United States Patent Application Publication US 2020/0163878 A1 - sequence listing, part 19

SEQ ID NO: 67546 - RNA, 1701 nt, Artificial Sequence
  derived and/or modified CDS sequence (opt1) from hemagglutinin__InfluenzaA__ACY46513
augaaggccauccuggugguccuccuguacaccuucgccaccgcgaacgccgacacgcugugcaucggcuaccacgccaacaacagcaccgacaccguggacaccgugcucgagaagaacgucacggugacccacuccgugaaccugcuggaggacaagcacaacgggaagcucugcaagcugcgcggcgucgcgccccugcaccucgggaagugcaacaucgccggcuggauccuggggaacccggagugcgagagccuguccaccgccagcuccuggagcuacaucguggagaccuccagcuccgacaacggcacgugcuaccccggcgacuucaucgacuacgaggagcuccgggagcagcugagcuccgugagcuccuucgagcgcuucgagaucuuccccaagaccagcuccuggcccaaccacgacagcaacaagggggucaccgccgccugcccgcacgccggcgcgaaguccuucuacaagaaccugaucuggcucgugaagaaggggaacagcuaccccaagcuguccaagagcuacaucaacgacaagggcaaggaggugcugguccucugggggauccaccaccccagcaccuccgccgaccagcagagccuguaccagaacgccgacgccuacguguucgugggcuccagcaaguacuccaagaaguucaagcccgagaucgccauccggccgaagguccgcgaccaggagggccggaugaacuacuacuggacgcugguggagcccggggacaagaucaccuucgaggcgaccggcaaccucguggucccccgcuacgccuucgccauggagcggaacgccgggagcggcaucaucaucuccgacacccccgugcacgacugcaacacgaccugccagaccccgaagggcgccaucaacaccagccugcccuuccagaacauccaccccaucacgaucgggaagugccccaaguacgugaaguccaccaagcugcgccucgcgaccggccugcggaacgucccgagcauccagucccgcgggcuguucggcgccaucgccggguucaucgagggcggcuggaccgggaugguggacggcugguacggguaccaccaccagaacgagcagggcagcggguacgccgccgaccucaaguccacgcagaacgcgaucgacgagaucaccaacaaggugaacagcgucaucgagaagaugaacacccaguucaccgccgugggcaaggaguucaaccaccuggagaagcggaucgagaaccugaacaagaaggucgacgacggcuuccucgacaucuggacguacaacgccgagcugcuggugcuccuggacaacgagcgcacccuggacuaccacgacuccaacgugaagaaccucuacgagaagguccggagccagcugaagaacaacgccaaggagaucgggaacggcugcuucgaguucuaccacaagugcgacaacacgugcauggaguccgugaagaacgggaccuacgacuaccccaaguacagcgaggaggccaagcugaaccgcgaggagaucgacggcgugaagcucgaguccacccggaucuaccagauccuggcgaucuacagcaccgucgccagcucccuggugcucguggucagccugggggccaucuccuucuggaugugcagcaacggcucccugcagugccgcaucugcaucuga

SEQ ID NO: 67547 - RNA, 1701 nt, Artificial Sequence; identical to SEQ ID NO: 66693
  derived and/or modified CDS sequence (opt1) from hemagglutinin__InfluenzaA__ACY46523

SEQ ID NO: 67548 - RNA, 1701 nt, Artificial Sequence; identical to SEQ ID NO: 66693
  derived and/or modified CDS sequence (opt1) from hemagglutinin__InfluenzaA__ACY46533

SEQ ID NO: 67549 - RNA, 1701 nt, Artificial Sequence; identical to SEQ ID NO: 66693
  derived and/or modified CDS sequence (opt1) from hemagglutinin__InfluenzaA__ACY46562

SEQ ID NO: 67550 - RNA, 1701 nt, Artificial Sequence; identical to SEQ ID NO: 66693
  derived and/or modified CDS sequence (opt1) from hemagglutinin__InfluenzaA__ACY46572

SEQ ID NO: 67551 - RNA, 1701 nt, Artificial Sequence; identical to SEQ ID NO: 66693
  derived and/or modified CDS sequence (opt1) from hemagglutinin__InfluenzaA__ACY46582

SEQ ID NO: 67552 - RNA, 1701 nt, Artificial Sequence; identical to SEQ ID NO: 66693
  derived and/or modified CDS sequence (opt1) from hemagglutinin__InfluenzaA__ACY46592

SEQ ID NO: 67553 - RNA, 1701 nt, Artificial Sequence; identical to SEQ ID NO: 66693
  derived and/or modified CDS sequence (opt1) from hemagglutinin__InfluenzaA__ACY46622

SEQ ID NO: 67554 - RNA, 1701 nt, Artificial Sequence
  derived and/or modified CDS sequence (opt1) from hemagglutinin__InfluenzaA__ACY46672
augaaggccauccuggugguccuccuguacaccuucgccaccgcgaacgccgacacgcugugcaucggcuaccacgccaacaacagcaccgacaccguggacaccgugcucgagaagaacgucacggugacccacuccgugaaccugcuggaggacaagcacaacgggaagcucugcaagcugcgcggcgucgcgccccugcaccucgggaagugcaacaucgccggcuggauccuggggaacccggagugcgagagccuguccaccgccagcuccuggagcuacaucguggagaccuccagcuccgacaacggcacgugcuaccccggcgacuucaucgacuacgaggagcuccgggagcagcugagcuccgugagcuccuucgagcgcuucgagaucuuccccaagaccagcuccuggcccaaccacgacagcaacaagggggucaccgccgccugcccgcacgccggcgcgaaguccuucuacaagaaccugaucuggcucgugaagaaggggaacagcuaccccaagcuguccaagagcuacaucaacgacaagggcaaggaggugcugguccucugggggauccaccaccccagcaccuccgccgaccagcagagccuguaccagaacgccgacgccuacguguucgugggcacgucccgguacagcaagaaguucaagcccgagaucgccauccgcccgaagguccgggaccaggagggccgcaugaacuacuacuggacccugguggagcccggggacaagaucaccuucgaggcgaccggcaaccucguggucccccgguacgccuucgccauggugcgcaacgccggguccggcaucaucaucagcgacacgcccgugcacgacugcaacacgaccugccagaccccgaagggcgccaucaacaccucccugcccuuccagaacauccaccccaucaccaucgggaagugccccaaguacgucaagagcaccaagcugcggcucgcgaccggccugcgcaacgugccguccauccagagccgggggcuguucggcgccaucgccggguucaucgagggcggcuggacggggaugguggacggcugguacggguaccaccaccagaacgagcagggcuccggguacgccgccgaccucaagagcacccagaacgcgaucgacgagaucaccaacaaggucaacuccgugaucgagaagaugaacacccaguucacggccgucggcaaggaguucaaccaccuggagaagcgcaucgagaaccugaacaagaagguggacgacggcuuccucgacaucuggaccuacaacgccgagcugcuggugcuccuggagaacgagcggacccuggacuaccacgacagcaacgucaagaaccucuacgagaaggugcgcucccagcugaagaacaacgccaaggagaucgggaacggcugcuucgaguucuaccacaagugcgacaacacgugcauggagagcgugaagaacgggaccuacgacuaccccaaguacuccgaggaggccaagcugaaccgggaggagaucgacggcgucaagcucgagagcacccgcaucuaccagauccuggcgaucuacuccaccguggccagcagccuggugcucgucgugucccugggggccaucagcuucuggaugugcuccaacggcagccugcagugccggaucugcaucuga

SEQ ID NO: 67555 - RNA, 1701 nt, Artificial Sequence; identical to SEQ ID NO: 66693
  derived and/or modified CDS sequence (opt1) from hemagglutinin__InfluenzaA__ACY46682

SEQ ID NO: 67556 - RNA, 1701 nt, Artificial Sequence; identical to SEQ ID NO: 66693
  derived and/or modified CDS sequence (opt1) from hemagglutinin__InfluenzaA__ACY46692

SEQ ID NO: 67557 - RNA, 1701 nt, Artificial Sequence; identical to SEQ ID NO: 66693
  derived and/or modified CDS sequence (opt1) from hemagglutinin__InfluenzaA__ACY46712

SEQ ID NO: 67558 - RNA, 1701 nt, Artificial Sequence
  derived and/or modified CDS sequence (opt1) from hemagglutinin__InfluenzaA__ACY46722
augaaggccauccuggugguccuccuguacaccuucgccaccgcgaacgccgacacgcugugcaucggcuaccacgccaacaacagcaccgacaccguggacaccgugcucgagaagaacgucacggugacccacuccgugaaccugcuggaggacaagcacaacgggaagcucugcaagcugcgcggcgucgcgccccugcaccucgggaagugcaacaucgccggcuggauccuggggaacccggagugcgagagccuguccaccgccagcuccuggagcuacaucguggagaccuccagcuccgacaacggcacgugcuaccccggcgacuucaucgacuacgaggagcuccgggagcagcugagcuccgugagcuccuucgagcgcuucgagaucuuccccaagaccagcuccuggcccaaccacgacagcaacaagggggucaccgccgccugcccgcacgccggcgcgaaguccuucuacaagaaccugaucuggcucgugaagaaggggaacagcuaccccaagcuguccaagagcuacaucaacgacaagggcaaggaggugcugguccucugggggauccaccaccccagcaccuccgccggccagcagagccuguaccagaacgccgacgccuacguguucgugggcacgucccgguacagcaagaaguucaagcccgagaucgccauccgcccgaagguccgggaccaggaggggcgcaugaacuacuacuggacccugguggagcccggcgacaagaucaccuucgaggcgaccgggaaccucguggucccccgguacgccuucgccauggagcgcaacgccggcuccggcaucaucaucagcgacacgcccgugcacgacugcaacacgaccugccagaccccgaagggggccaucaacaccucccugcccuuccagaacauccaccccaucaccaucggcaagugccccaaguacgucaagagcaccaagcugcggcucgcgaccgggcugcgcaacgugccguccauccagagccggggccuguucggggccaucgccggcuucaucgagggcggguggacgggcaugguggacgggugguacggcuaccaccaccagaacgagcagggguccggcuacgccgccgaccucaagagcacccagaacgcgaucgacgagaucaccaacaaggugaacuccgucaucgagaagaugaacacccaguucacggccgugggcaaggaguucaaccaccuggagaagcgcaucgagaaccugaacaagaaggucgacgacggguuccucgacaucuggaccuacaacgccgagcugcuggugcuccuggagaacgagcggacccuggacuaccacgacagcaacgugaagaaccucuacgagaagguccgcucccagcugaagaacaacgccaaggagaucggcaacgggugcuucgaguucuaccacaagugcgacaacacgugcauggagagcgugaagaacggcaccuacgacuaccccaaguacuccgaggaggccaagcugaaccgggaggagaucgacggggugaagcucgagagcacccgcaucuaccagauccuggcgaucuacuccaccgucgccagcagccuggugcucguggucucccugggcgccaucagcuucuggaugugcuccaacggcagccugcagugccggaucugcaucuga

SEQ ID NO: 67559 - RNA, 1701 nt, Artificial Sequence
  derived and/or modified CDS sequence (opt1) from hemagglutinin__InfluenzaA__ACY46742
augaaggccauccuggugguccuccuguacaccuucgccaccgcgaacgccgacacgcugugcaucggcuaccacgccaacaacagcaccgacaccguggacaccgugcucgagaagaacgucacggugacccacuccgugaaccugcuggaggacaagcacaacgggaagcucugcaagcugcgcggcgucgcgccccugcaccucgggaagugcaacaucgccggcuggauccuggggaacccggagugcgagagccuguccaccgccagcuccuggagcuacaucguggagaccuccagcuccgacaacggcacgugcuaccccggcaacuucaucgacuacgaggagcuccgggagcagcugagcuccgugagcuccuucgagcgcuucgagaucuuccccaagaccagcuccuggcccaaccacgacagcaacaagggggucaccgccgccugcccgcacgccggcgcgaaguccuucuacaagaaccugaucuggcucgugaagaaggggaacagcuaccccaagcuguccaagagcuacaucaacgacaagggcaaggaggugcugguccucugggggauccaccaccccagcaccuccgccgaccagcagagccuguaccagaacgccgacgccuacguguucgugggcacgucccgguacagcaagaaguucaagcccgagaucgccauccgcccgaagguccgggaccaggagggccgcaugaacuacuacuggacccugguggagcccggggacaagaucaccuucgaggcgaccggcaaccucguggucccccgguacgccuucgccauggagcgcaacgccggguccggcaucaucaucagcgacacgcccgugcacgacugcaacacgaccugccagaccccgaagggcgccaucaacaccucccugcccuuccagaacauccaccccaucaccaucgggaagugccccaaguacgucaagagcaccaagcugcggcucgcgaccggccugcgcaacgugccguccauccagagccgggggcuguucggcgccaucgccggguucaucgagggcggcuggacggggaugguggacggcugguacggguaccaccaccagaacgagcagggcuccggguacgccgccgaccucaagagcacccagaacgcgaucgacgagaucaccaacaaggugaacuccgucaucgagaagaugaacacccaguucacggccgugggcaaggaguucaaccaccuggagaagcgcaucgagaaccugaacaagaaggucgacgacggcuuccucgacaucuggaccuacaacgccgagcugcuggugcuccuggagaacgagcggacccuggacuaccacgacagcaacgugaagaaccucuacgagaagguccgcucccagcugaagaacaacgccaaggagaucgggaacggcugcuucgaguucuaccacaagugcgacaacacgugcauggagagcgugaagaacgggaccuacgacuaccccaaguacuccgaggaggccaagcugaaccgggaggagaucgacggcgugaagcucgagagcacccgcaucuaccagauccuggcgaucuacuccaccgucgccagcagccuggugcucguggucucccugggggccaucagcuucuggaugugcuccaacggcagccugcagugccggaucugcaucuga

SEQ ID NO: 67560 - RNA, 1701 nt, Artificial Sequence; identical to SEQ ID NO: 66693
  derived and/or modified CDS sequence (opt1) from hemagglutinin__InfluenzaA__ACY46762

SEQ ID NO: 67561 - RNA, 1701 nt, Artificial Sequence; identical to SEQ ID NO: 66693
  derived and/or modified CDS sequence (opt1) from hemagglutinin__InfluenzaA__ACY46772

SEQ ID NO: 67562 - RNA, 1701 nt, Artificial Sequence; identical to SEQ ID NO: 66693
  derived and/or modified CDS sequence (opt1) from hemagglutinin__InfluenzaA__ACY46903

SEQ ID NO: 67563 - RNA, 1701 nt, Artificial Sequence; identical to SEQ ID NO: 66719
  derived and/or modified CDS sequence (opt1) from hemagglutinin__InfluenzaA__ACY77534

SEQ ID NO: 67564 - RNA, 1698 nt, Artificial Sequence
  derived and/or modified CDS sequence (opt1) from hemagglutinin__InfluenzaA__ACY77544
augaaggccauccugguggucaugcucuacaccuucgccaccgcgaacgccgacacgcugugcaucggcuaccacgccaacaacagcaccgacaccguggacaccgugcuggagaagaacgucacggugacccacuccgugaaccuccuggaggacaagcacaacgggaagcugugcaagcuccgcggcgucgcgccccugcaccuggggaagugcaacaucgccggcuggauccucgggaacccggagugcgagagccuguccaccgccagcuccuggagcuacaucguggagaccuccagcuccgacaacggcacgugcuaccccggcgacuucaucgacuacgaggagcugcgggagcagcucagcuccgugagcuccuucgagcgcuucgagaucuuccccaagaccagcuccuggcccaaccacgacagcaacaagggggucaccgccgccugcccgcacgccggcgcgaaguccuucuacaagaaccugaucuggcuggugaagaaggggaacagcuaccccaagcucuccaagagcuacaucaacgacaagggcaaggaggugcugguccugugggggauccaccaccccagcaccuccgccgaccagcagagccucuaccagaacgccgacgccuacguguucgugggcuccagccgguacuccaagaaguucaagcccgagaucgccauccgcccgaagguccgggaccaggagggccgcaugaacuacuacuggacgcugguggagcccggggacaagaucaccuucgaggcgaccggcaaccugguggucccccgguacgccuucgccauggagcgcaacgccgggagcggcaucaucaucuccgacaccacggugcacgacugcaacacgaccugccagacccccaagggcgccaucaacaccagccucccguuccagaacauccaccccaucaccaucgggaagugccccaaguacgugaaguccaccaagcugcggcuggcgaccggccuccgcaacguccccagcauccagucccgggggcuguucggcgccaucgccggguucaucgagggcggcuggacggggaugguggacggcugguacggguaccaccaccagaacgagcagggcagcggguacgccgccgaccugaaguccacccagaacgcgaucgacgagaucaccaacaaggugaacagcgucaucgagaagaugaacacccaguucacggccgugggcaaggaguucaaccaccucgagaagcgcaucgagaaccugaacaagaaggucgacgacggcuuccuggacaucuggaccuacaacgccgagcuccuggugcugcucgagaacgagcggacccuggacuaccacgacuccaacgugaagaaccuguacgagaagguccgcagccagcucaagaacaacgccaaggagaucgggaacggcugcuucgaguucuaccacaagugcgacaacacgugcauggaguccgugaagaacgggaccuacgacuacccgaaguacagcgaggaggccaagcugaaccgggaggagaucgacggcgugaagcuggaguccacccgcaucuaccagauccucgcgaucuacagcaccgucgccagcucccuggugcugguggucagccucggggccaucuccuucuggaugugcagcuggucccugcagugccggaucugcaucuga

SEQ ID NO: 67565 - RNA, 1698 nt, Artificial Sequence
  derived and/or modified CDS sequence (opt1) from hemagglutinin__InfluenzaA__ACY77554
augaaggccauccuggugguccugcuguacaccuucgccaccgcgaacgccgacacgcugugcaucggcuaccacgccaacaacagcaccgacaccguggacaccgugcucgagaagaacgucacggugacccacuccgugaaccugcuggaggacaagcacaacgggaagcucugcaagcugcgcggcgucgcgccccugcaccucgggaagugcaacaucgccggcuggauccuggggaacccggagugcgagagccuguccaccgccagcuccuggagcuacaucguggagaccuccagcuccgacaacggcacgugcuaccccggcgacuucaucgacuacgaggagcuccgggagcagcugagcuccgugagcuccuucgagcgcuucgagaucuuccccaagaccagcuccuggcccaaccacgacagcaacaagggggucaccgccgccugcccgcacgccggcgcgaaguccuucuacaagaaccugaucuggcucgugaagaaggggaacagcuaccccaagcuguccaagagcuacaucaacgacaagggcaaggaggugcugguccucugggggauccaccaccccagcaccuccgccgaccagcagagccuguaccagaacgccgacgccuacguguucgugggcacgucccgguacagcaagaaguucaagcccgagaucgccauccgcccgaagguccgggaccaggagggccgcaugaacuacuacuggacccugguggagcccggggacaagaucaccuucgaggcgaccggcaaccucguggucccccgguacgccuucgccauggagcgcaacgccggguccggcaucaucaucagcgacacgcccgugcacaacugcaacacgaccugccagaccccgaagggcgccaucaacaccucccugcccuuccagaacauccaccccaucaccaucgggaagugccccaaguacgucaagagcaccaagcugcggcucgcgaccggccugcgcaacgugccguccauccagagccgggggcuguucggcgccaucgccggguucaucgagggcggcuggacggggaugguggacggcugguacggguaccaccaccagaacgagcagggcuccggguacgccgccgaccucaagagcacccagaacgcgaucgacgagaucaccaacaaggugaacuccgucaucgagaagaugaacacccaguucacggccgugggcaaggaguucaaccaccuggagaagcgcaucgagaaccugaacaagaaggucgacgacggcuuccucgacaucuggaccuacaacgccgagcugcuggugcuccuggagaacgagcggacccuggacuaccacgacagcaacgugaagaaccucuacgagaagguccgcucccagcugaagaacaacgccaaggagaucgggaacggcugcuucgaguucuaccacaagugcgacaacacgugcauggagagcgugaagaacgggaccuacgacuaccccaaguacuccgaggaggccaagcugaaccgggaggagaucgacggcgugaagcucgagagcacccgcaucuaccagauccuggcgaucuacuccaccgucgccagcagccuggugcucguggucucccugggggccaucagcuucuggaugugcuccggccaccuccagugccggaucugcaucuga

SEQ ID NO: 67566 - RNA, 1695 nt, Artificial Sequence
  derived and/or modified CDS sequence (opt1) from hemagglutinin__InfluenzaA__ACY77573
augaaggccauccuggugguccuccuguacaccuucgccaccgcgaacgccgacacgcugugcaucggcuaccacgccaacaacagcaccgacaccguggacaccgugcucgagaagaacgucacggugacccacuccgugaaccugcuggaggacaagcacaacgggaagcucugcaagcugcgcggcgucgcgccccugcaccucgggaagugcaacaucgccggcuggauccuggggaacccggagugcgagagccuguccaccgccagcuccuggagcuacaucguggagaccuccagcuccgacaacggcacgugcuaccccggcgacuucaucgacuacgaggagcuccgggagcagcugagcuccgugagcuccuucgagcgcuucgagaucuuccccaagaccagcuccuggcccaaccacgacagcaacaagggggucaccgccgccugcccgcacgccggcgcgaaguccuucuacaagaaccugaucuggcucgugaagaaggggaacagcuaccccaagcuguccaagagcuacaucaacgacaagggcaaggaggugcugguccucugggggauccaccaccccagcaccuccgccgaccagcagagccuguaccagaacgccgacgccuacguguucgugggcuccagccgguacuccaagaaguucaagcccgagaucgccauccgcccgaagguccgggaccaggagggccgcaugaacuacuacuggacgcugguggagcccggggacaagaucaccuucgaggcgaccggcaaccucguggucccccgguacgccuucgccauggagcgcaacgccgggagcggcaucaucaucuccgacacccccgugcacgacugcaacacgaccugccagaccccgaagggcgccaucaacaccagccugcccuuccagaacauccaccccaucacgaucgggaagugccccaaguacgugaaguccaccaagcugcggcucgcgaccggccugcgcaacgucccgagcauccagucccgggggcuguucggcgccaucgccggguucaucgagggcggcuggaccgggaugguggacggcugguacggguaccaccaccagaacgagcagggcagcggguacgccgccgaccucaaguccacgcagagcgcgaucgacgagaucaccaacaaggugaacuccgucaucgagaagaugaacacccagcugaccggccagugcaaggaguucaaccaccuggagaagcgcaucgagaaccucaacaagaagguggacgacggcuuccuggacaucuggacguacaacgccgagcugcucguccugcuggagaacgagcggacccucgacuaccacgacagcaacgugaagaaccuguacgagaaggugcgcucccagcugaagaacaacgccaacgagaucgggaacggcugcuucgaguucuaccacaagugcgacaacacgugcauggagagcgucaagaacgggaccuacgacuaccccaaguacuccgaggaggccaagcucaaccgggaggagaucgacggcgugaagcuggagagcacccgcaucuaccagauccuggccaucuacagcaccguggcguccagccucguccugguggugucccugggggccaucagcuucuggaugugcuccggccacagcugccggaucugcaucuga

SEQ ID NO: 67567 - RNA, 1701 nt, Artificial Sequence
  derived and/or modified CDS sequence (opt1) from hemagglutinin__InfluenzaA__ACY77593
augaaggccauccugguggucaugcucuacaccuucgccaccgcgaacgccgacacgcugugcaucggcuaccacgccaacaacagcaccgacaccguggacaccgugcuggagaagaacgucacggugacccacuccgugaaccuccuggaggacaagcacaacgggaagcugugcaagcuccgcggcgucgcgccccugcaccuggggaagugcaacaucgccggcuggauccucgggaacccggagugcgagagccuguccaccgccagcuccuggagcuacaucguggagaccuccagcuccgacaacggcacgugcuaccccggcgacuucaucgacuacgaggagcugcgggagcagcucagcuccgugagcuccuucgagcgcuucgagaucuuccccaagaccagcuccuggcccaaccacgacagcaacaagggggucaccgccgccugcccgcacgccggcgcgaaguccuucuacaagaaccugaucuggcuggugaagaaggggaacagcuaccccaagcucuccaagagcuacaucaacgacaagggcaaggaggugcugguccugugggggauccaccaccccagcaccuccgccgaccagcagagccucuaccagaacgccgacgccuacguguucgugggcuccagccgguacuccaagaaguucaagcccgagaucgccauccgcccgaagguccgggaccaggagggccgcaugaacuacuacuggacgcugguggagcccggggacaagaucaccuucgaggcgaccggcaaccugguggucccccgguacgccuucgccauggagcgcaacgccgggagcggcaucaucaucuccgacaccacggugcacgacugcaacacgaccugccagacccccaagggcgccaucaacaccagccucccguuccagaacauccaccccaucaccaucgggaagugccccaaguacgugaaguccaccaagcugcggcuggcgaccggccuccgcaacguccccagcauccagucccgggggcuguucggcgccaucgccggguucaucgagggcggcuggacggggaugguggacggcugguacggguaccaccaccagaacgagcagggcagcggguacgccgccgaccugaaguccacccagaacgcgaucgacgagaucaccaacaaggugaacagcgucaucgagaagaugaacacccaguucacggccgugggcaaggaguucaaccaccucgagaagcgcaucgagaaccugaacaagaaggucgacgacggcuuccuggacaucuggaccuacaacgccgagcuccuggugcugcucgagaacgagcggacccuggacuaccacgacuccaacgugaagaaccuguacgagaagguccgcagccagcucaagaacaacgccaaggagaucgggaacggcugcuucgaguucuaccacaagugcgacaacacgugcauggaguccgugaagaacgggaccuacgacuacccgaaguacagcgaggaggccaagcugaaccgggaggagaucgacggcgugaagcuggaguccacccgcaucuaccagauccucgcgaucuacagcaccgucgccagcucccuggugcugguggucagccucggggccaucuccuucuggaugugcagcaacggcucccugcagugccggaucugcaucuga

SEQ ID NO: 67568 - RNA, 1698 nt, Artificial Sequence
  derived and/or modified CDS sequence (opt1) from hemagglutinin__InfluenzaA__ACY77603
augaaggccauccugguggucaugcucuacaccuucgccaccgcgaacgccgacacgcugugcaucggcuaccacgccaacaacagcaccgacaccguggacaccgugcuggagaagaacgucacggugacccacuccgugaaccuccuggaggacaagcacaacgggaagcugugcaagcuccgcggcgucgcgccccugcaccuggggaagugcaacaucgccggcuggauccucgggaacccggagugcgagagccuguccaccgccagcuccuggagcuacaucguggagaccuccagcuccgacaacggcacgugcuaccccggcgacuucaucgacuacgaggagcugcgggagcagcucagcuccgugagcuccuucgagcgcuucgagaucuuccccaagaccagcuccuggcccaaccacgacagcaacaagggggucaccgccgccugcccgcacgccggcgcgaaguccuucuacaagaaccugaucuggcuggugaagaaggggaacagcuaccccaagcucuccaagagcuacaucaacgacaagggcaaggaggugcugguccugugggggauccaccaccccagcaccuccgccgaccagcagagccucuaccagaacgccgacgccuacguguucgugggcuccagccgguacuccaagaaguucaagcccgagaucgccauccgcccgaagguccgggaccaggagggccgcaugaacuacuacuggacgcugguggagcccggggacaagaucaccuucgaggcgaccggcaaccugguggucccccgguacgccuucgccauggagcgcaacgccgggagcggcaucaucaucuccgacacccccgugcacgacugcaacacgaccugccagaccccgaagggcgccaucaacaccagccuccccuuccagaacauccaccccaucacgaucgggaagugccccaaguacgugaaguccaccaagcugcggcuggcgaccggccuccgcaacgucccgagcauccagucccgggggcuguucggcgccaucgccggguucaucgagggcggcuggaccgggaugguggacggcugguacggguaccaccaccagaacgagcagggcagcggguacgccgccgaccugaaguccacgcagaacgcgaucgacgagaucaccaacaaggugaacagcgucaucgagaagaugaacacccaguucaccgccgugggcaaggaguucaaccaccucgagaagcgcaucgagaaccugaacaagaaggucgacgacggcuuccuggacaucuggacguacaacgccgagcuccuggugcugcucgagaacgagcggacccuggacuaccacgacuccaacgugaagaaccuguacgagaagguccgcagccagcucaagaacaacgccaaggagaucgggaacggcugcuucgaguucuaccacaagugcgacaacacgugcauggaguccgugaagaacgggaccuacgacuaccccaaguacagcgaggaggccaagcugaaccgggaggagaucgacggcgugaagcuggaguccacccgcaucuaccagauccucgcgaucuacagcaccgucgccagcucccuggugcugguggucagccucggggccaucuccuucuggaugugcagcuggucccugcagugccggaucugcaucuga

SEQ ID NO: 67569 - RNA, 1695 nt, Artificial Sequence
  derived and/or modified CDS sequence (opt1) from hemagglutinin__InfluenzaA__ACY77613
augaaggccauccuggugguccuccuguacaccuucgccaccgcgaacgccgacacgcugugcaucggcuaccacgccaacaacagcaccgacaccguggacaccgugcucgagaagaacgucacggugacccacuccgugaaccugcuggaggacaagcacaacgggaagcucugcaagcugcgcggcgucgcgccccugcaccucgggaagugcaacaucgccggcuggauccuggggaacccggagugcgagagccuguccaccgccagcuccuggagcuacaucguggagaccuccagcuccgacaacggcacgugcuaccccggcgacuucaucgacuacgaggagcuccgggagcagcugagcuccgugagcuccuucgagcgcuucgagaucuuccccaagaccagcuccuggcccaaccacgacagcaacaagggggucaccgccgccugcccgcacgccggcgcgaaguccuucuacaagaaccugaucuggcucgugaagaaggggaacagcuaccccaagcuguccaagagcuacaucaacgacaagggcaaggaggugcugguccucugggggauccaccaccccagcaccuccgccgaccagcagagccuguaccagaacgccgacgccuacguguucgugggcacgucccgguacagcaagaaguucaagcccgagaucgccauccgcccgaagguccgggaccaggagggccgcaugaacuacuacuggacccugguggagcccggggacaagaucaccuucgaggcgaccggcaaccucguggucccccgguacgccuucgccauggagcgcaacgccggguccggcaucaucaucagcgacacgcccgugcacgacugcaacacgaccugccagaccccgaagggcgccaucaacaccucccugcccuuccagaacauccaccccaucaccaucgggaagugccccaaguacgucaagagcaccaagcugcggcucgcgaccggccugcgcaacgugccguccauccagagccgggggcuguucggcgccaucgccggguucaucgagggcggcuggacggggaugguggacggcugguacggguaccaccaccagaacgagcagggcuccggguacgccgccgaccucaagagcacccagaacgcgaucgacgagaucaccaacaaggugaacuccgucaucgagaagaugaacacccaguucacgggccagugcaaggaguucaaccaccuggagaagcgcaucgagaaccugaacaagaagguggacgacggcuuccucgacaucuggaccuacaacgccgagcugcugguccuccuggagaacgagcggacccuggacuaccacgacagcaacgugaagaaccucuacgagaaggugcgcucccagcugaagaacaacgccaaggagaucgggaacggcugcuucgaguucuaccacaagugcgacaacacgugcauggagagcgucaagaacgggaccuacgacuaccccaaguacuccgaggaggccaagcugaaccgggaggagaucgacggcgugaagcucgagagcacccgcaucuaccagauccuggccaucuacuccaccguggcgagcagccugguccucguggugucccugggggccaucagcuucuggaugugcuccggccacagcugccggaucugcaucuga

SEQ ID NO: 67570 - RNA, 1701 nt, Artificial Sequence; identical to SEQ ID NO: 66693
  derived and/or modified CDS sequence (opt1) from hemagglutinin__InfluenzaA__ACY77623

SEQ ID NO: 67571 - RNA, 1707 nt, Artificial Sequence
  derived and/or modified CDS sequence (opt1) from hemagglutinin__InfluenzaA__ACY77653
augaaggccauccuggugguccuccuguacaccuucgccaccgcgaacgccgacacgcugugcaucggcuaccacgccaacaacagcaccgacaccguggacaccgugcucgagaagaacgucacggugacccacuccgugaacauccuggaggacaagcacaacgggaagcugugcaagcuccgcggcgucgcgccccugcaccuggggaagugcaacaucgccggcuggauccucgggaacccggagugcgagagccuguccaccgccagcuccuggagcuacaucguggagaccuccagcuccgacaacggcacgugcuaccccggcgacuucaucgacuacgaggagcugcgggagcagcucagcuccgugagcuccuucgagcgcuucgagaucuuccccaagaccagcuccuggcccaaccacgacagcaacaagggggucaccgccgccugcccgcacgccggcgcgaaguccuucuacaagaaccugaucuggcuggugaagaaggggaacagcuaccccaagcucuccaagagcuacaucaacgacaagggcaaggaggugcugguccugugggggauccaccaccccagcaccuccgccgaccagcagagccucuaccagaacgccgacgccuacguguucgugggcuccagccgguacuccaagaaguucaagcccgagaucgccauccgcccgaagguccgggaccaggagggccgcaugaacuacuacuggacgcugguggagcccggggacaagaucaccuucgaggcgaccggcaaccugguggucccccgguacgccuucgccauggagcgcaacgccgggagcggcaucaucaucuccgacacccccgugcacgacugcaacacgaccugccagaccccgaagggcgccaucaacaccagccuccccuuccagaacauccaccccaucacgaucgggaagugccccaaguacgugaaguccaccaagcugcggcuggcgaccggccuccgcaacgucccgagcauccagucccgggggcuguucggcgccaucgccggguucaucgagggcggcuggaccgggaugguggacggcugguacggguaccaccaccagaacgagcagggcagcggguacgccgccgaccugaaguccacgcagaacgcgaucgacgagaucaccaacaaggugaacagcgucaucgagaagaugaacacccaguucaccgccgugggcaaggaguucaaccaccucgagaagcgcaucgagaaccugaacaagaaggucgacgacggcuuccuggacaucuggacguacaacgccgagcuccuggugcugcucgagaacgagcggacccuggacuaccacgacuccaacgugaagaaccuguacgagaagguccgcagccagcucaagaacaacgccaaggagguggggaacggcugcuucgaguucuaccacaagugcgacaacacgugcauggaguccgugaagaacgggaccuacgacuaccccaaguacagcgaggaggccaagcugaaccgggaggagaucgacggcgucaagcuggaguccacccgcaucuaccagauccucgcgaucuacagcaccguggccagcucccuggugcuggucgugagccucggggccaucuccuucuggaugugcagcggccacuccggcagccugcagugccggaucugcaucuga

SEQ ID NO: 67572 - RNA, 1698 nt, Artificial Sequence
  derived and/or modified CDS sequence (opt1) from hemagglutinin__InfluenzaA__ACY77663
augaaggccauccuggugguccuccuguacaccuucgccaccgcgaacgccgacacgcugugcaucggcuaccacgccaacaacagcaccgacaccguggacaccgugcucgagaagaacgucacggugacccacuccgugaaccugcuggaggacaagcacaacgggaagcucugcaagcugcgcggcgucgcgccccugcaccucgggaagugcaacaucgccggcuggauccuggggaacccggagugcgagagccuguccaccgccagcuccuggagcuacaucguggagaccuccagcuccgacaacggcacgugcuaccccggcgacuucaucgacuacgaggagcuccgggagcagcugagcuccgugagcuccuucgagcgcuucgagaucuuccccaagaccagcuccuggcccaaccacgacagcaacaagggggucaccgccgccugcccgcacgccggcgcgaaguccuucuacaagaaccugaucuggcucgugaagaaggggaacagcuaccccaagcuguccaagagcuacaucaacgacaagggcaaggaggugcugguccucugggggauccaccaccccagcaccuccgccgaccagcagagccuguaccagaacgccgacgccuacguguucgugggcacgucccgguacagcaagaaguucaagcccgagaucgccauccgcccgaagguccgggaccaggagggccgcaugaacuacuacuggacccugguggagcccggggacaagaucaccuucgaggcgaccggcaaccucguggucccccgguacgccuucgccauggagcgcaacgccggguccggcaucaucaucagcgacacgcccgugcacgacugcaacacgaccugccagaccccgaagggcgccaucaacaccucccugcccuuccagaacauccaccccaucaccaucgggaagugccccaaguacgucaagagcaccaagcugcggcucgcgaccggccugcgcaacgugccguccauccagagccgggggcuguucggcgccaucgccggguucaucgagggcggcuggacggggaugguggacggcugguacggguaccaccaccagaacgagcagggcuccggguacgccgccgaccucaagagcacccagaacgcgaucgacgagaucaccaacaaggugaacuccgucaucgagaagaugaacacccaguucacggccgugggcaaggaguucaaccaccuggagaagcgcaucgagaaccugaacaagaaggucgacgacggcuuccucgacaucuggaccuacaacgccgagcugcuggugcuccuggagaacgagcggacccuggacuaccacgacagcaacgugaagaaccucuacgagaagguccgcucccagcugaagaacaacgccaaggagaucgggaacggcugcuucgaguucuaccacaagugcgacaacacgugcauggagagcgugaagaacgggaccuacgacuaccccaaguacuccgaggaggccaagcugaaccgggaggagaucgacggcgugaagcucgagagcacccgcaucuaccagauccuggcgaucuacuccaccgucgccagcagccuggugcucguggucucccugggggccaucagcuucuggaugugcuccuggagccugcucugccggaucugcaucuga

SEQ ID NO: 67573 - RNA, 1698 nt, Artificial Sequence
  derived and/or modified CDS sequence (opt1) from hemagglutinin__InfluenzaA__ACY77683
augaaggccauccuggugguccuccuguacaccuucgccaccgcgaacgccgacacgcugugcaucggcuaccacgccaacaacagcaccgacaccguggacaccgugcucgagaagaacgucacggugacccacuccgugaacauccuggaggacaagcacaacgggaagcugugcaagcuccgcggcgucgcgccccugcaccuggggaagugcaacaucgccggcuggauccucgggaacccggagugcgagagccuguccaccgccagcuccuggagcuacaucguggagaccuccagcuccgacaacggcacgugcuaccccggcgacuucaucgacuacgaggagcugcgggagcagcucagcuccgugagcuccuucgagcgcuucgagaucuuccccaagaccagcuccuggcccaaccacgacagcaacaagggggucaccgccgccugcccgcacgccggcgcgaaguccuucuacaagaaccugaucuggcuggugaagaaggggaacagcuaccccaagcucuccaagagcuacaucaacgacaagggcaaggaggugcugguccugugggggauccaccaccccagcaccuccgccgaccagcagagccucuaccagaacgccgacgccuacguguucgugggcuccagccgguacuccaagaaguucaagcccgagaucgccauccgcccgaagguccgggaccaggagggccgcaugaacuacuacuggacgcugguggagcccggggacaagaucaccuucgaggcgaccggcaaccugguggucccccgguacgccuucgccauggagcgcaacgccgggagcggcaucaucaucuccgacacccccgugcacgacugcaacacgaccugccagaccccgaagggcgccaucaacaccagccuccccuuccagaacauccaccccaucacgaucgggaagugccccaaguacgugaaguccaccaagcugcggcuggcgaccggccuccgcaacgucccgagcauccagucccgggggcuguucggcgccaucgccggguucaucgagggcggcuggaccgggaugguggacggcugguacggguaccaccaccagaacgagcagggcagcggguacgccgccgaccugaaguccacgcagaacgcgaucgacgagaucaccaacaaggugaacagcgucaucgagaagaugaacacccaguucaccgccgugggcaaggaguucaaccaccucgagaagcgcaucgagaaccugaacaagaaggucgacgacggcuuccuggacaucuggacguacaacgccgagcuccuggugcugcucgagaacgagcggacccuggacuaccacgacuccaacgugaagaaccuguacgagaagguccgcagccagcucaagaacaacgccaaggagguggggaacggcugcuucgaguucuaccacaagugcgacaacacgugcauggaguccgugaagaacgggaccuacgacuaccccaaguacagcgaggaggccaagcugaaccgggaggagaucgacggcgucaagcuggaguccacccgcaucuaccagauccucgcgaucuacagcaccguggccagcucccuggugcuggucgugagccucggggccaucuccuucuggaugugcagcuggucccugcagugccggaucugcaucuga

SEQ ID NO: 67574 - RNA, 1698 nt, Artificial Sequence
  derived and/or modified CDS sequence (opt1) from hemagglutinin__InfluenzaA__ACY77693
augaaggccauccuggugguccuccuguacaccuucgccaccgcgaacgccgacacgcugugcaucggcuaccacgccaacaacagcaccgacaccguggacaccgugcucgagaagaacgucacggugacccacuccgugaacauccuggaggacaagcacaacgggaagcugugcaagcuccgcggcgucgcgccccugcaccuggggaagugcaacaucgccggcuggauccucgggaacccggagugcgagagccuguccaccgccagcuccuggagcuacaucguggagaccuccagcuccgacaacggcacgugcuaccccggcgacuucaucgacuacgaggagcugcgggagcagcucagcuccgugagcuccuucgagcgcuucgagaucuuccccaagaccagcuccuggcccaaccacgacagcaacaagggggucaccgccgccugcccgcacgccggcgcgaaguccuucuacaagaaccugaucuggcuggugaagaaggggaacagcuaccccaagcucuccaagagcuacaucaacgacaagggcaaggaggugcugguccugugggggauccaccaccccagcaccuccgccgaccagcagagccucuaccagaacgccgacgccuacguguucgugggcuccagccgguacuccaagaaguucaagcccgagaucacgauccgcccgaagguccgggaccaggagggccgcaugaacuacuacuggacccugguggagcccggggacaagaucaccuucgaggccaccggcaaccugguggucccccgguacgcguucgccauggagcgcaacgccgggagcggcaucaucaucuccgacacgcccgugcacgacugcaacacgaccugccagaccccgaagggcgccaucaacaccagccuccccuuccagaacauccaccccaucaccaucgggaagugccccaaguacgugaaguccaccaagcugcggcuggccaccggccuccgcaacgucccgagcauccagucccgggggcuguucggcgcgaucgccggguucaucgagggcggcuggacggggaugguggacggcugguacggguaccaccaccagaacgagcagggcagcggguacgccgccgaccugaaguccacccagaacgccaucgacgagaucaccaacaaggugaacagcgucaucgagaagaugaacacccaguucacgggccagugcaaggaguucaaccaccucgagaagcgcaucgagaaccugaacaagaagguggacgacggcuuccuggacaucuggaccuacaacgcggagcuccugguccugcucgagaacgagcggacccuggacuaccacgacuccaacgugaagaaccuguacgagaaggugcgcagccagcucaagaacaacgccaaggaggucgggaacggcugcuucgaguucuaccacaagugcgacaacacgugcauggaguccgugaagaacgggaccuacgacuaccccaaguacagcgaggaggccaagcugaaccgggaggagaucgacggcgugaagcuggaguccacccgcaucuaccagauccucgccaucuacagcaccgucgccagcucccuggugcugguggucagccucggggcgaucuccuucuggaugugcagcuggucccugcagugccggaucugcaucuga

SEQ ID NO: 67575 - RNA, 1698 nt, Artificial Sequence
  derived and/or modified CDS sequence (opt1) from hemagglutinin__InfluenzaA__ACY77703
augaaggccauccuggugguccuccuguacaccuucgccaccgcgaacgccgacacgcugugcaucggcuaccacgccaacaacagcaccgacaccguggacaccgugcucgagaagaacgucacggugacccacuccgugaacauccuggaggacaagcacaacgggaagcugugcaagcuccgcggcgucgcgccccugcaccuggggaagugcaacaucgccggcuggauccucgggaacccggagugcgagagccuguccaccgccagcuccuggagcuacaucguggagaccuccagcuccgacaacggcacgugcuaccccggcgacuucaucgacuacgaggagcugcgggagcagcucagcuccgugagcuccuucgagcgcuucgagaucuuccccaagaccagcuccuggcccaaccacgacagcaacaagggggucaccgccgccugcccgcacgccggcgcgaaguccuucuacaagaaccugaucuggcuggugaagaaggggaacagcuaccccaagcucuccaagagcuacaucaacgacaagggcaaggaggugcugguccugugggggauccaccaccccagcaccuccgccgaccagcagagccucuaccagaacgccgacgccuacguguucgugggcuccagccgguacuccaagaaguucaagcccgagaucgccauccgcccgaagguccgggaccaggagggccgcaugaacuacuacuggacgcugguggagcccggggacaagaucaccuucgaggcgaccggcaaccugguggucccccgguacgccuucgccauggagcgcaacgccgggagcggcaucaucaucuccgacacccccgugcacgacugcaacacgaccugccagaccccgaagggcgccaucaacaccagccuccccuuccagaacauccaccccaucacgaucgggaagugccccaaguacgugaaguccaccaagcugcggcuggcgaccggccuccgcaacgucccgagcauccagucccgggggcuguucggcgccaucgccggguucaucgagggcggcuggaccgggaugguggacggcugguacggguaccaccaccagaacgagcagggcagcggguacgccgccgaccugaaguccacgcagaacgcgaucgacgagaucaccaacaaggugaacagcgucaucgagaagaugaacacccaguucaccggccagugcaaggaguucaaccaccucgagaagcgcaucgagaaccugaacaagaagguggacgacggcuuccuggacaucuggacguacaacgccgagcuccugguccugcucgagaacgagcggacccuggacuaccacgacuccaacgugaagaaccuguacgagaaggugcgcagccagcucaagaacaacgccaaggaggucgggaacggcugcuucgaguucuaccacaagugcgacaacacgugcauggaguccgugaagaacgggaccuacgacuaccccaaguacagcgaggaggccaagcugaaccgggaggagaucgacggcgugaagcuggaguccacccgcaucuaccagauccucgccaucuacagcaccgucgcgagcucccuggugcugguggucagccucggggccaucuccuucuggaugugcagcuggucccugcagugccggaucugcaucuga

SEQ ID NO: 67576 - RNA, 1698 nt, Artificial Sequence
  derived and/or modified CDS sequence (opt1) from hemagglutinin__InfluenzaA__ACY77713
augaaggccauccuggugguccugcuguacaccuucgccaccgcgaacgccgacacgcugugcaucggcuaccacgccaacaacagcaccgacaccguggacaccgugcucgagaagaacgucacggugacccacuccgugaacauccuggaggacaagcacaacgggaagcugugcaagcuccgcggcgucgcgccccugcaccuggggaagugcaacaucgccggcuggauccucgggaacccggagugcgagagccuguccaccgccagcuccuggagcuacaucguggagaccuccagcuccgacaacggcacgugcuaccccggcgacuucaucgacuacgaggagcugcgggagcagcucagcuccgugagcuccuucgagcgcuucgagaucuuccccaagaccagcuccuggcccaaccacgacagcaacaagggggucaccgccgccugcccgcacgccggcgcgaaguccuucuacaagaaccugaucuggcuggugaagaaggggaacagcuaccccaagcucuccaagagcuacaucaacgacaagggcaaggaggugcugguccugugggggauccaccaccccagcaccuccgccgaccagcagagccucuaccagaacgccgacgccuacguguucgugggcuccagccgguacuccaagaaguucaagcccgagaucgccauccgcccgaagguccgggaccaggagggccgcaugaacuacuacuggacgcugguggagcccggggacaagaucaccuucgaggcgaccggcaaccugguggucccccgguacgccuucgccauggagcgcaacgccgggagcggcaucaucaucuccgacacccccgugcacgacugcaacacgaccugccagaccccgaagggcgccaucaacaccagccuccccuuccagaacauccaccccaucacgaucgggaagugccccaaguacgugaaguccaccaagcugcggcuggcgaccggccuccgcaacgucccgagcauccagucccgggggcuguucggcgccaucgccggguucaucgagggcggcuggaccgggaugguggacggcugguacggguaccaccaccagaacgagcagggcagcggguacgccgccgaccugaaguccacgcagaacgcgaucgacgagaucaccaacaaggugaacagcgucaucgagaagaugaacacccaguucaccggccagugcaaggaguucaaccaccucgagaagcgcaucgagaaccugaacaagaagguggacgacggcuuccuggacaucuggacguacaacgccgagcuccugguccugcucgagaacgagcggacccuggacuaccacgacuccaacgugaagaaccuguacgagaaggugcgcagccagcucaagaacaacgccaaggaggucgggaacggcugcuucgaguucuaccacaagugcgacaacacgugcauggaguccgugaagaacgggaccuacgacuaccccaaguacagcgaggaggccaagcugaaccgggaggagaucgacggcgugaagcuggaguccacccgcaucuaccagauccucgccaucuacagcaccgucgcgagcucccuggugcugguggucagccucggggccaucuccuucuggaugugcagcggccaccuccagugccggaucugcaucuga

SEQ ID NO: 67577 - RNA, 1701 nt, Artificial Sequence; identical to SEQ ID NO: 67006
  derived and/or modified CDS sequence (opt1) from hemagglutinin__InfluenzaA__ACY77723

SEQ ID NO: 67578 - RNA, 1695 nt, Artificial Sequence
  derived and/or modified CDS sequence (opt1) from hemagglutinin__InfluenzaA__ACY77733
augaaggccauccuggugguccuccuguacaccuucgccaccgcgaacgccgacacgcugugcaucggcuaccacgccaacaacagcaccgacaccguggacaccgugcucgagaagaacgucacggugacccacuccgugaacauccuggaggacaagcacaacgggaagcugugcaagcuccgcggcgucgcgccccugcaccuggggaagugcaacaucgccggcuggauccucgggaacccggagugcgagagccuguccaccgccagcuccuggagcuacaucguggagaccuccagcuccgacaacggcacgugcuaccccggcgacuucaucgacuacgaggagcugcgggagcagcucagcuccgugagcuccuucgagcgcuucgagaucuuccccaagaccagcuccuggcccaaccacgacagcaacaagggggucaccgccgccugcccgcacgccggcgcgaaguccuucuacaagaaccugaucuggcuggugaagaccgggaacagcuaccccaagcucuccaagagcuacaucaacgacaagggcaaggaggugcugguccugugggggauccaccaccccagcacguccgccgaccagcagagccucuaccagaacgccgacgccuacguguucgugggcuccagccgguacuccaagaaguucaagcccgagaucgccauccgcccgaagguccgggaccaggagggccgcaugaacuacuacuggacccugguggagcccggggacaagaucaccuucgaggcgaccggcaaccugguggucccccgguacgccuucgccauggagcgcaacgccgggagcggcaucaucaucuccgacacgcccgugcacgacugcaacacgaccugccagaccccgaagggcgccaucaacaccagccuccccuuccagaacauccaccccaucaccaucgggaagugccccaaguacgugaaguccaccaagcugcggcuggcgaccggccuccgcaacgucccgagcauccagucccgggggcuguucggcgccaucgccggguucaucgagggcggcuggacggggaugguggacggcugguacggguaccaccaccagaacgagcagggcagcggguacgccgccgaccugaaguccacccagaacgcgaucgacgagaucaccaacaaggugaacagcgucaucgagaagaugaacacccaguucacggccgugggcaaggaguucaaccaccucgagaagcgcaucgagaaccugaacaagaaggucgacgacggcuuccuggacaucuggaccuacaacgccgagcuccuggugcugcucgagaacgagcggacccuggacuaccacgacuccaacgugaagaaccuguacgagaagguccgcagccagcucaagaacaacgccaaggagaucgggaacggcugcuucgaguucuaccacaagugcgacaacacgugcauggaguccgugaagaacgggaccuacgacuaccccaaguacagcgaggaggccaagcugaaccgggaggagaucgacggcgugaagcuggaguccacccgcaucuaccagauccucgcgaucuacagcaccgucgccagcucccuggugcugguggucagccucggggccaucuccuucuggaugugcagcggccugcagugccggaucugcaucuga

SEQ ID NO: 67579 - RNA, 1698 nt, Artificial Sequence
  derived and/or modified CDS sequence (opt1) from hemagglutinin__InfluenzaA__ACY77743
augaaggccauccuggugguccuccuguacaccuucgccaccgcgaacgccgacacgcugugcaucggcuaccacgccaacaacagcaccgacaccguggacaccgugcucgagaagaacgucacggugacccacuccgugaaccugcuggaggacaagcacaacgggaagcucugcaagcugcgcggcgucgcgccccugcaccucgggaagugcaacaucgccggcuggauccuggggaacccggagugcgagagccuguccaccgccagcuccuggagcuacaucguggagaccuccagcuccgacaacggcacgugcuaccccggcgacuucaucgacuacgaggagcuccgggagcagcugagcuccgugagcuccuucgagcgcuucgagaucuuccccaagaccagcuccuggcccaaccacgacagcaacaagggggucaccgccgccugcccgcacgccggcgcgaaguccuucuacaagaaccugaucuggcucgugaagaaggggaacagcuaccccaagcuguccaagagcuacaucaacgacaagggcaaggaggugcugguccucugggggauccaccaccccagcaccuccgccgaccagcagagccuguaccagaacgccgacgccuacguguucgugggcuccagccgguacuccaagaaguucaagcccgagaucgccauccgcccgaagguccgggaccaggagggccgcaugaacuacuacuggacgcugguggagcccggggacaagaucaccuucgaggcgaccggcaaccucguggucccccgguacgccuucgccauggagcgcaacgccgggagcggcaucaucaucuccgacacccccgugcacgacugcaacacgaccugccagaccccgaagggcgccaucaacaccagccugcccuuccagaacauccaccccaucacgaucgggaagugccccaaguacgugaaguccaccaagcugcggcucgcgaccggccugcgcaacgucccgagcauccagucccgggggcuguucggcgccaucgccggguucaucgagggcggcuggaccgggaugguggacggcugguacggguaccaccaccagaacgagcagggcagcggguacgccgccgaccucaaguccacgcagaacgcgaucgacgagaucaccaacaaggugaacagcgucaucgagaagaugaacacccaguucaccgccgugggcaaggaguucaaccaccuggagaagcgcaucgagaaccugaacaagaaggucgacgacggcuuccucgacaucuggacguacaacgccgagcugcuggugcuccuggagaacgagcggacccuggacuaccacgacuccaacgugaagaaccucuacgagaagguccgcagccagcugaagaacaacgccaaggagguggggaacggcugcuucgaguucuaccacaagugcgacaacacgugcauggaguccgugaagaacgggaccuacgacuaccccaaguacagcgaggaggccaagcugaaccgggaggagaucgacggcgucaagcucgaguccacccgcaucuaccagauccuggcgaucuacagcaccguggccagcucccuggugcucgucgugagccugggggccaucuccuucuggaugugcagcuggucccugcagugccggaucugcaucuga

SEQ ID NO: 67580 - RNA, 1701 nt, Artificial Sequence; identical to SEQ ID NO: 66693
  derived and/or modified CDS sequence (opt1) from hemagglutinin__InfluenzaA__ACY77753

SEQ ID NO: 67581 - RNA, 1695 nt, Artificial Sequence
  derived and/or modified CDS sequence (opt1) from hemagglutinin__InfluenzaA__ACY77783
augaaggccauccuggugguccuccuguacaccuucgccaccgcgaacgccgacacgcugugcaucggcuaccacgccaacaacagcaccgacaccguggacaccgugcucgagaagaacgucacggugacccacuccgugaaccugcugggggacaagcacaacggcaagcucugcaagcugcgcggggucgcgccccugcaccucggcaagugcaacaucgccggguggauccugggcaacccggagugcgagagccuguccaccgccagcuccuggagcuacaucguggagaccuccagcuccgacaacggcacgugcuaccccggggacuucaucgacuacgaggagcuccgggagcagcugagcuccgugagcuccuucgagcgcuucgagaucuuccccaagaccagcuccuggcccaaccacgacagcgacaagggcgucaccgccgccugcccgcacgccggggcgaaguccuucuacaagaaccugaucuggcucgugaagaagggcaacagcuaccccaagcuguccaagagcuacaucaacgacaaggggaaggaggugcugguccucuggggcauccaccaccccagcaccuccgccgaccagcagagccuguaccagaacgccgacacguacguguucgugggcaccucccgguacagcaagaaguucaagcccgagaucgccauccgcccgaagguccgggaccaggaggggcgcaugaacuacuacuggacccugguggagcccggcgacaagaucaccuucgaggccacggggaaccucguggucccccgguacgcguucgccauggagcgcaacgccggcuccggcaucaucaucagcgacacccccgugcacgacugcaacacgaccugccagaccccgaagggggccaucaacaccucccugcccuuccagaacauccaccccaucaccaucggcaagugccccaaguacgucaagagcaccaagcugcggcucgccacggggcugcgcaacgugccguccauccagagccggggccuguucggggcgaucgccggcuucaucgagggcggguggaccggcaugguggacgggugguacggcuaccaccaccagaacgagcagggguccggcuacgccgccgaccucaagagcacccagaacgccaucgacgagaucaccaacaaggugaacuccgucaucgagaagaugaacacgcaguucaccgcggugggcaaggaguucaaccaccuggagaagcgcaucgagaaccugaacaagaaggucgacgacggguuccucgacaucuggaccuacaacgccgagcugcuggugcuccuggagaacgagcggacccuggacuaccacgacagcaacgugaagucccucuacgagaagguccgcagccagcugaagaacaacgccaaggagaucggcaacgggugcuucgaguucuaccacaagugcgacaacacgugcauggaguccgugaagaacggcaccuacgacuaccccaaguacagcgaggaggccaagcugaaccgggaggagaucgacggggugaagcucgaguccacccgcaucuaccagauccuggccaucuacagcaccgucgcgagcucccuggugcucguggucagccugggcgccaucuccuucuggaugugcagcggccacuccugccggaucugcaucuga

SEQ ID NO: 67582 - RNA, 1698 nt, Artificial Sequence
  derived and/or modified CDS sequence (opt1) from hemagglutinin__InfluenzaA__ACY77813
augaaggccauccuggugguccugcuguacaccuucgccaccgcgaacgccgacacgcugugcaucggcuaccacgccaacaacagcaccgacaccguggacaccgugcucgagaagaacgucacggugacccacuccgugaaccugcuggaggacaagcacaacgggaagcucugcaagcugcgcggcgucgcgccccugcaccucgggaagugcaacaucgccggcuggauccuggggaacccggagugcgagagccuguccaccgccagcuccuggagcuacaucguggagaccuccagcuccgacaacggcacgugcuaccccggcgacuucaucgacuacgaggagcuccgggagcagcugagcuccgugagcuccuucgagcgcuucgagaucuuccccaagaccagcuccuggcccaaccacgacagcaacaagggggucaccgccgccugcccgcacgccggcgcgaaguccuucuacaagaaccugaucuggcucgugaagaaggggaacagcuaccccaagcuguccaagagcuacaucaacgacaagggcaaggaggugcugguccucugggggauccaccaccccagcaccuccgccgaccagcagagccuguaccagaacgccgacgccuacguguucgugggcacgucccgguacagcaagaaguucaagcccgagaucgccauccgcccgaagguccgggaccaggagggccgcaugaacuacuacuggacccugguggagcccggggacaagaucaccuucgaggcgaccggcaaccucguggucccccgguacgccuucgccauggagcgcaacgccggguccggcaucaucaucagcgacacgcccgugcacgacugcaacacgaccugccagaccccgaagggcgccaucaacaccucccugcccuuccagaacauccaccccaucaccaucgggaagugccccaaguacgucaagagcaccaagcugcggcucgcgaccggccugcgcaacgugccguccauccagagccgggggcuguucggcgccaucgccggguucaucgagggcggcuggacggggaugguggacggcugguacggguaccaccaccagaacgagcagggcuccggguacgccgccgaccucaagagcacccagaacgcgaucgacgagaucaccaacaaggugaacuccgucaucgagaagaugaacacccaguucacgggccagugcaaggaguucaaccaccuggagaagcgcaucgagaaccugaacaagaagguggacgacggcuuccucgacaucuggaccuacaacgccgagcugcugguccuccuggagaacgagcggacccuggacuaccacgacagcaacgugaagaaccucuacgagaaggugcgcucccagcugaagaacaacgccaaggagaucgggaacggcugcuucgaguucuaccacaagugcgacaacacgugcauggagagcgucaagaacgggaccuacgacuaccccaaguacuccgaggaggccaagcugaaccgggaggagaucgacggcgugaagcucgagagcacccgcaucuaccagauccuggccaucuacuccaccguggcgagcagccugguccucguggugucccugggggccaucagcuucuggaugugcuccggccaccuccagugccggaucugcaucuga

SEQ ID NO: 67583 - RNA, 1698 nt, Artificial Sequence
  derived and/or modified CDS sequence (opt1) from hemagglutinin__InfluenzaA__ACY77823
augaaggccauccuggugguccuccuguacaccuucgccaccgcgaacgccgacacgcugugcaucggcuaccacgccaacaacagcaccgacaccguggacaccgugcucgagaagaacgucacggugacccacuccgugaaccugcuggaggacaagcacaacgggaagcucugcaagcugcgcggcgucgcgccccugcaccucgggaagugcaacaucgccggcuggauccuggggaacccggagugcgagagccuguccaccgccagcuccuggagcuacaucguggagaccuccagcuccgacaacggcacgugcuaccccggcgacuucaucgacuacgaggagcuccgggagcagcugagcuccgugagcuccuucgagcgcuucgagaucuuccccaagaccagcuccuggcccaaccacgacagcaacaagggggucaccgccgccugcccgcacgccggcgcgaaguccuucuacaagaaccugaucuggcucgugaagaaggggaacagcuaccccaagcuguccaagagcuacaucaacgacaagggcaaggaggugcugguccucugggggauccaccaccccagcaccuccgccgaccagcagagccuguaccagaacgccgacgccuacguguucgugggcacgucccgguacagcaagaaguucaagcccgagaucgccauccgcccgaagguccgggaccaggagggccgcaugaacuacuacuggacccugguggagcccggggacaagaucaccuucgaggcgaccggcaaccucguggucccccgguacgccuucgccauggagcgcaacgccggguccggcaucaucaucagcgacacgcccgugcacgacugcaacacgaccugccagaccccgaagggcgccaucaacaccucccugcccuuccagaacauccaccccaucaccaucgggaagugccccaaguacgucaagagcaccaagcugcggcucgcgaccggccugcgcaacgugccguccauccagagccgggggcuguucggcgccaucgccggguucaucgagggcggcuggacggggaugguggacggcugguacggguaccaccaccagaacgagcagggcuccggguacgccgccgaccucaagagcacccagaacgcgaucgacgagaucaccaacaaggugaacuccgucaucgagaagaugaacacccaguucacgggccagugcaaggaguucaaccaccuggagaagcgcaucgagaaccugaacaagaagguggacgacggcuuccucgacaucuggaccuacaacgccgagcugcugguccuccuggagaacgagcggacccuggacuaccacgacagcaacgugaagaaccucuacgagaaggugcgcucccagcugaagaacaacgccaaggagaucgggaacggcugcuucgaguucuaccacaagugcgacaacacgugcauggagagcgucaagaacgggaccuacgacuaccccaaguacuccgaggaggccaagcugaaccgggaggagaucgacggcgugaagcucgagagcacccgcaucuaccagauccuggccaucuacuccaccguggcgagcagccugguccucguggugucccugggggccaucagcuucuggaugugcuccuggagccugcagugccggaucugcaucuga

SEQ ID NO: 67584 - RNA, 1698 nt, Artificial Sequence
  derived and/or modified CDS sequence (opt1) from hemagglutinin__InfluenzaA__ACY77833
augaaggccauccuggugguccuccuguacaccuucgccaccgcgaacgccgacacgcugugcaucggcuaccacgccaacaacagcaccgacaccguggacaccgugcucgagaagaacgucacggugacccacuccgugaaccugcuggaggacaagcacaacgggaagcucugcaagcugcgcggcgucgcgccccugcaccucgggaagugcaacaucgccggcuggauccuggggaacccggagugcgagagccuguccaccgccagcuccuggagcuacaucguggagaccuccagcuccgacaacggcacgugcuaccccggcgacuucaucgacuacgaggagcuccgggagcagcugagcuccgugagcuccuucgagcgcuucgagaucuuccccaagaccagcuccuggcccaaccacgacagcaacaagggggucaccgccgccugcccgcacgccggcgcgaaguccuucuacaagaaccugaucuggcucgugaagaaggggaacagcuaccccaagcuguccaagagcuacaucaacgacaagggcaaggaggugcugguccucugggggauccaccaccccagcaccuccgccgaccagcagagccuguaccagaacgccgacgccuacguguucgugggcacgucccgguacagcaagaaguucaagcccgagaucgccauccgcccgaagguccgggaccaggagggccgcaugaacuacuacuggacccugguggagcccggggacaagaucaccuucgaggcgaccggcaaccucguggucccccgguacgccuucgccauggagcgcaacgccggguccggcaucaucaucagcgacacgcccgugcacgacugcaacacgaccugccagaccccgaagggcgccaucaacaccucccugcccuuccagaacauccaccccaucaccaucgggaagugccccaaguacgucaagagcaccaagcugcggcucgcgaccggccugcgcaacgugccguccauccagagccgggggcuguucggcgccaucgccggguucaucgagggcggcuggacggggaugguggacggcugguacggguaccaccaccagaacgagcagggcuccggguacgccgccgaccucaagagcacccagaacgcgaucgacgagaucaccaacaaggugaacuccgucaucgagaagaugaacacccaguucacggccgugggcaaggaguucaaccaccuggagaagcgcaucgagaaccugaacaagaaggucgacgacggcuuccucgacaucuggaccuacaacgccgagcugcuggugcuccuggagaacgagcggacccuggacuaccacgacagcaacgugaagaaccucuacgagaagguccgcucccagcugaagaacaacgccaaggagaucgggaacggcugcuucgaguucuaccacaagugcgacaacacgugcauggagagcgugaagaacgggaccuacgacuaccccaaguacuccgaggaggccaagcugaaccgggaggagaucgacggcgugaagcucgagagcacccgcaucuaccagauccuggcgaucuacuccaccgucgccagcagccuggugcucguggucucccugggggccaucagcuucuggaugugcuccuggagccugcagugccggaucugcaucuga

SEQ ID NO: 67585 - RNA, 1698 nt, Artificial Sequence
  derived and/or modified CDS sequence (opt1) from hemagglutinin__InfluenzaA__ACY77843
augaaggccauccugguggucaugcuguacaccuucgccaccgcgaacgccgacacgcugugcaucggcuaccacgccaacaacagcaccgacaccguggacaccgugcuggagaagaacgucacggugacccacuccgugaaccuccuggaggacaagcacaacgggaagcugugcaagcuccgcggcgucgcgccccugcaccuggggaagugcaacaucgccggcuggauccucgggaacccggagugcgagagccuguccaccgccagcuccuggagcuacaucguggagaccuccagcuccgacaacggcacgugcuaccccggcgacuucaucgacuacgaggagcugcgggagcagcucagcuccgugagcuccuucgagcgcuucgagaucuuccccaagaccagcuccuggcccaaccacgacagcaacaagggggucaccgccgccugcccgcacgccggcgcgaaguccuucuacaagaaccugaucuggcuggugaagaaggggaacagcuaccccaagcucuccaagagcuacaucaacgacaagggcaaggaggugcugguccugugggggauccaccaccccagcaccuccgccgaccagcagagccucuaccagaacgccgacgccuacguguucgugggcuccagccgguacuccaagaaguucaagcccgagaucgccauccgcccgaagguccgggaccaggagggccgcaugaacuacuacuggacgcugguggagcccggggacaagaucaccuucgaggcgaccggcaaccugguggucccccgguacgccuucgccauggagcgcaacgccgggagcggcaucaucaucuccgacaccacggugcacgacugcaacacgaccugccagacccccaagggcgccaucaacaccagccucccguuccagaacauccaccccaucaccaucgggaagugccccaaguacgugaaguccaccaagcugcggcuggcgaccggccuccgcaacguccccagcauccagucccgggggcuguucggcgccaucgccggguucaucgagggcggcuggacggggaugguggacggcugguacggguaccaccaccagaacgagcagggcagcggguacgccgccgaccugaaguccacccagaacgcgaucgacgagaucaccaacaaggugaacagcgucaucgagaagaugaacacccaguucacggccgugggcaaggaguucaaccaccucgagaagcgcaucgagaaccugaacaagaaggucgacgacggcuuccuggacaucuggaccuacaacgccgagcuccuggugcugcucgagaacgagcggacccuggacuaccacgacuccaacgugaagaaccuguacgagaagguccgcagccagcucaagaacaacgccaaggagaucgggaacggcugcuucgaguucuaccacaagugcgacaacacgugcauggaguccgugaagaacgggaccuacgacuacccgaaguacagcgaggaggccaagcugaaccgggaggagaucgacggcgugaagcuggaguccacccgcaucuaccagauccucgcgaucuacagcaccgucgccagcucccuggugcugguggucagccucggggccaucuccuucuggaugugcagcggccaccuccagugccggaucugcaucuga

SEQ ID NO: 67586 - RNA, 1701 nt, Artificial Sequence
  derived and/or modified CDS sequence (opt1) from hemagglutinin__InfluenzaA__ACY77863
augaaggccauccuggugguccuccuguacaccuucgccaccgcgaacgccgacacgcugugcaucggcuaccacgccaacaacagcaccgacaccguggacaccgugcucgagaagaacgucacggugacccacuccgugaaccugcuggaggacaagcacaacgggaagcucugcaagcugcgcggcgucgcgccccugcaccucgggaagugcaacaucgccggcuggauccuggggaacccggagugcgagagccuguccaccgccagcuccuggagcuacaucguggagaccuccagcuccgacaacggcacgugcuaccccggcgacuucaucgacuacgaggagcuccgggagcagcugagcuccgugagcuccuucgagcgcuucgagaucuuccccaagaccagcuccuggcccaaccacgacagcaacaagggggucaccgccgccugcccgcacgccggcgcgaaguccuucuacaagaaccugaucuggcucgugaagaaggggaacagcuaccccaagcuguccaagagcuacaucaacgacaagggcaaggaggugcugguccucugggggauccaccaccccagcaccuccgccgaccagcagagccuguaccagaacgccgacgccuacguguucgugggcacgucccgguacagcaagaaguucaagcccgagaucgccauccgcccgaagguccgggaccaggagggccgcaugaacuacuacuggacccugguggagcccggggacaagaucaccuucgaggcgaccggcaaccucguggucccccgguacgccuucgccauggagcgcaacgccggguccggcaucaucaucagcgacacgcccgugcacgacugcaacacgaccugccagaccccgaagggcgccaucaacaccucccugcccuuccagaacauccaccccaucaccaucgggaagugccccaaguacgucaagagcaccaagcugcggcucgcgaccggccugcgcaacgugccguccauccagagccgggggcuguucggcgccaucgccggguucaucgagggcggcuggacggggaugguggacggcugguacggguaccaccaccagaacgagcagggcuccggguacgccgccgaccucaagagcacccagaacgcgaucgacgagaucaccaacaaggugaacuccgucaucgagaagaugaacacccaguucacggccgugggcaaggaguucaaccaccuggagaagcgcaucgagaaccugaacaagaaggucgacgacggcuuccucgacaucuggaccuacaacgccgagcugcuggugcuccuggagaacgagcggacccuggacuaccacgacagcaacgugaagaaccucuacgagaagguccgcucccagcugaagaacaacgccaaggagaucgggaacggcugcuucgaguucuaccacaagugcgacaacacgugcauggagagcgugaagaacgggaccuacgacuaccccaaguacuccgaggaggccaagcugaaccgggaggagaucgacggcgugaagcucgagagcacccgcaucuaccagauccuggcgaucuacuccaccgucgccagcagccuggugcucguggucucccugggggccaucagcuucuggaugugcuccggcaugagccugcagugccggaucugcaucuga

SEQ ID NO: 67587 - RNA, 1701 nt, Artificial Sequence; identical to SEQ ID NO: 66680
  derived and/or modified CDS sequence (opt1) from hemagglutinin__InfluenzaA__ACY77874

SEQ ID NO: 67588 - RNA, 1701 nt, Artificial Sequence; identical to SEQ ID NO: 66680
  derived and/or modified CDS sequence (opt1) from hemagglutinin__InfluenzaA__ACY77884

SEQ ID NO: 67589 - RNA, 1701 nt, Artificial Sequence
  derived and/or modified CDS sequence (opt1) from hemagglutinin__InfluenzaA__ACY77904
augaaggccauccuggugguccuccuguacaccuucgccaccgcgaacgccgacacgcugugcaucggcuaccacgccaacaacagcaccgacaccguggacaccgugcucgagaagaacgucacggugacccacuccgugaaccugcuggaggacaagcacaacgggaagcucugcaagcugcgcggcgucgcgccccugcaccucgggaagugcaacaucgccggcuggauccuggggaacccggagugcgagagccuguccaccgccagcuccuggagcuacaucguggagaccuccagcuccgacaacggcacgugcuaccccggcgacuucaucgacuacgaggagcuccgggagcagcugagcuccgugagcuccuucgagcgcuucgagaucuuccccaagaccagcuccuggcccaaccacgacagcaacaagggggucaccgccgccugcccgcacgccggcgcgaaguccuucuacaagaaccugaucuggcucgugaagaaggggaacagcuaccccaagcuguccaagagcuacaucaacgacaagggcaaggaggugcugguccucugggggauccaccaccccagcaccuccgccgaccagcagagccuguaccagaacgccgacgccuacguguucgugggcuccagcaaguacuccaagaaguucaagcccgagaucgccauccggccgaagguccgcgaccaggagggccggaugaacuacuacuggacgcugguggagcccggggacaagaucaccuucgaggcgaccggcaaccucguggucccccgcuacgccuucgccauggagcggaacgccgggagcggcaucaucaucuccgacacccccgugcacgacugcaacacgaccugccagaccccgaagggcgccaucaacaccagccugcccuuccagaacauccaccccaucacgaucgggaagugccccaagcacgugaaguccaccaagcugcgccucgcgaccggccugcggaacgucccgagcauccagucccgcgggcuguucggcgccaucgccggguucaucgagggcggcuggaccgggaugguggacggcugguacggguaccaccaccagaacgagcagggcagcggguacgccgccgaccucaaguccacgcagaacgcgaucgacgagaucaccaacaaggugaacagcgucaucgagaagaugaacacccaguucaccgccgugggcaaggaguucaaccaccuggagaagcggaucgagaaccugaacaagaaggucgacgacggcuuccucgacaucuggacguacaacgccgagcugcuggugcuccuggagaacgagcgcacccuggacuaccacgacuccaacgugaagaaccucuacgagaagguccggagccagcugaagaacaacgccaaggagaucgggaacggcugcuucgaguucuaccacaagugcgacaacacgugcauggaguccgugaagaacgggaccuacgacuaccccaaguacagcgaggaggccaagcugaaccgcgaggagaucgacggcgugaagcucgaguccacccggaucuaccagauccuggcgaucuacagcaccgucgccagcucccuggugcucguggucagccugggggccaucuccuucuggaugugcagcaacggcucccugcagugccgcaucugcaucuga

SEQ ID NO: 67590 - RNA, 1701 nt, Artificial Sequence; identical to SEQ ID NO: 66873
  derived and/or modified CDS sequence (opt1) from hemagglutinin__InfluenzaA__ACY77914

SEQ ID NO: 67591 - RNA, 1701 nt, Artificial Sequence
  derived and/or modified CDS sequence (opt1) from hemagglutinin__InfluenzaA__ACY77924
augaaggccauccuggugguccuccuguacaccuucgccaccgcgaacgccgacacgcugugcaucggcuaccacgccaacaacagcaccgacaccguggacaccgugcucgagaagaacgucacggugacccacuccgugaaccugcuggaggacaagcacgacgggaagcucugcaagcugcgcggcgucgcgccccugcaccucgggaagugcaacaucgccggcuggauccuggggaacccggagugcgagagccuguccaccgccagcuccuggagcuacaucguggagaccuccagcuccgacaacggcacgugcuaccccggcgacuucaucgacuacgaggagcuccgggagcagcugagcuccgugagcuccuucgagcgcuucgagaucuuccccaagaccagcuccuggcccaaccacgacagcaacaagggggucaccgccgccugcccgcacgccggcgcgaaguccuucuacaagaaccugaucuggcucgugaagaaggggaacagcuaccccaagcuguccaagagcuacaucaacgacaagggcaaggaggugcugguccucugggggauccaccaccccagcaccuccgccgaccagcagagccuguaccagaacgccgacgccuacguguucgugggcacgucccgguacagcaagaaguucaagcccgagaucgccauccgcccgaagguccgggaccaggagggccgcaugaacuacuacuggacccugguggagcccggggacaagaucaccuucgaggcgaccggcaaccucguggucccccgguacgccuucgccauggagcgcaacgccggguccggcaucaucaucagcgacacgcccgugcacgacugcaacacgaccugccagaccccgaagggcgccaucaacaccucccugcccuuccagaacauccaccccaucaccaucgggaagugccccaaguacgucaagagcaccaagcugcggcucgcgaccggccugcgcaacgugccguccauccagagccgggggcuguucggcgccaucgccggguucaucgagggcggcuggacggggaugguggacggcugguacggguaccaccaccagaacgagcagggcuccggguacgccgccgaccucaagagcacccagaacgcgaucgacgagaucaccaacaaggugaacuccgucaucgagaagaugaacacccaguucacggccgugggcaaggaguucaaccaccuggagaagcgcaucgagaaccugaacaagaaggucgacgacggcuuccucgacaucuggaccuacaacgccgagcugcuggugcuccuggagaacgagcggacccuggacuaccacgacagcaacgugaagaaccucuacgagaagguccgcucccagcugaagaacaacgccaaggagaucgggaacggcugcuucgaguucuaccacaagugcgacaacacgugcauggagagcgugaagaacgggaccuacgacuaccccaaguacuccgaggaggccaagcugaaccgggaggagaucgacggcgugaagcucgagagcacccgcaucuaccagauccuggcgaucuacuccaccgucgccagcagccuggugcucguggucucccugggggccaucagcuucuggaugugcuccaacggcagccugcagugccggaucugcaucuga

SEQ ID NO: 67592 - RNA, 1701 nt, Artificial Sequence; identical to SEQ ID NO: 67441
  derived and/or modified CDS sequence (opt1) from hemagglutinin__InfluenzaA__ACY77934

SEQ ID NO: 67593 - RNA, 1701 nt, Artificial Sequence
  derived and/or modified CDS sequence (opt1) from hemagglutinin__InfluenzaA__ACY77944
augaaggccauccuggugguccuccuguacaccuucgccaccgcgaacgccgacacgcugugcaucggcuaccacgccaacaacagcaccgacaccguggacaccgugcucgagaagaacgucacggugacccacuccgugaaccugcuggaggacaagcacaacgggaagcucugcaagcugcgcggcgucgcgccccugcaccucgggaagugcaacaucgccggcuggauccuggggaacccggagugcgagagccuguccaccgccagcuccuggagcuacaucguggagaccuccagcuccgacaacggcacgugcuaccccggcgacuucaucgacuacgaggagcuccgggagcagcugagcuccgugagcuccuucgagcgcuucgagaucuuccccaagaccagcuccuggcccaaccacgacagcaacaagggggucaccgccgccugcccgcacgccggcgcgaaguccuucuacaagaaccugaucuggcucgugaagaaggggaacagcuaccccaagcuguccaagagcuacaucaacgacaagggcaaggaggugcugguccucugggggauccaccaccccagcaccuccgccgaccagcagagccuguaccagaacgccgacgccuacguguucgugggcuccagccgguacuccaagaaguucaagcccgagaucgccauccgcccgaagguccgggaccaggagggccgcaugaacuacuacuggacgcugguggagcccggggacaagaucaccuucgaggcgaccggcaaccucguggucccccgguacgccuucgccauggagcgcaacgccgagagcgggaucaucaucuccgacacccccgugcacgacugcaacacgaccugccagaccccgaagggcgccaucaacaccagccugcccuuccagaacauccaccccaucacgaucggcaagugccccaaguacgugaaguccaccaagcugcggcucgcgaccgggcugcgcaacgucccgagcauccagucccggggccuguucggggccaucgccggcuucaucgagggcggguggaccggcaugguggacgggugguacggcuaccaccaccagaacgagcaggggagcggcuacgccgccgaccucaaguccacgcagaacgcgaucgacgagaucaccaacaaggugaacagcgucaucgagaagaugaacacccaguucaccgccguggggaaggaguucaaccaccuggagaagcgcaucgagaaccugaacaagaaggucgacgacggcuuccucgacaucuggacguacaacgccgagcugcuggugcuccuggagaacgagcggacccuggacuaccacgacuccaacgugaagaaccucuacgagaagguccgcagccagcugaagaacaacgccaaggagaucggcaacgggugcuucgaguucuaccacaagugcgacaacacgugcauggaguccgugaagaacggcaccuacgacuaccccaaguacagcgaggaggccaagcugaaccgggaggagaucgacggggugaagcucgaguccacccgcaucuaccagauccuggcgaucuacagcaccgucgccagcucccuggugcucguggucagccugggcgccaucuccuucuggaugugcagcaacgggucccugcagugccggaucugcaucuga

SEQ ID NO: 67594 - RNA, 1701 nt, Artificial Sequence; identical to SEQ ID NO: 66680
  derived and/or modified CDS sequence (opt1) from hemagglutinin__InfluenzaA__ACY77954

SEQ ID NO: 67595 - RNA, 1701 nt, Artificial Sequence; identical to SEQ ID NO: 66680
  derived and/or modified CDS sequence (opt1) from hemagglutinin__InfluenzaA__ACY77964

SEQ ID NO: 67596 - RNA, 1701 nt, Artificial Sequence; identical to SEQ ID NO: 66680
  derived and/or modified CDS sequence (opt1) from hemagglutinin__InfluenzaA__ACY77974

SEQ ID NO: 67597 - RNA, 1701 nt, Artificial Sequence; identical to SEQ ID NO: 66680
  derived and/or modified CDS sequence (opt1) from hemagglutinin__InfluenzaA__ACY77984

SEQ ID NO: 67598 - RNA, 1701 nt, Artificial Sequence; identical to SEQ ID NO: 66680
  derived and/or modified CDS sequence (opt1) from hemagglutinin__InfluenzaA__ACY77994

SEQ ID NO: 67599 - RNA, 1701 nt, Artificial Sequence
  derived and/or modified CDS sequence (opt1) from hemagglutinin__InfluenzaA__ACY79633
augaaggagauccuggugguccuccuguacaccuucgccaccgccaacgcggacacgcugugcaucggcuaccacgccaacaacagcaccgacaccguggacaccgugcucgagaagaacgucacggugacccacuccgugaaccugcuggaggacaagcacaacgggaagcucugcaagcugcgcggcgucgcgccccugcaccucgggaagugcaacaucgccggcuggauccuggggaacccggagugcgagagccuguccaccgccagcuccuggagcuacaucguggagaccuccagcuccgacaacggcacgugcuaccccggcgacuucaucgacuacgaggagcuccgggagcagcugagcuccgugagcuccuucgagcgcuucgagaucuuccccaagaccagcuccuggcccaaccacgacagcaacaagggggucaccgccgccugcccgcacgccggcgccaaguccuucuacaagaaccugaucuggcucgugaagaaggggaacagcuaccccaagcuguccaagagcuacaucaacgacaagggcaaggaggugcugguccucugggggauccaccaccccagcaccuccgcggaccagcagagccuguaccagaacgccgacgccuacguguucgugggcacgucccgguacagcaagaaguucaagcccgagaucgccauccgcccgaagguccgggaccaggagggccgcaugaacuacuacuggacccugguggagcccggggacaagaucaccuucgaggccaccggcaaccucguggucccccgguacgcguucgccauggagcgcaacgcccgguccgggaucaucaucagcgacacgcccgugcacgacugcaacacgaccugccagaccccgaagggcgccaucaacaccucccugcccuuccagaacauccaccccaucaccaucggcaagugccccaaguacgucaagagcaccaagcugcgccucgccaccgggcugcggaacgugccguccauccagagccgcggccuguucggggcgaucgccggcuucaucgagggcggguggacgggcaugguggacgggugguacggcuaccaccaccagaacgagcagggguccggcuacgccgccgaccucaagagcacccagaacgccaucgacgagaucaccaacaaggugaacuccgucaucgagaagaugaacacccaguucacggcgguggggaaggaguucaaccaccuggagaagcggaucgagaaccugaacaagaaggucgacgacggcuuccucgacaucuggaccuacaacgccgagcugcuggugcuccuggagaacgagcgcacccuggacuaccacgacagcaacgugaagaaccucuacgagaagguccggucccagcugaagaacaacgccaaggagaucggcaacgggugcuucgaguucuaccacaagugcgacaacacgugcauggagagcgugaagaacggcaccuacgacuaccccaaguacuccgaggaggccaagcugaaccgcgaggagaucgacggggugaagcucgagagcacccggaucuaccagauccuggccaucuacuccaccgucgcgagcagccuggugcucguggucucccugggcgccaucagcuucuggaugugcuccaacgggagccugcagugccgcaucugcaucuga

SEQ ID NO: 67600 - RNA, 1701 nt, Artificial Sequence; identical to SEQ ID NO: 67491
  derived and/or modified CDS sequence (opt1) from hemagglutinin__InfluenzaA__ACZ01953

SEQ ID NO: 67601 - RNA, 1701 nt, Artificial Sequence
  derived and/or modified CDS sequence (opt1) from hemagglutinin__InfluenzaA__ACZ05050
augaaggccauccuggugguccuccuguacaccuucgccaccgcgaacgccgacacgcugugcaucggcuaccacgccaacaacagcaccgacaccguggacaccgugcucgagaagaacgucacggugacccacuccgugaaccugcuggaggacaagcacaacgggaagcucugcaagcugcgcggcgucgcgccccugcaccucgggaagugcaacaucgccggcuggauccuggggaacccggagugcgagagccuguccaccgcgagcuccuggagcuacaucguggagaccuccagcuccgacaacggcacgugcuaccccggcgacuucaucgacuacgaggagcuccgggagcagcugagcuccgugagcuccuucgagcgcuucgagaucuuccccaagaccagcuccuggcccaaccacgacagcaacaagggggucaccgccgccugcucccacgccggcgccaagagcuucuacaagaaccugaucuggcucgugaagaaggggaacuccuacccgaagcugagcaagagcuacaucaacgacaagggcaaggaggugcugguccucugggggauccaccaccccuccaccagcgccgaccagcagucccuguaccagaacgccgacgccuacguguucgugggcagcucccgguacagcaagaaguucaagcccgagaucgccauccgccccaagguccgggaccaggagggccgcaugaacuacuacuggacgcugguggagccgggggacaagaucaccuucgaggcgaccggcaaccucguggucccccgguacgccuucgccauggagcgcaacgccggguccggcaucaucaucagcgacacccccgugcacgacugcaacacgaccugccagacccccaagggcgccaucaacaccucccugccguuccagaacauccaccccaucacgaucgggaagugccccaaguacgucaagagcaccaagcugcggcucgcgaccggccugcgcaacgugcccuccauccagagccgggggcuguucggcgccaucgccggguucaucgagggcggcuggaccgggaugguggacggcugguacggguaccaccaccagaacgagcagggcuccggguacgccgccgaccucaagagcacgcagaacgcgaucgacgagaucaccaacaaggugaacuccgucaucgagaagaugaacacccaguucaccgccgugggcaaggaguucaaccaccuggagaagcgcaucgagaaccugaacaagaaggucgacgacggcuuccucgacaucuggacguacaacgccgagcugcuggugcuccuggagaacgagcggacccuggacuaccacgacagcaacgugaagaaccucuacgagaagguccgcucccagcugaagaacaacgccaaggagaucgggaacggcugcuucgaguucuaccacaagugcgacaacacgugcauggagagcgugaagaacgggaccuacgacuacccgaaguacuccgaggaggccaagcugaaccgggaggagaucgacggcgugaagcucgagagcacccgcaucuaccagauccuggcgaucuacagcaccgucgccuccagccuggugcucguggucucccugggggccaucagcuucuggaugugcuccaacggcagccugcagugccggaucugcaucuga

SEQ ID NO: 67602 - RNA, 1701 nt, Artificial Sequence
  derived and/or modified CDS sequence (opt1) from hemagglutinin__InfluenzaA__ACZ05061
auggaggccauccuggugguccuccuguacaccuucaccacggccaacgcggacacccugugcaucggcuaccacgccaacaacagcaccgacaccguggacacggugcucgagaagaacgucaccgugacccacuccgugaaccugcuggaggacaagcacaacgggaagcucugcaagcugcgcggcgucgcgccccugcaccucgggaagugcaacaucgccggcuggauccuggggaacccggagugcgagagccuguccaccgccagcuccuggagcuacaucguggagacguccagcuccgacaacgggaccugcuaccccggcgacuucaucgacuacgaggagcuccgggagcagcugagcuccgugagcuccuucgagcgcuucgagaucuuccccaagaccagcuccuggcccaaccacgacagcaacaagggggucaccgccgccugcccgcacgccggcgccaaguccuucuacaagaaccugaucuggcucgugaagaaggggaacagcuaccccaagcuguccaagagcuacaucaacgacaagggcaaggaggugcugguccucugggggauccaccaccccagcacguccgcggaccagcagagccuguaccagaacgccgacgccuacguguucgugggcuccagccgguacuccaagaaguucaagcccgagaucgccauccgcccgaagguccgggaccaggagggccgcaugaacuacuacuggacccugguggagcccggggacaagaucaccuucgaggccaccggcaaccucguggucccccgguacgcguucgccauggagcgcaacgccgggagcggcaucaucaucuccgacacgcccgugcacgacugcaacacgaccugccagacccugaagggcgccaucaacaccagccugccguuccagaacauccaccccaucaccaucgggaagugccccaaguacgugaaguccaccaagcuccggcuggccaccggccugcgcaacguccccagcauccagucccggggccucuucggcgcgaucgccggguucaucgagggcggcuggacggggaugguggacggcugguacggguaccaccaccagaacgagcagggcagcggguacgccgccgaccugaaguccacccagaacgccaucgacgagaucaccaacaaggugaacagcgucaucgagaagaugaacacccaguucacggcggugggcaaggaguucaaccaccuggagaagcgcaucgagaaccucaacaagaaggucgacgacggcuuccuggacaucuggaccuacaacgccgagcugcucgugcugcuggagaacgagcggacccucgacuaccacgacuccaacgugaagaaccuguacgagaagguccgcagccagcugaagaacaacgccaaggagaucgggaacggcugcuucgaguucuaccacaagugcgacaacacgugcauggaguccgugaagaacgggaccuacgacuacccgaaguacagcgaggaggccaagcucaaccgggaggagaucgacggcgugaagcuggaguccacccgcaucuaccagauccuggccaucuacagcaccgucgcgagcucccucgugcugguggucagccugggggccaucuccuucuggaugugcagcaacggcucccuccagugccggaucugcaucuga

SEQ ID NO: 67603 - RNA, 1701 nt, Artificial Sequence; identical to SEQ ID NO: 66680
  derived and/or modified CDS sequence (opt1) from hemagglutinin__InfluenzaA__ACZ05071

SEQ ID NO: 67604 - RNA, 1701 nt, Artificial Sequence; identical to SEQ ID NO: 66680
  derived and/or modified CDS sequence (opt1) from hemagglutinin__InfluenzaA__ACZ05081

SEQ ID NO: 67605 - RNA, 1701 nt, Artificial Sequence; identical to SEQ ID NO: 66680
  derived and/or modified CDS sequence (opt1) from hemagglutinin__InfluenzaA__ACZ05091

SEQ ID NO: 67606 - RNA, 1701 nt, Artificial Sequence; identical to SEQ ID NO: 66680
  derived and/or modified CDS sequence (opt1) from hemagglutinin__InfluenzaA__ACZ05101

SEQ ID NO: 67607 - RNA, 1701 nt, Artificial Sequence; identical to SEQ ID NO: 66680
  derived and/or modified CDS sequence (opt1) from hemagglutinin__InfluenzaA__ACZ05111

SEQ ID NO: 67608 - RNA, 1701 nt, Artificial Sequence
  derived and/or modified CDS sequence (opt1) from hemagglutinin__InfluenzaA__ACZ05121
augaaggccauccuggugguccuccuguacaccuucgccaccgcgaacgccgacacgcugugcaucggcuaccacgccaacaacagcaccgacaccguggacaccgugcucgagaagaacgucacggugacccacuccgugaaccugcuggaggacaagcacaacgggaagcucugcaagcugcgcggcgucgcgccccugcaccucgggaagugcaacaucgccggcuggauccuggggaacccggagugcgagagccuguccaccgccagcuccuggagcuacaucguggagaccuccagcuccgacaacggcacgugcuaccccggcgacuucaucgacuacgaggagcuccgggagcagcugagcuccgugagcuccuucgagcgcuucgagaucuuccccaagaccagcuccuggcccaaccacgacagcaacaagggggucaccgccgccugcccgcacgccggcgcgaaguccuucuacaacaaccugaucuggcucgugaagaaggggaacagcuaccccaagcuguccaagagcuacaucaacgacaagggcaaggaggugcugguccucugggggauccaccaccccagcaccuccgccgaccagcagagccuguaccagaacgccgacgccuacguguucgugggcuccagccgguacuccaagaaguucaagcccgagaucgccauccgcccgaagguccgggaccaggagggccgcaugaacuacuacuggacgcugguggagcccggggacaagaucaccuucgaggcgaccggcaaccucguggucccccgguacgccuucgccauggagcgcaacgccgggagcggcaucaucaucuccgacacccccgugcacgacugcaacacgaccugccagaccccgaagggcgccaucaacaccagccugcccuuccagaacauccaccccaucacgaucgggaagugccccaaguacgugaaguccaccaagcugcggcucgcgaccggccugcgcaacgucccgagcauccagucccgggggcuguucggcgccaucgccggguucaucgagggcggcuggaccgggaugguggacggcugguacggguaccaccaccagaacgagcagggcagcggguacgccgccgaccucaaguccacgcagaacgcgaucgacgagaucaccaacaaggugaacagcgucaucgagaagaugaacacccaguucaccgccgugggcaaggaguucaaccaccuggagaagcgcaucgagaaccugaacaagaaggucgacgacggcuuccucgacaucuggacguacaacgccgagcugcuggugcuccuggagaacgagcggacccuggacuaccacgacuccaacgugaagaaccucuacgagaagguccgcagccagcugaagaacaacgccaaggagaucgggaacggcugcuucgaguucuaccacaagugcgacaacacgugcaugggguccgugaagaacggcaccuacgacuaccccaaguacagcgaggaggccaagcugaaccgggaggagaucgacggggugaagcucgaguccacccgcaucuaccagauccuggcgaucuacagcaccgucgccagcucccuggugcucguggucagccugggcgccaucuccuucuggaugugcagcaacggcucccugcagugccggaucugcaucuga

SEQ ID NO: 67609 - RNA, 1701 nt, Artificial Sequence; identical to SEQ ID NO: 66680
  derived and/or modified CDS sequence (opt1) from hemagglutinin__InfluenzaA__ACZ05131

SEQ ID NO: 67610 - RNA, 1701 nt, Artificial Sequence; identical to SEQ ID NO: 66680
  derived and/or modified CDS sequence (opt1) from hemagglutinin__InfluenzaA__ACZ05141

SEQ ID NO: 67611 - RNA, 1701 nt, Artificial Sequence; identical to SEQ ID NO: 66680
  derived and/or modified CDS sequence (opt1) from hemagglutinin__InfluenzaA__ACZ05151

SEQ ID NO: 67612 - RNA, 1701 nt, Artificial Sequence
  derived and/or modified CDS sequence (opt1) from hemagglutinin__InfluenzaA__ACZ05172
augaagaccaucaucgcccugagcuacauccucugccugguguucgcccagaagcugcccggcaacgacaacuccaccgcgacgcucugccuggggcaccacgccgucccgaacggcaccaucgugaagaccaucaccaacgaccagaucgaggugacgaacgccaccgagcugguccagagcuccagcaccggggagaucugcgacagcccccaccagauccucgacggcaagaacugcacccugaucgacgcccugcucggggacccccagugcgacggcuuccagaacaagaagugggaccuguucguggagcgcagcaaggccuacuccaacugcuaccccuacgacgugccggacuacgcgagccugcggucccucgucgccagcuccggcacgcuggaguucaacaacgagagcuucaacuggaccggggugacccaggacggcaccuccagcgccugcauccgccgguccaagaacagcuucuucucccgccugaacuggcucacgcaccugaacuucaaguaccccgcccugaacgugaccaugcccaacaacgagcaguucgacaagcucuacaucuggggcguccaccaccccgggaccgacaaggaccagaucuuccuguacgcgcaggccagcgggcggaucaccguguccacgaagcgcagccagcagaccgccaucccgaacaucggcagccggccccgcgugcggaacauccccucccgcaucagcaucuacuggaccaucgucaagcccggcgacauccugcucaucaacuccaccgggaaccugaucgccccgcggggcuacuucaagauccgcagcgggaaguccagcaucaugcgguccgacgcccccaucggcaagugcaacagcgagugcaucacgcccaacggcuccauccccaacgacaagccguuccagaacgugaaccgcaucaccuacggggcgugcccccgguacgugaagcagaacacccugaagcucgccaccggcaugcgcaacguccccgagaagcagacgcgggggaucuucggcgccaucgccggguucaucgagaacggcugggagggcaugguggacgggugguacggcuuccgccaccagaacagcgaggggcggggccaggccgcggaccugaaguccacccaggccgccaucgaccagaucaacgggaagcugaaccgccucaucggcaagaccaacgagaaguuccaccagaucgagaaggaguucagcgagguggagggccggauccaggaccuggagaaguacgucgaggacaccaagaucgaccugugguccuacaacgccgagcuccugguggcccuggagaaccagcacacgaucgaccucaccgacagcgagaugaacaagcuguucgagaagaccaagaagcagcugcgcgagaacgcggaggacauggggaacggcugcuucaagaucuaccacaagugcgacaacgccugcaucggguccauccgcaacggcaccuacgaccacgacguguaccgggacgaggcccucaacaaccgcuuccagaucaagggggucgagcugaaguccggcuacaaggacuggauccuguggaucuccuucgccaucagcugcuuccuccugugcguggcccugcucggcuucaucaugugggcgugccagaaggggaacauccggugcaacaucugcaucuga

SEQ ID NO: 67613 - RNA, 1698 nt, Artificial Sequence; identical to SEQ ID NO: 67155
  derived and/or modified CDS sequence (opt1) from hemagglutinin__InfluenzaA__ACZ05194

SEQ ID NO: 67614 - RNA, 1701 nt, Artificial Sequence; identical to SEQ ID NO: 67612
  derived and/or modified CDS sequence (opt1) from hemagglutinin__InfluenzaA__ACZ05205

SEQ ID NO: 67615 - RNA, 1701 nt, Artificial Sequence
  derived and/or modified CDS sequence (opt1) from hemagglutinin__InfluenzaA__ACZ05216
augaagaccaucaucgcccugagcuacauccucugccugguguucgcccagaagauccccggcaacgacaacaacaccgcgacgcugugccucgggcaccacgccgucccgaacggcaccaucgugaagaccaucaccaacgaccagaucgaggugacgaacgccaccgagcugguccaguccagcuccaccggggagaucugcgacagcccccaccagauccuggacggcgagaacugcacccucaucgacgcccugcugggggacccccagugcgacggcuuccagaacaagaagugggaccucuucguggagcgcuccaaggccuacagcaacugcuaccccuacgacgugccggacuacgcgucccugcggagccuggucgccuccagcggcacgcucgaguucaacaacgaguccuucaacuggaccggggugacccagaacggcaccagcuccgccugcauccgccggagcaacaacuccuucuucagccgccugaacuggcugacgcaccucaaguucaaguaccccgcccugaacgugaccaugcccaacaacgagcaguucgacaagcuguacaucuggggcguccaccaccccgggaccgacaacgaccagaucuuccucuacgcgcaggccuccgggcggaucaccgugagcacgaagcgcucccagcagaccgugaucccgaacaucggcagccggccccgcguccggaacauccccagccgcaucuccaucuacuggaccaucgugaagcccggcgacauccugcugaucaacagcaccgggaaccucaucgccccgcggggcuacuucaagauccgcuccggcaagagcuccaucaugcggagcgacgcccccaucgggaagugcaacuccgagugcaucacgcccaacggcagcauccccaacgacaagccguuccagaacgugaaccgcaucaccuacggggccugcccccgguacgucaagcagaacacccugaagcuggcgaccggcaugcgcaacgugcccgagaagcagacgcgggggaucuucggcgccaucgccggguucaucgagaacggcugggagggcaugguggacgggugguacggcuuccgccaccagaacuccgaggggcggggccaggccgccgaccucaagagcacccaggcggccaucgaccagaucaacgggaagcugaaccgccugaucggcaagaccaacgagaaguuccaccagaucgagaaggaguucuccgaggucgagggccggauccaggaccucgagaaguacguggaggacaccaagaucgaccuguggagcuacaacgccgagcugcucguggcccuggagaaccagcacacgaucgaccugaccgacuccgagaugaacaagcuguucgagaagaccaagaagcagcuccgcgagaacgccgaggacauggggaacggcugcuucaagaucuaccacaagugcgacaacgcgugcaucgggagcauccgcaacggcaccuacgaccacgacgucuaccgggacgaggcccugaacaaccgcuuccagaucaaggggguggagcucaaguccggcuacaaggacuggauccuguggaucagcuucgccaucuccugcuuccugcucugcguggcccugcugggcuucaucaugugggccugccagaaggggaacauccggugcaacaucugcaucuga

SEQ ID NO: 67616 - RNA, 1701 nt, Artificial Sequence; identical to SEQ ID NO: 67612
  derived and/or modified CDS sequence (opt1) from hemagglutinin__InfluenzaA__ACZ05227

SEQ ID NO: 67617 - RNA, 1701 nt, Artificial Sequence
  derived and/or modified CDS sequence (opt1) from hemagglutinin__InfluenzaA__ACZ05238
augaagaccaucaucgcccugagcuacauccucugccugguguucgcccagaagcugcccggcaacgacaacuccaccgcgacgcucugccuggggcaccacgccgucccgaacggcaccaucgugaagaccaucaccaacgaccagaucgaggugacgaacgccaccgagcugguccagagcuccagcaccggggagaucugcgacagcccccaccagauccucgacggcaagaacugcacccugaucgacgcccugcucggggacccccagugcgacggcuuccagaacaagaagugggaccuguucguggagcgcagcaaggccuacuccaacugcuaccccuacgacgugccggacuacgcgagccugcggucccucgucgccagcuccggcacgcuggaguucaacaacgagagcuucaacugggccggggugacccagaacggcaccuccagcgccugcauccgccgguccaagaacagcuucuucucccgccugaacuggcucacccaccugaacuucaaguaccccgcgcugaacgugacgaugcccaacaacgagcaguucgacaagcucuacaucuggggcguccaccaccccgggaccgacaaggaccagaucuuccuguacgcccaggccagcgggcggaucaccguguccaccaagcgcagccagcagacggccaucccgaacaucggcagccggccccgcgugcggaacauccccucccgcaucagcaucuacuggaccaucgucaagcccggcgacauccugcucaucaacuccaccgggaaccugaucgccccgcggggcuacuucaagauccgcagcgggaaguccagcaucaugcgguccgacgcgcccaucggcaagugcaacagcgagugcaucacccccaacggcuccauccccaacgacaagccguuccagaacgugaaccgcaucacguacggggccugcccccgguacgugaagcagaacacccugaagcucgccaccggcaugcgcaacguccccgagaagcagacccgggggaucuucggcgccaucgccggguucaucgagaacggcugggagggcaugguggacgggugguacggcuuccgccaccagaacagcgaggggcggggccaggcggccgaccugaaguccacgcaggccgccaucgaccagaucaacgggaagcugaaccgccucaucggcaagaccaacgagaaguuccaccagaucgagaaggaguucagcgagguggagggccggauccaggaccuggagaaguacgucgaggacaccaagaucgaccugugguccuacaacgccgagcuccugguggcgcuggagaaccagcacaccaucgaccucacggacagcgagaugaacaagcuguucgagaagaccaagaagcagcugcgcgagaacgccgaggacauggggaacggcugcuucaagaucuaccacaagugcgacaacgccugcaucggguccauccgcaacggcaccuacgaccacgacguguaccgggacgaggcccucaacaaccgcuuccagaucaagggggucgagcugaaguccggcuacaaggacuggauccuguggaucuccuucgccaucagcugcuuccuccugugcguggcgcugcucggcuucaucaugugggccugccagaaggggaacauccggugcaacaucugcaucuga

SEQ ID NO: 67618 - RNA, 1701 nt, Artificial Sequence; identical to SEQ ID NO: 67612
  derived and/or modified CDS sequence (opt1) from hemagglutinin__InfluenzaA__ACZ05249

SEQ ID NO: 67619 - RNA, 1701 nt, Artificial Sequence; identical to SEQ ID NO: 67612
  derived and/or modified CDS sequence (opt1) from hemagglutinin__InfluenzaA__ACZ05260

SEQ ID NO: 67620 - RNA, 1701 nt, Artificial Sequence
  derived and/or modified CDS sequence (opt1) from hemagglutinin__InfluenzaA__ACZ05271
augaagaccaucaucgcccugagcuacauccucugccugguguucgcccagaagcugcccggcaacgacaacuccaccgcgacgcucugccuggggcaccacgccgucccgaacggcaccaucgugaagaccaucaccaacgaccagaucgaggugacgaacgccaccgagcugguccagagcuccagcaccggggagaucugcgacagcccccaccagauccucgacggcgagaacugcacccugaucgacgcccugcucggggacccccagugcgacggcuuccagaacaagaagugggaccuguucguggagcgcagcaaggccuacuccaacugcuaccccuacgacgugccggacuacgcgagccugcggucccucgucgccagcuccggcacgcuggaguucaacaacgagagcuucaacuggaccggggugacccagaacggcaccuccagcgccugcauccgccgguccaacaacagcuucuucucccgccugaacuggcucacgcaccugaaguucaaguaccccgcccugaacgugaccaugcccaacaacgagcaguucgacaagcucuacaucuggggcguccaccaccccgggaccgacaacgaccagaucuuccuguacgcgcaggccagcgggcggaucaccguguccacgaagcgcagccagcagaccgugaucccgaacaucggcagccggccccgcguccggaacauccccucccgcaucagcaucuacuggaccaucgugaagcccggcgacauccugcucaucaacuccaccgggaaccugaucgccccgcggggcuacuucaagauccgcagcgggaaguccagcaucaugcgguccgacgcccccaucggcaagugcaacagcgagugcaucacgcccaacggcuccauccccaacgacaagccguuccagaacgugaaccgcaucaccuacggggccugcccccgguacgucaagcagaacacccugaagcucgcgaccggcaugcgcaacgugcccgagcggcagacgcgcgggaucuucggcgccaucgccggguucaucgagaacggcugggagggcaugguggacgggugguacggcuuccggcaccagaacagcgaggggcgcggccaggccgccgaccugaaguccacccaggcggccaucgaccagaucaacgggaagcugaaccggcucaucggcaagaccaacgagaaguuccaccagaucgagaaggaguucagcgaggucgagggccgcauccaggaccuggagaaguacguggaggacaccaagaucgaccugugguccuacaacgccgagcuccugguggcccuggagaaccagcacacgaucgaccucaccgacagcgagaugaacaagcuguucgagaagaccaagaagcagcugcgcgagaacgccgaggacauggggaacggcugcuucaagaucuaccacaagugcgacaacgcgugcaucggguccauccggaacggcaccuacgaccacgacgucuaccgcgacgaggcccucaacaaccgguuccagaucaaggggguggagcugaaguccggcuacaaggacuggauccuguggaucuccuucgccaucagcugcuuccuccugugcguggcccugcucggcuucaucaugugggccugccagaaggggaacauccgcugcaacaucugcaucuga

SEQ ID NO: 67621 - RNA, 1701 nt, Artificial Sequence
  derived and/or modified CDS sequence (opt1) from hemagglutinin__InfluenzaA__ACZ05282
augaagaccaccaucgcccugagcuacauccucugccugguguucgcccagaagcugcccggcaacgacaacuccacggcgacccucugccuggggcaccacgccgucccgaacggcaccaucgugaagaccaucacgaacgaccagaucgaggugaccaacgccaccgagcugguccagagcuccagcaccggggagaucugcgacagcccccaccagauccucgacggcgagaacugcacgcugaucgacgcccugcucggggacccccagugcgacggcuuccagaacaagaagugggaccuguucguggagcgcagcaaggccuacuccaacugcuaccccuacgacgugccggacuacgcgagccugcggucccucgucgccagcuccggcacccuggaguucaacaacgagagcuucaacuggaccggggugacccagaacggcacguccagcgccugcauccgccgguccaacaacagcuucuucucccgccugaacuggcucacccaccugaaguucaaguaccccgcccugaacgugaccaugcccaacaacgagcaguucgacaagcucuacaucuggggcguccaccaccccgggaccgacaacgaccagaucuuccuguacgcgcaggccagcgggcggaucacgguguccaccaagcgcagccagcagaccgugaucccgaacaucggcagccggccccgcguccggaacauccccucccgcaucagcaucuacuggaccaucgugaagcccggcgacauccugcucaucaacuccacggggaaccugaucgccccgcggggcuacuucaagauccagagcgggaaguccagcaucaugcgcuccgacgcccccaucggcaagugcaacagcgagugcaucacccccaacggcuccauccccaacgacaagccguuccagaacgugaaccggaucaccuacggggccugcccccgcuacgucaagcagaacacccugaagcucgcgacgggcaugcggaacgugcccgagaagcagacccgcgggaucuucggcgccaucgccggguucaucgagaacggcugggagggcaugguggacgggugguacggcuuccggcaccagaacagcgaggggcgcggccaggccgccgaccugaaguccacccaggcggccaucgaccagaucaacgggaagcugaaccggcucaucggcaagaccaacgagaaguuccaccagaucgagaaggaguucagcgaggucgagggccgcauccaggaccuggagaaguacguggaggacacgaagaucgaccugugguccuacaacgccgagcuccugguggcccuggagaaccagcacaccaucgaccucaccgacagcgagaugaacaagcuguucgagaagaccaagaagcagcugcgggagaacgccgaggacauggggaacggcugcuucaagaucuaccacaagugcgacaacgcgugcaucggguccauccgcaacggcacguacgaccacgacgucuaccgcgacgaggcccucaacaaccgguuccagaucaaggggguggagcugaaguccggcuacaaggacuggauccuguggaucuccuucgccaucagcugcuuccuccugugcguggcccugcucggcuucaucaugugggccugccagaaggggaacauccgcugcaacaucugcaucuga

SEQ ID NO: 67622 - RNA, 1701 nt, Artificial Sequence; identical to SEQ ID NO: 67612
  derived and/or modified CDS sequence (opt1) from hemagglutinin__InfluenzaA__ACZ05304

SEQ ID NO: 67623 - RNA, 1701 nt, Artificial Sequence; identical to SEQ ID NO: 67435
  derived and/or modified CDS sequence (opt1) from hemagglutinin__InfluenzaA__ACZ05315

SEQ ID NO: 67624 - RNA, 1701 nt, Artificial Sequence; identical to SEQ ID NO: 67612
  derived and/or modified CDS sequence (opt1) from hemagglutinin__InfluenzaA__ACZ05326

SEQ ID NO: 67625 - RNA, 1701 nt, Artificial Sequence
  derived and/or modified CDS sequence (opt1) from hemagglutinin__InfluenzaA__ACZ05337
augaagaccaucaucgcccugagcuacauccucugccugguguucacccagaagcugcccggcaacgacaacuccacggccacccucugccuggggcaccacgcggucccgaacggcaccaucgugaagaccaucacgaacgaccagaucgaggugaccaacgccaccgagcugguccagagcuccagcaccggggagaucugcgacagcccccaccagauccucgacggcaagaacugcacgcugaucgacgcccugcucggggacccccagugcgacggcuuccagaacaagaagugggaccuguucguggagcgcagcaaggccuacuccaacugcuaccccuacgacgugccggacuacgccagccugcggucccucgucgcgagcuccggcacccuggaguucaacaacgagcgcuucaacuggaccggggugacccagaacggcacgagcuccgccugcauccggcgcagcaagaacuccuucuucagccggcugaacuggcucacccaccugaacuucaaguaccccgcccugaacgugaccaugcccaacaacgagcaguucgacaagcucuacaucuggggcguccaccaccccgggaccgacaaggaccagaucuuccuguacgcccaggcguccgggcgcaucacggugagcaccaagcggucccagcagaccgugaucccgaacaucggcagccgcccccggguccgcaacauccccagccggaucuccaucuacuggaccaucgugaagcccggcgacauccugcucaucagcuccacggggaaccugaucgccccgcgcggcuacuucaagauccggagcgggaaguccagcaucaugcgcuccgacgcccccaucggcaagugcaacagcgagugcaucacccccaacggcuccauccccaacgacaagccguuccagaacgugaaccggaucaccuacggggccugcccccgcuacgucaagcagaacacccugaagcucgccacgggcaugcggaacgugcccgagaagcagacccgcgggaucuucggcgcgaucgccggguucaucgagaacggcugggagggcaugguggacgggugguacggcuuccggcaccagaacagcgaggggcgcggccaggccgccgaccugaaguccacccaggccgcgaucgaccagaucaacgggaagcugaaccggcucaucggcaagaccaacgagaaguuccaccagaucgagaaggaguucagcgaggucgagggccgcauccaggaccuggagaaguacguggaggacacgaagaucgaccugugguccuacaacgccgagcuccugguggcccuggagaaccagcacaccaucgaccucaccgacagcgagaugaacaagcuguucgagaagaccaagaagcagcugcgcgagaacgccgaggacauggggaacggcugcuucaagaucuaccacaagugcgacaacgccugcaucggguccauccggaacggcacguacgaccacgacgucuaccgcgacgaggcgcucaacaaccgguuccagaucaaggggguggagcugaaguccggcuucaaggacuggauccuguggaucuccuucgccaucagcugcuuccuccugugcguggcccugcucggcuucaucaugugggccugccagaaggggaacauccgcugcaacaucugcaucuga

SEQ ID NO: 67626 - RNA, 1701 nt, Artificial Sequence; identical to SEQ ID NO: 67612
  derived and/or modified CDS sequence (opt1) from hemagglutinin__InfluenzaA__ACZ05348

SEQ ID NO: 67627 - RNA, 1701 nt, Artificial Sequence; identical to SEQ ID NO: 67617
  derived and/or modified CDS sequence (opt1) from hemagglutinin__InfluenzaA__ACZ05359

SEQ ID NO: 67628 - RNA, 1701 nt, Artificial Sequence; identical to SEQ ID NO: 67612
  derived and/or modified CDS sequence (opt1) from hemagglutinin__InfluenzaA__ACZ05370

SEQ ID NO: 67629 - RNA, 1701 nt, Artificial Sequence
  derived and/or modified CDS sequence (opt1) from hemagglutinin__InfluenzaA__ACZ05392
augaagaccaucaucgcccugagcuacauccucugccugguguucgcccagaagcugcccggcaacgacaacuccaccgcgacgcucugccuggggcaccacgccgucccgaacggcaccaucgugaagaccaucaccaacgaccagaucgaggugacgaacgccaccgagcugguccagagcuccagcaccggggagaucugcgacagcccccaccagauccucgacggcaagaacugcacccugaucgacgcccugcucggggacccccagugcgacggcuuccagaacaagaagugggaccuguucguggagcgcagcaaggccuacuccaacugcuaccccuacgacgugccggacuacgcgagccugcggucccucgucgccagcuccggcacgcuggaguucaacaacgagagcuucaacuggaccggggugacccagaacggcgccuccagcgccugcauccgccgguccaagaacagcuucuucucccgccugaacuggcucacccaccugaacuucaaguaccccgcgcugaacgugacgaugcccaacaacgagcaguucgacaagcucuacaucuggggcguccaccaccccgggaccgacaaggaccagaucuuccuguacgcccaggccagcgggcggaucaccguguccaccaagcgcagccagcagacggccaucccgaacaucggcagccggccccgcgugcggaacauccccucccgcaucagcaucuacuggaccaucgucaagcccggcgacauccugcucaucaacuccaccgggaaccugaucgccccgcggggcuacuucaagauccgcagcgggaaguccagcaucaugcgguccgacgcgcccaucggcaagugcaacagcgagugcaucacccccaacggcuccauccccaacgacaagccguuccagaacgugaaccgcaucacguacggggccugcccccgguacgugaagcagaacacccugaagcucgccaccggcaugcgcaacguccccgagaagcagacccgggggaucuucggcgccaucgccggguucaucgagaacggcugggagggcaugguggacgggugguacggcuuccgccaccagaacagcgaggggcggggccaggcggccgaccugaaguccacgcaggccgccaucgaccagaucaacgggaagcugaaccgccucaucggcaagaccaacgagaaguuccaccagaucgagaaggaguucagcgagguggagggccggauccaggaccuggagaaguacgucgaggacaccaagaucgaccugugguccuacaacgccgagcuccugguggcgcuggagaaccagcacaccaucgaccucacggacagcgagaugaacaagcuguucgagaagaccaagaagcagcugcgcgagaacgccgaggacauggggaacggcugcuucaagaucuaccacaagugcgacaacgccugcaucggguccauccgcaacggcaccuacgaccacgacguguaccgggacgaggcccucaacaaccgcuuccagaucaagggggucgagcugaaguccggcuacaaggacuggauccuguggaucuccuucgccaucagcugcuuccuccugugcguggcgcugcucggcuucaucaugugggccugccagaaggggaacauccggugcaacaucugcaucuga

SEQ ID NO: 67630 - RNA, 1701 nt, Artificial Sequence; identical to SEQ ID NO: 67612
  derived and/or modified CDS sequence (opt1) from hemagglutinin__InfluenzaA__ACZ05403

SEQ ID NO: 67631 - RNA, 1701 nt, Artificial Sequence
  derived and/or modified CDS sequence (opt1) from hemagglutinin__InfluenzaA__ACZ05436
augaagaccaucaucgcccugagcuacauccucugccugguguucgcccagaagcugcccggcaacgacaacuccaccgcgacgcucugccuggggcaccacgccgucccgaacggcaccaucgugaagaccaucaccaacgaccagaucgaggugacgaacgccaccgagcugguccagagcuccagcaccggggagaucugcgacagcccccaccagauccucgacggcaagagcugcacccugaucgacgcccugcucggggacccccagugcgacggcuuccagaacaagaagugggaccuguucguggagcgcuccaaggccuacagcaacugcuaccccuacgacgugccggacuacgcgucccugcggagccucgucgccuccagcggcacgcuggaguucaacaacgaguccuucaacuggaccggggugacccagaacggcaccagcuccgccugcauccgccggagcaagaacuccuucuucagccgccugaacuggcucacgcaccugaacuucaaguaccccgcccugaacgugaccaugcccaacaacgagcaguucgacaagcucuacaucuggggcguccaccaccccgggaccgacaaggaccagaucuuccuguacgcgcaggccuccgggcggaucaccgugagcacgaagcgcagccagcagaccgccaucccgaacaucggcucccggccccgcgugcggaacauccccagccgcaucuccaucuacuggaccaucgucaagcccggcgacauccugcucaucaacagcaccgggaaccugaucgccccgcggggcuacuucaagauccgcuccgggaaguccuccaucaugcggagcgacgcccccaucggcaagugcaacuccgagugcaucacgcccaacggcagcauccccaacgacaagccguuccagaacgugaaccgcaucaccuacggggcgugcccccgguacgugaagcagaacacccugaagcucgccaccggcaugcgcaacguccccgagaagcagacgcgggggaucuucggcgccaucgccggguucaucgagaacggcugggagggcaugguggacgggugguacggcuuccgccaccagaacuccgaggggcggggccaggccgcggaccucaagagcacccaggccgccaucgaccagaucaacgggaagcugaaccgccugaucggcaagaccaacgagaaguuccaccagaucgagaaggaguucuccgagguggagggccggauccaggaccuggagaaguacgucgaggacaccaagaucgaccuguggagcuacaacgccgagcuccugguggcccuggagaaccagcacacgaucgaccucaccgacuccgagaugaacaagcuguucgagaagaccaagaagcagcugcgcgagaacgcggaggacauggggaacggcugcuucaagaucuaccacaagugcgacaacgccugcaucgggagcauccgcaacggcaccuacgaccacgacguguaccgggacgaggcccucaacaaccgcuuccagaucaagggggucgagcugaaguccggcuacaaggacuggauccuguggaucagcuucgccaucuccugcuuccuccugugcguggcccugcucggcuucaucaugugggcgugccagaaggggaacauccggugcaacaucugcaucuga

SEQ ID NO: 67632 - RNA, 1701 nt, Artificial Sequence; identical to SEQ ID NO: 67612
  derived and/or modified CDS sequence (opt1) from hemagglutinin__InfluenzaA__ACZ05458

SEQ ID NO: 67633 - RNA, 1701 nt, Artificial Sequence; identical to SEQ ID NO: 67612
  derived and/or modified CDS sequence (opt1) from hemagglutinin__InfluenzaA__ACZ05469

SEQ ID NO: 67634 - RNA, 1701 nt, Artificial Sequence; identical to SEQ ID NO: 67631
  derived and/or modified CDS sequence (opt1) from hemagglutinin__InfluenzaA__ACZ05480

SEQ ID NO: 67635 - RNA, 1701 nt, Artificial Sequence; identical to SEQ ID NO: 67435
  derived and/or modified CDS sequence (opt1) from hemagglutinin__InfluenzaA__ACZ05513

SEQ ID NO: 67636 - RNA, 1701 nt, Artificial Sequence; identical to SEQ ID NO: 67612
  derived and/or modified CDS sequence (opt1) from hemagglutinin__InfluenzaA__ACZ05524

SEQ ID NO: 67637 - RNA, 1701 nt, Artificial Sequence
  derived and/or modified CDS sequence (opt1) from hemagglutinin__InfluenzaA__ACZ05535
augaagaccaucaucgcccugagcuacauccucugccugguguucgcccagaagcugcccggcaacgacaacuccaccgcgacgcucugccuggggcaccacgccgucccgaacggcaccaucgugaagaccaucaccaacgaccagaucgaggugacgaacgccaccgagcugguccagagcuccagcaccggggagaucugcgacagcccccaccagauccucgacggcaagaacugcacccugaucgacgcccugcucggggacccccagugcgacggcuuccagaacaagaagugggaccuguucguggagcgcagcaaggccuacuccaacugcuaccccuacgacgugccggacuacgcgagccugcggucccucgucgccagcuccggcacgcuggaguucaacaacgagagcuucaacuggaccggggugacccagaacggcaccuccagcgccugcauccgccgguccaagaacagcuucuucucccgccugaacuggcucacgcaccugaacuucaaguaccccgcccugaacgugaccaugcccaacaacgagcaguucgacaagcucuacaucuggggcguccaccaccccgggaccgacaaggaccagaucuuccuguacgcgcaggccagcgggcggaucaccguguccacgaagcgcagccagcagaccgccaucccgaacaucggcagccggccccgcgugcggaacauccccucccgcaucagcaucuacuggaccaucgucaagcccggcgacauccugcucaucaacuccaccgggaaccugaucgccccgcggggcuacuucaagauccgcagcgggaaguccagcaucaugcgguccgacgcccccaucggcaagugcaacagcgagugcaucacgcccaacggcuccauccccaacgacaagccguuccagaacgugaaccgcaucaccuacggggcgugcccccgguacgugaagcagaacacccugaagcucgccaccggcaugcgcaacguccccgagaagcagacgcgggggaucuucggcgccaucgccggguucaucgagaacggcugggagggcaugguggacgggugguacggcuuccgccaccagaacagcgaggggcggggccaggccgcggaccugaaguccacccaggccgccaucgaccagaucaacgggaagcugaaccgccucaucggcaagaccaacgagaaguuccaccagaucgagaaggaguucagcgagguggagggccggauccaggaccuggagaaguacgucgaggacaccaagaucgaccugugguccuacaacgccgagcuccugguggcccuggagaaccagcacacgaucgaccucaccgacagcgagaugaacaagcuguucgagaagaccaagaagcagcugcgcgagaacgcggaggacauggggaacggcugcuucaagaucuaccacaagugcgacaacgccugcaucggguccauccgcaacggcaccuacgaccacgacguguaccgggacgaggcccucaacaaccgcuuccagaucaagggggucgagcugaaguccggcuacaaggacuggauccuguggaucuccuucgccaucagcugcuuccuccugugcguggcccugcucggcuucaucaugugggcgugccagaaggggaacauccggugcaacaucugcaucuga

SEQ ID NO: 67638 - RNA, 1701 nt, Artificial Sequence; identical to SEQ ID NO: 67637
  derived and/or modified CDS sequence (opt1) from hemagglutinin__InfluenzaA__ACZ05546

SEQ ID NO: 67639 - RNA, 1701 nt, Artificial Sequence; identical to SEQ ID NO: 67612
  derived and/or modified CDS sequence (opt1) from hemagglutinin__InfluenzaA__ACZ05557

SEQ ID NO: 67640 - RNA, 1698 nt, Artificial Sequence
  derived and/or modified CDS sequence (opt1) from hemagglutinin__InfluenzaA__ACZ05579
augaaggugaagcugcucguccugcugugcaccuucaccgccacguacgccgacaccaucugcaucggcuaccacgcgaacaacagcaccgacaccguggacacggugcucgagaagaacgucaccgugacccacuccgugaaccugcuggagaacagccacaacgggaagcucugccugcugaagggcaucgcgccccuccagcuggggaacugcuccgucgccggcuggauccuggggaacccggagugcgagcuccugaucagcaaggaguccuggagcuacaucguggagaagcccaaccccgagaacgggaccugcuaccccggccacuucgccgacuacgaggagcugcgcgagcagcucuccagcguguccagcuucgagcgguucgagaucuucccgaaggaguccagcuggcccaaccacacggucaccgggguguccgccagcugcucccacaacggcgagagcuccuucuaccgcaaccugcuguggcucaccgugaagaacgggcuguaccccaaccugagcaaguccuacgccaacaacaaggagaaggagguccucgugcuguggggcgugcaccacccgcccaacaucgucgaccagaagacccuguaccggacggagaacgccuacgugagcguggucagcucccacuacagccgcaaguucacccccgagaucgccaagcggcccaaggugcgcgaccaggaggggcggaucaacuacuacuggacccuccuggagcccggcgacaccaucaucuucgaggccaacggcaaccugaucgcgccgcgcuacgccuucgcccucucccggggguucggcagcgggaucaucaacuccaacgcccccauggacaagugcgacgccaagugccagacgccccgcggcgcgaucaacagcucccugcccuuccagaacgugcacccggucaccaucggcgagugccccaaguacgugcggagcgccaagcugcgcauggugaccgggcuccggaacauccccuccauccagagccgcggccuguucggggccaucgccggcuucaucgagggcggcuggaccggcauggucgacgggugguacggcuaccaccaccagaacgagcagggguccggcuacgccgcggaccagaaguccacgcagaacgccaucaacgggaucaccaacaaggugaacagcgucaucgagaagaugaacacccaguucaccgccgugggcaaggaguucaacaagcuggagcggcgcauggagaaccucaacaagaagguggacgacggcuucaucgacaucuggacguacaacgccgagcugcugguccuccuggagaacgagcggacccuggacuuccacgacagcaacgugaagaaccucuacgagaaggugaagucccagcugaagaacaacgccaaggagaucgggaacggcugcuucgaguucuaccacaagugcaacgacgagugcauggagagcgucaagaacgggaccuacgacuaccccaaguacuccgaggagagcaagcugaaccgcgagaagaucgacggcgugaagcucgaguccauggggguguaccagauccuggcgaucuacagcaccgucgccagcucccuggugcuccuggugagccugggcgccaucuccuucuggaugugcagcaacggcucccuccagugccggaucugcaucuga

SEQ ID NO: 67641 - RNA, 1698 nt, Artificial Sequence
  derived and/or modified CDS sequence (opt1) from hemagglutinin__InfluenzaA__ACZ05590
augaaggugaagcugcucguccugcugugcaccuucaccgccacguacgccgacaccaucugcaucggcuaccacgcgaacaacagcaccgacaccguggacacggugcucgagaagaacgucaccgugacccacuccgugaaccugcuggagaacagccacaacgggaagcucugccugcugaagggcaucgcgccccuccagcuggggaacugcuccgucgccggcuggauccuggggaacccggagugcgagcuccugaucagcaaggaguccuggagcuacaucguggagaagcccaaccccgagaacgggaccugcuaccccggccacuucgccgacuacgaggagcugcgcgagcagcucuccagcguguccagcuucgagcgguucgagaucuucccgaaggaguccagcuggcccaaccacacggucaccgggguguccgccagcugcucccacaacggcgagagcuccuucuaccgcaaccugcuguggcucaccgggaagaacggccuguaccccaaccugagcaaguccuacgccaacaacaaggagaaggaggugcucguccuguggggcgugcaccacccgcccagcaucagcgaccagaagacccuguaccacacggaggacgccuacguguccgucgugagcucccacuacagccggaaguucacccccgagaucgccaagcgccccaaggugcgggaccaggagggccgcaucaacuacuacuggacccuccuggagcccggcgacaccaucaucuucgaggccaacgggaaccugaucgcgccgcgguacgccuucgcccucucccgcggcuucgggagcggcaucaucaacuccaacgcccccaugggcaagugcgacgccaagugccagacgccccagggggcgaucaacagcucccugcccuuccagaacguccacccggugaccaucggcgagugccccaaguacgugcggagcgccaagcugcgcauggucaccgggcuccggaacauccccuccauccagagccgcggccuguucggggccaucgccggcuucaucgagggcggguggaccggcaugguggacgggugguacggcuaccaccaccagaacgagcagggguccggcuacgccgcggaccagaaguccacgcagaacgccaucaacggcaucaccaacaaggugaacagcgucaucgagaagaugaacacccaguucaccgccguggggaaggaguucaacaagcuggagcggcgcauggagaaccucaacaagaaggucgacgacggcuucaucgacaucuggacguacaacgccgagcugcuggugcuccuggagaacgagcggacccuggacuuccacgacagcaacgugaagaaccucuacgagaaggucaagucccagcugaagaacaacgccaaggagaucgggaacggcugcuucgaguucuaccacaagugcaacgacgagugcauggagagcgugaagaacgggaccuacgacuaccccaaguacuccgaggagagcaagcugaaccgcgagaagaucgacggcgugaagcucgagagcaugggcgucuaccagauccuggcgaucuacuccaccguggccagcucccuggugcuccuggucagccugggggccaucuccuucuggaugugcagcaacggcucccuccagugccggaucugcaucuga

SEQ ID NO: 67642 - RNA, 1701 nt, Artificial Sequence; identical to SEQ ID NO: 67637
  derived and/or modified CDS sequence (opt1) from hemagglutinin__InfluenzaA__ACZ05950

SEQ ID NO: 67643 - RNA, 1701 nt, Artificial Sequence; identical to SEQ ID NO: 67612
  derived and/or modified CDS sequence (opt1) from hemagglutinin__InfluenzaA__ACZ05961

SEQ ID NO: 67644 - RNA, 1701 nt, Artificial Sequence
  derived and/or modified CDS sequence (opt1) from hemagglutinin__InfluenzaA__ACZ05972
augaagaccaucaucgcccugagcuacauccucugccugguguucgcccagaagcugcccggcaacgacaacuccaccgcgacgcucugccuggggcaccacgccgucccgaacggcaccaucgugaagaccaucaccaacgaccagaucgaggugacgaacgccaccgagcugguccagagcuccagcaccggggagaucugcgacagcccccaccagauccucgacggcaagaacugcacccugaucgacgcccugcucggggacccccagugcgacggcuuccagaacaagaagugggaccuguucguggagcgcagcaaggccuacuccaacugcuaccccuacgacgugccggacuacgcgagccugcggucccucgucgccagcuccggcacgcuggaguucaacaacgagagcuucaacuggaccggggugacccagaacggcaccuccagcgccugcauccgccgguccaagaacagcuucuucucccgccugaacuggcucacgcaccugaacuucaaguaccccgcccugaacgugaccaugcccaacaacgagcaguucgacaagcucuacaucuggggcguccaccaccccgggaccgacaaggaccagaucuuccuguacgcgcaggccagcgggcggaucaccguguccacgaagcgcagccagcagaccgccaucccgaacaucggcagccggccccgcgugcggaacauccccucccgcaucagcaucuacuggaccaucgucaagcccggcgacauccugcucaucaacuccaccgggaaccugaucgccccgcggggcuacuucaagauccgcagcgggaaguccagcaucaugcgguccgacgcccccaucggcaagugcaacagcgagugcaucacgcccaacggcuccauccccaacgacaagccguuccagaacgugaaccgcaucaccuacggggcgugcccccgguacgugaagcagaacacccugaagcucgccaccggcaugcgcaacguccccgagaagcagacgcgggggaucuucggcgccaucgccggguucaucgagaacggcugggagggcaugguggacgggugguacggcuuccgccaccagaacagcgaggggcggggccaggccgcggaccugaaguccacccaggccgccaucgaccagaucaacgggaagcugaaccgccucaucggcaagaccaacgagaaguuccaccagaucgagaaggaguucagcgagguggagggccggauccaggaccuggagaaguacgucgaggacaccaagaucgaccugugguccuacaacgccgagcuccugguggcccuggagaaccagcacacgaucgaccucaccgacagcgagaugaacaagcuguucgagaagaccaagaagcagcugcgcgagaacgcggaggacauggggaacggcugcuucaagaucuaccacaagugcgacaacgccugcaucggguccauccgcaacggcaccuacgaccacgacguguaccgggacgaggcccucaacaaccgcuuccagaucaagggggucgagcugaaguccggcuacaaggacuggauccuguggaucuccuucgccaucagcugcucccuccugugcguggcccugcucggcuucaucaugugggcgugccagaaggggaacauccggugcaacaucugcaucuga

SEQ ID NO: 67645 - RNA, 1701 nt, Artificial Sequence
  derived and/or modified CDS sequence (opt1) from hemagglutinin__InfluenzaA__ACZ05983
augaagaccaucaucgcccugagcuacauccucugccugguguucgcccagaagcugcccggcaacgacaacuccaccgcgacgcucugccuggggcaccacgccgucccgaacggcaccaucgugaagaccaucaccaacgaccagaucgaggugacgaacgccaccgagcugguccagagcuccagcaccggggagaucugcgacagcccccaccagauccucgacggcaagaacugcacccugaucgacgcccugcucggggacccccagugcgacggcuuccagaacaagaagugggaccuguucguggagcgcagcaaggccuacuccaacugcuaccccuacgacgugccggacuacgcgagccugcggucccucgucgccagcuccggcacgcuggaguucaacaacgagagcuucaacuggaccggggugacccagaacggcaccuccagcgccugcauccgccgguccaagaacagcuucuucucccgccugaacuggcucacgcaccugaacuucaaguaccccgcccugaacgugaccaugcccaacaacgagcaguucgacaagcucuacaucuggggcguccaccaccccgggaccgacaaggaccagaucuuccuguacgcgcaggccagcgggcggaucaccguguccacgaagcgcagccagcagaccgccaucccgaacaucggcagccggccccgcgugcggaacauccccucccgcaucagcaucuacuggaccaucgucaagcccggcgacauccugcucaucaacuccaccgggaaccugaucgccccgcggggcuacuucaagauccgcagcgggaaguccagcaucaugcgguccgacgcccccaucggcaagugcaacagcgagugcaucacgcccaacggcuccauccccaacgacaagccguuccagaacgugaaccgcaacaccuacggggcgugcccccgguacgugaagcagaacacccugaagcucgccaccggcaugcgcaacguccccgagaagcagacgcgggggaucuucggcgccaucgccggguucaucgagaacggcugggagggcaugguggacgggugguacggcuuccgccaccagaacagcgaggggcggggccaggccgcggaccugaaguccacccaggccgccaucgaccagaucaacgggaagcugaaccgccucaucggcaagaccaacgagaaguuccaccagaucgagaaggaguucagcgagguggagggccggauccaggaccuggagaaguacgucgaggacaccaagaucgaccugugguccuacaacgccgagcuccugguggcccuggagaaccagcacacgaucgaccucaccgacagcgagaugaacaagcuguucgagaagaccaagaagcagcugcgcgagaacgcggaggacauggggaacggcugcuucaagaucuaccacaagugcgacaacgccugcaucggguccauccgcaacggcaccuacgaccacgacguguaccgggacgaggcccucaacaaccgcuuccagaucaagggggucgagcugaaguccggcuacaaggacuggauccuguggaucuccuucgccaucagcugcuuccuccugugcguggcccugcucggcuucaucaugugggcgugccagaaggggaacauccggugcaacaucugcaucuga

SEQ ID NO: 67646 - RNA, 1701 nt, Artificial Sequence
  derived and/or modified CDS sequence (opt1) from hemagglutinin__InfluenzaA__ACZ05994
augaagaccaucaucgcccugagcuacauccucugccugguguucgcccagaagcugcccggcaacgacaacuccaccgcgacgcucugccuggggcaccacgccgucccgaacggcaccaucgugaagaccaucaccaacgaccagaucgaggugacgaacgccaccgagcugguccagagcuccagcaccggggagaucugcgacagcccccaccagauccucgacggcaagaacugcacccugaucgacgcccugcucggggacccccagugcgacggcuuccagaacaagaagugggaccuguucguggagcgcagcaaggccuacuccaacugcuaccccuacgacgugccggacuacgcgagccugcggucccucgucgccagcuccggcacgcuggaguucaacaacgagagcuucaacuggaccggggugacccagaacggcaccuccagcgccugcauccgccgguccaagaacagcuucuucucccgccugaacuggcucacgcaccugaacuucaaguaccccgcccugaacgugaccguccccaacaacgagcaguucgacaagcucuacaucuggggcgugcaccaccccgggaccgacaaggaccagaucuuccuguacgcgcaggccagcgggcggaucaccguguccacgaagcgcagccagcagaccgccaucccgaacaucggcagccggccccgcguccggaacauccccucccgcaucagcaucuacuggaccaucgugaagcccggcgacauccugcucaucaacuccaccgggaaccugaucgccccgcggggcuacuucaagauccgcagcgggaaguccagcaucaugcgguccgacgcccccaucggcaagugcaacagcgagugcaucacgcccaacggcuccauccccaacgacaagccguuccagaacgugaaccgcaucaccuacggggcgugcccccgguacgucaagcagaacacccugaagcucgccaccggcaugcgcaacgugcccgagaagcagacgcgggggaucuucggcgccaucgccggguucaucgagaacggcugggagggcaugguggacgggugguacggcuuccgccaccagaacagcgaggggcggggccaggccgcggaccugaaguccacccaggccgccaucgaccagaucaacgggaagcugaaccgccucaucggcaagaccaacgagaaguuccaccagaucgagaaggaguucagcgaggucgagggccggauccaggaccuggagaaguacguggaggacaccaagaucgaccugugguccuacaacgccgagcuccugguggcccuggagaaccagcacacgaucgaccucaccgacagcgagaugaacaagcuguucgagaagaccaagaagcagcugcgcgagaacgcggaggacauggggaacggcugcuucaagaucuaccacaagugcgacaacgccugcaucggguccauccgcaacggcaccuacgaccacgacgucuaccgggacgaggcccucaacaaccgcuuccagaucaaggggguggagcugaaguccggcuacaaggacuggauccuguggaucuccuucgccaucagcugcuuccuccugugcguggcccugcucggcuucaucaugugggcgugccagaaggggaacauccggugcaacaucugcaucuga

SEQ ID NO: 67647 - RNA, 1701 nt, Artificial Sequence; identical to SEQ ID NO: 67612
  derived and/or modified CDS sequence (opt1) from hemagglutinin__InfluenzaA__ACZ06005

SEQ ID NO: 67648 - RNA, 1701 nt, Artificial Sequence; identical to SEQ ID NO: 67612
  derived and/or modified CDS sequence (opt1) from hemagglutinin__InfluenzaA__ACZ06016

SEQ ID NO: 67649 - RNA, 1698 nt, Artificial Sequence
  derived and/or modified CDS sequence (opt1) from hemagglutinin__InfluenzaA__ACZ16013
augaaggugaagcugcucguccugcugugcaccuucaccgccacguacgccgacaccaucugcaucggcuaccacgcgaacaacagcaccgacaccguggacacggugcucgagaagaacgucaccgugacccacuccgugaaccugcuggagaacagccacaacgggaagcucugccugcugaagggcaucgcgccccuccagcuggggaacugcuccgucgccggcuggauccuggggaacccggagugcgagcuccugaucagcaaggaguccuggagcuacaucguggagaagcccaaccccgagaacgggaccugcuaccccggccacuucgccgacuacgaggagcugcgcgagcagcucuccagcguguccagcuucgagcgguucgagaucuucccgaaggaguccagcuggcccaaccacacggucaccgggguguccgccagcugcucccacaacggcgagaacagcuucuaccgcaaccugcuguggcucaccgggaagaacggccuguaccccaaccuguccaagagcuacgccaacaacaaggagaaggaggugcucguccuguggggcgugcaccacccgcccaacaucgccgaccagaagacccuguaccacacggagaaggccuacguguccgucgugagcagccacuacucccggaaguucacccccgagaucgccaagcgccccaaggugcgggaccaggagggccgcaucaacuacuacuggacccuccuggagcccggcgacaccaucaucuucgaggcgaacgggaaccugaucgccccgcgguacgccuucgcccucagccgcggcuucggguccggcaucaucaacagcaacgcccccauggacaagugcgacgcgaagugccagacgccccagggcgccaucaacuccagccugcccuuccagaacguccacccggugaccaucggggagugccccaaguacgugcgguccgccaagcugcgcauggucaccggccuccggaacauccccagcauccagucccgcgggcuguucggcgccaucgccggguucaucgagggcggcuggaccgggaugguggacggcugguacggguaccaccaccagaacgagcagggcagcggguacgcggccgaccagaaguccacgcagaacgccaucaacggcaucaccaacaaggugaacagcgucaucgagaagaugaacacccaguucaccgccgugggcaaggaguucaacaagcuggagcggcgcauggagaaccucaacaagaaggucgacgacggguucaucgacaucuggacguacaacgccgagcugcuggugcuccuggagaacgagcggacccuggacuuccacgacuccaacgugaagaaccucuacgagaaggucaagagccagcugaagaacaacgcgaaggagaucggcaacgggugcuucgaguucuaccacaagugcaacgacgagugcauggaguccgugaagaacggcaccuacgacuaccccaaguacagcgaggaguccaagcugaaccgcgagaagaucgacggggugaagcucgagagcaugggcgucuaccagauccuggccaucuacuccaccguggccagcagccuggugcuccuggucucccugggcgccaucagcuucuggaugugcuccaacgggagccuccagugccggaucugcaucuga

SEQ ID NO: 67650 - RNA, 1698 nt, Artificial Sequence
  derived and/or modified CDS sequence (opt1) from hemagglutinin__InfluenzaA__ACZ16023
augaaggugaagcugcucguccugcugugcaccuucaccgccacguacgccgacaccaucugcaucggcuaccacgcgaacaacagcaccgacaccguggacacggugcucgagaagaacgucaccgugacccacuccgugaaccugcuggagaacagccacaacgggaagcucugccugcugaagggcaucgcgccccuccagcuggggaacugcuccgucgccggcuggauccuggggaacccggagugcgagcuccugaucagcaaggaguccuggagcuacaucguggagaagcccaaccccgagaacgggaccugcuaccccggccacuucgccgacuacgaggagcugcgcgagcagcucuccagcguguccagcuucgagcgguucgagaucuucccgaaggaguccagcuggcccaaccacacggucaccgggguguccgccagcugcucccacaacggcgagaacagcuucuaccgcaaccugcuguggcucaccgggaagaacggccuguaccccaaccuguccaagagcuacgccaacaacaaggagaaggaggugcucguccuguggggcgugcaccacccgcccaacaucgccgaccagaagacccuguaccacacggagaacgccuacguguccgucgugagcagccacuacucccggaaguucacccccgagaucgccaagcgccccaaggugcgggaccaggagggccgcaucaacuacuacuggacccuccuggagcccggcgacaccaucaucuucgaggcgaacgggaaccugaucgccccgcgguacgccuucgcccucagccgcggcuucggguccggcaucaucaacagcaacgcccccauggacaagugcgacgcgaagugccagacgccccagggcgccaucaacuccagccugcccuuccagaacguccacccggugaccaucggggagugccccaaguacgugcgguccgccaagcugcgcauggucaccggccuccggaacauccccagcauccagucccgcgggcuguucggcgccaucgccggguucaucgagggcggcuggaccgggaugguggacggcugguacggguaccaccaccagaacgagcagggcagcggguacgcggccgaccagaaguccacgcagaacgccaucaacggcaucaccaacaaggugaacagcgucaucgagaagaugaacacccaguucaccgccgugggcaaggaguucaacaagcuggagcggcgcauggagaaccucaacaagaaggucgacgacggguucaucgacaucuggacguacaacgccgagcugcuggugcuccuggagaacgagcggacccuggacuuccacgacuccaacgugaagaaccucuacgagaaggucaagagccagcugaagaacaacgcgaaggagaucggcaacgggugcuucgaguucuaccacaagugcaacgacgagugcauggaguccgugaagaacggcaccuacgacuaccccaaguacagcgaggaguccaagcugaaccgcgagaagaucgacggggugaagcucgagagcaugggcgucuaccagauccuggccaucuacuccaccguggccagcagccuggugcuccuggucucccugggcgccaucagcuucuggaugugcuccaacgggagccuccagugccggaucugcaucuga

SEQ ID NO: 67651 - RNA, 1698 nt, Artificial Sequence
  derived and/or modified CDS sequence (opt1) from hemagglutinin__InfluenzaA__ACZ16033
augaaggugaagcugcucguccugcugugcaccuucaccgccacguacgccgacaccaucugcaucggcuaccacgcgaacaacagcaccgacaccguggacacggugcucgagaagaacgucaccgugacccacuccgugaaccugcuggagaacagccacaacgggaagcucugccugcugaagggcaucgcgccccuccagcuggggaacugcuccgucgccggcuggauccuggggaacccggagugcgagcuccugaucagcaaggaguccuggagcuacaucguggagaagcccaaccccgagaacgggaccugcuaccccggccacuucgccgacuacgaggagcugcgcgagcagcucuccagcguguccagcuucgagcgguucgagaucuucccgaaggaguccagcuggcccaaccacacggucaccggggccuccgccagcugcucccacaacggcgagaacagcuucuaccgcaaccugcuguggcucaccgggaagaacggccuguaccccaaccuguccaagagcuacgccaacaacaaggagaaggaggugcucgugcuguggggcguccaccacccgcccaacaucgccgaccagaagacccuguaccacacggagaacgccuacguguccguggucagcagccacuacucccggaaguucacccccgagaucgcgaagcgccccaaggugcgggaccaggagggccgcaucaacuacuacuggacccuccuggagcccggcgacaccaucaucuucgaggccaacgggaaccugaucgccccgcgguacgccuucgcccucagccgcggcuucggguccggcaucaucaacagcaacgcgcccauggacaagugcgacgccaagugccagacgccccagggcgccaucaacuccagccugcccuuccagaacauccacccggugaccaucggggagugccccaaguacguccgguccgccaagcugcgcauggugaccggccuccggaacauccccagcauccagucccgcgggcuguucggcgccaucgcgggguucaucgagggcggcuggaccgggaugguggacggcugguacggguaccaccaccagaacgagcagggcagcggguacgccgccgaccagaaguccacgcagaacgccaucaacggcaucaccaacaaggucaacagcgugaucgagaagaugaacacccaguucaccgccgugggcaaggaguucaacaagcuggagcggcgcauggagaaccucaacaagaaggucgacgacggguucaucgacaucuggacguacaacgcggagcugcuggugcuccuggagaacgagcggacccuggacuuccacgacuccaacgucaagaaccucuacgagaaggucaagagccagcugaagaacaacgccaaggagaucggcaacgggugcuucgaguucuaccacaagugcaacgacgagugcauggaguccgugaagaacggcaccuacgacuaccccaaguacagcgaggaguccaagcugaacaaggagaagaucgacggggugaagcucgagagcaugggcguguaccagauccuggccaucuacuccaccguggccagcagccugguccuccuggugucccugggcgccaucagcuucuggaugugcuccaacgggagccuccagugccgcaucugcaucuga

SEQ ID NO: 67652 - RNA, 1701 nt, Artificial Sequence; identical to SEQ ID NO: 66680
  derived and/or modified CDS sequence (opt1) from hemagglutinin__InfluenzaA__ACZ16040

SEQ ID NO: 67653 - RNA, 1701 nt, Artificial Sequence; identical to SEQ ID NO: 66680
  derived and/or modified CDS sequence (opt1) from hemagglutinin__InfluenzaA__ACZ16050

SEQ ID NO: 67654 - RNA, 1701 nt, Artificial Sequence; identical to SEQ ID NO: 66680
  derived and/or modified CDS sequence (opt1) from hemagglutinin__InfluenzaA__ACZ16060

SEQ ID NO: 67655 - RNA, 1701 nt, Artificial Sequence
  derived and/or modified CDS sequence (opt1) from hemagglutinin__InfluenzaA__ACZ16070
augaaggccauccuggugguccuccuguacaccuucgccaccgcgaacgccgacacgcugugcaucggcuaccacgccaacaacagcaccgacaccguggacaccgugcucgagaagaacgucacggugacccacuccgugagccugcuggaggacaagcacaacgggaagcucugcaagcugcgcggcgucgcgccccugcaccucgggaagugcaacaucgccggcuggauccuggggaacccggagugcgagucccugagcaccgcguccagcugguccuacaucguggagaccagcuccagcgacaacggcacgugcuaccccggcgacuucaucgacuacgaggagcuccgggagcagcuguccagcguguccagcuucgagcgcuucgagaucuuccccaagaccuccagcuggcccaaccacgacuccaacaagggggucaccgccgccugcccgcacgccggcgccaagagcuucuacaagaaccugaucuggcucgugaagaaggggaacuccuaccccaagcugagcaagagcuacaucaacgacaagggcaaggaggugcugguccucugggggauccaccaccccuccaccagcgccgaccagcagucccuguaccagaacgccgacgccuacguguucgugggcagcucccgguacagcaagaaguucaagcccgagaucgccauccgcccgaagguccgggaccaggagggccgcaugaacuacuacuggacgcugguggagcccggggacaagaucaccuucgaggcgaccggcaaccucguggucccccgguacgccuucgccauggagcgcaacgccggguccggcaucaucaucagcgacacccccgugcacgacugcaacacgaccugccagaccccgaagggcgccaucaacaccucccugcccuuccagaacauccaccccaucacgaucgggaagugccccaaguacgucaagagcaccaagcugcggcucgcgaccggccugcgcaacgugccguccauccagagccgggggcuguucggcgccaucgccggguucaucgagggcggcuggaccgggaugguggacggcugguacggguaccaccaccagaacgagcagggcuccggguacgccgccgaccucaagagcacgcagaacgcgaucgacgagaucaccaacaaggugaacuccgucaucgagaagaugaacacccaguucaccgccgugggcaaggaguucaaccaccuggagaagcgcaucgagaaccugaacaagaaggucgacgacggcuuccucgacaucuggacguacaacgccgagcugcuggugcuccuggagaacgagcggacccuggacuaccacgacagcaacgugaagaaccucuacgagaagguccgcucccagcugaagaacaacgccaaggagaucgggaacggcugcuucgaguucuaccacaagugcgacaacacgugcauggagagcgugaagaacgggaccuacgacuaccccaaguacuccgaggaggccaagcugaaccgggaggagaucgacggcgugaagcucgagagcacccgcaucuaccagauccuggcgaucuacagcaccgucgccuccagccuggugcucguggucucccugggggccaucagcuucuggaugugcuccaacggcagccugcagugccggaucugcaucuga

SEQ ID NO: 67656 - RNA, 1701 nt, Artificial Sequence
  derived and/or modified CDS sequence (opt1) from hemagglutinin__InfluenzaA__ACZ16080
augaaggccauccuggugguccuccuguacaccuucgccaccgcgaacgccgacacgcugugcaucggcuaccacgccaacaacagcaccgacaccguggacaccgugcucgagaagaacgucacggugacccacuccgugaaccugcuggaggacaagcacaacgggaagcucugcaagcugcgcggcgucgcgccccugcaccucgggaagugcaacaucgccggcuggauccuggggaacccggagugcgagagccuguccaccgccagcuccuggagcuacaucguggagaccuccagcuccgacaacggcacgugcuaccccggcgacuucaucgacuacgaggagcuccgggagcagcugagcuccgugagcuccuucgagcgcuucgagaucuuccccaagaccagcuccuggcccaaccacgacagcaacaagggggucaccgccgccugcccgcacgccggcgcgaaguccuucuacaagaaccugaucuggcucgugaagaaggggaacagcuaccccaagcuguccaagagcuacaucaacgacaagggcaaggaggugcugguccucugggggauccaccaccccagcaccuccgccgaccagcagagccuguaccagaacgccgacgccuacguguucgugggcuccagccgguacuccaagaaguucaagcccgagaucgccauccgcccgaagguccgggaccaggagggccgcaugaacuacuacuggacgcugguggagcccggggacaagaucaccuucgaggcgaccggcaaccucguggucccccgguacgccuucgccauggagcgcaacgacgggagcggcaucaucaucuccgacacccccgugcacgacugcaacacgaccugccagaccccgaagggcgccaucaacaccagccugcccuuccagaacauccaccccaucacgaucgggaagugccccaaguacgugaaguccaccaagcugcggcucgccaccggccugcgcaacgucccgagcauccagucccgggggcuguucggcgcgaucgccggguucaucgagggcggcuggaccgggaugguggacggcugguacggguaccaccaccagaacgagcagggcagcggguacgccgccgaccucaaguccacgcagaacgccaucgacgagaucaccaacaaggugaacagcgucaucgagaagaugaacacccaguucaccgcggugggcaaggaguucaaccaccuggagaagcgcaucgagaaccugaacaagaaggucgacgacggcuuccucgacaucuggacguacaacgccgagcugcuggugcuccuggagaacgagcggacccuggacuaccacgacuccaacgugaagaaccucuacgagaagguccgcagccagcugaagaacaacgccaaggagaucgggaacggcugcuucgaguucuaccacaagugcgacaacacgugcauggaguccgugaagaacgggaccuacgacuaccccaaguacagcgaggaggccaagcugaaccgggaggagaucgacggcgugaagcucgaguccacccgcaucuaccagauccuggccaucuacagcaccgucgcgagcucccuggugcucguggucagccugggggccaucuccuucuggaugugcagcaacggcucccugcagugccggaucugcaucuga

SEQ ID NO: 67657 - RNA, 1701 nt, Artificial Sequence
  derived and/or modified CDS sequence (opt1) from hemagglutinin__InfluenzaA__ACZ16090
augaaggccauccugcucgugcugcuguacaccuucgccaccgcgaacgccgacacgcucugcaucggcuaccacgccaacaacagcaccgacaccgucgacaccgugcuggagaagaacgugacggucacccacuccgugaaccugcucgaggacaagcacaacgggaagcugugcaagcugcgcggcguggcgccccuccaccuggggaagugcaacaucgccggcuggauccuggggaacccggagugcgagagccucuccaccgccagcuccuggagcuacaucgucgagaccuccagcuccgacaacggcacgugcuaccccggcgacuucaucgacuacgaggagcugcgggagcagcugagcuccaugagcuccuucgagcgcuucgagaucuuccccaagaccagcuccuggcccaaccacgacagcaacaagggggugaccgccgccugcccgcacgccggcgcgaaguccuucuacaagaaccucaucuggcuggugaagaaggggaacagcuaccccaagcuguccaagagcuacaucaacgacaagggcaaggagguccucgugcugugggggauccaccaccccagcaccuccgccgaccagcagagccuguaccagaacgccgacgccuacguguucgucggcuccagccgguacuccaagaaguucaagcccgagaucgccauccgcccgaaggugcgggaccaggagggccgcaugaacuacuacuggacgcucguggagcccggggacaagaucaccuucgaggcgaccggcaaccuggucgugccccgguacgccuucgccauggagcgcaacgccgggagcggcaucaucaucuccgacacccccgugcacgacugcaacacgaccugccagaccccgaagggcgccaucaacaccagccugcccuuccagaacauccaccccaucacgaucgggaagugccccaaguacgucaaguccaccaagcuccggcuggcgaccggccugcgcaacgugccgagcauccagucccggggccucuucggggccaucgccggguucaucgagggcggcuggaccgggaugguggacggcugguacggguaccaccaccagaacgagcagggcagcggguacgccgccgaccugaaguccacgcagaacgcgaucgacgagaucaccaacaaggucaacagcgugaucgagaagaugaacacccaguucaccgccgugggcaaggaguucaaccaccuggagaagcgcaucgagaaccucaacaagaaggucgacgacggcuuccuggacaucuggacguacaacgccgagcugcucgugcugcuggagaacgagcggacccucgacuaccacgacuccaacgucaagaaccuguacgagaaggugcgcagccagcugaagaacaacgccaaggagaucgggaacggcugcuucgaguucuaccacaagugcgacaacacgugcauggaguccgugaagaacgggaccuacgacuaccccaaguacagcgaggaggccaagcucaaccgggaggagaucgacggcgucaagcuggaguccacccgcaucuaccagauccuggcgaucuacagcaccguggccagcucccucgugcuggucgugagccugggggccaucuccuucuggaugugcagcaacggcucccuccagugccggaucugcaucuga

SEQ ID NO: 67658 - RNA, 1701 nt, Artificial Sequence; identical to SEQ ID NO: 66680
  derived and/or modified CDS sequence (opt1) from hemagglutinin__InfluenzaA__ACZ16100

SEQ ID NO: 67659 - RNA, 1701 nt, Artificial Sequence; identical to SEQ ID NO: 66680
  derived and/or modified CDS sequence (opt1) from hemagglutinin__InfluenzaA__ACZ16110

SEQ ID NO: 67660 - RNA, 1701 nt, Artificial Sequence; identical to SEQ ID NO: 66680
  derived and/or modified CDS sequence (opt1) from hemagglutinin__InfluenzaA__ACZ16120

SEQ ID NO: 67661 - RNA, 1701 nt, Artificial Sequence; identical to SEQ ID NO: 67428
  derived and/or modified CDS sequence (opt1) from hemagglutinin__InfluenzaA__ACZ16130

SEQ ID NO: 67662 - RNA, 1701 nt, Artificial Sequence; identical to SEQ ID NO: 66680
  derived and/or modified CDS sequence (opt1) from hemagglutinin__InfluenzaA__ACZ16140

SEQ ID NO: 67663 - RNA, 1701 nt, Artificial Sequence; identical to SEQ ID NO: 66680
  derived and/or modified CDS sequence (opt1) from hemagglutinin__InfluenzaA__ACZ16150

SEQ ID NO: 67664 - RNA, 1701 nt, Artificial Sequence; identical to SEQ ID NO: 66680
  derived and/or modified CDS sequence (opt1) from hemagglutinin__InfluenzaA__ACZ16160

SEQ ID NO: 67665 - RNA, 1701 nt, Artificial Sequence; identical to SEQ ID NO: 66873
  derived and/or modified CDS sequence (opt1) from hemagglutinin__InfluenzaA__ACZ16170

SEQ ID NO: 67666 - RNA, 1701 nt, Artificial Sequence
  derived and/or modified CDS sequence (opt1) from hemagglutinin__InfluenzaA__ACZ16180
augaaggccauccuggugguccuccuguacaccuucgccaccgcgaacgccgacacgcugugcaucggcuaccacgccaacaacagcaccgacaccguggacaccgugcucgagaagaacgucacggugacccacuccgugaaccugcuggaggacaagcacaacgggaagcucugcaagcugcgcggcgucgcgccccugcaccucgggaagugcaacaucgccggcuggauccuggggaacccggagugcgagagccuguacaccgcguccagcugguccuacaucguggagaccagcuccagcgacaacggcacgugcuaccccggcgacuucaucgacuacgaggagcuccgggagcagcuguccagcguguccagcuucgagcgcuucgagaucuuccccaagaccuccagcuggcccaaccacgacuccaacaagggggucaccgccgccugcccgcacgccggcgccaagagcuucuacaagaaccugaucuggcucgugaagaaggggaacuccuaccccaagcugagcaaguccuacaucaacgacaagggcaaggaggugcugguccucugggggauccaccaccccagcaccagcgccgaccagcagucccuguaccagaacgccgacgccuacguguucgugggcagcucccgguacagcaagaaguucaagcccgagaucgccauccgcccgaagguccgggaccaggagggccgcaugaacuacuacuggacgcugguggagcccggggacaagaucaccuucgaggcgaccggcaaccucguggucccccgguacgccuucgccauggagcgcaacgccggguccggcaucaucaucagcgacacccccgugcacgacugcaacacgaccugccagaccccgaagggcgccaucaacaccucccugcccuuccagaacauccaccccaucacgaucgggaagugccccaaguacgucaagagcaccaagcugcggcucgcgaccggccugcgcaacgugccguccauccagagccgggggcuguucggcgccaucgccggguucaucgagggcggcuggaccgggaugguggacggcugguacggguaccaccaccagaacgagcagggcuccggguacgccgccgaccucaagagcacgcagaacgcgaucgacgagaucaccaacaaggugaacuccgucaucgagaagaugaacacccaguucaccgccgugggcaaggaguucaaccaccuggagaagcgcaucgagaaccugaacaagaaggucgacgacggcuuccucgacaucuggacguacaacgccgagcugcuggugcuccuggagaacgagcggacccuggacuaccacgacagcaacgugaagaaccucuacgagaagguccgcucccagcugaagaacaacgccaaggagaucgggaacggcugcuucgaguucuaccacaagugcgacaacacgugcauggagagcgugaagaacgggaccuacgacuaccccaaguacuccgaggaggccaagcugaaccgggaggagaucgacggcgugaagcucgagagcacccgcaucuaccagauccuggcgaucuacuccaccgucgccagcagccuggugcucguggucucccugggggccaucagcuucuggaugugcuccaacggcagccugcagugccggaucugcaucuga

SEQ ID NO: 67667 - RNA, 1701 nt, Artificial Sequence; identical to SEQ ID NO: 66680
  derived and/or modified CDS sequence (opt1) from hemagglutinin__InfluenzaA__ACZ16190

SEQ ID NO: 67668 - RNA, 1701 nt, Artificial Sequence
  derived and/or modified CDS sequence (opt1) from hemagglutinin__InfluenzaA__ACZ16200
augaaggccauccuggugguccuccuguacaccuucgccaccgcgaaccccgacacgcugugcaucggcuaccacgccaacaacagcaccgacaccguggacaccgugcucgagaagaacgucacggugacccacuccgugaaccugcuggaggacaagcacaacgggaagcucugcaagcugcgcggcgucgccccgcugcaccucgggaagugcaacaucgccggcuggauccuggggaaccccgagugcgagagccuguccaccgccagcuccuggagcuacaucguggagaccuccagcuccgacaacggcacgugcuaccccggcgacuucaucgacuacgaggagcuccgggagcagcugagcuccgugagcuccuucgagcgcuucgagaucuuccccaagaccagcuccuggccgaaccacgacagcaacaagggggucaccgcggccugcccccacgccggcgccaaguccuucuacaagaaccugaucuggcucgugaagaaggggaacagcuaccccaagcuguccaagagcuacaucaacgacaagggcaaggaggugcugguccucugggggauccaccaccccagcaccuccgcggaccagcagagccuguaccagaacgccgacgccuacguguucgugggcuccagccgguacuccaagaaguucaagccggagaucgccauccgccccaagguccgggaccaggagggccgcaugaacuacuacuggacgcugguggagcccggggacaagaucaccuucgaggccaccggcaaccucguggucccccgguacgcguucgccauggagcgcaacgccgggagcggcaucaucaucuccgacaccccggugcacgacugcaacacgaccugccagacccccaagggcgccaucaacaccagccugcccuuccagaacauccaccccaucacgaucgggaagugcccgaaguacgugaaguccaccaagcugcggcucgccaccggccugcgcaacguccccagcauccagucccgggggcuguucggcgcgaucgccggguucaucgagggcggcuggaccgggaugguggacggcugguacggguaccaccaccagaacgagcagggcagcggguacgccgccgaccucaaguccacgcagaacgccaucgacgagaucaccaacaaggugaacagcgucaucgagaagaugaacacccaguucaccgcggugggcaaggaguucaaccaccuggagaagcgcaucgagaaccugaacaagaaggucgacgacggcuuccucgacaucuggacguacaacgccgagcugcuggugcuccuggagaacgagcggacccuggacuaccacgacuccaacgugaagaaccucuacgagaagguccgcagccagcugaagaacaacgccaaggagaucgggaacggcugcuucgaguucuaccacaagugcgacaacacgugcauggaguccgugaagaacgggaccuacgacuaccccaaguacagcgaggaggccaagcugaaccgggaggagaucgacggcgugaagcucgaguccacccgcaucuaccagauccuggccaucuacagcaccgucgcgagcucccuggugcucguggucagccugggggccaucuccuucuggaugugcagcaacggcucccugcagugccggaucugcaucuga

SEQ ID NO: 67669 - RNA, 1701 nt, Artificial Sequence; identical to SEQ ID NO: 66680
  derived and/or modified CDS sequence (opt1) from hemagglutinin__InfluenzaA__ACZ16210

SEQ ID NO: 67670 - RNA, 1701 nt, Artificial Sequence; identical to SEQ ID NO: 66680
  derived and/or modified CDS sequence (opt1) from hemagglutinin__InfluenzaA__ACZ16220

SEQ ID NO: 67671 - RNA, 1701 nt, Artificial Sequence; identical to SEQ ID NO: 67428
  derived and/or modified CDS sequence (opt1) from hemagglutinin__InfluenzaA__ACZ16230

SEQ ID NO: 67672 - RNA, 1701 nt, Artificial Sequence
  derived and/or modified CDS sequence (opt1) from hemagglutinin__InfluenzaA__ACZ16240
augaaggccauccuggugguccuccuguacaccuucgccaccgcgaacgccgacacgcugugcaucggcuaccacgccaacaacagcaccgacaccguggacaccgugcucgagaagaacgucacggugacccacuccgugaacauccuggaggacaagcacaacgggaagcugugcaagcuccgcggcgucgcgccccugcaccuggggaagugcaacaucgccggcuggauccucgggaacccggagugcgagagccuguccaccgccagcuccuggagcuacaucguggagaccuccagcuccgacaacggcacgugcuaccccggcgacuucaucgacuacgaggagcugcgggagcagcucagcuccgugagcuccuucgagcgcuucgagaucuuccccaagaccagcuccuggcccaaccacgacagcaacaagggggucaccgccgccugcccgcacgccggcgcgaaguccuucuacaagaaccugaucuggcuggugaagaaggggaacagcuaccccaagcucuccaagagcuacaucaacgacaagggcaaggaggugcugguccugugggggauccaccaccccagcaccuccgccgaccagcagagccucuaccagaacgccgacgccuacguguucgugggcuccagccgguacuccaagaaguucaagcccgagaucgccauccgcccgaagguccgggaccaggagggccgcaugaacuacuacuggacgcugguggagcccggggacaagaucaccuucgaggcgaccggcaaccugguggucccccgguacgccuucgccauggagcgcaacgccgggagcggcaucaucaucuccgacacccccgugcacgacugcaacacgaccugccagaccccgaagggcgccaucaacaccagccuccccuuccagaacauccaccccaucacgaucgggaagugccccaaguacgugaaguccaccaagcugcggcuggcgaccggccuccgcaacgucccgagcauccagucccgggggcuguucggcgccaucgccggguucaucgagggcggcuggaccgggaugguggacggcugguacggguaccaccaccagaacgagcagggcagcggguacgccgccgaccugaaguccacgcagaacgcgcucgacgagaucaccaacaaggugaacagcgucaucgagaagaugaacacccaguucaccgccgugggcaaggaguucaaccaccuggagaagcgcaucgagaaccugaacaagaaggucgacgacggcuuccucgacaucuggacguacaacgccgagcugcuggugcuccuggagaacgagcggacccuggacuaccacgacuccaacgugaagaaccucuacgagaagguccgcagccagcugaagaacaacgccaaggagaucgggaacggcugcuucgaguucuaccacaagugcgacaacacgugcauggaguccgugaagaacgggaccuacgacuaccccaaguacagcgaggaggccaagcugaaccgggaggagaucgacggcgugaagcucgaguccacccgcaucuaccagauccuggcgaucuacagcaccgucgccagcucccuggugcucguggucagccugggggccaucuccuucuggaugugcagcaacggcucccugcagugccggaucugcaucuga

SEQ ID NO: 67673 - RNA, 1701 nt, Artificial Sequence; identical to SEQ ID NO: 66680
  derived and/or modified CDS sequence (opt1) from hemagglutinin__InfluenzaA__ACZ16260

SEQ ID NO: 67674 - RNA, 1701 nt, Artificial Sequence
  derived and/or modified CDS sequence (opt1) from hemagglutinin__InfluenzaA__ACZ16270
augaaggccauccuggugguccuccuguacaccuucgccaccgcgaacgccgacacgcugugcaucggcuaccacgccaacaacagcaccgacaccguggacaccgugcucgagaagaacgucacggugacccacuccgugaaccugcuggaggacaagcacaacgggaagcucugcaagcugcgcggcgucgcgccccugcaccucgggaagugcaacaucgccggcuggauccuggggaacccggagugcgagagccuguccaccgccagcuccuggagcuacaucguggagaccuccagcuccgacaacggcacgugcuaccccggcgacuucaucgacuacgaggagcuccgggagcagcugagcuccgugagcuccuucgagcgcuucgagaucuuccccaagaccagcuccuggcccaaccacgacagcaacaagggggucaccgccgccugcccgcacgccggcgcgaaguccuucuacaagaaccugaucuggcucgugaagaaggggaacagcuaccccaagcuguccaagagcuacaucaacgacaagggcaaggaggugcugguccucugggggauccaccaccccagcaccuccgccgaccagcagaaccuguaccagaacgccgacgccuacguguucgugggcagcucccgguacagcaagaaguucaagcccgagaucgccauccgcccgaagguccgggaccaggagggccgcaugaacuacuacuggacgcugguggagcccggggacaagaucaccuucgaggcgaccggcaaccucguggucccccgguacgccuucgccauggagcgcaacgccggguccggcaucaucaucagcgacacccccgugcacgacugcaacacgaccugccagaccccgaagggcgccaucaacaccucccugcccuuccagaacauccaccccaucacgaucgggaagugccccaaguacgucaagagcaccaagcugcggcucgcgaccggccugcgcaacgugccguccauccagagccgggggcuguucggcgccaucgccggguucaucgagggcggcuggaccgggaugguggacggcugguacggguaccaccaccagaacgagcagggcuccggguacgccgccgaccucaagagcacgcagaacgcgaucgacgagaucaccaacaaggugaacuccgucaucgagaagaugaacacccaguucaccgccgugggcaaggaguucaaccaccuggagaagcgcaucgagaaccugaacaagaaggucgacgacggcuuccucgacaucuggacguacaacgccgagcugcuggugcuccuggagaacgagcggacccuggacuaccacgacagcaacgugaagaaccucuacgagaagguccgcucccagcugaagaacaacgccaaggagaucgggaacggcugcuucgaguucuaccacaagugcgacaacacgugcauggagagcgugaagaacgggaccuacgacuaccccaaguacuccgaggaggccaagcugaaccgggaggagaucgacggcgugaagcucgagagcacccgcaucuaccagauccuggcgaucuacuccaccgucgccagcagccugauccucguggugucccugggggccaucagcuucuggaugugcuccaacggcagccugcagugccggaucugcaucuga

SEQ ID NO: 67675 - RNA, 1701 nt, Artificial Sequence; identical to SEQ ID NO: 67355
  derived and/or modified CDS sequence (opt1) from hemagglutinin__InfluenzaA__ACZ16280

SEQ ID NO: 67676 - RNA, 1701 nt, Artificial Sequence; identical to SEQ ID NO: 66680
  derived and/or modified CDS sequence (opt1) from hemagglutinin__InfluenzaA__ACZ16290

SEQ ID NO: 67677 - RNA, 1701 nt, Artificial Sequence
  derived and/or modified CDS sequence (opt1) from hemagglutinin__InfluenzaA__ACZ16300
augaaggccauccuggugguccuccuguacaccuucgccaccgcgaacgccgacacgcugugcaucggcuaccacgccaacaacagcaccgacaccguggacaccgugcucgagaagaacgucaucgugacgcacuccgugaaccugcuggaggacaagcacaacgggaagcucugcaagcugcgcggcgucgcgccccugcaccucgggaagugcaacaucgccggcuggauccuggggaacccggagugcgagagccuguccaccgccagcuccuggagcuacaucguggagaccuccagcuccgacaacgggaccugcuaccccggcgacuucaucgacuacgaggagcuccgggagcagcugagcuccgugagcuccuucgagcgcuucgagaucuuccccaagacgagcuccuggcccaaccacgacagcaacaagggggucaccgccgccugcccgcacgccggcgcgaaguccuucuacaagaaccugaucuggcucgugaagaaggggaacagcuaccccaagcuguccaagagcuacaucaacgacaagggcaaggaggugcugguccucugggggauccaccaccccagcaccuccgccgaccagcagagccuguaccagaacgccgacgccuacguguucgugggcuccagccgguacuccaagaaguucaagcccgagaucgccauccgcccgaagguccgggaccaggagggccgcaugaacuacuacuggacccugguggagcccggggacaagaucacguucgaggcgaccggcaaccuccuggugccccgguacgccuucgccauggagcgcaacgccgggagcggcaucaucaucuccgacacccccguccacgacugcaacaccacgugccagaccccgaagggcgccaucaacaccagccugcccuuccagaacauccaccccaucaccaucgggaagugccccaaguacgugaaguccacgaagcuccggcuggcgaccggccugcgcaacgugccgagcauccagucccggggccucuucggcgccaucgccggguucaucgagggcggcuggaccgggauggucgacggcugguacggguaccaccaccagaacgagcagggcagcggguacgccgccgaccugaaguccacccagaacgcgaucgacgagaucacgaacaaggugaacagcgugaucgagaagaugaacacccaguucaccgccgucggcaaggaguucaaccaccuggagaagcgcaucgagaaccucaacaagaagguggacgacggcuuccuggacaucuggaccuacaacgccgagcugcucguccugcuggagaacgagcggacgcucgacuaccacgacuccaacgugaagaaccuguacgagaaggugcgcagccagcugaagaacaacgccaaggagaucgggaacggcugcuucgaguucuaccacaagugcgacaacacgugcauggaguccgucaagaacgggaccuacgacuaccccaaguacagcgaggaggccaagcucaaccgggaggagaucgacggcgugaagcuggaguccacccgcaucuaccagauccuggcgaucuacagcaccguggccagcucccucguccugguggugagccugggggccaucuccuucuggaugugcagcaacggcucccuccagugccggaucugcaucuga

SEQ ID NO: 67678 - RNA, 1701 nt, Artificial Sequence; identical to SEQ ID NO: 67423
  derived and/or modified CDS sequence (opt1) from hemagglutinin__InfluenzaA__ACZ16310

SEQ ID NO: 67679 - RNA, 1701 nt, Artificial Sequence
  derived and/or modified CDS sequence (opt1) from hemagglutinin__InfluenzaA__ACZ16320
augaaggccauccuggugguccuccuguacaccuucgccaccgcgaacgccgacacgcugugcaucggcuaccacgccaacaacagcaccgacaccguggacaccgugcucgagaagaacgucacggugacccacuccgugaaccugcuggaggacaagcacaacgggaagcucugcaagcugcgcggcgucgcgccccugcaccucgggaagugcaacaucgccggcuggauccuggggaacccggagugcgagagccuguccaccgccagcuccuggagcuacaucguggagaccuccagcuccgacaacggcacgugcuaccccggcgacuucaucgacuacgaggagcuccgggagcagcugagcuccgugagcuccuucgagcgcuucgagaucuuccccaagaccagcuccuggcccaaccacgacagcaacaagggggucaccgccgccugcccgcacgccggcgcgaaguccuucuacaagaaccugaucuggcucgugaagaaggggaacagcuaccccaagcuguccaagagcuacaucaacgacaagggcaaggaggugcugguccucugggggauccaccaccccagcaccuccgccgaccagcagagccuguaccagaacgccgacgccuacguguucgugggcuccagccgguacuccaagaaguucaagcccgagaucgccauccgcccgaagguccgggaccaggagggccgcaugaacuacuacuggacgcugguggagcccggggacaagaucaccuucgaggcgaccggcaaccucguggucccccgguacgccuucgccauggagcgcaacgccgggagcggcaucaucaucuccgacacccccgugcacgacugcaacacgaccugccagaccccgaagggcgccaucaacaccagccugcccuuccagaacauccaccccaucacgaucgggaagugccccaaguacgugaaguccacccggcugcgccucgcgaccggccugcggaacgucccgagcauccagucccgcgggcuguucggcgccaucgccggguucaucgagggcggcuggaccgggaugguggacggcugguacggguaccaccaccagaacgagcagggcagcggguacgccgccgaccucaaguccacgcagaacgcgaucgacgagaucaccaacaaggugaacagcgucaucgagaagaugaacacccaguucaccgccgugggcaaggaguucaaccaccuggagaagcggaucgagaaccugaacaagaaggucgacgacggcuuccucgacaucuggacguacaacgccgagcugcuggugcuccuggagaacgagcgcacccuggacuaccacgacuccaacgugaagaaccucuacgagaagguccggagccagcugaagaacaacgccaaggagaucgggaacggcugcuucgaguucuaccacaagugcgacaacacgugcauggaguccgugaagaacgggaccuacgacuaccccaaguacagcgaggaggccaagcugaaccgcgaggagaucgacggcgugaagcucgaguccacccggaucuaccagauccuggcgaucuacagcaccgucgccagcucccuggugcucguggucagccugggggccaucuccuucuggaugugcagcaacggcucccugcagugccgcaucugcaucuga

SEQ ID NO: 67680 - RNA, 1701 nt, Artificial Sequence; identical to SEQ ID NO: 67423
  derived and/or modified CDS sequence (opt1) from hemagglutinin__InfluenzaA__ACZ16330

SEQ ID NO: 67681 - RNA, 1701 nt, Artificial Sequence; identical to SEQ ID NO: 66873
  derived and/or modified CDS sequence (opt1) from hemagglutinin__InfluenzaA__ACZ16340

SEQ ID NO: 67682 - RNA, 1701 nt, Artificial Sequence; identical to SEQ ID NO: 66680
  derived and/or modified CDS sequence (opt1) from hemagglutinin__InfluenzaA__ACZ16350

SEQ ID NO: 67683 - RNA, 1701 nt, Artificial Sequence; identical to SEQ ID NO: 66680
  derived and/or modified CDS sequence (opt1) from hemagglutinin__InfluenzaA__ACZ16360

SEQ ID NO: 67684 - RNA, 1701 nt, Artificial Sequence; identical to SEQ ID NO: 66873
  derived and/or modified CDS sequence (opt1) from hemagglutinin__InfluenzaA__ACZ16370

SEQ ID NO: 67685 - RNA, 1701 nt, Artificial Sequence; identical to SEQ ID NO: 66680
  derived and/or modified CDS sequence (opt1) from hemagglutinin__InfluenzaA__ACZ16380

SEQ ID NO: 67686 - RNA, 1701 nt, Artificial Sequence; identical to SEQ ID NO: 66680
  derived and/or modified CDS sequence (opt1) from hemagglutinin__InfluenzaA__ACZ16390

SEQ ID NO: 67687 - RNA, 1701 nt, Artificial Sequence; identical to SEQ ID NO: 66680
  derived and/or modified CDS sequence (opt1) from hemagglutinin__InfluenzaA__ACZ16400

SEQ ID NO: 67688 - RNA, 1701 nt, Artificial Sequence; identical to SEQ ID NO: 66680
  derived and/or modified CDS sequence (opt1) from hemagglutinin__InfluenzaA__ACZ16410

SEQ ID NO: 67689 - RNA, 1701 nt, Artificial Sequence; identical to SEQ ID NO: 67317
  derived and/or modified CDS sequence (opt1) from hemagglutinin__InfluenzaA__ACZ16420

SEQ ID NO: 67690 - RNA, 1701 nt, Artificial Sequence; identical to SEQ ID NO: 66680
  derived and/or modified CDS sequence (opt1) from hemagglutinin__InfluenzaA__ACZ16430

SEQ ID NO: 67691 - RNA, 1701 nt, Artificial Sequence; identical to SEQ ID NO: 66680
  derived and/or modified CDS sequence (opt1) from hemagglutinin__InfluenzaA__ACZ16440

SEQ ID NO: 67692 - RNA, 1701 nt, Artificial Sequence
  derived and/or modified CDS sequence (opt1) from hemagglutinin__InfluenzaA__ACZ16450
augaaggccauccuggugguccuccuguacaccuucgccaccgcgaacgccgacacgcugugcaucggcuaccacgccaacaacagcaccgacaccguggacaccgugcucgagaagaacgucacggugacccacuccgugaaccugcuggaggacaagcacaacgggaagcucugcaagcugcgcggcgucgcgccccugcaccucgggaagugcaacaucgccggcuggauccuggggaacccggagugcgagagccuguccaccgccagcuccuggagcuacaucguggagaccuccagcuccgacaacggcacgugcuaccccggcgacuucaucgacuacgaggagcuccgggagcagcugagcuccgugagcuccuucgagcgcuucgagaucuuccccaagaccagcuccuggcccaaccacgacagcaacaagggggucaccgccgccugcccgcacgccggcgcgaaguccuucuacaagaaccugaucuggcucgugaagaaggggaacagcuaccccaagcuguccaagagcuacaucaacgacaagggcaaggaggugcugguccucugggggauccaccaccccagcaccuccgccgaccagcagagccuguaccagaacgccgacgccuacguguucgugggcuccagccgguacuccaagaaguucaagcccgagaucgccauccgcccgaagguccgggaccaggagggccgcaugaacuacuacuggacgcuggugaagcccggggacaagaucaccuucgaggcgaccggcaaccucguggucccccgguacgccuucgccauggagcgcaacgccgggagcggcaucaucaucuccgacacccccgugcacgacugcaacacgaccugccagaccccgaagggcgccaucaacaccagccugcccuuccagaacauccaccccaucacgaucgggaagugccccaaguacgugaaguccaccaagcugcggcucgcgaccggccugcgcaacgucccgagcauccagucccgggggcuguucggcgccaucgccggguucaucgagggcggcuggaccgggaugguggacggcugguacggguaccaccaccagaacgagcagggcagcggguacgccgccgaccucaaguccacgcagaacgcgaucgacgagaucaccaacaaggugaacagcgucaucgagaagaugaacacccaguucaccgccgugggcaaggaguucaaccaccuggagaagcgcaucgagaaccugaacaagaaggucgacgacggcuuccucgacaucuggacguacaacgccgagcugcuggugcuccuggagaacgagcggacccuggacuaccacgacuccaacgugaagaaccucuacgagaagguccgcagccagcugaagaacaacgccaaggagaucgggaacggcugcuucgaguucuaccacaagugcgacaacacgugcauggaguccgugaagaacgggaccuacgacuaccccaaguacagcgaggaggccaagcugaaccgggaggagaucgacggcgugaagcucgaguccacccgcaucuaccagauccuggcgaucuacagcaccgucgccagcucccuggugcucguggucagccugggggccaucuccuucuggaugugcagcaacggcucccugcagugccggaucugcaucuga

SEQ ID NO: 67693 - RNA, 1701 nt, Artificial Sequence; identical to SEQ ID NO: 66873
  derived and/or modified CDS sequence (opt1) from hemagglutinin__InfluenzaA__ACZ16460

SEQ ID NO: 67694 - RNA, 1701 nt, Artificial Sequence; identical to SEQ ID NO: 66680
  derived and/or modified CDS sequence (opt1) from hemagglutinin__InfluenzaA__ACZ16470

SEQ ID NO: 67695 - RNA, 1701 nt, Artificial Sequence; identical to SEQ ID NO: 66680
  derived and/or modified CDS sequence (opt1) from hemagglutinin__InfluenzaA__ACZ16480

SEQ ID NO: 67696 - RNA, 1701 nt, Artificial Sequence; identical to SEQ ID NO: 67428
  derived and/or modified CDS sequence (opt1) from hemagglutinin__InfluenzaA__ACZ16490

SEQ ID NO: 67697 - RNA, 1701 nt, Artificial Sequence; identical to SEQ ID NO: 66680
  derived and/or modified CDS sequence (opt1) from hemagglutinin__InfluenzaA__ACZ16500

SEQ ID NO: 67698 - RNA, 1701 nt, Artificial Sequence; identical to SEQ ID NO: 66873
  derived and/or modified CDS sequence (opt1) from hemagglutinin__InfluenzaA__ACZ16510

SEQ ID NO: 67699 - RNA, 1701 nt, Artificial Sequence; identical to SEQ ID NO: 66680
  derived and/or modified CDS sequence (opt1) from hemagglutinin__InfluenzaA__ACZ16530

SEQ ID NO: 67700 - RNA, 1701 nt, Artificial Sequence
  derived and/or modified CDS sequence (opt1) from hemagglutinin__InfluenzaA__ACZ16540
augaaggccauccuggugguccuccuguacaccuucgccaccgcgaacgccgacacgcugugcaucggcuaccacgccaacaacagcaccgacaccguggacaccgugcucgagaagaacgucacggugacccacuccgugaacauccuggaggacaagcacaacgggaagcugugcaagcuccgcggcgucgcgccccugcaccuggggaagugcaacaucgccggcuggauccucgggaacccggagugcgagagccuguccaccgccagcuccuggagcuacaucguggagaccuccagcuccgacaacggcacgugcuaccccggcgacuucaucgacuacgaggagcugcgggagcagcucagcuccgugagcuccuucgagcgcuucgagaucuuccccaagaccagcuccuggcccaaccacgacagcaacaagggggucaccgccgccugcccgcacgccggcgcgaaguccuucuacaagaaccugaucuggcuggugaagaaggggaacagcuaccccaagcucuccaagagcuacaucaacgacaagggcaaggaggugcugguccugugggggauccaccaccccagcaccuccgccgaccagcagagccucuaccagaacgccgacgccuacguguucgugggcuccagccgguacuccaagaaguucaagcccgagaucgccauccgcccgaagguccgggaccaggagggccgcaugaacuacuacuggacgcugguggagcccggggacaagaucaccuucgaggcgaccggcaaccugguggucccccgguacgccuucgccauggagcgcaacgccgggagcggcaucaucaucuccgacacccccgugcacgacugcaacacgaccugccagaccccgaagggcgccaucaacaccagccuccccuuccagaacauccaccccaucacgaucgggaagugccccaaguacgugaaguccaccaagcugcggcuggcgaccggccuccgcaacgucccgagcauccagucccgggggcugcugggcgccaucgccggguucaucgagggcggcuggaccgggaugguggacggcugguacggguaccaccaccagaacgagcagggcagcggguacgccgccgaccucaaguccacgcagaacgcgaucgacgagaucaccaacaaggugaacagcgucaucgagaagaugaacacccaguucaccgccgugggcaaggaguucaaccaccuggagaagcgcaucgagaaccugaacaagaaggucgacgacggcuuccucgacaucuggacguacaacgccgagcugcuggugcuccuggagaacgagcggacccuggacuaccacgacuccaacgugaagaaccucuacgagaagguccgcagccagcugaagaacaacgccaaggagaucgggaacggcugcuucgaguucuaccacaagugcgacaacacgugcauggaguccgugaagaacgggaccuacgacuaccccaaguacagcgaggaggccaagcugaaccgggaggagaucgacggcgugaagcucgaguccacccgcaucuaccagauccuggcgaucuacagcaccgucgccagcucccuggugcucguggucagccugggggccaucuccuucuggaugugcagcaacggcucccugcagugccggaucugcaucuga

SEQ ID NO: 67701 - RNA, 1701 nt, Artificial Sequence; identical to SEQ ID NO: 67423
  derived and/or modified CDS sequence (opt1) from hemagglutinin__InfluenzaA__ACZ16550

SEQ ID NO: 67702 - RNA, 1701 nt, Artificial Sequence; identical to SEQ ID NO: 66680
  derived and/or modified CDS sequence (opt1) from hemagglutinin__InfluenzaA__ACZ16583

SEQ ID NO: 67703 - RNA, 1701 nt, Artificial Sequence; identical to SEQ ID NO: 67423
  derived and/or modified CDS sequence (opt1) from hemagglutinin__InfluenzaA__ACZ16593

SEQ ID NO: 67704 - RNA, 1701 nt, Artificial Sequence; identical to SEQ ID NO: 66680
  derived and/or modified CDS sequence (opt1) from hemagglutinin__InfluenzaA__ACZ16603

SEQ ID NO: 67705 - RNA, 1701 nt, Artificial Sequence; identical to SEQ ID NO: 67423
  derived and/or modified CDS sequence (opt1) from hemagglutinin__InfluenzaA__ACZ16630

SEQ ID NO: 67706 - RNA, 1701 nt, Artificial Sequence; identical to SEQ ID NO: 66680
  derived and/or modified CDS sequence (opt1) from hemagglutinin__InfluenzaA__ACZ16640

SEQ ID NO: 67707 - RNA, 1701 nt, Artificial Sequence; identical to SEQ ID NO: 66680
  derived and/or modified CDS sequence (opt1) from hemagglutinin__InfluenzaA__ACZ16650

SEQ ID NO: 67708 - RNA, 1701 nt, Artificial Sequence; identical to SEQ ID NO: 66680
  derived and/or modified CDS sequence (opt1) from hemagglutinin__InfluenzaA__ACZ16660

SEQ ID NO: 67709 - RNA, 1701 nt, Artificial Sequence; identical to SEQ ID NO: 66680
  derived and/or modified CDS sequence (opt1) from hemagglutinin__InfluenzaA__ACZ16670

SEQ ID NO: 67710 - RNA, 1701 nt, Artificial Sequence; identical to SEQ ID NO: 66680
  derived and/or modified CDS sequence (opt1) from hemagglutinin__InfluenzaA__ACZ16680

SEQ ID NO: 67711 - RNA, 1701 nt, Artificial Sequence; identical to SEQ ID NO: 66680
  derived and/or modified CDS sequence (opt1) from hemagglutinin__InfluenzaA__ACZ16690

SEQ ID NO: 67712 - RNA, 1701 nt, Artificial Sequence; identical to SEQ ID NO: 66680
  derived and/or modified CDS sequence (opt1) from hemagglutinin__InfluenzaA__ACZ16700

SEQ ID NO: 67713 - RNA, 1701 nt, Artificial Sequence; identical to SEQ ID NO: 66680
  derived and/or modified CDS sequence (opt1) from hemagglutinin__InfluenzaA__ACZ16710

SEQ ID NO: 67714 - RNA, 1701 nt, Artificial Sequence; identical to SEQ ID NO: 66680
  derived and/or modified CDS sequence (opt1) from hemagglutinin__InfluenzaA__ACZ16720

SEQ ID NO: 67715 - RNA, 1701 nt, Artificial Sequence; identical to SEQ ID NO: 67423
  derived and/or modified CDS sequence (opt1) from hemagglutinin__InfluenzaA__ACZ16730

SEQ ID NO: 67716 - RNA, 1701 nt, Artificial Sequence; identical to SEQ ID NO: 67423
  derived and/or modified CDS sequence (opt1) from hemagglutinin__InfluenzaA__ACZ16740

SEQ ID NO: 67717 - RNA, 1701 nt, Artificial Sequence; identical to SEQ ID NO: 66680
  derived and/or modified CDS sequence (opt1) from hemagglutinin__InfluenzaA__ACZ16750

SEQ ID NO: 67718 - RNA, 1701 nt, Artificial Sequence; identical to SEQ ID NO: 66680
  derived and/or modified CDS sequence (opt1) from hemagglutinin__InfluenzaA__ACZ16760

SEQ ID NO: 67719 - RNA, 1701 nt, Artificial Sequence; identical to SEQ ID NO: 66873
  derived and/or modified CDS sequence (opt1) from hemagglutinin__InfluenzaA__ACZ16770

SEQ ID NO: 67720 - RNA, 1701 nt, Artificial Sequence; identical to SEQ ID NO: 66680
  derived and/or modified CDS sequence (opt1) from hemagglutinin__InfluenzaA__ACZ16780

SEQ ID NO: 67721 - RNA, 1701 nt, Artificial Sequence; identical to SEQ ID NO: 66680
  derived and/or modified CDS sequence (opt1) from hemagglutinin__InfluenzaA__ACZ16790

SEQ ID NO: 67722 - RNA, 1701 nt, Artificial Sequence; identical to SEQ ID NO: 66680
  derived and/or modified CDS sequence (opt1) from hemagglutinin__InfluenzaA__ACZ16800

SEQ ID NO: 67723 - RNA, 1701 nt, Artificial Sequence; identical to SEQ ID NO: 66680
  derived and/or modified CDS sequence (opt1) from hemagglutinin__InfluenzaA__ACZ16810

SEQ ID NO: 67724 - RNA, 1701 nt, Artificial Sequence; identical to SEQ ID NO: 67355
  derived and/or modified CDS sequence (opt1) from hemagglutinin__InfluenzaA__ACZ16820

SEQ ID NO: 67725 - RNA, 1701 nt, Artificial Sequence; identical to SEQ ID NO: 66680
  derived and/or modified CDS sequence (opt1) from hemagglutinin__InfluenzaA__ACZ16830

SEQ ID NO: 67726 - RNA, 1701 nt, Artificial Sequence
  derived and/or modified CDS sequence (opt1) from hemagglutinin__InfluenzaA__ACZ16840
augaaggccauccuggugguccuccuguacaccuucgccaccgcgaacgccgacacgcugugcaucggcuaccacgccaacaacagcaccgacaccguggacaccgugcucgagaagaacgucacggugacccacuccgugaaccugcuggaggacaagcacaacgggaagcucugcaagcugcgcggcgucgcgccccugcaccucgggaagugcaacaucgccggcuggauccuggggaacccggagugcgagagccuguccaccgccagcuccuggagcuacaucguggagaccuccagcuccgacaacggcacgugcuaccccggcgacuucaucgacuacgaggagcuccgggagcagcugagcuccgugagcuccuucgagcgcuucgagaucuuccccaagaccagcuccuggcccaaccacgacagcaacaagggggucaccgccgccugcccgcacgccggcgcgaaguccuucuacaagaaccugaucuggcucgugaagaaggggaacagcuaccccaagcuguccaagagcuacaucaacgacaagggcaaggaggugcugguccucugggggauccaccaccccagcaccuccgccgaccagcagagccuguaccagaacgccgacgccuacguguucgugggcuccagccgguacuccaagaaguucaagcccgagaucgccauccgcacgaagguccgggaccaggagggccgcaugaacuacuacuggacccugguggagccgggggacaagaucaccuucgaggcgaccggcaaccucguggucccccgguacgccuucgccauggagcgcaacgccgggagcggcaucaucaucuccgacacgcccgugcacgacugcaacacgaccugccagacccccaagggcgccaucaacaccagccugccguuccagaacauccaccccaucaccaucgggaagugccccaaguacgugaaguccaccaagcugcggcucgcgaccggccugcgcaacguccccagcauccagucccgggggcuguucggcgccaucgccggguucaucgagggcggcuggacggggaugguggacggcugguacggguaccaccaccagaacgagcagggcagcggguacgccgccgaccucaaguccacccagaacgcgaucgacgagaucaccaacaaggugaacagcgucaucgagaagaugaacacccaguucacggccgugggcaaggaguucaaccaccuggagaagcgcaucgagaaccugaacaagaaggucgacgacggcuuccucgacaucuggaccuacaacgccgagcugcuggugcuccuggagaacgagcggacccuggacuaccacgacuccaacgugaagaaccucuacgagaagguccgcagccagcugaagaacaacgccaaggagaucgggaacggcugcuucgaguucuaccacaagugcgacaacacgugcauggaguccgugaagaacgggaccuacgacuacccgaaguacagcgaggaggccaagcugaaccgggaggagaucgacggcgugaagcucgaguccacccgcaucuaccagauccuggcgaucuacagcaccgucgccagcucccuggugcucguggucagccugggggccaucuccuucuggaugugcagcaacggcucccugcagugccggaucugcaucuga

SEQ ID NO: 67727 - RNA, 1701 nt, Artificial Sequence; identical to SEQ ID NO: 66680
  derived and/or modified CDS sequence (opt1) from hemagglutinin__InfluenzaA__ACZ16850

SEQ ID NO: 67728 - RNA, 1701 nt, Artificial Sequence
  derived and/or modified CDS sequence (opt1) from hemagglutinin__InfluenzaA__ACZ16860
augaaggccauccuggugguccuccuguacaccuucgccaccgcgaacgccgacacgcugugcaucggcuaccacgccaacaacagcaccgacaccguggacaccgugcucgagaagaacgucacggugacccacuccgugaaccugcuggaggacaagcacaacgggaagcucugcaagcugcgcggcgucgcgccccugcaccucgggaagugcaacaucgccggcuggauccuggggaacccggagugcgagagccuguccaccgccagcuccuggagcuacaucguggagaccuccagcuccgacaacggcacgugcuaccccggcgacuucaucgacuacgaggagcuccgggagcagcugagcuccgugagcuccuucgagcgcuucgagaucuuccccaagaccagcuccuggcccaaccacgacagcaacaagggggucaccgccgccugcccgcacgccggcgcgaaguccuucuacaagaaccugaucuggcucgugaagaaggggaacagcuaccccaagcuguccaagagcuacaucaacgacaagggcaaggaggugcugguccucugggggauccaccaccccagcaccuccgccgaccagcagagccuguaccagaacgccgacgccuacguguucgugggcuccagccgguacuccaagaaguucaagcccgagaucgccauccgcccgaagguccgggaccaggagggccgcaugaacuacuacuggacgcugguggagcccggggacaagaucaccuucgaggcgaccggcaaccucguggcgccccgguacgccuucgccauggagcgcaacgccgggagcggcaucaucaucuccgacacccccguccacgacugcaacacgaccugccagaccccgaagggcgccaucaacaccagccugcccuuccagaacauccaccccaucacgaucgggaagugccccaaguacgugaaguccaccaagcugcggcucgccaccggccugcgcaacgugccgagcauccagucccgggggcuguucggcgccaucgccggguucaucgagggcggcuggaccgggauggucgacggcugguacggguaccaccaccagaacgagcagggcagcggguacgccgcggaccucaaguccacgcagaacgccaucgacgagaucaccaacaaggugaacagcgugaucgagaagaugaacacccaguucaccgccgucggcaaggaguucaaccaccuggagaagcgcaucgagaaccugaacaagaagguggacgacggcuuccucgacaucuggacguacaacgccgagcugcugguccuccuggagaacgagcggacccuggacuaccacgacuccaacgugaagaaccucuacgagaaggugcgcagccagcugaagaacaacgccaaggagaucgggaacggcugcuucgaguucuaccacaagugcgacaacacgugcauggaguccgucaagaacgggaccuacgacuaccccaaguacagcgaggaggcgaagcugaaccgggaggagaucgacggcgugaagcucgaguccacccgcaucuaccagauccuggccaucuacagcaccguggccagcucccugguccucguggugagccugggggccaucuccuucuggaugugcagcaacggcucccugcagugccggaucugcaucuga

SEQ ID NO: 67729 - RNA, 1701 nt, Artificial Sequence; identical to SEQ ID NO: 67423
  derived and/or modified CDS sequence (opt1) from hemagglutinin__InfluenzaA__ACZ16870

SEQ ID NO: 67730 - RNA, 1701 nt, Artificial Sequence
  derived and/or modified CDS sequence (opt1) from hemagglutinin__InfluenzaA__ACZ16880
augaaggccauccuggugguccuccuguacaccuucgccaccgcgaacgccgacacgcugugcaucggcuaccacgccaacaacagcaccgacaccguggacaccgugcucgagaagaacgucacggugacccacuccgugaaccugcuggaggacaagcacaacgggaagcucugcaagcugcgcggcgucgcgccccugcaccucgggaagugcaacaucgccggcuggauccuggggaacccggagugcgagagccuguccaccgccagcuccuggagcuacaucguggagaccuccagcuccgacaacggcacgugcuaccccggcgacuucaucgacuacgaggagcuccgggagcagcugagcuccgugagcuccuucgagcgcuucgagaucuuccccaagaccagcuccuggcccaaccacgacagcaacaagggggucaccgccgccugcccgcacgccggcgcgaaguccuucuacaagaaccugaucuggcucgugaagaaggggaacagcuaccccaagcuguccaagagcuacaucaacgacaagggcaaggaggugcugguccucugggggauccaccaccccagcaccuccgccgaccagcagagccuguaccagaacgccgacgccuacguguucgugggcuccagccgguacuccaagaaguucaagcccgagaucgccauccgcccgaagguccgggaccaggagggccgcaugaacuacuacuggacgcugguggagcccggggacaagaucaccuucgaggcgaccggcaaccucguggucccccgguacgccuucgccauggagcgcaacgacgggagcggcaucaucaucuccgacacccccgugcacgacugcaacacgaccugccagaccccgaagggcgccaucaacaccagccugcccuuccagaacauccaccccaucacgaucgggaagugccccaaguacgugaaguccaccaagcugcggcucgccaccggccugcgcaacgucccgagcauccagucccgggggcuguucggcgcgaucgccggguucaucgagggcggcuggaccgggaugguggacggcugguacggguaccaccaccagaacgagcagggcagcggguacgccgccgaccucaaguccacgcagaacgccaucgacgagaucaccaacaaggugaacagcgucaucgagaagaugaacacccaguucaccgcggugggcaaggaguucaaccaccuggagaagcgcaucgagaaccugaacaagaaggucgacgacggcuuccucgacaucuggacguacaacgccgagcugcuggugcuccuggagaacgagcggacccuggacuaccacgacuccaacgugaagaaccucuacgagaagguccgcagccagcugaagaacaacgccaaggagaucgggaacggcugcuucgaguucuaccacaagugcaacaacacgugcauggaguccgugaagaacgggaccuacgacuaccccaaguacagcgaggaggccaagcugaaccgggaggagaucgacggcgugaagcucgaguccacccgcaucuaccagauccuggccaucuacagcaccgucgcgagcucccuggugcucguggucagccugggggccaucuccuucuggaugugcagcaacggcucccugcagugccggaucugcaucuga

SEQ ID NO: 67731 - RNA, 1701 nt, Artificial Sequence; identical to SEQ ID NO: 67428
  derived and/or modified CDS sequence (opt1) from hemagglutinin__InfluenzaA__ACZ16890

SEQ ID NO: 67732 - RNA, 1701 nt, Artificial Sequence; identical to SEQ ID NO: 66680
  derived and/or modified CDS sequence (opt1) from hemagglutinin__InfluenzaA__ACZ16900

SEQ ID NO: 67733 - RNA, 1701 nt, Artificial Sequence; identical to SEQ ID NO: 66680
  derived and/or modified CDS sequence (opt1) from hemagglutinin__InfluenzaA__ACZ16910

SEQ ID NO: 67734 - RNA, 1701 nt, Artificial Sequence; identical to SEQ ID NO: 66680
  derived and/or modified CDS sequence (opt1) from hemagglutinin__InfluenzaA__ACZ16920

SEQ ID NO: 67735 - RNA, 1701 nt, Artificial Sequence; identical to SEQ ID NO: 66693
  derived and/or modified CDS sequence (opt1) from hemagglutinin__InfluenzaA__ACZ16930

SEQ ID NO: 67736 - RNA, 1701 nt, Artificial Sequence; identical to SEQ ID NO: 66693
  derived and/or modified CDS sequence (opt1) from hemagglutinin__InfluenzaA__ACZ16940

SEQ ID NO: 67737 - RNA, 1701 nt, Artificial Sequence; identical to SEQ ID NO: 66680
  derived and/or modified CDS sequence (opt1) from hemagglutinin__InfluenzaA__ACZ16950

SEQ ID NO: 67738 - RNA, 1701 nt, Artificial Sequence; identical to SEQ ID NO: 66935
  derived and/or modified CDS sequence (opt1) from hemagglutinin__InfluenzaA__ACZ16960

SEQ ID NO: 67739 - RNA, 1701 nt, Artificial Sequence
  derived and/or modified CDS sequence (opt1) from hemagglutinin__InfluenzaA__ACZ16970
augaaggccauccuggugguccuccuguacaccuucgccaccgcgaacgccgacacgcugugcaucggcuaccacgccaacaacagcaccgacaccguggacaccgugcucgagaagaacgucacggugacccacuccgugaaccugcuggaggacaagcacaacgggaagcucugcaagcugcgcggcgucgcgccccugcaccucgggaagugcaacaucgccggcuggauccuggggaacccggagugcgagagccuguccaccgccagcuccuggagcuacaucguggagaccuccagcuccgacaacggcacgugcuaccccggcgacuucaucgacuacgaggagcuccgggagcagcugagcuccgugagcuccuucgagcgcuucgagaucuuccccaagaccagcuccuggcccaaccacgacagcaacaagggggucaccgccgccugcccgcacgccggcgcgaaguccuucuacaagaaccugaucuggcucgugaaggaggggaacagcuaccccaagcuguccaagagcuacaucaacgacaagggcaaggaggugcugguccucugggggauccaccaccccagcaccuccgccgaccagcagagccuguaccagaacgccgacgccuacguguucgugggcacgucccgguacagcaagaaguucaagcccgagaucgccauccgcccgaagguccgggaccaggagggccgcaugaacuacuacuggacccugguggagcccggggacaagaucaccuucgaggcgaccggcaaccucguggucccccgguacgccuucgccauggagcgcaacgccggguccggcaucaucaucagcgacacgcccgugcacgacugcaacacgaccugccagaccccgaagggcgccaucaacaccucccugcccuuccagaacauccaccccaucaccaucgggaagugccccaaguacgucaagagcaccaagcugcggcucgcgaccggccugcgcaacgugccguccauccagagccgggggcuguucggcgccaucgccggguucaucgagggcggcuggacggggaugguggacggcugguacggguaccaccaccagaacgagcagggcuccggguacgccgccgaccucaagagcacccagaacgcgaucgacgagaucaccaacaaggugaacuccgucaucgagaagaugaacacccaguucacggccgugggcaaggaguucaaccaccuggagaagcgcaucgagaaccugaacaagaaggucgacgacggcuuccucgacaucuggaccuacaacgccgagcugcuggugcuccuggagaacgagcggacccuggacuaccacgacagcaacgugaagaaccucuacgagaagguccgcucccagcugaagaacaacgccaaggagaucgggaacggcugcuucgaguucuaccacaagugcgacaacacgugcauggagagcgugaagaacgggaccuacgacuaccccaaguacuccgaggaggccaagcugaaccgggaggagaucgacggcgugaagcucgagagcacccgcaucuaccagauccuggcgaucuacuccaccgucgccagcagccuggugcucguggucucccugggggccaucagcuucuggaugugcuccaacggcagccugcagugccggaucugcaucuga

SEQ ID NO: 67740 - RNA, 1701 nt, Artificial Sequence; identical to SEQ ID NO: 66693
  derived and/or modified CDS sequence (opt1) from hemagglutinin__InfluenzaA__ACZ16980

SEQ ID NO: 67741 - RNA, 1701 nt, Artificial Sequence; identical to SEQ ID NO: 66693
  derived and/or modified CDS sequence (opt1) from hemagglutinin__InfluenzaA__ACZ17000

SEQ ID NO: 67742 - RNA, 1701 nt, Artificial Sequence
  derived and/or modified CDS sequence (opt1) from hemagglutinin__InfluenzaA__ACZ17010
augaaggccauccuggugguccuccuguacaccuucgccaccgcgaacgccgacacgcugugcaucggcuaccacgccaacaacagcaccgacaccguggacaccgugcucgagaagaacgucacggugacccacuccgugaaccugcuggaggacaagcacaacgggaagcucugcaagcugcgcggcgucgcgccccugcaccucgggaagugcaacaucgccggcuggauccuggggaacccggagugcgagagccuguccaccgccagcuccuggagcuacaucguggagaccuccagcuccgacaacggcacgugcuaccccggcgacuucaucgacuacgaggagcuccgggagcagcugagcuccgugagcuccuucgagcgcuucgagaucuuccccaagaccagcuccuggcccaaccacgacagcaacaagggggucaccgccgccugcccgcacgccggcgcgaaguccuucuacaagaaccugaucuggcucgugaagaaggggaacagcuaccccaagcuguccaagagcuacaucaacgacaagggcaaggaggugcugguccucugggggauccaccaccccagcaccuccgccgaccagcagagccuguaccagaacgccgacgccuacguguucgugggcuccagcaaguacuccaagaaguucaagcccgagaucgccauccggccgaagguccgcgaccaggagggccggaugaacuacuacuggacgcugguggagcccggggacaagaucaccuucgaggcgaccggcaaccucguggucccccgcuacgccuucgccauggagcggaacgccgggagcggcaucaucaucuccgacacccccgugcacgacugcaacacgaccugccagaccccgaagggcgccaucaacaccagccugcccuuccagaacauccaccccaucacgaucgggaagugccccaaguacgugaaguccaccaagcugcgccucgcgaccggccugcggaacgucccgagcauccagucccgcgggcuguucggcgccaucgccggguucaucgagggcggcuggaccgggaugguggacggcugguacggguaccaccaccagaacgagcagggcagcggguacgccgccgaccucaaguccacgcagaacgcgaucgacaagaucaccaacaaggugaacagcgucaucgagaagaugaacacccaguucaccgccgugggcaaggaguucaaccaccuggagaagcggaucgagaaccugaacaagaaggucgacgacggcuuccucgacaucuggacguacaacgccgagcugcuggugcuccuggagaacgagcgcacccuggacuaccacgacuccaacgugaagaaccucuacgagaagguccggagccagcugaagaacaacgccaaggagaucgggaacggcugcuucgaguucuaccacaagugcgacaacacgugcauggaguccgugaagaacgggaccuacgacuaccccaaguacagcgaggaggccaagcugaaccgcgaggagaucgacggcgugaagcucgaguccacccggaucuaccagauccuggcgaucuacagcaccgucgccagcucccuggugcucguggucagccugggggccaucuccuucuggaugugcagcaacggcucccugcagugccgcaucugcaucuga

SEQ ID NO: 67743 - RNA, 1701 nt, Artificial Sequence; identical to SEQ ID NO: 66693
  derived and/or modified CDS sequence (opt1) from hemagglutinin__InfluenzaA__ACZ17020

SEQ ID NO: 67744 - RNA, 1701 nt, Artificial Sequence
  derived and/or modified CDS sequence (opt1) from hemagglutinin__InfluenzaA__ACZ17030
augaaggccacccuggugguccuccuguacaccuucgccacggcgaacgccgacacccugugcaucggcuaccacgccaacaacagcaccgacaccguggacacggugcucgagaagaacgucaccgugacccacuccgugaaccugcuggaggacaagcacaacgggaagcucugcaagcugcgcggcgucgcgccccugcaccucgggaagugcaacaucgccggcuggauccuggggaacccggagugcgagagccuguccaccgccagcuccuggagcuacaucguggaggccuccagcuccgacaacggcacgugcuaccccggcgacuucaucgacuacgaggagcuccgggagcagcugagcuccgugagcuccuucgagcgcuucgagaucuuccccaagaccagcuccuggcccaaccacgacagcaacaagggggucaccgccgccugcccgcacgcgggcgccaaguccuucuacaagaaccugaucuggcucgugaagaaggggaacagcuaccccaagcuguccaagagcuacaucaacgacaagggcaaggaggugcugguccucugggggauccaccaccccagcaccuccgccgaccagcagagccuguaccagaacgccgacgccuacguguucgugggcacgucccgguacagcaagaaguucaagcccgagaucgcgauccgcccgaagguccgggaccaggagggccgcaugaacuacuacuggacccugguggagcccggggacaagaucaccuucgaggccaccggcaaccucguggucccccgguacgccuucgccauggagcgcaacgccggguccggcaucaucaucagcgacacgcccgugcacgacugcaacacgaccugccagaccccgaagggcgcgaucaacaccucccugcccuuccagaacauccaccccaucaccaucgggaagugccccaaguacgucaagagcaccaagcugcggcucgccaccggccugcgcaacgugccguccauccagagccgggggcuguucggcgccaucgccggguucaucgagggcggcuggacggggaugguggacggcugguacggguaccaccaccagaacgagcagggcuccggguacgccgcggaccucaagagcacccagaacgccaucgacgagaucaccaacaaggugaacuccgucaucgagaagaugaacacccaguucacggccgugggcaaggaguucaaccaccuggagaagcgcaucgagaaccugaacaagaaggucgacgacggcuuccucgacaucuggaccuacaacgccgagcugcuggugcuccuggagaacgagcggacccuggacuaccacgacagcaacgugaagaaccucuacgagaagguccgcucccagcugaagaacaacgccaaggagaucgggaacggcugcuucgaguucuaccacaagugcgacaacacgugcauggagagcgugaagaacgggaccuacgacuaccccaaguacuccgaggaggcgaagcugaaccgggaggagaucgacggcgugaagcucgagagcacccgcaucuaccagauccuggccaucuacuccaccgucgccagcagccuggugcucguggucucccugggggccaucagcuucuggaugugcuccaacggcagccugcagugccggaucugcaucuga

SEQ ID NO: 67745 - RNA, 1701 nt, Artificial Sequence
  derived and/or modified CDS sequence (opt1) from hemagglutinin__InfluenzaA__ACZ17040
augaaggccauccuggugguccuccuguacaccuucgccaccgcgaacgccgacacgcugugcaucggcuaccacgccaacaacagcaccgacaccguggacaccgugcucgagaagaacgucacggugacccacuccgugaaccugcuggaggacaagcacaacgggaagcucugcaagcugcgcggcgucgcgccccugcaccucgggaagugcaacaucgccggcuggauccuggggaacccggagugcgagagccuguccaccgccagcuccuggagcuacaucguggagaccuccagcuccgacaacggcacgugcuaccccggcgacuucaucgacuacgaggagcuccgggagcagcugagcuccgugagcuccuucgagcgcuucgagaucuuccccaagaccagcuccuggcccaaccacgacagcaacaagggggucaccgccgccugcccgcacgccggcgcgaaguccuucuacaagaaccugaucuggcucgugaagaaggggaacagcuaccccaagcuguccaagagcuacaucaacgacaagggcaaggaggugcugguccucugggggauccaccaccccagcaccuccgccgaccagcagagccuguaccagaacgccgacgccuacguguucgugggcacgucccgguacagcaagaaguucaagcccgagaucgccauccgcccgaagguccgggaccaggagggccgcaugaacuacuacuggacccugguggagcccggggacaagaucaccuucgaggcgaccggcaaccucguggucccccgguacgccuucgccauggagcgcaacgccggguccggcaucaucaucagcgacacgcccgugcacgacugcaacacgaccugccagaccccgaagggcgccaucaacaccucccugcccuuccagaacauccaccccaucaccaucgggaagugccccaaguacgucaagagcaccaagcugcggcucgcgaccggccugcgcaacgugccguccauccagagccgggggcuguucggcgccaucgccggguucaucgagggcggcuggacggggaugguggacggcugguacggguaccaccaccagaacgagcagggcuccggguacgccgccgaccucaagagcacccagaacgcgaucgacgagaucaccaacaaggugaacuccgucaucgagaagaugaacacccaguucacggccgugggcaaggaguucaaccaccuggagaagcgcaucgagaaccugaacaagaaggucgacgacggcuuccucgacaucuggaccuacaacgccgagcugcuggugcuccuggagaacgagcggacccuggacuaccacgacagcaacgugaagaaccucuacgagaagguccgcucccagcugaagaacaacgccaaggagaucgggaacggcugcuucgaguucuaccacaagugcgacaacacgugcauggagagcgugaagaacgggaccuacgacuaccccaaguacuccaaggaggccaagcugaaccgggaggagaucgacggcgugaagcucgagagcacccgcaucuaccagauccuggcgaucuacuccaccgucgccagcagccuggugcucguggucucccugggggccaucagcuucuggaugugcuccaacggcagccugcagugccggaucugcaucuga

SEQ ID NO: 67746 - RNA, 1701 nt, Artificial Sequence; identical to SEQ ID NO: 66693
  derived and/or modified CDS sequence (opt1) from hemagglutinin__InfluenzaA__ACZ17050

SEQ ID NO: 67747 - RNA, 1701 nt, Artificial Sequence; identical to SEQ ID NO: 66693
  derived and/or modified CDS sequence (opt1) from hemagglutinin__InfluenzaA__ACZ17060

SEQ ID NO: 67748 - RNA, 1701 nt, Artificial Sequence; identical to SEQ ID NO: 66693
  derived and/or modified CDS sequence (opt1) from hemagglutinin__InfluenzaA__ACZ17070

SEQ ID NO: 67749 - RNA, 1701 nt, Artificial Sequence; identical to SEQ ID NO: 66873
  derived and/or modified CDS sequence (opt1) from hemagglutinin__InfluenzaA__ACZ17080

SEQ ID NO: 67750 - RNA, 1701 nt, Artificial Sequence
  derived and/or modified CDS sequence (opt1) from hemagglutinin__InfluenzaA__ACZ17090
augaaggccauccuggugguccuccuguacaccuucgccaccgcgaacgccgacacgcugugcaucggcuaccacgccaacaacagcaccgacaccguggacaccgugcucgagaagaacgucacggugacccacuccgugaaccugcugggggacaagcacaacggcaagcucugcaagcugcgcggggucgcgccccugcaccucggcaagugcaacaucgccggguggauccugggcaacccggagugcgagagccuguccaccgccagcuccuggagcuacaucguggagaccuccagcuccgacaacggcacgugcuaccccggggacuucaucgacuacgaggagcuccgggagcagcugagcuccgugagcuccuucgagcgcuucgagaucuuccccaagaccagcuccuggcccaaccacgacagcaacaagggcgucaccgccgccugcccgcacgccggggcgaaguccuucuacaagaaccugaucuggcucgugaagaagggcaacagcuaccccaagcuguccaagagcuacaucaacgacaaggggaaggaggugcugguccucuggggcauccaccaccccagcaccuccgccgaccagcagagccuguaccagaacgccgacgccuacguguucgugggcacgucccgguacagcaagaaguucaagcccgagaucgccauccgcccgaagguccgggaccaggaggggcgcaugaacuacuacuggacccugguggagcccggcgacaagaucaccuucgaggcgaccgggaaccucguggucccccgguacgccuucgccauggagcgcaacgccggcuccggcaucaucaucagcgacacgcccgugcacgacugcaacacgaccugccagaccccgaagggggccaucaacaccucccugcccuuccagaacauccaccccaucaccaucggcaagugccccaaguacgucaagagcaccaagcugcggcucgcgaccgggcugcgcaacgugccguccauccagagccggggccuguucggggccaucgccggcuucaucgagggcggguggacgggcaugguggacgggugguacggcuaccaccaccagaacgagcagggguccggcuacgccgccgaccucaagagcacccagaacgcgaucgacgagaucaccaacaaggugaacuccgucaucgagaagaugaacacccaguucacggccgugggcaaggaguucaaccaccuggagaagcgcaucgagaaccugaacaagaaggucgacgacggguuccucgacaucuggaccuacaacgccgagcugcuggugcuccuggagaacgagcggacccuggacuaccacgacagcaacgugaagaaccucuacgagaaggucaagucccagcugaagaacaacgccaaggagaucggcaacgggugcuucgaguucuaccacaagugcgacaacacgugcauggagagcgugaagaacggcaccuacgacuaccccaaguacuccgaggaggccaagcugaaccgcgaggagaucgacggggugaagcucgagagcacccggaucuaccagauccuggcgaucuacuccaccgucgccagcagccuggugcucguggucucccugggcgccaucagcuucuggaugugcuccaacggcagccugcagugccgcaucugcaucuga

SEQ ID NO: 67751 - RNA, 1701 nt, Artificial Sequence; identical to SEQ ID NO: 66680
  derived and/or modified CDS sequence (opt1) from hemagglutinin__InfluenzaA__ACZ17100

SEQ ID NO: 67752 - RNA, 1701 nt, Artificial Sequence
  derived and/or modified CDS sequence (opt1) from hemagglutinin__InfluenzaA__ACZ17110
augaaggccauccuggugguccuccuguacaccuucgccaccgcgaacgccgacacgcugugcaucggcuaccacgccaacaacagcaccgacaccguggacaccgugcucgagaagaacgucacggugacccacuccgugaaccugcuggaggacaagcacaacgggaagcucugcaagcugcgcggcgucgcgccccugcaccucgggaagugcaacaucgccggcuggauccuggggaacccggagugcgagagccuguccaccgccagcuccuggagcuacaucguggagaccuccagcuccgacaacggcacgugcuaccccggcgacuucaucgacuacgaggagcuccgggagcagcugagcuccgugagcuccuucgagcgcuucgagaucuuccccaagaccagcuccuggcccaaccacgacagcaacaagggggucaccgccgccugcccgcacgccggcgcgaaguccuucuacaagaaccugaucuggcucgugaagaaggggaacagcuaccccgagcuguccaagagcuacaucaacgacaagggcaaggaggugcugguccucugggggauccaccaccccagcaccuccgccgaccagcagagccuguaccagaacgccgacgccuacguguucgugggcacgucccgguacagcaagaaguucaagcccgagaucgccauccgcccgaagguccgggaccaggagggccgcaugaacuacuacuggacccugguggagcccggggacaagaucaccuucgaggcgaccggcaaccucguggucccccgguacgccuucgccauggagcgcaacgccggguccggcaucaucaucagcgacacgcccgugcacgacugcaacacgaccugccagaccccgaagggcgccaucaacaccucccugcccuuccagaacauccaccccaucaccaucgggaagugccccaaguacgucaagagcaccaagcugcggcucgcgaccggccugcgcaacgugccguccauccagagccgggggcuguucggcgccaucgccggguucaucgagggcggcuggacggggaugguggacggcugguacggguaccaccaccagaacgagcagggcuccggguacgccgccgaccucaagagcacccagaacgcgaucgacgagaucaccaacaaggugaacuccgucaucgagaagaugaacacccaguucacggccgugggcaaggaguucaaccaccuggagaagcgcaucgagaaccugaacaagaaggucgacgacggcuuccucgacaucuggaccuacaacgccgagcugcuggugcuccuggagaacgagcggacccuggacuaccacgacagcaacgugaagaaccucuacgagaagguccgcucccagcugaagaacaacgccaaggagaucgggaacggcugcuucgaguucuaccacaagugcgacaacacgugcauggagagcgugaagaacgggaccuacgacuaccccaaguacuccgaggaggccaagcugaaccgggaggagaucgacggcgugaagcucgagagcacccgcaucuaccagauccuggcgaucuacuccaccgucgccagcagccuggugcucguggucucccugggggccaucagcuucuggaugugcuccaacggcagccugcagugccggaucugcaucuga

SEQ ID NO: 67753 - RNA, 1701 nt, Artificial Sequence
  derived and/or modified CDS sequence (opt1) from hemagglutinin__InfluenzaA__ACZ17120
augaaggccauccuggugguccuccuguacaccuucgccaccgcgaacgccgacacgcugugcaucggcuaccacgccaacaacagcaccgacaccguggacaccgugcucgagaagaacgucacggugacccacuccgugaaccugcuggaggacaagcacaacgggaagcucugcaagcugcgcggcgucgcgccccugcaccucgggaagugcaacaucgccggcuggauccuggggaacccggagugcgagagccuguccaccgccagcuccuggagcuacaucguggagaccuccagcuccgacaacggcacgugcuaccccggcgacuucaucgacuacgaggagcuccgggagcagcugagcuccgugagcuccuucgagcgcuucgagaucuuccccaagaccagcuccuggcccaaccacgacagcaacaagggggucaccgccgccugcccgcacgccggcgcgaaguccuucuacaagaaccugaucuggcucgugaagaaggggaacagcuaccccaagcuguccaagagcuacaucaacgacaagggcaaggaggugcugguccucugggggauccaccaccccagcaccuccgccgaccagcagagccuguaccagaacgccgacgccuacguguucgugggcacgucccgguacagcaagaaguucaagcccgagaucgccauccgcccgaagguccgggaccaggagggccgcaugaacuacuacuggacccugguggagcccggggacaagaucaccuucgaggcgaccggcaaccucguggucccccgguacgccuucgccauggagcgcaacgccggguccggcaucaucaucagcgacacgcccgugcacgacugcaacacgaccugccagaccccgaagggcgccaucaacaccucccugcccuuccagaacauccaccccaucaccaucgggaagugccccaaguacgucaagagcaccaagcugcggcucgcgaccggccugcgcaacgugccguccauccagagccgggggcuguucggcgccaucgccggguucaucgagggcggcuggacggggaugguggacggcugguacggguaccaccaccagaacgagcagggcuccggguacgccgccgaccucaagagcacccagaacgcgaucgacgagaucaccaacaaggugaacuccgucaucgagaagaugaacacccaguucacggccgugggcaaggaguucaaccaccuggagaagcgcaucgagaaccugaacaagaaggucgacgacggcuuccucgacaucuggaccuacaacgccgagcugcuggugcuccuggagaacgagcggacccuggacuaccacgacagcaacgugaagaaccucuacgagaagguccgcucccagcugaagaccaacgccaaggagaucgggaacggcugcuucgaguucuaccacaagugcgacaacacgugcauggagagcgugaagaacgggaccuacgacuaccccaaguacuccgaggaggccaagcugaaccgggaggagaucgacggcgugaagcucgagagcacccgcaucuaccagauccuggcgaucuacuccaccgucgccagcagccuggugcucguggucucccugggggccaucagcuucuggaugugcuccaacggcagccugcagugccggaucugcaucuga

SEQ ID NO: 67754 - RNA, 1701 nt, Artificial Sequence
  derived and/or modified CDS sequence (opt1) from hemagglutinin__InfluenzaA__ACZ17130
augaaggccauccuggugguccuccuguacaccuucgccaccgcgaacgccgacacgcugugcaucggcuaccacgccaacaacagcaccgacaccguggacaccgugcucgagaagaacgucacggugacccacuccgugaaccugcuggaggacaagcacaacgggaagcucugcaagcugcgcggcgucgcgccccugcaccucgggaagugcaacaucgccggcuggauccuggggaacccggagugcgagagccuguccaccgccagcuccuggagcuacaucguggagaccuccagcuccgacaacggcacgugcuaccccggcgacuucaucgacuacgaggagcuccgggagcagcugagcuccgugagcuccuucgagcgcuucgagaucuuccccaagaccagcuccuggcccaaccacgacagcaacaagggggucaccgccgccugcccgcacgccggcgcgaaguccuucuacaagaaccugaucuggcucgugaagaaggggaacagcuaccccaagcuguccaagagcuacaucaacgacaagggcaaggaggugcugguccucugggggauccaccaccccagcaccuccgccgaccagcagagccuguaccagaacgccgacgccuacguguucgugggcacgucccgguacagcaagaaguucaagcccgagaucgccauccgcccgaagguccgggaccaggagggccgcaugaacuacuacuggacccugguggagcccggggacaagaucaccuucgaggcgaccggcaaccucguggucccccgguacgccuucgccauggagcgcaacgccggguccggcaucaucaucagcgacacgcccgugcacgacugcaacacgaccugccagaccccgaagggcgccaucaacaccucccugcccuuccagaacauccaccccaucaccaucgggaagugccccaaguacgucaagagcaccaagcugcggcucgcgaccggccugcgcaacgugccguccauccagagccgggggcuguucggcgccaucgccggguucaucgagggcggcuggacggggaugguggacggcugguacggguaccaccaccagaacgagcagggcuccggguacgccgccgaccucaagagcacccagaacgcgaucgacgagaucaccaacaaggugaacuccgucaucgagaagaugaacgcccaguucaccgccgugggcaaggaguucaaccaccuggagaagcgcaucgagaaccugaacaagaaggucgacgacggcuuccucgacaucuggacguacaacgccgagcugcuggugcuccuggagaacgagcggacccuggacuaccacgacagcaacgugaagaaccucuacgagaagguccgcucccagcugaagaacaacgccaaggagaucgggaacggcugcuucgaguucuaccacaagugcgacaacacgugcauggagagcgugaagaacgggaccuacgacuaccccaaguacuccgaggaggcgaagcugaaccgggaggagaucgacggcgugaagcucgagagcacccgcaucuaccagauccuggccaucuacuccaccgucgccagcagccuggugcucguggucucccugggggccaucagcuucuggaugugcuccaacggcagccugcagugccggaucugcaucuga

SEQ ID NO: 67755 - RNA, 1701 nt, Artificial Sequence; identical to SEQ ID NO: 67491
  derived and/or modified CDS sequence (opt1) from hemagglutinin__InfluenzaA__ACZ17140

SEQ ID NO: 67756 - RNA, 1701 nt, Artificial Sequence; identical to SEQ ID NO: 67322
  derived and/or modified CDS sequence (opt1) from hemagglutinin__InfluenzaA__ACZ17150

SEQ ID NO: 67757 - RNA, 1701 nt, Artificial Sequence; identical to SEQ ID NO: 67322
  derived and/or modified CDS sequence (opt1) from hemagglutinin__InfluenzaA__ACZ17160

SEQ ID NO: 67758 - RNA, 1701 nt, Artificial Sequence; identical to SEQ ID NO: 67322
  derived and/or modified CDS sequence (opt1) from hemagglutinin__InfluenzaA__ACZ17170

SEQ ID NO: 67759 - RNA, 1701 nt, Artificial Sequence
  derived and/or modified CDS sequence (opt1) from hemagglutinin__InfluenzaA__ACZ17190
augaaggccauccuggugguccuccuguacaccuucgccaccgcgaacgccgacacgcugugcaucggcuaccacgccaacaacagcaccgacaccguggacaccgugcucgagaagaacgucacggugacccacuccgugaaccugcuggaggacaagcacaacgggaagcucugcaagcugcgcggcgucgcgccccugcaccucgggaagugcaacaucgccggcuggauccuggggaacccggagugcgagagccuguccaccgccagcuccuggagcuacaucguggagaccuccagcuccgacaacggcacgugcuaccccggcgacuucaucgacuacgaggagcuccgggagcagcugagcuccgugagcuccuucgagcgcuucgagaucuuccccaagaccagcuccuggcccaaccacgacagcaacaagggggucaccgccgccugcccgcacgccggcgcgaaguccuucuacaagaaccugaucuggcucgugaagaaggggaacagcuaccccaagcuguccaagagcuacaucaacgacaagggcaaggaggugcugguccucugggggauccaccaccccagcaccuccgccgaccagcagagccuguaccagaacgccgacgccuacguguucgugggcacgucccgguacagcaagaaguucaagcccgagaucgccauccgcccgaagguccgggaccaggagggccgcaugaacuacuacuggacccugguggagcccggggacaagaucaccuucgaggcgaccggcaaccucguggucccccgguacgccuucgccauggagcgcaacgccggguccggcaucaucaucagcgacacgcccgugcacgacugcuccacgaccugccagaccccggagggcgccaucaacaccagccugcccuuccagaacauccaccccaucaccaucgggaagugccccaaguacgugaaguccaccaagcugcggcucgcgaccggccugcgcaacgucccgagcauccagucccgggggcuguucggcgccaucgccggguucaucgagggcggcuggacggggaugguggacggcugguacggguaccaccaccagaacgagcagggcagcggguacgccgccgaccucaaguccacccagaacgcgaucgacgagaucaccaacaaggugaacagcgucaucgagaagaugaacacccaguucacggccgugggcaaggaguucaaccaccuggagaagcgcaucgagaaccugaacaagaaggucgacgacggcuuccucgacaucuggaccuacaacgccgagcugcuggugcuccuggagaacgagcggacccuggacuaccacgacuccaacgugaagaaccucuacgagaagguccgcagccagcugaagaacaacgccaaggagaucgggaacggcugcuucgaguucuaccacaagugcgacaacacgugcauggaguccgugaagaacgggaccuacgacuaccccaaguacagcgaggaggccaagcugaaccgggaggagaucgacggcgugaagcucgaguccacccgcaucuaccagauccuggcgaucuacagcaccgucgccagcucccuggugcucguggucagccugggggccaucuccuucuggaugugcagcaacggcucccugcagugccggaucugcaucuga

SEQ ID NO: 67760 - RNA, 1701 nt, Artificial Sequence; identical to SEQ ID NO: 67759
  derived and/or modified CDS sequence (opt1) from hemagglutinin__InfluenzaA__ACZ17200

SEQ ID NO: 67761 - RNA, 1701 nt, Artificial Sequence; identical to SEQ ID NO: 66693
  derived and/or modified CDS sequence (opt1) from hemagglutinin__InfluenzaA__ACZ17220

SEQ ID NO: 67762 - RNA, 1701 nt, Artificial Sequence
  derived and/or modified CDS sequence (opt1) from hemagglutinin__InfluenzaA__ACZ17230
augaaggccauccuggugguccuccuguacaccuucgccaccgcgaacgccgacacgcugugcaucggcuaccacgccaacaacagcaccgacaccguggacaccgugcucgagaagaacgucacggugacccacuccgugaaccugcuggaggacaagcacaacgggaagcucugcaagcugcgcggcgucgcgccccugcaccucgggaagugcaacaucgccggcuggauccuggggaacccggagugcgagagccuguccaccgccagcuccuggagcuacaucguggagaccuccagcuccgacaacggcacgugcuaccccggcgacuucaucgacuacgaggagcucaaggagcagcugagcuccgugagcuccuucgagcgguucgagaucuuccccaagaccagcuccuggcccaaccacgacagcaacaagggggucaccgccgccugcccgcacgccggcgcgaaguccuucuacaagaaccugaucuggcucgugaagaaggggaacagcuaccccaagcuguccaagagcuacaucaacgacaagggcaaggaggugcugguccucugggggauccaccaccccagcaccuccgccgaccagcagagccuguaccagaacgccgacgccuacguguucgugggcacgucccgcuacagcaagaaguucaagcccgagaucgccauccggccgaagguccgcgaccaggagggccggaugaacuacuacuggacccugguggagcccggggacaagaucaccuucgaggcgaccggcaaccucguggucccccgcuacgccuucgccauggagcggaacgccggguccggcaucaucaucagcgacacgcccgugcacgacugcaacacgaccugccagaccccgaagggcgccaucaacaccucccugcccuuccagaacauccaccccaucaccaucgggaagugccccaaguacgucaagagcaccaagcugcgccucgcgaccggccugcggaacgugccguccauccagagccgcgggcuguucggcgccaucgccggguucaucgagggcggcuggacggggaugguggacggcugguacggguaccaccaccagaacgagcagggcuccggguacgccgccgaccucaagagcacccagaacgcgaucgacgagaucaccaacaaggugaacuccgucaucgagaagaugaacacccaguucacggccgugggcaaggaguucaaccaccuggagaagcggaucgagaaccugaacaagaaggucgacgacggcuuccucgacaucuggaccuacaacgccgagcugcuggugcuccuggagaacgagcgcacccuggacuaccacgacagcaacgugaagaaccucuacgagaagguccggucccagcugaagaacaacgccaaggagaucgggaacggcugcuucgaguucuaccacaagugcgacaacacgugcauggagagcgugaagaacgggaccuacgacuaccccaaguacuccgaggaggccaagcugaaccgcgaggagaucgacggcgugaagcucgagagcacccggaucuaccagauccuggcgaucuacuccaccgucgccagcagccuggugcucguggucucccugggggccaucagcuucuggaugugcuccaacggcagccugcagugccgcaucugcaucuga

SEQ ID NO: 67763 - RNA, 1701 nt, Artificial Sequence; identical to SEQ ID NO: 66693
  derived and/or modified CDS sequence (opt1) from hemagglutinin__InfluenzaA__ACZ17240

SEQ ID NO: 67764 - RNA, 1701 nt, Artificial Sequence; identical to SEQ ID NO: 66693
  derived and/or modified CDS sequence (opt1) from hemagglutinin__InfluenzaA__ACZ17250

SEQ ID NO: 67765 - RNA, 1701 nt, Artificial Sequence; identical to SEQ ID NO: 66693
  derived and/or modified CDS sequence (opt1) from hemagglutinin__InfluenzaA__ACZ17260

SEQ ID NO: 67766 - RNA, 1701 nt, Artificial Sequence
  derived and/or modified CDS sequence (opt1) from hemagglutinin__InfluenzaA__ACZ17270
augaaggccauccuggugguccuccuguacaccuucgccaccgcgaacgccgacacgcugugcaucggcuaccacgccaacaacagcaccgacaccguggacaccgugcucgagaagaacgucacggugacccacuccgugaaccugcuggaggacaagcacaacgggaagcucugcaagcugcgcggcgucgcgccccugcaccucgggcggugcaacaucgccggcuggauccuggggaacccggagugcgagagccuguccaccgccagcuccuggagcuacaucguggagaccuccagcuccgacaacggcacgugcuaccccggcgacuucaucgacuacgaggagcuccgcgagcagcugagcuccgugagcuccuucgagcgguucgagaucuuccccaagaccagcuccuggcccaaccacgacagcaacaagggggucaccgccgccugcccgcacgccggcgcgaaguccuucuacaagaaccugaucuggcucgugaagaaggggaacagcuaccccaagcuguccaagagcuacaucaacgacaagggcaaggaggugcugguccucugggggauccaccaccccagcaccuccgccgaccagcagagccuguaccagaacgccgacgccuacguguucgugggcacgucccgcuacagcaagaaguucaagcccgagaucgccauccggccgaagguccgcgaccaggagggccggaugaacuacuacuggacccugguggagcccggggacaagaucaccuucgaggcgaccggcaaccucguggucccccgcuacgccuucgccauggagcggaacgccggguccggcaucaucaucagcgacacgcccgugcacgacugcaacacgaccugccagaccccgaagggcgccaucaacaccucccugcccuuccagaacauccaccccaucaccaucgggaagugccccaaguacgucaagagcaccaagcugcgccucgcgaccggccugcggaacgugccguccauccagagccgcgggcuguucggcgccaucgccggguucaucgagggcggcuggacggggaugguggacggcugguacggguaccaccaccagaacgagcagggcuccggguacgccgccgaccucaagagcacccagaacgcgaucgacgagaucaccaacaaggugaacuccgucaucgagaagaugaacacccaguucacggccgugggcaaggaguucaaccaccuggagaagcggaucgagaaccugaacaagaaggucgacgacggcuuccucgacaucuggaccuacaacgccgagcugcuggugcuccuggagaacgagcgcacccuggacuaccacgacagcaacgugaagaagcucuacgagaagguccggucccagcugaagaacaacgccaaggagaucgggaacggcugcuucgaguucuaccacaagugcgacaacacgugcauggagagcgugaagaacgggaccuacgacuaccccaaguacuccgaggaggccaagcugaaccgcgaggagaucgacggcgugaagcucgagagcacccgggucuaccagauccuggcgaucuacuccaccguggccagcagccuggugcucgucgugucccugggggccaucagcuucuggaugugcuccaacggcagccugcagugccgcaucugcaucuga

SEQ ID NO: 67767 - RNA, 1701 nt, Artificial Sequence; identical to SEQ ID NO: 66873
  derived and/or modified CDS sequence (opt1) from hemagglutinin__InfluenzaA__ACZ17290

SEQ ID NO: 67768 - RNA, 1701 nt, Artificial Sequence; identical to SEQ ID NO: 66873
  derived and/or modified CDS sequence (opt1) from hemagglutinin__InfluenzaA__ACZ17300

SEQ ID NO: 67769 - RNA, 1701 nt, Artificial Sequence; identical to SEQ ID NO: 66873
  derived and/or modified CDS sequence (opt1) from hemagglutinin__InfluenzaA__ACZ17310

SEQ ID NO: 67770 - RNA, 1701 nt, Artificial Sequence; identical to SEQ ID NO: 66693
  derived and/or modified CDS sequence (opt1) from hemagglutinin__InfluenzaA__ACZ17398

SEQ ID NO: 67771 - RNA, 1701 nt, Artificial Sequence; identical to SEQ ID NO: 66693
  derived and/or modified CDS sequence (opt1) from hemagglutinin__InfluenzaA__ACZ17408

SEQ ID NO: 67772 - RNA, 1701 nt, Artificial Sequence; identical to SEQ ID NO: 66693
  derived and/or modified CDS sequence (opt1) from hemagglutinin__InfluenzaA__ACZ17418

SEQ ID NO: 67773 - RNA, 1701 nt, Artificial Sequence
  derived and/or modified CDS sequence (opt1) from hemagglutinin__InfluenzaA__ACZ17438
augaaggccauccuggugguccuccuguacaccuucgccaccgcgaacgccgacacgcugugcaucggcuaccacgccaacaacagcaccgacaccguggacaccgugcucgagaagaacgucacggugacccacuccgugaaccugcuggaggacaagcacaacgggaagcucugcaagcugcgcggcgucgcgccccugcaccucgggaagugcaacaucgccggcuggauccuggggaacccggagugcgagagccuguccaccgccagcuccuggagcuacaucguggagaccuccagcuccgacaacggcacgugcuaccccggcgacuucaucgacuacgaggagcuccgggagcagcugagcuccgugagcuccuucgagcgcuucgagaucuuccccaagaccagcuccuggcccaaccacgacagcaacaagggggucaccgccgccugcccgcacgccggcgcgaaguccuucuacaagaaccugaucuggcucgugaagaaggggaacagcuaccccaagcuguccaagagcuacaucaacgacaagggcaaggaggugcugguccucugggggauccaccaccccagcaccuccgccgaccagcagagccuguaccagaacgccgacuccuacguguucgugggcagcucccgguacagcaagaaguucaagcccgagaucgccauccgcccgaagguccgggaccaggagggccgcaugaacuacuacuggacgcugguggagcccggggacaagaucaccuucgaggccaccggcaaccucguggucccccgguacgcguucgccauggagcgcaacgccggguccggcaucaucaucagcgacacccccgugcacgacugcaacacgaccugccagaccccgaagggcgccaucaacaccucccugcccuuccagaacauccaccccaucacgaucgggaagugccccaaguacgucaagagcaccaagcugcggcucgccaccggccugcgcaacgugccguccauccagagccgggggcuguucggcgcgaucgccggguucaucgagggcggcuggaccgggaugguggacggcugguacggguaccaccaccagaacgagcagggcuccggguacgccgccgaccucaagagcacgcagaacgccaucgacgagaucaccaacaaggugaacuccgucaucgagaagaugaacacccaguucaccgcggugggcaaggaguucaaccaccuggagaagcgcaucgagaaccugaacaagaaggucgacgacggcuuccucgacaucuggacguacaacgccgagcugcuggugcuccuggagaacgagcggacccuggacuaccacgacagcaacgugaagaaccucuacgagaagguccgcucccagcugaagaacaacgccaaggagaucgggaacggcugcuucgaguucuaccacaagugcgacaacacgugcauggagagcgugaagaacgggaccuacgacuaccccaaguacuccgaggaggccaagcugaaccgggaggagaucgacggcgugaagcucgagagcacccgcaucuaccagauccuggccaucuacagcaccgucgcguccagccuggugcucguggucucccugggggccaucagcuucuggaugugcuccaacggcagccugcagugccggaucugcaucuga

SEQ ID NO: 67774 - RNA, 1701 nt, Artificial Sequence; identical to SEQ ID NO: 66680
  derived and/or modified CDS sequence (opt1) from hemagglutinin__InfluenzaA__ACZ17448

SEQ ID NO: 67775 - RNA, 1701 nt, Artificial Sequence; identical to SEQ ID NO: 66693
  derived and/or modified CDS sequence (opt1) from hemagglutinin__InfluenzaA__ACZ17458

SEQ ID NO: 67776 - RNA, 1701 nt, Artificial Sequence; identical to SEQ ID NO: 66680
  derived and/or modified CDS sequence (opt1) from hemagglutinin__InfluenzaA__ACZ17478

SEQ ID NO: 67777 - RNA, 1701 nt, Artificial Sequence; identical to SEQ ID NO: 66693
  derived and/or modified CDS sequence (opt1) from hemagglutinin__InfluenzaA__ACZ17488

SEQ ID NO: 67778 - RNA, 1701 nt, Artificial Sequence
  derived and/or modified CDS sequence (opt1) from hemagglutinin__InfluenzaA__ACZ18240
augaaggccauccuggugguccuccuguacaccuucgccaccgcgaacgccgacacgcugugcaucggcuaccacgccaacaacagcaccgacaccguggacaccgugcucgagaagaacgucacggugacccacuccgugaaccugcuggaggacaagcacaacgggaagcucugcaagcugcgcggcgucgcgccccugcaccucgggaagugcaacaucgccggcuggauccuggggaacccggagugcgagagccuguccaccaccagcuccuggagcuacaucguggagacguccagcuccgacaacgggaccugcuaccccggcgacuucaucgacuacgaggagcuccgggagcagcugagcuccgugagcuccuucgagcgcuucgagaucuuccccaagaccagcuccuggcccaaccacgacccgaacaagggcgucaccgccgccugcccccacgccggcgccaagagcuucuacaagaaccugaucuggcucgugaagaaggggaacuccuaccccaagcugagcaaguccuacaucaacgacaagggcaaggaggugcugguccucugggggauccaccaccccagcacgagcgcggaccagcagucccuguaccagaacgccgacgccuacguguucgugggcaccagccgguacuccaagaaguucaagccggagaucgccauccgccccaagguccgggaccaggagggccgcaugaacuacuacuggacccugguggagcccggggacaagaucaccuucgaggccacgggcaaccucguggucccccgguacgcguucgccauggagcgcaacgccgggagcggcaucaucaucuccgacaccccggugcacgacugcaacacgaccugccagacccccaagggcgccaucaacaccagccugcccuuccagaacauccaccccaucaccaucgggaagugcccgaaguacgugaaguccaccaagcugcggcucgccacgggccugcgcaacguccccagcauccagucccgggggcuguucggcgcgaucgccggguucaucgagggcggcuggaccgggaugguggacggcugguacggguaccaccaccagaacgagcagggcagcggguacgccgccgaccucaaguccacccagaacgccaucgacgagaucaccaacaaggugaacagcgucaucgagaagaugaacacgcaguucaccgcggugggcaaggaguucaaccaccuggagaagcgcaucgagaaccugaacaagaaggucgacgacggcuuccucgacaucuggaccuacaacgccgagcugcuggugcuccuggagaacgagcggacccuggacuaccacgacuccaacgugaagaaccucuacgagaagguccgcagccagcugaagaacaacgccaaggagaucgggaacggcugcuucgaguucuaccacaagugcgacaacacgugcauggaguccgugaagaacgggaccuacgacuaccccaaguacagcgaggaggccaagcugaaccgggaggagaucgacggcgugaagcucgaguccacccgcaucuaccagauccuggccaucuacagcaccgucgcguccagccuggugcucguggucagccugggggccaucuccuucuggaugugcagcaacggcucccugcagugccggaucugcaucuga

SEQ ID NO: 67779 - RNA, 1701 nt, Artificial Sequence; identical to SEQ ID NO: 66693
  derived and/or modified CDS sequence (opt1) from hemagglutinin__InfluenzaA__ACZ18241

SEQ ID NO: 67780 - RNA, 1701 nt, Artificial Sequence
  derived and/or modified CDS sequence (opt1) from hemagglutinin__InfluenzaA__ACZ27800
augaaggccauccuggugguccuccuguacaccuucgccaccgcgaacgccgacacgcugugcaucggcuaccacgccaacaacagcaccgacaccguggacaccgugcucgagaagaacgucacggugacccacuccgugaaccugcuggaggacaagcacaacgggaagcucugcaagcugcgcggcgucgcgccccugcaccucgggaagugcaacaucgccggcuggauccuggggaacccggagugcgagagccuguccaccgccagcuccuggagcuacaucguggagaccuccagcuccgacaacggcacgugcuaccccggcgacuucaucgacuacgaggagcuccgggagcagcugagcuccgugagcuccuucgagcgcuucgagaucuuccccaagaccagcuccuggcccaaccacgacagcaacaagggggucaccgccgccugcccgcacgccggcgcgaaguccuucuacaagaaccugaucuggcucgugaagaaggggaacagcuaccccaagcuguccaagagcuacaucaacgacaagggcaaggaggugcugguccucugggggauccaccaccccagcaccuccgccgaccagcagagccuguaccagaacgccgacgccuacguguucgugggcuccagccgguacuccaaggaguucaagcccgagaucgccauccgcccgaagguccggggccaggaggggcgcaugaacuacuacuggacgcugguggagcccggcgacaagaucaccuucgaggcgaccgggaaccucguggucccccgguacgccuucgccauggagcgcaacgccggcagcggcaucaucaucuccgacacccccgugcacgacugcaacacgaccugccagaccccgaagggggccaucaacaccagccugcccuuccagaacauccaccccaucacgaucggcaagugccccaaguacgugaaguccaccaagcugcggcucgcgaccgggcugcgcaacgucccgagcauccagucccggggccuguucggggccaucgccggcuucaucgagggcggguggaccggcaugguggacgggugguacggcuaccaccaccagaacgagcaggggagcggcuacgccgccgaccucaaguccacgcagaacgcgaucgacgagaucaccaacaaggugaacagcgucaucgagaagaugaacacccaguucaccgccgugggcaaggaguucaaccaccuggagaagcgcaucgagaaccugaacaagaaggucgacgacggguuccucgacaucuggacguacaacgccgagcugcuggugcuccuggagaacgagcggacccuggacuaccacgacuccaacgugaagaaccucuacgagaagguccgcagccagcugaagaacaacgccaaggagaucggcaacgggugcuucgaguucuaccacaagugcgacaacacgugcauggaguccgugaagaacggcaccuacgacuaccccaaguacagcgaggaggccaagcugaaccgggaggagaucgacggggugaagcucgaguccacccgcaucuaccagauccuggcgaucuacagcaccgucgccagcucccuggugcucguggucagccugggcgccaucuccuucuggaugugcagcaacggcucccugcagugccggaucugcaucuga

SEQ ID NO: 67781 - RNA, 1701 nt, Artificial Sequence; identical to SEQ ID NO: 66693
  derived and/or modified CDS sequence (opt1) from hemagglutinin__InfluenzaA__ACZ27810

SEQ ID NO: 67782 - RNA, 1701 nt, Artificial Sequence; identical to SEQ ID NO: 66693
  derived and/or modified CDS sequence (opt1) from hemagglutinin__InfluenzaA__ACZ27820

SEQ ID NO: 67783 - RNA, 1701 nt, Artificial Sequence; identical to SEQ ID NO: 66693
  derived and/or modified CDS sequence (opt1) from hemagglutinin__InfluenzaA__ACZ27830

SEQ ID NO: 67784 - RNA, 1701 nt, Artificial Sequence; identical to SEQ ID NO: 67046
  derived and/or modified CDS sequence (opt1) from hemagglutinin__InfluenzaA__ACZ27840

SEQ ID NO: 67785 - RNA, 1701 nt, Artificial Sequence; identical to SEQ ID NO: 66680
  derived and/or modified CDS sequence (opt1) from hemagglutinin__InfluenzaA__ACZ45006

SEQ ID NO: 67786 - RNA, 1701 nt, Artificial Sequence
  derived and/or modified CDS sequence (opt1) from hemagglutinin__InfluenzaA__ACZ45007
augaaggccauccuggugguccuccuguacaccuucgccaccgcgaacgccgacacgcugugcaucggcuaccacgccaacaacagcaccgacaccguggacaccgugcucgagaagaacgucacggugacccacuccgugaaccugcuggaggacaagcacaacgggaagcucugcaagcugcgcggcgucgcgccccugcaccucgggaagugcaacaucgccggcuggauccuggggaacccggagugcgagagccuguccaccgccagcuccuggagcuacaucguggagaccuccagcuccgacaacggcacgugcuaccccggcgacuucaucgacuacgaggagcuccgggagcagcugagcuccgugagcuccuucgagcgcuucgagaucuuccccaagaccagcuccuggcccaaccacgacagcaacaagggggucaccgccgccugcccgcacgccggcgcgaaguccuucuacaagaaccugaucuggcucgugaagaaggggaacagcuaccccaagcuguccaagagcuacaucaacgacaagggcaaggaggugcugguccucugggggauccaccaccccagcaccuccgccgaccagcagagccuguaccagaacgccgacgccuacguguucgugggcacgucccgguacagcaagaaguucaagcccgagaucgccauccgcccgaagguccgggaccaggagggccgcaugaacuacuacuggacccugguggagcccggggacaagaucaccuucgaggcgaccggcaaccucguggucccccgguacgccuucgccauggagcgcaacgccggguccggcaucaucaucagcgacacgcccgugcacgacugcaacacgaccugccagaccccgaagggcgccaucaacaccucccugcccuuccagaacauccaccccaucaccaucgggaagugccccaaguacgucaagagcaccaagcugcggcucgcgaccggccugcgcaacgugccguccauccagagccgggggcuguucggcgccaucgccggguucaucgagggcggcuggacggggaugguggacggcugguacggguaccaccaccagaacgagcagggcuccggggacgccgccgaccucaagagcacccagaacgcgaucgacgagaucaccaacaaggugaacuccgucaucgagaagaugaacacccaguucacggccgugggcaaggaguucaaccaccuggagaagcgcaucgagaaccugaacaagaaggucgacgacggcuuccucgacaucuggaccuacaacgccgagcugcuggugcuccuggagaacgagcggacccuggacuaccacgacagcaacgugaagaaccucuacgagaagguccgcucccagcugaagaacaacgccaaggagaucgggaacggcugcuucgaguucuaccacaagugcgacaacacgugcauggagagcgugaagaacgggaccuacgacuaccccaaguacuccgaggaggccaagcugaaccgggaggagaucgacggcgugaagcucgagagcacccgcaucuaccagauccuggcgaucuacuccaccgucgccagcagccuggugcucguggucucccugggggccaucagcuucuggaugugcuccaacggcagccugcagugccggaucugcaucuga

SEQ ID NO: 67787 - RNA, 1701 nt, Artificial Sequence; identical to SEQ ID NO: 67046
  derived and/or modified CDS sequence (opt1) from hemagglutinin__InfluenzaA__ACZ45008

SEQ ID NO: 67788 - RNA, 1701 nt, Artificial Sequence; identical to SEQ ID NO: 67046
  derived and/or modified CDS sequence (opt1) from hemagglutinin__InfluenzaA__ACZ45009

SEQ ID NO: 67789 - RNA, 1701 nt, Artificial Sequence; identical to SEQ ID NO: 66935
  derived and/or modified CDS sequence (opt1) from hemagglutinin__InfluenzaA__ACZ45010

SEQ ID NO: 67790 - RNA, 1701 nt, Artificial Sequence; identical to SEQ ID NO: 66693
  derived and/or modified CDS sequence (opt1) from hemagglutinin__InfluenzaA__ACZ45012

SEQ ID NO: 67791 - RNA, 1701 nt, Artificial Sequence
  derived and/or modified CDS sequence (opt1) from hemagglutinin__InfluenzaA__ACZ45013
augaaggccauccuggugguccuccuguacaccuucgccaccgcgaacgccgacacgcugugcaucggcuaccacgccaacaacagcaccgacaccguggacaccgugcucgagaagaacgucacggugacccacuccgugaaccugcuggaggacaagcacaacgggaagcucugcaagcugcgcggcgucgcgccccugcaccucgggaagugcaacaucgccggcuggauccuggggaacccggagugcgagagccuguccaccgcgagcuccuggagcuacaucguggagaccuccagcuccgacaacggcacgugcuaccccggcgacuucaucgacuacgaggagcuccgggagcagcugagcuccgugagcuccuucgagcgcuucgagaucuuccccaagaccagcuccuggcccaaccacgacagcuccaagggggucaccgccgccugcccgcacgccggcgccaagagcuucuacaagaaccugaucuggcucgugaagaaggggaacuccuaccccaagcugagcaagagcuacaucaacgacaagggcaaggaggugcugguccucugggggauccaccaccccuccaccagcgccgaccagcagucccuguaccagaacgccgacgccuacguguucgugggcacgagccgguacuccaagaaguucaagcccgagaucgccauccgcccgaagguccgggagcaggagggccgcaugaacuacuacuggacccugguggagcccggggacaagaucaccuucgaggcgaccggcaaccucguggucccccgguacgccuucgccauggagcgcaacgccgggagcggcaucaucaucuccgacacgcccgugcacgacugcaacacgaccugccagaccccgaagggcgccaucaacaccagccugcccuuccagaacauccaccccaucaccaucgggaagugccccaaguacgugaaguccaccaagcugcggcucgcgaccggccugcgcaacgucccgagcauccagucccgggggcuguucggcgccaucgccggguucaucgagggcggcuggacggggaugguggacggcugguacggguaccaccaccagaacgagcagggcagcggguacgccgccgaccucaaguccacccagaacgcgaucgacgagaucaccaacaaggugaacagcgucaucgagaagaugaacacccaguucacggccgugggcaaggaguucaaccaccuggagaagcgcaucgagaaccugaacaagaaggucgacgacggcuuccucgacaucuggaccuacaacgccgagcugcuggugcuccuggagaacgagcggacccuggacuaccacgacuccaacgugaagaaccucuacgagaagguccgcagccagcugaagaacaacgccaaggagaucgggaacggcugcuucgaguucuaccacaagugcgacaacacgugcauggaguccgugaagaacgggaccuacgacuaccccaaguacagcgaggaggccaagcugaaccgggaggagaucgacggcgugaagcucgaguccacccgcaucuaccagauccuggcgaucuacagcaccgucgccagcucccuggugcucguggucagccugggggccaucuccuucuggaugugcagcaacggcucccugcagugccggaucugcaucuga

SEQ ID NO: 67792 - RNA, 1701 nt, Artificial Sequence; identical to SEQ ID NO: 66693
  derived and/or modified CDS sequence (opt1) from hemagglutinin__InfluenzaA__ACZ45014

SEQ ID NO: 67793 - RNA, 1701 nt, Artificial Sequence; identical to SEQ ID NO: 66693
  derived and/or modified CDS sequence (opt1) from hemagglutinin__InfluenzaA__ACZ45016

SEQ ID NO: 67794 - RNA, 1701 nt, Artificial Sequence
  derived and/or modified CDS sequence (opt1) from hemagglutinin__InfluenzaA__ACZ45028
augaaggccauccuggugguccuccuguacaccuucgccaccgcgaacgccgacacgcugugcaucggcuaccacgccaacaacagcaccgacaccguggacaccgugcucgagaagaacgucacggugacccacuccgugaaccugcuggaggacaagcacaacgggaagcucugcaagcugcgcggcgucgcgccccugcaccucgggaagugcaacaucgccggcuggauccuggggaacccggagugcgagagccuguccaccgccagcuccuggagcuacaucguggagaccuccagcuccgacaacggcacgugcuaccccggcgacuucaucgacuacgaggagcuccgggagcagcugagcuccgugagcuccuucgagcgcuucgagaucuuccccaagaccagcuccuggcccaaccacgacagcaacaagggggucaccgccgccugcccgcacgccggcgcgaaguccuucuacaagaaccugaucuggcucgugaagaaggggaacagcuaccccaagcuguccaagagcuacaucaacgacaagggcaaggaggugcugguccucugggggauccaccaccccagcaccuccgccgaccagcagagccuguaccagaacgccgacgccuacguguucgugggcacgucccgguacagcaagaaguucaagcccgagaucgccauccgcccgaagguccgggaccaggagggccgcaugaacuacuacuggacccugguggagcccggggacaagaucaccuucgaggcgaccggcaaccucguggucccccgguacgccuucgccauggagcgcaacgccggguccggcaucaucaucagcgacacgcccgugcacgacugcaacacgaccugccagaccccgaagggcgccaucaacaccucccugcccuuccagaacauccaccccaucaccaucgggaagugccccaaguacgucaagagcaccaagcugcggcucgcgaccggccugcgcaacaucccguccauccagagccgggggcuguucggcgccaucgccggguucaucgagggcggcuggacggggaugguggacggcugguacggguaccaccaccagaacgagcagggcuccggguacgccgccgaccucaagagcacccagaacgcgaucgacgagaucaccaacaaggugaacuccgugaucgagaagaugaacacccaguucacggccgucggcaaggaguucaaccaccuggagaagcgcaucgagaaccugaacaagaagguggacgacggcuuccucgacaucuggaccuacaacgccgagcugcugguccuccuggagaacgagcggacccuggacuaccacgacagcaacgugaagaaccucuacgagaaggugcgcucccagcugaagaacaacgccaaggagaucgggaacggcugcuucgaguucuaccacaagugcgacaacacgugcauggagagcgucaagaacgggaccuacgacuaccccaaguacuccgaggaggccaagcugaaccgggaggagaucgacggcgugaagcucgagagcacccgcaucuaccagauccuggcgaucuacuccaccguggccagcagccugguccucguggugucccugggggccaucagcuucuggaugugcuccaacggcagccugcagugccggaucugcaucuga

SEQ ID NO: 67795 - RNA, 1701 nt, Artificial Sequence
  derived and/or modified CDS sequence (opt1) from hemagglutinin__InfluenzaA__ACZ45029
augaaggccauccuggugguccuccuguacaccuucgccaccgcgaacgccgacacgcugugcaucggcuaccacgccaacaacagcaccgacaccguggacaccgugcucgagaagaacgucacggugacccacuccgugaaccugcuggaggacaagcacaacgggaagcucugcaagcugcgcggcgucgcgccccugcaccucgggaagugcaacaucgccggcuggauccuggggaacccggagugcgagagccuguccaccgccagcuccuggagcuacaucguggagaccuccagcuccggcaacggcacgugcuaccccggggacuucaucgacuacgaggagcuccgggagcagcugagcuccgugagcuccuucgagcgcuucgagaucuuccccaagaccagcuccuggcccaaccacgacagcaacaagggcgucaccgccgccugcccgcacgccggggcgaaguccuucuacaagaaccugaucuggcucgugaagaagggcaacagcuaccccaagcuguccaagagcuacaucaacgacaaggggaaggaggugcugguccucuggggcauccaccaccccagcaccuccgccgaccagcagagccuguaccagaacgccgacgccuacguguucgugggcacgucccgguacagcaagaaguucaagcccgagaucgccauccgcccgaagguccgggaccaggaggggcgcaugaacuacuacuggacccugguggagcccggcgacaagaucaccuucgaggcgaccgggaaccucguggucccccgguacgccuucgccauggagcgcaacgccggcuccggcaucaucaucagcgacacgcccgugcacgacugcaacacgaccugccagaccccgaagggggccaucaacaccucccugcccuuccagaacauccaccccaucaccaucggcaagugccccaaguacgucaagagcaccaagcugcggcucgcgaccgggcugcgcaacgugccguccauccagagccggggccuguucggggccaucgccggcuucaucgagggcggguggacgggcaugguggacgggugguacggcuaccaccaccagaacgagcagggguccggcuacgccgccgaccucaagagcacccagaacgcgaucgacgagaucaccaacaaggugaacuccgucaucgagaagaugaacacccaguucacggccgugggcaaggaguucaaccaccuggagaagcgcaucgagaaccugaacaagaaggucgacgacggguuccucgacaucuggaccuacaacgccgagcugcuggugcuccuggagaacgagcggacccuggacuaccacgacagcaacgugaagaaccucuacgagaagguccgcucccagcugaagaacaacgccaaggagaucggcaacgggugcuucgaguucuaccacaagugcgacaacacgugcauggagagcgugaagaacggcaccuacgacuaccccaaguacuccgaggaggccaagcugaaccgggaggagaucgacggggugaagcucgagagcacccgcaucuaccagauccuggcgaucuacuccaccgucgccagcagccuggugcucguggucucccugggcgccaucagcuucuggaugugcuccaacggcagccugcagugccggaucugcaucuga

SEQ ID NO: 67796 - RNA, 1701 nt, Artificial Sequence
  derived and/or modified CDS sequence (opt1) from hemagglutinin__InfluenzaA__ACZ45030
augaaggccauccuggugguccuccuguacaccuucgccaccgcgaacgccgacacgcugugcaucggcuaccacgccaacaacagcaccgacaccguggacaccgugcucgagaagaacgucacggugacccacuccgugaaccugcuggaggacaagcacaacgggaagcucugcaagcugcgcggcgucgcgccccugcaccucgggaagugcaacaucgccggcuggauccuggggaacccggagugcgagagccuguccaccgccagcuccuggagcuacaucguggagaccuccagcuccgacaacggcacgugcuaccccggcgacuucaucgacuacgaggagcuccgggagcagcugagcuccgugagcuccuucgagcgcuucgagaucuuccccaagaccagcuccuggcccaaccacgacagcaacaagggggucaccgccgccugcccgcacgccggcgcgaaguccuucuacaagaaccugaucuggcucgugaagaaggggaacagcuaccccaagcuguccaagagcuacaucaacgacaagggcaaggaggugcugguccucugggggauccaccaccccagcaccuccgccgaccagcagagccuguaccagaacgccgacgccuacguguucgugggcacguccaccuacagcaagaaguucaagcccgagaucgccauccggccgaagguccgcgaccaggagggccggaugaacuacuacuggacccugguggagcccggggacaagaucaccuucgaggcgacgggcaaccucguggucccccgcuacgccuucaccauggagcggaacgccggguccggcaucaucaucagcgacacccccgugcacgacugcaacaccacgugccagaccccgaagggcgccaucaacaccucccugcccuuccagaacauccaccccaucaccaucgggaagugccccaaguacgucaagagcacgaagcugcgccucgccaccggccugcggaacaucccguccauccagagccgcgggcuguucggcgcgaucgccggguucaucgagggcggcuggaccgggaugguggacggcugguacggguaccaccaccagaacgagcagggcuccggguacgccgccgaccucaagagcacccagaacgccaucgacgagaucacgaacaaggugaacuccgugaucgagaagaugaacacccaguucaccgcggucggcaaggaguucaaccaccuggagaagcggaucgagaaccugaacaagaagguggacgacggcuuccucgacaucuggaccuacaacgccgagcugcugguccuccuggagaacgagcgcacgcuggacuaccacgacagcaacgugaagaaccucuacgagaaggugcggucccagcugaagaacaacgccaaggagaucgggaacggcugcuucgaguucuaccacaagugcgacaacacgugcauggagagcgucaagaacgggaccuacgacuaccccaaguacuccgaggaggccaagcugaaccgcgaggagaucgacggcgugaagcucgagagcacccggaucuaccagauccuggccaucuacuccaccguggcgagcagccugguccucguggugucccugggggccaucagcuucuggaugugcuccaacggcagccugcagugccgcaucugcaucuga

SEQ ID NO: 67797 - RNA, 1701 nt, Artificial Sequence
  derived and/or modified CDS sequence (opt1) from hemagglutinin__InfluenzaA__ACZ45031
augaaggccauccuggugguccuccuguacaccuucgccaccgcgaacgccgacacgcugugcaucggcuaccacgccaacaacagcaccgacaccguggacaccgugcucgagaagaacgucacggugacccacuccgugaaccugcuggaggacaagcacaacgggaagcucugcaagcugcgcggcgucgcgccccugcaccucgggaagugcaacaucgccggcuggauccuggggaacccggagugcgagagccuguccaccgccagcuccuggagcuacaucguggagaccuccagcuccgacaacggcacgugcuaccccggcgacuucaucgacuacgaggagcuccgggagcagcugagcuccgugagcuccuucgagcgcuucgagaucuuccccaagaccagcuccuggcccaaccacgacagcaacaagggggucaccgccgccugcccgcacgccggcgcgaaguccuucuacaagaaccugaucuggcucgugaagaaggggaacagcuaccccaagcuguccaagagcuacaucaacgacaagggcaaggaggugcugguccucugggggauccaccaccccagcaccuccgccgaccagcagagccuguaccagaacgccgacgccuacguguucgugggcacgucccgguacagcaagaaguucaagcccgagaucgccauccgcccgaagguccgggagcaggagggccgcaugaacuacuacuggacccugguggagcccggggacaagaucaccuucgaggcgaccggcaaccucguggucccccgguacgccuucacgauggagcgcaacgugggguccggcaucaucaucagcgacacccccgugcacgacugcaacacgaccugccagaccccgaagggcgccaucaacaccucccugcccuuccagaacauccaccccaucaccaucgggaagugccccaaguacgucaagagcaccaagcugcggcucgccacgggccugcgcaacgugccguccauccagagccgggggcuguucggcgccaucgcgggguucaucgagggcggcuggaccgggaugguggacggcugguacggguaccaccaccagaacgagcagggcuccggguacgccgccgaccucaagagcacccagaacgccaucgacgagaucaccaacaaggucaacuccgugaucgagaagaugaacacgcaguucaccgccgucggcaaggaguucaaccaccuggagaagcgcaucgagaaccugaacaagaagguggacgacggcuuccucgacaucuggaccuacaacgcggagcugcuggugcuccuggagaacgagcggacccuggacuaccacgacagcaacgucaagaaccucuacgagaaggugcgcucccagcugaagaacaacgccaaggagaucgggaacggcugcuucgaguucuaccacaagugcgacaacacgugcauggagagcgugaagaacgggaccuacgacuaccccaaguacuccgaggaggccaagcugaaccgggaggagaucgacggcgucaagcucgagagcacccgcaucuaccagauccuggccaucuacuccaccguggccagcagccuggugcucgucgugucccugggggcgaucagcuucuggaugugcuccaacggcagccugcagugccggaucugcaucuga

SEQ ID NO: 67798 - RNA, 1701 nt, Artificial Sequence
  derived and/or modified CDS sequence (opt1) from hemagglutinin__InfluenzaA__ACZ45034
augaaggccauccuggugguccuccuguacaccuucgccaccgcgaacgccgacacgcugugcaucggcuaccacgccaacaacagcaccgacaccguggacaccgugcucgagaagaacgucacggugacccacuccgugaaccugcuggaggacaagcacaacgggaagcucugcaagcugcgcggcgucgcgccccugcaccucgggaagugcaacaucgccggcuggauccuggggaacccggagugcgagagccuguccaccgccagcuccuggagcuacaucguggagaccuccagcuccgacaacggcacgugcuaccccggcgacuucaucgacuacgaggagcuccgggagcagcugagcuccgugagcuccuucgagcgcuucgagaucuuccccaagaccagcuccuggcccaaccacgacagcaacaagggggucaccgccgccugcccgcacgccggcgcgaaguccuucuacaagaaccugaucuggcucgugaagaaggggaacagcuaccccaagcuguccaagagcuacaucaacgacaagggcaaggaggugcugguccucugggggauccaccaccccagcaccuccgccgaccagcagagccuguaccagaacgccgacgccuacguguucgugggcacgucccgguacagcaagaaguucaagcccgagaucgccauccgcccgaagguccgggaccaggagggccgcaugaacuacuacuggacccugguggagcccggggacaagaucaccuucgaggcgaccggcaaccucguggucccccgguacgccuucgccauggagcgcaacgccggguccggcaucaucaucagcgacacgcccgugcacgacugcaacacgaccugccagaccccgaagggcgccaucaacaccucccugcccuuccagaacgugcaccccaucaccaucgggaagugccccaaguacgucaagagcaccaagcugcggcucgcgaccggccugcgcaacgugccgcccauccagucccgggggcuguucggcgccaucgccggguucaucgagggcggcuggacggggaugguggacggcugguacggguaccaccaccagaacgagcagggcagcggguacgccgccgaccucaaguccacccagaacgcgaucgacgagaucaccaacaaggucaacagcgugaucgagaagaugaacacccaguucacggccgucggcaaggaguucaaccaccuggagaagcgcaucgagaaccugaacaagaagguggacgacggcuuccucgacaucuggaccuacaacgccgagcugcuggugcuccuggagaacgagcggacccuggacuaccacgacuccaacgucaagaaccucuacgagaaggugcgcagccagcugaagaacaacgccaaggagaucgggaacggcugcuucgaguucuaccacaagugcgacaacacgugcauggaguccgugaagaacgggaccuacgacuaccccaaguacagcgaggaggccaagcugaaccgggaggagaucgacggcgucaagcucgaguccacccgcaucuaccagauccuggcgaucuacagcaccguggccuccagccuggugcucgucgugagccugggggccaucuccuucuggaugugcagcaacggcucccugcagugccggaucugcaucuga

SEQ ID NO: 67799 - RNA, 1701 nt, Artificial Sequence; identical to SEQ ID NO: 66693
  derived and/or modified CDS sequence (opt1) from hemagglutinin__InfluenzaA__ACZ45036

SEQ ID NO: 67800 - RNA, 1701 nt, Artificial Sequence; identical to SEQ ID NO: 66693
  derived and/or modified CDS sequence (opt1) from hemagglutinin__InfluenzaA__ACZ45037

SEQ ID NO: 67801 - RNA, 1701 nt, Artificial Sequence; identical to SEQ ID NO: 67794
  derived and/or modified CDS sequence (opt1) from hemagglutinin__InfluenzaA__ACZ45038

SEQ ID NO: 67802 - RNA, 1701 nt, Artificial Sequence; identical to SEQ ID NO: 67046
  derived and/or modified CDS sequence (opt1) from hemagglutinin__InfluenzaA__ACZ45039

SEQ ID NO: 67803 - RNA, 1701 nt, Artificial Sequence; identical to SEQ ID NO: 66693
  derived and/or modified CDS sequence (opt1) from hemagglutinin__InfluenzaA__ACZ45040

SEQ ID NO: 67804 - RNA, 1701 nt, Artificial Sequence; identical to SEQ ID NO: 66693
  derived and/or modified CDS sequence (opt1) from hemagglutinin__InfluenzaA__ACZ52567

SEQ ID NO: 67805 - RNA, 1701 nt, Artificial Sequence; identical to SEQ ID NO: 66693
  derived and/or modified CDS sequence (opt1) from hemagglutinin__InfluenzaA__ACZ52568

SEQ ID NO: 67806 - RNA, 1701 nt, Artificial Sequence; identical to SEQ ID NO: 67262
  derived and/or modified CDS sequence (opt1) from hemagglutinin__InfluenzaA__ACZ52569

SEQ ID NO: 67807 - RNA, 1701 nt, Artificial Sequence
  derived and/or modified CDS sequence (opt1) from hemagglutinin__InfluenzaA__ACZ53956
augaagaccaucaucgcccugagcuacaucuucugccucgcccuggcgcagaagcugcccggcaacgacaacuccaccgccacgcucugccuggggcaccacgccgugccgaacggcacccuggucaagaccaucaccaacgaccagaucgaggugacgaacgccaccgagcucgugcagagcuccagcaccgggcgcaucugcgacagcccccaccagauccuggacggcgagaacugcacccugaucgacgcccuccugggggacccccacugcgacggcuuccagaacaaggagugggaccuguucgucgagcggagcaaggcguacuccaacugcuaccccuacgacgugccggacuacgccagccuccgcucccugguggccagcuccggcacgcuggaguucaacaacgagagcuucaacuggaccggggucgcccagaacggcaccuccagcgcgugcaagcggcgcuccaucaagagcuucuucuccacccucaacuggcugcaccagcugcagaaccgguaccccgcccucaacgugacgaugcccaacaacgacaaguucgacaagcuguacaucuggggcgugcaccaccccagcaccgacuccgaccagaucagcgucuacgcccaggccagcgggcgcgugaccguguccaccaagcggagccagcagacggucaucccgaacaucgggucccgccccugggugcggggcgugagcucccgcaucagcaucuacuggaccaucgucaagcccggcgacauccugcucaucaacuccaccgggaaccugaucgcgccccggggcuacuucaagauccgcagcgggaaguccagcaucaugcgguccgacgccccgaucggcaagugcaacagcgagugcaucacccccaacggcuccauccccaacgacaagcccuuccagaacgugaaccgcaucacguacggggccugcccgcgguacgugaagcagaacacccugaagcucgccaccggcaugcgcaacguccccgagaagcagacccgggggaucuucggcgccaucgccggguucaucgagaacggcugggagggcaugauggacgggugguacggcuuccgccaccagaacagcgaggggacgggccaggcggccgaccugaaguccacccaggccgccaucaaccagaucaacgggaagcugaaccggcucaucgagaagaccaacgagaaguuccaccagaucgagaaggaguucagcgagguggagggccgcauccaggaccuggagaaguacguggaggacaccaagaucgaccugugguccuacaacgccgagcuccuggucgcgcuggagaaccagcacacgaucgaccucaccgacagcgagaugaacaagcuguucgagcggacccgcaagcagcugcgcgagaacgccgaggacaugggcaacgggugcuucaagaucuaccacaagugcgacaacgccugcaucggcuccauccggaacgggaccuacgaccacgacguguaccgcgacgaggcccucaacaaccgguuccagaucaagggcguggagcugaaguccggguacaaggacuggauccuguggaucagcuucgccaucuccugcuuccuccugugcgucgugcugcucggcuucaucaugugggcgugccagcgcggcaacauccggugcaacaucugcaucuga

SEQ ID NO: 67808 - RNA, 1701 nt, Artificial Sequence
  derived and/or modified CDS sequence (opt1) from hemagglutinin__InfluenzaA__ACZ53967
augaagaccaucaucgcccugagcuacaucuucugccucgcccuggcgcagaagcugcccggcaacgacaacuccaccgccacgcucugccuggggcaccacgccgugccgaacggcacccuggucaagaccaucaccaacgaccagaucgaggugacgaacgccaccgagcucgugcagagcuccagcaccgggcgcaucugcgacagcccccaccagauccuggacggcgagaacugcacccugaucgacgcccuccugggggacccccacugcgacggcuuccagaacaaggagugggaccuguucgucgagcggagcaaggcguacuccaacugcuaccccuacgacgugccggacuacgccagccuccgcucccugguggccagcuccggcacgcuggaguucaacaacgagagcuucaacuggaccggggucgcccagaacggcaccuccagcgcgugcaagcggcgcuccaucaagagcuucuucuccacccucaacuggcugcaccagcugcagaaccgguaccccgcccucaacgugacgaugcccaacaacgacaaguucgacaagcuguacaucuggggcgugcaccaccccagcaccgacuccgaccagaccagccuguacgcccaggccagcgggcgcgucaccguguccacgaagcggagccagcagaccgugaucccgaacaucgggucccgccccuggguccggggcgugagcucccgcaucagcaucuacuggaccaucgugaagcccggcgacguccucgugaucaacuccaacgggaaccugaucgcgccccggggcuacuucaagaugcgcagcgggaaguccagcaucaugcgguccgacgccccgaucggcaagugcaacagcgagugcaucacccccaacggcuccauccccaacgacaagcccuuccagaacgugaaccgcaucacguacggggccugcccgcgguacgucaagcagaacacccugaagcucgccaccggcaugcgcaacgugcccgagaagcagacccgggggaucuucggcgccaucgccggguucaucgagaacggcugggagggcaugauggacgggugguacggcuuccgccaccagaacagcgaggggacgggccaggcggccgaccugaaguccacccaggccgccaucaaccagaucaacgggaagcugaacaagcucaucgagaagaccaacgagaaguuccaccagaucgagaaggaguucagcgagguggagggccggauccaggaccuggagaaguacgucgaggacaccaagaucgaccugugguccuacaacgccgagcuccugguggcgcuggagaaccagcacacgaucgaccucaccgacagcgagaugaacaagcuguucgagcgcacccggaagcagcugcgcgagaacgccgaggacaugggcaacgggugcuucaagaucuaccacaagugcgacaacgccugcaucggcuccauccgcaacgggaccuacgaccacgacguguaccgggacgaggcccucaacaaccgcuuccagaucaagggcgucgagcugaaguccggguacaaggacuggauccuguggaucagcuucgccaucuccugcuuccuccugugcgugguccugcucggcagcaucaugugggcgugccagcggggcaacauccgcugcaacaucugcaucuga

SEQ ID NO: 67809 - RNA, 1701 nt, Artificial Sequence
  derived and/or modified CDS sequence (opt1) from hemagglutinin__InfluenzaA__ACZ53978
augaagaccaucaucgcccugagcuacaucuucugccucgcccuggcgcagaagcugcccggcaacgacaacuccaccgccacgcucugccuggggcaccacgccgugccgaacggcacccuggucaagaccaucaccaacgaccagaucgaggugacgaacgccaccgagcucgugcagagcuccagcaccgggcgcaucugcgacagcccccaccagauccuggacggcgagaacugcacccugaucgacgcccuccugggggacccccacugcgacggcuuccagaacaaggagugggaccuguucgucgagcggagcaaggcguacuccaacugcuaccccuacgacgugccggacuacgccagccucaagucccugaucgccagcuccggcacgcuggaguucaacaacgagagcuucaacuggaucggggugucccagaacggcaccagcuccgccugcaagcgcaucagcaucaccgucuccuucaacaagcucaacuggcugcaccagcugaaguaccgguaccccgcgcucaacgugaccaugcccaacaacgacaaguucgacaagcuguacaucuggggcgugcaccaccccagcacggacuccgaccagaccagccuguacgcccaggccagcgggcgcgucaccguguccaccaagcggagccagcagacggugaucccgaacaucgggucccgccccuggguccggggcgugagcucccgcaucagcaucuacuggaccaucgugaagcccggcgacguccucgugaucaacuccaacgggaaccugaucgcgccccggggcuacuucaagaugcgcagcgggaaguccagcaucaugcgguccgacgccccgaucggcaagugcaacagcgagugcaucacccccaacggcuccauccccaacgacaagcccuuccagaacgugaaccgcaucaccuacggggccugcccgcgguacgucaagcagaacacgcugaagcucgccaccggcaugcgcaacgugcccgagaagcagacccgggggaucuucggcgccaucgccggguucaucgagaacggcugggagggcaugguggacgggugguacggcuuccgccaccagaacagcgaggggaccggccaggccgcggaccugaaguccacgcaggccgccaucaaccagaucaccgggaagcugaacaagcucaucgagaagaccaacgagaaguuccaccagaucgagaaggaguucagcgaggucgagggccggauccaggaccuggagaaguacguggaggacaccaagaucgaccugugguccuacaacgccgagcuccugguggcccuggagaaccagcacacgaucgaccucaccgacagcgagaugaacaagcuguucgagcgcacccggaagcagcugcgcgagaacgcggaggacaugggcaacgggugcuucaagaucuaccacaagugcgacaacgccugcaucggcuccauccggaacgggaccuacgaccacgacgucuaccgcgacgaggcccucaacaaccgcuuccagaucaagggcguggagcugaaguccggguacaaggacuggauccuguggaucagcuucgccaucuccugcuuccuccugugcgucgugcugcucggcuucaucaugugggccugccagcggggcaacauccgcugcaacaucugcaucuga

SEQ ID NO: 67810 - RNA, 1701 nt, Artificial Sequence
  derived and/or modified CDS sequence (opt1) from hemagglutinin__InfluenzaA__ACZ56080
augaaggccauccuggugguccuccuguacaccuucgccaccgcgaacgccgacacgcugugcaucggcuaccacgccaacaacagcaccgacaccguggacaccgugcucgagaagaacgucacggugacccacuccgugaaccugcuggaggacaagcacaacgggaagcucugcaagcugcgcggcgucgcgccccugcaccucgggaagugcaacaucgccggcuggauccuggggaacccggagugcgagagccuguccaccgcgagcuccuggagcuacaucguggagaccuccagcuccgacaacggcacgugcuaccccggcgacuucaucgacuacgaggagcuccgggagcagcugagcuccgugagcuccuucgagcgcuucgagaucuuccccaagaccagcuccuggcccaaccacgacagcaacaagggggucaccgccgccugcucccacgccggcgccaagagcuucuacaagaaccugaucuggcucgugaagaaggggaacuccuacccgaagcugagcaagagcuacaucaacgacaagggcaaggaggugcugguccucugggggauccaccaccccuccaccagcgccgaccagcagucccuguaccagaacgccgacgccuacguguucgugggcacgagccgguacuccaagaaguucaagcccgagaucgccauccgccccaagguccggggccaggaggggcgcaugaacuacuacuggacccugguggagccgggcgacaagaucaccuucgaggcgaccgggaaccucguggucccccgguacgccuucgccauggagcgcaacgccggcagcggcaucaucaucuccgacacgcccgugcacgacugcaacacgaccugccagacccccaagggggccaucaacaccagccugccguuccagaacauccaccccaucaccaucggcaagugccccaaguacgugaaguccaccaagcugcggcucgcgaccgggcugcgcaacguccccagcauccagucccggggccuguucggggccaucgccggcuucaucgagggcggguggacgggcaugguggacgggugguacggcuaccaccaccagaacgagcaggggagcggcuacgccgccgaccucaaguccacccagaacgcgaucgacgagaucaccaacaaggugaacagcgucaucgagaagaugaacacccaguucacggccgugggcaaggaguucaaccaccuggagaagcgcaucgagaaccugaacaagaaggucgacgacggguuccucgacaucuggaccuacaacgccgagcugcuggugcuccuggagaacgagcggacccuggacuaccacgacuccaacgugaagaaccucuacgagaagguccgcagccagcugaagaacaacgccaaggagaucggcaacgggugcuucgaguucuaccacaagugcgacaacacgugcauggaguccgugaagaacggcaccuacgacuacccgaaguacagcgaggaggccaagcugaaccgggaggagaucgacggggugaagcucgaguccacccgcaucuaccagauccuggcgaucuacagcaccgucgccagcucccuggugcucguggucagccugggcgccaucuccuucuggaugugcagcaacggcucccugcagugccggaucugcaucuga

SEQ ID NO: 67811 - RNA, 1701 nt, Artificial Sequence
  derived and/or modified CDS sequence (opt1) from hemagglutinin__InfluenzaA__ACZ61118
augaaggccauccuggugguccuccuguacaccuucgccaccgcgaacgccgacacgcugugcaucggcuaccacgccaacaacagcaccgacaccguggacaccgugcucgagaagaacgucacggugacccacuccgugaaccugcuggaggacaagcacaacgggaagcucugcaagcugcgcggcgucgcgccccugcaccucgggaagugcaacaucgccggcuggauccuggggaacccggagugcgagagccuguccaccgccagcuccuggagcuacaucguggagaccuccagcuccgacaacggcacgugcuaccccggcgacuucaucgacuacgaggagcuccgggagcagcugagcuccgugagcuccuucgagcgcuucgagaucuuccccaagaccagcuccuggcccaaccacgacagcaacaagggggucaccgccgccugcccgcacgccggcgcgaaguccuucuacaagaaccugaucuggcucgugaagaaggggaacagcuaccccaagcuguccaagagcuacaucaacgacaagggcaaggaggugcugguccucugggggauccaccaccagagcaccuccgccgaccagcagagccuguaccagaacgccgacgccuacguguucgugggcuccagccgguacuccaagaaguucaagcccgagaucgccauccgccccaagguccgggaccaggagggccgcaugaacuacuacuggacgcugguggagccgggggacaagaucaccuucgaggcgaccggcaaccucguggucccccgguacgccuucgccauggagcgcaacgccgggagcggcaucaucaucuccgacacccccgugcacgacugcaacacgaccugccagacccccaagggcgccaucaacaccagccugccguuccagaacauccaccccaucacgaucgggaagugccccaaguacgugaaguccaccaagcugcggcucgcgaccggccugcgcaacguccccagcauccagucccgggggcuguucggcgccaucgccggguucaucgagggcggcuggaccgggaugguggacggcugguacggguaccaccaccagaacgagcagggcagcggguacgccgccgaccucaaguccacgcagaacgcgaucgacgagaucaccaacaaggugaacagcgucaucgagaagaugaacacccaguucaccgccgugggcaaggaguucaaccaccuggagaagcgcaucgagaaccugaacaagaaggucgacgacggcuuccucgacaucuggacguacaacgccgagcugcuggugcuccuggagaacgagcggacccuggacuaccacgacuccaacgugaagaaccucuacgagaagguccgcagccagcugaagaacaacgccaaggagaucgggaacggcugcuucgaguucuaccacaagugcgacaacacgugcauggaguccgugaagaacgggaccuacgacuacccgaaguacagcgaggaggccaagcugaaccgggaggagaucgacggcgugaagcucgaguccacccgcaucuaccagauccuggcgaucuacagcaccgucgccagcucccuggugcucguggucagccugggggccaucuccuucuggaugugcagcaacggcucccugcagugccggaucugcaucuga

SEQ ID NO: 67812 - RNA, 1701 nt, Artificial Sequence
  derived and/or modified CDS sequence (opt1) from hemagglutinin__InfluenzaA__ACZ61119
auggaggccauccuggugguccuccuguacaccuucgccaccgcgaacgccgacacgcugugcaucggcuaccacgccaacaacagcaccgacaccguggacaccgugcucgagaagaacgucacggugacccacuccgugaaccugcuggaggacaagcacaacgggaagcucugcaagcugcgcggcgucgcgccccugcaccucgggaagugcaacaucgccggcuggauccuggggaacccggagugcgagagccuguccaccgccagcuccuggagcuacaucguggagaccuccagcuccgacaacggcacgugcuaccccggcgacuucaucgacuacgaggagcuccgggagcagcugagcuccgugagcuccuucgagcgcuucgagaucuuccccaagaccagcuccuggcccaaccacgacagcaacaagggggucaccgccgccugcccgcacgccggcgcgaaguccuucuacaagaaccugaucuggcucgugaagaaggggaacagcuaccccaagcuguccaagagcuacaucaacgacaagggcaaggaggugcugguccucugggggauccaccaccccagcaccuccgccgaccagcagagccuguaccagaacgccgacgccuacguguucgugggcuccagccgguacuccaagaaguucaagcccgagaucgccauccgcccgaagguccgggaccaggagggccgcaugaacuacuacuggacgcugguggagcccggggacaagaucaccuucgaggcgaccggcaaccucguggucccccgguacgccuucgccauggagcgcaacgccgggagcggcaucaucaucuccgacacccccgugcacgacugcaacacgaccugccagaccccgaagggcgccaucaacaccagccugcccuuccacaacauccaccccaucacgaucgggaagugccccaaguacgugaaguccaccaagcugcggcucgcgaccggccugcgcaacgucccgagcauccagucccgggggcuguucggcgccaucgccggguucaucgagggcggcuggaccgggaugguggacggcugguacggguaccaccaccagaacgagcagggcagcggguacgccgccgaccucaaguccacgcagaacgcgaucgacgagaucaccaacaaggugaacagcgucaucgagaagaugaacacccaguucaccgccgugggcaaggaguucaaccaccuggagaagcgcaucgagaaccugaacaagaaggucgacgacggcuuccucgacaucuggacguacaacgccgagcugcugauccuccuggagaacgagcggacccuggacuaccacgacuccaacgugaagaaccucuacgagaaggugcgcagccagcugaagaacaacgccaaggagaucgggaacggcugcuucgaguucuaccacaagugcgacaacacgugcauggaguccgucaagaacgggaccuacgacuaccccaaguacagcgaggaggccaagcugaaccgggaggagaucgacggcgugaagcucgaguccacccgcaucuaccagauccuggcgaucuacagcaccguggccagcucccugguccucguggugagccugggggccaucuccuucuggaugugcagcaacggcucccugcagugccggaucugcaucuga

SEQ ID NO: 67813 - RNA, 1701 nt, Artificial Sequence; identical to SEQ ID NO: 66693
  derived and/or modified CDS sequence (opt1) from hemagglutinin__InfluenzaA__ACZ61122

SEQ ID NO: 67814 - RNA, 1701 nt, Artificial Sequence; identical to SEQ ID NO: 66693
  derived and/or modified CDS sequence (opt1) from hemagglutinin__InfluenzaA__ACZ61123

SEQ ID NO: 67815 - RNA, 1701 nt, Artificial Sequence; identical to SEQ ID NO: 67491
  derived and/or modified CDS sequence (opt1) from hemagglutinin__InfluenzaA__ACZ74627

SEQ ID NO: 67816 - RNA, 1698 nt, Artificial Sequence
  derived and/or modified CDS sequence (opt1) from hemagglutinin__InfluenzaA__ACZ81554
augaaggugaagcugcucguccugcugugcaccuucaccgccacguacgccgacaccaucugcaucggcuaccacgcgaacaacagcaccgacaccguggacacggugcucgagaagaacgucaccgugacccacuccgugaaccugcuggagaacaaccacaacgggaagcucugccugcugaagggcaucgcgccccuccagcuggggaacugcaccgucgccggcuggauccuggggaacccggagugcgagcuccugaucagcaaggaguccuggagcuacaucguggagaagcccaaccccgagaacggcacgugcuaccccggccacuucgccgacuacgaggagcugcgcgagcagcucuccagcguguccagcuucgagcgguucgagaucuucccgaaggaguccagcuggcccaaccacaccgucaccgggguguccgccagcugcucccacaacggcgagaacagcuucuaccgcaaccugcuguggcucaccgggaagaacggccuguaccccaaccuguccaagagcuacgccaacaacaaggagaaggaggugcucguccuguggggcgugcaccacccgcccaacaucgccgaccagaagacgcuguaccacaccgagaacgccuacguguccgucgugagcucccacuacagccggaaguucacccccgagaucgccaagcgccccaagauccgggaccaggaggggcgcaucaacuacuacuggacccuccuggagcccggcgacacgaucaucuucgaggcgaacgggaaccugaucgccccgcgguacgccuucgcccucagccgcggcuucggguccggcaucaucaacagcaacgcccccauggacaagugcgacgcgaagugccagacgccccagggcgccaucaacuccagccugcccuuccagaacgugcacccggucaccaucggggagugccccaaguacgugcgguccgccaagcugcgcauggugaccggccuccggaacauccccagcauccagucccgcgggcuguucggcgccaucgccggguucaucgagggcggcuggaccgggauggucgacggcugguacggguaccaccaccagaacgagcagggcagcggguacgcggccgaccagaaguccacccagaacgccaucaacggcaucaccaacaaggugaacagcgugaucgagaagaugaacacccaguucacggccgucggcaaggaguucaacaagcuggagcggcgcauggagaaccucaacaagaagguggacgacggguucaucgacaucuggaccuacaacgccgagcugcugguccuccuggagaacgagcggacccuggacuuccacgacuccaacgugaagaaccucuacgagaaggucaagagccagcugaagaacaacgcgaaggagaucggcaacgggugcuucgaguucuaccacaagugcaacgacgagugcauggaguccgugaagaacggcaccuacgacuaccccaaguacagcgaggaguccaagcugaaccgcgagaagaucgacggggugaagcucgagagcaugggcguguaccagauccuggccaucuacuccacggucgccagcucccuggugcuccuggugagccugggcgccaucagcuucuggaugugcuccaacgggagccuccagugccggaucugcaucuga

SEQ ID NO: 67817 - RNA, 1698 nt, Artificial Sequence
  derived and/or modified CDS sequence (opt1) from hemagglutinin__InfluenzaA__ACZ81555
augaaggugaagcugcucguccugcugugcaccuucaccgccacguacgccgacaccaucugcaucggcuaccacgcgaacaacagcaccgacaccguggacacggugcucgagaagaacgucaccgugacccacuccgugaaccugcuggagaacagccacaacgggaagcucugccugcugaagggcaucgcgccccuccagcuggggaacugcuccgucgccggcuggauccuggggaacccggagugcgagcuccugaucagcaaggaguccuggagcuacaucguggagaagcccaaccccgagaacgggaccugcuaccccggccacuucgccgacuacgaggagcugcgcgagcagcucuccagcguguccagcuucgagcgguucgagaucuucccgaaggaguccagcuggcccaaccacacggucaccgggguguccgccagcugcucccacaacggcgagaacagcuucuaccgcaaccugcuguggcucaccgggaagaacggccuguaccccaaccuguccaagagcuacgccaacaacaaggagaaggaggugcucguccuguggggcgugcaccacccgcccaacaucggcgaccagaagacccuguaccacacggagaacgccuacguguccgucgugagcagccacuacucccggaaguucacccccgagaucgccaagcgccccaaggugcgggaccaggagggccgcaucaacuacuacugggcccuccuggagcccggggacaccaucaucuucgaggcgaacggcaaccugaucgccccgcgguacgccuucgcccucagccgcggguucggcuccggcaucaucaacagcaacgcccccauggacaagugcgacgcgaagugccagacgccccagggggccaucaacuccagccugcccuuccagaacguccacccggugaccaucggcgagugccccaaguacgugcgguccgccaagcugcgcauggucaccgggcuccggaacauccccagcauccagucccgcggccuguucggggccaucgccggcuucaucgagggcggguggaccggcaugguggacgggugguacggcuaccaccaccagaacgagcaggggagcggcuacgcggccgaccagaaguccacccagaacgccaucaacggcaucacgaacaaggugaacagcgucaucgagaagaugaacacccaguucaccgccguggggaaggaguucaacaagcuggagcggcgcauggagaaccucaacaagaaggucgacgacggcuucaucgacaucuggaccuacaacgccgagcugcuggugcuccuggagaacgagcggacgcuggacuuccacgacuccaacgugaagaaccucuacgagaaggucaagagccagcugaagaacaacgcgaaggagaucgggaacggcugcuucgaguucuaccacaagugcaacgacgagugcauggaguccgugaagaacgggaccuacgacuaccccaaguacagcgaggaguccaagcugaaccgcgagaagaucgacggcgugaagcucgagagcaugggcgucuaccagauccuggccaucuacuccaccguggccagcagccuggugcuccuggucucccugggggccaucagcuucuggaugugcuccaacggcagccuccagugccggaucugcaucuga

SEQ ID NO: 67818 - RNA, 1698 nt, Artificial Sequence
  derived and/or modified CDS sequence (opt1) from hemagglutinin__InfluenzaA__ACZ81556
augaaggugaagcugcucguccugcugugcaccuucaccgccacguacgccgacaccaucugcaucggcuaccacgcgaacaacagcaccgacaccguggacacggugcucgagaagaacgucaccgugacccacuccgugaaccugcuggagaacagccacaacgggaagcucugccugcugaagggcaucgcgccccuccagcuggggaacugcuccgucgccggcuggauccuggggaacccggagugcgagcuccugaucagcaaggaguccuggagcuacaucguggagaagcccaaccccgagaacgggaccugcuaccccggccacuucgccgacuacgaggagcugcgcgagcagcucuccagcguguccagcuucgagcgguucgagaucuucccgaaggaguccagcuggcccaaccacacggucaccggggccuccgccagcugcucccacaacggcgagaacagcuucuaccgcaaccugcuguggcucaccgggaagaacggccuguaccccaaccuguccaagagcuacgccaacaacaaggagaaggaggugcucgugcuguggggcguccaccacccgcccaacaucgccgaccagaagacccuguaccacacggagaacgccuacguguccguggucagcagccacuacucccggaaguucacccccgagaucgcgaagcgccccaaggugcgggaccaggagggccgcaucaacuacuacuggacccuccuggagcccggcgacaccaucaucuucgaggccaacgggaaccugaucgccccgcgguacgccuucgcccucagccgcggcuucggguccggcaucaucaacagcaacgcgcccauggacaagugcgacgccaagugccagacgccccagggcgccaucaacuccagccugcccuuccagaacgugcacccggucaccaucggggagugccccaaguacgugcgguccgccaagcugcgcauggugaccggccuccggaacauccccagcauccagucccgcgggcuguucggcgccaucgcgggguucaucgagggcggcuggaccgggauggucgacggcugguacggguaccaccaccagaacgagcagggcagcggguacgccgccgaccagaaguccacgcagaacgccaucaacggcaucaccaacaaggugaacagcgugaucgagaagaugaacacccaguucaccgccgucggcaaggaguucaacaagcuggagcggcgcauggagaaccucaacaagaagguggacgacggguucaucgacaucuggacguacaacgcggagcugcugguccuccuggagaacgagcggacccuggacuuccacgacuccaacgugaagaaccucuacgagaaggucaagagccagcugaagaacaacgccaaggagaucggcaacgggugcuucgaguucuaccacaagugcaacgacgagugcauggaguccgugaagaacggcaccuacgacuaccccaaguacagcgaggaguccaagcugaacaaggagaagaucgacggggugaagcucgagagcaugggcguguaccagauccuggccaucuacuccaccgucgccagcagccuggugcuccuggugucccugggcgccaucagcuucuggaugugcuccaacgggagccuccagugccgcaucugcaucuga

SEQ ID NO: 67819 - RNA, 1701 nt, Artificial Sequence
  derived and/or modified CDS sequence (opt1) from hemagglutinin__InfluenzaA__ACZ81557
augaagaccaucaucgcccugagcuacauccucugccugguguucgcccagaagcugcccggcaacgacaacuccaccgcgacgcucugccuggggcaccacgccgucccgaacggcaccaucgugaagaccaucaccaacgaccagaucgaggugacgaacgccaccgagcugguccagagcuccagcaccggggagaucugcggcagcccccaccagauccucgacgggaagaacugcacccugaucgacgcccugcucggcgacccccagugcgacggcuuccagaacaagaagugggaccuguucguggagcgcagcaaggccuacuccaacugcuaccccuacgacgugccggacuacgcgagccugcggucccucgucgccagcuccgggacgcuggaguucaacaacgagagcuucaacuggaccggcgugacccagaacgggaccuccagcgccugcauccgccgguccaagaacagcuucuucucccgccugaacuggcucacgcaccugaacuucaaguaccaggcccugaacgugaccaugcccaacaacgagcaguucgacaagcucuacaucuggggcguccaccaccccgggaccgacaaggaccagaucuuccuguacgcgcaggccagcggccggaucaccguguccacgaagcgcagccagcagaccgugauccccaacaucggcagccggccgcgcguccggaacauccccucccgcaucagcaucuacuggaccaucgugaagcccggggacauccugcucaucaacuccaccggcaaccugaucgcgccccggggguacuucaagauccagagcggcaaguccagcaucaugcgcuccgacgccccgaucggcaagugcaacagcgagugcaucacgcccaacggguccauccccaacgacaagcccuuccagaacgugaaccggaucaccuacggcgccugcccgcgcuacgucaagcagaacacccugaagcucgccaccgggaugcggaacgugcccgagaagcagacgcgcggcaucuucggggccaucgccggcuucaucgagaacggcugggaggggaugguggacggcugguacggguuccggcaccagaacagcgagggccgcgggcaggccgccgaccugaaguccacccaggcggccaucgaccagaucaacggcaagcugaaccggcucaucggcaagaccaacgagaaguuccaccagaucgagaaggaguucagcgaggucgaggggcgcauccaggaccuggagaaguacguggaggacaccaagaucgaccugugguccuacaacgccgagcuccugguggcccuggagaaccagcacacgaucgaccucaccgacagcgagaugaacaagcuguucgagaagaccaagaagcagcugcgggagaacgccgaggacaugggcaacgggugcuucaagaucuaccacaagugcgacaacgcgugcaucggcuccauccgcaacgggaccuacgaccacgacgucuaccgcgacgaggcccucaacaaccgguuccagaucaagggcguggagcugaaguccggcuacaaggacuggauccuguggaucuccuucgccaucagcugcuuccuccugugcguggcccugcucggguucaucaugugggccugccagaagggcaacauccgcugcaacaucugcaucuga

SEQ ID NO: 67820 - RNA, 1701 nt, Artificial Sequence
  derived and/or modified CDS sequence (opt1) from hemagglutinin__InfluenzaA__ACZ81558
augaagaccaucaucgcccugagcuacauccucugccugguguucgcccagaagcugcccggcaacgacaacuccaccgcgacgcucugccuggggcaccacgccgucccgaacggcaccaucgugaagaccaucaccaacgaccagaucgaggugacgaacgccaccgagcugguccagagcuccagcaccggggagaucugcgacagcccccaccagauccucgacggcaagaacugcacccugaucgacgcccugcucggggacccccacugcgacggcuuccagaacaagaagugggaccuguucguggagcgcagcaaggccuacuccaacugcuaccccuacgacgugccggacuacgcgagccugcggucccucgucgccagcuccggcacgcuggaguucaacaacgagagcuucaacuggaccggggugacccagaacggcaccuccagcgccugcauccgccgguccaagaacagcuucuucucccgccugaacuggcucacgcaccugaacuucaaguaccccgcccugaacgugaccaugcccaacaacgagcaguucgacaagcucuacaucuggggcguccaccaccccgggaccgacaaggaccagaucuuccuguacgcgcaggccagcgggcggaucaccguguccacgaagcgcagccagcagaccgccaucccgaacaucggcagccggccccgcgugcggaacauccccucccgcaucagcaucuacuggaccaucgucaagcccggcgacauccugcucaucaacuccaccgggaaccugaucgccccgcggggcuacuucaagauccgcagcgggaaguccagcaucaugcgguccgacgcccccaucggcaagugcaacagcgagugcaucacgcccaacggcuccauccccaacgacaagccguuccagaacgugaaccgcaucaccuacggggcgugcccccgguacgugaagcagaacacccugaagcucgccaccggcaugcgcaacguccccgagaagcagacgcgggggaucuucggcgccaucgccggguucaucgagaacggcugggagggcaugguggacgggugguacggcuuccgccaccagaacagcgaggggcggggccaggccgcggaccugaaguccacccaggccgccaucgaccagaucaacgggaagcugaaccgccucaucgagaagaccaacgagaaguuccaccagaucgagaaggaguucagcgagguggagggccggauccaggaccuggagaaguacgucgaggacaccaagaucgaccugugguccuacaacgccgagcuccugguggcccuggagaaccagcacacgaucgaccucaccgacagcgagaugaacaagcuguucgagaagaccaagaagcagcugcgcgagaacgcggaggacaugggcaacgggugcuucaagaucuaccacaagugcgacaacgccugcaucggcuccauccgcaacgggaccuacgaccacgacguguaccgggacgaggcccucaacaaccgcuuccagaucaagggcgucgagcugaaguccggguacaaggacuggauccuguggaucuccuucgccaucagcugcuuccuccugugcguggcccugcucggcuucaucaugugggcgugccagaagggcaacauccggugcaacaucugcaucuga

SEQ ID NO: 67821 - RNA, 1701 nt, Artificial Sequence
  derived and/or modified CDS sequence (opt1) from hemagglutinin__InfluenzaA__ACZ81559
augaagaccaucaucgcccugagcuacauccucugccugguguucgcccagaagcugcccggcaacgacaacuccaccgcgacgcucugccuggggcaccacgccgucccgaacggcaccaucgugaagaccaucaccaacgaccagaucgaggugacgaacgccaccgagcugguccagagcuccagcaccggggagaucugcgacagcccccaccagauccucgacggcaagaacugcacccugaucgacgcccugcucggggacccccacugcgacggcuuccagaacaagaagugggaccuguucguggagcgcagcaaggccuacuccaacugcuaccccuacgacgugccggacuacgcgagccugcggucccucgucgccagcuccggcacgcuggaguucaacaacgagagcuucaacuggaccggggugacccagaacggcaccuccagcgccugcauccgccgguccaagaacagcuucuucucccgccugaacuggcucacgcaccugaacuucaaguaccccgcccugaacgugaccaugcccaacaacgagcaguucgacaagcucuacaucuggggcguccaccaccccgggaccgacaaggaccagaucuuccuguacgcgcaggccagcgggcggaucaccguguccacgaagcgcagccagcagaccgccaucccgaacaucggcagccggccccgcgugcggaacauccccucccgcaucagcaucuacuggaccaucgucaagcccggcgacauccugcucaucaacuccaccgggaaccugaucgccccgcggggcuacuucaagauccgcagcgggaaguccagcaucaugcgguccgacgcccccaucggcaagugcaacagcgagugcaucacgcccaacggcuccauccccaacgacaagccguuccagaacgugaaccgcaucaccuacggggcgugcccccgguacgugaagcagaacacccugaagcucgccaccggcaugcgcaacguccccgagaagcagacgcgggggaucuucggcgccaucgccggguucaucgagaacggcugggagggcaugguggacgggugguacggcuuccgccaccagaacagcgaggggcggggccaggccgcggaccugaaguccacccaggccgccaucgaccagaucaacgggaagcugaaccgccucaucggcaagaccaacgagaaguuccaccagaucgagaaggaguucagcgagguggagggccggauccaggaccuggagaaguacgucgaggacaccaagaucgaccugugguccuacaacgccgagcuccugguggcccuggagaaccagcacacgaucgaccucaccgacagcgagaugaacaagcuguucgagaagaccaagaagcagcugcgcgagaacgcggaggacauggggaacggcugcuucaagaucuaccacaagugcgacaacgccugcaucggguccauccgcaacggcaccuacgaccacgacguguaccgggacgaggcccucaacaaccgcuuccagaucaagggggucgagcugaaguccggcuacaaggacuggauccuguggaucuccuucgccaucagcugcuuccuccugugcguggcccugcucggcuucaucaugugggcgugccagaaggggaacauccggugcaacaucugcaucuga

SEQ ID NO: 67822 - RNA, 1701 nt, Artificial Sequence; identical to SEQ ID NO: 66693
  derived and/or modified CDS sequence (opt1) from hemagglutinin__InfluenzaA__ACZ81632

SEQ ID NO: 67823 - RNA, 1701 nt, Artificial Sequence; identical to SEQ ID NO: 66693
  derived and/or modified CDS sequence (opt1) from hemagglutinin__InfluenzaA__ACZ81642

SEQ ID NO: 67824 - RNA, 1701 nt, Artificial Sequence
  derived and/or modified CDS sequence (opt1) from hemagglutinin__InfluenzaA__ACZ81652
augaaggccauccuggugguccuccuguacaccuucgccaccgcgaacgccgacacgcugugcaucggcuaccacgccaacaacagcaccgacaccguggacaccgugcucgagcgcaacgucacggugacccacuccgugaaccugcuggaggacaagcacaacgggaagcucugcaagcugcggggcgucgcgccccugcaccucgggaagugcaacaucgccggcuggauccuggggaacccggagugcgagagccuguccaccgccagcuccuggagcuacaucguggagaccuccagcuccgacaacggcacgugcuaccccggcgacuucaucgacuacgaggagcuccgcgagcagcugagcuccgugagcuccuucgagcgguucgagaucuuccccaagaccagcuccuggcccaaccacgacagcaacaagggggucaccgccgccugcccgcacgccgaggcgaaguccuucuacaagaaccugaucuggcucgugaagaagggcaacagcuaccccaagcuguccaagagcuacaucaacgacaaggggaaggaggugcugguccucuggggcauccaccaccccagcaccuccgccgaccagcagagccuguaccagaacgccgacgccuacguguucguggggacgucccgcuacagcaagaaguucaagcccgagaucgccauccggccgaagguccgcggccaggagggccggaugaacuacuacuggacccugguggagcccggggacaagaucaccuucgaggcgaccggcaaccucguggucccccgcuacgccuucgccauggagcggaacgccggguccggcaucaucaucagcgacacgcccgugcacgacugcaacacgaccugccagaccccgaagggcgccaucaacaccucccugcccuuccagaacauccaccccaucaccaucgggaagugccccaaguacgucaagagcaccaagcugcgccucgcgaccggccugcggaacgugccguccauccagagccgcgggcuguucggcgccaucgccggguucaucgagggcggcuggacggggaugguggacggcugguacggguaccaccaccagaacgagcagggcuccggguacgccgccgaccucaagagcacccagaacgcgaucgacgagaucaccaacaaggugaacuccgucaucgagaagaugaacacccaguucacggccgugggcaaggaguucaaccaccuggagaagcggaucgagaaccugaacaagaaggucgacgacggcuuccucgacaucuggaccuacaacgccgagcugcuggugcuccuggagaacgagcgcacccuggacuaccacgacagcaacgugaagaaccucuacgagaagguccggucccagcugaagaacaacgccaaggagaucgggaacggcugcuucgaguucuaccacaagugcgacaacacgugcauggagagcgugaagaacgggaccuacgacuaccccaaguacuccgaggaggccaagcugaaccgcgaggagaucgacggcgugaagcucgagagcacccggaucuaccagauccuggcgaucuacuccaccgucgccagcagccuggugcucguggucucccugggggccaucagcuucuggaugugcuccaacggcagccugcagugccgcaucugcaucuga

SEQ ID NO: 67825 - RNA, 1701 nt, Artificial Sequence
  derived and/or modified CDS sequence (opt1) from hemagglutinin__InfluenzaA__ACZ92130
auggaggccauccuggugguccuccuguacaccuucgccaccgcgaacgccgacacgcugugcaucggcuaccacgccaacaacagcaccgacaccguggacaccgugcucgagaagaacgucacggugacccacuccgugaaccugcuggaggacaagcacaacgggaagcucugcaagcugcgcggcgucgcgccccugcaccucgggaagugcaacaucgccggcuggauccuggggaacccggagugcgagagccuguccaccgccagcuccuggagcuacaucguggagaccuccagcuccgacaacggcacgugcuaccccggcgacuucaucgacuacgaggagcuccgggagcagcugagcuccgugagcuccuucgagcgcuucgagaucuuccccaagaccagcuccuggcccaaccacgacagcaacaagggggucaccgccgccugcccgcacgccggcgcgaaguccuucuacaagaaccugaucuggcucgugaagaaggggaacagcuaccccaagcuguccaagagcuacaucaacgacaagggcaaggaggugcugguccucugggggauccaccaccccagcaccuccgccgaccagcagagccuguaccagaacgccgacgccuacguguucgugggcuccagccgguacuccaagaaguucaagcccgagaucgccauccgcccgaagguccgggaccaggagggccgcaugaacuacuacuggacgcugguggagcccggggacaagaucaccuucgaggcgaccggcaaccucguggucccccgguacgccuucgccauggagcgcaacgccgggagcggcaucaucaucuccgacacccccgugcacgacugcaacacgaccugccagaccccgaagggcgccaucaacaccagccugcccuuccacaacauccaccccaucacgaucgggaagugccccaaguacgugaaguccaccaagcugcggcucgcgaccggccugcgcaacgucccgagcauccagucccgggggcuguucggcgccaucgccggguucaucgagggcggcuggaccgggaugguggacggcugguacggguaccaccaccagaacgagcagggcagcggguacgccgccgaccucaaguccacgcagaacgcgaucgacgagaucaccaacaaggugaacagcgucaucgagaagaugaacacccaguucaccgccgugggcaaggaguucaaccaccuggagaagcgcaucgagaaccugaacaagaaggucgacgacggcuuccucgacaucuggacguacaacgccgagcugcuggugcuccuggagaacgagcggacccuggacuaccacgacuccaacgugaagaaccucuacgagaagguccgcagccagcugaagaacaacgccaaggagaucgggaacggcugcuucgaguucuaccacaagugcgacaacacgugcaucgaguccgugaagaacgggaccuacgacuaccccaaguacagcgaggaggccaagcugaaccgggaggagaucgacggcgugaagcucgaguccacccgcaucuaccagauccuggcgaucuacagcaccgucgccagcucccuggugcucguggucagccugggggccaucuccuucuggaugugcagcaacggcucccugcagugccggaucugcaucuga

SEQ ID NO: 67826 - RNA, 1701 nt, Artificial Sequence; identical to SEQ ID NO: 66935
  derived and/or modified CDS sequence (opt1) from hemagglutinin__InfluenzaA__ACZ92131

SEQ ID NO: 67827 - RNA, 1701 nt, Artificial Sequence; identical to SEQ ID NO: 66935
  derived and/or modified CDS sequence (opt1) from hemagglutinin__InfluenzaA__ACZ92132

SEQ ID NO: 67828 - RNA, 1701 nt, Artificial Sequence; identical to SEQ ID NO: 66935
  derived and/or modified CDS sequence (opt1) from hemagglutinin__InfluenzaA__ACZ92133

SEQ ID NO: 67829 - RNA, 1701 nt, Artificial Sequence; identical to SEQ ID NO: 66693
  derived and/or modified CDS sequence (opt1) from hemagglutinin__InfluenzaA__ACZ92134

SEQ ID NO: 67830 - RNA, 1701 nt, Artificial Sequence; identical to SEQ ID NO: 66693
  derived and/or modified CDS sequence (opt1) from hemagglutinin__InfluenzaA__ACZ95465

SEQ ID NO: 67831 - RNA, 1701 nt, Artificial Sequence; identical to SEQ ID NO: 66680
  derived and/or modified CDS sequence (opt1) from hemagglutinin__InfluenzaA__ACZ95837

SEQ ID NO: 67832 - RNA, 1701 nt, Artificial Sequence; identical to SEQ ID NO: 66693
  derived and/or modified CDS sequence (opt1) from hemagglutinin__InfluenzaA__ACZ95847

SEQ ID NO: 67833 - RNA, 1701 nt, Artificial Sequence
  derived and/or modified CDS sequence (opt1) from hemagglutinin__InfluenzaA__ACZ95857
augaaggccauccuggugguccuccuguacaccuucgccaccgcgaacgccgacacgcugugcaucggcuaccacgccaacaacagcaccgacaccguggacaccgugcucgagaagaacgucacggugacccacuccgugaaccugcuggaggacaagcacaacgggaagcucugcaagcugcgcggcgucgcgccccugcaccucgggaagugcaacaucgccggcuggauccuggggaacccggagugcgagagccuguccaccgccagcuccuggagcuacaucguggagaccuccagcuccgacaacggcacgugcuaccccggcgacuucaucgacuacgaggagcuccgggagcagcugagcuccgugagcuccuucgagcgcuucgagaucuuccccaagaccagcuccuggcccaaccacgacagcaacaagggggucaccgccgccugcccgcacgccggcgcgaaguccuucuacaagaaccugaucuggcucgugaagaaggggaacagcuaccccaagcuguccaagagcuacaucaacgacaagggcaaggaggugcugguccucugggggauccaccaccccagcaccuccgccgaccagcagagccuguaccagaacgccgacgccuacguguucgugggcacgucccgguacagcaagaaguucaagcccgagaucgccauccgcccgaagguccgggaccaggagggccgcaugaacuacuacuggacccugguggagcccggggacaagaucaccuucgaggcgaccggcaaccucguggucccccgguacgccuucgccauggagcgcaacgccggguccggcaucaucaucagcgacacgcccgugcacgacugcaacacgaccugccagaccuccaagggcgccaucaacaccagccugccguuccagaacauccaccccaucaccaucgggaagugccccaaguacgugaaguccaccaagcugcggcucgcgaccggccugcgcaacguccccagcauccagucccgggggcuguucggcgccaucgccggguucaucgagggcggcuggacggggaugguggacggcugguacggguaccaccaccagaacgagcagggcagcggguacgccgccgaccucaaguccacccagaacgcgaucgacgagaucaccaacaaggugaacagcgucaucgagaagaugaacacccaguucacggccgugggcaaggaguucaaccaccuggagaagcgcaucgagaaccugaacaagaaggucgacgacggcuuccucgacaucuggaccuacaacgccgagcugcuggugcuccuggagaacgagcggacccuggacuaccacgacuccaacgugaagaaccucuacgagaagguccgcagccagcugaagaacaacgccaaggagaucgggaacggcugcuucgaguucuaccacaagugcgacaacacgugcauggaguccgugaagaacgggaccuacgacuacccgaaguacagcgaggaggccaagcugaaccgggaggagaucgacggcgugaagcucgaguccacccgcaucuaccagauccuggcgaucuacagcaccgucgccagcucccuggugcucguggucagccugggggccaucuccuucuggaugugcagcaacggcucccugcagugccggaucugcaucuga

SEQ ID NO: 67834 - RNA, 1701 nt, Artificial Sequence; identical to SEQ ID NO: 66693
  derived and/or modified CDS sequence (opt1) from hemagglutinin__InfluenzaA__ACZ95867

SEQ ID NO: 67835 - RNA, 1701 nt, Artificial Sequence
  derived and/or modified CDS sequence (opt1) from hemagglutinin__InfluenzaA__ACZ95887
auggaggccauccuggugguccuccuguacaccuucgccaccgcgaacgccgacacgcugugcaucggcuaccacgccaacaacagcaccgacaccguggacaccgugcucgagaagaacgucacggugacccacuccgugaaccugcuggaggacaagcacaacgggaagcucugcaagcugcgcggcgucgcgccccugcaccucgggaagugcaacaucgccggcuggauccuggggaacccggagugcgagagccuguccaccgccagcuccuggagcuacaucguggagaccuccagcuccgacaacggcacgugcuaccccggcgacuucaucgacuacgaggagcuccgggagcagcugagcuccgugagcuccuucgagcgcuucgagaucuuccccaagaccagcuccuggcccaaccacgacagcaacaagggggucaccgccgccugcccgcacgccggcgcgaaguccuucuacaagaaccugaucuggcucgugaagaaggggaacagcuaccccaagcuguccaagagcuacaucaacgacaagggcaaggaggugcugguccucugggggauccaccaccccagcaccuccgccgaccagcagagccuguaccagaacgccgacgccuacguguucgugggcuccagccgguacuccaagaaguucaagcccgagaucgccauccgcccgaagguccggaaccaggagggccgcaugaacuacuacuggacgcugguggagcccggggacaagaucaccuucgaggcgaccggcaaccucguggucccccgguacgccuucgccauggagcgcaacgccgggagcggcaucaucaucuccgacacccccgugcacgacugcaacacgaccugccagaccccgaagggcgccaucaacaccagccugcccuuccacaacauccaccccaucacgaucgggaagugccccaaguacgugaaguccaccaagcugcggcucgcgaccggccugcgcaacgucccgagcauccagucccgggggcuguucggcgccaucgccggguucaucgagggcggcuggaccgggaugguggacggcugguacggguaccaccaccagaacgagcagggcagcggguacgccgccgaccucaaguccacgcagaacgcgaucgacgagaucaccaacaaggugaacagcgucaucgagaagaugaacacccaguucaccgccgugggcaaggaguucaaccaccuggagaagcgcaucgagaaccugaacaagaaggucgacgacggcuuccucgacaucuggacguacaacgccgagcugcuggugcuccuggagaacgagcggacccuggacuaccacgacuccaacgugaagaaccucuacgagaagguccgcagccagcugaagaacaacgccaaggagaucgggaacggcugcuucgaguucuaccacaagugcgacaacacgugcauggaguccgugaagaacgggaccuacgacuaccccaaguacagcgaggaggccaagcugaaccgggaggagaucgacggcgugaagcucgaguccacccgcaucuaccagauccuggcgaucuacagcaccgucgccagcucccuggugcucguggucagccugggggccaucuccuucuggaugugcagcaacggcucccugcagugccggaucugcaucuga

SEQ ID NO: 67836 - RNA, 1701 nt, Artificial Sequence; identical to SEQ ID NO: 66693
  derived and/or modified CDS sequence (opt1) from hemagglutinin__InfluenzaA__ACZ95897

SEQ ID NO: 67837 - RNA, 1701 nt, Artificial Sequence
  derived and/or modified CDS sequence (opt1) from hemagglutinin__InfluenzaA__ACZ95907
augaaggccauccuggugguccuccuguacaccuucgccaccgcgaacgccgacacgcugugcaucggcuaccacgccaacaacagcaccgacaccguggacaccgugcucgagaagaacgucacggugacccacuccgugaaccugcuggaggacaagcacaacgggaagcucugcaagcugcgcggcgucgcgccccugcaccucgggaagugcaacaucgccggcuggauccuggggaacccggagugcgagagccuguccaccgccagcuccuggagcuacaucguggagaccuccagcuccgacaacggcacgugcuaccccggcgacuucaucgacuacgaggagcuccgggagcagcugagcuccgugagcuccuucgagcgcuucgagaucuuccccaagaccagcuccuggcccaaccacgacagcaacaagggggucaccgccgccugcccgcacgccggcgcgaaguccuucuacaagaaccugaucuggcucgugaagaaggggaacagcuaccccaagcuguccaagagcuacaucaacgacaagggcaaggaggugcugguccucugggggauccaccaccccagcaccuccgccgaccagcagagccuguaccagaacgccgacgccuacguguucgugggcacgucccgguacagcaagaaguucaagcccgagaucgccauccgcccgaagguccgggaccaggagggccgcaugaacuacuacuggacccugguggagcccggggacaagaucaccuucgaggcgaccggcaaccucguggucccccgguacgccuucgccauggagcgcaacgccggguccggcaucaucaucagcgacacgcccguguacgacugcaacacgaccugccagaccccgaagggcgccaucaacaccucccugcccuuccagaacauccaccccaucaccaucgggaagugccccaaguacgucaagagcaccaagcugcggcucgcgaccggccugcgcaacgugccguccauccagagccgggggcuguucggcgccaucgccggguucaucgagggcggcuggacggggaugguggacggcugguacggguaccaccaccagaacgagcagggcuccggguacgccgccgaccucaagagcacccagaacgcgaucgacgagaucaccaacaaggugaacuccgucaucgagaagaugaacacccaguucacggccgugggcaaggaguucaaccaccuggagaagcgcaucgagaaccugaacaagaaggucgacgacggcuuccucgacaucuggaccuacaacgccgagcugcuggugcuccuggagaacgagcggacccuggacuaccacgacagcaacgugaagaaccucuacgagaagguccgcucccagcugaagaacaacgccaaggagaucgggaacggcugcuucgaguucuaccacaagugcgacaacacgugcauggagagcgugaagaacgggaccuacgacuaccccaaguacuccgaggaggccaagcugaaccgggaggagaucgacggcgugaagcucgagagcacccgcaucuaccagauccuggcgaucuacuccaccgucgccagcagccuggugcucguggucucccugggggccaucagcuucuggaugugcuccaacggcagccugcagugccggaucugcaucuga

SEQ ID NO: 67838 - RNA, 1701 nt, Artificial Sequence; identical to SEQ ID NO: 66693
  derived and/or modified CDS sequence (opt1) from hemagglutinin__InfluenzaA__ACZ95927

SEQ ID NO: 67839 - RNA, 1701 nt, Artificial Sequence
  derived and/or modified CDS sequence (opt1) from hemagglutinin__InfluenzaA__ACZ95937
auggaggccauccuggugguccuccuguacaccuucgccaccgcgaacgccgacacgcugugcaucggcuaccacgccaacaacagcaccgacaccguggacaccgugcucgagaagaacgucacggugacccacuccgugaaccugcuggaggacaagcacaacgggaagcucugcaagcugcgcggcgucgcgccccugcaccucgggaagugcaacaucgccggcuggauccuggggaacccggagugcgagagccuguccaccgccagcuccuggagcuacaucguggagaccuccagcuccgacaacggcacgugcuaccccggcgacuucaucgacuacgaggagcuccgggagcagcugagcuccgugagcuccuucgagcgcuucgagaucuuccccaagaccagcuccuggcccaaccacgacagcaacaagggggucaccgccgccugcccgcacgccggcgcgaaguccuucuacaagaaccugaucuggcucgugaagaaggggaacagcuaccccaagcuguccaagagcuacaucaacgacaagggcaaggaggugcugguccucugggggauccaccaccccagcaccaacgccgaccagcagucccuguaccagaacgccgacgccuacguguucgugggcagcucccgguacagcaagaaguucaagcccgagaucgccauccgcccgaagguccgggaccaggagggccgcaugaacuacuacuggacgcugguggagcccggggacaagaucaccuucgaggcgaccggcaaccucguggucccccgguacgccuucgccauggagcgcaacgccggguccggcaucaucaucagcgacacccccgugcacgacugcaacacgaccugccagaccccgaagggcgccaucaacaccucccugcccuuccacaacauccaccccaucacgaucgggaagugccccaaguacgucaagagcaccaagcugcggcucgcgaccggccugcgcaacgugccguccauccagagccgggggcuguucggcgccaucgccggguucaucgagggcggcuggaccgggaugguggacggcugguacggguaccaccaccagaacgagcagggcuccggguacgccgccgaccucaagagcacgcagaacgcgaucgacgagaucaccaacaaggugaacuccgucaucgagaagaugaacacccaguucaccgccgugggcaaggaguucaaccaccuggagaagcgcaucgagaaccugaacaagaaggucgacgacggcuuccucgacaucuggacguacaacgccgagcugcuggugcuccuggagaacgagcggacccuggacuaccacgacagcaacgugaagaaccucuacgagaagguccgcucccagcugaagaacaacgccaaggagaucgggaacggcugcuucgaguucuaccacaagugcgacaacacgugcauggagagcgugaagaacgggaccuacgacuaccccaaguacuccgaggaggccaagcugaaccgggaggagaucgacggcgugaagcucgagagcacccgcaucuaccagauccuggcgaucuacuccaccgucgccagcagccuggugcucguggucucccugggggccaucagcuucuggaugugcuccaacggcagccugcagugccggaucugcaucuga

SEQ ID NO: 67840 - RNA, 1701 nt, Artificial Sequence; identical to SEQ ID NO: 66935
  derived and/or modified CDS sequence (opt1) from hemagglutinin__InfluenzaA__ACZ95947

SEQ ID NO: 67841 - RNA, 1701 nt, Artificial Sequence; identical to SEQ ID NO: 66693
  derived and/or modified CDS sequence (opt1) from hemagglutinin__InfluenzaA__ACZ95957

SEQ ID NO: 67842 - RNA, 1701 nt, Artificial Sequence; identical to SEQ ID NO: 66935
  derived and/or modified CDS sequence (opt1) from hemagglutinin__InfluenzaA__ACZ95967

SEQ ID NO: 67843 - RNA, 1701 nt, Artificial Sequence; identical to SEQ ID NO: 67839
  derived and/or modified CDS sequence (opt1) from hemagglutinin__InfluenzaA__ACZ95977

SEQ ID NO: 67844 - RNA, 1701 nt, Artificial Sequence
  derived and/or modified CDS sequence (opt1) from hemagglutinin__InfluenzaA__ACZ95987
augaaggccauccuggugguccuccuguacaccuucgccaccgcgaacgccgacacgcugugcaucggcuaccacgccaacaacagcaccgacaccguggacaccgugcucgagaagaacgucacggugacccacuccgugaaccugcuggaggacaagcacaacgggaagcucugcaagcugcgcggcgucgcgccccugcaccucgggaagugcaacaucgccggcuggauccuggggaacccggagugcgagagccuguccaccgccagcuccuggagcuacaucguggagaccuccagcuccgacaacggcacgugcuaccccggcgacuucaucgacuacgaggagcuccgggagcagcugagcuccgugagcuccuucgagcgcuucgagaucuuccccaagaccagcuccuggcccaaccacgacagcaacaagggggucaccgccgccugcccgcacgccggcgcgaaguccuucuacaagaaccugaucuggcucgugaagaaggggaacagcuaccccaagcuguccaagagcuacaucaacgacaagggcaaggaggugcugguccucugggggauccaccaccccagcaccuccgccgaccagcagagccuguaccagaacgccgacgccuacguguucgugggcacgucccgguacagcaagaaguucaagcccgagaucgccauccgcccgaagguccgggaccaggagggccgcaugaacuacuacuggacccugguggagcccggggacaagaucaccuucgaggcgaccggcaaccucguggucccccgguacgccuucgccauggagcgcaacgccggguccggcaucaucaucagcgacacgcccgugcacgacugcaacacgaccugccagaccccgaagggcgccaucaacaccucccugcccuuccagaacauccaccccaucaccaucgggaagugccccaaguacgucaagagcaccaagcugcggcucgcgaccggccugcgcaacaucccguccauccagagccgggggcuguucggcgccaucgccggguucaucgagggcggcuggacggggaugaucgacggcugguacggguaccaccaccagaacgagcagggcuccggguacgccgccgaccucaagagcacccagaacgcgaucgacgagaucaccaacaaggugaacuccgugaucgagaagaugaacacccaguucacggccgugggcaaggaguucaaccaccuggagaagcgcaucgagaaccugaacaagaaggucgacgacggcuuccucgacaucuggaccuacaacgccgagcugcuggugcuccuggagaacgagcggacccuggacuaccacgacagcaacgucaagaaccucuacgagaaggugcgcucccagcugaagaacaacgccaaggagaucgggaacggcugcuucgaguucuaccacaagugcgacaacacgugcauggagagcgugaagaacgggaccuacgacuaccccaaguacuccgaggaggccaagcugaaccgggaggagaucgacggcgucaagcucgagagcacccgcaucuaccagauccuggcgaucuacuccaccguggccagcagccuggugcucgucgugucccugggggccaucagcuucuggaugugcuccaacggcagccugcagugccggaucugcaucuga

SEQ ID NO: 67845 - RNA, 1701 nt, Artificial Sequence; identical to SEQ ID NO: 66693
  derived and/or modified CDS sequence (opt1) from hemagglutinin__InfluenzaA__ACZ95997

SEQ ID NO: 67846 - RNA, 1701 nt, Artificial Sequence; identical to SEQ ID NO: 66693
  derived and/or modified CDS sequence (opt1) from hemagglutinin__InfluenzaA__ACZ96007

SEQ ID NO: 67847 - RNA, 1701 nt, Artificial Sequence; identical to SEQ ID NO: 66680
  derived and/or modified CDS sequence (opt1) from hemagglutinin__InfluenzaA__ACZ96017

SEQ ID NO: 67848 - RNA, 1701 nt, Artificial Sequence; identical to SEQ ID NO: 66693
  derived and/or modified CDS sequence (opt1) from hemagglutinin__InfluenzaA__ACZ96027

SEQ ID NO: 67849 - RNA, 1701 nt, Artificial Sequence; identical to SEQ ID NO: 67839
  derived and/or modified CDS sequence (opt1) from hemagglutinin__InfluenzaA__ACZ96047

SEQ ID NO: 67850 - RNA, 1701 nt, Artificial Sequence
  derived and/or modified CDS sequence (opt1) from hemagglutinin__InfluenzaA__ACZ96057
augaaggccauccuggugguccuccuguacaccuucgccaccgcgaacgccgacacgcugugcaucggcuaccacgccaacaacagcaccgacaccguggacaccgugcucgagaagaacgucacggugacccacuccgugaaccugcuggaggacaagcacaacgggaagcucugcaagcugcgcggcgucgcgccccugcaccucgggaagugcaacaucgccggcuggauccuggggaacccggagugcgagagccuguccaccgccagcuccuggagcuacaucguggagaccuccagcuccgacaacggcacgugcuaccccggcgacuucaucgacuacgaggagcuccgggagcagcugagcuccgugagcuccuucgagcgcuucgagaucuuccccaagaccagcuccuggcccaaccacgacagcaacaagggggucaccgccgccugccugcacgccggcgcgaaguccuucuacaagaaccucaucuggcuggugaagaaggggaacagcuacccgaagcuguccaagagcuacaucaacgacaagggcaaggaggugcucguccugugggggauccaccaccccagcaccuccgccgaccagcagagccuguaccagaacgccgacgccuacguguucgugggcacgucccgguacagcaagaaguucaagcccgagaucgccauccgccccaagguccgggaccaggagggccgcaugaacuacuacuggacccucguggagccgggggacaagaucaccuucgaggcgaccggcaaccugguggucccccgguacgccuucgccauggagcgcaacgccggguccggcaucaucaucagcgacacgcccgugcacgacugcaacacgaccugccagacccccaagggcgccaucaacaccucccugccguuccagaacauccaccccaucaccaucgggaagugccccaaguacgucaagagcaccaagcuccggcuggcgaccggccugcgcaacauccccuccauccagagccgggggcuguucggcgccaucgccggguucaucgagggcggcuggacggggaugguggacggcugguacggguaccaccaccagaacgagcagggcuccggguacgccgccgaccucaagagcacccagaacgcgaucgacgagaucaccaacaaggugaacuccgugaucgagaagaugaacacccaguucacggccgucggcaaggaguucaaccaccuggagaagcgcaucgagaaccucaacaagaagguggacgacggcuuccuggacaucuggaccuacaacgccgagcugcucguccugcuggagaacgagcggacccucgacuaccacgacagcaacgugaagaaccuguacgagaaggugcgcucccagcugaagaacaacgccaaggagaucgggaacggcugcuucgaguucuaccacaagugcgacaacacgugcauggagagcgucaagaacgggaccuacgacuacccgaaguacuccgaggaggccaagcucaaccgggaggagaucgacggcgugaagcuggagagcacccgcaucuaccagauccuggcgaucuacuccaccguggccagcagccucguccugguggugucccugggggccaucagcuucuggaugugcuccaacggcagccuccagugccggaucugcaucuga

SEQ ID NO: 67851 - RNA, 1701 nt, Artificial Sequence
  derived and/or modified CDS sequence (opt1) from hemagglutinin__InfluenzaA__ACZ96069
augaaggccauccuggugguccuccuguacaccuucgccaccgcgaacgccgacacgcugugcaucggcuaccacgccaacaacagcaccgacaccguggacaccgugcucgagaagaacgucacggugacccacuccgugaaccugcuggaggacaagcacaacgggaagcucugcaagcugcgcggcgucgcgccccugcaccucgggaagugcaacaucgccggcuggauccuggggaacccggagugcgagagccuguccaccgccagcuccuggagcuacaucguggagaccuccagcuccgacaacggcacgugcuaccccggcgacuucaucgacuacgaggagcuccgggagcagcugagcuccgugagcuccuucgagcgcuucgagaucuuccccaagaccagcuccuggcccaaccacgacagcaacaagggggucaccgccgccugcccgcacgccggcgcgaaguccuucuacaagaaccugaucuggcucgugaagaaggggaacagcuaccccaagcuguccaagagcuacaucaacgacaagggcaaggaggugcugguccucugggggauccaccaccccagcaccuccgccgaccagcagagccuguaccagaacgccgacgccuacguguucgugggcacgucccgguacagcaagaaguucaagcccgagaucgccauccgcccgaagguccgggaccaggagggccgcaugaacuacuacuggacccugguggagcccgggaacaagaucaccuucgaggcgaccggcaaccucguggucccccgguacgccuucgccauggagcgcaacgccggguccggcaucaucaucagcgacacgcccgugcacgacugcaacacgaccugccagaccccgaagggcgccaucaacaccucccugcccuuccagaacauccaccccaucaccaucgggaagugccccaaguacgucaagagcaccaagcugcggcucgcgaccggccugcgcaacgugccguccauccagagccgggggcuguucggcgccaucgccggguucaucgagggcggcuggacggggaugguggacggcugguacggguaccaccaccagaacgagcagggcuccggguacgccgccgaccucaagagcacccagaacgcgaucgacgagaucaccaacaaggugaacuccgucaucgagaagaugaacacccaguucacggccgugggcaaggaguucaaccaccuggagaagcgcaucgagaaccugaacaagaaggucgacgacggcuuccucgacaucuggaccuacaacgccgagcugcuggugcuccuggagaacgagcggacccuggacuaccacgacagcaacgugaagaaccucuacgagaagguccgcucccagcugaagaacaacgccaaggagaucgggaacggcugcuucgaguucuaccacaagugcgacaacacgugcauggagagcgugaagaacgggaccuacgacuaccccaaguacuccgaggaggccaagcugaaccgggaggagaucgacggcgugaagcucgagagcacccgcaucuaccagauccuggcgaucuacuccaccgucgccagcagccuggugcucguggucucccugggggccaucagcuucuggaugugcuccaacggcagccugcagugccggaucugcaucuga

SEQ ID NO: 67852 - RNA, 1701 nt, Artificial Sequence; identical to SEQ ID NO: 67839
  derived and/or modified CDS sequence (opt1) from hemagglutinin__InfluenzaA__ACZ96089

SEQ ID NO: 67853 - RNA, 1701 nt, Artificial Sequence
  derived and/or modified CDS sequence (opt1) from hemagglutinin__InfluenzaA__ACZ96119
augaaggccauccuggugguccuccuguacaccuucgccaccgcgaacgccgacacgcugugcaucggcuaccacgccaacaacagcaccgacaccguggacaccgugcucgagaagaacgucacggugacccacuccgugaaccugcuggaggacaagcacaacgggaagcucugcaagcugcgcggcgucgcgccccugcaccucgggaagugcaacaucgccggcuggauccuggggaacccggagugcgagagccuguccaccgccagcuccuggagcuacaucguggagaccuccagcuccgacaacggcacgugcuaccccggcgacuucaucgacuacgaggagcuccgggagcagcugagcuccgugagcuccuucgagcgcuucgagauguuccccaagaccagcuccuggcccaaccacgacagcaacaagggggucaccgccgccugcccgcacgccggcgcgaaguccuucuacaagaaccugaucuggcucgugaagaaggggaacagcuaccccaagcuguccaagagcuacaucaacgacaagggcaaggaggugcugguccucugggggauccaccaccccagcaccuccgccgaccagcagagccuguaccagaacgccgacgccuacguguucgugggcacgucccgguacagcaagaaguucaagcccgagaucgccauccgcccgaagguccgggaccaggagggccgcaugaacuacuacuggacccugguggagcccggggacaagaucaccuucgaggcgaccggcaaccucguggucccccgguacgccuucgccauggagcgcaacgccggguccggcaucaucaucagcgacacgcccgugcacgacugcaacacgaccugccagaccccgaagggcgccaucaacaccucccugcccuuccagaacauccaccccaucaccaucgggaagugccccaaguacgucaagagcaccaagcugcggcucgcgaccggccugcgcaacgugccguccauccagagccgggggcuguucggcgccaucgccggguucaucgagggcggcuggacggggaugguggacggcugguacggguaccaccaccagaacgagcagggcuccggguacgccgccgaccucaagagcacccagaacgcgaucgacgagaucaccaacaaggugaacuccgucaucgagaagaugaacacccaguucacggccgugggcaaggaguucaaccaccuggagaagcgcaucgagaaccugaacaagaaggucgacgacggcuuccucgacaucuggaccuacaacgccgagcugcuggugcuccuggagaacgagcggacccuggacuaccacgacagcaacgugaagaaccucuacgagaagguccgcucccagcugaagaacaacgccaaggagaucgggaacggcugcuucgaguucuaccacaagugcgacaacacgugcauggagagcgugaagaacgggaccuacgacuaccccaaguacuccgaggaggccaagcugaaccgggaggagaucgacggcgugaagcucgagagcacccgcaucuaccagauccuggcgaucuacuccaccgucgccagcagccuggugcucguggucucccugggggccaucagcuucuggaugugcuccaacggcagccugcagugccggaucugcaucuga

SEQ ID NO: 67854 - RNA, 1701 nt, Artificial Sequence
  derived and/or modified CDS sequence (opt1) from hemagglutinin__InfluenzaA__ACZ96129
augaaggccauccuggugguccuccuguacaccuucgccaccgcgaacgccgacacgcugugcaucggcuaccacgccaacaacagcaccgacaccguggacaccgugcucgagaagaacgucacggugacccacuccgugaaccugcuggaggacaagcacaacgggaagcucugcaagcugcgcggcgucgcgccccugcaccucgggaagugcaacaucgccggcuggauccuggggaacccggagugcgagagccuguccaccgccagcuccuggagcuacaucguggagaccuccagcuccgacaacggcacgugcuaccccggcgaguucaucgacuacgaggagcuccgggagcagcugagcuccgugagcuccuucgagcgcuucgagaucuuccccaagaccagcuccuggcccaaccacgacagcaacaagggggucaccgccgccugcccgcacgccggcgcgaaguccuucuacaagaaccugaucuggcucgugaagaaggggaacagcuaccccaagcuguccaagagcuacaucaacgacaagggcaaggaggugcugguccucugggggauccaccaccccagcaccuccgccgaccagcagagccuguaccagaacgccgacgccuacguguucgugggcacgucccgguacagcaagaaguucaagcccgagaucgccauccgcccgaagguccgggaccaggagggccgcaugaacuacuacuggacccugguggagcccggggacaagaucaccuucgaggcgaccggcaaccucguggucccccgguacgccuucgccauggagcgcaacgccggguccggcaucaucaucagcgacacgcccgugcacgacugcaacacgaccugccagaccccgaagggcgccaucaacaccucccugcccuuccagaacauccaccccaucaccaucgggaagugccccaaguacgucaagagcaccaagcugcggcucgcgaccggccugcgcaacgugccguccauccagagccgggggcuguucggcgccaucgccggguucaucgagggcggcuggacggggaugguggacggcugguacggguaccaccaccagaacgagcagggcuccggguacgccgccgaccucaagagcacccagaacgcgaucgacgagaucaccaacaaggugaacuccgucaucgagaagaugaacacccaguucacggccgugggcaaggaguucaaccaccuggagaagcgcaucgagaaccugaacaagaaggucgacgacggcuuccucgacaucuggaccuacaacgccgagcugcuggugcuccuggagaacgagcggacccuggacuaccacgacagcaacgugaagaaccucuacgagaagguccgcucccagcugaagaacaacgccaaggagaucgggaacggcugcuucgaguucuaccacaagugcgacaacacgugcauggagagcgugaagaacgggaccuacgacuaccccaaguacuccgaggaggccaagcugaaccgggaggagaucgacggcgugaagcucgagagcacccgcaucuaccagauccuggcgaucuacuccaccgucgccagcagccuggugcucguggucucccugggggccaucagcuucuggaugugcuccaacggcagccugcagugccggaucugcaucuga

SEQ ID NO: 67855 - RNA, 1701 nt, Artificial Sequence; identical to SEQ ID NO: 66693
  derived and/or modified CDS sequence (opt1) from hemagglutinin__InfluenzaA__ACZ96149

SEQ ID NO: 67856 - RNA, 1701 nt, Artificial Sequence; identical to SEQ ID NO: 66693
  derived and/or modified CDS sequence (opt1) from hemagglutinin__InfluenzaA__ACZ96159

SEQ ID NO: 67857 - RNA, 1701 nt, Artificial Sequence
  derived and/or modified CDS sequence (opt1) from hemagglutinin__InfluenzaA__ACZ96179
augaaggccauccuggugguccuccuguacaccuucgccaccgcgaacgccgacacgcugugcaucggcuaccacgccaacaacagcaccgacaccguggacaccgugcucgagaagaacgucacggugacccacuccgugaaccugcuggaggacaagcacaacgggaagcucugcaagcugcgcggcgucgcgccccugcaccucgggaagugcaacaucgccggcuggauccuggggaacccggagugcgagagccuguccaccgccagcuccuggagcuacaucguggagaccuccagcuccgacaacggcacgugcuaccccggcgacuucaucgacuacgaggagcuccgggagcagcugagcuccgugagcuccuucgagcgcuucgagaucuuccccaagaccagcuccuggcccaaccacgacagcaacaagggggucaccgccgccugcccgcacgccggcgcgaaguccuucuacaagaaccugaucuggcucgugaagaaggggaacagcuaccccaagcuguccaagagcuacaucaacgacaagggcaaggaggugcugguccucugggggauccaccaccccagcaccuccgccgaccagcagagccuguaccagaacgccgacgccuacguguucgugggcacgucccgguacagcaagaaguucaagcccgagaucgccauccgcccgaagguccgggaccaggagggccgcaugaacuacuacuggacccugguggagcccggggacaagaucaccuucgaggcgaccggcaaccucguggucccccgguacgccuucgccauggagcgcaacgccggguccggcaucaucaucagcgacacgcccgugcacgacugcaacacgaccugccagaccccgaagggcgccaucaacaccucccugcccuuccagaacauccaccccaucaccaucgggaagugccccaaguacgucaagagcaccaagcugcggcucgcgaccggccugcgcaacgugccguccauccagagccgggggcuguucggcgccaucgccggguucaucgagggcggcuggacggggaugguggacggcugguacggguaccaccaccagaacgagcagggcuccggguacgccgccgaccucaagagcacccagaacgcgaucgacaagaucaccaacaaggugaacuccgucaucgagaagaugaacacccaguucacggccgugggcaaggaguucaaccaccuggagaagcgcaucgagaaccugaacaagaaggucgacgacggcuuccucgacaucuggaccuacaacgccgagcugcuggugcuccuggagaacgagcggacccuggacuaccacgacagcaacgugaagaaccucuacgagaagguccgcucccagcugaagaacaacgccaaggagaucgggaacggcugcuucgaguucuaccacaagugcgacaacacgugcauggagagcgugaagaacgggaccuacgacuaccccaaguacuccgaggaggccaagcugaaccgggaggagaucgacggcgugaagcucgagagcacccgcaucuaccagauccuggcgaucuacuccaccgucgccagcagccuggugcucguggucucccugggggccaucagcuucuggaugugcuccaacggcagccugcagugccggaucugcaucuga

SEQ ID NO: 67858 - RNA, 1701 nt, Artificial Sequence; identical to SEQ ID NO: 67850
  derived and/or modified CDS sequence (opt1) from hemagglutinin__InfluenzaA__ACZ96189

SEQ ID NO: 67859 - RNA, 1701 nt, Artificial Sequence; identical to SEQ ID NO: 67857
  derived and/or modified CDS sequence (opt1) from hemagglutinin__InfluenzaA__ACZ96199

SEQ ID NO: 67860 - RNA, 1701 nt, Artificial Sequence; identical to SEQ ID NO: 66693
  derived and/or modified CDS sequence (opt1) from hemagglutinin__InfluenzaA__ACZ96209

SEQ ID NO: 67861 - RNA, 1701 nt, Artificial Sequence
  derived and/or modified CDS sequence (opt1) from hemagglutinin__InfluenzaA__ACZ96219
augaaggccauccuggugguccuccuguacaccuucgccaccgcgaacgccgacacgcugugcaucggcuaccacgccaacaacagcaccgacaccguggacaccgugcucgagaagaacgucacggugacccacuccgugaaccugcuggaggacaagcacaacgggaagcucugcaagcugcgcggcgucgcgccccugcaccucgggaagugcaacaucgccggcuggauccuggggaacccggagugcgagagccuguccaccgccagcuccuggagcuacaucguggagaccuccagcuccgacaacggcacgugcuaccccggcgacuucaucgacuacgaggagcuccgggagcagcugagcuccgugagcuccuucgagcgcuucgagaucuuccccaagaccagcuccuggcccaaccacgacagcaacaagggggucaccgccgccugcccgcacgccggcgcgaaguccuucuacaagaaccugaucuggcucgugaagaaggggaacagcuaccccaagcuguccaagagcuacaucaacgacaagggcaaggaggugcugguccucugggggauccaccaccccagcaccuccgccgaccagcagagccuguaccagaacgccgacgccuacguguucgugggcacgucccgguacagcaagaaguucaagcccgagaucgccauccgcccgaagguccgggaccaggagggccgcaugaacuacuacuggacccugguggagcccggggacaagaucaaguucgaggcgaccggcaaccucguggucccccgguacgccuucgccauggagcgcaacgccggguccggcaucaucaucagcgacacccccgugcacgacugcaacacgaccugccagaccuccaagggcgccaucaacaccagccugccguuccagaacauccaccccaucacgaucgggaagugccccaaguacgugaaguccaccaagcugcggcucgcgaccggccugcgcaacguccccagcauccagucccgggggcuguucggcgccaucgccggguucaucgagggcggcuggaccgggaugguggacggcugguacggguaccaccaccagaacgagcagggcagcggguacgccgccgaccucaaguccacgcagaacgcgaucgacgagaucaccaacaaggugaacagcgucaucgagaagaugaacacccaguucaccgccgugggcaaggaguucaaccaccuggagaagcgcaucgagaaccugaacaagaaggucgacgacggcuuccucgacaucuggacguacaacgccgagcugcuggugcuccuggagaacgagcggacccuggacuaccacgacuccaacgugaagaaccucuacgagaagguccgcagccagcugaagaacaacgccaaggagaucgggaacggcugcuucgaguucuaccacaagugcgacaacacgugcauggaguccgugaagaacgggaccuacgacuacccgaaguacagcgaggaggccaagcugaaccgggaggagaucgcgggcgugaagcucgaguccacccgcaucuaccagauccuggccaucuacagcaccgucgccagcucccuggugcucguggucagccugggggccaucuccuucuggaugugcagcaacggcucccugcagugccggaucugcaucuga

SEQ ID NO: 67862 - RNA, 1701 nt, Artificial Sequence; identical to SEQ ID NO: 66693
  derived and/or modified CDS sequence (opt1) from hemagglutinin__InfluenzaA__ACZ96229

SEQ ID NO: 67863 - RNA, 1701 nt, Artificial Sequence; identical to SEQ ID NO: 67857
  derived and/or modified CDS sequence (opt1) from hemagglutinin__InfluenzaA__ACZ96239

SEQ ID NO: 67864 - RNA, 1701 nt, Artificial Sequence; identical to SEQ ID NO: 66693
  derived and/or modified CDS sequence (opt1) from hemagglutinin__InfluenzaA__ACZ96249

SEQ ID NO: 67865 - RNA, 1701 nt, Artificial Sequence
  derived and/or modified CDS sequence (opt1) from hemagglutinin__InfluenzaA__ACZ96269
augaaggccauccuggugguccuccuguacaccuucgccaccgcgaacgccgacacgcugugcaucggcuaccacgccaacaacagcaccgacaccguggacaccgugcucgagcgcaacgucacggugacccacuccgugaaccugcuggaggacaagcacaacgggaagcucugcaagcugcggggcgucgcgccccugcaccucgggaagugcaacaucgccggcuggauccuggggaacccggagugcgagagccuguccaccgccagcuccuggagcuacaucguggagaccuccagcuccgacaacggcacgugcuaccccggcgacuucaucgacuacgaggagcuccgcgagcagcugagcuccgugagcuccuucgagcgguucgagaucuuccccaagaccagcuccuggcccaaccacgacagcaacaagggggucaccgccgccugcccgcacgccggcgcgaaguccuucuacaagaaccugaucuggcucgugaagaaggggaacagcuaccccaagcuguccaagagcuacaucaacgacaagggcaaggaggugcugguccucugggggauccaccaccccagcaccuccgccgaccagcagagccuguaccagaacgccgacgccuacguguucgugggcacgucccgcuacagcaagaaguucaagcccgagaucgccauccggccgaagguccgcgaccaggagggccggaugaacuacuacuggacccugguggagcccggggacaagaucaccuucgaggcgaccggcaaccucguggucccccgcuacgccuucgccauggagcggaacgccggguccggcaucaucaucagcgacacgcccgugcacgacugcaacacgaccugccagaccccgaagggcgccaucaacaccucccugcccuuccagaacauccaccccaucaccaucgggaagugccccaaguacgucaagagcaccaagcugcgccucgcgaccggccugcggaacgugccguccauccagagccgcgggcuguucggcgccaucgccggguucaucgagggcggcuggacggggaugguggacggcugguacggguaccaccaccagaacgagcagggcuccggguacgccgccgaccucaagagcacccagaacgcgaucgacgagaucaccaacaaggugaacuccgucaucgagaagaugaacacccaguucacggccgugggcaaggaguucaaccaccuggagaagcggaucgagaaccugaacaagaaggucgacgacggcuuccucgacaucuggaccuacaacgccgagcugcuggugcuccuggagaacgagcgcacccuggacuaccacgacagcaacgugaagaaccucuacgagaagguccggucccagcugaagaacaacgccaaggagaucgggaacggcugcuucgaguucuaccacaagugcgacaacacgugcauggagagcgugaagaacgggaccuacgacuaccccaaguacuccgaggaggccaagcugaaccgcgaggagaucgacggcgugaagcucgagagcacccggaucuaccagauccuggcgaucuacuccaccgucgccagcagccuggugcucguggucucccugggggccaucagcuucuggaugugcuccaacggcagccugcagugccgcaucugcaucuga

SEQ ID NO: 67866 - RNA, 1701 nt, Artificial Sequence; identical to SEQ ID NO: 66693
  derived and/or modified CDS sequence (opt1) from hemagglutinin__InfluenzaA__ACZ96299

SEQ ID NO: 67867 - RNA, 1701 nt, Artificial Sequence; identical to SEQ ID NO: 66693
  derived and/or modified CDS sequence (opt1) from hemagglutinin__InfluenzaA__ACZ96309

SEQ ID NO: 67868 - RNA, 1701 nt, Artificial Sequence
  derived and/or modified CDS sequence (opt1) from hemagglutinin__InfluenzaA__ACZ96319
augaaggccauccuggugguccuccuguacaccuucgccaccgcgaacgccgacacgcugugcaucggcuaccacgccaacaacagcaccgacaccguggacaccgugcucgagaagaacgucacggugacccacuccgugaaccugcuggaggacaagcacaacgggaagcucugcaagcugcgcggcgucgcgccccugcaccucgggaucugcaacaucgccggcuggauccuggggaacccggagugcgagagccuguccaccgccagcuccuggagcuacaucguggagaccuccagcuccgacaacggcacgugcuaccccggcgacuucaucgacuacgaggagcuccgggagcagcugagcuccgugagcuccuucgagcgcuucgagaucuuccccaagaccagcuccuggcccaaccacgacagcaacaagggggucaccgccgccugcccgcacgccggcgcgaaguccuucuacaagaaccugaucuggcucgugaagaaggggaacagcuaccccaagcuguccaagagcuacaucaacgacaagggcaaggaggugcugguccucugggggauccaccaccccagcaccuccgccgaccagcagagccuguaccagaacgccgacgccuacguguucgugggcacgucccgguacagcaagaaguucaagcccgagaucgccauccgcccgaagguccgggaccaggagggccgcaugaacuacuacuggacccugguggagcccggggacaagaucaccuucgaggcgaccggcaaccucguggucccccgguacgccuucgccauggagcgcaacgccggguccggcaucaucaucagcgacacgcccgugcacgacugcaacacgaccugccagaccccgaagggcgccaucaacaccucccugcccuuccagaacauccaccccaucaccaucgggaagugccccaaguacgucaagagcaccaagcugcggcucgcgaccggccugcgcaacgugccguccauccagagccgggggcuguucggcgccaucgccggguucaucgagggcggcuggacggggaugguggacggcugguacggguaccaccaccagaacgagcagggcuccggguacgccgccgaccucaagagcacccagaacgcgaucgacgagaucaccaacaaggugaacuccgucaucgagaagaugaacacccaguucacggccgugggcaaggaguucaaccaccuggagaagcgcaucgagaaccugaacaagaaggucgacgacggcuuccucgacaucuggaccuacaacgccgagcugcuggugcuccuggagaacgagcggacccuggacuaccacgacagcaacgugaagaaccucuacgagaagguccgcucccagcugaagaacaacgccaaggagaucgggaacggcugcuucgaguucuaccacaagugcgacaacacgugcauggagagcgugaagaacgggaccuacgacuaccccaaguacuccgaggaggccaagcugaaccgggaggagaucgacggcgugaagcucgagagcacccgcaucuaccagauccuggcgaucuacuccaccgucgccagcagccuggugcucguggucucccugggggccaucagcuucuggaugugcuccaacggcagccugcagugccggaucugcaucuga

SEQ ID NO: 67869 - RNA, 1701 nt, Artificial Sequence; identical to SEQ ID NO: 67868
  derived and/or modified CDS sequence (opt1) from hemagglutinin__InfluenzaA__ACZ96329

SEQ ID NO: 67870 - RNA, 1701 nt, Artificial Sequence
  derived and/or modified CDS sequence (opt1) from hemagglutinin__InfluenzaA__ACZ96339
augaaggccauccuggugguccuccuguacaccuucgccaccgcgaacgccgacacgcugugcaucggcuaccacgccaacaacagcaccgacaccguggacaccgugcucgagaagaacgucacggugacccacuccgugaaccugcuggaggacaagcacaacgggaagcucugcaagcugcgcggcgucgcgccccugcaccucgggaagugcaacaucgccggcuggauccuggggaacccggagugcgagagccuguccaccgccagcuccuggagcuacaucguggagaccuccagcuccgacaacggcacgugcuaccccggcgacuucaucgacuacgaggagcuccgggagcagcugagcuccgugagcuccuucgagcgcuucgagaucuuccccaagaccagcuccuggcccaaccacgacagcaacaagggggucaccgccgccugcccgcacgccggcgcgaaguccuucuacaagaaccugaucuggcucgugaagaaggggaacagcuaccccaagcuguccaagagcuacaucaacgacaagggcaaggaggugcugguccucugggggauccaccaccccagcaccuccgccgaccagcagagccuguaccagaacgccgacuccuacguguucgugggcacgagccgguacuccaagaaguucaagcccgagaucgccauccgcccgaagguccgggaccaggagggccgcaugaacuacuacuggacccugguggagcccggggacaagaucaccuucgaggccaccggcaaccucguggucccccgguacgcguucgccauggagcgcaacgccgggagcggcaucaucaucuccgacacgcccgugcacgacugcaacacgaccugccagaccccggagggcgccaucaacaccagccugcccuuccagaacauccaccccaucaccaucgggaagugccccaaguacgugaaguccaccaagcugcggcucgccaccggccugcgcaacgucccgagcauccagucccgggggcuguucggcgcgaucgccggguucaucgagggcggcuggacggggaugguggacggcugguacggguaccaccaccagaacgagcagggcagcggguacgccgccgaccucaaguccacccagaacgccaucgacgagaucaccaacaaggugaacagcgucaucaagaagaugaacacccaguucacggcggugggcaaggaguucaaccaccuggagaagcgcaucgagaaccugaacaagaaggucgacgacggcuuccucgacaucuggaccuacaacgccgagcugcuggugcuccuggagaacgagcggacccuggacuaccacgacuccaacgugaagaaccucuacgagaagguccgcagccagcugaagaacaacgccaaggagaucgggaacggcugcuucgaguucuaccacaagugcgacaacacgugcauggaguccgugaagaacgggaccuacgacuaccccaaguacagcgaggaggccaagcugaaccgggaggagaucgacggcgugaagcucgaguccacccgcaucuaccagauccuggccaucuacagcaccgucgcgagcucccuggugcucguggucagccugggggccaucuccuucuggaugugcagcaacggcucccugcagugccggaucugcaucuga

SEQ ID NO: 67871 - RNA, 1701 nt, Artificial Sequence; identical to SEQ ID NO: 66693
  derived and/or modified CDS sequence (opt1) from hemagglutinin__InfluenzaA__ACZ96349

SEQ ID NO: 67872 - RNA, 1701 nt, Artificial Sequence; identical to SEQ ID NO: 67868
  derived and/or modified CDS sequence (opt1) from hemagglutinin__InfluenzaA__ACZ96359

SEQ ID NO: 67873 - RNA, 1701 nt, Artificial Sequence; identical to SEQ ID NO: 66693
  derived and/or modified CDS sequence (opt1) from hemagglutinin__InfluenzaA__ACZ96372

SEQ ID NO: 67874 - RNA, 1701 nt, Artificial Sequence; identical to SEQ ID NO: 67868
  derived and/or modified CDS sequence (opt1) from hemagglutinin__InfluenzaA__ACZ96382

SEQ ID NO: 67875 - RNA, 1701 nt, Artificial Sequence; identical to SEQ ID NO: 66680
  derived and/or modified CDS sequence (opt1) from hemagglutinin__InfluenzaA__ACZ96392

SEQ ID NO: 67876 - RNA, 1701 nt, Artificial Sequence; identical to SEQ ID NO: 66935
  derived and/or modified CDS sequence (opt1) from hemagglutinin__InfluenzaA__ACZ96405

SEQ ID NO: 67877 - RNA, 1701 nt, Artificial Sequence; identical to SEQ ID NO: 66693
  derived and/or modified CDS sequence (opt1) from hemagglutinin__InfluenzaA__ACZ96415

SEQ ID NO: 67878 - RNA, 1701 nt, Artificial Sequence; identical to SEQ ID NO: 66693
  derived and/or modified CDS sequence (opt1) from hemagglutinin__InfluenzaA__ACZ96425

SEQ ID NO: 67879 - RNA, 1701 nt, Artificial Sequence
  derived and/or modified CDS sequence (opt1) from hemagglutinin__InfluenzaA__ACZ96435
augaaggccauccuggugguccuccuguacaccuucgccaccgcgaacgccgacacgcugugcaucggcuaccacgccaacaacagcaccgacaccguggacaccgugcucgagaagaacgucacggugacccacuccgugaaccugcuggaggacaagcacaacgggaagcucugcaagcugcgcggcgucgcccagcugcaccucgggaagugcaacaucgccggcuggauccuggggaaccccgagugcgagagccuguccaccgcgagcuccuggagcuacaucguggagaccuccagcuccgacaacggcacgugcuacccgggcgacuucaucgacuacgaggagcuccgggagcagcugagcuccgugagcuccuucgagcgcuucgagaucuuccccaagaccagcuccuggcccaaccacgacagcaacaagggggucaccgccgccugcccccacgccggcgcgaaguccuucuacaagaaccugaucuggcucgugaagaaggggaacagcuacccgaagcuguccaagagcuacaucaacgacaagggcaaggaggugcugguccucugggggauccaccaccccagcaccuccgccgaccagcagagccuguaccagaacgccgacgccuacguguucgugggcacgucccgguacagcaagaaguucaagcccgagaucgccauccgccccaagguccgggaccaggagggccgcaugaacuacuacuggacccugguggagccgggggacaagaucaccuucgaggcgaccggcaaccucauggugccccgguacgccuucgccauggagcgcaacgccggguccggcaucaucaucagcgacacgcccguccacgacugcaacacgaccugccagacccccaagggcgccaucaacaccucccugccguuccagaacauccaccccaucaccaucgggaagugccccaaguacgucaagagcaccaagcugcggcucgcgaccggccugcgcaacgugcccuccauccagagccgggggcuguucggcgccaucgccggguucaucgagggcggcuggacggggaugguggacggcugguacggguaccaccaccagaacgagcagggcuccggguacgccgccgaccucaagagcacccagaacgcgaucgacgagaucaccaacaaggugaacuccgugaucgagaagaugaacacccaguucacggccgucggcaaggaguucaaccaccuggagaagcgcaucgagaaccugaacaagaagguggacgacggcuuccucgacaucuggaccuacaacgccgagcugcugguccuccuggagaacgagcggacccuggacuaccacgacagcaacgugaagaaccucuacgagaaggugcgcucccagcugaagaacaacgccaaggagaucgggaacggcugcuucgaguucuaccacaagugcgacaacacgugcauggagagcgucaagaacgggaccuacgacuacccgaaguacuccgaggaggccaagcugaaccgggaggagaucgacggcgugaagcucgagagcacccgcaucuaccagauccuggcgaucuacuccaccguggccagcagccugguccucguggugucccugggggccaucagcuucuggaugugcuccaacggcagccugcagugccggaucugcaucuga

SEQ ID NO: 67880 - RNA, 1701 nt, Artificial Sequence; identical to SEQ ID NO: 66693
  derived and/or modified CDS sequence (opt1) from hemagglutinin__InfluenzaA__ACZ96445

SEQ ID NO: 67881 - RNA, 1701 nt, Artificial Sequence
  derived and/or modified CDS sequence (opt1) from hemagglutinin__InfluenzaA__ACZ96476
augaaggccauccuggugguccuccuguacaccuucgccaccgcguacgccgacacgcugugcaucggcuaccacgccaacaacagcaccgacaccguggacaccgugcucgagaagaacgucacggugacccacuccgugaaccugcuggaggacaagcacaacgggaagcucugcaagcugcgcggcgucgcgccccugcaccucgggaagugcaacaucgccggcuggauccuggggaacccggagugcgagagccuguccaccgccagcuccuggagcuacaucguggagaccuccagcuccgacaacggcacgugcuaccccggcgacuucaucgacuacgaggagcuccgggagcagcugagcuccgugagcuccuucgagcgcuucgagaucuuccccaagaccagcuccuggcccaaccacgacagcaacaagggggucaccgccgccugcccgcacgccggcgcgaaguccuucuacaagaaccugaucuggcucgugaagaaggggaacagcuaccccaagcuguccaagagcuacaucaacgacaagggcaaggaggugcugguccucugggggauccaccaccccagcaccuccgccgaccagcagagccuguaccagaacgccgacgccuacguguucgugggcacgucccgguacagcaagaaguucaagcccgagaucgccauccgcccgaagguccgggaccaggagggccgcaugaacuacuacuggacccugguggagcccggggacaagaucaccuucgaggcgaccggcaaccucguggucccccgguacgccuucgccauggagcgcaacgccggguccggcaucaucaucagcgacacgcccgugcacgacugcaacacgaccugccagaccccgaagggcgccaucaacaccucccugcccuuccagaacauccaccccaucaccaucgggaagugccccaaguacgucaagagcaccaagcugcggcucgcgaccggccugcgcaacgugccguccauccagagccgggggcuguucggcgccaucgccggguucaucgagggcggcuggacggggaugguggacggcugguacggguaccaccaccagaacgagcagggcuccggguacgccgccgaccucaagagcacccagaacgcgaucgacgagaucaccaacaaggugaacuccgucaucgagaagaugaacacccaguucacggccgugggcaaggaguucaaccaccuggagaagcgcaucgagaaccugaacaagaaggucgacgacggcuuccucgacaucuggaccuacaacgccgagcugcuggugcuccuggagaacgagcggacccuggacuaccacgacagcaacgugaagaaccucuacgagaagguccgcucccagcugaagaacaacgccaaggagaucgggaacggcugcuucgaguucuaccacaagugcgacaacacgugcauggagagcgugaagaacgggaccuacgacuaccccaaguacuccgaggaggccaagcugaaccgggaggagaucgacggcgugaagcucgagagcacccgcaucuaccagauccuggcgaucuacuccaccgucgccagcagccuggugcucguggucucccugggggccaucagcuucuggaugugcuccaacggcagccugcagugccggaucugcaucuga

SEQ ID NO: 67882 - RNA, 1701 nt, Artificial Sequence; identical to SEQ ID NO: 66693
  derived and/or modified CDS sequence (opt1) from hemagglutinin__InfluenzaA__ACZ96496

SEQ ID NO: 67883 - RNA, 1701 nt, Artificial Sequence; identical to SEQ ID NO: 66693
  derived and/or modified CDS sequence (opt1) from hemagglutinin__InfluenzaA__ACZ96506

SEQ ID NO: 67884 - RNA, 1701 nt, Artificial Sequence; identical to SEQ ID NO: 66693
  derived and/or modified CDS sequence (opt1) from hemagglutinin__InfluenzaA__ACZ96526

SEQ ID NO: 67885 - RNA, 1701 nt, Artificial Sequence
  derived and/or modified CDS sequence (opt1) from hemagglutinin__InfluenzaA__ACZ96536
augaaggccauccuggugguccuccuguacaccuucgccaccgcgaacgccgacacgcugugcaucggcuaccacgccaacaacagcaccgacaccguggacaccgugcucgagaagaacgucacggugacccacuccgugaacauccuggaggacaagcacaacgggaagcugugcaagcucaagggcgucgcgccccugcaccuggggaagugcaacaucgccggcuggauccucgggaacccggagugcgagagccuguccaccgccagcuccuggagcuacaucguggagaccuccagcuccgacaacggcacgugcuaccccggcgacuucaucgacuacgaggagcugcgcgagcagcucagcuccgugagcuccuucgagcgguucgagaucuuccccaagaccagcuccuggcccaaccacgacagcaacaagggggucaccgccgccugcccgcacgccggcgcgaaguccuucuacaagaaccugaucuggcuggugaagaaggggaacagcuaccccaagcucuccaagagcuacaucaacgacaagggcaaggaggugcugguccugugggggauccaccaccccagcaccuccgccgaccagcagagccucuaccagaacgccgacacguacguguucgugggcuccagcaaguacuccaagaaguucaagcccgagaucgccauccgcccgaagguccgggaccaggagggccgcaugaacuacuacuggacccugguggagcccggggacaagaucaccuucgaggccaccggcaaccugguggucccccgguacgcguucgccauggagcgcaacgccgggagcggcaucaucaucuccgacacgcccgugcacgacugcaacacgaccugccagaccccgaagggcgccaucaacaccagccuccccuuccagaacauccaccccaucaccaucgggaagugccccaagcacgugaaguccaccaagcugcggcuggccaccggccuccgcaacgucccgagcauccagucccgggggcuguucggcgcgaucgccggguucaucgagggcggcuggacggggaugguggacggcugguacggguaccaccaccagaacgagcagggcagcggguacgccgccgaccugaaguccacccagaacgccaucgacgagaucaccaacaaggugaacagcgucaucgagaagaugaacacccaguucacggcggugggcaaggaguucaaccaccucgagaagcgcaucgagaaccugaacaagaaggucgacgacggcuuccuggacaucuggaccuacaacgccgagcuccuggugcugcucgagaacgagcggacccuggacuaccacgacuccaacgugaagaaccuguacgagaagguccgcagccagcucaagaacaacgccaaggagaucgggaacggcugcuucgaguucuaccacaagugcgacaacacgugcauggaguccgugaagaacgggaccuacgacuaccccaaguacagcgaggaggccaagcugaaccgggaggagaucgacggcgugaagcuggaguccacccgcaucuaccagauccucgccaucuacagcaccgucgcgagcucccuggugcugguggucagccucggggccaucuccuucuggaugugcagcaacggcucccugcagugccggaucugcaucuga

SEQ ID NO: 67886 - RNA, 1701 nt, Artificial Sequence; identical to SEQ ID NO: 66693
  derived and/or modified CDS sequence (opt1) from hemagglutinin__InfluenzaA__ACZ96549

SEQ ID NO: 67887 - RNA, 1701 nt, Artificial Sequence
  derived and/or modified CDS sequence (opt1) from hemagglutinin__InfluenzaA__ACZ96559
augaaggccauccuggugguccuccuguacaccuucgccaccgcgaacgccgacacgcugugcaucggcuaccacgccaacaacagcaccgacaccguggacaccgugcucgagaagaacgucacggugacccacuccgugaaccugcuggaggacaagcacaacgggaagcucugcaagcugcgcggcgucgcgccccugcaccucgggaagugcaacaucgccggcuggauccuggggaacccggagugcgagagccuguccaccgccagcuccuggagcuacaucguggagaccuccagcuccgacaacggcacgugcuaccccggcgacuucaucaacuacgaggagcuccgggagcagcugagcuccgugagcuccuucgagcgcuucgagaucuuccccaagaccagcuccuggcccaaccacgacagcaacaagggggucaccgccgccugcccgcacgccggcgcgaaguccuucuacaagaaccugaucuggcucgugaagaaggggaacagcuaccccaagcuguccaagagcuacaucaacgacaagggcaaggaggugcugguccucugggggauccaccaccccagcaccuccgccgaccagcagagccuguaccagaacgccgacgccuacguguucgugggcacgucccgguacagcaagaaguucaagcccgagaucgccauccgcccgaagguccgggaccaggagggccgcaugaacuacuacuggacccugguggagcccggggacaagaucaccuucgaggcgaccggcaaccucguggucccccgguacgccuucgccauggagcgcaacgccggguccggcaucaucaucagcgacacgcccgugcacgacugcaacacgaccugccagaccccgaagggcgccaucaacaccucccugcccuuccagaacauccaccccaucaccaucgggaagugccccaaguacgucaagagcaccaagcugcggcucgcgaccggccugcgcaacgugccguccauccagagccgggggcuguucggcgccaucgccggguucaucgagggcggcuggacggggaugguggacggcugguacggguaccaccaccagaacgagcagggcuccggguacgccgccgaccucaagagcacccagaacgcgaucgacgagaucaccaacaaggugaacuccgucaucgagaagaugaacacccaguucacggccgugggcaaggaguucaaccaccuggagaagcgcaucgagaaccugaacaagaaggucgacgacggcuuccucgacaucuggaccuacaacgccgagcugcuggugcuccuggagaacgagcggacccuggacuaccacgacagcaacgugaagaaccucuacgagaagguccgcucccagcugaagaacaacgccaaggagaucgggaacggcugcuucgaguucuaccacaagugcgacaacacgugcauggagagcgugaagaacgggaccuacgacuaccccaaguacuccgaggaggccaagcugaaccgggaggagaucgacggcgugaagcucgagagcacccgcaucuaccagauccuggcgaucuacuccaccgucgccagcagccuggugcucguggucucccugggggccaucagcuucuggaugugcuccaacggcagccugcagugccggaucugcaucuga

SEQ ID NO: 67888 - RNA, 1701 nt, Artificial Sequence
  derived and/or modified CDS sequence (opt1) from hemagglutinin__InfluenzaA__ACZ96569
auggaggccauccuggugguccuccuguacaccuucgccaccgcgaacgccgacacgcugugcaucggcuaccacgccaacaacagcaccgacaccguggacaccgugcucgagaagaacgucacggugacccacuccgugaaccugcuggaggacaagcacaacgggaagcucugcaagcugcgcggcgucgcgccccugcaccucgggaagugcaacaucgccggcuggauccuggggaacccggagugcgagagccuguccaccgccagcuccuggagcuacaucguggagaccuccagcuccgacaacggcacgugcuaccccggcgacuucaucaacuacgaggagcuccgggagcagcugagcuccgugagcuccuucgagcgcuucgagaucuuccccaagaccagcuccuggcccaaccacgacagcaacaagggggucaccgccgccugcccgcacgccggcgcgaaguccuucuacaagaaccugaucuggcucgugaagaaggggaacagcuaccccaagcuguccaagagcuacaucaacgacaagggcaaggaggugcugguccucugggggauccaccaccccagcaccuccgccgaccagcagagccuguaccagaacgccgacgccuacguguucgugggcuccagccgguacuccaagaaguucaagcccgagaucgccauccgcccgaagguccgggaccaggagggccgcaugaacuacuacuggacgcugguggagcccggggacaagaucaccuucgaggcgaccggcaaccucguggucccccgguacgccuucgccauggagcgcaacgccgggagcggcaucaucaucuccgacacccccgugcacgacugcaacacgaccugccagaccccgaagggcgccaucaacaccagccugcccuuccacaacauccaccccaucacgaucgggaagugccccaaguacgugaaguccaccaagcugcggcucgcgaccggccugcgcaacgucccgagcauccagucccgggggcuguucggcgccaucgccggguucaucgagggcggcuggaccgggaugguggacggcugguacggguaccaccaccagaacgagcagggcagcggguacgccgccgaccucaaguccacgcagaacgcgaucgacgagaucaccaacaaggugaacagcgucaucgagaagaugaacacccaguucaccgccgugggcaaggaguucaaccaccuggagaagcgcaucgagaaccugaacaagaaggucgacgacggcuuccucgacaucuggacguacaacgccgagcugcuggugcuccuggagaacgagcggacccuggacuaccacgacuccaacgugaagaaccucuacgagaagguccgcagccagcugaagaacaacgccaaggagaucgggaacggcugcuucgaguucuaccacaagugcgacaacacgugcauggaguccgugaagaacgggaccuacgacuaccccaaguacagcgaggaggccaagcugaaccgggaggagaucgacggcgugaagcucgaguccacccgcaucuaccagauccuggcgaucuacagcaccgucgccagcucccuggugcucguggucagccugggggccaucuccuucuggaugugcagcaacggcucccugcagugccggaucugcaucuga

SEQ ID NO: 67889 - RNA, 1701 nt, Artificial Sequence
  derived and/or modified CDS sequence (opt1) from hemagglutinin__InfluenzaA__ACZ96579
auggaggccauccuggugguccuccuguacaccuucgccaccgcgaacgccgacacgcugugcaucggcuaccacgccaacaacagcaccgacaccguggacaccgugcucgagaagaacgucacggugacccacuccgugaaccugcuggaggacaagcacaacgggaagcucugcaagcugcgcggcgucgcgccccugcaccucgggaagugcaacaucgccggcuggauccuggggaacccggagugcgagagccuguccaccgccagcuccuggagcuacaucguggagaccuccagcuccgacaacggcacgugcuaccccggcgacuucaucgacuacgaggagcuccgggagcagcugagcuccgugagcuccuucgagcgcuucgagaucuuccccaagaccagcuccuggcccaaccacgacagcaacaagggggucaccgccgccugcccgcacgccggcgcgaaguccuucuacaagaaccugaucuggcucgugaagaaggggaacagcuaccccaagcuguccaagagcuacaucaacgacaagggcaaggaggugcugguccucugggggauccaccaccccagcuccagcgccgaccagcagucccuguaccagaacgccgacgccuacguguucgugggcagcucccgguacagcaagaaguucaagcccgagaucgccauccgcccgaagguccgggaccaggagggccgcaugaacuacuacuggacccugguggagcccggggacaagaucacguucgaggcgaccggcaaccucguggucccccgguacgccuucgccauggagcgcaacgccggguccggcaucaucaucagcgacacccccgugcacgacugcaacaccacgugccagaccccgaagggcgccaucaacaccucccugcccuuccacaacauccaccccaucaccaucgggaagugccccaaguacgucaagagcacgaagcugcggcucgcgaccggccugcgcaacgugccguccauccagagccgggggcuguucggcgccaucgccggguucaucgagggcggcuggaccgggaugguggacggcugguacggguaccaccaccagaacgagcagggcuccggguacgccgccgaccucaagagcacccagaacgcgaucgacgagaucacgaacaaggugaacuccgucaucgagaagaugaacacccaguucaccgccgugggcaaggaguucaaccaccuggagaagcgcaucgagaaccugaacaagaaggucgacgacggcuuccucgacaucuggaccuacaacgccgagcugcuggugcuccuggagaacgagcggacgcuggacuaccacgacagcaacgugaagaaccucuacgagaagguccgcucccagcugaagaacaacgccaaggagaucgggaacggcugcuucgaguucuaccacaagugcgacaacacgugcauggagagcgugaagaacgggaccuacgacuaccccaaguacuccgaggaggccaagcugaaccgggaggagaucgacggcgugaagcucgagagcacccgcaucuaccagauccuggcgaucuacagcaccgucgccuccagccuggugcucguggucucccugggggccaucagcuucuggaugugcuccaacggcagccugcagugccggaucugcaucuga

SEQ ID NO: 67890 - RNA, 1701 nt, Artificial Sequence; identical to SEQ ID NO: 66693
  derived and/or modified CDS sequence (opt1) from hemagglutinin__InfluenzaA__ACZ96589

SEQ ID NO: 67891 - RNA, 1701 nt, Artificial Sequence
  derived and/or modified CDS sequence (opt1) from hemagglutinin__InfluenzaA__ACZ96599
augaaggccauccuggugguccuccuguacaccuucgccaccgcgaacgccgacacgcugugcaucggcuaccacgccaacaacagcaccgacaccguggacaccgugcucgagaagaacgucacggugacccacuccgugaaccugcuggaggacaagcacaacgggaagcucugcaagcugcgcggcgucgcgccccugcaccucgggaagugcaacaucgccggcuggauccuggggaacccggagugcgagagccuguccaccgccagcuccuggagcuacaucguggagaccuccagcuccgacaacggcacgugcuaccccggcgacuucaucgacuacgaggagcuccgggagcagcugagcuccgugagcuccuucgagcgcuucgagaucuuccccaagaccagcuccuggcccaaccacgacagcaacaagggggucaccgccgccugcccgcacgccggcgcgaaguccuucuacaagaaccugaucuggcucgugaagaaggggaacagcuaccccaagcuguccaagagcuacaucaacgacaagggcaaggaggugcugguccucugggggauccaccaccccagcaccuccgccgaccagcagagccuguaccagaacgccgacgccuacguguucgugggcacgucccgguacagcaagaaguucaagcccgagaucgccauccgcccgaagguccgggagcaggagggccgcaugaacuacuacuggacccugguggagcccggggacaagaucaccuucgaggcgaccggcaaccucguggucccccgguacgccuucgccauggagcgcaacacgggguccggcaucaucaucagcgacacccccgugcacgacugcaacacgaccugccagaccccgaagggcgccaucaacaccucccugcccuuccagaacauccacagcaucaccaucgggaagugccccaaguacgugaaguccaccaagcugcggcucgccacgggccugcgcaacguccccagcauccagucccgggggcuguucggcgcgaucgccggguucaucgagggcggcuggaccgggaugguggacggcugguacggguaccaccaccagaacgagcagggcagcggguacgccgccgaccucaaguccacccagaacgccaucgacgagaucaccaacaaggugaacagcgucaucgagaagaugaacacgcaguucaccgcggugggcaaggaguucaaccaccuggagaagcgcaucgagaaccugaacaagaaggucgacgacggcuuccucgacaucuggaccuacaacgccgagcugcuggugcuccuggagaacgagcggacccuggacuaccacgacuccaacgugaagaaccucuacgagaagguccgcagccagcugaagaacaacgccaaggagaucgggaacggcugcuucgaguucuaccacaagugcgacaacacgugcauggaguccgugaagaacgggaccuacgacuacccgaaguacagcgaggaggccaagcugaaccgggaggagaucgacggcgugaagcucgaguccacccgcaucuaccagauccuggccaucuacagcaccgucgcgagcucccuggugcucguggucagccugggggccaucuccuucuggaugugcagcaacggcucccugcagugccggaucugcaucuga

SEQ ID NO: 67892 - RNA, 1701 nt, Artificial Sequence
  derived and/or modified CDS sequence (opt1) from hemagglutinin__InfluenzaA__ACZ96609
augaaggccauccuggugguccuccuguacaccuucgccaccgcgaacgccgacacgcugugcaucggcuaccacgccaacaacagcaccgacaccguggacaccgugcucgagaagaacgucacggugacccacuccgugaaccugcuggaggacaagcacaacgggaagcucugcaagcugcgcggcgucgcgccccugcaccucgggaagugcaacaucgccggcuggauccuggggaacccggagugcgagagccuguccaccgccagcuccuggagcuacaucguggagaccuccagcuccgacaacggcacgugcuaccccggcgacuucaucaacuacgaggagcuccgggagcagcugagcuccgugagcuccuucgagcgcuucgagaucuuccccaagaccagcuccuggcccaaccacgacagcaacaagggggucaccgccgccugcccgcacgccggcgcgaaguccuucuacaagaaccugaucuggcucgugaagaaggggaacagcuaccccaagcuguccaagagcuacaucaacgacaagggcaaggaggugcugguccucugggggauccaccaccccagcaccuccgccgaccagcagagccuguaccagaacgccgacgccuacguguucgugggcuccagccgguacuccaagaaguucaagcccgagaucgccauccgcccgaagguccgggaccaggagggccgcaugaacuacuacuggacgcugguggagcccggggacaagaucaccuucgaggcgaccggcaaccucguggucccccgguacgccuucgccauggagcgcaacgccgggagcggcaucaucaucuccgacacccccgugcacgacugcaacacgaccugccagaccccgaagggcgccaucaacaccagccugcccuuccagaacauccaccccaucacgaucgggaccugccccaaguacgugaaguccaccaagcugcggcucgcgaccggccugcgcaacgucccgagcauccagucccgggggcuguucggcgccaucgccggguucaucgagggcggcuggacggggaugguggacggcugguacggguaccaccaccagaacgagcagggcagcggguacgccgccgaccucaaguccacccagaacgcgaucgacgagaucaccaacaaggugaacagcgucaucgagaagaugaacacccaguucacggccgugggcaaggaguucaaccaccuggagaagcgcaucgagaaccugaacaagaaggucgacgacggcuuccucgacaucuggaccuacaacgccgagcugcuggugcuccuggagaacgagcggacccuggacuaccacgacuccaacgugaagaaccucuacgagaagguccgcagccagcugaagaacaacgccaaggagaucgggaacggcugcuucgaguucuaccacaagugcgacaacacgugcauggaguccgugaagaacgggaccuacgacuaccccaaguacagcgaggaggccaagcugaaccgggaggagaucgacggcgugaagcucgaguccacccgcaucuaccagauccuggcgaucuacagcaccgucgccagcucccuggugcucguggucagccugggggccaucuccuucuggaugugcagcaacggcucccugcagugccggaucugcaucuga

SEQ ID NO: 67893 - RNA, 1701 nt, Artificial Sequence; identical to SEQ ID NO: 66873
  derived and/or modified CDS sequence (opt1) from hemagglutinin__InfluenzaA__ACZ96619

SEQ ID NO: 67894 - RNA, 1701 nt, Artificial Sequence; identical to SEQ ID NO: 66873
  derived and/or modified CDS sequence (opt1) from hemagglutinin__InfluenzaA__ACZ96629

SEQ ID NO: 67895 - RNA, 1701 nt, Artificial Sequence; identical to SEQ ID NO: 66873
  derived and/or modified CDS sequence (opt1) from hemagglutinin__InfluenzaA__ACZ96639

SEQ ID NO: 67896 - RNA, 1701 nt, Artificial Sequence; identical to SEQ ID NO: 66873
  derived and/or modified CDS sequence (opt1) from hemagglutinin__InfluenzaA__ACZ96649

SEQ ID NO: 67897 - RNA, 1701 nt, Artificial Sequence; identical to SEQ ID NO: 66873
  derived and/or modified CDS sequence (opt1) from hemagglutinin__InfluenzaA__ACZ96659

SEQ ID NO: 67898 - RNA, 1701 nt, Artificial Sequence; identical to SEQ ID NO: 66873
  derived and/or modified CDS sequence (opt1) from hemagglutinin__InfluenzaA__ACZ96669

SEQ ID NO: 67899 - RNA, 1701 nt, Artificial Sequence; identical to SEQ ID NO: 66873
  derived and/or modified CDS sequence (opt1) from hemagglutinin__InfluenzaA__ACZ96679

SEQ ID NO: 67900 - RNA, 1701 nt, Artificial Sequence; identical to SEQ ID NO: 66873
  derived and/or modified CDS sequence (opt1) from hemagglutinin__InfluenzaA__ACZ96689

SEQ ID NO: 67901 - RNA, 1701 nt, Artificial Sequence; identical to SEQ ID NO: 66873
  derived and/or modified CDS sequence (opt1) from hemagglutinin__InfluenzaA__ACZ96699

SEQ ID NO: 67902 - RNA, 1701 nt, Artificial Sequence; identical to SEQ ID NO: 66873
  derived and/or modified CDS sequence (opt1) from hemagglutinin__InfluenzaA__ACZ96719

SEQ ID NO: 67903 - RNA, 1701 nt, Artificial Sequence; identical to SEQ ID NO: 66873
  derived and/or modified CDS sequence (opt1) from hemagglutinin__InfluenzaA__ACZ96729

SEQ ID NO: 67904 - RNA, 1701 nt, Artificial Sequence; identical to SEQ ID NO: 66873
  derived and/or modified CDS sequence (opt1) from hemagglutinin__InfluenzaA__ACZ96739

SEQ ID NO: 67905 - RNA, 1701 nt, Artificial Sequence
  derived and/or modified CDS sequence (opt1) from hemagglutinin__InfluenzaA__ACZ96749
augaagaccauccuggugguccuccuguacaccuucgccacggccaacgcggacacccugugcaucggcuaccacgccaacaacagcaccgacaccguggacacggugcucgagaagaacgucaccgugacccacuccgugaaccugcuggaggacaagcacaacgggaagcucugcaagcugcgcggcgucgcgccccugcaccucgggaagugcaacaucgccggcuggauccuggggaacccggagugcgagagccuguccaccgccagcuccuggagcuacaucguggagacguccagcuccgacaacgggaccugcuaccccggcgacuucaucgacuacgaggagcuccgggagcagcugagcuccgugagcuccuucgagcgcuucgagaucuuccccaagaccagcuccuggcccaaccacgacagcaacaagggcgucaccgccgccugcccgcacgccggcgccaaguccuucuacaagaaccugaucuggcucgugaagaaggggaacagcuaccccaagcuguccaagagcuacaucaacgacaagggcaaggaggugcugguccucugggggauccaccaccccagcacguccgcggaccagcagagccuguaccagaacgccgacgccuacguguucgugggcuccagccgguacuccaagaaguucaagcccgagaucgccauccgcccgaagguccgggaccaggagggccgcaugaacuacuacuggacccugguggagcccggggacaagaucaccuucgaggccaccggcaaccucguggucccccgguacgcguucgccauggagcgcaacgccgggagcggcaucaucaucuccgacacgcccgugcacgacugcaacacgaccugccagaccccgaagggcgccaucaacaccagccugcccuuccagaacauccaccccaucaccaucgggaagugccccaaguacgugaaguccaccaagcugcggcucgccaccggccugcgcaacgucccgagcauccagucccgggggcuguucggcgcgaucgccggguucaucgagggcggcuggacggggaugguggacggcugguacggguaccaccaccagaacgagcagggcagcggguacgccgccgaccucaaguccacccagaacgccaucgacgagaucaccaacaaggugaacagcgucaucgagaagaugaacacccaguucacggcggugggcaaggaguucaaccaccuggagaagcgcaucgagaaccugaacaagaaggucgacgacggcuuccucgacaucuggaccuacaacgccgagcugcuggugcuccuggagaacgagcggacccuggacuaccacgacuccaacgugaagaaccucuacgagaagguccgcagccagcugaagaacaacgccaaggagaucgggaacggcugcuucgaguucuaccacaagugcgacaacacgugcauggaguccgugaagaacgggaccuacgacuaccccaaguacagcgaggaggccaagcugaaccgggaggagaucgacggcgugaagcucgaguccacccgcaucuaccagauccuggccaucuacagcaccgucgcgagcucccuggugcucguggucagccugggggccaucuccuucuggaugugcagcaacggcucccugcagugccggaucugcaucuga

SEQ ID NO: 67906 - RNA, 1701 nt, Artificial Sequence; identical to SEQ ID NO: 66680
  derived and/or modified CDS sequence (opt1) from hemagglutinin__InfluenzaA__ACZ96759

SEQ ID NO: 67907 - RNA, 1701 nt, Artificial Sequence; identical to SEQ ID NO: 66680
  derived and/or modified CDS sequence (opt1) from hemagglutinin__InfluenzaA__ACZ96769

SEQ ID NO: 67908 - RNA, 1701 nt, Artificial Sequence; identical to SEQ ID NO: 66680
  derived and/or modified CDS sequence (opt1) from hemagglutinin__InfluenzaA__ACZ96779

SEQ ID NO: 67909 - RNA, 1701 nt, Artificial Sequence; identical to SEQ ID NO: 66680
  derived and/or modified CDS sequence (opt1) from hemagglutinin__InfluenzaA__ACZ96789

SEQ ID NO: 67910 - RNA, 1701 nt, Artificial Sequence
  derived and/or modified CDS sequence (opt1) from hemagglutinin__InfluenzaA__ACZ96809
augaaggccauccuggugguccuccuguacaccuucgccaccgcgaacgccgacacgcugugcaucggcuaccacgccaacaacagcaccgacaccguggacaccgugcucgagaagaacgucacggugacccacuccgugaaccugcuggaggacaagcacaacgggaagcucugcaagcugcgcggcgucgcgccccugcaccucgggaagugcaacaucgccggcuggauccuggggaacccggagugcgagagccuguccaccgccagcuccuggagcuacaucguggagaccuccagcuccgacaacggcacgugcuaccccggcgacuucaucgacuacgaggagcuccgggagcagcugagcuccgugagcuccuucgagcgcuucgagaucuuccccaagaccagcuccuggcccaaccacgacagcaacaagggggucaccgccgccugcccgcacgccggcgcgaaguccuucuacaagaaccugaucuggcucgugaagaaggggaacagcuaccccaagcuguccaagagcuacaucaacgacaagggcaaggaggugcugguccucugggggauccaccaccccagcaccaacgccgaccagcagucccuguaccagaacgccgacgccuacguguucgugggcacgagccgguacuccaagaaguucaagcccgagaucgccauccgcccgaagguccgggaccaggagggccgcaugaacuacuacuggacccugguggagcccggggacaagaucaccuucgaggcgaccggcaaccucguggucccccgguacgccuucgccauggagcgcaacgccgggagcggcaucaucaucuccgacacgcccgugcacgacugcaacacgaccugccagaccccgaagggcgccaucaacaccagccugcccuuccagaacauccaccccaucaccaucgggaagugccccaaguacgugaaguccaccaagcugcggcucgcgaccggccugcgcaacgucccgagcauccagucccgggggcuguucggcgccaucgccggguucaucgagggcggcuggacggggaugguggacggcugguacggguaccaccaccagaacgagcagggcagcggguacgccgccgaccucaaguccacccagaacgcgaucgacgagaucaccaacaaggugaacagcgucaucgagaagaugaacacccaguucgccgccgugggcaaggaguucaaccaccuggagaagcgcaucgagaaccugaacaagaaggucgacgacggcuuccucgacaucuggacguacaacgccgagcugcuggugcuccuggagaacgagcggacccuggacuaccacgacuccaacgugaagaaccucuacgagaagguccgcagccagcugaagaacaacgccaaggagaucgggaacggcugcuucgaguucuaccacaagugcgacaacacgugcauggaguccgugaagaacgggaccuacgacuaccccaaguacagcgaggaggcgaagcugaaccgggaggagaucgacggcgugaagcucgaguccacccgcaucuaccagauccuggccaucuacagcaccgucgccuccagccuggugcucguggucagccugggggccaucuccuucuggaugugcagcaacggcucccugcagugccggaucugcaucuga

SEQ ID NO: 67911 - RNA, 1701 nt, Artificial Sequence; identical to SEQ ID NO: 66680
  derived and/or modified CDS sequence (opt1) from hemagglutinin__InfluenzaA__ACZ96819

SEQ ID NO: 67912 - RNA, 1701 nt, Artificial Sequence; identical to SEQ ID NO: 66680
  derived and/or modified CDS sequence (opt1) from hemagglutinin__InfluenzaA__ACZ96829

SEQ ID NO: 67913 - RNA, 1701 nt, Artificial Sequence; identical to SEQ ID NO: 66680
  derived and/or modified CDS sequence (opt1) from hemagglutinin__InfluenzaA__ACZ96839

SEQ ID NO: 67914 - RNA, 1701 nt, Artificial Sequence; identical to SEQ ID NO: 67833
  derived and/or modified CDS sequence (opt1) from hemagglutinin__InfluenzaA__ACZ96849

SEQ ID NO: 67915 - RNA, 1701 nt, Artificial Sequence; identical to SEQ ID NO: 66693
  derived and/or modified CDS sequence (opt1) from hemagglutinin__InfluenzaA__ACZ96859

SEQ ID NO: 67916 - RNA, 1701 nt, Artificial Sequence; identical to SEQ ID NO: 66680
  derived and/or modified CDS sequence (opt1) from hemagglutinin__InfluenzaA__ACZ96869

SEQ ID NO: 67917 - RNA, 1701 nt, Artificial Sequence; identical to SEQ ID NO: 66680
  derived and/or modified CDS sequence (opt1) from hemagglutinin__InfluenzaA__ACZ96879

SEQ ID NO: 67918 - RNA, 1701 nt, Artificial Sequence
  derived and/or modified CDS sequence (opt1) from hemagglutinin__InfluenzaA__ACZ96899
augaaggccauccuggugguccuccuguacaccuucgccaccgcgaacgccgacacgcugugcaucggcuaccacgccaacaacagcaccgacaccguggacaccgugcucgagaagaacgucacggugacccacuccgugaaccugcuggaggacaagcacaacgggaagcucugcaagcugcgcggcgucgcgccccugcaccucgggaagugcaacaucgccggcuggauccuggggaacccggagugcgagagccuguccaccgccagcuccuggagcuacaucguggagaccuccagcuccgacaacggcacgugcuaccccggcgacuucaucgacuacgaggagcuccgggagcagcugagcuccgugagcuccuucgagcgcuucgagaucuuccccaagaccagcuccuggcccaaccacgacagcaacaagggggucaccgccgccugcccgcacgccggcgcgaaguccuucuacaagaaccugaucuggcucgugaagaaggggaacagcuaccccaagcuguccaagagcuacaucaacgacaagggcaaggaggugcugguccucugggggauccaccacagcuccaccagcgccgaccagcagucccuguaccagaacgccgacgccuacguguucgugggcagcucccgguacagcaagaaguucaagcccgagaucgccauccgccccaagguccgggaccaggagggccgcaugaacuacuacuggacgcugguggagccgggggacaagaucaccuucgaggcgaccggcaaccucguggucccccgguacgccuucgccauggagcgcaacgccggguccggcaucaucaucagcgacacccccgugcacgacugcaacacgaccugccagacccccaagggcgccaucaacaccucccugccguuccagaacauccaccccaucacgaucgggaagugccccaaguacgucaagagcaccaagcugcggcucgcgaccggccugcgcaacgugcccuccauccagagccgggggcuguucggcgccaucgccggguucaucgagggcggcuggaccgggaugguggacggcugguacggguaccaccaccagaacgagcagggcuccggguacgccgccgaccucaagagcacgcagaacgcgaucgacgagaucaccaacaaggugaacuccgucaucgagaagaugaacacccaguucaccgccgugggcaaggaguucaaccaccuggagaagcgcaucgagaaccugaacaagaaggucgacgacggcuuccucgacaucuggacguacaacgccgagcugcuggugcuccuggagaacgagcggacccuggacuaccacgacagcaacgugaagaaccucuacgagaagguccgcucccagcugaagaacaacgccaaggagaucgggaacggcugcuucgaguucuaccacaagugcgacaacacgugcauggagagcgugaagaacgggaccuacgacuacccgaaguacuccgaggaggccaagcugaaccgggaggagaucgacggcgugaagcucgagagcacccgcaucuaccagauccuggcgaucuacagcaccgucgccuccagccuggugcucguggucucccugggggccaucagcuucuggaugugcuccaacggcagccugcagugccggaucugcaucuga

SEQ ID NO: 67919 - RNA, 1701 nt, Artificial Sequence; identical to SEQ ID NO: 66680
  derived and/or modified CDS sequence (opt1) from hemagglutinin__InfluenzaA__ACZ96909

SEQ ID NO: 67920 - RNA, 1701 nt, Artificial Sequence; identical to SEQ ID NO: 66680
  derived and/or modified CDS sequence (opt1) from hemagglutinin__InfluenzaA__ACZ96919

SEQ ID NO: 67921 - RNA, 1701 nt, Artificial Sequence; identical to SEQ ID NO: 66680
  derived and/or modified CDS sequence (opt1) from hemagglutinin__InfluenzaA__ACZ96929

SEQ ID NO: 67922 - RNA, 1701 nt, Artificial Sequence; identical to SEQ ID NO: 66680
  derived and/or modified CDS sequence (opt1) from hemagglutinin__InfluenzaA__ACZ96939

SEQ ID NO: 67923 - RNA, 1701 nt, Artificial Sequence
  derived and/or modified CDS sequence (opt1) from hemagglutinin__InfluenzaA__ACZ96949
augaaggccauccuggugguccuccuguacaccuucgccaccgcgaacgccgacacgcugugcaucggcuaccacgccaacaacagcaccgacaccguggacaccgugcucgagaagaacgucacggugacccacuccgugaaccugcuggaggacaagcacaacgggaagcucugcaagcugcgcggcgucgcgccccugcaccucgggaagugcaacaucgccggcuggauccuggggaacccggagugcgagagccuguccaccgccagcuccuggagcuacaucguggagaccuccagcuccgacaacggcacgugcuaccccggcgacuucaucgacuacgaggagcuccgggagcagcugagcuccgugagcuccuucgagcgcuucgagaucuuccccaagaccagcuccuggcccaaccacgacagcaacaagggggucaccgccgccugcccgcacgccggcgcgaaguccuucuacaagaaccugaucuggcucgugaagaaggggaacagcuaccccaagcuguccaagagcuacaucaacgacaagggcaaggaggugcugguccucugggggauccaccaccccagcaccuccgccgaccagcagagccuguaccagaacgccgacgccuacguguucgugggcuccagccgguacuccaagaaguucaagcccgagaucgccauccgcccgaagguccgggaccaggagggccgcaugaacuacuacuggacgcugguggagcccggggacaagaucaccuucgaggcgaccggcaaccucguggucccccgguacgccuucgccauggagcgcaacgccgggagcggcaucaucaucuccgacacccccgugcacgacugcaacacgaccugccagaccccgaagggcgccaucaacaccagccugcccuuccagaacauccaccccaucacgaucgggaagugccccaaguacgugaaguccaccaagcugcggcucgcgaccggccugcgcaacgucccgagcauccagucccgggggcuguucggcgccaucgccggguucaucgagggcggcuggaccgggaugguggacggcugguacggguaccaccaccagaacgagcagggcagcggguacgccgccgaccucaaguccacgcagaacgcgaucgacgagaucaccaacaaggugaacagcgucaucgagaagaugaacacccaguucaccgccgugggcaaggaguucaaccaccuggagaagcgcaucgagaaccugaacaagaaggucgacgacggcuuccucgacaucuggacguacaacgccgagaugcuggugcugcucgagaacgagcggacccuggacuaccacgacuccaacgugaagaaccuguacgagaagguccgcagccagcucaagaacaacgccaaggagaucgggaacggcugcuucgaguucuaccacaagugcgacaacacgugcauggaguccgugaagaacgggaccuacgacuaccccaaguacagcgaggaggccaagcugaaccgggaggagaucgacggcgugaagcuggaguccacccgcaucuaccagauccucgcgaucuacagcaccgucgccagcucccuggugcugguggucagccucggggccaucuccuucuggaugugcagcaacggcucccugcagugccggaucugcaucuga

SEQ ID NO: 67924 - RNA, 1701 nt, Artificial Sequence; identical to SEQ ID NO: 66680
  derived and/or modified CDS sequence (opt1) from hemagglutinin__InfluenzaA__ACZ97021

SEQ ID NO: 67925 - RNA, 1701 nt, Artificial Sequence; identical to SEQ ID NO: 67047
  derived and/or modified CDS sequence (opt1) from hemagglutinin__InfluenzaA__ACZ97343

SEQ ID NO: 67926 - RNA, 1701 nt, Artificial Sequence; identical to SEQ ID NO: 67047
  derived and/or modified CDS sequence (opt1) from hemagglutinin__InfluenzaA__ACZ97353

SEQ ID NO: 67927 - RNA, 1701 nt, Artificial Sequence; identical to SEQ ID NO: 66680
  derived and/or modified CDS sequence (opt1) from hemagglutinin__InfluenzaA__ACZ97363

SEQ ID NO: 67928 - RNA, 1701 nt, Artificial Sequence
  derived and/or modified CDS sequence (opt1) from hemagglutinin__InfluenzaA__ACZ97383
augaaggccauccuggugguccuccuguacaccuucgccaccgcgaacgccgacacgcugugcaucggcuaccacgccaacaacagcaccgacaccguggacaccgugcucgagaagaacgucacggugacccacuccgugaaccugcuggaggacaagcacaacgggaagcucugcaagcugcgcggcgucgcgccccugcaccucgggaagugcaacaucgccggcuggauccuggggaacccggagugcgagagccuguccaccgcgagcuccuggagcuacaucguggagaccuccacgagcgacaacgggaccugcuaccccggcgacuucaucgacuacgaggagcuccgggagcagcuguccagcguguccagcuucgagcgcuucgagaucuuccccaagaccuccagcuggcccaaccacgacuccaacaagggcgucaccgccgccugcccgcacgccggcgccaagagcuucuacaagaaccugaucuggcucgugaagaaggggaacuccuaccccaagcugagcaaguccuacaucaacgacaagggcaaggaggugcugguccucugggggauccaccaccccagcacgagcgccgaccagcagucccuguaccagaacgccgacgccuacguguucgugggcagcucccgguacagcaagaaguucaagcccgagaucgccauccgcccgaagguccgggaccaggagggccgcaugaacuacuacuggacccugguggagcccggggacaagaucaccuucgaggcgaccggcaaccucguggucccccgguacgccuucgccauggagcgcaacgccggguccggcaucaucaucagcgacacgcccgugcacgacugcaacacgaccugccagaccccgaagggcgccaucaacaccucccugcccuuccagaacauccaccccaucaccaucgggaagugccccaaguacgucaagagcaccaagcugcggcucgcgaccggccugcgcaacgugccguccauccagagccgggggcuguucggcgccaucgccggguucaucgagggcggcuggacggggaugguggacggcugguacggguaccaccaccagaacgagcagggcuccggguacgccgccgaccucaagagcacccagaacgcgaucgacgagaucaccaacaaggugaacuccgucaucgagaagaugaacacccaguucacggccgugggcaaggaguucaaccaccuggagaagcgcaucgagaaccugaacaagaaggucgacgacggcuuccucgacaucuggaccuacaacgccgagcugcuggugcuccuggagaacgagcggacccuggacuaccacgacagcaacgugaagaaccucuacgagaagguccgcucccagcugaagaacaacgccaaggagaucgggaacggcugcuucgaguucuaccacaagugcgacaacacgugcauggagagcgugaagaacgggaccuacgacuaccccaaguacuccgaggaggccaagcugaaccgggaggagaucgacggcgugaagcucgagagcacccgcaucuaccagauccuggcgaucuacuccaccgucgccagcagccuggugcucguggucucccugggggccaucagcuucuggaugugcuccaacggcagccugcagugccggaucugcaucuga

SEQ ID NO: 67929 - RNA, 1701 nt, Artificial Sequence; identical to SEQ ID NO: 66680
  derived and/or modified CDS sequence (opt1) from hemagglutinin__InfluenzaA__ACZ97393

SEQ ID NO: 67930 - RNA, 1701 nt, Artificial Sequence
  derived and/or modified CDS sequence (opt1) from hemagglutinin__InfluenzaA__ACZ98178
augaaggccauccuggugguccuccuguacaccuucgccaccgcgaacgccgacacgcugugcaucggcuaccacgccaacaacagcaccgacaccguggacaccgugcucgagaagaacgucacggugacccacuccgugaaccugcuggaggacaagcacuacgggaagcucugcaagcugcgcggcgucgcgccccugcaccucgggaagugcaacaucgccggcuggauccuggggaacccggagugcgagagccuguccaccgccagcuccuggagcuacaucguggagaccuccagcuccgacaacggcacgugcuaccccggcgacuucaucgacuacgaggagcuccgggagcagcugagcuccgugagcuccuucgagcgcuucgagaucuuccccaagaccagcuccuggcccaaccacgacagcaacaagggggucaccaccgccugcccgcacgccggcgccaaguccuucuacaagaaccugaucuggcucgugaagaaggggaacagcuaccccaagcuguccaagagcuacaucaacgacaagggcaaggaggugcugguccucugggggauccaccaccccagcacguccgcggaccagcagagccuguaccagaacgccgacgccuacguguucgugggcaccucccgguacagcaagaaguucaagcccgagaucgccauccgcccgaagguccgggaccaggagggccgcaugaacuacuacuggacccugguggagcccggggacaagaucaccuucgaggccacgggcaaccucguggucccccgguacgcguucgccauggagcgcaacgccggguccggcaucaucaucagcgacacccccgugcacgacugcaacacgaccugccagaccccgaagggcgccaucaacaccucccugcccuuccagaacauccaccccaucaccaucgggaagugccccaaguacgucaagagcaccaagcugcggcucgccacgggccugcgcaacgugccguccauccagagccgggggcuguucggcgcgaucgccggguucaucgagggcggcuggaccgggaugguggacggcugguacggguaccaccaccagaacgagcagggcuccggguacgccgccgaccucaagagcacccagaacgccaucgacgagaucaccaacaaggugaacuccgucaucgagaagaugaacacgcaguucaccgcggugggcaaggaguucaaccaccuggagaagcgcaucgagaaccugaacaagaaggucgacgacggcuuccucgacaucuggaccuacaacgccgagcugcuggugcuccuggagaacgagcggacccuggacuaccacgacagcaacgugaagaaccucuacgagaagguccgcucccagcugaagaacaacgccaaggagaucgggaacggcugcuucgaguucuaccacaagugcgacaacacgugcauggagagcgugaagaacgggaccuacgacuaccccaaguacuccgaggaggccaagcugaaccgggaggagaucgacggcgugaagcucgagagcacccgcaucuaccagauccuggccaucuacuccaccgucgcgagcagccuggugcucguggucucccugggggccaucagcuucuggaugugcuccaacggcagccugcagugccggaucugcaucuga

SEQ ID NO: 67931 - RNA, 1701 nt, Artificial Sequence; identical to SEQ ID NO: 66680
  derived and/or modified CDS sequence (opt1) from hemagglutinin__InfluenzaA__ACZ98188

SEQ ID NO: 67932 - RNA, 1701 nt, Artificial Sequence; identical to SEQ ID NO: 66873
  derived and/or modified CDS sequence (opt1) from hemagglutinin__InfluenzaA__ACZ98198

SEQ ID NO: 67933 - RNA, 1701 nt, Artificial Sequence; identical to SEQ ID NO: 66693
  derived and/or modified CDS sequence (opt1) from hemagglutinin__InfluenzaA__ACZ98208

SEQ ID NO: 67934 - RNA, 1701 nt, Artificial Sequence; identical to SEQ ID NO: 66693
  derived and/or modified CDS sequence (opt1) from hemagglutinin__InfluenzaA__ACZ98218

SEQ ID NO: 67935 - RNA, 1701 nt, Artificial Sequence; identical to SEQ ID NO: 66693
  derived and/or modified CDS sequence (opt1) from hemagglutinin__InfluenzaA__ACZ98228

SEQ ID NO: 67936 - RNA, 1701 nt, Artificial Sequence; identical to SEQ ID NO: 66693
  derived and/or modified CDS sequence (opt1) from hemagglutinin__InfluenzaA__ACZ98238

SEQ ID NO: 67937 - RNA, 1701 nt, Artificial Sequence; identical to SEQ ID NO: 67322
  derived and/or modified CDS sequence (opt1) from hemagglutinin__InfluenzaA__ACZ98248

SEQ ID NO: 67938 - RNA, 1701 nt, Artificial Sequence; identical to SEQ ID NO: 66693
  derived and/or modified CDS sequence (opt1) from hemagglutinin__InfluenzaA__ACZ98258

SEQ ID NO: 67939 - RNA, 1701 nt, Artificial Sequence; identical to SEQ ID NO: 66693
  derived and/or modified CDS sequence (opt1) from hemagglutinin__InfluenzaA__ACZ98268

SEQ ID NO: 67940 - RNA, 1701 nt, Artificial Sequence; identical to SEQ ID NO: 67833
  derived and/or modified CDS sequence (opt1) from hemagglutinin__InfluenzaA__ACZ98278

SEQ ID NO: 67941 - RNA, 1701 nt, Artificial Sequence; identical to SEQ ID NO: 67833
  derived and/or modified CDS sequence (opt1) from hemagglutinin__InfluenzaA__ACZ98288

SEQ ID NO: 67942 - RNA, 1701 nt, Artificial Sequence
  derived and/or modified CDS sequence (opt1) from hemagglutinin__InfluenzaA__ACZ98298
augaaggccauccuggugguccuccuguacaccuucgccaccgcgaacgccgacacgcugugcaucggcuaccacgccaacaacagcaccgacaccguggacaccgugcucgagaagaacgucacggugacccacuccgugaaccugcuggaggacaagcacaacgggaagcucugcaagcugcgcggcgucgcgccccugcaccucgggaagugcaacaucgccggcuggauccuggggaacccggagugcgagagccuguccaccgccagcuccuggagcuacaucguggagaccuccagcuccgacaacggcacgugcuaccccggcgacuucaucgacuacgaggagcuccgggagcagcugagcuccgugagcuccuucgagaaguucgagaucuuccccaagaccagcuccuggcccaaccacgacagcaacaagggggucaccgccgccugcccgcacgccggcgcgaaguccuucuacaagaaccugaucuggcucgugaagaaggggaacagcuaccccaagcuguccaagagcuacaucaacgacaagggcaaggaggugcugguccucugggggauccaccaccccagcaccuccgccgaccagcagagccuguaccagaacgccgacgccuacguguucgugggcuccagccgcuacuccaagaaguucaagcccgagaucgccauccggccgaagguccgcgaccaggagggccggaugaacuacuacuggacgcugguggagcccggggacaagaucaccuucgaggcgaccggcaaccucguggucccccgcuacgccuucgccauggagcggaacgccgggagcggcaucaucaucuccgacacccccgugcacgacugcaacacgaccugccagaccccgaagggcgccaucaacaccagccugcccuuccagaacauccaccccaucacgaucgggaagugccccaaguacgugaaguccaccaagcugcgccucgcgaccggccugcggaacgucccgagcauccagucccgcgggcuguucggcgccaucgccggguucaucgagggcggcuggaccgggaugguggacggcugguacggguaccaccaccagaacgagcagggcagcggguacgccgccgaccucaaguccacgcagaacgcgaucgacggcaucaccaacaaggugaacagcgucaucgagaagaugaacacccaguucaccgccgugggcaaggaguucaaccaccuggagaagcggaucgagaaccugaacaagaaggucgacgacggguuccucgacaucuggacguacaacgccgagcugcuggugcuccuggagaacgagcgcacccuggacuaccacgacuccaacgugaagaaccucuacgagaagguccggagccagcugaagaacaacgccaaggagaucggcaacgggugcuucgaguucuaccacaagugcgacaacacgugcauggaguccgugaagaacggcaccuacgacuaccccaaguacagcgaggaggccaagcugaaccgcgaggagaucgacggggugaagcucgaguccacccggaucuaccagauccuggcgaucuacagcaccgucgccagcucccuggugcucguggucagccugggcgccaucuccuucuggaugugcagcaacggcucccugcagugccgcaucugcaucuga

SEQ ID NO: 67943 - RNA, 1701 nt, Artificial Sequence
  derived and/or modified CDS sequence (opt1) from hemagglutinin__InfluenzaA__ACZ98318
augaaggccauccuggugguccuccuguacaccuucgccaccgcgaacgccgacacgcugugcaucggcuaccacgccaacaacagcaccgacaccguggacaccgugcucgagaagaacgucacggugacccacuccgugaaccugcuggaggacaagcacaacgggaagcucugcaagcugcgcggcgucgcgccccugcaccucgggaagugcaacaucgccggcuggauccuggggaacccggagugcgagagccuguccaccgccagcuccuggagcuacaucguggagaccuccagcuccgacaacggcacgugcuaccccggcgacuucaucgacuacgaggagcuccgggagcagcugagcuccgugagcuccuucgagcgcuucgagaucuuccccaagaccagcuccuggcccaaccacgacagcaacaagggggucaccgccgccugcccgcacgccggcgcgaaguccuucuacaagaaccugaucuggcucgugaagaaggggaacagcuaccccaagcuguccaagagcuacaucaacgacaagggcaaggaggugcugguccucugggggauccaccaccccagcaccuccgccgaccagcagagccuguaccagaacgccgacgccuacguguucgugggcacgucccgguacagcaagaaguucaagcccgagaucgccauccgcccgaagguccgggaccaggagggccgcaugaacuacuacuggacccugguggagcccggggacaagaucaccuucgaggcgaccggcaaccucguggucccccgguacgccuucgccauggagcgcaacgccggguccggcaucaucaucagcgacacgcccgugcacgacugcaacacgaccugccagaccccgaagggcgccaucaacaccucccugcccuuccagaacauccaccccaucaccaucgggaagugccccaaguacgucaagagcaccaagcugcggcucgcgaccggccugcgcaacgugccguccauccagagccgggggcuguucggcgccaucgccggguucaucgagggcggcuggacggggaugguggacggcugguacggguaccaccaccagaacgagcagggcuccggguacgccgccgaccucaagagcacccagaacgcgaucgacgagaucaccaacaaggugaacuccgucaucgagaagaugaacacccaguucacggccgugggcaaggaguucaaccaccuggagaagcgcaucgagaaccugaacaagaaggucgacgacggcuuccucgacaucuggaccuacaacgccgagcugcuggugcuccuggagaacgagcggacccuggacuaccacgacagcaacgugaagaaccucuacgagaagguccgcucccagcugaagaacaacgccaaggagaucgggaacggcugcuucgaguucuaccacaagugcgacaacacgugcauggagagcgugaagaacgggaccuacgacuaccccaaguacuccgaggaggccaagcugaaccgggaggagaucgacggcgugaagcucgagagcacccgcaucuaccacauccuggcgaucuacuccaccgucgccagcagccuggugcucguggucucccugggggccaucagcuucuggaugugcuccaacggcagccugcagugccggaucugcaucuga

SEQ ID NO: 67944 - RNA, 1701 nt, Artificial Sequence; identical to SEQ ID NO: 66935
  derived and/or modified CDS sequence (opt1) from hemagglutinin__InfluenzaA__ACZ98328

SEQ ID NO: 67945 - RNA, 1701 nt, Artificial Sequence; identical to SEQ ID NO: 66693
  derived and/or modified CDS sequence (opt1) from hemagglutinin__InfluenzaA__ACZ98338

SEQ ID NO: 67946 - RNA, 1701 nt, Artificial Sequence; identical to SEQ ID NO: 67833
  derived and/or modified CDS sequence (opt1) from hemagglutinin__InfluenzaA__ACZ98348

SEQ ID NO: 67947 - RNA, 1701 nt, Artificial Sequence; identical to SEQ ID NO: 66693
  derived and/or modified CDS sequence (opt1) from hemagglutinin__InfluenzaA__ACZ98358

SEQ ID NO: 67948 - RNA, 1701 nt, Artificial Sequence; identical to SEQ ID NO: 66693
  derived and/or modified CDS sequence (opt1) from hemagglutinin__InfluenzaA__ACZ98368

SEQ ID NO: 67949 - RNA, 1701 nt, Artificial Sequence; identical to SEQ ID NO: 66935
  derived and/or modified CDS sequence (opt1) from hemagglutinin__InfluenzaA__ACZ98388

SEQ ID NO: 67950 - RNA, 1701 nt, Artificial Sequence; identical to SEQ ID NO: 66693
  derived and/or modified CDS sequence (opt1) from hemagglutinin__InfluenzaA__ACZ98398

SEQ ID NO: 67951 - RNA, 1701 nt, Artificial Sequence; identical to SEQ ID NO: 66693
  derived and/or modified CDS sequence (opt1) from hemagglutinin__InfluenzaA__ACZ98408

SEQ ID NO: 67952 - RNA, 1701 nt, Artificial Sequence; identical to SEQ ID NO: 66873
  derived and/or modified CDS sequence (opt1) from hemagglutinin__InfluenzaA__ACZ98418

SEQ ID NO: 67953 - RNA, 1701 nt, Artificial Sequence; identical to SEQ ID NO: 66693
  derived and/or modified CDS sequence (opt1) from hemagglutinin__InfluenzaA__ACZ98428

SEQ ID NO: 67954 - RNA, 1701 nt, Artificial Sequence; identical to SEQ ID NO: 66693
  derived and/or modified CDS sequence (opt1) from hemagglutinin__InfluenzaA__ACZ98438

SEQ ID NO: 67955 - RNA, 1701 nt, Artificial Sequence; identical to SEQ ID NO: 66693
  derived and/or modified CDS sequence (opt1) from hemagglutinin__InfluenzaA__ACZ98448

SEQ ID NO: 67956 - RNA, 1701 nt, Artificial Sequence; identical to SEQ ID NO: 67833
  derived and/or modified CDS sequence (opt1) from hemagglutinin__InfluenzaA__ACZ98458

SEQ ID NO: 67957 - RNA, 1701 nt, Artificial Sequence
  derived and/or modified CDS sequence (opt1) from hemagglutinin__InfluenzaA__ACZ98546
augaaggccauccuggugguccuccuguacaccuucgccaccgcgaacgccgacacgcugugcaucggcuaccacgccaacaacagcaccgacaccguggacaccgugcucgagaagaacgucacggugacccacuccgugaaccugcuggaggacaagcacaacgggaagcucugcaagcugcgcggcgucgcgccccugcaccucgggaagugcaacaucgccggcuggauccuggggaacccggagugcgagagccuguccaccgcgagcuccuggagcuacaucguggagaccuccagcuccgacaacggcacgugcuaccccggcgacuucaucgacuacgaggagcuccgggagcagcugagcuccgugagcuccuucgagcgcuucgagaucuuccccaagaccagcuccuggcccaaccacgacccgaacaagggggucaccgccgccugcccccacgccggcgccaagagcuucuacaagaaccugaucuggcucgugaagaaggggaacuccuaccccaagcugagcaaguccuacaucaacgacaagggcaaggaggugcugguccucugggggauccaccaccccagcaccagcgccgaccagcagucccuguaccagaacgccgacgccuacguguucgugggcacgagccgguacuccaagaaguucaagccggagaucgccauccgccccaagguccgggaccaggagggccgcaugaacuacuacuggacccugguggagcccggggacaagaucaccuucgaggcgaccggcaaccucguggucccccgguacgccuucgccauggagcgcaacgccgggagcggcaucaucaucuccgacacgccggugcacgacugcaacacgaccugccagacccccaagggcgccaucaacaccagccugcccuuccagaacauccaccccaucaccaucgggaagugcccgaaguacgugaaguccaccaagcugcggcucaccacgggccugcgcaacguccccagcauccaguaccgggggcuguucggcgcgaucaccggguucaucgagggcggcuggaccgggaugguggacggcugguacggguaccaccaccagaacgagcagggcuccggguacgccgccgaccucaagagcacccagaacgccaucgacgagaucacgaacaaggugaacuccgucaucgagaagaugaacacccaguucaccgccgugggcaaggaguucaaccaccuggagaagcgcaucgagaaccugaacaagaaggucgacgacggcuuccucgacaucuggaccuacaacgcggagcugcuggugcuccuggagaacgagcggacgcuggacuaccacgacagcaacgugaagaaccucuacgagaagguccgcucccagcugaagaacaacgccaaggagaucgggaacggcugcuucgaguucuaccacaagugcgacaacacgugcauggagagcgugaagaacgggaccuacgacuaccccaaguacuccgaggaggccaagcugaaccgggaggagaucgacggcgugaagcucgagagcacccgcaucuaccagauccuggccaucuacuccaccgucgccagcucccuggugcucguggucagccugggggcgaucagcuucuggaugugcuccaacggcagccugcagugccggaucugcaucuga

SEQ ID NO: 67958 - RNA, 1701 nt, Artificial Sequence
  derived and/or modified CDS sequence (opt1) from hemagglutinin__InfluenzaA__ACZ98560
augaaggccauccgcgugguccugcucuacaccuucgccaccgcgaacgccgacacgcugugcaucggcuaccacgccaacaacagcaccgacaccguggacaccgugcuggagaagaacgucacggugacccacuccgugaaccuccuggaggacaagcacaacgggaagcugugcaagcuccggggcgucgcgccccugcaccuggggaagugcaacaucgccggcuggauccucgggaacccggagugcgagagccuguccaccgcgagcuccuggagcuacaucguggagaccuccagcuccgacaacggcacgugcuaccccggcgacuucaucgacuacgaggagcugcgcgagcagcucagcuccgugagcuccuucgagcgguucgagaucuuccccaagaccagcuccuggcccaaccacgacccgaacaagggggucaccgccgccugcccccacgccggcgccaagagcuucuacaagaaccugaucuggcuggugaagaaggggaacuccuaccccaagcucagcaaguccuacaucaacgacaagggcaaggaggugcugguccugugggggauccaccaccccagcaccagcgccgaccagcagucccucuaccagaacgccgacgccuacguguucgugggcacgagccgcuacuccaagaaguucaagccggagaucgccauccggcccaagguccgcgaccaggagggccggaugaacuacuacuggacccugguggagcccggggacaagaucaccuucgaggcgaccggcaaccugguggucccccgcuacgccuucgccauggagcggaacgccgggagcggcaucaucaucuccgacacgccggugcacgacugcaacacgaccugccagacccccaagggcgccaucaacaccagccuccccuuccagaacauccaccccaucaccaucgggaagugcccgaaguacgugaagucccccaagcugcgccuggcgaccggcaugcggaacguccccuucauccaguaccgcggccucuucggggccaucaccggguucaucgagggcggcuggacggggaugguggacggcugguacggguaccaccaccagaacgagcagggcagcggguacgccgccgaccugaaguccacccagaacgccaucgacgagaucaccaacaaggugaacagcgucaucgagaagaugaacacccaguucacggcggugggcaaggaguucaaccaccuggagaagcggaucgagaaccucaacaagaaggucgacgacggcuuccuggacaucuggaccuacaacgccgagcugcucgugcugcuggagaacgagcgcacccucgacuaccacgacuccaacgugaagaaccuguacgagaagguccggagccagcugaagaacaacgccaaggagaucgggaacggcugcuucgaguucuaccacaagugcgacaacacgugcauggaguccgugaagaacgggaccuacgacuaccccaaguacagcgaggaggccaagcucaaccgcgaggagaucgacggcgugaagcuggaguccacccggaucuaccagauccuggccaucuacagcaccgucgcguccagccucgugcugguggucucccugggggccaucagcuucuggaugugcagcaacggcucccuccagugccgcaucugcaucuga

SEQ ID NO: 67959 - RNA, 1701 nt, Artificial Sequence
  derived and/or modified CDS sequence (opt1) from hemagglutinin__InfluenzaA__ACZ98567
augaaggccauccuggugguccuccuguacaccuucgccaccgcgaacgccgacacgcugugcaucggcuaccacgccaacaacagcaccgacaccguggacaccgugcucgagaagaacgucacggugacccacuccgugaaccugcuggaggacaagcacaacgggaagcucugcaagcugcgcggcgucgcgccccugcaccucgggaagugcaacaucgccggcuggauccuggggaacccggagugcgagagccuguccaccgcgagcuccuggagcuacaucguggagaccuccagcuccgacaacggcacgugcuaccccggcgacuucaucgacuacgaggagcuccgggagcagcugagcuccgugagcuccuucgagcgcuucgagaucuuccccaagaccagcuccuggcccaaccacgacccgaacaagggggucaccgccgccugcccccacgccggcgccaagagcuucuacaagaaccugaucuggcucgugaagaaggggaacuccuaccccaagcugagcaaguccuacaucaacgacaagggcaaggaggugcugguccucugggggauccaccaccccagcaccagcgccgaccagcagucccuguaccagaacgccgacgccuacguguucgugggcacgagccgguacuccaagaaguucaagccggagaucgccauccgccccaagguccgggaccaggagggccgcaugaacuacuacuggacccugguggagcccggggacaagaucaccuucgaggcgaccggcaaccucguggucccccgguacgccuucgccauggagcgcaacgccgggagcggcaucaucaucuccgacacgccggugcacgacugcaacacgaccugccagacccccaagggcgccaucaacaccagccugcccuuccagaacauccaccccaucaccaucgggaagugcccgaaguacgugaagucccccaagcugcggcucgcgagcggcaugcgcaacguccccuucauccagucccgggggcuguucggcgccaucaccggguucaucgaggagggcuggaccggcaugguggacgggugguacggcuuccaccaccagaacgagcaggggagcggcuacgccgccgaccugaaguccacgcagaacgccaucgacgagaucaccaacaaggugaacagcgucaucgagaagaugaacacccaguucaccgcgguggggaaggaguucaaccaccucgagaagcgcaucgagaaccugaacaagaaggucgacgacggcuuccuggacaucuggacguacaacgccgagcuccuggugcugcucgagaacgagcggacccuggacuaccacgacuccaacgugaagaaccuguacgagaagguccgcagccagcucaagaacaacgccaaggagaucggcaacgggugcuucgaguucuaccacaagugcgacaacacgugcauggaguccgugaagaacggcaccuacgacuaccccaaguacagcgaggaggccaagcugaaccgggaggagaucgacggggugaagcuggaguccacccgcaucuaccagauccucgccaucuacagcaccgucgcguccagccuggugcugguggucagccucggcgccaucuccuucuggaugugcagcaacgggucccugcagugccggaucugcaucuga

SEQ ID NO: 67960 - RNA, 1701 nt, Artificial Sequence; identical to SEQ ID NO: 66680
  derived and/or modified CDS sequence (opt1) from hemagglutinin__InfluenzaA__ACZ98671

SEQ ID NO: 67961 - RNA, 1701 nt, Artificial Sequence; identical to SEQ ID NO: 66680
  derived and/or modified CDS sequence (opt1) from hemagglutinin__InfluenzaA__ACZ98681

SEQ ID NO: 67962 - RNA, 1701 nt, Artificial Sequence; identical to SEQ ID NO: 66693
  derived and/or modified CDS sequence (opt1) from hemagglutinin__InfluenzaA__ACZ98691

SEQ ID NO: 67963 - RNA, 1701 nt, Artificial Sequence
  derived and/or modified CDS sequence (opt1) from hemagglutinin__InfluenzaA__ADA60799
augaaggccauccuggugguccuccuguacaccuucgccaccgcgaacgccgacacgcugugcaucggcuaccacgccaacaacagcaccgacaccguggacaccgugcucgagcgcaacgucacggugacccacuccgugaaccugcuggaggacaagcacaacgggaagcucugcaagcugcggggcgucgcgccccugcaccucgggaagugcaacaucgccggcuggauccuggggaacccggagugcgagagccuguccaccgccagcuccuggagcuacaucguggagaccuccagcuccgacaacggcacgugcuaccccggcgacuucaucgacuacgaggagcuccgcgagcagcugagcuccgugagcuccuucgagcgguucgagaucuuccccaagaccagcuccuggcccaaccacgacagcaacaagggggucaccgccgccugcccgcacgccggcgcgaaguccuucuacaagaaccugaucuggcucgugaagaaggggaacagcuaccccaagcuguccaagagcuacaucaacgacaagggcaaggaggugcugguccucugggggauccaccaccccagcaccuccgccgaccagcagagccuguaccagaacgccgacgccuacguguucgugggcacgucccgcuacagcaagaaguucaagcccgagaucgccauccggccgaagguccgcgaccaggagggccggaugaacuacuacuggacccugguggagcccggggacaagaucaccuucgaggcgaccggcaaccucguggucccccgcuacgccuucgccauggagcggaacgccggguccggcaucaucaucagcgacacgcccgugcacgacugcaacacgaccugccagaccccgaagggcgccaucaacaccucccugcccuuccagaacauccaccccaucaccaucgggaagugccccaaguacgucaagagcaccaagcugcgccucgcgaccggccugcggaacaucccguccauccagagccgcgggcuguucggcgccaucgccggguucaucgagggcggcuggacggggaugguggacggcugguacggguaccaccaccagaacgagcagggcuccggguacgccgccgaccucaagagcacccagaacgcgaucgacgagaucaccaacaaggugaacuccgugaucgagaagaugaacacccaguucacggccgucggcaaggaguucaaccaccuggagaagcggaucgagaaccugaacaagaagguggacgacggcuuccucgacaucuggaccuacaacgccgagcugcugguccuccuggagaacgagcgcacccuggacuaccacgacagcaacgugaagaaccucuacgagaaggugcggucccagcugaagaacaacgccaaggagaucgggaacggcugcuucgaguucuaccacaagugcgacaacacgugcauggagagcgucaagaacgggaccuacgacuaccccaaguacuccgaggaggccaagcugaaccgcgaggagaucgacggcgugaagcucgagagcacccggaucuaccagauccuggcgaucuacuccaccguggccagcagccugguccucguggugucccugggggccaucagcuucuggaugugcuccaacggcagccugcagugccgcaucugcaucuga

SEQ ID NO: 67964 - RNA, 1701 nt, Artificial Sequence; identical to SEQ ID NO: 67857
  derived and/or modified CDS sequence (opt1) from hemagglutinin__InfluenzaA__ADA69302

SEQ ID NO: 67965 - RNA, 1701 nt, Artificial Sequence; identical to SEQ ID NO: 67857
  derived and/or modified CDS sequence (opt1) from hemagglutinin__InfluenzaA__ADA69312

SEQ ID NO: 67966 - RNA, 1701 nt, Artificial Sequence; identical to SEQ ID NO: 67857
  derived and/or modified CDS sequence (opt1) from hemagglutinin__InfluenzaA__ADA69322

SEQ ID NO: 67967 - RNA, 1701 nt, Artificial Sequence; identical to SEQ ID NO: 67857
  derived and/or modified CDS sequence (opt1) from hemagglutinin__InfluenzaA__ADA69332

SEQ ID NO: 67968 - RNA, 1701 nt, Artificial Sequence; identical to SEQ ID NO: 67794
  derived and/or modified CDS sequence (opt1) from hemagglutinin__InfluenzaA__ADA70329

SEQ ID NO: 67969 - RNA, 1698 nt, Artificial Sequence
  derived and/or modified CDS sequence (opt1) from hemagglutinin__InfluenzaA__ADA71150
augaaggugaagcugcucguccugcugugcaccuucaccgccacguacgccgacaccaucugcaucggcuaccacgcgaacaacagcaccgacaccguggacacggugcucgagaagaacgucaccgugacccacuccgugaaccuggucgagaacagccacaacgggaagcugugccuccugaagggcaucgcgccccugcagcucgggaacugcuccguggccggcuggauccuggggaacccggagugcgagcugcucaucagcaaggaguccuggagcuacaucguggagaagcccaaccccgagaacgggaccugcuaccccggccacuucgccgacuacgaggagcugcgcgagcagcuguccagcgucuccagcuucgagcgguucgagaucuucccgaaggaguccagcuggcccaaccacacggugaccgggguguccgccagcugcucccacaacggcgagagcuccuucuaccgcaaccuccuguggcugaccgggaagaacggccucuaccccaaccugagcaaguccuacgccaacaacaaggagaaggagguccuggugcucuggggcgugcaccacccgcccagcaucagcaaccagaagacccuguaccacacggagaacgccuacgucuccguggugagcucccacuacagccggaaguucacccccgagaucgccaagcgccccaagguccgggaccaggagggccgcaucaacuacuacuggacccugcucgagcccggcgacaccaucaucuucgaggccaacgggaaccugaucgcgccgcgguacgccuucgcccugucccgcggcuucgggagcggcaucaucaacuccaacgcccccauggacaagugcgacgccaagugccagacgccccagggcgcgaucaacagcucccuccccuuccagaacgugcacccggugaccaucggggagugccccaaguacguccggagcgccaagcugcgcauggugaccggccugcggaacauccccuccauccagagccgcggccucuucggggccaucgccggguucaucgagggcggcuggaccgggaugguggacggcugguacggguaccaccaccagaacgagcagggcuccggguacgccgcggaccagaaguccacgcagaacgccaucaacggcaucaccaagaaggucaacagcgugaucgagaagaugaacacccaguucaccgccgucggcaaggaguucaacaagcuggagcggcgcauggagaaccugaacaagaagguggacgacggguucaucgacaucuggacguacaacgccgagcuccuggugcugcucgagaacgagcggacccuggacuuccacgacagcaacgucaagaaccuguacgagaaggugaagucccagcucaagaacaacgccaaggagaucggcaacgggugcuucgaguucuaccacaagugcaacgacgagugcauggagagcgugaagaacggcaccuacgacuaccccaaguacuccgaggagagcaagcugaaccgcgagaagaucgacggggucaagcuggagagcaugggcguguaccagauccucgcgaucuacuccaccguggccagcucccugguccugcucgugagccugggcgccaucuccuucuggaugugcagcaacgggucccugcagugccggaucugcaucuga

SEQ ID NO: 67970 - RNA, 1701 nt, Artificial Sequence
  derived and/or modified CDS sequence (opt1) from hemagglutinin__InfluenzaA__ADA71152
augaagaccaucaucgcccugagcuacauccucugccugguguucgcccagaagcugcccggcaacgacaacuccaccgcgacgcucugccuggggcaccacgccgucccgaacggcaccaucgugaagaccaucaccaacgaccagaucgaggugacgaacgccaccgagcugguccagagcuccagcaccggggagaucugcgacagcccccaccagauccucgacggcgggaacugcacccugaucgacgcccugcucggcgacccccagugcgacggcuuccagaacaagaagugggaccuguucguggagcgcagcaaggccuacuccaacugcuaccccuacgacgugccggacuacgcgagccugcggucccucgucgccagcuccgggacgcuggaguucaacaacgagagcuucaacuggaccggcgugacccagaacgggaccuccagcgccugcauccgccgguccaacaacagcuucuucucccgccugaacuggcucacgcaccugaaguucaaguaccccgcccugaacgugaccaugcccaacaacgagcaguucgacaagcucuacaucuggggcguccaccaccccgggaccgacaacgaccagaucuuccuguacgcgcaggccagcggccggaucaccguguccacgaagcgcagccagcagaccgugaucccgaacaucggcagccggccccgcguccggaacauccccucccgcaucagcaucuacuggaccaucgugaagcccggggacauccugcucaucaacuccaccggcaaccugaucgccccgcggggguacuucaagauccgcagcggcaaguccagcaucaugcgguccgacgcccccaucggcaagugcaacagcgagugcaucacgcccaacggguccauccccaacgacaagccguuccagaacgugaaccgcaucaccuacggcgccugcccccgguacgucaagcagaacacccugaagcucgcgaccgggaugcgcaacgugcccgagaagcagacgcggggcaucuucggggccaucgccggcuucaucgagaacggcugggaggggaugguggacggcugguacggguuccgccaccagaacagcgagggccgggggcaggccgccgaccugaaguccacccaggcggccaucgaccagaucaacggcaagcugaaccgccucaucggcaagaccaacgagaaguuccaccagaucgagaaggaguucagcgaggucgaggggcggauccaggaccuggagaaguacguggaggacaccaagaucgaccugugguccuacaacgccgagcuccugguggcccuggagaaccagcacacgaucgaccucaccgacagcgagaugaacaagcuguucgagaagaccaagaagcagcugcgcgagaacgccgaggacaugggcaacgggugcuucaagaucuaccacaagugcgacaacgcgugcaucggcuccauccgcaacgggaccuacgaccacgacgucuaccgggacgaggcccucaacaaccgcuuccagaucaagggcguggagcugaaguccggcuacaaggacuggauccuguggaucuccuucgccaucagcugcuuccuccugugcguggcccugcucggguucaucaugugggccugccagaagggcaacauccggugcaacaucugcaucuga

SEQ ID NO: 67971 - RNA, 1698 nt, Artificial Sequence
  derived and/or modified CDS sequence (opt1) from hemagglutinin__InfluenzaA__ADA71154
augaaggugaagcugcucguccugcugugcaccuucaccgccacguacgccgacaccaucugcaucggcuaccacgcgaacaacagcaccgacaccguggacacggugcucgagaagaacgucaccgugacccacuccgugaaccugcuggagaacagccacaacgggaagcucugccugcugaagggcaucgcgccccuccagcuggggaacugcuccgucgccggcuggauccuggggaacagcgagugcgagcuccugaucuccaaggagagcugguccuacaucguggagaagccgaaccccgagaacgggaccugcuacuucggccacuucgccgacuacgaggagcugcgcgagcaguucgggagcguguccagcuucgagcgguucgagaucuuccccaaggaguccagcuggcccaaccacacggucaccggcguguccgccagcugcucccacaacggggagagcuccuucuaccgcaaccuccuguggcugaccggcaagaacgggcucuacccgaaccugagcaaguccuacgccaacaacaaggagaaggaggugcugguccucuggggcgugcaccacccgcccagcaucaacgaccagaagacccuguaccacacggagaacgccuacgugagcgucguguccagccacuacucccggaaguucacccccgagaucgccaagcgccccaaggugcgggaccaggagggccgcaucaacuacuacuggacccugcucgagccccgggacaccaucaucuucgaggccaacgggaaccugaucgcgccccgcuacgccuucgcccugagccggggcuucggguccggcaucaucaacagcaacgcccccauggacaagugcgacgccaagugccagacgccgcagggcgcgaucaacuccagccuccccuuccagaacguccaccccgugaccaucggggagugccccaaguacgugcgcuccgccaagcugcggauggucaccggccugcgcaacaucccgagcauccagucccggggccucuucggcgccaucgccggguucaucgagggcggcuggaccgggaugguggacggcugguacggguaccaccaccagaacgagcagggcagcggguacgccgcggaccagaaguccacgcagaacgccaucaacggcaucaccaacaaggugaacagcgucaucgagaagaugaacacccaguucaccgccgugggcaaggaguucaacaagcuggagcgccggauggagaaccugaacaagaaggucgacgacggguucaucgacaucuggacguacaacgccgagcuccuggugcugcucgagaacgagcgcacccuggacuuccacgacuccaacgugaagaaccuguacgagaaggucaagagccagcucaagaacaacgccaaggagaucggcaacgggugcuucgaguucuaccacaagugcaacgacgagugcauggaguccgugaagaacggcaccuacgacuaccccaaguacagcgaggaguccaagcugaaccgggagaagaucgacggggugaagcuggagagcaugggcgucuaccagauccucgcgaucuacagcaccguggccuccagccuggugcugcucgucucccugggcgccaucagcuucuggaugugcuccaacgggagccugcagugccgcaucugcaucuga

SEQ ID NO: 67972 - RNA, 1698 nt, Artificial Sequence
  derived and/or modified CDS sequence (opt1) from hemagglutinin__InfluenzaA__ADA71158
augaaggugaagcugcucguccugcugugcaccuucaccgccacguacgccgacaccaucugcaucggcuaccacgcgaacaacagcaccgacaccguggacacggugcucgagaagaacgucaccgugacccacuccgugaaccugcuggagaacagccacaacgggaagcucugccugcugaagggcaucgcgccccuccagcuggggaacugcuccgucgccggcuggauccuggggaacccggagugcgagcuccugaucagcaaggagaccugguccuacaucguggagaagcccaaccccgagaacggcacgugcuaccccggccacuucgccgacuacgaggagcugcgcgagcagcucagcuccgugagcuccuucgagcgguucgagaucuucccgaaggagagcuccuggcccaaccacaccgucaccggggugagcgccuccugcagccacaacggcgaguccagcuucuaccgcaaccugcuguggcucaccgggaagaacggccuguaccccaaccuguccaagagcuacgccaacaacaaggagaaggaggugcucguccuguggggcgugcaccacccgcccuccaucaacgaccagcggacgcuguaccacaccgagaacgccuacgugagcgucgugagcucccacuacagccgcaaguucacccccgagaucgccaagcggcccaaggugcgcgaccaggaggggcggaucaacuacuacuggacccuccuggagccccgcgacacgaucaucuucgaggccaacggcaaccugaucgcgccgcgguacgccuucgcccucucccgcggguucggcagcgggaucaucaacuccaacgcccccauggacaagugcgacgccaagugccagacgccccagggcgcgaucaacagcucccugcccuuccagaacguccacccggugaccaucggcgagugccccaaguacgugcggagcgccaagcugcgcauggucaccgggcuccggaacacccccuccauccagagccgcggccuguucggggccaucgccggcuucaucgagggcggguggaccggcaugguggacgggugguacggcuaccaccaccagaacgagcagggguccggcuacgccgcggaccagaaguccacccagaacgccaucaacgggaucaccaacaaggugaacagcgucaucgagaagaugaacacgcaguucaccgccgugggcaaggaguucaacaagcuggagagccucauggacauccugaacaagaaggucgacgacggcuucaucgacaucuggaccuacaacgccgagcugcucgugcugcuggagaacgagcggacccucgacuuccacgacuccaacgugaagaaccuguacgagaaggucaagagccagcugaagaacaacgccaaggagaucgggaacggcugcuucgaguucuaccacaagugcaacgacgagugcauggaguccgugaagaacgggacguacgacuaccccaaguacagcgaggaguccaagcucaaccgcgagaagaucgacggcgugaagcuggagagcaugggggucuaccagauccuggcgaucuacagcaccguggccuccagccucgugcugcuggucucccucggcgccaucagcuucuggaugugcuccaacggcagccugcagugccggaucugcaucuga

SEQ ID NO: 67973 - RNA, 1701 nt, Artificial Sequence; identical to SEQ ID NO: 66458
  derived and/or modified CDS sequence (opt1) from hemagglutinin__InfluenzaA__ADA71162

SEQ ID NO: 67974 - RNA, 1698 nt, Artificial Sequence
  derived and/or modified CDS sequence (opt1) from hemagglutinin__InfluenzaA__ADA71164
augaaggugaagcugcucguccugcugugcaccuucaccgccacguacgccgacaccaucugcaucggcuaccacgcgaacaacagcaccgacaccguggacacggugcucgagaagaacgucaccgugacccacuccgugaaccugcuggagaacagccacaacgggaagcucugccugcugaagggcaucgcgccccuccagcuggggaacugcuccgucgccggcuggauccuggggaacccggagugcgagcuccuggugagcaaggaguccuggagcuacaucguggagaagcccaaccccgagaacgggaccugcuaccccggccacuucgccgacuacgaggagcugcgcgagcagcucuccagcgucuccagcuucgagcgguucgagaucuucccgaaggaguccagcuggcccaaccacacggugaccggggccuccgccagcugcucccacaacggcgagaacagcuucuaccgcaaccugcuguggcucaccgggaagaacggccuguaccccaaccuguccaagagcuacgccaacaacaaggagaaggaggugcucguccuguggggcgugcaccacccgcccuccaucgccgaccagaagacccuguaccacacggagaacgccuacgugagcgucgugagcucccacuacagccggaaguucacccccgagaucgcgaagcgccccaaggugcgggaccaggagggccgcauccacuacuacuggacccuccuggagcccggcgacaccaucaucuucgaggccaacgggaaccugaucgccccgcgguacgccuucgcccucucccgcggcuucgggagcggcaucaucaacuccaacgcgcccauggacaagugcgacgccacgugccagacgccccagggcgccaucaacagcucccugcccuuccagaacguccacccggugaccaucggggagugccccaaguacgugcggagcgccaagcugcgcauggucaccggccuccggaacauccccuccauccagagccgcgggcuguucggcgccaucgcgggguucaucgagggcggcuggaccgggaugguggacggcugguacggguaccaccaccagaacgagcagggcuccggguacgccgccgaccagaaguccacccagaacgccaucaacggcaucaccaacaaggugaacagcgucaucgagaagaugaacacccaguucacggccgugggcaaggaguucaacaagcuggagcggcgcauggagaaccucaacaagaaggucgacgacggguucaucgacaucuggaccuacaacgcggagcugcuggugcuccuggagaacgagcggacccuggacuuccacgacagcaacgugaagaaccucuacgagaaggucaucucccagcugaagaucaacgccaaggaccugggcuacgggugcuucgaguucuaccacaagugcaacgacgagugcauggagagcgugaagaacggcaccuacgacuaccccaaguacuccgaggagagcaagcucaaccgcgagaagaucgacggggugaagcuggaguccaugggcgucuaccagauccuggccaucuacagcacgguggccagcucccucgugcugcuggucagccucggcgccaucuccuucuggaugugcagcaacgggucccugcagugccggaucugcaucuga

SEQ ID NO: 67975 - RNA, 1698 nt, Artificial Sequence
  derived and/or modified CDS sequence (opt1) from hemagglutinin__InfluenzaA__ADA71168
augaaggugaagcugcucguccugcugugcaccuucaccgccacguacgccgacaccaucugcaucggcuaccacgcgaacaacagcaccgacaccguggacacggugcucgagaagaacgucaccgugacccacuccgugaaccugcuggaggacaaccacaacgggaagcucugccugcugaagggcaaggcgccccuccagcuggggaacugcagcgucgccggcuggauccuggggaacccggagugcggccuccugaucuccaaggagagcugguccuacaucguggagcgccccaaccccgagaacgggaccugcuaccccgggcacuucgccgacuacgaggagcugcgggagcagcucagcuccgugagcuccuucgagcgcuucgagaucuucccgaaggagagcuccuggcccaaccacacggucaccggcgugagcgccuccugcagccacaacggggaguccagcuucuacaagaaccugcuguggcucaccggcaagaacgggcuguaccccaaccuguccaagagcuacgccaacaacaaggagaaggaggugcucguccuguggggcgugcaccacccgcccaacaucggcgugcagaugacccuguaccacaaggagaacgccuacgucuccguggugagcagccacuacucccggaaguucacgcccgagaucgucaagcgccccaaggugcgggaccaggaggggcgcaucaacuacuacuggacccuccuggagcccggcgacaccaucaucuucgaggccaacgggaaccugaucgccccgcgguacgcguucgcccucagccgcggcuucggcuccgggaucaucaacagcaacgcccccauggacgagugcgacgccaagugccagacgccccagggcgccaucaacuccagccugcccuuccagaacgugcacccggucaccaucggggagugccccaaguacgugcgguccgcgaagcugcgcauggugaccggccuccggaacauccccagcauccagucccgcgggcuguucggcgccaucgccggcuucaucgagggcggcuggaccgggauggucgacggcugguacggguaccaccaccagaacgagcagggcagcggcuacgccgccgaccagaaguccacccagaacgcgaucaacgggaucacgaacaaggugaacagcgucaucgagaagaugaacacccaguucaccgccgugggcaaggaguucaacaagcuggagcggcgcauggagaaccucaacaagaagguggacgacggguucaucgacaucuggaccuacaacgccgagcugcugguccuccuggagaacgagcggacgcuggacuuccacgacuccaacgugaagaaccucuacgagaaggucaagagccagcugaagaacaacgccaaggagaucggcaacgggugcuucgaguucuaccacaagugcaacgacgagugcauggaguccgugaagaacggcaccuacgacuaccccaaguacagcgaggaguccaagcugaaccgcgagaagaucgacggcgugaagcucgagagcauggggguguaccagauccuggccaucuacuccaccgucgcgagcagccuggugcuccuggugucccugggcgccaucagcuucuggaugugcuccaacgggagccuccagugccggaucugcaucuga

SEQ ID NO: 67976 - RNA, 1698 nt, Artificial Sequence
  derived and/or modified CDS sequence (opt1) from hemagglutinin__InfluenzaA__ADA71170
augaaggugaagcugcucguccugcugugcaccuucaccgccacguacgccgacaccaucugcaucggcuaccacgcgaacaacagcaccgacaccguggacacggugcucgagaagaacgggaccgucacccccuccggcaaccugguggagaacagcccgaacgggaagcugugccuccugaagggcaucaccccgcugcagcucgggaagugcuccguggccggcuggauccugggcaaccccaagugggagcugcucgucagcaaggaguccuggagcuacaucgggaagaagcccaaccccgagaacggcacgugcuaccccgggcacuuccccuacuacgaggagcugcgcgagcagcuguccagcguguccagcuucgagcgguucgagaucuuccccaaggaguccagcuggccgaaccacaccgugaccggcgccuccgccagcugcucccacaacggggagaacagcuucuaccgcaaccuccuguggcugaccggcaagaacggccucuaccccaaccuguccaagagcuacgccaacaacaaggagaaggagguccuggugcucuggggcgugcaccacccgcccaacaucgcggaccagaagacgcuguaccacaccgagaacgccuacgucuccguggugagcagccacuacucccggaaguucacccccgagaucgccaagcgccccaagguccgggaccaggaggggcgcaucaacuacuacuggacccugcucgagcccggggacacgaucaucuucgaggccaacggcaaccugaucgcgccccgguacgccuucgcccugagccgcggcuucggguccggcaucaucaacagcaacgccccgauggacaagugcgacgccaagugccagacgccccagggggcgaucaacuccagccuccccuuccagaacgugcaccccgugaccaucggcgagugcccgaaguacguccgguccgccaagcugcgcauggugaccgggcugcggaacauccccagcauccagucccgcggccucuucggcgccaucgccggguucaucgagggcggguggaccggcaugguggacgggugguacggcuaccaccaccagaacgagcagggcagcggguacgccgcggaccagaaguccacccagaacgccaucaacggcaucaccaacaaggucaacagcgugaucgagaagaugaacacccaguucacggccguggggaaggaguucaacaagcuggagcggcgcauggagaaccugaacaagaaggucgacgacggcuucaucgacaucuggaccuacaacgccgagcuccuggugcugcucgagaacgagcggacccuggacuuccacgacuccaacgucaagaaccuguacgagaaggucaagagccagcucaagaacaacgccaaggagaucgggaacggcugcuucgaguucuaccacaagugcaacgacgagugcauggaguccgugaagaacggcaccuacgacuaccccaaguacagcgaggaguccaagcugaaccgcgagaagaucgacggggugaagcuggagagcaugggcguguaccagauccucgcgaucuacuccacgguggccagcagccugguccugcucgugucccugggggccaucagcuucuggaugugcuccaacggcagccugcagugccggaucugcaucuga

SEQ ID NO: 67977 - RNA, 1701 nt, Artificial Sequence
  derived and/or modified CDS sequence (opt1) from hemagglutinin__InfluenzaA__ADA71172
augaagaccaucaucgcccugagcuacauccucugccugguguucacccagaagcugcccggcaacgacaacuccacggccacccucugccuggggcaccacgcggucccgaacggcaccaucgugaagaccaucacgaacgaccagaucgaggugaccaacgccaccgagcugguccagagcuccagcaccggggagaucugcgacagcccccaccagauccucgacggcgagaacugcacgcugaucgacgcccugcucggggacccccagugcgacggcuuccagaacaagaagugggaccuguucguggagcgcagcaaggccuacuccaacugcuaccccuacgacgugccggacuacgccagccugcggucccucgucgcgagcuccggcacccuggaguucaacaacgagagcuucaacuggaccggggugacccagaacggcacguccagcgccugcauccgccgguccaacaacagcuucuucucccgccugaacuggcucacccaccugaaguucaaguaccccgcccugaacgugaccaugcccaacaacgagcaguucgacaagcucuacaucuggggcguccaccaccccgggaccgacaacgaccagaucuuccuguacgcccaggcgagcgggcggaucacgguguccaccaagcgcagccagcagaccgugaucccgaacaucggcagccggccccgcguccggaacauccccucccgcaucagcaucuacuggaccaucgugaagcccggcgacauccugcucaucaacuccacggggaaccugaucgccccgcggggcuacuucaagauccgcagcgggaaguccagcaucaugcgguccgacgcccccaucggcaagugcaacagcgagugcaucacccccaacggcuccauccccaacgacaagccguuccagaacgugaaccgcaucaccuacggggccugcccccgguacgucaagcagaacacccugaagcucgccacgggcaugcgcaacgugcccgagaagcagacccgggggaucuucggcgcgaucgccggguucaucgagaacggcugggagggcaugguggacgggugguacggcuuccgccaccagaacagcgaggggcggggccaggccgccgaccugaaguccacccaggccgcgaucgaccagaucaacgggaagcugaaccgccucaucggcaagaccaacgagaaguuccaccagaucgagaaggaguucagcgaggucgagggccggauccaggaccuggagaaguacguggaggacacgaagaucgaccugugguccuacaacgccgagcuccugguggcccuggagaaccagcacaccaucgaccucaccgacagcgagaugaacaagcuguucgagaagaccaagaagcagcugcgcgagaacgccgaggacauggggaacggcugcuucaagaucuaccacaagugcgacaacgccugcaucggguccauccgcaacggcacguacgaccacgacgucuaccgggacgaggcgcucaacaaccgcuuccagaucaaggggguggagcugaaguccggcuacaaggacuggauccuguggaucuccuucgccaucagcugcuuccuccugugcguggcccugcucggcuucaucaugugggccugccagaaggggaacauccggugcaacaucugcaucuga

SEQ ID NO: 67978 - RNA, 1698 nt, Artificial Sequence
  derived and/or modified CDS sequence (opt1) from hemagglutinin__InfluenzaA__ADA71176
augaaggugaagcugcucguccugcugugcaccuucaccgccacguacgccgacaccaucugcaucggcuaccacgcgaacaacagcaccgacaccguggacacggugcucgagaagaacgucaccgugacccacuccgugaaccugcuggagaacagccacaacgggaagcucugccugcugaagggcaucgcgccccuccagcuggggaacugcuccgucgccggcuggauccuggggaacccggagugcgagcuccugaucagcaaggaguccuggagcuacaucguggagaagcccaaccccgagaacgggaccugcuaccccggccacuucgccgacuacgaggagcugcgcgagcagcucuccagcguguccagcuucgagcgguucgagaucuucccgaaggaguccagcuggcccaaccacacggucaccggggccuccgccagcugcucccacaacggcgagaacagcuucuaccgcaaccugcuguggcucaccgggaagaacggccuguaccccaaccuguccaagagcuacgccaacaacaaggagaaggaggugcucgugcuguggggcguccaccacccgcccaacaucgccaaccagaagacccuguaccacacggagaacgccuacguguccguggucagcagccacuacucccggaaguucacccccgagaucgcgaagcgccccaaggugcgggaccaggagggccgcaucaacuacuacuggacccuccuggagcccggcgacaccaucaucuucgaggccaacgggaaccugaucgccccgcgguacgccuucgcccucagccgcggcuucggguccggcaucaucaacagcaacgcgcccauggacaagugcgacgccacgugccagacgccccagggcgccaucaacuccagccugcccuuccagaacgugcacccggucaccaucggggagugccccaaguacgugcgguccgccaagcugcgcauggugaccggccuccggaacauccccagcauccagucccgcgggcuguucggcgccaucgcgggguucaucgagggcggcuggaccgggauggucgacggcugguacggguaccaccaccagaacgagcagggcagcggguacgccgccgaccagaaguccacccagaacgccaucaacggcaucaccaacaaggugaacagcgugaucgagaagaugaacacccaguucacggccgucggcaaggaguucaacaagcuggagcggcgcauggagaaccucaacaagaagguggacgacggguucaucgacaucuggaccuacaacgcggagcugcugguccuccuggagaacgagcggacccuggacuuccacgacuccaacgugaagaaccucuacgagaaggucaagagccagcugaagaacaacgccaaggagaucggcaacgggugcuucgaguucuaccacaagugcaacgacgagugcauggaguccgugaagaacggcaccuacgacuaccccaaguacagcgaggaguccaagcugaaccgcgagaagaucgacggggugaagcucgagagcaugggcguguaccagauccuggccaucuacuccacggucgccagcagccuggugcuccuggugucccugggcgccaucagcuucuggaugugcuccaacgggagccuccagugccggaucugcaucuga

SEQ ID NO: 67979 - RNA, 1701 nt, Artificial Sequence; identical to SEQ ID NO: 67794
  derived and/or modified CDS sequence (opt1) from hemagglutinin__InfluenzaA__ADA71181

SEQ ID NO: 67980 - RNA, 1701 nt, Artificial Sequence; identical to SEQ ID NO: 67794
  derived and/or modified CDS sequence (opt1) from hemagglutinin__InfluenzaA__ADA71191

SEQ ID NO: 67981 - RNA, 1701 nt, Artificial Sequence
  derived and/or modified CDS sequence (opt1) from hemagglutinin__InfluenzaA__ADA79587
augaaggccauccuggugguccuccuguacaccuucgccaccgcgaacgccgacacgcugugcaucggcuaccacgccaacaacagcaccgacaccguggacaccgugcucgagaagaacgucacggugacccacuccgugaaccugcuggaggacaagcacaacgggaagcucugcaagcugcgcggcgucgcgccccugcaccucgggaagugcaacaucgccggcuggauccuggggaacccggagugcgagagccuguccaccgcgaacagcugguccuacaucguggagaccagcuccagcgacaacggcacgugcuaccccggcgacuucaucgacuacgaggagcuccgggagcagcuguccagcguguccagcuucgagcgcuucgagaucuuccccaagaccuccagcuggcccaaccacgacuccaacaagggggucaccgccgccugcccgcacgccggcgccaagagcuucuacaagaaccugaucuggcucgugaagaaggggaacuccuaccccaagcugagcaaguccuacaucaacgacaagggcaaggaggugcugguccucugggggauccaccaccccagcaccagcgccgaccagcagucccuguaccagaacgccgacgccuacguguucgugggcacgagccgguacuccaagaaguucaagcccgagaucgccauccgcccgaagguccgggaccaggagggccgcaugaacuacuacuggacccugguggagcccggggacaagaucaccuucgaggcgaccggcaaccucguggucccccgguacgccuucgccauggagcgcaacgccgggagcggcaucaucaucuccgacacgcccgugcacgacugcaacacgaccugccagaccccgaagggcgccaucaacaccagccugcccuuccagaacauccaccccaucaccaucgggaagugccccaaguacgugaaguccaccaagcugcggcucgcgaccggccugcgcaacaucccgagcauccagucccgggggcuguucggcgccaucgccggguucaucgagggcggcuggacggggauggucgacggcugguacggguaccaccaccagaacgagcagggcagcggguacgccgccgaccucaaguccacccagaacgcgaucgacgagaucaccaacaaggugaacagcgugaucgagaagaugaacacccaguucacggccgucggcaaggaguucaaccaccuggagaagcgcaucgagaaccugaacaagaagguggacgacggcuuccucgacaucuggaccuacaacgccgagcugcugguccuccuggagaacgagcggacccuggacuaccacgacuccaacgugaagaaccucuacgagaaggugcgcagccagcugaagaacaacgccaaggagaucgggaacggcugcuucgaguucuaccacaagugcgacaacacgugcauggaguccgucaagaacgggaccuacgacuaccccaaguacagcgaggaggccaagcugaaccgggaggagaucgacggcgugaagcucgaguccacccgcaucuaccagauccuggcgaucuacagcaccguggccuccagccugguccucguggugagccugggggccaucuccuucuggaugugcagcaacggcucccugcagugccggaucugcaucuga

SEQ ID NO: 67982 - RNA, 1701 nt, Artificial Sequence
  derived and/or modified CDS sequence (opt1) from hemagglutinin__InfluenzaA__ADA79607
augaaggccauccuggugguccuccuguacaccuucgccaccgcgaacgccgacacgcugugcaucggcuaccacgccaacaacagcaccgacaccguggacaccgugcucgagaagaacgucacggugacccacuccgugaaccugcuggaggacaagcacaacgggaagcucugcaagcugcgcggcgucgcgccccugcaccucgggaagugcaacaucgccggcuggauccuggggaacccggagugcgagagccuguccaccgccagcuccuggagcuacaucguggagaccuccagcuccgacaacggcacgugcuaccccggcgacuucaucgacuacgaggagcuccgggagcagcugagcuccgugagcuccuucgagcgcuucgagaucuuccccaagaccagcuccuggcccaaccacgacagcaacaagggggucaccgccgccugcccgcacgccggcgcgaagggguucuacaagaaccugaucuggcucgugaagaagggcaacuccuaccccaagcugagcaaguccuacaucaacgacaaggggaaggaggugcugguccucuggggcauccaccaccccagcaccagcgccgaccagcagucccuguaccagaacgccgacgccuacguguucgugggcacgagccgguacuccaagaaguucaagcccgagaucgccauccgcccgaagguccgggaccaggaggggcgcaugaacuacuacuggacccugguggagcccggcgacaagaucaccuucgaggcgaccgggaaccucguggucccccgguacgccuucgccauggagcgcaacgccggcagcggcaucaucaucuccgacacgcccgugcacgacugcaacacgaccugccagaccccgaagggggccaucaacaccagccugcccuuccagaacauccaccccaucaccaucggcaagugccccaaguacgugaaguccaccaagcugcggcucgcgaccgggcugcgcaacgucccgagcauccagucccggggccuguucggggccaucgccggcuucaucgagggcggguggacgggcaugguggacgggugguacggcuaccaccaccagaacgagcaggggagcggcuacgccgccgaccucaaguccacccagaacgcgaucgacgagaucaccaacaaggugaacagcgucaucgagaagaugaacacccaguucacggccgugggcaaggaguucaaccaccuggagaagcgcaucgagaaccugaacaagaaggucgacgacggguuccucgacaucuggaccuacaacgccgagcugcuggugcuccuggagaacgagcggacccuggacuaccacgacuccaacgugaagaaccucuacgagaagguccgcagccagcugaagaacaacgccaaggagaucggcaacgggugcuucgaguucuaccacaagugcgacaacacgugcauggaguccgugaagaacggcaccuacgacuaccccaaguacagcgaggaggccaagcugaaccgggaggagaucgacggggugaagcucgaguccacccgcaucuaccagauccuggcgaucuacagcaccgucgccuccagccuggugcucguggucagccugggcgccaucuccuucuggaugugcagcaacggcucccugcagugccggaucugcaucuga

SEQ ID NO: 67983 - RNA, 1701 nt, Artificial Sequence
  derived and/or modified CDS sequence (opt1) from hemagglutinin__InfluenzaA__ADA83043
augaaggccauccuggugguccuccuguacaccuucgccaccgcgaacgccgacacgcugugcaucggcuaccacgccaacaacagcaccgacaccguggacaccgugcucgagaagaacgucacggugacccacuccgugaaccugcuggaggacaagcacaacgggaagcucugcaagcugcgcggcgucgcgccccugcaccucgggaagugcaacaucgccggcuggauccuggggaacccggagugcgagagccuguccaccgccagcuccuggagcuacaucguggagaccuccagcuccgacaacggcacgugcuaccccggcgacuucaucgacuacgaggagcuccgggagcagcugagcuccgugagcuccuucgagcgcuucgagaucuuccccaagaccagcuccuggcccaaccacgacagcaacaagggggucaccgccgccugcccgcacgccggcgcgaaguccuucuacaagaaccugaucuggcucgugaagaaggggaacagcuaccccaagcuguccaagagcuacaucaacgacaagggcaaggaggugcugguccucugggggauccaccaccccagcaccuccgccgaccagcagagccuguaccagaacgccgacgccuacguguucgugggcacgucccgguacagcaagaaguucaagcccgagaucgccauccgcccgaagguccgggagcgcgagggccggaugaacuacuacuggacccugguggagcccggggacaagaucaccuucgaggcgaccggcaaccucguggucccccgcuacgccuucgccauggagcggaacgccggguccggcaucaucaucagcgacacgcccgugcacgacugcaacacgaccugccagaccccgaagggcgccaucaacaccucccugcccuuccagaacauccaccccaucaccaucgggaagugccccaaguacgucaagagcaccaagcugcgccucgcgaccggccugcggaacgugccguccauccagagccgcgggcuguucggcgccaucgccggguucaucgagggcggcuggacggggaugguggacggcugguacggguaccaccaccagaacgagcagggcuccggguacgccgccgaccucaagagcacccagaacgcgaucgacgagaucaccaacaaggugaacuccgucaucgagaagaugaacacccaguucacggccgugggcaaggaguucaaccaccuggagaagcggaucgagaaccugaacaagaaggucgacgacggcuuccucgacaucuggaccuacaacgccgagcugcuggugcuccuggagaacgagcgcacccuggacuaccacgacagcaacgugaagaaccucuacgagaagguccggucccagcugaagaacaacgccaaggagaucgggaacggcugcuucgaguucuaccacaagugcgacaacacgugcauggagagcgugaagaacgggaccuacgacuaccccaaguacuccgaggaggccaagcugaaccgcgaggagaucgacggcgugaagcucgagagcacccggaucuaccagauccuggcgaucuacuccaccgucgccagcagccuggugcucguggucucccugggggccaucagcuucuggaugugcuccaacggcagccugcagugccgcaucugcaucuga

SEQ ID NO: 67984 - RNA, 1701 nt, Artificial Sequence
  derived and/or modified CDS sequence (opt1) from hemagglutinin__InfluenzaA__ADA83044
augaaggccauccuggugguccuccuguacaccuucgccaccgcgaacgccgacacgcugugcaucggcuaccacgccaacaacagcaccgacaccguggacaccgugcucgagaagaacgucacggugacccacuccgugaaccugcuggaggacaagcacaacgggaagcucugcaagcugcgcggcgucgcgccccugcaccucgggaagugcaacaucgccggcuggauccuggggaacccggagugcgagagccuguccaccgccagcuccuggagcuacaucguggagaccuccagcuccaacaacggcacgugcuaccccggcgacuucaucgacuacgaggagcuccgggagcagcugagcuccgugagcuccuucgagcgcuucgagaucuuccccaagaccagcuccuggcccaaccacgacagcaacaagggggucaccgccgccugcccgcacgccggcgcgaaguccuucuacaagaaccugaucuggcucgugaagaaggagaacagcuaccccaagcugaacaaguccuacaucaacgacaaggggaaggaggugcugguccucuggggcauccaccaccccagcaccagcgccgaccagcagucccuguaccagaacgccgacgccuacguguucguggggacgagccgguacuccaagaaguucaagcccgagaucgccauccgcccgaagguccggggccaggagggccgcaugaacuacuacuggacccugguggagcccggggacaagaucaccuucgaggcgaccggcaaccucguggucccccgguacgccuucgccauggagcgcaacgccgggagcggcaucaucaucuccgacacgcccgugcacgacugcaacacgaccugccagaccccgaagggcgccaucaacaccagccugcccuuccagaacauccaccccaucaccaucgggaagugccccaaguacgugaaguccaccaagcugcggcucgcgaccggccugcgcaacgucccgagcauccagucccgggggcuguucggcgccaucgccggguucaucgagggcggcuggacggggaugguggacggcugguacggguaccaccaccagaacgagcagggcagcggguacgccgccgaccucaaguccacccagaacgcgaucgacgagaucaccaacaaggugaacagcgucaucgagaagaugaacacccaguucacggccgugggcaaggaguucaaccaccuggagaagcgcaucgagaaccugaacaagaaggucgacgacggcuuccucgacaucuggaccuacaacgccgagcugcuggugcuccuggagaacgagcggacccuggacuaccacgacuccgacgugaagaaccucuacgagaagguccgcagccagcugaagaacaacgccaaggagaucgggaacggcugcuucgaguucuaccacaagugcgacaacacgugcauggaguccgugaagaacgggaccuacgacuaccccaaguacagcgaggaggccaagcugaaccgggaggagaucgacggcgugaagcucgaguccacccgcaucuaccagauccuggcgaucuacagcaccgucgccuccagccuggugcucguggucagccugggggccaucuccuucuggaugugcagcaacggcucccugcagugccggaucugcaucuga

SEQ ID NO: 67985 - RNA, 1701 nt, Artificial Sequence; identical to SEQ ID NO: 66693
  derived and/or modified CDS sequence (opt1) from hemagglutinin__InfluenzaA__ADA83580

SEQ ID NO: 67986 - RNA, 1701 nt, Artificial Sequence; identical to SEQ ID NO: 66693
  derived and/or modified CDS sequence (opt1) from hemagglutinin__InfluenzaA__ADA83587

SEQ ID NO: 67987 - RNA, 1701 nt, Artificial Sequence
  derived and/or modified CDS sequence (opt1) from hemagglutinin__InfluenzaA__ADA83591
augaaggccauccuggugguccuccuguacaccuucgccaccgcgaacgccgacacgcugugcaucggcuaccacgccaacaacagcaccgacaccguggacaccgugcucgagaagaacgucacggugacccacuccgugaaccugcuggaggacaagcacaacgggaagcucugcaagcugcgcggcgucgcgccccugcaccucgggaagugcaacaucgccggcuggauccuggggaacccggagugcgagagccuguccaccgccagcuccuggagcuacaucguggagaccuccagcuccgacaacggcacgugcuaccccggcgacuucaucgacuacgaggagcuccgggagcagcugagcuccgugagcuccuucgagcgcuucgagaucuuccccaagaccagcuccuggcccaaccacgacagcaacaagggggucaccgccgccugcccgcacgccggcgcgaaguccuucuacaagaaccugaucuggcucgugaagaaggggaacagcuaccccaagcuguccaagagcuacaucaacgacaagggcaaggaggugcugguccucugggggauccaccaccccagcaccuccgccgaccagcagagccuguaccagaacgccgacgccuacguguucgugggcacgucccgguacagcaagaaguucaagcccgagaucuccauccgcccgaagguccgggaccaggagggccgcaugaacuacuacuggacccugguggagcccggggacaagaucaccuucgaggccaccggcaaccucguggucccccgguacgcguucgccauggagcgcaacgccgggagcggcaucaucaucuccgacacgcccgugcacgacugcaacacgaccugccagaccccgaagggcgccaucaacaccagccugcccuuccagaacauccaccccaucaccaucgggaagugccccaaguacgugaaguccaccaagcugcggcucgccaccggccugcgcaacgucccgagcauccagucccgggggcuguucggcgcgaucgccggguucaucgagggcggcuggacggggaugguggacggcugguacggguaccaccaccagaacgagcagggcagcggguacgccgccgaccucaaguccacccagaacgccaucgacgagaucaccaacaaggugaacagcgucaucgagaagaugaacacccaguucacggcggugggcaaggaguucaaccaccuggagaagcgcaucgagaaccugaacaagaaggucgacgacggcuuccucgacaucuggaccuacaacgccgagcugcuggugcuccuggagaacgagcggacccuggacuaccacgacuccaacgugaagaaccucuacgagaagguccgcagccagcugaagaacaacgccaaggagaucgggaacggcugcuucgaguucuaccacaagugcgacaacacgugcauggaguccgugaagaacgggaccuacgacuaccccaaguacagcgaggaggccaagcugaaccgggaggagaucgacggcgugaagcucgaguccacccgcaucuaccagauccuggccaucuacagcaccgucgcgagcucccuggugcucguggucagccugggggccaucuccuucuggaugugcagcaacggcucccugcagugccggaucugcaucuga

SEQ ID NO: 67988 - RNA, 1701 nt, Artificial Sequence; identical to SEQ ID NO: 67438
  derived and/or modified CDS sequence (opt1) from hemagglutinin__InfluenzaA__ADA83595

SEQ ID NO: 67989 - RNA, 1701 nt, Artificial Sequence; identical to SEQ ID NO: 66693
  derived and/or modified CDS sequence (opt1) from hemagglutinin__InfluenzaA__ADA83599

SEQ ID NO: 67990 - RNA, 1701 nt, Artificial Sequence; identical to SEQ ID NO: 66693
  derived and/or modified CDS sequence (opt1) from hemagglutinin__InfluenzaA__ADA83603

SEQ ID NO: 67991 - RNA, 1701 nt, Artificial Sequence; identical to SEQ ID NO: 66693
  derived and/or modified CDS sequence (opt1) from hemagglutinin__InfluenzaA__ADA83611

SEQ ID NO: 67992 - RNA, 1701 nt, Artificial Sequence
  derived and/or modified CDS sequence (opt1) from hemagglutinin__InfluenzaA__ADA83615
augaaggccauccuggugguccuccuguacaccuucgccaccgcgaacgccgacacgcugugcaucggcuaccacgccaacaacagcaccgacaccguggacaccgugcucgagaagaacgucacggugacccacuccgugaaccugcuggaggacaagcacaacgggaagcucugcaagcugcgcggcgucgcgccccugcaccucgggaagugcaacaucgccggcuggauccuggggaacccggagugcgagagccuguccaccgccagcuccuggagcuacaucguggagaccuccagcuccgacaacggcacgugcuaccccggcgacuucaucgacuacgaggagcuccgggagcagcugagcuccgugagcuccuucgagcgcuucgagaucuuccccaagaccagcuccuggcccaaccacgacagcaacaagggggucaccgccgccugcccgcacgccggcgcgaaguccuucuacaagaaccugaucuggcucgugaagaaggggaacagcuaccccaagcuguccaagagcuacaucaacgacaagggcaaggaggugcugguccucugggggauccaccaccccagcaccuccgccgaccagcagagccuguaccagaacgccgacgccuacguguucgugggcacgucccgguacagcaagaaguucaagcccgagaucgccauccgcccgaagguccgggaccaggagggccgcaugaacuacuacuggacccugguggagcccggggacaagaucaccuucgaggcgaccggcaaccucguggucccccgguacgccuucgccauggagcgcaacgccggguccggcaucaucaucagcgacacgcccgugcacgacugcaacacgaccugccagaccccgaagggcgccaucaacaccucccugcccuuccagaacauccaccccaucaccaucgggaagugccccaaguacgucaagagcaccaagcugcggcucgcgaccggccugcgcaacgugccguccauccagagccgggggcuguucggcgccaucgccggguucaucgagggcggcuggacggggaugguggacggcugguacggguaccaccaccagaacgagcagggcuccggguacgccgccgaccucaagagcacccagaacgcgaucgacgagaucaccaacaaggugaacuccgucaucgagaagaugaacacccaguucacggccgugggcaaggaguucaaccaccuggagaagcgcaucgagaaccugaacaagaaggucgacgacggcuuccucgacaucuggaccuacaacgccgagcugcuggugcuccuggagaacgagcggacccuggacuaccacgaccucaacgugaagaaccuguacgagaagguccgcagccagcugaagaacaacgccaaggagaucgggaacggcugcuucgaguucuaccacaagugcgacaacacgugcauggaguccgugaagaacgggaccuacgacuaccccaaguacagcgaggaggccaagcucaaccgggaggagaucgacggcgugaagcuggaguccacccgcaucuaccagauccuggcgaucuacagcaccgucgccuccagccucgugcugguggucagccugggggccaucuccuucuggaugugcagcaacggcucccuccagugccggaucugcaucuga

SEQ ID NO: 67993 - RNA, 1701 nt, Artificial Sequence
  derived and/or modified CDS sequence (opt1) from hemagglutinin__InfluenzaA__ADA83622
augaaggccauccuggugguccuccuguacaccuucgccaccgcgaacgccgacacgcugugcaucggcuaccacgccaacaacagcaccgacaccguggacaccgugcucgagaagaacgucacggugacccacuccgugaaccugcuggaggacaagcacaacgggaagcucugcaagcugcgcggcgucgcgccccugcaccucgggaagugcaacaucgccggcuggauccuggggaacccggagugcgagagccuguccaccgccagcuccuggagcuacaucguggagaccuccagcuccgacaacggcacgugcuaccccggcgacuucaucgacuacgaggagcuccgggagcagcugagcuccgugagcuccuucgagcgcuucgagaucuuccccaagaccagcuccuggcccaaccacgacagcaacaagggggucaccgccgccugcccgcacgccggcgcgaaguccuucuacaagaaccugaucuggcucgugaagaaggggaacagcuaccccaagcuguccaagagcuacaucaacgacaagggcaaggaggugcugguccucugggggauccaccaccccagcaccuccgccgaccagcagcggcuguaccagaacgccgacgccuacguguucgugggcacgagccgcuacuccaagaagcugaagcccgagaucgccauccggccgaagguccgcgaccaggagggccggaugaacuacuacuggacccucguggagcccggggacaagaucaccuucgaggcgaccggcaaccugguggucccccgcuacgccuucgccauggagcggaacgccgggagcggcaucaucaucuccgacacgcccgugcacgacugcaacacgaccugccagaccccgaagggcgccaucaacaccagccugcccuuccagaacauccaccccaucaccaucgggaagugccccaaguacgugaaguccaccaagcuccgccuggcgaccggccugcggaacgucccgagcauccagucccgcggccucuucggggccaucgccggguucaucgagggcggcuggacggggaugguggacggcugguacggguaccaccaccagaacgagcagggcagcggguacgccgccgaccugaaguccacccagaacgcgaucgacgagaucaccaacaaggugaacagcgucaucgagaagaugaacacccaguucacggccgugggcaaggaguucaaccaccuggagaagcggaucgagaaccucaacaagaaggucgacgacggcuuccuggacaucuggaccuacaacgccgagcugcucgugcugcuggagaacgagcgcacccucgacuaccacgacuccaacgugaagaaccuguacgagaagguccggagccagcugaagaacaacgccaaggagaucgggaacggcugcuucgaguucuaccacaagugcgacaacacgugcauggaguccgugaagaacgggaccuacgacuaccccaaguacagcgaggaggccaagcucaaccgcgaggagaucgacggcgugaagcuggaguccacccggaucuaccagauccuggcgaucuacagcaccgucgccuccagccucgugcugguggucagccugggggccaucuccuucuggaugugcagcaacggcucccuccagugccgcaucugcaucuga

SEQ ID NO: 67994 - RNA, 1701 nt, Artificial Sequence; identical to SEQ ID NO: 66693
  derived and/or modified CDS sequence (opt1) from hemagglutinin__InfluenzaA__ADA83633

SEQ ID NO: 67995 - RNA, 1701 nt, Artificial Sequence; identical to SEQ ID NO: 66693
  derived and/or modified CDS sequence (opt1) from hemagglutinin__InfluenzaA__ADA83637

SEQ ID NO: 67996 - RNA, 1701 nt, Artificial Sequence; identical to SEQ ID NO: 66693
  derived and/or modified CDS sequence (opt1) from hemagglutinin__InfluenzaA__ADA83641

SEQ ID NO: 67997 - RNA, 1701 nt, Artificial Sequence; identical to SEQ ID NO: 66693
  derived and/or modified CDS sequence (opt1) from hemagglutinin__InfluenzaA__ADA83645

SEQ ID NO: 67998 - RNA, 1701 nt, Artificial Sequence; identical to SEQ ID NO: 66693
  derived and/or modified CDS sequence (opt1) from hemagglutinin__InfluenzaA__ADA83648

SEQ ID NO: 67999 - RNA, 1701 nt, Artificial Sequence; identical to SEQ ID NO: 66693
  derived and/or modified CDS sequence (opt1) from hemagglutinin__InfluenzaA__ADA83656

SEQ ID NO: 68000 - RNA, 1701 nt, Artificial Sequence; identical to SEQ ID NO: 66693
  derived and/or modified CDS sequence (opt1) from hemagglutinin__InfluenzaA__ADA83660

SEQ ID NO: 68001 - RNA, 1701 nt, Artificial Sequence
  derived and/or modified CDS sequence (opt1) from hemagglutinin__InfluenzaA__ADA83664
augaaggccauccuggugguccuccuguacaccuucgccaccgcgaacgccgacacgcugugcaucggcuaccacgccaacaacagcaccgacaccguggacaccgugcucgagaagaacgucacggugacccacuccgugaaccugcuggaggacaagcacaacgggaagcucugcaagcugcgcggcgucgcgccccugcaccucgggaagugcaacaucgccggcuggauccuggggaacccggagugcgagagccuguccaccgccagcuccuggagcuacaucguggagaccuccagcuccgacaacggcacgugcuaccccggcgacuucaucgacuacgaggagcuccgggagcagcugagcuccgugagcuccuucgagcgcuucgagaucuuccccaagaccagcuccuggcccaaccacgacagcaacaagggggucaccgccgccugcccgcacgccggcgcgaaguccuucuacaagaaccugaucuggcucgugaagaaggggaacagcuaccccaagcuguccaagagcuacaucaacgacaagggcaaggaggugcugguccucugggggauccaccaccccagcaccuccgccgaccagcagagccuguaccagaacgccgacgccuacguguucgugggcacgucccgguacagcaagaaguucaagcccgagaccgccauccgcccgaagguccgggaccaggagggccgcaugaacuacuacuggacccugguggagcccggggacaagaucaccuucgaggcgacgggcaaccucguggucccccgguacgccuucgccauggagcgcaacgccggguccggcaucaucaucagcgacacccccgugcacgacugcaacacgaccugccagaccccgaagggcgccaucaacaccucccugcccuuccagaacauccaccccaucaccaucgggaagugccccaaguacgucaagagcaccaagcugcggcucgcgacgggccugcgcaacgugccguccauccagagccgggggcuguucggcgccaucgccggguucaucgagggcggcuggaccgggaugguggacggcugguacggguaccaccaccagaacgagcagggcuccggguacgccgccgaccucaagagcacccagaacgcgaucgacgagaucaccaacaaggugaacuccgucaucgagaagaugaacacgcaguucaccgccgugggcaaggaguucaaccaccuggagaagcgcaucgagaaccugaacaagaaggucgacgacggcuuccucgacaucuggaccuacaacgccgagcugcuggugcuccuggagaacgagcggacccuggacuaccacgacagcaacgugaagaaccucuacgagaagguccgcucccagcugaagaacaacgccaaggagaucgggaacggcugcuucgaguucuaccacaagugcgacaacacgugcauggagagcgugaagaacgggaccuacgacuaccccaaguacuccgaggaggccaagcugaaccgggaggagaucgacggcgugaagcucgagagcacccgcaucuaccagauccuggcgaucuacuccaccgucgccagcagccuggugcucguggucucccugggggccaucagcuucuggaugugcuccaacggcagccugcagugccggaucugcaucuga

SEQ ID NO: 68002 - RNA, 1701 nt, Artificial Sequence
  derived and/or modified CDS sequence (opt1) from hemagglutinin__InfluenzaA__ADA83668
augaaggccauccuggugguccuccuguacaccuucgccaccgcgaacgccgacacgcugugcaucggcuaccacgccaacaacagcaccgacaccguggacaccgugcucgagaagaacgucacggugacccacuccgugaaccugcuggaggacaagcacaacgggaagcucugcaagcugcgcggcgucgcgccccugcaccucgggaagugcaacaucgccggcuggauccuggggaacccggagugcggcagccuguccaccgccagcuccuggagcuacaucguggagaccuccagcuccgacaacggcacgugcuaccccggggacuucaucgacuacgaggagcuccgggagcagcugagcuccgugagcuccuucgagcgcuucgagaucuuccccaagaccagcuccuggcccaaccacgacagcaacaagggcgucaccgccgccugcccgcacgccggggcgaaguccuucuacaagaaccugaucuggcucgugaagaagggcaacagcuaccccaagcuguccaagagcuacaucaacgacaaggggaaggaggugcugguccucuggggcauccaccaccccagcaccuccgccgaccagcagagccuguaccagaacgccgacgccuacguguucgugggcacgucccgguacagcaagaaguucaagcccgagaucgccauccgcccgaagguccgggaccaggaggggcgcaugaacuacuacuggacccugguggagcccggcgacaagaucaccuucgaggcgaccgggaaccucguggucccccgguacgccuucgccauggagcgcaacgccggcuccggcaucaucaucagcgacacgcccgugcacgacugcaacacgaccugccagaccccgaagggggccaucaacaccucccugcccuuccagaacauccaccccaucaccaucggcaagugccccaaguacgucaagagcaccaagcugcggcucgcgaccgggcugcgcaacgugccguccauccagagccggggccuguucggggccaucgccggcuucaucgagggcggguggacgggcaugguggacgggugguacggcuaccaccaccagaacgagcagggguccggcuacgccgccgaccucaagagcacccagaacgcgaucgacgagaucaccaacaaggugaacuccgucaucgagaagaugaacacccaguucacggccgugggcaaggaguucaaccaccuggagaagcgcaucgagaaccugaacaagaaggucgacgacggguuccucgacaucuggaccuacaacgccgagcugcuggugcuccuggagaacgagcggacccuggacuaccacgacagcaacgugaagaaccucuacgagaagguccgcucccagcugaagaacaacgccaaggagaucggcaacgggugcuucgaguucuaccacaagugcgacaacacgugcauggagagcgugaagaacggcaccuacgacuaccccaaguacuccgaggaggccaagcugaaccgggaggagaucgacggggugaagcucgagagcacccgcaucuaccagauccuggcgaucuacuccaccgucgccagcagccuggugcucguggucucccugggcgccaucagcuucuggaugugcuccaacggcagccugcagugccggaucugcaucuga

SEQ ID NO: 68003 - RNA, 1701 nt, Artificial Sequence; identical to SEQ ID NO: 66693
  derived and/or modified CDS sequence (opt1) from hemagglutinin__InfluenzaA__ADA83672

SEQ ID NO: 68004 - RNA, 1701 nt, Artificial Sequence; identical to SEQ ID NO: 66693
  derived and/or modified CDS sequence (opt1) from hemagglutinin__InfluenzaA__ADA83676

SEQ ID NO: 68005 - RNA, 1701 nt, Artificial Sequence; identical to SEQ ID NO: 66693
  derived and/or modified CDS sequence (opt1) from hemagglutinin__InfluenzaA__ADA83680

SEQ ID NO: 68006 - RNA, 1701 nt, Artificial Sequence
  derived and/or modified CDS sequence (opt1) from hemagglutinin__InfluenzaA__ADA86068
augaaggccauccuggugguccuccuguacaccuucgccaccgcgaacgccgacacgcugugcaucggcuaccacgccaacaacagcaccgacaccguggacaccgugcucgagaagaacgucacggugacccacuccguggaccugcuggaggacaagcacaacgggaagcucugcaagcugcgcggcgucgcgccccugcaccucgggaagugcaacaucgccggcuggauccuggggaacccggagugcgagagccuguccaccgccagcuccuggagcuacaucguggagaccuccagcuccgacaacggcacgugcuaccccggcgacuucaucgacuacgaggagcuccgggagcagcugagcuccgugagcuccuucgagcgcuucgagaucuuccccaagaccagcuccuggcccaaccacgacagcaacaagggggucaccgccgccugcccgcacgccggcgcgaaguccuucuacaagaaccugaucuggcucgugaagaaggggaacagcuaccccaagcuguccaagagcuacaucaacgacaagggcaaggaggugcugguccucugggggauccaccaccccagcaccuccgccgaccagcagagccuguaccagaacgccgacgccuacguguucgugggcacgucccgguacagcaagaaguucaagcccgagaucgccauccgcccgaagguccggaaccaggagggccgcaugaacuacuacuggacccugguggagcccggggacaagaucaccuucgaggcgaccggcaaccucguggucccccgguacgccuucgccauggagcgcaacgccggguccggcaucaucaucagcgacacgcccgugcacgacugcaacacgaccugccagaccccgaagggcgccaucaacaccucccugcccuuccagaacauccaccccaucaccaucgggaagugccccaaguacgucaagagcaucaagcugcggcucgcgaccggccugcgcaacgugccguccauccagagccgggggcuguucggcgccaucgccggguucaucgagggcggcuggaccgggaugguggacggcugguacggguaccaccaccagaacgagcagggcuccggguacgccgccgaccucaagagcacgcagaacgcgaucgacgagaucaccaacaaggugaacuccgucaucgagaagaugaacacccaguucaccgccgugggcaaggaguucaaccaccuggagaagcgcaucgagaaccugaacaagaaggucgacgacggcuuccucgacaucuggacguacaacgccgagcugcuggugcuccuggagaacgagcggacccuggacuaccacgacagcaacgugaagaaccucuacgagaagguccgcucccagcugaagaacaacgccaaggagaucgggaacggcugcuucgaguucuaccacaagugcgacaacacgugcauggagagcgugaagaacgggaccuacgacuaccccaaguacuccgaggaggccaagcugaaccgggaggagaucgacggcgugaagcucgagagcacccgcaucuaccagauccuggcgaucuacuccaccgucgccagcagccuggugcucguggucucccugggggccaucagcuucuggaugugcuccaacggcagccugcagugccggaucugcaucuga

SEQ ID NO: 68007 - RNA, 1701 nt, Artificial Sequence
  derived and/or modified CDS sequence (opt1) from hemagglutinin__InfluenzaA__ADA86086
augaaggccauccuggugguccuccuguacaccuucgccaccgcgaacgccgacacgcugugcaucggcuaccacgccaacaacagcaccgacaccguggacaccgugcucgagaagaacgucacggugacccacuccgugaaccugcuggaggacaagcacaacgggaagcucugcaagcugcgcggcgucgcgccccugcaccucgggaagugcaacaucgccggcuggauccuggggaacccggagugcgagagccuguccaccgccagcuccuggagcuacaucguggagaccuccagcuccgacaacggcacgugcuaccccggcgacuucaucgacuacgaggagcuccgggagcagcugagcuccgugagcuccuucgagcgcuucgagaucuuccccaagaccagcuccuggcccaaccacgacagcaacaagggggucaccgccgccugcccgcacgccggcgcgaaguccuucuacaagaaccugaucuggcucgugaagaaggggaacagcuaccccaagcuguccaagagcuacaucaacgacaagggcaaggaggugcugguccucugggggauccaccaccccagcaccaacgccgaccagcagucccuguaccagaacgccgacgccuacguguucgugggcacgagccgguacuccaagaaguucaagcccgagaucgccauccgcccgaagguccgggaccaggagggccgcaugaacuacuacuggacccugguggagcccggggacaagaucaccuucgaggcgaccggcaaccucguggucccccgguacgccuucgccauggagcgcaacgccgggagcggcaucaucaucuccgacacgcccgugcacgacugcaacacgaccugccagaccccgaagggcgccaucaacaccagccugcccuuccagaacauccaccccaucaccaucgggaagugccccaaguacgugaaguccaccaagcugcggcucgcgaccggccugcgcaacgucccgagcauccagucccgggggcuguucggcgccaucgccggguucaucgagggcggcuggacggggaugguggacggcugguacggguaccaccaccagaacgagcagggcagcggguacgccgccgaccucaaguccacccagaacgcgaucgacgagaucaccaacaaggugaacagcgucaucgagaagaugaacacccaguucacggccgugggcaaggaguucaaccaccuggagaagcgcaucgagaaccugaacaagaaggucgacgacggcuuccucgacaucuggaccuacaacgccgagcugcuggugcuccuggagaacgagcggacccuggacuaccacgacuccaacgugaagaaccucuacgagaagguccgcagccagcugaagaacaacgccaaggagaucgggaacggcugcuucgaguucuaccacaagugcgacaacacgugcauggaguccgugaagaacgggaccuacgacuaccccaaguacagcgaggaggccaagcugaaccgggaggagaucgacggcgugaagcucgaguccacccgcaucuaccagauccuggcgaucuacagcaccgucgccuccagccuggugcucguggucagccugggggccaucuccuucuggaugugcagcaacggcucccugcagugccggaucugcaucuga

SEQ ID NO: 68008 - RNA, 1701 nt, Artificial Sequence
  derived and/or modified CDS sequence (opt1) from hemagglutinin__InfluenzaA__ADA86087
augaaggccauccuggugguccuccuguacaccuucgccaccgcgaacgccgacacgcugugcaucggcuaccacgccaacaacagcaccgacaccguggacaccgugcucgagaagaacgucacggugacccacuccgugaaccugcuggaggacaagcacaacgggaagcucugcaagcugcgcggcgucgcgccccugcaccucgggaagugcaacaucgccggcuggauccuggggaacccggagugcgagagccuguccaccgcgagcuccuggagcuacaucguggagaccuucuccagcgacaacggcacgugcuaccccggcgacuucaucgacuacgaggagcuccgggagcagcuguccagcguguccagcuucgagcgcuucgagaucuuccccaagaccuccagcuggcccaaccacgacuccaacaagggggucaccgccgccugcccgcacgccggcgccaagagcuucuacaagaaccugaucuggcucgugaagaaggggaacuccuaccccaagcugagcaaguccuacaucaacgacaagggcaaggaggugcugguccucugggggauccaccaccccagcaccagcgccgaccagcagucccuguaccagaacgccgacgccuacguguucgugggcacgagccgguacuccaagaaguucaagcccgagaucgccauccgcccgaagguccgggaccaggagggccgcaugaacuacuacuggacccugguggagcccggggacaagaucaccuucgaggcgaccggcaaccucguggucccccgguacgccuucgccauggagcgcaacgccgggagcggcaucaucaucuccgacacgcccgugcacgacugcaacacgaccugccagaccccgaagggcgcccugaacaccagccugcccuuccagaacauccaccccaucaccaucgggaagugccccaaguacgugaaguccaccaagcuccggcuggcgaccggccugcgcaacgucccgagcauccagucccggggccucuucggggccaucgccggguucaucgagggcggcuggacggggaugguggacggcugguacggguaccaccaccagaacgagcagggcagcggguacgccgccgaccugaaguccacccagaacgcgaucgacgagaucaccaacaaggugaacagcgucaucgagaagaugaacacccaguucacggccgugggcaaggaguucaaccaccuggagaagcgcaucgagaaccucaacaagaaggucgacgacggcuuccuggacaucuggaccuacaacgccgagcugcucgugcugcuggagaacgagcggacccucgacuaccacgacuccaacgugaagaaccuguacgagaagguccgcaaccagcugaagaacaacgccaaggagaucgggaacggcugcuucgaguucuaccacaagugcgacaacacgugcauggagagcgugaagaacgggaccuacgacuaccccaaguacuccgaggaggccaagcucaaccgggaggagaucgacggcgugaagcuggagagcacccgcaucuaccagauccuggcgaucuacuccaccgucgccagcucccucgugcugguggucagccugggggccaucagcuucuggaugugcuccaacggcagccuccagugccggaucugcaucuga

SEQ ID NO: 68009 - RNA, 1701 nt, Artificial Sequence; identical to SEQ ID NO: 67491
  derived and/or modified CDS sequence (opt1) from hemagglutinin__InfluenzaA__ADA86088

SEQ ID NO: 68010 - RNA, 1701 nt, Artificial Sequence
  derived and/or modified CDS sequence (opt1) from hemagglutinin__InfluenzaA__ADB03603
augaaggccauccugaucgugcuccuguacaccuucgccaccgcgcacgccgacacgcugugcaucggcuaccacgccaacaacagcaccgacaccgucgacaccgugcucgagaagaacgugacggucacccacuccgugaaccugcuggaggacaagcacaacgggaagcucugcaagcugcgcggcguggcgccccugcaccucgggaagugcaacaucgccggcuggauccuggggaacccggagugcgagagccuguccaccgccagcuccuggagcuacaucgucgagaccuccagcuccgacaacggcacgugcuaccccggcgacuucaucgacuacgaggagcuccgggagcagcugagcuccgugagcuccuucgagcgcuucgagaucuuccccaagaccagcuccuggcccaaccacgacagcaacaagggggugaccgccgccugcccgcacgccggcgcgaaguccuucuacaagaaccugaucuggcucgucaagaaggggaacagcuaccccaagcuguccaagagcuacaucaacgacaagggcaaggaggugcuggugcucugggggauccaccaccccagcaccuccgccgaccagcagagccuguaccagaacgccgacgccuacgucuucgugggcacgucccgguacagcaagaaguucaagcccgagaucgccauccgcccgaaggugcgggaccaggagggccgcauggacuacuacuggacccuggucgagcccggggacaagaucaccuucgaggcgaccggcaaccucguggugccccgguacgccuucgccauggagcgcaacgccggguccggcaucaucaucagcgacacgcccguccacgacugcaacacgaccugccagaccccgaagggcgccaucaacaccucccugcccuuccagaacauccaccccaucaccaucgggaagugccccaaguacgucaagagcaccaagcugcggcucgcgaccggccugcgcaacgugccguccauccagagccgggggcuguucggcgccaucgccggguucaucgagggcggcuggacggggaugguggacggcugguacggguaccaccaccagaacgagcagggcuccggguacgccgccgaccucaagagcacccagaacgcgaucgacgagaucaccaacaaggugaacuccgugaucgagaagaugaacacccaguucacggccgucggcaaggaguucaaccaccuggagaagcgcaucgagaaccugaacaagaagguggacgacggcuuccucgacaucuggaccuacaacgccgagcugcugguccuccuggagaacgagcggacccuggacuaccacgacagcaacgugaagaaccucuacgagaaggugcgcucccagcugaagaacaacgccaaggagaucgggaacggcugcuucgaguucuaccacaagugcgacaacacgugcauggagagcgucaagaacgggaccuacgacuaccccaaguacuccgaggaggccaagcugaaccgggaggagaucgacggcgugaagcucgagagcacccgcaucuaccagauccuggcgaucuacuccaccguggccagcagccugguccucguggugucccugggggccaucagcuucuggaugugcuccaacggcagccugcagugccggaucugcaucuga

SEQ ID NO: 68011 - RNA, 1701 nt, Artificial Sequence; identical to SEQ ID NO: 66680
  derived and/or modified CDS sequence (opt1) from hemagglutinin__InfluenzaA__ADB03604

SEQ ID NO: 68012 - RNA, 1701 nt, Artificial Sequence
  derived and/or modified CDS sequence (opt1) from hemagglutinin__InfluenzaA__ADB03605
augaaggccauccuggugguccuccuguacaccuucgccaccgcgaacgccgacacgcugugcaucggcuaccacgccaacaacagcaccgacaccguggacaccgugcucgagaagaacgucacggugacccacuccgugaaccugcuggaggacaagcacaacgggaagcucugcaagcugcgcggcgucgcgccccugcaccucgggaagugcaacaucgccggcuggauccuggggaacccggagugcgagagccuguccaccgccagcuccuggagcuacaucguggagaccuccagcuccgacaacggcacgugcuaccccggcgacuucaucgacuacgaggagcuccgggagcagcugagcuccgugagcuccuucgagcgcuucgagaucuuccccaagaccagcuccuggcccaaccacgacagcaacaagggggucaccgccgccugcccgcacgccggcgcgaaguccuucuacaagaaccugaucuggcucgugaagaaggggaacagcuaccccaagcuguccaagagcuacaucaacgacaagggcaaggaggugcugguccucugggggauccaccaccccagcaccuccgccgaccagcagagccuguaccagaacgccgacgccuacguguucgugggcacgucccgguacagcaagaaguucaagcccgagaucgccauccgcccgaagguccgggagcaggagggccgcauggacuacuacuggacccugguggagcccggggacaagaucaccuucgaggcgaccggcaaccucguggucccccgguacgccuucgccauggagcgcaacgccggguccggcaucaucaucagcgacacgcccgugcacgacugcaacacgaccugccagaccccgaagggcgccaucaacaccucccugcccuuccagaacauccaccccaucaccaucgggaagugccccaaguacgucaagagcaccaagcugcggcucgcgaccggccugcgcaacgugccguccauccagagccgggggcuguucggcgccaucgccggguucaucgagggcggcuggacggggaugguggacggcugguacggguaccaccaccagaacgagcagggcuccggguacgccgccgaccucaagagcacccagaacgcgaucgacgagaucaccaacaaggugaacuccgucaucgagaagaugaacacccaguucacggccgugggcaaggaguucaaccaccuggagaagcgcaucgagaaccugaacaagaaggucgacgacggcuuccucgacaucuggaccuacaacgccgagcugcuggugcuccuggagaacgagcggacccuggacuaccacgacagcaacgugaagaaccucuacgagaagguccgcucccagcugaagaacaacgccaaggagaucgggaacggcugcuucgaguucuaccacaagugcgacaacacgugcauggagagcgugaagaacgggaccuacgacuaccccaaguacuccgaggaggccaagcugaaccgggaggagaucgacggcgugaagcucgagagcacccgcaucuaccagauccuggcgaucuacuccaccgucgccagcagccuggugcucguggucucccugggggccaucagcuucuggaugugcuccaacggcagccugcagugccggaucugcaucuga

SEQ ID NO: 68013 - RNA, 1701 nt, Artificial Sequence; identical to SEQ ID NO: 66693
  derived and/or modified CDS sequence (opt1) from hemagglutinin__InfluenzaA__ADB03607

SEQ ID NO: 68014 - RNA, 1701 nt, Artificial Sequence; identical to SEQ ID NO: 67046
  derived and/or modified CDS sequence (opt1) from hemagglutinin__InfluenzaA__ADB03609

SEQ ID NO: 68015 - RNA, 1701 nt, Artificial Sequence; identical to SEQ ID NO: 66693
  derived and/or modified CDS sequence (opt1) from hemagglutinin__InfluenzaA__ADB03611

SEQ ID NO: 68016 - RNA, 1701 nt, Artificial Sequence
  derived and/or modified CDS sequence (opt1) from hemagglutinin__InfluenzaA__ADB03612
augaaggccauccuggugguccuccuguacaccuucgccaccgcgaacgccgacacgcugugcaucggcuaccacgccaacaacagcaccgacaccguggacaccgugcucgagaagaacgucacggugacccacuccgugaaccugcuggaggacaagcacaacgggaagcucugcaagcugcgcggcgucgcgccccugcaccucgggaagugcaacaucgccggcuggauccuggggaacccggagugcgagagccuguccaccgccagcuccuggagcuacaucguggagaccuccagcuccgacaacggcacgugcuaccccggcgacuucaucgacuacgaggagcuccgggagcagcugagcuccgugagcuccuucgagcgcuucgagaucuuccccaagaccagcuccuggcccaaccacgacagcaacaagggggucaccgccgccugcccgcacgccggcgcgaaguccuucuacaagaaccugaucuggcucgugaagaaggggaacagcuaccccaagcuguccaagagcuacaucaacgacaagggcaaggaggugcugguccucugggggauccaccaccccagcaccuccgccgaccagcagagccuguaccagaacgccgacgccuacguguucgugggcacgucccgguacagcaagaaguucaagcccgagaucgccauccgcccgaagguccgggaccaggagggccgcaugaacuacuacuggacccugguggagcccggggacaagaucaccuucgaggcgaccggcaaccucguggucccccgguacgccuucgccauggagcgcaacgccggguccggcaucaucaucagcgacacgcccgugcacgacugcaacacgaccugccagaccccgaagggcgccaucaacaccucccugcccuuccagaacauccaccccaucaccaucgggaagugccccaaguacgucaagagcaccaagcugcggcucgcgaccggccugcgcaacgugccguucauccagucccgggggcuguucggcgccaucgccggguucaucgagggcggcuggacggggaugguggacggcugguacggguaccaccaccagaacgagcagggcagcggguacgccgccgaccucaaguccacccagaacgcgaucgacgagaucaccaacaaggugaacagcgucaucgagaagaugaacacccaguucacggccgugggcaaggaguucaaccaccuggagaagcgcaucgagaaccugaacaagaaggucgacgacggcuuccucgacaucuggaccuacaacgccgagcugcuggugcuccuggagaacgagcggacccuggacuaccacgacuccaacgugaagaaccucuacgagaagguccgcagccagcugaagaacaacgccaaggagaucgggaacggcugcuucgaguucuaccacaagugcgacaacacgugcauggaguccgugaagaacgggaccuacgacuaccccaaguacagcgaggaggccaagcugaaccgggaggagaucgacggcgugaagcucgaguccacccgcaucuaccagauccuggcgaucuacagcaccgucgccuccagccuggugcucguggucagccugggggccaucuccuucuggaugugcagcaacggcucccugcagugccggaucugcaucuga

SEQ ID NO: 68017 - RNA, 1701 nt, Artificial Sequence; identical to SEQ ID NO: 66693
  derived and/or modified CDS sequence (opt1) from hemagglutinin__InfluenzaA__ADB03614

SEQ ID NO: 68018 - RNA, 1701 nt, Artificial Sequence
  derived and/or modified CDS sequence (opt1) from hemagglutinin__InfluenzaA__ADB03617
augaaggccauccuggugguccuccuguacaccuucgccaccgcgaacgccgacacgcugugcaucggcuaccacgccaacaacagcaccgacaccguggacaccgugcucgagaagaacgucacggugacccacuccgugaaccugcuggaggacaagcacaacgggaagcucugcaagcugcgcggcgucgcgccccugcaccucgggaagugcaacaucgccggcuggauccuggggaacccggagugcgagagccuguccaccgccagcuccuggagcuacaucguggagaccuccagcuccgacaacggcacgugcuaccccggcgacuucaucgacuacgaggagcuccgggagcagcugagcuccgugagcuccuucgagcgcuucgagaucuuccccaagaccagcuccuggcccaaccacgacagcaacaagggggucaccgccgccugcccgcacgccggcgcgaaguccuucuacaagaaccugaucuggcucgugaagaaggggaacagcuaccccaagcuguccaagagcuacaucaacgacaagggcaaggaggugcugguccucugggggauccaccaccccagcaccuccgccgaccagcagagccuguaccagaacgccgacgccuacguguucgugggcacgucccgguacagcaagaaguucaagcccgagaucgccauccgcccgaagguccgggagcaggagggccgcaugaacuacuacuggacccugguggagcccggggacaagaucaccuucgaggcgaccggcaaccucguggucccccgguacgccuucgccauggagcgcaacgccggguccggcaucaucaucagcgacacgcccgugcacgacugcaacacgaccugccagaccccgaagggcgccaucaacaccucccugcccuuccagaacauccaccccaucaccaucgggaagugccccaaguacgucaagagcaccaagcugcggcucgcgaccggccugcgcaacgugccguccauccagagccgggggcuguucggcgccaucgccggguucaucgagggcggcuggacggggaugguggacggcugguacggguaccaccaccagaacgagcagggcuccggguacgccgccgaccucaagagcacccagaacgcgaucgacgagaucaccaacaaggugaacuccgucaucgagaagaugaacacccaguucacggccgugggcaaggaguucaaccaccuggagaagcgcaucgagaaccugaacaagaaggucgacgacggcuuccucgacaucuggaccuacaacgccgagcugcuggugcuccuggagaacgagcggacccuggacuaccacgacagcaacgugaagaaccucuacgagaagguccgcucccagcugaagaacaacgccaaggagaucgggaacggcugcuucgaguucuaccacaagugcgacaacacgugcauggagagcgugaagaacgggaccuacgacuaccccaaguacuccaaggaggccaagcugaaccgggaggagaucgacggcgugaagcucgagagcacccgcaucuaccagauccuggcgaucuacuccaccgucgccagcagccuggugcucguggucucccugggggccaucagcuucuggaugugcuccaacggcagccugcagugccggaucugcaucuga

SEQ ID NO: 68019 - RNA, 1701 nt, Artificial Sequence; identical to SEQ ID NO: 67046
  derived and/or modified CDS sequence (opt1) from hemagglutinin__InfluenzaA__ADB03619

SEQ ID NO: 68020 - RNA, 1701 nt, Artificial Sequence
  derived and/or modified CDS sequence (opt1) from hemagglutinin__InfluenzaA__ADB03620
augaaggccauccuggugguccuccuguacaccuucgccaccgcgaacgccgacacgcugugcaucggcuaccacgccaacaacagcaccgacaccguggacaccgugcucgagaagaacgucacggugacccacuccgugaaccugcuggaggggaagcacaacggcaagcucugcaagcugcgcggggucgcgccccugcaccucggcaagugcaacaucgccggguggauccugggcaacccggagugcgagagccuguccaccgccagcuccuggagcuacaucguggagaccuccagcuccgacaacggcacgugcuaccccggggacuucaucgacuacgaggagcuccgggagcagcugagcuccgugagcuccuucgagcgcuucgagaucguccccaagaccagcuccuggcccaaccacgacagcaacaagggcgugaccgccgccugcccgcacgccggggcgaaguccuucuacaagaaccugaucuggcucgugaagaagggcaacagcuaccccaagcuguccaagagcuacaucaacgacaaggggaaggagguccuggugcucuggggcauccaccaccccagcaccuccgccgaccagcagagccuguaccagaacgccgacgccuacguguucgucggcacgucccgguacagcaagaaguucaagcccgagaucgccauccgcccgaaggugcgggaccaggaggggcgcaugaacuacuacuggacccugguggagcccggcgacaagaucaccuucgaggcgaccgggaaccucgucgugccccgguacgccuucgccauggagcgcaacgccggcuccggcaucaucaucagcgacacgcccgugcacgacugcaacacgaccugccagaccccgaagggggccaucaacaccucccugcccuuccagaacauccaccccaucaccaucggcaagugccccaaguacgucaagagcaccaagcugcggcucgcgaccgggcugcgcaacgugccguccauccagagccggggccuguucggggccaucgccggcuucaucgagggcggguggacgggcaugguggacgggugguacggcuaccaccaccagaacgagcagggguccggcuacgccgccgaccucaagagcacccagaacgcgaucgacgagaucaccaacaaggucaacuccgugaucgagaagaugaacacccaguucacggccgucggcaaggaguucaaccaccuggagaagcgcaucgagaaccugaacaagaagguggacgacggguuccucgacaucuggaccuacaacgccgagcugcuggugcuccuggagaacgagcggacccuggacuaccacgacagcaacgucaagaaccucuacgagaaggugcgcucccagcugaagaacaacgccaaggagaucggcaacgggugcuucgaguucuaccacaagugcgacaacacgugcauggagagcgugaagaacggcaccuacgacuaccccaaguacuccgaggaggccaagcugaaccgggaggagaucgacggggucaagcucgagagcacccgcaucuaccagauccuggcgaucuacuccaccguggccagcagccuggugcucgucgugucccugggcgccaucagcuucuggaugugcuccaacggcagccugcagugccggaucugcaucuga

SEQ ID NO: 68021 - RNA, 1701 nt, Artificial Sequence
  derived and/or modified CDS sequence (opt1) from hemagglutinin__InfluenzaA__ADB03622
augaaggccauccuggugguccuccuguacaccuucgccaccgcgaacgccgacacgcugugcaucggcuaccacgccaacaacagcaccgacaccguggacaccgugcucgagaagaacgucacggugacccacuccgugaaccugcuggaggacaagcacaacgggaagcucugcaagcugcgcggcgucgcgccccugcaccucgggaagugcaacaucgccggcuggauccuggggaacccggagugcgagagccuguccaccgccagcuccuggagcuacaucguggagaccuccagcuccgacaacggcacgugcuaccccggcgacuucaucaacuacgaggagcuccgggagcagcugagcuccgugagcuccuucgagcgcuucgagaucuuccccaagaccagcuccuggcccaaccacgacagcaacaagggggucaccgccgccugcccgcacgccggcgcgaaguccuucuacaagaaccugaucuggcucgugaagaaggggaacagcuaccccaagcuguccaagagcuacaucaacgacaagggcaaggaggugcugguccucugggggauccaccaccccagcaccuccgccgaccagcagagccuguaccagaacgccgacgccuacguguucgugggcacgucccgguacagcaagaaguucaagcccgagaucgccauccgcccgaagguccgggaccaggagggccgcaugaacuacuacuggacccugguggagcccggggacaagaucaccuucgaggcgaccggcaaccucguggucccccgguacgccuucgccauggagcgcaacgccggguccggcaucaucaucagcgacacgcccgugcacgacugcaacacgaccugccagaccccgaacggcgccaucaacaccucccugcccuuccagaacauccaccccaucaccaucgggaagugccccaaguacgucaagagcaccaagcugcggcucgcgaccggccugcgcaacgugccguccauccagagccgggggcuguucggcgccaucgccggguucaucgagggcggcuggacggggaugguggacggcugguacggguaccaccaccagaacgagcagggcuccggguacgccgccgaccucaagagcacccagaacgcgaucgacaagaucaccaacaaggugaacuccgucaucgagaagaugaacacccaguucacggccgugggcaaggaguucaaccaccuggagaagcgcaucgagaaccugaacaagaaggucgacgacggcuuccucgacaucuggaccuacaacgccgagcugcuggugcuccuggagaacgagcggacccuggacuaccacgacagcaacgugaagaaccucuacgagaagguccgcucccagcugaagaacaacgccaaggagaucgggaacggcugcuucgaguucuaccacaagugcgacaacacgugcauggagagcgugaagaacgggaccuacgacuaccccaaguacuccgaggaggccaagcugaaccgggaggagaucgacggcgugaagcucgagagcacccgcaucuaccagauccuggcgaucuacuccaccgucgccagcagccuggugcucguggucucccugggggccaucagcuucuggaugugcuccaacggcagccugcagugccggaucugcaucuga

SEQ ID NO: 68022 - RNA, 1701 nt, Artificial Sequence; identical to SEQ ID NO: 68021
  derived and/or modified CDS sequence (opt1) from hemagglutinin__InfluenzaA__ADB03623

SEQ ID NO: 68023 - RNA, 1701 nt, Artificial Sequence
  derived and/or modified CDS sequence (opt1) from hemagglutinin__InfluenzaA__ADB03628
auggaggccauccuggugguccuccuguacaccuucgccaccgcgaacgccgacacgcugugcaucggcuaccacgccaacaacagcaccgacaccguggacaccgugcucgagaagaacgucacggugacccacuccgugaaccugcuggaggacaagcacaacgggaagcucugcaagcugcgcggcgucgcgccccugcaccucgggaagugcaacaucgccggcuggauccuggggaacccggagugcgagagccuguccaccgccagcuccuggagcuacaucguggagaccuccagcuccgacaacggcacgugcuaccccggcgacuucaucgacuacgaggagcuccgggagcagcugagcuccgugagcuccuucgagcgcuucgagaucuuccccaagaccagcuccuggcccaaccacgacagcaacaagggggucaccgccgccugcccgcacgccggcgcgaaguccuucuacaagaaccugaucuggcucgugaagaaggggaacagcuaccccaagcuguccaagagcuacaucaacgacaagggcaaggaggugcugguccucugggggauccaccaccccagcaccuccgccgaccagcagagccuguaccagaacgccgacgccuacguguucgugggcacgucccgguacagcaagaaguucaagcccgagaucgccauccgcccgaagguccgggaccaggagggccgcaugaacuacuacuggacccugguggagcccggggacaagaucaccuucgaggcgaccggcaaccucguggucccccgguacgccuucgccauggagcgcaacgccggguccggcaucaucaucagcgacacgcccgugcacgacugcaacacgaccugccagaccccgaagggcgccaucaacaccucccugcccuuccacaacauccaccccaucaccaucgggaagugccccaaguacgucaagagcaccaagcugcggcucgcgaccggccugcgcaacgugccguccauccagagccgggggcuguucggcgccaucgccggguucaucgagggcggcuggacggggaugguggacggcugguacggguaccaccaccagaacgagcagggcuccggguacgccgccgaccucaagagcacccagaacgcgaucgacgagaucaccaacaaggugaacuccgucaucgagaagaugaacacccaguucacggccgugggcaaggaguucaaccaccuggagaagcgcaucgagaaccugaacaagaaggucgacgacggcuuccucgacaucuggaccuacaacgccgagcugcuggugcuccuggagaacgagcggacccuggacuaccacgacagcaacgugaagaaccucuacgagaagguccgcucccagcugaagaacaacgccaaggagaucgggaacggcugcuucgaguucuaccacaagugcgacaacacgugcauggagagcgugaagaacgggaccuacgacuaccccaaguacuccgaggaggccaagcugaaccgggaggagaucgacggcgugaagcucgagagcacccgcaucuaccagauccuggcgaucuacuccaccgucgccagcagccuggugcucguggucucccugggggccaucagcuucuggaugugcuccaacggcagccugcagugccggaucugcaucuga

SEQ ID NO: 68024 - RNA, 1701 nt, Artificial Sequence
  derived and/or modified CDS sequence (opt1) from hemagglutinin__InfluenzaA__ADB03629
augaaggccauccuggugguccuccuguacaccuucaccacggccaacgcggacacccugugcaucggcuaccacgccaacaacagcaccgacaccguggacacggugcucgagaagaacgucaccgugacccacuccgugaaccugcuggaggacaagcacaacgggaagcucugcaagcugcgcggcgucgcgccccugcaccucgggaagugcaacaucgccggcuggauccuggggaacccggagugcgagagccuguccaccgccagcuccuggagcuacaucguggagacguccagcuccgacaacgggaccugcuaccccggcgacuucaucgacuacgaggagcuccgggagcagcugagcuccgugagcuccuucgagcgcuucgagaucuuccccaagaccagcuccuggcccaaccacgacagcaacaagggcgucaccgccgccugcccgcacgccggcgccaaguccuucuacaagaaccugaucuggcucgugaagaaggggaacagcuaccccaagcuguccaagagcuacaucaacgacaagggcaaggaggugcugguccucugggggauccaccaccccagcacguccgcggaccagcagagccuguaccagaacgccgacgccuacguguucgugggcaccucccgguacagcaagaaguucaagcccgagaucgccauccgcccgaagguccgggagcaggagggccgcaugaacuacuacuggacccugguggagcccggggacaagaucaccuucgaggccacgggcaaccucguggucccccgguacgcguucgccauggagcgcaacgccggguccggcaucaucaucagcgacacccccgugcacgacugcaacacgaccugccagaccccgaagggcgccaucaacaccucccugcccuuccagaacauccacagcaucaccaucgggaagugccccaaguacgugaaguccaccaagcugcggcucgccacgggccugcgcaacguccccagcauccagucccgggggcuguucggcgcgaucgccggguucaucgagggcggcuggaccgggaugguggacggcugguacggguuccaccaccagaacgagcagggcagcggguacgccgccgaccucaaguccacccagaacgccaucgacgagaucaccaacaaggugaacagcgucaucgagaagaugaacacgcaguucaccgcggugggcaaggaguucaaccaccuggagaagcgcaucgagaaccugaacaagaaggucgacgacggcuuccucgacaucuggaccuacaacgccgagcugcuggugcuccuggagaacgagcggacccuggacuaccacgacuccaacgugaagaaccucuacgagaagguccgcagccagcugaagaacaacgccaaggagaucgggaacggcugcuucgaguucuaccacaagugcgacaacacgugcauggaguccgugaagaacgggaccuacgacuacccgaaguacagcgaggaggccaagcugaaccgggaggagaucgacggcgugaagcucgaguccacccgcaucuaccagauccuggccaucuacagcaccgucgcgagcucccuggugcucguggucagccugggggccaucuccuucuggaugugcagcaacggcucccugcagugccggaucugcaucuga

SEQ ID NO: 68025 - RNA, 1701 nt, Artificial Sequence
  derived and/or modified CDS sequence (opt1) from hemagglutinin__InfluenzaA__ADB03630
augaaggccauccuggugguccuccuguacaccuucgccaccgcgaacgccgacacgcugugcaucggcuaccacgccaacaacagcaccgacaccguggacaccgugcucgagaagaacgucacggugacccacuccgugaaccugcuggaggacaagcacaacgggaagcucugcaagcugcgcggcgucgcgccccugcaccucgggaagugcaacaucgccggcuggauccuggggaacccggagugcgagagccuguccaccgccagcuccuggagcuacaucguggagaccuccagcuccgacaacggcacgugcuaccccggcgacuucaucgacuacgaggagcuccgggagcagcugagcuccgugagcuccuucgagcgcuucgagaucuuccccaagaccagcuccuggcccaaccacgacagcaacaagggggucaccgccgccugcccgcacgccggcgcgaaguccuucuacaagaaccugaucuggcucgugaagaaggggaacagcuaccccaagcuguccaagagcuacaucaacgacaagggcaaggaggugcugguccucugggggauccaccaccccagcaccuccgccgaccagcagagccuguaccagaacgccgacgccuacguguucgugggcacgucccgguacagcaagaaguucaagcccgagaucgccauccgcccgaagguccgggaccaggagggccgcaugaacuaccacuggacccugguggagcccggggacaagaucaccuucgaggcgaccggcaaccucguggucccccgguacgccuucgccauggagcgcaacgccggguccggcaucaucaucagcgacacgcccgugcacgacugcaacacgaccugccagaccccgaagggcgccaucaacaccucccugcccuuccagaacauccaccccaucaccaucgggaagugccccaaguacgucaagagcaccaagcugcggcucgcgaccggccugcgcaacgugccguccauccagagccgggggcuguucggcgccaucgccggguucaucgagggcggcuggacggggaugguggacggcugguacggguaccaccaccagaacgagcagggcuccggguacgccgccgaccucaagagcacccagaacgcgaucgacgagaucaccaacaaggugaacuccgucaucgagaagaugaacacccaguucacggccgugggcaaggaguucaaccaccuggagaagcgcaucgagaaccugaacaagaaggucgacgacggcuuccucgacaucuggaccuacaacgccgagcugcuggugcuccuggagaacgagcggacccuggacuaccacgacagcaacgugaagaaccucuacgagaagguccgcucccagcugaagaacaacgccaaggagaucgggaacggcugcuucgaguucuaccacaagugcgacaacacgugcauggagagcgugaagaacgggaccuacgacuaccccaaguacuccaaggaggccaagcugaaccgggaggagaucgacggcgugaagcucgagagcacccgcaucuaccagauccuggcgaucuacuccaccgucgccagcagccuggugcucguggucucccugggggccaucagcuucuggaugugcuccaacggcagccugcagugccggaucugcaucuga

SEQ ID NO: 68026 - RNA, 1701 nt, Artificial Sequence; identical to SEQ ID NO: 67438
  derived and/or modified CDS sequence (opt1) from hemagglutinin__InfluenzaA__ADB25319

SEQ ID NO: 68027 - RNA, 1701 nt, Artificial Sequence; identical to SEQ ID NO: 66693
  derived and/or modified CDS sequence (opt1) from hemagglutinin__InfluenzaA__ADB25321

SEQ ID NO: 68028 - RNA, 1701 nt, Artificial Sequence
  derived and/or modified CDS sequence (opt1) from hemagglutinin__InfluenzaA__ADB27970
augaaggccauccuggugguccuccuguacaccuucgccaccgcgaacgccgacacgcugugcaucggcuaccacgccaacaacagcaccgacaccguggacaccgugcucgagaagaacgucacggugacccacuccgugaaccugcuggaggacaagcacaacgggaagcucugcaagcugcgcggcgucgcgccccugcaccucgggaagugcaacaucgccggcuggauccuggggaacccggagugcgagagccuguccaccgccagcuccuggagcuacaucguggagaccuccagcuccgacaacggcacgugcuaccccggcgacuucaucgacuacgaggagcuccgggagcagcugagcuccgugagcuccuucgagcgcuucgagaucuuccccaagaccagcuccuggcccaaccacgacagcaacaagggggucaccgccgccugcccgcacgccggcgcgaaguccuucuacaagaaccugaucuggcucgugaagaaggggaacagcuaccccaagcuguccaagagcuacaucaacgacaagggcaaggaggugcugguccucugggggauccaccaccccagcaccuccgccgaccagcagagccuguaccagaacgccgacgccuacguguucgugggcacgucccgguacagcaagaaguucaagcccgagaucgccauccgcccgaagguccgggaccaggagggccgcaugaacuacuacuggacccugguggagcccggggacaagaucaccuucgaggcgaccggcaaccucguggucccccgguacgccuucgccauggagcgcgacgccggguccggcaucaucaucagcgacacgcccgugcacgacugcaacacgaccugccagaccccgaagggcgccaucaacaccucccugcccuuccagaacauccaccccaucaccaucgggaagugccccaaguacgucaagagcaccaagcugcggcucgcgaccggccugcgcaacgugccguccauccagagccgggggcuguucggcgccaucgccggguucaucgagggcggcuggacggggaugguggacggcugguacggguaccaccaccagaacgagcagggcuccggguacgccgccgaccucaagagcacccagaacgcgaucgacgagaucaccaacaaggugaacuccgucaucgagaagaugaacacccaguucacggccgugggcaaggaguucaaccaccuggagaagcgcaucgagaaccugaacaagaaggucgacgacggcuuccucgacaucuggaccuacaacgccgagcugcuggugcuccuggagaacgagcggacccuggacuaccacgacagcaacgugaagaaccucuacgagaagguccgcucccagcugaagaacaacgccaaggagaucgggaacggcugcuucgaguucuaccacaagugcgacaacacgugcauggagagcgugaagaacgggaccuacgacuaccccaaguacuccgaggaggccaagcugaaccgggaggagaucgacggcgugaagcucgagagcacccgcaucuaccagauccuggcgaucuacuccaccgucgccagcagccuggugcucguggucucccugggggccaucagcuucuggaugugcuccaacggcagccugcagugccggaucugcaucuga

SEQ ID NO: 68029 - RNA, 1701 nt, Artificial Sequence; identical to SEQ ID NO: 66693
  derived and/or modified CDS sequence (opt1) from hemagglutinin__InfluenzaA__ADB27980

SEQ ID NO: 68030 - RNA, 1701 nt, Artificial Sequence; identical to SEQ ID NO: 66693
  derived and/or modified CDS sequence (opt1) from hemagglutinin__InfluenzaA__ADB54352

SEQ ID NO: 68031 - RNA, 1701 nt, Artificial Sequence; identical to SEQ ID NO: 66693
  derived and/or modified CDS sequence (opt1) from hemagglutinin__InfluenzaA__ADB54355

SEQ ID NO: 68032 - RNA, 1698 nt, Artificial Sequence
  derived and/or modified CDS sequence (opt1) from hemagglutinin__InfluenzaA__ADB65926
augaaggugaagcugcucguccugcugugcaccuucaccgccacguacgccgacaccaucugcaucggcuaccacgcgaacaacagcaccgacaccguggacacggugcucgagaagaacgucaccgugacccacuccgugaaccugcuggaggacaagcacaacgggaagcucugccugcugaagggcaaggcgccccuccagcuggggaacugcagcgucgccggcuggauccuggggaacccggagugcggccuccugaucuccaaggagagcugguccuacaucguggagcgccccaaccccgagaacgggaccugcuaccccggccacuucgccgacuacgaggagcugcgggagcagcucagcuccgugagcuccuucgagcgcuucgagaucuucccgaagggcagcuccuggcccaaccacacggucaccggggugagcgccuccugcagccacaacggcgaguccagcuucuacaagaaccugcuguggcucaccgggaagaacggccuguaccccaaccuguccaagagcuacgccaacaacaaggagaaggaggugcucguccuguggggcgugcaccacccgcccaacaucggggaccagaugacccuguaccacaaggagaacgccuacguguccgucgugagcagccacuacucccggaaguucacgcccgagaucgccaagcgccccaaggugcgggaccaggagggccgcaucaacuacuacuggacccuccuggagcccggggacaccaucaucuucgaggccaacggcaaccugaucgcgccgcgguacgccuucgcccucagccgcggcuucggguccggcaucaucaacagcaacgcccccauggacgagugcgacgccaagugccagacgccccagggggcgaucaacuccagccugcccuuccagaacguccacccggugaccaucggcgagugccccaaguacgugcgguccgccaagcugcgcauggucaccgggcuccggaacauccccagcauccagucccgcggccuguucggcgccaucgccggguucaucgagggcggguggaccggcaugguggacgggugguacggcuaccaccaccagaacgagcagggcagcggguacgccgcggaccagaaguccacccagaacgccaucaacggcaucacgaacaaggugaacagcgucaucgagaagaugaacacccaguucaccgccguggggaaggaguucaacaagcuggagcggcgcauggagaaccucaacaagaaggucgacgacggcuucaucgacguguggaccuacaacgccgagcugcuggugcuccuggagaacgagcggacgcuggacuuccacgacuccaacgucaagaaccucuacgagaaggugaagaaccagcugaagaacaacgccaaggagauggggaacggcugcuucgaguucuaccacaagugcaacgacgagugcauggagagcgugaagaacggcaccuacgacuaccccaaguacuccgaggagagcaagcugucccgcgagaagaucgacggggucaagcucgagagcaugggcguguaccagauccuggcgaucuacuccaccguggccagcagccugguccuccuggugucccugggggccaucggcuucuggaugugcagcaacggcucccuccagugccggaucugcaucuga

SEQ ID NO: 68033 - RNA, 1698 nt, Artificial Sequence
  derived and/or modified CDS sequence (opt1) from hemagglutinin__InfluenzaA__ADB80153
augaaggugaagcugcucgcccugcugugcaccuucaccgccacguacgcggacaccaucugcaucggcuaccacgccaacaacagcaccgacaccgucgacacggugcucgagaagaacgugaccgucacccacuccgugaaccugcuggaggacaaccacaacgggaagcucugccugcugaagggcaucgcgccccuccagcuggggaacugcagcguggccggcuggauccuggggaacccggagugcgagcuccugaucuccaaggagagcugguccuacaucgucgagaagcccaaccccgagaacgggaccugcuaccccggccacuucgccgacuacgaggagcugcgcgagcagcucagcuccgugagcuccuucgagcgguucgagaucuucccgaaggagagcuccuggcccaaccacacggugaccggggucagcgccuccugcagccacaacggcgaguccagcuucuacaagaaccugcuguggcucaccgggaagaacggccuguaccccaaccuguccaagagcuucgccaacaacaaggagaaggaggugcucgugcuguggggcguccaccacccgcccaacaucggcgaccagaugacccuguaccacaaggagaacgccuacguguccguggucagcagccacuacucccgcaaguucacgcccgagaucgccaagcggcccaaggugcgcgaccaggagggccggaucaacuacuacuggacccuccuggagcccggggacaccaucaucuucgaggcgaacggcaaccugaucgccccgcgcuacgccuucgcccucagccggggguucggcuccggcaucaucaacagcaacgcccccauggacgagugcgacgcgaagugccagacgccccagggggccaucaacuccagccugcccuuccagaacgugcacccggucaccaucggcgagugccccaaguacgugcgcuccaccaagcugcggauggugaccgggcuccgcaacauccccagcauccagucccggggccuguucggggccaucgccggcuucaucgagggcggguggaccggcauggucgacgggugguacggcuaccaccaccagaacgagcaggggagcggcuacgccgcggaccagaaguccacgcagaacgccaucaacggcaucaccaacaaggugaacagcgugaucgagaagaugaacacccaguucaccgccgucgggaaggaguucaacaagcuggagcgccggauggagaaccucaacaagaagguggacgacggcuucaucgacgucuggacguacaacgccgagcugcuggugcuccuggagaacgagcgcacccuggacuuccacgacuccaacgugaagaaccucuacgagaaggucaagaaccagcugaagaacaacgccaaggagaucgggaacggcugcuucgaguucuaccacaagugcaacgacgagugcauggagagcgugaagaacgggaccuacgacuaccccaaguacuccgaggagagcaagcugucccgggagaagaucgacggcgugaagcucgagagcaugggcgucuaccagauccuggcgaucuacuccaccguggccagcagccuggugcuccuggucucccugggggccaucagcuucuggaugugcuccaacggcagccuccagugccgcaucugcaucuga

SEQ ID NO: 68034 - RNA, 1701 nt, Artificial Sequence; identical to SEQ ID NO: 67794
  derived and/or modified CDS sequence (opt1) from hemagglutinin__InfluenzaA__ADB81399

SEQ ID NO: 68035 - RNA, 1701 nt, Artificial Sequence; identical to SEQ ID NO: 67794
  derived and/or modified CDS sequence (opt1) from hemagglutinin__InfluenzaA__ADB81409

SEQ ID NO: 68036 - RNA, 1701 nt, Artificial Sequence
  derived and/or modified CDS sequence (opt1) from hemagglutinin__InfluenzaA__ADB81419
augaaggccauccuggugguccuccuguacaccuucgccaccgcgaacgccgacacgcugugcaucggcuaccacgccaacaacagcaccgacaccguggacaccgugcucgagaagaacgucacggugacccacuccgugaaccugcuggaggacaagcacaacgggaagcucugcaagcugcgcggcgucgcgccccugcaccucgggaagugcaacaucgccggcuggauccuggggaacccggagugcgagagccuguccaccgccagcuccuggagcuacaucguggagaccuccagcuccgacaacggcacgugcuaccccggcgacuucaucgacuacgaggagcuccgggagcagcugagcuccgugagcuccuucgagcgcuucgagaucuuccccaagaccagcuccuggcccaaccacgacagcaacaagggggucaccgccgccugcccgcacgccggcgcgaaguccuucuacaagaaccugaucuggcucgugaagaaggggaacagcuaccccaagcuguccaagagcuacaucaacgacaagggcaaggaggugcugguccucugggggauccaccaccccagcaccuccgccgaccagcagagccuguaccagaacgccgacgccuacguguucgugggcacgucccgguacagcaagaaguucaagcccgagaucgccauccgcccgaagguccgggaccaggagggccgcaugaacuacuacuggacccugguggagcccggggacaagaucaccuucgaggcgaccggcaaccucguggucccccgguacgccuucgccauggagcgcaacgccggguccggcaucaucaucagcgacacgcccgugcacgacugcaacacgaccugccagaccccgaagggcgccaucaacaccucccugcccuuccagaacauccaccccaucaccaucgggaagugccccaaguacgucaagagcaccaagcugcggcucgcgaccggccugcgcaacaucccguccauccagagccgggggcuguucggcgccaucgccggguucaucgagggcggcuggacggggaugguggacggcugguacggguaccaccaccagaacgagcagggcuccggguacgccgccgaccucaagagcacccagaacgcgaucgacgagaucaccaacaaggugaacuccgugaucgagaagaugaacacccaguucacggccgucggcaaggaguucaaccaccuggagaagcgcaucgagaaccugaacaagaagguggacgacggcuuccucgacaucuggaccuacaacgccgagcugcugguccuccuggagaacgagcggacccuggacuaccacgacagcaacgugaagaaccucuacgagaaggugcgcucccagcugaagaacaacgccaaggagaucgggaacggcugcuucgaguucuaccacaagugcgacaacacgugcauggagagcgucaagaacgggaccuacgacuaccccgaguacuccgaggaggccaagcugaaccgggaggagaucgacggcgugaagcucgagagcacccgcaucuaccagauccuggcgaucuacuccaccguggccagcagccugguccucguggugucccugggggccaucagcuucuggaugugcuccaacggcagccugcagugccggaucugcaucuga

SEQ ID NO: 68037 - RNA, 1701 nt, Artificial Sequence; identical to SEQ ID NO: 67853
  derived and/or modified CDS sequence (opt1) from hemagglutinin__InfluenzaA__ADB81429

SEQ ID NO: 68038 - RNA, 1701 nt, Artificial Sequence
  derived and/or modified CDS sequence (opt1) from hemagglutinin__InfluenzaA__ADB81439
augaaggccauccuggugguccuccuguacaccuucgccaccgcgaacgccgacacgcugugcaucggcuaccacgccaacaacagcaccgacaccguggacaccgugcucgagaagaacgucacggugacccacuccgugaaccugcuggaggacaagcacaacgggaagcucugcaagcugcgcggcgucgcgccccugcaccucgggaagugcaacaucgccggcuggauccuggggaacccggagugcgagagccuguccaccgcgagcuccuggagcuacaucguggagaccuccagcuccgacaacggcacgugcuaccccggcgacuucaucgacuacgaggagcuccgggagcagcugagcuccgugagcuccuucgagcgcuucgagaucuuccccaagaccagcuccuggcccaaccacgacccgaacaagggggucaccgccgccugcccccacgccggcgccaagagcuucuacaagaaccugaucuggcucgugaagaaggggaacuccuaccccaagcugagcaaguccuacaucaacgacaagggcaaggaggugcugguccucugggggauccaccaccccagcaccagcgccgaccagcagucccuguaccagaacgccgacgccuacguguucgugggcacgagccgguacuccaagaaguucaagccggagaucgccauccgccccaagguccggaaccaggagggccgcaugaacuacuacuggacccugguggagcccggggacaagaucaccuucgaggcgaccggcaaccucguggucccccgguacgccuucgccauggagcgcaacgccgggagcggcaucaucaucuccgacacgccggugcacgacugcaacacgaccugccagacccccaagggcgccaucaacaccagccugcccuuccagaacauccaccccaucaccaucgggaagugcccgaaguacgugaaguccaccaagcugcggcucgcgaccggccugcgcaacguccccagcauccagucccgggggcuguucggcgccaucgccggguucaucgagggcggcuggacggggaugguggacggcugguacggguaccaccaccagaacgagcagggcagcggguacgccgccgaccucaaguccacccagaacgcgaucgacgagaucaccaacaaggugaacagcgucaucgagaagaugaacacccaguucacggccgugggcaaggaguucaaccaccuggagaagcgcaucgagaaccugaacaagaaggucgacgacggcuuccucgacaucuggaccuacaacgccgagcugcuggugcuccuggagaacgagcggacccuggacuaccacgacuccaacgugaagaaccucuacgagaagguccgcagccagcugaagaacaacgccaaggagaucgggaacggcugcuucgaguucuaccacaagugcgacaacacgugcauggaguccgugaagaacgggaccuacgacuaccccaaguacagcgaggaggccaagcugaaccgggaggagaucgacggcgugaagcucgaguccacccgcaucuaccagauccuggcgaucuacagcaccgucgccuccagccuggugcucguggucagccugggggccaucuccuucuggaugugcagcaacggcucccugcagugccggaucugcaucuga

SEQ ID NO: 68039 - RNA, 1701 nt, Artificial Sequence
  derived and/or modified CDS sequence (opt1) from hemagglutinin__InfluenzaA__ADB81449
augaaggccauccuggugguccuccuguacaccuucgccaccgcgaacgccgacacgcugugcaucggcuaccacgccaacaacagcaccgacaccguggacaccgugcucgagaagaacgucacggugacccacuccgugaaccugcuggaggacaagcacaacgggaagcucugcaagcugcgcggcgucgcgccccugcaccucgggaagugcaacaucgccggcuggauccuggggaacccggagugcgagagccuguccaccgccagcuccuggagcuacaucguggagaccuccagcuccgacaacggcacgugcuaccccggcgacuucaucgacuacgaggagcuccgggagcagcugagcuccgugagcuccuucgagcgcuucgagaucuuccccaagaccagcuccuggcccaaccacgacagcaacaagggggucaccgccgccugcccgcacgccggcgcgaaguccuucuacaagaaccugaucuggcucgugaagaaggggaacagcuaccccaagcugaacaaguccuacaucaacgacaagggcaaggaggugcugguccucugggggauccaccaccccagcaccagcgccgaccagcagucccuguaccagaacgccgacgccuacguguucgugggcacgagccgguacuccaagaaguucaagcccgagaucgccauccgcccgaagguccgggaccaggagggccgcaugaacuacuacuggacccugguggagcccggggacaagaucaccuucgaggcgaccggcaaccucguggucccccgguacgccuucgccauggagcgcaacgccgggagcggcaucaucaucuccgacacgcccgugcacgacugcaacacgaccugccagaccccgaagggcgccaucaacaccagccugcccuuccagaacauccaccccaucaccaucgggaagugccccaaguacgugaaguccaccaagcugcggcucgcgaccggccugcgcaacgucccgagcauccagucccgggggcuguucggcgccaucgccggguucaucgagggcggcuggacggggaugguggacggcugguacggguaccaccaccagaacgagcagggcagcggguacgccgccgaccucaaguccacccagaacgcgaucgacgagaucaccaacaaggugaacagcgucaucgagaagaugaacacccaguucacggccgugggcaaggaguucaaccaccuggagaagcgcaucgagaaccugaacaagaaggucgacgacggcuuccucgacaucuggaccuacaacgccgagcugcuggugcuccuggagaacgagcggacccuggacuaccacgacuccaacgugaagaaccucuacgagaagguccgcagccagcugaagaacaacgccaaggagaucgggaacggcugcuucgaguucuaccacaagugcgacaacacgugcauggaguccgugaagaacgggaccuacgacuaccccaaguacagcgaggaggccaagcugaaccgggaggagaucgacggcgugaagcucgaguccacccgcaucuaccagauccuggcgaucuacagcaccgucgccuccagccuggugcucguggucagccugggggccaucuccuucuggaugugcagcaacggcucccugcagugccggaucugcaucuga

SEQ ID NO: 68040 - RNA, 1701 nt, Artificial Sequence
  derived and/or modified CDS sequence (opt1) from hemagglutinin__InfluenzaA__ADB81459
augaaggccauccuggugguccuccuguacaccuucgccaccgcgaacgccgacacgcugugcaucggcuaccacgccaacaacagcaccgacaccguggacaccgugcucgagaagaacgucacggugacccacuccgugaaccugcuggaggacaagcacaacgggaagcucugcaagcugcgcggcgucgcgccccugcaccucgggaagugcaacaucgccggcuggauccuggggaacccggagugcgagagccuguccaccgccagcuccuggagcuacaucguggagaccuccagcuccgacaacggcacgugcuaccccggcgacuucaucgacuacgaggagcuccgggagcagcugagcuccgugagcuccuucgagcgcuucgagaucuuccccaagaccagcuccuggcccaaccacgacagcaacaagggggucaccgccgccugcccgcacgccggcgcgaaguccuucuacaagaaccugaucuggcucgugaagaaggggaacagcuaccccaagcugaacaaguccuacaucaacgacaagggcaaggaggugcugguccucugggggauccaccaccccagcaccagcgccgaccagcagucccuguaccagaacgccgacgccuacguguucgugggcacgagccgguacuccaagaaguucaagcccgagaucgccauccgcccgaagguccgggaccaggagggccgcaugaacuacuacuggacccugguggagcccggggacaagaucaccuucgaggcgaccggcaaccucguggucccccgguacgccuucgccauggagcgcaacgggggcagcggcaucaucaucuccgacacgcccgugcacgacugcaacacgaccugccagaccccgaagggggccaucaacaccagccugcccuuccagaacauccaccccaucaccaucggcaagugccccaaguacgugaaguccaccaagcugcggcucgccaccgggcugcgcaacgucccgagcauccagucccggggccuguucggggcgaucgccggcuucaucgagggcggguggacgggcaugguggacgggugguacggcuaccaccaccagaacgagcaggggagcggcuacgccgccgaccucaaguccacccagaacgccaucgacgagaucaccaacaaggugaacagcgucaucgagaagaugaacacccaguucacggcggugggcaaggaguucaaccaccuggagaagcgcaucgagaaccugaacaagaaggucgacgacggguuccucgacaucuggaccuacaacgccgagcugcuggugcuccuggagaacgagcggacccuggacuaccacgacuccaacgugaagaaccucuacgagaagguccgcagccagcugaagaacaacgccaaggagaucggcaacgggugcuucgaguucuaccacaagugcgacaacacgugcauggaguccgugaagaacggcaccuacgacuaccccaaguacagcgaggaggccaagcugaaccgggaggagaucgacggggugaagcucgaguccacccgcaucuaccagauccuggccaucuacagcaccgucgcguccagccuggugcucguggucagccugggcgccaucuccuucuggaugugcagcaacggcucccugcagugccggaucugcaucuga

SEQ ID NO: 68041 - RNA, 1701 nt, Artificial Sequence
  derived and/or modified CDS sequence (opt1) from hemagglutinin__InfluenzaA__ADB82655
augaaggccauccugcucgugcugcugugcacccucgccgcggccaacgccgacacccugugcaucggcuaccacgccaacaacagcacggacaccgucgacaccgugcuggagaagaacgugaccgucacgcacuccgugaaccuccuggaggaccgccacaacgggaagcugugcaaccuccggggcaaggcgccccugcaccuggggaagugcaacaucgccggcuggcuccuggggaacccggagugcgagcuccuguucgccgugaacagcugguccuacaucgucgagaccagcaacuccgacaacgggaccugcuaccccggcgacuucaccagcuacgaggagcugcgcgagcagcuguccagcguguccagcuucgagcgguucgagaucuuccccaaggccuccagcuggcccaaccacgagacgaaccgcggcgugaccgccgcgugcccguacgccggcaccaacggguucuaccggaaccucaucuggcuggucaagaaggagaacuccuaccccaagcugcgcaagagcuacgugaacaacaagaagaaggaggugcucguccuguggggcauccaccacccgcccaccaacacggaccagcagucccuguaccagaacgccgacgccuacguguucguggggagcuccaaguacagccggaaguucaagcccgagaucgccgagcgccccaagguccggggccaggcgggccgcaugaacuacuacuggacccucaucgagcccggggacaccaucaccuucgaggccacgggcaaccugguggcgccccgguacgccuucgccaugaaccgcgggccgguguccggcaucaucaccagcgacgcccccguccacgacugcaacgcgaccugccagacccccaagggcgccaucaacacgagccugcccuuccagaacauccacccgaucaccaucggggagugccccaaguacgugaaguccacccggcuccgcauggccaccggccugcggaacauccccagcauccagucccgcgggcuguucggcgccaucgccggguucaucgagggcggcuggacggggaugaucgacggcugguacggguaccaccaccagaacggccaggggagcggcuacgccgccgaccagaaguccacccagaacgccaucgaccggaucaccaacaaggugaacagcgucaucgagaagaugaacauccaguucaccgccgugggcaaggaguucaaccaccucgagcgccggaucgagaaccugaacaagaagguggacgacggguuccuggacgucuggacguacaacgcggagcuccuggugcugcucgagaacgagcgcacccuggacuuccacgacuccaacgucaagacccuguacgagaaggugaagacccagcuccggaacaacgccaaggagaucggcaacgggugcuucgaguucuaccacaagugcgacgacacgugcauggagagcaucaagaacggcaccuacaacuaccccaaguacuccgaggagagcaagcugaaccgcgaggagaucgacggggugaagcuggaguccacccgcaucuaccagauccucgccaucuacagcaccgccgcguccagccugguccugcucgugucccugggcgccaucggcuucuggaugugcagcaacgggucccugcagugccggaucugcaucuga

SEQ ID NO: 68042 - RNA, 1701 nt, Artificial Sequence
  derived and/or modified CDS sequence (opt1) from hemagglutinin__InfluenzaA__ADB82656
augaaggccauccugcucgugcugcagugcauccugaccgccgcgaacgccgacacccucugcaucggcuaccacgccaacaacagcacggacaccgucgacaccgugcuggagaagaacgugaccgucacgcacuccgugaaccugcucgaggaccgccacaacgggaagcugugcaagcugaagggcaucgcgccccuccaccuggggaagugcaacaucgccggcuggcugcucgggaacccggagugcgagcugcuguucaaggccaacagcugguccuacaucguggagaccagcuacuccgacaacgggaccugcuaccccggcgacuucaccaacuacgaggagcuccgggagcagcugagcuccgucagcuccuucgagcgcuucgagauguuccccaaggccaacagcuggcccaaccacgagacgaacaagggggugaccgccgccugcccguacgcgggcgccaacuccuucuaccggaaccugaucuggcucgugaagaaggggaacagcuacccccgccuguccaagagcuacgucaacaacaagaagaaggaggugcuggugcucuggggcauccaccaccccuccaccagcaccgaccagcagucccuguaccagaacgccgacgccuacgucuucgugagcuccagcacguacaacaagcgguucaagcccgagaucgggacccgcccgaaggugcgggaccagagcggccgcaugaacuacuacuggaccaucgucgagcccggcgacaccaucacguucgaggccaccgggaaccugguggcgccccgguacgccuucgccaugaagcgcgacuccggcagcgggaucaucauguccgacacccccgugcacgacugcaacaccacgugccagaccccgaagggcgccaucaacaccagccuccccuuccagaacguccaccccgugaccaucggcgagugccccaaguacgugaaguccacgaagcugcggauggccaccgggcugcgcaacaucccgagcauccagucccggggccucuucggggcgaucgccggcuucaucgagggcggcuggaccggcaugaucgacgggugguacggcuaccaccaccagaacgagcaggggagcggcuacgccgccgaccgcaaguccacccagaacgccaucgacgggaucacgaacaaggucaacagcaucaucgagaagaugaacauccaguucaccgcggugggcaaggaguucucccaccuggagaagcggguggagaaccugaacaagaaggucgacgacggcuuccucgacguguggaccuacaacgccgagcugcugguccuccuggagaacgagcgcacccuggacuaccacgacagcaacgugaagaaccucuacgagaaggugcggucccagcugaagaacaacgccaaggagaucgggaacggcugcuucgaguucuaccacaagugcgacgacagcugcauggaguccaucaagaacgagacguacgacuacagcaaguacuccgaggagagccgccugaaccgggagaagaucgacggggucaagcucgaguccacccagaucuaccagauccuggccaucuacagcaccguggccagcucccuggugcuccuggucagccugggcgcgaucuccuucuggaugugcagcaacgggucccuccagugccgcaucugcaucuga

SEQ ID NO: 68043 - RNA, 1701 nt, Artificial Sequence
  derived and/or modified CDS sequence (opt1) from hemagglutinin__InfluenzaA__ADB82944
augaaggccauccuggugguccuccuguacaccuucgccaccgcgaacgccgacacgcugugcaucggcuaccacgccaacaacagcaccgacaccguggacaccgugcucgagaagaacgucacggugacccacuccgugaaccugcuggaggacaagcacaacgggaagcucugcaagcugcgcggcgucgcgccccugcaccucgggaagugcaacaucgccggcuggauccuggggaacccggagugcgagagccuguccaccgcgagcuccuggagcuacaucguggagaccuccagcuccgacaacggcacgugcuaccccggcgacuucaucgacuacgaggagcuccgggagcagcugagcuccgugagcuccuucgagcgcuucgagaucuuccccaagaccagcuccuggcccaaccacgacccgaacaagggggucaccgccgccugcccccacgccggcgccaagagcuucuacaagaaccugaucuggcucgugaagaaggggaacuccuaccccaagcugagcaaguccuacaucaacgacaagggcaaggaggugcugguccucugggggauccaccaccccagcaccagcgccgaccagcagucccuguaccagaacgccgacgccuacguguucgugggcacgagccgguacuccaagaaguucaagccggagaucgccauccgccccaagguccgggaccaggagggccgcaugaacuacuacuggacccugguggagcccggggacaagaucaccuucgaggcgaccggcaaccucguggucccccgguacgccuucgccauggagcgcaacgccgggagcggcaucaucaucuccgacacgccggugcacgacugcaacacgaccugccagacccccaagggcgccaucaacaccagccugcccuuccagaacauccaccccaucaccaucgggaagugcccgaaguacgugaaguccaccaagcugcggcucgcgaccggccugcgcaacauccccagcauccagucccgggggcuguucggcgccaucgccggguucaucgagggcggcuggacggggauggucgacggcugguacggguaccaccaccagaacgagcagggcagcggguacgccgccgaccucaaguccacccagaacgcgaucgacgagaucaccaacaaggugaacagcgugaucgagaagaugaacacccaguucacggccgucggcaaggaguucaaccaccuggagaagcgcaucgagaaccugaacaagaagguggacgacggcuuccucgacaucuggaccuacaacgccgagcugcugguccuccuggagaacgagcggacccuggacuaccacgacuccaacgugaagaaccucuacgagaaggugcgcagccagcugaagaacaacgccaaggagaucgggaacggcugcuucgaguucuaccacaagugcgacaacacgugcauggaguccgucaagaacgggaccuacgacuaccccaaguacagcgaggaggccaagcugaaccgggaggagaucgacggcgugaagcucgaguccacccgcaucuaccagauccuggcgaucuacagcaccguggccuccagccugguccucguggugagccugggggccaucuccuucuggaugugcagcaacggcucccugcagugccggaucugcaucuga

SEQ ID NO: 68044 - RNA, 1701 nt, Artificial Sequence
  derived and/or modified CDS sequence (opt1) from hemagglutinin__InfluenzaA__ADB82950
augaaggccauccuggugguccuccuguacaccuucgccaccgcgaacgccgacacgcugugcaucggcuaccacgccaacaacagcaccgacaccguggacaccgugcucgagaagaacgucacggugacccacuccgugaaccugcuggaggacaagcacaacgggaagcucugcaagcugcgcggcgucgcgccccugcaccucgggaagugcaacaucgccggcuggauccuggggaacccggagugcgagagccuguccaccgccagcuccuggagcuacaucguggagaccuccagcuccgacaacggcacgugcuaccccggcgacuucaucgacuacgaggagcuccgggagcagcugagcuccgugagcuccuucgagcgcuucgagaucuuccccaagaccagcuccuggcccaaccacgacagcaacaagggggucaccgccgccugcccgcacgccggcgcgaaguccuucuacaagaaccugaucuggcucgugaagaaggggaacagcuaccccaagcuguccaagagcuacaucaacgacaagggcaaggaggugcugguccucugggggauccaccaccccagcaccuccgccgaccagcagagccuguaccagaacgccgacgccuacguguucgugggcacgucccgguacagcaagaaguucgagcccgagaucgccauccgcccgaagguccgggaccaggagggccgcaugaacuacuacuggacccugguggagcccggggacaagaucaccuucgaggcgaccggcaaccucguggucccccgguacgccuucgccauggagcgcaacgccggguccggcaucaucaucagcgacacgcccgugcacgacugcaacacgaccugccagaccccgaagggcgccaucaacaccucccugcccuuccagaacauccaccccaucaccaucgggaagugccccaaguacgucaagagcaccaagcugcggcucgcgaccggccugcgcaacgugccguccauccagagccgggggcuguucggcgccaucgccggguucaucgagggcggcuggacggggaugguggacggcugguacggguaccaccaccagaacgagcagggcuccggguacgccgccgaccucaagagcacccagaacgcgaucgacgagaucaccaacaaggugaacuccgucaucgagaagaugaacacccaguucacggccgugggcaaggaguucaaccaccuggagaagcgcaucgagaaccugaacaagaaggucgacgacggcuuccucgacaucuggaccuacaacgccgagcugcuggugcuccuggagaacgagcggacccuggacuaccacgacagcaacgugaagaaccucuacgagaagguccgcucccagcugaagaacaacgccaaggagaucgggaacggcugcuucgaguucuaccacaagugcgacaacacgugcauggagagcgugaagaacgggaccuacgacuaccccaaguacuccgaggaggccaagcugaaccgggaggagaucgacggcgugaagcucgagagcacccgcaucuaccagauccuggcgaucuacuccaccgucgccagcagccuggugcucguggucucccugggggccaucagcuucuggaugugcuccaacggcagccugcagugccggaucugcaucuga

SEQ ID NO: 68045 - RNA, 1701 nt, Artificial Sequence; identical to SEQ ID NO: 67491
  derived and/or modified CDS sequence (opt1) from hemagglutinin__InfluenzaA__ADB89129

SEQ ID NO: 68046 - RNA, 1701 nt, Artificial Sequence; identical to SEQ ID NO: 66693
  derived and/or modified CDS sequence (opt1) from hemagglutinin__InfluenzaA__ADB89139

SEQ ID NO: 68047 - RNA, 1701 nt, Artificial Sequence
  derived and/or modified CDS sequence (opt1) from hemagglutinin__InfluenzaA__ADB89149
augaaggccauccuggugguccuccuguacaccuucgccaccgcgaacgccuacacgcugugcaucggcuaccacgccaacaacagcaccgacaccguggacaccgugcucgagaagaacgucacggugacccacuccgugaaccugcuggaggacaagcacaacgggaagcucugcaagcugcgcggcgucgcgccccugcaccucgggaagugcaacaucgccggcuggauccuggggaacccggagugcgagagccuguccaccgccagcuccuggagcuacaucguggagaccuccagcuccgacaacggcacgugcuaccccggcgacuucaucgacuacgaggagcuccgggagcagcugagcuccgugagcuccuucgagcgcuucgagaucuuccccaagaccagcuccuggcccaaccacgacagcaacaagggggucaccgccgccugcccgcacgugggcgccaaguccuucuacaagaaccugaucuggcucgugaagaaggggaacagcuaccccaagcuguccaagagcuacaucaacgacaagggcaaggagguccuggugcucugggggauccaccaccccagcaccuccgcggaccagcagagccuguaccagaacgccgacgccuacguguucgucggcacgucccgguacagcaagaaguucaagcccgagaucgccauccgcccgaaggugcggggccaggaggggcgcaugaacuacuacuggacccugguggagcccggcgacaagaucaccuucgaggccaccgggaaccucgucgugccccgguacgcguucgccauggagcgcaacgccggcuccggcaucaucaucagcgacacgcccgugcacgacugcaacacgaccugccagaccccgaagggggccaucaacaccucccugcccuuccagaacauccaccccaucaccaucggcaagugccccaaguacgucaagagcaccaagcugcggcucgccaccgggcugcgcaacaucccguccauccagagccggggccuguucggggcgaucgccggcuucaucgagggcggguggacgggcaugguggacgggugguacggcuaccaccaccagaacgagcagggguccggcuacgccgccgaccucaagagcacccagaacgccaucgacgagaucaccaacaaggugaacuccgucaucgagaagaugaacacccaguucacggcggugggcaaggaguucaaccaccuggagaagcgcaucgagaaccugaacaagaaggucgacgacggguuccucgacaucuggaccuacaacgccgagcugcuggugcuccuggagaacgagcggacccuggacuaccacgacagcaacgugaagaaccucuacgagaagguccgcucccagcugaagaacaacgccaaggagaucggcaacgggugcuucgaguucuaccacaagugcgacaacacgugcauggagagcgugaagaacggcaccuacgacuaccccaaguacuccgaggaggccaagcugaaccgggaggagaucgacggggugaagcucgagagcacccgcaucuaccagauccuggccaucuacuccaccgucgcgagcagccuggugcucguggucucccugggcgccaucagcuucuggaugugcuccaacggcagccugcagugccggaucugcaucuga

SEQ ID NO: 68048 - RNA, 1701 nt, Artificial Sequence; identical to SEQ ID NO: 67046
  derived and/or modified CDS sequence (opt1) from hemagglutinin__InfluenzaA__ADB89150

SEQ ID NO: 68049 - RNA, 1701 nt, Artificial Sequence
  derived and/or modified CDS sequence (opt1) from hemagglutinin__InfluenzaA__ADB89221
augaaggccauccuggugguccuccuguacaccuucgccaccgcgaacgccgacacgcugugcaucggcuaccacgccaacaacagcaccgacaccguggacaccgugcucgagaagaacgucacggugacccacuccgugaaccugcuggaggacaagcacaacgggaagcucugcaagcugcgcggcgucgcgccccugcaccucgggaagugcaacaucgccggcuggauccuggggaacccggagugcgagagccuguccaccgccagcuccuggagcuacaucguggagaccuccagcuccgacaacggcacgugcuaccccggcgacuucaucgacuacgaggagcuccgggagcagcugagcuccgugagcuccuucgagcgcuucgagaucuuccccaagaccagcuccuggcccaaccacgacagcaacaagggggucaccgccgccugcccgcacgccggcgcgaaguccuucuacaagaaccugaucuggcucgugaagaaggggaacagcuaccccaagcuguccaagagcuacaucaacgacaagggcaaggaggugcugguccucugggggauccaccaccccagcaccuccgccgaccagcagaaccuguaccagaacgccgacgccuacguguucgugggcagcucccgguacagcaagaaguucaagcccgagaucgccauccgcccgaagguccgggaccaggagggccgcaugaacuacuacuggacgcugguggagcccggggacaagaucaccuucgaggcgaccggcaaccucguggucccccgguacgccuucgccauggagcgcaacgccggguccggcaucaucaucagcgacacccccgugcacgacugcaacacgaccugccagaccccgaagggcgccaucaacaccucccugcccuuccagaacauccaccccaucacgaucgggaagugccccaaguacgucaagagcaccaagcugcggcucgcgaccggccugcgcaacgugccguccauccagagccgggggcuguucggcgccaucgccggguucaucgagggcggcuggaccgggaugguggacggcugguacggguaccaccaccagaacgagcagggcuccggguacgccgccgaccucaagagcacgcagaacgcgaucgacgagaucaccaacaaggugaacuccgucaucgagaagaugaacacccaguucaccgccgugggcaaggaguucaaccaccuggagaagcgcaucgagaaccugaacaagaaggucgacgacggcuuccucgacaucuggacguacaacgccgagcugcuggugcuccuggagaacgagcggacccuggacuaccacgacagcaacgugaagaaccucuacgagaagguccgcucccagcugaagaacaacgccaaggagaucgggaacggcugcuucgaguucuaccacaagugcgacaacacgugcauggagagcgugaagaacgggaccuacgacuaccccaaguacuccgaggaggccaagcugaaccgggaggagaucgacggcgugaagcucgagagcacccgcaucuaccagauccuggcgaucuacuccaccgucgccagcagccuggugcucguggucucccugggggccaucagcuucuggaugugcuccaacggcagccugcagugccggaucugcaucuga

SEQ ID NO: 68050 - RNA, 1701 nt, Artificial Sequence; identical to SEQ ID NO: 66746
  derived and/or modified CDS sequence (opt1) from hemagglutinin__InfluenzaA__ADB89241

SEQ ID NO: 68051 - RNA, 1701 nt, Artificial Sequence; identical to SEQ ID NO: 66693
  derived and/or modified CDS sequence (opt1) from hemagglutinin__InfluenzaA__ADB89251

SEQ ID NO: 68052 - RNA, 1701 nt, Artificial Sequence; identical to SEQ ID NO: 67140
  derived and/or modified CDS sequence (opt1) from hemagglutinin__InfluenzaA__ADB89261

SEQ ID NO: 68053 - RNA, 1701 nt, Artificial Sequence
  derived and/or modified CDS sequence (opt1) from hemagglutinin__InfluenzaA__ADB89271
augaaggccauccuggugguccuccuguacaccuucgccaccgcgaacgccgacacgcugugcaucggcuaccacgccaacaacagcaccgacaccguggacaccgugcucgagaagaacgucacggugacccacuccgugaaccugcuggaggacaagcacaacgggaagcucugcaagcugcgcggcgucgcgccccugcaccucgggaagugcaacaucgccggcuggauccuggggaacccggagugcgagagccuguccaccgccagcuccuggagcuacaucguggagaccuccagcuccgacaacggcacgugcuaccccggcgacuucaucgacuacgaggagcuccgggagcagcugagcuccgugagcuccuucgagcgcuucgagaucuuccccaagaccagcuccuggcccaaccacgacagcaacaagggggucaccgccgccugcccgcacgccggcgcgaaguccuucuacaagaaccugaucuggcucgugaagaaggggaacagcuaccccaagcuguccaagagcuacaucaacgacaagggcaaggaggugcugguccucugggggauccaccaccccagcaccuccgccgaccagcagagccuguaccagaacgccgacgccuacguguucgugggcuccagccgguacuccaagaaguucaagcccgagaucgccauccgcccgaagguccgggaccaggagggccgcaugaacuacuacuggacgcugguggagcccggggacaagaucaccuucgaggcgaccggcaaccucguggucccccgguacgccuucgccauggagcgcaacgccgggagcggcaucaucaucuccgacacccccgugcacgacugcaacacgaccugccagaccccgaagggcgccaucaacaccagccugcccuuccagaacauccaccccaucacgaucgggaagugccccaaguacgugaaguccaccaagcugcggcucgcgaccggccugcgcaacgucccgagcauccagucccgggggcuguucggcgccaucgccggguucaucgagggcggcuggaccgggaugguggacggcugguacggguaccaccaccagaacgagcagggcagcggguacgccgccgaccucaaguccacgcagaacgcgaucgacgagaucaccaacaaggugaacagcgucaucgagaagaugaacacccaguucaccgccgugggcaaggaguucaaccaccuggagaagcgcaucgagaaccugaacaagaaggucgacgacggcuuccucgacaucuggacguacaacgccgagcugcuggugcuccuggagaacgagcggacccuggacuaccacgacuccaacgugaagaaccucuacgagaagguccgcagccagcugaagaacaacgccaaggagaucgggaacggcugcuucgaguucuaccacaagugcgacaacacgugcaugggguccgugaagaacggcaccuacgacuaccccaaguacagcgaggaggccaagcugaaccgggaggagaucgacggggugaagcucgaguccacccgcaucuaccagauccuggcgaucuacagcaccgucgccagcucccuggugcucguggucagccugggcgccaucuccuucuggaugugcagcaacggcucccugcagugccggaucugcaucuga

SEQ ID NO: 68054 - RNA, 1701 nt, Artificial Sequence
  derived and/or modified CDS sequence (opt1) from hemagglutinin__InfluenzaA__ADB89281
augaaggccauccuggugguccuccuguacaccuucgccaccgcgaacgccgacacgcugugcaucggcuaccacgccaacaacagcaccgacaccguggacaccgugcucgagaagaacgucacggugacccacuccgugaaccugcuggaggacaagcacaacgggaagcucugcaagcugcgcggcgucgcgccccugcaccucgggaagugcaacaucgccggcuggauccuggggaacccggagugcgagagccuguccaccgccagcuccuggagcuacaucguggagaccuccagcuccgacaacggcacgugcuaccccggcgacuucaucgacuacgaggagcuccgggagcagcugagcuccgugagcuccuucgagcgcuucgagaucuuccccaagaccagcuccuggcccaaccacgacagcaacaagggggucaccgccgccugcccgcacgccggcgcgaaguccuucuacaagaaccugaucuggcucgugaagaaggggaacagcuaccccaagcuguccaagagcuacaucaacgacaagggcaaggaggugcugguccucugggggauccaccacccgcccaccagcgccgaccagcagucccuguaccagaacgccgacgccuacguguucgugggcacgagccgguacuccaagaaguucaagcccgagaucgccauccgccccaagguccggggccaggaggggcgcaugaacuacuacuggacccugguggagcccggcgacaagaucaccuucgaggcgaccgggaaccucguggucccccgguacgccuucgccauggagcgcaacgccggcagcggcaucaucaucuccgacacgccggugcacgacugcaacacgaccugccagacccccaagggggccaucaacaccagccugcccuuccagaacauccaccccaucaccaucggcaagugcccgaaguacgugaaguccaccaagcugcggcucgcgaccgggcugcgcaacguccccagcauccagucccggggccuguucggggccaucgccggcuucaucgagggcggguggacgggcaugguggacgggugguacggcuaccaccaccagaacgagcaggggagcggcuacgccgccgaccucaaguccacccagaacgcgaucgacgagaucaccaacaaggugaacagcgucaucgagaagaugaacacccaguucacggccgugggcaaggaguucaaccaccuggagaagcgcaucgagaaccugaacaagaaggucgacgacggguuccucgacaucuggaccuacaacgccgagcugcuggugcuccuggagaacgagcggacccuggacuaccacgacuccaacgugaagaaccucuacgagaagguccgcagccagcugaagaacaacgccaaggagaucggcaacgggugcuucgaguucuaccacaagugcgacaacacgugcauggaguccgugaagaacggcaccuacgacuaccccaaguacagcgaggaggccaagcugaaccgggaggagaucgacggggugaagcucgaguccacccgcaucuaccagauccuggcgaucuacagcaccgucgccuccagccuggugcucguggucagccugggcgccaucuccuucuggaugugcagcaacggcucccugcagugccggaucugcaucuga

SEQ ID NO: 68055 - RNA, 1701 nt, Artificial Sequence; identical to SEQ ID NO: 66693
  derived and/or modified CDS sequence (opt1) from hemagglutinin__InfluenzaA__ADB89291

SEQ ID NO: 68056 - RNA, 1701 nt, Artificial Sequence; identical to SEQ ID NO: 66693
  derived and/or modified CDS sequence (opt1) from hemagglutinin__InfluenzaA__ADB89301

SEQ ID NO: 68057 - RNA, 1701 nt, Artificial Sequence; identical to SEQ ID NO: 66693
  derived and/or modified CDS sequence (opt1) from hemagglutinin__InfluenzaA__ADB89311

SEQ ID NO: 68058 - RNA, 1701 nt, Artificial Sequence
  derived and/or modified CDS sequence (opt1) from hemagglutinin__InfluenzaA__ADB89321
augaaggccauccuggugguccuccuguacaccuucgccaccgcgaacgccgacacgcugugcaucggcuaccacgccaacaacagcaccgacaccguggacaccgugcucgagaagaacgucacggugacccacuccgugaaccugcuggaggacaagcacaacgggaagcucugcaagcugcgcggcgucgcgccccugcaccucgggaagugcaacaucgccggcuggauccuggggaacccggagugcgagagccuguccaccgccagcuccuggagcuacaucguggagaccuccagcuccgacaacggcacgugcuaccccggcgacuucaucgacuacgaggagcuccgggagcagcugagcuccgugagcuccuucgagcgcuucgagaucuuccccaagaccagcuccuggcccaaccacgacagcaacaagggggucaccgccgccugcccgcacgccggcgcgaaguccuucuacaagaaccugaucuggcucgugaagaaggggaacagcuaccccaagcuguccgagagcuacaucaacgacaagggcaaggaggugcugguccucugggggauccaccaccccagcaccuccgccgaccagcagagccuguaccagaacgccgacgccuacguguucgugggcacguccaaguacagcaagaaguucaagcccgagaucgccauccggccgaagguccgcgaccaggagggccggaugaacuacuacuggacccugguggagcccggggacaagaucaccuucgaggcgaccggcaaccucguggucccccgcuacgccuucgccauggagcggaacgccggguccggcaucaucaucagcgacacgcccgugcacgacugcaacacgaccugccagaccccgaagggcgccaucaacaccucccugcccuuccagaacauccaccccaucaccaucgggaagugccccaaguacgucaagagcaccaagcugcgccucgcgaccggccugcggaacgugccguccauccagagccgcgggcuguucggcgccaucgccggguucaucgagggcggcuggacggggaugguggacggcugguacggguaccaccaccagaacgagcagggcuccggguacgccgccgaccucaagagcacccagaacgcgaucgacgagaucaccaacaaggugaacuccgucaucgagaagaugaacacccaguucacggccgugggcaaggaguucaaccaccuggagaagcggaucgagaaccugaacaagaaggucgacgacggcuuccucgacaucuggaccuacaacgccgagcugcuggugcuccuggagaacgagcgcacccuggacuaccacgacagcaacgugaagaaccucuacgagaagguccggucccagcugaagaacaacgccaaggagaucgggaacggcugcuucgaguucuaccacaagugcgacaacacgugcauggagagcgugaagaacgggaccuacgacuaccccaaguacuccgaggaggccaagcugaaccgcgaggagaucgacggcgugaagcucgagagcacccggaucuaccagauccuggcgaucuacuccaccgucgccagcagccuggugcucguggucucccugggggccaucagcuucuggaugugcuccaacggcagccugcagugccgcaucugcaucuga

SEQ ID NO: 68059 - RNA, 1701 nt, Artificial Sequence
  derived and/or modified CDS sequence (opt1) from hemagglutinin__InfluenzaA__ADB89331
augaaggccauccuggugguccuccuguacaccuucgccaccgcgaacgccgacacgcugugcaucggcuaccacgccaacaacagcaccgacaccguggacaccgugcucgagaagaacgucacggugacccacuccgugaaccugcuggaggacaagcacaacgggaagcucugcaagcugcgcggcgucgcgccccugcaccucgggaagugcaacaucgccggcuggauccuggggaacccggagugcgagagccuguccaccgccagcuccuggagcuacaucguggagaccuccagcuccgacaacggcacgugcuaccccggcgacuucaucgacuacgaggagcuccgggagcagcugagcuccgugagcuccuucgagcgcuucgagaucuuccccaagaccagcuccuggcccaaccacgacagcaacaagggggucaccgccgccugcccgcacgccggcgcgaaguccuucuacaagaaccugaucuggcucgugaagaaggggaacagcuaccccaagcuguccaagagcuacaucaacgacaagggcaaggaggugcugguccucugggggauccaccaccccagcaccuccgccgaccagcagagccuguaccagaacgccgacgccuacguguucgugggcuccagcaaguacuccaagaaguucaagcccgagaucgccauccggccgaagguccgcgaccaggagggccggaugaacuacuacuggacgcugguggagcccggggacaagaucaccuucgaggcgaccggcaaccucguggucccccgcuacgccuucgccauggagcggaacgccgggagcggcaucaucaucuccgacacccccgugcacgacugcaacacgaccugccagaccccgaagggcgccaucaacaccagccugcccuuccagaacauccaccccaucacgaucgggaagugccccaaguacgugaaguccaccaagcugcgccucgcgaccggccugcggaacgucccgagcauccagucccgcgggcuguucggcgccaucgccggguucaucgagggcggcuggaccgggaugguggacggcugguacggguaccaccaccagaacgagcagggcagcggguacgccgccgaccucaaguccacgcagaacgcgaucgacgagaucaccaacaaggugaacagcgucaucgagaagaugaacacccaguucaccgccgugggcaaggaguucaaccaccuggagaagcggaucgagaaccugaacaagaaggucgacgacggcuuccucgacaucuggacguacaacgccgagcugcuggugcuccuggagaacgagcgcacccuggacuaccacgacuccaacgugaagaaccucuacgagaagguccggagccagcugaagaacaacgccaaggagaucgggaacggcugcuucgaguucuaccacaagugcgacaacacgugcauggaguccgugaagaacgggaccuacgacuaccccaaguacagcgaggaggccaagcugaaccgcgaggagaucgacggcgugaagcucgaguccacccgggucuaccagauccuggcgaucuacagcaccguggccagcucccuggugcucgucgugagccugggggccaucuccuucuggaugugcagcaacggcucccugcagugccgcaucugcaucuga

SEQ ID NO: 68060 - RNA, 1701 nt, Artificial Sequence; identical to SEQ ID NO: 66693
  derived and/or modified CDS sequence (opt1) from hemagglutinin__InfluenzaA__ADB89341

SEQ ID NO: 68061 - RNA, 1701 nt, Artificial Sequence; identical to SEQ ID NO: 66693
  derived and/or modified CDS sequence (opt1) from hemagglutinin__InfluenzaA__ADB89351

SEQ ID NO: 68062 - RNA, 1701 nt, Artificial Sequence; identical to SEQ ID NO: 66693
  derived and/or modified CDS sequence (opt1) from hemagglutinin__InfluenzaA__ADB89361

SEQ ID NO: 68063 - RNA, 1701 nt, Artificial Sequence; identical to SEQ ID NO: 66693
  derived and/or modified CDS sequence (opt1) from hemagglutinin__InfluenzaA__ADB89371

SEQ ID NO: 68064 - RNA, 1701 nt, Artificial Sequence; identical to SEQ ID NO: 67438
  derived and/or modified CDS sequence (opt1) from hemagglutinin__InfluenzaA__ADB89381

SEQ ID NO: 68065 - RNA, 1701 nt, Artificial Sequence
  derived and/or modified CDS sequence (opt1) from hemagglutinin__InfluenzaA__ADB89391
augaaggccauccuggugguccuccuguacaccuucgccaccgcgaacgccgacacgcugugcaucggcuaccacgccaacaacagcaccgacaccguggacaccgugcucgagaagaacgucacggugacccacuccgugaaccugcuggaggacaagcacaacgggaagcucugcaagcugcgcggcgucgcgccccugcaccucgggaagugcaacaucgccggcuggauccuggggaacccggagugcgagagccuguccaccgccagcuccuggagcuacaucguggagaccuccagcuccgacaacggcacgugcuaccccggcgacuucaucgacuacgaggagcuccgggagcagcugagcuccgugagcuccuucgagcgcuucgagaucuuccccaagaccagcuccuggcccaaccacgacagcaacaagggggucaccgccgccugccugcacgccggcgcgaaguccuucuacaagaaccucaucuggcuggugaagaaggggaacagcuacccgaagcuguccaagagcuacaucaacgacaagggcaaggaggugcucguccugugggggauccaccaccccagcaccuccgccgaccagcagagccuguaccagaacgccgacgccuacguguucgugggcacgucccgguacagcaagaaguucaagcccgagaucgccauccgccccaagguccgggaccaggagggccgcaugaacuacuacuggacccucguggagccgggggacaagaucaccuucgaggcgaccggcaaccugguggucccccgguacgccuucgccauggagcgcaacgccggguccggcaucaucaucagcgacacgcccgugcacgacugcaacacgaccugccagacccccaagggcgccaucaacaccucccugccguuccagaacauccaccccaucaccaucgggaagugccccaaguacgucaagagcaccaagcuccggcuggcgaccggccugcgcaacgugcccuccauccagagccgggggcuguucggcgccaucgccggguucaucgagggcggcuggacggggaugaucgacggcugguacggguaccaccaccagaacgagcagggcuccggguacgccgccgaccucaagagcacccagaacgcgaucgacgagaucaccaacaaggugaacuccgugaucgagaagaugaacacccaguucacggccgucggcaaggaguucaaccaccuggagaagcgcaucgagaaccucaacaagaagguggacgacggcuuccuggacaucuggaccuacaacgccgagcugcucguccugcuggagaacgagcggacccucgacuaccacgacagcaacgugaagaaccuguacgagaaggugcgcucccagcugaagaacaacgccaaggagaucgggaacggcugcuucgaguucuaccacaagugcgacaacacgugcauggagagcgucaagaacgggaccuacgacuacccgaaguacuccgaggaggccaagcucaaccgggaggagaucgacggcgugaagcuggagagcacccgcaucuaccagauccuggcgaucuacuccaccguggccagcagccucguccugguggugucccugggggccaucagcuucuggaugugcuccaacggcagccuccagugccggaucugcaucuga

SEQ ID NO: 68066 - RNA, 1701 nt, Artificial Sequence; identical to SEQ ID NO: 66680
  derived and/or modified CDS sequence (opt1) from hemagglutinin__InfluenzaA__ADB89401

SEQ ID NO: 68067 - RNA, 1701 nt, Artificial Sequence; identical to SEQ ID NO: 66693
  derived and/or modified CDS sequence (opt1) from hemagglutinin__InfluenzaA__ADB89411

SEQ ID NO: 68068 - RNA, 1701 nt, Artificial Sequence; identical to SEQ ID NO: 67140
  derived and/or modified CDS sequence (opt1) from hemagglutinin__InfluenzaA__ADB89431

SEQ ID NO: 68069 - RNA, 1701 nt, Artificial Sequence; identical to SEQ ID NO: 67046
  derived and/or modified CDS sequence (opt1) from hemagglutinin__InfluenzaA__ADB89441

SEQ ID NO: 68070 - RNA, 1701 nt, Artificial Sequence; identical to SEQ ID NO: 66693
  derived and/or modified CDS sequence (opt1) from hemagglutinin__InfluenzaA__ADB89461

SEQ ID NO: 68071 - RNA, 1701 nt, Artificial Sequence; identical to SEQ ID NO: 67140
  derived and/or modified CDS sequence (opt1) from hemagglutinin__InfluenzaA__ADB89481

SEQ ID NO: 68072 - RNA, 1701 nt, Artificial Sequence; identical to SEQ ID NO: 67140
  derived and/or modified CDS sequence (opt1) from hemagglutinin__InfluenzaA__ADB89491

SEQ ID NO: 68073 - RNA, 1701 nt, Artificial Sequence
  derived and/or modified CDS sequence (opt1) from hemagglutinin__InfluenzaA__ADB89501
augaaggccauccuggugguccuccuguacaccuucgccaccgcgaacgccgacacgcugugcaucggcuaccacgccaacaacagcaccgacaccguggacaccgugcucgagaagaacgucacggugacccacuccgugaaccugcuggaggacaagcacaacgggaagcucugcaagcugcgcggcgucgcgccccugcaccucgggaagugcaacaucgccggcuggauccuggggaacccggagugcgagagccuguccaccgccagcuccuggagcuacaucguggagaccuccagcuccgacaacggcacgugcuaccccggcgacuucaucgacuacgaggagcuccgggagcagcugagcuccgugagcuccuucgagcgcuucgagaucuuccccaagaccagcuccuggcccaaccacgacagcaacaagggggucaccgccgccugcccgcacgccggcgcgaaguccuucuacaagaaccugaucuggcucgugaagaaggggaacagcuaccccaagcuguccaagagcuacaucaacgacaagggcaaggaggugcugguccucugggggauccaccaccccagcaccuccgccgaccagcagagccuguaccagaacgccgacgccuacguguucgugggcuccagccgguacuccaagaaguucaagcccgagaucgccauccgcccgaagguccgggaccaggagggccgcaugaacuacuacuggacgcugguggagcccggggacaagaucaccuucgaggcgaccggcaaccucguggucccccgguacgccuucgccauggagcgcaacgccgggagcggcaucaucaucuccgacacccccgugcacgacugcaacacgaccugccagaccccgaagggcgccaucaacaccagccugcccuuccagaacauccaccccaucacgaucgggaagugccccaaguacgugaaguccaccaagcugcggcucgcgaccggccugcgcaacgucccgagcauccagucccgggggcuguucggcgccaucgccggguucaucgagggcggcuggaccgggcucguggacggcugguacggguaccaccaccagaacgagcagggcagcggguacgccgccgaccugaaguccacgcagaacgcgaucgacgagaucaccaacaaggugaacagcgucaucgagaagaugaacacccaguucaccgccgugggcaaggaguucaaccaccuggagaagcgcaucgagaaccucaacaagaaggucgacgacggcuuccuggacaucuggacguacaacgccgagcugcucgugcugcuggagaacgagcggacccucgacuaccacgacuccaacgugaagaaccuguacgagaagguccgcagccagcugaagaacaacgccaaggagaucgggaacggcugcuucgaguucuaccacaagugcgacaacacgugcauggaguccgugaagaacgggaccuacgacuaccccaaguacagcgaggaggccaagcucaaccgggaggagaucgacggcgugaagcuggaguccacccgcaucuaccagauccuggcgaucuacagcaccgucgccagcucccucgugcugguggucagccugggggccaucuccuucuggaugugcagcaacggcucccuccagugccggaucugcaucuga

SEQ ID NO: 68074 - RNA, 1701 nt, Artificial Sequence; identical to SEQ ID NO: 66693
  derived and/or modified CDS sequence (opt1) from hemagglutinin__InfluenzaA__ADB89511

SEQ ID NO: 68075 - RNA, 1701 nt, Artificial Sequence; identical to SEQ ID NO: 67140
  derived and/or modified CDS sequence (opt1) from hemagglutinin__InfluenzaA__ADB89531

SEQ ID NO: 68076 - RNA, 1701 nt, Artificial Sequence; identical to SEQ ID NO: 67140
  derived and/or modified CDS sequence (opt1) from hemagglutinin__InfluenzaA__ADB89541

SEQ ID NO: 68077 - RNA, 1701 nt, Artificial Sequence; identical to SEQ ID NO: 67853
  derived and/or modified CDS sequence (opt1) from hemagglutinin__InfluenzaA__ADB89551

SEQ ID NO: 68078 - RNA, 1701 nt, Artificial Sequence; identical to SEQ ID NO: 66693
  derived and/or modified CDS sequence (opt1) from hemagglutinin__InfluenzaA__ADB89561

SEQ ID NO: 68079 - RNA, 1701 nt, Artificial Sequence; identical to SEQ ID NO: 66693
  derived and/or modified CDS sequence (opt1) from hemagglutinin__InfluenzaA__ADB89571

SEQ ID NO: 68080 - RNA, 1701 nt, Artificial Sequence; identical to SEQ ID NO: 66693
  derived and/or modified CDS sequence (opt1) from hemagglutinin__InfluenzaA__ADB89581

SEQ ID NO: 68081 - RNA, 1701 nt, Artificial Sequence
  derived and/or modified CDS sequence (opt1) from hemagglutinin__InfluenzaA__ADB89591
augaaggccauccuggugguccuccuguacaccuucgccaccgcgaacgccgacacgcugugcaucggcuaccacgccaacaacagcaccgacaccguggacaccgugcucgagaagaacgucacggugacccacuccgugaaccugcuggaggacaagcacaacgggaagcucugcaagcugcgcggcgucgcgccccugcaccucgggaagugcaacaucgccggcuggauccuggggaacccggagugcgagagccuguccaccgccagcuccuggagcuacaucguggagaccuccagcuccgacaacggcacgugcuaccccggcgacuucaucgacuacgaggagcuccgggagcagcugagcuccgugagcuccuucgagcgcuucgagaucuuccccaagaccagcuccuggcccaaccacgacagcaacaagggggucaccgccgccugcccgcacgccggcgcgaaguccuucuacaagaaccugaucuggcucgugaagaaggggaacagcuaccccaagcuguccaagagcuacaucaacgacaagggcaaggaggugcugguccucugggggauccaccaccccagcaccuccgccgaccagcagagccuguaccagaacgccgacgccuacguguucgugggcacgucccgguacagcaagaaguucaagcccgagaucgccauccgcccgaagguccgggagcaggagggccgcaugaacuacuacugggcgcugguggagcccggggacaagaucaccuucgaggccaccggcaaccucguggucccccgguacgccuucgccauggagcgcaacgccggguccggcaucaucaucagcgacacccccgugcacgacugcaacacgaccugccagaccccgaagggcgcgaucaacaccucccugcccuuccagaacauccacagcaucacgaucgggaagugccccaaguacgugaaguccaccaagcugcggcucgccaccggccugcgcaacguccccagcauccagucccgggggcuguucggcgccaucgccggguucaucgagggcggcuggaccgggaugguggacggcugguacggguaccaccaccagaacgagcagggcagcggguacgccgcggaccucaaguccacgcagaacgccaucgacgagaucaccaacaaggugaacagcgucaucgagaagaugaacacccaguucaccgccgugggcaaggaguucaaccaccuggagaagcgcaucgagaaccugaacaagaaggucgacgacggcuuccucgacaucuggacguacaacgccgagcugcuggugcuccuggagaacgagcggacccuggacuaccacgacuccaacgugaagaaccucuacgagaagguccgcagccagcugaagaacaacgccaaggagaucgggaacggcugcuucgaguucuaccacaagugcgacaacacgugcauggaguccgugaagaacgggaccuacgacuacccgaaguacagcgaggaggcgaagcugaaccgggaggagaucgacggcgugaagcucgaguccacccgcaucuaccagauccuggccaucuacagcaccgucgccagcucccuggugcucguggucagccugggggccaucuccuucuggaugugcagcaacggcucccugcagugccggaucugcaucuga

SEQ ID NO: 68082 - RNA, 1701 nt, Artificial Sequence
  derived and/or modified CDS sequence (opt1) from hemagglutinin__InfluenzaA__ADB89601
augaaggccaucaucgugguccugcucuacaccuucgccaccgcgaacgccgacacgcugugcaucggcuaccacgccaacaacagcaccgacaccguggacaccgugcuggagaagaacgucacggugacccacuccgugaaccuccuggaggacaagcacaacgggaagcugugcaagcuccgcggcgucgcgccccugcaccuggggaagugcaacaucgccggcuggauccucgggaacccggagugcgagagccuguccaccgccagcuccuggagcuacaucguggagaccuccagcuccgacaacggcacgugcuaccccggcgacuucaucgacuacgaggagcugcgggagcagcucagcuccgugagcuccuucgagcgcuucgagaucuuccccaagaccagcuccuggcccaaccacgacagcaacaagggggucaccgccgccugcccgcacgccggcgcgaaguccuucuacaagaaccugaucuggcuggugaagaaggggaacagcuaccccaagcucuccaagagcuacaucaacgacaagggcaaggaggugcugguccugugggggauccaccaccccagcaccuccgccgaccagcagagccucuaccagaacgccgacgccuacguguucgugggcacgucccgguacagcaagaaguucaagcccgagaucgccauccgcccgaagguccgggaccaggagggccgcaugaacuacuacuggacccugguggagcccggggacaagaucaccuucgaggcgaccggcaaccugguggucccccgguacgccuucgccauggagcgcaacgccggguccggcaucaucaucagcgacacgcccgugcacgacugcaacacgaccugccagaccccgaagggcgccaucaacaccucccuccccuuccagaacauccaccccaucaccaucgggaagugccccaaguacgucaagagcaccaagcugcggcuggcgaccggccuccgcaacgugccguccauccagagccgggggcuguucggcgccaucgccggguucaucgagggcggcuggacggggaugguggacggcugguacggguaccaccaccagaacgagcagggcuccggguacgccgccgaccucaagagcacccagaacgcgaucgacaagaucaccaacaaggugaacuccgucaucgagaagaugaacacccaguucacggccgugggcaaggaguucaaccaccuggagaagcgcaucgagaaccugaacaagaaggucgacgacggcuuccuggacaucuggaccuacaacgccgagcuccuggugcugcucgagaacgagcggacccuggacuaccacgacagcaacgugaagaaccuguacgagaagguccgcucccagcucaagaacaacgccaaggagaucgggaacggcugcuucgaguucuaccacaagugcgacaacacgugcauggagagcgugaagaacgggaccuacgacuaccccaaguacuccgaggaggccaagcugaaccgggaggagaucgacggcgugaagcuggagagcacccgcaucuaccagauccucaccaucuacuccaccgucgcgagcagccuggugcugguggucucccucggggccaucagcuucuggaugugcuccaacggcagccugcagugccggaucugcaucuga

SEQ ID NO: 68083 - RNA, 1701 nt, Artificial Sequence; identical to SEQ ID NO: 67857
  derived and/or modified CDS sequence (opt1) from hemagglutinin__InfluenzaA__ADB89611

SEQ ID NO: 68084 - RNA, 1701 nt, Artificial Sequence; identical to SEQ ID NO: 67857
  derived and/or modified CDS sequence (opt1) from hemagglutinin__InfluenzaA__ADB89621

SEQ ID NO: 68085 - RNA, 1701 nt, Artificial Sequence
  derived and/or modified CDS sequence (opt1) from hemagglutinin__InfluenzaA__ADB89631
augaaggccauccugaucgugcuccuguacaccuucgccaccgcgaacgccgacacgcugugcaucggcuaccacgccaacaacagcaccgacaccgucgacaccgugcucgagaagaacgugacggucacccacuccgugaaccugcuggaggacaagcacaacgggaagcucugcaagcugcgcggcguggcgccccugcaccucgggaagugcaacaucgccggcuggauccuggggaacccggagugcgagagccuguccaccgccagcuccuggagcuacaucgucgagaccuccagcuccgacaacggcacgugcuaccccggcgacuucaucgacuacgaggagcuccgggagcagcugagcuccgugagcuccuucgagcgcuucgagaucuuccccaagaccagcuccuggcccaaccacgacagcaacaagggggugaccgccgccugcccgcacgccggcgcgaaguccuucuacaagaaccugaucuggcucgucaagaaggggaacagcuaccccaagcuguccaagagcuacaucaacgacaagggcaaggaggugcuggugcucugggggauccaccaccccagcaccuccgccgaccagcagagccuguaccagaacgccgacgccuacgucuucgugggcacgucccgguacagcaagaaguucaagcccgagaucgccauccgcccgaaggugcgggaccaggagggccgcaugaacuacuacuggacccuggucgagcccggggacaagaucaccuucgaggcgaccggcaaccucguggugccccgguacgccuucgccauggagcgcaacgccggguccggcaucaucaucagcgacacgcccguccacgacugcaacacgaccugccagaccccgaagggcgccaucaacaccucccugcccuuccagaacauccaccccaucaccaucgggaagugccccaaguacgucaagagcaccaagcugcggcucgcgaccggccugcgcaacaucccguccauccagagccgggggcuguucggcgccaucgccggguucaucgagggcggcuggacggggaugguggacggcugguacggguaccaccaccagaacgagcagggcuccggguacgccgccgaccucaagagcacccagaacgcgaucgacgagaucaccaacaaggugaacuccgugaucgagaagaugaacacccaguucacggccgugggcaaggaguucaaccaccuggagaagcgcaucgagaaccugaacaagaaggucgacgacggcuuccucgacaucuggaccuacaacgccgagcugcuggugcuccuggagaacgagcggacccuggacuaccacgacagcaacgucaagaaccucuacgagaaggugcgcucccagcugaagaacaacgccaaggagaucgggaacggcugcuucgaguucuaccacaagugcgacaacacgugcauggagagcgugaagaacgggaccuacgacuaccccaaguacuccgaggaggccaagcugaaccgggaggagaucgacggcgucaagcucgagagcacccgcaucuaccagauccuggcgaucuacuccaccguggccagcagccuggugcucgucgugucccugggggccaucagcuucuggaugugcuccaacggcagccugcagugccggaucugcaucuga

SEQ ID NO: 68086 - RNA, 1701 nt, Artificial Sequence; identical to SEQ ID NO: 67857
  derived and/or modified CDS sequence (opt1) from hemagglutinin__InfluenzaA__ADB89641

SEQ ID NO: 68087 - RNA, 1701 nt, Artificial Sequence; identical to SEQ ID NO: 66693
  derived and/or modified CDS sequence (opt1) from hemagglutinin__InfluenzaA__ADB89651

SEQ ID NO: 68088 - RNA, 1701 nt, Artificial Sequence; identical to SEQ ID NO: 66693
  derived and/or modified CDS sequence (opt1) from hemagglutinin__InfluenzaA__ADB89661

SEQ ID NO: 68089 - RNA, 1701 nt, Artificial Sequence; identical to SEQ ID NO: 67857
  derived and/or modified CDS sequence (opt1) from hemagglutinin__InfluenzaA__ADB89671

SEQ ID NO: 68090 - RNA, 1701 nt, Artificial Sequence; identical to SEQ ID NO: 66693
  derived and/or modified CDS sequence (opt1) from hemagglutinin__InfluenzaA__ADB89681

SEQ ID NO: 68091 - RNA, 1701 nt, Artificial Sequence; identical to SEQ ID NO: 66693
  derived and/or modified CDS sequence (opt1) from hemagglutinin__InfluenzaA__ADB89691

SEQ ID NO: 68092 - RNA, 1701 nt, Artificial Sequence; identical to SEQ ID NO: 67795
  derived and/or modified CDS sequence (opt1) from hemagglutinin__InfluenzaA__ADB89701

SEQ ID NO: 68093 - RNA, 1701 nt, Artificial Sequence
  derived and/or modified CDS sequence (opt1) from hemagglutinin__InfluenzaA__ADB89711
augaaggccauccuggugguccuccuguacaccuucgccaccgcgaacgccgacacgcugugcaucggcuaccacgccaacaacagcaccgacaccguggacaccgugcucgagaagaacgucacggugacccacuccgugaaccugcuggaggacaagcacaacgggaagcucugcaagcugcgcggcgucgcgccccugcaccucgggaagugcaacaucgccggcuggauccuggggaacccggagugcgagagccuguccaccgccagcuccuggagcuacaucguggagaccuccagcuccggcaacggcacgugcuaccccggggacuucaucgacuacgaggagcuccgggagcagcugagcuccgugagcuccuucgagcgcuucgagaucuuccccaagaccagcuccuggcccaaccacgacagcaacaagggcgucaccgccgccugcccgcacgccggggcgaaguccuucuacaagaaccugaucuggcucgugaagaagggcaacagcuaccccaagcuguccaagagcuacaucaacgacaaggggaaggaggugcugguccucuggggcauccaccaccccagcaccuccgccgaccagcagagccuguaccagaacgccgacgccuacguguucgugggcacgucccgguacagcaagaaguucaagcccgagaucgccauccgcccgaagguccgggaccaggaggggcgcaugaacuaccacuggacccugguggagcccggcgacaagaucaccuucgaggcgaccgggaaccucguggucccccgguacgccuucgccauggagcgcaacgccggcuccggcaucaucaucagcgacacgcccgugcacgacugcaacacgaccugccagaccccgaagggggccaucaacaccucccugcccuuccagaacauccaccccaucaccaucggcaagugccccaaguacgucaagagcaccaagcugcggcucgcgaccgggcugcgcaacgugccguccauccagagccggggccuguucggggccaucgccggcuucaucgagggcggguggacgggcaugguggacgggugguacggcuaccaccaccagaacgagcagggguccggcuacgccgccgaccucaagagcacccagaacgcgaucgacgagaucaccaacaaggugaacuccgucaucgagaagaugaacacccaguucacggccgugggcaaggaguucaaccaccuggagaagcgcaucgagaaccugaacaagaaggucgacgacggguuccucgacaucuggaccuacaacgccgagcugcuggugcuccuggagaacgagcggacccuggacuaccacgacagcaacgugaagaaccucuacgagaagguccgcucccagcugaagaacaacgccaaggagaucggcaacgggugcuucgaguucuaccacaagugcgacaacacgugcauggagagcgugaagaacggcaccuacgacuaccccaaguacuccgaggaggccaagcugaaccgggaggagaucgacggggugaagcucgagagcacccgcaucuaccagauccuggcgaucuacuccaccgucgccagcagccuggugcucguggucucccugggcgccaucagcuucuggaugugcuccaacggcagccugcagugccggaucugcaucuga

SEQ ID NO: 68094 - RNA, 1701 nt, Artificial Sequence
  derived and/or modified CDS sequence (opt1) from hemagglutinin__InfluenzaA__ADB89721
augaagaccaucaucgcccugagcuacauccucugccugguguucgcccagaagcugcccggcaacgacaacuccaccgcgacgcucugccuggggcaccacgccgucccgaacggcaccaucgugaagaccaucaccaacgaccagaucgaggugacgaacgccaccgagcugguccagagcuccagcaccggggagaucugcgacagcccccaccagauccucgacggcaagaacugcacccugaucgacgcccugcucggggacccccagugcgacggcuuccagaacaagaagugggaccuguucguggagcgcagcaaggccuacuccaacugcuaccccuacgacgugccggacuacgcgagccugcggucccucgucgccagcuccggcacgcuggaguucgacaacgagagcuucaacuggaccggggugacccagaacggcaccuccagcgccugcauccgccgguccaagaacagcuucuucucccgccugaacuggcucacgcaccugaacuucaaguaccccgcccugaacgugaccaugcccaacaacgagcaguucgacaagcucuaccuguggggcguccaccaccccgggaccgacaaggaccagaucuuccuguacgcgcaggccagcgggcggaucaccguguccacgaagcgcagccagcagaccgugaucccgaacaucggcagccggccccgcguccggaacauccccucccgcaucagcaucuacuggaccaucgugaagcccggcgacauccuccugaucaacuccaccgggaaccugaucgccccgcggggcuacuucaagauccagagcgggaaguccagcaucaugcgcuccgacgcccccaucggcaagugcaacagcgagugcaucacgcccaacggcuccauccccaacgacaagccguuccagaacgugaaccggaucaccuacggggccugcccccgcuacgucaagcagaacacccucaagcuggcgaccggcaugcggaacgugcccgagaagcagacgcgcgggaucuucggcgccaucgccggguucaucgagaacggcugggagggcaugguggacgggugguacggcuuccggcaccagaacagcgaggggcgcggccaggccgccgaccugaaguccacccaggcggccaucgaccagaucaacgggaagcucaaccggcugaucggcaagaccaacgagaaguuccaccagaucgagaaggaguucagcgaggucgagggccgcauccaggaccuggagaaguacguggaggacaccaagaucgaccucugguccuacaacgccgagcugcugguggcccucgagaaccagcacacgaucgaccugaccgacagcgagaugaacaagcuguucgagaagaccaagaagcagcuccgggagaacgccgaggacauggggaacggcugcuucaagaucuaccacaagugcgacaacgcgugcaucggguccauccgcaacggcaccuacgaccacgacgucuaccgcgacgaggcccugaacaaccgguuccagaucaaggggguggagcugaaguccggcuacaaggacuggauccucuggaucuccuucgccaucagcugcuuccugcugugcguggcccuccugggcuucaucaugugggccugccagaaggggaacauccgcugcaacaucugcaucuga

SEQ ID NO: 68095 - RNA, 1701 nt, Artificial Sequence
  derived and/or modified CDS sequence (opt1) from hemagglutinin__InfluenzaA__ADB90360
augaaggccauccuggugguccuccuguacaccuucgccaccgcgaacgccgacacgcugugcaucggcuaccacgccaacaacagcaccgacaccguggacaccgugcucgagaagaacgucacggugacccacuccgugaaccugcuggaggacaagcacaacgggaagcucugcaagcugcgcggcgucgcgccccugcaccucgggaagugcaacaucgccggcuggauccuggggaacccggagugcgagagccuguccaccgcgagcuccuggagcuacaucguggagaccuccagcuccaacaacggcacgugcuaccccggcgacuucaucgacuacgaggagcuccgggagcagcugagcuccgugagcuccuucgagcgcuucgagaucuuccccaagaccagcuccuggcccaaccacgacccgaacaagggggucaccgccgccugcccccacgccggcgccaagagcuucuacaagaaccugaucuggcucgugaagaaggggaacuccuaccccaagcugagcaaguccuacaucaacgacaagggcaaggaggugcugguccucugggggauccaccaccccagcaccagcgccgaccagcagucccuguaccagaacgccgacgccuacguguucgugggcacgagccgguacuccaagaaguucaagccggagaucgccauccgccccaagguccggggccaggaggggcgcaugaacuacuacuggacccugguggagcccggcgacaagaucaccuucgaggcgaccgggaaccucguggucccccgguacgccuucgccauggagcgcaacgccggcagcggcaucaucaucuccgacacgccggugcacgacugcaacacgaccugccagacccccaagggggccaucaacaccagccugcccuuccagaacauccaccccaucaccaucggcaagugcccgaaguacgugaaguccaccaagcugcggcucgcgaccgggcugcgcaacauccccagcauccagucccggggccuguucggggccaucgccggcuucaucgagggcggguggacgggcauggucgacgggugguacggcuaccaccaccagaacgagcaggggagcggcuacgccgccgaccucaaguccacccagaacgcgaucgacgagaucaccaacaaggugaacagcgugaucgagaagaugaacacccaguucacggccgucggcaaggaguucaaccaccuggagaagcgcaucgagaaccugaacaagaagguggacgacggguuccucgacaucuggaccuacaacgccgagcugcugguccuccuggagaacgagcggacccuggacuaccacgacuccaacgugaagaaccucuacgagaaggugcgcagccagcugaagaacaacgccaaggagaucggcaacgggugcuucgaguucuaccacaagugcgacaacacgugcauggaguccgucaagaacggcaccuacgacuaccccaaguacagcgaggaggccaagcugaaccgggaggagaucgacggggugaagcucgaguccacccgcaucuaccagauccuggcgaucuacagcaccguggccuccagccugguccucguggugagccugggcgccaucuccuucuggaugugcagcaacggcucccugcagugccggaucugcaucuga

SEQ ID NO: 68096 - RNA, 1701 nt, Artificial Sequence
  derived and/or modified CDS sequence (opt1) from hemagglutinin__InfluenzaA__ADB90370
augaaggccauccuggugguccuccuguacaccuucgccaccgcgaacgccgacacgcugugcaucggcuaccacgccaacaacagcaccgacaccguggacaccgugcucgagaagaacgucacggugacccacuccgugaaccugcuggaggacaagcacaacgggaagcucugcaagcugcgcggcgucgcgccccugcaccucgggaagugcaacaucgccggcuggauccuggggaacccggagugcgagagccuguccaccgcgagcuccuggagcuacaucguggagaccuccagcuccgacaacggcacgugcuaccccggcgacuucaucgacuacgaggagcuccgggagcagcugagcuccgugagcuccuucgagcgcuucgagaucuuccccaagaccagcuccuggcccaaccacgacccgaacaagggggucaccgccgccugcccccacgccggcgccaagagcuucuacaagaaccugaucuggcucgugaagaaggggaacuccuaccccaagcugagcaaguccuacaucaacgacaagggcaaggaggugcugguccucugggggauccaccaccccagcaccagcgccgaccagcagucccuguaccagaacgccgacgccuacguguucgugggcacgagccgguacuccaagaaguucaagccggagaucgccauccgccccaagguccggggccaggaggggcgcaugaacuacuacuggacccugguggagcccggcgacaagaucaccuucgaggcgaccgggaaccucguggucccccgguacgccuucgccauggagcgcaacgccggcagcggcaucaucaucuccgacacgccggugcacgacugcaacacgaccugccagacccccaagggggccaucaacaccagccugcccuuccagaacauccaccccaucaccaucggcaagugcccgaaguacgugaaguccaccaagcugcggcucgcgaccgggcugcgcaacguccccagcauccagucccggggccuguucggggccaucgccggcuucaucgagggcggguggacgggcaugguggacgggugguacggcuaccaccaccagaacgagcaggggagcggcuacgccgccgaccucaaguccacccagaacgcgaucgacgagaucaccaacaaggugaacagcgucaucgagaagaugaacacccaguucacggccgugggcaaggaguucaaccaccuggagaagcgcaucgagaaccugaacaagaaggucgacgacggguuccucgacaucuggaccuacaacgccgagcugcuggugcuccuggagaacgagcggacccuggacuaccacgacuccaacgugaagaaccucuacgagaagguccgcagccagcugaagaacaacgccaaggagaucggcaacgggugcuucgaguucuaccacaagugcgacaacacgugcauggaguccgugaagaacggcaccuacgacuaccccaaguacagcgaggaggccaagcugaaccgggaggagaucgacggggugaagcucgaguccacccgcaucuaccagauccuggcgaucuacagcaccgucgccuccagccuggugcucguggucagccugggcgccaucuccuucuggaugugcagcaacggcucccugcagugccggaucugcaucuga

SEQ ID NO: 68097 - RNA, 1701 nt, Artificial Sequence; identical to SEQ ID NO: 67612
  derived and/or modified CDS sequence (opt1) from hemagglutinin__InfluenzaA__ADB90414

SEQ ID NO: 68098 - RNA, 1701 nt, Artificial Sequence; identical to SEQ ID NO: 67140
  derived and/or modified CDS sequence (opt1) from hemagglutinin__InfluenzaA__ADC32409

SEQ ID NO: 68099 - RNA, 1701 nt, Artificial Sequence
  derived and/or modified CDS sequence (opt1) from hemagglutinin__InfluenzaA__ADC32410
augaaggccauccuggugguccuccuguacaccuucgccaccgcgaacgccgacacgcugugcaucggcuaccacgccaacaacagcaccgacaccguggacaccgugcucgagaagaacgucacggugacccacuccgugaaccugcuggaggacaagcacaacgggaagcucugcaagcugcgcggcgucgcgccccugcaccucgggaagugcaacaucgccggcuggauccuggggaacccggagugcgagagccuguccaccgccagcuccuggagcuacaucguggagaccuccagcuccgacaacggcacgugcuaccccggcgacuucaucgacuacgaggagcuccgggagcagcugagcuccgugagcuccuucgagcgcuucgagaucuuccccaagaccagcuccuggcccaaccacgacagcaacaagggggucaccgccgccugcccgcacgccggcgcgaaguccuucuacaagaaccugaucuggcucgugaagaaggggaacagcuaccccaagcuguccaagagcuacaucaacgacaagggcaaggaggugcugguccucugggggauccaccaccccagcaccuccgccgaccagcagagccuguaccagaacgccgacgccuacguguucgugggcacgucccgguacagcaagaaguucaagcccgagaucgccauccgcccgaagguccgggaccaggagggccgcaugaacuacuacuggacccugguggagcccggggacaagaucaccuucgaggcgaccggcaaccucguggucccccgguacgccuucgccauggagcgcaacgccggguccggcaucaucaucagcgacacgcccgugcacgacugcaacacgaccugccagaccccgaagggcgccaucaacaccucccugcccuuccagaacauccaccccaucaccaucgggaagugccccaaguacgucaagagcaccaagcugcggcucgcgaccggccugcgcaacgugccguccauccagagccgggggcuguucggcgccaucgccggguucaucgagggcggcuggacggggaugguggacggcugguacggguaccaccaccagaacgagcagggcuccggguacgccgccgaccucaagagcacccagaacgcgaucgacgagaucaccaacaaggugaacuccgucaucgagaagaugaacacccaguucacggccgugggcaaggaguucaaccaccuggagaagcgcaucgagaaccugaacaagaaggucgacgacggcuuccucgacaucuggaccuacaacgccgagcugcuggugcuccuggagaacgagaagacccuggacuaccacgacagcaacgugaagaaccucuacgagaagguccggucccagcugaagaacaacgccaaggagaucgggaacggcugcuucgaguucuaccacaagugcgacaacacgugcauggagagcgugaagaacgggaccuacgacuaccccaaguacuccgaggaggccaagcugaaccgcgaggagaucgacggcgugaagcucgagagcacccggaucuaccagauccuggcgaucuacuccaccgucgccagcagccuggugcucguggucucccugggggccaucagcuucuggaugugcuccaacggcagccugcagugccgcaucugcaucuga

SEQ ID NO: 68100 - RNA, 1701 nt, Artificial Sequence
  derived and/or modified CDS sequence (opt1) from hemagglutinin__InfluenzaA__ADC32411
augaaggccauccuggugguccuccuguacaccuucgccaccgcgaacgccgacacgcugugcaucggcuaccacgccaacaacagcaccgacaccguggacaccgugcucgagaagaacgucacggugacccacuccgugaaccugcuggaggacaagcacaacgggaagcucugcaagcugcgcggcgucgcgccccugcaccucgggaagugcaacaucgccggcuggauccuggggaacccggagugcgagagccuguccaccgccagcuccuggagcuacaucguggagaccuccagcuccgacaacggcacgugcuaccccggcgacuucaucgacuacgaggagcuccgggagcagcugagcuccgugagcuccuucgagcgcuucgagaucuuccccaagaccagcuccuggcccaaccacgacagcaacaagggggucaccgccgccugcccgcacgccggcgcgaaguccuucuacaagaaccugaucuggcucgugaagaaggggaacagcuaccccaagcuguccaagagcuacaucaacgacaagggcaaggaggugcugguccucugggggauccaccaccccagcaccuccgccgaccagcagagccuguaccagaacgccgacgccuacguguucgugggcacgucccgguacagcaagaaguucaagcccgagaucgccauccgcccgaagguccgggagcaggagggccgcaugaacuacuacuggacccugguggagcccggggacaagaucaccuucgaggcgaccggcaaccucguggucccccgguacgccuucgccauggagcgcaacgccggguccggcaucaucaucagcgacacgcccgugcacgacugcaacacgaccugccagaccccgaagggcgccaucaacaccucccugcccuuccagaacauccacagcaucaccaucgggaagugccccaaguacgugaaguccaccaagcugcggcucgcgaccggccugcgcaacguccccagcauccagucccgggggcuguucggcgccaucgccggguucaucgagggcggcuggacggggaugguggacggcugguacggguaccaccaccagaacgagcagggcagcggguacgccgccgaccucaaguccacccagaacgcgaucgacgagaucaccaacaaggugaacagcgucaucgagaagaugaacacccaguucacggccgugggcaaggaguucaaccaccuggccaagcgcaucgagaaccugaacaagaaggucgacgacggcuuccucgacaucuggaccuacaacgccgagcugcuggugcuccuggagaacgagcggacccuggacuaccacgacuccaacgugaagaaccucuacgagaagguccgcagccagcugaagaacaacgccaaggagaucgggaacggcugcuucgaguucuaccacaagugcgacaacacgugcauggaguccgugaagaacgggaccuacgacuacccgaaguacagcgaggaggcgaagcugaaccgggaggagaucgacggcgugaagcucgaguccacccgcaucuaccagauccuggccaucuacagcaccgucgccagcucccuggugcucguggucagccugggggccaucuccuucuggaugugcagcaacggcucccugcagugccggaucugcaucuga

SEQ ID NO: 68101 - RNA, 1701 nt, Artificial Sequence; identical to SEQ ID NO: 67046
  derived and/or modified CDS sequence (opt1) from hemagglutinin__InfluenzaA__ADC32412

SEQ ID NO: 68102 - RNA, 1701 nt, Artificial Sequence; identical to SEQ ID NO: 66693
  derived and/or modified CDS sequence (opt1) from hemagglutinin__InfluenzaA__ADC32413

SEQ ID NO: 68103 - RNA, 1701 nt, Artificial Sequence; identical to SEQ ID NO: 67140
  derived and/or modified CDS sequence (opt1) from hemagglutinin__InfluenzaA__ADC32414

SEQ ID NO: 68104 - RNA, 1701 nt, Artificial Sequence; identical to SEQ ID NO: 67140
  derived and/or modified CDS sequence (opt1) from hemagglutinin__InfluenzaA__ADC32415

SEQ ID NO: 68105 - RNA, 1701 nt, Artificial Sequence; identical to SEQ ID NO: 67140
  derived and/or modified CDS sequence (opt1) from hemagglutinin__InfluenzaA__ADC32416

SEQ ID NO: 68106 - RNA, 1701 nt, Artificial Sequence
  derived and/or modified CDS sequence (opt1) from hemagglutinin__InfluenzaA__ADC32417
augaaggccauccuggugguccuccuguacaccuucgccaccgcgaacgccgacacgcugugcaucggcuaccacgccaacaacagcaccgacaccguggacaccgugcucgagaagaacgucacggugacccacuccgugaaccugcuggaguacaagcacaacgggaagcucugcaagcugcgcggcgucgcgccccugcaccucgggaagugcaacaucgccggcuggauccuggggaacccggagugcgagagccuguccaccgccagcuccuggagcuacaucguggagaccuccagcuccgacaacggcacgugcuaccccggcgacuucaucgacuacgaggagcuccgggagcagcugagcuccgugagcuccuucgagcgcuucgagaucuuccccaagaccagcuccuggcccaaccacgacagcaacaagggggucaccgccgccugcccgcacgccggcgcgaaguccuucuacaagaaccugaucuggcucgugaagaaggggaacagcuaccccaagcuguccaagagcuacaucaacgacaagggcaaggaggugcugguccucugggggauccaccaccccagcaccuccgccgaccagcagagccuguaccagaacgccgacgccuacguguucgugggcacgucccgguacagcaagaaguucaagcccgagaucgccauccgcccgaagguccgggagcaggagggccgcaugaacuacuacuggacccugguggagcccggggacaagaucaccuucgaggcgaccggcaaccucguggucccccgguacgccuucgccauggagcgcaacgccggguccggcaucaucaucagcgacacgcccgugcacgacugcaacacgaccugccagaccccgaagggcgccaucaacaccucccugcccuuccagaacauccaccccaucaccaucgggaagugccccaaguacgucaagagcaccaagcugcggcucgcgaccggccugcgcaacgugccguccauccagagccgggggcuguucggcgccaucgccggguucaucgagggcggcuggacggggaugguggacggcugguacggguaccaccaccagaacgagcagggcuccggguacgccgccgaccucaagagcacccagaacgcgaucgacgagaucaccaacaaggugaacuccgucaucgagaagaugaacacccaguucacggccgugggcaaggaguucaaccaccuggagaagcgcaucgagaaccugaacaagaaggucgacgacggcuuccucgacaucuggaccuacaacgccgagcugcuggugcuccuggagaacgagcggacccuggacuaccacgacagcaacgugaagaaccucuacgagaagguccgcucccagcugaagaacaacgccaaggagaucgggaacggcugcuucgaguucuaccacaagugcaacaacacgugcauggagagcgugaagaacgggaccuacgacuaccccaaguacuccgaggaggccaagcugaaccgggaggagaucgacggcgugaagcucgagagcacccgcaucuaccagauccuggcgaucuacuccaccgucgccagcagccuggugcucguggucucccugggggccaucagcuucuggaugugcuccaacggcagccugcagugccggaucugcaucuga

SEQ ID NO: 68107 - RNA, 1701 nt, Artificial Sequence; identical to SEQ ID NO: 67140
  derived and/or modified CDS sequence (opt1) from hemagglutinin__InfluenzaA__ADC32418

SEQ ID NO: 68108 - RNA, 1701 nt, Artificial Sequence
  derived and/or modified CDS sequence (opt1) from hemagglutinin__InfluenzaA__ADC32419
augaaggccauccuggugguccuccuguacaccuucgccaccgcgaacgccgacacgcugugcaucggcuaccacgccaacaacagcaccgacaccguggacaccgugcucgagaagaacgucacggugacccacuccgugaaccugcuggaggacaagcacaacgggaagcucugcaagcugcgcggcgucgcgccccugcaccucgggaagugcaacaucgccggcuggauccuggggaacccggagugcgagagccuguccaccgccagcuccuggagcuacaucguggagaccuccagcuccgacaacggcacgugcuaccccggcgacuucaucgacuacgaggagcuccgggagcagcugagcuccgugagcuccuucgagcgcuucgagaucuuccccaagaccagcuccuggcccaaccacgacagcaacaagggggucaccgccgccugcccgcacgccggcgcgaaguccuucuacaagaaccugaucuggcucgugaagaaggggaacagcuaccccaagcuguccaagagcuacaucaacgacaagggcaaggaggugcugguccucugggggauccaccaccccagcaccuccgccgaccagcagagccuguaccagaacgccgacgccuacguguucgugggcacgucccgguacagcaagaaguucaagcccgagaucgccauccgcccgaagguccgggagcaggagggccgcaugaacuacuacuggacccugguggagcccggggacaagaucaccuucgaggcgaccggcaaccucguggucccccgguacgccuucgccauggagcgcaacgccggguccggcaucaucaucagcgacacgcccgugcacgacugcaacacgaccugccagaccccgaagggcgccaucaacaccucccugcccuuccagaacauccacagcaucaccaucgggaagugccccaaguacgugaaguccaccaagcugcggcucgcgaccggccugcgcaacguccccagcauccagucccgggggcuguucggcgccaucgccggguucaucgagggcggcuggacggggaugguggacggcugguucggguaccaccaccagaacgaccagggcagcgccuacgccgcggaccucaaguccacccagaacgccaucgacgagaucaccaacaaggugaacagcgucaucgagaagaugaacacccaguucacggccguggggaaggaguucaaccaccuggagaagcgcaucgagaaccugaacaagaaggucgacgacggcuuccucgacaucuggaccuacaacgccgagcugcuggugcuccuggagaacgagcggacccuggacuaccacgacuccaacgugaagaaccucuacgagaagguccgcagccagcugaagaacaacgccaaggagaucggcaacgggugcuucgaguucuaccacaagugcgacaacacgugcauggaguccgugaagaacggcaccuacgacuacccgaaguacagcgaggaggcgaagcugaaccgggaggagaucgacggggugaagcucgaguccacccgcaucuaccagauccuggccaucuacagcaccgucgccagcucccuggugcucguggucagccugggcgccaucuccuucuggaugugcagcaacgggucccugcagugccggaucugcaucuga

SEQ ID NO: 68109 - RNA, 1701 nt, Artificial Sequence; identical to SEQ ID NO: 67140
  derived and/or modified CDS sequence (opt1) from hemagglutinin__InfluenzaA__ADC32420

SEQ ID NO: 68110 - RNA, 1701 nt, Artificial Sequence; identical to SEQ ID NO: 67140
  derived and/or modified CDS sequence (opt1) from hemagglutinin__InfluenzaA__ADC32421

SEQ ID NO: 68111 - RNA, 1701 nt, Artificial Sequence
  derived and/or modified CDS sequence (opt1) from hemagglutinin__InfluenzaA__ADC32422
augaaggccauccuggugguccuccuguacaccuucgccaccgcgaacgccgacacgcugugcaucggcuaccacgccaacaacagcaccgacaccguggacaccgugcucgagaagaacgucacggugacccacuccgugaaccugcuggaggacaagcacaacgggaagcucugcaagcugcgcggcgucgcgccccugcaccucgggaagugcaacaucgccggcuggauccuggggaacccggagugcgagagccuguccaccgccagcuccuggagcuacaucguggagaccuccagcuccgacaacggcacgugcuaccccggcgacuucaucgacuacgaggagcuccgggagcagcugagcuccgugagcuccuucgagcgcuucgagaucuuccccaagaccagcuccuggcccaaccacgacagcaacaagggggucaccgccgccugcccgcacgccggcgcgaaguccuucuacaagaaccugaucuggcucgugaagaaggggaacagcuaccccaagcuguccaagagcuacaucaacgacaagggcaaggaggugcugguccucugggggauccaccaccccagcaccuccgccgaccagcagagccuguaccagaacgccgacgccuacguguucgugggcacgucccgguacagcaagaaguucaagcccgagaucgccauccgcccgaagguccgggagcaggagggccgcaugaacuacuacuggacccugguggagcccggggacaagaucaccuucgaggcgaccggcaaccucauggugccccgguacgccuucgccauggagcgcaacgccggguccggcaucaucaucagcgacacgcccguccacgacugcaacacgaccugccagaccccgaagggcgccaucaacaccucccugcccuuccagaacauccacagcaucaccaucgggaagugccccaaguacgugaaguccaccaagcugcggcucgcgaccggccugcgcaacgugcccagcauccagucccgggggcuguucggcgccaucgccggguucaucgagggcggcuggacggggauggucgacggcugguacggguaccaccaccagaacgagcagggcagcggguacgccgccgaccucaaguccacccagaacgcgaucgacgagaucaccaacaaggugaacagcgugaucgagaagaugaacacccaguucacggccgucggcaaggaguucaaccaccuggagaagcgcaucgagaaccugaacaagaagguggacgacggcuuccucgacaucuggaccuacaacgccgagcugcugguccuccuggagaacgagcggacccuggacuaccacgacuccaacgugaagaaccucuacgagaaggugcgcagccagcugaagaacaacgccaaggagaucgggaacggcugcuucgaguucuaccacaagugcgacaacacgugcauggaguccgucaagaacgggaccuacgacuacccgaaguacagcgaggaggccaagcugaaccgggaggagaucgacggcgugaagcucgaguccacccgcaucuaccagauccuggcgaucuacagcaccguggccagcucccugguccucguggugagccugggggccaucuccuucuggaugugcagcaacggcucccugcagugccggaucugcaucuga

SEQ ID NO: 68112 - RNA, 1701 nt, Artificial Sequence
  derived and/or modified CDS sequence (opt1) from hemagglutinin__InfluenzaA__ADC32423
augaaggccauccuggugguccuccuguacaccuucgccaccgcgaacgccgacacgcugugcaucggcuaccacgccaacaacagcaccgacaccguggacaccgugcucgagaagaacgucacggugacccacuccgugaaccugcuggaggacaagcacaacgggaagcucugcaagcugcgcggcgucgcgccccugcaccucgggaagugcaacaucgccggcuggauccuggggaacccggagugcgagagccuguccaccgccagcuccuggagcuacaucguggagaccuccagcuccgacaacggcacgugcuaccccggcgacuucaucgacuacgaggagcuccgggagcagcugagcuccgugagcuccuucgagcgcuucgagaucuuccccaagaccagcuccuggcccaaccacgacagcaacaagggggucaccgccgccugcccgcacgccggcgcgaaguccuucuacaagaaccugaucuggcucgugaagaaggggaacagcuaccccaagcuguccaagagcuacaucaacgacaagggcaaggaggugcugguccucugggggauccaccaccccagcaccuccgccgaccagcagagccuguaccagaacgccgacgccuacguguucgugggcacgucccgguacagcaagaaguucaagcccgagaucgccauccgcccgaagguccgggagcaggagggccgcaugaacuacuacuggacccugguggagcccggggacaagaucaccuucgaggcgaccggcaaccucguggucccccgguacgccuucgccauggagcgcaacgccggguccggcaucaucaucagcgacacgcccgugcacgacugcaacacgaccugccagaccccgaagggcgccaucaacaccucccugcccuuccagaacauccacagcaucaccaucgggaagugccccaaguacgugaaguccaccaagcugcggcucgcgaccggccugcgcaacguccccagcauccagucccgggggcuguucggcgccaucgccggguucaucgagggcggcuggacggggaugguggacggcugguacggguaccaccaccagaacgagcagggcagcggguacgccgccgaccucaaguccacccagaacgcgaucgacgagaucaccaacaaggugaacagcgucaucgagaagaugaacacccaguucacggccgugggcaaggaguucaaccaccuggagaagcgcaucgagaaccugaacaagaaggucaacgacggcuuccucgacaucuggaccuacaacgccgagcugcuggugcuccuggagaacgagcggacccuggacuaccacgacuccaacgugaagaaccucuacgagaagguccgcagccagcugaagaacaacgccaaggagaucgggaacggcugcuucgaguucuaccacaagugcgacaacacgugcauggaguccgugaagaacgggaccuacgacuacccgaaguacagcgaggaggccaagcugaaccgggaggagaucgacggcgugaagcucgaguccacccgcaucuaccagauccuggcgaucuacagcaccgucgccagcucccuggugcucguggucagccugggggccaucuccuucuggaugugcagcaacggcucccugcagugccggaucugcaucuga

SEQ ID NO: 68113 - RNA, 1701 nt, Artificial Sequence
  derived and/or modified CDS sequence (opt1) from hemagglutinin__InfluenzaA__ADC32434
augaaggccauccuggugguccuccuguacaccuucgccaccgcgaacgccgacacgcugugcaucggcuaccacgccaacaacagcaccgacaccguggacaccgugcucgagaagaacgucacggugacccacuccgugaaccugcuggaggacaagcacaacgggaagcucugcaagcugcgcggcgucgcgccccugcaccucgggaagugcaacaucgccggcuggauccuggggaacccggagugcgagagccuguccaccgccagcuccuggagcuacaucguggagaccuccagcuccgacaacggcacgugcuaccccggcgacuucaucgacuacgaggagcuccgggagcagcugagcuccgugagcuccuucgagcgcuucgagaucuuccccaagaccagcuccuggcccaaccacgacagcaacaagggggucaccgccgccugcccgcacgccggcgcgaaguccuucuacaagaaccugaucuggcucgugaagaaggggaacagcuaccccaagcuguccaagagcuacaucaacgacaagggcaaggaggugcugguccucugggggauccaccaccccagcaccuccgccgaccagcagagccuguaccagaacgccgacgccuacguguucgugggcacgucccgguacagcaagaaguucaagcccgagaucgccauccgcccgaagguccgggaccaggagggccgcaugaacuacuacuggacccugguggagcccggggacaagaucaccuucgaggcgaccggcaaccucguggucccccgguacgccuucgccauggagcgcaacgccggguccggcaucaucaucagcgacacgcccgugcacgacugcaacacgaccugccagaccccgaagggcgccaucaacaccucccugcccuuccagaacauccaccccaucaccaucgggaagugccccaaguacgucaagagcaccaagcugcggcucgcgaccggccugcgcaacgugccguccauccagagccgggggcuguucggcgccaucgccggguucaucgagggcggcuggacggggaugguggacggcugguacggguaccaccaccagaacgagcagggcuccggguacgccgccgaccucaagagcacccagcacgcgaucgacgagaucaccaacaaggugaacuccgucaucgagaagaugaacacccaguucacggccgugggcaaggaguucaaccaccuggagaagcgcaucgagaaccugaacaagaaggucgacgacggcuuccucgacaucuggaccuacaacgccgagcugcuggugcuccuggagaacgagcggacccuggacuaccacgacagcaacgugaagaaccucuacgagaagguccgcucccagcugaagaacaacgccaaggagaucgggaacggcugcuucgaguucuaccacaagugcgacaacacgugcauggagagcgugaagaacgggaccuacgacuaccccaaguacuccgaggaggccaagcugaaccgggaggagaucgacggcgugaagcucgagagcacccgcaucuaccagauccuggcgaucuacuccaccgucgccagcagccuggugcucguggucucccugggggccaucagcuucuggaugugcuccaacggcagccugcagugccggaucugcaucuga

SEQ ID NO: 68114 - RNA, 1701 nt, Artificial Sequence; identical to SEQ ID NO: 68113
  derived and/or modified CDS sequence (opt1) from hemagglutinin__InfluenzaA__ADC32435

SEQ ID NO: 68115 - RNA, 1701 nt, Artificial Sequence
  derived and/or modified CDS sequence (opt1) from hemagglutinin__InfluenzaA__ADC34940
augaagaccaucaucgcccugagcuacauccucugccugguguucgcccagaagcugcccggcaacgacaacuccaccgcgacgcucugccuggggcaccacgccgucccgaacggcaccaucgugaagaccaucaccaacgaccagaucgaggugacgaacgccaccgagcugguccagagcuccagcaccgggggcaucugcgacagcccccaccagauccucgacggggagaacugcacccugaucgacgcccugcucggcgacccccagugcgacggcuuccagaacaagaagugggaccuguucguggagcgcagcaaggccuacuccaacugcuaccccuacgacgugccggacuacgcgagccugcggucccucgucgccagcuccgggacgcuggaguucaacaacgagcgcuucaacuggaccggcgugacccagaacgggaccagcuccgccugcaagcggggcagcgacaacuccuucuucagccgccugaacuggcucacgcaccugaaguucaaguaccccgcccugaacgugaccaugcccaacaacgagaaguucgacaagcucuacaucuggggcguccaccaccccgggaccgacaacgaccagaucuuccugcacgcgcaggccuccggccggaucaccgugagcacgaagcgcucccagcagaccgugaucccgaacaucgggagccggccccgcguccggaacauccccagccgcaucuccaucuacuggaccaucgugaagcccggcgacauccugcucaucaacagcaccgggaaccugaucgccccgcggggcuacuucaagauccgcuccggcaagagcuccaucaugaaguccgacgcccccaucgggaagugcaacuccgagugcaucacgcccaacggcagcauccccaacgacaagccguuccagaacgugaaccggaucaccuacggggccugcccccgcuacgucaagcagaacacccugaagcucgcgaccggcaugcggaacgugcccgagaagcagacgcgcgggaucuucggcgccaucgccggcuucaucgagaacgggugggagggcaugguggacgggugguacggcuuccggcaccagaacuccgaggggaucggccaggccgccgaccucaagagcacccaggcggccaucaaccagaucaacggcaagcugaaccgccugaucgggaagaccaacgagaaguuccaccagaucgagaaggaguucuccgaggucgagggccggauccaggaccuggagaaguacguggaggacaccaagaucgaccuguggagcuacaacgccgagcuccugguggcccuggagaaccagcacacgaucgaccucaccgacuccgagaugaacaagcuguucgagcgcaccaagaagcagcugcgggagaacgccgaggacauggggaacggcugcuucaagaucuaccacaagugcgacaacgcgugcaucgggagcauccgcaacggcaccuacgaccacgacgucuaccgcgacgaggcccucaacaaccgguuccagaucaagggcguggagcugaaguccggguacaaggacuggauccuguggaucagcuucgccaucuccugcuuccuccugugcguggcccugcucggcuucaucaugugggccugccagaaggggaacauccgcugcaacaucugcaucuga

SEQ ID NO: 68116 - RNA, 1701 nt, Artificial Sequence; identical to SEQ ID NO: 68028
  derived and/or modified CDS sequence (opt1) from hemagglutinin__InfluenzaA__ADC38987

SEQ ID NO: 68117 - RNA, 1701 nt, Artificial Sequence
  derived and/or modified CDS sequence (opt1) from hemagglutinin__InfluenzaA__ADC38997
augaaggccauccuggugguccuccuguacaccuucgccaccgcgaacgccgacacgcugugcaucggcuaccacgccaacaacagcaccgacaccguggacaccgugcucgagaagaacgucacggugacccacuccgugaaccugcuggaggacaagcacaacgggaagcucugcaagcugcgcggcgucgcgccccugcaccucgggaagugcaacaucgccggcuggauccuggggaacccggagugcgagagccuguccaccgccagcuccuggagcuacaucguggagaccuccagcuccgacaacggcacgugcuaccccggcgacuucaucgacuacgaggagcuccgggagcagcugagcuccgugagcuccuucgagcgcuucgagaucuuccccaagaccagcuccuggcccaaccacgacagcaacaagggggucaccgccgccugcccgcacgccggcgcgaaguccuucuacaagaaccugaucuggcucgugaagaaggggaacagcuaccccaagcuguccaagagcuacaucaacgacaagggcaaggacgugcugguccucugggggauccaccaccccagcaccuccgccgaccagcagagccuguaccagaacgccgacgccuacguguucgugggcacgucccgguacagcaagaaguucaagcccgagaucgccauccgcccgaagguccgggaccaggagggccgcaugaacuacuacuggacccugguggagcccggggacaagaucaccuucgaggcgaccggcaaccucguggucccccgguacgccuucgccauggagcgcaacgccggguccggcaucaucaucagcgacacgcccgugcacgacugcaacacgaccugccagaccccgaagggcgccaucaacaccucccugcccuuccagaacauccaccccaucaccaucgggaagugccccaaguacgucaagagcaccaagcugcggcucgcgaccggccugcgcaacgugccguccauccagagccgggggcuguucggcgccaucgccggguucaucgagggcggcuggacggggaugguggacggcugguacggguaccaccaccagaacgagcagggcuccggguacgccgccgaccucaagagcacccagaacgcgaucgacgagaucaccaacaaggugaacuccgucaucgagaagaugaacacccaguucacggccgugggcaaggaguucaaccaccuggagaagcgcaucgagaaccugaacaagaaggucgacgacggcuuccucgacaucuggaccuacaacgccgagcugcuggugcuccuggagaacgagcggacccuggacuaccacgacagcaacgugaagaaccucuacgagaagguccgcucccagcugaagaacaacgccaaggagaucgggaacggcugcuucgaguucuaccacaagugcgacaacacgugcauggagagcgugaagaacgggaccuacgacuaccccaaguacuccgaggaggccaagcugaaccgggaggagaucgacggcgugaagcucgagagcacccgcaucuaccagauccuggcgaucuacuccaccgucgccagcagccuggugcucguggucucccugggggccaucagcuucuggaugugcuccaacggcagccugcagugccggaucugcaucuga

SEQ ID NO: 68118 - RNA, 1701 nt, Artificial Sequence; identical to SEQ ID NO: 67794
  derived and/or modified CDS sequence (opt1) from hemagglutinin__InfluenzaA__ADC39007

SEQ ID NO: 68119 - RNA, 1698 nt, Artificial Sequence
  derived and/or modified CDS sequence (opt1) from hemagglutinin__InfluenzaA__ADC45604
augaaggccaagcugcucgugcugcugugcaccuucaccgccacguacgcggacaccaucugcaucggcuaccacgccaacaacagcaccgacaccgucgacacggugcucgagaagaacgugaccgucacccacuccgugaaccugcuggagaacagccacaacgggaagcucugccugcugaagggcaucgcgccccuccagcuggggaacugcuccguggccggcuggauccuggggaacccggagugcgagcuccugaucagcaaggaguccuggagcuacaucgucgagaagcccaaccccgagaacgggaccugcuaccccggccacuucgccgacuacgaggagcugcgcgagcagcucuccagcguguccagcuucgagcgguucgagaucuucccgaaggaguccagcuggcccaaccacacggugaccggggucuccgccagcugcucccacaacggcgagagcuccuucuaccgcaaccugcuguggcucaccgggaagaacggccuguaccccaaccugagcaaguccuacgccaacaacaaggagaaggaggugcucgugcuguggggcguccaccacccgcccaacaucggcgaccagaaggcccuguaccacaccgagaacgccuacgugagcguggucagcucccacuacagccggaaguucacgcccgagaucgcgaagcgccccaaggugcgggaccaggagggccgcaucaacuacuacuggacccuccuggagcccggggacaccaucaucuucgaggccaacggcaaccugaucgccccgcgguacgccuucgcccucucccgcgggcugggcagcggcaucaucaacuccaacgcgcccauggacaagugcgacgccaagugccagacgccccagggggccaucaacagcucccugcccuuccagaacgugcacccggucaccaucggcgagugccccaaguacgugcggagcgccaagcuccgcauggugaccgggcugcggaacauccccuccauccagagccgcggccuguucggggccaucgcgggcuucaucgagggcggguggaccggcauggucgacgggugguacggcuaccaccaccagaacgagcagggguccggcuacgccgccgaccagaaguccacccagaacgccaucaacggcaucacgaacaaggugaacagcgugaucgagaagaugaacacccaguucaccgccgucgggaaggaguucaacaagcucgagcggcgcauggagaaccugaacaagaagguggacgacggcuucaucgacaucuggaccuacaacgcggagcugcucguccugcuggagaacgagcggacgcucgacuuccacgacagcaacgugaagaaccuguacgagaaggugaagucccagcugaagaacaacgccaaggagaucgggaacggcugcuucgaguucuaccacaagugcaacgacgagugcauggagagcgucaagaacgggaccuacgacuaccccaaguacuccgaggagagcaagcucaaccgcgagaagaucgacggcgugaagcuggaguccaugggcguguaccagauccuggccaucuacagcaccgucgccagcucccucgugcugcuggugagccucggggccaucuccuucuggaugugcagcaacggcucccugcagugccggaucugcaucuga

SEQ ID NO: 68120 - RNA, 1698 nt, Artificial Sequence
  derived and/or modified CDS sequence (opt1) from hemagglutinin__InfluenzaA__ADC45626
augaaggugaagcugcucguccugcugugcaccuucaccgccacguacgccgacaccaucugcaucggcuaccacgcgaacaacagcaccgacaccguggacacggugcucgagaagaacgucaccgugacccacuccgugaaccugcuggaggacaaccacaacgggaagcucugccugcugaagggcaucgcgccccuccagcuggggaacugcagcgucgccggcuggauccuggggaacccggagugcgagcuccugaucuccaaggagagcugguccuacaucguggagaagcccaaccccgagaacgggaccugcuaccccggccacuucgccgacuacgaggagcugcgcgagcagcucagcuccgugagcuccuucgagcgguucgagaucuucccgaaggagagcuccuggcccaaccacacggucaccggggugagcgccuccugcagccacaacggcgaguccagcuucuacaagaaccugcuguggcucaccgggaagaacggccuguaccccaaccuguccaagagcuacgccaacaacaaggagaaggaggugcucguccuguggggcgugcaccacccgcccaacaucggcaaccagaugacccuguaccacaaggagaacgccuacguguccgucgugagcagccacuacucccgcaaguucacgcccgagaucgccaagcggcccaaggugcgcgaccaggagggccggaucaacuacuacuggacccuccuggagcccggggacaccaucaucuucgaggccagcggcaaccugaucgcgccgcgcuacgccuucgcccucucccggggguucggcagcggcaucaucaacuccaacgcccccauggacgagugcgacgccaagugccagacgccccagggggcgaucaacagcucccugcccuuccagaacguccacccggugaccaucggcgagugccccaaguacgugcgcagcgccaagcugcggauggucaccgggcuccgcaacauccccuccauccagagccggggccuguucggggccaucgccggcuucaucgagggcggguggaccggcaugguggacgggugguacggcuaccaccaccagaacgagcagggguccggcuacgccgcggaccagaaguccacccagaacgccaucaacggcaucacgaacaaggugaacagcgucaucgagaagaugaacacccaguucaccgccguggggaaggaguucaacaagcuggagcgccggauggagaaccucaacaagaaggucgacgacggcuucaucgacguguggaccuacaacgccgagcugcuggugcuccuggagaacgagcgcacgcuggacuuccacgacagcaacgucaagaaccucuacgagaaggugaagaaccagcugaagaacaacgccaaggagaucgggaacggcugcuucgaguucuaccacaagugcaacgacgagugcauggaguccgugaagaacgggaccuacgacuaccccaaguacagcgaggaguccaagcugagccgggagaagaucgacggcgucaagcucgaguccaugggcguguaccagauccuggcgaucuacagcaccguggccagcucccugguccuccuggugagccugggggccaucuccuucuggaugugcagcaacggcucccuccagugccgcaucugcaucuga

SEQ ID NO: 68121 - RNA, 1698 nt, Artificial Sequence
  derived and/or modified CDS sequence (opt1) from hemagglutinin__InfluenzaA__ADC45637
augaaggugaagcugcucguccugcugugcaccuucaccgccacguacgccgacaccaucugcaucggcuaccacgcgaacaacagcaccgacaccguggacacggugcucgagaagaacgucaccgugacccacuccgugaaccugcuggaggacaaccacaacgggaagcucugccugcugaagggcaucgcgccccuccagcuggggaacugcagcgucgccggcuggauccuggggaacccggagugcgagcuccugaucuccaaggagagcugguccuacaucguggagaagcccaaccccgagaacgggaccugcuaccccggccacuucgccgacuacgaggagcugcgcgagcagcucagcuccgugagcuccuucgagcgguucgagaucuucccgaaggagagcuccuggcccaaccacacggucaccggggugagcgccuccugcagccacaacggcgaguccagcuucuacaagaaccugcuguggcucaccgggaagaacggccuguaccccaaccuguccaagagcuacgccaacaacaaggagaaggaggugcucguccuguggggcgugcaccacccgcccaacaucggcgaccagaugacccuguaccacaaggagaacgccuacguguccgucgugagcagccacuacucccgcaaguucacgcccgagaucgccaagcggcccaaggugcgcgaccaggagggccggaucaacuacuacuggacccuccuggagcccggggacaccaucaucuucgaggccagcggcaaccugaucgcgccgcgcuacgccuucgcccucucccggggguucggcagcggcaucaucaacuccaacgcccccauggacgagugcgacgccaagugccagacgccccagggggcgaucaacagcucccugcccuuccagaacguccacccggugaccaucggcgagugccccaaguacgugcgcagcgccaagcugcggauggucaccgggcuccgcaacauccccuccauccagagccggggccuguucggggccaucgccggcuucaucgagggcggguggaccggcaugguggacgggugguacggcuaccaccaccagaacgagcagggguccggcuacgccgcggaccagaaguccacccagaacgccaucaacggcaucacgaacaaggugaacagcgucaucgagaagaugaacacccaguucaccgccguggggaaggaguucaacaagcuggagcgccggauggagaaccucaacaagaaggucgacgacggcuucaucgacguguggaccuacaacgccgagcugcuggugcuccuggagaacgagcgcacgcuggacuuccacgacagcaacgucaagaaccucuacgagaaggugaagaaccagcugaagaacaacgccaaggagaucgggaacggcugcuucgaguucuaccacaagugcaacgacgagugcauggaguccgugaagaacgggaccuacgacuaccccaaguacagcgaggaguccaagcugagccgggagaagaucgacggcgucaagcucgaguccaugggcguguaccagauccuggcgaucuacagcaccguggccagcucccugguccuccuggugagccugggggccaucuccuucuggaugugcagcaacggcucccuccagugccgcaucugcaucuga

SEQ ID NO: 68122 - RNA, 1698 nt, Artificial Sequence
  derived and/or modified CDS sequence (opt1) from hemagglutinin__InfluenzaA__ADC45648
augaaggugaagcugcucguccugcugugcaccuucgccgccaccuacgcggacacgaucugcaucggcuaccacgccaacaacagcaccgacaccguggacaccgugcucgagaagaacgucacggugacccacuccgugaaccugcuggagaacagccacaacgggaagcucugccugcugaagggcaucgcgccccuccagcuggggaacugcuccaucgccggcuggguccuggggaacccggagugcgagcuccugaucagcaaggaguccuggagcuacaucguggagaagcccaaccccgagaacgggaccugcuaccccggccacuucgccgacuacgaggagcugcgcgagcagcucuccagcguguccagcuucgagcgguucgagaucuucccgaaggaguccagcuggcccaaccacaccgucacggggguguccgccagcugcucccacaacggcgagagcuccuucuaccgcaaccugcuguggcucaccgggaagaacggccuguaccccaaccugagcaaguccuacgccaacaacaaggagaaggaggugcucguccuguggggcgugcaccacccgcccaacaucggcgaccagaaggcccuguaccacaccgagaacgccuacgugagcgucgugagcucccacuacagccggaaguucacccccgagaucgcgaagcgccccaaggugcgggaccaggagggccgcaucaacuacuacuggacgcuccuggagcccggggacaccaucaucuucgaggccaacggcaaccugaucgccccgcgguacgccuucgcccucucccgcggguucggcagcggcaucaucaacuccaacgcgcccauggacaagugcgacgccaagugccagacgccccagggggccaucaacagcucccugcccuuccagaacguccacccggugaccaucggcgagugccccaaguacgugcggagcgccaagcugcgcauggucaccgggcuccggaacauccccuccauccagagccgcggccuguucggggccaucgcgggcuucaucgagggcggguggaccggcaugguggacgggugguacggcuaccaccaccagaacgagcagggguccggcuacgccgccgaccagaaguccacccagaacgccaucaacggcaucaccaacaaggugaacagcgucaucgagaagaugaacacgcaguucaccgccguggggaaggaguucaacaagcuggagcggcgcauggagaaccucaacaagaaggucgacgacggcuucaucgacaucuggaccuacaacgcggagcugcuggugcuccuggagaacgagcggacccuggacuuccacgacagcaacgugaagaaccucuacgagaaggucaagucccagcugaagaacaacgccaaggagaucgggaacggcugcuucgaguucuaccacaagugcaacgacgagugcauggagagcgugaagaacgggacguacgacuaccccaaguacuccgaggagagcaagcugaaccgcgagaagaucgacggcgugaagcucgaguccaugggcgucuaccagauccuggccaucuacagcaccguggccagcucccuggugcuccuggucagccugggggccaucuccuucuggaugugcagcaacggcucccuccagugccggaucugcaucuga

SEQ ID NO: 68123 - RNA, 1698 nt, Artificial Sequence
  derived and/or modified CDS sequence (opt1) from hemagglutinin__InfluenzaA__ADC45659
augaaggugaagcugcucguccugcugugcaccuucaccgccacguacgccgacaccaucugcaucggcuaccacgcgaacaacagcaccgacaccguggacacggugcucgagaagaacgucaccgugacccacuccgugaaccugcuggagaacagccacaacgggaagcucugccugcugaagggcaucgcgccccuccagcuggggaacugcuccgucgccggcuggauccuggggaacccggagugcgagcuccugaucagcaaggaguccuggagcuacaucguggagaagcccaaccccgagaacgggaccugcuaccccggccacuucgccgacuacgaggagcugcgcgagcagcucuccagcguguccagcuucgagcgguucgagaucuucccgaagaaguccagcuggcccaaccacacggucaccggcguguccgccagcugcucccacaacggcgagagcuccuucuaccgcaaccugcuguggcucaccgagaagaacgggcuguaccccaaccugagcaaguccuacgccaacaacaaggagaaggaggugcucguccuguggggcgugcaccacccgcccaacaucggggaccagaaggcccuguaccacaccgagaacgccuacgugagcgucgugagcucccacuacagccggaaguucacgcccgagaucgccaagcgccccaaggugcgggaccaggagggccgcaucaacuacuacuggacccuccuggagcccggcgacaccaucaucuucgaggcgaacgggaaccugaucgccccgcgguacgccuucgcccucucccgcggcuucgggagcggcaucaucaacuccaacgcccccauggacaagugcgacgcgaagugccagacgccccagggcgccaucaacagcucccugcccuuccagaacguccacccggugaccaucggggagugccccaaguacgugcggagcgccaagcugcgcauggucaccggccuccggaacauccccuccauccagagccgcgggcuguucggcgccaucgccggguucaucgagggcggcuggaccgggaugguggacggcugguacggguaccaccaccagaacgagcagggcuccggguacgcggccgaccagaaguccacccagaacgccaucaacggcaucacgaacaaggugaacagcgucaucgagaagaugaacacccaguucaccgccgugggcaaggaguucaacaagcuggagcggcgcauggagaaccucaacaagaaggucgacgacggguucaucgacaucuggaccuacaacgccgagcugcuggugcuccuggagaacgagcggacgcuggacuuccacgacagcaacgugaagaaccucuacgagaaggucaagucccagcugaagaacaacgcgaaggagaucggcaacgggugcuucgaguucuaccacaagugcaacgacgagugcauggagagcgugaagaacggcaccuacgacuaccccaaguacuccgaggagagcaagcugaaccgcgagaagaucgacggggugaagcucgaguccaugggcgucuaccagauccuggccaucuacagcaccguggccagcucccuggugcuccuggucagccugggcgccaucuccuucuggaugugcagcaacgggucccuccagugccggaucugcaucuga

SEQ ID NO: 68124 - RNA, 1698 nt, Artificial Sequence
  derived and/or modified CDS sequence (opt1) from hemagglutinin__InfluenzaA__ADC45670
augaaggugaagcugcucguccugcugugcaccuucaccgccacguacgccgacaccaucugcaucggcuaccacgcgaacaacagcaccgacaccguggacacggugcucgagaagaacgucaccgugacccacuccgugaaccugcuggagaacagccacaacgggaagcucugccugcugaagggcaucgcgccccuccagcuggggaacugcuccgucgccggcuggauccuggggaacccggagugcgagcuccugaucagcaaggaguccuggagcuacaucguggagaagcccaaccccgagaacgggaccugcuaccccggccacuucgccgacuacgaggagcugcgcgagcagcucuccagcguguccagcuucgagcgguucgagaucuucccgaaggaguccagcuggcccaaccacacggucaccgggggcuccgccagcugcucccacaacggggagagcuccuucuaccgcaaccugcuguggcucaccggcaagaacgggcuguaccccaaccugagcaaguccuacgccaacaacaaggagaaggaggugcucgugcuguggggcguccaccacccgcccaacaucggcgaccagaaggcccuguaccacaccgagaacgccuacgugagcguggucagcucccacuacagccggaaguucacgcccgagaucgccaagcgccccaaggugcgggaccaggaggggcgcaucaacuacuacuggacccuccuggagcccggcgacaccaucaucuucgaggcgaacgggaaccugaucgccccgcgguacgccuucgcccucucccgcggcuucggcagcgggaucaucaacuccaacgcccccauggacaagugcgacgcgaagugccagacgccccagggcgccaucaacagcucccugcccuuccagaacgugcacccggucaccaucggggagugccccaaguacgugcggagcgccaagcugcgcauggugaccggccuccggaacauccccuccauccagagccgcgggcuguucggcgccaucgccggcuucaucgagggcggcuggaccgggauggucgacggcugguacggguaccaccaccagaacgagcagggcuccggcuacgcggccgaccagaaguccacccagaacgccaucaacgggaucacgaacaaggugaacagcgugaucgagaagaugaacacccaguucaccgccgucggcaaggaguucaacaagcuggagcggcgcauggagaaccucaacaagaagguggacgacggguucaucgacaucuggaccuacaacgccgagcugcugguccuccuggagaacgagcggacgcuggacuuccacgacagcaacgugaagaaccucuacgagaaggugaagucccagcugaagaacaacgcgaaggagaucggcaacgggugcuucgaguucuaccacaagugcaacgacgagugcauggagagcgucaagaacggcaccuacgacuaccccaaguacuccgaggagagcaagcugaaccgcgagaagaucgacggcgugaagcucgaguccauggggguguaccagauccuggccaucuacagcaccgucgccagcucccuggugcuccuggugagccugggcgccaucuccuucuggaugugcagcaacgggucccuccagugccggaucugcaucuga

SEQ ID NO: 68125 - RNA, 1698 nt, Artificial Sequence
  derived and/or modified CDS sequence (opt1) from hemagglutinin__InfluenzaA__ADC45681
augaaggugaagcugcucguccugcugugcaccuucaccgccacguacgccgacaccaucugcaucggcuaccacgcgaacaacagcaccgacaccguggacacggugcucgagaagaacgucaccgugacccacuccgugaaccugcuggaggacaaccacaacgggaagcucugccugcugaagggcaucgcgccccuccagcuggggaacugcagcgucgccggcuggauccuggggaacccggagugcgagcuccugaucuccaaggagagcugguccuacaucguggagaagcccaaccccgagaacgggaccugcuaccccggccacuucgccgacuacgaggagcugcgcgagcagcucagcuccgccagcuccuucgagcgguucgagaucuucccgaaggagagcuccuggcccaaccacacggugaccggggucagcgccuccugcagccacaacggcgaguccagcuucuacaagaaccugcuguggcucaccgggaagaacggccuguaccccaaccugcgcaaguccuacgccaacaacaaggagaaggaggugcucgugcuguggggcguccaccacccgcccaacaucggcgaccagaugacccuguaccacaaggagaacgccuacgugagcguggucuccagccacuacagccggaaguucacgcccgagaucgccaagcgccccaaggugcgggaccaggagggccgcaucaacuacuacuggacccuccuggagcccggggacaccaucaucuucgaggcguccggcaaccugaucgccccgcgguacgccuucgcccucagccgcggguucggcuccggcaucaucaacagcaacgcccccauggacgagugcgacgcgaagugccagacgccccagggggccaucaacuccagccugcccuuccagaacgugcacccggucaccaucggcgagugccccaaguacgugcgguccgccaagcugcgcauggugaccgggcuccggaacauccccagcauccagucccgcggccuguucggggccaucgccggcuucaucgagggcggguggaccggcauggucgacgggugguacggcuaccaccaccagaacgagcaggggagcggcuacgcggccgaccagaaguccacccagaacgccaucaacggcaucacgaacaaggugaacagcgugaucgagaagaugaacacccaguucaccgccgucgggaaggaguucaacaagcuggagcggcgcauggagaaccucaacaagaagguggacgacggcuucaucgacgucuggaccuacaacgccgagcugcuggugcuccuggagaacgagcggacgcuggacuuccacgacuccaacgugaagaaccucuacgagaaggucaagaaccagcugaagaacaacgcgaaggagaucgggaacggcugcuucgaguucuaccacaagugcaacgacgagugcauggagagcgugaagaacgggaccuacgacuaccccaaguacuccgaggagagcaagcugucccgcgagaagaucgacggcgugaagcucgagagcaugggcgucuaccagauccuggccaucuacuccaccguggccagcagccuggugcuccuggucucccugggggccaucagcuucuggaugugcuccaacggcagccuccagugccggaucugcaucuga

SEQ ID NO: 68126 - RNA, 1698 nt, Artificial Sequence
  derived and/or modified CDS sequence (opt1) from hemagglutinin__InfluenzaA__ADC45692
augaaggugaagcugcucguccugcugugcaccuucaccgccacguacgccgacaccaucugcaucggcuaccacgcgaacaacagcaccgacaccguggacacggugcucgagaagaacgucaccgugacccacuccgugaaccugcuggagaacagccacaacgggaagcucugccugcugaagggcaucgcgccccuccagcuggggaacugcuccgucgccggcuggauccuggggaacccggagugcgagcuccugaucagcaagaaguccuggagcuacaucguggagaagcccaaccccgagaacgggaccugcuaccccggccacuucgccgacuacgaggagcugcgcgagcagcucuccagcguguccagcuucgagcgguucgagaucuucccgaaggaguccagcuggcccaaccacacggucaccgggguguccgccagcugcucccacaacggcgagagcuccuucuaccgcaaccugcuguggcucaccgggaagaacggccuguaccccaaccugagcaaguccuacgccaacaacaaggagaaggaggugcucguccuguggggcgugcaccacccgcccaacaucggcgaccagaaggcccuguaccacaccgagaacgccuacgugagcgucgugagcucccacuacagccggaaguucacgcccgagaucgccaagcgccccaaggugcgggaccaggagggccgcaucaacuacuacuggacccuccuggagcccggggacaccaucaucuucgaggcgaacggcaaccugaucgccccgcgguacgccuucgcccucucccgcggguucggcagcggcaucaucaacuccaacgcccccauggacaagugcgacgcgaagugccagacgccccagggggccaucaacagcucccugcccuuccagaacguccacccggugaccaucggcgagugccccaaguacgugcggagcgccaagcugcgcauggucaccgggcuccggaacauccccuccauccagagccgcggccuguucggggccaucgccggcuucaucgagggcggguggaccggcaugguggacgggugguacggcuaccaccaccagaacgagcagggguccggcuacgcggccgaccagaaguccacccagaacgccaucaacggcaucacgaacaaggugaacagcgucaucgagaagaugaacacccaguucaccgccguggggaaggaguucaacaagcuggagcggcgcauggagaaccucaacaagaaggucgacgacggcuucaucgacaucuggaccuacaacgccgagcugcuggugcuccuggagaacgagcggacgcuggacuuccacgacagcaacgugaagaaccucuacgagaaggucaagucccagcugaagaacaacgcgaaggagaucgggaacggcugcuucgaguucuaccacaagugcaacgacgagugcauggagagcgugaagaacgggaccuacgacuaccccaaguacuccgaggagagcaagcugaaccgcgagaagaucgacggcgugaagcucgaguccaugggcgucuaccagauccuggccaucuacagcaccguggccagcucccuggugcuccuggucagccugggggccaucuccuucuggaugugcagcaacggcucccuccagugccggaucugcaucuga

SEQ ID NO: 68127 - RNA, 1698 nt, Artificial Sequence; identical to SEQ ID NO: 67194
  derived and/or modified CDS sequence (opt1) from hemagglutinin__InfluenzaA__ADC45703

SEQ ID NO: 68128 - RNA, 1698 nt, Artificial Sequence
  derived and/or modified CDS sequence (opt1) from hemagglutinin__InfluenzaA__ADC45714
augaaggugaagcugcucguccugcugugcaccuucaccgccacguacgccgacaccaucugcaucggcuaccacgcgaacaacagcaccgacaccguggacacggugcucgagaagaacgucaccgugacccacuccgugaaccugcuggaggacaaccacaacgggaagcucugccugcugaagggcaucgcgccccuccagcuggggaacugcagcgucgccggcuggauccuggggaacccggagugcgagcuccugaucuccaaggagagcugguccuacaucguggagaagcccaaccccgagaacgggaccugcuaccccggccacuucgccgacuacgaggagcugcgcgagcagcucagcuccgugagcuccuucgagcgguucgagaucuucccgaaggagagcuccuggcccaaccacacggucaccggggugagcgccuccugcagccacaacggcgaguccagcuucuacaagaaccugcuguggcucaccgggaagaacggccuguaccccaaccuguccaagagcuacgccaacaacaaggagaaggaggugcucguccuguggggcgugcaccacccgcccaacaucggcgaccagaccacgcuguaccacaaggagaacgccuacguguccgucgugagcagccacuacucccgcaaguucacccccgagaucgccaagcggcccaaggugcgcgaccaggagggccggaucaacuacuacuggacccuccuggagcccggggacaccaucaucuucgaggccagcggcaaccugaucgcgccgcgcuacgccuucgcccucucccggggguucggcagcggcaucaucaacuccaacgcccccauggacgagugcgacgccaagugccagacgccccagggggcgaucaacagcucccugcccuuccagaacguccacccggugaccaucggcgagugccccaaguacgugcgcagcgccaagcugcggauggucaccgggcuccgcaacauccccuccauccagagccggggccuguucggggccaucgccggcuucaucgagggcggguggaccggcaugguggacgggugguacggcuaccaccaccagaacgagcagggguccggcuacgccgcggaccagaaguccacgcagaacgccaucaacggcaucaccaacaaggugaacagcgucaucgagaagaugaacacccaguucaccgccguggggaaggaguucaacaagcuggagcgccggauggagaaccucaacaagaaggucgacgacggcuucaucgacguguggacguacaacgccgagcugcuggugcuccuggagaacgagcgcacccuggacuuccacgacagcaacgucaagaaccucuacgagaaggugaagaaccagcugaagaacaacgccaaggagaucgggaacggcugcuucgaguucuaccacaagugcaacgacgagugcauggaguccgugaagaacgggaccuacgacuaccccaaguacagcgaggaguccaagcugagccgggagaagaucgacggcgucaagcucgaguccaugggcguguaccagauccuggcgaucuacagcaccguggccagcucccugguccuccuggugagccugggggccaucuccuucuggaugugcagcaacggcucccuccagugccgcaucugcaucuga

SEQ ID NO: 68129 - RNA, 1698 nt, Artificial Sequence; identical to SEQ ID NO: 67194
  derived and/or modified CDS sequence (opt1) from hemagglutinin__InfluenzaA__ADC45725

SEQ ID NO: 68130 - RNA, 1698 nt, Artificial Sequence
  derived and/or modified CDS sequence (opt1) from hemagglutinin__InfluenzaA__ADC45736
augaaggugaagcugcucguccugcugugcaccuucaccgccacguacgccgacaccaucugcaucggcuaccacgcgaacaacagcaccgacaccguggacacggugcucgagaagaacgucaccgugacccacuccgugaaccugcuggagaacagccacaacgggaagcucugccugcugaagggcaucgcgccccuccagcuggggaacugcuccgucgccggcuggauccuggggaacccggagugcgagcuccugaucagcaaggaguccuggagcuacaucguggagaagcccaaccccgagaacgggaccugcuaccccggccacuucgccgacuacgaggagcugcgcgagcagcucuccagcguguccagcuucgagcgguucgagaucuucccgaaggaguccagcuggcccaaccacacggucaccgggguguccgccagcugcucccacaacggcgagagcuccuucuaccgcaaccugcuguggcucaccgggaagaacggccuguaccccaaccugagcaaguccuacgccaacaacaaggagaaggaggugcucguccuguggggcgugcaccacccgcccaacaucggcgaccagaaggcccuguaccacaccgagaacacguacgugagcgucgugagcucccacuacagccggaaguucacccccgagaucgccaagcgccccaaggugcgggaccaggagggccgcaucaacuacuacuggacccuccuggagcccggggacaccaucaucuucgaggccaacggcaaccugaucgcgccgcgguacgccuucgcccucucccgcggguucggcagcggcaucaucaacuccaacgcccccauggacaagugcgacgccaagugccagacgccccagggggcgaucaacagcucccugcccuuccagaacguccacccggugaccaucggcgagugccccaaguacgugcggagcgccaagcugcgcauggucaccgggcuccggaacauccccuccauccagagccgcggccuguucggggccaucgccggcuucaucgagggcggguggaccggcaugguggacgggugguacggcuaccaccaccagaacgagcagggguccggcuacgccgcggaccagaaguccacgcagaacgccaucaacggcaucaccaacaaggugaacagcgucaucgagaagaugaacacccaguucaccgccguggggaaggaguucaacaagcuggagcggcgcauggagaaccucaacaagaaggucgacgacggcuucaucgacaucuggacguacaacgccgagcugcuggugcuccuggagaacgagcggacccuggacuuccacgacagcaacgugaagaaccucuacgagaaggucaagucccagcugaagaacaacgccaaggagaucgggaacggcugcuucgaguucuaccacaagugcaacgacgagugcauggagagcgugaagaacgggaccuacgacuaccccaaguacuccgaggagagcaagcugaaccgcgagaagaucgacggcgugaagcucgaguccaugggcgucuaccagauccuggcgaucuacagcaccguggccagcucccuggugcuccuggucagccugggggccaucuccuucuggaugugcagcaacggcucccuccagugccggaucugcaucuga

SEQ ID NO: 68131 - RNA, 1698 nt, Artificial Sequence; identical to SEQ ID NO: 66512
  derived and/or modified CDS sequence (opt1) from hemagglutinin__InfluenzaA__ADC45747

SEQ ID NO: 68132 - RNA, 1698 nt, Artificial Sequence
  derived and/or modified CDS sequence (opt1) from hemagglutinin__InfluenzaA__ADC45758
augaaggugaagcugcucguccugcugugcaccuucaccgccacguacgccgacaccaucugcaucggcuaccacgcgaacaacagcaccgacaccguggacacggugcucgagaagaacgucaccgugacccacuccgugaaccugcuggagaacagccacaacgggaagcucugccugcugaagggcaucgcgccccuccagcuggggaacugcuccgucgccggcuggauccuggggaacccggagugcgagcuccugaucagcaaggaguccuggagcuacaucguggagaagcccaaccccgagaacgggaccugcuaccccggccacuucgccgacuacgaggagcugcgcgagcagcucuccagcguguccagcuucgagcgguucgagaucuucccgaaggaguccagcuggcccaaccacacggucaccgggguguccgccagcugcucccacaacggcgagaacagcuucuaccgcaaccugcuguggcucaccgggaagaacggccuguaccccaaccuguccaagagcuacgccaacaacaaggagaaggaggugcucguccuguggggcgugcaccacccgcccaacaucgccgaccagaagacccuguaccacacggagaacgccuacguguccgucgugagcagccacuacucccggaaguucacccccgagaucgccaagcgccccaaggugcgggaccaggagggccgcaucaacuacuacuggacccuccuggagcccggcgacaccaucaucuucgaggcgaacgggaaccugaucgccccgcgguacgccuucgcccucagccgcggcuucggguccggcaucaucaacagcaacgcccccauggacaagugcgacgcgaagugccagacgccccagggcgccaucaacuccagccugcccuuccagaacguccacccggugaccaucggggagugccccaaguacgugcgguccgccaagcugcgcauggucaccggccuccggaacauccccagcauccagucccgcgggcuguucggcgccaucgccggguucaucgagggcggcuggaccgggaugguggacggcugguacggguaccaccaccagaacgagcagggcagcggguacgcggccgaccagaaguccacgcagaacgccaucaacggcaucaccaacaaggugaacagcgucaucgagaagaugaacacccaguucaccgccgugggcaaggaguucaacaagcuggagcggcgcauggagaaccucaacaagaaggucgacgacggguucaucgacaucuggacguacaacgccgagcugcuggugcuccuggagaacgagcggacccugaacuuccacgacuccaacgugaagaaccucuacgagaaggucaagagccagcugaagaacaacgcgaaggagaucggcaacgggugcuucgaguucuaccacaagugcaacgacgagugcauggaguccgugaagaacggcaccuacgacuaccccaaguacagcgaggaguccaagcugaaccgcgagaagaucgacggggugaagcucgagagcaugggcgucuaccagauccuggccaucuacuccaccguggccagcagccuggugcuccuggucucccugggcgccaucagcuucuggaugugcuccaacgggagccuccagugccggaucugcaucuga

SEQ ID NO: 68133 - RNA, 1698 nt, Artificial Sequence; identical to SEQ ID NO: 67650
  derived and/or modified CDS sequence (opt1) from hemagglutinin__InfluenzaA__ADC45780

SEQ ID NO: 68134 - RNA, 1698 nt, Artificial Sequence; identical to SEQ ID NO: 67155
  derived and/or modified CDS sequence (opt1) from hemagglutinin__InfluenzaA__ADC45791

SEQ ID NO: 68135 - RNA, 1698 nt, Artificial Sequence
  derived and/or modified CDS sequence (opt1) from hemagglutinin__InfluenzaA__ADC45813
augaaggugaagcugcucauccugcugugcaccuucaccgccacguacgccgacaccaucugcaucggcuaccacgcgaacaacagcaccgacaccgucgacacggugcucgagaagaacgugaccgucacccacuccgugaaccugcuggagaacagccacaacgggaagcucugccugcugaagggcaucgcgccccuccagcuggggaacugcuccguggccggcuggauccuggggaacccggagugcgagcuccugaucagcaaggaguccuggagcuacaucgucgagaagcccaaccccgagaacgggaccugcuaccccggccacuucgccgacuacgaggagcugcgcgagcagcucuccagcguguccagcuucgagcgguucgagaucuucccgaaggaguccagcuggcccaaccacacggugaccggcgucuccgccagcugcucccacaacggcgagagcuccuucuaccgcaaccugcuguggcucaccaugaagaacgggcuguaccccaaccugagcaaguccuacgccaacaacaaggagaaggaggugcucgugcuguggggcguccaccacccgcccaacaucggggaccagaagacccuguacaacacggagaacgccuacgugagcguggucagcucccacuacagccggaaguucacccccgagaucgccaagcgccccaaggugcgggaccaggagggccgcaucaacuacuacuggacccuccuggagcccggcgacaccaucaucuucgaggccaacgggaaccugaucgcgccgcgguacgccuucgcccucucccgcggcuucgggagcggcaucaucaacuccaacgcccccauggacaagugcgacgccaagugccagacgccccagggcgcgaucaacagcucccugcccuuccagaacgugcacccggucaccaucggggagugccccaaguacgugcggagcgccaagcugcgcauggugaccggccuccggaacauccccuccauccagagccgcgggcuguucggcgccaucgccggguucaucgagggcggcuggaccgggauggucgacggcugguacggguaccaccaccagaacgagcagggcuccggguacgccgcggaccagaaguccacgcagaacgccaucaacggcaucaccaacaaggugaacagcgugaucgagaagaugaacacccaguucaccgccgucggcaaggaguucaacaagcuggagcggcgcauggagaaccucaacaagaagguggacgacggguucaucgacaucuggacguacaacgccgagcugcugguccuccuggagaacgagcggacccuggacuuccacgacagcaacgugaagaaccucuacgagaaggugaagucccagcugaagaacaacgccaaggagaucggcaacgggugcuucgaguucuaccacaagugcaacgacgagugcauggagagcgucaagaacggcaccuacgacuaccccaaguacuccgaggagagcaagcugaaccgcgagaagaucgacggggugaagcucgaguccaugggcguguaccagauccuggcgaucuacagcaccgucgccagcucccuggugcuccuggugagccugggcgccaucuccuucuggaugugcagcaacgggucccuccagugccggaucugcaucuga

SEQ ID NO: 68136 - RNA, 1698 nt, Artificial Sequence; identical to SEQ ID NO: 67155
  derived and/or modified CDS sequence (opt1) from hemagglutinin__InfluenzaA__ADC45824

SEQ ID NO: 68137 - RNA, 1698 nt, Artificial Sequence
  derived and/or modified CDS sequence (opt1) from hemagglutinin__InfluenzaA__ADC45835
augaaggugaagcugcucguccugcugugcaccuucaccgccacguacgccgacaccaucugcaucggcuaccacgcgaacaacagcaccgacaccguggacacggugcucgagaagaacgucaccgugacccacuccgugaaccugcuggagaacagccacaacgggaagcucugccugcugaagggcaucgcgccccuccagcuggggaacugcuccgucgccggcuggauccuggggaacccggagugcgagcuccugaucagcaaggaguccuggagcuacaucguggagaagcccaaccccgagaacgggaccugcuaccccggccacuucgccgacuacgaggagcugcgcgagcagcucuccagcguguccagcuucgagcgguucgagaucuucccgaaggaguccagcuggcccaaccacacggucaccgggguguccgccagcugcucccacaacggcgagaacagcuucuaccgcaaccugcuguggcucaccgggaagaacggccuguaccccaaccuguccaagagcuacgccaacaacaaggagaaggaggugcucguccuguggggcgugcaccacccgcccaacaucgccgaccagaagacccuguaccacacggagaacgccuacguguccgucgugagcagccacuacucccggaaguucacccccgagaucgccaagcgccccaaggugcgggaccaggagggccgcaucaacuacuacuggacccuccuggagcccggcgacaccaucaucuucgaggcgaacgggaaccugaucgccccgcgguacgccuucgcccucagccgcggcuucggguccggcaucaucaacagcaacgcccccauggacaagugcgacgcgaagugccagacgccccagggcgccaucaacuccagccugcccuuccagaacguccacccggugaccaucggggagugccccaaguacgugcgguccgccaagcugcgcauggucaccggccuccggaacauccccagcauccagucccgcgggcuguucggcgccaucgccggguucaucgagggcggcuggaccgggaugguggacggcugguacggguaccaccaccagaacgagcagggcagcggguacgcggccgaccagaaguccacgcagaacgccaucaacggcaucaccaacaaggugaacagcgucaucgagaagaugaacacccaguucaccgccgugggcaaggaguucaacaagcuggagcggcgcauggagaaccucaacaagaaggucgacgacggguucaucgacaucuggacguacaacgccgagcugcuggugcuccuggagaacgagcggacccuggacuuccacgacuccaacgugaagaaccucuacgagaaggucaagagccagcugaagaacaacgcgaaggagaucggcaacgggugcuucgaguucuaccacaagugcaacgacgagugcauggaguccgugaagaacggcaccuacgacuaccccaaguacagcgaggaguccaagcugaaccgcgagaagaucgacggggugacccucgagagcaugggcgucuaccagauccuggccaucuacuccacgguggccagcagccuggugcuccuggucucccugggcgccaucagcuucuggaugugcuccaacgggagccuccagugccggaucugcaucuga

SEQ ID NO: 68138 - RNA, 1698 nt, Artificial Sequence; identical to SEQ ID NO: 66512
  derived and/or modified CDS sequence (opt1) from hemagglutinin__InfluenzaA__ADC45846

SEQ ID NO: 68139 - RNA, 1701 nt, Artificial Sequence; identical to SEQ ID NO: 66693
  derived and/or modified CDS sequence (opt1) from hemagglutinin__InfluenzaA__ADC53558

SEQ ID NO: 68140 - RNA, 1701 nt, Artificial Sequence; identical to SEQ ID NO: 66784
  derived and/or modified CDS sequence (opt1) from hemagglutinin__InfluenzaA__ADD14087

SEQ ID NO: 68141 - RNA, 1701 nt, Artificial Sequence; identical to SEQ ID NO: 66693
  derived and/or modified CDS sequence (opt1) from hemagglutinin__InfluenzaA__ADD14089

SEQ ID NO: 68142 - RNA, 1701 nt, Artificial Sequence; identical to SEQ ID NO: 66693
  derived and/or modified CDS sequence (opt1) from hemagglutinin__InfluenzaA__ADD14093

SEQ ID NO: 68143 - RNA, 1701 nt, Artificial Sequence
  derived and/or modified CDS sequence (opt1) from hemagglutinin__InfluenzaA__ADD14095
augaaggccauccuggugguccuccuguacaccuucgccaccgcgaacgccgacacgcugugcaucggcuaccacgccaacaacagcaccgacaccguggacaccgugcucgagaagaacgucacggugacccacuccgugaaccugcuggaggacaagcacaacgggaagcucugcaagcugcgcggcgucgcgccccugcaccucgggaagugcaacaucgccggcuggauccuggggaacccggagugcgagagccuguccaccgccagcuccuggagcuacaucguggagaccuccagcuccgacaacggcacgugcuaccccggcgacuucaucgacuacgaggagcuccgggagcagcugagcuccgugagcuccuucgagcgcuucgagaucuuccccaagaccagcuccuggcccaaccacgacagcaacaagggggucaccgccgccugcccgcacgccggcgcgaaguccuucuacaagaaccugaucuggcucgugaagaaggggaacagcuaccccaagcuguccaagagcuacaucaacgacaagggcaaggaggugcugguccucugggggauccaccaccccagcaccuccgccgaccagcagagccuguaccagaacgccgacgccuacguguucgugggcacgucccgguacagcaagaaguucaagcccgagaucgccauccgcccgaagguccgggaccaggagggccgcaugaacuacuacuggacccugguggagcccggggacaagaucaccuucgaggcgaccggcaaccucgugcugccccgguacgccuucgccauggagcgcaacgccggguccggcaucaucaucagcgacacgcccguccacgacugcaacacgaccugccagaccccgaagggcgccaucaacaccucccugcccuuccagaacauccaccccaucaccaucgggaagugccccaaguacgucaagagcaccaagcuccggcuggcgaccggccugcgcaacgugccguccauccagagccgggggcuguucggcgccaucgccggguucaucgagggcggcuggacggggaugguggacggcugguacggguaccaccaccagaacgagcagggcuccggguacgccgccgaccucaagagcacccagaacgcgaucgacgagaucaccaacaaggugaacuccgugaucgagaagaugaacacccaguucacggccgucggcaaggaguucaaccaccuggagaagcgcaucgagaaccucaacaagaagguggacgacggcuuccuggacaucuggaccuacaacgccgagcugcucguccugcuggagaacgagcggacccucgacuaccacgacagcaacgugaagaaccuguacgagaaggugcgcucccagcugaagaacaacgccaaggagaucgggaacggcugcuucgaguucuaccacaagugcgacaacacgugcauggagagcgucaagaacgggaccuacgacuaccccaaguacuccgaggaggccaagcucaaccgggaggagaucgacggcgugaagcuggagagcacccgcaucuaccagauccuggcgaucuacuccaccguggccagcagccucguccugguggugucccugggggccaucagcuucuggaugugcuccaacggcagccuccagugccggaucugcaucuga

SEQ ID NO: 68144 - RNA, 1701 nt, Artificial Sequence; identical to SEQ ID NO: 66693
  derived and/or modified CDS sequence (opt1) from hemagglutinin__InfluenzaA__ADD14097

SEQ ID NO: 68145 - RNA, 1701 nt, Artificial Sequence; identical to SEQ ID NO: 66693
  derived and/or modified CDS sequence (opt1) from hemagglutinin__InfluenzaA__ADD14099

SEQ ID NO: 68146 - RNA, 1701 nt, Artificial Sequence; identical to SEQ ID NO: 66693
  derived and/or modified CDS sequence (opt1) from hemagglutinin__InfluenzaA__ADD14101

SEQ ID NO: 68147 - RNA, 1701 nt, Artificial Sequence
  derived and/or modified CDS sequence (opt1) from hemagglutinin__InfluenzaA__ADD14103
augaaggccauccuggugguccuccugugcaccuucgccaccgcgaacgccgacacgcugugcaucggcuaccacgccaacaacagcaccgacaccguggacaccgugcucgagaagaacgucacggugacccacuccgugaaccugcuggaggacaagcacaacgggaagcucugcaagcugcgcggcgucgcgccccugcaccucgggaagugcaacaucgccggcuggauccuggggaacccggagugcgagagccuguccaccgccagcuccuggagcuacaucguggagaccuccagcuccgacaacggcacgugcuaccccggcgacuucaucgacuacgaggagcuccgggagcagcugagcuccgugagcuccuucgagcgcuucgagaucuuccccaagaccagcuccuggcccaaccacgacagcaacaagggggucaccgccgccugcccgcacgccggcgcgaaguccuucuacaagaaccugaucuggcucgugaagaaggggaacagcuaccccaagcuguccaagagcuacaucaacgacaagggcaaggaggugcugguccucugggggauccaccaccccagcaccuccgccgaccagcagagccuguaccagaacgccgacgccuacguguucgugggcacgucccgguacagcaagaaguucaagcccgagaucgccauccgcccgaagguccgggaccaggagggccgcaugaacuacuacuggacccugguggagcccggggacaagaucaccuucgaggcgaccggcaaccucguggucccccgguacgccuucgccauggagcgcaacgccggguccggcaucaucaucagcgacacgcccgugcacgacugcaacacgaccugccagaccccgaagggcgccaucaacaccucccugcccuuccagaacauccaccccaucaccaucgggaagugccccaaguacgucaagagcaccaagcugcggcucgcgaccggccugcgcaacgugccguccauccagagccgggggcuguucggcgccaucgccggguucaucgagggcggcuggacggggaugguggacggcugguacggguaccaccaccagaacgagcagggcuccggguacgccgccgaccucaagagcacccagaacgcgaucgacgagaucaccaacaaggugaacuccgucaucgagaagaugaacacccaguucacggccgugggcaaggaguucaaccaccuggacaagcgcaucgagaaccugaacaagaagaucgacgacggcuuccucgacaucuggaccuacaacgccgagcugcugguccuccuggagaacgagcggacccuggacuaccacgacagcaacgugaagaaccucuacgagaaggugcgcucccagcugaagaacaacgccaaggagaucgggaacggcugcuucgaguucuaccacaagugcgacaacacgugcauggagagcgucaagaacgggaccuacgacuaccccaaguacuccgaggaggccaagcugaaccgggaggagaucgacggcgugaagcucgagagcacccgcaucuaccagauccuggcgaucuacuccaccguggccagcagccugguccucguggugucccugggggccaucagcuucuggaugugcuccaacggcagccugcagugccggaucugcaucuga

SEQ ID NO: 68148 - RNA, 1701 nt, Artificial Sequence
  derived and/or modified CDS sequence (opt1) from hemagglutinin__InfluenzaA__ADD14111
augaaggccauccuggugguccuccuguacaccuucgccaccgcgaacgccgacacgcugugcaucggcuaccacgccaacaacagcaccgacaccguggacaccgugcucgagaagaacgucacggugacccacuccgugaaccugcuggaggacaagcacaacgggaagcucugcaagcugcgcggcgucgcgccccugcaccucgggaagugcaacaucgccggcuggauccuggggaacccggagugcgagagccuguccaccgccagcuccuggagcuacaucguggagaucuccagcuccgacaacgggaccugcuaccccggcgacuucaucgacuacgaggagcuccgggagcagcugagcuccgugagcuccuucgagcgcuucgagaucuuccccaagacgagcuccuggcccaaccacgacagcaacaagggcgucaccgccgccugcccgcacgccggcgcgaaguccuucuacaagaaccugaucuggcucgugaagaaggggaacagcuaccccaagcuguccaagagcuacaucaacgacaagggcaaggaggugcugguccucugggggauccaccaccccagcaccuccgccgaccagcagagccuguaccagaacgccgacgccuacguguucgugggcaccucccgguacagcaagaaguucaagcccgagaucgccauccgcccgaagguccgggaccaggagggccgcaugaacuacuacuggacgcugguggagcccggggacaagaucaccuucgaggcgaccggcaaccucguggucccccgguacgccuucgccauggagcgcaacgccggguccggcaucaucaucagcgacacccccgugcacgacugcaacacgaccugccagaccccgaagggcgccaucaacaccucccugcccuuccagaacauccaccccaucacgaucgggaagugccccaaguacgucaagagcaccaagcugcggcucgcgaccggccugcgcaacgugccguccauccagagccgggggcuguucggcgccaucgccggguucaucgagggcggcuggaccgggaugguggacggcugguacggguaccaccaccagaacgagcagggcuccggguacgccgccgaccucaagagcacgcagaacgcgaucgacgagaucaccaacaaggugaacuccgucaucgagaagaugaacacccaguucaccgccgugggcaaggaguucaaccaccuggagaagcgcaucgagaaccugaacaagaaggucgacgacggcuuccucgacaucuggacguacaacgccgagcugcuggugcuccuggagaacgagcggacccuggacuaccacgacagcaacgugaagaaccucuacgagaagguccgcucccagcugaagaacaacgccaaggagaucgggaacggcugcuucgaguucuaccacaagugcgacaacacgugcauggagagcgugaagaacgggaccuacgacuaccccaaguacuccgaggaggccaagcugaaccgggaggagaucgacggcgugaagcucgagagcacccgcaucuaccagauccuggcgaucuacuccaccgucgccagcagccuggugcucguggucucccugggggccaucagcuucuggaugugcuccaacggcagccugcagugccggaucugcaucuga

SEQ ID NO: 68149 - RNA, 1701 nt, Artificial Sequence; identical to SEQ ID NO: 66693
  derived and/or modified CDS sequence (opt1) from hemagglutinin__InfluenzaA__ADD14115

SEQ ID NO: 68150 - RNA, 1701 nt, Artificial Sequence; identical to SEQ ID NO: 66693
  derived and/or modified CDS sequence (opt1) from hemagglutinin__InfluenzaA__ADD14117

SEQ ID NO: 68151 - RNA, 1701 nt, Artificial Sequence; identical to SEQ ID NO: 66693
  derived and/or modified CDS sequence (opt1) from hemagglutinin__InfluenzaA__ADD14119

SEQ ID NO: 68152 - RNA, 1701 nt, Artificial Sequence; identical to SEQ ID NO: 66693
  derived and/or modified CDS sequence (opt1) from hemagglutinin__InfluenzaA__ADD14121

SEQ ID NO: 68153 - RNA, 1701 nt, Artificial Sequence; identical to SEQ ID NO: 66693
  derived and/or modified CDS sequence (opt1) from hemagglutinin__InfluenzaA__ADD14123

SEQ ID NO: 68154 - RNA, 1701 nt, Artificial Sequence; identical to SEQ ID NO: 66693
  derived and/or modified CDS sequence (opt1) from hemagglutinin__InfluenzaA__ADD14127

SEQ ID NO: 68155 - RNA, 1701 nt, Artificial Sequence
  derived and/or modified CDS sequence (opt1) from hemagglutinin__InfluenzaA__ADD14129
augaaggccauccuggugguccuccuguacaccuucgccaccgcgaacgccgacacgcugugcaucggcuaccacgccaacaacagcaccgacaccguggacaccgugcucgagaagaacgucacggugacccacuccgugaaccugcuggaggacaagcacaacgggaagcucugcaagcugcgcggcgucgccagccugcaccucgggaagugcaacaucgccggcuggauccuggggaaccccgagugcgagucccugagcaccgcguccagcugguccuacaucguggagaccagcuccagcgacaacggcacgugcuacccgggcgacuucaucgacuacgaggagcuccgggagcagcuguccagcguguccagcuucgagcgcuucgagaucuuccccaagaccuccagcuggcccaaccacgacuccaacaagggggucaccgccgccugcccccacgccggcgccaagagcuucuacaagaaccugaucuggcucgugaagaaggggaacuccuacccgaagcugagcaagagcuacaucaacgacaagggcaaggaggugcugguccucugggggauccaccaccccuccaccagcgcggaccagcagucccuguaccagaacgccgacgccuacguguucgugggcacgagccgguacuccaagaaguucaagcccgagaucgccauccgccccaagguccgggaccaggagggccgcaugaacuacuacuggacccugguggagccgggggacaagaucaccuucgaggcgaccggcaaccucguggucccccgguacgccuucgccauggagcgcaacgccgggagcggcaucaucaucuccgacacgcccgugcacgacugcaacacgaccugccagacccccaagggcgccaucaacaccagccugccguuccagaacauccaccccaucaccaucgggaagugccccaaguacgugaaguccaccaagcugcggcucgcgaccggccugcgcaacguccccagcauccagucccgggggcuguucggcgccaucgccggguucaucgagggcggcuggacggggaugguggacggcugguacggguaccaccaccagaacgagcagggcagcggguacgccgccgaccucaaguccacccagaacgcgaucgacgagaucaccaacaaggugaacagcgucaucgagaagaugaacacccaguucacggccgugggcaaggaguucaaccaccuggagaagcgcaucgagaaccugaacaagaaggucgacgacggcuuccucgacaucuggaccuacaacgccgagcugcuggugcuccuggagaacgagcggacccuggacuaccacgacuccaacgugaagaaccucuacgagaagguccgcagccagcugaagaacaacgccaaggagaucgggaacggcugcuucgaguucuaccacaagugcgacaacacgugcauggaguccgugaagaacgggaccuacgacuacccgaaguacagcgaggaggccaagcugaaccgggaggagaucgacggcgugaagcucgaguccacccgcaucuaccagauccuggcgaucuacagcaccgucgccagcucccuggugcucguggucagccugggggccaucuccuucuggaugugcagcaacggcucccugcagugccggaucugcaucuga

SEQ ID NO: 68156 - RNA, 1701 nt, Artificial Sequence
  derived and/or modified CDS sequence (opt1) from hemagglutinin__InfluenzaA__ADD14133
augaaggccauccuggugguccuccuguacaccuucgccaccgcgaacgccgacacgcugugcaucggcuaccacgccaacaacagcaccgacaccguggacaccgugcucgagaagaacgucacggugacccacuccgugaaccugcuggaggacaagcacaacgggaagcucugcaagcugcgcggcgucgcgccccugcaccucgggaagugcaacaucgccggcuggauccuggggaacccggagugcgagagccuguccaccgccagcuccuggagcuacaucguggagaccuccagcuccgacaacggcacgugcuaccccggcgacuucaucgacuacgaggagcuccgggagcagcugagcuccgugagcuccuucgagcgcuucgagaucuuccccaagaccagcuccuggcccaaccacgacagcaacaagggggucaccgccgccugcccgcacgccggcgcgaaguccuucuacaagaaccugaucuggcucgugaagaaggggaacagcuaccccaagcuguccaagagcuacaucaacgacaagggcaaggaggugcugguccucugggggauccaccaccccagcaccuccgccgaccagcagagccuguaccagaacguggacgccuacguguucgucggcacgucccgguacagcaagaaguucaagcccgagaucgccauccgcccgaaggugcgggaccaggagggccgcaugaacuacuacuggacccugguggagcccggggacaagaucaccuucgaggccaccggcaaccucgucgugccccgguacgcguucgccauggagcgcaacgccggguucggcaucaucaucuccgacacgcccgugcacgacugcaacacgaccugccagaccccgaagggcgccaucaacaccagccugcccuuccagaacauccaccccaucaccaucgggaagugccccaaguacgucaaguccaccaagcugcggcucgccaccggccugcgcaacgugccgagcauccagucccgggggcuguucggcgcgaucgccggguucaucgagggcggcuggacggggaugguggacggcugguacggguaccaccaccagaacgagcagggcagcggguacgccgccgaccucaaguccacccagaacgccaucgacgagaucaccaacaaggucaacagcgugaucgagaagaugaacacccaguucacggcggucggcaaggaguucaaccaccuggagaagcgcaucgagaaccugaacaagaagguggacgacggcuuccucgacaucuggaccuacaacgccgagcugcuggugcuccuggagaacgagcggacccuggacuaccacgacuccaacgucaagaaccucuacgagaaggugcgcagccagcugaagaacaacgccaaggagaucgggaacggcugcuucgaguucuaccacaagugcgacaacacgugcauggaguccgugaagaacgggaccuacgacuaccccaaguacagcgaggaggccaagcugaaccgggaggagaucgacggcgucaagcucgaguccacccgcaucuaccagauccuggccaucuacagcaccguggcguccagccuggugcucgucgugagccugggggccaucuccuucuggaugugcagcaacggcucccugcagugccggaucugcaucuga

SEQ ID NO: 68157 - RNA, 1701 nt, Artificial Sequence; identical to SEQ ID NO: 66784
  derived and/or modified CDS sequence (opt1) from hemagglutinin__InfluenzaA__ADD14135

SEQ ID NO: 68158 - RNA, 1701 nt, Artificial Sequence; identical to SEQ ID NO: 66693
  derived and/or modified CDS sequence (opt1) from hemagglutinin__InfluenzaA__ADD14137

SEQ ID NO: 68159 - RNA, 1701 nt, Artificial Sequence; identical to SEQ ID NO: 67441
  derived and/or modified CDS sequence (opt1) from hemagglutinin__InfluenzaA__ADD14139

SEQ ID NO: 68160 - RNA, 1701 nt, Artificial Sequence; identical to SEQ ID NO: 66693
  derived and/or modified CDS sequence (opt1) from hemagglutinin__InfluenzaA__ADD14143

SEQ ID NO: 68161 - RNA, 1701 nt, Artificial Sequence; identical to SEQ ID NO: 66693
  derived and/or modified CDS sequence (opt1) from hemagglutinin__InfluenzaA__ADD14145

SEQ ID NO: 68162 - RNA, 1701 nt, Artificial Sequence; identical to SEQ ID NO: 66693
  derived and/or modified CDS sequence (opt1) from hemagglutinin__InfluenzaA__ADD14147

SEQ ID NO: 68163 - RNA, 1701 nt, Artificial Sequence
  derived and/or modified CDS sequence (opt1) from hemagglutinin__InfluenzaA__ADD14151
augaaggccauccuggugguccuccuguacaccuucgccaccgcgaacgccgacacgcugugcaucggcuaccacgccaacaacagcaccgacaccguggacaccgugcucgagaagaacgucacggugacccacuccgugaaccugcuggaggacaagcacaacgggaagcucugcaagcugcgcggcgucgcgccccugcaccucgggaagugcaacaucgccggcuggauccuggggaacccggagugcgagagccuguccaccgccagcuccuggagcuacaucguggagaccuccagcuccgacaacggcacgugcuaccccggcgacuucaucgacuacgaggagcuccgggagcagcugagcuccgugagcuccuucgagcgcuucgagaucuuccccaagaccagcuccuggcccaaccacgacagcaacaagggggucaccgccgccugcccgcgggccggcgcgaaguccuucuacaagaaccugaucuggcucgugaagaaggggaacagcuaccccaagcuguccaagagcuacaucaacgacaagggcaaggaggugcugguccucugggggauccaccaccccagcaccuccgccgaccagcagagccuguaccagaacgccgacgccuacguguucgugggcacgucccgcuacagcaagaaguucaagcccgagaucgccauccggccgaagguccgcgaccaggagggccggaugaacuacuacuggacccugguggagcccggggacaagaucaccuucgaggcgaccggcaaccucguggucccccgcuacgccuucgccauggagcggaacgccggguccggcaucaucaucagcgacacgcccgugcacgacugcaacacgaccugccagaccccgaagggcgccaucaacaccucccugcccuuccagaacauccaccccaucaccaucgggaagugccccaaguacgucaagagcaccaagcugcgccucgcgaccggccugcggaacgugccguccauccagagccgcgggcuguucggcgccaucgccggguucaucgagggcggcuggacggggaugguggacggcugguacggguaccaccaccagaacgagcagggcuccggguacgccgccgaccucaagagcacccagaacgcgaucgacaagaucaccaacaaggugaacuccgucaucgagaagaugaacacccaguucacggccgugggcaaggaguucaaccaccuggagaagcggaucgagaaccugaacaagaaggucgacgacggcuuccucgacaucuggaccuacaacgccgagcugcuggugcuccuggagaacgagcgcacccuggacuaccacgacagcaacgugaagaaccucuacgagaagguccggucccagcugaagaacaacgccaaggagaucgggaacggcugcuucgaguucuaccacaagugcgacaacacgugcauggagagcgugaagaacgggaccuacgacuaccccaaguacuccgaggaggccaagcugaaccgcgaggagaucgacggcgugaagcucgagagcacccggaucuaccagauccuggcgaucuacuccaccgucgccagcagccuggugcucguggucucccugggggccaucagcuucuggaugugcuccaacggcagccugcagugccgcaucugcaucuga

SEQ ID NO: 68164 - RNA, 1701 nt, Artificial Sequence; identical to SEQ ID NO: 66693
  derived and/or modified CDS sequence (opt1) from hemagglutinin__InfluenzaA__ADD14153

SEQ ID NO: 68165 - RNA, 1701 nt, Artificial Sequence; identical to SEQ ID NO: 66693
  derived and/or modified CDS sequence (opt1) from hemagglutinin__InfluenzaA__ADD14155

SEQ ID NO: 68166 - RNA, 1701 nt, Artificial Sequence; identical to SEQ ID NO: 66693
  derived and/or modified CDS sequence (opt1) from hemagglutinin__InfluenzaA__ADD14157

SEQ ID NO: 68167 - RNA, 1701 nt, Artificial Sequence; identical to SEQ ID NO: 66693
  derived and/or modified CDS sequence (opt1) from hemagglutinin__InfluenzaA__ADD14162

SEQ ID NO: 68168 - RNA, 1701 nt, Artificial Sequence; identical to SEQ ID NO: 66693
  derived and/or modified CDS sequence (opt1) from hemagglutinin__InfluenzaA__ADD14172

SEQ ID NO: 68169 - RNA, 1701 nt, Artificial Sequence; identical to SEQ ID NO: 66693
  derived and/or modified CDS sequence (opt1) from hemagglutinin__InfluenzaA__ADD14182

SEQ ID NO: 68170 - RNA, 1701 nt, Artificial Sequence; identical to SEQ ID NO: 66693
  derived and/or modified CDS sequence (opt1) from hemagglutinin__InfluenzaA__ADD14192

SEQ ID NO: 68171 - RNA, 1701 nt, Artificial Sequence; identical to SEQ ID NO: 66693
  derived and/or modified CDS sequence (opt1) from hemagglutinin__InfluenzaA__ADD14202

SEQ ID NO: 68172 - RNA, 1701 nt, Artificial Sequence
  derived and/or modified CDS sequence (opt1) from hemagglutinin__InfluenzaA__ADD21447
augaaggccauccugguguuccuccuguacaccuucgccaccgcgaacgccgacacgcugugcaucggcuaccacgccaacaacagcaccgacaccgucgacaccgugcucgagaagaacgugacggucacccacuccgugaaccugcuggaggaccgccacaacgggaagcucugcaagcugcggggcguggcgccccugcaccucgggaagugcaacaucgccggcuggcugcuggggaacccggagugcgagcuccuguucaccgccagcuccuggagcuacaucgucgagaccuccaacagcgacaacggcacgugcuaccccggcgacuucaucaacuacgaggagcugcgcgagcagcucuccagcguguccagcuucgagcgguucgagauguuccccaaguccagcuccuggcccaaccacgagaccaaccgcggggugaccgccgccugcccguacgccggcgcgaacagcuucuaccggaaccugaucuggcuggucaagaaggagaacuccuaccccaagcucagcaaguccuacaucaacaacaaggagaaggaggugcuggugcugugggggauccaccacccgcccaccagcgccgaccagcagucccucuaccagaacgccgacgccuacgucuucgugggcagcagcaaguacaacaagaaguuccgccccgagaucgccgcgcggcccaaggugcgcgggcagacgggccggaugaacuacuacuggacccuggucgagcccggcgacaccaucaccuucgaggccacggagaaccugguggugccccgcuacgccuucgccaugaagcggggguccggcagcgggaucaucaucuccgacaccccgguccacgacugcaacacgaccugccagacccccaagggcgccaucaacaccagccuccccuuccagaacauccaccccgugaccaucggcgagugcccgaaguacgugaaguccaccaaccugcgcauggcgacggggcugcggaacauccccagcauccagucccgcggccucuucggggccaucgccggcuucaucgagggcggguggaccggcaugaucgacgggugguacggcuaccaccaccagaacgagcaggggagcggcuacgccgccgaccggaaguccacccagaacgcgaucgacgggaucaccaacaaggucaacagcgugaucgagaagaugaacacgcaguucaccgccgugggcaaggaguucaaccaccuggagaagcgcaucgagaaccugaacaagaaggucgacgacggccuccuggacguguggaccuacaacgccgagcugcucguccugcuggagaacgagcggacccucgacuaccacgacuccaacgugaagaaccuguacgagaaggugcgcagccagcugaagaacaacgccaaggagaucgggaacggcugcuucgaguucuaccacaagugcgacgacacgugcauggaguccguccggaacggggccuacgacuaccccaaguacagcgaggaggcgaagcucaaccgcgaggagaucgacggcgugaagcuggaguccacccggaucuaccagauccuggccaucuacagcaccguggccuccagccucguccugcuggugucccucggggccaucagcuucuggaugugcagcaacggcucccugcagugccgcaucugcaucuga

SEQ ID NO: 68173 - RNA, 1701 nt, Artificial Sequence
  derived and/or modified CDS sequence (opt1) from hemagglutinin__InfluenzaA__ADD21457
augaaggccauccugguguuccuccuguacaccuucgccaccgcgaacgccgacacgcugugcaucggcuaccacgccaacaacagcaccgacaccgucgacaccgugcucgagaagaacgugacggucacccacuccgugaaccugcuggaggaccgccacaacgggaagcucugcaagcugcggggcguggcgccccugcaccucgggaagugcaacaucgccggcuggcugcuggggaacccggagugcgagcuccuguucaccgccagcuccuggagcuacaucgucgagaccuccaacagcgacaacggcacgugcuaccccggcgacuucaucaacuacgaggagcugcgcgagcagcucuccagcguguccagcuucgagcgguucgagauguuccccaaguccagcuccuggcccaaccacgagaccaaccgcggggugaccgccgccugcccguacgccggcgcgaacagcuucuaccggaaccugaucuggcuggucaagaaggagaacuccuaccccaagcucagcaaguccuacaucaacaacaaggagaaggaggugcuggugcugugggggauccaccacccgcccaccagcgccgaccagcagucccucuaccagaacgccgacgccuacgucuucgugggcagcagcaaguacaacaagaaguuccgccccgagaucgccgcgcggcccaaggugcgcgggcagacgggccggaugaacuacuacuggacccuggucgagcccggcgacaccaucaccuucgaggccacggggaaccugguggugccccgcuacgccuucgccaugaagcggggcuccgggagcggcaucaucaucuccgacaccccgguccacgacugcaacacgaccugccagacccccaagggcgccgugaacaccagccuccccuuccagaacauccaccccgugaccaucggggagugcccgaaguacgucaaguccaccaaccugcgcauggcgacgggccugcggaacauccccagcauccagucccgcggccucuucggggccaucgccggguucaucgagggcggcuggaccgggaugaucgacggcugguacggguaccaccaccagaacgagcagggcagcggguacgccgccgaccggaaguccacccagaacgcgaucgacggcaucaccaacaaggugaacagcgugaucgagaagaugaacacgcaguucaccgccgucggcaaggaguucaaccaccuggagaagcgcaucgagaaccugaacaagaagguggacgacgggcuccuggacgucuggaccuacaacgccgagcugcucgugcugcuggagaacgagcggacccucgacuaccacgacuccaacgugaagaaccuguacgagaagguccgcagccagcugaagaacaacgccaaggagaucggcaacgggugcuucgaguucuaccacaagugcgacgacacgugcauggaguccgugcggaacggcaccuacgacuaccccaaguacagcgaggaggccaagcucaaccgcgaggagaucgacggggugaagcuggaguccacccggaucuaccagauccuggcgaucuacagcaccgucgccuccagccucgugcugcuggugucccucggcgccaucagcuucuggaugugcagcaacggcucccugcagugccgcaucugcaucuga

SEQ ID NO: 68174 - RNA, 1698 nt, Artificial Sequence
  derived and/or modified CDS sequence (opt1) from hemagglutinin__InfluenzaA__ADD21467
augaaggccaagcugcucgugcugcugugcaccuucaccgccacguacgcggacaccaucugcaucggcuaccacgccaacaacagcaccgacaccgucgacacggugcucgagaagaacgugaccgucacccacuccgugaaccugcuggaggacagccacaacgggaagcucugccugcugaagggcaucgcgccccuccagcuggggaacugcuccguggccggcuggauccuggggaacccggagugcgagcuccugaucagcaaggaguccuggagcuacaucgucgagacccccaaccccgagaacggcacgugcuaccccggcuacuucgccgacuacgaggagcugcgcgagcagcucuccagcguguccagcuucgagcgguucgagaucuucccgaaggaguccagcuggcccaaccacaccgugaccggggucuccgccagcugcucccacaacggcaagagcuccuucuaccgcaaccugcuguggcucaccgggaagaacggccuguaccccaaccugagcaaguccuacgccaacaacaaggagaaggaggugcucgugcuguggggcguccaccacccgcccaacauccgggaccagcgcgcccuguaccacacggagaacgccuacgugagcguggucagcucccacuacagccggcgcuucacccccgagaucgcgaagcggcccaaggugcgcgggcaggagggccggaucaacuacuacuggacccuccuggagcccggggacaccaucaucuucgaggccaacggcaaccugaucgccccgugguacgccuucgcccucucccgcggguucggcagcggcaucaucacguccaacgcgcccauggacgagugcgacgccaagugccagacgccccagggggccaucaacagcucccugcccuuccagaacgugcacccggucaccaucggcgagugccccaaguacgcccggagcgccaagcugcgcauggugaccgggcuccggaacauccccuccauccagagccgcggccuguucggggcgaucgccggcuucaucgagggcggguggaccggcaugguggacgggugguacggcuaccaccaccagaacgagcagggguccggcuacgccgccgaccagaaguccacccagaacgccaucaacggcaucaccaacaaggucaacagcgugaucgagaagaugaacacccaguucacggcgguggggaaggaguucaacaagcuggagcggcgcauggagaaccucaacaagaaggucgacgacggcuuccuggacaucuggaccuacaacgccgagcugcucgugcugcuggagaacgagcggacccucgacuuccacgacagcaacgucaagaaccuguacgagaaggugaagucccagcugaagaacaacgccaaggagaucgggaacggcugcuucgaguucuaccacaagugcaacaacgagugcauggagagcgugaagaacgggaccuacgacuaccccaaguacuccgaggagagcaagcucaaccgcgagaagaucgacggcgucaagcuggaguccaugggcguguaccagauccuggccaucuacagcacgguggccagcucccucguccugcuggugagccucggggcgaucuccuucuggaugugcagcaacggcucccugcagugccggaucugcaucuga

SEQ ID NO: 68175 - RNA, 1701 nt, Artificial Sequence
  derived and/or modified CDS sequence (opt1) from hemagglutinin__InfluenzaA__ADD21560
augaagaccaucaucgccuucagccacauccugugccucaucuacgcccagaagcugcccggcuccgacaacagcauggcgacccugugccucgggcaccacgccgugccgaacggcacgcuggucaagaccaucaccgacgaccagaucgaggugaccaacgccacggagcuggugcaguccagcuccaccgggcgcaucugcaacagcccccaccacauccucgacggcaagaacugcacccugaucgacgcccugcucggggacccccacugcgacgacuuccagaacaaggagugggaccuguucgucgagcgguccaccgccuacagcaacugcuaccccuacuacgugccggacuacgcgucccugcgcagccucguggccuccagcggcacgcuggaguucacccaggaguccuucaacuggaccggcgucacccaggacgggagcuccuacacgugccggcgcaagagcgugaacuccuucuucagccggcugaacuggcuccacaaccuggacuacaaguaccccgcccugaacgugaccaugcccaacaacgacaaguucgacaagcucuacaucuggggcguccaccaccccgggaccgaccgcgaccagaccaaccuguacgugcaggccuccggccgggugacggucagcaccaagcgcagccagcagaccgugaucccgaacaucgggucccggcccugggugcgcggcgucagcuccaucaucagcaucuacuggaccaucgugaagcccggcgacauccugcucaucaacuccacggggaaccugaucgcgccccggggcuacuucaagauccagagcgggaaguccagcaucaugcgcuccgacgccccgaucggcaacugcaacagcgagugcaucacccccaacggcuccauccccaacgacaagcccuuccagaacgugaaccggaucaccuacggggccugcccgcgcuacgucaagcagaacacccugaagcucgccacgggcaugcggaacgugcccgagaagcagacccgcgggaucuucggcgccaucgcgggguucaucgagaacggcugggagggcaugguggacgggugguacggcuuccggcaccagaacagcgaggggaccggccaggccgccgaccugaaguccacccaggccgccaucaaccagaucacggggaagcugaaccgcgucaucaagaagaccaacgagaaguuccaccagaucgagaaggaguucagcgagguggagggccggauccaggaccucgagaaguacguggaggacaccaagaucgaccugugguccuacaacgcggagcugcucgucgcccuggagaaccagcacaccaucgaccugacggacagcgagaugaacaagcuguucgagcgcacccggaagcagcuccgcgagaacgccgaggacaugggcaacgggugcuucaagaucuaccacaagugcgacaacgccugcaucggcuccauccgcaacgggaccuacgaccacgacguguaccgggacgaggcccugaacaaccgcuuccagaucaagagcguccagcucaaguccggcuacaaggacuggauccuguggaucagcuucgcgaugagcugcuuccugcucugcguggugcugcugggguucaucauguggaccugccagaagggcaacaucaagugcaacaucugcaucuga

SEQ ID NO: 68176 - RNA, 1701 nt, Artificial Sequence; identical to SEQ ID NO: 66680
  derived and/or modified CDS sequence (opt1) from hemagglutinin__InfluenzaA__ADD21734

SEQ ID NO: 68177 - RNA, 1701 nt, Artificial Sequence; identical to SEQ ID NO: 66693
  derived and/or modified CDS sequence (opt1) from hemagglutinin__InfluenzaA__ADD21744

SEQ ID NO: 68178 - RNA, 1701 nt, Artificial Sequence
  derived and/or modified CDS sequence (opt1) from hemagglutinin__InfluenzaA__ADD21764
augaaggccauccuggugguccuccuguacaccuucgccaccgcgaacgccgacacgcugugcaucggcuaccacgccaacaacagcaccgacaccguggacaccgugcucgagaagaacgucacggugacccacuccgugaaccugcuggaggacaagcacaacgggaagcucugcaagcugcgcggcgucgcgccccugcaccucgggaagugcaacaucgccggcuggauccuggggaacccggagugcgagagccuguccaccgccagcuccuggagcuacaucguggagaccuccagcuccgacaacggcacgugcuaccccggcgacuucaucgacuacgaggagcuccgggagcagcugagcuccgugagcuccuucgagcgcuucgagaucuuccccaagaccagcuccuggcccaaccacgacagcaacaagggggucaccgccgccugcccgcacgccggcgcgaaguccuucuacaagaaccugaucuggcucgugaagaaggggaacagcuaccccaagcuguccaagagcuacaucaacgacaagggcaaggaggugcugguccucugggggauccaccaccccagcaccuccgccgaccagcagagccuguaccagaacgccgacgccuacguguucgugggcacgucccgguacagcaagaaguucaagcccgagaucgccauccgcccgaagguccgggaccaggagggccgcaugaacuacuacuggacccugguggagcccggggacaagaucaccuucgaggcgaccggcaaccucguggucccccgguacgccuucgccauggagcgcaacgccgaguccgggaucaucaucagcgacacgcccgugcacgacugcaacacgaccugccagaccccgaagggcgccaucaacaccucccugcccuuccagaacauccaccccaucaccaucggcaagugccccaaguacgucaagagcaccaagcugcggcucgcgaccgggcugcgcaacgugccguccauccagagccggggccuguucggggccaucgccggcuucaucgagggcggguggacgggcaugguggacgggugguacggcuaccaccaccagaacgagcagggguccggcuacgccgccgaccucaagagcacccagaacgcgaucgacgagaucaccaacaaggugaacuccgucaucgagaagaugaacacccaguucacggccguggggaaggaguucaaccaccuggagaagcgcaucgagaaccugaacaagaaggucgacgacggcuuccucgacaucuggaccuacaacgccgagcugcuggugcuccuggagaacgagcggacccuggacuaccacgacagcaacgugaagaaccucuacgagaagguccgcucccagcugaagaacaacgccaaggagaucggcaacgggugcuucgaguucuaccacaagugcgacaacacgugcauggagagcgugaagaacggcaccuacgacuaccccaaguacuccgaggaggccaagcugaaccgggaggagaucgacggggugaagcucgagagcacccgcaucuaccagauccuggcgaucuacuccaccgucgccagcagccuggugcucguggucucccugggcgccaucagcuucuggaugugcuccaacgggagccugcagugccggaucugcaucuga

SEQ ID NO: 68179 - RNA, 1701 nt, Artificial Sequence
  derived and/or modified CDS sequence (opt1) from hemagglutinin__InfluenzaA__ADD21774
augaaggccauccuggugguccuccuguacaccuucgccaccgcgaacgccgacacgcugugcaucggcuaccacgccaacaacagcaccgacaccguggacaccgugcucgagaagaacgucacggugacccacuccgugaaccugcuggaggacaagcacaacgggaagcucugcaagcugcgcggcgucgcgccccugcaccucgggaagugcaacaucgccggcuggauccuggggaacccggagugcgagagccuguccaccgccagcuccuggagcuacaucguggagaccuccagcuccgacaacggcacgugcuaccccggcgacuucaucgacuacgaggagcuccgggagcagcugagcuccgugagcuccuucgagcgcuucgagaucuuccccaagaccagcuccuggcccaaccacgacagcaacaagggggucaccgccgccugcccgcacgccggcgcgaaguccuucuacaagaaccugaucuggcucgugaagaaggggaacagcuaccccaagcuguccaagagcuacaucaacgacaagggcaaggaggugcugguccucugggggauccaccaccccagcaccuccgccgaccagcagagccuguaccagaacgccgacgccuacguguucgugggcuccagccgguacuccaagaaguucaagcccgagaucgccauccgcccgaagguccgggaccaggagggccgcaugaacuacuacuggacgcugguggagcccggggacaagaucaccuucgaggcgaccggcaaccucguggucccccgguacgccuucgccauggagcgcaacgccgggagcggcaucaucaucuccgacacccccgugcacgacugcaacacgaccugccagaccccgaagggcgccaucaacaccagccugcccuuccagaacauccaccccaucacgaucgggaagugccccaaguacgugaaguccaccaagcugcggcucgcgaccggccugcgcaacgucccgagcgugcagucccgggggcuguucggcgccaucgccggguucaucgagggcggcuggaccgggaugguggacggcugguacggguaccaccaccagaacgagcagggcagcggguacgccgccgaccucaaguccacgcagaacgcgaucgacgagaucaccaacaaggucaacagcgugaucgagaagaugaacacccaguucaccgccgucggcaaggaguucaaccaccuggagaagcgcaucgagaaccugaacaagaagguggacgacggcuuccucgacaucuggacguacaacgccgagcugcuggugcuccuggagaacgagcggacccuggacuaccacgacuccaacgucaagaaccucuacgagaaggugcgcagccagcugaagaacaacgccaaggagaucgggaacggcugcuucgaguucuaccacaagugcgacaacacgugcauggaguccgugaagaacgggaccuacgacuaccccaaguacagcgaggaggccaagcugaaccgggaggagaucgacggcgucaagcucgaguccacccgcaucuaccagauccuggcgaucuacagcaccguggccagcucccuggugcucgucgugagccugggggccaucuccuucuggaugugcagcaacggcucccugcagugccggaucugcaucuga

SEQ ID NO: 68180 - RNA, 1701 nt, Artificial Sequence; identical to SEQ ID NO: 66693
  derived and/or modified CDS sequence (opt1) from hemagglutinin__InfluenzaA__ADD21784

SEQ ID NO: 68181 - RNA, 1701 nt, Artificial Sequence; identical to SEQ ID NO: 67853
  derived and/or modified CDS sequence (opt1) from hemagglutinin__InfluenzaA__ADD21794

SEQ ID NO: 68182 - RNA, 1701 nt, Artificial Sequence; identical to SEQ ID NO: 66693
  derived and/or modified CDS sequence (opt1) from hemagglutinin__InfluenzaA__ADD21804

SEQ ID NO: 68183 - RNA, 1701 nt, Artificial Sequence
  derived and/or modified CDS sequence (opt1) from hemagglutinin__InfluenzaA__ADD21814
augaaggccauccuggugguccuccuguacaccuucgccaccgcgaacgccgacacgcugugcaucggcuaccacgccaacaacagcaccgacaccguggacaccgugcucgagaagaacgucacggugacccacuccgugaaccugcuggaggacaagcacaacgggaagcucugcaagcugcgcggcgucgcgccccugcaccucgggaagugcaacaucgccagcuggauccugggcaacccggagugcgagucccugagcaccgcguccagcugguccuacaucguggagaccagcuccagcgacaacgggacgugcuaccccggcgacuucaucgacuacgaggagcuccgggagcagcuguccagcguguccagcuucgagcgcuucgagaucuuccccaagaccuccagcuggcccaaccacgacuccaacaagggcgucaccgccgccugcccgcacgccggggccaagagcuucuacaagaaccugaucuggcucgugaagaagggcaacuccuaccccaagcugagcaagagcuacaucaacgacaaggggaaggaggugcugguccucuggggcauccaccaccccuccaccagcgccgaccagcagucccuguaccagaacgccgacgccuacguguucguggggacgagccgguacuccaagaaguucaagcccgagaucgccauccgcccgaagguccgggaccaggagggccgcaugaacuacuacuggacccugguggagcccggcgacaagaucaccuucgaggcgaccgggaaccucguggucccccgguacgccuucgccauggagcgcaacgccggcagcgggaucaucaucuccgacacgcccgugcacgacugcaacacgaccugccagaccccgaagggcgccaucaacaccagccugcccuuccagaacauccaccccaucaccaucggcaagugccccaaguacgugaaguccaccaagcugcggcucgcgaccgggcugcgcaacgucccgagcauccagucccggggccuguucggggccaucgccggcuucaucgagggcggguggacgggcaugguggacgggugguacggcuaccaccaccagaacgagcaggggagcggcuacgccgccgaccucaaguccacccagaacgcgaucgacgagaucaccaacaaggugaacagcgucaucgagaagaugaacacccaguucacggccguggggaaggaguucaaccaccuggagaagcgcaucgagaaccugaacaagaaggucgacgacggcuuccucgacaucuggaccuacaacgccgagcugcuggugcuccuggagaacgagcggacccuggacuaccacgacuccaacgugaagaaccucuacgagaagguccgcagccagcugaagaacaacgccaaggagaucggcaacgggugcuucgaguucuaccacaagugcgacaacacgugcauggaguccgugaagaacggcaccuacgacuaccccaaguacagcgaggaggccaagcugaaccgggaggagaucgacggggugaagcucgaguccacccgcaucuaccagauccuggcgaucuacagcaccgucgccagcucccuggugcucguggucagccugggcgccaucuccuucuggaugugcagcaacgggucccugcagugccggaucugcaucuga

SEQ ID NO: 68184 - RNA, 1701 nt, Artificial Sequence; identical to SEQ ID NO: 67853
  derived and/or modified CDS sequence (opt1) from hemagglutinin__InfluenzaA__ADD21824

SEQ ID NO: 68185 - RNA, 1701 nt, Artificial Sequence; identical to SEQ ID NO: 67853
  derived and/or modified CDS sequence (opt1) from hemagglutinin__InfluenzaA__ADD21834

SEQ ID NO: 68186 - RNA, 1701 nt, Artificial Sequence; identical to SEQ ID NO: 67857
  derived and/or modified CDS sequence (opt1) from hemagglutinin__InfluenzaA__ADD21844

SEQ ID NO: 68187 - RNA, 1701 nt, Artificial Sequence; identical to SEQ ID NO: 67857
  derived and/or modified CDS sequence (opt1) from hemagglutinin__InfluenzaA__ADD21854

SEQ ID NO: 68188 - RNA, 1701 nt, Artificial Sequence; identical to SEQ ID NO: 67795
  derived and/or modified CDS sequence (opt1) from hemagglutinin__InfluenzaA__ADD21864

SEQ ID NO: 68189 - RNA, 1701 nt, Artificial Sequence
  derived and/or modified CDS sequence (opt1) from hemagglutinin__InfluenzaA__ADD21884
augaaggccauccuggugguccuccuguacaccuucgccaccgcgaacgccgacacgcugugcaucggcuaccacgccaacaacagcaccgacaccguggacaccgugcucgagaagaacgucacggugacccacuccgugaaccugcuggaggacaagcacaacgggaagcucugcaagcugcgcggcgucgcgccccugcaccucgggaagugcaacaucgccggcuggauccuggggaacccggagugcgagagccuguccaccgccagcuccuggagcuacaucguggagaccuccagcuccggcaacggcacgugcuaccccggggacuucaucgacuacgaggagcuccgggagcagcugagcuccgugagcuccuucgagcgcuucgagaucuuccccaagaccagcuccuggcccaaccacgacagcaacaagggcgucaccgccgccugcccgcacgccggggcgaaguccuucuacaagaaccugaucuggcucgugaagaagggcaacagcuaccccaagcuguccaagagcuacaucaacgacaaggggaaggaggugcugguccucuggggcauccaccaccccagcaccuccgccgaccagcagagccuguaccagaacgccgacgccuacguguucgugggcacgucccgguacagcaagaaguucaagcccgagaucgccauccgcccgaagguccgggaccaggaggggcgcaugaacuacuacuggacccugguggagcccggcgacaagaucaccuucgaggcgaccgggaaccucguggucccccgguacgccuucgccauggagcgcaacgccggcuccggcaucaucaucagcgacacgcccgugcacgacugcaacacgaccugccagaccccgaagggggccaucaacaccucccugcccuuccagaacauccaccccaucaccaucggcaagugccccaaguacgucaagagcaccaagcugcggcucgcgaccgggcugcgcaacgugccguccauccagagccggggccuguucggggccaucgccggcuucaucgagggcggguggacgggcaugguggacgggugguacggcuaccaccaccagaacgagcagggguccggcuacgccgccgaccucaagagcacccagaacgcgaucgacgagaucaccaacaaggugaacuccgucaucgagaagaugaacacccaguucacggccgugggcaaggaguucaaccaccuggagaagcgcaucgagaaccugaacaagaaggucgacgacggguuccucgacaucuggaccuacaacgccgagcugcuggugcuccuggagaacgagcggacccuggacuaccacgacagcaacgugaagaaccucuacgagaagguccgcucccagcugaagaacaacgccaaggagaucggcaacgggugcuucgaguucuaccacaagugcgacaacacgugcaugggcagcgugaagaacgggaccuacgacuaccccaaguacuccgaggaggccaagcugaaccgggaggagaucgacggcgugaagcucgagagcacccgcaucuaccagauccuggcgaucuacuccaccgucgccagcagccuggugcucguggucucccugggcgccaucagcuucuggaugugcuccaacgggagccugcagugccggaucugcaucuga

SEQ ID NO: 68190 - RNA, 1701 nt, Artificial Sequence; identical to SEQ ID NO: 67795
  derived and/or modified CDS sequence (opt1) from hemagglutinin__InfluenzaA__ADD21894

SEQ ID NO: 68191 - RNA, 1701 nt, Artificial Sequence
  derived and/or modified CDS sequence (opt1) from hemagglutinin__InfluenzaA__ADD22501
augaaggccauccuggugguccuccuguacaccuucgccaccgcgaacgccgacacgcugugcaucggcuaccacgccaacaacagcaccgacaccguggacaccgugcucgagaagaacgucacggugacccacuccgugaaccugcuggaggacaagcacaacgggaagcucugcaagcugcgcggcgucgcgccccugcaccucgggaagugcaacaucgccggcuggauccuggggaacccggagugcgagagccuguccaccgccagcuccuggagcuacaucguggagaccuccagcuccgacaacggcacgugcuaccccggcgacuucaucgacuacgaggagcuccgggagcagcugagcuccgugagcuccuucgagcgcuucgagaucuuccccaagaccagcuccuggcccaaccacgacagcaacaagggggucaccgccgccugcccgcacgccggcgcgaaguccuucuacaagaaccugaucuggcucgugaagaaggggaacagcuaccccaagcuguccaagagcuacaucaacgacaagggcaaggaggugcugguccucugggggauccaccaccccagcaccuccgccgaccagcagagccuguaccagaacgccgacgccuacguguucgugggcacguccaaguacagcaagaaguucaagcccgagaucgccauccggccgaagguccgcgaccaggagggccggaugaacuacuacuggacccugguggagcccggggacaagaucaccuucgaggcgaccggcaaccucguggucccccgcuacgccuucgccauggagcggaacgccggguccggcaucaucaucagcgacacgcccgugcacgacugcaacacgaccugccagaccccgaagggcgccaucaacaccucccugcccuuccagaacauccaccccaucaccaucgggaagugccccaaguacgucaagagcaccaagcugcgccucgcgaccggccugcggaacgugccguccauccagagccgcgggcuguucggcgccaucgccggguucaucgagggcggcuggacggggaugguggacggcugguacggguaccaccaccagaacgagcagggcuccggguacgccgccgaccucaagagcacccagaacgcgaucgacgagaucaccaacaaggugaacuccgucaucgagaagaugaacacccaguucacggccgugggcaaggaguucaaccaccuggagaagcggaucgagaaccugaacaagaagaucgacgacggcuuccucgacaucuggaccuacaacgccgagcugcugguccuccuggagaacgagcgcacccuggacuaccacgacagcaacgugaagaaccucuacgagaaggugcggauccagcugaagaacaacgccaaggagaucgggaacggcugcuucgaguucuaccacaagugcgacaacacgugcauggaguccgucaagaacgggaccuacgacuaccccaaguacagcgaggaggccaagcugaaccgcgaggagaucgacggcgugaagcucgaguccacccggaucuaccagauccuggcgaucuacagcaccguggccuccagccugguccucguggugagccugggggccaucuccuucuggaugugcagcaacggcucccugcagugccgcaucugcaucuga

SEQ ID NO: 68192 - RNA, 1701 nt, Artificial Sequence; identical to SEQ ID NO: 67795
  derived and/or modified CDS sequence (opt1) from hemagglutinin__InfluenzaA__ADD22511

SEQ ID NO: 68193 - RNA, 1701 nt, Artificial Sequence
  derived and/or modified CDS sequence (opt1) from hemagglutinin__InfluenzaA__ADD22521
augaaggccauccuggugguccuccuguacaccuucgccaccgcgaacgccgacacgcugugcaucggcuaccacgccaacaacagcaccgacaccguggacaccgugcucgagaagaacgucacggugacccacuccgugaaccugcuggaggacaagcacaacgggaagcucugcaagcugcgcggcgucgcgccccugcaccucgggaagugcaacaucgccggcuggauccuggggaacccggagugcgagagccuguccaccgccagcuccuggagcuacaucguggagaccuccagcuccgacaacggcacgugcuaccccggcgacuucaucgacuacgaggagcuccgggagcagcugagcuccgugagcuccuucgagcgcuucgagaucuuccccaagaccagcuccuggcccaaccacgacagcaacaagggggucaccgccgccugcccgcacgccggcgcgaaguccuucuacaagaaccugaucuggcucgugaagaaggggaacagcuaccccaagcuguccaagagcuacaucaacgacaagggcaaggaggugcugguccucugggggauccaccaccccagcaccuccgccgaccagcagagccuguaccagaacgccgacacguacguguucgugggcaccucccgguacagcaagaaguucaagcccgagaucgccauccgcccgaagguccgggaccaggagggccgcaugaacuacuacuggacccugguggagcccggggacaagaucaccuucgaggccacgggcaaccucguggucccccgguacgcguucgccauggagcgcaacgccggguccggcaucaucaucagcgacacccccgugcacgacugcaacacgaccugccagaccccgaagggcgccaucaacaccucccugcccuuccagaacauccaccccaucaccaucgggaagugccccaaguacgucaagagcaccaagcugcggcucgccacgggccugcgcaacgugccguccauccagagccgggggcuguucggcgcgaucgccggguucaucgagggcggcuggaccgggaugguggacggcugguacggguaccaccaccagaacgagcagggcuccggguacgccgccgaccucaagagcacccagaacgccaucgacgagaucaccaacaaggugaacuccgucaucgagaagaugaacacgcaguucaccgcggugggcaaggaguucaaccaccuggagaagcgcaucgagaaccugaacaagaagaucgacgacggcuuccucgacaucuggaccuacaacgccgagcugcugguccuccuggagaacgagcggacccuggacuaccacgacagcaacgugaagaaccucuacgagaaggugcgcucccagcugaagaacaacgccaaggagaucgggaacggcugcuucgaguucuaccacaagugcgacaacacgugcauggagagcgucaagaacgggaccuacgacuaccccaaguacuccgaggaggccaagcugaaccgggaggagaucgacggcgugaagcucgagagcacccgcaucuaccagauccuggccaucuacuccaccguggcgagcagccugguccucguggugucccugggggccaucagcuucuggaugugcuccaacggcagccugcagugccggaucugcaucuga

SEQ ID NO: 68194 - RNA, 1701 nt, Artificial Sequence; identical to SEQ ID NO: 66693
  derived and/or modified CDS sequence (opt1) from hemagglutinin__InfluenzaA__ADD22531

SEQ ID NO: 68195 - RNA, 1701 nt, Artificial Sequence
  derived and/or modified CDS sequence (opt1) from hemagglutinin__InfluenzaA__ADD22541
augaaggccauccuggugguccuccuguacaccuucgccaccgcgaacgccgacacgcugugcaucggcuaccacgccaacaacagcaccgacaccguggacaccgugcucgagaagaacgucacggugacccacuccgugaaccugcuggaggacaagcacaacgggaagcucugcaagcugcgcggcgucgcgccccugcaccucgggaagugcaacaucgccggcuggauccuggggaacccggagugcgagagccuguccaccgccagcuccuggagcuacaucguggagaccuccagcuccggcaacggcacgugcuaccccggggacuucaucgacuacgaggagcuccgggagcagcugagcuccgugagcuccuucgagcgcuucgagaucuuccccaagaccagcuccuggcccaaccacgacagcaacaagggcgucaccgccgccugcccgcacgccggggcgaaguccuucuacaagaaccugaucuggcucgugaagaagggcaacagcuaccccaagcuguccaagagcuacaucaacgacaaggggaaggaggugcugguccucuggggcauccaccaccccagcaccuccgccgaccagcagagccuguaccagaacgccgacgccuacguguucgugggcacguccaaguacagcaagaaguucaagcccgagaucgccauccggccgaagguccgcgaccaggaggggcggaugaacuacuacuggacccugguggagcccggcgacaagaucaccuucgaggcgaccgggaaccucguggucccccgcuacgccuucgccauggagcggaacgccggcuccggcaucaucaucagcgacacgcccgugcacgacugcaacacgaccugccagaccccgaagggggccaucaacaccucccugcccuuccagaacauccaccccaucaccaucggcaagugccccaaguacgucaagagcaccaagcugcgccucgcgaccgggcugcggaacgugccguccauccagagccgcggccuguucggggccaucgccggcuucaucgagggcggguggacgggcaugguggacgggugguacggcuaccaccaccagaacgagcagggguccggcuacgccgccgaccucaagagcacccagaacgcgaucgacgagaucaccaacaaggugaacuccgucaucgagaagaugaacacccaguucacggccgugggcaaggaguucaaccaccuggagaagcggaucgagaaccugaacaagaaggucgacgacggguuccucgacaucuggaccuacaacgccgagcugcuggugcuccuggagaacgagcgcacccuggacuaccacgacagcaacgugaagaaccucuacgagaagguccggucccagcugaagaacaacgccaaggagaucggcaacgggugcuucgaguucuaccacaagugcgacaacacgugcauggagagcgugaagaacggcaccuacgacuaccccaaguacuccgaggaggccaagcugaaccgcgaggagaucgacggggugaagcucgagagcacccggaucuaccagauccuggcgaucuacuccaccgucgccagcagccuggugcucguggucucccugggcgccaucagcuucuggaugugcuccaacggcagccugcagugccgcaucugcaucuga

SEQ ID NO: 68196 - RNA, 1701 nt, Artificial Sequence; identical to SEQ ID NO: 67795
  derived and/or modified CDS sequence (opt1) from hemagglutinin__InfluenzaA__ADD22554

SEQ ID NO: 68197 - RNA, 1701 nt, Artificial Sequence; identical to SEQ ID NO: 67795
  derived and/or modified CDS sequence (opt1) from hemagglutinin__InfluenzaA__ADD22564

SEQ ID NO: 68198 - RNA, 1701 nt, Artificial Sequence
  derived and/or modified CDS sequence (opt1) from hemagglutinin__InfluenzaA__ADD22574
augaaggccauccuggugguccuccuguacaccuucgccaccgcgaacgccgacacgcugugcaucggcuaccacgccaacaacagcaccgacaccguggacaccgugcucgagaagaacgucacggugacccacuccgugaaccugcuggaggacaagcacaacgggaagcucugcaagcugcgcggcgucgcgccccugcaccucgggaagugcaacaucgccggcuggauccuggggaacccggagugcgagagccuguccaccgccagcuccuggagcuacaucguggagaccuccagcuccgacaacggcacgugcuaccccggcgacuucaucgacuacgaggagcuccgggagcagcugagcuccgugagcuccuucgagcgcuucgagaucuuccccaagaccagcuccuggcccaaccacgacagcaacaagggggucaccgccgccugcccgcacgccggcgcgaaguccuucuacaagaaccugaucuggcucgugaagaaggggaacagcuaccccaagcuguccaagagcuacaucaacgacaagggcaaggaggugcugguccucugggggauccaccaccccagcaccuccgccgaccagcagagccuguaccagaacgccgacacguacguguucgugggcaccucccgguacagcaagaaguucaagcccgagaucgccauccgcccgaagguccgggaccaggagggccgcaugaacuacuacuggacccugguggagcccggggacaagaucaccuucgaggccacgggcaaccucguggucccccgguacgcguucgccauggagcgcaacgccggguccggcaucaucaucagcgacacccccgugcacgacugcaacacgaccugccagacccugaagggcgccaucaacaccucccugccguuccagaacauccaccccaucaccaucgggaagugccccaaguacgucaagagcaccaagcuccggcuggccacgggccugcgcaacgugcccuccauccagagccgggggcuguucggcgcgaucgccggguucaucgagggcggcuggaccgggaugguggacggcugguacggguaccaccaccagaacgagcagggcuccggguacgccgccgaccucaagagcacccagaacgccaucgacgagaucaccaacaaggugaacuccgucaucgagaagaugaacacgcaguucaccgcggugggcaaggaguucaaccaccuggagaagcgcaucgagaaccucaacaagaagaucgacgacggcuuccuggacaucuggaccuacaacgccgagcugcucguccugcuggagaacgagcggacccucgacuaccacgacagcaacgugaagaaccuguacgagaaggugcgcucccagcugaagaacaacgccaaggagaucgggaacggcugcuucgaguucuaccacaagugcgacaacacgugcauggagagcgucaagaacgggaccuacgacuacccgaaguacuccgaggaggccaagcucaaccgggaggagaucgacggcgugaagcuggagagcacccgcaucuaccagauccuggccaucuacuccaccguggcgagcagccucguccugguggugucccugggggccaucagcuucuggaugugcuccaacggcagccuccagugccggaucugcaucuga

SEQ ID NO: 68199 - RNA, 1701 nt, Artificial Sequence; identical to SEQ ID NO: 67795
  derived and/or modified CDS sequence (opt1) from hemagglutinin__InfluenzaA__ADD22584

SEQ ID NO: 68200 - RNA, 1701 nt, Artificial Sequence; identical to SEQ ID NO: 66693
  derived and/or modified CDS sequence (opt1) from hemagglutinin__InfluenzaA__ADD22594

SEQ ID NO: 68201 - RNA, 1701 nt, Artificial Sequence; identical to SEQ ID NO: 67795
  derived and/or modified CDS sequence (opt1) from hemagglutinin__InfluenzaA__ADD22604

SEQ ID NO: 68202 - RNA, 1701 nt, Artificial Sequence; identical to SEQ ID NO: 67795
  derived and/or modified CDS sequence (opt1) from hemagglutinin__InfluenzaA__ADD22614

SEQ ID NO: 68203 - RNA, 1701 nt, Artificial Sequence; identical to SEQ ID NO: 67795
  derived and/or modified CDS sequence (opt1) from hemagglutinin__InfluenzaA__ADD22624

SEQ ID NO: 68204 - RNA, 1701 nt, Artificial Sequence
  derived and/or modified CDS sequence (opt1) from hemagglutinin__InfluenzaA__ADD22634
augaaggccauccuggugguccuccugugcaccuucgccaccgcgaacgccgacacgcugugcaucggcuaccacgccaacaacagcaccgacaccguggacaccgugcucgagaagaacgucacggugacccacuccgugaaccugcuggaggacaagcacaacgggaagcucugcaagcugcgcggcgucgcgccccugcaccucgggaagugcaacaucgccggcuggauccuggggaacccggagugcgagagccuguccaccgccagcuccuggagcuacaucguggagaccuccagcuccgacaacggcacgugcuaccccggcgacuucaucgacuacgaggagcuccgggagcagcugagcuccgugagcuccuucgagcgcuucgagaucuuccccaagaccagcuccuggcccaaccacgacagcaacaagggggucaccgccgccugcccgcacgccggcgcgaaguccuucuacaagaaccugaucuggcucgugaagaaggggaacagcuaccccaagcuguccaagagcuacaucaacgacaagggcaaggaggugcugguccucugggggauccaccaccccagcaccuccgccgaccagcagagccuguaccagaacgccgacgccuacguguucgugggcacgucccgguacagcaagaaguucaagcccgagaucgccauccgcccgaagguccgggaccaggagggccgcaugaacuacuacuggacccugguggagcccggggacaagaucaccuucgaggcgaccggcaaccucguggucccccgguacgccuucgccauggagcgcaacgccggguccggcaucaucaucagcgacacgcccgugcacgacugcaacacgaccugccagaccccgaagggcgccaucaacaccucccugcccuuccagaacauccaccccaucaccaucgggaagugccccaaguacgucaagagcaccaagcugcggcucgcgaccggccugcgcaacgugccguccauccagagccgggggcuguucggcgccaucgccggguucaucgagggcggcuggacggggaugguggacggcugguacggguaccaccaccagaacgagcagggcuccggguacgccgccgaccucaagagcacccagaacgcgaucgacgagaucaccaacaaggugaacuccgucaucgagaagaugaacacccaguucacggccgugggcaaggaguucaaccaccuggagaagcgcaucgagaaccugaacaagaagaucgacgacggcuuccucgacaucuggaccuacaacgccgagcugcugguccuccuggagaacgagcggacccuggacuaccacgacagcaacgugaagaaccucuacgagaaggugcgcucccagcugaagaacaacgccaaggagaucgggaacggcugcuucgaguucuaccacaagugcgacaacacgugcauggagagcgucaagaacgggaccuacgacuaccccaaguacuccgaggaggccaagcugaaccgggaggagaucgacggcgugaagcucgagagcacccgcaucuaccagauccuggcgaucuacuccaccguggccagcagccugguccucguggugucccugggggccaucagcuucuggaugugcuccaacggcagccugcagugccggaucugcaucuga

SEQ ID NO: 68205 - RNA, 1701 nt, Artificial Sequence
  derived and/or modified CDS sequence (opt1) from hemagglutinin__InfluenzaA__ADD22645
augaaggccauccuggugguccuccuguacaccuucgccaccgcgaacgccgacacgcugugcaucggcuaccacgccaacaacagcaccgacaccguggacaccgugcucgagaagaacgucacggugacccacuccgugaaccugcuggaggacaagcacaacgggaagcucugcaagcugcgcggcgucgcgccccugcaccucgggaagugcaacaucgccggcuggauccuggggaacccggagugcgagagccuguccaccgccagcuccuggagcuacaucguggagaccuccagcuccggcaacggcacgugcuaccccggggacuucaucgacuacgaggagcuccgggagcagcugagcuccgugagcuccuucgagcgcuucgagaucuuccccaagaccagcuccuggcccaaccacgacagcaacaagggcgucaccgccgccugcccgcacgccggggcgaaguccuucuacaagaaccugaucuggcucgugaagaagggcaacagcuaccccaagcuguccaagagcuacaucaacgacaaggggaaggaggugcugguccucuggggcauccaccaccccagcaccuccgccgaccagcagagccuguaccagaacgccgacgccuacguguucgugggcacgucccgguacagcaagaaguucaagcccgagaucgccauccgcccgaagguccgggaccaggaggggcgcaugaacuacuacuggacccugguggagcccggcgacaagaucaccuucgaggcgaccgggaaccucguggucccccgguacgccuucgccauggagcgcaacgccggcuccggcaucaucaucagcgacacgcccgugcacgacugcaacacgaccugccagaccccgaagggggccaucaacaccucccugcccuuccagaacauccaccccaucaccaucggcaagugccccaaguacgucaagagcaccaagcugcggcucgcgaccgggcugcgcaacgugccguccauccagagccggggccuguucggggccaucgccggcuucaucgagggcggguggacgggcaugguggacgggugguacggcuaccaccaccagaacgagcagggguccggcuacgccgccgaccucaagagcacccagaacgcgaucgacgagaucaccaacaaggugaacuccgucaucgagaagaugaacacccaguucacggccgugggcaaggaguucaaccaccuggagaagcgcaucgagaaccugaacaagaaggucgacgacggguuccucgacaucuggaccuacaacgccgagcugcuggugcuccuggagaacgagcggacccuggacuaccacgacagcaacgugaagaaccucuacgagaagguccgcucccagcugaagaacaacgccaaggagaucggcaacgggugcuucgaguucuaccacaagugcgacaacacgugcauggagagcgugaagaacggcaccuacgacuaccccaaguacuccgaggaggccaagcugaaccgggaggagaucgagggggugaagcucgagagcacccgcaucuaccagauccuggcgaucuacuccaccgucgccagcagccuggugcucguggucucccugggcgccaucagcuucuggaugugcuccaacggcagccugcagugccggaucugcaucuga

SEQ ID NO: 68206 - RNA, 1701 nt, Artificial Sequence
  derived and/or modified CDS sequence (opt1) from hemagglutinin__InfluenzaA__ADD22665
augaaggccauccuggugguccuccuguacaccuucgccaccgcgaacgccgacacgcugugcaucggcuaccacgccaacaacagcaccgacaccguggacaccgugcucgagaagaacgucacggugacccacuccgugaaccugcuggaggacaagcacaacgggaagcucugcaagcugcgcggcgucgcgccccugcaccucgggaagugcaacaucgccggcuggauccuggggaacccggagugcgagagccuguccaccgccagcuccuggagcuacaucguggagaccuccagcuccggcaacggcacgugcuaccccggggacuucaucgacuacgaggagcuccgggagcagcugagcuccgugagcuccuucgagcgcuucgagaucuuccccaagaccagcuccuggcccaaccacgacagcaacaagggcgucaccgccgccugcccgcacgccggggcgaaguccuucuacaagaaccugaucuggcucgugaagaagggcaacagcuaccccaagcuguccaagagcuacaucaacgacaagcggaaggaggugcugguccucugggggauccaccaccccagcaccuccgccgaccagcagagccuguaccagaacgccgacgccuacguguucgugggcacguccaaguacagcaagaaguucaagcccgagaucgccauccgcccgaagguccgggaccaggagggccgcaugaacuacuacuggacccugguggagcccggggacaagaucaccuucgaggcgaccggcaaccucguggucccccgguacgccuucgccauggagcgcaacgccggguccggcaucaucaucagcgacacgcccgugcacgacugcaacacgaccugccagaccccgaagggcgccaucaacaccucccugcccuuccagaacauccaccccaucaccaucgggaagugccccaaguacgucaagagcaccaagcugcggcucgcgaccggccugcgcaacgugccguccauccagagccgggggcuguucggcgccaucgccggguucaucgagggcggcuggacggggaugguggacggcugguacggguaccaccaccagaacgagcagggcuccggguacgccgccgaccucaagagcacccagaacgcgaucgacgagaucaccaacaaggugaacuccgucaucgagaagaugaacacccaguucacggccgugggcaaggaguucaaccaccuggagaagcgcaucgagaaccugaacaagaaggucgacgacggcuuccucgacaucuggaccuacaacgccgagcugcuggugcuccuggagaacgagcggacccuggacuaccacgacagcaacgugaagaaccucuacgagaagguccgcucccagcugaagaacaacgccaaggagaucgggaacggcugcuucgaguucuaccacaagugcgacaacacgugcauggagagcgugaagaacgggaccuacgacuaccccaaguacuccgaggaggccaagcugaaccgggaggagaucgacggcgugaagcucgagagcacccgcaucuaccagauccuggcgaucuacuccaccgucgccagcagccuggugcucguggucucccugggggccaucagcuucuggaugugcuccaacggcagccugcagugccggaucugcaucuga

SEQ ID NO: 68207 - RNA, 1701 nt, Artificial Sequence; identical to SEQ ID NO: 67795
  derived and/or modified CDS sequence (opt1) from hemagglutinin__InfluenzaA__ADD22675

SEQ ID NO: 68208 - RNA, 1701 nt, Artificial Sequence; identical to SEQ ID NO: 67795
  derived and/or modified CDS sequence (opt1) from hemagglutinin__InfluenzaA__ADD22685

SEQ ID NO: 68209 - RNA, 1701 nt, Artificial Sequence; identical to SEQ ID NO: 67795
  derived and/or modified CDS sequence (opt1) from hemagglutinin__InfluenzaA__ADD22695

SEQ ID NO: 68210 - RNA, 1701 nt, Artificial Sequence
  derived and/or modified CDS sequence (opt1) from hemagglutinin__InfluenzaA__ADD22722
augaaggccauccuggugguccuccuguacaccuucgccaccgcgaacgccgacacgcugugcaucggcuaccacgccaacaacagcaccgacaccguggacaccgugcucgagaagaacgucacggugacccacuccgugaaccugcuggaggaccgccacaacgggaagcucugcaagcugcggggcgucgcgccccugcaccucgggaagugcaacaucgccggcuggauccuggggaacccggagugcgagagccuguccaccgccagcuccuggagcuacaucguggagaccuccagcuccggcaacggcacgugcuaccccggggacuucaucgacuacgaggagcuccgcgagcagcugagcuccgugagcuccuucgagcgguucgagaucuuccccaagaccagcuccuggcccaaccacgacagcaacaagggcgucaccgccgccugcccgcacgccggggcgaaguccuucuacaagaaccugaucuggcucgugaagaagggcaacagcuaccccaagcuguccaagagcuacaucaacgacaaggggaaggaggugcugguccucuggggcauccaccaccccagcaccuccgccgaccagcagagccuguaccagaacgccgacgccuacguguucgugggcacguccagcuacuccaagaaguucaagcccgagaucgccauccgcccgaagguccgggaccaggaggggcgcaugaacuacuacuggacccugguggagcccggcgacaagaucaccuucgaggcgaccgggaaccucguggucccccgguacgccuucgccauggagcgcaacgccggcagcggcaucaucaucuccgacacgcccgugcacgacugcaacacgaccugccagaccccgaagggggccaucaacaccagccugcccuuccagaacauccaccccaucaccaucggcaagugccccaaguacgugaaguccaccaagcugcggcucgcgaccgggcugcgcaacgucccgagcauccagucccggggccuguucggggccaucgccggcuucaucgagggcggguggacgggcaugguggacgggugguacggcuaccaccaccagaacgagcaggggagcggcuacgccgccgaccucaaguccacccagaacgcgaucgacgagaucaccaacaaggugaacagcgucaucgagaagaugaacacccaguucacggccgugggcaaggaguucaaccaccuggagaagcgcaucgagaaccugaacaagaaggucgacgacggguuccucgacaucuggaccuacaacgccgagcugcuggugcuccuggagaacgagcggacccuggacuaccacgacuccaacgugaagaaccucuacgagaagguccgcagccagcugaagaacaacgccaaggagaucggcaacgggugcuucgaguucuaccacaagugcgacaacacgugcauggaguccgugaagaacggcaccuacgacuaccccaaguacagcgaggaggccaagcugaaccgggaggagaucgacggggugaagcucgaguccacccgcaucuaccagauccuggcgaucuacagcaccgucgccagcucccuggugcucguggucagccugggcgccaucuccuucuggaugugcagcaacggcucccugcagugccggaucugcaucuga

SEQ ID NO: 68211 - RNA, 1701 nt, Artificial Sequence; identical to SEQ ID NO: 68193
  derived and/or modified CDS sequence (opt1) from hemagglutinin__InfluenzaA__ADD22732

SEQ ID NO: 68212 - RNA, 1701 nt, Artificial Sequence
  derived and/or modified CDS sequence (opt1) from hemagglutinin__InfluenzaA__ADD22742
augaaggccauccuggugguccuccuguacaccuucgccaccgcgaacgccgacacgcugugcaucggcuaccacgccaacaacagcaccgacaccguggacaccgugcucgagaagaacgucacggugacccacuccgugaaccugcuggaggacaagcacaacgggaagcucugcaagcugcgcggcgucgcgccccugcaccucgggaagugcaacaucgccggcuggauccuggggaacccggagugcgagagccuguccaccgccagcuccuggagcuacaucguggagaccuccagcuccggcaacggcacgugcuaccccggggacuucaucgacuacgaggagcuccgggagcagcugagcuccgugagcuccuucgagcgcuucgagaucuuccccaagaccagcuccuggcccaaccacgacagcaacaagggcgucaccgccgccugcccgcacgccggggcgaaguccuucuacaagaaccugaucuggcucgugaagaagggcaacagcuaccccaagcuguccaagagcuacaucaacgacaaggggaaggaggugcugguccucuggggcauccaccaccccagcaccuccgccgaccagcagagccuguaccagaacgccgacgccuacguguucgugggcacguccagcuacuccaagaaguucaagcccgagaucgccauccggccgaagguccgcgaccaggaggggcggaugaacuacuacuggacccugguggagcccggcgacaagaucaccuucgaggcgaccgggaaccucguggucccccgcuacgccuucgccauggagcggaacgccggcagcggcaucaucaucuccgacacgcccgugcacgacugcaacacgaccugccagaccccgaagggggccaucaacaccagccugcccuuccagaacauccaccccaucaccaucggcaagugccccaaguacgugaaguccaccaagcugcgccucgcgaccgggcugcggaacgucccgagcauccagucccgcggccuguucggggccaucgccggcuucaucgagggcggguggacgggcaugguggacgggugguacggcuaccaccaccagaacgagcaggggagcggcuacgccgccgaccucaaguccacccagaacgcgaucgacgagaucaccaacaaggugaacagcgucaucgagaagaugaacacccaguucacggccgugggcaaggaguucaaccaccuggagaagcggaucgagaaccugaacaagaaggucgacgacggguuccucgacaucuggaccuacaacgccgagcugcuggugcuccuggagaacgagcgcacccuggacuaccacgacuccaacgugaagaaccucuacgagaagguccggagccagcugaagaacaacgccaaggagaucggcaacgggugcuucgaguucuaccacaagugcgacaacacgugcauggaguccgugaagaacggcaccuacgacuaccccaaguacagcgaggaggccaagcugaaccgcgaggagaucgacggggugaagcucgaguccacccggaucuaccagauccuggcgaucuacagcaccgucgccagcucccuggugcucguggucagccugggcgccaucuccuucuggaugugcagcaacggcucccugcagugccgcaucugcaucuga

SEQ ID NO: 68213 - RNA, 1701 nt, Artificial Sequence; identical to SEQ ID NO: 66693
  derived and/or modified CDS sequence (opt1) from hemagglutinin__InfluenzaA__ADD22752

SEQ ID NO: 68214 - RNA, 1701 nt, Artificial Sequence; identical to SEQ ID NO: 66784
  derived and/or modified CDS sequence (opt1) from hemagglutinin__InfluenzaA__ADD22762

SEQ ID NO: 68215 - RNA, 1701 nt, Artificial Sequence; identical to SEQ ID NO: 67795
  derived and/or modified CDS sequence (opt1) from hemagglutinin__InfluenzaA__ADD22772

SEQ ID NO: 68216 - RNA, 1701 nt, Artificial Sequence; identical to SEQ ID NO: 67795
  derived and/or modified CDS sequence (opt1) from hemagglutinin__InfluenzaA__ADD22782

SEQ ID NO: 68217 - RNA, 1701 nt, Artificial Sequence
  derived and/or modified CDS sequence (opt1) from hemagglutinin__InfluenzaA__ADD22792
augaaggccauccuggugguccuccuguacaccuucgccaccgcgaacgccgacacgcugugcaucggcuaccacgccaacaacagcaccgacaccguggacaccgugcucgagaagaacgucacggugacccacuccgugaaccugcuggaggacaagcacaacgggaagcucugcaagcugcgcggcgucgcgccccugcaccucgggaagugcaacaucgccggcuggauccuggggaacccggagugcgagagccuguccaccgccagcuccuggagcuacaucguggagaccuccagcuccggcaacggcacgugcuaccccggggacuucaucaacuacgaggagcuccgggagcagcugagcuccgugagcuccuucgagcgcuucgagaucuuccccaagaccagcuccuggcccaaccacgacagcaacaagggcgucaccgccgccugcccgcacgccggggcgaaguccuucuacaagaaccugaucuggcucgugaagaagggcaacagcuaccccaagcuguccaagagcuacaucaacgacaaggggaaggaggugcugguccucuggggcauccaccaccccagcaccuccgccgaccagcagagccuguaccagaacgccgacgccuacguguucgugggcacgucccgguacagcaagaaguucaagcccgagaucgccauccgcccgaagguccgggaccaggaggggcgcaugaacuacuacuggacccugguggagcccggcgacaagaucaccuucgaggcgaccgggaaccucguggucccccgguacgccuucgccauggagcgcaacgccggcuccggcaucaucaucagcgacacgcccgugcacgacugcaacacgaccugccagaccccgaagggggccaucaacaccucccugcccuuccagaacauccaccccaucaccaucggcaagugccccaaguacgucaagagcaccaagcugcggcucgcgaccgggcugcgcaacgugccguccauccagagccggggccuguucggggccaucgccggcuucaucgagggcggguggacgggcaugguggacgggugguacggcuaccaccaccagaacgagcagggguccggcuacgccgccgaccucaagagcacccagaacgcgaucgacgagaucaccaacaaggugaacuccgucaucgagaagaugaacacccaguucacggccgugggcaaggaguucaaccaccuggagaagcgcaucgagaaccugaacaagaaggucgacgacggguuccucgacaucuggaccuacaacgccgagcugcuggugcuccuggagaacgagcggacccuggacuaccacgacagcaacgugaagaaccucuacgagaagguccgcucccagcugaagaacaacgccaaggagaucggcaacgggugcuucgaguucuaccacaagugcgacaacacgugcauggagagcgugaagaacggcaccuacgacuaccccaaguacuccgaggaggccaagcugaaccgggaggagaucgacggggugaagcucgagagcacccgcaucuaccagauccuggcgaucuacuccaccgucgccagcagccuggugcucguggucucccugggcgccaucagcuucuggaugugcuccaacggcagccugcagugccggaucugcaucuga

SEQ ID NO: 68218 - RNA, 1701 nt, Artificial Sequence; identical to SEQ ID NO: 68193
  derived and/or modified CDS sequence (opt1) from hemagglutinin__InfluenzaA__ADD22802

SEQ ID NO: 68219 - RNA, 1701 nt, Artificial Sequence; identical to SEQ ID NO: 67795
  derived and/or modified CDS sequence (opt1) from hemagglutinin__InfluenzaA__ADD22812

SEQ ID NO: 68220 - RNA, 1701 nt, Artificial Sequence
  derived and/or modified CDS sequence (opt1) from hemagglutinin__InfluenzaA__ADD22822
augaaggccauccuggugguccuccuguacaccuucgccaccgcgaacgccgacacgcugugcaucggcuaccacgccaacaacagcaccgacaccguggacaccgugcucgagaagaacgucacggugacccacuccgugaaccugcuggaggacaagcacaacgggaagcucugcaagcugcgcggcgucgcgccccugcaccucgggaagugcaacaucgccggcuggauccuggggaacccggagugcgagagccuguccaccgccagcuccuggagcuacaucguggagaccuccagcgccgacaacggcacgugcuaccccggcgacuucaucgacuacgaggagcuccgggagcagcuguccagcguguccagcuucgagcgcuucgagaucuuccccaagaccuccagcuggcccaaccacgacuccaacaagggggucaccgccgccugcccgcacgcgggcgccaagagcuucuacaagaaccugaucuggcucgugaagaaggggaacuccuaccccaagcugagcaaguccuacaucaacgacaagggcaaggaggugcugguccucugggggauccaccaccccagcaccagcgccgaccagcagucccuguaccagaacgccgacgccuacguguucgugggcacgagcaaguacuccaagaaguucaagcccgagaucgcgauccggccgaagguccgcgaccaggagggccggaugaacuacuacuggacccugguggagcccggggacaagaucaccuucgaggccaccggcaaccucguggucccccgcuacgccuucgccauggagcggaacgccgggagcggcaucaucaucuccgacacgcccgugcacgacugcaacacgaccugccagaccccgaagggcgcgaucaacaccagccugcccuuccagaacauccaccccaucaccaucgggaagugccccaaguacgugaaguccaccaagcugcgccucgccaccggccugcggaacgucccgagcauccagucccgcgggcuguucggcgccaucgccggguucaucgagggcggcuggacggggaugguggacggcugguacggguaccaccaccagaacgagcagggcagcggguacgccgcggaccucaaguccacccagaacgccaucgacgagaucaccaacaaggugaacagcgucaucgagaagaugaacacccaguucacggccgugggcaaggaguucaaccaccuggagaagcggaucgagaaccugaacaagaagaucgacgacggcuuccucgacaucuggaccuacaacgccgagcugcugguccuccuggagaacgagcgcacccuggacuaccacgacuccaacgugaagaaccucuacgagaaggugcggagccagcugaagaacaacgccaaggagaucgggaacggcugcuucgaguucuaccacaagugcgacaacaugugcauggaguccgucaagaacgggaccuacgacuaccccaaguacagcgaggaggcgaagcugaaccgcgaggagaucgacggcgugaagcucgaguccacgcggaucuaccagauccuggccaucuacagcaccguggccuccagccugguccucguggugagccugggggccaucuccuucuggaugugcagcaacggcucccugcagugccgcaucugcaucuga

SEQ ID NO: 68221 - RNA, 1701 nt, Artificial Sequence; identical to SEQ ID NO: 67795
  derived and/or modified CDS sequence (opt1) from hemagglutinin__InfluenzaA__ADD22832

SEQ ID NO: 68222 - RNA, 1701 nt, Artificial Sequence; identical to SEQ ID NO: 67795
  derived and/or modified CDS sequence (opt1) from hemagglutinin__InfluenzaA__ADD22842

SEQ ID NO: 68223 - RNA, 1701 nt, Artificial Sequence
  derived and/or modified CDS sequence (opt1) from hemagglutinin__InfluenzaA__ADD22852
augaaggccauccuggugguccuccuguacaccuucgccaccgcgaacgccgacacgcugugcaucggcuaccacgccaacaacagcaccgacaccguggacaccgugcucgagaagaacgucacggugacccacuccgugaaccugcuggaggacaagcacaacgggaagcucugcaagcugcgcggcgucgcgccccugcaccucgggaagugcaacaucgccggcuggauccuggggaacccggagugcgagagccuguccaccgccagcuccuggagcuacaucguggagaccuccagcuccgacaacggcacgugcuaccccggcgacuucaucgacuacgaggagcuccgggagcagcugagcuccgugagcuccuucgagcgcuucgagaucuuccccaagaccagcuccuggcccaaccacgacagcaacaagggggucaccgccgccugcccgcacgccggcgcgaaguccuucuacaagaaccugaucuggcucgugaagaaggggaacagcuaccccaagcuguccaagagcuacaucaacgacaagggcaaggaggugcugguccucugggggauccaccaccccagcaccuccgccgaccagcagagccuguaccagaacgccgacgccuacguguucgugggcacgucccgguacagcaagaaguucaagcccgagaucgccauccgcccgaagguccgggaccaggagggccgcaugaacuacuacuggacccugguggagcccggggacaagaucaccuucgaggcgaccggcaaccucguggucccccgguacgccuucgccauggagcgcaacgccggguccggcaucgugaucagcgacacgcccgugcacgacugcaacacgaccugccagaccccgaagggcgccaucaacaccucccugcccuuccagaacauccaccccaucaccaucgggaagugccccaaguacgucaagagcaccaagcugcggcucgcgaccggccugcgcaacgugccguccauccagagccgggggcuguucggcgccaucgccggguucaucgagggcggcuggacggggaugguggacggcugguacggguaccaccaccagaacgagcagggcuccggguacgccgccgaccucaagagcacccagaacgcgaucgacgagaucaccaacaaggucaacuccgugaucgagaagaugaacacccaguucacggccgucggcaaggaguucaaccaccuggagaagcgcaucgagaaccugaacaagaagguggacgacggcuuccucgacaucuggaccuacaacgccgagcugcuggugcuccuggagaacgagcggacccuggacuaccacgacagcaacgucaagaaccucuacgagaaggugcgcucccagcugaagaacaacgccaaggagaucgggaacggcugcuucgaguucuaccacaagugcgacaacacgugcauggagagcgugaagaacgggaccuacgacuaccccaaguacuccgaggaggccaagcugaaccgggaggagaucgacggcgucaagcucgagagcacccgcaucuaccagauccuggcgaucuacuccaccguggccagcagccuggugcucgucgugucccugggggccaucagcuucuggaugugcuccaacggcagccugcagugccggaucugcaucuga

SEQ ID NO: 68224 - RNA, 1701 nt, Artificial Sequence
  derived and/or modified CDS sequence (opt1) from hemagglutinin__InfluenzaA__ADD22941
augaaggccauccuggugguccuccuguacaccuucgccaccgcgaacgccgacacgcugugcaucggcuaccacgccaacaacagcaccgacaccguggacaccgugcucgagaagaacgucacggugacccacuccgugaaccugcuggaggacaagcacaacgggaagcucugcaagcugcgcggcgucgcgccccugcaccucgggaagugcaacaucgccggcuggauccuggggaacccggagugcgagagccuguccaccgcgaucagcugguccuacaucguggagaccagcuccagcggcaacggcacgugcuaccccggggacuucaucgacuacgaggagcuccgggagcagcuguccagcguguccagcuucgagcgcuucgagaucuuccccaagaccuccagcuggcccaaccacgacuccaacaagggcgucaccgccgccugcccgcacgccggggccaagagcuucuacaagaaccugaucuggcucgugaagaagggcaacuccuaccccaagcugagcaaguccuacaucaacgacaaggggaaggaggugcugguccucuggggcauccaccaccccagcaccagcgccgaccagcagucccuguaccagaacgccgacgccuacguguucgugggcacgagccgguacuccaagaaguucaagcccgagaucgccauccgcccgaagguccgggaccaggaggggcgcaugaacuacuacuggacccugguggagcccggcgacaagaucaccuucgaggcgaccgggaaccucguggucccccgguacgccuucgccauggagcgcaacgccggcagcggcaucaucaucuccgacacgcccgugcacgacugcaacacgaccugccagaccccgaagggggccaucaacaccagccugcccuuccagaacauccaccccaucaccaucggcaagugccccaaguacgugaaguccaccaagcugcggcucgcgaccgggcugcgcaacgucccgagcauccagucccggggccuguucggggccaucgccggcuucaucgagggcggguggacgggcaugguggacgggugguacggcuaccaccaccagaacgagcaggggagcggcuacgccgccgaccucaaguccacccagaacgcgaucgacgagaucaccaacaaggugaacagcgucaucgagaagaugaacacccaguucacggccgugggcaaggaguucaaccaccuggagaagcgcaucgagaaccugaacaagaaggucgacgacggguuccucgacaucuggaccuacaacgccgagcugcuggugcuccuggagaacgagcggacccuggacuaccacgacuccaacgugaagaaccucuacgagaagguccgcagccagcugaagaacaacgccaaggagaucggcaacgggugcuucgaguucuaccacaagugcgacaacacgugcauggaguccgugaagaacggcaccuacgacuaccccaaguacagcgaggaggccaagcugaaccgggaggagaucgacggggugaagcucgaguccacccgcaucuaccagauccuggcgaucuacagcaccgucgccuccagccuggugcucguggucagccugggcgccaucuccuucuggaugugcagcaacggcucccugcagugccggaucugcaucuga

SEQ ID NO: 68225 - RNA, 1701 nt, Artificial Sequence; identical to SEQ ID NO: 67795
  derived and/or modified CDS sequence (opt1) from hemagglutinin__InfluenzaA__ADD22951

SEQ ID NO: 68226 - RNA, 1701 nt, Artificial Sequence; identical to SEQ ID NO: 67795
  derived and/or modified CDS sequence (opt1) from hemagglutinin__InfluenzaA__ADD22961

SEQ ID NO: 68227 - RNA, 1701 nt, Artificial Sequence; identical to SEQ ID NO: 67795
  derived and/or modified CDS sequence (opt1) from hemagglutinin__InfluenzaA__ADD22971

SEQ ID NO: 68228 - RNA, 1701 nt, Artificial Sequence; identical to SEQ ID NO: 67795
  derived and/or modified CDS sequence (opt1) from hemagglutinin__InfluenzaA__ADD23072

SEQ ID NO: 68229 - RNA, 1701 nt, Artificial Sequence
  derived and/or modified CDS sequence (opt1) from hemagglutinin__InfluenzaA__ADD23082
augaaggccauccuggugguccuccuguacaccuucgccaccgcgaacgccgacacgcugugcaucggcuaccacgccaacaacagcaccgacaccguggacaccgugcucgagaagaacgucacggugacccacuccgugaaccugcuggaggacaagcacaacgggaagcucugcaagcugcgcggcgucgcgccccugcaccucgggaagugcaacaucgccggcuggauccuggggaacccggagugcgagagccuguccaccgccagcuccuggagcuacaucguggagaccuccagcuccggcaacggcacgugcuaccccggggacuucaucgacuacgaggagcuccgggagcagcugagcuccgugagcuccuucgagcgcuucgagaucuuccccaagaccagcuccuggcccaaccacgacagcaacaagggcgucaccgccgccugcccgcacgccggggcgaaguccuucuacaagaaccugaucuggcucgugaagaagggcaacagcuaccccaagcuguccaagagcuacaucaacgacaaggggaaggaggugcugguccucuggggcauccaccaccccagcaccuccgccgaccagcagagccuguaccagaacgccgacacguacguguucgugggcaccucccgguacagcaagaaguucaagcccgagaucgccauccgcccgaagguccgggaccaggaggggcgcaugaacuacuacuggacccugguggagcccggcgacaagaucaccuucgaggccacggggaaccucguggucccccgguacgcguucgccauggagcgcaacgccggcuccggcaucaucaucagcgacacccccgugcacgacugcaacacgaccugccagaccccgaagggggccaucaacaccucccugcccuuccagaacauccaccccaucaccaucggcaagugccccaaguacgucaagagcaccaagcugcggcucgccacggggcugcgcaacgugccguccauccagagccggggccuguucggggcgaucgccggcuucaucgagggcggguggaccggcaugguggacgggugguacggcuaccaccaccagaacgagcagggguccggcuacgccgccgaccucaagagcacccagaacgccaucgacgagaucaccaacaaggugaacuccgucaucgagaagaugaacacgcaguucaccgcggugggcaaggaguucaaccaccuggagaagcgcaucgagaaccugaacaagaaggucgacgacggguuccucgacaucuggaccuacaacgccgagcugcuggugcuccuggagaacgagcggacccuggacuaccacgacagcaacgugaagaaccucuacgagaagguccgcucccagcugaagaacaacgccaaggagaucggcaacgggugcuucgaguucuaccacaagugcgacaacacgugcauggagagcgugaagaacggcaccuacgacuaccccaaguacuccgaggaggccaagcugaaccgggaggagaucgacggggugaagcucgagagcacccgcaucuaccagauccuggccaucuacuccaccgucgcgagcagccuggugcucguggucucccugggcgccaucagcuucuggaugugcuccaacggcagccugcagugccggaucugcaucuga

SEQ ID NO: 68230 - RNA, 1701 nt, Artificial Sequence
  derived and/or modified CDS sequence (opt1) from hemagglutinin__InfluenzaA__ADD23102
augaaggccauccuggugguccuccuguacaccuucgccaccgcgaacgccgacacgcugugcaucggcuaccacgccaacaacagcaccgacaccguggacaccgugcucgagaagaacgucacggugacccacuccgugaaccugcuggaggacaagcacaacgggaagcucugcaagcugcgcggcgucgcgccccugcaccucgggaagugcaacaucgccggcuggauccuggggaacccggagugcgagagccuguccaccgccagcuccuggagcuacaucguggagaccuccagcuccggcaacggcacgugcuaccccggggacuucaucgacuacgaggagcuccgggagcagcugagcuccgugagcuccuucgagaaguucgagaucuuccccaagaccagcuccuggcccaaccacgacagcaacaagggcgucaccgccgccugcccgcacgccggggcgaaguccuucuacaagaaccugaucuggcucgugaagaagggcaacagcuaccccaagcuguccaagagcuacaucaacgacaaggggaaggaggugcugguccucuggggcauccaccaccccagcaccuccgccgaccagcagagccuguaccagaacgccgacgccuacguguucgugggcacgucccgcuacagcaagaaguucaagcccgagaucgccauccggccgaagguccgcgaccaggaggggcggaugaacuacuacuggacccugguggagcccggcgacaagaucaccuucgaggcgaccgggaaccucguggucccccgcuacgccuucgccauggagcggaacgccggcuccggcaucaucaucagcgacacgcccgugcacgacugcaacacgaccugccagaccccgaagggggccaucaacaccucccugcccuuccagaacauccaccccaucaccaucggcaagugccccaaguacgucaagagcaccaagcugcgccucgcgaccgggcugcggaacgugccguccauccagagccgcggccuguucggggccaucgccggcuucaucgagggcggguggacgggcaugguggacgggugguacggcuaccaccaccagaacgagcagggguccggcuacgccgccgaccucaagagcacccagaacgcgaucgacgagaucaccaacaaggugaacuccgucaucgagaagaugaacacccaguucacggccgugggcaaggaguucaaccaccuggagaagcggaucgagaaccugaacaagaaggucgacgacggguuccucgacaucuggaccuacaacgccgagcugcuggugcuccuggagaacgagcgcacccuggacuaccacgacagcaacgugaagaaccucuacgagaagguccggucccagcugaagaacaacgccaaggagaucggcaacgggugcuucgaguucuaccacaagugcgacaacacgugcauggagagcgugaagaacggcaccuacgacuaccccaaguacuccgaggaggccaagcugaaccgcgaggagaucgacggggugaagcucgagagcacccggaucuaccagauccuggcgaucuacuccaccgucgccagcagccuggugcucguggucucccugggcgccaucagcuucuggaugugcuccaacggcagccugcagugccgcaucugcaucuga

SEQ ID NO: 68231 - RNA, 1701 nt, Artificial Sequence; identical to SEQ ID NO: 67795
  derived and/or modified CDS sequence (opt1) from hemagglutinin__InfluenzaA__ADD23112

SEQ ID NO: 68232 - RNA, 1701 nt, Artificial Sequence; identical to SEQ ID NO: 67795
  derived and/or modified CDS sequence (opt1) from hemagglutinin__InfluenzaA__ADD23122

SEQ ID NO: 68233 - RNA, 1701 nt, Artificial Sequence; identical to SEQ ID NO: 66693
  derived and/or modified CDS sequence (opt1) from hemagglutinin__InfluenzaA__ADD23132

SEQ ID NO: 68234 - RNA, 1701 nt, Artificial Sequence; identical to SEQ ID NO: 67857
  derived and/or modified CDS sequence (opt1) from hemagglutinin__InfluenzaA__ADD23142

SEQ ID NO: 68235 - RNA, 1701 nt, Artificial Sequence
  derived and/or modified CDS sequence (opt1) from hemagglutinin__InfluenzaA__ADD23162
augaaggccauccuggugguccuccuguacaccuucgccaccgcgaacgccgacacgcugugcaucggcuaccacgccaacaacagcaccgacaccguggacaccgugcucgagaagaacgucacggugacccacuccgugaaccugcuggaggacaagcacaacgggaagcucugcaagcugcgcggcgucgcgccccugcaccucgggaagugcaacaucgccggcuggauccuggggaacccggagugcgagagccuguccaccgccagcuccuggagcuacaucguggagaccuccagcuccgacaacggcacgugcuaccccggcgacuucaucgacuacgaggagcuccgggagcagcugagcuccgugagcuccuucgagcgcuucgagaucuuccccaagaccagcuccuggcccaaccacgacagcaacaagggggucaccgccgccugcccgcacgccggcgcgaaguccuucuacaagaaccugaucuggcucgugaagaaggggaacagcuaccccaagcuguccaagagcuacaucaacgacaagggcaaggaggugcugguccucugggggauccaccaccccagcaccuccgccgaccagcagggccuguaccagaacgccgacgccuacguguucgugggcacgagccgguacuccaagaaguucaagcccgagaucgccauccgcccgaagguccgggaccaggaggggcgcaugaacuacuacuggacccugguggagcccggcgacaagaucaccuucgaggcgaccgggaaccucguggucccccgguacgccuucgccauggagcgcaacgccggcagcggcaucaucaucuccgacacgcccgugcacgacugcaacacgaccugccagaccccgaagggggccaucaacaccagccugcccuuccagaacauccaccccaucaccaucggcaagugccccaaguacgugaaguccaccaagcugcggcucgcgaccgggcugcgcaacgucccgagcauccagucccggggccuguucggggccaucgccggcuucaucgagggcggguggacgggcaugguggacgggugguacggcuaccaccaccagaacgagcaggggagcggcuacgccgccgaccucaaguccacccagaacgcgaucgacaagaucaccaacaaggugaacagcgucaucgagaagaugaacacccaguucacggccgugggcaaggaguucaaccaccuggagaagcgcaucgagaaccugaacaagaaggucgacgacggguuccucgacaucuggaccuacaacgccgagcugcuggugcuccuggagaacgagcggacccuggacuaccacgacuccaacgugaagaaccucuacgagaagguccgcagccagcugaagaacaacgccaaggagaucggcaacgggugcuucgaguucuaccacaagugcgacaacacgugcauggaguccgugaagaacggcaccuacgacuaccccaaguacagcgaggaggccaagcugaaccgggaggagaucgacggggugaagcucgaguccacccgcaucuaccagauccuggcgaucuacagcaccgucgccuccagccuggugcucguggucagccugggcgccaucuccuucuggaugugcagcaacggcucccugcagugccggaucugcaucuga

SEQ ID NO: 68236 - RNA, 1701 nt, Artificial Sequence; identical to SEQ ID NO: 67857
  derived and/or modified CDS sequence (opt1) from hemagglutinin__InfluenzaA__ADD23172

SEQ ID NO: 68237 - RNA, 1701 nt, Artificial Sequence; identical to SEQ ID NO: 67857
  derived and/or modified CDS sequence (opt1) from hemagglutinin__InfluenzaA__ADD23182

SEQ ID NO: 68238 - RNA, 1701 nt, Artificial Sequence; identical to SEQ ID NO: 67857
  derived and/or modified CDS sequence (opt1) from hemagglutinin__InfluenzaA__ADD23192

SEQ ID NO: 68239 - RNA, 1701 nt, Artificial Sequence; identical to SEQ ID NO: 67857
  derived and/or modified CDS sequence (opt1) from hemagglutinin__InfluenzaA__ADD23202

SEQ ID NO: 68240 - RNA, 1701 nt, Artificial Sequence; identical to SEQ ID NO: 67857
  derived and/or modified CDS sequence (opt1) from hemagglutinin__InfluenzaA__ADD23220

SEQ ID NO: 68241 - RNA, 1701 nt, Artificial Sequence; identical to SEQ ID NO: 67853
  derived and/or modified CDS sequence (opt1) from hemagglutinin__InfluenzaA__ADD23230

SEQ ID NO: 68242 - RNA, 1701 nt, Artificial Sequence; identical to SEQ ID NO: 67857
  derived and/or modified CDS sequence (opt1) from hemagglutinin__InfluenzaA__ADD23240

SEQ ID NO: 68243 - RNA, 1701 nt, Artificial Sequence
  derived and/or modified CDS sequence (opt1) from hemagglutinin__InfluenzaA__ADD23260
augaaggccauccuggugguccuccuguacaccuucgccaccgcgaacgccgacacgcugugcaucggcuaccacgccaacaacagcaccgacaccguggacaccgugcucgagaagaacgucacggugacccacuccgugaaccugcuggaggacaagcacaacgggaagcucugcaagcugcgcggcgucgcgccccugcaccucgggaagugcaacaucgccggcuggauccuggggaacccggagugcgagagccuguccaccgccagcuccuggagcuacaucguggagaccuccagcuccgacaacggcacgugcuaccccggcgacuucaucgacuacgaggagcuccgggagcagcugagcuccgugagcuccuucgagcgcuucgagaucuuccccaagaccagcuccuggcccaaccacgacagcaacaagggggucaccgccgccugcccgcacgccggcgcgaaguccuucuacaagaaccugaucuggcucgugaagaaggggaacagcuaccccaagcuguccaagagcuacaucaacgacaagggcaaggaggugcugguccucugggggauccaccaccccagcaccuccgccgaccagcagagccuguaccagaacgccgacgccuacguguucgugggcacgucccgguacagcaagaaguucaagcccgagaucgccauccgcccgaagguccgggaccaggagggccgcaugaacuacuacuggacccugguggagcccggggacaagaucaccuucgaggcgaccggcaaccucguggucccccgguacgccuucgccauggagcgcaacgccggguccggcaucaucaucagcgacacgcccgugcacgacugcaacacgaccugccagaccccggagggcgccaucaacaccucccugcccuuccagaacauccaccccaucaccaucgggaagugccccaaguacgucaagagcaccaagcugcggcucgcgaccggccugcgcaacgugccguccauccagagccgggggcuguucggcgccaucgccggguucaucgagggcggcuggacggggaugguggacggcugguacggguaccaccaccagaacgagcagggcuccggguacgccgccgaccucaagagcacccagaacgcgaucgacaagaucaccaacaaggugaacuccgucaucgagaagaugaacacccaguucacggccgugggcaaggaguucaaccaccuggagaagcgcaucgagaaccugaacaagaaggucgacgacggcuuccucgacaucuggaccuacaacgccgagcugcuggugcuccuggagaacgagcggacccuggacuaccacgacagcaacgugaagaaccucuacgagaagguccgcucccagcugaagaacaacgccaaggagaucgggaacggcugcuucgaguucuaccacaagugcgacaacacgugcauggagagcgugaagaacgggaccuacgacuaccccaaguacuccgaggaggccaagcugaaccgggaggagaucgacggcgugaagcucgagagcacccgcaucuaccagauccuggcgaucuacuccaccgucgccagcagccuggugcucguggucucccugggggccaucagcuucuggaugugcuccaacggcagccugcagugccggaucugcaucuga

SEQ ID NO: 68244 - RNA, 1701 nt, Artificial Sequence; identical to SEQ ID NO: 67046
  derived and/or modified CDS sequence (opt1) from hemagglutinin__InfluenzaA__ADD23280

SEQ ID NO: 68245 - RNA, 1701 nt, Artificial Sequence
  derived and/or modified CDS sequence (opt1) from hemagglutinin__InfluenzaA__ADD23290
augaaggccauccuggugguccuccuguacaccuucgccaccgcgaacgccgacacgcugugcaucggcuaccacgccaacaacagcaccgacaccguggacaccgugcucgagaagaacgucacggugacccacuccgugaaccugcuggaggacaagcacaacgggaagcucugcaagcugcgcggcgucgcgccccugcaccucgggaagugcaacaucgccggcuggauccuggggaacccggagugcgagagccuguccaccgccagcuccuggagcuacaucguggagaccuccagcuccgacaacggcacgugcuaccccggcgacuucaucaacuacgaggagcuccgggagcagcugagcuccgugagcuccuucgagcgcuucgagaucuuccccaagaccagcuccuggcccaaccacgacagcaacaagggggucaccgccgccugcccgcacgccggcgcgaaguccuucuacaagaaccugaucuggcucgugaagaaggggaacagcuaccccaagcuguccaagagcuacaucaacgacaagggcaaggaggugcugguccucugggggauccaccaccccagcaccuccgccgaccagcagagccuguaccagaacgccgacgccuacguguucgugggcacgucccgguacagcaagaaguucaagcccgagaucgccauccgcccgaagguccgggaccaggagggccgcaugaacuacuacuggacccugguggagcccggggacaagaucaccuucgaggcgaccggcaaccucguggucccccgguacgccuucgccauggagcgcaacgccggguccggcaucaucaucagcgacacgcccgugcacgacugcaacacgaccugccagaccccgaagggcgccaucaacaccucccugcccuuccagaacauccaccccaucaccaucgggaagugccccaaguacgucaagagcaccaagcugcggcucgcgaccggccugcgcaacgugccguccauccagagccgggggcuguucggcgccaucgccggguucaucgagggcggcuggacggggaugguggacggcugguacggguaccaccaccagaacgagcagggcuccggguacgccgccgaccucaagagcacccagaacgcgaucgacaagaucaccaacaaggugaacuccgucaucgagaagaugaacacccaguucacggccgugggcaaggaguucaaccaccuggagaagcgcaucgagaaccugaacaagaaggucgacgacggcuuccucgacaucuggaccuacaacgccgagcugcuggugcuccuggagaacgagcggacccuggacuaccacgacagcaacgugaagaaccucuacgagaagguccgcucccagcugaagaacaacgccaaggagaucgggaacggcugcuucgaguucuaccacaagugcgacaacacgugcauggagagcgugaagaacgggaccuacgacuaccccaaguacuccgaggaggccaagcugaaccgggaggagaucgacggcgugaagcucgagagcacccgcaucuaccagauccuggcgaucuacuccaccgucgccagcagccuggugcucguggucucccugggggccaucagcuucuggaugugcuccaacggcagccugcagugccggaucugcaucuga

SEQ ID NO: 68246 - RNA, 1701 nt, Artificial Sequence; identical to SEQ ID NO: 67857
  derived and/or modified CDS sequence (opt1) from hemagglutinin__InfluenzaA__ADD23300

SEQ ID NO: 68247 - RNA, 1701 nt, Artificial Sequence; identical to SEQ ID NO: 68245
  derived and/or modified CDS sequence (opt1) from hemagglutinin__InfluenzaA__ADD23310

SEQ ID NO: 68248 - RNA, 1701 nt, Artificial Sequence; identical to SEQ ID NO: 67857
  derived and/or modified CDS sequence (opt1) from hemagglutinin__InfluenzaA__ADD23320

SEQ ID NO: 68249 - RNA, 1701 nt, Artificial Sequence
  derived and/or modified CDS sequence (opt1) from hemagglutinin__InfluenzaA__ADD23330
augaaggccauccuggugguccuccuguacaccuucgccaccgcgaacgccgacacgcugugcaucggcuaccacgccaacaacagcaccgacaccguggacaccgugcucgagaagaacgucacggugacccacuccgugaaccugcuggaggacaagcacaacgggaagcucugcaagcugcgcggcgucgcgccccugcaccucgggaagugcaacaucgccggcuggauccuggggaacccggagugcgagagccuguccaccgccagcuccuggagcuacaucguggagaccuccagcuccgacaacggcacgugcuaccccggcgacuucaucaacuacgaggagcuccgggagcagcugagcuccgugagcuccuucgagcgcuucgagaucuuccccaagaccagcuccuggcccaaccacgacagcaacaagggggucaccgccgccugcccgcacgccggcgcgaaguccuucuacaagaaccugaucuggcucgugaagaaggggaacagcuaccccaagcuguccaagagcuacaucaacgacaagggcaaggaggugcugguccucugggggauccaccaccccagcaccuccgccgaccagcagagccuguaccagaacgccgacgccuacguguucgugggcacgucccgguacagcaagaaguucaagcccgagaucgccauccgcccgaagguccgggaccaggagggccgcaugaacuacuacuggacccugguggagcccggggacaagaucaccuucgaggcgaccggcaaccucguggucccccgguacgccuucgccauggagcgcaacgccggguccggcaucaucaucagcgacacgcccgugcacgacugcaacacgaccugccagaccccgaagggcgccaucaacaccucccugcccuuccagaacauccaccccaucaccaucgggaagugccccaaguacgucaagagcaccaagcugcggcucgcgaccggccugcgcaacgugccguccauccagagccgggggcuguucggcgccaucgccggguucaucgagggcggcuggacggggaugguggacggcugguacggguaccaccaccagaacgagcagggcuccggguacgccgccgaccucaagagcacccagaacgcgaucgacaagaucaccaacaaggugaacuccgucaucgagaagaugaacacccaguucacggccgugggcaaggaguucaaccaccuggagaagcgcaucgagaaccugaacaagaaggucgacgacggcuuccucgacaucuggaccuacaacgccgagcugcuggugcuccuggagaacgagcggacccuggacuaccacgacagcaacgugaagaaccucuacgagaagguccgcucccagcugaagaccaacgccaaggagaucgggaacggcugcuucgaguucuaccacaagugcgacaacacgugcauggagagcgugaagaacgggaccuacgacuaccccaaguacuccgaggaggccaagcugaaccgggaggagaucgacggcgugaagcucgagagcacccgcaucuaccagauccuggcgaucuacuccaccgucgccagcagccuggugcucguggucucccugggggccaucagcuucuggaugugcuccaacggcagccugcagugccggaucugcaucuga

SEQ ID NO: 68250 - RNA, 1701 nt, Artificial Sequence
  derived and/or modified CDS sequence (opt1) from hemagglutinin__InfluenzaA__ADD23355
augaaggccauccuggugguccuccuguacaccuucgccaccgcgaacgccgacacgcugugcaucggcuaccacgccaacaacagcaccgacaccguggacaccgugcucgagaagaacgucacggugacccacuccgugaaccugcuggaggacaagcacaacgggaagcucugcaagcugcgcggcgucgcgccccugcaccucgggaagugcaacaucgccggcuggauccuggggaacccggagugcgagagccuguccaccgccagcuccuggagcuacaucguggagaccuccagcuccgacaacggcacgugcuaccccggcgacuucaucaacuacgaggagcuccgggagcagcugagcuccgugagcuccuucgagauguucgagaucuuccccaagaccagcuccuggcccaaccacgacagcaacaagggggucaccgccgccugcccgcacgccggcgcgaaguccuucuacaagaaccugaucuggcucgugaagaaggggaacagcuaccccaagcuguccaagagcuacaucaacgacaagggcaaggaggugcugguccucugggggauccaccaccccagcaccuccgccgaccagcagagccuguaccagaacgccgacgccuacguguucgugggcacgucccgcuacagcaagaaguucaagcccgagaucgccauccggccgaagguccgcgaccaggagggccggaugaacuacuacuggacccugguggagcccggggacaagaucaccuucgaggcgaccggcaaccucguggucccccgcuacgccuucgccauggagcggaacgccggguccggcaucaucaucagcgacacgcccgugcacgacugcaacacgaccugccagaccccgaagggcgccaucaacaccucccugcccuuccagaacauccaccccaucaccaucgggaagugccccaaguacgucaagagcaccaagcugcgccucgcgaccggccugcggaacgugccguccauccagagccgcgggcuguucggcgccaucgccggguucaucgagggcggcuggacggggaugguggacggcugguacggguaccaccaccagaacgagcagggcuccggguacgccgccgaccucaagagcacccagaacgcgaucgacaagaucaccaacaaggugaacuccgucaucgagaagaugaacacccaguucacggccgugggcaaggaguucaaccaccuggagaagcggaucgagaaccugaacaagaaggucgacgacggcuuccucgacaucuggaccuacaacgccgagcugcuggugcuccuggagaacgagcgcacccuggacuaccacgacagcaacgugaagaaccucuacgagaagguccggucccagcugaagaacaacgccaaggagaucgggaacggcugcuucgaguucuaccacaagugcgacaacacgugcauggagagcgugaagaacgggaccuacgacuaccccaaguacuccgaggaggccaagcugaaccgcgaggagaucgacggcgugaagcucgagagcacccggaucuaccagauccuggcgaucuacuccaccgucgccagcagccuggugcucguggucucccugggggccaucagcuucuggaugugcuccaacggcagccugcagugccgcaucugcaucuga

SEQ ID NO: 68251 - RNA, 1701 nt, Artificial Sequence; identical to SEQ ID NO: 68245
  derived and/or modified CDS sequence (opt1) from hemagglutinin__InfluenzaA__ADD23375

SEQ ID NO: 68252 - RNA, 1701 nt, Artificial Sequence; identical to SEQ ID NO: 67857
  derived and/or modified CDS sequence (opt1) from hemagglutinin__InfluenzaA__ADD23385

SEQ ID NO: 68253 - RNA, 1701 nt, Artificial Sequence
  derived and/or modified CDS sequence (opt1) from hemagglutinin__InfluenzaA__ADD23405
augaaggccauccuggugguccuccuguacaccuucgccaccgcgaacgccgacacgcugugcaucggcuaccacgccaacaacagcaccgacaccguggacaccgugcucgagaagaacgucacggugacccacuccgugaaccugcuggaggacaagcacaacgggaagcucugcaagcugcgcggcgucgcgccccugcaccucgggaagugcaacaucgccggcuggauccuggggaacccggagugcgagagccuguccaccgccagcuccuggagcuacaucguggagaccuccagcuccgacaacggcacgugcuaccccggcgacuucaucaacuacgaggagcuccgggagcagcugagcuccgugagcuccuucgagcgcuucgagaucuuccccaagaccagcuccuggcccaaccacgacagcaacaagggggucaccgccgccugcccgcacgccggcgcgaaguccuucuacaagaaccugaucuggcucgugaagaaggggaacagcuaccccaagcuguccaagagcuacaucaacgacaagggcaaggaggugcugguccucugggggauccaccaccccagcaccuccgccgaccagcagagccuguaccagaacgccgacgccuacguguucgugggcacgucccgguacagcaagaaguucaagcccgagaucgccauccgcccgaagguccgggaccaggagggccgcaugaacuacuacuggacccugguggagcccggggacaagaucaccuucgaggcgaccggcaaccucguggucccccgguacgccuucgccauggagcgcaacgccggguccggcaucaucaucagcgacacgcccgugcacgacugcaacacgaccugccagaccccgaagggcgccaucaacaccucccugcccuuccagaacauccaccccaucaccguggggaagugccccaaguacgucaagagcaccaagcugcggcucgcgaccggccugcgcaacgugccguccauccagagccgggggcuguucggcgccaucgccggguucaucgagggcggcuggacggggaugguggacggcugguacggguaccaccaccagaacgagcagggcuccggguacgccgccgaccucaagagcacccagaacgcgaucgacaagaucaccaacaaggucaacuccgugaucgagaagaugaacacccaguucacggccgucggcaaggaguucaaccaccuggagaagcgcaucgagaaccugaacaagaagguggacgacggcuuccucgacaucuggaccuacaacgccgagcugcuggugcuccuggagaacgagcggacccuggacuaccacgacagcaacgucaagaaccucuacgagaaggugcgcucccagcugaagaacaacgccaaggagaucgggaacggcugcuucgaguucuaccacaagugcgacaacacgugcauggagagcgugaagaacgggaccuacgacuaccccaaguacuccgaggaggccaagcugaaccgggaggagaucgacggcgucaagcucgagagcacccgcaucuaccagauccuggcgaucuacuccaccguggccagcagccuggugcucgucgugucccugggggccaucagcuucuggaugugcuccaacggcagccugcagugccggaucugcaucuga

SEQ ID NO: 68254 - RNA, 1701 nt, Artificial Sequence
  derived and/or modified CDS sequence (opt1) from hemagglutinin__InfluenzaA__ADD23415
augaaggccauccuggugguccuccuguacaccuucgccaccgcgaacgccgacacgcugugcaucggcuaccacgccaacaacagcaccgacaccguggacaccgugcucgagaagaacgucacggugacccacuccgugaaccugcuggaggacaagcacaacgggaagcucugcaagcugcgcggcgucgcgccccugcaccucgggaagugcaacaucgccggcuggauccuggggaacccggagugcgagagccuguccaccgccagcuccuggagcuacaucguggagaccuccagcuccgacaacggcacgugcuaccccggcgacuucaucaacuacgaggagcuccgggagcagcugagcuccgugagcuccuucgagcgcuucgagaucuuccccaagaccagcuccuggcccaaccacgacagcaacaagggggucaccgccgccugcccgcacgccggcgcgaaguccuucuacaagaaccugaucuggcucgugaagaaggggaacagcuaccccaagcuguccaagagcuacaucaacgacaagggcaaggaggugcugguccucugggggauccaccaccccagcaccuccgccgaccagcagagccuguaccagaacgccgacgccuacguguucgugggcacgucccgguacagcaagaaguucaagcccgagaucgccauccgcccgaagguccgggaccaggagggccgcaugaacuacuacuggacccugguggagcccggggacaagaucaccuucgaggcgaccggcaaccucguggucccccgguacgccuucgccauggagcgcaacgccgaguccgggaucaucaucagcgacacgcccgugcacgacugcaacacgaccugccagaccccgaagggcgccaucaacaccucccugcccuuccagaacauccaccccaucaccaucggcaagugccccaaguacgucaagagcaccaagcugcggcucgcgaccgggcugcgcaacgugccguccauccagagccggggccuguucggggccaucgccggcuucaucgagggcggguggacgggcaugguggacgggugguacggcuaccaccaccagaacgagcagggguccggcuacgccgccgaccucaagagcacccagaacgcgaucgacaagaucaccaacaaggugaacuccgucaucgagaagaugaacacccaguucacggccguggggaaggaguucaaccaccuggagaagcgcaucgagaaccugaacaagaaggucgacgacggcuuccucgacaucuggaccuacaacgccgagcugcuggugcuccuggagaacgagcggacccuggacuaccacgacagcaacgugaagaaccucuacgagaagguccgcucccagcugaagaacaacgccaaggagaucggcaacgggugcuucgaguucuaccacaagugcgacaacacgugcauggagagcgugaagaacggcaccuacgacuaccccaaguacuccgaggaggccaagcugaaccgggaggagaucgacggggugaagcucgagagcacccgcaucuaccagauccuggcgaucuacuccaccgucgccagcagccuggugcucguggucucccugggcgccaucagcuucuggaugugcuccaacgggagccugcagugccggaucugcaucuga

SEQ ID NO: 68255 - RNA, 1701 nt, Artificial Sequence; identical to SEQ ID NO: 67857
  derived and/or modified CDS sequence (opt1) from hemagglutinin__InfluenzaA__ADD23435

SEQ ID NO: 68256 - RNA, 1701 nt, Artificial Sequence
  derived and/or modified CDS sequence (opt1) from hemagglutinin__InfluenzaA__ADD23465
augaaggccauccuggccgugcuccuguacaccuucgcgaccgccaacgccgacacgcugugcaucggcuaccacgccaacaacagcaccgacaccgucgacaccgugcucgagaagaacgugacggucacccacuccgugaaccugcuggaggacaagcacaacgggaagcucugcaagcugcgcggcguggcgccccugcaccucgggaagugcaacaucgccggcuggauccuggggaacccggagugcgagagccuguccaccgccagcuccuggagcuacaucgucgagaccuccagcuccgacaacggcacgugcuaccccggcgacuucaucgacuacgaggagcuccgggagcagcugagcuccgugagcuccuucgagcgcuucgagaucuuccccaagaccagcuccuggcccaaccacgacagcaacaagggggugaccgccgccugcccgcacgcgggcgccaaguccuucuacaagaaccugaucuggcucgucaagaaggggaacagcuaccccaagcuguccaagagcuacaucaacgacaagggcaaggaggugcuggugcucugggggauccaccaccccagcaccuccgccgaccagcagagccuguaccagaacgccgacgccuacgucuucgugggcacgucccgguacagcaagaaguucaagcccgagaucgcgauccgcccgaaggugcgggaccaggagggccgcaugaacuacuacuggacccuggucgagcccggggacaagaucaccuucgaggccaccggcaaccucguggugccccgguacgccuucgccauggagcgcaacgccggguccggcaucaucaucagcgacacgcccguccacgacugcaacacgaccugccagaccccgaagggcgcgaucaacaccucccugcccuuccagaacauccaccccaucaccaucgggaagugccccaaguacgucaagagcaccaagcugcggcucgccaccggccugcgcaacgugccguccauccagagccgggggcuguucggcgccaucgccggguucaucgagggcggcuggacggggaugguggacggcugguacggguaccaccaccagaacgagcagggcuccggguacgccgcggaccucaagagcacccagaacgccaucgacaagaucaccaacaaggugaacuccgugaucgagaagaugaacacccaguucacggccgucggcaaggaguucaaccaccuggagaagcgcaucgagaaccugaacaagaagguggacgacggcuuccucgacaucuggaccuacaacgccgagcugcugguccuccuggagaacgagcggacccuggacuaccacgacagcaacgugaagaaccucuacgagaaggugcgcucccagcugaagaacaacgccaaggagaucgggaacggcugcuucgaguucuaccacaagugcgacaacacgugcauggagagcgucaagaacgggaccuacgacuaccccaaguacuccgaggaggcgaagcugaaccgggaggagaucgacggcgugaagcucgagagcacccgcaucuaccagauccuggccaucuacuccaccguggccagcagccugguccucguggugucccugggggccaucagcuucuggaugugcuccaacggcagccugcagugccggaucugcaucuga

SEQ ID NO: 68257 - RNA, 1701 nt, Artificial Sequence; identical to SEQ ID NO: 67857
  derived and/or modified CDS sequence (opt1) from hemagglutinin__InfluenzaA__ADD23475

SEQ ID NO: 68258 - RNA, 1701 nt, Artificial Sequence; identical to SEQ ID NO: 67857
  derived and/or modified CDS sequence (opt1) from hemagglutinin__InfluenzaA__ADD23485

SEQ ID NO: 68259 - RNA, 1701 nt, Artificial Sequence
  derived and/or modified CDS sequence (opt1) from hemagglutinin__InfluenzaA__ADD23495
augaaggccauccuggugguccuccuguacaccuucgccaccgcgaacgccgacacgcugugcaucggcuaccacgccaacaacagcaccgacaccguggacaccgugcucgagaagaacgucacggugacccacuccgugaaccugcuggaggacaagcacaacgggaagcucugcaagcugcgcggcgucgcgccccugcaccucgggaagugcaacaucgccggcuggauccuggggaacccggagugcgagagccuguccaccgccagcuccuggagcuacaucguggagaccuccagcuccgacaacggcacgugcuaccccggcgacuucaucgacuacgaggagcuccgggagcagcugagcuccgugagcuccuucgagcgcuucgagaucuuccccaagaccagcuccuggcccaaccacgacagcaacaagggggucaccgccgccugcccgcacgccggcgcgcgguccuucuacaagaaccugaucuggcucgugaagaaggggaacagcuaccccaagcuguccaagagcuacaucaacgacaagggcaaggaggugcugguccucugggggauccaccaccccagcaccuccgccgaccagcagagccuguaccagaacgccgacgccuacguguucgugggcacgucccgcuacagcaagaaguucaagcccgagaucgccauccggccgaagguccgcgaccaggagggccggaugaacuacuacuggacccugguggagcccggggacaagaucaccuucgaggcgaccggcaaccucguggucccccgcuacgccuucgccauggagcggaacgccggguccggcaucaucaucagcgacacgcccgugcacgacugcaacacgaccugccagaccccgaagggcgccaucaacaccucccugcccuuccagaacauccaccccaucaccaucgggaagugccccaaguacgucaagagcaccaagcugcgccucgcgaccggccugcggaacgugccguccauccagagccgcgggcuguucggcgccaucgccggguucaucgagggcggcuggacggggaugguggacggcugguacggguaccaccaccagaacgagcagggcuccggguacgccgccgaccucaagagcacccagaacgcgaucgacgagaucaccaacaaggugaacuccgucaucgagaagaugaacacccaguucacggccgugggcaaggaguucaaccaccuggagaagcggaucgagaaccugaacaagaaggucgacgacggcuuccucgacaucuggaccuacaacgccgagcugcuggugcuccuggagaacgagcgcacccuggacuaccacgacagcaacgugaagaaccucuacgagaagguccggucccagcugaagaacaacgccaaggagaucgggaacggcugcuucgaguucuaccacaagugcgacaacacgugcauggagagcgugaagaacgggaccuacgacuaccccaaguacuccgaggaggccaagcugaaccgcgaggagaucgacggcgugaagcucgagagcacccggaucuaccagauccuggcgaucuacuccaccgucgccagcagccuggugcucguggucucccugggggccaucagcuucuggaugugcuccaacggcagccugcagugccgcaucugcaucuga

SEQ ID NO: 68260 - RNA, 1701 nt, Artificial Sequence
  derived and/or modified CDS sequence (opt1) from hemagglutinin__InfluenzaA__ADD23505
augaaggccauccuggugguccuccuguacaccuucgccaccgcgaacgccgacacgcugugcaucggcuaccacgccaacaacagcaccgacaccguggacaccgugcucgagaagaacgucacggugacccacuccgugaaccugcuggaggacaagcacaacgggaagcucugcaagcugcgcggcgucgcgccccugcaccucgggaagugcaacaucgccggcuggauccuggggaacccggagugcgagagccuguccaccgccagcuccuggagcuacaucguggagaccuccagcuccgacaacggcacgugcuaccccggcgacuucaucgacuacgaggagcuccgggagcagcugagcuccgugagcuccuucgagcgcuucgagaucuuccccaagaccagcuccuggcccaaccacgacagcaacaagggggucaccgccgccugcccgcacgccggcgcgaaguccuucuacaagaaccugaucuggcucgugaagaaggggaacagcuaccccaagcuguccaagagcuacaucaacgacaagggcaaggaggugcugguccucugggggauccaccaccccagcaccuccgccgaccagcagagccuguaccagaacgccgacgccuacguguucgugggcacgucccgguacagcaagaaguucaagcccgagaucgccauccgcccgaagguccgggaccaggagggccgcaugaacuacuacuggacccugaucgagcccggggacaagaucaccuucgaggcgaccggcaaccucguggugccccgguacgccuucgccauggagcgcaacgccggguccggcaucaucaucagcgacacgcccgcccacgacugcaacacgaccugccagaccccgaagggcgcgaucaacaccucccugcccuuccagaacauccaccccaucaccaucgggaagugccccaaguacgucaagagcaccaagcugcggcucgccaccggccugcgcaacgugccguccauccagagccgggggcuguucggcgccaucgccggguucaucgagggcggcuggacggggaugguggacggcugguacggguaccaccaccagaacgagcagggcuccggguacgccgcggaccucaagagcacccagaacgccaucgacaagaucaccaacaaggucaacuccgugaucgagaagaugaacacccaguucacggccgugggcaaggaguucaaccaccuggagaagcgcaucgagaaccugaacaagaaggucgacgacggcuuccucgacaucuggaccuacaacgccgagcugcuggugcuccuggagaacgagcggacccuggacuaccacgacagcaacgucaagaaccucuacgagaaggugcgcucccagcugaagaacaacgccaaggagaucgggaacggcugcuucgaguucuaccacaagugcgacaacacgugcauggagagcgugaagaacgggaccuacgacuaccccaaguacuccgaggaggcgaagcugaaccgggaggagaucgacggcgucaagcucgagagcacccgcaucuaccagauccuggccaucuacuccaccguggccagcagccuggugcucgucgugucccugggggccaucagcuucuggaugugcuccaacggcagccugcagugccggaucugcaucuga

SEQ ID NO: 68261 - RNA, 1701 nt, Artificial Sequence; identical to SEQ ID NO: 67857
  derived and/or modified CDS sequence (opt1) from hemagglutinin__InfluenzaA__ADD23515

SEQ ID NO: 68262 - RNA, 1701 nt, Artificial Sequence; identical to SEQ ID NO: 67857
  derived and/or modified CDS sequence (opt1) from hemagglutinin__InfluenzaA__ADD23994

SEQ ID NO: 68263 - RNA, 1701 nt, Artificial Sequence
  derived and/or modified CDS sequence (opt1) from hemagglutinin__InfluenzaA__ADD24004
augaaggccauccuggugguccuccuguacaccuucgccaccgcgaacgccgacacgcugugcaucggcuaccacgccaacaacagcaccgacaccguggacaccgugcucgagaagaacgucacggugacccacuccgugaaccugcuggaggacaagcacaacgggaagcucugcaagcugcgcggcgucgcgccccugcaccucgggaagugcaacaucgccggcuggauccuggggaacccggagugcgagagccuguccaccgccagcuccuggagcuacaucguggagaccuccagcuccgacaacggcacgugcuaccccggcgacuucaucgacuacgaggagcuccgggagcagcugagcuccgugagcuccuucgagcgcuucgagaucuuccccaagaccagcuccuggcccaaccacgacagcaacaagggggucaccgccgccugcccgcacgccggcgcgaaguccuucuacaagaaccugaucuggcucgugaagaaggggaacagcuaccccaagcuguccaagagcuacaucaacgacaagggcaaggaggugcugguccucugggggauccaccaccccagcaccuccgccgaccagcagagccuguaccagaacgccgacgccuacguguucgugggcacgucccgguacagcaagaaguucaagcccgagaucgccauccgcccgaagguccgggaccaggagggccgcaugaacuacuacuggacccugguggagcccggggacaagaucaccuucgaggcgaccggcaaccucguggucccccgguacgccuucgccauggagcgcaacgccggguccggcaucaucaucagcgacacgcccgugcacgacugcaacacgaccugccagaccccgaacggcgccaucaacaccucccugcccuuccagaacauccaccccaucaccaucgggaagugccccaaguacgucaagagcaccaagcugcggcucgcgaccggccugcgcaacgugccguccauccagagccgggggcuguucggcgccaucgccggguucaucgagggcggcuggacggggaugguggacggcugguacggguaccaccaccagaacgagcagggcuccggguacgccgccgaccucaagagcacccagaacgcgaucgacgagaucaccaacaaggugaacuccgucaucgagaagaugaacacccaguucacggccgugggcaaggaguucaaccaccuggagaagcgcaucgagaaccugaacaagaagaucgacgacggcuuccucgacaucuggaccuacaacgccgagcugcugguccuccuggagaacgagcggacccuggacuaccacgacagcaacgugaagaaccucuacgagaaggugcgcucccagcugaagaacaacgccaaggagaucgggaacggcugcuucgaguucuaccacaagugcgacaacacgugcauggagagcgucaagaacgggaccuacgacuaccccaaguacuccgaggaggccaagcugaaccgggaggagaucgacggcgugaagcucgagagcacccgcaucuaccagauccuggcgaucuacuccaccguggccagcagccugguccucguggugucccugggggccaucagcuucuggaugugcuccaacggcagccugcagugccggaucugcaucuga

SEQ ID NO: 68264 - RNA, 1701 nt, Artificial Sequence; identical to SEQ ID NO: 67795
  derived and/or modified CDS sequence (opt1) from hemagglutinin__InfluenzaA__ADD24014

SEQ ID NO: 68265 - RNA, 1701 nt, Artificial Sequence
  derived and/or modified CDS sequence (opt1) from hemagglutinin__InfluenzaA__ADD52537
augaaggccauccuggugguccuccuguacaccuucgccaccgcgaacgccgacacgcugugcaucggcuaccacgccaacaacagcaccgacaccguggacaccgugcucgagaagaacgucacggugacccacuccgugaaccugcuggaggacaagcacaacgggaagcucugcaagcugcgcggcgucgcgccccugcaccucgggaagugcaacaucgccggcuggauccuggggaacccggagugcgagagccuguccaccgccagcuccuggagcuacaucguggagaccuccagcuccgacaacggcacgugcuaccccggcgacuucaucgacuacgaggagcuccgggagcagcugagcuccgugagcuccuucgagcgcuucgagaucuuccccaagaccagcuccuggcccaaccacgacagcaacaagggggucaccgccgccugcccgcacgccggcgcgaaguccuucuacaagaaccugaucuggcucgugaagaaggggaacagcuaccccaagcuguccaagagcuacaucaacgacaagggcaaggaggugcugguccucugggggauccaccaccccagcaccuccgccgaccagcagagccuguaccagaacgccgacgccuacguguucgugggcuccagccgguacuccaagaaguucaagcccgagaucgccauccgcccgaagguccgggaccaggagggccgcaugaacuacuacuggacgcugguggagcccggggacaagaucaccuucgaggcgaccggcaaccucguggucccccgguacgccuucgccauggagcgcaacgccgggagcggcaucaucaucuccgacacccccgugcacgacugcaacacgaccugccagaccccgaagggcgccaucaacaccagccugcccuuccagaacauccaccccaucacgaucgggaagugccccaaguacgugaaguccaccaagcugcggcucgcgaccggccugcgcaacgucccgagcauccagucccgggggcuguucggcgccaucgccggguucaucgagggcggcuggaccgggaugguggacggcugguacggguaccaccaccagaacgagcagggcagcggguacgccgccgaccucaaguccacgcagaacgcgaucgacggcaucaccaacaaggugaacagcgucaucgagaagaugaacacccaguucaccgccgugggcaaggaguucaaccaccuggagaagcgcaucgagaaccugaacaagaaggucgacgacggguuccucgacaucuggacguacaacgccgagcugcuggugcuccuggagaacgagcggacccuggacuaccacgacuccaacgugaagaaccucuacgagaagguccgcagccagcugaagaacaacgccaaggagaucggcaacgggugcuucgaguucuaccacaagugcgacaacacgugcauggaguccgugaagaacggcaccuacgacuaccccaaguacagcgaggaggccaagcugaaccgggaggagaucgacggggugaagcucgaguccacccgcaucuaccagauccuggcgaucuacagcaccgucgccagcucccuggugcucguggucagccugggcgccaucuccuucuggaugugcagcaacggcucccugcagugccggaucugcaucuga

SEQ ID NO: 68266 - RNA, 1701 nt, Artificial Sequence; identical to SEQ ID NO: 67857
  derived and/or modified CDS sequence (opt1) from hemagglutinin__InfluenzaA__ADD64203

SEQ ID NO: 68267 - RNA, 1701 nt, Artificial Sequence
  derived and/or modified CDS sequence (opt1) from hemagglutinin__InfluenzaA__ADD64204
augaaggccauccuggugguccuccuguacaccuucgccaccgcgaacgccgacacgcugugcaucggcuaccacgccaacaacagcaccgacaccguggacaccgugcucgagaagaacgucacggugacccacuccgugaaccugcuggaggacaagcacaacgggaagcucugcaagcugcgcggcgucgcgccccugcaccucgggaagugcaacaucgccggcuggauccuggggaacccggagugcgagagccuguccaccgcgagcuccuggagcuacaucguggagaccuccagcuccgacaacggcacgugcuaccccggcgacuucaucgacuacgaggagcuccgggagcagcugagcuccgugagcuccuucgagcgcuucgagaucuuccccaagaccagcuccuggcccaaccacgacccgaacaagggggucaccgccgccugcccccacgccggcgccaagagcuucuacaagaaccugaucuggcucgugaagaaggggaacuccuaccccaagcugagcaaguccuacaucaacgacaagggcaaggaggugcugguccucugggggauccaccaccccagcaccagcgccgaccagcagucccuguaccagaacgccgacgccuacguguucgugggcacgagccgguacuccaagaaguucaagccggagaucgccauccgccccaagguccgggaccaggagggccgcaugaacuacuacuggacccugaucgagcccggggagaagaucaccuucgaggcgaccggcaaccucguggugccccgguacgccuucgccauggagcgcaacgccgggagcggcaucaucaucuccgacacgccgguccacgacugcaacacgaccugccagacccccaagggcgccaucaacaccagccugcccuuccagaacauccaccccaucaccaucgggaagugcccgaaguacgugaaguccaccaagcugcggcucgcgaccggccugcgcaacgugcccagcauccagucccgggggcuguucggcgccaucgccggguucaucgagggcggcuggacggggauggucgacggcugguacggguaccaccaccagaacgagcagggcagcggguacgccgccgaccucaaguccacccagaacgcgaucgacgagaucaccaacaaggugaacagcgugaucgagaagaugaacacccaguucacggccgucggcaaggaguucaaccaccuggagaagcgcaucgagaaccugaacaagaagguggacgacggcuuccucgacaucuggaccuacaacgccgagcugcugguccuccuggagaacgagcggacccuggacuaccacgacuccaacgugaagaaccucuacgagaaggugcgcagccagcugaagaacaacgcccgggagaucgggaacggcugcuucgaguucuaccacaagugcgacaacacgugcauggaguccgucaagaacgggaccuacgacuaccccaaguacagcgaggaggccaagcugaaccgcgaggagaucgacggcgugaagcucgaguccacccggaucuaccagauccuggcgaucuacagcaccguggccuccagccugguccucguggugagccugggggccaucuccuucuggaugugcagcaacggcucccugcagugccgcaucugcaucuga

SEQ ID NO: 68268 - RNA, 1701 nt, Artificial Sequence; identical to SEQ ID NO: 66693
  derived and/or modified CDS sequence (opt1) from hemagglutinin__InfluenzaA__ADD64205

SEQ ID NO: 68269 - RNA, 1701 nt, Artificial Sequence; identical to SEQ ID NO: 66693
  derived and/or modified CDS sequence (opt1) from hemagglutinin__InfluenzaA__ADD64206

SEQ ID NO: 68270 - RNA, 1701 nt, Artificial Sequence; identical to SEQ ID NO: 67491
  derived and/or modified CDS sequence (opt1) from hemagglutinin__InfluenzaA__ADD64207

SEQ ID NO: 68271 - RNA, 1701 nt, Artificial Sequence
  derived and/or modified CDS sequence (opt1) from hemagglutinin__InfluenzaA__ADD64208
augaaggccauccuggugguccuccuguacaccuucgccaccgcgaacgccgacacgcugugcaucggcuaccacgccaacaacagcaccgacaccguggacaccgugcucgagaagaacgucacggugacccacuccgugaaccugcuggaggacaagcacaacgggaagcucugcaagcugcgcggcgucgcgccccugcaccucgggaagugcaacaucgccggcuggauccuggggaacccggagugcgagagccuguccaccgcgagcuccuggagcuacaucguggagaccuccagcuccgacaacggcacgugcuaccccggcgacuucaucgacuacgaggagcuccgggagcagcugagcuccgugagcuccuucgagcgcuucgagaucuuccccaagaccagcuccuggcccaaccacgacccgaacaagggggucaccgccgccugcccccacgccggcgccaagagcuucuacaagaaccugaucuggcucgugaagaaggggaacuccuaccccaagcugagcaaguccuacaucaacgacaagggcaaggaggugcugguccucugggggauccaccaccccagcaccagcgccgaccagcagucccuguaccagaacgccgacgccuacguguucgugggcacgagccgguacuccaagaaguucaagccggagaucgccauccgccccaagguccgggaccaggagggccgcaugaacuacuacuggacccugguggagcccggggacaagaucaccuucgaggcgaccggcaaccucguggucccccgguacgccuucgccauggagcgcaacgccgggagcggcaucaucaucuccgacacgccggugcacgacugcaacacgaccugccagacccccaagggcgccaucaacaccagccugcccuuccagaacauccaccccaucaccaucgggaagugcccgaaguacgugaaguccaccaagcugcggcucgcgaccggccugcgcaacguccccagcauccagucccgggggcuguucggcgccaucgccggguucaucgagggcggcuggacggggaugguggacggcugguacggguaccaccaccagaacgagcagggcagcggguacgccgccgaccucaaguccacccagaacgcgaucgacgagaucaccaacaaggugaacagcgucaucgagaagaugaacacccaguucacggccgugggcaaggaguucaaccaccuggagaagcgcaucgagaaccugaacaagaaggucgacgacggcuuccucgacaucuggaccuacaacgccgagcugcuggugcuccuggagaacgagcggacccuggacuaccacgaccccaacgugaagaaccucuacgagaagguccgcucccagcugaagaacaacgccaaggagaucgggaacggcugcuucgaguucuaccacaagugcgacaacacgugcauggagagcgugaagaacgggaccuacgacuaccccaaguacuccgaggaggccaagcugaaccgggaggagaucgacggcgugaagcucgagagcacccgcaucuaccagauccuggcgaucuacuccaccgucgccagcucccuggugcucguggucagccugggggccaucagcuucuggaugugcuccaacggcagccugcagugccggaucugcaucuga

SEQ ID NO: 68272 - RNA, 1701 nt, Artificial Sequence; identical to SEQ ID NO: 67491
  derived and/or modified CDS sequence (opt1) from hemagglutinin__InfluenzaA__ADD64209

SEQ ID NO: 68273 - RNA, 1701 nt, Artificial Sequence; identical to SEQ ID NO: 66693
  derived and/or modified CDS sequence (opt1) from hemagglutinin__InfluenzaA__ADD64210

SEQ ID NO: 68274 - RNA, 1701 nt, Artificial Sequence; identical to SEQ ID NO: 67491
  derived and/or modified CDS sequence (opt1) from hemagglutinin__InfluenzaA__ADD64211

SEQ ID NO: 68275 - RNA, 1701 nt, Artificial Sequence; identical to SEQ ID NO: 66693
  derived and/or modified CDS sequence (opt1) from hemagglutinin__InfluenzaA__ADD64212

SEQ ID NO: 68276 - RNA, 1701 nt, Artificial Sequence; identical to SEQ ID NO: 67491
  derived and/or modified CDS sequence (opt1) from hemagglutinin__InfluenzaA__ADD64213

SEQ ID NO: 68277 - RNA, 1701 nt, Artificial Sequence
  derived and/or modified CDS sequence (opt1) from hemagglutinin__InfluenzaA__ADD64214
augaaggccauccuggugguccuccuguacaccuucgccaccgcgaacgccgacacgcugugcaucggcuaccacgccaacaacagcaccgacaccguggacaccgugcucgagaagaacgucacggugacccacuccgugaaccugcuggagaacaagcacaacgggaagcucugcaagcugcgcggcgucgcgccccugcaccucgggaagugcaacaucgccggcuggauccuggggaacccggagugcgagagcuucuccaccagcuccagcugguccuacaucguggagaccagcuccagcgacaacggcacgugcuaccccggcgacuucaucgacuacgaggagcugcgggagcagcucuccagcguguccagcuucgagcgcuucgagaucuuccccaagaccuccagcuggcccaaccacgacuccaacaagggggucaccgccgccugcccgcacgccggcgccaagagcuucuacaagaaccugaucuggcuggugaagaaggggaacuccuaccccaagcucaacaagagcuacaucaacgacaagggcaaggaggugcugguccugugggggauccaccaccccagcaccuccgcggaccagcagagccucuaccagaacgccgacgccuacguguucgugggcacgucccgguacagcaagaaguucaagcccgagaucgccauccgcccgaagguccgggaccaggagggccgcaugaacuacuacuggacccugguggagcccggggacaagaucaccuucgaggccaccggcaaccugguggucccccgguacgcguucgccauggagcgcaacgccggguccggcaucaucaucagcgacacgcccgugcacgacugcaacacgaccugccagaccccgaagggcgccaucaacaccucccuccccuuccagaacauccaccccaucaccaucgggaagugccccaaguacgucaagagcaccaagcugcggcuggccaccggccuccgcaacgugccguccauccagagccgggggcuguucggcgcgaucgccggguucaucgagggcggcuggacggggaugguggacggcugguacggguaccaccaccagaacgagcagggcuccggguacgccgccgaccucaagagcacccagaacgccaucgacggcaucaccaacaaggugaacuccgucaucgagaagaugaacacccaguucacggcggugggcaaggaguucaaccaccuggagaagcgcaucgagaaccugaacaagaaggucgacgacggguuccuggacaucuggaccuacaacgccgagcuccuggugcugcucgagaacgagcggacccuggacuaccacgacagcaacgugaagaaccuguacgagaagguccgcucccagcucaagaacaacgccaaggagaucggcaacgggugcuucgaguucuaccacaagugcgacaacacgugcauggagagcgugaagaacggcaccuacgacuaccccaaguacuccgaggaggccaagcugaaccgggaggagaucgacggggugaagcuggagagcacccgcaucuaccagauccucgccaucuacuccaccgucgcgagcagccuggugcugguggucucccucggcgccaucagcuucuggaugugcuccaacggcagccugcagugccggaucugcaucuga

SEQ ID NO: 68278 - RNA, 1701 nt, Artificial Sequence; identical to SEQ ID NO: 66693
  derived and/or modified CDS sequence (opt1) from hemagglutinin__InfluenzaA__ADD64215

SEQ ID NO: 68279 - RNA, 1701 nt, Artificial Sequence; identical to SEQ ID NO: 67491
  derived and/or modified CDS sequence (opt1) from hemagglutinin__InfluenzaA__ADD64216

SEQ ID NO: 68280 - RNA, 1701 nt, Artificial Sequence; identical to SEQ ID NO: 67491
  derived and/or modified CDS sequence (opt1) from hemagglutinin__InfluenzaA__ADD64217

SEQ ID NO: 68281 - RNA, 1701 nt, Artificial Sequence
  derived and/or modified CDS sequence (opt1) from hemagglutinin__InfluenzaA__ADD74350
augaaggccauccuggugguccuccuguacaccuucgccaccgcgaacgccgacacgcugugcaucggcuaccacgccaacaacagcaccgacaccguggacaccgugcucgagaagaacgucacggugacccacuccgugaacauccuggaggacaagcacaacgggaagcugugcaagcuccgcggcgucgcgccccugcaccuggggaagugcaacaucgccggcuggauccucgggaacccggagugcgagagccuguccaccgcgagcuccuggagcuacaucguggagaccuccagcuccgacaacggcacgugcuaccccggcgacuucaucgacuacgaggagcugcgggagcagcucagcuccgugagcuccuucgagcgcuucgagaucuuccccaagaccagcuccuggcccaaccacgacagcaacaagggggucaccgccgccugcucccacgccggcgccaagagcuucuacaagaaccugaucuggcuggugaagaaggggaacuccuacccgaagcucagcaagagcuacaucaacgacaagggcaaggaggugcugguccugugggggauccaccaccccuccaccagcgccgaccagcagucccucuaccagaacgccgacgccuacguguucgugggcagcucccgguacagcaagaaguucaagcccgagaucgccauccgccccaagguccgggaccaggagggccgcaugaacuacuacuggacgcugguggagccgggggacaagaucaccuucgaggcgaccggcaaccugguggucccccgguacgccuucgccauggagcgcaacgccggguccggcaucaucaucagcgacacccccgugcacgacugcaacacgaccugccagacccccaagggcgccaucaacaccucccucccguuccagaacauccaccccaucacgaucgggaagugccccaaguacgucaagagcaccaagcugcggcuggcgaccggccuccgcaacgugcccuccauccagagccgggggcuguucggcgccaucgccggguucaucgagggcggcuggaccgggaugguggacggcugguacggguaccaccaccagaacgagcagggcuccggguacgccgccgaccucaagagcacgcagaacgcgaucgacgagaucaccaacaaggugaacuccgucaucgagaagaugaacacccaguucaccgccgugggcaaggaguucaaccaccuggagaagcgcaucgagaaccugaacaagaaggucgacgacggcuuccuggacaucuggacguacaacgccgagcuccuggugcugcucgagaacgagcggacccuggacuaccacgacagcaacgugaagaaccuguacgagaagguccgcucccagcucaagaacaacgccaaggagaucgggaacggcugcuucgaguucuaccacaagugcgacaacacgugcauggagagcgugaagaacgggaccuacgacuacccgaaguacuccgaggaggccaagcugaaccgggaggagaucgacggcgugaagcuggagagcacccgcaucuaccagauccucgcgaucuacagcaccgucgccuccagccuggugcugguggucucccucggggccaucagcuucuggaugugcuccaacggcagccugcagugccggaucugcaucuga

SEQ ID NO: 68282 - RNA, 1701 nt, Artificial Sequence
  derived and/or modified CDS sequence (opt1) from hemagglutinin__InfluenzaA__ADD74360
augaaggccauccuggugguccuccuguacaccuucgccaccgcgaacgccgacacgcugugcaucggcuaccacgccaacaacagcaccgacaccguggacaccgugcucgagaagaacgucacggugacccacuccgugaaccugcuggaggacaagcacaacgggaagcucugcaagcugcgcggcgucgcgccccugcaccucgggaagugcaacaucgccggcuggauccuggggaacccggagugcgagagccuguccaccgccagcuccuggagcuacaucguggagaccuccagcuccgacaacggcacgugcuaccccggcgacuucaucgacuacgaggagcuccgggagcagcugagcuccgugagcuccuucgagcgcuucgagaucuuccccaagaccagcuccuggcccaaccacgacagcaacaagggggucaccgccgccugcccgcacgccggcgcgaaguccuucuacaagaaccugaucuggcucgugaagaaggggaacagcuaccccaagcuguccaagagcuacaucaacgacaagcggaaggaggugcugguccucuggggcauccaccaccccagcaccuccgccgaccagcagagccuguaccagaacgccgacgccuacguguucguggggacgucccgcuacagcaagaaguucaagcccgagaucgccauccggccgaagguccgcgaccaggagggccggaugaacuacuacuggacccugguggagcccggcgacaagaucaccuucgaggcgaccgggaaccucguggucccccgcuacgccuucgccauggagcggaacgccggcuccgggaucaucaucagcgacacgcccgugcacgacugcaacacgaccugccagaccccgaagggcgccaucaacaccucccugcccuuccagaacauccaccccaucaccaucggcaagugccccaaguacgucaagagcaccaagcugcgccucgcgaccgggcugcggaacgugccguccauccagagccgcggccuguucggggccaucgccggcuucaucgagggcggguggacgggcaugguggacgggugguacggcuaccaccaccagaacgagcagggguccggcuacgccgccgaccucaagagcacccagaacgcgaucgacgagaucaccaacaaggugaacuccgucaucgagaagaugaacacccaguucacggccguggggaaggaguucaaccaccuggagaagcggaucgagaaccugaacaagaaggucgacgacggcuuccucgacaucuggaccuacaacgccgagcugcuggugcuccuggagaacgagcgcacccuggacuaccacgacagcaacgugaagaaccucuacgagaagguccggucccagcugaagaacaacgccaaggagaucggcaacgggugcuucgaguucuaccacaagugcgacaacacgugcauggagagcgugaagaacggcaccuacgacuaccccaaguacuccgaggaggccaagcugaaccgcgaggagaucgacggggugaagcucgagagcacccggaucuaccagauccuggcgaucuacuccaccgucgccagcagccuggugcucguggucucccugggcgccaucagcuucuggaugugcuccaacgggagccugcagugccgcaucugcaucuga

SEQ ID NO: 68283 - RNA, 1701 nt, Artificial Sequence; identical to SEQ ID NO: 66693
  derived and/or modified CDS sequence (opt1) from hemagglutinin__InfluenzaA__ADD74370

SEQ ID NO: 68284 - RNA, 1701 nt, Artificial Sequence; identical to SEQ ID NO: 66693
  derived and/or modified CDS sequence (opt1) from hemagglutinin__InfluenzaA__ADD74398

SEQ ID NO: 68285 - RNA, 1701 nt, Artificial Sequence
  derived and/or modified CDS sequence (opt1) from hemagglutinin__InfluenzaA__ADD74428
augaaggccauccuggugguccuccuguacaccuucgccaccgcgaacgccgacacgcugugcaucggcuaccacgccaacaacagcaccgacaccguggacaccgugcucgagaagaacgucacggugacccacuccgugaaccugcuggaggacaagcacaacgggaagcucugcaagcugcgcggcgucgcgccccugcaccucgggaagugcaacaucgccggcuggauccuggggaacccggagugcgagagccuguccaccgccagcuccuggagcuacaucguggagaccuccagcuccgacaacggcacgugcuaccccggcgacuucaucaacuacgaggagcuccgggagcagcugagcuccgugagcuccuucgagcgcuucgagaucuuccccaagaccagcuccuggcccaaccacgacagcaacaagggggucaccgccgccugcccgcacgccggcgcgaaguccuucuacaagaaccugaucuggcucgugaagaaggggaacagcuaccccaagcuguccaagagcuacaucaacgacaagggcaaggaggugcugguccucugggggauccaccaccccagcaccuccgccgaccagcagagccuguaccagaacgccgacgccuacguguucgugggcacgucccgguacagcaagaaguucaagcccgagaucgccauccgcccgaagguccgggaccaggagggccgcaugaacuacuacuggacccuggugaagcccggggacaagaucaccuucgaggcgaccggcaaccucguggucccccgguacgccuucgccauggagcgcaacgccggguccggcaucaucaucagcgacacgcccgugcacgacugcaacacgaccugccagaccccgaagggcgccaucaacaccucccugcccuuccagaacauccaccccaucaccaucgggaagugccccaaguacgucaagagcaccaagcugcggcucgcgaccggccugcgcaacgugccguccauccagagccgggggcuguucggcgccaucgccggguucaucgagggcggcuggacggggaugguggacggcugguacggguaccaccaccagaacgagcagggcuccggguacgccgccgaccucaagagcacccagaacgcgaucgacaagaucaccaacaaggugaacuccgucaucgagaagaugaacacccaguucacggccgugggcaaggaguucaaccaccuggagaagcgcaucgagaaccugaacaagaaggucgacgacggcuuccucgacaucuggaccuacaacgccgagcugcuggugcuccuggagaacgagcggacccuggacuaccacgacagcaacgugaagaaccucuacgagaagguccgcucccagcugaagaacaacgccaaggagaucgggaacggcugcuucgaguucuaccacaagugcgacaacacgugcauggagagcgugaagaacgggaccuacgacuaccccaaguacuccgaggaggccaagcugaaccgggaggagaucgacggcgugaagcucgagagcacccgcaucuaccagauccuggcgaucuacuccaccgucgccagcagccuggugcucguggucucccugggggccaucagcuucuggaugugcuccaacggcagccugcagugccggaucugcaucuga

SEQ ID NO: 68286 - RNA, 1701 nt, Artificial Sequence
  derived and/or modified CDS sequence (opt1) from hemagglutinin__InfluenzaA__ADD74438
augaaggccauccuggugguccuccuguacaccuucgccaccgcgaacgccgacacgcugugcaucggcuaccacgccaacaacagcaccgacaccguggacaccgugcucgagaagaacgucacggugacccacuccgugaaccugcuggaggacaagcacaacgggaagcucugcaagcugcgcggcgucgcgccccugcaccucgggaagugcaacaucgccggcuggauccuggggaacccggagugcgagagccuguccaccgccagcuccuggagcuacaucguggagaccuccagcuccgacaacggcacgugcuaccccggcgacuucaucgacuacgaggagcuccgggagcagcugagcuccgugagcuccuucgagcgcuucgagaucuuccccaagaccagcuccuggcccaaccacgacagcaacaagggggucaccgccgccugcccgcacgccggcgcgaaguccuucuacaagaaccugaucuggcucgugaagaaggggaacagcuaccccaagcuguccaagagcuacaucaacgacaagggcaaggaggugcugguccucugggggauccaccaccccagcaccuccgccgaccagcagagccuguaccagaacgccgacgccuacguguucgugggcacgucccgguacagcaagaaguucaagcccgagaucgccauccgcccgaagguccgggaccaggagggccgcaugaacuacuacuggacccugguggagcccggggacaagaucaccuucgaggcgaccggcaaccucguggucccccgguacgccuucgccauggagcgcaacgccggguccggcaucaucaucagcgacacgcccgugcacgacugcaacacgaccugccagaccccgaagggcgccaucaacaccucccugcccuuccagaacauccaccccaucaccaucgggaagugccccaaguacgucaagagcaccaagcugcggcucgcgaccggccugcgcaacgugccguccauccagagccgggggcuguucggcgccaucgccggguucaucgagggcggcuggacggggaugguggacggcugguacggguaccaccaccagaacgagcagggcuccggguacgccgccgaccucaagagcacccagaacgcgaucgacgagaucaccaacaaggugaacuccgucaucgagaagaugaacacccaguucacggccgugggcaaggaguucaaccaccuggagaagcgcaucgagaaccugaacaagaaggucgacgacggcuuccucgacaucuggaccuacaacgccgagcugcuggugcuccuggagaacgagcggacccuggacuaccacgacagcaacgugaagaaccucuacgagaagguccgcucccagcugaagaacaacgccaaggagaucgggaacggcugcuucgaguucuaccacaagugcgacaacacgugcauggagagcgugaagaacgggaccuacgacuaccccaaguacuccgaggaggccaagcugaaccgggaggagaucgacggcgugaagcucgagcccacccgcaucuaccagauccuggcgaucuacagcaccgucgccuccagccuggugcucguggucagccugggggccaucuccuucuggaugugcagcaacggcucccugcagugccggaucugcaucuga

SEQ ID NO: 68287 - RNA, 1701 nt, Artificial Sequence; identical to SEQ ID NO: 66693
  derived and/or modified CDS sequence (opt1) from hemagglutinin__InfluenzaA__ADD74448

SEQ ID NO: 68288 - RNA, 1701 nt, Artificial Sequence; identical to SEQ ID NO: 66693
  derived and/or modified CDS sequence (opt1) from hemagglutinin__InfluenzaA__ADD74458

SEQ ID NO: 68289 - RNA, 1701 nt, Artificial Sequence
  derived and/or modified CDS sequence (opt1) from hemagglutinin__InfluenzaA__ADD74468
augaaggccauccuggugguccuccuguacaccuucgccaccgcgaacgccgacacgcugugcaucggcuaccacgccaacaacagcaccgacaccguggacaccgugcucgagaagaacgucacggugacccacuccguggaccugcuggaggacaagcacaacgggaagcucugcaagcugcgcggcgucgcgccccugcaccucgggaagugcaacaucgccggcuggauccuggggaacccggagugcgagagccuguccaccgccagcuccuggagcuacaucguggagaccuccagcuccgacaacggcacgugcuaccccggcgacuucaucgacuacgaggagcuccgggagcagcugagcuccgugagcuccuucgagcgcuucgagaucuuccccaagaccagcuccuggcccaaccacgacagcaacaagggggucaccgccgccugcccgcacgccggcgcgaaguccuucuacaagaaccugaucuggcucgugaagaaggggaacagcuaccccaagcuguccaagagcuacaucaacgacaagggcaaggaggugcugguccucugggggauccaccaccccagcaccuccgccgaccagcagagccuguaccagaacgccgacgccuacguguucgugggcacgucccgguacagcaagaaguucaagcccgagaucaccauccgcccgaagguccgggaccaggagggccgcaugaacuacuacuggacccugguggagcccggggacaagaucaccuucgaggccacgggcaaccucguggucccccgguacgcguucgccauggagcgcaacgccggguccggcaucaucaucagcgacacccccgugcacgacugcaacacgaccugccagaccccgaagggcgccaucaacaccucccugcccuuccagaacauccaccccaucaccaucgggaagugccccaaguacgucaagagcaccaagcugcggcucgccacgggccugcgcaacgugccguccauccagagccgggggcuguucggcgcgaucgccggguucaucgagggcggcuggaccgggaugguggacggcugguacggguaccaccaccagaacgagcagggcuccggguacgccgccgaccucaagagcacccagaacgccaucgacgagaucaccaacaaggugaacuccgucaucgagaagaugaacacgcaguucaccgcggugggcaaggaguucaaccaccuggagaagcgcaucgagaaccugaacaagaaggucgacgacggcuuccucgacaucuggaccuacaacgccgagcugcuggugcuccuggagaacgagcggacccuggacuaccacgacagcaacgugaagaaccucuacgagaagguccgcucccagcugaagaacaacgccaaggagaucgggaacggcugcuucgaguucuaccacaagugcgacaacacgugcauggagagcgugaagaacgggaccuacgacuaccccaaguacuccgaggaggccaagcugaaccgggaggagaucgacggcgugaagcucgagagcacccgcaucuaccagauccuggccaucuacuccaccgucgcgagcagccuggugcucguggucucccugggggccaucagcuucuggaugugcuccaacggcagccugcagugccggaucugcaucuga

SEQ ID NO: 68290 - RNA, 1701 nt, Artificial Sequence
  derived and/or modified CDS sequence (opt1) from hemagglutinin__InfluenzaA__ADD74488
augaaggccauccuggugguccuccuguacaccuucgccaccgcgaacgccgacacgcugugcaucggcuaccacgccaacaacagcaccgacaccguggacaccgugcucgagaagaacgucacggugacccacuccgugaacauccuggaggacaagcacaacgggaagcugugcaagcuccgcggcgucgcgccccugcaccuggggaagugcaacaucgccggcuggauccucgggaacccggagugcgagagccuguccaccgccagcuccuggagcuacaucguggagaccuccagcuccgacaacggcacgugcuaccccggcgacuucaucgacuacgaggagcugcgggagcagcucagcuccgugagcuccuucgagcgcuucgagaucuuccccaagaccagcuccuggcccaaccacgacagcaacaagggggucaccgccgccugcccgcacgccggcgcgaaguccuucuacaagaaccugaucuggcuggugaagaaggggaacagcuaccccaagcucuccaagagcuacaucaacgacaagggcaaggaggugcugguccugugggggauccaccaccccagcaccuccgccgaccagcagagccucuaccagaacgccgacgccuacguguucgugggcacgucccgguacagcaagaaguucaagcccgagaucgccauccgcccgaagguccgggaccaggagggccgcaugaacuacuacuggacccugguggagcccggggacaagaucaccuucgaggcgaccggcaaccugguggucccccgguacgccuucgccauggagcgcaacgccggguccggcaucaucaucagcgacacgcccgugcacgacugcaacacgaccugccagaccccgaagggcgccaucaacaccucccuccccuuccagaacauccaccccaucaccaucgggaagugccccaaguacgucaagagcaccaagcugcggcuggcgaccggccuccgcaacgugccguccauccagagccgggggcuguucggcgccaucgccggguucaucgagggcggcuggacggggaugguggacggcugguacggguaccaccaccagaacgagcagggcuccggguacgccgccgaccucaagagcacccagaacgcgaucgacgagaucaccaacaaggugaacuccgucaucgagaagaugaacacccaguucacggccgugggcaaggaguucaaccaccuggagaagcgcaucgagaaccugaacaagaaggucgacgacggcuuccuggacaucuggaccuacaacgccgagcuccuggugcugcucgagaacgagcggacccuggacuaccacgacagcaacgugaagaaccuguacgagaagguccgcucccagcucaagaacaacgccaaggagaucgggaacggcugcuucgaguucuaccacaagugcgacaacacgugcauggagagcgugaagaacgggaccuacgacuaccccaaguacuccgaggaggccaagcugaaccgggaggagaucgacggcgugaagcuggagagcacccgcaucuaccagauccucgcgaucuacuccaccgucgccagcagccuggugcugguggucucccucggggccaucagcuucuggaugugcuccaacggcagccugcagugccggaucugcaucuga

SEQ ID NO: 68291 - RNA, 1701 nt, Artificial Sequence; identical to SEQ ID NO: 66693
  derived and/or modified CDS sequence (opt1) from hemagglutinin__InfluenzaA__ADD74498

SEQ ID NO: 68292 - RNA, 1701 nt, Artificial Sequence
  derived and/or modified CDS sequence (opt1) from hemagglutinin__InfluenzaA__ADD74508
augaaggccauccuggugguccuccuguacaccuucgccaccgcgaacgccgacacgcugugcaucggcuaccacgccaacaacagcaccgacaccguggacaccgugcucgagaagaacgucacggugacccacuccguggaccugcuggaggacaagcacaacgggaagcucugcaagcugcgcggcgucgcgccccugcaccucgggaagugcaacaucgccggcuggauccuggggaacccggagugcgagagccuguccaccgccagcuccuggagcuacaucguggagaccuccagcuccgacaacggcacgugcuaccccggcgacuucaucgacuacgaggagcuccgggagcagcugagcuccgugagcuccuucgagcgcuucgagaucuuccccaagaccagcuccuggcccaaccacgacagcaacaagggggucaccgccgccugcccgcacgccgaggcgaaguccuucuacaagaaccugaucuggcucgugaagaagggcaacagcuaccccaagcuguccaagagcuacaucaacgacaaggggaaggaggugcugguccucuggggcauccaccaccccagcaccuccgccgaccagcagagccuguaccagaacgccgacgccuacguguucguggggacgucccgguacagcaagaaguucaagcccgagaucgccauccgcccgaagguccgggaccaggagggccgcaugaacuacuacuggacccugguggagcccggcgacaagaucaccuucgaggcgaccgggaaccucguggucccccgguacgccuucgccauggagcgcaacgccggcuccgggaucaucaucagcgacacgcccgugcacgacugcaacacgaccugccagaccccgaagggcgccaucaacaccucccugcccuuccagaacauccaccccaucaccaucggcaagugccccaaguacgucaagagcaccaagcugcggcucgcgaccgggcugcgcaacgugccguccauccagagccggggccuguucggggccaucgccggcuucaucgagggcggguggacgggcaugguggacgggugguacggcuaccaccaccagaacgagcagggguccggcuacgccgccgaccucaagagcacccagaacgcgaucgacgagaucaccaacaaggugaacuccgucaucgagaagaugaacacccaguucacggccguggggaaggaguucaaccaccuggagaagcgcaucgagaaccugaacaagaaggucgacgacggcuuccucgacaucuggaccuacaacgccgagcugcuggugcuccuggagaacgagcggacccuggacuaccacgacagcaacgugaagaaccucuacgagaagguccgcucccagcugaagaacaacgccaaggagaucggcaacgggugcuucgaguucuaccacaagugcgacaacacgugcauggagagcgugaagaacggcaccuacgacuaccccaaguacuccgaggaggccaagcugaaccgggaggagaucgacggggugaagcucgagagcacccgcaucuaccagauccuggcgaucuacuccaccgucgccagcagccuggugcucguggucucccugggcgccaucagcuucuggaugugcuccaacgggagccugcagugccggaucugcaucuga

SEQ ID NO: 68293 - RNA, 1701 nt, Artificial Sequence
  derived and/or modified CDS sequence (opt1) from hemagglutinin__InfluenzaA__ADD74518
augaaggccauccuggugguccuccuguacaccuucgccaccgcgaacgccgacacgcugugcaucggcuaccacgccaacaacagcaccgacaccguggacaccauccucgagaagaacgugacggucacccacuccgugaaccugcuggaggacaagcacaacgggaagcucugcaagcugcgcggcguggcgccccugcaccucgggaagugcaacaucgccggcuggauccuggggaacccggagugcgagagccuguccaccgccagcuccuggagcuacaucgucgagaccuccagcuccgacaacggcacgugcuaccccggcgacuucaucgacuacgaggagcuccgggagcagcugagcuccgugagcuccuucgagcgcuucgagaucuuccccaagaccagcuccuggcccaaccacgacagcaacaagggggugaccgccgccugcccgcacgccggcgcgaaguccuucuacaagaaccugaucuggcucgucaagaaggggaacagcuaccccaagcuguccaagagcuacaucaacgacaagggcaaggagauccuggugcucugggggauccaccaccccagcaccuccgccgaccagcagagccuguaccagaacgccgacgccuacguguucgucggcacgucccgguacagcaagaaguucaagcccgagaucgccauccgcccgaaggugcgggaccaggagggccgcaugaacuacuacuggacccugguggagcccggggacaagaucaccuucgaggcgaccggcaaccucgucgugccccgguacgccuucgccauggagcgcaacacgggguccggcaucaucaucagcgacacccccgugcacgacugcaacacgaccugccagaccccgaagggcgccaucaacaccucccugcccuuccagaacauccaccccaucaccaucgggaagugccccaaguacgucaagagcaccaagcugcggcucgccacgggccugcgcaacgugccguccauccagagccgggggcuguucggcgcgaucgccggguucaucgagggcggcuggaccgggaugguggacggcugguacggguaccaccaccagaacgagcagggcuccggguacgccgccgaccucaagagcacccagaacgccaucgacgagaucaccaacaaggucaacuccgugaucgagaagaugaacacgcaguucaccgcggugggcaaggaguucaaccaccuggagaagcgcaucgagaaccugaacaagaaggucgacgacggcuuccucgacaucuggaccuacaacgccgagcugcuggugcuccuggagaacgagcggacccuggacuaccacgacagcaacgucaagaaccucuacgagaaggugcgcucccagcugaagaacaacgccaaggagaucgggaacggcugcuucgaguucuaccacaagugcgacaacacgugcauggagagcgugaagaacgggaccuacgacuaccccaaguacuccgaggaggccaagcugaaccgggaggagaucgacggcgucaagcucgagagcacccgcaucuaccagauccuggccaucuacuccaccguggcgagcagccuggugcucgucgugucccugggggccaucagcuucuggaugugcuccaacggcagccugcagugccggaucugcaucuga

SEQ ID NO: 68294 - RNA, 1701 nt, Artificial Sequence
  derived and/or modified CDS sequence (opt1) from hemagglutinin__InfluenzaA__ADD74528
augaaggccauccuggugguccuccuguacaccuucgccaccgcgaacgccgacacgcugugcaucggcuaccacgccaacaacagcaccgacaccguggacaccgugcucgagaagaacgucacggugacccacuccgugaaccugcuggaggacaagcacaacgggaagcucugcaagcugcgcggcgucgcgccccugcaccucgggaagugcaacaucgccggcuggauccuggggaacccggagugcgagagccuguccaccgccagcuccuggagcuacaucguggagaccuccagcuccgacaacggcacgugcuaccccggcgacuucaucaacuacgaggagcuccgggagcagcugagcuccgugagcuccuucgagcgcuucgagaucuuccccaagaccagcuccuggcccaaccacgacagcaacaagggggucaccgccgccugcccgcacgccggcgcgaaguccuucuacaagaaccugaucuggcucgugaagaaggggaacagcuaccccaagcuguccaagagcuacaucaacgacaagggcaaggaggugcugguccucugggggauccaccaccccagcaccuccgccgaccagcagagccuguaccagaacgccgacgccuacguguucgugggcacgucccgguacagcaagaaguuccagcccgagaucgccauccgcccgaagguccgggaccaggagggccgcaugaacuacuacuggacccugguggagcccggggacaagaucaccuucgaggcgaccggcaaccucguggucccccgguacgccuucgccauggagcgcaacgccggguccggcaucaucaucagcgacacgcccgugcacgacugcaacacgaccugccagaccccgaagggcgccaucaacaccucccugcccuuccagaacauccaccccaucaccaucgggaagugccccaaguacgucaagagcaccaagcugcggcucgcgaccggccugcgcaacgugccguccauccagagccgggggcuguucggcgccaucgccggguucaucgagggcggcuggacggggaugguggacggcugguacggguaccaccaccagaacgagcagggcuccggguacgccgccgaccucaagagcacccagaacgcgaucgacaagaucaccaacaaggugaacuccgucaucgagaagaugaacacccaguucacggccgugggcaaggaguucaaccaccuggagaagcgcaucgagaaccugaacaagaaggucgacgacggcuuccucgacaucuggaccuacaacgccgagcugcuggugcuccuggagaacgagcggacccuggacuaccacgacagcaacgugaagaaccucuacgagaagguccgcucccagcugaagaacaacgccaaggagaucgggaacggcugcuucgaguucuaccacaagugcgacaacacgugcauggagagcgugaagaacgggaccuacgacuaccccaaguacuccgaggaggccaagcugaaccgggaggagaucgacggcgugaagcucgagagcacccgcaucuaccagauccuggcgaucuacuccaccgucgccagcagccuggugcucguggucucccugggggccaucagcuucuggaugugcuccaacggcagccugcagugccggaucugcaucuga

SEQ ID NO: 68295 - RNA, 1701 nt, Artificial Sequence
  derived and/or modified CDS sequence (opt1) from hemagglutinin__InfluenzaA__ADD74538
augaaggccauccuggugguccuccuguacaccuucgccaccgcgaacgccgacacgcugugcaucggcuaccacgccaacaacagcaccgacaccguggacaccgugcucgagaagaacgucacggugacccacuccgugaaccugcuggaggacaagcacaacgggaagcucugccgccugcggggcgucgcgccccugcaccucgggaagugcaacaucgccggcuggauccuggggaacccggagugcgagagccuguccaccgccagcuccuggagcuacaucguggagaccuccagcuccgacaacggcacgugcuaccccggcgacuucaucgacuacgaggagcuccgcgagcagcugagcuccgugagcuccuucgagcgguucgagaucuuccccaagaccagcuccuggcccaaccacgacagcaacaagggggucaccgccgccugcccgcacgccggcgcgaaguccuucuacaagaaccugaucuggcucgugaagaaggggaacagcuaccccaagcuguccaagagcuacaucaacgacaagggcaaggaggugcugguccucugggggauccaccaccccagcaccuccgccgaccagcagagccuguaccagaacgccgacgccuacguguucgugggcacgucccgcuacagcaagaaguucaagcccgagaucgccauccggccgaagguccgcgaccaggagggccggaugaacuacuacuggacccugguggagcccggggacaagaucaccuucgaggcgaccggcaaccucguggucccccgcuacgccuucgccauggagcggaacgccggguccggcaucaucaucagcgacacgcccguguacgacugcaacacgaccugccagaccccgaagggcgccaucaacaccucccugcccuuccagaacauccaccccaucaccaucgggaagugccccaaguacgucaagagcaccaagcugcgccucgcgaccggccugcggaacgugccguccauccagagccgcgggcuguucggcgccaucgccggguucaucgagggcggcuggacggggaugguggacggcugguacggguaccaccaccagaacgagcagggcuccggguacgccgccgaccucaagagcacccagaacgcgaucgacgagaucaccaacaaggugaacuccgucaucgagaagaugaacacccaguucacggccgugggcaaggaguucaaccaccuggagaagcggaucgagaaccugaacaagaaggucgacgacggcuuccucgacaucuggaccuacaacgccgagcugcuggugcuccuggagaacgagcgcacccuggacuaccacgacagcaacgugaagaaccucuacgagaagguccggucccagcugaagaacaacgccaaggagaucgggaacggcugcuucgaguucuaccacaagugcgacaacacgugcauggagagcgugaagaacgggaccuacgacuaccccaaguacuccgaggaggccaagcugaaccgcgaggagaucgacggcgugaagcucgagagcacccggaucuaccagauccuggcgaucuacuccaccgucgccagcagccuggugcucguggucucccugggggccaucagcuucuggaugugcuccaacggcagccugcagugccgcaucugcaucuga

SEQ ID NO: 68296 - RNA, 1701 nt, Artificial Sequence; identical to SEQ ID NO: 68290
  derived and/or modified CDS sequence (opt1) from hemagglutinin__InfluenzaA__ADD74548

SEQ ID NO: 68297 - RNA, 1701 nt, Artificial Sequence; identical to SEQ ID NO: 67857
  derived and/or modified CDS sequence (opt1) from hemagglutinin__InfluenzaA__ADD74558

SEQ ID NO: 68298 - RNA, 1701 nt, Artificial Sequence; identical to SEQ ID NO: 68245
  derived and/or modified CDS sequence (opt1) from hemagglutinin__InfluenzaA__ADD74568

SEQ ID NO: 68299 - RNA, 1701 nt, Artificial Sequence
  derived and/or modified CDS sequence (opt1) from hemagglutinin__InfluenzaA__ADD74578
augaaggccauccuggugguccuccuguacaccuucgccaccgcgaacgccgacacgcugugcaucggcuaccacgccaacaacagcaccgacaccguggacaccgugcucgagaagaacgucacggugacccacuccgugaaccugcuggaggacaagcacaacgggaagcucugcaagcugcgcggcgucgcgccccugcaccucgggaagugcaacaucgccggcuggauccuggggaacccggagugcgagagccuguccaccagcuccagcugguccuacaucguggagaccagcuccagcgacaacggcacgugcuaccccggcgacuucaucgacuacgaggagcuccgggagcagcuguccagcguguccagcuucgagcgcuucgagaucuuccccaagaccuccagcuggcccaaccacgacuccaacaagggggucaccgccgccugcccgcacgccggcgccaagagcuucuacaagaaccugaucuggcucgugaagaaggggaacuccuaccccaagcugagcaagagcuacaucaacgacaagggcaaggaggugcugguccucugggggauccaccaccccuccaccagcacggaccagcagucccuguaccagaacgcggacgccuacguguucgugggcaccagccgguacuccaagaaguucaagcccgagaucgccauccgcccgaagguccgggaccaggagggccgcaugaacuacuacuggacccugguggagcccggggacaagaucaccuucgaggccacgggcaaccucguggucccccgguacgccuucgcgauggagcgcaacgccgggagcggcaucaucaucuccgacacccccgugcacgacugcaacacgaccugccagaccccgaagggcgccaucaacaccagccugcccuuccagaacauccaccccaucaccaucgggaagugccccaaguacgugaaguccaccaagcugcggcucgccacgggccugcgcaacgucccgagcauccagucccgggggcuguucggcgccaucgcgggguucaucgagggcggcuggaccgggaugguggacggcugguacggguaccaccaccagaacgagcagggcagcggguacgccgccgaccucaaguccacccagaacgccaucgacgagaucaccaacaaggugaacagcgucaucgagaagaugaacacgcaguucaccgccgugggcaaggaguucaaccaccuggagaagcgcaucgagaaccugaacaagaaggucgacgacggcuuccucgacaucuggaccuacaacgcggagcugcuggugcuccuggagaacgagcggacccuggacuaccacgacuccaacgugaagaaccucuacgagaagguccgcagccagcugaagaacaacgccaaggagaucgggaacggcugcuucgaguucuaccacaagugcgacaacacgugcauggaguccgugaagaacgggaccuacgacuaccccaaguacagcgaggaggccaagcugaaccgggaggagaucgacggcgugaagcucgaguccacccgcaucuaccagauccuggccaucuacagcaccgucgccagcucccuggugcucguggucagccugggggcgaucuccuucuggaugugcagcaacggcucccugcagugccggaucugcaucuga

SEQ ID NO: 68300 - RNA, 1701 nt, Artificial Sequence
  derived and/or modified CDS sequence (opt1) from hemagglutinin__InfluenzaA__ADD74588
augaaggccauccuggugguccuccuguacaccuucgccaccgcgaacgccgacacgcugugcaucggcuaccacgccaacaacagcaccgacaccguggacaccgugcucgagaagaacgucacggugacccacuccgugaaccugcuggaggacaagcacaacgggaagcucugcaagcugcgcggcgucgcgccccugcaccucgggaagugcaacaucgccggcuggauccuggggaacccggagugcgagagccuguccaccgccagcuccuggagcuacaucguggagaccuccagcuccgacaacggcacgugcuaccccggcgacuucaucgacuacgaggagcuccgggagcagcugagcuccgugagcuccuucgagcgcuucgagaucuuccccaagaccagcuccuggcccaaccacgacagcaacaagggggucaccgccgccugcccgcacgccggcgcgaaguccuucuacaagaaccugaucuggcucgugaagaaggggaacagcuaccccaagcuguccaagagcuacaucaacgacaagggcaaggaggugcugguccucugggggauccaccaccccagcaccuccgacggccagcagagccuguaccagaacgccgacgccuacguguucgugggcacgucccgguacagcaagaaguucaagcccgagaucgccauccgcccgaagguccgggaccaggaggggcgcaugaacuacuacuggacccugguggagcccggcgacaagaucaccuucgaggccaccgggaaccucguggucccccgguacgcguucgccauggagcgcaacgccggcuccggcaucaucaucagcgacacgcccgugcacgacugcaacacgaccugccagaccccgaagggggccaucaacaccucccugcccuuccagaacauccaccccaucaccaucggcaagugccccaaguacgucaagagcaccaagcugcggcucgccaccgggcugcgcaacgugccguccauccagagccggggccuguucggggcgaucgccggcuucaucgagggcggguggacgggcaugguggacgggugguacggcuaccaccaccagaacgagcagggguccggcuacgccgccgaccucaagagcacccagaacgccaucgacgagaucaccaacaaggugaacuccgucaucgagaagaugaacacccaguucacggcggugggcaaggaguucaaccaccuggagaagcgcaucgagaaccugaacaagaaggucgacgacggguuccucgacaucuggaccuacaacgccgagcugcuggugcuccuggagaacgagcggacccuggacuaccacgacagcaacgugaagaaccucuacgagaagguccgcucccagcugaagaacaacgccaaggagaucggcaacgggugcuucgaguucuaccacaagugcgacaacacgugcauggagagcgugaagaacggcaccuacgacuaccccaaguacuccaaggaggccaagcugaaccgggaggagaucgacggggugaagcucgagagcacccgcaucuaccagauccuggccaucuacuccaccgucgcgagcagccuggugcucguggucucccugggcgccaucagcuucuggaugugcuccaacggcagccugcagugccggaucugcaucuga

SEQ ID NO: 68301 - RNA, 1701 nt, Artificial Sequence; identical to SEQ ID NO: 68245
  derived and/or modified CDS sequence (opt1) from hemagglutinin__InfluenzaA__ADD74598

SEQ ID NO: 68302 - RNA, 1701 nt, Artificial Sequence; identical to SEQ ID NO: 68245
  derived and/or modified CDS sequence (opt1) from hemagglutinin__InfluenzaA__ADD74608

SEQ ID NO: 68303 - RNA, 1701 nt, Artificial Sequence; identical to SEQ ID NO: 67857
  derived and/or modified CDS sequence (opt1) from hemagglutinin__InfluenzaA__ADD74618

SEQ ID NO: 68304 - RNA, 1701 nt, Artificial Sequence
  derived and/or modified CDS sequence (opt1) from hemagglutinin__InfluenzaA__ADD74628
augaaggccauccuggugguccuccuguacaccuucgccaccgcgaacgccgacacgcugugcaucggcuaccacgccaacaacagcaccgacaccguggacaccauccucgagaagaacgugacggucacccacuccgugaaccugcuggaggacaagcacaacgggaagcucugcaagcugcgcggcguggcgccccugcaccucgggaagugcaacaucgccggcuggauccuggggaacccggagugcgagagccuguccaccgccagcuccuggagcuacaucgucgagaccuccagcuccgacaacggcacgugcuaccccggcgacuucaucgacuacgaggagcuccgggagcagcugagcuccgugagcuccuucgagcgcuucgagaucuuccccaagaccagcuccuggcccaaccacgacagcaacaagggggugaccgccgccugcccgcacgccggcgcgaaguccuucuacaagaaccugaucuggcucgucaagaaggggaacagcuaccccaagcuguccaagagcuacaucaacgacaagggcaaggagauccuggugcucugggggauccaccaccccagcaccuccgccgaccagcagagccuguaccagaacgccgacgccuacguguucgucggcacgucccgguacagcaagaaguucaagcccgagaucgccauccgcccgaaggugcgggaccaggagggccgcaugaacuacuacuggacccugguggagcccggggacaagaucaccuucgaggcgaccggcaaccucgucgugccccgguacgccuucgccauggagaagaacgccggguccggcaucaucaucagcgacacgcccgugcacgacugcaacacgaccugccagaccccgaagggcgccaucaacaccucccugcccuuccagaacauccaccccaucaccaucgggaagugccccaaguacgucaagagcaccaagcugcgccucgcgaccggccugcggaacgugccguccauccagagccgcgggcuguucggcgccaucgccggguucaucgagggcggcuggacggggaugguggacggcugguacggguaccaccaccagaacgagcagggcuccggguacgccgccgaccucaagagcacccagaacgcgaucgacgagaucaccaacaaggucaacuccgugaucgagaagaugaacacccaguucacggccgugggcaaggaguucaaccaccuggagaagcggaucgagaaccugaacaagaaggucgacgacggcuuccucgacaucuggaccuacaacgccgagcugcuggugcuccuggagaacgagcgcacccuggacuaccacgacagcaacgucaagaaccucuacgagaaggugcggucccagcugaagaacaacgccaaggagaucgggaacggcugcuucgaguucuaccacaagugcgacaacacgugcauggagagcgugaagaacgggaccuacgacuaccccaaguacuccgaggaggccaagcugaaccgcgaggagaucgacggcgucaagcucgagagcacccggaucuaccagauccuggcgaucuacuccaccguggccagcagccuggugcucgucgugucccugggggccaucagcuucuggaugugcuccaacggcagccugcagugccgcaucugcaucuga

SEQ ID NO: 68305 - RNA, 1701 nt, Artificial Sequence; identical to SEQ ID NO: 67794
  derived and/or modified CDS sequence (opt1) from hemagglutinin__InfluenzaA__ADD74648

SEQ ID NO: 68306 - RNA, 1701 nt, Artificial Sequence
  derived and/or modified CDS sequence (opt1) from hemagglutinin__InfluenzaA__ADD74658
augaaggccauccuggugguccuccuguacaccuucgccaccgcgaacgccgacacgcugugcaucggcuaccacgccaacaacagcaccgacaccguggacaccgugcucgagaagaacgucacggugacccacuccgugaaccugcuggaggacaagcacaacgggaagcucugcaagcugcgcggcgucgcgccccugcaccucgggaagugcaacaucgccggcuggauccuggggaacccggagugcgagagccuguccaccgccagcuccuggagcuacaucguggagaccuccagcuccgacaacggcacgugcuaccccggcgacuucaucgacuacgaggagcuccgggagcagcugagcuccgugagcuccuucgagcgcuucgagaucuuccccaagaccagcuccuggcccaaccacgacagcaacaagggggucaccgccgccugcccgcacgccggcgcgaaguccuucuacaagaaccugaucuggcucgugaagaaggggaacagcuaccccaagcuguccaagagcuacaucaacgacaagggcaaggaggugcugguccucugggggauccaccaccccagcaccuccgccgaccagcagagccuguaccagaacgccgacuccuacguguucgugggcacgagccgguacuccaagaaguucaagcccgagaucgccauccgcccgaagguccgggaccaggagggccgcaugaacuacuacuggacccugguggagcccggggacaagaucaccuucgaggccaccggcaaccucguggucccccgguacgcguucgccauggagcgcaacgccgggagcggcaucaucaucuccgacacgcccgugcacgacugcaacacgaccugccagaccccggagggcgccaucaacaccagccugcccuuccagaacauccaccccaucaccaucgggaagugccccaaguacgugaaguccaccaagcugcggcucgccaccggccugcgcaacgucccgagcauccagucccgggggcuguucggcgcgaucgccggguucaucgagggcggcuggacggggaugguggacggcugguacggguaccaccaccagaacgagcagggcagcggguacgccgccgaccucaaguccacccagaacgccaucgacgagaucaccaacaaggugaacagcgucaucgagaagaugaacacccaguucacggcggugggcaaggaguucaaccaccuggagaagcgcaucgagaaccugaacaagaaggucgacgacggcuuccucgacaucuggaccuacaacgccgagcugcuggugcuccuggagaacgagcggacccuggacuaccacgacuccaacgugaagaaccucuacgagaagguccgcagccagcugaagaacaacgccaaggagaucgggaacggcugcuucgaguucuaccacaagugcgacaacacgugcauggaguccgugaagaacgggaccuacgacuaccccaaguacagcgaggaggccaagcugaaccgggaggagaucgacggcgugaagcucgaguccacccgcaucuaccagauccuggccaucuacagcaccgucgcgagcucccuggugcucguggucagccugggggccaucuccuucuggaugugcagcaacggcucccugcagugccggaucugcaucuga

SEQ ID NO: 68307 - RNA, 1701 nt, Artificial Sequence; identical to SEQ ID NO: 68245
  derived and/or modified CDS sequence (opt1) from hemagglutinin__InfluenzaA__ADD74668

SEQ ID NO: 68308 - RNA, 1701 nt, Artificial Sequence; identical to SEQ ID NO: 68285
  derived and/or modified CDS sequence (opt1) from hemagglutinin__InfluenzaA__ADD74678

SEQ ID NO: 68309 - RNA, 1701 nt, Artificial Sequence; identical to SEQ ID NO: 68245
  derived and/or modified CDS sequence (opt1) from hemagglutinin__InfluenzaA__ADD74688

SEQ ID NO: 68310 - RNA, 1701 nt, Artificial Sequence
  derived and/or modified CDS sequence (opt1) from hemagglutinin__InfluenzaA__ADD74698
augaaggccauccuggugguccuccuguacaccuucgccaccgcgaacgccgacacgcugugcaucggcuaccacgccaacaacagcaccgacaccguggacaccgugcucgagaagaacgucacggugacccacuccgugaaccugcuggaggacaagcacaacgggaagcucugcaagcugcgcggcgucgcgccccugcaccucgggaagugcaacaucgccggcuggauccuggggaacccggagugcgagagccuguccaccgccagcuccuggagcuacaucguggagaccuccagcuccgacaacggcacgugcuaccccggcgacuucaucaacuacgaggagcuccgggagcagcugagcuccgugagcuccuucgagcgcuucgagaucuuccccaagaccagcuccuggcccaaccacgacagcaacaagggggucaccgccgccugcccgcacgccggcgcgaaguccuucuacaagaaccugaucuggcucgugaagaaggggaacagcuaccccaagcuguccaagagcuacaucaacgacaagggcaaggaggugcugguccucugggggauccaccaccccagcaccuccgccgaccagcagagccuguaccagaacgccgacgccuacguguucgugggcacgucccgguacagcaagaaguucaagcccgagaucgccauccgcccgaagguccgggaccaggagggccgcaugaacuacuacuggacccugguggagcccggggacaagaucaccuucgaggcgaccggcaaccucguggucccccgguacgccuucgccauggagcgcaacgccggguccggcaucaucaucagcgacacgcccgugcacgacugcaacacgaccugccagaccccgaagggcgccaucaacaccucccugcccuuccagaacauccaccccaucaccaucgggaagugccccaaguacgucaagagcaccaagcugcggcucgcgaccggccugcgcaacgugccguccauccagagccgggggcuguucggcgccaucgccggguucaucgagggcggcuggacggggaugguggacggcugguacggguaccaccaccagaacgagcagggcuccggguacgccgccgaccucaagagcacccagaacgcgaucgacaagaucaccaacaaggugaacuccgucaucgagaagaugaacacccaguucacggccgugggcaaggaguucaaccaccuggagaagcgcaucgagaaccugaacaagaaggucgacgacggcuuccucgacaucuggaccuacaacgccgagcugcuggugcuccuggagaacgagcggacccuggacuaccacgacagcaacgugaagaaccucuacgagaagguccgcaaccagcugaagaacaacgccaaggagaucgggaacggcugcuucgaguucuaccacaagugcgacaacacgugcauggaguccgugaagaacgggaccuacgacuaccccaaguacagcgaggaggccaagcugaaccgggaggagaucgacggcgugaagcucgaguccacccgcaucuaccagauccuggcgaucuacagcaccgucgccuccagccuggugcucguggucagccugggggccaucuccuucuggaugugcagcaacggcucccugcagugccggaucugcaucuga

SEQ ID NO: 68311 - RNA, 1701 nt, Artificial Sequence; identical to SEQ ID NO: 68245
  derived and/or modified CDS sequence (opt1) from hemagglutinin__InfluenzaA__ADD74708

SEQ ID NO: 68312 - RNA, 1701 nt, Artificial Sequence
  derived and/or modified CDS sequence (opt1) from hemagglutinin__InfluenzaA__ADD74728
augaaggccauccuggugguccuccuguacaccuucgccaccgcgaacgccgacacgcugugcaucggcuaccacgccaacaacagcaccgacaccguggacaccgugcucgagaagaacgucacggugacccacuccgugaaccugcuggaggacaagcacaacgggaagcucugcaagcugcgcggcgucgcgccccugcaccucgggaagugcaacaucgccggcuggauccuggggaacccggagugcgagagccuguccaccgccagcuccuggagcuacaucguggagaccuccagcuccgacaacggcacgugcuaccccggcgacuucaucgacuacgaggagcuccgggagcagcugagcuccgugagcuccuucgagcgcuucgagaucuuccccaagaccagcuccuggcccgaccacgacagcaacaagggggucaccgccgccugcccgcacgccggcgcgaaguccuucuacaagaaccugaucuggcucgugaagaaggggaacagcuaccccaagcuguccaagagcuacaucaacgacaagggcaaggaggugcugguccucugggggauccaccaccccagcaccuccgccgaccagcagagccuguaccagaacgccgacgccuacguguucgugggcacgucccgguacagcaagaaguucaagcccgagaucgccauccgcccgaagguccgggaccaggagggccgcaugaacuacuacuggacccugguggagcccggggacaagaucaccuucgaggcgaccggcaaccucguggucccccgguacgccuucgccauggagcgcaacgccggguccggcaucaucaucagcgacacgcccgugcacgacugcaacacgaccugccagaccccgaagggcgccaucaacaccucccugcccuuccagaacauccaccccaucaccaucgggaagugccccaaguacgucaagagcaccaagcugcggcucgcgaccggccugcgcaacgugccguccauccagagccgggggcuguucggcgccaucgccggguucaucgagggcggcuggacggggaugguggacggcugguacggguaccaccaccagaacgagcagggcuccggguacgccgccgaccucaagagcacccagaacgcgaucgacaagaucaccaacaaggugaacuccgucaucgagaagaugaacacccaguucacggccgugggcaaggaguucaaccaccuggagaagcgcaucgagaaccugaacaagaaggucgacgacggcuuccucgacaucuggaccuacaacgccgagcugcuggugcuccuggagaacgagcggacccuggacuaccacgacagcaacgugaagaaccucuacgagaagguccgcucccagcugaagaacaacgccaaggagaucgggaacggcugcuucgaguucuaccacaagugcgacaacacgugcauggagagcgugaagaacgggaccuacgacuaccccaaguacuccgaggaggccaagcugaaccgggaggagaucgacggcgugaagcucgagagcacccgcaucuaccagauccuggcgaucuacuccaccgucgccagcagcguggugcuggucgugucccucggggccaucagcuucuggaugugcuccaacggcagccugcagugccggaucugcaucuga

SEQ ID NO: 68313 - RNA, 1701 nt, Artificial Sequence
  derived and/or modified CDS sequence (opt1) from hemagglutinin__InfluenzaA__ADD74738
augaaggccauccuggugguccuccuguacaccuucgccaccgcgaacgccgacacgcugugcaucggcuaccacgccaacaacagcaccgacaccguggacaccgugcucgagaagaacgucacggugacccacuccgugaaccugcuggaggacaagcacaacgggaagcucugcaagcugcgcggcgucgcgccccugcaccucgggaagugcaacaucgccggcuggauccuggggaacccggagugcgagagccuguccaccgcgcggagcugguccuacaucguggagaccagcuccagcgacaacggcacgugcuaccccggcgacuucaucgacuacgaggagcuccgcgagcagcuguccagcguguccagcuucgagcgguucgagaucuuccccaagaccuccagcuggcccaaccacgacuccaacaagggggucaccgccgccugcccgcacgccggcgccaagagcuucuacaagaaccugaucuggcucgugaagaaggggaacuccuaccccaagcugagcaaguccuacaucaacgacaagggcaaggaggugcugguccucugggggauccaccaccccagcaccagcgccgaccagcagucccuguaccagaacgccgacgccuacguguucgugggcacgagcggcuacuccaagaaguucaagcccgagaucgccauccgcccgaagguccgggaccaggaggggcgcaugaacuacuacuggacccugguggagcccggcgacaagaucaccuucgaggcgaccgggaaccucguggucccccgguacgccuucgccauggagcgcaacgccggcagcggcaucaucaucuccgacacgcccgugcacgacugcaacacgaccugccagaccccgaagggggccaucaacaccagccugcccuuccagaacauccaccccaucaccaucggcaagugccccaaguacgugaaguccaccaagcugcggcucgcgaccgggcugcgcaacgucccgagcauccagucccggggccuguucggggccaucgccggcuucaucgagggcggguggacgggcaugguggacgggugguacggcuaccaccaccagaacgagcaggggagcggcuacgccgccgaccucaaguccacccagaacgcgaucgacaagaucaccaacaaggugaacagcgucaucgagaagaugaacacccaguucacggccgugggcaaggaguucaaccaccuggagaagcgcaucgagaaccugaacaagaaggucgacgacggguuccucgacaucuggaccuacaacgccgagcugcuggugcuccuggagaacgagcggacccuggacuaccacgacuccaacgugaagaaccucuacgagaagguccgcagccagcugaagaacaacgccaaggagaucggcaacgggugcuucgaguucuaccacaagugcgacaacacgugcauggaguccgugaagaacggcaccuacgacuaccccaaguacagcgaggaggccaagcugaaccgggaggagaucgacggggugaagcucgaguccacccgcaucuaccagauccuggcgaucuacagcaccgucgccuccagccuggugcucguggucagccugggcgccaucuccuucuggaugugcagcaacggcucccugcagugccggaucugcaucuga

SEQ ID NO: 68314 - RNA, 1701 nt, Artificial Sequence; identical to SEQ ID NO: 67857
  derived and/or modified CDS sequence (opt1) from hemagglutinin__InfluenzaA__ADD74748

SEQ ID NO: 68315 - RNA, 1701 nt, Artificial Sequence; identical to SEQ ID NO: 67857
  derived and/or modified CDS sequence (opt1) from hemagglutinin__InfluenzaA__ADD74758

SEQ ID NO: 68316 - RNA, 1701 nt, Artificial Sequence
  derived and/or modified CDS sequence (opt1) from hemagglutinin__InfluenzaA__ADD74768
augaaggccauccuggugguccuccuguacaccuucgccaccgcgaacgccgacacgcugugcaucggcuaccacgccaacaacagcaccgacaccguggacaccgugcucgagaagaacgucacggugacccacuccgugaaccugcuggaggacaagcacaacgggaagcucugcaagcugcgcggcgucgcgccccugcaccucgggaagugcaacaucgccggcuggauccuggggaacccggagugcgagagccuguccaccgccagcuccuggagcuacaucguggagaccuccagcuccgacaacggcacgugcuaccccggcgacuucaucgacuacgaggagcuccgggagcagcugagcuccgugagcuccuucgagcgcuucgagaucuuccccaagaccagcuccuggcccaaccacgacagcaacaagggggucaccgccgccugcccgcacgccggcgcgaaguccuucuacaagaaccugaucuggcucgugaagaaggggaacagcuaccccaagcuguccaagagcuacaucaacgacaagggcaaggaggugcugguccucugggggauccaccaccccagcaccuccgccgaccagcagagccuguaccagaacgccgacgccuacguguucgugggcacgucccgguacagcaagaaguucaagcccgagaucgccauccgcccgaagguccgggaccaggagggccgcauguccuacuacuggacccugguggagcccggggacaagaucaccuucgaggcgaccggcaaccucguggucccccgguacgccuucgccauggagcgcaacgccgggagcggcaucaucaucuccgacacgcccgugcacgacugcaacacgaccugccagaccccgaagggcgccaucaacaccagccugcccuuccagaacauccaccccaucaccaucgggaagugccccaaguacgugaaguccaccaagcugcggcucgcgaccggccugcgcaacgucccgagcauccagucccgggggcuguucggcgccaucgccggguucaucgagggcggcuggacggggaugguggacggcugguacggguaccaccaccagaacgagcagggcagcggguacgccgccgaccucaaguccacccagaacgcgaucgacaagaucaccaacaaggugaacagcgucaucgagaagaugaacacccaguucacggccgugggcaaggaguucaaccaccuggagaagcgcaucgagaaccugaacaagaaggucgacgacggcuuccucgacaucuggaccuacaacgccgagcugcuggugcuccuggagaacgagcggacccuggacuaccacgacuccaacgugaagaaccucuacgagaagguccgcagccagcugaagaacaacgccaaggagaucgggaacggcugcuucgaguucuaccacaagugcgacaacacgugcauggaguccgugaagaacgggaccuacgacuaccccaaguacagcgaggaggccaagcugaaccgggaggagaucgacggcgugaagcucgaguccacccgcaucuaccagauccuggcgaucuacagcaccgucgccagcucccuggugcucguggucagccugggggccaucuccuucuggaugugcagcaacggcucccugcagugccggaucugcaucuga

SEQ ID NO: 68317 - RNA, 1701 nt, Artificial Sequence; identical to SEQ ID NO: 67857
  derived and/or modified CDS sequence (opt1) from hemagglutinin__InfluenzaA__ADD74778

SEQ ID NO: 68318 - RNA, 1701 nt, Artificial Sequence; identical to SEQ ID NO: 68245
  derived and/or modified CDS sequence (opt1) from hemagglutinin__InfluenzaA__ADD74788

SEQ ID NO: 68319 - RNA, 1701 nt, Artificial Sequence; identical to SEQ ID NO: 68245
  derived and/or modified CDS sequence (opt1) from hemagglutinin__InfluenzaA__ADD74798

SEQ ID NO: 68320 - RNA, 1701 nt, Artificial Sequence
  derived and/or modified CDS sequence (opt1) from hemagglutinin__InfluenzaA__ADD74808
augaaggccauccuggugguccuccuguacaccuucgccaccgcgaacgccgacacgcugugcaucggcuaccacgccaacaacagcaccgacaccguggacaccgugcucgagaagaacgucacggugacccacuccgugaacauccuggaggacaagcacaacgggaagcugugcaagcuccgcggcgucgcgccccugcaccuggggaagugcaacaucgccggcuggauccucgggaacccggagugcgagagccuguccaccgccagcuccuggagcuacaucguggagaccuccagcuccgacaacggcacgugcuaccccggcgacuucaucgacuacgaggagcugcgggagcagcucagcuccgugagcuccuucgagcgcuucgagaucuuccccaagaccagcuccuggcccaaccacgacagcaacaagggggucaccgccgccugcccgcacgccggcgcgaaguccuucuacaagaaccugaucuggcuggugaagaaggggaacagcuaccccaagcucuccaagagcuacaucaacgacaagggcaaggaggugcugguccugugggggauccaccaccccagcaccuccgccgaccagcagagccucuaccagaacgccgacgccuacguguucgugggcuccagccgguacuccaagaaguucaagcccgagaucgccauccgcccgaagguccgggaccaggagggccgcaugaacuacuacuggacgcugguggagcccggggacaagaucaccuucgaggcgaccggcaaccugguggucccccgguacgccuucgccauggagcgcaacgccgggagcggcaucaucaucuccgacacccccgugcacgacugcaacacgaccugccagaccccgaagggcgccaucaacaccagccuccccuuccagaacauccaccccaucacgaucgggaagugccccaaguacgugaaguccaccaagcugcggcuggcgaccggccuccgcaacgucccgagcauccagucccgggggcuguucggcgccaucgccggguucaucgagggcggcuggaccgggaugguggacggcugguacggguaccaccaccagaacgagcagggcagcggguacgccgccgaccugaaguccacgcagaacgcgaucgacgagaucaccaacaaggugaacagcgucaucgagaagaugaacacccaguucaccgccgugggcaaggaguucaaccaccucgagaagcgcaucgagaaccugaacaagaaggucgacgacggcuuccuggacaucuggacguacaacgccgagcuccuggugcugcucgagaacgagcggacccuggacuaccacgacuccaacgugaagaaccuguacgagaagguccgcagccagcucaagaacaacgccaaggagguggggaacggcugcuucgaguucuaccacaagugcgacaacacgugcauggaguccgugaagaacgggaccuacgacuaccccaaguacagcgaggaggccaagcugaaccgggaggagaucgacggcgucaagcuggaguccacccgcaucuaccagauccucgcgaucuacagcaccgccgccagcucccuggugcugguggucagccucggggccaucuccuucuggaugugcagcaacggcucccugcagugccggaucugcaucuga

SEQ ID NO: 68321 - RNA, 1701 nt, Artificial Sequence
  derived and/or modified CDS sequence (opt1) from hemagglutinin__InfluenzaA__ADD74818
augaaggccauccuggugguccuccuguacaccuucgccaccgcgaacgccgacacgcugugcaucggcuaccacgccaacaacagcaccgacaccguggacaccgugcucgagaagaacgucacggugacccacuccgugaacauccuggaggacaagcacaacgggaagcugugcaagcuccgcggcgucgcgccccugcaccuggggaagugcaacaucgccggcuggauccucgggaacccggagugcgagagccuguccaccgccagcuccuggagcuacaucguggagaccuccagcuccgacaacggcacgugcuaccccggcgacuucaucgacuacgaggagcugcgggagcagcucagcuccgugagcuccuucgagcgcuucgagaucuuccccaagaccagcuccuggcccaaccacgacagcaacaagggggucaccgccgccugcccgcacgccggcgcgaaguccuucuacaagaaccugaucuggcuggugaagaaggggaacagcuaccccaagcucuccaagagcuacaucaacgacaagggcaaggaggugcugguccugugggggauccaccaccccagcaccuccgccgaccagcagagccucuaccagaacgccgacgccuacguguucgugggcacgucccgguacagcaagaaguucaagcccgagaucgccauccgcccgaagguccgggaccaggagggccgcaugaacuaccacuggacccugguggagcccggggacaagaucaccuucgaggcgaccggcaaccugguggucccccgguacgccuucgccauggagcgcaacgccggguccggcaucaucaucagcgacacgcccgugcacgacugcaacacgaccugccagaccccgaagggcgccaucaacaccucccuccccuuccagaacauccaccccaucaccaucgggaagugccccaaguacgucaagagcaccaagcugcggcuggcgaccggccuccgcaacgugccguccauccagagccgggggcuguucggcgccaucgccggguucaucgagggcggcuggacggggaugguggacggcugguacggguaccaccaccagaacgagcagggcuccggguacgccgccgaccucaagagcacccagaacgcgaucgacgagaucaccaacaaggugaacuccgucaucgagaagaugaacacccaguucacggccgugggcaaggaguucaaccaccuggagaagcgcaucgagaaccugaacaagaaggucgacgacggcuuccuggacaucuggaccuacaacgccgagcuccuggugcugcucgagaacgagcggacccuggacuaccacgacagcaacgugaagaaccuguacgagaagguccgcucccagcucaagaacaacgccaaggagaucgggaacggcugcuucgaguucuaccacaagugcgacaacacgugcauggagagcgugaagaacgggaccuacgacuaccccaaguacuccgaggaggccaagcugaaccgggaggagaucgacggcgugaagcuggagagcacccgcaucuaccagauccucgcgaucuacuccaccgucgccagcagccuggugcugguggucucccucggggccaucagcuucuggaugugcuccaacggcagccugcagugccggaucugcaucuga

SEQ ID NO: 68322 - RNA, 1701 nt, Artificial Sequence
  derived and/or modified CDS sequence (opt1) from hemagglutinin__InfluenzaA__ADD74838
augaaggccauccuggugguccuccuguacaccuucgccaccgcgaacgccgacacgcugugcaucggcuaccacgccaacaacagcaccgacaccguggacaccgugcucgagaagaacgucacggugacccacuccgugaaccugcuggaggacaagcacaacgggaagcucugcaagcugcgcggcgucgcgccccugcaccucgggaagugcaacaucgccggcuggauccuggggaacccggagugcgagagccuguccaccgccagcuccuggagcuacaucguggagaccuccagcuccgacaacggcacgugcuaccccggcgacuucaucaacuacgaggagcuccgggagcagcugagcuccgugagcuccuucgagcgcuucgagaucuuccccaagaccagcuccuggcccaaccacgacagcaacaagggggucaccgccgccugcccgcacgccggcgcgaaguccuucuacaagaaccugaucuggcucgugaagaaggggaacagcuaccccaagcuguccaagagcuacaucaacgacaagggcaaggaggugcugguccucugggggauccaccaccccagcaccuccgccgaccagcagagccuguaccagaacgccgacgccuacguguucgugggcacgucccgguacagcaagaaguucaagcccgagaucgccauccgcccgaagguccgggaccaggagggccgcaugaacuacuacuggacccugguggagcccggggacaagaucaccuucgaggcgaccggcaaccucguggucccccgguacgccuucgccauggagcgcaacgccggguccggcaucaucaucagcgacacgcccgugcacgacugcaacacgaccugccagaccccgaagggcgccaucaacaccucccugcccuuccagaacgugcaccccaucaccaucgggaagugccccaaguacgucaagagcaccaagcugcggcucgcgaccggccugcgcaacgugccguccauccagagccgggggcuguucggcgccaucgccggguucaucgagggcggcuggacggggaugguggacggcugguacggguaccaccaccagaacgagcagggcuccggguacgccgccgaccucaagagcacccagaacgcgaucgacaagaucaccaacaaggucaacuccgugaucgagaagaugaacacccaguucacggccgucggcaaggaguucaaccaccuggagaagcgcaucgagaaccugaacaagaagguggacgacggcuuccucgacaucuggaccuacaacgccgagcugcuggugcuccuggagaacgagcggacccuggacuaccacgacagcaacgucaagaaccucuacgagaaggugcgcucccagcugaagaacaacgccaaggagaucgggaacggcugcuucgaguucuaccacaagugcgacaacacgugcauggagagcgugaagaacgggaccuacgacuaccccaaguacuccgaggaggccaagcugaaccgggaggagaucgacggcgucaagcucgagagcacccgcaucuaccagauccuggcgaucuacuccaccguggccagcagccuggugcucgucgugucccugggggccaucagcuucuggaugugcuccaacggcagccugcagugccggaucugcaucuga

SEQ ID NO: 68323 - RNA, 1701 nt, Artificial Sequence
  derived and/or modified CDS sequence (opt1) from hemagglutinin__InfluenzaA__ADD74848
augaaggccauccuggugguccuccuguacaccuucgccaccgcgaacgccgacacgcugugcaucggcuaccacgccaacaacagcaccgacaccguggacaccgugcucgagaagaacgucacggugacccacuccgugaaccugcuggaggacaagcacaacgggaagcucugcaagcugcgcggcgucgcgccccugcaccucgggaagugcaacaucgccggcuggauccuggggaacccggagugcgagagccuguccaccgccagcuccuggagcuacaucguggagaccuccagcuccgacaacggcacgugcuaccccggcgacuucaucgacuacgaggagcuccgggagcagcugagcuccgugagcuccuucgagcgcuucgagaucuuccccaagaccagcuccuggcccaaccacgacagcaacaagggggucaccgccgccugcccgcacgccggcgcgaaguccuucuacaagaaccugaucuggcucgugaagaaggggaacagcuaccccaagcuguccaagagcuacaucaacgacaagggcaaggaggugcugguccucugggggauccaccaccccagcaccuccgccgaccagcagagccuguaccagaacgccgacgccuacguguucgugggcacgucccgguacagcaagaaguucaagcccgagaucgccauccgcccgaagguccgggaccaggagggccgcaugaacuacuacuggacccugguggagcccggggacaagaucaccuucgaggcgaccggcaaccucguggucccccgguacgccuucgccauggagcgcaacgccggguccggcaucaucaucagcgacacgcccgugcacgacugcaacacgaccugccagaccccgaagggcgccaucaacaccucccugcccuuccagaacauccaccccaucaccaucgggaagugccccaaguacgucaagagcaccaagcugcggcucgcgaccggccugcgcaacgugccguccauccagagccgggggcuguucggcgccaucgccggguucaucgagggcggcuggacggggaugguggacggcugguacggguaccaccaccagaacgagcagggcuccggguacgccgccgaccucaagagcacccagaacgcgaucgacaagaucaccaacaaggugaacuccgucaucgagaagaugaacacccaguucacggccgugggcaaggaguucaaccaccuggagaagcgcaucgagaaccugaacaagaaggucgacgacggcuuccucgacaucuggaccuacaacgccgagcugcuggugcuccuggagaacgagcggacccuggacuaccacgacagcaacgugaagaaccucuacgagaagguccgcucccagcugaagaacaacgccaaggagaucgggaacggcugcuucgaguucuaccacaagugcgacaacacgugcauggagagcgugaagaacgggaccuacgacuaccccaaguacuccgaggaggccaagcugaaccgggaggagaucgacggcgugaagcucgagagcacccgcaucuaccagauccuggcgaucuacuccaccgucgccagcagccuggugcucaucgugucccugggggccaucagcuucuggaugugcuccaacggcagccugcagugccggaucugcaucuga

SEQ ID NO: 68324 - RNA, 1701 nt, Artificial Sequence
  derived and/or modified CDS sequence (opt1) from hemagglutinin__InfluenzaA__ADD74858
augaaggccauccuggugguccuccuguacaccuucgccaccgcgaacgccgacacgcugugcaucggcuaccacgccaacaacagcaccgacaccguggacaccgugcucgagaagaacgucacggugacccacuccgugaaccugcuggaggacaagcacaacgggaagcucugcaagcugcgcggcgucgcgccccugcaccucgggaagugcaacaucgccggcuggauccuggggaacccggagugcgagagccuguccaccgccagcuccuggagcuacaucguggagaccuccagcuccgacaacggcacgugcuaccccggcgacuucaucaacuacgaggagcuccgggagcagcugagcuccgugagcuccuucgagcgcuucgagaucuuccccaagaccagcuccuggcccaaccacgacagcaacaagggggucaccgccgccugcccgcacgccggcaccaaguccuucuacaagaaccugaucuggcucgugaagaaggggaacagcuaccccaagcuguccaagagcuacaucaacgacaagggcaaggaggugcugguccucugggggauccaccaccccagcacguccgcggaccagcagagccuguaccagaacgccgacgccuacguguucgugggcaccucccgguacagcaagaaguucaagcccgagaucgccauccgcccgaagguccgggaccaggagggccgcaugaacuacuacuggacccugguggagcccggggacaagaucaccuucgaggccacgggcaaccucguggucccccgguacgcguucgccauggagcgcaacgccggguccggcaucaucaucagcgacacccccgugcacgacugcaacacgaccugccagaccccgaagggcgccaucaacaccucccugcccuuccagaacauccaccccaucaccaucgggaagugccccaaguacgucaagagcaccaagcugcggcucgccacgggccugcgcaacgugccguccauccagagccgggggcuguucggcgcgaucgccggguucaucgagggcggcuggaccgggaugguggacggcugguacggguaccaccaccagaacgagcagggcuccggguacgccgccgaccucaagagcacccagaacgccaucgacaagaucaccaacaaggugaacuccgucaucgagaagaugaacacgcaguucaccgcggugggcaaggaguucaaccaccuggagaagcgcaucgagaaccugaacaagaaggucgacgacggcuuccucgacaucuggaccuacaacgccgagcugcuggugcuccuggagaacgagcggacccuggacuaccacgacagcaacgugaagaaccucuacgagaagguccgcucccagcugaagaacaacgccaaggagaucgggaacggcugcuucgaguucuaccacaagugcgacaacacgugcauggagagcgugaagaacgggaccuacgacuaccccaaguacuccgaggaggccaagcugaaccgggaggagaucgacggcgugaagcucgagagcacccgcaucuaccagauccuggccaucuacuccaccgucgcgagcagccuggugcucguggucucccugggggccaucagcuucuggaugugcuccaacggcagccugcagugccggaucugcaucuga

SEQ ID NO: 68325 - RNA, 1701 nt, Artificial Sequence; identical to SEQ ID NO: 68245
  derived and/or modified CDS sequence (opt1) from hemagglutinin__InfluenzaA__ADD74868

SEQ ID NO: 68326 - RNA, 1701 nt, Artificial Sequence; identical to SEQ ID NO: 68245
  derived and/or modified CDS sequence (opt1) from hemagglutinin__InfluenzaA__ADD74878

SEQ ID NO: 68327 - RNA, 1701 nt, Artificial Sequence
  derived and/or modified CDS sequence (opt1) from hemagglutinin__InfluenzaA__ADD74888
augaaggccauccuggugguccuccuguacaccuucgccaccgcgaacgccgacacgcugugcaucggcuaccacgccaacaacagcaccgacaccguggacaccgugcucgagaagaacgucacggugacccacuccguggaccugcuggaggacaagcacaacgggaagcucugcaagcugcgcggcgucgcgccccugcaccucgggaagugcaacaucgccggcuggauccuggggaacccggagugcgagagccuguccaccgcgagcuccuggagcuacaucguggagaccuccagcuccgacaacggcacgugcuaccccggcgacuucaucgacuacgaggagcuccgggagcagcugagcuccgugagcuccuucgagcgcuucgagaucuuccccaagaccaacagcuggcccaaccacgacuccaacaagggggucaccgccgccugcccgcacgccggcgccaagagcuucuacaagaaccugaucuggcucgugaagaaggggaacuccuaccccaagcugagcaaguccuacaucaacgacaagggcaaggaggugcugguccucugggggauccaccaccccagcaccagcgccgaccagcagucccuguaccagaacgccgacgccuacguguucgugggcacgagccgguacuccaagaaguucaagcccgagaucgccauccgcccgaagguccgggaccaggagggccgcaugaacuacuacuggacccugguggagcccggggacaagaucaccuucgaggcgaccggcaaccucguggucccccgguacgccuucgccauggagcgcaacgccgggagcggcaucaucaucuccgacacgcccgugcacgacugcaacacgaccugccagaccccgaagggcgccaucaacaccagccugcccuuccagaacauccaccccaucaccaucgggaagugccccaaguacgugaaguccaccaagcugcggcucgcgaccggccugcgcaacgucccgagcauccagucccgggggcuguucggcgccaucgccggguucaucgagggcggcuggacggggaugguggacggcugguacggguaccaccaccagaacgagcagggcagcggguacgccgccgaccucaaguccacccagaacgcgaucgacgagaucaccaacaaggugaacagcgucaucgagaagaugaacacccaguucacggccgugggcaaggaguucaaccaccuggagaagcgcaucgagaaccugaacaagaaggucgacgacggcuuccucgacaucuggaccuacaacgccgagcugcuggugcuccuggagaacgagcggacccuggacuaccacgacuccaacgugaagaaccucuacgagaagguccgcagccagcugaagaacaacgccaaggagaucgggaacggcugcuucgaguucuaccacaagugcgacaacacgugcauggaguccgugaagaacgggaccuacgacuaccccaaguacagcgaggaggccaagcugaaccgggaggagaucgacggcgugaagcucgaguccacccgcaucuaccagauccuggcgaucuacagcaccgucgccuccagccuggugcucguggucagccugggggccaucuccuucuggaugugcagcaacggcucccugcagugccggaucugcaucuga

SEQ ID NO: 68328 - RNA, 1701 nt, Artificial Sequence
  derived and/or modified CDS sequence (opt1) from hemagglutinin__InfluenzaA__ADD74898
augaaggccauccuggugguccuccuguacaccuucaccacggccaacgcggacacccugugcaucggcuaccacgccaacaacagcaccgacaccguggacacggugcucgagaagaacgucaccgugacccacuccgugaaccugcuggaggacaagcacaacgggaagcucugcaagcugcgcggcgucgcgccccugcaccucgggaagugcaacaucgccggcuggauccuggggaacccggagugcgagagccuguccaccgccagcuccuggagcuacaucguggagacguccagcuccgacaacgggaccugcuaccccggcgacuucaucaacuacgaggagcuccgggagcagcugagcuccgugagcuccuucgagcgcuucgagaucuuccccaagaccagcuccuggcccaaccacgacagcaacaagggcgucaccgccgccugcccgcacgccggcgccaaguccuucuacaagaaccugaucuggcucgugaagaaggggaacagcuaccccaagcuguccaagagcuacaucaacgacaagggcaaggaggugcugguccucugggggauccaccaccccagcacguccgcggaccagcagagccuguaccagaacgccgacgccuacguguucgugggcaccucccgguacagcaagaaguucaagcccgagaucgccauccgcccgaagguccgggaccaggagggccgcaugaacuacuacuggacccugguggagcccggggacaagaucaccuucgaggccacgggcaaccucguggucccccgguacgcguucgccauggagcgcaacgccggguccggcaucaucaucagcgacacccccgugcacgacugcaacacgaccugccagaccccgaagggcgccaucaacaccucccugcccuuccagaacauccaccccaucaccaucgggaagugccccaaguacgucaagagcaccaagcugcggcucgccacgggccugcgcaacgugccguccauccagagccgggggcuguucggcgcgaucgccggguucaucgagggcggcuggaccgggaugguggacggcugguacggguaccaccaccagaacgagcagggcuccggguacgccgccgaccucaagagcacccagaacgccaucgacaagaucaccaacaaggugaacuccgucaucgagaagaugaacacgcaguucaccgcggugggcaaggaguucaaccaccuggagaagcgcaucgagaaccugaacaagaaggucgacgacggcuuccucgacaucuggaccuacaacgccgagcugcuggugcuccuggagaacgagcggacccuggacuaccacgacagcaacgugaagaaccucuacgagaagguccgcucccagcugaagaacaacgccaaggagaucgggaacggcugcuucgaguucuaccacaagugcgacaacacgugcauggagagcgugaagaacgggaccuacgacuaccccaaguacuccgaggaggccaagcugaaccgggaggagaucgacggcgugaagcucgagagcacccgcaucuaccagauccuggccaucuacuccaccgucgcgagcagccuggugcucguggucucccugggggccaucagcuucuggaugugcuccaacggcagccugcagugccggaucugcaucuga

SEQ ID NO: 68329 - RNA, 1701 nt, Artificial Sequence
  derived and/or modified CDS sequence (opt1) from hemagglutinin__InfluenzaA__ADD74908
augaaggccauccuggugguccuccuguacaccuucgccaccgcgaacgccgacacgcugugcaucggcuaccacgccaacaacagcaccgacaccguggacaccgugcucgagaagaacgucacggugacccacuccgugaaccugcuggaggacaagcacaacgggaagcucugcaagcugcgcggcgucgcgccccugcaccucgggaagugcaacaucgccggcuggauccuggggaacccggagugcgagagccuguccaccgccagcuccuggagcuacaucguggagaccuccagcuccgacaacggcacgugcuaccccggcgacuucaucgacuacgaggagcuccgggagcagcugagcuccgugagcuccuucgagcgcuucgagaucuuccccaagaccagcuccuggcccaaccacgacagcaacaagggggucaccgccgccugcccgcacgccggcgcgaaguccuucuacaagaaccugaucuggcucgugaagaaggggaacagcuaccccaagcuguccaagagcuacaucaacgacaagggcaaggaggugcugguccucugggggauccaccaccccagcaccuccgccgaccagcagagccuguaccagaacgccgacgccuacguguucgugggcacgucccgguacagcaagaaguucaagcccgagaucgccauccgcccgaagguccgggaccaggagggccgcaugaacuacuacuggacccugguggagcccggggacaagaucaccuucgaggcgaccggcaaccucguggucccccgguacgccuucacgauggagcgcaacgccggguccggcaucaucaucagcgacacccccgugcacgacugcaacacgaccugccagaccccgaagggcgccaucaacaccucccugcccuuccagaacauccaccccaucaccaucgggaagugccccaaguacgucaagagcaccaagcugcggcucgccacgggccugcgcaacgugccguccauccagagccgggggcuguucggcgcgaucgccggguucaucgagggcggcuggaccgggaugguggacggcugguacggguaccaccaccagaacgagcagggcuccggguacgccgccgaccucaagagcacccagaacgccaucgacgagaucaccaacaaggugaacuccgucaucgagaagaugaacacgcaguucaccgcggugggcaaggaguucaaccaccuggagaagcgcaucgagaaccugaacaagaaggucgacgacggcuuccucgacaucuggaccuacaacgccgagcugcuggugcuccuggagaacgagcggacccuggacuaccacgacagcaacgugaagaaccucuacgagaagguccgcucccagcugaagaacaacgccaaggagaucgggaacggcugcuucgaguucuaccacaagugcgacaacacgugcauggagagcgugaagaacgggaccuacgacuaccccaaguacuccgaggaggccaagcugaaccgggaggagaucgacggcgugaagcucgagagcacccgcaucuaccagauccuggccaucuacuccaccgucgcgagcagccuggugcucguggucucccugggggccaucagcuucuggaugugcuccaacggcagccugcagugccggaucugcaucuga

SEQ ID NO: 68330 - RNA, 1701 nt, Artificial Sequence; identical to SEQ ID NO: 68323
  derived and/or modified CDS sequence (opt1) from hemagglutinin__InfluenzaA__ADD74918

SEQ ID NO: 68331 - RNA, 1701 nt, Artificial Sequence; identical to SEQ ID NO: 68245
  derived and/or modified CDS sequence (opt1) from hemagglutinin__InfluenzaA__ADD74928

SEQ ID NO: 68332 - RNA, 1701 nt, Artificial Sequence; identical to SEQ ID NO: 68323
  derived and/or modified CDS sequence (opt1) from hemagglutinin__InfluenzaA__ADD74938

SEQ ID NO: 68333 - RNA, 1701 nt, Artificial Sequence
  derived and/or modified CDS sequence (opt1) from hemagglutinin__InfluenzaA__ADD74958
augaaggccauccuggugguccuccuguacaccuucgccaccgcgaacgccgacacgcugugcaucggcuaccacgccaacaacagcaccgacaccguggacaccgugcucgagaagaacgucacggugacccacuccgugaaccugcuggagaacaagcacaacgggaagcucugcaagcugcgcggcgucgcgccccugcaccucgggaagugcaacaucgccggcuggauccuggggaacccggagugcgagagccuguccaccgccagcuccuggagcuacaucguggagaccuccagcuccgacaacggcacgugcuaccccggcgacuucaucaacuacgaggagcuccgggagcagcugagcuccgugagcuccuucgagcgcuucgagaucuuccccaagaccagcuccuggcccaaccacgacagcaacaagggggucaccgccgccugcccgcacgccggcgcgaaguccuucuacaagaaccugaucuggcucgugaagaaggggaacagcuaccccaagcuguccaagagcuacaucaacgacaagggcaaggaggugcugguccucugggggauccaccaccccagcaccuccgccgaccagcagagccuguaccagaacgccgacgccuacguguucgugggcacgucccgguacagcaagaaguucaagcccgagaucgccauccgcccgaagguccgggaccaggagggccgcaugaacuacuacuggacccugguggagcccggggacaagaucaccuucgaggcgaccggcaaccucguggucccccgguacgccuucgccauggagcgcaacgccggguccggcaucaucaucagcgacacgcccgugcacgacugcaacacgaccugccagaccccgaagggcgccaucaacaccucccugcccuuccagaacauccaccccaucaccaucgggaagugccccaaguacgucaagagcaccaagcugcggcucgcgaccggccugcgcaacgugccguccauccagagccgggggcuguucggcgccaucgccggguucaucgagggcggcuggacggggaugguggacggcugguacggguaccaccaccagaacgagcagggcuccggguacgccgccgaccucaagagcacccagaacgcgaucgacaagaucaccaacaaggugaacuccgucaucgagaagaugaacacccaguucacggccgugggcaaggaguucaaccaccuggagaagcgcaucgagaaccugaacaagaaggucgacgacggcuuccucgacaucuggaccuacaacgccgagcugcuggugcuccuggagaacgagcggacccuggacuaccacgacagcaacgugaagaaccucuacgagaagguccgcucccagcugaagaacaacgccaaggagaucgggaacggcugcuucgaguucuaccacaagugcgacaacacgugcauggagagcgugaagaacgggaccuacgacuaccccaaguacuccgaggaggccaagcugaaccgggaggagaucgacggcgugaagcucgagagcacccgcaucuaccagauccuggcgaucuacuccaccgucgccagcagccuggugcucguggucucccugggggccaucagcuucuggaugugcuccaacggcagccugcagugccggaucugcaucuga

SEQ ID NO: 68334 - RNA, 1701 nt, Artificial Sequence; identical to SEQ ID NO: 67857
  derived and/or modified CDS sequence (opt1) from hemagglutinin__InfluenzaA__ADD74968

SEQ ID NO: 68335 - RNA, 1701 nt, Artificial Sequence
  derived and/or modified CDS sequence (opt1) from hemagglutinin__InfluenzaA__ADD74998
augaaggccauccuggugguccuccuguacaccuucgccaccgcgaacgccgacacgcugugcaucggcuaccacgccaacaacagcaccgacaccguggacaccgugcucgagaagaacgucacggugacccacuccgugaaccugcuggaggacaagcacaacgggaagcucugcaagcugcgcggcgucgcgccccugcaccucgggaagugcaacaucgccggcuggauccuggggaacccggagugcgagagccuguccaccgccagcuccuggagcuacaucguggagaccuccagcuccgacaacggcacgugcuaccccggcgacuucaucgacuacgaggagcuccgggagcagcugagcuccgugagcuccuucgagcgcuucgagaucuuccccaagaccagcuccuggcccaaccacgacagcaacaagggggucaccgccgccugcccgcacgccggcgcgaaguccuucuacaagaaccugaucuggcucgugaagaaggggaacagcuaccccaagcuguccaagagcuacaucaacgacaagggcaaggaggugcugguccucugggggauccaccaccccagcaccuccgccgaccagcagagccuguaccagaacgccgacgccuacguguucgugggcacgucccgguacagcaagaaguucaagcccgagaucgccauccgcccgaagguccgggaccaggagggccgcaugaacuacuacuggacccugguggagcccggggacaagaucaccuucgaggcgaccggcaaccucguggucccccgguacgccuucgccauggagcgcaacgccggguccggcaucaucaucagcgacacgcccgugcacgacugcaacacgaccugccagaccccgaagggcgccaucaacaccucccugcccuuccagaacauccaccccaucaccaucgggaagugccccaaguacgucaagagcaccaagcugcggcucgcgaccggccugcgcaacgugccguccauccagagccgggggcuguucggcgccaucgccggguucaucgagggcggcuggacggggaugguggacggcugguacggguaccaccaccagaacgagcgcggcuccggguacgccgccgaccucaagagcacccagaacgcgaucgacaagaucaccaacaaggugaacuccgucaucgagaagaugaacacccaguucacggccgugggcaaggaguucaaccaccuggagaagcggaucgagaaccugaacaagaaggucgacgacggcuuccucgacaucuggaccuacaacgccgagcugcuggugcuccuggagaacgagcgcacccuggacuaccacgacagcaacgugaagaaccucuacgagaagguccggucccagcugaagaacaacgccaaggagaucgggaacggcugcuucgaguucuaccacaagugcgacaacacgugcauggagagcgugaagaacgggaccuacgacuaccccaaguacuccgaggaggccaagcugaaccgcgaggagaucgacggcgugaagcucgagagcacccggaucuaccagauccuggcgaucuacuccaccgucgccagcagccuggugcucguggucucccugggggccaucagcuucuggaugugcuccaacggcagccugcagugccgcaucugcaucuga

SEQ ID NO: 68336 - RNA, 1701 nt, Artificial Sequence; identical to SEQ ID NO: 67857
  derived and/or modified CDS sequence (opt1) from hemagglutinin__InfluenzaA__ADD75008

SEQ ID NO: 68337 - RNA, 1701 nt, Artificial Sequence; identical to SEQ ID NO: 67857
  derived and/or modified CDS sequence (opt1) from hemagglutinin__InfluenzaA__ADD75018

SEQ ID NO: 68338 - RNA, 1701 nt, Artificial Sequence; identical to SEQ ID NO: 67857
  derived and/or modified CDS sequence (opt1) from hemagglutinin__InfluenzaA__ADD75028

SEQ ID NO: 68339 - RNA, 1701 nt, Artificial Sequence; identical to SEQ ID NO: 67794
  derived and/or modified CDS sequence (opt1) from hemagglutinin__InfluenzaA__ADD75058

SEQ ID NO: 68340 - RNA, 1701 nt, Artificial Sequence; identical to SEQ ID NO: 68113
  derived and/or modified CDS sequence (opt1) from hemagglutinin__InfluenzaA__ADD75088

SEQ ID NO: 68341 - RNA, 1701 nt, Artificial Sequence; identical to SEQ ID NO: 66693
  derived and/or modified CDS sequence (opt1) from hemagglutinin__InfluenzaA__ADD75098

SEQ ID NO: 68342 - RNA, 1701 nt, Artificial Sequence
  derived and/or modified CDS sequence (opt1) from hemagglutinin__InfluenzaA__ADD75108
augaaggccauccuggugguccuccuguacaccuucgccaccgcgaacgccgacacgcugugcaucggcuaccacgccaacaacagcaccgacaccguggacaccgugcucgagaagaacgucacggugacccacuccgugaaccugcuggaggacaagcacaacgggaagcucugcaagcugcgcggcgucgcgccccugcaccucgggaagugcaacaucgccggcuggauccuggggaacccggagugcgagagccuguccaccgccagcuccuggagcuacaucguggagaccuccagcuccgacaacggcacgugcuaccccggcgacuucaucgacuacgaggagcuccgggagcagcugagcuccgugagcuccuucgagcgcuucgagaucuuccccaagaccagcuccuggcccaaccacgacagcaacaagggggucaccgccgccugcccgcacgccggcgcgaaguccuucuacaagaaccugaucuggcucgugaagaaggggaacagcuaccccaagcuguccaagagcuacaucaacgacaagggcaaggaggugcugguccucugggggauccaccaccccagcaccuccgccgaccagcagagccuguaccagaacgccgacgccuacguguucgugggcacgucccgguacagcaagaaguucaagcccgagaucgccauccgcccgaagguccgggaccaggagggccgcaugaacuacuacuggacccugguggagcccggggacaagaucaccuucgaggcgaccggcaaccucguggucccccgguacgccuucgccauggagcgcaacgccggguccggcaucaucaucagcgacacgcccgugcacgacugcaacacgaccugccagaccccgaagggcgccaucaacaccucccugcccuuccagaacauccaccccaucaccaucgggaagugccccaaguacgucaagagcaccaagcugcggcucgcgaccggccugcgcaacaucccguccauccagagccgggggcuguucggcgccaucgccggguucaucgagggcggcuggacggggaugguggacggcugguacggguaccaccaccagaacgagcagggcuccggguacgccgccgaccucaagagcacccagaacgcgaucgacaagaucaccaacaaggugaacuccgugaucgagaagaugaacacccaguucacggccgucggcaaggaguucaaccaccuggagaagcgcaucgagaaccugaacaagaagguggacgacggcuuccucgacaucuggaccuacaacgccgagcugcugguccuccuggagaacgagcggacccuggacuaccacgacagcaacgugaagaaccucuacgagaaggugcgcucccagcugaagaacaacgccaaggagaucgggaacggcugcuucgaguucuaccacaagugcgacaacacgugcauggagagcgucaagaacgggaccuacgacuaccccaaguacuccgaggaggccaagcugaaccgggaggagaucgacggcgugaagcucgagagcacccgcaucuaccagauccuggcgaucuacuccaccguggccagcagccugguccucguggugucccugggggccaucagcuucuggaugugcuccaacggcagccugcagugccggaucugcaucuga

SEQ ID NO: 68343 - RNA, 1701 nt, Artificial Sequence; identical to SEQ ID NO: 66693
  derived and/or modified CDS sequence (opt1) from hemagglutinin__InfluenzaA__ADD75118

SEQ ID NO: 68344 - RNA, 1701 nt, Artificial Sequence; identical to SEQ ID NO: 67140
  derived and/or modified CDS sequence (opt1) from hemagglutinin__InfluenzaA__ADD75128

SEQ ID NO: 68345 - RNA, 1701 nt, Artificial Sequence; identical to SEQ ID NO: 66693
  derived and/or modified CDS sequence (opt1) from hemagglutinin__InfluenzaA__ADD75138

SEQ ID NO: 68346 - RNA, 1701 nt, Artificial Sequence; identical to SEQ ID NO: 67857
  derived and/or modified CDS sequence (opt1) from hemagglutinin__InfluenzaA__ADD75148

SEQ ID NO: 68347 - RNA, 1701 nt, Artificial Sequence; identical to SEQ ID NO: 66693
  derived and/or modified CDS sequence (opt1) from hemagglutinin__InfluenzaA__ADD75158

SEQ ID NO: 68348 - RNA, 1701 nt, Artificial Sequence
  derived and/or modified CDS sequence (opt1) from hemagglutinin__InfluenzaA__ADD84494
augaaggccauccuggugguccuccuguacaccuucgccaccgcgaacgccgacacgcugugcaucggcuaccacgccaacaacagcaccgacaccguggacaccgugcucgagaagaacgucacggugacccacuccgugaaccugcuggaggacaagcacaacgggaagcucugcaagcugcgcggcgucgcgccccugcaccucgggaagugcaacaucgccggcuggauccuggggaacccggagugcgagagccuguccaccgcgagcuccuggagcuacaucguggagaccuccagcuccgacaacggcacgugcuaccccggcgacuucaucgacuacgaggagcuccgggagcagcugagcuccgugagcuccuucgagcgcuucgagaucuuccccaagaucagcuccuggcccaaccacgacccgaacaagggggucaccgccgccugcccccacgccggcgccaagagcuucuacaagaaccugaucuggcucgugaagaaggggaacuccuaccccaagcugagcaaguccuacaucaacgacaagggcaaggaggugcugguccucugggggauccaccaccccagcaccagcgccgaccagcagucccuguaccagaacgccgacgccuacguguucgugggcaccagccgguacuccaagaaguucaagccggagaucgccauccgccccaagguccgggaccaggagggccgcaugaacuacuacuggacgcugguggagcccggggacaagaucaccuucgaggcgaccggcaaccucguggucccccgguacgccuucgccauggagcgcaacgccgggagcggcaucaucaucuccgacaccccggugcacggcugcaacacgaccugccagacccccaagggggccaucaacaccagccugcccuuccagaacauccaccccaucacgaucggcaagugcccgaaguacgugaaguccaccaagcugcggcucgcgaccgggcugcgcaacguccccagcauccagucccggggccuguucggggccaucgccggcuucaucgagggcggguggaccggcaugguggacgggugguacggcuaccaccaccagaacgagcaggggagcggcuacgccgccgaccucaaguccacgcagaacgcgaucgacgagaucaccaacaaggugaacagcgucaucgagaagaugaacacccaguucaccgccgugggcaaggaguucaaccaccuggagaagcgcaucgagaaccugaacaagaaggucgacgacggguuccucgacaucuggacguacaacgccgagcugcuggugcuccuggagaacgagcggacccuggacuaccacgacuccaacgugaagaaccucuacgagaagguccgcagccagcugaagaacaacgccaaggagaucggcaacgggugcuucgaguucuaccacaagugcgacaacacgugcauggaguccgugaagaacggcaccuacgacuaccccaaguacagcgaggaggccaagcugaaccgggaggagaucgacggggugaagcucgaguccacccgcaucuaccagauccuggcgaucuacagcaccgucgccuccagccuggugcucguggucagccugggcgccaucuccuucuggaugugcagcaacggcucccugcagugccggaucugcaucuga

SEQ ID NO: 68349 - RNA, 1701 nt, Artificial Sequence
  derived and/or modified CDS sequence (opt1) from hemagglutinin__InfluenzaA__ADD84495
augaaggccauccuggugguccuccuguacaccuucgccaccgcgaacgccgacacgcugugcaucggcuaccacgccaacaacagcaccgacaccguggacaccgugcucgagaagaacgucacggugacccacuccgugaaccugcuggaggacaagcacaacgggaagcucugcaagcugcgcggcgucgcgccccugcaccucgggaagugcaacaucgccggcuggauccuggggaacccggagugcgagagccuguccaccgcgagcuccuggagcuacaucguggagaccuccagcuccgacaacggcacgugcuaccccggcgacuucaucgacuacgaggagcuccgggagcagcugagcuccgugagcuccuucgagcgcuucgagaucuuccccaagaucagcuccuggcccaaccacgacccgaacaagggggucaccgccgccugcccccacgccggcgccaagagcuucuacaagaaccugaucuggcucgugaagaaggggaacuccuaccccaagcugagcaaguccuacaucaacgacaagggcaaggaggugcugguccucugggggauccaccaccccagcaccagcgccgaccagcagucccuguaccagaacgccgacgccuacguguucgugggcaccagccgguacuccaagaaguucaagccggagaucgccauccgccccaagguccgggaccaggagggccgcaugaacuacuacuggacgcugguggagcccggggacaagaucaccuucgaggcgaccggcaaccucguggucccccgguacgccuucgccauggagcgcaacgccgggagcggcaucaucaucuccgacaccccggugcacgacugcaacacgaccugccagacccccaagggcgccaucaacaccagccugcccuuccagaacauccaccccaucacgaucgggaagugcccgaaguacgugaaguccaccaagcugcggcucgcgaccggccugcgcaacguccccagcauccagucccgggggcuguucggcgccaucgccggguucaucgagggcggcuggaccgggaugguggacggcugguacggguaccaccaccagaacgagcagggcagcggguacgccgccgaccucaaguccacgcagaacgcgaucgacgagaucaccaacaaggugaacagcgucaucgagaagaugaacacccaguucaccgccgugggcaaggaguucaaccaccuggagaagcgcaucgagaaccugaacaagaaggucgacgacggcuuccucgacaucuggacguacaacgccgagcugcuggugcuccuggagaacgagcggacccuggacuaccacgacuccaacgugaagaaccucuacgagaagguccgcagccagcugaagaacaacgccaaggagaucgggaacggcugcuucgaguucuaccacaagugcgacaacacgugcauggaguccgugaagaacgggaccuacgacuaccccaaguacagcgaggaggccaagcugaaccgggaggagaucgacggcgugaagcucgaguccacccgcaucuaccagauccuggcgaucuacagcaccgucgccuccagccuggugcucguggucagccugggggccaucuccuucuggaugugcagcaacggcucccugcagugccggaucugcaucuga

SEQ ID NO: 68350 - RNA, 1701 nt, Artificial Sequence
  derived and/or modified CDS sequence (opt1) from hemagglutinin__InfluenzaA__ADD84496
augaaggccauccuggugguccuccuguacaccuucgccaccgcgaacgccgacacgcugugcaucggcuaccacgccaacaacagcaccgacaccguggacaccgugcucgagaagaacgucacggugacccacuccgugaaccugcuggaggacaagcacaacgggaagcucugcaagcugcgcggcgucgcgccccugcaccucgggaagugcaacaucgccggcuggauccuggggaacccggagugcgagagccuguccaccgcgagcuccuggagcuacaucguggagaccuccagcuccgacaacggcacgugcuaccccggcgacuucaucgacuacgaggagcuccgggagcagcugagcuccgugagcuccuucgagcgcuucgagaucuuccccaagaucagcuccuggcccaaccacgacccgaacaagggggucaccgccgccugcccccacgccggcgccaagagcuucuacaagaaccugaucuggcucgugaagaaggggaacuccuaccccaagcugagcaaguccuacaucaacgacaagggcaaggaggugcugguccucugggggauccaccaccccagcaccagcgccgaccagcagucccuguaccagaacgccgacgccuacguguucgugggcagcucccgguacagcaagaaguucaagccggagaucgccauccgccccaagguccgggaccaggagggccgcaugaacuacuacuggacccugguggagcccggggacaagaucacguucgaggcgaccggcaaccucguggucccccgguacgccuucgccauggagcgcaacgccggguccggcaucaucaucagcgacaccccggugcacgacugcaacaccacgugccagacccccaagggcgccaucaacaccucccugcccuuccagaacauccaccccaucaccaucgggaagugcccgaaguacgucaagagcacgaagcugcggcucgcgaccggccugcgcaacgugcccuccauccagagccgggggcuguucggcgccaucgccggguucaucgagggcggcuggaccgggaugguggacggcugguacggguaccaccaccagaacgagcagggcuccggguacgccgccgaccucaagagcacccagaacgcgaucgacgagaucacgaacaaggugaacuccgucaucgagaagaugaacacccaguucaccgccgugggcaaggaguucaaccaccuggagaagcgcaucgagaaccugaacaagaaggucgacgacggcuuccucgacaucuggaccuacaacgccgagcugcuggugcuccuggagaacgagcggacgcuggacuaccacgacagcaacgugaagaaccucuacgagaagguccgcucccagcugaagaacaacgccaaggagaucgggaacggcugcuucgaguucuaccacaagugcgacaacacgugcauggagagcgugaagaacgggaccuacgacuaccccaaguacuccgaggaggccaagcugaaccgggaggagaucgacggcgugaagcucgagagcacccgcaucuaccagauccuggcgaucuacuccaccgucgccagcagccuggugcucguggucucccugggggccaucagcuucuggaugugcuccaacggcagccugcagugccggaucugcaucuga

SEQ ID NO: 68351 - RNA, 1701 nt, Artificial Sequence; identical to SEQ ID NO: 68349
  derived and/or modified CDS sequence (opt1) from hemagglutinin__InfluenzaA__ADD84497

SEQ ID NO: 68352 - RNA, 1701 nt, Artificial Sequence
  derived and/or modified CDS sequence (opt1) from hemagglutinin__InfluenzaA__ADD84498
augaaggccauccuggugguccuccuguacaccuucgccaccgcgaacgccgacacgcugugcaucggcuaccacgccaacaacagcaccgacaccguggugaccguccucgagaagaacgugacggugacccacuccgucaaccugcuggaggacaagcacaacgggaagcucugcaagcugcgcggcguggcgccccugcaccucgggaagugcaacaucgccggcuggauccuggggaacccggagugcgagagccuguccaccgcgagcuccuggagcuacaucguggagaccuccagcuccgacaacggcacgugcuaccccggcgacuucaucgacuacgaggagcuccgggagcagcugagcuccgucagcuccuucgagcgcuucgagaucuuccccaagaucagcuccuggcccaaccacgacccgaacaagggggugaccgccgccugcccccacgccggcgccaagagcuucuacaagaaccugaucuggcucgugaagaaggggaacuccuaccccaagcugagcaaguccuacaucaacgacaagggcaaggagguccuggugcucugggggauccaccaccccagcaccagcgccgaccagcagucccuguaccagaacgccgacgccuacguguucgucggcagcucccgguacagcaagaaguucaagccggagaucgccauccgccccaaggugcgggaccaggagggccgcaugaacuacuacuggacccugguggagcccggggacaagaucacguucgaggcgaccggcaaccucgucgugccccgguacgccuucgccauggagcgcaacgccggguccggcaucaucaucagcgacaccccggugcacgacugcaacaccacgugccagacccccaagggcgccaucaacaccucccugcccuuccagaacauccaccccaucaccaucgggaagugcccgaaguacgucaagagcacgaagcugcggcucgcgaccggccugcgcaacgugcccuccauccagagccgggggcuguucggcgccaucgccggguucaucgagggcggcuggaccgggaugguggacggcugguacggguaccaccaccagaacgagcagggcuccggguacgccgccgaccucaagagcacccagaacgcgaucgacgagaucacgaacaaggucaacuccgugaucgagaagaugaacacccaguucaccgccgucggcaaggaguucaaccaccuggagaagcgcaucgagaaccugaacaagaagguggacgacggcuuccucgacaucuggaccuacaacgccgagcugcuggugcuccuggagaacgagcggacgcuggacuaccacgacagcaacgucaagaaccucuacgagaaggugcgcucccagcugaagaacaacgccaaggagaucgggaacggcugcuucgaguucuaccacaagugcgacaacacgugcauggagagcgugaagaacgggaccuacgacuaccccaaguacuccgaggaggccaagcugaaccgggaggagaucgacggcgucaagcucgagagcacccgcaucuaccagauccuggcgaucuacuccaccguggccagcagccuggugcucgucgugucccugggggccaucagcuucuggaugugcuccaacggcagccugcagugccggaucugcaucuga

SEQ ID NO: 68353 - RNA, 1701 nt, Artificial Sequence; identical to SEQ ID NO: 68349
  derived and/or modified CDS sequence (opt1) from hemagglutinin__InfluenzaA__ADD84499

SEQ ID NO: 68354 - RNA, 1701 nt, Artificial Sequence
  derived and/or modified CDS sequence (opt1) from hemagglutinin__InfluenzaA__ADD92535
augaaggccauccuggugguccuccuguacaccuucgccaccgcgaacgccgacacgcugugcaucggcuaccacgccaacaacagcaccgacaccguggacaccgugcucgagaagaacgucacggugacccacuccgugaaccugcuggaggacaagcacaacgggaagcucugcaagcugcgcggcgucgcgccccugcaccucgggaagugcaacaucgccggcuggauccuggggaacccggagugcgagagccuguccaccgccagcuccuggagcuacaucguggagaccuccagcuccgacaacggcacgugcuaccccggcgacuucaucgacuacgaggagcuccgggagcagcugagcuccgugagcuccuucgagcgcuucgagaucuuccccaagaccagcuccuggcccaaccacgacagcaacaagggggucaccgccgccugcccgcacgccggcgcgaaguccuucuacaagaaccugaucuggcucgugaagaaggggaacagcuaccccaagcuguccaagagcuacaucaacgacaagggcaaggaggugcugguccucugggggauccaccaccccagcaccuccgccgaccagcagagccuguaccagaacgccgacgccuacguguucgugggcacgucccgguacagcaagaaguucaagcccgagaucgccauccgcccgaagguccgggaccgcgagggccggaugaacuacuacuggacccugguggagcccggggacaagaucaccuucgaggcgaccggcaaccucguggucccccgcuacgccuucgccauggagcggaacgccggguccggcaucaucaucagcgacacgcccgugcacgacugcaacacgaccugccagaccccgaagggcgccaucaacaccucccugcccuuccagaacauccaccccaucaccaucgggaagugccccaaguacgucaagagcaccaagcugcgccucgcgaccggccugcggaacgugccguccauccagagccgcgggcuguucggcgccaucgccggguucaucgagggcggcuggacggggaugguggacggcugguacggguaccaccaccagaacgagcagggcuccggguacgccgccgaccucaagagcacccagaacgcgaucgacgagaucaccaaccgggugaacuccgucaucgagaagaugaacacccaguucacggccgugggcaaggaguucaaccaccuggagaagcgcaucgagaaccugaacaagaaggucgacggcggguuccucgacaucuggaccuacaacgccgagcugcuggugcuccuggagaacgagcggacccuggacuaccacgacagcaacgugaagaaccucuacgagaagguccgcucccagcugaagaacaacgccaaggagaucggcaacgggugcuucgaguucuaccacaagugcgacaacacgugcauggagagcgugaagaacggcaccuacgacuaccccaaguacuccgaggaggccaagcugaaccgggaggagaucgacggggugaagcucgagagcacccgcaucuaccagauccuggcgaucuacuccaccgucgccagcagccuggugcucguggucucccugggcgccaucagcuucuggaugugcuccaacggcagccugcagugccggaucugcaucuga

SEQ ID NO: 68355 - RNA, 1701 nt, Artificial Sequence; identical to SEQ ID NO: 68281
  derived and/or modified CDS sequence (opt1) from hemagglutinin__InfluenzaA__ADD96766

SEQ ID NO: 68356 - RNA, 1701 nt, Artificial Sequence; identical to SEQ ID NO: 66873
  derived and/or modified CDS sequence (opt1) from hemagglutinin__InfluenzaA__ADD96776

SEQ ID NO: 68357 - RNA, 1701 nt, Artificial Sequence; identical to SEQ ID NO: 66873
  derived and/or modified CDS sequence (opt1) from hemagglutinin__InfluenzaA__ADD96786

SEQ ID NO: 68358 - RNA, 1701 nt, Artificial Sequence; identical to SEQ ID NO: 68178
  derived and/or modified CDS sequence (opt1) from hemagglutinin__InfluenzaA__ADD96796

SEQ ID NO: 68359 - RNA, 1701 nt, Artificial Sequence
  derived and/or modified CDS sequence (opt1) from hemagglutinin__InfluenzaA__ADD96806
augaaggccauccuggugguccuccuguacacccuggccaccgcgaacgccgacacgcucugcaucggcuaccacgccaacaacagcaccgacaccguggacaccgugcuggagaagaacgucacggugacccacuccgugaaccugcucgaggacaagcacaacgggaagcugugcaagcugcgcggcgucgcgccccuccaccuggggaagugcaacaucgccggcuggauccuggggaacccggagugcgagagccucuccaccgccagcuccuggagcuacaucguggagaccuccagcuccgacaacggcacgugcuaccccggcgacuucaucgacuacgaggagcugcgggagcagcugagcuccgugagcuccuucgagcgcuucgagaucuuccccaagaccagcuccuggcccaaccacgacagcaacaagggggucaccgccgccugcccgcacgccggcgcgaaguccuucuacaagaaccucaucuggcuggugaagaaggggaacagcuaccccaagcuguccaagagcuacaucaacgacaagggcaaggaggugcucguccugugggggauccaccaccccagcaccuccgccgaccagcagagccuguaccagaacgccgacgccuacguguucgugggcacgucccgguacagcaagaaguucaagcccgagaucgccauccgcccgaagguccgggaccaggagggccgcaugaacuacuacuggacccucguggagcccggggacaagaucaccuucgaggcgaccggcaaccugguggucccccgguacgccuucgccauggagcgcaacgccggguccggcaucaucaucagcgacacgcccgugcacgacugcaacacgaccugccagaccccgaagggcgccaucaacaccucccugcccuuccagaacauccaccccaucaccaucgggaagugccccaaguacgucaagagcaccaagcuccggcuggcgaccggccugcgcaacgugccguccauccagagccgggggcuguucggcgccaucgccggguucaucgagggcggcuggacggggaugguggacggcugguacggguaccaccaccagaacgagcagggcuccggguacgccgccgaccucaagagcacccagaacgcgaucgacgagaucaccaacaaggugaacuccgucaucgagaagaugaacacccaguucacggccgugggcaaggaguucaaccaccuggagaagcgcaucgagaaccucaacaagaaggucgacgacggcuuccuggacaucuggaccuacaacgccgagcugcucgugcugcuggagaacgagcggacccucgacuaccacgacagcaacgugaagaaccuguacgagaagguccgcucccagcugaagaacaacgccaaggagaucgggaacggcugcuucgaguucuaccacaagugcgacaacacgugcauggagagcgugaagaacgggaccuacgacuaccccaaguacuccgaggaggccaagcucaaccgggaggagaucgacggcgugaagcuggagagcacccgcaucuaccagauccuggcgaucuacuccaccgucgccagcagccucgugcugguggucucccugggggccaucagcuucuggaugugcuccaacggcagccuccagugccggaucugcaucuga

SEQ ID NO: 68360 - RNA, 1701 nt, Artificial Sequence; identical to SEQ ID NO: 67857
  derived and/or modified CDS sequence (opt1) from hemagglutinin__InfluenzaA__ADD96816

SEQ ID NO: 68361 - RNA, 1701 nt, Artificial Sequence
  derived and/or modified CDS sequence (opt1) from hemagglutinin__InfluenzaA__ADD96826
augaaggccauccuggugguccuccuguacaccuucgccaccgcgaacgccgacacgcugugcaucggcuaccacgccaacaacagcaccgacaccguggacaccgugcucgagaagaacgucacggugacccacuccgugaaccugcuggaggacaagcacaacgggaagcucugcaagcugcgcggcgucgcgccccugcaccucgggaagugcaacaucgccggcuggauccuggggaacccggagugcgagagccuguccaccgccagcuccuggagcuacaucguggagaccuccagcuccgacaacggcacgugcuaccccggcgacuucaucgacuacgaggagcuccgggagcagcugagcuccgugagcuccuucgagcgcuucgagaucuuccccaagaccagcuccuggcccaaccacgacagcaacaagggggucaccgccgccugcccgcacgccggcgcgaaguccuucuacaagaaccugaucuggcucgugaagaaggggaacagcuaccccaagcuguccaagagcuacaucaacgacaagggcaaggaggugcugguccucugggggauccaccaccccagcaccuccgccgaccagcagagccuguaccagaacgccgacgccuacguguucgugggcacgucccgguacagcaagaaguucaagcccgagaucgccauccgcccgaaggucauggaccaggagggccggaugaacuacuacuggacccugguggagcccggggacaagaucaccuucgaggcgaccggcaaccucguggucccccgcuacgccuucgccauggagcggaacgccggguccggcaucaucaucagcgacacgcccgugcacgacugcaacacgaccugccagaccccgaagggcgccaucaacaccucccugcccuuccagaacauccaccccaucaccaucgggaagugccccaaguacgucaagagcaccaagcugcgccucgcgaccggccugcggaacgugccguccauccagagccgcgggcuguucggcgccaucgccggguucaucgagggcggcuggacggggaugguggacggcugguacggguaccaccaccagaacgagcagggcuccggguacgccgccgaccucaagagcacccagaacgcgaucgacgagaucaccaacaaggugaacuccgucaucgagaagaugaacacccaguucgccgccgugggcaaggaguucaaccaccuggagaagcggaucgagaaccugaacaagaaggucgacgacggcuuccucgacaucuggacguacaacgccgagcugcuggugcuccuggagaacgagcgcacccuggacuaccacgacagcaacgugaagaaccucuacgagaagguccggucccagcugaagaacaacgccaaggagaucgggaacggcugcuucgaguucuaccacaagugcgacaacacgugcauggagagcgugaagaacgggaccuacgacuaccccaaguacuccgaggaggcgaagcugaaccgcgaggagaucgacggcgugaagcucgagagcacccggaucuaccagauccuggccaucuacuccaccgucgccagcagccuggugcucguggucucccugggggccaucagcuucuggaugugcuccaacggcagccugcagugccgcaucugcaucuga

SEQ ID NO: 68362 - RNA, 1701 nt, Artificial Sequence; identical to SEQ ID NO: 66693
  derived and/or modified CDS sequence (opt1) from hemagglutinin__InfluenzaA__ADD96836

SEQ ID NO: 68363 - RNA, 1701 nt, Artificial Sequence; identical to SEQ ID NO: 66693
  derived and/or modified CDS sequence (opt1) from hemagglutinin__InfluenzaA__ADD96846

SEQ ID NO: 68364 - RNA, 1701 nt, Artificial Sequence; identical to SEQ ID NO: 68245
  derived and/or modified CDS sequence (opt1) from hemagglutinin__InfluenzaA__ADD96856

SEQ ID NO: 68365 - RNA, 1701 nt, Artificial Sequence; identical to SEQ ID NO: 67046
  derived and/or modified CDS sequence (opt1) from hemagglutinin__InfluenzaA__ADD96886

SEQ ID NO: 68366 - RNA, 1701 nt, Artificial Sequence; identical to SEQ ID NO: 68320
  derived and/or modified CDS sequence (opt1) from hemagglutinin__InfluenzaA__ADD96896

SEQ ID NO: 68367 - RNA, 1701 nt, Artificial Sequence; identical to SEQ ID NO: 67857
  derived and/or modified CDS sequence (opt1) from hemagglutinin__InfluenzaA__ADD96906

SEQ ID NO: 68368 - RNA, 1701 nt, Artificial Sequence; identical to SEQ ID NO: 67857
  derived and/or modified CDS sequence (opt1) from hemagglutinin__InfluenzaA__ADD96916

SEQ ID NO: 68369 - RNA, 1701 nt, Artificial Sequence; identical to SEQ ID NO: 67857
  derived and/or modified CDS sequence (opt1) from hemagglutinin__InfluenzaA__ADD96926

SEQ ID NO: 68370 - RNA, 1701 nt, Artificial Sequence
  derived and/or modified CDS sequence (opt1) from hemagglutinin__InfluenzaA__ADD96936
augaaggccauccuggugguccuccuguacaccuucgccaccgcgaacgccgacacgcugugcaucggcuaccacgccaacaacagcaccgacaccguggacaccgugcucgagaagaacgucacggugacccacuccgugaacauccuggaggacaagcacaacgggaagcugugcaagcuccgcggcgucgcgccccugcaccuggggaagugcaacaucgccggcuggauccucgggaacccggagugcgagagccuguccaccgccagcuccuggagcuacaucguggagaccuccagcuccgacaacggcacgugcuaccccggcgacuucaucgacuacgaggagcugcgggagcagcucagcuccgugagcuccuucgagcgcuucgagaucuuccccaagaccagcuccuggcccaaccacgacagcaacaagggggucaccgccgccugcccgcacgccggcgcgaaguccuucuacaagaaccugaucuggcugaucaagaaggggaacagcuaccccaagcucuccaagagcuacaucaacgacaagggcaaggaggugcuggugcugugggggauccaccaccccagcaccuccgccgaccagcagagccucuaccagaacgccgacgccuacgucuucgugggcacgucccgguacagcaagaaguucaagcccgagaucgccauccgcccgaaggugcgggaccaggagggccgcaugaacuacuacuggacccuggucgagcccggggacaagaucaccuucgaggcgaccggcaaccugguggugccccgguacgccuucgccauggagcgcaacgccggguccggcaucaucaucagcgacacgcccguccacgacugcaacacgaccugccagaccccgaagggcgccaucaacaccucccuccccuuccagaacauccaccccaucaccaucgggaagugccccaaguacgucaagagcaccaagcugcggcuggcgaccggccuccgcaacgugccguccauccagagccgggggcuguucggcgccaucgccggguucaucgagggcggcuggacggggaugguggacggcugguacggguaccaccaccagaacgagcagggcuccggguacgccgccgaccucaagagcacccagaacgcgaucgacgagaucaccaacaaggugaacuccgugaucgagaagaugaacacccaguucacggccgucggcaaggaguucaaccaccuggagaagcgcaucgagaaccugaacaagaagguggacgacggcuuccuggacaucuggaccuacaacgccgagcuccugguccugcucgagaacgagcggacccuggacuaccacgacagcaacgugaagaaccuguacgagaaggugcgcucccagcucaagaacaacgccaaggagaucgggaacggcugcuucgaguucuaccacaagugcgacaacacgugcauggagagcgucaagaacgggaccuacgacuaccccaaguacuccgaggaggccaagcugaaccgggaggagaucgacggcgugaagcuggagagcacccgcaucuaccagauccucgcgaucuacuccaccguggccagcagccugguccugguggugucccucggggccaucagcuucuggaugugcuccaacggcagccugcagugccggaucugcaucuga

SEQ ID NO: 68371 - RNA, 1701 nt, Artificial Sequence
  derived and/or modified CDS sequence (opt1) from hemagglutinin__InfluenzaA__ADD96946
augaaggccauccuggugguccuccuguacaccuucgccaccgcgaacgccgacacgcugugcaucggcuaccacgccaacaacagcaccgacaccguggacaccgugcucgagaagaacgucacggugacccacuccgugaaccugcuggaggacaagcacaacgggaagcucugcaagcugcgcggcgucgcgccccugcaccucgggaagugcaacaucgccggcuggauccuggggaacccggagugcgagagccuguccaccgccagcuccuggagcuacaucguggagaccuccagcuccgacaacggcacgugcuaccccggcgacuucaucgacuacgaggagcuccgggagcagcugagcuccgugagcuccuucaagcgcuucgagaucuuccccaagaccagcuccuggcccaaccacgacagcaacaagggggucaccgccgccugcccgcacgccggcgcgaaguccuucuacaagaaccugaucuggcucgugaagaaggggaacagcuaccccaagcuguccaagagcuacaucaacgacaagggcaaggaggugcugguccucugggggauccaccaccccagcaccuccgccgaccagcagagccuguaccagaacgccgacgccuacguguucgugggcacgucccgguacagcaagaaguucaagcccgagaucgccauccgcccgaagguccgggaccaggagggccgcaugaacuacuacuggacccugguggagcccggggacaagaucaccuucgaggcgaccggcaaccucguggucccccgguacgccuucgccauggagcgcaacgccggguccggcaucaucaucagcgacacgcccgugcacgacugcaacacgaccugccagaccccgaagggcgccaucaacaccucccugcccuuccagaacauccaccccaucaccaucggggagugccccaaguacgucaagagcaccaagcugcggcucgcgaccggccugcgcaacgugccguccauccagagccgggggcuguucggcgccaucgccggguucaucgagggcggcuggacggggaugguggacggcugguacggguaccaccaccagaacgagcagggcuccggguacgccgccgaccucaagagcacccagaacgcgaucgacaagaucaccaacaaggugaacuccgucaucgagaagaugaacacccaguucacggccgugggcaaggaguucaaccaccuggagaagcgcaucgagaaccugaacaagaaggucgacgacggcuuccucgacaucuggaccuacaacgccgagcugcuggugcuccuggagaacgagcggacccuggacuaccacgacagcaacgugaagaaccucuacgagaagguccgcucccagcugaagaacaacgccaaggagaucgggaacggcugcuucgaguucuaccacaagugcgacaacacgugcauggagagcgugaagaacgggaccuacgacuaccccaaguacuccgaggaggccaagcugaaccgggaggagaucgacggcgugaagcucgagagcacccgcaucuaccagauccuggcgaucuacuccaccgucgccagcagccuggugcucguggucucccugggggccaucagcuucuggaugugcuccaacggcagccugcagugccggaucugcaucuga

SEQ ID NO: 68372 - RNA, 1701 nt, Artificial Sequence
  derived and/or modified CDS sequence (opt1) from hemagglutinin__InfluenzaA__ADD96956
augaaggccauccuggugguccuccuguacaccuucgccaccgcgaacgccgacacgcugugcaucggcuaccacgccaacaacagcaccgacaccguggacaccgugcucgagaagaacgucacggugacccacuccgugaaccugcuggaggacaagcacaacgggaagcucugcaagcugcgcggcgucgcgccccugcaccucgggaagugcaacaucgccggcuggauccuggggaacccggagugcgagagccuguccaccgccagcuccuggagcuacaucguggagaccuccagcuccgacaacggcacgugcuaccccggcgacuucaucgacuacgaggagcuccgggagcagcugagcuccgugagcuccuucgagcgcuucgagaucuuccccaagaccagcuccuggcccaaccacgacagcaacaagggggucaccgccgccugcccgcacgccggcgcgaaguccuucuacaagaaccugaucuggcucgugaagaaggggaacagcuaccccaagcuguccaagagcuacaucaacgacaagggcaaggaggugcugguccucugggggauccaccaccccagcaccuccgccgaccagcagagccuguaccagaacgccgacgccuacguguucgugggcacgucccgguacagcaagaaguucaagcccgagaucgccauccgcccgaagguccgggagcaggagggccgcaugaacuacuacuggacccuggugaagcccggggacaagaucaccuucgaggcgaccggcaaccucguggucccccgguacgccuucgccauggagcgcaacgccggguccggcaucaucaucagcgacacgcccgugcacgacugcaacacgaccugccagaccccgaagggcgccaucaacaccucccugcccuuccagaacauccacagcaucaccaucgggaagugccccaaguacgugaaguccaccaagcugcggcucgcgaccggccugcgcaacguccccagcauccagucccgggggcuguucggcgccaucgccggguucaucgagggcggcuggacggggaugguggacggcugguacggguaccaccaccagaacgagcagggcagcggguacgccgccgaccucaaguccacccagaacgcgaucgacgagaucaccaacaaggugaacagcgucaucgagaagaugaacacccaguucacggccgugggcaaggaguucaaccaccuggagaagcgcaucgagaaccugaacaagaaggucgacgacggcuuccucgacaucuggaccuacaacgccgagcugcuggugcuccuggagaacgagcggacccuggacuaccacgacuccaacgugaagaaccucuacgagaagguccgcagccagcugaagaacaacgccaaggagaucgggaacggcugcuucgaguucuaccacaagugcgacaacacgugcauggaguccgugaagaacgggaccuacgacuacccgaaguacagcgaggaggccaagcugaaccgggaggagaucgacggcgugaagcucgaguccacccgcaucuaccagauccuggcgaucuacagcaccgucgccagcucccuggugcucguggucagccugggggccaucuccuucuggaugugcagcaacggcucccugcagugccggaucugcaucuga

SEQ ID NO: 68373 - RNA, 1701 nt, Artificial Sequence; identical to SEQ ID NO: 66693
  derived and/or modified CDS sequence (opt1) from hemagglutinin__InfluenzaA__ADD96976

SEQ ID NO: 68374 - RNA, 1701 nt, Artificial Sequence; identical to SEQ ID NO: 66693
  derived and/or modified CDS sequence (opt1) from hemagglutinin__InfluenzaA__ADD96986

SEQ ID NO: 68375 - RNA, 1701 nt, Artificial Sequence
  derived and/or modified CDS sequence (opt1) from hemagglutinin__InfluenzaA__ADD97035
augaaggccauccuggugguccuccuguacaccuucgccaccgcgaacgccgacacgcugugcaucggcuaccacgccaacaacagcaccgacaccguggacaccgugcucgagaagaacgucacggugacccacuccgugaaccugcuggaggacaagcacaacgggaagcucugcaagcugcgcggcgucgcgccccugcaccucgggaagugcaacaucgccggcuggauccuggggaacccggagugcgagagccuguccaccgccagcuccuggagcuacaucguggagaccuccagcuccgacaacggcacgugcuaccccggcgacuucaucgacuacgaggagcuccgggagcagcugagcuccgugagcuccuucgagcgcuucgagaucuuccccaagaccagcuccuggcccaaccacgacagcaacaagggggucaccgccgccugcccgcacgccggcgcgaaguccuucuacaagaaccugaucuggcucgugaagaaggggaacagcuaccccaagcuguccaagagcuacaucaacgacaagggcaaggaggugcugguccucugggggauccaccaccccagcaccuccgccgaccagcagagccuguaccagaacgccgacgccuacguguucgugggcacgucccgguacagcaagaaguucaagcccgagaucgccauccgcccgaagguccgggaccaggagggccgcaugaacuacuacuggacccugguggagcccggggacaagaucaccuucgaggcgaccggcaaccucguggucccccgguacgccuucgccauggagcgcaacgccggguccggcaucaucaucagcgacacgcccgugcacgacugcaacacgaccugccagaccccgaagggcgccaucaacaccucccugcccuuccagaacauccaccccaucaccaucgggaagugccccaaguacgucaagagcaccaagcugcggauggcgaccggccuccgcaacgugccguccauccagagccgggggcuguucggcgccaucgccggguucaucgagggcggcuggacggggaugguggacggcugguacggguaccaccaccagaacgagcagggcuccggguacgccgccgaccucaagagcacccagaacgcgaucgacgagaucaccaacaaggugaacuccgucaucgagaagaugaacacccaguucacggccgugggcaaggaguucaaccaccuggagaagcgcaucgagaaccugaacaagaaggucgacgacggcuuccuggacaucuggaccuacaacgccgagcuccuggugcugcucgagaacgagcggacccuggacuaccacgacagcaacgugaagaaccuguacgagaagguccgcucccagcucaagaacaacgccaaggagaucgggaacggcugcuucgaguucuaccacaagugcgacaacacgugcauggagagcgugaagaacgggaccuacgacuaccccaaguacuccgaggaggccaagcugaaccgggaggagaucgacggcgugaagcuggagagcacccgcaucuaccagauccucgcgaucuacuccaccgucgccagcagccuggugcugguggucucccucggggccaucagcuucuggaugugcuccaacggcagccugcagugccggaucugcaucuga

SEQ ID NO: 68376 - RNA, 1701 nt, Artificial Sequence
  derived and/or modified CDS sequence (opt1) from hemagglutinin__InfluenzaA__ADD97045
augaaggccauccuggugguccuccuguacaccuucgccaccgcgaacgccgacacgcugugcaucggcuaccacgccaacaacagcaccgacaccguggacaccgugcucgagaagaacgucacggugacccacuccgugaaccugcuggaggacaagcacaacgggaagcucugcaagcugcgcggcgucgcgccccugcaccucgggaagugcaacaucgccggcuggauccuggggaacccggagugcgagagccuguccaccgccagcuccuggagcuacaucguggagaccuccagcuccgacaacggcacgugcuaccccggcgacuucaccgacuacgaggagcuccgggagcagcugagcuccgugagcuccuucgagcgcuucgagaucuuccccaagaccagcuccuggcccaaccacgacagcaacaagggggucaccgccgccugcccgcacgccggcgcgaaguccuucuacaagaaccugaucuggcucgugaagaaggggaacagcuaccccaagcuguccaagagcuacaucaacgacaagggcaaggaggugcugguccucugggggauccaccaccccagcacguccgccgaccagcagagccuguaccagaacgccgacgccuacguguucgugggcaccucccgguacagcaagaaguucaagcccgagaucgccauccgcccgaagguccgggaccaggagggccgcaugaacuacuacuggacccugguggagcccggggacaagaucaccuucgaggcgacgggcaaccucguggucccccgguacgccuucgccauggagcgcaacgccggguccggcaucaucaucagcgacacccccgugcacgacugcaacacgaccugccagaccccgaagggcgccaucaacaccucccugcccuuccagaacauccaccccaucaccaucgggaagugccccaaguacgucaagagcaccaagcugcggcucgcgacgggccugcgcaacgugccguccauccagagccgggggcuguucggcgccaucgccggguucaucgagggcggcuggaccgggaugguggacggcugguacggguaccaccaccagaacgagcagggcuccggguacgccgccgaccucaagagcacccagaacgcgaucgacgagaucaccaacaaggugaacuccgucaucgagaagaugaacacgcaguucaccgccgugggcaaggaguucaaccaccuggagaagcgcaucgagaaccugaacaagaaggucgacgacggcuuccucgacaucuggaccuacaacgccgagcugcuggugcuccuggagaacgagcggacccuggacuaccacgacagcaacgugaagaaccucuacgagaagguccgcucccagcugaagaacaacgccaaggagaucgggaacggcugcuucgaguucuaccacaagugcgacaacacgugcauggagagcgugaagaacgggaccuacgacuaccccaaguacuccgaggaggccaagcugaaccgggaggagaucgacggcgugaagcucgagagcacccgcaucuaccagauccuggcgaucuacuccaccgucgccagcagccuggugcucguggucucccugggggccaucagcuucuggaugugcuccaacggcagccugcagugccggaucugcaucuga

SEQ ID NO: 68377 - RNA, 1701 nt, Artificial Sequence; identical to SEQ ID NO: 68376
  derived and/or modified CDS sequence (opt1) from hemagglutinin__InfluenzaA__ADD97055

SEQ ID NO: 68378 - RNA, 1701 nt, Artificial Sequence; identical to SEQ ID NO: 68376
  derived and/or modified CDS sequence (opt1) from hemagglutinin__InfluenzaA__ADD97123

SEQ ID NO: 68379 - RNA, 1701 nt, Artificial Sequence
  derived and/or modified CDS sequence (opt1) from hemagglutinin__InfluenzaA__ADD97161
augaaggccauccuggugguccuccuguacaccuucgccaccgcgaacgccgacacgcugugcaucggcuaccacgccaacaacagcaccgacaccguggacaccgugcucgagaagaacgucacggugacccacuccgugaaccugcuggaggacaagcacaacgggaagcucugcaagcugcgcggcgucgcgccccugcaccucgggaagugcaacaucgccggcuggauccuggggaacccggagugcgagagccuguccaccgccagcuccuggagcuacaucguggagaccuccagcuccgacaacggcacgugcuaccccggcgacuucaucgacuacgaggagcuccgggagcagcugagcuccgugagcuccuucgagcgcuucgagaucuuccccaagaccagcuccuggcccaaccacgacagcaacaagggggucaccgccgccugcccgcacgccggcgcgaaguccuucuacaagaaccugaucuggcucgugaagaagggcaagagcuaccccaagcuguccaagagcuacaucaacgacaaggggaagaaggugcugguccucugggggauccaccaccccagcaccuccgccgaccagcagagccuguaccagaacgccgacgccuacguguucgugggcacgucccgguacagcaagaaguucaagcccgagaucgccauccgcccgaagguccgggaccaggagggccgcaugaacuacuacuggacccugguggagcccggggacaagaucaccuucgaggcgaccggcaaccucguggucccccgguacgccuucgccauggagcgcaacgccggguccggcaucaucaucagcgacacgcccgugcacgacugcaacacgaccugccagaccccgaagggcgccaucaacaccucccugcccuuccagaacauccaccccaucaccaucgggaagugccccaaguacgucaagagcaccaagcugcggcucgcgaccggccugcgcaacgugccguccauccagagccgggggcuguucggcgccaucgccggguucaucgagggcggcuggacggggaugguggacggcugguacggguaccaccaccagaacgagcagggcuccggguacgccgccgaccucaagagcacccagaacgcgaucgacgagaucaccaacaaggugaacuccgucaucgagaagaugaacacccaguucacggccgugggcaaggaguucaaccaccuggagaagcgcaucgagaaccugaacaagaaggucgacgacggcuuccucgacaucuggaccuacaacgccgagcugcuggugcuccuggagaacgagcggacccuggacuaccacgacagcaacgugaagaaccucuacgagaagguccgcucccagcugaagaacaacgccaaggagaucgggaacggcugcuucgaguucuaccacaagugcgacaacacgugcauggagagcgugaagaacgggaccuacgacuaccccaaguacuccgaggaggccaagcugaaccgggaggagaucgacggcgugaagcucgagagcacccgcaucuaccagauccuggcgaucuacuccaccgucgccagcagccuggugcucguggucucccugggggccaucagcuucuggaugugcuccaacggcagccugcagugccggaucugcaucuga

SEQ ID NO: 68380 - RNA, 1701 nt, Artificial Sequence
  derived and/or modified CDS sequence (opt1) from hemagglutinin__InfluenzaA__ADD97171
augaaggccauccuggugguccuccuguacaccuucgccaccgcgaacgccgacacgcugugcaucggcuaccacgccaacaacagcaccgacaccguggacaccgugcucgagaagaacgucacggugacccacuccgugaaccugcuggaggacaagcacaacgggaagcucugcaagcugcgcggcgucgcgccccugcaccucgggaagugcaacaucgccggcuggauccuggggaacccggagugcgagagccuguccaccgccagcuccuggagcuacaucguggagaccuccagcuccgacaacggcacgugcuaccccggcgacuucaucgacuacgaggagcuccgggagcagcugagcuccgugagcuccuucgagcgcuucgagaucuuccccaagaccagcuccuggcccaaccacgacagcaacaagggggucaccgccgccugcccgcacgccggcgcgaaguccuucuacaagaaccugaucuggcucgugaagaaggggaacagcuaccccaagcuguccaagagcuacaucaacgacaagggcaaggaggugcugguccucugggggauccaccaccccagcaccuccgccgaccagcagagccuguaccagaacgccgacgccuacguguucgugggcacgucccgguacagcaagaaguucaagcccgagaucgccauccgcccgaagguccgggaccaggagggccgcaugaacuacuacuggacccugguggagcccggggacaagaucaccuucgaggcgaccggcaaccucguggucccccgguacgccuucgccauggagcgcaacgccggguccggcaucaucaucagcgacacgcccgugcacgacugcaacacgaccugccagaccccgaagggcgccaucaacaccucccugcccuuccagaacauccaccccaucaccaucgggaagugccccaaguacgucaagagcaccaagcugcggcucgcgaccggccugcgcaacgugccguccauccagagccgggggcuguucggcgccaucgccggguucaucgagggcggcuggacggggaugguggacggcugguacggguaccaccaccagaacgagcagggcuccggguacgccgccgaccucaagagcacccagaacgcgaucgacgagaucaccaacaaggugaacuccgucaucgagaagaugaacacccaguucacggccgugggcaaggaguucaaccaccuggagaagcgcaucgagaaccugaacaagaaggucgacgacggcuuccucgacaucuggaccuacaacgccgagcugcuggugcuccuggagaacgagcggacccuggacuaccacgacagcaacgugaagaaccucuacgagaagguccgcucccagcugaagaacaacgccaaggagaucgggaacggcugcuucgaguucuaccacaagugcgacaacacgugcauggagagcgugaagaacgggaccuacgacuaccccaaguacuccgaggaggccaagcugaaccgggaggagaucgacggcgugaagcucgagagcacccgcaucuaccagauccuggcgaucuacuccaccgucgccagcagccuggugcucguggucucccugggggccgugagcuucuggaugugcuccaacggcagccugcagugccggaucugcaucuga

SEQ ID NO: 68381 - RNA, 1701 nt, Artificial Sequence; identical to SEQ ID NO: 66693
  derived and/or modified CDS sequence (opt1) from hemagglutinin__InfluenzaA__ADD97181

SEQ ID NO: 68382 - RNA, 1701 nt, Artificial Sequence; identical to SEQ ID NO: 66693
  derived and/or modified CDS sequence (opt1) from hemagglutinin__InfluenzaA__ADD97201

SEQ ID NO: 68383 - RNA, 1701 nt, Artificial Sequence; identical to SEQ ID NO: 68376
  derived and/or modified CDS sequence (opt1) from hemagglutinin__InfluenzaA__ADD97211

SEQ ID NO: 68384 - RNA, 1701 nt, Artificial Sequence; identical to SEQ ID NO: 66693
  derived and/or modified CDS sequence (opt1) from hemagglutinin__InfluenzaA__ADD97231

SEQ ID NO: 68385 - RNA, 1701 nt, Artificial Sequence
  derived and/or modified CDS sequence (opt1) from hemagglutinin__InfluenzaA__ADD97241
augaaggccauccuggugguccuccuguacaccuucgccaccgcgaacgccgacacgcugugcaucggcuaccacgccaacaacagcaccgacaccguggacaccgugcucgagaagaacgucacggugacccacuccgugaaccugcuggaggacaagcacaacgggaagcucugcaagcugcgcggcgucgcgccccugcaccucgggaagugcaacaucgccggcuggauccuggggaacccggagugcgagagccuguccaccgccagcuccuggagcuacaucguggagaccuccagcuccgacaacggcacgugcuaccccggcgacuucaccgacuacgaggagcuccgggagcagcugagcuccgugagcuccuucgagcgcuucgagaucuuccccaagaccagcuccuggcccaaccacgacagcaacaagggggucaccgccgccugcccgcacgccggcgcgaaguccuucuacaagaaccugaucuggcucgugaagaaggggaacagcuaccccaagcuguccaagagcuacaucaacgacaagggcaaggaggugcugguccucugggggauccaccaccccagcacguccgccgaccagcagagccuguaccagaacgccgacgccuacguguucgugggcaccucccgguacagcaagaaguucaagcccgagaucgccauccgcccgaagguccgggaccaggagggccgcaugaacuacuacuggacccugguggagcccggggacaagaucaccuucgaggcgacgggcaaccucguggucccccgguacgccuucgccauggagcgcaacgccggguccggcaucaucaucagcgacacccccgugcacaacugcaacacgaccugccagaccccgaagggcgccaucaacaccucccugcccuuccagaacauccaccccaucaccaucgggaagugccccaaguacgucaagagcaccaagcugcggcucgcgacgggccugcgcaacgugccguccauccagagccgggggcuguucggcgccaucgccggguucaucgagggcggcuggaccgggaugguggacggcugguacggguaccaccaccagaacgagcagggcuccggguacgccgccgaccucaagagcacccagaacgcgaucgacgagaucaccaacaaggugaacuccgucaucgagaagaugaacacgcaguucaccgccgugggcaaggaguucaaccaccuggagaagcgcaucgagaaccugaacaagaaggucgacgacggcuuccucgacaucuggaccuacaacgccgagcugcuggugcuccuggagaacgagcggacccuggacuaccacgacagcaacgugaagaaccucuacgagaagguccgcucccagcugaagaacaacgccaaggagaucgggaacggcugcuucgaguucuaccacaagugcgacaacacgugcauggagagcgugaagaacgggaccuacgacuaccccaaguacuccgaggaggccaagcugaaccgggaggagaucgacggcgugaagcucgagagcacccgcaucuaccagauccuggcgaucuacuccaccgucgccagcagccuggugcucguggucucccugggggccaucagcuucuggaugugcuccaacggcagccugcagugccggaucugcaucuga

SEQ ID NO: 68386 - RNA, 1701 nt, Artificial Sequence; identical to SEQ ID NO: 68376
  derived and/or modified CDS sequence (opt1) from hemagglutinin__InfluenzaA__ADD97251

SEQ ID NO: 68387 - RNA, 1701 nt, Artificial Sequence; identical to SEQ ID NO: 66693
  derived and/or modified CDS sequence (opt1) from hemagglutinin__InfluenzaA__ADD97261

SEQ ID NO: 68388 - RNA, 1701 nt, Artificial Sequence
  derived and/or modified CDS sequence (opt1) from hemagglutinin__InfluenzaA__ADD97271
augaaggccauccuggugguccuccuguacaccuucgccaccgcgaacgccgacacgcugugcaucggcuaccacgccaacaacagcaccgacaccguggacaccgugcucgagaagaacgucacggugacccacuccgugaaccugcuggaggacaagcacaacgggaagcucugcaagcugcgcggcgucacgccccugcaccucgggaagugcaacaucgccggcuggauccuggggaacccggagugcgagagccuguccaccgccagcuccuggagcuacaucguggagaccuccagcuccgacaacgggaccugcuaccccggcgacuucaucgacuacgaggagcuccgggagcagcugagcuccgugagcuccuucgagcgcuucgagaucuuccccaagaccagcuccuggcccaaccacgacagcaacaagggcgucaccgcggccugcccgcacgccggcgccaaguccuucuacaagaaccugaucuggcucgugaagaaggggaacagcuaccccaagcuguccaagagcuacaucaacgacaagggcaaggaggugcugguccucugggggauccaccaccccagcacguccgcggaccagcagagccuguaccagaacgccgacgccuacguguucgugggcaccucccgguacagcaagaaguucaagcccgagaucgccauccgcccgaagguccgggaccaggagggccgcaugaacuacuacuggacccugguggagcccggggacaagaucaccuucgaggccacgggcaaccucguggucccccgguacgcguucgccauggagcgcaacgccggguccggcaucaucaucagcgacacccccgugcacgacugcaacacgaccugccagaccccgaagggcgccaucaacaccucccugcccuuccagaacauccaccccaucaccaucgggaagugccccaaguacgucaagagcaccaagcugcggcucgccacgggccugcgcaacaucccguccauccagagccgggggcuguucggcgcgaucgccggguucaucgagggcggcuggaccgggaugguggacggcugguacggguaccaccaccagaacgagcagggcuccggguacgccgccgaccucaagagcacccagaacgccaucgacgagaucaccaacaaggugaacuccgugaucgagaagaugaacacgcaguucaccgcggucggcaaggaguucaaccaccuggagaagcgcaucgagaaccugaacaagaagguggacgacggcuuccucgacaucuggaccuacaacgccgagcugcugguccuccuggagaacgagcggacccuggacuaccacgacagcaacgugaagaaccucuacgagaaggugcgcucccagcugaagaacaacgccaaggagaucgggaacggcugcuucgaguucuaccacaagugcgacaacacgugcauggagagcgucaagaacgggaccuacgacuaccccaaguacuccgaggaggccaagcugaaccgggaggagaucgacggcgugaagcucgagagcacccgcaucuaccagauccuggccaucuacuccaccguggcgagcagccugguccucguggugucccugggggccaucagcuucuggaugugcuccaacggcagccugcagugccggaucugcaucuga

SEQ ID NO: 68389 - RNA, 1701 nt, Artificial Sequence; identical to SEQ ID NO: 68380
  derived and/or modified CDS sequence (opt1) from hemagglutinin__InfluenzaA__ADD97281

SEQ ID NO: 68390 - RNA, 1701 nt, Artificial Sequence; identical to SEQ ID NO: 66693
  derived and/or modified CDS sequence (opt1) from hemagglutinin__InfluenzaA__ADD97291

SEQ ID NO: 68391 - RNA, 1701 nt, Artificial Sequence
  derived and/or modified CDS sequence (opt1) from hemagglutinin__InfluenzaA__ADD97311
augaaggccauccuggugguccuccuguacaccuucgccaccgcgaacgccgacacgcugugcaucggcuaccacgccaacaacagcaccgacaccguggacaccauccucgagaagaacgugacggucacccacuccgugaaccugcuggaggacaagcacaacgggaagcucugcaagcugcgcggcguggcgccccugcaccucgggaagugcaacaucgccggcuggauccuggggaacccggagugcgagagccuguccaccgccagcuccuggagcuacaucgucgagaccuccagcuccgacaacggcacgugcuaccccggcgacuucaucgacuacgaggagcuccgggagcagcugagcuccgugagcuccuucgagcgcuucgagaucuuccccaagaccagcuccuggcccaaccacgacagcaacaagggggugaccgccgccugcccgcacgccggcgcgaaguccuucuacaagaaccugaucuggcucgucaagaaggggaacagcuaccccaagcuguccaagagcuacaucaacgacaagggcaaggagauccuggugcucugggggauccaccaccccagcaccaucgccgaccagcagucccuguaccagaacgccgacgccuacguguucgucggcacgagccgguacuccaagaaguucaagcccgagaucgccauccgcccgaaggugcgggaccaggagggccgcaugaaguacuacuggacccugguggagcccggggacaagaucaccuucgaggcgaccggcaaccucgucgugccccgguacgccuucgccauggagcgcaacgccgggagcggcaucaucaucuccgacacgcccgugcacaacugcaacacgaccugccagaccagcaagggcgccaucaacaccucccugccguuccagaacauccaccccaucaccaucgggaagugccccaaguacgucaagagcaccaagcugcggcucgcgaccggccugcgcaacgugcccuccauccagagccgggggcuguucggcgccaucgccggguucaucgagggcggcuggacggggaugguggacggcugguacggguaccaccaccagaacgagcagggcuccggguacgccgccgaccucaagagcacccagaacgcgaucgacgagaucaccaacaaggucaacuccgugaucgagaagaugaacacccaguucacggccgugggcaaggaguucaaccaccuggagaagcgcaucgagaaccugaacaagaaggucgacgacggcuuccucgacaucuggaccuacaacgccgagcugcuggugcuccuggagaacgagcggacccuggacuaccacgacagcaacgucaagaaccucuacgagaaggugcgcucccagcugaagaacaacgccaaggagaucgggaacggcugcuucgaguucuaccacaagugcgacaacacgugcauggagagcgugaagaacgggaccuacgacuacccgaaguacuccgaggaggccaagcugaaccgggaggagaucgacggcgucaagcucgagagcacccgcaucuaccagauccuggcgaucuacuccaccguggccagcagccuggugcucgucgugucccugggggccaucagcuucuggaugugcuccaacggcagccugcagugccggaucugcaucuga

SEQ ID NO: 68392 - RNA, 1701 nt, Artificial Sequence; identical to SEQ ID NO: 68376
  derived and/or modified CDS sequence (opt1) from hemagglutinin__InfluenzaA__ADD97321

SEQ ID NO: 68393 - RNA, 1701 nt, Artificial Sequence; identical to SEQ ID NO: 67857
  derived and/or modified CDS sequence (opt1) from hemagglutinin__InfluenzaA__ADD97331

SEQ ID NO: 68394 - RNA, 1701 nt, Artificial Sequence
  derived and/or modified CDS sequence (opt1) from hemagglutinin__InfluenzaA__ADD97341
augaaggccauccuggugguccuccuguacaccuucgccaccgugaacgcggacacgcugugcaucggcuaccacgccaacaacagcaccgacaccguggacaccguccucgagaagaacgugacggugacccacuccgucaaccugcuggaggacaagcacaacgggaagcucugcaagcugcgcggcguggcgccccugcaccucgggaagugcaacaucgccggcuggauccuggggaacccggagugcgagagccuguccaccgccagcuccuggagcuacaucguggagaccuccagcuccgacaacggcacgugcuaccccggcgacuucaucgacuacgaggagcuccgggagcagcugagcuccgucagcuccuucgagcgcuucgagaucuuccccaagaccagcuccuggcccaaccacgacagcaacaagggggugaccgccgccugcccgcacgccggcgccaaguccuucuacaagaaccugaucuggcucgugaagaaggggaacagcuaccccaagcuguccaagagcuacaucaacgacaagggcaaggagguccuggugcucugggggauccaccaccccagcaccuccacggaccagcagagccuguaccagaacgcggacgccuacguguucgucggcaccucccgguacagcaagaaguucaagcccgagaucgccauccgcccgaaggugcgggaccaggagggccgcaugaacuacuacuggacccugguggagcccggggacaagaucaccuucgaggccacgggcaaccucgucgugccccgguacgccuucgcgauggagcgcaacgccggguccggcaucaucaucagcgacacccccgugcacgacugcaacacgaccugccagaccccgaagggcgccaucaacaccucccugcccuuccagaacauccaccccaucaccaucgggaagugccccaaguacgucaagagcaccaagcugcggcucgccacgggccugcgcaacaucccguccauccagagccgggggcuguucggcgccaucgcgggguucaucgagggcggcuggaccgggaugguggacggcugguacggguaccaccaccagaacgagcagggcuccggguacgccgccgaccucaagagcacccagaacgccaucgacgagaucaccaacaaggugaacuccgucaucgagaagaugaacacgcaguucaccgccgugggcaaggaguucaaccaccuggagaagcgcaucgagaaccugaacaagaaggucgacgacggcuuccucgacaucuggaccuacaacgcggagcugcuggugcuccuggagaacgagcggacccuggacuaccacgacagcaacgugaagaaccucuacgagaagguccgcucccagcugaagaacaacgccaaggagaucgggaacggcugcuucgaguucuaccacaagugcgacaacacgugcauggagagcgugaagaacgggaccuacgacuaccccaaguacuccgaggaggccaagcugaaccgggaggagaucgacggcgugaagcucgagagcacccgcaucuaccagauccuggccaucuacuccaccgucgccagcagccuggugcucguggucucccugggggcgaucagcuucuggaugugcuccaacggcagccugcagugccggaucugcaucuga

SEQ ID NO: 68395 - RNA, 1701 nt, Artificial Sequence; identical to SEQ ID NO: 67857
  derived and/or modified CDS sequence (opt1) from hemagglutinin__InfluenzaA__ADD97351

SEQ ID NO: 68396 - RNA, 1701 nt, Artificial Sequence; identical to SEQ ID NO: 67857
  derived and/or modified CDS sequence (opt1) from hemagglutinin__InfluenzaA__ADD97361

SEQ ID NO: 68397 - RNA, 1701 nt, Artificial Sequence
  derived and/or modified CDS sequence (opt1) from hemagglutinin__InfluenzaA__ADD97371
augaaggccauccuggugguccuccuguacaccuucgccaccgcgaacgccgacacgcugugcaucggcuaccacgccaacaacagcaccgacaccguggacaccgugcucgagaagaacgucacggugacccacuccgugaaccugcuggaggacaagcacaacgggaagcucugcaagcugcgcggcgucgcgccccugcaccucgggaagugcaacaucgccggcuggauccuggggaacccggagugcgagagccuguccaccgccagcuccuggagcuacaucguggagaccuccagcuccgacaacggcacgugcuaccccggcgacuucaucgacuacgaggagcuccgggagcagcugagcuccgugagcuccuucgagcgcuucgagaucuuccccaagaccagcuccuggcccaaccacgacagcaacaagggggucaccgccgccugcccgcacgccggcgcgaaguccuucuacaagaaccugaucuggcucgugaagaaggggaacagcuaccccaagcuguccaagagcuacaucaacgacaagggcaaggaggugcugguccucugggggauccaccaccccagcaccuccgccgaccagcagagccuguaccagaacgccgacgccuacguguucgugggcacgucccgguacagcaagaaguucaagcccgagaucgccauccgcccgaagguccgggagcaggagggccgcaugaacuacuacuggacccugguggagcccggggacaagaucaccuucgaggcgaccggcaaccucguggucccccgguacgccuucgccauggagcgcaacgccggguccggcaucaucaucagcgacacgcccgugcacgacugcaacacgaccugccagaccccgaagggcgccaucaacaccucccugcccuuccagaacauccaccccaucaccaucgggaagugccccaaguacgucaagagcaccaagcugcggcucgcgaccggccugcgcaacgugccguccauccagagccgggggcuguucggcgccaucgccggguucaucgagggcggcuggacggggaugguggacggcugguacggguaccaccaccagaacgagcagggcuccggguacgccgccgaccucaagagcacccagaacgcgaucgacgagaucaccaacaaggugaacuccgucaucgagaagaugaacacccaguucacggccgugggcaaggaguucaaccaccuggagaagcgcaucgagaaccugaacaagaaggucgacgacggcuuccucgacaucuggaccuacaacgccgagcugcuggugcuccuggagaacgagcggacccuggacuaccacgacagcaacgugaagaaccucuacgagaagguccgcucccagcugaagaacaacgccaaggagaucgggaacggcugcuucgaguucuaccacaagugcgacaacacgugcauggagagcgugaagaacgggaccuacgacuaccccaaguacuccgaggaggccaagcugaaccgggaggagaucgacggcgugaagcucgagagcacccgcaucuaccagauccuggcgaucuacuccaccgucgccagcagccuggugcucguggucucccugggggccaucagcuucuggaugugcuccaacggcagccugcagugccgggugugcaucuga

SEQ ID NO: 68398 - RNA, 1701 nt, Artificial Sequence; identical to SEQ ID NO: 67857
  derived and/or modified CDS sequence (opt1) from hemagglutinin__InfluenzaA__ADD97381

SEQ ID NO: 68399 - RNA, 1701 nt, Artificial Sequence; identical to SEQ ID NO: 66693
  derived and/or modified CDS sequence (opt1) from hemagglutinin__InfluenzaA__ADD97391

SEQ ID NO: 68400 - RNA, 1701 nt, Artificial Sequence; identical to SEQ ID NO: 67857
  derived and/or modified CDS sequence (opt1) from hemagglutinin__InfluenzaA__ADD97411

SEQ ID NO: 68401 - RNA, 1701 nt, Artificial Sequence; identical to SEQ ID NO: 67857
  derived and/or modified CDS sequence (opt1) from hemagglutinin__InfluenzaA__ADD97421

SEQ ID NO: 68402 - RNA, 1701 nt, Artificial Sequence; identical to SEQ ID NO: 66693
  derived and/or modified CDS sequence (opt1) from hemagglutinin__InfluenzaA__ADD97431

SEQ ID NO: 68403 - RNA, 1701 nt, Artificial Sequence
  derived and/or modified CDS sequence (opt1) from hemagglutinin__InfluenzaA__ADD97441
augaaggccauccuggugguccuccuguacaccuucgccaccgcgaacgccgacacgcugugcaucggcuaccacgccaacaacagcaccgacaccguggacaccauccucgagaagaacgugacggucacccacuccgugaaccugcuggaggacaagcacaacgggaagcucugcaagcugcgcggcguggcgccccugcaccucgggaagugcaacaucgccggcuggauccuggggaacccggagugcgagagccuguccaccgccagcuccuggagcuacaucgucgagaccuccagcuccgacaacggcacgugcuaccccggcgacuucaucgacuacgaggagcuccgggagcagcugagcuccgugagcuccuucgagcgcuucgagaucuuccccaagaccagcuccuggcccaaccacgacagcaacaagggggugaccgccgccugcccgcacgccggcgcgaaguccuucuacaagaaccugaucuggcucgucaagaaggggaacagcuaccccaagcuguccaagagcuacaucaacgacaagggcaaggagauccuggugcucugggggauccaccaccccagcaccuccgccgaccagcagagccuguaccagaacgccgacgccuacguguucgucggcacgucccgguacagcaagaaguucaagcccgagaucgccauccgcccgaaggugcgggaccaggagggccgcaugaacuacuacuggacccugguggagcccggggacaagaucaccuucgaggcgaccggcaaccucgucgugccccgguacgccuucgccauggagcgcaacgccggguccggcaucaucaucagcgacacgcccgugcacgacugcaacacgaccugccagaccccgaagggcgccaucaacaccucccugcccuuccagaacauccaccccaucaccaucgggaagugccccaaguacgucaagagcaccaagcugcggcucgcgaccggccugcgcaacgugccguccauccagagccgggggcuguucggcgccaucgccggguucaucgagggcggcuggacggggaugguggacggcugguacggguaccaccaccagaacgagcagggcuccggguacgccgccgaccucaagagcacccagaacgcgaucgacgagaucaccaacaaggucaacuccgugaucgagaagaugaacacccaguucacggccgugggcaaggaguucaaccaccuggagaagcgcaucgagaaccugaacaagaaggucgacgacggcuuccucgacaucuggaccuacaacgccgagcugcuggugcuccuggagaacgagcggacccuggacuaccacgacagcaacgucaagaaccucuacgagaaggugcgcucccagcugaagaacaacgccaaggagaucgggaacggcugcuucgaguucuaccacaagugcgacaacacgugcauggagagcgugaagaacgggaccuacgacuaccccaaguacuccgaggaggccaagcugaaccgggaggagaucgacggcgucaagcucgagagcacccgcaucuaccagauccuggcgaucuacuccaccguggccagcagccuggugcucgucgugucccugggggccaucagcuucuggaugugcuccaacggcagccugcagugccggaucugcaucuga

SEQ ID NO: 68404 - RNA, 1701 nt, Artificial Sequence; identical to SEQ ID NO: 68397
  derived and/or modified CDS sequence (opt1) from hemagglutinin__InfluenzaA__ADD97451

SEQ ID NO: 68405 - RNA, 1701 nt, Artificial Sequence; identical to SEQ ID NO: 68397
  derived and/or modified CDS sequence (opt1) from hemagglutinin__InfluenzaA__ADD97461

SEQ ID NO: 68406 - RNA, 1701 nt, Artificial Sequence; identical to SEQ ID NO: 68245
  derived and/or modified CDS sequence (opt1) from hemagglutinin__InfluenzaA__ADD97471

SEQ ID NO: 68407 - RNA, 1701 nt, Artificial Sequence; identical to SEQ ID NO: 68245
  derived and/or modified CDS sequence (opt1) from hemagglutinin__InfluenzaA__ADD97481

SEQ ID NO: 68408 - RNA, 1701 nt, Artificial Sequence
  derived and/or modified CDS sequence (opt1) from hemagglutinin__InfluenzaA__ADD97491
augaaggccauccuggugguccuccuguacaccuucgccaccgcgaacgccgacacgcugugcaucggcuaccacgccaacaacagcaccgacaccguggacaccgugcucgagaagaacgucacggugacccacuccgugaaccugcuggaggacaagcacaacgggaagcucugcaagcugcgcggcgaggcgccccugcaccucgggaagugcaacaucgccggcuggauccuggggaacccggagugcgagagccuguccaccgccagcuccuggagcuacaucgucgagaccuccagcuccgacaacggcacgugcuaccccggcgacuucaucaacuacgaggagcuccgggagcagcugagcuccgugagcuccuucgagcgcuucgagaucuuccccaagaccagcuccuggcccaaccacgacagcaacaagggggugaccgccgccugcccgcacgccggcgcgaaguccuucuacaagaaccugaucuggcucgucaagaaggggaacagcuaccccaagcuguccaagagcuacaucaacgacaagggcaaggaggugcuggugcucugggggauccaccaccccagcaccuccgccgaccagcagagccuguaccagaacgccgacgccuacgucuucgugggcacgucccgguacagcaagaaguucaagcccgagaucgccauccgcccgaaggugcgggaccaggagggccgcaugaacuacuacuggacccuggucgagcccggggacaagaucaccuucgaggcgaccggcaaccucguggugccccgguacgccuucgccauggagcgcaacgccggguccggcaucaucaucagcgacacgcccguccacgacugcaacacgaccugccagaccccgaagggcgccaucaacaccucccugcccuuccagaacauccaccccaucaccaucgggaagugccccaaguacgucaagagcaccaagcugcggcucgcgaccggccugcgcaacgugccguccauccagagccgggggcuguucggcgccaucgccggguucaucgagggcggcuggacggggaugguggacggcugguacggguaccaccaccagaacgagcagggcuccggguacgccgccgaccucaagagcacccagaacgcgaucgacaagaucaccaacaaggugaacuccgugaucgagaagaugaacacccaguucacggccgucggcaaggaguucaaccaccuggagaagcgcaucgagaaccugaacaagaagguggacgacggcuuccucgacaucuggaccuacaacgccgagcugcugguccuccuggagaacgagcggacccuggacuaccacgacagcaacgugaagaaccucuacgagaaggugcgcucccagcugaagaacaacgccaaggagaucgggaacggcugcuucgaguucuaccacaagugcgacaacacgugcauggagagcgucaagaacgggaccuacgacuaccccaaguacuccgaggaggccaagcugaaccgggaggagaucgacggcgugaagcucgagagcacccgcaucuaccagauccuggcgaucuacuccaccguggccagcagccugguccucguggugucccugggggccaucagcuucuggaugugcuccaacggcagccugcagugccggaucugcaucuga

SEQ ID NO: 68409 - RNA, 1701 nt, Artificial Sequence; identical to SEQ ID NO: 68408
  derived and/or modified CDS sequence (opt1) from hemagglutinin__InfluenzaA__ADD97501

SEQ ID NO: 68410 - RNA, 1701 nt, Artificial Sequence; identical to SEQ ID NO: 67046
  derived and/or modified CDS sequence (opt1) from hemagglutinin__InfluenzaA__ADD97511

SEQ ID NO: 68411 - RNA, 1701 nt, Artificial Sequence
  derived and/or modified CDS sequence (opt1) from hemagglutinin__InfluenzaA__ADD97531
augaaggccauccuggugguccuccuguacaccuucgccaccgcgaacgccgacacgcugugcaucggcuaccacgccaacaacagcaccgacaccguggacaccauccucgagaagaacgugacggucacccacuccgugaaccugcuggaggacaagcacaacgggaagcucugcaagcugcgcggcguggcgccccugcaccucgggaagugcaacaucgccggcuggauccuggggaacccggagugcgagagccuguccaccgccagcuccuggagcuacaucgucgagaccuccagcuccgacaacggcacgugcuaccccggcgacuucaucgacuacgaggagcuccgggagcagcugagcuccgugagcuccuucgagcgcuucgagaucuuccccaagaccagcuccuggcccaaccacgacagcaacaagggggugaccgccgccugcccgcacgccggcgcgaaguccuucuacaagaaccugaucuggcucgucaagaaggggaacagcuaccccaagcuguccaagagcuacaucaacgacaagggcaaggagauccuggugcucugggggauccaccaccccagcaccaucgccgaccagcagucccuguaccagaacgccgacgccuacguguucgucggcacgagccgguacuccaagaaguucaagcccgagaucgccauccgcccgaaggugcgggaccaggagggccgcaugaaguacuacuggacccugguggagcccggggacaagaucaccuucgaggcgaccggcaaccucgucgugccccgguacgccuucgccauggagcgcaacgccgggagcggcaucaucaucuccgacacgcccgugcacaacugcaacacgaccugccagaccccgaagggcgccaucaacaccagccugcccuuccagaacauccaccccaucaccaucgggaagugccccaaguacgucaaguccaccaagcugcggcucgcgaccggccugcgcaacgugccgagcauccagucccgggggcuguucggcgccaucgccggguucaucgagggcggcuggacggggaugguggacggcugguacggguaccaccaccagaacgagcagggcagcggguacgccgccgaccucaaguccacccagaacgcgaucgacgagaucaccaacaaggucaacagcgugaucgagaagaugaacacccaguucacggccgugggcaaggaguucaaccaccuggagaagcgcaucgagaaccugaacaagaaggucgacgacggcuuccucgacaucuggaccuacaacgccgagcugcuggugcuccuggagaacgagcggacccuggacuaccacgacuccaacgucaagaaccucuacgagaaggugcgcagccagcugaagaacaacgccaaggagaucgggaacggcugcuucgaguucuaccacaagugcgacaacacgugcauggaguccgugaagaacgggaccuacgacuaccccaaguacagcgaggaggccaagcugaaccgggaggagaucgacggcgucaagcucgaguccacccgcaucuaccagauccuggcgaucuacagcaccguggccuccagccuggugcucgucgugagccugggggccaucuccuucuggaugugcagcaacggcucccugcagugccggaucugcaucuga

SEQ ID NO: 68412 - RNA, 1701 nt, Artificial Sequence
  derived and/or modified CDS sequence (opt1) from hemagglutinin__InfluenzaA__ADD97541
augaaggccauccuggugguccuccuguacaccuucgccaccgcgaacgccgacacgcugugcaucggcuaccacgccaacaacagcaccgacaccguggacaccgugcucgagaagaacgucacggugacccacuccgugaaccugcuggaggacaagcacaacgggaagcucugcaagcugcgcggcgucgcgccccugcaccucgggaagugcaacaucgccggcuggauccuggggaacccggagugcgagagccuguccaccgccagcuccuggagcuacaucguggagaccuccagcuccgacaacggcacgugcuaccccggcgacuucaucgacuacgaggagcuccgggagcagcugagcuccgugagcuccuucgagcgcuucgagaucuuccccaagaccagcuccuggcccaaccacgacagcaacaagggggucaccgccgccugcccgcacaccggcgccaaguccuucuacaagaaccugaucuggcucgugaagaaggggaacagcuaccccaagcuguccaagagcuacaucaacgacaagggcaaggaggugcugguccucugggggauccaccaccccagcacguccaccgaccagcagagccuguaccagaacgcggacgcccacguguucgugggcaccucccgguacagcaagaaguucaagcccgagaucgccauccgcccgaagguccgggaccaggagggccgcaugaacuacuacuggacccugguggagcccggggacaagaucacguucgaggccaccggcaaccucguggucccccgguacgccuucgcgauggagcgcaacgccggguccggcaucaucaucagcgacacccccgugcacgacugcaacaccacgugccagaccccgaagggcgccaucaacaccucccugcccuuccagaacauccaccccaucaccaucgggaagugccccaaguacgucaagagcacgaagcugcggcucgccaccggccugcgcaacaucccguccauccagagccgggggcuguucggcgccaucgcgggguucaucgagggcggcuggaccgggaugguggacggcugguacggguaccaccaccagaacgagcagggcuccggguacgccgccgaccucaagagcacccagaacgccaucgacgagaucacgaacaaggugaacuccgugaucgagaagaugaacacccaguucaccgccgucggcaaggaguucaaccaccuggagaagcgcaucgagaaccugaacaagaagguggacgacggcuuccucgacaucuggaccuacaacgcggagcugcugguccuccuggagaacgagcggacgcuggacuaccacgacagcaacgugaagaaccucuacgagaaggugcgcucccagcugaagaacaacgccaaggagaucgggaacggcugcuucgaguucuaccacaagugcgacaacacgugcauggagagcgucaagaacgggaccuacgacuaccccaaguacuccgaggaggccaagcugaaccgggaggagaucgacggcgugaagcucgagagcacccgcaucuaccagauccuggccaucuacuccaccguggccagcagccugguccucguggugucccugggggcgaucagcuucuggaugugcuccaacggcagccugcagugccggaucugcaucuga

SEQ ID NO: 68413 - RNA, 1701 nt, Artificial Sequence; identical to SEQ ID NO: 68245
  derived and/or modified CDS sequence (opt1) from hemagglutinin__InfluenzaA__ADD97551

SEQ ID NO: 68414 - RNA, 1701 nt, Artificial Sequence; identical to SEQ ID NO: 67857
  derived and/or modified CDS sequence (opt1) from hemagglutinin__InfluenzaA__ADD97561

SEQ ID NO: 68415 - RNA, 1701 nt, Artificial Sequence
  derived and/or modified CDS sequence (opt1) from hemagglutinin__InfluenzaA__ADD97571
augaaggccauccuggugguccuccuguacaccuucgccaccgcgaacgccgacacgcugugcaucggcuaccacgccaacaacagcaccgacaccguggacaccgugcucgagaagaacgucacggugacccacuccgugaaccugcuggaggacaagcacaacgggaagcucugcaagcugcgcggcgucgcgccccugcaccucgggaagugcaacaucgccggcuggauccuggggaacccggagugcgagagccuguccaccgcgagcuccuggagcuacaucguggagaccuccagcuccgacaacggcacgugcuaccccggcgacuucaucaacuacgaggagcuccgggagcagcugagcuccgugagccuguucgagcgcuucgagaucuuccccaagaccuccagcuggcccaaccacgacuccaacaagggggucaccgccgccugcccgcacgccggcgccaagagcuucuacaagaaccucaucuggcuggugaagaaggggaacuccuaccccaagcugagcaaguccuacaucaacgacaagggcaaggaggugcucguccugugggggauccaccaccccagcaccagcgccgaccagcagucccuguaccagaacgccgacgccuacguguucgugggcacgagccgguacuccaagaaguucaagcccgagaucgccauccgcccgaagguccgggaccaggagggccgcaugaacuacuacuggacccucguggagcccggggacaagaucaccuucgaggcgaccggcaaccugguggucccccgguacgccuucgccauggagcgcaacgccgggagcggcaucaucaucuccgacacgcccgugcacgacugcaacacgaccugccagaccccgaagggcgccaucaacaccagccugcccuuccagaacauccaccccaucaccaucgggaagugccccaaguacgugaaguccaccaagcuccggcuggcgaccggccugcgcaacgucccgagcauccagucccggggccucuucggggccaucgccggguucaucgagggcggcuggacggggaugguggacggcugguacggguaccaccaccagaacgagcagggcagcggguacgccgccgaccugaaguccacccagaacgcgaucgacaagaucaccaacaaggugaacagcgucaucgagaagaugaacacccaguucacggccgugggcaaggaguucaaccaccuggagaagcgcaucgagaaccucaacaagaaggucgacgacggcuuccuggacaucuggaccuacaacgccgagcugcucgugcugcuggagaacgagcggacccucgacuaccacgacuccaacgugaagaaccuguacgagaagguccgcagccagcugaagaacaacgccaaggagaucgggaacggcugcuucgaguucuaccacaagugcgacaacacgugcauggaguccgugaagaacgggaccuacgacuaccccaaguacagcgaggaggccaagcucaaccgggaggagaucgacggcgugaagcuggaguccacccgcaucuaccagauccuggcgaucuacagcaccgucgccuccagccucgugcugguggucagccugggggccaucuccuucuggaugugcagcaacggcucccuccagugccggaucugcaucuga

SEQ ID NO: 68416 - RNA, 1701 nt, Artificial Sequence; identical to SEQ ID NO: 66693
  derived and/or modified CDS sequence (opt1) from hemagglutinin__InfluenzaA__ADD97581

SEQ ID NO: 68417 - RNA, 1701 nt, Artificial Sequence; identical to SEQ ID NO: 66693
  derived and/or modified CDS sequence (opt1) from hemagglutinin__InfluenzaA__ADD97591

SEQ ID NO: 68418 - RNA, 1701 nt, Artificial Sequence; identical to SEQ ID NO: 66693
  derived and/or modified CDS sequence (opt1) from hemagglutinin__InfluenzaA__ADD97688

SEQ ID NO: 68419 - RNA, 1701 nt, Artificial Sequence; identical to SEQ ID NO: 68245
  derived and/or modified CDS sequence (opt1) from hemagglutinin__InfluenzaA__ADD97698

SEQ ID NO: 68420 - RNA, 1701 nt, Artificial Sequence; identical to SEQ ID NO: 68245
  derived and/or modified CDS sequence (opt1) from hemagglutinin__InfluenzaA__ADD97888

SEQ ID NO: 68421 - RNA, 1701 nt, Artificial Sequence
  derived and/or modified CDS sequence (opt1) from hemagglutinin__InfluenzaA__ADD97898
augaaggccauccuggugguccuccuguacaccuucgccaccgcgaacgccgacacgcugugcaucggcuaccacgccaacaacagcaccgacaccguggacaccgugcucgagaagaacgucacggugacccacuccgugaaccugcuggaggacaagcacaacgggaagcucugcaagcugcgcggcgucgcgccccugcaccucgggaagugcaacaucgccggcuggauccuggggaacccggagugcgagagccuguccaccgccagcuccuggagcuacaucguggagaccuccagcuccgacaacggcacgugcuaccccggcgacuucaucgacuacgaggagcuccgggagcagcugagcuccgugagcuccuucgagcgcuucgagaucuuccccaagaccagcuccuggcccaaccacgacagcaacaagggggucaccgccgccugcccgcacgccggcgcgaaguccuucuacaagaaccugaucuggcucgugaagaaggggaacagcuaccccaagcuguccaagagcuacaucaacgacaagggcaaggaggugcugguccucugggggauccaccaccccagcaccuccacggaccagcagagccuguaccagaacgccgacgccuacguguucgugggcaccucccgguacagcaagaaguucaagcccgagaucgccauccgcccgaagguccgggaccaggagggccgcaugaacuacuacuggacccugguggagcccggggacaagaucaccuucgaggccacgggcaaccucguggucccccgguacgcguucgccauggagcgcaacgccggguccggcaucaucaucagcgacacccccgugcacgacugcaacacgaccugccagaccccgaagggcgccaucaacaccucccugcccuuccagaacauccaccccaucaccaucgggaagugccccaaguacgucaagagcaccaagcugcggcucgccacgggccugcgcaacaucccguccauccagagccgggggcuguucggcgcgaucgccggguucaucgagggcggcuggaccgggaugguggacggcugguacggguaccaccaccagaacgagcagggcuccggguacgccgccgaccucaagagcacccagaacgccaucgacgagaucaccaacaaggugaacuccgugaucgagaagaugaacacgcaguucaccgcggucggcaaggaguucaaccaccuggagaagcgcaucgagaaccugaacaagaagguggacgacggcuuccucgacaucuggaccuacaacgccgagcugcugguccuccuggagaacgagcggacccuggacuaccacgacagcaacgugaagaaccucuacgagaaggugcgcucccagcugaagaacaacgccaaggagaucgggaacggcugcuucgaguucuaccacaagugcgacaacacgugcauggagagcgucaagaacgggaccuacgacuaccccaaguacuccgaggaggccaagcugaaccgggaggagaucgacggcgugaagcucgagagcacccgcaucuaccagauccuggccaucuacuccaccguggcgagcagccugguccucguggugucccugggggccaucagcuucuggaugugcuccaacggcagccugcagugccggaucugcaucuga

SEQ ID NO: 68422 - RNA, 1701 nt, Artificial Sequence; identical to SEQ ID NO: 67046
  derived and/or modified CDS sequence (opt1) from hemagglutinin__InfluenzaA__ADD97908

SEQ ID NO: 68423 - RNA, 1701 nt, Artificial Sequence; identical to SEQ ID NO: 67857
  derived and/or modified CDS sequence (opt1) from hemagglutinin__InfluenzaA__ADD97918

SEQ ID NO: 68424 - RNA, 1701 nt, Artificial Sequence
  derived and/or modified CDS sequence (opt1) from hemagglutinin__InfluenzaA__ADD97928
augaaggccauccuggugguccuccuguacaccuucgccaccgcgaacgccgacacgcugugcaucggcuaccacgccaacaacagcaccgacaccguggacaccgugcucgagaagaacgucacggugacccacuccgugaaccugcuggaggacaagcacaacgggaagcucugcaagcugcgcggcgucgcgccccugcaccucgggaagugcaacaucgccggcuggauccuggggaacccggagugcgagagccuguccaccgccagcuccuggagcuacaucguggagaccuccagcuccggcaacggcacgugcuaccccggggacuucaucgacuacgaggagcuccgggagcagcugagcuccgugagcuccuucgagcgcuucgagaucuuccccaagaccagcuccuggcccaaccacgacagcaacaagggcgucaccgccgccugcccgcacgccggggcgaaguccuucuacaagaaccugaucuggcucgugaagaagggcaacagcuaccccaagcuguccaagagcuacaucaacgacaaggggaaggaggugcugguccucuggggcauccaccaccccagcaccuccgccgaccagcagagccuguaccagaacgccgacgccuacguguucgugggcacgucccgguacagcaagaaguucaagcccgagaucgccauccgcccgaagguccgggaccaggaggggcgcaugaacuacuacuggacccugguggagcccggcgacaagaucaccuucgaggcgaccgggaaccucguggucccccgguacgccuucgccauggagcgcaacgccggcuccggcaucaucaucagcgacacgcccgugcacgacugcaacacgaccugccagaccccgaagggggccaucaacaccucccugcccuuccagaacauccaccccaucaccaucggcaagugccccaaguacgucaagagcaccaagcugcggcucgcgaccgggcugcgcaacgugccguccauccagagccggggccuguucggggccaucgccggcuucaucgagggcggguggacgggcaugguggacgggugguacggcuaccaccaccagaacgagcagggguccggcuacgccgccgaccucaagagcacccagaacgcgaucgacggcaucaccaacaaggugaacuccgucaucgagaagaugaacacccaguucacggccguggggaaggaguucaaccaccuggagaagcgcaucgagaaccugaacaagaaggucgacgacggcuuccucgacaucuggaccuacaacgccgagcugcuggugcuccuggagaacgagcggacccuggacuaccacgacagcaacgugaagaaccucuacgagaagguccgcucccagcugaagaacaacgccaaggagaucgggaacggcugcuucgaguuccaccacaagugcgacaacacgugcauggagagcgugaagaacgggaccuacgacuaccccaaguacuccgaggaggccaagcugaaccgggaggagaucgacggcgugaagcucgagagcacccgcaucuaccagauccuggcgaucuacuccaccgucgccagcagccuggugcucguggucucccugggcgccaucagcuucuggaugugcuccaacgggagccugcagugccggaucugcaucuga

SEQ ID NO: 68425 - RNA, 1701 nt, Artificial Sequence
  derived and/or modified CDS sequence (opt1) from hemagglutinin__InfluenzaA__ADD97938
augaaggccauccuggugguccuccuguacaccuucgccaccgcgaacgccgacacgcugugcaucggcuaccacgccaacaacagcaccgacaccguggacaccauccucgagaagaacgugacggucacccacuccgugaaccugcuggaggacaagcacaacgggaagcucugcaagcugcgcggcguggcgccccugcaccucgggaagugcaacaucgccggcuggauccuggggaacccggagugcgagagccuguccaccgccagcuccuggagcuacaucgucgagaccuccagcuccgacaacggcacgugcuaccccggcgacuucaucgacuacgaggagcuccgggagcagcugagcuccgugagcuccuucgagcgcuucgagaucuuccccaugaccagcuccuggcccaaccacgacagcaacaagggggugaccgccgccugcccgcacgccggcgcgaaguccuucuacaagaaccugaucuggcucgucaagaaggggaacagcuaccccaagcuguccaagagcuacaucaacgacaagggcaaggagauccuggugcucugggggauccaccaccccagcaccuccgccgaccagcagagccuguaccagaacgccgacgccuacguguucgucggcacgucccgguacagcaagaaguucaagcccgagaucgccauccgcccgaaggugcgggaccaggagggccgcaugaacuacuacuggacccugguggagcccggggacaagaucaccuucgaggcgaccggcaaccucgucgugccccgguacgccuucgccauggagcgcaacgccggguccggcaucaucaucagcgacacgcccgugcacgacugcaacacgaccugccagaccccgaagggcgccaucaacaccucccugcccuuccagaacauccaccccaucaccaucgggaagugccccaaguacgucaagagcaccaagcugcggcucgcgaccggccugcgcaacgugccguccauccagagccgggggcuguucggcgccaucgccggguucaucgagggcggcuggacggggaugguggacggcugguacggguaccaccaccagaacgagcagggcuccggguacgccgccgaccucaagagcacccagaacgcgaucgacgagaucaccaacaaggucaacuccgugaucgagaagaugaacacccaguucacggccgugggcaaggaguucaaccaccuggagaagcgcaucgagaaccugaacaagaaggucgacgacggcuuccucgacaucuggaccuacaacgccgagcugcuggugcuccuggagaacgagcggacccuggacuaccacgacagcaacgucaagaaccucuacgagaaggugcgcucccagcugaagaacaacgccaaggagaucgggaacggcugcuucgaguucuaccacaagugcgacaacacgugcauggagagcgugaagaacgggaccuacgacuaccccaaguacuccgaggaggccaagcugaaccgggaggagaucgacggcgucaagcucgagagcacccgcaucuaccagauccuggcgaucuacuccaccguggccagcagccuggugcucgucgugucccugggggccaucagcuucuggaugugcuccaacggcagccugcagugccggaucugcaucuga

SEQ ID NO: 68426 - RNA, 1701 nt, Artificial Sequence
  derived and/or modified CDS sequence (opt1) from hemagglutinin__InfluenzaA__ADD97948
augaaggccauccugcucgugcugcuguacaccuucgccaccgcgaacgccgacacgcucugcaucggcuaccacgccaacaacagcaccgacaccgucgacaccgugcuggagaagaacgugacggucacccacuccgugaaccugcucgaggacaagcacaacgggaagcugugcaagcugcgcggcguggcgccccuccaccuggggaagugcaacaucgccggcuggauccuggggaacccggagugcgagagccucuccaccgccagcuccuggagcuacaucgucgagaccuccagcuccgacaacggcacgugcuaccccggcgacuucaucgacuacgaggagcugcgggagcagcugagcuccgugagcuccuucgagcgcuucgagauguuccccaagaccagcuccuggcccaaccacgacagcaacaagggggugaccgccgccugcccgcacgccggcgcgaaguccuucuacaagaaccucaucuggcuggucaagaaggggaacagcuaccccaagcuguccaagagcuacaucaacgacaagggcaaggaggugcucgugcugugggggauccaccaccccagcaccuccgccgaccagcagagccuguaccagaacgccgacgccuacgucuucgugggcacgucccgguacagcaagaaguucaagcccgagaucgccauccgcccgaaggugcgggaccaggagggccgcaugaacuacuacuggacccucgucgagcccggggacaagaucaccuucgaggcgaccggcaaccugguggugccccgguacgccuucgccauggagcgcaacgccggguccggcaucaucaucagcgacacgcccguccacgacugcaacacgaccugccagaccccgaagggcgccaucaacaccucccugcccuuccagaacauccaccccaucaccaucgggaagugccccaaguacgucaagagcaccaagcuccggcuggcgaccggccugcgcaacgugccguccauccagagccgggggcuguucggcgccaucgccggguucaucgagggcggcuggacggggaugguggacggcugguacggguaccaccaccagaacgagcagggcuccggguacgccgccgaccucaagagcacccagaacgcgaucgacgagaucaccaacaaggugaacuccgugaucgagaagaugaacacccaguucacggccgucggcaaggaguucaaccaccuggagaagcgcaucgagaaccucaacaagaagguggacgacggcuuccuggacaucuggaccuacaacgccgagcugcucguccugcuggagaacgagcggacccucgacuaccacgacagcaacgugaagaaccuguacgagaaggugcgcucccagcugaagaacaacgccaaggagaucgggaacggcugcuucgaguucuaccacaagugcgacaacacgugcauggagagcgucaagaacgggaccuacgacuaccccaaguacuccgaggaggccaagcucaaccgggaggagaucgacggcgugaagcuggagagcacccgcaucuaccagauccuggcgaucuacuccaccguggccagcagccucguccugguggugucccugggggccaucagcuucuggaugugcuccaacggcagccuccagugccggaucugcaucuga

SEQ ID NO: 68427 - RNA, 1701 nt, Artificial Sequence
  derived and/or modified CDS sequence (opt1) from hemagglutinin__InfluenzaA__ADD97958
augaaggccauccuggugguccuccuguacaccuucgccaccgcgaacgccgacacgcugugcaucggcuaccacgccaacaacagcaccgacaccguggacaccgugcucgagaagaacgucacggugacccacuccgugaaccugcuggaggacaagcacaacgggaagcucugcaagcugcgcggcgucgcgccccugcaccucgggaagugcaacaucgccggcuggauccuggggaacccggagugcgagagccuguccaccgccagcuccuggagcuacaucguggagaccuccagcuccgacaacggcacgugcuaccccggcgacuucaucgacuacgaggagcuccgggagcagcugagcuccgugagcuccuucgagcgcuucgagaucuuccccaagaccagcuccuggcccaaccacgacagcaacaagggggucaccgccgccugcccgcacgccggcgcgaaguccuucuacaagaaccugaucuggcucgugaagaaggggaacagcuaccccaagcuguccaagagcuacaucaacgacaagggcaaggaggugcugguccucugggggauccaccaccccagcaccuccgccgaccagcagagccuguaccagaacgccgacgccuacguguucgugggcacgucccgguacagcaagaaguuccagcccgagaucgccauccgcccgaagguccgggaccaggagggccgcaugaacuacuacuggacccugcucgagcccggggacaagaucaccuucgaggcgaccggcaaccugguggugccccgguacgccuucgccauggagcgcaacgccggguccggcaucaucaucagcgacacgcccguccacgacugcaacacgaccugccagaccccgaagggcgccaucaacaccucccugcccuuccagaacauccaccccaucaccaucgggaagugccccaaguacgucaagagcaccaagcuccggcuggcgaccggccugcgcaacgugccguccauccagagccgggggcuguucggcgccaucgccggguucaucgagggcggcuggacggggaugguggacggcugguacggguaccaccaccagaacgagcagggcuccggguacgccgccgaccucaagagcacccagaacgcgaucgacgagaucaccaacaaggugaacuccgugaucgagaagaugaacacccaguucacggccgucggcaaggaguucaaccaccuggagaagcgcaucgagaaccucaacaagaagguggacgacggcuuccuggacaucuggaccuacaacgccgagcugcucguccugcuggagaacgagcggacccucgacuaccacgacagcaacgugaagaaccuguacgagaaggugcgcucccagcugaagaacaacgccaaggagaucgggaacggcugcuucgaguucuaccacaagugcgacaacacgugcauggagagcgucaagaacgggaccuacgacuaccccaaguacuccgaggaggccaagcucaaccgggaggagaucgacggcgugaagcuggagagcacccgcaucuaccagauccuggcgaucuacuccaccguggccagcagccucguccugguggugucccugggggccaucagcuucuggaugugcuccaacggcagccuccagugccggaucugcaucuga

SEQ ID NO: 68428 - RNA, 1701 nt, Artificial Sequence; identical to SEQ ID NO: 66693
  derived and/or modified CDS sequence (opt1) from hemagglutinin__InfluenzaA__ADD97968

SEQ ID NO: 68429 - RNA, 1701 nt, Artificial Sequence; identical to SEQ ID NO: 68421
  derived and/or modified CDS sequence (opt1) from hemagglutinin__InfluenzaA__ADD97978

SEQ ID NO: 68430 - RNA, 1701 nt, Artificial Sequence; identical to SEQ ID NO: 68375
  derived and/or modified CDS sequence (opt1) from hemagglutinin__InfluenzaA__ADD97988

SEQ ID NO: 68431 - RNA, 1701 nt, Artificial Sequence
  derived and/or modified CDS sequence (opt1) from hemagglutinin__InfluenzaA__ADD97998
augaaggccauccuggugguccuccuguacaccuucgccaccgcgaacgccgacacgcugugcaucggcuaccacgccaacaacagcaccgacaccguggacaccgugcucgagaagaacgucacggugacccacuccgugaaccugcuggaggacaagcacaacgggaagcucugcaagcugcgcggcgucgcgccccugcaccucgggaagugcaacaucgccggcuggauccuggggaacccggagugcgagagccuguccaccgccagcuccuggagcuacaucguggagaccuccagcuccgacaacggcacgugcuaccccggcgacuucaucgacuacgaggagcuccgggagcagcugagcuccgugagcuccuucgagcgcuucgagaucuuccccaaggccagcuccuggcccaaccacgacagcaacaagggggucaccgccgccugcccgcacgcgggcgccaaguccuucuacaagaaccugaucuggcucgugaagaaggggaacagcuaccccaagcuguccaagagcuacaucaacgacaagggcaaggaggugcugguccucugggggauccaccaccccagcaccuccgccgaccagcagagccuguaccagaacgccgacgccuacguguucgugggcaccucccgguacagcaagaaguucaagcccgagaucgcgauccgcccgaagguccgggaccaggagggccgcaugaacuacuacuggacgcugguggagcccggggacaagaucaccuucgaggccaccggcaaccucguggucccccgguacgccuucgagauggagcgcaacgccggguccggcaucaucaucagcgacacccccgugcacgacugcaacacgaccugccagaccccgaagggcgccaucaacaccucccugcccuuccagaacauccaccccaucacgaucgggaagugccccaaguacgucaagagcaccaagcugcggcucgcgaccggccugcgcaacgugccguccauccagagccgggggcuguucggcgccaucgccggguucaucgagggcggcuggaccgggaugguggacggcugguacggguaccaccaccagaacgagcagggcuccggguacgccgccgaccucaagagcacgcagaacgcgaucgacgagaucaccaacaaggugaacuccgucaucgagaagaugaacacccaguucaccgccgugggcaaggaguucaaccaccuggagaagcgcaucgagaaccugaacaagaaggucgacgacggcuuccucgacaucuggacguacaacgccgagcugcuggugcuccuggagaacgagcggacccuggacuaccacgacagcaacgugaagaaccucuacgagaagguccgcucccagcugaagaacaacgccaaggagaucgggaacggcugcuucgaguucuaccacaagugcgacaacacgugcauggagagcgugaagaacgggaccuacgacuaccccaaguacuccgaggaggccaagcugaaccgggaggagaucgacggcgugaagcucgagagcacccgcaucuaccagauccuggcgaucuacuccaccgucgccagcagccuggugcucguggucucccugggggccaucagcuucuggaugugcuccaacggcagccugcagugccggaucugcaucuga

SEQ ID NO: 68432 - RNA, 1701 nt, Artificial Sequence; identical to SEQ ID NO: 68245
  derived and/or modified CDS sequence (opt1) from hemagglutinin__InfluenzaA__ADD98008

SEQ ID NO: 68433 - RNA, 1701 nt, Artificial Sequence
  derived and/or modified CDS sequence (opt1) from hemagglutinin__InfluenzaA__ADD98018
augaaggccauccuggugguccuccuguacaccuucgccaccgcgaacgccgacacgcugugcaucggcuaccacgccaacaacagcaccgacaccguggacaccgugcucgagaagaacgucacggugacccacuccgugaaccugcuggaggacaagcacaacgggaagcucugcaagcugcgcggcgucgcgccccugcaccucgggaagugcaacaucgccggcuggauccuggggaacccggagugcgagagccuguccaccgccagcuccuggagcuacaucguggagaccuccagcuccgacaacggcacgugcuaccccggcgacuucaucgacuacgaggagcuccgggagcagcugagcuccgugagcuccuucgagcgcuucgagaucuuccccaagaccagcuccuggcccaaccacgacagcaacaagggggucaccgccgccugcccgcacgccggcgcgaaguccuucuacaagaaccugaucuggcucgugaagaaggggaacagcuaccccaagcuguccaagagcuacaucaacgacaagggcaaggagauccuggugcucugggggauccaccaccccagcaccuccgccgaccagcagagccuguaccagaacgccgacgccuacgucuucgugggcacgucccgguacagcaagaaguucaagcccgagaucgccacccgcccgaaggugcgggagcaggagggccgcaugaacuacuacuggacccuggucgagcccggggacaagaucaccuucgaggcgacgggcaaccucguggugccccgguacgccuucgccauggagcgcaacgccggguccggcaucaucaucagcgacacccccguccacgacugcaacacgaccugccagaccccgaagggcgccaucaacaccucccugcccuuccagaacauccacagcaucaccaucgggaagugccccaaguacgugaaguccaccaagcugcggcucgcgacgggccugcgcaacgugcccagcauccagucccgggggcuguucggcgccaucgccggguucaucgagggcggcuggaccgggauggucgacggcugguacggguaccaccaccagaacgagcagggcagcggguacgccgccgaccucaaguccacccagaacgcgaucgacgagaucaccaacaaggugaacagcgugaucgagaagaugaacacgcaguucaccgccgucggcaaggaguucaaccaccuggagaagcgcaucgagaaccugaacaagaagguggacgacggcuuccucgacaucuggaccuacaacgccgagcugcugguccuccuggagaacgagcggacccuggacuaccacgacuccaacgugaagaaccucuacgagaaggugcgcagccagcugaagaacaacgccaaggagaucgggaacggcugcuucgaguucuaccacaagugcgacaacacgugcauggaguccgucaagaacgggaccuacgacuacccgaaguacagcgaggaggccaagcugaaccgggaggagaucgacggcgugaagcucgaguccacccgcaucuaccagauccuggcgaucuacagcaccguggccagcucccugguccucguggugagccugggggccaucuccuucuggaugugcagcaacggcucccugcagugccggaucugcaucuga

SEQ ID NO: 68434 - RNA, 1701 nt, Artificial Sequence; identical to SEQ ID NO: 68397
  derived and/or modified CDS sequence (opt1) from hemagglutinin__InfluenzaA__ADD98028

SEQ ID NO: 68435 - RNA, 1701 nt, Artificial Sequence
  derived and/or modified CDS sequence (opt1) from hemagglutinin__InfluenzaA__ADD98038
augaaggccauccuggugguccuccuguacaccuucgccaccgcgaacgccgacacgcugugcaucggcuaccacgccaacaacagcaccgacaccguggacaccgugcucgagaagaacgucacggugacccacuccgugaaccugcuggaggacaagcacaacgggaagcucugcaagcugcgcggcgucgcgccccugcaccucgggaagugcaacaucgccggcuggauccuggggaacccggagugcgagagcaucuccaccgccagcuccuggagcuacaucguggagaccuccagcuccgacaacggcacgugcuaccccggcgacuucaucgacuacgaggagcugcgggagcagcucagcuccgugagcuccuucgagcgcuucgagaucuuccccaaggccagcuccuggcccaaccacgacagcaacaagggggucaccgccgccugcccgcacgcgggcgccaaguccuucuacaagaaccugaucuggcuggugaagaaggggaacagcuaccccaagcucuccaagagcuacaucaacgacaagggcaaggaggugcugguccugugggggauccaccaccccagcaccuccgccgaccagcagagccucuaccagaacgccgacgccuacguguucgugggcaccucccgguacagcaagaaguucaagcccgagaucgcgauccgcccgaagguccgggaccaggagggccgcaugaacuacuacuggacgcugguggagcccggggacaagaucaccuucgaggccaccggcaaccugguggucccccgguacgccuucgagauggagcgcaacgccggguccggcaucaucaucagcgacacccccgugcacgacugcaacacgaccugccagaccccgaagggcgccaucaacaccucccuccccuuccagaacauccaccccaucacgaucgggaagugccccaaguacgucaagagcaccaagcugcggcuggcgaccggccuccgcaacgugccguccauccagagccgggggcuguucggcgccaucgccggguucaucgagggcggcuggaccgggaugguggacggcugguacggguaccaccaccagaacgagcagggcuccggguacgccgccgaccucaagagcacgcagaacgcgaucgacgagaucaccaacaaggugaacuccgucaucgagaagaugaacacccaguucaccgccgugggcaaggaguucaaccaccuggagaagcgcaucgagaaccugaacaagaaggucgacgacggcuuccuggacaucuggacguacaacgccgagcuccuggugcugcucgagaacgagcggacccuggacuaccacgacagcaacgugaagaaccuguacgagaagguccgcucccagcucaagaacaacgccaaggagaucgggaacggcugcuucgaguucuaccacaagugcgacaacacgugcauggagagcgugaagaacgggaccuacgacuaccccaaguacuccgaggaggccaagcugaaccgggaggagaucgacggcgugaagcuggagagcacccgcaucuaccagauccucgcgaucuacuccaccgucgccagcagccuggugcugguggucucccucggggccaucagcuucuggaugugcuccaacggcagccugcagugccggaucugcaucuga

SEQ ID NO: 68436 - RNA, 1701 nt, Artificial Sequence; identical to SEQ ID NO: 68421
  derived and/or modified CDS sequence (opt1) from hemagglutinin__InfluenzaA__ADD98048

SEQ ID NO: 68437 - RNA, 1701 nt, Artificial Sequence; identical to SEQ ID NO: 66693
  derived and/or modified CDS sequence (opt1) from hemagglutinin__InfluenzaA__ADD98058

SEQ ID NO: 68438 - RNA, 1701 nt, Artificial Sequence; identical to SEQ ID NO: 66693
  derived and/or modified CDS sequence (opt1) from hemagglutinin__InfluenzaA__ADD98068

SEQ ID NO: 68439 - RNA, 1701 nt, Artificial Sequence; identical to SEQ ID NO: 66935
  derived and/or modified CDS sequence (opt1) from hemagglutinin__InfluenzaA__ADD98078

SEQ ID NO: 68440 - RNA, 1701 nt, Artificial Sequence
  derived and/or modified CDS sequence (opt1) from hemagglutinin__InfluenzaA__ADD98098
augaaggccauccuggugguccuccuguacaccuucgccaccgcgaacgccgacacgcugugcaucggcuaccacgccaacaacagcaccgacaccguggacaccauccucgagaagaacgugacggucacccacuccgugaaccugcuggaggacaagcacaacgggaagcucugcaagcugcgcggcguggcgccccugcaccucgggaagugcaacaucgccggcuggauccuggggaacccggagugcgagagccuguccaccgccagcuccuggagcuacaucgucgagaccuccagcuccgacaacggcacgugcuaccccggcgacuucaucgacuacgaggagcuccgggagcagcugagcuccgugagcuccuucgagcgcuucgagaucuuccccaagaccagcuccuggcccaaccacgacagcaacaagggggugaccgccgccugcccgcacgccggcgcgaaguccuucuacaagaaccugaucuggcucgucaagaaggggaacagcuaccccaagcuguccaagagcuacaucaacgacaagggcaaggaggugcuggugcucugggggauccaccaccccagcaccuccagcgaccagcagucccuguaccagaacgccgacgccuacgucuucgugggcacgagccgguacuccaagaaguucaagcccgagaucgccauccgcccgaaggugcgggaccaggagggccgcaugaacuacuacuggacccuggucgagcccggggacaagaucaccuucgaggccaccggcaaccucguggugccccgguacgcguucgccgucgagcgcaacgccgggagcggcaucaucaucuccgacacgcccgugcacgacugcaacacgaccugccagaccccgaagggcgccaucaacaccagccugcccuuccagaacauccaccccaucaccaucgggaagugccccaaguacgugaaguccaccaagcugcggcucgccaccggccugcgcaacgucccgagcauccagucccgggggcuguucggcgcgaucgccggguucaucgagggcggcuggacggggaugguggacggcugguacggguaccaccaccagaacgagcagggcagcggguacgccgccgaccucaaguccacccagaacgccaucgacgagaucaccaacaaggugaacagcgucaucgagaagaugaacacccaguucacggcggugggcaaggaguucaaccaccuggagaagcgcaucgagaaccugaacaagaaggucgacgacggcuuccucgacaucuggaccuacaacgccgagcugcuggugcuccuggagaacgagcggacccuggacuaccacgacuccaacgugaagaaccucuacgagaagguccgcagccagcugaagaacaacgccaaggagaucgggaacggcugcuucgaguucuaccacaagugcgacaacacgugcauggaguccgugaagaacgggaccuacgacuaccccaaguacagcgaggaggccaagcugaaccgggaggagaucgacggcgugaagcucgaguccacccgcaucuaccagauccuggccaucuacagcaccgucgcgagcucccuggugcucguggucagccugggggccaucuccuucuggaugugcagcaacggcucccugcagugccggaucugcaucuga

SEQ ID NO: 68441 - RNA, 1701 nt, Artificial Sequence; identical to SEQ ID NO: 68408
  derived and/or modified CDS sequence (opt1) from hemagglutinin__InfluenzaA__ADD98118

SEQ ID NO: 68442 - RNA, 1701 nt, Artificial Sequence; identical to SEQ ID NO: 68408
  derived and/or modified CDS sequence (opt1) from hemagglutinin__InfluenzaA__ADD98128

SEQ ID NO: 68443 - RNA, 1701 nt, Artificial Sequence
  derived and/or modified CDS sequence (opt1) from hemagglutinin__InfluenzaA__ADD98138
augaaggccauccuggugguccuccuguacaccuucgccaccgcgaacgccgacacgcugugcaucggcuaccacgccaacaacagcaccgacaccguggacaccgugcucgagaagaacgucacggugacccacuccgugaaccugcuggaggacaagcacaacgggaagcucugcaagcugcgcggcgucgcgccccugcaccucgggaagugcaacaucgccggcuggauccuggggaacccggagugcgagagccuguccaccgccagcuccuggagcuacaucguggagaccuccagcuccgacaacggcacgugcuaccccggcgacuucaucaacuacgaggagcuccgggagcagcugagcuccgugagcuccuucgagcgcuucgagaucuuccccaagaccagcuccuggcccaaccacgacagcaacaagggggucaccgccgccugcccgcacgccggcgcgaaguccuucuacaagaaccugaucuggcucgugaagaaggggaacagcuaccccaagcuguccaagagcuacaucaacgacaagggcaaggaggugcugguccucugggggauccaccaccccagcaccuccacggaccagcagagccuguaccagaacgccgacgccuacguguucgugggcaccucccgguacagcaagaaguucaagcccgagaucgccauccgcccgaagguccgggaccaggagggccgcaugaacuacuacuggacccugguggagcccggggacaagaucaccuucgaggccacgggcaaccucguggucccccgguacgcguucgccauggagcgcaacaccggguccggcaucaucaucagcgacacccccgugcacgacugcaacaccacgugccagaccccgaacggcgccaucaacaccucccugcccuuccagaacauccaccccaucaccaucgggaagugccccaaguacgucaagagcacgaagcugcggcucgccaccggccugcgcaacgugccguccauccagagccgggggcuguucggcgccaucgcgggguucaucgagggcggcuggaccgggaugguggacggcugguacggguaccaccaccagaacgagcagggcuccggguacgccgccgaccucaagagcacccagaacgccaucgacaagaucacgaacaaggugaacuccgucaucgagaagaugaacacccaguucaccgccgugggcaaggaguucaaccaccuggagaagcgcaucgagaaccugaacaagaaggucgacgacggcuuccucgacaucuggaccuacaacgcggagcugcuggugcuccuggagaacgagcggacgcuggacuaccacgacagcaacgugaagaaccucuacgagaagguccgcucccagcugaagaacaacgccaaggagaucgggaacggcugcuucgaguucuaccacaagugcgacaacacgugcauggagagcgugaagaacgggaccuacgacuaccccaaguacuccgaggaggccaagcugaaccgggaggagaucgacggcgugaagcucgagagcacccgcaucuaccagauccuggccaucuacuccaccgucgccagcagccuggugcucguggucucccugggggcgaucagcuucuggaugugcuccaacggcagccugcagugccggaucugcaucuga

SEQ ID NO: 68444 - RNA, 1701 nt, Artificial Sequence
  derived and/or modified CDS sequence (opt1) from hemagglutinin__InfluenzaA__ADD98148
augaaggccauccuggugguccuccuguacaccuucgccaccgcgaacgccgacacgcugugcaucggcuaccacgccaacaacagcaccgacaccguggacaccgugcucgagaagaacgucacggugacccacuccgugaaccugcuggaggacaagcacaacgggaagcucugcaagcugcgcggcgucgcgccccugcaccucgggaagugcaacaucgccggcuggauccuggggaacccggagugcgagagccuguccaccgccagcuccuggagcuacaucguggagaccuccagcuccgacaacggcacgugcuaccccggcgacuucaucgacuacgaggagcuccgggagcagcugagcuccgugagcuccuucgagcgcuucgagaucuuccccaagaccagcuccuggcccaaccacgacagcaacaagggggucaccgccgccugcccgcacgccggcgcgaaguccuucuacaagaaccugaucuggcucgugaagaaggggaacagcuaccccaagcuguccaagagcuacaucaacgacaagggcaaggaggugcugguccucugggggauccaccaccccagcaccuccgccgaccagcagagccuguaccagaacgccgacgccuacguguucgugggcacgucccgguacagcaagaaguucaagcccgagaucgccauccgcccgaagguccgggaccaggagggccgcaugaacuacuacuggacccugguggagcccggggacaagaucaccuucgaggcgaccggcaaccucguggucccccgguacgccuucgccauggagcgcaacgccggguccggcaucuucaucagcgacacgcccgugcacgacugcaacacgaccugccagaccccgaagggcgccaucaacaccucccugcccuuccagaacauccaccccaucaccaucgggaagugccccaaguacgucaagagcaccaagcugcggcucgcgaccggccugcgcaacgugccguccauccagagccgggggcuguucggcgccaucgccggguucaucgagggcggcuggacggggaugguggacggcugguacggguaccaccaccagaacgagcagggcuccggguacgccgccgaccucaagagcacccagaacgcgaucgacaagaucaccaacaaggugaacuccgucaucgagaagaugaacacccaguucacggccgugggcaaggaguucaaccaccuggagaagcgcaucgagaaccugaacaagaaggucgacgacggcuuccucgacaucuggaccuacaacgccgagcugcuggugcuccuggagaacgagcggacccuggacuaccacgacagcaacgugaagaaccucuacgagaagguccgcucccagcugaagaacaacgccaaggagaucgggaacggcugcuucgaguucuaccacaagugcgacaacacgugcauggagagcgugaagaacgggaccuacgacuaccccaaguacuccgaggaggccaagcugaaccgggaggagaucgacggcgugaagcucgagagcacccgcaucuaccagauccuggcgaucuacuccaccgucgccagcagccuggugcucguggucucccugggggccaucagcuucuggaugugcuccaacggcagccugcagugccggaucugcaucuga

SEQ ID NO: 68445 - RNA, 1701 nt, Artificial Sequence
  derived and/or modified CDS sequence (opt1) from hemagglutinin__InfluenzaA__ADD98158
augaaggccauccuggugguccuccuguacaccuucgccaccgcgaacgccgacacgcugugcaucggcuaccacgccaacaacagcaccgacaccguggacaccgugcucgagaagaacgucacggugacccacuccgugaaccugcuggaggacaagcacaacgggaagcucugcgagcugcgcggcgucgcgccccugcaccucgggaagugcaacaucgccggcuggauccuggggaacccggagugcgagagccuguccaccgccagcuccuggagcuacaucguggagaccuccagcuccgacaacggcacgugcuaccccggcgacuucaucgacuacgaggagcuccgggagcagcugagcuccgugagcuccuucgagcgcuucgagaucuuccccaagaccagcuccuggcccaaccacgacagcaacaagggggucaccgccgccugcccgcacgccggcgcgaaguccuucuacaagaaccugaucuggcucgugaagaaggggaacagcuaccccaagcuguccaagagcuacaucaacgacaagggcaaggaggugcugguccucugggggauccaccaccccagcaccuccgccgaccagcagagccuguaccagaacgccgacgccuacguguucgugggcacgucccgguacagcaagaaguucaagcccgagaucgccauccgcccgaagguccgggaccaggagggccgcaugaacuacuacuggacccugguggagcccggggacaagaucaccuucgaggcgaccggcaaccucgugaucccccgguacgccuucgccauggagcgcaacgccggguccggcaucaucaucagcgacacgcccguccacgacugcaacacgaccugccagaccccgaagggcgccaucaacaccucccugcccuuccagaacauccaccccaucaccaucgggaagugccccaaguacgucaagagcaccaagcugcggcucgcgaccggccugcgcaacgugccguccauccagagccgggggcuguucggcgccaucgccggguucaucgagggcggcuggacggggaugguggacggcugguacggguaccaccaccagaacgagcagggcuccggguacgccgccgaccucaagagcacccagaacgcgaucgacaagaucaccaacaaggugaacuccgugaucgagaagaugaacacccaguucacggccgucggcaaggaguucaaccaccuggagaagcgcaucgagaaccugaacaagaagguggacgacggcuuccucgacaucuggaccuacaacgccgagcugcugguccuccuggagaacgagcggacccuggacuaccacgacagcaacgugaagaaccucuacgagaaggugcgcucccagcugaagaacaacgccaaggagaucgggaacggcugcuucgaguucuaccacaagugcgacaacacgugcauggagagcgucaagaacgggaccuacgacuaccccaaguacuccgaggaggccaagcugaaccgggaggagaucgacggcgugaagcucgagagcacccgcaucuaccagauccuggcgaucuacuccaccguggccagcagccugguccucguggugucccugggggccaucagcuucuggaugugcuccaacggcagccugcagugccggaucugcaucuga

SEQ ID NO: 68446 - RNA, 1701 nt, Artificial Sequence
  derived and/or modified CDS sequence (opt1) from hemagglutinin__InfluenzaA__ADD98168
augaaggccauccuggugguccuccuguacaccuucgccaccgcgaacgccgacacgcugugcaucggcuaccacgccaacaacagcaccgacaccguggacaccgugcucgagaagaacgucacggugacccacuccaucaacauccuggaggacaagcacaacgggaagcugugcaagcuccgcggcguggcgccccugcaccuggggaagugcaacaucgccggcuggauccucgggaacccggagugcgagagccuguccaccgccagcuccuggagcuacaucgucgagaccuccagcuccgacaacggcacgugcuaccccggcgacuucaucgacuacgaggagcugcgggagcagcucagcuccgugagcuccuucgagcgcuucgagaucuuccccaagaccagcuccuggcccaaccacgacagcaacaagggggugaccgccgccugcccgcacgccggcgcgaaguccuucuacaagaaccugaucuggcuggucaagaaggggaacagcuaccccaagcucuccaagagcuacaucaacgacaagggcaaggaggugcuggugcugugggggauccaccaccccagcaccuccgccgaccagcagagccucuaccagaacgccgacgccuacgucuucgugggcacgucccgguacagcaagaaguucaagcccgagaucgccauccgcccgaaggugcgggaccaggagggccgcaugaacuacuacuggacccuggucgagcccggggacaagaucaccuucgaggcgaccggcaaccugguggugcccaaguacgccuucgccauggagcggaacgccggguccggcaucaucaucagcgacacgcccguccacgacugcaacacgaccugccagaccccgaagggcgccaucaacaccucccuccccuuccagaacauccaccccaucaccaucgggaagugccccaaguacgucaagagcaccaagcugcgccuggcgaccggccuccggaacgugccguccauccagagccgcgggcuguucggcgccaucgccggguucaucgagggcggcuggacggggaugguggacggcugguacggguaccaccaccagaacgagcagggcuccggguacgccgccgaccucaagagcacccagaacgcgaucgacgagaucaccaacaaggugaacuccgugaucgagaagaugaacacccaguucacggccgucggcaaggaguucaaccaccuggagaagcggaucgagaaccugaacaagaagguggacgacggcuuccuggacaucuggaccuacaacgccgagcuccugguccugcucgagaacgagcgcacccuggacuaccacgacagcaacgugaagaaccuguacgagaaggugcggucccagcucaagaacaacgccaaggagaucgggaacggcugcuucgaguucuaccacaagugcgacaacacgugcauggagagcgucaagaacgggaccuacgacuaccccaaguacuccgaggaggccaagcugaaccgcgaggagaucgacggcgugaagcuggagagcacccggaucuaccagauccucgcgaucuacuccaccguggccagcagccugguccugguggugucccucggggccaucagcuucuggaugugcuccaacggcagccugcagugccgcaucugcaucuga

SEQ ID NO: 68447 - RNA, 1701 nt, Artificial Sequence; identical to SEQ ID NO: 67865
  derived and/or modified CDS sequence (opt1) from hemagglutinin__InfluenzaA__ADD98188

SEQ ID NO: 68448 - RNA, 1701 nt, Artificial Sequence
  derived and/or modified CDS sequence (opt1) from hemagglutinin__InfluenzaA__ADD98198
augaaggccauccuggugguccuccuguacaccuucgccaccgcgaacgccgacacgcugugcaucggcuaccacgccaacaacagcaccgacaccguggacaccgugcucgagaagaacgucacggugacccacuccgugaaccugcuggaggacaagcacaacgggaagcucugcaagcugcgcggcgucgcgccccugcaccucgggaagugcaacaucgccggcuggauccuggggaacccggagugcgagagccuguccaccgccagcuccuggagcuacaucguggagaccuccagcuccgacaacggcacgugcuaccccggcgacuucaucgacuacgaggagcuccgggagcagcugagcuccgugagcuccuucgagcgcuucgagaucuuccccaagaccagcuccuggcccaaccacgacagcaacaagggggucaccgccgccugcccgcacgccggcgcgaaguccuucuacaagaaccugaucuggcucgugaagaaggggaacagcuaccccaagcuguccaagagcuacaucaacgacaagggcaaggaggugcugguccucugggggauccaccaccccagcaccuccgccgaccagcagagccuguaccagaacgccgacgccuacguguucgugggcacgucccgguacagcaagaaguucaagcccgagaucgccauccgcccgaagguccgggaccaggagggccgcaugaacuacuacuggacccugguggagcccggggacaagaucaccuucgaggcgaccggcaaccucguggucccccgguacgccuucgccauggagcgcaacgccggguccggcaucaucaucagcgacacgcccgugcacgacugcaacacgaccugccagaccccgaagggcgccaucaacaccucccugcccuuccagaacauccaccccaucaccaucgggaagugccccaaguacgucaagagcaccaagaugcggcuggcgaccggccuccgcaacgugccguccauccagagccgggggcuguucggcgccaucgccggguucaucgagggcggcuggacggggaugguggacggcugguacggguaccaccaccagaacgagcagggcuccggguacgccgccgaccucaagagcacccagaacgcgaucgacgagaucaccaacaaggugaacuccgucaucgagaagaugaacacccaguucacggccgugggcaaggaguucaaccaccuggagaagcgcaucgagaaccugaacaagaaggucgacgacggcuuccuggacaucuggaccuacaacgccgagcuccuggugcugcucgagaacgagcggacccuggacuaccacgacagcaacgugaagaaccuguacgagaagguccgcucccagcucaagaacaacgccaaggagaucgggaacggcugcuucgaguucuaccacaagugcgacaacacgugcauggagagcgugaagaacgggaccuacgacuaccccaaguacuccgaggaggccaagcugaaccgggaggagaucgacggcgugaagcuggagagcacccgcaucuaccagauccucgcgaucuacuccaccgucgccagcagccuggugcugguggucucccucggggccaucagcuucuggaugugcuccaacggcagccugcagugccggaucugcaucuga

SEQ ID NO: 68449 - RNA, 1701 nt, Artificial Sequence; identical to SEQ ID NO: 66693
  derived and/or modified CDS sequence (opt1) from hemagglutinin__InfluenzaA__ADD98208

SEQ ID NO: 68450 - RNA, 1701 nt, Artificial Sequence; identical to SEQ ID NO: 66873
  derived and/or modified CDS sequence (opt1) from hemagglutinin__InfluenzaA__ADE20321

SEQ ID NO: 68451 - RNA, 1701 nt, Artificial Sequence; identical to SEQ ID NO: 66873
  derived and/or modified CDS sequence (opt1) from hemagglutinin__InfluenzaA__ADE20331

SEQ ID NO: 68452 - RNA, 1701 nt, Artificial Sequence; identical to SEQ ID NO: 66873
  derived and/or modified CDS sequence (opt1) from hemagglutinin__InfluenzaA__ADE20341

SEQ ID NO: 68453 - RNA, 1701 nt, Artificial Sequence; identical to SEQ ID NO: 68281
  derived and/or modified CDS sequence (opt1) from hemagglutinin__InfluenzaA__ADE20351

SEQ ID NO: 68454 - RNA, 1701 nt, Artificial Sequence; identical to SEQ ID NO: 66873
  derived and/or modified CDS sequence (opt1) from hemagglutinin__InfluenzaA__ADE20375

SEQ ID NO: 68455 - RNA, 1701 nt, Artificial Sequence; identical to SEQ ID NO: 68281
  derived and/or modified CDS sequence (opt1) from hemagglutinin__InfluenzaA__ADE20388

SEQ ID NO: 68456 - RNA, 1701 nt, Artificial Sequence; identical to SEQ ID NO: 66873
  derived and/or modified CDS sequence (opt1) from hemagglutinin__InfluenzaA__ADE20628

SEQ ID NO: 68457 - RNA, 1701 nt, Artificial Sequence; identical to SEQ ID NO: 68281
  derived and/or modified CDS sequence (opt1) from hemagglutinin__InfluenzaA__ADE20638

SEQ ID NO: 68458 - RNA, 1701 nt, Artificial Sequence; identical to SEQ ID NO: 66873
  derived and/or modified CDS sequence (opt1) from hemagglutinin__InfluenzaA__ADE20648

SEQ ID NO: 68459 - RNA, 1701 nt, Artificial Sequence; identical to SEQ ID NO: 66873
  derived and/or modified CDS sequence (opt1) from hemagglutinin__InfluenzaA__ADE20658

SEQ ID NO: 68460 - RNA, 1701 nt, Artificial Sequence; identical to SEQ ID NO: 68281
  derived and/or modified CDS sequence (opt1) from hemagglutinin__InfluenzaA__ADE20668

SEQ ID NO: 68461 - RNA, 1701 nt, Artificial Sequence; identical to SEQ ID NO: 68281
  derived and/or modified CDS sequence (opt1) from hemagglutinin__InfluenzaA__ADE20678

SEQ ID NO: 68462 - RNA, 1701 nt, Artificial Sequence; identical to SEQ ID NO: 66873
  derived and/or modified CDS sequence (opt1) from hemagglutinin__InfluenzaA__ADE20688

SEQ ID NO: 68463 - RNA, 1701 nt, Artificial Sequence; identical to SEQ ID NO: 66873
  derived and/or modified CDS sequence (opt1) from hemagglutinin__InfluenzaA__ADE20708

SEQ ID NO: 68464 - RNA, 1701 nt, Artificial Sequence; identical to SEQ ID NO: 66873
  derived and/or modified CDS sequence (opt1) from hemagglutinin__InfluenzaA__ADE20718

SEQ ID NO: 68465 - RNA, 1701 nt, Artificial Sequence
  derived and/or modified CDS sequence (opt1) from hemagglutinin__InfluenzaA__ADE20728
augaaggccauccuggugguccuccuguacaccuucgccaccgcgaacgccgacacgcugugcaucggcuaccacgccaacaacagcaccgacaccguggacaccgugcucgagaagaacgucacggugacccacuccgugaacauccuggaggacaagcacaacgggaagcugugcaagcucaagggcgucgcgccccugcaccuggggaagugcaacaucgccggcuggauccucgggaacccggagugcgagagccuguccaccgccagcuccuggagcuacaucguggagaccuccagcuccgacaacggcacgugcuaccccggcgacuucaucgacuacgaggagcugcgcgagcagcucagcuccgugagcuccuucgagcgguucgagaucuuccccaagaccagcuccuggcccaaccacgacagcaacaagggggucaccgccgccugcccgcacgccggcgcgaaguccuucuacaagaaccugaucuggcuggugaagaaggggaacagcuaccccaagcucuccaagagcuacaucaacgacaagggcaaggaggugcugguccugugggggauccaccaccccagcaccuccgccgaccagcagagccucuaccagaacgccgacgccuacguguucgugggcuccagcaaguacuccaagaaguucaagcccgagaucgccauccgcccgaagguccgggaccaggagggccgcaugaacuacuacuggacgcugguggagcccggggacaagaucaccuucgaggcgaccggcaaccugguggucccccgguacgccuucgccauggagcgcaacgccgggagcggcaucaucaucuccgacacccccgugcacgacugcaacacgaccugccagaccccgaagggcgccaucaacaccagccuccccuuccagaacauccaccccaucacgaucgggaagugccccaaguacgugaaguccaccaagcugcggcuggcgaccggccuccgcaacgucccgagcauccagucccgggggcuguucggcgccaucgccggguucaucgagggcggcuggaccgggaugguggacggcugguacggguaccaccaccagaacgagcagggcagcggguacgccgccgaccugaaguccacgcagaacgcgaucgacgagaucaccaacaaggugaacagcgucaucgagaagaugaacacccaguucaccgccgugggcaaggaguucaaccaccucgagaagcgcaucgagaaccugaacaagaaggucgacgacggcuuccuggacaucuggacguacaacgccgagcuccuggugcugcucgagaacgagcggacccuggacuaccacgacuccaacgugaagaaccuguacgagaagguccgcagccagcucaagaacaacgccaaggagaucgggaacggcugcuucgaguucuaccacaagugcgacaacacgugcauggaguccgugaagaacgggaccuacgacuaccccaaguacagcgaggaggccaagcugaaccgggaggagaucgacggcgugaagcuggaguccacccgcaucuaccagauccucgcgaucuacagcaccgucgccagcucccuggugcugguggucagccucggggccaucuccuucuggaugugcagcaacggcucccugcagugccggaucugcaucuga

SEQ ID NO: 68466 - RNA, 1701 nt, Artificial Sequence; identical to SEQ ID NO: 66873
  derived and/or modified CDS sequence (opt1) from hemagglutinin__InfluenzaA__ADE20738

SEQ ID NO: 68467 - RNA, 1701 nt, Artificial Sequence; identical to SEQ ID NO: 66873
  derived and/or modified CDS sequence (opt1) from hemagglutinin__InfluenzaA__ADE20748

SEQ ID NO: 68468 - RNA, 1701 nt, Artificial Sequence; identical to SEQ ID NO: 68465
  derived and/or modified CDS sequence (opt1) from hemagglutinin__InfluenzaA__ADE20758

SEQ ID NO: 68469 - RNA, 1701 nt, Artificial Sequence; identical to SEQ ID NO: 66873
  derived and/or modified CDS sequence (opt1) from hemagglutinin__InfluenzaA__ADE20768

SEQ ID NO: 68470 - RNA, 1701 nt, Artificial Sequence
  derived and/or modified CDS sequence (opt1) from hemagglutinin__InfluenzaA__ADE20778
augaaggccauccuggugguccuccuguacaccuucgccaccgcgaacgccgacacgcugugcaucggcuaccacgccaacaacagcaccgacaccguggacaccgugcucgagaagaacgucacggugacccacuccgugaacauccuggaggacaagcacaacgggaagcugugcaagcucaagggcgucgcgccccugcaccuggggaagugcaacaucgccggcuggauccucgggaacccggagugcgagagccuguccaccgccagcuccuggagcuacaucguggagaccuccagcuccgacaacggcacgugcuaccccggcgacuucaucgacuacgaggagcugcgcgagcagcucagcuccgugagcuccuucgagcgguucgagaucuuccccaagaccagcuccuggcccaaccacgacagcaacaagggggucaccgccgccugcccgcacgccggcgcgaaguccuucuacaagaaccugaucuggcuggugaagaaggggaacagcuaccccaagcucuccaagagcuacaucaacgacaagggcaagaaggugcugguccugugggggauccaccaccccagcaccuccgccgaccagcagagccucuaccagaacgccgacgccuacguguucgugggcuccagcaaguacuccaagaaguucaagcccgagaucgccauccgcccgaagguccgggaccaggagggccgcaugaacuacuacuggacgcugguggagcccggggacaagaucaccuucgaggcgaccggcaaccugguggucccccgguacgccuucgccauggagcgcaacgccgggagcggcaucaucaucuccgacacccccgugcacgacugcaacacgaccugccagaccccgaagggcgccaucaacaccagccuccccuuccagaacauccaccccaucacgaucgggaagugccccaaguacgugaaguccaccaagcugcggcuggcgaccggccuccgcaacgucccgagcauccagucccgggggcuguucggcgccaucgccggguucaucgagggcggcuggaccgggaugguggacggcugguacggguaccaccaccagaacgagcagggcagcggguacgccgccgaccugaaguccacgcagaacgcgaucgacgagaucaccaacaaggugaacagcgucaucgagaagaugaacacccaguucaccgccgugggcaaggaguucaaccaccucgagaagcgcaucgagaaccugaacaagaaggucgacgacggcuuccuggacaucuggacguacaacgccgagcuccuggugcugcucgagaacgagcggacccuggacuaccacgacuccaacgugaagaaccuguacgagaagguccgcagccagcucaagaacaacgccaaggagaucgggaacggcugcuucgaguucuaccacaagugcgacaacacgugcauggaguccgugaagaacgggaccuacgacuaccccaaguacagcgaggaggccaagcugaaccgggaggagaucgacggcgugaagcuggaguccacccgcaucuaccagauccucgcgaucuacagcaccgucgccagcucccuggugcugguggucagccucggggccaucuccuucuggaugugcagcaacggcucccugcagugccggaucugcaucuga

SEQ ID NO: 68471 - RNA, 1701 nt, Artificial Sequence; identical to SEQ ID NO: 67857
  derived and/or modified CDS sequence (opt1) from hemagglutinin__InfluenzaA__ADE20788

SEQ ID NO: 68472 - RNA, 1701 nt, Artificial Sequence
  derived and/or modified CDS sequence (opt1) from hemagglutinin__InfluenzaA__ADE20808
augaaggccauccuggugguccuccuguacaccuucgccaccgcgaacgccgacacgcugugcaucggcuaccacgccaacaacagcaccgacaccguggacaccgugcucgagaagaacgucacggugacccacuccgugaaccugcuggaggacaagcacaacgggaagcucugcaagcugcgcggcgucgcgccccugcaccucgggaagugcaacaucgccggcuggauccuggggaacccggagugcgagagccuguccaccgccagcuccuggagcuacaucguggagaccuccagcuccgacaacggcacgugcuaccccggcgacuucaucgacuacgaggagcuccgggagcagcugagcuccgugagcuccuucgagcgcuucgagaucuuccccaagaccagcuccuggcccaaccacgacagcaacaagggggucaccgccgccugcccgcacgccggcgcgaaguccuucuacaagaaccugaucuggcucgugaagaaggggaacagcuaccccaagcuguccaagagcuacaucaacgacaaggagaaggaggugcugguccucuggggcauccaccaccccagcaccuccgccgaccagcagagccuguaccagaacgccgacgccuacguguucguggggacgucccgguacagcaagaaguucaagcccgagaucgccauccgcccgaagguccgggaccaggagggccgcaugaacuacuacuggacccugguggagcccggcgacaagaucaccuucgaggcgaccgggaaccucguggucccccgguacgccuucgccauggagcgcaacgccggcuccgggaucaucaucagcgacacgcccgugcacgacugcaacacgaccugccagaccccgaagggcgccaucaacaccucccugcccuuccagaacauccaccccaucaccaucggcaagugccccaaguacgucaagagcaccaagcugcggcucgcgaccgggcugcgcaacgugccguccauccagagccggggccuguucggggccaucgccggcuucaucgagggcggguggacgggcaugguggacgggugguacggcuaccaccaccagaacgagcagggguccggcuacgccgccgaccucaagagcacccagaacgcgaucgacaagaucaccaacaaggugaacuccgucaucgagaagaugaacacccaguucacggccguggggaaggaguucaaccaccuggagaagcgcaucgagaaccugaacaagaaggucgacgacggcuuccucgacaucuggaccuacaacgccgagcugcuggugcuccuggagaacgagcggacccuggacuaccacgacagcaacgugaagaaccucuacgagaagguccgcucccagcugaagaacaacgccaaggagaucggcaacgggugcuucgaguucuaccacaagugcgacaacacgugcauggagagcgugaagaacggcaccuacgacuaccccaaguacuccgaggaggccaagcugaaccgggaggagaucgacggggugaagcucgagagcacccgcaucuaccagauccuggcgaucuacuccaccgucgccagcagccuggugcucguggucucccugggcgccaucagcuucuggaugugcuccaacgggagccugcagugccggaucugcaucuga

SEQ ID NO: 68473 - RNA, 1701 nt, Artificial Sequence; identical to SEQ ID NO: 67857
  derived and/or modified CDS sequence (opt1) from hemagglutinin__InfluenzaA__ADE20818

SEQ ID NO: 68474 - RNA, 1701 nt, Artificial Sequence; identical to SEQ ID NO: 68415
  derived and/or modified CDS sequence (opt1) from hemagglutinin__InfluenzaA__ADE20828

SEQ ID NO: 68475 - RNA, 1701 nt, Artificial Sequence
  derived and/or modified CDS sequence (opt1) from hemagglutinin__InfluenzaA__ADE20848
augaaggccauccuggugguccuccuguacaccuucgccaccgcgaacgccgacacgcugugcaucggcuaccacgccaacaacagcaccgacaccguggacaccgugcucgagaagaacgucacggugacccacuccgugaaccugcuggaggacaagcacaacgggaagcucugcaagcugcgcggcgucgcgccccugcaccucgggaagugcaacaucgccggcuggauccuggggaacccggagugcgagagccuguccaccgccagcuccuggagcuacaucguggagaccuccagcuccgacaacggcacgugcuaccccggcgacuucaucaacuacgaggagcuccgggagcagcugagcuccgugagcuccuucgagcgcuucgagaucuuccccaagaccagcuccuggcccaaccacgacagcaacaagggggucaccgccgccugcccgcacgccggcgcgaaguccuucuacaagaaccugaucuggcucgugaagaaggggaacagcuaccccaagcuguccaagagcuacaucaacgacaagggcaaggaggugcugguccucugggggauccaccaccccagcaccuccgccgaccagcagagccuguaccagaacgccgacgccuacguguucgugggcacgucccgguacagcaagaaguucaagcccgagaucgccauccgcccgaagguccgggaccaggagggccgcaugaacuacuacuggacccugguggagcccggggacaagaucaccuucgaggcgaccggcaaccucguggucccccgguacgccuucgccauggagcgcaacgccggguccggcaucaucaucagcgacacgcccgugcacgacugcaacacgaccugccagaccccgaagggcgccaucaacaccucccugcccuuccagaacauccaccccaucaccaucgggaagugccccaaguacgucaagagcaccaagcugcggcucgcgaccggccugcgcaacgugccguccauccagagccgggggcuguucggcgccaucgccggguucaucgagggcggcuggacggggaugaucgacggcugguacggguaccaccaccagaacgagcagggcuccggguacgccgccgaccucaagagcacccagaacgcgaucgacaagaucaccaacaaggugaacuccgugaucgagaagaugaacacccaguucacggccgucggcaaggaguucaaccaccuggagaagcgcaucgagaaccugaacaagaagguggacgacggcuuccucgacaucuggaccuacaacgccgagcugcugguccuccuggagaacgagcggacccuggacuaccacgacagcaacgugaagaaccucuacgagaaggugcgcucccagcugaagaacaacgccaaggagaucgggaacggcugcuucgaguucuaccacaagugcgacaacacgugcauggagagcgucaagaacgggaccuacgacuaccccaaguacuccgaggaggccaagcugaaccgggaggagaucgacggcgugaagcucgagagcacccgcaucuaccagauccuggcgaucuacuccaccguggccagcagccugguccucguggugucccugggggccaucagcuucuggaugugcuccaacggcagccugcagugccggaucugcaucuga

SEQ ID NO: 68476 - RNA, 1701 nt, Artificial Sequence; identical to SEQ ID NO: 67857
  derived and/or modified CDS sequence (opt1) from hemagglutinin__InfluenzaA__ADE20858

SEQ ID NO: 68477 - RNA, 1701 nt, Artificial Sequence
  derived and/or modified CDS sequence (opt1) from hemagglutinin__InfluenzaA__ADE20868
augaaggccauccuggugguccuccuguacaccuucgccaccgcgaacgccgacacgcugugcaucggcuaccacgccaacaacagcaccgacaccguggacaccgugcucgagaagaacgucacggugacccacuccgugaaccugcuggaggggaagcacaacggcaagcucugcaagcugcgcggggucgcgccccugcaccucggcaagugcaacaucgccggguggauccugggcaacccggagugcgagagccugaccaccgcguccagcugguccuacaucguggagacgagcuccagcgacaacgggaccugcuaccccggcgacuucaucgacuacgaggagcuccgggagcagcuguccagcguguccagcuucgagcgcuucgagauguuccccaagaccuccagcuggcccaaccacgacuccaacaagggcgucaccgccgccugcccgcacgccggggccaagagcuucuacaagaaccugaucuggcucgugaagaagggcaacuccuaccccaagcugagcaaguccuacaucaacgacaaggggaaggaggugcugguccucuggggcauccaccaccccagcacgagcgccgaccagcagucccuguaccagaacgccgacgccuacguguucgugggcaccagccgguacuccaagaaguucaagcccgagaucgccauccgcccgaagguccgggaccaggaggggcgcaugaacuacuacuggacccugguggagcccggcgacaagaucaccuucgaggcgacggggaaccucguggucccccgguacgccuucgccauggagcgcaacgccggcagcggcaucaucaucuccgacacccccgugcacgacugcaacacgaccugccagaccccgaagggggccaucaacaccagccugcccuuccagaacauccaccccaucaccaucggcaagugccccaaguacgugaaguccaccaagcugcggcucgcgacggggcugcgcaacgucccgagcauccagucccggggccuguucggggccaucgccggcuucaucgagggcggguggaccggcaugguggacgggugguacggcuaccaccaccagaacgagcaggggagcggcuacgccgccgaccucaaguccacccagaacgcgaucgacgagaucaccaacaaggugaacagcgucaucgagaagaugaacacgcaguucaccgccgugggcaaggaguucaaccaccuggagaagcgcaucgagaaccugaacaagaaggucgacgacggguuccucgacaucuggaccuacaacgccgagcugcuggugcuccuggagaacgagcggacccuggacuaccacgacuccaacgugaagaaccucuacgagaagguccgcagccagcugaagaacaacgccaaggagaucggcaacgggugcuucgaguucuaccacaagugcgacaacacgugcauggaguccgugaagaacggcaccuacgacuaccccaaguacagcgaggaggccaagcugaaccgggaggagaucgacggggugaagcucgaguccacccgcaucuaccagauccuggcgaucuacagcaccgucgccuccagccuggugcucguggucagccugggcgccaucuccuucuggaugugcagcaacggcucccugcagugccggaucugcaucuga

SEQ ID NO: 68478 - RNA, 1701 nt, Artificial Sequence; identical to SEQ ID NO: 68411
  derived and/or modified CDS sequence (opt1) from hemagglutinin__InfluenzaA__ADE20878

SEQ ID NO: 68479 - RNA, 1701 nt, Artificial Sequence; identical to SEQ ID NO: 67795
  derived and/or modified CDS sequence (opt1) from hemagglutinin__InfluenzaA__ADE20888

SEQ ID NO: 68480 - RNA, 1701 nt, Artificial Sequence
  derived and/or modified CDS sequence (opt1) from hemagglutinin__InfluenzaA__ADE20898
augaaggccauccuggugguccuccuguacaccuucgccaccgcgaacgccgacacgcugugcaucggcuaccacgccaacaacagcaccgacaccguggacaccauccucgagaagaacgugacggucacccacuccgugaaccugcuggaggacaagcacaacgggaagcucugcaagcugcgcggcguggcgccccugcaccucgggaagugcaacaucgccggcuggauccuggggaacccggagugcgagagccuguccaccgccagcuccuggagcuacaucgucgagaccuccagcuccgacaacggcacgugcuaccccggcgacuucaucgacuacgaggagcuccgggagcagcugagcuccgugagcuccuucgagcgcuucgagaucuuccccaagaccagcuccuggcccaaccacgacagcaacaagggggugaccgccgccugcccgcacgccggcgcgaaguccuucuacaagaaccugaucuggcucgucaagaaggggaacagcuaccccaagcuguccaagagcuacaucaacgacaagggcaaggagauccuggugcucugggggauccaccaccccagcaccuccgccgaccagcagagccuguaccagaacgccgacgccuacguguucgucggcacgucccgguacagcaagaaguucaagcccgagaucgccauccgcccgaaggugcgggaccaggagggccgcaugaacuacuacuggacccugguggagcccggggacaagaucaccuucgaggcgaccggcaaccucgucgugccccgguacgccuucgccauggagcgcaacgccggguccggcaucaucaucagcgacacgcccgugcacgacugcaacacgaccugccagaccccgaagggcgccaucaacaccucccugcccuuccagaacauccaccccaucaccaucgggaagugccccaaguacgucaagagcaccaagcugcggcucgcgaccggccugcgcaacgugccguccauccagagccgggggcuguucggcgccaucgccggguucaucgagggcggcuggacggggaugguggacggcugguacggguaccaccaccagaacgagcagggcuccggguacgccgccgaccucaagagcacccagaacgcgaucgacgagaucaccaacaaggucaacuccgugaucgagaagaugaacacccaguucacggccgugggcaaggaguucaaccaccuggagaagcgcaucgagaaccugaacaagaaggucgacgacggcuuccucgacaucuggaccuacaacgccgagcugcuggugcuccuggagaacgagcggacccuggacuaccacgacagcaacgucaagaaccucuacgagaaggugcgcucccagcugaagaacaacgccaaggagaucgggaacggcugcuucgaguucuaccacaagugcgacaacacgugcauggagggggugaagaacggcaccuacgacuaccccaaguacagcgaggaggccaagcugaaccgggaggagaucgacggggucaagcucgaguccacccgcaucuaccagauccuggcgaucuacagcaccguggccuccagccuggugcucgucgugagccugggcgccaucuccuucuggaugugcagcaacggcucccugcagugccggaucugcaucuga

SEQ ID NO: 68481 - RNA, 1701 nt, Artificial Sequence; identical to SEQ ID NO: 68444
  derived and/or modified CDS sequence (opt1) from hemagglutinin__InfluenzaA__ADE20908

SEQ ID NO: 68482 - RNA, 1701 nt, Artificial Sequence
  derived and/or modified CDS sequence (opt1) from hemagglutinin__InfluenzaA__ADE20918
augaaggccauccuggugguccuccuguacaccuucgccaccgcgaacgccgacacgcugugcaucggcuaccacgccaacaacagcaccgacaccguggacaccgugcucgagaagaacgucacggugacccacuccgugaacauccuggaggacaagcacaacgggaagcugugcaagcuccgcggcgucgcgccccugcaccuggggaagugcaacaucgccggcuggauccucgggaacccggagugcgagagccuguccaccgccagcuccuggagcuacaucguggagaccuccagcuccgacaacggcacgugcuaccccggcgacuucaucgacuacgaggagcugcgggagcagcucagcuccgugagcuccuucgagcgcuucgagaucuuccccaagaccagcuccuggcccaaccacgacagcaacaagggggucaccgccgccugcccgcacgccggcgcgaaguccuucuacaagaaccugaucuggcuggugaagaaggggaacagcuaccccaagcucuccaagagcuacaucaacgacaagggcaaggaggugcugguccugugggggauccaccaccccagcaccuccgccgaccagcagagccucuaccagaacgccgacgccuacguguucgugggcacgucccgguacagcaagaaguucaagcccgagaucgccauccgcccgaagguccgggaccaggagggccgcaugaacuacuacuggauccugguggagcccggggacaagaucaccuucgaggcgaccggcaaccugguggucccccgguacgccuucgccauggagcgcaacgccggguccggcaucaucaucagcgacacccccgugcacgacugcaacacgaccugccagaccccgaagggcgccaucaacaccucccuccccuuccagaacauccaccccaucacgaucgggaagugccccaaguacgucaagagcaccaagcugcggcuggcgaccggccuccgcaacgugccguccauccagagccgggggcuguucggcgccaucgccggguucaucgagggcggcuggaccgggaugguggacggcugguacggguaccaccaccagaacgagcagggcuccggguacgccgccgaccucaagagcacgcagaacgcgaucgacgagaucaccaacaaggugaacuccgucaucgagaagaugaacacccaguucaccgccgugggcaaggaguucaaccaccuggagaagcgcaucgagaaccugaacaagaaggucgacgacggcuuccuggacaucuggacguacaacgccgagcuccuggugcugcucgagaacgagcggacccuggacuaccacgacagcaacgugaagaaccuguacgagaagguccgcucccagcucaagaacaacgccaaggagaucgggaacggcugcuucgaguucuaccacaagugcgacaacacgugcauggagagcgugaagaacgggaccuacgacuaccccaaguacuccgaggaggccaagcugaaccgggaggagaucgacggcgugaagcuggagagcacccgcaucuaccagauccucgcgaucuacuccaccgucgccagcagccuggugcugguggucucccucggggccaucagcuucuggaugugcuccaacggcagccugcagugccggaucugcaucuga

SEQ ID NO: 68483 - RNA, 1701 nt, Artificial Sequence; identical to SEQ ID NO: 67046
  derived and/or modified CDS sequence (opt1) from hemagglutinin__InfluenzaA__ADE20928

SEQ ID NO: 68484 - RNA, 1701 nt, Artificial Sequence
  derived and/or modified CDS sequence (opt1) from hemagglutinin__InfluenzaA__ADE20948
augaaggccauccuggugguccuccuguacaccuucgccaccgcgaacgccgacacgcugugcaucggcuaccacgccaacaacagcaccgacaccguggacaccgugcucgagaagaacgucacggugacccacuccgugaaccugcuggaggacaagcacaacgggaagcucugcaagcugcgcggcgucgcgccccugcaccucgggaagugcaacaucgccggcuggauccuggggaacccggagugcgagagccuguccaccgccagcuccuggagcuacaucguggagaccuccagcuccgacaacggcacgugcuaccccggcgacuucaucaacuacgaggagcuccgggagcagcugagcuccgugagcuccuucgagcgcuucgagaucuuccccaagaccagcuccuggcccaaccacgacagcaacaagggggucaccgccgccugcccgcacgccggcgcgaaguccuucuacaagaaccugaucuggcucgugaagaaggggaacagcuaccccaagcuguccaagagcuacaucaacgacaagggcaaggaggugcugguccucugggggauccaccaccccagcaccuccgccgaccagcagagccuguaccagaacgccgacuccuacguguucgugggcacgagccgguacuccaagaaguucaagcccgagaucgccauccgcccgaagguccgggaccaggagggccgcaugaacuacuacuggacccugguggagcccggggacaagaucaccuucgaggccaccggcaaccucguggucccccgguacgcguucgccauggagcgcaacgccgggagcggcaucaucaucuccgacacgcccgugcacgacugcaacacgaccugccagaccccgaagggcgccaucaacaccagccugcccuuccagaacauccaccccaucaccaucgggaagugccccaaguacgugaaguccaccaagcugcggcucgccaccggccugcgcaacgucccgagcauccagucccgggggcuguucggcgcgaucgccggguucaucgagggcggcuggacggggaugguggacggcugguacggguaccaccaccagaacgagcagggcagcggguacgccgccgaccucaaguccacccagaacgccaucgacaagaucaccaacaaggugaacagcgucaucgagaagaugaacacccaguucacggcggugggcaaggaguucaaccaccuggagaagcgcaucgagaaccugaacaagaaggucgacgacggcuuccucgacaucuggaccuacaacgccgagcugcuggugcuccuggagaacgagcggacccuggacuaccacgacuccaacgugaagaaccucuacgagaagguccgcagccagcugaagaacaacgccaaggagaucgggaacggcugcuucgaguucuaccacaagugcgacaacacgugcauggaguccgugaagaacgggaccuacgacuaccccaaguacagcgaggaggccaagcugaaccgggaggagaucgacggcgugaagcucgaguccacccgcaucuaccagauccuggccaucuacagcaccgucgcgagcucccuggugcucguggucagccugggggccaucuccuucuggaugugcagcaacggcucccugcagugccggaucugcaucuga

SEQ ID NO: 68485 - RNA, 1701 nt, Artificial Sequence
  derived and/or modified CDS sequence (opt1) from hemagglutinin__InfluenzaA__ADE20968
augaaggccauccuggugguccuccuguacaccuucgccaccgcgaacgccgacacgcugugcaucggcuaccacgccaacaacagcaccgacaccguggacaccgugcucgagaagaacgucacggugacccacuccgugaaccugcuggaggacaagcacaacgggaagcucugcaagcugcgcggcgaggcgccccugcaccucgggaagugcaacaucgccggcuggauccuggggaacccggagugcgagagccuguccaccgccagcuccuggagcuacaucgucgagaccuccagcuccgacaacggcacgugcuaccccggcgacuucaucaacuacgaggagcuccgggagcagcugagcuccgugagcuccuucgagcgcuucgagaucuuccccaagaccagcuccuggcccaaccacgacagcaacaagggggugaccgccgccugcccgcacuccggcgccaagagcuucuacaagaaccugaucuggcucgucaagaaggggaacuccuaccccaagcugagcaagagcuacaucaacgacaagggcaaggaggugcuggugcucugggggauccaccaccccuccaccagcgcggaccagcagucccuguaccagaacgccgacgccuacgucuucgugggcacgagccgguacuccaagaaguucaagcccgagaucgccauccgcccgaaggugcgggaccaggagggccgcaugaacuacuacuggacccuggucgagcccggggacaagaucaccuucgaggccaccggcaaccucguggugccccgguacgcguucgccauggagcgcaacgccgggagcggcaucaucaucuccgacacgcccguccacgacugcaacacgaccugccagaccccgaagggcgccaucaacaccagccugcccuuccagaacauccaccccaucaccaucgggaagugccccaaguacgugaaguccaccaagcugcggcucgccaccggccugcgcaacgugccgagcauccagucccgggggcuguucggcgcgaucgccggguucaucgagggcggcuggacggggauggucgacggcugguacggguaccaccaccagaacgagcagggcagcggguacgccgccgaccucaaguccacccagaacgccaucgacaagaucaccaacaaggugaacagcgugaucgagaagaugaacacccaguucacggcggucggcaaggaguucaaccaccuggagaagcgcaucgagaaccugaacaagaagguggacgacggcuuccucgacaucuggaccuacaacgccgagcugcugguccuccuggagaacgagcggacccuggacuaccacgacuccaacgugaagaaccucuacgagaaggugcgcagccagcugaagaacaacgccaaggagaucgggaacggcugcuucgaguucuaccacaagugcgacaacacgugcauggaguccgucaagaacgggaccuacgacuaccccaaguacagcgaggaggccaagcugaaccgggaggagaucgacggcgugaagcucgaguccacccgcaucuaccagauccuggccaucuacagcaccguggcgagcucccugguccucguggugagccugggggccaucuccuucuggaugugcagcaacggcucccugcagugccggaucugcaucuga

SEQ ID NO: 68486 - RNA, 1701 nt, Artificial Sequence; identical to SEQ ID NO: 67857
  derived and/or modified CDS sequence (opt1) from hemagglutinin__InfluenzaA__ADE20978

SEQ ID NO: 68487 - RNA, 1701 nt, Artificial Sequence
  derived and/or modified CDS sequence (opt1) from hemagglutinin__InfluenzaA__ADE20988
augaaggccauccuggugguccuccuguacaccuucgccaccgcgaacgccgacacgcugugcaucggcuaccacgccaacaacagcaccgacaccguggacaccgugcucgagaagaacgucacggugacccacuccgugaaccugcuggaggacaagcacaacgggaagcucugcaagcugcgcggcgucgcgccccugcaccucgggaagugcaacaucgccggcuggauccuggggaacccggagugcgagagccuguccaccgccagcuccuggagcuacaucguggagaccuccagcuccgacaacggcacgugcuaccccggcgacuucaucgacuacgaggagcuccgggagcagcugagcuccgugagcuccuucgagcgcuucgagaucuuccccaagaccagcuccuggcccaaccacgacagcaacaagggggucaccgccgccugcccgcacgccggcgcgaaguccuucuacaagaaccugaucuggcucgugaagaaggggaacagcuaccccaagcuguccaagagcuacaucaacgacaagggcaaggaggugcugguccucugggggauccaccaccccagcaccuccacggaccagcagagccuguaccagaacgccgacgccuacguguucgugggcaccucccgguacagcaagaaguucaagcccgagaucgccauccgcccgaagguccgggaccaggagggccgcaugaacuacuacuggacccugguggagcccggggacaagaucaccuucgaggccacgggcaaccucguggucccccgguacgcguucgccauggagcgcaacgccggguccggcaucaucaucagcgacacccccgugcacgacugcaacacgaccugccagaccccgaagggcgccaucaacaccucccugcccuuccagaacauccaccccaucaccaucgggaagugccccaaguacgucaagagcaccaagcugcggcucgccacgggccugcgcaacaucccguccauccagagccgggggcuguucggcgcgaucgccggguucaucgagggcggcuggaccgggaugguggacggcugguacggguaccaccaccagaacgagcagggcuccggguacgccgccgaccucaagagcacccagaacgccaucgacgagaucaccaacaaggugaacuccgugaucgagaagaugaacacgcaguucaccgcggucggcaaggaguucaaccaccuggagaagcgcaucgagaaccugaacaagaagguggacgacggcuuccucgacaucuggaccuacaacgccgagcugcugguccuccuggagaacgagcggacccuggacuaccacgacagcaacgugaagaaccucuacgagaaggugcgcucccagcugaagaacaacgccaaggagaucgggaacggcugcuucgaguucuaccacaagugcgacaacacgugcauggagagcgucaagaacgggaccuacgacuaccccaaguacuccgaggaggccaagcugaagcgggaggagaucgacggcgugaagcucgagagcacccgcaucuaccagauccuggccaucuacuccaccguggcgagcagccugguccucguggugucccugggggccaucagcuucuggaugugcuccaacggcagccugcagugccggaucugcaucuga

SEQ ID NO: 68488 - RNA, 1701 nt, Artificial Sequence; identical to SEQ ID NO: 67857
  derived and/or modified CDS sequence (opt1) from hemagglutinin__InfluenzaA__ADE20998

SEQ ID NO: 68489 - RNA, 1701 nt, Artificial Sequence; identical to SEQ ID NO: 68021
  derived and/or modified CDS sequence (opt1) from hemagglutinin__InfluenzaA__ADE21008

SEQ ID NO: 68490 - RNA, 1701 nt, Artificial Sequence
  derived and/or modified CDS sequence (opt1) from hemagglutinin__InfluenzaA__ADE21018
augaaggccauccuggugguccuccuguacaccuucgccaccgcgaacgccgacacgcugugcaucggcuaccacgccaacaacagcaccgacaccguggacaccgugcucgagaagaacgucacggugacccacuccgugaaccugcuggaggacaagcacaacgggaagcucugcaagcugcgcggcgucgcgccccugcaccucgggaagugcaacaucgccggcuggauccuggggaacccggagugcgagagccuguccaccgccagcuccuggagcuacaucguggagaccuccagcuccgacaacggcacgugcuaccccggcgacuucaucgacuacgaggagcuccgggagcagcugagcuccgugagcuccuucgagcgcuucgagaucuuccccaagaccagcuccuggcccaaccacgacagcaacaagggggucaccaccgccugcccgcacgccggcgccaaguccuucuacaagaaccugaucuggcucgugaagaaggggaacagcuaccccaagcuguccaagagcuacaucaacgacaagggcaaggaggugcugguccucugggggauccaccaccccagcacguccaccgaccagcagagccuguaccagaacgcggacgccuacguguucgugggcaccucccgguacagcaagaaguucaagcccgagaucgccauccgcccgaagguccgggaccaggagggccgcaugaacuacuacuggacccugguggagcccggggacaagaucacguucgaggccaccggcaaccucguggucccccgguacgccuucgcgauggagcgcaacgccggguccggcaucaucaucagcgacacccccgugcacgacugcaacaccacgugccagaccccgaagggcgccaucaacaccucccugcccuuccagaacauccaccccaucaccaucgggaagugccccaaguacgucaagagcacgaagcugcggcucgccaccggccugcgcaacaucccguccauccagagccgggggcuguucggcgccaucgcgggguucaucgagggcggcuggaccgggaugguggacggcugguacggguaccaccaccagaacgagcagggcuccggguacgccgccgaccucaagagcacccagaacgccaucgacgagaucacgaacaaggugaacuccgugaucgagaagaugaacacccaguucaccgccgucggcaaggaguucaaccaccuggagaagcgcaucgagaaccugaacaagaagguggacgacggcuuccucgacaucuggaccuacaacgcggagcugcugguccuccuggagaacgagcggacgcuggacuaccacgacagcaacgugaagaaccucuacgagaaggugcgcucccagcugaagaacaacgccaaggagaucgggaacggcugcuucgaguucuaccacaagugcgacaacacgugcauggagagcgucaagaacgggaccuacgacuaccccaaguacuccgaggaggccaagcugaaccgggaggagaucgacggcgugaagcucgagagcacccgcaucuaccagauccuggccaucuacuccaccguggccagcagccugguccucguggugucccugggggcgaucagcuucuggaugugcuccaacggcagccugcagugccggaucugcaucuga

SEQ ID NO: 68491 - RNA, 1701 nt, Artificial Sequence; identical to SEQ ID NO: 68431
  derived and/or modified CDS sequence (opt1) from hemagglutinin__InfluenzaA__ADE21028

SEQ ID NO: 68492 - RNA, 1701 nt, Artificial Sequence; identical to SEQ ID NO: 68421
  derived and/or modified CDS sequence (opt1) from hemagglutinin__InfluenzaA__ADE21038

SEQ ID NO: 68493 - RNA, 1701 nt, Artificial Sequence; identical to SEQ ID NO: 68444
  derived and/or modified CDS sequence (opt1) from hemagglutinin__InfluenzaA__ADE21048

SEQ ID NO: 68494 - RNA, 1701 nt, Artificial Sequence
  derived and/or modified CDS sequence (opt1) from hemagglutinin__InfluenzaA__ADE21058
augaaggccauccuggugguccuccuguacaccuucgccaccgcgaacgccgacacgcugugcaucggcuaccacgccaacaacagcaccgacaccguggacaccgugcucgagaagaacgucacggugacccacuccgugaaccugcuggaggacaagcacaacgggaagcucugcaagcugcgcggcgucgcgccccugcaccucgggaagugcaacaucgccggcuggauccuggggaacccggagugcgagagccuguccaccgccagcuccuggagcuacaucguggagaccuccagcuccgacaacggcacgugcuaccccggcgacuucaucgacuacgaggagcuccgggagcagcugagcuccgugagcuccuucgagcgcuucgagaucuuccccaagaccagcuccuggcccaaccacgacagcaacaagggggucaccgccgccugcccgcacgccggcgcgaaguccuucuacaagaaccugaucuggcucgugaagaaggggaacagcuaccccaagcuguccaagagcuacaucaacgacaagggcaaggaggugcugguccucugggggauccaccaccccagcaccuccgccgaccagcagagccuguaccagaacgccgacgccuacguguucgugggcacgucccgguacagcaagaaguucaagcccgagaucgccauccgcccgaagguccgggaccaggagggccgcaucaacuacuacuggacccugguggagcccggggacaagaucaccuucgaggcgaccggcaaccucguggucccccgguacgccuucgccauggagcgcaacgccggguccggcaucaucaucagcgacacgcccgcccacgacugcaacacgaccugccagaccccgaagggcgcgaucaacaccucccugcccuuccagaacauccaccccaucaccaucgggaagugccccaaguacgucaagagcaccaagcugcggcucgccaccggccugcgcaacgugccguccauccagagccgggggcuguucggcgccaucgccggguucaucgagggcggcuggacggggaugguggacggcugguacggguaccaccaccagaacgagcagggcuccggguacgccgcggaccucaagagcacccagaacgccaucgacaagaucaccaacaaggugaacuccgugaucgagaagaugaacacccaguucacggccgucggcaaggaguucaaccaccuggagaagcgcaucgagaaccugaacaagaagguggacgacggcuuccucgacaucuggaccuacaacgccgagcugcugguccuccuggagaacgagcggacccuggacuaccacgacagcaacgugaagaaccucuacgagaaggugcgcucccagcugaagaacaacgccaaggagaucgggaacggcugcuucgaguucuaccacaagugcgacaacacgugcauggagagcgucaagaacgggaccuacgacuaccccaaguacuccgaggaggcgaagcugaaccgggaggagaucgacggcgugaagcucgagagcacccgcaucuaccagauccuggccaucuacuccaccguggccagcagccugguccucguggugucccugggggccaucagcuucuggaugugcuccaacggcagccugcagugccggaucugcaucuga

SEQ ID NO: 68495 - RNA, 1701 nt, Artificial Sequence
  derived and/or modified CDS sequence (opt1) from hemagglutinin__InfluenzaA__ADE21068
augaaggccauccuggugguccuccuguacaccuucgccaccgcgaacgccgacacgcugugcaucggcuaccacgccaacaacagcaccgacaccguggacaccgugcucgagaagaacgucacggugacccacuccgugaaccugcuggaggacaagcacaacgggaagcucugcaagcugcgcggcgucgcgccccugcaccucgggaagugcaacaucgccggcuggauccuggggaacccggagugcgagagccuguccaccgccagcuccuggagcuacaucguggagaccuccagcuccgacaacggcacgugcuaccccggcgacuucaucgacuacgaggagcuccgggagcagcugagcuccgugagcuccuucgagcgcuucgagaucuuccccaagaccagcuccuggcccaaccacgacagcaacaagggggucaccgccgccugcccgcacgccggcgcgaaguccuucuacaagaaccugaucuggcucgugaagaaggggaacagcuaccccaagcuguccaagagcuacaucaacgacaagggcaaggaggugcugguccucugggggauccaccaccccagcaccuccgccgaccagcagagccuguaccagaacgccgacgccuacguguucgugggcacgucccgguacagcaagaaguucaagcccgagaucgccauccgcccgaagguccgggagcaggagggccgcaugaacuacuacuggacccugguggagcccggggacaagaucaccuucgaggcgaccggcaaccucguggucccccgguacgccuucgccauggagcgcaacgccggguccggcaucaucaucagcgacacgcccgugcacgacugcaacacgaccugccagaccccgaagggcgccaucaacaccucccugcccuuccagaacauccacagcaucaccaucgggaagugccccaaguacgugaaguccaccaagcugcggcucgcgaccggccugcgcaacguccccagcauccagucccgggggcuguucggcgccaucgccggguucaucgagggcggcuggacggggaugguggacggcugguacggguaccaccaccagaacgagcagggcagcggguacgccgccgaccucaaguccacccagaacgcgaucgacgagaucaccaacaaggugaacagcgucaucgagaagaugaacacccaguucacggccgugggcaaggaguucaaccaccuggagaagcgcaucgagaaccugaacaagaaggucgacgacggcuuccucgacaucuggaccuacaacgccgagcugcuggugcuccuggagaacgagcggacccuggacuaccacgacuccaacgugaagaaccucuacgagaagguccgcagccagcugaagaacaacgccaaggagaccgggaacggcugcuucgaguucuaccacaagugcgacaacacgugcauggaguccgugaagaacgggaccuacgacuacccgaaguacagcgaggaggccaagcugaaccgggaggagaucgacggcgugaagcucgaguccacccgcaucuaccagauccuggcgaucuacagcaccgucgccagcucccuggugcucguggucagccugggggccaucuccuucuggaugugcagcaacggcucccugcagugccggaucugcaucuga

SEQ ID NO: 68496 - RNA, 1698 nt, Artificial Sequence
  derived and/or modified CDS sequence (opt1) from hemagglutinin__InfluenzaA__ADE28761
augaaggugaagcugcucguccugcugugcaccuucaccgccacguacgccgacaccaucugcaucggcuaccacgcgaacaacagcaccgacaccguggacacggugcucgagaagaacgucaccgugacccacuccgugaaccugcuggagaacagccacaacgggaagcucugccugcugaagggcaucgcgccccuccagcuggggaacugcuccgucgccggcuggauccuggggaacccggagugcgagcuccugaucagcaaggaguccuggagcuacaucguggagaagcccaaccccgagaacgggaccugcuaccccggccacuucgccgacuacgaggagcugcgcgagcagcucuccagcguguccagcuucgagcgguucgagaucuucccgaaggaguccagcuggcccaaccacacggucaccgggguguccgccagcugcucccacaacggcgagagcuccuucuaccgcaaccugcuguggcucaccgggaagaacggccuguaccccaaccugagcaaguccuacgccaacaacaaggagaaggaggugcucguccuguggggcgugcaccacccgcccaacaucggcaaccagaagacccuguaccacacggagaacgccuacgugagcgucgugagcucccacuacagccggaaguucacccccgagaucgccaagcgccccaaggugcgggaccaggagggccgcaucaacuacuacuggacccuccuggagcccggggacaccaucaucuucgaggccaacggcaaccugaucgcgccgcgguacgccuucgcccucucccgcggguucggcagcggcaucaucaacuccaacgcccccauggacaagugcgacgccaagugccagacgccccagggggcgaucaacagcucccugcccuuccagaacguccacccggugaccaucggcgagugccccaaguacgugcggagcgccaagcugcgcauggucaccgggcuccggaacauccccuccauccagagccgcggccuguucggggccaucgccggcuucaucgagggcggguggaccggcaugguggacgggugguacggcuaccaccaccagaacgagcagggguccggcuacgccgcggaccagaaguccacgcagaacgccaucaacggcaucaccaacaaggugaacagcgucaucgagaagaugaacacccaguucaccgccguggggaaggaguucaacaagcuggagcggcgcauggagaaccucaacaagaaggucgacgacggcuucaucgacaucuggacguacaacgccgagcugcuggugcuccuggagaacgagcggacccuggacuuccacgagagcaacgugaagaaccucuacgagaaggucaagucccagcugaagaacaacgccaaggagaucgggaacggcugcuucgaguucuaccacaagugcaacgacgagugcauggagagcgugaagaacgggaccuacgacuaccccaaguacuccgaggagagcaagcugaaccgcgagaagaucgacggcgugaagcucgaguccauggaggucuaccagauccuggcgaucuacagcaccguggccagcucccuggugcuccuggucagccugggcgccaucuccuucuggaugugcagcaacgggucccuccagugccggaucugcaucuga

SEQ ID NO: 68497 - RNA, 1701 nt, Artificial Sequence; identical to SEQ ID NO: 66873
  derived and/or modified CDS sequence (opt1) from hemagglutinin__InfluenzaA__ADE28780

SEQ ID NO: 68498 - RNA, 1701 nt, Artificial Sequence; identical to SEQ ID NO: 68281
  derived and/or modified CDS sequence (opt1) from hemagglutinin__InfluenzaA__ADE28790

SEQ ID NO: 68499 - RNA, 1701 nt, Artificial Sequence; identical to SEQ ID NO: 68465
  derived and/or modified CDS sequence (opt1) from hemagglutinin__InfluenzaA__ADE28800

SEQ ID NO: 68500 - RNA, 1701 nt, Artificial Sequence; identical to SEQ ID NO: 67857
  derived and/or modified CDS sequence (opt1) from hemagglutinin__InfluenzaA__ADE28810

SEQ ID NO: 68501 - RNA, 1701 nt, Artificial Sequence
  derived and/or modified CDS sequence (opt1) from hemagglutinin__InfluenzaA__ADE28820
augaaggccauccuggugguccuccuguacaccuucgccaccgcgaacgccgacacgcugugcaucggcuaccacgccaacaacagcaccgacaccguggacaccgugcucgagaagaacgucacggugacccacuccgugaaccugcuggaggacaagcacaacgggaagcucugcaagcugcgcggcgucgcgccccugcaccucgggaagugcaacaucgccggcuggauccuggggagcccggagugcgagucccugagcaccgcguccagcugguccuacaucguggagaccagcuccagcgacaacggcacgugcuaccccggcgacuucaucgacuacgaggagcuccgggagcagcuguccagcguguccagcuucgagcgcuucgagaucuuccccaagaccuccagcuggcccaaccacgacuccaacaagggggucaccgccgccugcccgcacgccggcgccaagagcuucuacaagaaccugaucuggcucgugaagaaggggaacuccuaccccaagcugagcaagagcuacaucaacgacaagggcaaggaggugcugguccucugggggauccaccaccccuccaccagcgccgaccagcagucccuguaccagaacgccgacgccuacguguucgugggcacgagccgguacuccaagaaguucaagcccgagaucgccauccgcccgaagguccgggaccaggagggccgcaugaacuacuacuggacccugguggagcccggggacaagaucaccuucgaggcgaccggcaaccucguggucccccgguacgccuucgccauggagcgcaacgccgggagcggcaucaucaucuccgacacgcccgugcacgacugcaacacgaccugccagaccccgaagggcgccaucaacaccagccugcccuuccagaacauccaccccaucaccaucgggaagugccccaaguacgugaaguccaccaagcugcggcucgcgaccggccugcgcaacgucccgagcauccagucccgggggcuguucggcgccaucgccggguucaucgagggcggcuggacggggaugguggacggcugguacggguaccaccaccagaacgagcagggcagcggguacgccgccgaccucaaguccacccagaacgcgaucgacaagaucaccaacaaggugaacagcgucaucgagaagaugaacacccaguucacggccgugggcaaggaguucaaccaccuggagaagcgcaucgagaaccugaacaagaaggucgacgacggcuuccucgacaucuggaccuacaacgccgagcugcuggugcuccuggagaacgagcggacccuggacuaccacgacuccaacgugaagaaccucuacgagaagguccgcagccagcugaagaacaacgccaaggagaucgggaacggcugcuucgaguucuaccacaagugcgacaacacgugcauggaguccgugaagaacgggaccuacgacuaccccaaguacagcgaggaggccaagcugaaccgggaggagaucgacggcgugaagcucgaguccacccgcaucuaccagauccuggcgaucuacagcaccgucgccagcucccuggugcucguggucagccugggggccaucuccuucuggaugugcagcaacggcucccugcagugccggaucugcaucuga

SEQ ID NO: 68502 - RNA, 1701 nt, Artificial Sequence; identical to SEQ ID NO: 66873
  derived and/or modified CDS sequence (opt1) from hemagglutinin__InfluenzaA__ADE28830

SEQ ID NO: 68503 - RNA, 1701 nt, Artificial Sequence; identical to SEQ ID NO: 66873
  derived and/or modified CDS sequence (opt1) from hemagglutinin__InfluenzaA__ADE28840

SEQ ID NO: 68504 - RNA, 1701 nt, Artificial Sequence; identical to SEQ ID NO: 66873
  derived and/or modified CDS sequence (opt1) from hemagglutinin__InfluenzaA__ADE28850

SEQ ID NO: 68505 - RNA, 1701 nt, Artificial Sequence; identical to SEQ ID NO: 66873
  derived and/or modified CDS sequence (opt1) from hemagglutinin__InfluenzaA__ADE28881

SEQ ID NO: 68506 - RNA, 1701 nt, Artificial Sequence; identical to SEQ ID NO: 66873
  derived and/or modified CDS sequence (opt1) from hemagglutinin__InfluenzaA__ADE28891

SEQ ID NO: 68507 - RNA, 1701 nt, Artificial Sequence; identical to SEQ ID NO: 68376
  derived and/or modified CDS sequence (opt1) from hemagglutinin__InfluenzaA__ADE28911

SEQ ID NO: 68508 - RNA, 1701 nt, Artificial Sequence; identical to SEQ ID NO: 67857
  derived and/or modified CDS sequence (opt1) from hemagglutinin__InfluenzaA__ADE28921

SEQ ID NO: 68509 - RNA, 1701 nt, Artificial Sequence; identical to SEQ ID NO: 67857
  derived and/or modified CDS sequence (opt1) from hemagglutinin__InfluenzaA__ADE28931

SEQ ID NO: 68510 - RNA, 1701 nt, Artificial Sequence; identical to SEQ ID NO: 67046
  derived and/or modified CDS sequence (opt1) from hemagglutinin__InfluenzaA__ADE28951

SEQ ID NO: 68511 - RNA, 1701 nt, Artificial Sequence
  derived and/or modified CDS sequence (opt1) from hemagglutinin__InfluenzaA__ADE28961
augaaggccauccuggugguccuccuguacaccuucgccaccgcgaacgccgacacgcugugcaucggcuaccacgccaacaacagcaccgacaccguggacaccgugcucgagaagaacgucacggugacccacuccgugaaccugcuggaggacaagcacaacgggaagcucugcaagcugcgcggcgucgcgccccugcaccucgggaagugcaacguggccggcuggauccuggggaacccggagugcgagagccuguccaccgccagcuccuggagcuacaucguggagaccuccagcuccgacaacggcacgugcuaccccggcgacuucaucgacuacgaggagcuccgggagcagcugagcuccgucagcuccuucgagcgcuucgagaucuuccccaagaccagcuccuggcccaaccacgacagcaacaagggggugaccgccgccugcccgcacgccggcgcgaaguccuucuacaagaaccugaucuggcucgugaagaaggggaacagcuaccccaagcuguccaagagcuacaucaacgacaagggcaaggagguccuggugcucugggggauccaccaccccagcaccuccgccgaccagcagagccuguaccagaacgccgacgccuacguguucgucggcacgucccgguacagcaagaaguucaagcccgagaucgccauccgcccgaaggugcgggaccaggagggccgcaugaacuacuacuggacccugguggagcccggggacaagaucaccuucgaggcgaccggcaaccucgucgugccccgguacgccuucgccauggagcgcaacgccggguccggcaucaucaucagcgacacgcccgugcacgacugcaacacgaccugccagaccccgaagggcgccaucaacaccucccugcccuuccagaacauccaccccaucaccaucgggaagugccccaaguacgucaagagcaccaagcugcggcucgcgaccggccugcgcaacgugccguccauccagagccgggggcuguucggcgccaucgccggguucaucgagggcggcuggacggggaugguggacggcugguacggguaccaccaccagaacgagcagggcuccggguacgccgccgaccucaagagcacccagaacgcgaucgacgagaucaccaacaaggucaacuccgugaucgagaagaugaacacccaguucacggccgucggcaaggaguucaaccaccuggagaagcgcaucgagaaccugaacaagaagguggacgacggcuuccucgacaucuggaccuacaacgccgagcugcuggugcuccuggagaacgagcggacccuggacuaccacgacagcaacgucaagaaccucuacgagaaggugcgcucccagcugaagaacaacgccaaggagaucgggaacggcugcuucgaguucuaccacaagugcgacaacacgugcauggagagcgugaagaacgggaccuacgacuaccccaaguacuccgaggaggccaagcugaaccgggaggagaucgacggcgucaagcucgagagcacccgcaucuaccagauccuggcgaucuacuccaccguggccagcagccuggugcucgucgugucccugggggccaucagcuucuggaugugcuccaacggcagccugcagugccggaucugcaucuga

SEQ ID NO: 68512 - RNA, 1701 nt, Artificial Sequence; identical to SEQ ID NO: 68397
  derived and/or modified CDS sequence (opt1) from hemagglutinin__InfluenzaA__ADE28971

SEQ ID NO: 68513 - RNA, 1701 nt, Artificial Sequence
  derived and/or modified CDS sequence (opt1) from hemagglutinin__InfluenzaA__ADE28981
augaaggccauccuggugguccuccuguacaccuucgccaccgcgaacgccgacacgcugugcaucggcuaccacgccaacaacagcaccgagaccguggacaccgugcucgagaagaacgucacggugacccacuccgugaaccugcuggaggacaagcacaacgggaagcucugcaagcugcgcggcgucgcgccccugcaccucgggaagugcaacaucgccggcuggauccuggggaacccggagugcgagagccuguccaccgccagcuccuggagcuacaucguggagaccuccagcuccgacaacggcacgugcuaccccggcgacuucaucgacuacgaggagcuccgggagcagcugagcuccgugagcuccuucgagcgcuucgagaucuuccccaagaccagcuccuggcccaaccacgacagcaacaagggggucaccgccgccugcccgcacgccggcgcgaaguccuucuacaagaaccugaucuggcucgugaagaaggggaacagcuaccccaagcuguccaagagcuacaucaacgacaagggcaaggaggugcugguccucugggggauccaccaccccagcaccuccgccgaccagcagagccuguaccagaacgccgacgccuacguguucgugggcacgucccgguacagcaagaaguucaagcccgagaucgccauccgcccgaagguccgggaccaggagggccgcaugaacuacuacuggacccugguggagcccggggacaagaucaccuucgaggcgaccggcaaccucguggucccccgguacgccuucgccauggagcgcaacgccggguccggcaucaucaucagcgacacgcccgugcacgacugcaacacgaccugccagaccccgaagggcgccaucaacaccucccugcccuuccagaacauccaccccaucaccaucgggaagugccccaaguacgucaagagcaccaagcugcggcucgcgaccggccugcgcaacgugccguccauccagagccgggggcuguucggcgccaucgccggguucaucgagggcggcuggacggggaugguggacggcugguacggguaccaccaccagaacgagcagggcuccggguacgccgccgaccucaagagcacccagaacgcgaucgacaagaucaccaacaaggugaacuccgucaucgagaagaugaacacccaguucacggccgugggcaaggaguucaaccaccuggagaagcgcaucgagaaccugaacaagaaggucgacgacggcuuccucgacaucuggaccuacaacgccgagcugcuggugcuccuggagaacgagcggacccuggacuaccacgacagcaacgugaagaaccucuacgagaagguccgcucccagcugaagaacaacgccaaggagaucgggaacggcugcuucgaguucuaccacaagugcgacaacacgugcauggagagcgugaagaacgggaccuacgacuaccccaaguacuccgaggaggccaagcugaaccgggaggagaucgacggcgugaagcucgagagcacccgcaucuaccagauccuggcgaucuacuccaccgucgccagcagccuggugcucguggucucccugggggccaucagcuucuggaugugcuccaacggcagccugcagugccggaucugcaucuga

SEQ ID NO: 68514 - RNA, 1701 nt, Artificial Sequence; identical to SEQ ID NO: 67857
  derived and/or modified CDS sequence (opt1) from hemagglutinin__InfluenzaA__ADE28991

SEQ ID NO: 68515 - RNA, 1701 nt, Artificial Sequence
  derived and/or modified CDS sequence (opt1) from hemagglutinin__InfluenzaA__ADE29001
augaaggccauccuggugguccuccuguacaccuucgccaccgcgaacgccgacacgcugugcaucggcuaccacgccaacaacagcaccgacaccguggacaccgugcucgagcgcaacgucacggugacccacuccgugaaccugcuggaggacaagcacaacgggaagcucugcaagcugaagggcgucgcgccccugcaccucgggaagugcaacaucgccggcuggauccuggggaacccggagugcgagagccuguccaccgccagcuccuggagcuacaucguggagaccuccagcuccgacaacggcacgugcuaccccggcgacuucaucgacuacgaggagcuccgggagcagcugagcuccgugagcuccuucgagcgcuucgagaucuuccccaagaccagcuccuggcccaaccacgacagcaacaagggggucaccgccgccugcccgcacgccggcgcgaaguccuucuacaagaaccugaucuggcucgugaagaaggggaacagcuaccccaagcuguccaagagcuacaucaacgacaagggcaaggaggugcugguccucugggggauccaccaccccagcaccuccgccgaccagcagagccuguaccagaacgccgacgccuacguguucgugggcacgucccgguacagcaagaaguucaagcccgagaucgccauccgcccgaagguccgggaccaggagggccgcaugaacuacuacuggacccugguggagcccggggacaagaucaccuucgaggcgaccggcaaccucguggucccccgguacgccuucgccauggagcgcaacgccggguccggcaucaucaucagcgacacgcccgugcacgacugcaacacgaccugccagaccccgaagggcgccaucaacaccucccugcccuuccagaacauccaccccaucaccaucgggaagugccccaaguacgucaagagcaccaagcugcggcucgcgaccggccugcgcaacgugccguccauccagagccgggggcuguucggcgccaucgccggguucaucgagggcggcuggacggggaugguggacggcugguacggguaccaccaccagaacgagcagggcuccggguacgccgccgaccucaagagcacccagaacgcgaucgacgagaucaccaacaaggugaacuccgucaucgagaagaugaacacccaguucacggccgugggcaaggaguucaaccaccuggagaagcgcaucgagaaccugaacaagaaggucgacgacggcuuccucgacaucuggaccuacaacgccgagcugcuggugcuccuggagaacgagcggacccuggacuaccacgacagcaacgugaagaaccucuacgagaagguccgcucccagcugaagaacaacgccaaggagaucgggaacggcugcuucgaguucuaccacaagugcgacaacacgugcauggagagcgugaagaacgggaccuacgacuaccccaaguacuccgaggaggccaagcugaaccgggaggagaucgacggcgugaagcucgagagcacccgcaucuaccagauccuggcgaucuacuccaccgucgccagcagccuggugcucguggucucccugggggccaucagcuucuggaugugcuccaacggcagccugcagugccggaucugcaucuga

SEQ ID NO: 68516 - RNA, 1701 nt, Artificial Sequence; identical to SEQ ID NO: 66935
  derived and/or modified CDS sequence (opt1) from hemagglutinin__InfluenzaA__ADE29011

SEQ ID NO: 68517 - RNA, 1701 nt, Artificial Sequence
  derived and/or modified CDS sequence (opt1) from hemagglutinin__InfluenzaA__ADE29021
augaaggccauccuggugguccuccuguacaccuucgccaccgcgaacgccgacacgcugugcaucggcuaccacgccaacaacagcaccgacaccguggacaccgugcucgagaagaacgucacggugacccacuccgugaaccugcuggaggacaagcacaacgggaagcucugcaagcugcgcggcgucgcgccccugcaccucgggaagugcaacaucgccggcuggauccuggggaacccggagugcgagagccuguccaccgcgagcuccuggagcuacaucguggagaccuccggcagcgacaacggcacgugcuaccccggggacuucaucgacuacgaggagcuccgggagcagcuguccagcguguccagcuucgagcgcuucgagaucuuccccaagaccuccagcuggcccaaccacgacuccaacaagggcgucaccgccgccugcccgcacgccggggccaagagcuucuacaagaaccugaucuggcucgugaagaagggcaacuccuaccccaagcugagcaaguccuacaucaacgacaaggggaaggaggugcugguccucuggggcauccaccaccccagcaccagcacggaccagcagucccuguaccagaacgccgacgccuacgugagcgugggcaccucccgguacagcaagaaguucaagcccgagaucgccauccgcccgaagguccgggaccaggaggggcgcaugaacuacuacuggacccugguggagcccggcgacaagaucaccuucgaggccacggggaaccucguggucccccgguacgcguucgccauggagcgcaacgccggcuccggcaucaucaucagcgacacccccgugcacgacugcaacacgaccugccagaccccgaagggggccaucaacaccucccugcccuuccagaacauccaccccaucaccaucggcaagugccccaaguacgucaagagcaccaagcugcggcucgccacggggcugcgcaacgugccguccauccagagccggggccuguucggggcgaucgccggcuucaucgagggcggguggaccggcaugguggacgggugguacggcuaccaccaccagaacgagcagggguccggcuacgccgccgaccucaagagcacccagaacgccaucgacaagaucaccaacaaggugaacuccgucaucgagaagaugaacacgcaguucaccgcggugggcaaggaguucaaccaccuggagaagcgcaucgagaaccugaacaagaaggucgacgacggguuccucgacaucuggaccuacaacgccgagcugcuggugcuccuggagaacgagcggacccuggacuaccacgacagcaacgugaagaaccucuacgagaagguccgcucccagcugaagaacaacgccaaggagaucggcaacgggugcuucgaguucuaccacaagugcgacaacacgugcauggagagcgugaagaacggcaccuacgacuaccccaaguacuccgaggaggccaagcugaaccgggaggagaucgacggggugaagcucgagagcacccgcaucuaccagauccuggccaucuacuccaccgucgcgagcagccuggugcucguggucucccugggcgccaucagcuucuggaugugcuccaacggcagccugcagugccggaucugcaucuga

SEQ ID NO: 68518 - RNA, 1701 nt, Artificial Sequence; identical to SEQ ID NO: 68342
  derived and/or modified CDS sequence (opt1) from hemagglutinin__InfluenzaA__ADE29031

SEQ ID NO: 68519 - RNA, 1701 nt, Artificial Sequence
  derived and/or modified CDS sequence (opt1) from hemagglutinin__InfluenzaA__ADE29041
augaaggccauccuggugguccuccuguacaccuucgccaccgcgaacgccgacacgcugugcaucggcuaccacgccaacaacagcaccgacaccguggacaccgugcucgagaagaacgucacggugacccacuccgugaaccugcuggaggacaagcacaacgggaagcucugcaagcugcgcggcgucgcgccccugcaccucgggaagugcaacaucgccggcuggauccuggggaacccggagugcgagagccuguccaccgccagcuccuggagcuacaucguggagaccuccagcuccgacaacggcacgugcuaccccggcgacuucaucgacuacgaggagcuccgggagcagcugagcuccgugagcuccuucgagcgcuucgagaucuuccccaagaccagcuccuggcccaaccacgacagcaacaagggggucaccgccgccugcccgcacgccggcgcgaaguccuucuacaagaaccugaucuggcucgugaagaaggggaacagcuaccccaagcuguccaagagcuacaucaacgacaagggcaaggaggugcugguccucugggggauccaccaccccagcaccuccgccgaccagcagagccuguaccagaacgccgacgccuacguguucgugggcacgucccgguacagcaagaaguucaagcccgagaucgccauccgcccgaagguccgggaccaggagggccgcaugaacuacuacuggacccugguggagcccggggacaagaucaccuucgaggcgaccggcaaccucguggucccccgguacgccuucgccauggagaagaacgccggguccggcaucaucaucagcgacacgcccgugcacgacugcaacacgaccugccagaccccgaagggcgccaucaacaccucccugcccuuccagaacauccaccccaucaccaucgggaagugccccaaguacgucaagagcaccaagcugcgccucgcgaccggccugcggaacgugccguccauccagagccgcgggcuguucggcgccaucgccggguucaucgagggcggcuggacggggaugguggacggcugguacggguaccaccaccagaacgagcagggcuccggguacgccgccgaccucaagagcacccagaacgcgaucgacgagaucaccaacaaggugaacuccgucaucgagaagaugaacacccaguucacggccgugggcaaggaguucaaccaccuggagaagcggaucgagaaccugaacaagaaggucgacgacggcuuccucgacaucuggaccuacaacgccgagcugcuggugcuccuggagaacgagcgcacccuggacuaccacgacagcaacgugaagaaccucuacgagaagguccggucccagcugaagaacaacgccaaggagaucgggaacggcugcuucgaguucuaccacaagugcgacaacacgugcauggagagcgugaagaacgggaccuacgacuaccccaaguacuccgaggaggccaagcugaaccgcgaggagaucgacggcgugaagcucgagagcacccggaucuaccagauccuggcgaucuacuccaccgucgccagcagccuggugcucguggucucccugggggccaucagcuucuggaugugcuccaacggcagccugcagugccgcaucugcaucuga

SEQ ID NO: 68520 - RNA, 1701 nt, Artificial Sequence; identical to SEQ ID NO: 68342
  derived and/or modified CDS sequence (opt1) from hemagglutinin__InfluenzaA__ADE29051

SEQ ID NO: 68521 - RNA, 1701 nt, Artificial Sequence
  derived and/or modified CDS sequence (opt1) from hemagglutinin__InfluenzaA__ADE29085
augaaggccauccuggugguccuccuguacaccuucgccaccgcgaacgccgacacgcugugcaucggcuaccacgccaacaacagcaccgacaccguggacaccgugcucgagaagaacgucacggugacccacuccgugaaccugcuggaggacaagcacaacgggaagcucugcaagcugcgcggcgucgcgccccugcaccucgggaagugcaacaucgccggcuggauccuggggaacccggagugcgagagccuguccaccgcgagcuccuggagcuacaucguggagacccccuccagcgacaacggcacgugcuaccccggcgacuucaucgacuacgaggagcuccgggagcagcuguccagcguguccagcuucgagcgcuucgagaucuuccccaagaccuccagcuggccgaaccacgacuccaacaagggggucaccgccgccugcccccacgccgaggccaagagcuucuacaagaaccugaucuggcucgugaagaagggcaacuccuaccccaagcugagcaaguccuacaucaacgacaaggggaaggaggugcugguccucuggggcauccaccaccccagcaccagcgccgaccagcagucccuguaccagaacgccgacgccuacguguucguggggagcucccgguacagcaagacguucaagccggagaucgccauccgccccaagguccgggaccgcgagggccggaugaacuacuacuggacccugguggagcccggcgacaagaucaccuucgaggcgaccgggaaccucguggucccccgcuacgccuucgccauggagcggaacgccggcuccgggaucaucaucagcgacacgccggugcacgacugcaacacgaccugccagacccccaagggcgccaucaacaccucccugcccuuccagaacauccaccccaucaccaucggcaagugcccgaaguacgucaagagcaccaagcugcgccucgcgaccgggcugcggaacauccccuccauccagagccgcggccuguucggggccaucgccggcuucaucgagggcggguggacgggcaugguggacgggugguacggcuaccaccaccagaacgagcagggguccggcuacgccgccgaccucaagagcacccagaacgcgaucgacgagaucaccaacaaggugaacuccgugaucgagaagaugaacacccaguucacggccgucgggaaggaguucaaccaccuggagaagcggaucgagaaccugaacaagaagguggacgacggcuuccucgacaucuggaccuacaacgccgagcugcugguccuccuggagaacgagcgcacccuggacuaccacgacagcaacgugaagaaccucuacgagaaggugcggucccagcugaagaacaacgccaaggagaucggcaacgggugcuucgaguucuaccacaagugcgacaacacgugcauggagagcgucaagaacggcaccuacgacuaccccaaguacuccgaggaggccaagcugaaccgcgaggagaucgacggggugaagcucgagagcacccggaucuaccagauccuggcgaucuacuccaccguggccagcagccugguccucguggugucccugggcgccaucagcuucuggaugugcuccaacgggagccugcagugccgcaucugcaucuga

SEQ ID NO: 68522 - RNA, 1701 nt, Artificial Sequence
  derived and/or modified CDS sequence (opt1) from hemagglutinin__InfluenzaA__ADE29095
augaaggccauccuggugguccuccuguacaccuucgccaccgcgaacgccgacacgcugugcaucggcuaccacgccaacaacagcaccgacaccguggacaccgugcucgagaagaacgucacggugacccacuccgugaaccugcuggaggacaagcacaacgggaagcucugcaagcugcgcggcgucgcgccccugcaccucgggaagugcaacaucgccggcuggauccuggggaacccggagugcgagagccuguccaccgcgagcuccuggagcuacaucguggagacccccuccagcgacaacggcacgugcuaccccggcgacuucaucgacuacgaggagcuccgggagcagcuguccagcguguccagcuucgagcgcuucgagaucuuccccaagaccuccagcuggccgaaccacgacuccaacaagggggucaccgccgccugcccccacgccggcgccaagagcuucuacaagaaccugaucuggcucgugaagaaggggaacuccuaccccaagcugagcaaguccuacaucaacgacaagggcaaggaggugcugguccucugggggauccaccaccccagcaccagcgccgaccagcagucccuguaccagaacgccgacgccuacguguucgugggcagcucccgguacagcaagacguucaagccggagaucgccauccgccccaagguccgggaccgcgagggccggaugaacuacuacuggacccugguggagcccggggacaagaucaccuucgaggcgaccggcaaccucguggucccccgcuacgccuucgccauggagcggaacgccggguccggcaucaucaucagcgacacgccggugcacgacugcaacacgaccugccagacccccaagggcgccaucaacaccucccugcccuuccagaacauccaccccaucaccaucgggaagugcccgaaguacgucaagagcaccaagcugcgccucgcgaccggccugcggaacauccccuccauccagagccgcgggcuguucggcgccaucgccggguucaucgagggcggcuggacggggaugguggacggcugguacggguaccaccaccagaacgagcagggcuccggguacgccgccgaccucaagagcacccagaacgcgaucgacgagaucaccaacaaggugaacuccgugaucgagaagaugaacacccaguucacggccgucggcaaggaguucaaccaccuggagaagcggaucgagaaccugaacaagaagguggacgacggcuuccucgacaucuggaccuacaacgccgagcugcugguccuccuggagaacgagcgcacccuggacuaccacgacagcaacgugaagaaccucuacgagaaggugcggucccagcugaagaacaacgccaaggagaucgggaacggcugcuucgaguucuaccacaagugcgacaacacgugcauggagagcgucaagaacgggaccuacgacuaccccaaguacuccgaggaggccaagcugaaccgcgaggagaucgacggcgugaagcucgagagcacccggaucuaccagauccuggcgaucuacuccaccguggccagcagccugguccucguggugucccugggggccaucagcuucuggaugugcuccaacggcagccugcagugccgcaucugcaucuga

SEQ ID NO: 68523 - RNA, 1701 nt, Artificial Sequence; identical to SEQ ID NO: 67612
  derived and/or modified CDS sequence (opt1) from hemagglutinin__InfluenzaA__ADE34191

SEQ ID NO: 68524 - RNA, 1701 nt, Artificial Sequence; identical to SEQ ID NO: 67612
  derived and/or modified CDS sequence (opt1) from hemagglutinin__InfluenzaA__ADE34202

SEQ ID NO: 68525 - RNA, 1701 nt, Artificial Sequence
  derived and/or modified CDS sequence (opt1) from hemagglutinin__InfluenzaA__ADE34213
augaagaccaucaucgcccugagcuacauccucugccugguguucgcccagaagcugcccggcaacgacaacuccaccgcgacgcucugccuggggcaccacgccgucccgaacggcaccaucgugaagaccaucaccaacgaccagaucgaggugacgaacgccaccgagcugguccagagcuccagcaccggggagaucugcgacagcccccaccagauccucgacggcgagaacugcacccugaucgacgcccugcucggggacccccagugcgacggcuuccagaacaagaagugggaccuguucguggagcgccggaaggccuacagcaacugcuaccccuacgacgugccggacuacgcgucccugcgcagccucgucgccuccagcggcacgcuggaguucaacaacgaguccuucaacuggaccggggugacccagaacggcaccagcuccgccugcauccggcgcagcaacaacuccuucuucagccggcugaacuggcucacgcaccugaaguucaaguaccccgcccugaacgugaccaugcccaacaacgagcaguucgacaagcucuacaucuggggcguccaccaccccgggaccgacaacgaccagaucuuccuguacgcgcaggccuccgggcgcaucaccgugagcacgaagcggucccagcagaccgugaucccgaacaucggcagccgcccccggguccgcaacauccccagccggaucuccaucuacuggaccaucgugaagcccggcgacauccugcucaucaacagcaccgggaaccugaucgccccgcgcggcuacuucaagauccgguccgggaaguccuccaucaugcgcagcgacgcccccaucggcaagugcaacuccgagugcaucacgcccaacggcagcauccccaacgacaagccguuccagaacgugaaccggaucaccuacggggccugcccccgcuacgucaagcagaacacccugaagcucgcgaccggcaugcggaacgugcccgagaagcagacgcgcgggaucuucggcgccaucgccggguucaucgagaacggcugggagggcaugguggacgggugguacggcuuccggcaccagaacuccgaggggcgcggccaggccgccgaccucaagagcacccaggcggccaucgaccagaucaacgggaagcugaaccggcugaucggcaagaccaacgagaaguuccaccagaucgagaaggaguucuccgaggucgagggccgcauccaggaccuggagaaguacguggaggacaccaagaucgaccuguggagcuacaacgccgagcuccugguggcccuggagaaccagcacacgaucgaccucaccgacuccgagaugaacaagcuguucgagaagaccaagaagcagcugcgcgagaacgccgaggacauggggaacggcugcuucaagaucuaccacaagugcgacaacgcgugcaucgggagcauccggaacggcaccuacgaccacgacgucuaccgcgacgaggcccucaacaaccgguuccagaucaaggggguggagcugaaguccggcuacaaggacuggauccuguggaucagcuucgccaucuccugcuuccuccugugcguggcccugcucggcuucaucaugugggccugccagaaggggaacauccgcugcaacaucugcaucuga

SEQ ID NO: 68526 - RNA, 1701 nt, Artificial Sequence; identical to SEQ ID NO: 67612
  derived and/or modified CDS sequence (opt1) from hemagglutinin__InfluenzaA__ADE34224

SEQ ID NO: 68527 - RNA, 1701 nt, Artificial Sequence
  derived and/or modified CDS sequence (opt1) from hemagglutinin__InfluenzaA__ADE34235
augaagaccaucaucgcccugagcuacauccucugccugguguucgcccagaagcugcccggcaacgacaacuccaccgcgacgcucugccuggggcaccacgccgucccgaacggcaccaucgugaagaccaucaccaacgaccagaucgaggugacgaacgccaccgagcugguccagagcuccagcaccggggagaucugcgacagcccccaccagauccucgacggcaagaacugcacccugaucgacgcccugcucggggacccccagugcgacggcuuccagaacaagaagugggaccuguucguggagcgcagcaaggccuacuccaacugcuaccccuacgacgugccggacuacgcgagccugcggucccucgucgccagcuccggcacgcuggaguucaacaacgagagcuucaacuggaccggggugacccaggacggcaccuccagcgccugcauccgccgguccaagaacagcuucuucucccgccugaacuggcucacgcaccugaacuucaaguaccccgcccugaacgugaccaugcccaacaacgagcaguucgacaagcucuacaucuggggcguccaccaccccgggaccgacaaggaccagaucuuccuguacgcgcaggccagcgggcggaccacgguguccaccaagcgcagccagcagaccgccaucccgaacaucggcagccggccccgcgugcggaacauccccucccgcaucagcaucuacuggaccaucgucaagcccggcgacauccugcucaucaacuccacggggaaccugaucgccccgcggggcuacuucaagauccgcagcgggaaguccagcaucaugcgguccgacgcccccaucggcaagugcaacagcgagugcaucacccccaacggcuccauccccaacgacaagccguuccagaacgugaaccgcaucaccuacggggcgugcccccgguacgugaagcagaacacccugaagcucgccacgggcaugcgcaacguccccgagaagcagacccgggggaucuucggcgccaucgccggguucaucgagaacggcugggagggcaugguggacgggugguacggcuuccgccaccagaacagcgaggggcggggccaggccgcggaccugaaguccacccaggccgccaucgaccagaucaacgggaagcugaaccgccucaucggcaagaccaacgagaaguuccaccagaucgagaaggaguucagcgagguggagggccggauccaggaccuggagaaguacgucgaggacacgaagaucgaccugugguccuacaacgccgagcuccugguggcccuggagaaccagcacaccaucgaccucaccgacagcgagaugaacaagcuguucgagaagaccaagaagcagcugcgcgagaacgcggaggacauggggaacggcugcuucaagaucuaccacaagugcgacaacgccugcaucggguccauccgcaacggcacguacgaccacgacguguaccgggacgaggcccucaacaaccgcuuccagaucaagggggucgagcugaaguccggcuacaaggacuggauccuguggaucuccuucgccaucagcugcuuccuccugugcguggcccugcucggcuucaucaugugggcgugccagaaggggaacauccggugcaacaucugcaucuga

SEQ ID NO: 68528 - RNA, 1701 nt, Artificial Sequence; identical to SEQ ID NO: 67612
  derived and/or modified CDS sequence (opt1) from hemagglutinin__InfluenzaA__ADE34246

SEQ ID NO: 68529 - RNA, 1701 nt, Artificial Sequence; identical to SEQ ID NO: 67637
  derived and/or modified CDS sequence (opt1) from hemagglutinin__InfluenzaA__ADE34257

SEQ ID NO: 68530 - RNA, 1701 nt, Artificial Sequence
  derived and/or modified CDS sequence (opt1) from hemagglutinin__InfluenzaA__ADE34268
augaagaccaucaucgcccugagcuacauccucugccugguguucgcccagaagcugcccggcaacgacaacuccaccgcgacgcucugccuggggcaccacgccgucccgaacggcaccaucgugaagaccaucaccaacgaccagaucgaggugacgaacgccaccgagcugguccagagcuccagcaccggggagaucugcgacagcccccaccagauccucgacggcaagaacugcacccugaucgacgcccugcucggggacccccagugcgacggcuuccagaacaagaagugggaccuguucguggagcgcagcaaggccuacuccaacugcuaccccuacgaggugccggacuacgcgagccugcggucccucgucgccagcuccggcacgcuggaguucaacaacgagagcuucaacuggaccggggugacccaggacggcaccuccagcgccugcauccgccgguccaagaacagcuucuucucccgccugaacuggcucacgcaccugaacuucaaguaccccgcccugaacgugaccaugcccaacaacgagcaguucgacaagcucuacaucuggggcguccaccaccccgggaccgacaaggaccagaucuuccuguacgcgcaggccagcgggcggaucaccguguccacgaagcgcagccagcagaccgccaucccgaacaucggcagccggccccgcgugcggaacauccccucccgcaucagcaucuacuggaccaucgucaagcccggcgacauccugcucaucaacuccaccgggaaccugaucgccccgcggggcuacuucaagauccgcagcgggaaguccagcaucaugcgguccgacgcccccaucggcaagugcaacagcgagugcaucacgcccaacggcuccauccccaacgacaagccguuccagaacgugaaccgcaucaccuacggggcgugcccccgguacgugaagcagaacacccugaagcucgccaccggcaugcgcaacguccccgagaagcagacgcgggggaucuucggcgccaucgccggguucaucgagaacggcugggagggcaugguggacgggugguacggcuuccgccaccagaacagcgaggggcggggccaggccgcggaccugaaguccacccaggccgccaucgaccagaucaacgggaagcugaaccgccucaucggcaagaccaacgagaaguuccaccagaucgagaaggaguucagcgagguggagggccggauccaggaccuggagaaguacgucgaggacaccaagaucgaccugugguccuacaacgccgagcuccugguggcccuggagaaccagcacacgaucgaccucaccgacagcgagaugaacaagcuguucgagaagaccaagaagcagcugcgcgagaacgcggaggacauggggaacggcugcuucaagaucuaccacaagugcgacaacgccugcaucggguccauccgcaacggcaccuacgaccacgacguguaccgggacgaggcccucaacaaccgcuuccagaucaagggggucgagcugaaguccggcuacaaggacuggauccuguggaucuccuucgccaucagcugcuuccuccugugcguggcccugcucggcuucaucaugugggcgugccagaaggggaacauccggugcaacaucugcaucuga

SEQ ID NO: 68531 - RNA, 1701 nt, Artificial Sequence
  derived and/or modified CDS sequence (opt1) from hemagglutinin__InfluenzaA__ADE45499
augaaggccauccuggugguccuccuguacaccuucgccaccgcgaacgccgacacgcugugcaucggcuaccacgccaacaacagcaccgacaccguggacaccgugcucgagaagaacgucacggugacccacuccgugaaccugcuggaggacaagcacaacgggaagcucugcaagcugcgcggcgucgcgccccugcaccucgggaagugcaacaucgccggcuggauccuggggaacccggagugcgagagccuguccaccgcgagcuccuggagcuacaucguggagaccuccagcuccgacaacggcacgugcuaccccggcgacuucaucgacuacgaggagcuccgggagcagcugagcuccgugagcuccuucaagcgcuucgagaucuuccccaagaccagcuccuggcccaaccacgacccgaacaagggggucaccgccgccugcccccacgccggcgccaagagcuucuacaagaaccugaucuggcucgugaagaaggggaacuccuaccccaagcugagcaaguccuacaucaacgacaagggcaaggaggugcugguccucugggggauccaccaccccagcaccagcgccgaccagcagucccuguaccagaacgccgacgccuacguguucgugggcacgagccgguacuccaagaaguucaagccggagaucgccauccgccccaagguccgggaccaggagggccgcaugaacuacuacuggacccugguggagcccggggacaagaucaccuucgaggcgaccggcaaccucguggucccccgguacgccuucgccauggagcgcaacgccgggagcggcaucaucaucuccgacacgccggugcacgacugcaacacgaccugccagacccccaagggcgccaucaacaccagccugcccuuccagaacauccaccccaucaccaucgggaagugcccgaaguacgugaaguccaccaagcugcggcucgcgaccggccugcgcaacguccccagcauccagucccgggggcuguucggcgccaucgccggguucaucgagggcggcuggacggggaugguggacggcugguacggguaccaccaccagaacgagcagggcagcggguacgccgccgaccucaaguccacccagaacgcgaucgacgagaucaccaacaaggugaacagcgucaucgagaagaugaacacccaguucacggccgugggcaaggaguucaaccaccuggagaagcgcaucgagaaccugaacaagaaggucgacgacggcuuccucgacaucuggaccuacaacgccgagcugcuggugcuccuggagaacgagcggacccuggacuaccacgacuccaacgugaagaaccucuacgagaagguccgcagccagcugaagaacaacgccaaggagaucgggaacggcugcuucgaguucuaccacaagugcgacaacacgugcauggaguccgugaagaacgggaccuacgacuaccccaaguacagcgaggaggccaagcugaaccgggaggagaucgacggcgugaagcucgaguccacccgcaucuaccagauccuggcgaucuacagcaccgucgccuccagccuggugcucguggucagccugggggccaucuccuucuggaugugcagcaacggcucccugcagugccggaucugcaucuga

SEQ ID NO: 68532 - RNA, 1701 nt, Artificial Sequence; identical to SEQ ID NO: 67491
  derived and/or modified CDS sequence (opt1) from hemagglutinin__InfluenzaA__ADE45501

SEQ ID NO: 68533 - RNA, 1701 nt, Artificial Sequence
  derived and/or modified CDS sequence (opt1) from hemagglutinin__InfluenzaA__ADE45503
augaaggccauccuggugguccuccuguacaccuucgccaccgcgaacgccgacacgcugugcaucggcuaccacgccaacaacagcaccgacaccguggacaccgugcucgagaagaacgucacggugacccacuccgugaaccugcuggaggacaagcacaacgggaagcucugcaagcugcgcggcgucgcgccccugcaccucgggaagugcaacaucgccggcuggauccuggggaacccggagugcgagagccuguccaccgcgagcuccuggagcuacaucguggagaccuccagcuccgacaacggcacgugcuaccccggcgacuucaucgacuacgaggagcuccgggagcagcugagcuccgugagcuccuucgagcgcuucgagaucuuccccaagaccagcuccuggcccaaccacgacccgaacaagggggucaccgccgccugcccccacgccggcgccaagagcuucuacaagaaccugaucuggcucgugaagaaggggaacuccuaccccaagcugagcaaguccuacaucaacgacaagggcaaggaggugcugguccucugggggauccaccaccccagcaccagcgccgaccagcagucccuguaccagaacgccgacgccuacguguucgugggcacgagccgguacuccaagaaguucaagccggagaucgccauccgccccaagguccgggaccaggagggccgcaugaacuacuacuggacccugguggagcccggggacaagaucaccuucgaggcgaccggcaaccucguggucccccgguacgccuucgccauggagcgcaacgccgggagcggcaucaucaucuccgacacgccggugcacgacugcaacacgaccugccagacccccaagggcgccaucaacaccagccugcccuuccagaacauccaccccaucaccaucgggaagugcccgaaguacgugaaguccaccaagcugcggcucgcgaccggccugcgcaacguccccagcauccagucccgggggcuguucggcgccaucgccggguucaucgagggcggcuggacggggaugguggacggcugguacggguaccaccaccagaacgagcagggcagcggguacgccgccgaccucaaguccacccagaacgcgaucgacgagaucaccaacaaggugaacagcgucaucgagaagaugaacacccaguucacggccgugggcaaggaguucaaccaccuggagaagcgcaucgagaaccugaacaagaaggucgacgacggcuuccucgacaucuggaccuacaacgccgagcugcuggugcuccuggagaacgagcggacccuggacuaccacgacuccaacgugaagaaccucuacgagaagguccgcagccagcugaagaacaacgccaaggagaucgggaacggcugcuucgaguucuaccacaagugcgacaacacgugcauggaguccgugaagaacgggaccuacgacuaccccaaguacagcgaggaggccaagcugaaccgggaggagaucgacggcgugaagcucgaguccacccgcgucuaccagauccuggcgaucuacagcaccguggccuccagccuggugcucgucgugagccugggggccaucuccuucuggaugugcagcaacggcucccugcagugccggaucugcaucuga

SEQ ID NO: 68534 - RNA, 1701 nt, Artificial Sequence; identical to SEQ ID NO: 66693
  derived and/or modified CDS sequence (opt1) from hemagglutinin__InfluenzaA__ADE45505

SEQ ID NO: 68535 - RNA, 1701 nt, Artificial Sequence; identical to SEQ ID NO: 67046
  derived and/or modified CDS sequence (opt1) from hemagglutinin__InfluenzaA__ADE45507

SEQ ID NO: 68536 - RNA, 1701 nt, Artificial Sequence; identical to SEQ ID NO: 67046
  derived and/or modified CDS sequence (opt1) from hemagglutinin__InfluenzaA__ADE45509

SEQ ID NO: 68537 - RNA, 1701 nt, Artificial Sequence; identical to SEQ ID NO: 67491
  derived and/or modified CDS sequence (opt1) from hemagglutinin__InfluenzaA__ADE45511

SEQ ID NO: 68538 - RNA, 1701 nt, Artificial Sequence
  derived and/or modified CDS sequence (opt1) from hemagglutinin__InfluenzaA__ADE45513
augaaggccauccuggugguccuccuguacaccuucgccaccgcgaacgccgacacgcugugcaucggcuaccacgccaacaacagcaccgacaccguggacaccgugcucgagaagaacgucacggugacccacuccgugaaccugcuggaggacaagcacaacgggaagcucugcaagcugcgcggcgucgcgccccugcaccucgggaagugcaacaucgccggcuggauccuggggaacccggagugcgagagccuguccaccgcgagcuccuggagcuacaucguggagaccuccagcuccgacaacggcacgugcuaccccggcgacuucaucgacuacgaggagcuccgggagcagcugagcuccgugagcuccuucgagcgcuucgagaucuuccccaagaccagcuccuggcccaaccacgacccgaacaagggggucaccgccgccugcccccacgccggcgccaagagcuucuacaagaaccugaucuggcucgugaagaaggggaacuccuaccccaagcugagcaaguccuacaucaacgacaagggcaaggaggugcugguccucugggggauccaccaccccagcaccagcgccgaccagcagucccuguaccagaacgccgacgccuacgccuucgugggcacgagccgguacuccaagaaguucaagccggagaucgcgauccgccccaaggugcgggaccaggagggccgcaucaacuacuacuggacccuggucgagcccggggacaagaucaucuucgaggccaccggcaaccucguggugccccgguacgccuucgccauggagcgcaacgccgggagcggcaucaucaucuccgacaccccggcgcacgacugcaacacgaccugccagacccccaagggcgccaucaacaccagccugcccuuccagaacauccaccccaucacgaucgggaagugcccgaaguacgucaaguccaccaagcugcggcucgccaccggccugcgcaacgugcccagcauccagucccgggggcuguucggcgccaucgccggguucaucgagggcggcuggaccgggaugguggacggcugguacggguaccaccaccagaacgagcagggcagcggguacgcggccgaccucaaguccacgcagaacgccaucgacgagaucaccaacaaggucaacagcgugaucgagaagaugaacacccaguucaccgccgugggcaaggaguucaaccaccuggagaagcgcaucgagaaccugaacaagaaggucgacgacggcuuccucgacaucuggacguacaacgccgagcugcuggugcuccuggagaacgagcggacccuggacuaccacgacuccaacgucaagaaccucuacgagaaggugcgcagccagcugaagaacaacgcgaaggagaucgggaacggcugcuucgaguucuaccacaagugcgacaacacgugcauggaguccgugaagaacgggaccuacgacuaccccaaguacagcgaggaggccaagcugaaccgggaggagaucgacggcgucaagcucgaguccacccgcaucuaccagauccuggccaucuacagcaccguggccuccagccuggugcucgucgugagccugggggcgaucuccuucuggaugugcagcaacggcucccugcagugccggaucugcaucuga

SEQ ID NO: 68539 - RNA, 1701 nt, Artificial Sequence
  derived and/or modified CDS sequence (opt1) from hemagglutinin__InfluenzaA__ADE75388
augaaggccauccuggugguccuccuguacaccuucgccaccgcgaacgccgacacgcugugcaucggcuaccacgccaacaacagcaccgacaccguggacaccgugcucgagaagaacgucacggugacccacuccgugaaccugcuggaggacaagcacaacgggaagcucugcaagcugcgcggcgucgcgccccugcaccucgggaagugcaacaucgccggcuggauccuggggaacccggagugcgagagccuguccaccgccagcuccuggagcuacaucguggagaccuccagcuccgagaacggcacgugcuaccccggcgacuucaucgacuacgaggagcuccgggagcagcugagcuccgugagcuccuucgagcgcuucgagaucuuccccaagaccagcuccuggcccaaccacgacagcaacaagggggucaccgccgccugcccgcacgccggcgcgaaguccuucuacaagaaccugaucuggcucgugaagaaggggaacagcuaccccaagcuguccaagagcuacaucaacgacaagggcaaggaggugcugguccucugggggauccaccaccccagcaccuccgccgaccagcagagccuguaccagaacgccgacgccuacguguucgugggcacgucccgguacagcaagaaguucaagcccgagaucgccauccgcccgaagguccgggaccaggagggccgcaugaacuacuacuggacccugguggagcccggggacaagaucaccuucgaggcgaccggcaaccucguggucccccgguacgccuucgccauggagcgcaacgccggguccggcaucaucaucagcgacacgcccgugcacgacugcaacacgaccugccagaccccgaagggcgccaucaacaccucccugcccuuccagaacauccaccccaucaccaucgggaagugccccaaguacgucaagagcaccaagcugcggcucgcgaccggccugcgcaacgugccguccauccagagccgggggcuguucggcgccaucgccggguucaucgagggcggcuggacggggaugguggacggcugguacggguaccaccaccagaacgagcagggcuccggguacgccgccgaccucaagagcacccagaacgcgaucgacgagaucaccaacaaggugaacuccgucaucgagaagaugaacacccaguucacggccgugggcaaggaguucaaccaccuggagaagcgcaucgagaaccugaacaagaaggucgacgacggcuuccucgacaucuggaccuacaacgccgagcugcuggugcuccuggagaacgagcggacccuggacuaccacgacagcaacgugaagaaccucuacgagaagguccgcucccagcugaagaacaacgccaaggagaucgggaacggcugcuucgaguucuaccacaagugcgacaacacgugcauggagagcgugaagaacgggaccuacgacuaccccaaguacuccgaggaggccaagcugaaccgggaggagaucgacggcgugaagcucgagagcacccgcaucuaccagauccuggcgaucuacuccaccgucgccagcagccuggugcucguggucucccugggggccaucagcuucuggaugugcuccaacggcagccugcagugccggaucugcaucuga

SEQ ID NO: 68540 - RNA, 1701 nt, Artificial Sequence; identical to SEQ ID NO: 66693
  derived and/or modified CDS sequence (opt1) from hemagglutinin__InfluenzaA__ADE75390

SEQ ID NO: 68541 - RNA, 1701 nt, Artificial Sequence; identical to SEQ ID NO: 66693
  derived and/or modified CDS sequence (opt1) from hemagglutinin__InfluenzaA__ADF10067

SEQ ID NO: 68542 - RNA, 1701 nt, Artificial Sequence; identical to SEQ ID NO: 66693
  derived and/or modified CDS sequence (opt1) from hemagglutinin__InfluenzaA__ADF10077

SEQ ID NO: 68543 - RNA, 1701 nt, Artificial Sequence
  derived and/or modified CDS sequence (opt1) from hemagglutinin__InfluenzaA__ADF10087
augaaggccauccuggugguccuccuguacaccuucgccaccgcgaacgccgacacgcugugcaucggcuaccacgccaacaacagcaccgacaccguggacaccgugcucgagaagaacgucacggugacccacuccgugaaccugcuggaggacaagcacaacgggaagcucugcaagcugcgcggcgucgcgccccugcaccucgggaagugcaacaucgccggcuggauccuggggaacccggagugcgagagccuguccaccgccagcuccuggagcuacaucguggagaccuccagcuccgacaacggcacgugcuaccccggcgacuucaucgacuacgaggagcuccgggagcagcugagcuccgugagcuccuucgagcgcuucgagaucuuccccaagaccagcuccuggcccaaccacgacagcaacaagggggucaccgccgccugcccgcacgccggcgcgaaguccuucuacaagaaccugaucuggcucgugaagaaggggaacagcuaccccaagcuguccaagagcuacaucaacgacaagggcaaggaggugcugguccucugggggauccaccaccccagcaccuccgccgaccagcagagccuguaccagaacgccgacgccuacguguucgugggcacgucccgguacagcaagaaguucaagcccgagaucgccauccgcccgaagguccgggaccaggagggccgcaugaacuacuacuggacccugguggagcccggggacaagaucaccuucgaggcgaccggcaaccucguggucccccgguacgccuucgccaugaagcgcaacgccggguccggcaucaucaucagcgacacgcccgugcacgacugcaacacgaccugccagaccccgaagggcgccaucaacaccucccugcccuuccagaacauccaccccaucaccaucgggaagugccccaaguacgucaagagcaccaagcugcggcucgcgaccggccugcgcaacgugccguccauccagagccgggggcuguucggcgccaucgccggguucaucgagggcggcuggacggggaugguggacggcugguacggguaccaccaccagaacgagcagggcuccggguacgccgccgaccucaagagcacccagaacgcgaucgacgagaucaccaacaaggugaacuccgucaucgagaagaugaacacccaguucacggccgugggcaaggaguucaaccaccuggagaagcgcaucgagaaccugaacaagaaggucgacgacggcuuccucgacaucuggaccuacaacgccgagcugcuggugcuccuggagaacgagcggacccuggacuaccacgacagcaacgugaagaaccucuacgagaagguccgcaaccagcugaagaacaacgccaaggagaucgggaacggcugcuucgaguucuaccacaagugcgacaacacgugcauggaguccgugaagaacgggaccuacgacuaccccaaguacagcgaggaggccaagcugaaccgggaggagaucgacggcgugaagcucgaguccacccgcaucuaccagauccuggcgaucuacagcaccgucgccuccagccuggugcucguggucagccugggggccaucuccuucuggaugugcagcaacggcucccugcagugccggaucugcaucuga

SEQ ID NO: 68544 - RNA, 1701 nt, Artificial Sequence
  derived and/or modified CDS sequence (opt1) from hemagglutinin__InfluenzaA__ADF10097
auggaggccauccuggugguccuccuguacaccuucgccaccgcgaacgccgacacgcugugcaucggcuaccacgccaacaacagcaccgacaccguggacaccgugcucgagaagaacgucacggugacccacuccgugaaccugcuggaggacaagcacaacgggaagcucugcaagcugcgcggcgucgcgccccugcaccucgggaagugcaacaucgccggcuggauccuggggaacccggagugcgagagccuguccaccgccagcuccuggagcuacaucguggagaccuccagcuccgacaacggcacgugcuaccccggcgacuucaucgacuacgaggagcuccgggagcagcugagcuccgugagcuccuucgagcgcuucgagaucuuccccaagaccagcuccuggcccaaccacgacagcaacaagggggucaccgccgccugcccgcacgccggcgcgaaguccuucuacaagaaccugaucuggcucgugaagaaggggaacagcuaccccaagcuguccaagagcuacaucaacgacaagggcaaggaggugcugguccucugggggauccaccaccccagcaccuccgccgaccagcagagccuguaccagaacgccgacgccuacguguucgugggcuccagcaaguacuccaagaaguucaagcccgagaucgccauccggccgaagguccgcgaccaggagggccggaugaacuacuacuggacgcugguggagcccggggacaagaucaccuucgaggcgaccggcaaccucguggucccccgcuacgccuucgccauggagcggaacgccgggagcggcaucaucaucuccgacacccccgugcacgacugcaacacgaccugccagaccccgaagggcgccaucaacaccagccugcccuuccacaacauccaccccaucacgaucgggaagugccccaaguacgugaaguccaccaagcugcgccucgcgaccggccugcggaacgucccgagcauccagucccgcgggcuguucggcgccaucgccggguucaucgagggcggcuggaccgggaugguggacggcugguacggguaccaccaccagaacgagcagggcagcggguacgccgccgaccucaaguccacgcagaacgcgaucgacgagaucaccaacaaggugaacagcgucaucgagaagaugaacacccaguucaccgccgugggcaaggaguucaaccaccuggagaagcggaucgagaaccugaacaagaaggucgacgacggcuuccucgacaucuggacguacaacgccgagcugcuggugcuccuggagaacgagcgcacccuggacuaccacgacuccaacgugaagaaccucuacgagaagguccggagccagcugaagaacaacgccaaggagaucgggaacggcugcuucgaguucuaccacaagugcgacaacacgugcauggaguccgugaagaacgggaccuacgacuaccccaaguacagcgaggaggccaagcugaaccgcgaggagaucgacggcgugaagcucgaguccaccaagaucuaccagauccuggcgaucuacagcaccgucgccagcucccuggugcucguggucagccugggggccaucuccuucuggaugugcagcaacggcucccugcagugccggaucugcaucuga

SEQ ID NO: 68545 - RNA, 1701 nt, Artificial Sequence
  derived and/or modified CDS sequence (opt1) from hemagglutinin__InfluenzaA__ADF10107
auggaggccauccuggugguccuccuguacaccuucgccaccgcgaacgccgacacgcugugcaucggcuaccacgccaacaacagcaccgacaccguggacaccgugcucgagaagaacgucacggugacccacuccgugaaccugcuggaggacaagcacaacgggaagcucugcaagcugcgcggcgucgcgccccugcaccucgggaagugcaacaucgccggcuggauccuggggaacccggagugcgagagccuguccaccgccagcuccuggagcuacaucguggagaccuccagcuccgacaacggcacgugcuaccccggcgacuucaucgacuacgaggagcuccgggagcagcugagcuccgugagcuccuucgagcgcuucgagaucuuccccaagaccagcuccuggcccaaccacgacagcaacaagggggucaccgccgccugcccgcacgccggcgcgaaguccuucuacaagaaccugaucuggcucgugaagaaggggaacagcuaccccaagcuguccaagagcuacaucaacgacaagggcaaggaggugcugguccucugggggauccaccacccgcccaccagcgccgaccagcagucccuguaccagaacgccgacgccuacguguucgugggcagcuccaaguacagcaagaaguucaagcccgagaucgccauccggcccaagguccgcgaccaggagggccggaugaacuacuacuggacgcugguggagcccggggacaagaucaccuucgaggcgaccggcaaccucguggucccccgcuacgccuucgccauggagcggaacgccggguccggcaucaucaucagcgacaccccggcccacgacugcaacacgaccugccagacccccaagggcgcgaucaacaccucccugcccuuccacaacauccaccccaucacgaucgggaagugcccgaaguacgucaagagcaccaagcugcgccucgccaccggccugcggaacgugcccuccauccagagccgcgggcuguucggcgccaucgccggguucaucgagggcggcuggaccgggaugguggacggcugguacggguaccaccaccagaacgagcagggcuccggguacgccgcggaccucaagagcacgcagaacgccaucgacgagaucaccaacaaggugaacuccgugaucgagaagaugaacacccaguucaccgccgucggcaaggaguucaaccaccuggagaagcggaucgagaaccugaacaagaagguggacgacggcuuccucgacaucuggacguacaacgccgagcugcugguccuccuggagaacgagcgcacccuggacuaccacgacagcaacgugaagaaccucuacgagaaggugcggucccagcugaagaacaacgccaaggagaucgggaacggcugcuucgaguucuaccacaagugcgacaacacgugcauggagagcgucaagaacgggaccuacgacuaccccaaguacuccgaggaggcgaagcugaaccgcgaggagaucgacggcgugaagcucgagagcaccaagaucuaccagauccuggccaucuacuccaccguggccagcagccugguccucguggugucccugggggccaucagcuucuggaugugcuccaacggcagccugcagugccggaucugcaucuga

SEQ ID NO: 68546 - RNA, 1701 nt, Artificial Sequence; identical to SEQ ID NO: 66693
  derived and/or modified CDS sequence (opt1) from hemagglutinin__InfluenzaA__ADF10117

SEQ ID NO: 68547 - RNA, 1701 nt, Artificial Sequence; identical to SEQ ID NO: 68397
  derived and/or modified CDS sequence (opt1) from hemagglutinin__InfluenzaA__ADF10127

SEQ ID NO: 68548 - RNA, 1701 nt, Artificial Sequence; identical to SEQ ID NO: 66693
  derived and/or modified CDS sequence (opt1) from hemagglutinin__InfluenzaA__ADF10137

SEQ ID NO: 68549 - RNA, 1701 nt, Artificial Sequence
  derived and/or modified CDS sequence (opt1) from hemagglutinin__InfluenzaA__ADF10154
augaaggccauccuggugguccuccuguacaccuucgccaccgcgaacgccgacacgcugugcaucggcuaccacgccaacaacagcaccgacaccguggacaccgugcucgagaagaacgucacggugacccacuccgugaaccugcuggaggacaagcacaacgggaagcucugcaagcugcgcggcgucgcgccccugcaccucgggaagugcaacaucgccggcuggauccuggggaacccggagugcgagagccuguccaccgccagcuccuggagcuacaucguggagaccuccagcuccgacaacggcacgugcuaccccggcgacuucaucgacuacgaggagcuccgggagcagcugagcuccgugagcuccuucgagcgcuucgagaucuuccccaagaccagcuccuggcccgaccacgacagcaacaagggggucaccgccgccugcccgcacgccggcgcgaaguccuucuacaagaaccugaucuggcucgugaagaaggggaacagcuaccccaagcuguccaagagcuacaucaacgacaagggcaaggaggugcugguccucugggggauccaccaccccagcaccuccgccgaccagcagagccuguaccagaacgccgacgccuacguguucgugggcacgucccgguacagcaagaaguucaagcccgagaucgccauccgcccgaagguccgggagcaggagggccgcaugaacuacuacuggacccugguggagcccggggacaagaucaccuucgaggcgaccggcaaccucguggucccccgguacgccuucgccauggagcgcaacgccggguccggcaucaucaucagcgacacgcccgugcacgacugcaacacgaccugccagaccccgaagggcgccaucaacaccucccugcccuuccagaacauccaccccaucaccaucgggaagugccccaaguacgucaagagcaccaagcugcggcucgcgaccggccugcgcaacgugccguccauccagagccgggggcuguucggcgccaucgccggguucaucgagggcggcuggacggggaugguggacggcugguacggguaccaccaccagaacgagcagggcuccggguacgccgccgaccucaagagcacccagaacgcgaucgacgagaucaccaacaaggugaacuccgucaucgagaagaugaacacccaguucacggccgugggcaaggaguucaaccaccuggagaagcgcaucgagaaccugaacaagaaggucgacgacggcuuccucgacaucuggaccuacaacgccgagcugcuggugcuccuggagaacgagcggacccuggacuaccacgacagcaacgugaagaaccucuacgagcgcguccggucccagcugaagaacaacgccaaggagaucgggaacggcugcuucgaguucuaccacaagugcgacaacacgugcauggagagcgugaagaacgggaccuacgacuaccccaaguacuccgaggaggccaagcugaaccgcgaggagaucgacggcgugaagcucgagagcacccggaucuaccagauccuggcgaucuacuccaccgucgccagcagccuggugcucguggucucccugggggccaucagcuucuggaugugcuccaacggcagccugcagugccgcaucugcaucuga

SEQ ID NO: 68550 - RNA, 1701 nt, Artificial Sequence
  derived and/or modified CDS sequence (opt1) from hemagglutinin__InfluenzaA__ADF10174
augaaggccauccuggugguccuccuguacaccuucgccaccgcgaacgccgacacgcugugcaucggcuaccacgccaacaacagcaccgacaccguggacaccgugcucgagaagaacgucacggugacccacuccgugaaccugcuggaggacaagcacaacgggaagcucugcaagcugcgcggcgucgcgccccugcaccucgggaagugcaacaucgccggcuggauccuggggaacccggagugcgagagccuguccaccgccagcuccuggagcuacaucguggagaccuccagcuccgacaacggcacgugcuaccccggcgacuucaucgacuacgaggagcuccgggagcagcugagcuccgugagcuccuucgagcgcuucgagaucuuccccaagaccagcuccuggcccaaccacgacagcaacaagggggucaccgccgccugcccgcacgccggcgcgaaguccuucuacaagaaccugaucuggcucgugaagaaggggaacagcuaccccaagcuguccaagagcuacaucaacgacaagggcaaggaggugcugguccucugggggauccaccaccccagcaccuccgccgaccagcagagccuguaccagaacgccgacgccuacguguucgugggcacgucccgguacagcaagaaguucaagcccgagaucgccauccgcccgaagguccgggagcaggagggccgcaugaacuacuacuggacccugguggagcccggggacaagaucaccuucgaggcgaccggcaaccucguggucccccgguacgccuucgccauggagcgcaacgccggguccggcaucaucaucagcgacacgcccgugcacgacugcaacacgaccugccagaccccgaagggcgccaucaacaccucccugcccuuccagaacauccaccccaucaccaucgggaagugccccaaguacgucaagagcaccaagcugcggcucgcgaccggccugcgcaacgugccguccauccagagccgggggcuguucggcgccaucgccggguucaucgagggcggcuggacggggaugguggacggcugguacggguaccaccaccagaacgagcagggcuccggguacgccgccgaccucaagagcacccagaacgcgaucgacgagaucaccaacaaggugaacuccgucaucgagaagaugaacacccaguucacggccgugggcaaggaguucaaccaccuggagaagcgcaucgagaaccugaacaagaaggucgacgacggcuuccucgacaucuggaccuacaacgccgagcugcuggugcuccuggagaacgagcggacccuggacuaccacgacagcaacgugaagaaccucuacgagcgcguccggucccagcugaagaacaacgccaaggagaucgggaacggcugcuucgaguucuaccacaagugcgacaacacgugcauggagagcgugaagaacgggaccuacgacuaccccaaguacuccgaggaggccaagcugaaccgcgaggagaucgacggcgugaagcucgagagcacccggaucuaccagauccuggcgaucuacuccaccgucgccagcagccuggugcucguggucucccugggggccaucagcuucuggaugugcuccaacggcagccugcagugccgcaucugcaucuga

SEQ ID NO: 68551 - RNA, 1701 nt, Artificial Sequence; identical to SEQ ID NO: 68550
  derived and/or modified CDS sequence (opt1) from hemagglutinin__InfluenzaA__ADF10190

SEQ ID NO: 68552 - RNA, 1701 nt, Artificial Sequence; identical to SEQ ID NO: 68397
  derived and/or modified CDS sequence (opt1) from hemagglutinin__InfluenzaA__ADF10237

SEQ ID NO: 68553 - RNA, 1701 nt, Artificial Sequence; identical to SEQ ID NO: 68550
  derived and/or modified CDS sequence (opt1) from hemagglutinin__InfluenzaA__ADF10262

SEQ ID NO: 68554 - RNA, 1701 nt, Artificial Sequence
  derived and/or modified CDS sequence (opt1) from hemagglutinin__InfluenzaA__ADF10288
augaaggccauccuggugguccuccuguacaccuucgccaccgcgaacgccgacacgcugugcaucggcuaccacgccaacaacagcaccgacaccguggacaccgugcucgagaagaacgucacggugacccacuccgugaaccugcuggaggacaagcacaacgggaagcucugcaagcugcgcggcgucgcgccccugcaccucgggaagugcaacaucgccggcuggauccuggggaacccggagugcgagagccuguccaccgccagcuccuggagcuacaucguggagaccuccagcuccgacaacggcacgugcuaccccggcgacuucaucgacuacgaggagcuccgggagcagcugagcuccgugagcuccuucgagcgcuucgagaucuuccccaagaccagcuccuggcccaaccacgacagcaacaagggggucaccgccgccugcccgcacgccggcgcgaaguccuucuacaagaaccugaucuggcucgugaagaaggggaacagcuaccccaagcuguccaagagcuacaucaacgacaagggcaaggaggugcugguccucugggggauccaccaccccagcaccuccgccgaccagcagagccuguaccagaacgccgacgccuacguguucgugggcacgucccgguacagcaagaaguucaagcccgagaucgccauccgcccgaagguccgggagcaggagggccgcaugaacuacuacuggacccugguggagcccggggacaagaucaccuucgaggcgaccggcaaccucguggucccccgguacgccuucgccauggagcgcaacgccggguccggcaucaucaucagcgacacgcccgugcacgacugcaacacgaccugccagaccccgaagggcgccaucaacaccucccugcccuuccagaacauccaccccaucaccaucgggaagugccccaaguacgucaagagcaccaagcugcggcucgcgaccggccugcgcaacgugccguccauccagagccgggggcuguucggcgccaucgccggguucaucgagggcggcuggacggggaugguggacggcugguacggguaccaccaccagaacgagcagggcuccggguacgccgccgaccucaagagcacccagaacgcgaucgacgagaucaccaacaaggugaacuccgucaucgagaagaugaacacccaguucacggccgugggcaaggaguucaaccaccuggagaagcgcaucgagaaccugaacaagaaggucgacgacggcuuccucgacaucuggaccuacaacgccgagcugcuggugcuccuggagaacgagcggacccuggacuaccacgacagcaacgugaagaaccucuacgagcgcguccggucccagcugaagaacaacgccaaggagaucgggaacggcugcuucgaguucuaccacaagugcgacaacacgugcauggagagcgugaagaacgggaccuacgacuaccccaaguacuccgaggaggccaagcugaaccgcgaggagaucgacggcgugaagcucgagagcacccggaucuaccagauccuggcgaucuacuccaccgucgccagcagccuggugcucguggucucccugggggccaucagcuucuggaugugcuccaacggcagccugcagugccgcgugugcaucuga

SEQ ID NO: 68555 - RNA, 1701 nt, Artificial Sequence; identical to SEQ ID NO: 68397
  derived and/or modified CDS sequence (opt1) from hemagglutinin__InfluenzaA__ADF10302

SEQ ID NO: 68556 - RNA, 1701 nt, Artificial Sequence; identical to SEQ ID NO: 68397
  derived and/or modified CDS sequence (opt1) from hemagglutinin__InfluenzaA__ADF10335

SEQ ID NO: 68557 - RNA, 1701 nt, Artificial Sequence; identical to SEQ ID NO: 68397
  derived and/or modified CDS sequence (opt1) from hemagglutinin__InfluenzaA__ADF10359

SEQ ID NO: 68558 - RNA, 1701 nt, Artificial Sequence; identical to SEQ ID NO: 68550
  derived and/or modified CDS sequence (opt1) from hemagglutinin__InfluenzaA__ADF10369

SEQ ID NO: 68559 - RNA, 1701 nt, Artificial Sequence; identical to SEQ ID NO: 68550
  derived and/or modified CDS sequence (opt1) from hemagglutinin__InfluenzaA__ADF10390

SEQ ID NO: 68560 - RNA, 1701 nt, Artificial Sequence; identical to SEQ ID NO: 68397
  derived and/or modified CDS sequence (opt1) from hemagglutinin__InfluenzaA__ADF10528

SEQ ID NO: 68561 - RNA, 1701 nt, Artificial Sequence; identical to SEQ ID NO: 68550
  derived and/or modified CDS sequence (opt1) from hemagglutinin__InfluenzaA__ADF10598

SEQ ID NO: 68562 - RNA, 1701 nt, Artificial Sequence; identical to SEQ ID NO: 68550
  derived and/or modified CDS sequence (opt1) from hemagglutinin__InfluenzaA__ADF10670

SEQ ID NO: 68563 - RNA, 1701 nt, Artificial Sequence; identical to SEQ ID NO: 68550
  derived and/or modified CDS sequence (opt1) from hemagglutinin__InfluenzaA__ADF10724

SEQ ID NO: 68564 - RNA, 1701 nt, Artificial Sequence; identical to SEQ ID NO: 68397
  derived and/or modified CDS sequence (opt1) from hemagglutinin__InfluenzaA__ADF10757

SEQ ID NO: 68565 - RNA, 1701 nt, Artificial Sequence
  derived and/or modified CDS sequence (opt1) from hemagglutinin__InfluenzaA__ADF10828
augaaggccauccuggugguccuccuguacaccuucgccaccgcgaacgccgacacgcugugcaucggcuaccacgccaacaacagcaccgacaccguggacaccgugcucgagaagaacgucacggugacccacuccgugaaccugcuggaggacaagcacaacgggaagcucugcaagcugcgcggcgucgcgccccugcaccucgggaagugcaacaucgccggcuggauccuggggaacccggagugcgagagccuguccaccgccagcuccuggagcuacaucguggagaccuccagcuccgacaacggcacgugcuaccccggcgacuucaucgacuacgaggagcuccgggagcagcugagcuccgugagcuccuucgagcgcuucgagaucuuccccaagaccagcuccuggcccaaccacgacagcaacaagggggucaccgccgccugcccgcacgccggcgcgaaguccuucuacaagaaccugaucuggcucgugaagaaggggaacagcuaccccaagcuguccaagagcuacaucaacgacaagggcaaggaggugcugguccucugggggauccaccaccccagcaccuccacggaccagcagagccuguaccagaacgccgacgccuacguguucgugggcaccucccgguacagcaagaaguucaagcccgagaucgccauccgcccgaagguccgggaccaggagggccgcaugaacuacuacuggacccugguggagcccggggacaagaucaccuucgaggccacgggcaaccucguggucccccgguacgcguucgccauggagcgcaacgccggguccggcaucaucaucagcgacacccccgugcacgacugcaacacgaccugccagaccccgaagggcgccaucaacaccucccugcccuuccagaacauccaccccaucaccaucgggaagugccccaaguacgucaagagcaccaagcugcggcucgccacgggccugcgcaacgugccguccauccagagccgggggcuguucggcgcgaucgccggguucaucgagggcggcuggaccgggaugguggacggcugguacggguaccaccaccagaacgagcagggcuccggguacgccgccgaccucaagagcacccagaacgccaucgacaagaucaccaacaaggugaacuccgucaucgagaagaugaacacgcaguucaccgcggugggcaaggaguucaaccaccuggagaagcgcaucgagaaccugaacaagaaggucgacgacggcuuccucgacaucuggaccuacaacgccgagcugcuggugcuccuggagaacgagcggacccuggacuaccacgacagcaacgugaagaaccucuacgagaagguccgcucccagcugaagaacaacgccaaggagaucgggaacggcugcuucgaguucuaccacaagugcgacaacacgugcauggagagcgugaagaacgggaccuacgacuaccccaaguacuccgaggaggccaagcugaaccgggaggagaucgacggcgugaagcucgagagcacccgcaucuaccagauccuggccaucuacuccaccgucgcgagcagccuggugcucguggucucccugggggccaucagcuucuggaugugcuccaacggcagccugcagugccggaucugcaucuga

SEQ ID NO: 68566 - RNA, 1701 nt, Artificial Sequence; identical to SEQ ID NO: 66693
  derived and/or modified CDS sequence (opt1) from hemagglutinin__InfluenzaA__ADF10874

SEQ ID NO: 68567 - RNA, 1701 nt, Artificial Sequence; identical to SEQ ID NO: 67316
  derived and/or modified CDS sequence (opt1) from hemagglutinin__InfluenzaA__ADF10929

SEQ ID NO: 68568 - RNA, 1701 nt, Artificial Sequence; identical to SEQ ID NO: 67316
  derived and/or modified CDS sequence (opt1) from hemagglutinin__InfluenzaA__ADF10996

SEQ ID NO: 68569 - RNA, 1701 nt, Artificial Sequence; identical to SEQ ID NO: 66693
  derived and/or modified CDS sequence (opt1) from hemagglutinin__InfluenzaA__ADF27367

SEQ ID NO: 68570 - RNA, 1701 nt, Artificial Sequence; identical to SEQ ID NO: 66693
  derived and/or modified CDS sequence (opt1) from hemagglutinin__InfluenzaA__ADF27369

SEQ ID NO: 68571 - RNA, 1701 nt, Artificial Sequence
  derived and/or modified CDS sequence (opt1) from hemagglutinin__InfluenzaA__ADF27370
augaaggccauccuggugauccuccuguacaccuucgccaccgcgaacgccgacacgcugugcaucggcuaccacgccaacaacagcaccgacaccgucgacaccgugcucgagaagaacgugacggucacccacuccgugaaccugcuggaggacaagcacaacgggaagcucugcaagcugcgcggcguggcgccccugcaccucgggaagugcaacaucgccggcuggauccuggggaacccggagugcgagagccuguccaccgccagcuccuggagcuacaucgucgagaccuccagcuccgacaacggcacgugcuaccccggcgacuucaucgacuacgaggagcuccgggagcagcugagcuccgugagcuccuucgagcgcuucgagaucuuccccaagaccagcuccuggcccaaccacgacagcaacaagggggugaccgccgccugcccgcacgccggcgcgaaguccuucuacaagaaccugaucuggcucgucaagaaggggaacagcuaccccaagcuguccaagagcuacaucaacgacaagggcaaggaggugcuggugcucugggggauccaccaccccagcaccuccgccgaccagcagagccuguaccagaacgccgacgccuacguccuggugggcacgucccgguacagcaagaaguucaagcccgagaucgccauccgcccgaaggugcgggaccaggagggccgcaugaacuacuacuggacccucgucgagcccggggacaagaucaccuucgaggcgaccggcaaccugguggugccccgguacgccuucgccauggagcgcaacgccggguccggcaucaucaucagcgacacgcccguccacgacugcaacacgaccugccagaccccgaagggcgccaucaacaccucccugcccuuccagaacauccaccccaucaccaucgggaagugccccaaguacgucaagagcaccaagcuccggcuggcgaccggccugcgcaacgugccguccauccagagccgggggcuguucggcgccaucgccggguucaucgagggcggcuggacggggaugguggacggcugguacggguaccaccaccagaacgagcagggcuccggguacgccgccgaccucaagagcacccagaacgcgaucgacaagaucaccaacaaggugaacuccgugaucgagaagaugaacacccaguucacggccgucggcaaggaguucaaccaccuggagaagcgcaucgagaaccucaacaagaagguggacgacggcuuccuggacaucuggaccuacaacgccgagcugcucguccugcuggagaacgagcggacccucgacuaccacgacagcaacgugaagaaccuguacgagaaggugcgcucccagcugaagaacaacgccaaggagaucgggaacggcugcuucgaguucuaccacaagugcgacaacacgugcauggagagcgucaagaacgggaccuacgacuaccccaaguacuccgaggaggccaagcucaaccgggaggagaucgacggcgugaagcuggagagcacccgcaucuaccagauccuggcgaucuacuccaccguggccagcagccucguccugguggugucccugggggccaucagcuucuggaugugcuccaacggcagccuccagugccggaucugcaucuga

SEQ ID NO: 68572 - RNA, 1701 nt, Artificial Sequence; identical to SEQ ID NO: 67865
  derived and/or modified CDS sequence (opt1) from hemagglutinin__InfluenzaA__ADF27371

SEQ ID NO: 68573 - RNA, 1701 nt, Artificial Sequence
  derived and/or modified CDS sequence (opt1) from hemagglutinin__InfluenzaA__ADF27372
augaaggccauccuggugguccuccuguacaccuucgccaccgcgaacgccgacacgcugugcaucggcuaccacaccaacaacagcaccgacaccguggacacggugcucgagaagaacgucaccgugacccacuccgugaaccugcuggaggacaagcacaacgggaagcucugcaagcugcgcggcgucgcgccccugcaccucgggaagugcaacaucgccggcuggauccuggggaacccggagugcgagagccuguccaccgccagcuccuggagcuacaucguggagacguccagcuccgacaacgggaccugcuaccccggcgacuucaucgacuacgaggagcuccgggagcagcugagcuccgugagcuccuucgagcgcuucgagaucuuccccaagaccagcuccuggcccaaccacgacagcaacaagggcgucaccgccgccugcccgcacgccggcgccaaguccuucuacaagaaccugaucuggcucgugaagaaggggaacagcuaccccaagcuguccaagagcuacaucaacgacaagggcaaggaggugcugguccucugggggauccaccaccccagcacguccgcggaccagcagagccuguaccagaacgccgacgccuacguguucgugggcaccucccgguacagcaagaaguucaagcccgagaucgccauccgcccgaagguccgggaccaggagggccgcaugaacuacuacuggacccugguggagcccggggacaagaucaccuucgaggccacgggcaaccucguggucccccgguacgcguucgccauggagcgcaacgccggguccggcaucaucaucagcgacacccccgugcacgacugcaacacgaccugccagaccccgaagggcgccaucaacaccucccugcccuuccagaacauccaccccaucaccaucgggaagugccccaaguacgucaagagcaccaagcugcggcucgccacgggccugcgcaacgugccguccauccagagccgggggcuguucggcgcgaucgccggguucaucgagggcggcuggaccgggaugguggacggcugguacggguaccaccaccagaacgagcagggcuccggguacgccgccgaccucaagagcacccagaacgccaucgacaagaucaccaacaaggugaacuccgucaucgagaagaugaacacgcaguucaccgcggugggcaaggaguucaaccaccuggagaagcgcaucgagaaccugaacaagaaggucgacgacggcuuccucgacaucuggaccuacaacgccgagcugcuggugcuccuggagaacgagcggacccuggacuaccacgacagcaacgugaagaaccucuacgagaagguccgcucccagcugaagaacaacgccaaggagaucgggaacggcugcuucgaguucuaccacaagugcgacaacacgugcauggagagcgugaagaacgggaccuacgacuaccccaaguacuccgaggaggccaagcugaaccgggaggagaucgacggcgugaagcucgagagcacccgcaucuaccagauccuggccaucuacuccaccgucgcgagcagccuggugcucguggucucccugggggccaucagcuucuggaugugcuccaacggcagccugcagugccggaucugcaucuga

SEQ ID NO: 68574 - RNA, 1701 nt, Artificial Sequence
  derived and/or modified CDS sequence (opt1) from hemagglutinin__InfluenzaA__ADF27373
auggaggccauccuggugguccuccuguacaccuucgccaccgcgaacgccgacacgcugugcaucggcuaccacgccaacaacagcaccgacaccguggacaccgugcucgagaagaacgucacggugacccacuccgugaaccugcuggaggacaagcacaacgggaagcucugcaagcugcgcggcgucgcgccccugcaccucgggaagugcaacaucgccggcuggauccuggggaacccggagugcgagagccuguccaccgccagcuccuggagcuacaucguggagaccuccagcuccgacaacggcacgugcuaccccggcgacuucaucgacuacgaggagcucaucgagcagcugagcuccgugagcuccuucgagcgguucgagaucuuccccaagaccagcuccuggcccaaccacgacagcaacaagggggucaccgccgccugcccgcacgccggcgcgaaguccuucuacaagaaccugaucuggcucgugaagaaggggaacagcuaccccaagcuguccaagagcuacaucaacgacaagggcaaggaggugcugguccucugggggauccaccaccccagcaccuccgccgaccagcagagccuguaccagaacgccgacgccuacguguucgugggcuccagccgcuacuccaagaaguucaagcccgagaucgccauccggccgaagguccgcgaccaggagggccggaugaacuacuacuggacgcugguggagcccggggacaagaucaccuucgaggcgaccggcaaccucguggucccccgcuacgccuucgccauggagcggaacgccgggagcggcaucaucaucuccgacacccccgugcacgacugcaacacgaccugccagaccccgaagggcgccaucaacaccagccugcccuuccacaacauccaccccaucacgaucgggaagugccccaaguacgugaaguccaccaagcugcgccucgcgaccggccugcggaacgucccgagcauccagacccgcgggcuguucggcgccaucgccggguucaucgagggcggcuggacggggaugguggacggcugguacggguaccaccaccagaacgagcagggcuccggguacgccgccgaccucaagagcacccagaacgcgaucgacgagaucaccaacaaggugaacuccgucaucgagaagaugaacacccaguucacggccgugggcaaggaguucaaccaccuggagaagcggaucgagaaccugaacaagaaggucgacgacggcuuccucgacaucuggaccuacaacgccgagcugcuggugcuccuggagaacgagcgcacccuggacuaccacgacagcaacgugaagaaccucuacgagaagguccggucccagcugaagaacaacgccaaggagaucgggaacggcugcuucgaguucuaccacaagugcgacaacacgugcauggagagcgugaagaacgggaccuacgacuaccccaaguacuccgaggaggccaagcugaaccgcgaggagaucgacggcgugaagcucgagagcacccggaucuaccagauccuggcgaucuacuccaccgucgccagcagccuggugcucguggucucccugggggccaucagcuucuggaugugcuccaacggcagccugcagugccgcaucugcaucuga

SEQ ID NO: 68575 - RNA, 1701 nt, Artificial Sequence; identical to SEQ ID NO: 66935
  derived and/or modified CDS sequence (opt1) from hemagglutinin__InfluenzaA__ADF27374

SEQ ID NO: 68576 - RNA, 1701 nt, Artificial Sequence
  derived and/or modified CDS sequence (opt1) from hemagglutinin__InfluenzaA__ADF27375
auggaggccauccuggugguccuccuguacaccuucgccaccgcgaacgccgacacgcugugcaucggcuaccacgccaacaacagcaccgacaccguggacaccgugcucgagaagaacgucacggugacccacuccgugaaccugcuggaggacaagcacaacgggaagcucugcaagcugcgcggcgucgcgccccugcaccucgggaagugcaacaucgccggcuggauccuggggaacccggagugcgagagccuguccaccgccagcuccuggagcuacaucguggagaccuccagcuccgacaacggcacgugcuaccccggcgacuucaucgacuacgaggagcuccgggagcagcugagcuccgugagcuccuucgagcgcuucgagaucuuccccaagaccagcuccuggcccaaccacgacagcaacaagggggucaccgccgccugcccgcacgccggcgcgaaguccuucuacaagaaccugaucuggcucgugaagaaggggaacagcuaccccaagcuguccaagagcuacaucaacgacaagggcaaggaggugcugguccucugggggauccaccaccccagcaccuccgccgaccagcagagccuguaccagaacgccgacgccuacguguucgugggcuccagccgguacuccaagaaguucaagcccgagaucgccauccgcccgaagguccgggaccaggagggccgcaugaacuacuacuggacgcugguggagcccggggacaagaucaccuucgaggcgaccggcaaccucguggucccccgguacgccuucgccauggagcgcaacgccgggagcggcaucaucaucuccgacacccccgugcacgacugcaacacgaccugccagaccccgaagggcgccaucaacaccagccugcccuuccacaacauccaccccaucacgaucgggaagugccccaaguacgugaaguccaccaagcugcggcucgcgaccggccugcgcaacgucccgagcauccagucccgggggcuguucggcgccaucgccggguucaucgagggcggcuggaccgggaugguggacggcugguacggguaccaccaccagaacgagcagggcagcggguacgccgccgaccagaaguccacgcagaacgcgaucgacgagaucaccaacaagaucaacagcgugaucgagaagaugaacacccaguucaccgccgucggcaaggaguucaaccaccucgagaagcgcaucgagaaccugaacaagaagguggacgacggcuuccuggacaucuggacguacaacgccgagcuccugguccugcucgagaacgagcggacccuggacuaccacgacuccaacgugaagaaccuguacgagaaggugcgcagccagcucaagaacaacgccaaggagaucgggaacggcugcuucgaguucuaccacaagugcgacaacacgugcauggaguccgucaagaacgggaccuacgacuaccccaaguacagcgaggaggccaagcugaaccgggaggagaucgacggcgugaagcuggaguccacccgcaucuaccagauccucgcgaucuacagcaccguggccagcucccugguccugguggugagccucggggccaucuccuucuggaugugcagcaacggcucccugcagugccggaucugcaucuga

SEQ ID NO: 68577 - RNA, 1701 nt, Artificial Sequence
  derived and/or modified CDS sequence (opt1) from hemagglutinin__InfluenzaA__ADF27376
augaaggccauccuggugguccuccuguacaccuucgugaccgccaacgcggacacgcugugcaucggcuaccacgccaacaacagcaccgacaccguggacaccguccucgagaagaacgugacggugacccacuccgucaaccugcuggaggacaagcacaacgggaagcucugcaagcugcgcggcguggcgccccugcaccucgggaagugcaacaucgccggcuggauccuggggaacccggagugcgagagccuguccaccgccagcuccuggagcuacaucguggagaccuccaacagcgacaacggcacgugcuaccccggcgacuucaucgacuacgaggagcuccgggagcagcuguccagcgucuccagcuucgagcgcuucgagaucuuccccaagaccuccagcuggcccaaccacgacuccaacaagggggugaccgccgccugcccgcacgccggcgccaagagcuucuacaagaaccugaucuggcucgugaagaaggggaacuccuaccccaagcugagcaaguccuacaucaacgacaagggcaaggagguccuggugcucugggggauccaccaccccagcaccagcgcggaccagcagucccuguaccagaacgccgacgccuacguguucgucggcacgagccgguacuccaagaaguucaagcccgagaucgagauccgcccgaaggugcgggaccaggagggccgcaugaacuacuacuggacccugguggagcccggggacaagaucaccuucgaggccaccggcaaccucgucgugccccgguacgccuucgcgauggagcgcaacgccgggagcggcaucaucaucuccgacacgcccgugcacgacugcaacacgaccugccagaccccgaagggcgccaucaacaccagccugcccuuccagaacauccaccccaucaccaucgggaagugccccaaguacgucaaguccaccaagcugcggcucgccaccggccugcgcaacgugccgagcauccagucccgggggcuguucggcgccaucgcgggguucaucgagggcggcuggacggggaugguggacggcugguacggguaccaccaccagaacgagcagggcagcggguacgccgccgaccucaaguccacccagaacgccaucgacaagaucaccaacaaggucaacagcgugaucgagaagaugaacacccaguucacggccgucggcaaggaguucaaccaccuggagaagcgcaucgagaaccugaacaagaagguggacgacggcuuccucgacaucuggaccuacaacgcggagcugcuggugcuccuggagaacgagcggacccuggacuaccacgacuccaacgucaagaaccucuacgagaaggugcgcagccagcugaagaacaacgccaaggagaucgggaacggcugcuucgaguucuaccacaagugcgacaacacgugcauggaguccgugaagaacgggaccuacgacuaccccaaguacagcgaggaggccaagcugaaccgggaggagaucgacggcgucaagcucgaguccacccgcaucuaccagauccuggccaucuacagcaccguggccuccagccuggugcucgucgugagccugggggcgaucuccuucuggaugugcagcaacggcucccugcagugccggaucugcaucuga

SEQ ID NO: 68578 - RNA, 1701 nt, Artificial Sequence
  derived and/or modified CDS sequence (opt1) from hemagglutinin__InfluenzaA__ADF27378
augaaggccauccuggugguccuccuguacaccuucgugaccgccaacgcggacacgcugugcaucggcuaccacgccaacaacagcaccgacaccguggacaccguccucgagaagaacgugacggugacccacuccgucaaccugcuggaggacaagcacaacgggaagcucugcaagcugcgcggcguggcgccccugcaccucgggaagugcaacaucgccggcuggauccuggggaacccggagugcgagagccuguccaccgccagcuccuggagcuacaucguggagaccuccaacagcgacaacggcacgugcuaccccggcgacuucaucgacuacgaggagcuccgggagcagcuguccagcgucuccagcuucgagcgcuucgagaucuuccccaagaccuccagcuggcccaaccacgacuccaacaagggggugaccgccgccugcccgcacgccggcgccaagagcuucuacaagaaccugaucuggcucgugaagaaggggaacuccuaccccaagcugagcaaguccuacaucaacgacaagggcaaggagguccuggugcucugggggauccaccaccccagcaccagcgcggaccagcagucccuguaccagaacgccgacgccuacguguucgucggcacgagccgguacuccaagaaguucaagcccgagaucgccauccgcccgaaggugcgggaccaggagggccgcaugaacuacuacuggacccugguggagcccggggacaagaucaccuucgaggccaccggcaaccucgucgugccccgguacgcguucgccauggagcgcaacgccgggagcggcaucaucaucuccgacacgcccgugcacgacugcaacacgaccugccagaccccgaagggcgccaucaacaccagccugcccuuccagaacauccaccccaucaccaucgggaagugccccaaguacgucaaguccaccaagcugcggcucgccaccggccugcgcaacgugccgagcauccagucccgggggcuguucggcgcgaucgccggguucaucgagggcggcuggacggggaugguggacggcugguacggguaccaccaccagaacgagcagggcagcggguacgccgccgaccucaaguccacccagaacgccaucgacaagaucaccaacaaggucaacagcgugaucgagaagaugaacacccaguucacggcggucggcaaggaguucaaccaccuggagaagcgcaucgagaaccugaacaagaagguggacgacggcuuccucgacaucuggaccuacaacgccgagcugcuggugcuccuggagaacgagcggacccuggacuaccacgacuccaacgucaagaaccucuacgagaaggugcgcagccagcugaagaacaacgccaaggagaucgggaacggcugcuucgaguucuaccacaagugcgacaacacgugcauggaguccgugaagaacgggaccuacgacuaccccaaguacagcgaggaggccaagcugaaccgggaggagaucgacggcgucaagcucgaguccacccgcaucuaccagauccuggccaucuacagcaccguggcguccagccuggugcucgucgugagccugggggccaucuccuucuggaugugcagcaacggcucccugcagugccggaucugcaucuga

SEQ ID NO: 68579 - RNA, 1701 nt, Artificial Sequence
  derived and/or modified CDS sequence (opt1) from hemagglutinin__InfluenzaA__ADF27389
augaaggccauccuggugguccuccuguacaccuucgccaccgcgaacgccgacacgcugugcaucggcuaccacgccaacaacagcaccgacaccguggacaccgugcucgagaagaacgucacggugacccacuccgugaaccugcuggaggacaagcacaacgggaagcucugcaagcugcgcggcgucgcgccccugcaccucgggaagugcaacaucgccggcuggauccuggggaacccggagugcgagagccuguccaccgccagcuccuggagcuacaucguggagaccuccagcuccgacaacggcacgugcuaccccggcgacuucaucgacuacgaggagcuccgggagcagcugagcuccgugagcuccuucgagcgcuucgagaucuuccccaagaccagcuccuggcccaaccacgacagcaacaagggggucaccgccgccugcccgcacgccggcgcgaaguccuucuacaagaaccugaucuggcucgugaagaaggggaacagcuaccccaagcuguccaagagcuacaucaacgacaagggcaaggaggugcugguccucugggggauccaccaccccagcaccuccgccgaccagcagagccuguaccagaacgccgacgccuacguguucgugggcacgucccgguacagcaagaaguucaagcccgagaucgccauccgcccgaagguccgggaccaggagggccgcaugaacuacuacuggacccugguggagcccggggacaagaucaccuucgaggcgaccggcaaccucguggucccccgguacgccuucgccauggagcgcaacgccggguccggcaucaucacgagcgacacccccgugcacgacugcaacacgaccugccagaccccgaagggcgccaucaacaccucccugcccuuccagaacauccaccccaucaccaucgggaagugccccaaguacgucaagagcaccaagcugcggcucgcgacgggccugcgcaacgugccguccauccagagccgggggcuguucggcgccaucgccggguucaucgagggcggcuggaccgggaugguggacggcugguacggguaccaccaccagaacgagcagggcuccggguacgccgccgaccucaagagcacccagaacgcgaucgacgagaucaccaacaaggugaacuccgucaucgagaagaugaacacgcaguucaccgccgugggcaaggaguucaaccaccuggagaagcgcaucgagaaccugaacaagaaggucgacgacggcuuccucgacaucuggaccuacaacgccgagcugcuggugcuccuggagaacgagcggacccuggacuaccacgacagcaacgugaagaaccucuacgagaagguccgcucccagcugaagaacaacgccaaggagaucgggaacggcugcuucgaguucuaccacaagugcgacaacacgugcauggagagcgugaagaacgggaccuacgacuaccccaaguacuccgaggaggccaagcugaaccgggaggagaucgacggcgugaagcucgagagcacccgcaucuaccagauccuggcgaucuacuccaccgucgccagcagccuggugcucguggucucccugggggccaucagcuucuggaugugcuccaacggcagccugcagugccggaucugcaucuga

SEQ ID NO: 68580 - RNA, 1701 nt, Artificial Sequence
  derived and/or modified CDS sequence (opt1) from hemagglutinin__InfluenzaA__ADF27399
augaaggccauccuggugguccuccuguacaccuucgccaccgcgaacgccgacacgcugugcaucggcuaccacgccaacaacagcaccgacaccguggacaccgugcucgagaagaacgucacggugacccacuccgugaaccugcuggaggacaagcacaacgggaagcucugcaagcugcgcggcgucgcgccccugcaccucgggaagugcaacaucgccggcuggauccuggggaacccggagugcgagagccuguccaccgccagcuccuggagcuacaucguggagaccuccagcuccgacaacggcacgugcuaccccggcgacuucaucgacuacgaggagcuccgggagcagcugagcuccgugagcuccuucgagcgcuucgagaucuuccccaagaccagcuccuggcccaaccacgacagcaacaagggggucaccgccgccugcccgcacgccggcgcgaaguccuucuacaagaaccugaucuggcucgugaagaaggggaacagcuaccccaagcuguccaagagcuacaucaacgacaagggcaaggaggugcugguccucugggggauccaccaccccagcaccuccgccgaccagcagagccuguaccagaacgccgacgccuacguguucgugggcacgucccgguacagcaagaaguucaagcccgagaucgccauccgcccgaagguccgggaccaggagggccgcaugaacuacuacuggacccugguggagcccggggacaagaucaccuucgaggcgaccggcaaccucguggucccccgguacgccuucgccauggagcgcaacgccggguccggcaucaucaucagcgacacgcccgugcacgacugcaacacgaccugccagaccccgaagggcgccaucaacaccucccugcccuuccagaacauccaccccaucaccaucggggagugccccaaguacgucaagagcaccaagcugcggcucgcgaccggccugcgcaacgugccguccauccagagccgggggcuguucggcgccaucgccggguucaucgagggcggcuggacggggaugguggacggcugguacggguaccaccaccagaacgagcagggcuccggguacgccgccgaccucaagagcacccagaacgcgaucgacgagaucaccaacaaggugaacuccgucaucgagaagaugaacacccaguucacggccgugggcaaggaguucaaccaccuggagaagcgcaucgagaaccugaacaagaaggucgacgacggcuuccucgacaucuggaccuacaacgccgagcugcuggugcuccuggagaacgagcggacccuggacuaccacgacagcaacgugaagaaccucuacgagaagguccgcucccagcugaagaacaacgccaaggagaucgggaacggcugcuucgaguucuaccacaagugcgacaacacgugcauggagagcgugaagaacgggaccuacgacuaccccaaguacuccgaggaggccaagcugaaccgggaggagaucgacggcgugaagcucgagagcacccgcaucuaccagauccuggcgaucuacuccaccgucgccagcagccuggugcucguggucucccugggggccaucagcuucuggaugugcuccaacggcagccugcagugccggaucugcaucuga

SEQ ID NO: 68581 - RNA, 1701 nt, Artificial Sequence; identical to SEQ ID NO: 67857
  derived and/or modified CDS sequence (opt1) from hemagglutinin__InfluenzaA__ADF27409

SEQ ID NO: 68582 - RNA, 1701 nt, Artificial Sequence; identical to SEQ ID NO: 68565
  derived and/or modified CDS sequence (opt1) from hemagglutinin__InfluenzaA__ADF27419

SEQ ID NO: 68583 - RNA, 1701 nt, Artificial Sequence
  derived and/or modified CDS sequence (opt1) from hemagglutinin__InfluenzaA__ADF27429
augaaggccauccuggugguccuccuguacaccuucgccaccgcgaacgccgacacgcugugcaucggcuaccacgccaacaacagcaccgacaccguggacaccgugcucgagaagaacgucacggugacccacuccgugaaccugcuggaggacaagcacaacgggaagcucugcaagcugcgcggcgucgcgccccugcaccucgggaagugcaacaucgccggcuggauccuggggaacccggagugcgagagccuguccaccgccagcuccuggagcuacaucguggagaccuccagcuccgacaacggcacgugcuaccccggcgacuucaucgacuacgaggagcuccgggagcagcugagcuccgugagcuccuucgagcgcuucgagaucuuccccaagaccagcuccuggcccaaccacgacagcaacaagggggucaccgccgccugcccgcacgccggcgcgaaguccuucuacaagaaccugaucuggcucgugaagaaggggaacagcuaccccaagcuguccaaguucuacaucaacgacaagggcaaggaggugcugguccucugggggauccaccaccccagcaccagcgccgaccagcagucccuguaccagaacgccgacgccuacguguucgugggcacgagccgguacuccaagaaguucaagcccgagaucgccauccgcccgaagguccgggaccaggagggccgcaugaacuacuacuggacccugguggagcccggggacaagaucaccuucgaggcgaccggcaaccucguggucccccgguacgccuucgccauggagcgcaacgccgggagcggcaucaucaucuccgacacgcccgugcacgacugcaacacgaccugccagaccccgaagggcgccaucaacaccagccugcccuuccagaacauccaccccaucaccaucgggaagugccccaaguacgugaaguccaccaagcugcggcucgcgaccggccugcgcaacgucccgagcauccagucccgggggcuguucggcgccaucgccggguucaucgagggcggcuggacggggaugguggacggcugguacggguaccaccaccagaacgagcagggcagcggguacgccgccgaccucaaguccacccagaacgcgaucgacaagaucaccaacaaggugaacagcgucaucgagaagaugaacacccaguucacggccgugggcaaggaguucaaccaccuggagaagcgcaucgagaaccugaacaagaaggucgacgacggcuuccucgacaucuggaccuacaacgccgagcugcuggugcuccuggagaacgagcggacccuggacuaccacgacuccaacgugaagaaccucuacgagaagguccgcagccagcugaagaacaacgccaaggagaucgggaacggcugcuucgaguucuaccacaagugcgacaacacgugcaugaaguccgugaagaacgggaccuacgacuaccccaaguacagcgaggaggccaagcugaaccgggaggagaucgacggcgugaagcucgaguccacccgcaucuaccagauccuggcgaucuacagcaccgucgccuccagccuggugcucguggucagccugggggccaucuccuucuggaugugcagcaacggcucccugcagugccggaucugcaucuga

SEQ ID NO: 68584 - RNA, 1701 nt, Artificial Sequence; identical to SEQ ID NO: 66693
  derived and/or modified CDS sequence (opt1) from hemagglutinin__InfluenzaA__ADF27439

SEQ ID NO: 68585 - RNA, 1701 nt, Artificial Sequence
  derived and/or modified CDS sequence (opt1) from hemagglutinin__InfluenzaA__ADF27449
augaaggccauccuggugguccuccuguacaccuucgccaccgugaacgcggacacgcugugcaucggcuaccacgccaacaacagcaccgacaccguggacaccguccucgagaagaacgugacggugacccacuccgucaaccugcuggaggacaagcacaacgggaagcucugcaagcugcgcggcguggcgccccugcaccucgggaagugcaacaucgccggcuggauccuggggaacccggagugcgagagccuguccaccgccagcuccuggagcuacaucguggagaccuccagcuccgacaacggcacgugcuaccccggcgacuucaucgacuacgaggagcuccgggagcagcugagcuccgucagcuccuucgagcgcuucgagaucuuccccaagaccagcuccuggcccaaccacgacagcaacaagggggugaccgccgccugcccgcacgccggcgccaaguccuucuacaagaaccugaucuggcucgugaagaaggggaacagcuaccccaagcuguccaagagcuacaucaacgacaagggcaaggagguccuggugcucugggggauccaccaccccagcaccuccgcggaccagcagagccuguaccagaacgccgacgccuacguguucgucggcacgucccgguacagcaagaaguucaagcccgagaucgccauccgcccgaaggugcgggaccaggagggccgcaugaacuacuacuggacccugguggagcccggggacaagaucaccuucgaggccaccggcaaccucgucgugccccgguacgcguucgccauggagcgcaacgccggguccggcaucaucaucagcgacacgcccgugcacgacugcaacacgaccugccagaccccgaagggcgccaucaacaccucccugcccuuccagaacauccaccccaucaccaucgggaagugccccaaguacgucaagagcaccaagcugcggcucgccaccggccugcgcaacaucccguccauccagagccgggggcuguucggcgcgaucgccggguucaucgagggcggcuggacggggaugguggacggcugguacggguaccaccaccagaacgagcagggcuccggguacgccgccgaccucaagagcacccagaacgccaucgacgagaucaccaacaaggugaacuccgucaucgagaagaugaacacccaguucacggcggugggcaaggaguucaaccaccuggagaagcgcaucgagaaccugaacaagaaggucgacgacggcuuccucgacaucuggaccuacaacgccgagcugcuggugcuccuggagaacgagcggacccuggacuaccacgacagcaacgugaagaaccucuacgagaagguccgcucccagcugaagaacaacgccaaggagaucgggaacggcugcuucgaguucuaccacaagugcgacaacacgugcauggagagcgugaagaacgggaccuacgacuaccccaaguacuccgaggaggccaagcugaaccgggaggagaucgacggcgugaagcucgagagcacccgcaucuaccagauccuggccaucuacuccaccgucgcgagcagccuggugcucguggucucccugggggccaucagcuucuggaugugcuccaacggcagccugcagugccggaucugcaucuga

SEQ ID NO: 68586 - RNA, 1701 nt, Artificial Sequence; identical to SEQ ID NO: 67853
  derived and/or modified CDS sequence (opt1) from hemagglutinin__InfluenzaA__ADF27459

SEQ ID NO: 68587 - RNA, 1701 nt, Artificial Sequence; identical to SEQ ID NO: 66693
  derived and/or modified CDS sequence (opt1) from hemagglutinin__InfluenzaA__ADF27469

SEQ ID NO: 68588 - RNA, 1701 nt, Artificial Sequence
  derived and/or modified CDS sequence (opt1) from hemagglutinin__InfluenzaA__ADF27479
augaaggccauccuggugguccuccuguacaccuucgccaccgcgaacgccgacacgcugugcaucggcuaccacgccaacaacagcaccgacaccguggacaccgugcucgagaagaacgucacggugacccacuccgugaaccugcuggaggacaagcacaacgggaagcucugcaagcugcgcggcgucgcgccccugcaccucgggaagugcaacaucgccggcuggauccuggggaacccggagugcgagagccuguccaccgccagcuccuggagcuacaucguggagaccuccagcuccgacaacggcacgugcuaccccggcgacuucaucgacuacgaggagcuccgggagcagcugagcuccgugagcuccuucgagcgcuucgagaucuuccccaagaccagcuccuggcccaaccacgacagcaacaagggggucaccgccgccugcccgcacgccggcgcgaaguccuucuacaagaaccugaucuggcucgugaagaaggggaacagcuaccccaagcuguccaagagcuacaucaacgacaagggcaaggaggugcugguccucugggggauccaccaccccagcaccuccgccgaccagcagagccuguaccagaacgccgacgccuacguguucgugggcacgucccgguacagcaagaaguucaagcccgagaucgccauccgcccgaagguccgggaccaggagggccgcaugaacuacuacuggacccugguggagcccggggacaagaucaccuucgaggcgaccggcaaccucguggucccccgguacgccuucgccauggagcgcaacgccggguccggcaucaucaucagcgacacgcccgugcacgacugcaacacgaccugccagaccccgaagggcgccaucaacaccucccugcccuuccagaacauccaccccaucaccaucgggaagugccccaaguacgucaagagcaccaagcugcggcucgcgaccggccugcgcaacgugccguccauccacagccgggggcuguucggcgccaucgccggguucaucgagggcggcuggacggggaugguggacggcugguacggguaccaccaccagaacgagcagggcuccggguacgccgccgaccucaagagcacccagaacgcgaucgacaagaucaccaacaaggugaacuccgucaucgagaagaugaacacccaguucacggccgugggcaaggaguucaaccaccuggagaagcgcaucgagaaccugaacaagaaggucgacgacggcuuccucgacaucuggaccuacaacgccgagcugcuggugcuccuggagaacgagcggacccuggacuaccacgacagcaacgugaagaaccucuacgagaagguccgcucccagcugaagaacaacgccaaggagaucgggaacggcugcuucgaguucuaccacaagugcgacaacacgugcauggagagcgugaagaacgggaccuacgacuaccccaaguacuccgaggaggccaagcugaaccgggaggagaucgacggcgugaagcucgagagcacccgcaucuaccagauccuggcgaucuacuccaccgucgccagcagccuggugcucguggucucccugggggccaucagcuucuggaugugcuccaacggcagccugcagugccggaucugcaucuga

SEQ ID NO: 68589 - RNA, 1701 nt, Artificial Sequence
  derived and/or modified CDS sequence (opt1) from hemagglutinin__InfluenzaA__ADF27489
augaaggccauccuggugguccuccuguacaccuucgccaccgcgaacgccgacacgcugugcaucggcuaccacgccaacaacagcaccgacaccguggacaccgugcucgagaagaacgucacggugacccacuccgugaaccugcuggaguacaagcacaacgggaagcucugcaagcugcgcggcgucgcgccccugcaccucgggaagugcaacaucgccggcuggauccuggggaacccggagugcgagagccuguccaccgccagcuccuggagcuacaucguggagaccuccagcuccgacaacggcacgugcuaccccggcgacuucaucgacuacgaggagcuccgggagcagcugagcuccgugagcuccuucgagcgcuucgagaucuuccccaagaccagcuccuggcccaaccacgacagcaacaagggggucaccgccgccugcccgcacgccggcgcgaaguccuucuacaagaaccugaucuggcucgugaagaaggggaacagcuaccccaagcuguccaagagcuacaucaacgacaagggcaaggaggugcugguccucugggggauccaccaccccagcaccuccgccgaccagcagagccuguaccagaacgccgacgccuacguguucgugggcacgucccgguacagcaagaaguucaagcccgagaucgccauccgcccgaagguccgggaccaggagggccgcaugaacuacuacuggacccugguggagcccggggacaagaucaccuucgaggcgaccggcaaccucguggucccccgguacgccuucgccauggagcgcaacgccggguccggcaucaucaucagcgacacgcccgugcacgacugcaacacgaccugccagaccccgaagggcgccaucaacaccucccugcccuuccagaacauccaccccaucaccaucggggagugccccaaguacgucaagagcaccaagcugcggcucgcgaccggccugcgcaacgugccguccauccagagccgggggcuguucggcgccaucgccggguucaucgagggcggcuggacggggaugguggacggcugguacggguaccaccaccagaacgagcagggcuccggguacgccgccgaccucaagagcacccagaacgcgaucgacgagaucaccaacaaggugaacuccgucaucgagaagaugaacacccaguucacggccgugggcaaggaguucaaccaccuggagaagcgcaucgagaaccugaacaagaaggucgacgacggcuuccucgacaucuggaccuacaacgccgagcugcuggugcuccuggagaacgagcggacccuggacuaccacgacagcaacgugaagaaccucuacgagaagguccgcucccagcugaagaacaacgccaaggagaucgggaacggcugcuucgaguucuaccacaagugcgacaacacgugcauggagagcgugaagaacgggaccuacgacuaccccaaguacuccgaggaggccaagcugaaccgggaggagaucgacggcgugaagcucgagagcacccgcaucuaccagauccuggcgaucuacuccaccgucgccagcagccuggugcucguggucucccugggggccaucagcuucuggaugugcuccaacggcagccugcagugccggaucugcaucuga

SEQ ID NO: 68590 - RNA, 1701 nt, Artificial Sequence; identical to SEQ ID NO: 67857
  derived and/or modified CDS sequence (opt1) from hemagglutinin__InfluenzaA__ADF27499

SEQ ID NO: 68591 - RNA, 1701 nt, Artificial Sequence; identical to SEQ ID NO: 66693
  derived and/or modified CDS sequence (opt1) from hemagglutinin__InfluenzaA__ADF27509

SEQ ID NO: 68592 - RNA, 1701 nt, Artificial Sequence; identical to SEQ ID NO: 68290
  derived and/or modified CDS sequence (opt1) from hemagglutinin__InfluenzaA__ADF27529

SEQ ID NO: 68593 - RNA, 1701 nt, Artificial Sequence; identical to SEQ ID NO: 67865
  derived and/or modified CDS sequence (opt1) from hemagglutinin__InfluenzaA__ADF27539

SEQ ID NO: 68594 - RNA, 1701 nt, Artificial Sequence; identical to SEQ ID NO: 67865
  derived and/or modified CDS sequence (opt1) from hemagglutinin__InfluenzaA__ADF27549

SEQ ID NO: 68595 - RNA, 1701 nt, Artificial Sequence; identical to SEQ ID NO: 66693
  derived and/or modified CDS sequence (opt1) from hemagglutinin__InfluenzaA__ADF27559

SEQ ID NO: 68596 - RNA, 1701 nt, Artificial Sequence
  derived and/or modified CDS sequence (opt1) from hemagglutinin__InfluenzaA__ADF27569
augaaggccauccuggugguccuccuguacaccuucgccaccgcgaacgccgacacgcugugcaucggcuaccacgccaacaacagcaccgacaccguggacaccgugcucgagaagaacgucacggugacccacuccgugaaccugcuggaggacaagcacaacgggaagcucugcaagcugcgcggcgucgcgccccugcaccucgggaagugcaacaucgccggcuggauccuggggaacccggagugcgagagccuguccaccgccagcuccuggagcuacaucguggagaccuccagcuccgacaacggcacgugcuaccccggcgacuucaucgacuacgaggagcuccgggagcagcugagcuccgugagcuccuucgagcgcuucgagaucuuccccaagaccagcuccuggcccaaccacgacagcaacaagggggucaccgccgccugcccgcacgccggcgcgaaguccuucuacaagaaccugaucuggcucgugaagaaggggaacagcuaccccaagcuguccaagagcuacaucaacgacaagggcaaggaggugcugguccucugggggauccaccaccccagcaccuccgccgaccagcagagccuguaccagaacgccgacgccuacguguucgugggcacgucccgguacagcaagaaguucaagcccgagaucgccauccgcccgaagguccgggaccaggagggccgcgugaacuacuacuggacccugguggagcccggggacaagaucaccuucgaggcgaccggcaaccucgucgugccccgguacgccuucgccauggagcgcaacgccggguccggcaucaucaucagcgacacgcccgugcacgacugcaacacgaccugccagaccccgaagggcgccaucaacaccucccugcccuuccagaacauccaccccaucaccaucgggaagugccccaaguacgucaagagcaccaagcugcggcucgcgaccggccugcgcaacgugccguccauccagagccgggggcuguucggcgccaucgccggguucaucgagggcggcuggacggggaugguggacggcugguacggguaccaccaccagaacgagcagggcuccggguacgccgccgaccucaagagcacccagaacgcgaucgacaagaucaccaacaaggucaacuccgugaucgagaagaugaacacccaguucacggccgucggcaaggaguucaaccaccuggagaagcgcaucgagaaccugaacaagaagguggacgacggcuuccucgacaucuggaccuacaacgccgagcugcuggugcuccuggagaacgagcggacccuggacuaccacgacagcaacgucaagaaccucuacgagaaggugcgcucccagcugaagaacaacgccaaggagaucgggaacggcugcuucgaguucuaccacaagugcgacaacacgugcauggagagcgugaagaacgggaccuacgacuaccccaaguacuccgaggaggccaagcugaaccgggaggagaucgacggcgucaagcucgagagcacccgcaucuaccagauccuggcgaucuacuccaccguggccagcagccuggugcucgucgugucccugggggccaucagcuucuggaugugcuccaacggcagccugcagugccggaucugcaucuga

SEQ ID NO: 68597 - RNA, 1701 nt, Artificial Sequence; identical to SEQ ID NO: 67865
  derived and/or modified CDS sequence (opt1) from hemagglutinin__InfluenzaA__ADF27579

SEQ ID NO: 68598 - RNA, 1701 nt, Artificial Sequence
  derived and/or modified CDS sequence (opt1) from hemagglutinin__InfluenzaA__ADF27589
augaaggccauccuggugguccuccuguacaccuucgccaccgcgaacgccgacacgcugugcaucggcuaccacgccaacaacagcaccgacaccguggacaccgugcucgagaagaacgucacggugacccacuccgugaaccugcuggaggacaagcacaacgggaagcucugcaagcugcgcggcgucgcgccccugcaccucgggaagugcaacaucgccggcuggauccuggggaacccggagugcgagagccuguccaccgccagcuccuggagcuacaucguggagaccuccagcuccgacaacggcacgugcuaccccggcgacuucaucgacuacgaggagcuccgggagcagcugagcuccgugagcuccuucgagcgcuucgagaucuuccccaagaccagcuccuggcccaaccacgacagcaacaagggggucaccgccgccugcccgcacgccggcgcgaaguccuucuacaagaaccugaucuggcucgugaagaaggggaacagcuaccccaagcuguccaagagcuacaucaacgacaagggcaaggaggugcugguccucugggggauccaccaccccagcaccuccgccgaccagcagagccuguaccagaacgccgacgccuacguguucgugggcacgucccgguacagcaagaaguucaagcccgagaucgccauccgcccgaagguccgggaccaggagggccgcaugaacuacuacuggacccugguggagcccggggacaagaucaccuucgaggcgaccggcaaccucguggucccccgguacgccuucgccauggagcgcaacgccggguccggcaucaucaucagcgacacguccgugcacgacugcaacacgaccugccagacccccaagggcgccaucaacaccagccugccguuccagaacauccaccccaucaccaucgggaagugccccaaguacgugaaguccaccaagcugcggcucgcgaccggccugcgcaacguccccagcauccagucccgggggcuguucggcgccaucgccggguucaucgagggcggcuggacggggaugguggacggcugguacggguaccaccaccagaacgagcagggcagcggguacgccgccgaccucaaguccacccagaacgcgaucgacgagaucaccaacaaggugaacagcgucaucgagaagaugaacacccaguucacggccgugggcaaggaguucaaccaccuggagaagcgcaucgagaaccugaacaagaaggucgacgacggcuuccucgacaucuggaccuacaacgccgagcugcuggugcuccuggagaacgagcggacccuggacuaccacgacuccaacgugaagaaccucuacgagaagguccgcagccagcugaagaacaacgccaaggagaucgggaacggcugcuucgaguucuaccacaagugcgacaacacgugcauggaguccgugaagaacgggaccuacgacuacccgaaguacagcgaggaggccaagcugaaccgggaggagaucgacggcgugaagcucgaguccacccgcaucuaccagauccuggcgaucuacagcaccgucgccagcucccuggugcucguggucagccugggggccaucuccuucuggaugugcagcaacggcucccugcagugccggaucugcaucuga

SEQ ID NO: 68599 - RNA, 1701 nt, Artificial Sequence
  derived and/or modified CDS sequence (opt1) from hemagglutinin__InfluenzaA__ADF27599
augaaggccauccuggugguccuccuguacaccuucgccaccgcgaacgccgacacgcugugcaucggcuaccacgccaacaacagcaccgacaccguggacaccgugcucgagaagaacgucacggugacccacuccgugaaccugcuggaggacaagcacaacgggaagcucugcaagcugcgcggcgucgcgccccugcaccucgggaagugcaacaucgccggcuggauccuggggaacccggagugcgagagccuguccaccgccagcuccuggagcuacaucguggagaccuccagcuccgacaacggcacgugcuaccccggcgacuucaucgacuacgaggagcuccgggagcagcugagcuccgugagcuccuucgagcgcuucgagaucuuccccaagaccagcuccuggcccaaccacgacagcaacaagggggucaccgccgccugcccgcacgccggcgcgaaguccuucuacaagaaccugaucuggcucgugaagaaggggaacagcuaccccaagcuguccaagagcuacaucaacgacaagggcaaggaggugcugguccucugggggauccaccaccccagcaccuccgccgaccagcagagccuguaccagaacgccgacgccuacguguucgugggcacgucccgguacagcaagaaguucaagcccgagaucgccauccgcccgaagguccgggaccaggagggccgcaugaacuacuacuggacccugguggagcccggggacaagaucaccuucgaggcgaccggcaaccucguggucccccgguacgccuucacgauggagcgcaacgccggguccggcaucaucaucagcgacacccccgugcacgacugcaacacgaccugccagaccccgaagggcgccaucaacaccucccugcccuuccagaacauccaccccaucaccaucgggaagugccccaaguacgucaagagcaccaagcugcggcucgccacgggccugcgcaacgugccguccauccagagccgggggcuguucggcgcgaucgccggguucaucgagggcggcuggaccgggaugguggacggcugguacggguaccaccaccagaacgagcagggcuccggguacgccgccgaccucaagagcacccagaacgccaucgacgagaucaccaacaaggugaacuccgucaucgagaagaugaacacgcaguucaccgcggugggcaaggaguucaaccaccuggagaagcgcaucgagaaccugaacaagaaggucgacgacggcuuccucgacaucuggaccuacaacgccgagcugcuggugcuccuggagaacgagcggacccuggacuaccacgacagcaacgugaagaaccucuacgagaagguccgcucccagcucaagagcaacgccaaggagaucgggaacggcugcuucgaguucuaccacaagugcgacaacacgugcauggaguccgugaagaacgggaccuacgacuaccccaaguacagcgaggaggccaagcugaaccgggaggagaucgacggcgugaagcuggaguccacccgcaucuaccagauccuggccaucuacagcaccgucgcgagcucccuggugcucguggucagccugggggccaucuccuucuggaugugcagcaacggcucccugcagugccggaucugcaucuga

SEQ ID NO: 68600 - RNA, 1701 nt, Artificial Sequence
  derived and/or modified CDS sequence (opt1) from hemagglutinin__InfluenzaA__ADF27609
augaaggccauccuggugguccuccuguacaccuucgccaccgcgaacgccgacacgcugugcaucggcuaccacgccaacaacagcaccgacaccguggacaccgugcucgagaagaacgucacggugacccacuccgugaaccugcuggaggacaagcacaacgggaagcucugcaagcugcgcggcgucgcgccccugcaccucgggaagugcaacaucgccggcuggauccuggggaacccggagugcgagagccuguccaccgccagcuccuggagcuacaucguggagaccuccagcuccgacaacggcacgugcuaccccggcgacuucaucgacuacgaggagcuccgggagcagcugagcuccgugagcuccuucgagcgcuucgagaucuuccccaagaccagcuccuggcccaaccacgacagcaacaagggggucaccgccgccugcccgcaggccggcgcgaaguccuucuacaagaaccugaucuggcucgugaagaaggggaacagcuaccccaagcuguccaagagcuacaucaacgacaagggcaaggaggugcugguccucugggggauccaccaccccagcaccuccgccgaccagcagagccuguaccagaacgccgacgccuacguguucgugggcacgucccgguacagcaagaaguucaagcccgagaucgccauccgcccgaagguccgggaccaggagggccgcaugaacuacuacuggacccugguggagcccggggacaagaucaccuucgaggcgaccggcaaccucguggucccccgguacgccuucgccauggagcgcaacgccggguccggcaucaucaucagcgacacgcccgugcacgacugcaacacgaccugccagaccccgaagggcgccaucaacaccucccugcccuuccagaacauccaccccaucaccaucgggaagugccccaaguacgucaagagcaccaagcugcggcucgcgaccggccugcgcaacgugccguccauccagagccgggggcuguucggcgccaucgccggguucaucgagggcggcuggacggggaugguggacggcugguacggguaccaccaccagaacgagcagggcuccggguacgccgccgaccucaagagcacccagaacgcgaucgacgagaucaccaacaaggugaacuccgucaucgagaagaugaacacccaguucacggccgugggcaaggaguucaaccaccuggagaagcgcaucgagaaccugaacaagaaggucgacgacggcuuccucgacaucuggaccuacaacgccgagcugcuggugcuccuggagaacgagcggacccuggacuaccacgacagcaacgugaagaaccucuacgagaagguccgcucccagcugaagaacaacgccaaggagaucgggaacggcugcuucgaguucuaccacaagugcgacaacacgugcauggagagcgugaagaacgggaccuacgacuaccccaaguacuccgaggaggccaagcugaaccgggaggagaucgacggcgugaagcucgagagcacccgcaucuaccagauccuggcgaucuacuccaccgucgccagcagccuggugcucguggucucccugggggccaucagcuucuggaugugcuccaacggcagccugcagugccggaucugcaucuga

SEQ ID NO: 68601 - RNA, 1701 nt, Artificial Sequence
  derived and/or modified CDS sequence (opt1) from hemagglutinin__InfluenzaA__ADF27619
augaaggccauccuggugguccuccuguacaccuucgccaccgcgaacgccgacacgcugugcaucggcuaccacgccaacaacagcaccgacaccguggacaccgugcucgagaagaacgucacggugacccacuccgugaaccugcuggaggacaagcacaacgggaagcucugcaagcugcgcggcgucgugccccugcaccucgggaagugcaacaucgccggcuggauccuggggaacccggagugcgagagccuguccaccgccagcuccuggagcuacaucguggagaccuccagcuccgacaacggcacgugcuaccccggcgacuucaucgacuacgaggagcuccgggagcagcugagcuccgucagcuccuucgagcgcuucgagaucuuccccaagaccagcuccuggcccaaccacgacagcaacaagggggugaccgcggccugcccgcacgccggcgccaaguccuucuacaagaaccugaucuggcucgugaagaaggggaacagcuaccccaagcuguccaagagcuacaucaacgacaagggcaaggagguccuggugcucugggggauccaccaccccagcaccuccgcggaccagcagagccuguaccagaacgccgacgccuacguguucgucggcacgucccgguacagcaagaaguucaagcccgagaucgccauccgcccgaaggugcgggaccaggagggccgcaugaacuacuacuggacccugguggagcccggggacaagaucaccuucgaggccaccggcaaccucgucgugccccgguacgcguucgccauggagcgcaacgccggguccggcaucaucaucagcgacacgcccgugcacgacugcaacacgaccugccagaccccgaagggcgccaucaacaccucccugcccuuccagaacauccaccccaucaccaucgggaagugccccaaguacgucaagagcaccaagcugcggcucgccaccggccugcgcaacgugccguccauccagagccgggggcuguucggcgcgaucgccggguucaucgagggcggcuggacggggaugguggacggcugguacggguaccaccaccagaacgagcagggcuccggguacgccgccgaccucaagagcacccagaacgccaucgacaagaucaccaacaaggucaacuccgugaucgagaagaugaacacccaguucacggcggucggcaaggaguucaaccaccuggagaagcgcaucgagaaccugaacaagaagguggacgacggcuuccucgacaucuggaccuacaacgccgagcugcuggugcuccuggagaacgagcggacccuggacuaccacgacagcaacgucaagaaccucuacgagaaggugcgcucccagcugaagaacaacgccaaggagaucgggaacggcugcuucgaguucuaccacaagugcgacaacacgugcauggagagcgugaagaacgggaccuacgacuaccccaaguacuccgaggaggccaagcugaaccgggaggagaucgacggcgucaagcucgagagcacccgcaucuaccagauccuggccaucuacuccaccguggcgagcagccuggugcucgucgugucccugggggccaucagcuucuggaugugcuccaacggcagccugcagugccggaucugcaucuga

SEQ ID NO: 68602 - RNA, 1701 nt, Artificial Sequence; identical to SEQ ID NO: 67865
  derived and/or modified CDS sequence (opt1) from hemagglutinin__InfluenzaA__ADF27629

SEQ ID NO: 68603 - RNA, 1701 nt, Artificial Sequence
  derived and/or modified CDS sequence (opt1) from hemagglutinin__InfluenzaA__ADF27649
augaaggccauccuggugguccuccuguacaccuucgccaccgcgaacgccgacacgcugugcaucggcuaccacgccaacaacagcaccgacaccguggacaccgugcucgagaagaacgucacggugacccacuccgugaaccugcuggaggacaagcacaacgggaagcucugcaagcugcgcggcgucgcgccccugcaccucgggaagugcaacaucgccggcuggauccuggggaacccggagugcgagagccuguccaccgccagcuccuggagcuacaucguggagaccuccagcuccgacaacggcacgugcuaccccggcgacuucaucgacuacgaggagcuccgggagcagcugagcuccgugagcuccuucgagcgcuucgagaucuuccccaagaccagcuccuggcccaaccacgacagcaacaagggggucaccgccgccugcccgcacgccggcgcgaaguccuucuacaagaaccugaucuggcucgugaagaaggggaacagcuaccccaagcuguccaagagcuacaucaacgacaagggcaaggaggugcugguccucugggggauccaccaccccagcaccuccgccgaccagcagagccuguaccagaacgccgacgccuacguguucgugggcacgucccgguacagcaagaaguucaagcccgagaucgccauccgcccgaagguccgggaccaggagggccgcaugaacuacuacuggacccugguggagcccggggacaagaucaccuucgaggcgaccggcaaccucguggucccccgguacgccuucgccauggagcgcaacgccggguccggcaucaucaucagcgacacgcccgugcacgacugcaacacgaccugccagaccccgaagggcgccaucaacaccucccugcccuuccagaacauccaccccaucaccaucgggaagugccccaaguacgucaagagcaccaagcugcggcucgcgaccggccugcgcaacgugccguccauccagccccgggggcuguucggcgccaucgccggguucaucgagggcggcuggacggggaugguggacggcugguacggguaccaccaccagaacgagcagggcagcggguacgccgccgaccucaaguccacccagaacgcgaucgacaagaucaccaacaaggugaacagcgucaucgagaagaugaacacccaguucacggccgugggcaaggaguucaaccaccuggagaagcgcaucgagaaccugaacaagaaggucgacgacggcuuccucgacaucuggaccuacaacgccgagcugcuggugcuccuggagaacgagcggacccuggacuaccacgacuccaacgugaagaaccucuacgagaagguccgcagccagcugaagaacaacgccaaggagaucgggaacggcugcuucgaguucuaccacaagugcgacaacacgugcauggaguccgugaagaacgggaccuacgacuaccccaaguacagcgaggaggccaagcugaaccgggaggagaucgacggcgugaagcucgaguccacccgcaucuaccagauccuggcgaucuacagcaccgucgccuccagccuggugcucguggucagccugggggccaucuccuucuggaugugcagcaacggcucccugcagugccggaucugcaucuga

SEQ ID NO: 68604 - RNA, 1701 nt, Artificial Sequence; identical to SEQ ID NO: 67865
  derived and/or modified CDS sequence (opt1) from hemagglutinin__InfluenzaA__ADF27659

SEQ ID NO: 68605 - RNA, 1701 nt, Artificial Sequence; identical to SEQ ID NO: 68342
  derived and/or modified CDS sequence (opt1) from hemagglutinin__InfluenzaA__ADF27669

SEQ ID NO: 68606 - RNA, 1701 nt, Artificial Sequence; identical to SEQ ID NO: 67794
  derived and/or modified CDS sequence (opt1) from hemagglutinin__InfluenzaA__ADF27679

SEQ ID NO: 68607 - RNA, 1701 nt, Artificial Sequence; identical to SEQ ID NO: 68403
  derived and/or modified CDS sequence (opt1) from hemagglutinin__InfluenzaA__ADF27689

SEQ ID NO: 68608 - RNA, 1701 nt, Artificial Sequence
  derived and/or modified CDS sequence (opt1) from hemagglutinin__InfluenzaA__ADF27699
augaaggccauccuggugguccuccuguacaccuucgccaccgcgaacgccgacacgcugugcaucggcuaccacgccaacaacagcaccgacaccguggacaccgugcucgagaagaacgucacggugacccacuccgugaaccugcuggaggacaagcacaacgggaagcucugcaagcugcgcggcgucgcgccccugcaccucgggaagugcaacaucgccggcuggauccuggggaacccggagugcgagagccuguccaccgccagcuccuggagcuacaucguggagaccuccagcuccgacaacggcacgugcuaccccggcgacuucaucgacuacgaggagcuccgggagcagcugagcuccgugagcuccuucgagcgcuucgagauguuccccaagaccagcuccuggcccaaccacgacagcaacaagggggucaccgccgccugcccgcacgccggcgcgaaguccuucuacaagaaccugaucuggcucgugaagaaggggaacagcuaccccaagcuguccaagagcuacaucaacgacaagggcaaggaggugcugguccucugggggauccaccaccccagcaccuccgccgaccagcagagccuguaccagaacgccgacgccuacguguucgugggcacgucccgguacagcaagaaguucaagcccgagaucgccauccgcccgaagguccgggaccaggagggccgcaugaacuacuacuggacccugguggagcccggggacaagaucaccuucgaggcgaccggcaaccucguggucccccgguacgccuucgccauggagcgcaacgccggguccggcaucaucaucagcgacacgcccgugcacaacugcaacacgaccugccagaccccgaagggcgccaucaacaccucccugcccuuccagaacauccaccccaucaccaucgggaagugccccaaguacgucaagagcaccaagcugcggcucgcgaccggccugcgcaacgugccguccauccagagccgggggcuguucggcgccaucgccggguucaucgagggcggcuggacggggaugguggacggcugguacggguaccaccaccagaacgagcagggcuccggguacgccgccgaccucaagagcacccagaacgcgaucgacgagaucaccaacaaggugaacuccgucaucgagaagaugaacacccaguucacggccgugggcaaggaguucaaccaccuggagaagcgcaucgagaaccugaacaagaaggucgacgacggcuuccucgacaucuggaccuacaacgccgagcugcuggugcuccuggagaacgagcggacccuggacuaccacgacagcaacgugaagaaccucuacgagaagguccgcucccagcugaagaacaacgccaaggagguggggaacggcugcuucgaguucuaccacaagugcgacaacacgugcauggagagcgugaagaacgggaccuacgacuaccccaaguacuccgaggaggccaagcugaaccgggaggagaucgacggcgucaagcucgagagcacccgcaucuaccagauccuggcgaucuacuccaccguggccagcagccuggugcucgucgugucccugggggccaucagcuucuggaugugcuccaacggcagccugcagugccggaucugcaucuga

SEQ ID NO: 68609 - RNA, 1701 nt, Artificial Sequence
  derived and/or modified CDS sequence (opt1) from hemagglutinin__InfluenzaA__ADF27709
augaaggccauccuggugguccuccuguacaccuucgccaccgcgaacgccgacacgcugugcaucggcuaccacgccaacaacagcaccgacaccguggacaccgugcucgagaagaacgucacggugacccacuccgugaaccugcuggaggacaagcacaacgggaagcucugcaagcugcgcggcgucgcgccccugcaccucgggaagugcaacaucgccggcuggauccuggggaacccggagugcgagagccuguccaccgccagcuccuggagcuacaucguggagaucuccagcuccgacaacgggaccugcuaccccggcgacuucaucaacuacgaggagcuccgggagcagcugagcuccgugagcuccuucgagcgcuucgagaucuuccccaagacgagcuccuggcccaaccacgacagcaacaagggcgucaccgccgccugcccgcacgccggcgcgaaguccuucuacaagaaccugaucuggcucgugaagaaggggaacagcuaccccaagcuguccaagagcuacaucaacgacaagggcaaggaggugcugguccucugggggauccaccaccccagcaccuccgccgaccagcagagccuguaccagaacgccgacgccuacguguucgugggcaccucccgguacagcaagaaguucaagcccgagaucgccauccgcccgaagguccgggaccaggagggccgcaugaacuacuacuggacgcugguggagcccggggacaagaucaccuucgaggcgaccggcaaccucguggucccccgguacgccuucgccauggagcgcaacgccggguccggcaucaucaucagcgacacccccgugcacgacugcaacacgaccugccagaccccgaagggcgccaucaacaccucccugcccuuccagaacauccaccccaucacgaucgggaagugccccaaguacgucaagagcaccaagcugcggcucgcgaccggccugcgcaacgugccguccauccagagccgggggcuguucggcgccaucgccggguucaucgagggcggcuggaccgggaugguggacggcugguacggguaccaccaccagaacgagcagggcuccggguacgccgccgaccucaagagcacgcagaacgcgaucgacaagaucaccaacaaggugaacuccgucaucgagaagaugaacacccaguucaccgccgugggcaaggaguucaaccaccuggagaagcgcaucgagaaccugaacaagaaggucgacgacggcuuccucgacaucuggacguacaacgccgagcugcuggugcuccuggagaacgagcggacccuggacuaccacgacagcaacgugaagaaccucuacgagaagguccgcucccagcugaagaacaacgccaaggagaucgggaacggcugcuucgaguucuaccacaagugcgacaacacgugcauggagagcgugaagaacgggaccuacgacuaccccaaguacuccgaggaggccaagcugaaccgggaggagaucgacggcgugaagcucgagagcacccgcaucuaccagauccuggcgaucuacuccaccgucgccagcagccuggugcucguggucucccugggggccaucagcuucuggaugugcuccaacggcagccugcagugccggaucugcaucuga

SEQ ID NO: 68610 - RNA, 1701 nt, Artificial Sequence; identical to SEQ ID NO: 67857
  derived and/or modified CDS sequence (opt1) from hemagglutinin__InfluenzaA__ADF27785

SEQ ID NO: 68611 - RNA, 1701 nt, Artificial Sequence
  derived and/or modified CDS sequence (opt1) from hemagglutinin__InfluenzaA__ADF27795
augaaggccauccuggugguccuccuguacaccuucgccaccgcgaacgccgacacgcugugcaucggcuaccacgccaacaacagcaccgacaccguggacaccgugcucgagaagaacgucacggugacccacuccgugaaccugcuggaggacaagcacaacgggaagcucugcaagcugcgcggcgucgcgccccugcaccucgggaagugcaacaucgccggcuggauccuggggaacccggagugcgagagccuguccaccgccagcuccuggagcuacaucguggagaccuccagcuccgacaacggcacgugcuaccccggcgacuucaucgacuacgaggagcuccgggagcagcugagcuccgugagcuccuucgagcgcuucgagaucuuccccaagaccagcuccuggcccaaccacgacagcaacaagggggucaccgccgccugcccgcacgccggcgcgaaguccuucuacaagaaccugaucuggcucgugaagaaggggaacagcuaccccaagcuguccaagagcuacaucaacgacaagggcaaggaggugcugguccucugggggauccaccaccccagcaccuccgccgaccagcagagccuguaccagaacgccgacgccuacguguucgugggcacgucccgguacagcaagaaguucaagcccgagaucgccauccgcccgaagguccgggaccaggagggccgcaugaacuacuacuggacccuggugaagcccggggacaagaucaccuucgaggcgaccggcaaccucguggucccccgguacgccuucgccauggagcgcaacgccggguccggcaucaucaucagcgacacgcccgugcacgacugcaacacgaccugccagaccccgaagggcgccaucaacaccucccugcccuuccagaacauccaccccaucaccaucgggaagugccccaaguacgucaagagcaccaagcugcggcucgcgaccggccugcgcaacgugccguccauccagagccgggggcuguucggcgccaucgccggguucaucgagggcggcuggacggggaugguggacggcugguacggguaccaccaccagaacgagcagggcuccggguacgccgccgaccucaagagcacccagaacgcgaucgacgagaucaccaacaaggugaacuccgucaucgagaagaugaacacccaguucacggccgugggcaaggaguucaaccaccuggagaagcgcaucgagaaccugaacaagaaggucgacgacggcuuccucgacaucuggaccuacaacgccgagcugcuggugcuccuggagaacgagcggacccuggacuaccacgacagcaacgugaagaaccucuacgagaagguccgcucccagcugaagaacaacgccaaggagaucgggaacggcugcuucgaguucuaccacaagugcgacaacacgugcauggagagcgugaagaacgggaccuacgacuaccccaaguacuccgaggaggccaagcugaaccgggaggagaucgacggcgugaagcucgagagcacccgcaucuaccagauccuggcgaucuacuccaccgucgccagcagccuggugcucguggucucccugggggccaucagcuucuggaugugcuccaacggcagccugcagugccggaucugcaucuga

SEQ ID NO: 68612 - RNA, 1701 nt, Artificial Sequence; identical to SEQ ID NO: 67865
  derived and/or modified CDS sequence (opt1) from hemagglutinin__InfluenzaA__ADF27805

SEQ ID NO: 68613 - RNA, 1701 nt, Artificial Sequence
  derived and/or modified CDS sequence (opt1) from hemagglutinin__InfluenzaA__ADF27815
augaaggccauccuggugguccuccuguacaccuucgccaccgcgaacgccgacacgcugugcaucggcuaccacgccaacaacagcaccgacaccguggacaccgugcucgagaagaacgucacggugacccacuccgugaaccugcuggaggacaagcacaacgggaagcucugcaagcugcgcggcgucgcgccccugcaccucgggaagugcaacaucgccggcuggauccuggggaacccggagugcgagagccuguccaccgccagcuccuggagcuacaucguggagaccuccagcuccgacaacggcacgugcuaccccggcgacuucaucgacuacgaggagcuccgggagcagcugagcuccgugagcuccuucgagcgcuucgagaucuuccccaagaccagcuccuggcccaaccacgacagcaacaagggggucaccgccgccugcccgcacgacggcgccaaguccuucuacaagaaccugaucuggcucgugaagaaggggaacagcuaccccaagcuguccaagagcuacaucaacgacaagggcaaggaggugcugguccucugggggauccaccaccccagcaccuccgcggaccagcagagccuguaccagaacgccgacgccuacguguucgugggcacgucccgguacagcaagaaguucaagcccgagaucgccauccgcccgaagguccgggaccaggagggccgcaugaacuacuacuggacccugguggagcccggggacaagaucaccuucgaggccaccggcaaccucguggucccccgguacgcguucgccauggagcgcaacgccggguccggcaucaucaucagcgacacgcccgugcacgacugcaacacgaccugccagaccccgaagggcgccaucaacaccucccugcccuuccagaacauccaccccaucaccaucgggaagugccccaaguacgucaagagcaccaagcugcggcucgccaccggccugcgcaacgugccguccauccagagccgggggcuguucggcgcgaucgccggguucaucgagggcggcuggacggggaugguggacggcugguacggguaccaccaccagaacgagcagggcuccggguacgccgccgaccucaagagcacccagaacgccaucgacaagaucaccaacaaggugaacuccgucaucgagaagaugaacacccaguucacggcggugggcaaggaguucaaccaccuggagaagcgcaucgagaaccugaacaagaaggucgacgacggcuuccucgacaucuggaccuacaacgccgagcugcuggugcuccuggagaacgagcggacccuggacuaccacgacagcaacgugaagaaccucuacgagaagguccgcucccagcugaagaacaacgccaaggagaucgggaacggcugcuucgaguucuaccacaagugcgacaacacgugcauggagagcgugaagaacgggaccuacgacuaccccaaguacuccgaggaggccaagcugaaccgggaggagaucgacggcgugaagcucgagagcacccgcaucuaccagauccuggccaucuacuccaccgucgcgagcagccuggugcucguggucucccugggggccaucagcuucuggaugugcuccaacggcagccugcagugccggaucugcaucuga

SEQ ID NO: 68614 - RNA, 1701 nt, Artificial Sequence
  derived and/or modified CDS sequence (opt1) from hemagglutinin__InfluenzaA__ADF27825
augaaggccauccuggugguccuccuguacaccuucgccaccgcgaacgccgacacgcugugcaucggcuaccacgccaacaacagcaccgacaccguggacaccgugcucgagcgcaacgucacggugacccacuccgugaaccugcuggaggacaagcacaacgggaagcucugcaagcugcggggcgucgcgccccugcaccucgggaagugcaacaucgccggcuggauccuggggaacccggagugcgagagccuguccaccgcgagcuccuggagcuacaucguggagaccuccagcuccgacaacggcacgugcuaccccggcgacuucaucgacagcgaggagcuccgcgagcagcuguccagcguguccagcuucgagcgguucgagaucuuccccaagaccuccagcuggcccaaccacgacuccaacaagggggucaccgccgccugcccgcacgccggcgccaagagcuucuacaagaaccugaucuggcucgugaagaaggggaacuccuaccccaagcugagcaagagcuacaucaacgacaagggcaaggaggugcugguccucugggggauccaccaccccuccaccagcgccgaccagcagucccuguaccagaacgccgacgccuacguguucgugggcacgagccgcuacuccaagaaguucaagcccgagaucgccauccggccgaagguccgcgaccaggagggccggaugaacuacuacuggacccugguggagcccggggacaagaucaccuucgaggcgaccggcaaccucguggucccccgcuacgccuucgccauggagcggaacgccgggagcggcaucaucaucuccgacacgcccgugcacgacugcaacacgaccugccagaccccgaagggcgccaucaacaccagccugcccuuccagaacauccaccccaucaccaucgggaagugccccaaguacgugaaguccaccaagcugcgccucgcgaccggccugcggaacgucccgagcauccagucccgcgggcuguucggcgccaucgccggguucaucgagggcggcuggacggggaugguggacggcugguacggguaccaccaccagaacgagcagggcagcggguacgccgccgaccucaaguccacccagaacgcgaucgacgagaucaccaacaaggugaacagcgucaucgagaagaugaacacccaguucacggccgugggcaaggaguucaaccaccuggagaagcggaucgagaaccugaacaagaaggucgacgacggcuuccucgacaucuggaccuacaacgccgagcugcuggugcuccuggagaacgagcgcacccuggacuaccacgacuccaacgugaagaaccucuacgagaagguccggagccagcugaagaacaacgccaaggagaucgggaacggcugcuucgaguucuaccacaagugcgacaacacgugcauggaguccgugaagaacgggaccuacgacuaccccaaguacagcgaggaggccaagcugaaccgcgaggagaucgacggcgugaagcucgaguccacccggaucuaccagauccuggcgaucuacagcaccgucgccagcucccuggugcucguggucagccugggggccaucuccuucuggaugugcagcaacggcucccugcagugccgcaucugcaucuga

SEQ ID NO: 68615 - RNA, 1701 nt, Artificial Sequence
  derived and/or modified CDS sequence (opt1) from hemagglutinin__InfluenzaA__ADF27845
augaaggccauccuggugguccuccuguacaccuucgccaccgcgaacgccgacacgcugugcaucggcuaccacgccaacaacagcaccgacaccguggacaccgugcucgagaagaacgucacggugacccacuccgccaaccugcuggaggacaagcacaacgggaagcucugcaagcugcgcggcguggcgccccugcaccucgggaagugcaacaucgccggcuggauccuggggaacccggagugcgagagccuguccaccgccagcuccuggagcuacaucgucgagaccuccagcuccgacaacggcacgugcuaccccggcgacuucaucgacuacgaggagcuccgggagcagcugagcuccgugagcuccuucgagcgcuucgagaucuuccccaagaccagcuccuggcccaaccacgacagcaacaagggggugaccgccgccugcccgcacgcgggcgccaaguccuucuacaagaaccugaucuggcucgucaagaaggggaacagcuaccccaagcuguccaagagcuacaucaacgacaagggcaaggaggugcuggugcucugggggauccaccaccccagcaccaacgccgaccagcagucccuguaccagaacgccgacgccuacgucuucgugggcacgagccgguacuccaagaaguucaagcccgagaucgcgauccgcccgaaggugcgggaccaggagggccgcaugaacuacuacuggacccuggucgagcccggggacaagaucaccuucgaggccaccggcaaccucguggugccccgguacgccuucgccauggagcgcaacgccgggagcggcaucaucaucuccgacacgcccguccacgacugcaacacgaccugccagaccccgaagggcgcgaucaacaccagccugcccuuccagaacauccaccccaucaccaucgggaagugccccaaguacgugaaguccaccaagcugcggcucgccaccggccugcgcaacgugccgagcauccagucccgggggcuguucggcgccaucgccggguucaucgagggcggcuggacggggauggucgacggcugguacggguaccaccaccagaacgagcagggcagcggguacgccgcggaccucaaguccacccagaacgccaucgacgagaucaccaacaaggugaacagcgugaucgagaagaugaacacccaguucacggccgucggcaaggaguucaaccaccuggagaagcgcaucgagaaccugaacaagaagguggacgacggcuuccucgacaucuggaccuacaacgccgagcugcugguccuccuggagaacgagcggacccuggacuaccacgacuccaacgugaagaaccucuacgagaaggugcgcagccagcugaagaacaacgccaaggagaucgggaacggcugcuucgaguucuaccacaagugcgacaacacgugcauggaguccgucaagaacgggaccuacgacuaccccaaguacagcgaggaggcgaagcugaaccgggaggagaucgacggcgugaagcucgaguccacccgcaucuaccagauccuggccaucuacagcaccguggccuccagccugguccucguggugagccugggggccaucuccuucuggaugugcagcaacggcucccugcagugccggaucugcaucuga

SEQ ID NO: 68616 - RNA, 1701 nt, Artificial Sequence; identical to SEQ ID NO: 67857
  derived and/or modified CDS sequence (opt1) from hemagglutinin__InfluenzaA__ADF27855

SEQ ID NO: 68617 - RNA, 1701 nt, Artificial Sequence; identical to SEQ ID NO: 67857
  derived and/or modified CDS sequence (opt1) from hemagglutinin__InfluenzaA__ADF27865

SEQ ID NO: 68618 - RNA, 1701 nt, Artificial Sequence; identical to SEQ ID NO: 67857
  derived and/or modified CDS sequence (opt1) from hemagglutinin__InfluenzaA__ADF27875

SEQ ID NO: 68619 - RNA, 1701 nt, Artificial Sequence; identical to SEQ ID NO: 67857
  derived and/or modified CDS sequence (opt1) from hemagglutinin__InfluenzaA__ADF27885

SEQ ID NO: 68620 - RNA, 1701 nt, Artificial Sequence; identical to SEQ ID NO: 66693
  derived and/or modified CDS sequence (opt1) from hemagglutinin__InfluenzaA__ADF27895

SEQ ID NO: 68621 - RNA, 1701 nt, Artificial Sequence
  derived and/or modified CDS sequence (opt1) from hemagglutinin__InfluenzaA__ADF27915
augaaggccauccuggugguccuccuguacaccuucgccaccgcgaacgccgacacgcugugcaucggcuaccacgccaacaacagcaccgacaccguggacaccgugcucgagaagaacgucacggugacccacuccgugaaccugcuggaggacaagcacaacgggaagcucugcaagcugcgcggcgucgcgccccugcaccucgggaagugcaacaucgccggcuggauccuggggaacccggagugcgagagccuguccaccgccagcuccuggagcuacaucguggagaccuccagcuccgacaacggcacgugcuaccccggcgacuucaucgacuacgaggagcuccgggagcagcugagcuccgugagcuccuucgagcgcuucgagaucuuccccaagaccagcuccuggcccaaccacgacagcaacaagggggucaccgccgccugcccgcacgccggcgcgaaguccuucuacaagaaccugaucuggcucgugaagaaggggaacagcuaccccaagcuguccaagagcuacaucaacgacaagggcaaggaggugcugguccucugggggauccaccaccccagcgccuccgccgaccagcagagccuguaccagaacgccgacgccuacguguucgugggcaccucccgguacagcaagaaguucaagcccgagaucgcgauccgcccgaagguccgggaccaggagggccgcaugaacuacuacuggacgcugguggagcccggggacaagaucaccuucgaggccaccggcaaccucguggucccccgguacgccuucgccauggagcgcaacgccggguccggcaucaucaucagcgacacccccgugcacgacugcaacacgaccugccagaccccgaagggcgcgaucaacaccucccugcccuuccagaacauccaccccaucacgaucgggaagugccccaaguacgucaagagcaccaagcugcggcucgccaccggccugcgcaacgugccguccauccagagccgggggcuguucggcgccaucgccggguucaucgagggcggcuggaccgggaugguggacggcugguacggguaccaccaccagaacgagcagggcuccggguacgccgcggaccucaagagcacgcagaacgccaucgacaagaucaccaacaaggugaacuccgucaucgagaagaugaacacccaguucaccgccgugggcaaggaguucaaccaccuggagaagcgcaucgagaaccugaacaagaaggucgacgacggcuuccucgacaucuggacguacaacgccgagcugcuggugcuccuggagaacgagcggacccuggacuaccacgacagcaacgugaagaaccucuacgagaagguccgcucccagcugaagaacaacgccaaggagaucgggaacggcugcuucgaguucuaccacaagugcgacaacacgugcauggagagcgugaagaacgggaccuacgacuaccccaaguacuccgaggaggcgaagcugaaccgggaggagaucgacggcgugaagcucgagagcacccgcaucuaccagauccuggccaucuacuccaccgucgccagcagccuggugcucguggucucccugggggccaucagcuucuggaugugcuccaacggcagccugcagugccggaucugcaucuga

SEQ ID NO: 68622 - RNA, 1701 nt, Artificial Sequence
  derived and/or modified CDS sequence (opt1) from hemagglutinin__InfluenzaA__ADF27925
augaaggccauccuggugguccuccuguacaccuucgccaccgcgaacgccgacacgcugugcaucggcuaccacgccaacaacagcaccgacaccguggacaccgugcucgagaagaacgucacggugacccacuccgugaaccugcuggaggacaagcacaacgggaagcucugcaagcugcgcggcgucgcgccccugcaccucgggaagugcaacaucgccggcuggauccuggggaacccggagugcgagagccuguccaccgccagcuccuggagcuacaucguggagaccuccagcuccgacaacggcacgugcuaccccggcgacuucaucgacuacgaggagcuccgggagcagcugagcuccgugagcuccuucgagcgcuucgagaucuuccccaagaccagcuccuggcccaaccacgacagcaacaagggggucaccgccgccugcccgcacgccggcgcgaaguccuucuacaagaaccugaucuggcucgugaagaaggggaacagcuaccccaagcuguccaacagcuacaucaacgacaagggcaaggaggugcugguccucugggggauccaccaccccagcaccuccgccgaccagcagagccuguaccagaacgccgacgccuacguguucgugggcacgucccgguacagcaagaaguucaagcccgagaucgccauccgcccgaagguccgggaccaggagggccgcaugaacuacuacuggacccugguggagcccggggacaagaucaccuucgaggcgaccggcaaccucguggucccccgguacgccuucgccauggagcgcaacgccggguccggcaucaucaucagcgacacgcccgcccacgacugcaacacgaccugccagaccccgaagggcgcgaucaacaccucccugcccuuccagaacauccaccccaucaccaucgggaagugccccaaguacgucaagagcaccaagcugcggauggccaccggccuccgcaacgugccguccauccagagccgggggcuguucggcgccaucgccggguucaucgagggcggcuggacggggaugguggacggcugguacggguaccaccaccagaacgagcagggcuccggguacgccgcggaccucaagagcacccagaacgccaucgacgagaucaccaacaaggugaacuccgugaucgagaagaugaacacccaguucacggccgucggcaaggaguucaaccaccuggagaagcgcaucgagaaccugaacaagaagguggacgacggcuuccuggacaucuggaccuacaacgccgagcuccugguccugcucgagaacgagcggacccuggacuaccacgacagcaacgugaagaaccuguacgagaaggugcgcucccagcucaagaacaacgccaaggagaucgggaacggcugcuucgaguucuaccacaagugcgacaacacgugcauggagagcgucaagaacgggaccuacgacuaccccaaguacuccgaggaggcgaagcugaaccgggaggagaucgacggcgugaagcuggagagcacccgcaucuaccagauccucgccaucuacuccaccguggccagcagccugguccugguggugucccucggggccaucagcuucuggaugugcuccaacggcagccugcagugccggaucugcaucuga

SEQ ID NO: 68623 - RNA, 1701 nt, Artificial Sequence
  derived and/or modified CDS sequence (opt1) from hemagglutinin__InfluenzaA__ADF27935
augaaggccauccuggugguccuccuguacaccuucgccaccgcgaacgccgacacgcugugcaucggcuaccacgccaacaacagcaccgacaccguggacaccgugcucgagaagaacgucacggugacccacuccgugaaccugcuggaggacaagcacaacgggaagcucugcaagcugcgcggcgucgcgccccugcaccucgggaagugcaacaucgccggcuggauccuggggaacccgaagugcgagagccuguccaccgagagcuccuggagcuacaucguggagaccuccagcuccgacaacggcacgugcuaccccggcgacuucaucaacuacgaggagcuccgggagcagcugagcuccgugagcuccuucgagcgcuucgagaucuuccccaagaccagcuccuggcccaaccacgacagcaacaagggggucaccgccgccugcccgcacgccggcgccaaguccuucuacaagaaccugaucuggcucgugaagaaggggaacagcuaccccaagcuguccaagagcuacaucaacgacaagggcaaggaggugcugguccucugggggauccaccaccccagcaccuccgcggaccagcagagccuguaccagaacgccgacgccuacguguucgugggcacgucccgguacagcaagaaguucaagcccgagaucgccauccgcccgaagguccgggaccaggagggccgcaugaacuacuacuggacccugguggagcccggggacaagaucaccuucgaggccaccggcaaccucguggucccccgguacgcguucgccauggagcgcaacgccggguccggcaucaucaucagcgacacgcccgugcacgacugcaacacgaccugccagaccccgaagggcgccaucaacaccucccugcccuuccagaacauccaccccaucaccaucgggaagugccccaaguacgucaagagcaccaagcugcggcucgccaccggccugcgcaacgugccguccauccagagccgggggcuguucggcgcgaucgccggguucaucgagggcggcuggacggggaugguggacggcugguacggguaccaccaccagaacgagcagggcuccggguacgccgccgaccucaagagcacccagaacgccaucgacaagaucaccaacaaggugaacuccgucaucgagaagaugaacacccaguucacggcggugggcaaggaguucaaccaccuggagaagcgcaucgagaaccugaacaagaaggucgacgacggcuuccucgacaucuggaccuacaacgccgagcugcuggugcuccuggagaacgagcggacccuggacuaccacgacagcaacgugaagaaccucuacgagaagguccgcucccagcugaagaacaacgccaaggagaucgggaacggcugcuucgaguucuaccacaagugcgacaacacgugcauggagagcgugaagaacgggaccuacgacuaccccaaguacuccgaggaggccaagcugaaccgggaggagaucgacggcgugaagcucgagagcacccgcaucuaccagauccuggccaucuacuccaccgucgcgagcagccuggugcucguggucucccugggggccaucagcuucuggaugugcuccaacggcagccugcagugccggaucugcaucuga

SEQ ID NO: 68624 - RNA, 1701 nt, Artificial Sequence
  derived and/or modified CDS sequence (opt1) from hemagglutinin__InfluenzaA__ADF27955
augaaggccauccuggugguccuccuguacaccuucgccaccgcgaacgccgacacgcugugcaucggcuaccacgccaacaacagcaccgacaccguggacaccgugcucgagaagaacgucacggugacccacuccgugaaccugcuggaggacaagcacaacgggaagcucugcaagcugcgcggcgucgcgccccugcaccucgggaagugcaacaucgccggcuggauccuggggaacccggagugcgagagccuguccaccgccagcuccuggagcuacaucguggagaccuccagcuccgacaacggcacgugcuaccccggcgacuucaucgacuacgaggagcuccgggagcagcugagcuccgugagcuccuucgagcgcuucgagaucuuccccaagaccagcuccuggcccaaccacgacagcaacaagggggucaccgccgccugcccgcacgccggcgcgaaguccuucuacaagaaccugaucuggcucgugaagaaggggaacagcuaccccaagcuguccaacagcuacaucaacgacaagggcaaggaggugcugguccucugggggauccaccaccccagcaccuccgccgaccagcagagccuguaccagaacgccgacgccuacguguucgugggcacgucccgguacagcaagaaguucaagcccgagaucgccauccgcccgaagguccgggaccaggagggccgcaugaacuacuacuggacccugguggagcccggggacaagaucaccuucgaggcgaccggcaaccucguggucccccgguacgccuucgccauggagcgcaacgccggguccggcaucaucaucagcgacacgcccgugcacgacugcaacacgaccugccagaccccgaagggcgccaucaacaccucccugcccuuccagaacauccaccccaucaccaucgggaagugccccaaguacgucaagagcaccaagcugcggcucgcgaccggccugcgcaacgugccguccauccagagccgggggcuguucggcgccaucgccggguucaucgagggcggcuggacggggaugguggacggcugguacggguaccaccaccagaacgagcagggcuccggguacgccgccgaccucaagagcacccagaacgcgaucgacaagaucaccaacaaggugaacuccgucaucgagaagaugaacacccaguucacggccgugggcaaggaguucaaccaccuggagaagcgcaucgagaaccugaacaagaaggucgacgacggcuuccucgacaucuggaccuacaacgccgagcugcuggugcuccuggagaacgagcggacccuggacuaccacgacagcaacgugaagaaccucuacgagaagguccgcucccagcugaagaacaacgccaaggagaucgggaacggcugcuucgaguucuaccacaagugcgacaacacgugcauggagagcgugaagaacgggaccuacgacuaccccaaguacuccgaggaggccaagcugaaccgggaggagaucgacggcgugaagcucgagagcacccgcaucuaccagauccuggcgaucuacuccaccgucgccagcagccuggugcucguggucucccugggggccaucagcuucuggaugugcuccaacggcagccugcagugccggaucugcaucuga

SEQ ID NO: 68625 - RNA, 1701 nt, Artificial Sequence
  derived and/or modified CDS sequence (opt1) from hemagglutinin__InfluenzaA__ADF27965
augaaggccauccuggugguccuccuguacaccuucgccaccgcgaacgccgacacgcugugcaucggcuaccacgccaacaacagcaccgacaccguggacaccgugcucgagaagaacgucacggugacccacuccgugaaccugcuggaggacaagcacaacgggaagcucugcaagcugcgcggcgucgcgccccugcaccucgggaagugcaacaucgccggcuggauccuggggaacccggagugcgagagccuguccaccgccagcuccuggagcuacaucguggagaccuccagcuccgacaacggcacgugcuaccccggcgacuucaucgacuacgaggagcuccgggagcagcugagcuccgugagcuccuucgagcgcuucgagaucuuccccaagaccagcuccuggcccaaccacgacagcaacaagggggucaccgccgccugcccgcacgccggcgcgaaguccuucuacaagaaccugaucuggcucgugaagaaggggaacagcuaccccaagcuguccaagagcuacaucaacgacaagggcaagaaggugcugguccucugggggauccaccaccccagcaccuccgccgaccagcagagccuguaccagaacgccgacgccuacguguucgugggcacgucccgguacagcaagaaguucaagcccgagaucgccauccgcccgaagguccgggaccaggagggccgcaugaacuacuacuggacccugguggagcccggggacaagaucaccuucgaggcgaccggcaaccucguggucccccgguacgccuucgccauggagcgcaacgccggguccggcaucaucaucagcgacacgcccgugaacgacugcaacacgaccugccagaccccgaagggcgccaucaacaccucccugcccuuccagaacauccaccccaucaccaucgggaagugccccaaguacgucaagagcaccaagcugcggcucgcgaccggccugcgcaacgugccguccauccagagccgggggcuguucggcgccaucgccggguucaucgagggcggcuggacggggaugguggacggcugguacggguaccaccaccagaacgagcagggcuccggguacgccgccgaccucaagagcacccagaacgcgaucgacaagaucaccaacaaggugaacuccgucaucgagaagaugaacacccaguucacggccgugggcaaggaguucaaccaccuggagaagcgcaucgagaaccugaacaagaaggucgacgacggcuuccucgacaucuggaccuacaacgccgagcugcuggugcuccuggagaacgagcggacccuggacuaccacgacagcaacgugaagaaccucuacgagaagguccgcucccagcugaagaacaacgccaaggagaucgggaacggcugcuucgaguucuaccacaagugcgacaacacgugcauggagagcgugaagaacgggaccuacgacuaccccaaguacuccgaggaggccaagcugaaccgggaggagaucgacggcgugaagcucgagagcacccgcaucuaccagauccuggcgaucuacuccaccgucgccagcagccuggugcucguggucucccugggggccaucagcuucuggaugugcuccaacggcagccugcagugccggaucugcaucuga

SEQ ID NO: 68626 - RNA, 1701 nt, Artificial Sequence; identical to SEQ ID NO: 67857
  derived and/or modified CDS sequence (opt1) from hemagglutinin__InfluenzaA__ADF27975

SEQ ID NO: 68627 - RNA, 1701 nt, Artificial Sequence; identical to SEQ ID NO: 67865
  derived and/or modified CDS sequence (opt1) from hemagglutinin__InfluenzaA__ADF27985

SEQ ID NO: 68628 - RNA, 1701 nt, Artificial Sequence
  derived and/or modified CDS sequence (opt1) from hemagglutinin__InfluenzaA__ADF27995
augaaggccauccuggugguccuccuguacaccuucgccaccgcgaacgccgacacgcugugcaucggcuaccacgccaacaacagcaccgacaccguggacaccgugcucgagaagaacgucacggugacccacuccgccaaccugcuggaggacaagcacaacgggaagcucugcaagcugcgcggcguggcgccccugcaccucgggaagugcaacaucgccggcuggauccuggggaacccggagugcgagagccuguccaccgccagcuccuggagcuacaucgucgagaccuccagcuccgacaacggcacgugcuaccccggcgacuucaucgacuacgaggagcuccgggagcagcugagcuccgugagcuccuucgagcgcuucgagaucuuccccaagaccagcuccuggcccaaccacgacagcaacaagggggugaccgccgccugcccgcacgcgggcgccaaguccuucuacaagaaccugaucuggcucgucaagaaggggaacagcuaccccaagcuguccaagagcuacaucaacgacaagggcaaggaggugcuggugcucugggggauccaccaccccagcaccaacgccgaccagcagucccuguaccagaacgccgacgccuacgucuucgugggcacgagccgguacuccaagaaguucaagcccgagaucgcgauccgcccgaaggugcgggaccaggagggccgcaugaacuacuacuggacccuggucgagcccggggacaagaucaccuucgaggccaccggcaaccucguggugccccgguacgccuucgccauggagcgcaacgccgggagcggcaucaucaucuccgacacgcccgcgcacgacugcaacacgaccugccagaccccgaagggcgccaucaacaccagccugcccuuccagaacauccaccccaucaccaucgggaagugccccaaguacgucaaguccaccaagcugcggcucgccaccggccugcgcaacaucccgagcauccagucccgggggcuguucggcgccaucgccggguucaucgagggcggcuggacggggaugguggacggcugguacggguaccaccaccagaacgagcagggcagcggguacgcggccgaccucaaguccacccagaacgccaucgacgagaucaccaacaaggugaacagcgucaucgagaagaugaacacccaguucacggccgugggcaaggaguucaaccaccuggagaagcgcaucgagaaccugaacaagaagguggacgacggcuuccucgacaucuggaccuacaacgccgagcugcugguccuccuggagaacgagcggacccuggacuaccacgacuccaacgugaagaaccucuacgagaagguccgcagccagcugaagaacaacgcgaaggagaucgggaacggcugcuucgaguucuaccacaagugcgacaacacgugcauggaguccgugaagaacgggaccuacgacuaccccaaguacagcgaggaggccaagcugaaccgggaggagaucgacggcgugaagcucgaguccacccgcaucuaccagauccuggccaucuacagcaccgucgccuccagccuggugcucguggucagccugggggcgaucuccuucuggaugugcagcaacggcucccugcagugccggaucugcaucuga

SEQ ID NO: 68629 - RNA, 1701 nt, Artificial Sequence; identical to SEQ ID NO: 68245
  derived and/or modified CDS sequence (opt1) from hemagglutinin__InfluenzaA__ADF28005

SEQ ID NO: 68630 - RNA, 1701 nt, Artificial Sequence; identical to SEQ ID NO: 68245
  derived and/or modified CDS sequence (opt1) from hemagglutinin__InfluenzaA__ADF28015

SEQ ID NO: 68631 - RNA, 1701 nt, Artificial Sequence; identical to SEQ ID NO: 67857
  derived and/or modified CDS sequence (opt1) from hemagglutinin__InfluenzaA__ADF28025

SEQ ID NO: 68632 - RNA, 1701 nt, Artificial Sequence; identical to SEQ ID NO: 67857
  derived and/or modified CDS sequence (opt1) from hemagglutinin__InfluenzaA__ADF28045

SEQ ID NO: 68633 - RNA, 1701 nt, Artificial Sequence
  derived and/or modified CDS sequence (opt1) from hemagglutinin__InfluenzaA__ADF28055
augaaggccauccuggugguccuccuguacaccuucgccaccgcgaacgccgacacgcugugcaucggcuaccacgccaacaacagcaccgacaccguggacaccgugcucgagaagaacgucacggugacccacuccgugaaccugcuggaggacaagcacaacgggaagcucugcaagcugcgcggcgucgcgccccugcaccucgggaagugcaacaucgccggcuggauccuggggaacccggagugcgagagccuguccaccgccagcuccuggagcuacaucguggagaccuccagcuccgacaacggcacgugcuaccccggcgacuucaucgacuacgaggagcuccgggagcagcugagcuccgugagcuccuucgagcgcuucgagaucuuccccaagaccagcuccuggcccaacuacgacagcaacaagggggucaccgccgccugcccgcacgccggcgcgaaguccuucuacaagaaccugaucuggcucgugaagaaggggaacagcuaccccaagcuguccaagagcuacaucaacgacaagggcaaggaggugcugguccucugggggauccaccaccccagcaccuccgccgaccagcagagccuguaccagaacgccgacgccuacguguucgugggcacgucccgguacagcaagaaguucaagcccgagaucgccauccgcccgaagguccgggaccaggagggccgcaugaacuacuacuggacccugguggagcccggggacaagaucaccuucgaggcgaccggcaaccucguggucccccgguacgccuucgccauggagcgcaacgccggguccggcaucaucaucagcgacacgcccgugcacgacugcaacacgaccugccagaccccgaagggcgccaucaacaccucccugcccuuccagaacauccaccccaucaccaucgggaagugccccaaguacgucaagagcaccaagcugcggcucgcgaccggccugcgcaacgugccguccauccagagccgggggcuguucggcgccaucgccggguucaucgagggcggcuggacggggaugguggacggcugguacggguaccaccaccagaacgagcagggcuccggguacgccgccgaccucaagagcacccagaacgcgaucgacaagaucaccaacaaggugaacuccgucaucgagaagaugaacacccaguucacggccgugggcaaggaguucaaccaccuggagaagcgcaucgagaaccugaacaagaaggucgacgacggcuuccucgacaucuggaccuacaacgccgagcugcuggugcuccuggagaacgagcggacccuggacuaccacgacagcaacgugaagaaccucuacgagaagguccgcucccagcugaagaacaacgccaaggagaucgggaacggcugcuucgaguucuaccacaagugcgacaacacgugcauggagagcgugaagaacgggaccuacgacuaccccaaguacuccgaggaggccaagcugaaccgggaggagaucgacggcgugaagcucgagagcacccgcaucuaccagauccuggcgaucuacuccaccgucgccagcagccuggugcucguggucucccugggggccaucagcuucuggaugugcuccaacggcagccugcagugccggaucugcaucuga

SEQ ID NO: 68634 - RNA, 1701 nt, Artificial Sequence; identical to SEQ ID NO: 67857
  derived and/or modified CDS sequence (opt1) from hemagglutinin__InfluenzaA__ADF28065

SEQ ID NO: 68635 - RNA, 1701 nt, Artificial Sequence; identical to SEQ ID NO: 66875
  derived and/or modified CDS sequence (opt1) from hemagglutinin__InfluenzaA__ADF28075

SEQ ID NO: 68636 - RNA, 1701 nt, Artificial Sequence; identical to SEQ ID NO: 67794
  derived and/or modified CDS sequence (opt1) from hemagglutinin__InfluenzaA__ADF28085

SEQ ID NO: 68637 - RNA, 1701 nt, Artificial Sequence; identical to SEQ ID NO: 66873
  derived and/or modified CDS sequence (opt1) from hemagglutinin__InfluenzaA__ADF28107

SEQ ID NO: 68638 - RNA, 1701 nt, Artificial Sequence; identical to SEQ ID NO: 68245
  derived and/or modified CDS sequence (opt1) from hemagglutinin__InfluenzaA__ADF28117

SEQ ID NO: 68639 - RNA, 1701 nt, Artificial Sequence
  derived and/or modified CDS sequence (opt1) from hemagglutinin__InfluenzaA__ADF29918
augaaggccauccuggugguccuccuguacaccuucgccaccgcgaacgccgacacgcugugcaucggcuaccacgccaacaacagcaccgacaccguggacaccgugcucgagaagaacgucacggugacccacuccgugaaccugcuggaggacaagcacaacgggaagcucugcaagcugcgcggcgucgcgccccugcaccucgggaagugcaacaucgccggcuggauccuggggaacccggagugcgagagccuguccaccgccagcuccuggagcuacaucguggagaccuccagcuccgacaacggcacgugcuaccccggcgacuucaucgacuacgaggagcuccgggagcagcugagcuccgugagcuccuucgagcgcuucgagaucuuccccaagaccagcuccuggcccaaccacgacagcaacaagggggucaccgccgccugcccgcacgccggcgcgaaguccuucuacaagaaccugaucuggcucgugaagaaggggaacagcuaccccaagcugucccggagcuacaucaacgacaagggcaaggaggugcugguccucugggggauccaccaccccagcaccuccgccgaccagcagagccuguaccagaacgccgacgccuacguguucgugggcacgucccgcuacagcaagaaguucaagcccgagaucgccauccggccgaagguccgcaaccaggagggccggaugaacuacuacuggacccugguggagcccggggacaagaucaccuucgaggcgaccggcaaccucguggucccccgcuacgccuucgccauggagcggaacgccggguccggcaucaucaucagcgacacgcccgugcacgacugcaacacgaccugccagaccccgaagggcgccaucaacaccucccugcccuuccagaacauccaccccaucaccaucgggaagugccccaaguacgucaagagcaccaagcugcgccucgcgaccggccugcggaacgugccguccauccagagccgcgggcuguucggcgccaucgccggguucaucgagggcggcuggacggggaugguggacggcugguacggguaccaccaccagaacgagcagggcuccggguacgccgccgaccucaagagcacccagaacgcgaucgacgagaucaccaacaaggugaacuccgucaucgagaagaugaacacccaguucacggccgugggcaaggaguucaaccaccuggagaagcggaucgagaaccugaacaagaaggucgacgacggcuuccucgacaucuggaccuacaacgccgagcugcuggugcuccuggagaacgagcgcacccuggacuaccacgacagcaacgugaagaaccucuacgagaagguccggucccagcugaagaacaacgccaaggagaucgggaacggcugcuucgaguucuaccacaagugcgacaacacgugcauggagagcgugaagaacgggaccuacgacuaccccaaguacuccgaggaggccaagcugaaccgcgaggagaucgacggcgugaagcucgagagcacccggaucuaccagauccuggcgaucuacuccaccgucgccagcagccuggugcucguggucucccugggggccaucagcuucuggaugugcuccaacggcagccugcagugccgcaucugcaucuga

SEQ ID NO: 68640 - RNA, 1701 nt, Artificial Sequence
  derived and/or modified CDS sequence (opt1) from hemagglutinin__InfluenzaA__ADF42689
augaaggccauccuggugguccuccuguacaccuucgccaccgcgaacgccgacacgcugugcaucggcuaccacgccaacaacagcaccgacaccguggacaccgugcucgagaagaacgucacggugacccacuccgugaaccugcuggaggacaagcacaacgggaagcucugcaagcugcgcggcgucgcgccccugcaccucgggaagugcaacaucgccggcuggauccuggggaacccggagugcgagagccuguccaccgccagcuccuggagcuacaucguggagaccuccagcuccgacaacggcacgugcuaccccggcgacuucaucgacuacgaggagcuccgggagcagcugagcuccgugagcuccuucgagcgcuucgagaucuuccccaagaccagcuccuggcccaaccacgacagcaacaagggggucaccgccgccugcccgcacgccggcgcgaaguccuucuacaagaaccugaucuggcucgugaagaaggggaacagcuaccccaagcuguccaagagcuacaucaacgacaagggcaaggaggugcugguccucugggggauccaccaccccagcaccuccgccgaccagcagagccuguaccagaacgccgacgccuacguguucgugggcacgucccgguacagcaagaaguucaagcccgagaucgccauccgcccgaagguccgggaccaggagggccgcaugaacuacuacuggacccugguggagcccggggacaagaucaccuucgaggcgaccggcaaccucguggucccccgguacgccuucgccauggagcgcaacgccggguccggcaucaucaucagcgacacgcccgugcacgacugcaacacgaccugccagaccccgaagggcgccaucaacaccucccugcccuuccagaacauccaccccaucaccaucgggaagugccccaaguacgucaagagcaccaagcugcggcucgcgaccggccugcgcaacgugccguccauccagagccgggggcuguucggcgccaucgccggguucaucgagggcggcuggacggggaugguggacggcugguacggguaccaccaccagaacgagcagggcuccggguacgccgccgaccucaagagcacccagaacgcgaucgacgagaucaccaacaaggugaacuccgucaucgagaagaugaacacccaguucacggccgugggcaaggaguucaaccaccuggagaagcgcaucgagaaccugaacaagaaggucgacgacggcuuccucgacaucuggaccuacaacgccgagcugcuggugcuccuggagaacgagcggacccuggacuaccacgacagcaacgugaagaaccucuacgagaagguccgcucccagcugaagaacaacgccaaggagaucgggaacggcugcuucgaguucuaccacaagugcgacaacacgugcauggagagcgugaagaacgggaccuacgacuaccccaaguacuccgaggaggccaagcugaaccgggaggagaucgacggcgugaagcucgagagcacccgcaucuaccagauccuggcgaucuacuccaccgucgccagcagccuggugcucgccgugucccugggggccaucggcuucuggaugugcagcaacggcucccugcagugccggaucugcaucuga

SEQ ID NO: 68641 - RNA, 1701 nt, Artificial Sequence
  derived and/or modified CDS sequence (opt1) from hemagglutinin__InfluenzaA__ADF42699
augaaggccauccuggugguccuccuguacaccuucgccaccgcgaacgccgacacgcugugcaucggcuaccacgccaacaacagcaccgacaccguggacaccgugcucgagaagaacgucacggugacccacuccgugaaccugcuggaggacaagcacaacgggacccucugcaagcugcgcggcgucgcgccccugcaccucgggaagugcaacaucgccggcuggauccuggggaacccggagugcgagagccuguccaccgccagcuccuggagcuacaucguggagacguccagcuccgacaacgggaccugcuaccccggcgacuucaucgacuacgaggagcuccgggagcagcugagcuccgugagcuccuucgagcgcuucgagauguuccccaagaccagcuccuggcccaaccacgacagcaacaagggcgucaccgccgccugcccgcacgccggcgcgaaguccuucuacaagaaccugaucuggcucgugaagaaggggaacagcuaccccaagcuguccaagagcuacaucaacgacaagggcaaggaggugcugguccucugggggauccaccaccccagcacguccgccgaccagcagagccuguaccagaacgccgacgccuacguguucgugggcaccucccgguacagcaagaaguucaagcccgagaucgccauccgcccgaagguccgggaccaggagggccgcaugaacuacuacuggacccugguggagcccggggacaagaucaccuucgaggcgacgggcaaccucguggucccccgguacgccuucgccauggagcgcaacgccggguccggcaucaucaucagcgacacccccgugcacgacugcaacacgaccugccagaccccgaagggcgccaucaacaccucccugcccuuccagaacauccaccccaucaccaucgggaagugccccaaguacgucaagagcaccaagcugcggcucgcgacgggccugcgcaacgugccguccauccagagccgggggcuguucggcgccaucgccggguucaucgagggcggcuggaccgggaugguggacggcugguacggguaccaccaccagaacgagcagggcuccggguacgccgccgaccucaagagcacccagaacgcgaucgacgagaucaccaacaaggugaacuccgucaucgagaagaugaacacgcaguucaccgccgugggcaaggaguucaaccaccuggagaagcgcaucgagaaccugaacaagaaggucgacgacggcuuccucgacaucuggaccuacaacgccgagcugcuggugcuccuggagaacgagcggacccuggacuaccacgacagcaacgugaagaaccucuacgagaagguccgcucccagcugaagaacaacgccaaggagaucgggaacggcugcuucgaguucuaccacaagugcgacaacacgugcauggagagcgugaagaacgggaccuacgacuaccccaaguacuccgaggaggccaagcugaaccgggaggagaucgacggcgugaagcucgagagcacccgcaucuaccagauccuggcgaucuacuccaccgucgccagcagccuggugcucguggucucccugggggccaucagcuucuggaugugcuccaacggcagccugcagugccggaucugcaucuga

SEQ ID NO: 68642 - RNA, 1701 nt, Artificial Sequence; identical to SEQ ID NO: 67857
  derived and/or modified CDS sequence (opt1) from hemagglutinin__InfluenzaA__ADF42709

SEQ ID NO: 68643 - RNA, 1701 nt, Artificial Sequence; identical to SEQ ID NO: 67857
  derived and/or modified CDS sequence (opt1) from hemagglutinin__InfluenzaA__ADF42719

SEQ ID NO: 68644 - RNA, 1701 nt, Artificial Sequence; identical to SEQ ID NO: 67857
  derived and/or modified CDS sequence (opt1) from hemagglutinin__InfluenzaA__ADF42729

SEQ ID NO: 68645 - RNA, 1701 nt, Artificial Sequence; identical to SEQ ID NO: 67857
  derived and/or modified CDS sequence (opt1) from hemagglutinin__InfluenzaA__ADF42739

SEQ ID NO: 68646 - RNA, 1701 nt, Artificial Sequence
  derived and/or modified CDS sequence (opt1) from hemagglutinin__InfluenzaA__ADF58349
augaaggccauccuggugguccuccuguacaccuucgccaccgcgaacgccgacacgcugugcaucggcuaccacgccaacaacagcaccgacaccguggacaccgugcucgagaagaacgucacggugacccacuccgugaaccugcuggaggacaagcacaacgggaagcucugcaagcugcgcggcgucgcgccccugcaccucgggaagugcaacaucgccggcuggauccuggggaacccggagugcgagagccuguccaccgccagcuccuggagcuacaucguggagaccuccagcuccgacaacggcacgugcuaccccggcgacuucaucgacuacgaggagcuccgggagcagcugagcuccgugagcuccuucgagcgcuucgagaucuuccccaagaccagcuccuggcccgaccacgacagcaacaagggggucaccgccgccugcccgcacgccggcgcgaaguccuucuacaagaaccugaucuggcucgugaagaaggggaacagcuaccccaagcuguccaagagcuacaucaacgacaagggcaaggaggugcugguccucugggggauccaccaccccagcaccuccgccgaccagcagagccuguaccagaacgccgacgccuacguguucgugggcacgucccgguacagcaagaaguucaagcccgagaucgccauccgcccgaagguccgggagcgcgagggccggaugaacuacuacuggacccugguggagcccggggacaagaucaccuucgaggcgaccggcaaccucguggucccccgcuacgccuucgccauggagcggaacgccggguccggcaucaucaucagcgacacgcccgugcacgacugcaacacgaccugccagaccccgaagggcgccaucaacaccucccugcccuuccagaacauccaccccaucaccaucgggaagugccccaaguacgucaagagcaccaagcugcgccucgcgaccggccugcggaacgugccguccauccagagccgcgggcuguucggcgccaucgccggguucaucgagggcggcuggacggggaugguggacggcugguacggguaccaccaccagaacgagcagggcuccggguacgccgccgaccucaagagcacccagaacgcgaucgacgagaucaccaacaaggugaacuccgucaucgagaagaugaacacccaguucacggccgugggcaaggaguucaaccaccuggagaagcggaucgagaaccugaacaagaaggucgacgacggcuuccucgacaucuggaccuacaacgccgagcugcuggugcuccuggagaacgagcgcacccuggacuaccacgacagcaacgugaagaaccucuacgagaagguccggucccagcugaagaacaacgccaaggagaucgggaacggcugcuucgaguucuaccacaagugcgacaacacgugcauggagagcgugaagaacgggaccuacgacuaccccaaguacuccgaggaggccaagcugaaccgcgaggagaucgacggcgugaagcucgagagcacccggaucuaccagauccuggcgaucuacuccaccgucgccagcagccuggugcucguggucucccugggggccaucagcuucuggaugugcuccaacggcagccugcagugccgcaucugcaucuga

SEQ ID NO: 68647 - RNA, 1701 nt, Artificial Sequence; identical to SEQ ID NO: 68290
  derived and/or modified CDS sequence (opt1) from hemagglutinin__InfluenzaA__ADF58351

SEQ ID NO: 68648 - RNA, 1701 nt, Artificial Sequence
  derived and/or modified CDS sequence (opt1) from hemagglutinin__InfluenzaA__ADF80454
augaaggccauccuggugguccuccuguacaccuucgccaccgcgaacgccgacacgcugugcaucggcuaccacgccaacaacagcaccgacaccguggacaccgugcucgagaagaacgucacggugacccacuccgugaaccugcuggaggacaagcacaacgggaagcucugcaagcugcgcggcgucgcgccccugcaccucgggaagugcaacaucgccggcuggauccuggggaacccggagugcgagagccuguccaccgccagcuccuggagcuacaucguggagaccuccagcuccgacaacggcacgugcuaccccggcgacuucaucgacuacgaggagcuccgggagcagcugagcuccgugagcuccuucgagcgcuucgagaucuuccccaagaccagcuccuggcccaaccacgacagcaacaagggggucaccgccgccugcccgcacgccggcgcgaaguccuucuacaagaaccugaucuggcucgugaagaaggggaacagcuaccccaagcuguccaagagcuacaucaacgacaagggcaaggaggugcugguccucugggggauccaccaccccagcaccuccgccgaccagcagagccuguaccagaacgccgacgccuacguguucgugggcacgucccgguacagcaagaaguucaagcccgagaucgccauccgcccgaagguccgggaccaggagggccgcaugaacuacuacuggacccugguggagcccggggacaagaucaccuucgaggcgaccggcaaccucguggucccccgguacgccuucgccauggagcgcaacgccggguccggcaucaucaucagcgacacgcccgugcacgacugcaacacgaccugccagaccccggagggcgccaucaacaccucccugcccuuccagaacauccaccccaucaccaucgggaagugccccaaguacgucaagagcaccaagcugcggcucgcgaccggccugcgcaacgugccguccauccagagccgggggcuguucggcgccaucgccggguucaucgagggcggcuggacggggaugguggacggcugguacggguaccaccaccagaacgagcagggcuccggguacgccgccgaccucaagagcacccagaacgcgaucgacgagaucaccaacaaggugaacuccaucaucgagaagaugaacacccaguucacggccgucggcaaggaguucaaccaccuggagaagcgcaucgagaaccugaacaagaagguggacgacggcuuccucgacaucuggaccuacaacgccgagcugcugguccuccuggagaacgagcggacccuggacuaccacgacagcaacgugaagaaccucuacgagaaggugcgcucccagcugaagaacaacgccaaggagaucgggaacggcugcuucgaguucuaccacaagugcgacgacacgugcauggagagcgucaagaacgggaccuacgacuaccccaaguacuccgaggaggccaagcugaaccgggaggagaucgacggcgugaagcucgagagcacccgcaucuaccagauccuggcgaucuacuccaccguggccagcagccugguccucguggugucccugggggccaucagcuucuggaugugcuccaacggcagccugcagugccggaucugcaucuga

SEQ ID NO: 68649 - RNA, 1701 nt, Artificial Sequence
  derived and/or modified CDS sequence (opt1) from hemagglutinin__InfluenzaA__ADF80462
augaaggccauccuggugguccuccuguacaccuucgccaccgcgaacgccgacacgcugugcaucggcuaccacgccaacaacagcaccgacaccguggacaccgugcucgagaagaacgucacggugacccacuccgugaaccugcuggaggacaagcacaacgggaagcucugcaagcugcgcggcgucgcgccccugcaccucgggaagugcaacaucgccggcuggauccuggggaacccggagugcgagagccuguccaccgcgagcuccuggagcuacaucguggagaccuccaacagcgacaacggcacgugcuaccccggcgacuucaucgacuacgaggagcuccgggagcagcuguccagcguguccagcuucgagcgcuucgagaucuuccccaagaucuccagcuggcccaaccacgacuccaacaagggggucaccgccgccugcccgcacgccggcgccaagagcuucuacaagaaccugaucuggcucgugaagaaggggaacuccuaccccaagcugagcaaguccuacaucaacgacaagggcaaggaggugcugguccucugggggauccaccaccccagcaccagcgccgaccagcagucccuguaccagaacgccgacgccuacguguucgugggcaccagccgguacuccaagaaguucaagcccgagaucgccauccgcccgaagguccgggaccaggagggccgcaugaacuacuacuggacgcugguggagcccggggacaagaucaccuucgaggcgaccggcaaccucguggucccccgguacgccuucgccauggagcgcaacgccgggagcggcaucaucaucuccgacacccccgugcacgacugcaacacgaccugccagaccccgaagggcgccaucaacaccagccugcccuuccagaacauccaccccaucacgaucgggaagugccccaaguacgugaaguccaccaagcugcggcucgcgaccggccugcgcaacgucccgagcauccagucccgggggcuguucggcgccaucgccggguucaucgagggcggcuggaccgggaugguggacggcugguacggguaccaccaccagaacgagcagggcagcggguacgccgccgaccucaaguccacgcagaacgcgaucgacgagaucaccaacaaggugaacagcgucaucgagaagaugaacacccaguucaccgccgugggcaaggaguucaaccaccuggagaagcgcaucgagaaccugaacaagaaggucgacgacggcuuccucgacaucuggacguacaacgccgagcugcuggugcuccuggagaacgagcggacccuggacuaccacgacuccaacgugaagaaccucuacgagaagguccgcagccagcugaagaacaacgccaaggagaucgggaacggcugcuucgaguucuaccacaagugcgacaacacgugcauggaguccgugaagaacgggaccuacgacuaccccaaguacagcgaggaggccaagcugaaccgggaggagaucgacggcgugaagcucgaguccacccgcaucuaccagauccuggcgaucuacagcaccgucgccuccagccuggugcucguggucagccugggggccaucuccuucuggaugugcagcaacggcucccugcagugccggaucugcaucuga

SEQ ID NO: 68650 - RNA, 1701 nt, Artificial Sequence; identical to SEQ ID NO: 66693
  derived and/or modified CDS sequence (opt1) from hemagglutinin__InfluenzaA__ADF80470

SEQ ID NO: 68651 - RNA, 1701 nt, Artificial Sequence
  derived and/or modified CDS sequence (opt1) from hemagglutinin__InfluenzaA__ADF80478
augaaggccauccuggugguccuccuguacaccuucgccaccgcgaacgccgacacgcugugcaucggcuaccacgccaacaacagcaccgacaccguggacaccgugcucgagaagaacgucacggugacccacuccgugaaccugcuggaggacaagcacaacgggaagcucugcaagcugcgcggcgucgcgccccugcaccucgggaagugcaacaucgccggcuggauccuggggaacccggagugcgagagccuguccaccgcgagcuccuggagcuacaucguggagaccuccagcuccgacaacggcacgugcuaccccggcgacuucaucgacuacgaggagcuccgggagcagcugagcuccgugagcuccuucgagcgcuucgagaucuuccccaagaccagcuccuggcccaaccacgacccgaacaagggggucaccgccgccugcccccacgccggcgccaagagcuucuacaagaaccugaucuggcucgugaagaaggggaacuccuaccccaagcugagcaaguccuacaucaacgacaagggcaaggaggugcugguccucugggggauccaccaccccagcaccagcgccgaccagcagucccuguaccagaacgccgacgccuacguguucgugggcacgagccgguacuccaagaaguucaagccggagaucgccauccgccccaagguccgggaccaggagggccgcaugaacuacuacuggacccugguggagcccggggacaagaucaccuucgaggcgaccggcaaccucauggugccccgguacgccuucgccauggagcgcaacgccgggagcggcaucaucaucuccgacacgccgguccacgacugcaacacgaccugccagacccccaagggcgccaucaacaccagccugcccuuccagaacauccaccccaucaccaucgggaagugcccgaaguacgugaaguccaccaagcugcggcucgcgaccggccugcgcaacgugcccagcauccagucccgggggcuguucggcgccaucgccggguucaucgagggcggcuggacggggauggucgacggcugguacggguaccaccaccagaacgagcagggcagcggguacgccgccgaccucaaguccacccagaacgcgaucgacgagaucaccaacaaggugaacagcgugaucgagaagaugaacacccaguucacggccgucggcaaggaguucaaccaccuggagaagcgcaucgagaaccugaacaagaagguggacgacggcuuccucgacaucuggaccuacaacgccgagcugcugguccuccuggagaacgagcggacccuggacuaccacgacuccaacgugaagaaccucuacgagaaggugcgcagccagcugaagaacaacgccaaggagaucgggaacggcugcuucgaguucuaccacaagugcgacaacacgugcauggaguccgucaagaacgggaccuacgacuaccccaaguacagcgaggaggccaagcugaaccgggaggagaucgacggcgugaagcucgaguccacccgcaucuaccagauccuggcgaucuacagcaccguggccuccagccugguccucguggugagccugggggccaucuccuucuggaugugcagcaacggcucccugcagugccggaucugcaucuga

SEQ ID NO: 68652 - RNA, 1701 nt, Artificial Sequence
  derived and/or modified CDS sequence (opt1) from hemagglutinin__InfluenzaA__ADF80494
augaaggccauccuggugguccuccuguacaccuucgccaccgcgaacgccgacacgcugugcaucggcuaccacgccaacaacagcaccgacaccguggacaccgugcucgagaagaacgucacggugacccacuccgugaaccugcuggaggacaagcacaacgggaagcucugcaagcugcgcggcgucgcgccccugcaccucgggaagugcaacaucgccggcuggauccuggggaacccggagugcgagagccuguccaccgccagcuccuggagcuacaucguggagaccuccagcuccgacaacggcacgugcuaccccggcgacuucaucgacuacgaggagcuccgggagcagcugagcuccgugagcuccuucgagcgcuucgagaucuuccccaagaccagcuccuggcccaaccacgacagcaacaagggggucaccgccgccugcccgcacgccggcgcgaaguccuucuacaagaaccugaucuggcucgugaagaaggggaacagcuaccccaagcuguccaagagcuacaucaacgacaagggcaaggaggugcugguccucugggggauccaccaccccagcaccuccgccgaccagcagagccuguaccagaacgccgacgccuacguguucgugggcacgucccgguacagcaagaaguucaagcccgagaucgccauccgcccgaagguccgggaccaggagggccgcaugaacuacuacuggacccugguggagcccggggacaagaucaccuucgaggcgaccggcaaccuccuggugccccgguacgccuucgccauggagcgcaacgccggguccggcaucaucaucagcgacacgcccguccacgacugcaacacgaccugccagaccccgaagggcgccaucaacaccucccugcccuuccagaacauccaccccaucaccaucgggaagugccccaaguacgucaagagcaccaagcuccggcuggcgaccggccugcgcaacgugccguccauccagagccgggggcuguucggcgccaucgccggguucaucgagggcggcuggacggggaugguggacggcugguacggguaccaccaccagaacgagcagggcuccggguacgccgccgaccucaagagcacccagaacgcgaucgacgagaucaccaacaaggugaacuccgugaucgagaagaugaacacccaguucacggccgucggcaaggaguucaaccaccuggagaagcgcaucgagaaccucaacaagaagguggacgacggcuuccuggacaucuggaccuacaacgccgagcugcucguccugcuggagaacgagcggacccucgacuaccacgacagcaacgugaagaaccuguacgagaaggugcgcucccagcugaagaccaacgccaaggagaucgggaacggcugcuucgaguucuaccacaagugcgacaacacgugcauggagagcgucaagaacgggaccuacgacuaccccaaguacuccgaggaggccaagcucaaccgggaggagaucgacggcgugaagcuggagagcacccgcaucuaccagauccuggcgaucuacuccaccguggccagcagccucguccugguggugucccugggggccaucagcuucuggaugugcuccaacggcagccuccagugccggaucugcaucuga

SEQ ID NO: 68653 - RNA, 1701 nt, Artificial Sequence; identical to SEQ ID NO: 68652
  derived and/or modified CDS sequence (opt1) from hemagglutinin__InfluenzaA__ADF80498

SEQ ID NO: 68654 - RNA, 1701 nt, Artificial Sequence; identical to SEQ ID NO: 67317
  derived and/or modified CDS sequence (opt1) from hemagglutinin__InfluenzaA__ADF80502

SEQ ID NO: 68655 - RNA, 1701 nt, Artificial Sequence
  derived and/or modified CDS sequence (opt1) from hemagglutinin__InfluenzaA__ADF80506
augaaggccauccuggugguccuccuguacaccuucgccaccgcgaacgccgacacgcugugcaucggcuaccacgccaacaacagcaccgacaccguggacaccgugcucgagcgcaacgucacggugacccacuccgugaaccugcuggaggacaagcacaacgggaagcucugcaagcugcggggcgucgcgccccugcaccucgggaagugcagcaucgccggcuggauccuggggaacccggagugcgagucccugagcaccgccuccagcugguccuacaucguggagaccagcuccagcgacaacggcacgugcuaccccggcgacuucaucgacuacgaggagcuccgcgagcagcuguccagcguguccagcuucgagcgguucgagaucuuccccaagaccuccagcuggcccaaccacgacccgaacaagggggucaccgccgccugcccccacgccggcgcgaaguccuucuacaagaaccugaucuggcucgugaagaaggagaacagcuaccccaagcuguccaagagcuacaucaacgacaaggggaaggaggugcugguccucuggggcauccaccaccccagcaccuccgccgaccagcagagccuguaccagaacgccgacgccuacguguucguggggacgucccgcuacagcaagaaguucaagccggagaucgccauccggcccaagguccgcgaccaggagggccggaugaacuacuacuggacccugguggagcccggcgacaagaucaccuucgaggcgaccgggaaccucguggucccccgcuacgccuucgccauggagcggaacgccggcuccgggaucaucaucagcgacacgccggugcacgacugcaacacgaccugccagacccccaagggcgccaucaacaccucccugcccuuccagaacauccaccccaucaccaucggcaagugcccgaaguacgucaagagcaccaagcugcgccucgcgaccgggcugcggaacgugcccuccauccagagccgcggccuguucggggccaucgccggcuucaucgagggcggguggacgggcaugguggacgggugguacggcuaccaccaccagaacgagcagggguccggcuacgccgccgaccucaagagcacccagaacgcgaucgacgagaucaccaacaaggugaacuccgucaucgagaagaugaacacccaguucacggccguggggaaggaguucaaccaccuggagaagcggaucgagaaccugaacaagaaggucgacgacggcuuccucgacaucuggaccuacaacgccgagcugcuggugcuccuggagaacgagcgcacccuggacuaccacgacagcaacgugaagaaccucuacgagaagguccggucccagcugaagaacaacgccaaggagaucggcaacgggugcuucgaguucuaccacaagugcgacaacacgugcauggagagcgugaagaacggcaccuacgacuaccccaaguacuccgaggaggccaagcugaaccgcgaggagaucgacggggugaagcucgagagcacccggaucuaccagauccuggcgaucuacuccaccgucgccagcagccuggugcucguggucucccugggcgccaucagcuucuggaugugcuccaacgggagccugcagugccgcaucugcaucuga

SEQ ID NO: 68656 - RNA, 1701 nt, Artificial Sequence
  derived and/or modified CDS sequence (opt1) from hemagglutinin__InfluenzaA__ADF83741
augaagaccaucaucgcccugagcuacauccucugccugguguucgcccagaagcugcccggcaacgacaacuccaccgcgacgcucugccuggggcaccacgccgucccgaacggcaccaucgugaagaccaucaccaacgaccagaucgaggugacgaacgccaccgagcugguccagagcuccagcaccggggagaucugcgacagcccccaccagauccucgacggcaagaacugcacccugaucgacgcccugcucggggacccccagugcgacggcuuccagaacaagaagugggaccuguucguggagcgcagcaaggccuacuccaacugcuaccccuacgacgugccggacuacgcgagccugcggucccucgucgccagcuccggcacgcuggaguucaacaacgagagcuucaacuggaccggggugacccagaacggcaccuccagcgccugcauccgccgguccaagaacagcuucuucucccgccugaacuggcucacgcaccugaacuucaaguaccccgcccugaacgugaccaugcccaacaacgagcaguucgacaagcucuacaucuggggcguccaccaccccgggaccgacaaggaccagaucuuccuguacgcgcaggccagcgggcggaucaccguguccacgaagcgcagccagcagaccgccaucccgaacaucggcagccggccccgcgugcggaacauccccucccgcaucagcaucuacuggaccaucgucaagcccggcgacauccugcucaucaacuccaccgggaaccugaucgccccgcggggcuacuucaagauccgcagcgggaaguccagcgugaugcgguccgacgcccccaucggcaagugcaacagcgacugcaucacgcccaacggcuccauccccaacgacaagccguuccagaacgugaaccgcaucaccuacggggcgugcccccgguacgucaagcagaacacccugaagcucgccaccggcaugcgcaacgugcccgagaagcagacgcgggggaucuucggcgccaucgccggguucaucgagaacggcugggagggcaugguggacgggugguacggcuuccgccaccagaacagcgaggggcggggccaggccgcggaccugaaguccacccaggccgccaucgaccagaucaacgggaagcugaaccgccucaucggcaagaccaacgagaaguuccaccagaucgagaaggaguucagcgaggucgagggccggauccaggaccuggagaaguacguggaggacaccaagaucgaccugugguccuacaacgccgagcuccugguggcccuggagaaccagcacacgaucgaccucaccgacagcgagaugaacaagcuguucgagaagaccaagaagcagcugcgcgagaacgcggaggacauggggaacggcugcuucaagaucuaccacaagugcgacaacgccugcaucggguccauccgcaacggcaccuacgaccacgacgucuaccgggacgaggcccucaacaaccgcuuccagaucaaggggguggagcugaaguccggcuacaaggacuggauccuguggaucuccuucgccaucagcugcuuccuccugugcguggcccugcucggcuucaucaugugggcgugccagaaggggaacauccggugcaacaucugcaucuga

SEQ ID NO: 68657 - RNA, 1701 nt, Artificial Sequence; identical to SEQ ID NO: 67435
  derived and/or modified CDS sequence (opt1) from hemagglutinin__InfluenzaA__ADF83752

SEQ ID NO: 68658 - RNA, 1701 nt, Artificial Sequence; identical to SEQ ID NO: 68245
  derived and/or modified CDS sequence (opt1) from hemagglutinin__InfluenzaA__ADF83763

SEQ ID NO: 68659 - RNA, 1701 nt, Artificial Sequence; identical to SEQ ID NO: 68245
  derived and/or modified CDS sequence (opt1) from hemagglutinin__InfluenzaA__ADF83773

SEQ ID NO: 68660 - RNA, 1701 nt, Artificial Sequence
  derived and/or modified CDS sequence (opt1) from hemagglutinin__InfluenzaA__ADF83783
augaaggccauccuggugguccuccuguacaccuucgccaccgcgaacgccgacacgcugugcaucggcuaccacgccaacaacagcaccgacaccguggacaccgugcucgagaagaacgucacggugacccacuccgugaaccugcuggaggacaagcacaacgggaagcucugcaagcugcgcggcgucgcgccccugcaccucgggaagugcaacaucgccggcuggauccuggggaacccggagugcgagagccuguccaccgccagcuccuggagcuacaucguggagaccuccagcuccgacaacggcacgugcuaccccggcgacuucaucgacuacgaggagcuccgggagcagcugagcuccgugagcuccuucgagcgcuucgagaucuuccccaagaccagcuccuggcccaaccacgacagcaacaagggggucaccgccgccugcccgcacgccggcgcgaaguccuucuacaagaaccugaucuggcucgugaagaaggggaacagcuaccccaagcuguccaagagcuacaucaacgacaagggcaaggaggugcugguccucugggggauccaccaccccagcaccuccgccgaccagcagagccuguaccagaacgccgacgccuacguguucgugggcacgucccgguacagcaagaaguucaagcccgagaucgccauccgcccgaagguccgggaccaggagggccgcaugaacuacuacuggacccugguggagcccggggacaagaucaccuucgaggcgaccggcaaccucguggucccccgguacgccuucgccauggagcgcaacgccggguccggcaucaucaucagcgacacgcccgugcacgacugcaacacgaccugccagaccccgaagggcgccaucaacaccucccugcccuuccagaacauccaccccaccaccaucgggaagugccccaaguacgucaagagcaccaagcugcggcucgcgacgggccugcgcaacgugccguccauccagagccgggggcuguucggcgccaucgccggguucaucgagggcggcuggaccgggaugguggacggcugguacggguaccaccaccagaacgagcagggcuccggguacgccgccgaccucaagagcacccagaacgcgaucgacgagaucaccaacaaggugaacuccgucaucgagaagaugaacacgcaguucaccgccgugggcaaggaguucaaccaccuggagaagcgcaucgagaaccugaacaagaaggucgacgacggcuuccucgacaucuggaccuacaacgccgagcugcuggugcuccuggagaacgagcggacccuggacuaccacgacagcaacgugaagaaccucuacgagaagguccgcucccagcugaagaacaacgccaaggagaucgggaacggcugcuucgaguucuaccacaagugcgacaacacgugcauggagagcgugaagaacgggaccuacgacuaccccaaguacuccgaggaggccaagcugaaccgggaggagaucgacggcgugaagcucgagagcacccgcaucuaccagauccuggcgaucuacuccaccgucgccagcagccuggugcucguggucucccugggggccaucagcuucuggaugugcuccaacggcagccugcagugccggaucugcaucuga

SEQ ID NO: 68661 - RNA, 1701 nt, Artificial Sequence; identical to SEQ ID NO: 68320
  derived and/or modified CDS sequence (opt1) from hemagglutinin__InfluenzaA__ADF83793

SEQ ID NO: 68662 - RNA, 1701 nt, Artificial Sequence
  derived and/or modified CDS sequence (opt1) from hemagglutinin__InfluenzaA__ADF83803
augaaggccauccuggugguccuccuguacaccuucgccaccgcgaacgccgacacgcugugcaucggcuaccacgccaacaacagcaccgacaccguggacaccgugcucgagaagaacgucacggugacccacuccgugaaccugcuggaggacaagcacaacgggaagcucugcaagcugcgcggcgucgcgccccugcaccucgggaagugcaacaucgccggcuggauccuggggaacccggagugcgagacccugagcaccgcguccagcugguccuacaucguggagacgagcuccagcgacaacgggaccugcuaccccggcgacuucaucgacuacgaggagcuccgggagcagcuguccagcguguccagcuucgagcgcuucgagaucuuccccaagaccuccagcuggcccaaccacgacuccaacaagggcgucaccgccgccugcccgcacgccggcgccaagagcuucuacaagaaccugaucuggcucgugaagaaggggaacuccuaccccaagcugagcaaguccuacaucaacgacaagggcaaggaggugcugguccucugggggauccaccaccccagcacgagcgccgaccagcagucccuguaccagaacgccgacgccuacguguucgugggcaccagccgguacuccaagaaguucaagcccgagaucgccauccgcccgaagguccgggaccaggagggccgcaugaacuacuacuggacccugguggagcccggggacaagaucaccuucgaggcgacgggcaaccucguggucccccgguacgccuucgccauggagcgcaacgccgggagcggcaucaucaucuccgacacccccgugcacgacugcaacacgaccugccagaccccgaagggcgccaucaacaccagccugcccuuccagaacgugcaccccaucaccaucgggaagugccccaaguacgucaaguccaccaagcugcggcucgcgacgggccugcgcaacgugccgagcauccagucccgggggcuguucggcgccaucgccggguucaucgagggcggcuggaccgggaugguggacggcugguacggguaccaccaccagaacgagcagggcagcggguacgccgccgaccucaaguccacccagaacgcgaucgacgagaucaccaacaaggucaacagcgugaucgagaagaugaacacgcaguucaccgccgucggcaaggaguucaaccaccuggagaagcgcaucgagaaccugaacaagaagguggacgacggcuuccucgacaucuggaccuacaacgccgagcugcuggugcuccuggagaacgagcggacccuggacuaccacgacuccaacgucaagaaccucuacgagaaggugcgcagccagcugaagaacaacgccaaggagacggggaacggcugcuucgaguucuaccacaagugcgacaacacgugcauggaguccgugaagaacgggaccuacgacuaccccaaguacagcgaggaggccaagcugaaccgggaggagaucgacggcgucaagcucgaguccacccgcaucuaccagauccuggcgaucuacagcaccguggccuccagccuggugcucgucgugagccugggggccaucuccuucuggaugugcagcaacggcucccugcagugccggaucugcaucuga

SEQ ID NO: 68663 - RNA, 1701 nt, Artificial Sequence
  derived and/or modified CDS sequence (opt1) from hemagglutinin__InfluenzaA__ADF83813
augaaggccauccuggugguccuccuguacaccuucgccaccgcgaacgccgacacgcugugcaucggcuaccacgccaacaacagcaccgacaccguggacaccgugcucgagaagaacgucacggugacccacuccgugaaccugcuggaggacaagcacaacgggaagcucugcaagcugcgcggcgucgcgccccugcaccucgggaagugcaacaucgccggcuggauccuggggaacccggagugcgagagccuguccaccgccagcuccuggagcuacaucguggagaccuccagcuccgacaacggcacgugcuaccccggcgacuucaucgacuacgaggagcuccgggagcagcugagcuccgugagcuccuucgagcgcuucgagaucuuccccaagaccagcuccuggcccaaccacgacagcaacaagggggucaccgccgccugcccgcacgccggcgcgaaguccuucuacaagaaccugaucuggcucgugaagaaggggaacagcuaccccaagcuguccaagagcuacaucaacgacaagggcaaggaggugcugguccucugggggauccaccaccccagcaccuccacggaccagcagagccuguaccagaacgccgacgccuacguguucgugggcaccucccgguacagcaagaaguucaagcccgagaucgccauccgcccgaagguccgggaccaggagggccgcaugaacuacuacuggacccugguggagcccggggacaagaucaccuucgaggccacgggcaaccucguggucccccgguacgcguucgccauggagcgcaacgccggguccggcaucaucaucagcgacacccccgugcacgacugcaacacgaccugccagaccccgaagggcgccaucaacaccucccugcccuuccagaacauccaccccaucaccaucgggaagugccccaaguacgucaagagcaccaagcugcggcucgccacgggccugcgcaacgugccguccauccagagccgggggcuguucggcgcgaucgccggguucaucgagggcggcuggaccgggaugguggacggcugguacggguaccaccaccagaacgagcagggcuccggguacgccgccgaccucaagagcacccagaacgccaucgacgagaucaccaacaaggugaacuccgucaucgagaagaugaacacgcaguucaccgcggugggcaaggaguucaaccaccuggagaagcgcaucgagaaccugaacaagaaggucgacgacggcuuccucgacaucuggaccuacaacgccgagcugcuggugcuccuggagaacgagcggacccuggacuaccacgacagcaacgugaagaaccucuacgagaagguccgcucccagcugaagaacaacgccaaggagaucgggaacggcugcuucgaguucuaccacaagugcgacaacacgugcauggagagcgugaagaacgggaccuacgacuaccccaaguacuccgaggaggccaagcugaaccgggaggagaucgacggcgugaagcucgagagcacccgcaucuaccagauccuggccaucuacuccaccgucgcgagcagccuggugcucguggucucccugggggccaucagcuucuggaugugcuccaacggcagccugcagugccggaucugcaucuga

SEQ ID NO: 68664 - RNA, 1701 nt, Artificial Sequence
  derived and/or modified CDS sequence (opt1) from hemagglutinin__InfluenzaA__ADF83823
augaaggccauccuggugguccuccuguacaccuucgccaccgcgaacgccgacacgcugugcaucggcuaccacgccaacaacagcaccgacaccguggacaccgugcucgagaagaacgucacggugacccacuccgugaaccugcuggaggacaagcacaacgggaagcucugcaagcugcgcggcgucgcgccccugcaccucgggaagugcaacaucgccggcuggauccuggggaacccggagugcgagagccuguccaccgccagcuccuggagcuacaucguggagaccuccagcuccgacaacggcacgugcuaccccggcgacuucaucgacuacgaggagcuccgggagcagcugagcuccgugagcuccuucgagcgcuucgagaucuuccccaagaccagcuccuggcccaaccacgacagcaacaagggggucaccgccgccugcccgcacgccggcgcgaaguccuucuacaagaaccugaucuggcucgugaagaaggggaacagcuaccccaagcuguccaagagcuacaucaacgacaagggcaaggaggugcugguccucugggggauccaccaccccagcaccuccgccgaccagcagagccuguaccagaacgccgacuccuacguguucgugggcacgagccgguacuccaagaaguucaagcccgagaucgccauccgcccgaagguccgggaccaggagggccgcaugaacuacuacuggacccugguggagcccggggacaagaucaccuucgaggccaccggcaaccucguggucccccgguacgcguucgccauggagcgcaacgccgggagcggcaucaucaucuccgacacgcccgugcacgacugcaacacgaccugccagaccccgaagggcgccaucaacaccagccugcccuuccagaacauccaccccaucaccaucgggaagugccccaaguacgugaaguccaccaagcugcggcucgccaccggccugcgcaacaucccgagcauccagucccgggggcuguucggcgcgaucgccggguucaucgagggcggcuggacggggauggucgacggcugguacggguaccaccaccagaacgagcagggcagcggguacgccgccgaccucaaguccacccagaacgccaucgacgagaucaccaacaaggugaacagcgugaucgagaagaugaacacccaguucacggcggucggcaaggaguucaaccaccuggagaagcgcaucgagaaccugaacaagaagguggacgacggcuuccucgacaucuggaccuacaacgccgagcugcugguccuccuggagaacgagcggacccuggacuaccacgacuccaacgugaagaaccucuacgagaaggugcgcagccagcugaagaacaacgccaaggagaucgggaacggcugcuucgaguucuaccacaagugcgacaacacgugcauggaguccgucaagaacgggaccuacgacuaccccaaguacagcgaggaggccaagcugaaccgggaggagaucgacggcgugaagcucgaguccacccgcaucuaccagauccuggccaucuacagcaccguggcgagcucccugguccucguggugagccugggggccaucuccuucuggaugugcagcaacggcucccugcagugccggaucugcaucuga

SEQ ID NO: 68665 - RNA, 1701 nt, Artificial Sequence; identical to SEQ ID NO: 68245
  derived and/or modified CDS sequence (opt1) from hemagglutinin__InfluenzaA__ADF83833

SEQ ID NO: 68666 - RNA, 1701 nt, Artificial Sequence; identical to SEQ ID NO: 68245
  derived and/or modified CDS sequence (opt1) from hemagglutinin__InfluenzaA__ADF83843

SEQ ID NO: 68667 - RNA, 1701 nt, Artificial Sequence; identical to SEQ ID NO: 68245
  derived and/or modified CDS sequence (opt1) from hemagglutinin__InfluenzaA__ADF83853

SEQ ID NO: 68668 - RNA, 1701 nt, Artificial Sequence
  derived and/or modified CDS sequence (opt1) from hemagglutinin__InfluenzaA__ADF83873
augaaggccauccuggugguccuccuguacaccuucgccaccgcgaacgccgacacgcugugcaucggcuaccacgccaacaacagcaccgacaccguggacaccgugcucgagaagaacgucacggugacccacuccgugaaccugcuggaggacaagcacaacgggaagcucugcaagcugcgcggcgucgcgccccugcaccucgggaagugcaacaucgccggcuggauccuggggaacccggagugcgagagccuguccaccgcgaacagcugguccuacaucguggagaccagcuccagcgacaacggcacgugcuaccccggcgacuucaucgacuacgaggagcuccgggagcagcuguccagcguguccagcuucgagcgcuucgagaucuuccccaagaccuccagcuggcccaaccacgacuccaacaagggggucaccgccgccugcccgcacgccggcgccaagagcuucuacaagaaccugaucuggcucgugaagaaggggaacuccuaccccaagcugagcaaguccuacaucaacgacaagggcaaggaggugcugguccucugggggauccaccaccccagcaccagcacggaccagcagucccuguaccagaacgccgacgccuacguguucgugggcaccagccgguacuccaagaaguucaagcccgagaucgccauccgcccgaagguccgggaccaggagggccgcaugaacuacuacuggacccugguggagcccggggacaagaucaccuucgaggccacgggcaaccucguggucccccgguacgcguucgccauggagcgcaacgccgggagcggcaucaucaucuccgacacccccgugcacgacugcaacacgaccugccagaccccgaagggcgccaucaacaccagccugcccuuccagaacauccaccccaucaccaucgggaagugccccaaguacgugaaguccaccaagcugcggcucgccacgggccugcgcaacgucccgagcauccagucccgggggcuguucggcgcgaucgccggguucaucgagggcggcuggaccgggaugguggacggcugguacggguaccaccaccagaacgagcagggcagcggguacgccgccgaccucaaguccacccagaacgccaucgacaagaucaccaacaaggugaacagcgucaucgagaagaugaacacgcaguucaccgcggugggcaaggaguucaaccaccuggagaagcgcaucgagaaccugaacaagaaggucgacgacggcuuccucgacaucuggaccuacaacgccgagcugcuggugcuccuggagaacgagcggacccuggacuaccacgacuccaacgugaagaaccucuacgagaagguccgcagccagcugaagaacaacgccaaggagaucgggaacggcugcuucgaguucuaccacaagugcgacaacacgugcauggaguccgugaagaacgggaccuacgacuaccccaaguacagcgaggaggccaagcugaaccgggaggagaucgacggcgugaagcucgaguccacccgcaucuaccagauccuggccaucuacagcaccgucgcguccagccuggugcucguggucagccugggggccaucuccuucuggaugugcagcaacggcucccugcagugccggaucugcaucuga

SEQ ID NO: 68669 - RNA, 1701 nt, Artificial Sequence; identical to SEQ ID NO: 67857
  derived and/or modified CDS sequence (opt1) from hemagglutinin__InfluenzaA__ADF83885

SEQ ID NO: 68670 - RNA, 1701 nt, Artificial Sequence
  derived and/or modified CDS sequence (opt1) from hemagglutinin__InfluenzaA__ADF83895
augaaggccauccuggugguccuccuguacaccuucgccaccgugaacgcggacacgcugugcaucggcuaccacgccaacaacagcaccgacaccguggacaccguccucgagaagaacgugacggugacccacuccgucaaccugcuggaggacaagcacaacgggaagcucugcaagcugcgcggcguggcgccccugcaccucgggaagugcaacaucgccggcuggauccuggggaacccggagugcgagagccuguccaccgccagcuccuggagcuacaucguggagaccuccagcuccgacaacggcacgugcuaccccggcgacuucaucgacuacgaggagcuccgggagcagcugagcuccgucagcuccuucgagcgcuucgagaucuuccccaagaccagcuccuggcccaaccacgacagcaacaagggggugaccgccgccugcccgcacgccggcgccaaguccuucuacaagaaccugaucuggcucgugaagaaggggaacagcuaccccaagcuguccaagagcuacaucaacgacaagggcaaggagguccuggugcucugggggauccaccaccccagcaccuccgcggaccagcagagccuguaccagaacgccgacgccuacguguucgucggcacgucccgguacagcaagaaguucaagcccgagaucgccauccgcccgaaggugcgggaccaggagggccgcaugaacuacuacuggacccugguggagcccggggacaagaucaccuucgaggccaccggcaaccucgucgugccccgguacgcguucgccauggagcgcaacgccggguccggcaucaucaucagcgacacgcccgugcacgacugcaacacgaccugccagaccccgaagggcgccaucaacaccucccugcccuuccagaacauccaccccaucaccaucgggaagugccccaaguacgucaagagcaccaagcugcggcucgccaccggccugcgcaacgugccguccauccagagccgggggcuguucggcgcgaucgccggguucaucgagggcggcuggacggggaugguggacggcugguacggguaccaccaccagaacgagcagggcuccggguacgccgccgaccucaagagcacccagaacgccaucgacaagaucaccaacaaggucaacuccgugaucgagaagaugaacacccaguucacggcggucggcaaggaguucaaccaccuggagaagcgcaucgagaaccugaacaagaagguggacgacggcuuccucgacaucuggaccuacaacgccgagcugcuggugcuccuggagaacgagcggacccuggacuaccacgacagcaacgucaagaaccucuacgagaagauccgcucccagcugaagaacaacgccaaggagaucgggaacggcugcuucgaguucuaccacaagugcgacaacacgugcauggagagcgugaagaacgggaccuacgacuaccccaaguacuccgaggaggccaagcugaaccgggaggagaucgacggcgugaagcucgagagcacccgcaucuaccagauccuggccaucuacuccaccgucgcgagcagccuggugcucguggucucccugggggccaucagcuucuggaugugcuccaacggcagccugcagugccggaucugcaucuga

SEQ ID NO: 68671 - RNA, 1701 nt, Artificial Sequence; identical to SEQ ID NO: 68245
  derived and/or modified CDS sequence (opt1) from hemagglutinin__InfluenzaA__ADF83915

SEQ ID NO: 68672 - RNA, 1701 nt, Artificial Sequence
  derived and/or modified CDS sequence (opt1) from hemagglutinin__InfluenzaA__ADF84441
augaaggccauccuggugguccuccuguacaccuucgccaccgcgaacgccgacacgcugugcaucggcuaccacgccaacaacagcaccgacaccguggacaccgugcucgagaagaacgucacggugacccacuccgugaaccugcuggaggacaagcacaacgggaagcucugcaagcugcgcggcgucgcgccccugcaccucgggaagugcaacaucgccggcuggauccuggggaacccggagugcgagagccuguccaccgcgagcuccuggagcuacaucguggagaccuccagcuccgacaacggcacgugcuaccccggcgacuucaucaacuacgaggagcuccgggagcagcugagcuccgugagcuccuucgagcgcuucgagaucuuccccaagaccagcuccuggcccagccacgacuccaacaagggggucaccgccgccugcccgcacgccggcgccaagagcuucuacaagaaccugaucuggcucgugaagaaggggaacuccuaccccaagcugagcaagagcuacaucaacgacaagggcaaggaggugcugguccucugggggauccaccaccccuccaccagcgccgaccagcagucccuguaccagaacgccgacgccuacguguucgugggcacgagccgguacuccaagaaguucaagcccgagaucgccauccgcccgaagguccgggaccaggagggccgcaugaacuacuacuggacccugguggagcccggggacaagaucaccuucgaggcgaccggcaaccucguggucccccgguacgccuucgccauggagcgcaacgccgggagcggcaucaucaucuccgacacgcccgugcacgacugcaacacgaccugccagaccccgaagggcgccaucaacaccagccugcccuuccagaacauccaccccaucaccaucgggaagugccccaaguacgugaaguccaccaagcugcggcucgcgaccggccugcgcaacgucccgagcauccagucccgggggcuguucggcgccaucgccggguucaucgagggcggcuggacggggaugguggacggcugguacggguaccaccaccagaacgagcagggcagcggguacgccgccgaccucaaguccacccagaacgcgaucgacaagaucaccaacaaggugaacagcgucaucgagaagaugaacauccaguucaccgccgugggcaaggaguucaaccaccuggagaagcgcaucgagaaccugaacaagaaggucgacgacggcuuccucgacaucuggacguacaacgccgagcugcuggugcuccuggagaacgagcggacccuggacuaccacgacuccaacgugaagaaccucuacgagaagguccgcagccagcugaagaacaacgccaaggagaucgggaacggcugcuucgaguucuaccacaagugcgacaacacgugcauggaguccgugaagaacgggaccuacgacuaccccaaguacagcgaggaggccaagcugaaccgggaggagaucgacggcgugaagcucgaguccacccgcaucuaccagauccuggcgaucuacagcaccgucgccagcucccuggugcucguggucagccugggggccaucuccuucuggaugugcagcaacggcucccugcagugccggaucugcaucuga

SEQ ID NO: 68673 - RNA, 1701 nt, Artificial Sequence; identical to SEQ ID NO: 67857
  derived and/or modified CDS sequence (opt1) from hemagglutinin__InfluenzaA__ADF84459

SEQ ID NO: 68674 - RNA, 1701 nt, Artificial Sequence; identical to SEQ ID NO: 68245
  derived and/or modified CDS sequence (opt1) from hemagglutinin__InfluenzaA__ADF84469

SEQ ID NO: 68675 - RNA, 1701 nt, Artificial Sequence; identical to SEQ ID NO: 68306
  derived and/or modified CDS sequence (opt1) from hemagglutinin__InfluenzaA__ADF84479

SEQ ID NO: 68676 - RNA, 1701 nt, Artificial Sequence; identical to SEQ ID NO: 68245
  derived and/or modified CDS sequence (opt1) from hemagglutinin__InfluenzaA__ADF84489

SEQ ID NO: 68677 - RNA, 1701 nt, Artificial Sequence; identical to SEQ ID NO: 68245
  derived and/or modified CDS sequence (opt1) from hemagglutinin__InfluenzaA__ADF85017

SEQ ID NO: 68678 - RNA, 1701 nt, Artificial Sequence; identical to SEQ ID NO: 68245
  derived and/or modified CDS sequence (opt1) from hemagglutinin__InfluenzaA__ADF87152

SEQ ID NO: 68679 - RNA, 1701 nt, Artificial Sequence
  derived and/or modified CDS sequence (opt1) from hemagglutinin__InfluenzaA__ADF87162
augaaggccauccuggugguccuccuguacaccuucgccaccgcgaacgccgacacgcugugcaucggcuaccacgccaacaacagcaccgacaccguggacaccgugcucgagaagaacgucacggugacccacuccgugaaccugcuggaggacaagcacaacgggaagcucugcaagcugcgcggcgucgcgccccugcaccucgggaagugcaacaucgccggcuggauccuggggaacccggagugcgagagccuguccaccgccagcuccuggagcuacaucguggagaccuccagcuccgacaacggcacgugcuaccccggcgacuucaucgacuacgaggagcuccgggagcagcugagcuccgugagcuccuucgagcgcuucgagaucuuccccaagaccagcuccuggcccaaccacgacagcaacaagggggucaccgccgccugcccgcacgccggcgcgaaguccuucuacaagaaccugaucuggcucgugaagaaggggaacagcuaccccaagcuguccaagagcuacaucaacgacaagggcaaggaggugcugguccucugggggauccaccaccccagcaccuccgccgaccagcagagccuguaccagaacgccgacuccuacguguucgugggcacgagcaaguacuccaagaaguucaagcccgagaucgccauccggccgaagguccgcgaccaggagggccggaugaacuacuacuggacccugguggagcccggggacaagaucaccuucgaggccaccggcaaccucguggucccccgcuacgcguucgccauggagcggaacgccgggagcggcaucaucaucuccgacacgcccgugcacgacugcaacacgaccugccagaccccggagggcgccaucaacaccagccugcccuuccagaacauccaccccaucaccaucgggaagugccccaaguacgugaaguccaccaagcugcgccucgccaccggccugcggaacgucccgagcauccagucccgcgggcuguucggcgcgaucgccggguucaucgagggcggcuggacggggaugguggacggcugguacggguaccaccaccagaacgagcagggcagcggguacgccgccgaccucaaguccacccagaacgccaucgacgagaucaccaacaaggugaacagcgucaucgagaagaugaacacccaguucacggcggugggcaaggaguucaaccaccuggagaagcggaucgagaaccugaacaagaaggucgacgacggcuuccucgacaucuggaccuacaacgccgagcugcuggugcuccuggagaacgagcgcacccuggacuaccacgacuccaacgugaagaaccucuacgagaagguccggagccagcugaagaacaacgccaaggagaucgggaacggcugcuucgaguucuaccacaagugcgacaacacgugcauggaguccgugaagaacgggaccuacgacuaccccaaguacagcgaggaggccaagcugaaccgcgaggagaucgacggcgugaagcucgaguccacccggaucuaccagauccuggccaucuacagcaccgucgcgagcucccuggugcucguggucagccugggggccaucuccuucuggaugugcagcaacggcucccugcagugccgcaucugcaucuga

SEQ ID NO: 68680 - RNA, 1701 nt, Artificial Sequence; identical to SEQ ID NO: 68245
  derived and/or modified CDS sequence (opt1) from hemagglutinin__InfluenzaA__ADF87172

SEQ ID NO: 68681 - RNA, 1701 nt, Artificial Sequence
  derived and/or modified CDS sequence (opt1) from hemagglutinin__InfluenzaA__ADF87182
augaacgccauccuggugguccuccuguacaccuucgccaccgcgaacgccgacacgcugugcaucggcuaccacgccaacaacagcaccgacaccguggacacccuccuggagaagaacgugacggucacccacuccgugaaccugcucgaggacaagcacaacgggaagcugugcaagcugcgcggcguggcgccccuccaccuggggaagugcaacaucgccggcuggauccuggggaacccggagugcgagagccucuccaccgccagcuccuggagcuacaucgucgagaccuccagcuccgacaacggcacgugcuaccccggcgacuucaucgacuacgaggagcugcgggagcagcugagcuccgugagcuccuucgagcgcuucgagaucuuccccaagaccagcuccuggcccaaccacgacagcaacaagggggugaccgccgccugcccgcacgccggcgcgaaguccuucuacaagaaccucaucuggcuggucaagaaggggaacagcuaccccaagcuguccaagagcuacaucaacgacaagggcaaggaggugcucgugcugugggggauccaccaccccagcaccuccgccgaccagcagagccuguaccagaacgccgacgccuacgucuucgugggcacgucccgguacagcaagaaguucaagcccgagaucgccauccgcccgaaggugcgggaccaggagggccgcaugaacuaccacuggacccucgucgagcccggggacaagaucaccuucgaggcgaccggcaaccugguggugccccgguacgccuucgccauggagcgcaacgccggguccggcaucaucaucagcgacgcccccguccacgacugcaacacgaccugccagaccccgaagggcgcgaucaacaccucccugcccuuccagaacauccaccccaucacgaucgggaagugccccaaguacgucaagagcaccaagcuccggcuggccaccggccugcgcaacgugccguccauccagagccgggggcuguucggcgccaucgccggguucaucgagggcggcuggaccgggaugguggacggcugguacggguaccaccaccagaacgagcagggcuccggguacgccgcggaccucaagagcacgcagaacgccaucgacgagaucaccaacaagaucaacuccgugaucgagaagaugaacacccaguucaccgccgugggcaaggaguucaaccaccuggagaagcgcaucgagaaccucaacaagaaggucgacgacggcuuccuggacaucuggacguacaacgccgagcugcucgugcugcuggagaacgagcggacccucgacuaccacgacagcaacgucaagaaccuguacgagaaggugcgcucccagcugaagaacaacgccaaggagaucgggaacggcugcuucgaguucuaccacaagugcgacaacacgugcauggagagcgugaagaacgggaccuacgacuaccccaaguacuccgaggaggcgaagcucaaccgggaggagaucgacggcgucaagcuggagagcacccgcaucuaccagauccuggccaucuacuccaccguggccagcagccucgugcuggucgugucccugggggccaucagcuucuggaugugcuccaacggcagccuccagugccggaucugcaucuga

SEQ ID NO: 68682 - RNA, 1701 nt, Artificial Sequence; identical to SEQ ID NO: 68245
  derived and/or modified CDS sequence (opt1) from hemagglutinin__InfluenzaA__ADF87192

SEQ ID NO: 68683 - RNA, 1701 nt, Artificial Sequence
  derived and/or modified CDS sequence (opt1) from hemagglutinin__InfluenzaA__ADF87202
augaaggccauccuggugguccuccuguacaccuucgccaccgcgaacgccgacacgcugugcaucggcuaccacgccaacaacagcaccgacaccguggacaccgugcucgagaagaacgucacggugacccacuccgugaaccugcuggaggacaagcacaacgggaagcucugcaagcugcgcggcgucgcgccccugcaccucgggaagugcaacaucgccggcuggauccuggggaacccggagugcgagagccuguccaccgccagcuccuggagcuacaucguggagaccuccagcuccgacaacggcacgugcuaccccggcgacuucaucgacuacgaggagcuccgggagcagcugagcuccgugagcuccuucgagcgcuucgagaucuuccccaagaccagcuccuggcccaaccacgacagcaacaagggggucaccgccgccugcccgcacgccggcgcgaaguccuucuacaagaaccugaucuggcucgugaagaaggggaacagcuaccccaagcuguccaagagcuacaucaacgacaagggcaaggaggugcugguccucugggggauccaccaccccagcaccuccgccgaccagcagagccuguaccagaacgccgacgccuacguguucgugggcacgucccgguacagcaagaaguucaagcccgagaucgccauccgcccgaagguccgggaccaggagggccgcaugaacuacuacuggacccugguggagcccggggacaagaucaccuucgaggcgaccggcaaccucguggucccccgguacgccuucgccauggagcgcaacgccggguccggcaucaucaucagcgacacgcccgugcacgacugcaacacgaccugccagaccccgaagggcgccaucaacaccucccugcccuuccagaacauccaccccaucaccaucgggaagugccccaaguacgucaagagcaccaagcugcggcucgcgaccggccugcgcaacgugccguccauccagagccgggggcuguucggcgccaucgccggguucaucgagggcggcuggacggggaugguggacggcugguacggguaccaccaccagaacgagcagggcuccggguucgccgccgaccucaagagcacccagaacgcgaucgacaagaucaccaacaaggugaacuccgucaucgagaagaugaacacccaguucacggccgugggcaaggaguucaaccaccuggagaagcgcaucgagaaccugaacaagaaggucgacgacggcuuccucgacaucuggaccuacaacgccgagcugcuggugcuccuggagaacgagcggacccuggacuaccacgacagcaacgugaagaaccucuacgagaagguccgcucccagcugaagaacaacgccaaggagaucgggaacggcugcuucgaguucuaccacaagugcgacaacacgugcauggagagcgugaagaacgggaccuacgacuaccccaaguacuccgaggaggccaagcugaaccgggaggagaucgacggcgugaagcucgagagcacccgcaucuaccagauccuggcgaucuacuccaccgucgccagcagccuggugcucguggucucccugggggccaucagcuucuggaugugcuccaacggcagccugcagugccggaucugcaucuga

SEQ ID NO: 68684 - RNA, 1701 nt, Artificial Sequence; identical to SEQ ID NO: 68245
  derived and/or modified CDS sequence (opt1) from hemagglutinin__InfluenzaA__ADF87212

SEQ ID NO: 68685 - RNA, 1701 nt, Artificial Sequence; identical to SEQ ID NO: 68408
  derived and/or modified CDS sequence (opt1) from hemagglutinin__InfluenzaA__ADF87232

SEQ ID NO: 68686 - RNA, 1701 nt, Artificial Sequence; identical to SEQ ID NO: 68245
  derived and/or modified CDS sequence (opt1) from hemagglutinin__InfluenzaA__ADF87242

SEQ ID NO: 68687 - RNA, 1701 nt, Artificial Sequence
  derived and/or modified CDS sequence (opt1) from hemagglutinin__InfluenzaA__ADF87252
augaaggccauccuggugguccuccuguacaccuucgccaccgcgaacgccgacacgcugugcaucggcuaccacgccaacaacagcaccgacaccguggacaccgugcucgagaagaacgucacggugacccacuccgugaaccugcuggaggacaagcacaacgggaagcucugcaagcugcgcggcgucgcgccccugcaccucgggaagugcaacaucgccggcuggauccuggggaacccggagugcgagagccuguccaccgccagcuccuggagcuacaucguggagaccuccagcuccgacaacggcacgugcuaccccggcgacuucaucaacuacgaggagcuccgggagcagcugagcuccgugagcuccuucgagcgcuucgagaucuuccccaagaccagcuccuggcccaaccacgacagcaacaagggggucaccgccgccugcccgcacgccggcgcgaaguccuucuacaagaaccugaucuggcucgugaagaagggcaagagcuaccccaagcuguccaagagcuacaucaacgacaaggggaaggaggugcugguccucugggggauccaccaccccagcaccuccgccgaccagcagagccuguaccagaacgccgacgccuacguguucgugggcacgucccgguacagcaagaaguucaagcccgagaucgccauccgcccgaagguccgggaccaggagggccgcaugaacuacuacuggacccugguggagcccggggacaagaucaccuucgaggcgaccggcaaccucguggucccccgguacgccuucgccauggagcgcaacgccggguccggcaucaucaucagcgacacgcccgugcacgacugcaacacgaccugccagaccccgaagggcgccaucaacaccucccugcccuuccagaacauccaccccaucaccaucgggaagugccccaaguacgucaagagcaccaagcugcggcucgcgaccggccugcgcaacgugccguccauccagagccgggggcuguucggcgccaucgccggguucaucgagggcggcuggacggggaugguggacggcugguacggguaccaccaccagaacgagcagggcuccggguacgccgccgaccucaagagcacccagaacgcgaucgacaagaucaccaacaaggugaacuccgucaucgagaagaugaacacccaguucacggccgugggcaaggaguucaaccaccuggagaagcgcaucgagaaccugaacaagaaggucgacgacggcuuccucgacaucuggaccuacaacgccgagcugcuggugcuccuggagaacgagcggacccuggacuaccacgacagcaacgugaagaaccucuacgagaagguccgcucccagcugaagaacaacgccaaggagaucgggaacggcugcuucgaguucuaccacaagugcgacaacacgugcauggagagcgugaagaacgggaccuacgacuaccccaaguacuccgaggaggccaagcugaaccgggaggagaucgacggcgugaagcucgagagcacccgcaucuaccagauccuggcgaucuacuccaccgucgccagcagccuggugcucguggucucccugggggccaucagcuucuggaugugcuccaacggcagccugcagugccggaucugcaucuga

SEQ ID NO: 68688 - RNA, 1701 nt, Artificial Sequence; identical to SEQ ID NO: 68245
  derived and/or modified CDS sequence (opt1) from hemagglutinin__InfluenzaA__ADF87262

SEQ ID NO: 68689 - RNA, 1701 nt, Artificial Sequence; identical to SEQ ID NO: 67857
  derived and/or modified CDS sequence (opt1) from hemagglutinin__InfluenzaA__ADF87272

SEQ ID NO: 68690 - RNA, 1701 nt, Artificial Sequence; identical to SEQ ID NO: 67857
  derived and/or modified CDS sequence (opt1) from hemagglutinin__InfluenzaA__ADF87282

SEQ ID NO: 68691 - RNA, 1701 nt, Artificial Sequence
  derived and/or modified CDS sequence (opt1) from hemagglutinin__InfluenzaA__ADF87292
augaaggccauccuggugguccuccuguacaccuucgccaccgcgaacgccgacacgcugugcaucggcuaccacgccaacaacagcaccgacaccguggacaccgugcucaagaagaacgucacggugacccacuccgugaaccugcuggaggacaagcacaacgggaagcucugcaagcugcgcggcgucgcgccccugcaccucgggaagugcaacaucgccggcuggauccuggggaacccggagugcgagagccuguccaccgcgggcagcugguccuacaucguggagaccagcuccagcgacaacggcacgugcuaccccggggacuucaucgacuacgaggagcuccgggagcagcuguccagcguguccagcuucgagcgcuucgagaucuuccccaagaccuccagcuggcccaaccacgacuccaacaagggcgucaccgccgccugcccgcacgccggggccaagagcuucuacaagaaccugaucuggcucgugaagaagggcaacuccuaccccaagcugagcaaguccuacaucaacgacaaggggaaggaggugcugguccucuggggcauccaccaccccagcaccagcgccgaccagcagucccuguaccagaacgccgacgccuacguguucgugggcacgagccgguacuccaagaaguucaagcccgagaucgccauccgcccgaagguccgggaccaggaggggcgcaugaacuacuacuggacccugguggagcccggcgacaagaucaccuucgaggcgaccgggaaccucguggucccccgguacgccuucgccauggagcgcaacgccggcagcggcaucaucaucuccgacacgcccgugcacgacugcaacacgaccugccagaccccgaagggggccaucaacaccagccugcccuuccagaacauccaccccaucaccaucggcaagugccccaaguacgugaaguccaccaagcugcggcucgcgaccgggcugcgcaacgucccgagcauccagucccggggccuguucggggccaucgccggcuucaucgagggcggguggacgggcaugguggacgggugguacggcuaccaccaccagaacgagcaggggagcggcuacgccgccgaccucaaguccacccagaacgcgaucgacgagaucaccaacaaggugaacagcgucaucgagaagaugaacacccaguucacggccgugggcaaggaguucaaccaccuggagaagcgcaucgagaaccugaacaagaaggucgacgacggguuccucgacaucuggaccuacaacgccgagcugcuggugcuccuggagaacgagcggacccuggacuaccacgacuccaacgugaagaaccucuacgagaagguccgcagccagcugaagaacaacgccaaggagaucggcaacgggugcuucgaguucuaccacaagugcgacaacaugugcauggaguccgugaagaacggcaccuacgacuaccccaaguacagcgaggaggccaagcugaaccgggaggagaucgacggggugaagcucgaguccacgcgcaucuaccagauccuggcgaucuacagcaccgucgccuccagccuggugcucguggucagccugggcgccaucuccuucuggaugugcagcaacggcucccugcagugccggaucugcaucuga

SEQ ID NO: 68692 - RNA, 1701 nt, Artificial Sequence; identical to SEQ ID NO: 67857
  derived and/or modified CDS sequence (opt1) from hemagglutinin__InfluenzaA__ADF87302

SEQ ID NO: 68693 - RNA, 1701 nt, Artificial Sequence
  derived and/or modified CDS sequence (opt1) from hemagglutinin__InfluenzaA__ADF87331
augaaggccauccuggugguccuccuguacaccuucgccaccgcgaacgccgacacgcugugcaucggcuaccacgccaacaacagcaccgacaccguggacaccgugcucgagaagaacgucacggugacccacuccgugaaccugcuggaggacaagcacaacgggaagcucugcaagcugcgcggcgucgcgccccugcaccucgggaagugcaacaucgccggcuggauccuggggaacccggagugcgagagccuguccaccgcgagcuccuggagcuacaucguggagaccuccaacagcgacaacggcacgugcuaccccggcgacuucaucaacuacgaggagcuccgggagcagcuguccagcguguccagcuucgagcgcuucgagaucuuccccaagaccuccagcuggcccaaccacgacuccaacaaggggaucaccgccgccugcccgcacgccggcgccaagagcuucuacaagaaccugaucuggcucgucaagaaggggaacuccuaccccaagcugagcaaguccuacaucaacgacaagggcaaggaggugcuggugcucugggggauccaccaccccagcaccagcgccgaccagcagucccuguaccagaacgccgacgccuacgucuucgugggcagcucccgguacagcaagaaguucaagcccgagaucgccauccgcccgaaggugcgggaccaggagggccgcaugaacuacuacuggacgcuggucgagcccggggacaagaucaccuucgaggcgaccggcaaccucguggugccccgguacgccuucgccauggagcgcaacgccggguccggcaucaucaucagcgacacccccguccacgacugcaacacgaccugccagaccccgaagggcgccaucaacaccucccugcccuuccagaacauccaccccaucacgaucgggaagugccccaaguacgucaagagcaccaagcugcggcucgcgaccggccugcgcaacgugccguccauccagagccgggggcuguucggcgccaucgccggguucaucgagggcggcuggaccgggaugguggacggcugguacggguaccaccaccagaacgagcagggcuccggguacgccgccgaccucaagagcacgcagaacgcgaucgacaagaucaccaacaaggugaacuccgugaucgagaagaugaacacccaguucaccgccgucggcaaggaguucaaccaccuggagaagcgcaucgagaaccugaacaagaagguggacgacggcuuccucgacaucuggacguacaacgccgagcugcugguccuccuggagaacgagcggacccuggacuaccacgacagcaacgugaagaaccucuacgagaaggugcgcucccagcugaagaacaacgccaaggagaucgggaacggcugcuucgaguucuaccacaagugcgacaacacgugcauggagagcgucaagaacgggaccuacgacuaccccaaguacuccgaggaggccaagcugaaccgggaggagaucgacggcgugaagcucgagagcacccgcaucuaccagauccuggcgaucuacuccaccguggccagcagccugguccucguggugucccugggggccaucagcuucuggaugugcuccaacggcagccugcagugccggaucugcaucuga

SEQ ID NO: 68694 - RNA, 1701 nt, Artificial Sequence; identical to SEQ ID NO: 66693
  derived and/or modified CDS sequence (opt1) from hemagglutinin__InfluenzaA__ADF87341

SEQ ID NO: 68695 - RNA, 1701 nt, Artificial Sequence
  derived and/or modified CDS sequence (opt1) from hemagglutinin__InfluenzaA__ADF87351
augaaggccauccuggugguccuccuguacaccuucgccaccgcgaacgccgacacgcugugcaucggcuaccacgccaacaacagcaccgacaccguggacaccgugcucgagaagaacgucacggugacccacuccgugaaccugcuggaggacaagcacaacgggaagcucugcaagcugcgcggcgucgcgccccugcaccucgggaagugcaacaucgccggcuggauccuggggaacccggagugcgacagccuguccaccgccagcuccuggagcuacaucguggagaccuccagcuccgacaacggcacgugcuaccccggcgacuucaucgacuacgaggagcuccgggagcagcugagcuccgugagcuccuucgagcgcuucgagauguuccccaagaccagcuccuggcccaaccacgacagcaacaagggggucaccgccgccugcccgcacgccggcgcgaaguccuucuacaagaaccugaucuggcucgugaagaaggggaacagcuaccccaagcuguccaagagcuacaucaacgacaagggcaaggaggugcugguccucugggggauccaccaccccagcaccuccgccgaccagcagagccuguaccagaacgccgacgccuacguguucgugggcacgucccgguacagcaagaaguucaagcccgagaucgccauccgcccgaagguccgggaccaggagggccgcaugaacuacuacuggacccugguggagcccggggacaagaucaccuucgaggcgaccggcaaccucguggucccccgguacgccuucgccauggagcgcaacgccggguccggcaucaucaucagcgacacgcccgugcacgacugcaacacgaccugccagaccccgaagggcgccaucaacaccucccugcccuuccagaacauccaccccaucaccaucgggaagugccccaaguacgucaagagcaccaagcugcggcucgcgaccggccugcgcaacgugccguccauccagagccgggggcuguucggcgccaucgccggguucaucgagggcggcuggacggggaugguggacggcugguacggguaccaccaccagaacgagcagggcuccggguacgccgccgaccucaagagcacccagaacgcgaucgacgagaucaccaacaaggugaacuccgucaucgagaagaugaacacccaguucacggccgugggcaaggaguucaaccaccuggagaagcgcaucgagaaccugaacaagaaggucgacgacggcuuccucgacaucuggaccuacaacgccgagcugcuggugcuccuggagaacgagcggacccuggacuaccacgacagcaacgugaagaaccucuacgagaagguccgcucccagcugaagaacaacgccaaggagaucgggaacggcugcuucgaguucuaccacaagugcgacaacacgugcauggagagcgugaagaacgggaccuacgacuaccccaaguacuccgaggaggccaagcugaaccgggaggagaucgacggcgugaagcucgagagcacccgcaucuaccagauccuggcgaucuacuccaccgucgccagcagccuggugcucguggucucccugggggccaucagcuucuggaugugcuccaacggcagccugcagugccggaucugcaucuga

SEQ ID NO: 68696 - RNA, 1701 nt, Artificial Sequence; identical to SEQ ID NO: 68320
  derived and/or modified CDS sequence (opt1) from hemagglutinin__InfluenzaA__ADF87361

SEQ ID NO: 68697 - RNA, 1701 nt, Artificial Sequence; identical to SEQ ID NO: 67857
  derived and/or modified CDS sequence (opt1) from hemagglutinin__InfluenzaA__ADF87371

SEQ ID NO: 68698 - RNA, 1701 nt, Artificial Sequence
  derived and/or modified CDS sequence (opt1) from hemagglutinin__InfluenzaA__ADG08115
augaaggccauccuggugguccuccuguacaccuucgccaccgcgaacgccgacacgcugugcaucggcuaccacgccaacaacagcaccgacaccguggacaccgugcucgagaagaacgucacggugacccacuccgugaaccugcuggaggacaagcacaacgggaagcucugcaagcugcgcggcgucgcgccccugcaccucgggaagugcaacaucgccggcuggauccuggggaacccggagugcgagagccuguccaccgccagcuccuggagcuacaucguggagaccuccagcuccggcaacggcacgugcuaccccggggacuucaucgacuacgaggagcuccgggagcagcugagcuccgugagcuccuucgagcgcuucgagaucuuccccaagaccagcuccuggcccaaccacgacagcaacaagggcgucaccgccgccugcccgcacgccggggcgaaguccuucuacaagaaccugaucuggcucgugaagaagggcaacagcuaccccaagcuguccaagagcuacaucaacgacaaggggaaggaggugcugguccucuggggcauccaccaccccagcaccuccgccgaccagcagagccuguaccagaacgccgacgccuacguguucgugggcacgucccgguacagcaagaaguucaagcccgagaucgccauccgcccgaagguccgggggcaggagggccgcaugaacuacuacuggacccugguggagcccggggacaagaucaccuucgaggcgaccggcaaccucguggucccccgguacgccuucgccauggagcgcaacgccggcuccgggaucaucaucagcgacacgcccgugcacgacugcaacacgaccugccagaccccgaagggcgccaucaacaccucccugcccuuccagaacauccaccccaucaccaucgggaagugccccaaguacgucaagagcaccaagcugcggcucgcgaccggccugcgcaacgugccguccauccagagccgggggcuguucggcgccaucgccggcuucaucgagggcggguggacggggaugguggacggcugguacggguaccaccaccagaacgagcagggcuccggcuacgccgccgaccucaagagcacccagaacgcgaucgacgagaucaccaacaaggugaacuccgucaucgagaagaugaacacccaguucacggccguggggaaggaguucaaccaccuggagaagcgcaucgagaaccugaacaagaaggucgacgacggcuuccucgacaucuggaccuacaacgccgagcugcuggugcuccuggagaacgagcggacccuggacuaccacgacagcaacgugaagaaccucuacgagaagguccgcucccagcugaagaacaacgccaaggagaucgggaacggcugcuucgaguucuaccacaagugcgacaacacgugcauggagagcgugaagaacgggaccuacgacuaccccaaguacuccgaggaggccaagcugaaccgggaggagaucgacggcgugaagcucgagagcacccgcaucuaccagauccuggcgaucuacuccaccgucgccagcagccuggugcucguggucucccugggcgccaucagcuucuggaugugcuccaacgggagccugcagugccggaucugcaucuga

SEQ ID NO: 68699 - RNA, 1701 nt, Artificial Sequence; identical to SEQ ID NO: 67435
  derived and/or modified CDS sequence (opt1) from hemagglutinin__InfluenzaA__ADG21004

SEQ ID NO: 68700 - RNA, 1701 nt, Artificial Sequence; identical to SEQ ID NO: 67435
  derived and/or modified CDS sequence (opt1) from hemagglutinin__InfluenzaA__ADG21006

SEQ ID NO: 68701 - RNA, 1701 nt, Artificial Sequence
  derived and/or modified CDS sequence (opt1) from hemagglutinin__InfluenzaA__ADG21008
augaagaccaucaucgcccugagcuacauccucugccugguguucgcccagaagauccccggcaacgacaacuccaccgcgacgcugugccucgggcaccacgccgucccgaacggcaccaucgugaagaccaucaccaacgaccagaucgaggugacgaacgccaccgagcugguccagagcuccagcaccggggagaucugcgacagcccccaccagauccuggacggcgagaacugcacccucaucgacgcccugcugggggacccccagugcgacggcuuccagaacaagaagugggaccucuucguggagcgcagcaaguccuacagcaacugcuaccccuacgacgugccggacuacgccucccugcggagccuggucgcguccagcggcacgcucgaguucaacaacgaguccuucaacuggaccggggugacccagaacggcaccagcuccgccugcauccgcaagagcaacaacuccuucuucagccggcugaacuggcugacgcaccucaaguucaaguaccccgcccugaacgugaccaugcccaacaacgagcaguucgacaagcuguacaucuggggcguccaccaccccgggaccgacaacgaccagaucuuccucuacgcccaggcguccgggcgcaucaccgugagcacgaagcggagccagcagaccgugaucccgaacaucggcucccgcccccggguccgcaacauccccagccggaucuccaucuacuggaccaucgugaagcccggcgacauccugcugaucaacagcaccgggaaccucaucgccccgcgcggcuacuucaagauccgguccgggaaguccuccaucaugcgcagcgacgcccccaucggcaagugcaacuccgagugcaucacgcccaacggcagcauccccaacgacaagccguuccagaacgugaaccggaucaccuacggggccugcccccgcuacgucaagcagaacacccugaagcuggccaccggcaugcggaacgugcccgagaagcagacgcgcgggaucuucggcgcgaucgccggguucaucgagaacggcugggagggcaugguggacgggugguacggcuuccggcaccagaacuccgaggggcgcggccaggccgccgaccucaagagcacccaggccgcgaucgaccagaucaacgggaagcugaaccggcugaucggcaagaccaacgagaaguuccaccagaucgagaaggaguucuccgaggucgagggccgcauccaggaccucgagaaguacguggaggacaccaagaucgaccuguggagcuacaacgccgagcugcucguggcccuggagaaccagcacacgaucgaccugaccgacuccgagaugaacaagcuguucgagaagaccaagaagcagcuccgggagaacgccgaggacauggggaacggcugcuucaagaucuaccacaagugcgacaacgccugcaucgggagcauccgcaacggcaccuacgaccacgacgucuaccgcgacgaggcgcugaacaaccgguuccagaucaaggggguggagcucaaguccggcuacaaggacuggauccuguggaucagcuucgccaucuccugcuuccugcucugcguggcccugcugggcuucaucaugugggccugccagaaggggaacauccgcugcaacaucugcaucuga

SEQ ID NO: 68702 - RNA, 1701 nt, Artificial Sequence
  derived and/or modified CDS sequence (opt1) from hemagglutinin__InfluenzaA__ADG21009
augaagaccaucaucgcccugagcuacauccucugccugguguucgcccagaagcugcccggcaacgacaacuccaccgcgacgcucugccuggggcaccacgccgucccgaacggcaccaucgugaagaccaucaccaacgaccagaucgaggugacgaacgccaccgagcugguccagagcuccagcaccggggagaucugcaacagcccccaccagauccucgacggcgagaacugcacccugaucgacgcccugcucggggacccccagugcgacggcuuccagaacaagaagugggaccuguucguggagcgcagcaaggccuacuccaacugcuaccccuacgacgugccggacuacgcgagccugcggucccucgucgccagcuccggcacgcuggaguucaacaacgagagcuucaacuggaccggggugacccagaacggcaccuccagcgccugcauccgccgguccaacaacagcuucuucucccgccugaacuggcucacgcaccuccgguucaaguaccccgcccugaacgugaccaugcccaacaacgagcaguucgacaagcuguacaucuggggcguccaccaccccgggaccgacaacgaccagaucuuccuguacgcgcaggccagcgggcgcaucaccguguccacgaagcggagccagcagaccgugaucccgaacaucggcagccgcccccggguccgcaacauccccucccggaucagcaucuacuggaccaucgugaagcccggcgacauccugcucaucaacuccaccgggaaccugaucgccccgcgcggcuacuucaagauccggagcgggaaguccagcaucaugcgcuccgacgcccccaucggcaagugcaacagcgagugcaucacgcccaacggcuccauccccaacgacaagccguuccagaacgugaaccggaucaccuacggggccugcccccgcuacgucaagcagaacacccugaagcucgcgaccggcaugcggaacgugcccgagaagcagacgcgcgggaucuucggcgccaucgccggguucaucgagaacggcugggagggcaugguggacgggugguacggcuuccggcaccagaacagcgaggggcgcggccaggccgccgaccugaaguccacccaggcggccaucgaccagaucaacgggaagcugaaccggcucaucggcaagaccaacgagaaguuccaccagaucgagaaggaguucagcgaggucgagggccgcauccaggaccuggagaaguacguggaggacaccaagaucgaccugugguccuacaacgccgagcuccugguggcccuggagaaccagcacacgaucgaccucaccgacagcgagaugaacaagcuguucgagaagaccaagaagcagcugcgcgagaacgccgaggacauggggaacggcugcuucaagaucuaccacaagugcgacaacgcgugcaucggguccauccggaacggcaccuacgaccacgacgucuaccgcgacgaggcccucaacaaccgguuccagaucaaggggguggagcugaaguccggcuacaaggacuggauccuguggaucuccuucgccaucagcugcuuccuccugugcguggcccugcucggcuucaucaugugggccugccagaaggggaacauccgcugcaacaucugcaucuga

SEQ ID NO: 68703 - RNA, 1701 nt, Artificial Sequence; identical to SEQ ID NO: 67435
  derived and/or modified CDS sequence (opt1) from hemagglutinin__InfluenzaA__ADG21010

SEQ ID NO: 68704 - RNA, 1701 nt, Artificial Sequence
  derived and/or modified CDS sequence (opt1) from hemagglutinin__InfluenzaA__ADG21011
augaagaccaucaucgcccugagcuacauccucugccugguguucgcccagaagcugcccggcaacgacaacuccaccgcgacgcucugccuggggcaccacgccgucccgaacggcaccaucgugaagaccaucaccaacgaccagaucgaggugacgaacgccaccgagcugguccagagcuccagcaccggggagaucugcgacagcccccaccagauccucgacggcgagaacugcacccugaucgacgcccugcucggggacccccagugcgacggcuuccagaacaagaagugggaccuguucguggagcgcagcaaggccuacuccaacugcuaccccuacgacgugccggacuacgcgagccugcggucccucgucgccagcuccggcacgcuggaguucaacaacgagagcuucaacuggaccggggugacccagaacggcaccuccagcgccugcauccgccgguccaacaacagcuucuucucccgccugaacuggcucacgcaccugaacuucaaguaccccgcccugaacgugaccaugcccaacaacgagcaguucgacaagcucuacaucuggggcguccaccaccccgggaccgacaaggaccagaucuuccuguacgcgcaggccagcgggcggaucaccguguccacgaagcgcagccagcaggccgugaucccgaacaucggcagccggccccgcguccgggacauccccucccgcaucagcaucuacuggaccaucgugaagcccggcgacauccugcucaucaacuccaccgggaaccugaucgccccgcggggcuacuucaagauccgcagcgggaaguccagcaucaugcgguccgacgcccccaucggcaagugcaacagcgagugcaucacccccaacggcuccauccccaacgacaagccguuccagaacgugaaccgcaucacguacggggcgugcccccgguacgucaagcagaacacccugaagcucgccaccggcaugcgcaacgugcccgagaagcagacccgggggaucuucggcgccaucgccggguucaucgagaacggcugggagggcaugguggacgggugguacggcuuccgccaccagaacagcgaggggcggggccaggccgcggaccugaaguccacgcaggccgccaucgaccagaucaacgggaagcugaaccgccucaucggcaagaccaacgagaaguuccaccagaucgagaaggaguucagcgaggucgagggccggauccaggaccuggagaaguacguggaggacaccaagaucgaccugugguccuacaacgccgagcuccugguggcccuggagaaccagcacaccaucgaccucacggacagcgagaugaacaagcuguucgagaagaccaagaagcagcugcgcgagaacgcggaggacauggggaacggcugcuucaagaucuaccacaagugcgacaacgccugcaucggguccauccgcaacggcaccuacgaccacgacgucuaccgggacgaggcccucaacaaccgcuuccagaucaaggggguggagcugaaguccggcuacaaggacuggauccuguggaucuccuucgccaucagcugcuuccuccugugcguggcccugcucggcuucaucaugugggcgugccagaaggggaacauccggugcaacaucugcaucuga

SEQ ID NO: 68705 - RNA, 1701 nt, Artificial Sequence; identical to SEQ ID NO: 67435
  derived and/or modified CDS sequence (opt1) from hemagglutinin__InfluenzaA__ADG21012

SEQ ID NO: 68706 - RNA, 1701 nt, Artificial Sequence; identical to SEQ ID NO: 67435
  derived and/or modified CDS sequence (opt1) from hemagglutinin__InfluenzaA__ADG21013

SEQ ID NO: 68707 - RNA, 1701 nt, Artificial Sequence
  derived and/or modified CDS sequence (opt1) from hemagglutinin__InfluenzaA__ADG21014
augaagaccaucaucgcccugagcuacauccucugccugguguucgcccagaagauccccggcaacgacaacuccaccgcgacgcugugccucgggcaccacgccgucccgaacggcaccaucgugaagaccaucaccaacgaccagaucgaggugacgaacgccaccgagcugguccagagcuccagcaccggggagaucugcgacagcccccaccagauccuggacggcgagaacugcacccucaucgacgcccugcugggggacccccagugcgacggcuuccagaacaagaagugggaccucuucguggagcgcuccaaggccuacuccaacugcuaccccuacgacgugccggacuacgcgagccugcggucccuggucgccagcuccggcacgcucgaguucaacaacgagagcuucaacuggaccggggugacccagaacggcaccuccagcgccugcauccgccgguccaacaacagcuucuucucccgccugaacuggcugacgcaccucaacuucaaguaccccgcccugaacgugaccaugcccaacaacgagcaguucgacaagcuguacaucuggggcguccaccaccccgggaccgacaaggaccagaucuuccucuacgcgcaggccagcgggcggaucaccguguccacgaagcgcagccagcaggccgugaucccgaacaucggcagccggccccgcguccggaacauccccucccgcaucagcaucuacuggaccaucgugaagcccggcgacauccugcugaucaacuccaccgggaaccucaucgccccgcggggcuacuucaagauccgcagcgggaaguccagcaucaugcgguccgacgcccccaucggcaagugcaacagcgagugcaucacccccaacggcuccauccccaacgacaagccguuccagaacgugaaccgcaucacguacggggcgugcccccgguacgucaagcagaacacccugaagcuggccaccggcaugcgcaacgugcccgagaagcagacccgggggaucuucggcgccaucgccggguucaucgagaacggcugggagggcaugguggacgggugguacggcuuccgccaccagaacagcgaggggcggggccaggccgcggaccucaaguccacgcaggccgccaucgaccagaucaacgggaagcugaaccgccugaucggcaagaccaacgagaaguuccaccagaucgagaaggaguucagcgaggucgagggccggauccaggaccucgagaaguacguggaggacaccaagaucgaccugugguccuacaacgccgagcugcucguggcccuggagaaccagcacaccaucgaccugacggacagcgagaugaacaagcuguucgagaagaccaagaagcagcuccgcgagaacgcggaggacauggggaacggcugcuucaagaucuaccacaagugcgacaacgccugcaucggguccauccgcaacggcaccuacgaccacgacgucuaccgggacgaggcccugaacaaccgcuuccagaucaaggggguggagcucaagagcggcuacaaggacuggauccuguggaucuccuucgccaucagcugcuuccugcucugcguggcccugcugggcuucaucaugugggcgugccagaaggggaacauccggugcaacaucugcaucuga

SEQ ID NO: 68708 - RNA, 1701 nt, Artificial Sequence
  derived and/or modified CDS sequence (opt1) from hemagglutinin__InfluenzaA__ADG21017
augaagaccaucaucgcccugagcuacauccucuaccugguguucgcccagaagcugcccggcaacgacaacuccaccgcgacgcucugccuggggcaccacgccgucccgaacggcaccaucgugaagaccaucaccaacgaccagaucgaggugacgaacgccaccgagcugguccagagcuccagcaccggggagaucugcgacagcccccaccagauccucgacggcgagaacugcacccugaucgacgcccugcucggggacccccagugcgacggcuuccagaacaagaagugggaccuguucaucgagcgcagcaaggccuacuccaacugcuaccccuacgacgugccggacuacgcgagccugcggucccucguggccagcuccggcacgcuggaguucaacaacgagagcuucaacuggaccggggucacccagaacggcaccuccagcgccugcauccgccgguccaacaacagcuucuucucccgccugaacuggcucacgcaccugaacuucaaguaccccgcccugaacgugaccaugcccaacaacgagcaguucgacaagcucuacaucuggggcgugcaccaccccgggaccgacaaggaccagaucuuccuguacgcgcaggccagcgggcggaucaccgucuccacgaagcgcagccagcaggccgugaucccgaacaucggcagccggccccgcgugcggaacauccccucccgcaucagcaucuacuggaccaucgucaagcccggcgacauccugcucaucaacuccaccgggaaccugaucgccccgcggggcuacuucaagauccgcagcgggaaguccagcaucaugcgguccgacgcccccaucggcaagugcaacagcgagugcaucacccccaacggcuccauccccaacgacaagccguuccagaacgugaaccgcaucacguacggggcgugcccccgguacgugaagcagaacacccugaagcucgccaccggcaugcgcaacguccccgagaagcagacccgggggaucuucggcgccaucgccggguucaucgagaacggcugggagggcaugguggacgggugguacggcuuccgccaccagaacagcgaggggcggggccaggccgcggaccugaaguccacgcaggccgccaucgaccagaucaacgggaagcugaaccgccucaucggcaagaccaacgagaaguuccaccagaucgagaaggaguucagcgagguggagggccggauccaggaccuggagaaguacgucgaggacaccaagaucgaccugugguccuacaacgccgagcuccugguggcccuggagaaccagcacaccaucgaccucacggacagcgagaugaacaagcuguucgagaagaccaagaagcagcugcgcgagaacgcggaggacauggggaacggcugcuucaagaucuaccacaagugcgacaacgccugcaucggguccauccgcaacggcaccuacgaccacgacguguaccgggacgaggcccucaacaaccgcuuccagaucaagggggucgagcugaaguccggcuacaaggacuggauccuguggaucuccuucgccaucagcugcuuccuccugugcguggcccugcucggcuucaucaugugggcgugccagaaggggaacauccggugcaacaucugcaucuga

SEQ ID NO: 68709 - RNA, 1701 nt, Artificial Sequence
  derived and/or modified CDS sequence (opt1) from hemagglutinin__InfluenzaA__ADG21018
augaagaccaucaucgcccugagcuacauccucugccugguguucgcccagaagcugcccggcaacgacaacuccaccgcgacgcucugccuggggcaccacgccgucccgaacggcaccaucgugaagaccaucaccaacgaccagaucgaggugacgaacgccaccgagcugguccagagcuccagcaccggggagaucugcgacagcccccaccagauccucgacggcgagaacugcacccugaucgacgcccugcucggggacccccagugcgacggcuuccagaacaagaagugggaccuguucguggagcgcagcaaggccuacuccaacugcuaccccuacgacgugccggacuacgcgagccugcggucccucgucgccagcuccggcacgcuggaguucaacaacgagagcuucaacuggaccggggugacccagaacggcaccuccagcgccugcauccgccgguccaacaacagcuucuucucccgccugaacuggcucacgcacagcaacuucaaguaccccgcccugaacgugaccaugcccaacaacgagcaguucgacaagcuguacaucuggggcguccaccaccccgggaccgacaaggaccagaucuuccucuacgcgcaggccuccgggcggaucaccgugagcacgaagcgcagccagcaggccgugaucccgaacaucggcucccggcaccgcguccggaacauccccagccgcaucuccaucuacuggaccaucgugaagcccggcgacauccugcugaucaacagcaccgggaaccucaucgcgccccggggcuacuucaagauccgcuccgggaaguccuccaucaugcggagcgacgccccgaucggcaagugcaacuccgagugcaucacccccaacggcagcauccccaacgacaagcccuuccagaacgugaaccgcaucacguacggggccugcccgcgguacgucaagcagaacacccugaagcuggccaccggcaugcgcaacgugcccgagaagcagacccgggggaucuucggcgccaucgccggguucaucgagaacggcugggagggcaugguggacgggugguacggcuuccgccaccagaacuccgaggggcggggccaggccgcggaccucaagagcacgcaggccgccaucgaccagaucaacgggaagcugaaccgccugaucggcaagaccaacgagaaguuccaccagaucgagaaggaguucuccgaggucgagggccggauccaggaccucgagaaguacguggaggacaccaagaucgaccuguggagcuacaacgccgagcugcucguggcccuggagaaccagcacaccaucgaccugacggacuccgagaugaacaagcuguucgagaagaccaagaagcagcuccgcgagaacgcggaggacauggggaacggcugcuucaagaucuaccacaagugcgacaacgccugcaucgggagcauccgcaacggcaccuacgaccacgacgucuaccgggacgaggcccugaacaaccgcuuccagaucaaggggguggagcucaaguccggcuacaaggacuggauccuguggaucagcuucgccaucuccugcuuccugcucugcguggcccugcugggcuucaucaugugggcgugccagaaggggaacauccggugcaacaucugcaucuga

SEQ ID NO: 68710 - RNA, 1701 nt, Artificial Sequence
  derived and/or modified CDS sequence (opt1) from hemagglutinin__InfluenzaA__ADG21019
augaagaccaucaucgcccugagcuacauccucugccugguguucgcccagaagcugcccggcaacgacaacuccaccgcgacgcucugccuggggcaccacgccgucccgaacggcaccaucgugaagaccaucaccaacgaccagaucgaggugacgaacgccaccgagcugguccagagcuccagcaccggggagaucugcgacagcccccaccagauccucgacggcaagaacugcacccugaucgacacgcugcucggggacccccagugcgacggcuuccagaacaagaagugggaccuguucguggagcgcagcaaggccuacuccaacugcuaccccuacgacgugccggacuacgccagccugcggucccucgucgcgagcuccggcacccuggaguucaacaacgagagcuucaacuggaccggggugacccagaacggcacguccagcgccugcauccgccgguccaagaacagcuucuucucccgccugaacuggcucacccaccugaacuucaaguaccccgcccugaacgugaccaugcccaacaacgagcaguucgacaagcucuacaucuggggcguccaccaccccgggaccgacaaggaccagaucuuccuguacgcccaggcgagcgggaagaucaucguguccacgaagcggagccagcagaccgugaucccgaacaucggcagccgcccccggguccgcaacauccccuccaucaucagcaucuacuggaccaucgugaagcccggcgacauccugcucaucaacuccaccgggaaccugaucgccccgcggggcuacuucaagauccgcagcgggaaguccagcaucaugcgguccgacgcccccaucggcaagugcaacagcgagugcaucacgcccaacggcuccauccccaacgacaagccguuccagaacgugaaccgcaucaccuacggggccugcccccgguacgucaagcagaacacccugaagcucgccaccggcaugcgcaacgugcccgagaagcagacgcgggggaucuucggcgcgaucgccggguucaucgagaacggcugggagggcaugguggacgggugguacggcuuccgccaccagaacagcgaggggcggggccaggccgccgaccugaaguccacccaggccgcgaucgaccagaucaacgggaagcugaaccgccucaucggcaagaccaacgagaaguuccaccagaucgagaaggaguucagcgaggucgagggccggauccaggaccuggagaaguacguggaggacaccaagaucgaccugugguccuacaacgccgagcuccugguggcccuggagaaccagcacacgaucgaccucaccgacagcgagaugaacaagcuguucgagaagaccaagaagcagcugcgcgagaacgccgaggacaucgggaacggcugcuucaagaucuaccacaagugcgacaacgccugcaucggguccauccggaacggcaccuacgaccacgacgucuaccgcgacgaggcgcucaacaaccgcuuccagaucaaggggguggagcugaaguccggcuacaaggacuggauccuguggaucuccuucgccaucagcugcuuccuccugugcguggcccugcucggcuucaucaugugggccugccagaaggggaacauccggugcaacaucugcaucuga

SEQ ID NO: 68711 - RNA, 1701 nt, Artificial Sequence
  derived and/or modified CDS sequence (opt1) from hemagglutinin__InfluenzaA__ADG21020
augaagaccaucaucgcccugagcuacauccucugccugguguucgcccagaagcugcccggcaacgacaacuccaccgcgacgcucugccuggggcaccacgccgucccgaacggcaccaucgugaagaccaucaccaacgaccagaucgaggugacgaacgccaccgagcugguccagagcuccagcaccggggagaucugcgacagcccccaccagauccucgacggcaagaacugcacccugaucgacgcccugcucggggacccccagugcgacggcuuccagaacaagaagugggaccuguucguggagcgcagcaaggccuacuccaacugcuaccccuacgacgugccggacuacgcgagccugcggucccucgucgccagcuccggcacgcuggaguucaacaacgagagcuucaacuggaccggggugacccaguccggcaccagcuccgccugcauccgccggagcaagaacuccuucuucagccgccugaacuggcucacgcaccugaacuucaaguaccccgcccugaacgugaccaugcccaacaacgagcaguucgacaagcucuacaucuggggcguccaccaccccgggaccgacaaggaccagaucuuccuguacgcgcaggccuccgggcggaucaucgugagcaccaagcgcagccagcagacggugaccccgaacaucggcucccggccccgcguccggaacauccccagccgcaucuccaucuacuggaccaucgugaagcccggcgacauccugcucaucaacagcaccgggaaccugaucgccccgcggggcuacuucaagauccgcuccgggaaguccuccaucaugcggagcgacgcccccaucggcaagugcaacuccgagugcaucacgcccaacggcagcauccccaacgacaagccguuccagaacgugaaccgcaucaccuacggggccugcccccgguacgucaagcagaacacccugaagcucgcgaccggcaugcgcaacgugcccgagaagcagacgcgggggaucuucggcgccaucgccggguucaucgagaacggcugggagggcaugguggacgggugguacggcuuccgccaccagaacuccgaggggcggggccaggccgccgaccucaagagcacccaggcggccaucgaccagaucaacgggaagcugaaccgccugaucggcaagaccaacgagaaguuccaccagaucgagaaggaguucuccgaggucgagggccggauccaggaccuggagaaguacguggaggacaccaagaucgaccuguggagcuacaacgccgagcuccugguggcccuggagaaccagcacacgaucgaccucaccgacuccgagaugaacaagcuguucgagaagaccaagaagcagcugcgcgagaacgccgaggacauggggaacggcugcuucaagaucuaccacaagugcgacaacgcgugcaucgggagcauccgcaacggcaccuacgaccacgacgucuaccgggacgaggcccucaacaaccgcuuccagaucaaggggguggagcugaaguccggcuacaaggacuggauccuguggaucagcuucgccaucuccugcuuccuccugugcguggcccugcucggcuucaucaugugggccugccagaaggggaacauccggugcaacaucugcaucuga

SEQ ID NO: 68712 - RNA, 1701 nt, Artificial Sequence; identical to SEQ ID NO: 66458
  derived and/or modified CDS sequence (opt1) from hemagglutinin__InfluenzaA__ADG21022

SEQ ID NO: 68713 - RNA, 1701 nt, Artificial Sequence; identical to SEQ ID NO: 66458
  derived and/or modified CDS sequence (opt1) from hemagglutinin__InfluenzaA__ADG21023

SEQ ID NO: 68714 - RNA, 1701 nt, Artificial Sequence
  derived and/or modified CDS sequence (opt1) from hemagglutinin__InfluenzaA__ADG21024
augaagaccaucaucgcccugagcuacauccucugccugguguucacccagaagcugcccggcaacgacaacuccacggccacccucugccuggggcaccacgcggucccgaacggcaccaucgugaagaccaucacgaacgaccagaucgaggugaccaacgccaccgagcugguccagagcuccagcaccggggagaucugcgacagcccccaccagauccucgacggcgagaacugcacgcugaucgacgcccugcucggggacccccagugcgacggcuuccagaacaagaagugggaccuguucguggagcgcagcaaggccuacuccaacugcuaccccuacgacgugccggacuacgccagccugcggucccucgucgcgagcuccggcgcccuggaguucaacaacgagagcuucaacuggaccggggugacccagaacggcaccuccagcgccugcauccgccgguccaacaacagcuucuucucccgccugaacuggcucacgcaccugaacuucaaguaccccgcccugaacgugaccaugcccaacaacgagcaguucgacaagcucuacaucuggggcguccaccaccccgggaccgacaaggaccagaucuuccuguacgcgcaggccagcgggcggaucaccguguccacgaagcgcagccagcaggccgugaucccgaacaucggcagccggccccgcguccggaacauccccucccgcaucagcaucuacuggaccaucgugaagcccggcgacauccugcucaucaacuccaccgggaaccugaucgccccgcggggcuacuucaagauccagagcgggaaguccagcaucaugcgcuccgacgcccccaucggcaagugcaacagcgagugcaucacccccaacggcuccauccccaacgacaagccguuccagaacgugaaccggaucacguacggggcgugcccccgcuacgucaagcagagcacccugaagcucgccaccggcaugcggaacgugcccgagaagcagacccgcgggaucuucggcgccaucgccggguucaucgagaacggcugggagggcaugguggacgggugguacggcuuccggcaccagaacuccgaggggcgcggccaggccgcggaccugaaguccacgcaggccgccaucgaccagaucaacgggaagcugaaccggcucaucggcaagaccaacgagaaguuccaccagaucgagaaggaguucuccgaggucgagggccgcauccaggaccuggagaaguacguggaggacaccaagaucgaccuguggagcuacaacgccgagcuccugguggcccuggagaaccagcacaccaucgaccucacggacuccgagaugaacaagcuguucgagaagaccaagaagcagcugcgggagaacgcggaggacauggggaacggcugcuucaagaucuaccacaagugcgacaacgccugcaucgggagcauccgcaacggcaccuacgaccacgacgucuaccgcgacgaggcccucaacaaccgguuccagaucaaggggguggagcugaaguccggcuacaaggacuggauccuguggaucagcuucgccaucuccugcuuccuccugugcguggcccugcucggcuucaucaugugggcgugccagaaggggaacauccgcugcaacaucugcaucuga

SEQ ID NO: 68715 - RNA, 1701 nt, Artificial Sequence
  derived and/or modified CDS sequence (opt1) from hemagglutinin__InfluenzaA__ADG21026
augaagaccaucaucgcccugagcuacauccucugccugguguucgcccagaagcugcccggcaacgacaacuccaccgcgacgcucugccuggggcaccacgccgucccgaacggcaccaucgugaagaccaucaccaacgaccagaucgaggugacgaacgccaccgagcugguccagagcuccagcaccggggagaucugcgacagcccccaccagauccucgacggcgagaacugcacccugaucgacgcccugcucggggacccccagugcgacggcuuccagaacaagaagugggaccuguucguggagcgcagcaaggccuacuccaacugcuaccccuacgacgugccggacuacgcgagccugcggucccucgucgccagcuccggcacgcuggaguucaacaacgagagcuucaacuggaccggggugacccagaacggcaccuccagcgccugcauccgccgguccaacaacagcuucuucucccgccugaacuggcucacgcaccugaacuucaaguaccccgcccugaacgugaccaugcccaacaacgagcaguucgacaagcucuacaucuggggcguccaccaccccgggaccgacaaggaccagaucuuccuguacgcgcaggccagcgggcggaucaccguguccacgaagcgcagccagcaggccgugaucccgaacaucggcagccggcugcgcguccggaacauccccucccgcaucagcaucuacuggaccaucgugaagcccggcgacauccuccugaucaacuccaccgggaaccugaucgcgccccggggcuacuucaagauccgcagcgggaaguccagcaucaugcgguccgacgccccgaucggcaagugcaacagcgagugcaucacccccaacggcuccauccccaacgacaagcccuuccagaacgugaaccgcaucacguacggggccugcccgcgguacgucaagcagagcacccucaagcuggccaccggcaugcgcaacgugcccgagaagcagacccgggggaucuucggcgccaucgccggguucaucgagaacggcugggagggcaugguggacgggugguacggcuuccgccaccagaacuccgaggggcggggccaggccgcggaccugaaguccacgcaggccgccaucgaccagaucaacgggaagcucaaccgccugaucggcaagaccaacgagaaguuccaccagaucgagaaggaguucuccgaggucgagggccggauccaggaccuggagaaguacguggaggacaccaagaucgaccucuggagcuacaacgccgagcugcugguggcccucgagaaccagcacaccaucgaccugacggacuccgagaugaacaagcuguucgagaagaccaagaagcagcuccgcgagaacgcggaggacauggggaacggcugcuucaccaucuaccacaagugcgacaacgccugcaucgggagcauccgcaacggcaccuacgaccacaacgucuaccgggacgaggcccugaacaaccgcuuccagaucaaggggguggagcugaaguccggcuacaaggacuggauccucuggaucagcuucgccaucuccugcuuccugcugugcguggcccuccugggcuucaucaugugggcgugccagaaggggaacauccggugcaacaucugcaucuga

SEQ ID NO: 68716 - RNA, 1701 nt, Artificial Sequence; identical to SEQ ID NO: 66693
  derived and/or modified CDS sequence (opt1) from hemagglutinin__InfluenzaA__ADG21037

SEQ ID NO: 68717 - RNA, 1701 nt, Artificial Sequence
  derived and/or modified CDS sequence (opt1) from hemagglutinin__InfluenzaA__ADG21038
augaaggccauccuggugguccuccuguacaccuucgccaccgcggacgccgacacgcugugcaucggcuaccacgccaacaacagcaccgacaccguggacaccgugcucgagaagaacgucacggugacccacuccgugaaccugcuggaggacaagcacaacgggaagcucugcaagcugcgcggcgucgcgccccugcaccucgggaagugcaacaucgccggcuggauccuggggaacccggagugcgagagccuguccaccgccagcuccuggagcuacaucguggagaccuccagcuccgacaacggcacgugcuaccccggcgacuucaucgacuacgaggagcuccgggagcagcugagcuccgugagcuccuucgagcgcuucgagaucuuccccaagaccagcuccuggcccaaccacgacagcaacaagggggucaccgccgccugcccgcacgccggcgcgaaguccuucuacaagaaccugaucuggcucgugaagaaggggaacagcuaccccaagcuguccaagagcuacaucaacgacaagggcaaggaggugcugguccucugggggauccaccaccccagcaccuccgccgaccagcagagccuguaccagaacgccgacgccuacguguucgugggcacgucccgguacagcaagaaguucaagcccgagaucgccauccgcccgaagguccgggaccaggagggccgcaugaacuacuacuggacccugguggagcccggggacaagaucaccuucgaggcgaccggcaaccucguggucccccgguacgccuucgccauggagcgcaacgccggguccggcaucaucaucagcgacacgcccgugcacgacugcaacacgaccugccagaccccgaagggcgccaucaacaccucccugcccuuccagaacauccaccccaucaccaucgggaagugccccaaguacgucaagagcaccaagcugcggcucgcgaccggccugcgcaacgugccguccauccagagccgggggcuguucggcgccaucgccggguucaucgagggcggcuggacggggaugguggacggcugguacggguaccaccaccagaacgagcagggcuccggguacgccgccgaccucaagagcacccagaacgcgaucgacgagaucaccaacaaggugaacuccgucaucgagaagaugaacacccaguucacggccgugggcaaggaguucaaccaccuggagaagcgcaucgagaaccugaacaagaaggucgacgacggcuuccucgacaucuggaccuacaacgccgagcugcuggugcuccuggagaacgagcggacccuggacuaccacgacagcaacgugaagaaccucuacgagaagguccgcucccagcugaagaacaacgccaaggagaucgggaacggcugcuucgaguucuaccacaagugcgacaacacgugcauggagagcgugaagaacgggaccuacgacuaccccaaguacuccgaggaggccaagcugaaccgggaggagaucgacggcgugaagcucgagagcacccgcaucuaccagauccuggcgaucuacuccaccgucgccagcagccuggugcucguggucucccugggggccaucagcuucuggaugugcuccaacggcagccugcagugccggaucugcaucuga

SEQ ID NO: 68718 - RNA, 1701 nt, Artificial Sequence
  derived and/or modified CDS sequence (opt1) from hemagglutinin__InfluenzaA__ADG21040
augaaggccauccuggugguccuccuguacaccuucgccaccgcgaacgccgacacgcugugcaucggcuaccacgccaacaacagcaccgacaccguggacaccgugcucgagaagaacgucacggugacccacuccgugaaccugcuggaggacaagcacaacgggaagcucugcaagcugcgcggcgucgcgccccugcaccucgggaagugcaacaucgccggcuggauccuggggaacccggagugcgagagccuguccaccgccagcuccuggagcuacaucguggagaccuccagcuccgacaacggcacgugcuaccccggcgacuucaucgacuacgaggagcuccgggagcagcugagcuccgugagcuccuucgagcgcuucgagaucuuccccaagaccagcuccuggcccaaccacgacagcaacaagggggucaccgccgccugcccgcacgccggcgcgaaguccuucuacaagaaccugaucuggcucgugaagaaggggaacagcuaccccaagcuguccaagagcuacaucaacgacaagggcaaggaggugcugguccucugggggauccaccaccccagcaccuccgccgaccagcagagccuguaccagaacgccgacgccuacguguucgugggcacgucccgguacagcaagaaguucaagcccgagaucgccauccgcccgaagguccgggaccaggagggccgcaugaacuacuacuggacccugguggagcccggggacaagaucaccuucgaggcgaccggcaaccucguggucccccgguacgccuucgccauggagcgcaacgccggguccggcaucaucaucagcgacacgcccgugcacgacugcaacacgaccugccagaccccgaagggcgccaucaacaccucccugcccuuccagaacgugcaccccaucaccaucgggaagugccccaaguacgucaagagcaccaagcugcggcucgcgaccggccugcgcaacgugccguccauccagagccgggggcuguucggcgccaucgccggguucaucgagggcggcuggacggggaugguggacggcugguacggguaccaccaccagaacgagcagggcuccggguacgccgccgaccucaagagcacccagaacgcgaucgacgagaucaccaacaaggucaacuccgugaucgagaagaugaacacccaguucacggccgucggcaaggaguucaaccaccuggagaagcgcaucgagaaccugaacaagaagguggacgacggcuuccucgacaucuggaccuacaacgccgagcugcuggugcuccuggagaacgagcggacccuggacuaccacgacagcaacgucaagaaccucuacgagaaggugcgcucccagcugaagaacaacgccaaggagaucgggaacggcugcuucgaguucuaccacaagugcgacaacacgugcauggagagcgugaagaacgggaccuacgacuaccccaaguacuccgaggaggccaagcugaaccgggaggagaucgacggcgucaagcucgagagcacccgcguguaccagauccuggcgaucuacuccaccguggccagcagccugguccucguggugucccugggggccaucagcuucuggaugugcuccaacggcagccugcagugccggaucugcaucuga

SEQ ID NO: 68719 - RNA, 1701 nt, Artificial Sequence
  derived and/or modified CDS sequence (opt1) from hemagglutinin__InfluenzaA__ADG21041
augaaggccauccuggugguccuccuguacaccuucaccacggccaacgcggacacccugugcaucggcuaccacgccaacaacagcaccgacaccguggacacggugcucgagaagaacgucaccgugacccacuccgugaaccugcuggaggacaagcacaacgggaagcucugcaagcugcgcggcgucgcgccccugcaccucgggaagugcaacaucgccggcuggauccuggggaacccggagugcgagagccuguccaccgccagcuccuggagcuacaucguggagacguccagcuccgacaacgggaccugcuaccccggcgacuucaucgacuacgaggagcuccgggagcagcugagcuccgugagcuccuucgagcgcuucgagaucuuccccaagaccagcuccuggcccaaccacgacagcaacaagggcgucaccgccgccugcccgcacgccggcgccaaguccuucuacaagaaccugaucuggcucgugaagaaggggaacagcuaccccaagcuguccaagagcuacaucaacgacaagggcaaggaggugcugguccucugggggauccaccaccccagcacguccgcggaccagcagagccuguaccagaacgccgacgccuacguguucgugggcaccucccgguacagcaagaaguucaagcccgagaucgccauccgcccgaagguccgggagcaggagggccgcaugaacuacuacuggacccugguggagcccggggacaagaucaccuucgaggccacgggcaaccucguggucccccgguacgcguucgccauggagcgcaacgccggguccggcaucaucaucagcgacacccccgugcacgacugcaacacgaccugccagaccccgaagggcgccaucaacaccucccugcccuuccagaacauccacagcaucaccaucgggaagugccccaaguacgugaaguccaccaagcugcggcucgccacgggccugcgcaacguccccagcauccagucccgggggcuguucggcgcgaucgccggguucaucgagggcggcuggaccgggaugguggacggcugguacggguaccaccaccagaacgagcagggcagcggguacgccgccgaccucaaguccacccagaacgccaucgacgagaucaccaacaaggugaacagcgucaucgagaagaugaacacgcaguucaccgcggugggcaaggaguucaaccaccuggagaagcgcaucgagaaccugaacaagaaggucgacgacggcuuccucgacaucuggaccuacaacgccgagcugcuggugcuccuggagaacgagcggacccuggacuaccacgacuccaacgugaagaaccucuacgagaagguccgcagccagcugaagaacaacgccaaggagaucgggaacggcugcuucgaguucuaccacaagugcgacaacacgugcauggaguccgugaagaacgggaccuacgacuacccgaaguacagcgaggaggccaagcugaaccgggaggagaucgacggcgugaagcucgaguccacccgcaucuaccagauccuggccaucuacagcaccgucgcgagcucccuggugcucguggucagccugggggccguguccuucuggaugugcagcaacggcucccugcagugccggaucugcaucuga

SEQ ID NO: 68720 - RNA, 1701 nt, Artificial Sequence; identical to SEQ ID NO: 67794
  derived and/or modified CDS sequence (opt1) from hemagglutinin__InfluenzaA__ADG21042

SEQ ID NO: 68721 - RNA, 1701 nt, Artificial Sequence
  derived and/or modified CDS sequence (opt1) from hemagglutinin__InfluenzaA__ADG21043
augaaggccauccuggugguccuccuguacaccuucaccacggccaacgcggacacccugugcgugggcuaccacgccaacaacagcaccgacaccguggacacgguccucgagaagaacgugaccgugacccacuccgucaaccugcuggaggacaagcacaacgggaagcucugcaagcugcgcggcguggcgccccugcaccucgggaagugcaacaucgccggcuggauccuggggaacccggagugcgagagccuguccaccgccagcuccuggagcuacaucguggagacguccagcuccgacaacgggaccugcuaccccggcgacuucaucgacuacgaggagcuccgggagcagcugagcuccgucagcuccuucgagcgcuucgagaucuuccccaagaccagcuccuggcccaaccacgacagcaacaagggcgugaccgccgccugcccgcacgccggcgccaaguccuucuacaagaaccugaucuggcucgugaagaaggggaacagcuaccccaagcuguccaagagcuacaucaacgacaagggcaaggagguccuggugcucugggggauccaccaccccagcacguccgcggaccagcagagccuguaccagaacgccgacgccuacguguucgucggcaccucccgguacagcaagaaguucaagcccgagaucgccauccgcccgaaggugcgggagcaggagggccgcaugaacuacuacuggacccugguggagcccggggacaagaucaccuucgaggccacgggcaaccucgucgugccccgguacgcguucgccauggagcgcaacgccggguccggcaucaucaucagcgacacccccgugcacgacugcaacacgaccugccagaccccgaagggcgccaucaacaccucccugcccuuccagaacauccacagcaucaccaucgggaagugccccaaguacgucaaguccaccaagcugcggcucgccacgggccugcgcaacgugcccagcauccagucccgggggcuguucggcgcgaucgccggguucaucgagggcggcuggaccgggaugguggacggcugguacggguaccaccaccagaacgagcagggcagcggguacgccgccgaccucaaguccacccagaacgccaucgacgagaucaccaacaaggucaacagcgugaucgagaagaugaacacgcaguucaccgcggucggcaaggaguucaaccaccuggagaagcgcaucgagaaccugaacaagaagguggacgacggcuuccucgacaucuggaccuacaacgccgagcugcuggugcuccuggagaacgagcggacccuggacuaccacgacuccaacgucaagaaccucuacgagaaggugcgcagccagcugaagaacaacgccaaggagaucgggaacggcugcuucgaguucuaccacaagugcgacaacacgugcauggaguccgugaagaacgggaccuacgacuacccgaaguacagcgaggaggccaagcugaaccgggaggagaucgacggcgucaagcucgaguccacccgcaucuaccagauccuggccaucuacagcaccguggcgagcucccuggugcucgucgugagccugggggccaucuccuucuggaugugcagcaacggcucccugcagugccggaucugcaucuga

SEQ ID NO: 68722 - RNA, 1701 nt, Artificial Sequence
  derived and/or modified CDS sequence (opt1) from hemagglutinin__InfluenzaA__ADG21045
augaaggccauccuggugguccuccuguacaccuucaccacggccaacgcggacacccugugcaucggcuaccacgccaacaacagcaccgacaccguggacacggugcucgagaagaacgucaccgugacccacuccgugaaccugcuggaggacaagcacaacgggaagcucugcaagcugcgcggcgucgcgccccugcaccucgggaagugcaacaucgccggcuggauccuggggaacccggagugcgagagccuguccaccgccagcuccuggagcuacaucguggagacguccagcuccgacaacgggaccugcuaccccggcgacuucaucgacuacgaggagcuccgggagcagcugagcuccgugagcuccuucgagcgcuucgagaucuuccccaagaccagcuccuggcccaaccacgacagcaacaagggcgucaccgccgccugcccgcacgccggcgccaaguccuucuacaagaaccugaucuggcucgugaagaaggggaacagcuaccccaagcuguccaagagcuacaucaacgacaagggcaaggaggugcugguccucugggggauccaccaccccagcacguccgcggaccagcagagccuguaccagaacgccgacgccuacguguucgugggcaccucccgguacagcaagaaguucaagcccgagaucgccauccgcccgaagguccgggagcaggagggccgcaugaacuacuacuggacccugguggagcccggggacaagaucaccuucgaggccacgggcaaccucguggucccccgguacgcguucgccauggagcgcaacgccggguccggcaucaucaucagcgacacccccgugcacgacugcaacacgaccugccagaccccgaagggcgccaucaacaccucccugcccuuccagaacauccacagcaucaccaucgggaagugccccaaguacgugaaguccaccaagcugcggcucgccacgggccugcgcaacguccccagcauccagucccgggggcuguucggcgcgaucgccggguucaucgagggcggcuggaccgggaugguggacggcugguacggguaccaccaccagaacgagcagggcagcggguacgccgccgaccucaaguccacccagaacgccaucgacgagaucaccaacaaggugaacagcgucaucgagaagaugaacacgcaguucaccgcggugggcaaggaguucaaccaccuggagaagcgcaucgagaaccugaacaagaaggucgacgacggcuuccucgacaucuggaccuacaacgccgagcugcuggugcuccuggagaacgagcggacccuggacuaccacgacuccaacgugaagaaccucuacgagaagguccgcagccagcugaagaacaacgccaaggagaucgggaacggcugcuucgaguucuaccacaagugcgacaacacgugcauggaguccgugaagaacgggaccuacgacuacccgaaguacagcgaggaggccaagcugaaccgggaggagaucgacggcgugaagcucgaguccacccgcaucuaccagauccuggccaucuacagcaccgucgcgagcucccuggugcucguggucagccugggggccaucuccuucuggaugugcagcaacggcucccugcagugccggaucugcaucuga

SEQ ID NO: 68723 - RNA, 1701 nt, Artificial Sequence; identical to SEQ ID NO: 68722
  derived and/or modified CDS sequence (opt1) from hemagglutinin__InfluenzaA__ADG21046

SEQ ID NO: 68724 - RNA, 1701 nt, Artificial Sequence; identical to SEQ ID NO: 67857
  derived and/or modified CDS sequence (opt1) from hemagglutinin__InfluenzaA__ADG21048

SEQ ID NO: 68725 - RNA, 1701 nt, Artificial Sequence
  derived and/or modified CDS sequence (opt1) from hemagglutinin__InfluenzaA__ADG21049
augaaggccauccuggugguccuccuguacaccuucgccaccgcgaacgccgacacgcugugcaucggcuaccacgccaacaacagcaccgacaccguggacaccgugcucgagaagaacgucacggugacccacuccgugaaccugcuggaggacaagcacaacgggaagcucugcaagcugcgcggcgucgcgccccugcaccucgggaagugcaacaucgccggcuggauccuggggaacccggagugcgagagccuguccaccgccagcuccuggagcuacaucguggagaccuccagcuccgacaacggcacgugcuaccccggcgacuucaucgacuacgaggagcuccgggagcagcugagcuccgugagcuccuucgagcgcuucgagaucuuccccaagaccagcuccuggcccaaccacgacagcaacaagggggucaccgccgccugcccgcacgccggcgcgaaguccuucuacaagaaccugaucuggcucgugaagaaggggaacagcuaccccaagcuguccaagagcuacaucaacgacaagggcaaggaggugcugguccucugggggauccaccaccccagcaccuccgccgaccagcagagccuguaccagaacgccgacgccuacguguucgugggcacgucccgguacagcaagaaguucaagcccgagaucgccauccgcccgaagguccggaaccaggagggccgcaugaacuacuacuggacccugguggagcccggggacaagaucaccuucgaggcgaccggcaaccucguggucccccgguacgccuucgccauggagcgcaacgccggguccggcaucaucaucagcgacacgcccgugcacgacugcaacacgaccugccagaccuccaagggcgccaucaacaccagccugccguuccagaacauccaccccaucaccaucgggaagugccccaaguacgugaaguccaccaagcugcggcucgcgaccggccugcgcaacauccccagcauccagucccgggggcuguucggcgccaucgccggguucaucgagggcggcuggacggggauggucgacggcugguacggguaccaccaccagaacgagcagggcagcggguacgccgccgaccucaaguccacccagaacgcgaucgacgagaucaccaacaaggugaacagcgugaucgagaagaugaacacccaguucacggccgucggcaaggaguucaaccaccuggagaagcgcaucgagaaccugaacaagaagguggacgacggcuuccucgacaucuggaccuacaacgccgagcugcugguccuccuggagaacgagcggacccuggacuaccacgacuccaacgugaagaaccucuacgagaaggugcgcagccagcugaagaacaacgccaaggagaucgggaacggcugcuucgaguucuaccacaagugcgacaacacgugcauggaguccgucaagaacgggaccuacgacuacccgaaguacagcgaggaggccaagcugaaccgggaggagaucgacggcgugaagcucgaguccacccgcaucuaccagauccuggcgaucuacagcaccguggccagcucccugguccucguggugagccugggggccaucuccuucuggaugugcagcaacggcucccugcagugccggaucugcaucuga

SEQ ID NO: 68726 - RNA, 1701 nt, Artificial Sequence; identical to SEQ ID NO: 67046
  derived and/or modified CDS sequence (opt1) from hemagglutinin__InfluenzaA__ADG21122

SEQ ID NO: 68727 - RNA, 1701 nt, Artificial Sequence; identical to SEQ ID NO: 67857
  derived and/or modified CDS sequence (opt1) from hemagglutinin__InfluenzaA__ADG21123

SEQ ID NO: 68728 - RNA, 1701 nt, Artificial Sequence; identical to SEQ ID NO: 66693
  derived and/or modified CDS sequence (opt1) from hemagglutinin__InfluenzaA__ADG21124

SEQ ID NO: 68729 - RNA, 1701 nt, Artificial Sequence
  derived and/or modified CDS sequence (opt1) from hemagglutinin__InfluenzaA__ADG21125
augaaggccauccuggugguccuccuguacaccuucgccaccgcgaacgccgacacgcugugcaucggcuaccacgccaacaacagcaccgacaccguggacaccgugcucgagaagaacgucacggugacccacuccgugaaccugcuggaggacaagcacaacgggaagcucugcaagcugcgcggcgucgcgccccugcaccucgggaagugcaacaucgccggcuggauccuggggaacccggagugcgagagccuguccaccgccagcuccuggagcuacaucguggagaccuccagcuccgacaacggcacgugcuaccccggcgacuucaucgacuacgaggagcuccgggagcagcugagcuccgugagcuccuucaagcgcuucgagaucuuccccaagaccagcuccuggcccaaccacgacagcaacaagggggucaccgccgccugcccgcacgccggcgcgaaguccuucuacaagaaccugaucuggcucgugaagaaggggaacagcuaccccaagcuguccaagagcuacaucaacgacaagggcaaggaggugcugguccucugggggauccaccaccccagcaccuccgccgaccagcagagccuguaccagaacgccgacgccuacguguucgugggcacgucccgguacagcaagaaguucaagcccgagaucgccauccgcccgaagguccgggaccaggagggccgcaugaacuacuacuggacccugguggagcccggggacaagaucaccuucgaggcgaccggcaaccucguggucccccgguacgccuucgccauggagcgcaacgccggguccggcaucaucaucagcgacacgcccgugcacgacugcaacacgaccugccagaccccgaagggcgccaucaacaccucccugcccuuccagaacauccaccccaucaccaucgggaagugccccaaguacgucaagagcaccaagcugcggcucgcgaccggccugcgcaacgugccguccauccagagccgggggcuguucggcgccaucgccggguucaucgagggcggcuggacggggaugguggacggcugguacggguaccaccaccagaacgagcagggcuccggguacgccgccgaccucaagagcacccagaacgcgaucgacgagaucaccaacaaggugaacuccgucaucgagaagaugaacacccaguucacggccgugggcaaggaguucaaccaccuggagaagcgcaucgagaaccugaacaagaaggucgacgacggcuuccucgacaucuggaccuacaacgccgagcugcuggugcuccuggagaacgagcggacccuggacuaccacgacagcaacgugaagaaccucuacgagaagguccgcucccagcugaagaacaacgccaaggagaucgggaacggcugcuucgaguucuaccacaagugcgacaacacgugcauggagagcgugaagaacgggaccuacgacuaccccaaguacuccgaggaggccaagcugaaccgggaggagaucgacggcgugaagcucgagagcacccgcaucuaccagauccuggcgaucuacuccaccgucgccagcagccuggugcucguggucucccugggggccaucagcuucuggaugugcuccaacggcagccugcagugccggaucugcaucuga

SEQ ID NO: 68730 - RNA, 1701 nt, Artificial Sequence; identical to SEQ ID NO: 66680
  derived and/or modified CDS sequence (opt1) from hemagglutinin__InfluenzaA__ADG21126

SEQ ID NO: 68731 - RNA, 1701 nt, Artificial Sequence; identical to SEQ ID NO: 66680
  derived and/or modified CDS sequence (opt1) from hemagglutinin__InfluenzaA__ADG21127

SEQ ID NO: 68732 - RNA, 1701 nt, Artificial Sequence; identical to SEQ ID NO: 66680
  derived and/or modified CDS sequence (opt1) from hemagglutinin__InfluenzaA__ADG21128

SEQ ID NO: 68733 - RNA, 1701 nt, Artificial Sequence; identical to SEQ ID NO: 66680
  derived and/or modified CDS sequence (opt1) from hemagglutinin__InfluenzaA__ADG21129

SEQ ID NO: 68734 - RNA, 1701 nt, Artificial Sequence; identical to SEQ ID NO: 66693
  derived and/or modified CDS sequence (opt1) from hemagglutinin__InfluenzaA__ADG21130

SEQ ID NO: 68735 - RNA, 1701 nt, Artificial Sequence; identical to SEQ ID NO: 66680
  derived and/or modified CDS sequence (opt1) from hemagglutinin__InfluenzaA__ADG21131

SEQ ID NO: 68736 - RNA, 1701 nt, Artificial Sequence; identical to SEQ ID NO: 66680
  derived and/or modified CDS sequence (opt1) from hemagglutinin__InfluenzaA__ADG21132

SEQ ID NO: 68737 - RNA, 1701 nt, Artificial Sequence; identical to SEQ ID NO: 66680
  derived and/or modified CDS sequence (opt1) from hemagglutinin__InfluenzaA__ADG21133

SEQ ID NO: 68738 - RNA, 1701 nt, Artificial Sequence; identical to SEQ ID NO: 66680
  derived and/or modified CDS sequence (opt1) from hemagglutinin__InfluenzaA__ADG21134

SEQ ID NO: 68739 - RNA, 1701 nt, Artificial Sequence; identical to SEQ ID NO: 66680
  derived and/or modified CDS sequence (opt1) from hemagglutinin__InfluenzaA__ADG21135

SEQ ID NO: 68740 - RNA, 1701 nt, Artificial Sequence; identical to SEQ ID NO: 66680
  derived and/or modified CDS sequence (opt1) from hemagglutinin__InfluenzaA__ADG21136

SEQ ID NO: 68741 - RNA, 1701 nt, Artificial Sequence; identical to SEQ ID NO: 66680
  derived and/or modified CDS sequence (opt1) from hemagglutinin__InfluenzaA__ADG21137

SEQ ID NO: 68742 - RNA, 1701 nt, Artificial Sequence; identical to SEQ ID NO: 66680
  derived and/or modified CDS sequence (opt1) from hemagglutinin__InfluenzaA__ADG21138

SEQ ID NO: 68743 - RNA, 1701 nt, Artificial Sequence; identical to SEQ ID NO: 66680
  derived and/or modified CDS sequence (opt1) from hemagglutinin__InfluenzaA__ADG21139

SEQ ID NO: 68744 - RNA, 1701 nt, Artificial Sequence
  derived and/or modified CDS sequence (opt1) from hemagglutinin__InfluenzaA__ADG21140
augaaggccauccuggugguccuccuguacaccuucgccaccgcgaacgccgacacgcugugcaucggcuaccacgccaacaacagcaccgacaccguggacaccgugcucgagaagaacgucacggugacccacuccgugaaccugcuggaggacaagcacaacgggaagcucugcaagcugcgcggcgucgcgccccugcaccucgggaagugcaacaucgccggcuggauccuggggaacccggagugcgagagccuguccaccgccagcuccuggagcuacaucguggagaccuccagcuccgacaacggcacgugcuaccccggcgacuucaucgacuacgaggagcuccgggagcagcugagcuccgugagcuccuucgagcgcuucgagaucuuccccaagaccagcuccuggcccaaccacgacagcaacaagggggucaccgccgccugcccgcacgccggcgcgaaguccuucuacaagaaccugaucuggcucgugaagaaggggaacagcuaccccaagcuguccaagagcuacaucaacgacaagggcaaggaggugcugaugcucugggggauccaccaccccagcaccuccgccgaccagcagagccuguaccagaacgccgacgccuacgucuucgugggcuccagccgguacuccaagaaguucaagcccgagaucgccauccgcccgaaggugcgggaccaggagggccgcaugaacuacuacuggacgcuggucgagcccggggacaagaucaccuucgaggcgaccggcaaccucguggugccccgguacgccuucgccauggagcgcaacgccgggagcggcaucaucaucuccgacacccccguccacgacugcaacacgaccugccagaccccgaagggcgccaucaacaccagccugcccuuccagaacauccaccccaucacgaucgggaagugccccaaguacgugaaguccaccaagcugcggcucgcgaccggccugcgcaacgugccgagcauccagucccgggggcuguucggcgccaucgccggguucaucgagggcggcuggaccgggauggucgacggcugguacggguaccaccaccagaacgagcagggcagcggguacgccgccgaccucaaguccacgcagaacgcgaucgacgagaucaccaacaaggugaacagcgugaucgagaagaugaacacccaguucaccgccgucggcaaggaguucaaccaccuggagaagcgcaucgagaaccugaacaagaagguggacgacggcuuccucgacaucuggacguacaacgccgagcugcugguccuccuggagaacgagcggacccuggacuaccacgacuccaacgugaagaaccucuacgagaaggugcgcagccagcugaagaacaacgccaaggagaucgggaacggcugcuucgaguucuaccacaagugcgacaacacgugcauggaguccgucaagaacgggaccuacgacuaccccaaguacagcgaggaggccaagcugaaccgggaggagaucgacggcgugaagcucgaguccacccgcaucuaccagauccuggcgaucuacagcaccguggccagcucccugguccucguggugagccugggggccaucuccuucuggaugugcagcaacggcucccugcagugccggaucugcaucuga

SEQ ID NO: 68745 - RNA, 1701 nt, Artificial Sequence; identical to SEQ ID NO: 66680
  derived and/or modified CDS sequence (opt1) from hemagglutinin__InfluenzaA__ADG21141

SEQ ID NO: 68746 - RNA, 1701 nt, Artificial Sequence
  derived and/or modified CDS sequence (opt1) from hemagglutinin__InfluenzaA__ADG21142
augaaggccauccuggugguccuccuguacaccuucgccaccgcgaacgccgacacgcugugcaucggcuaccacgccaacaacagcaccgacaccguggacaccgugcucgagaagaacgucacggugacccacuccgugaaccugcuggaggacaagcacaacgggaagcucugcaagcugcgcggcgucgcgccccugcaccucgggaagugcaacaucgccggcuggauccuggggaacccggagugcgagagccuguccaccgccagcuccuggagcuacaucguggagaccuccagcuccgacaacggcacgugcuaccccggcgacuucaucgacuacgaggagcuccgggagcagcugagcuccgugagcuccuucgagcgcuucgagaucuuccccaagaccagcuccuggcccaaccacgacagcaacaagggggucaccgccgccugcccgcacgccggcgagaaguccuucuacaagaaccugaucuggcucgugaagaaggggaacagcuaccccaagcuguccaagagcuacaucaacgacaagggcaaggaggugcugguccucugggggauccaccaccccagcaccuccgcggaccagcagagccuguaccagaacgccgacgccuacguguucgugggcuccagccgguacuccaagaaguucaagcccgagaucgccauccgcccgaagguccgggaccaggagggccgcaugaacuacuacuggacgcugguggagcccggggacaagaucaccuucgaggccaccggcaaccucguggucccccgguacgcguucgccauggagcgcaacgccgggagcggcaucaucaucuccgacacccccgugcacgacugcaacacgaccugccagaccccgaagggcgccaucaacaccagccugcccuuccagaacauccaccccaucacgaucgggaagugccccaaguacgugaaguccaccaagcugcggcucgccaccggccugcgcaacgucccgagcauccagucccgggggcuguucggcgcgaucgccggguucaucgagggcggcuggaccgggaugguggacggcugguacggguaccaccaccagaacgagcagggcagcggguacgccgccgaccucaaguccacgcagaacgccaucgacgagaucaccaacaaggugaacagcgucaucgagaagaugaacacccaguucaccgcggugggcaaggaguucaaccaccuggagaagcgcaucgagaaccugaacaagaaggucgacgacggcuuccucgacaucuggacguacaacgccgagcugcuggugcuccuggagaacgagcggacccuggacuaccacgacuccaacgugaagaaccucuacgagaagguccgcagccagcugaagaacaacgccaaggagaucgggaacggcugcuucgaguucuaccacaagugcgacaacacgugcauggaguccgugaagaacgggaccuacgacuaccccaaguacagcgaggaggccaagcugaaccgggaggagaucgacggcgugaagcucgaguccacccgcaucuaccagauccuggccaucuacagcaccgucgcgagcucccuggugcucguggucagccugggggccaucuccuucuggaugugcagcaacggcucccugcagugccggaucugcaucuga

SEQ ID NO: 68747 - RNA, 1701 nt, Artificial Sequence; identical to SEQ ID NO: 66680
  derived and/or modified CDS sequence (opt1) from hemagglutinin__InfluenzaA__ADG21143

SEQ ID NO: 68748 - RNA, 1701 nt, Artificial Sequence; identical to SEQ ID NO: 66680
  derived and/or modified CDS sequence (opt1) from hemagglutinin__InfluenzaA__ADG21144

SEQ ID NO: 68749 - RNA, 1701 nt, Artificial Sequence
  derived and/or modified CDS sequence (opt1) from hemagglutinin__InfluenzaA__ADG21145
augaaggccauccuggugguccuccuguacaccuucgccaccgcgaacgccgacacgcugugcaucggcuaccacgccaacaacagcaccgacaccguggacaccgugcucgagaagaacgucacggugacccacuccgugaaccugcuggaggacaagcacaacgggaagcucugcaagcugcgcggcgucgcgccccugcaccucgggaagugcaacaucgccggcuggauccuggggaacccggagugcgagagccuguccaccgccagcuccuggagcuacaucguggagaccuccagcuccgacaacggcacgugcuaccccggcgacuucaucgacuacgaggagcuccgggagcagcugagcuccgugagcuccuucgagcgcuucgagaucuuccccaagaccagcuccuggcccaaccacgacagcaacaagggggucaccgccgccugcccgcacgccggcgcgaaguccuucuacaagaaccugaucuggcucgugaagaaggggaacagcuaccccaagcuguccaucagcuacaucaacgacaagggcaaggaggugcugguccucugggggauccaccaccccagcaccuccgccgaccagcagagccuguaccagaacgccgacgccuacguguucgugggcuccagccgguacuccaagaaguucaagcccgagaucgccauccgcccgaagguccgggaccaggagggccgcaugaacuacuacuggacgcugguggagcccggggacaagaucaccuucgaggcgaccggcaaccucguggucccccgguacgccuucgccauggagcgcaacgccgggagcggcaucaucaucuccgacacccccgugcacgacugcaacacgaccugccagaccccgaagggcgccaucaacaccagccugcccuuccagaacauccaccccaucacgaucgggaagugccccaaguacgugaaguccaccaagcugcggcucgcgaccggccugcgcaacgucccgagcauccagucccgggggcuguucggcgccaucgccggguucaucgagggcggcuggaccgggaugguggacggcugguacggguaccaccaccagaacgagcagggcagcggguacgccgccgaccucaaguccacgcagaacgcgaucgacgagaucaccaacaaggugaacagcgucaucgagaagaugaacacccaguucaccgccgugggcaaggaguucaaccaccuggagaagcgcaucgagaaccugaacaagaaggucgacgacggcuuccucgacaucuggacguacaacgccgagcugcuggugcuccuggagaacgagcggacccuggacuaccacgacuccaacgugaagaaccucuacgagaagguccgcagccagcugaagaacaacgccaaggagaucgggaacggcugcuucgaguucuaccacaagugcgacaacacgugcauggaguccgugaagaacgggaccuacgacuaccccaaguacagcgaggaggccaagcugaaccgggaggagaucgacggcgugaagcucgaguccacccgcaucuaccagauccuggcgaucuacagcaccgucgccagcucccuggugcucguggucagccugggggccaucuccuucuggaugugcagcaacggcucccugcagugccggaucugcaucuga

SEQ ID NO: 68750 - RNA, 1701 nt, Artificial Sequence; identical to SEQ ID NO: 66680
  derived and/or modified CDS sequence (opt1) from hemagglutinin__InfluenzaA__ADG21146

SEQ ID NO: 68751 - RNA, 1701 nt, Artificial Sequence; identical to SEQ ID NO: 66680
  derived and/or modified CDS sequence (opt1) from hemagglutinin__InfluenzaA__ADG21147

SEQ ID NO: 68752 - RNA, 1701 nt, Artificial Sequence; identical to SEQ ID NO: 66693
  derived and/or modified CDS sequence (opt1) from hemagglutinin__InfluenzaA__ADG21148

SEQ ID NO: 68753 - RNA, 1701 nt, Artificial Sequence; identical to SEQ ID NO: 67794
  derived and/or modified CDS sequence (opt1) from hemagglutinin__InfluenzaA__ADG21149

SEQ ID NO: 68754 - RNA, 1701 nt, Artificial Sequence; identical to SEQ ID NO: 67857
  derived and/or modified CDS sequence (opt1) from hemagglutinin__InfluenzaA__ADG21150

SEQ ID NO: 68755 - RNA, 1701 nt, Artificial Sequence; identical to SEQ ID NO: 66680
  derived and/or modified CDS sequence (opt1) from hemagglutinin__InfluenzaA__ADG21151

SEQ ID NO: 68756 - RNA, 1701 nt, Artificial Sequence; identical to SEQ ID NO: 66680
  derived and/or modified CDS sequence (opt1) from hemagglutinin__InfluenzaA__ADG21152

SEQ ID NO: 68757 - RNA, 1701 nt, Artificial Sequence; identical to SEQ ID NO: 66693
  derived and/or modified CDS sequence (opt1) from hemagglutinin__InfluenzaA__ADG21153

SEQ ID NO: 68758 - RNA, 1701 nt, Artificial Sequence; identical to SEQ ID NO: 66680
  derived and/or modified CDS sequence (opt1) from hemagglutinin__InfluenzaA__ADG21154

SEQ ID NO: 68759 - RNA, 1701 nt, Artificial Sequence; identical to SEQ ID NO: 66680
  derived and/or modified CDS sequence (opt1) from hemagglutinin__InfluenzaA__ADG21155

SEQ ID NO: 68760 - RNA, 1701 nt, Artificial Sequence; identical to SEQ ID NO: 67857
  derived and/or modified CDS sequence (opt1) from hemagglutinin__InfluenzaA__ADG21156

SEQ ID NO: 68761 - RNA, 1701 nt, Artificial Sequence; identical to SEQ ID NO: 67865
  derived and/or modified CDS sequence (opt1) from hemagglutinin__InfluenzaA__ADG21158

SEQ ID NO: 68762 - RNA, 1701 nt, Artificial Sequence
  derived and/or modified CDS sequence (opt1) from hemagglutinin__InfluenzaA__ADG21159
augaaggccauccuggugguccuccuguacaccuucgccaccgcgaacgccgacacgcugugcaucggcuaccacgccaacaacagcaccgacaccguggacaccgugcucgagaagaacgucacggugacccacuccgugaaccugcuggaggacaagcacaacgggaagcucugcaagcugcgcggcgucgcgccccugcaccucgggaagugcaacaucgccggcuggauccuggggaacccggagugcgagagccuguccaccgccagcuccuggagcuacaucguggagaccuccagcuccgacaacggcacgugcuaccccggcgacuucaucgacuacgaggagcuccgggagcagcugagcuccgugagcuccuucgagcgcuucgagaucuuccccaagaccagcuccuggcccaaccacgacagcaacaagggggucaccgccgccugcccgcacgccggcgcgaaguccuucuacaagaaccugaucuggcucgugaagaaggggaacagcuaccccaagcuguccaagagcuacaucaacgacaagggcaaggaggugcugguccucugggggauccaccaccccagcaccuccgccgaccagcagagccuguaccagaacgccgacgccuacguguucgugggcacgucccgguacagcaagaaguucaagcccgagaucgccauccgcccgaagguccgggaccaggagggccgcaugaacuacuacuggacccugguggagcccggggacaagaucaccuucgaggcgaccggcaaccucguggucccccgguacgccuucgccauggagcgcaacgccggguccggcaucaucaucagcgacacgcccgugcacgacugcaacacgaccugccagaccccgaagggcgccaucaacaccucccugcccuuccagaacauccaccccaucaccaucgggaagugccccaaguacgucaagagcaccaagcugcggcucgcgaccggccugcgcaacgugccguccauccagagccgggggcuguucggcgccaucgccggguucaucgagggcggcuggacggggaugguggacggcugguacggguaccaccaccagaacgagcagggcuccggguacgccgccgaccucaagagcacccagaacgcgaucgacgagaucaccaacaaggugaacuccgucaucgagaagaugaacacccaguucacggccgugggcaaggaguucaaccaccuggagaagcgcaucgagaaccugaacaagaaggucgacgacggcuuccucgacaucuggaccuacaacgccgagcugcuggugcuccuggagaacgagcggacccuggacuaccacgacagcaacgugaagaaccucuacgagaagguccgcucccagcugaagaacaacgccaaggagaucgggaacggcugcuucgaguucuaccacaagugcgacaacacgugcauggagagcgugaagaacgggaccuacgacuaccccaaguacuccgaggaggccaagcugaaccgggaggagaucgacggcgugaagcucgagagcacccgcaucuaccagauccuggcgaucuacuccaccgucgccagcagccuggugcuccuggugucccugggggccaucagcuucuggaugugcuccaacggcagccuccagugccggaucugcaucuga

SEQ ID NO: 68763 - RNA, 1701 nt, Artificial Sequence; identical to SEQ ID NO: 67865
  derived and/or modified CDS sequence (opt1) from hemagglutinin__InfluenzaA__ADG21160

SEQ ID NO: 68764 - RNA, 1701 nt, Artificial Sequence
  derived and/or modified CDS sequence (opt1) from hemagglutinin__InfluenzaA__ADG21161
augaaggccauccuggugguccuccuguacaccuucgccaccgcgaacgccgacacgcugugcaucggcuaccacgccaacaacagcaccgacaccguggacaccgugcucgagaagaacgucacggugacccacuccgugaaccugcuggaggacaagcacaacgggaagcucugcaagcugcgcggcgucgcgccccugcaccucgggaagugcaacaucgccggcuggauccuggggaacccggagugcgagagccuguccaccgccagcuccuggagcuacaucguggagaccuccagcuccgacaacggcacgugcuaccccggcgacuucaucgacuacgaggagcuccgggagcagcugagcuccgugagcuccuucgagcgcuucgagaucuuccccaagaccagcuccuggcccaaccacgacagcaacaagggggucaccgccgccugcccgcacgccggcgcgaaguccuucuacaagaaccugaucuggcucgugaagaaggagaacagcuaccccaagcuguccaagagcuacaucaacgacaaggggaaggaggugcugguccucuggggcauccaccaccccagcaccuccgccgaccagcagagccuguaccagaacgccgacgccuacguguucguggggacgucccgguacagcaagaaguucaagcccgagaucgccauccgcccgaagguccgggaccaggagggccgcaugaacuacuacuggacccugguggagcccggcgacaagaucaccuucgaggcgaccgggaaccucguggucccccgguacgccuucgccauggagcgcaacgccggcuccgggaucaucaucagcgacacgcccgugcacgacugcaacacgaccugccagaccccgaagggcgccaucaacaccucccugcccuuccagaacauccaccccaucaccaucggcaagugccccaaguacgucaagagcaccaagcugcggcucgcgaccgggcugcgcaacgugccguccauccagagccggggccuguucggggccaucgccggcuucaucgagggcggguggacgggcaugguggacgggugguacggcuaccaccaccagaacgagcagggguccggcuacgccgccgaccucaagagcacccagaacgcgaucgacgagaucaccaacaaggugaacuccgucaucgagaagaugaacacccaguucacggccguggggaaggaguucaaccaccuggagaagcgcaucgagaaccugaacaagaaggucgacgacggcuuccucgacaucuggaccuacaacgccgagcugcuggugcuccuggagaacgagcggacccuggacuaccacaacagcaacgugaagaaccucuacgagaagguccgcucccagcugaagaacaacgccaaggagaucggcaacgggugcuucgaguucuaccacaagugcgacaacacgugcauggagagcgugaagaacggcaccuacgacuaccccaaguacuccgaggaggccaagcugaaccgggaggagaucgacggggugaagcucgagagcacccgcaucuaccagauccuggcgaucuacuccaccgucgccagcagccuggugcucguggucucccugggcgccaucagcuucuggaugugcuccaacgggagccugcagugccggaucugcaucuga

SEQ ID NO: 68765 - RNA, 1701 nt, Artificial Sequence
  derived and/or modified CDS sequence (opt1) from hemagglutinin__InfluenzaA__ADG21163
augaaggccauccuggugguccuccuguacaccuucgccaccgcgaacgccgacacgcugugcaucggcuaccacgccaacaacagcaccgacaccguggacaccgugcucgagaagaacgucacggugacccacuccgugaaccugcuggaggacaagcacaacgggaagcucugcaagcugcgcggcgucgcgccccugcaccucgggaagugcaacaucgccggcuggauccuggggaacccggagugcgagagccuguccaccgccagcuccuggagcuacaucguggagaccuccagcuccgacaacggcacgugcuaccccggcgacuucaucgacuacgaggagcuccgggagcagcugagcuccgugagcuccuucgagcgcuucgagaucuuccccaagaccagcuccuggcccaaccacgacagcaacaagggggucaccgccgccugcccgcacgccggcgcgaaguccuucuacaagaaccugaucuggcucgugaagaaggggaacagcuaccccaagcuguccaagagcuacaucaacgacaagggcaaggaggugcugguccucugggggauccaccaccccagcaccuccgccgaccagcagagccuguaccagaacgccgacgccuacguguucgugggcacgucccgguacagcaagaaguucaagcccgagaucgccauccgcccgaagguccgggaccaggagggccgcaugaacuacuacuggacccugguggagcccggggacaagaucaccuucgaggcgaccggcaaccucguggucccccgguacgccuucgccauggagcgcaacgccggguccggcaucaucaucagcgacacgcccgugcacgacugcaacacgaccugccagaccccgaagggcgccaucaacaccucccugcccuuccagaacgugcaccccaucaccaucgggaagugccccaaguacgucaagagcaccaagcugcggcucgcgaccggccugcgcaacgugccguccauccagagccgggggcuguucggcgccaucgccggguucaucgagggcggcuggacggggaugguggacggcugguacggguaccaccaccagaacgagcagggcuccggguacgccgccgaccucaagagcacccagaacgcgaucgacgagaucaccaacaaggucaacuccgugaucgagaagaugaacacccaguucacggccgucggcaaggaguucaaccaccuggagaagcgcaucgagaaccugaacaagaagguggacgacggcuuccucgacguguggaccuacaacgccgagcugcugguccuccuggagaacgagcggacccuggacuaccacgacagcaacgugaagaaccucuacgagaaggugcgcucccagcugaagaacaacgccaaggagaucgggaacggcugcuucgaguucuaccacaagugcgacaacacgugcauggagagcgucaagaacgggaccuacgacuaccccaaguacuccgaggaggccaagcugaaccgggaggagaucgacggcgugaagcucgagagcacccgcaucuaccagauccuggcgaucuacuccaccguggccagcagccugguccucguggugucccugggggccaucagcuucuggaugugcuccaacggcagccugcagugccggaucugcaucuga

SEQ ID NO: 68766 - RNA, 1701 nt, Artificial Sequence
  derived and/or modified CDS sequence (opt1) from hemagglutinin__InfluenzaA__ADG21165
augaaggccauccuggugguccuccuguacaccuucgccaccgcgaacgccgacacgcugugcaucggcuaccacgccaacaacagcaccgacaccguggacaccgugcucgagaagaacgucacggugacccacuccgugaaccugcuggaggacaagcacaacgggaagcucugcaagcugcgcggcaucgcgccccugcaccucgggaagugcaacaucgccggcuggauccuggggaacccggagugcgagagccuguccaccgcgagcuccuggagcuacaucgucgagaccuccagcuccgacaacggcacgugcuaccccggcgacuucaucgacuacgaggagcuccgggagcagcugagcuccgugagcuccuucaagcgcuucgagaucuuccccaagaccaacagcuggcccaaccacgacuccaacaagggggugaccgccgccugcccgcacgccggcgccaagagcuucuacaagaaccugaucuggcucgucaagaaggggaacuccuaccccaagcugagcaaguccuacaucaacgacaagggcaaggaggugcuggugcucugggggauccaccaccccagcaccagcgccgaccagcagucccuguaccagaacgccgacgccuacgucuucgugggcacgagcaaguacuccaagaaguucaagcccgagaucgccauccggccgaaggugcgcgaccaggagggccggaugaacuacuacuggacccuggucgagcccggggacaagaucaccuucgaggcgaccggcaaccucguggugccccgcuacgccuucgccauggagcggaacgccgggagcggcaucaucaucuccgacacgcccguccacgacugcaacacgaccugccagaccccgaagggcgccaucaacaccagccugcccuuccagaacauccaccccaucaccaucgggaagugccccaaguacgugaaguccaccaagcugcgccucgcgaccggccugcggaacgugccgagcauccagucccgcgggcuguucggcgccaucgccggguucaucgagggcggcuggacggggauggucgacggcugguacggguaccaccaccagaacgagcagggcagcggguacgccgccgaccucaaguccacccagaacgcgaucgacggcaucaccaacaaggugaacagcgugaucgagaagaugaacacccaguucacggccgucggcaaggaguucaaccaccuggagaagcggaucgagaaccugaacaagaagguggacgacggguuccucgacaucuggaccuacaacgccgagcugcugguccuccuggagaacgagcgcacccuggacuaccacgacuccaacgugaagaaccucuacgagaaggugcggagccagcugaagaacaacgccaaggagaucggcaacgggugcuucgaguucuaccacaagugcgacaacacgugcauggaguccgucaagaacggcaccuacgacuaccccaaguacagcgaggaggccaagcugaaccgcgaggagaucgacggggugaagcucgaguccacccggaucuaccagauccuggcgaucuacagcaccguggccuccagccugguccucguggugagccugggcgccaucuccuucuggaugugcagcaacggcucccugcagugccgcaucugcaucuga

SEQ ID NO: 68767 - RNA, 1701 nt, Artificial Sequence; identical to SEQ ID NO: 66680
  derived and/or modified CDS sequence (opt1) from hemagglutinin__InfluenzaA__ADG21166

SEQ ID NO: 68768 - RNA, 1701 nt, Artificial Sequence
  derived and/or modified CDS sequence (opt1) from hemagglutinin__InfluenzaA__ADG21168
augaaggccauccuggugguccuccuguacaccuucgccaccgcgaacgccgacacgcugugcaucggcuaccacgccaacaacagcaccgacaccguggacaccgugcucgagaagaacgucacggugacccacuccgugaaccugcuggaggacaagcacaacgggaagcucugcaagcugcgcggcgucgcgccccugcaccucgggaagugcaacaucgccggcuggauccuggggaacccggagugcgagagccuguccaccgccagcuccuggagcuacaucguggagaccuccagcuccgacaacggcacgugcuaccccggcgacuucaucgacuacgaggagcuccgggagcagcugagcuccgugagcuccuucgagcgcuucgagaucuuccccaagaccagcuccuggcccaaccacgacagcaacaagggggucaccgccgccugcccgcacgccggcgcgaaguccuucuacaagaaccugaucuggcucgugaagaaggggaacagcuaccccaagcuguccaaguucuacaucaacgacaagggcaaggaggugcugguccucugggggauccaccaccccagcaccagcgccgaccagcagucccuguaccagaacgccgacgccuacguguucgugggcagcucccgguacagcaagaaguucaagcccgagaucgccauccgcccgaagguccgggaccaggagggccgcaugaacuacuacuggacgcugguggagcccggggacaagaucaccuucgaggcgaccggcaaccucguggucccccgguacgccuucgccauggagcgcaacgccggguccggcaucaucaucagcgacacccccgugcacgacugcaacacgaccugccagaccccgaagggcgccaucaacaccucccugcccuuccagaacauccaccccaucacgaucgggaagugccccaaguacgucaagagcaccaagcugcggcucgcgaccggccugcgcaacgugccguccauccagagccgggggcuguucggcgccaucgccggguucaucgagggcggcuggaccgggaugguggacggcugguacggguaccaccaccagaacgagcagggcuccggguacgccgccgaccucaagagcacgcagaacgcgaucgacgagaucaccaacaaggugaacuccgucaucgagaagaugaacacccaguucaccgccgugggcaaggaguucaaccaccuggagaagcgcaucgagaaccugaacaagaaggucgacgacggcuuccucgacaucuggacguacaacgccgagcugcuggugcuccuggagaacgagcggacccuggacuaccacgacagcaacgugaagaaccucuacgagaagguccgcucccagcugaagaacaacgccaaggagaucgggaacggcugcuucgaguucuaccacaagugcgacaacacgugcauggagagcgugaagaacgggaccuacgacuaccccaaguacuccgaggaggccaagcugaaccgggaggagaucgacggcgugaagcucgagagcacccgcaucuaccagauccuggcgaucuacuccaccgucgccagcagccuggugcucguggucucccugggggccaucagcuucuggaugugcuccaacggcagccugcagugccggaucugcaucuga

SEQ ID NO: 68769 - RNA, 1701 nt, Artificial Sequence; identical to SEQ ID NO: 68722
  derived and/or modified CDS sequence (opt1) from hemagglutinin__InfluenzaA__ADG21169

SEQ ID NO: 68770 - RNA, 1701 nt, Artificial Sequence; identical to SEQ ID NO: 66680
  derived and/or modified CDS sequence (opt1) from hemagglutinin__InfluenzaA__ADG21170

SEQ ID NO: 68771 - RNA, 1701 nt, Artificial Sequence; identical to SEQ ID NO: 66680
  derived and/or modified CDS sequence (opt1) from hemagglutinin__InfluenzaA__ADG21173

SEQ ID NO: 68772 - RNA, 1701 nt, Artificial Sequence; identical to SEQ ID NO: 66693
  derived and/or modified CDS sequence (opt1) from hemagglutinin__InfluenzaA__ADG21174

SEQ ID NO: 68773 - RNA, 1701 nt, Artificial Sequence; identical to SEQ ID NO: 66693
  derived and/or modified CDS sequence (opt1) from hemagglutinin__InfluenzaA__ADG21175

SEQ ID NO: 68774 - RNA, 1701 nt, Artificial Sequence; identical to SEQ ID NO: 66680
  derived and/or modified CDS sequence (opt1) from hemagglutinin__InfluenzaA__ADG21176

SEQ ID NO: 68775 - RNA, 1701 nt, Artificial Sequence; identical to SEQ ID NO: 66680
  derived and/or modified CDS sequence (opt1) from hemagglutinin__InfluenzaA__ADG21177

SEQ ID NO: 68776 - RNA, 1701 nt, Artificial Sequence; identical to SEQ ID NO: 66680
  derived and/or modified CDS sequence (opt1) from hemagglutinin__InfluenzaA__ADG21178

SEQ ID NO: 68777 - RNA, 1701 nt, Artificial Sequence; identical to SEQ ID NO: 67046
  derived and/or modified CDS sequence (opt1) from hemagglutinin__InfluenzaA__ADG21179

SEQ ID NO: 68778 - RNA, 1701 nt, Artificial Sequence; identical to SEQ ID NO: 66680
  derived and/or modified CDS sequence (opt1) from hemagglutinin__InfluenzaA__ADG21180

SEQ ID NO: 68779 - RNA, 1701 nt, Artificial Sequence; identical to SEQ ID NO: 66680
  derived and/or modified CDS sequence (opt1) from hemagglutinin__InfluenzaA__ADG21181

SEQ ID NO: 68780 - RNA, 1701 nt, Artificial Sequence; identical to SEQ ID NO: 66680
  derived and/or modified CDS sequence (opt1) from hemagglutinin__InfluenzaA__ADG21182

SEQ ID NO: 68781 - RNA, 1701 nt, Artificial Sequence; identical to SEQ ID NO: 66680
  derived and/or modified CDS sequence (opt1) from hemagglutinin__InfluenzaA__ADG21183

SEQ ID NO: 68782 - RNA, 1701 nt, Artificial Sequence; identical to SEQ ID NO: 67857
  derived and/or modified CDS sequence (opt1) from hemagglutinin__InfluenzaA__ADG21184

SEQ ID NO: 68783 - RNA, 1701 nt, Artificial Sequence
  derived and/or modified CDS sequence (opt1) from hemagglutinin__InfluenzaA__ADG21185
augaaggccauccuggugguccuccuguacaccuucgccaccgcgaacgccgacacgcugugcaucggcuaccacgccaacaacagcaccgacaccguggacaccgugcucgagaagaacgucacggugacccacuccgugaaccugcuggaggacaagcacaacgggaagcucugcaagcugcgcggcgucgcgccccugcaccucgggaagugcaacaucgccggcuggauccuggggaacccggagugcgagagccuguccaccgccagcuccuggagcuacaucguggagaccuccagcuccgacaacggcacgugcuaccccggcgacuucaucgacuacgaggagcuccgggagcagcugagcuccgugagcuccuucgagcgcuucgagaucuuccccaagaccagcuccuggcccaaccacgacagcaacaagggggucaccgccgccugcccgcacgccggcgcgaaguccuucuacaagaaccugaucuggcucgugaagaaggggaacagcuaccccaagcuguccaagagcuacaucaacgacaagggcaaggaggugcugguccucugggggauccaccaccccagcaccuccgccgaccagcagagccuguaccagaacgccgacgccuacguguucgugggcacgucccgguacagcaagaaguucaagcccgagaucgccauccgcccgaagguccgggaccaggagggccgcaugaacuacuacuggacccuggugaagcccggggacaagaucaccuucgaggcgaccggcaaccucguggucccccgguacgccuucgccauggagcgcaacgccggguccggcaucaucaucagcgacacgcccgugcacgacugcaacacgaccugccagaccccgaagggcgccaucaacaccucccugcccuuccagaacauccaccccaucaccaucgggcggugccccaaguacgucaagagcaccaagcugcgccucgcgaccggccugcggaacgugccguccauccagagccgcgggcuguucggcgccaucgccggguucaucgagggcggcuggacggggaugguggacggcugguacggguaccaccaccagaacgagcagggcuccggguacgccgccgaccucaagagcacccagaacgcgaucgacgagaucaccaacaaggugaacuccgucaucgagaagaugaacacccaguucacggccgugggcaaggaguucaaccaccuggagaagcggaucgagaaccugaacaagaaggucgacgacggcuuccucgacaucuggaccuacaacgccgagcugcuggugcuccuggagaacgagcgcacccuggacuaccacgacagcaacgugaagaaccucuacgagaagguccggucccagcugaagaacaacgccaaggagaucgggaacggcugcuucgaguucuaccacaagugcgacaacacgugcauggagagcgugaagaacgggaccuacgacuaccccaaguacuccgaggaggccaagcugaaccgcgaggagaucgacggcgugaagcucgagagcacccggaucuaccagauccuggcgaucuacuccaccgucgccagcagccuggugcucguggucucccugggggccaucagcuucuggaugugcuccaacggcagccugcagugccgcaucugcaucuga

SEQ ID NO: 68784 - RNA, 1701 nt, Artificial Sequence; identical to SEQ ID NO: 68039
  derived and/or modified CDS sequence (opt1) from hemagglutinin__InfluenzaA__ADG21188

SEQ ID NO: 68785 - RNA, 1707 nt, Artificial Sequence
  derived and/or modified CDS sequence (opt1) from hemagglutinin__InfluenzaA__ADG21402
auggagaagaucgugcugcuccuggccaucgucagccuggugaaguccgaccagaucugcaucggcuaccacgccaacaacagcaccgagcaggucgacaccaucauggagaagaacgugacggugacccacgcgcaggacauccucgagaagacccacaacgggaagcugugcgaccuggacggcgugaagccccucauccugcgcgacugcuccgucgccggguggcugcucggcaacccgaugugcgacgaguuccugaacgugcccgaguggagcuacaucguggagaagaucaaccccgccaacgaccugugcuaccccgggaacuucaacgacuacgaggagcucaagcaccuccugucccggaucaaccacuucgagaagauccagaucauccccaagagcuccuggagcgaccacgaggccuccagcggcgucuccagcgccugcccguaccagggccgcuccagcuucuuccggaacgugguguggcugaucaagaaggacaacgcguaccccaccaucaagcgcuccuacaacaacacgaaccaggaggaccugcugguccucugggggauccaccaccccaacgacgccgccgagcagacccggcuguaccagaacccgaccaccuacaucagcgugggcacguccacccugaaccagcgccucgugcccaagaucgccacccggagcaaggucaacgggcaguccggccgcauggaguucuucuggaccauccucaagagcaacgacgcgaucaacuucgagagcaacgggaacuucaucgcccccgagaacgccuacaagaucgugaagaagggcgacuccacgaucaugaaguccgagcuggaguacggcaacugcaacaccaagugccagacccccaucggggccaucaacagcagcaugccguuccacaacauccacccccugaccaucggcgagugccccaaguacgugaaguccaaccggcugauccuggccacggggcuccgcaacagcccccagggcgagcggcgccggaagaagcgcggccuguucggggcgaucgccggcuucaucgagggcggguggcaggggauggucgacggcugguacggcuaccaccacuccaacgagcaggggagcggcuacgccgccgacaaggaguccacccagaaggccaucgacggggugaccaacaaggugaacagcaucaucgacaagaugaacacccaguucgaggcggucggccgggaguucaacaaccuggagcgccggaucgagaaccucaacaagaagauggaggacggguuccuggacguguggacguacaacgccgagcugcucgugcugauggagaacgagcgcacccuggacuuccacgacuccaacgucaagaaccucuacgacaaggugcggcugcagcugcgcgacaacgccaaggagcucggcaacggcugcuucgaguucuaccaccggugcgacaacgagugcauggagagcguccgcaacgggaccuacgacuacccgcaguacuccgaggaggcccgccugaagcgggaggagaucagcggcgugaagcuggaguccaucgggaccuaccagauccucagcaucuacuccacgguggccagcucccuggcgcuggccaucauggucgccggccucuuccuguggaugugcagcaacgggagccugcagugccgcaucugcaucuga

SEQ ID NO: 68786 - RNA, 1704 nt, Artificial Sequence
  derived and/or modified CDS sequence (opt1) from hemagglutinin__InfluenzaA__ADG21414
auggagaagaucgugcugcuccuggccaucgucagcaucgugaaguccgaccagaucugcaucggcuaccacgccaacaacagcaccgagcacguggacaccaucauggagaagaacgucacggugacccacgcgcaggacauccuggagaagacccacaacgggaagcucugcaaccuggacggcgugaagccccugauccuccgcgacugcuccgucgccggguggcugcugggcaacccgaugugcgacgaguuccucaacgugcccgaguggagcuacaucguggagaagaucaaccccgccaacgaccugugcuaccccgggaacuucaacgacuacgaggagcugaagcaccuccugucccggaucaaccacuucgagaagauccagaucaucccgaagaacagcugguccgaccacgaggccagcggcgucuccagcgccugccccuaccagggccgcuccagcuucuuccggaacgugguguggcugaccaagaagaacaacgcguaccccacgaucaagaaguccuacaacaacaccaaccaggaggaccuccugguccugugggggauccaccaccccaacgacggcgccgagcagacccgccucuaccagaacccgaccacguacaucagcguggggaccuccacccugaaccagcggcuggugcccaagaucgccacccgcagcaaggucaacggccaguccgggcggauggaguucuucuggacgauccucaagagcaacgacgccaucaacuucgaguccaacggcaacuucaucgcgcccgagaacgccuacaagaucgugaagaagggcgacagcaccaucaugaaguccgagcuggaguacgggaacugcaacaccaagugccagacccccaucggcgccaucaacagcagcaugccguuccacaacauccacccccugacgaucggggagugccccaaguacgugaaguccaaccgccucguccuggccaccggccugcggaacagcccccagggcgagcgccggcgcaagaagcggggccucuucggggccaucgcgggguucaucgagggcggguggcagggcaugguggacggcugguacggguaccaccacuccaacgagcagggcagcggguacgccgccgacaaggaguccacccagaaggccaucgacggcgugaccaacaaggucaacagcaucaucgacaagaugaacacgcaguucgaggccguggggcgcgaguucaacaaccuggagcggcgcaucgagaaccugaacaagaagauggaggacggcuuccucgacguguggaccuacaacgcggagcugcugguccucauggagaacgagcggacccuggacuuccacgacuccaacgugaagaaccuguacgacaagguccgccuccagcugcgggacaacgccaaggagcugggcaacgggugcuucgaguucuaccaccgcugcgacaacgagugcauggagagcgugcggaacggcaccuacgacuacccgcaguacuccgaggaggcccgccucaagcgcgaggagaucagcggggugaagcuggaguccaucggcacguaccagauccugagcaucuacuccaccgucgccagcucccucgcccuggcgaucaugguggccgggcuguuccucuggaugugcagcaacggcucccugcagugccggaucugcaucuga

SEQ ID NO: 68787 - RNA, 1704 nt, Artificial Sequence
  derived and/or modified CDS sequence (opt1) from hemagglutinin__InfluenzaA__ADG21416
auggagaagaucgugcugcuccuggccaucgucagcaucgugaaguccgaccagaucugcaucggcuaccacgccaacaacagcaccgagcaggucgacaccaucauggagaagaacgugacggugacccacgcgcaggacauccuggagaagacccacaacgggaagcucugcaaccuggacggcgugaagccccugauccuccgcgacugcuccgucgccggguggcugcugggcaacccgaugugcgacgaguuccucaacgugcccgaguggagcuacaucguggagaagaucaaccccgccaacgaccugugcuaccccgggaacuucaacgacuacgaggagcugaagcaccuccugucccggaucaaccacuucgagaagauccagaucaucccgaagaacagcugguccgaccacgaggccagcggcgucuccagcgccugccccuaccagggccgcuccagcuucuuccggaacgugguguggcugaccaagaagaacaacgcguaccccacgaucaagaaguccuacaacaacaccaaccaggaggaccuccugguccugugggggauccaccaccccaacgacgccgccgagcagaccggccucuaccagaacccgaccacguacaucagcguggggaccuccacccugaaccagcgccuggugcccaagaucgccacccggagcaaggucaacggccaguccgggcgcauggaguucuucuggacgauccucaagagcaacgacgugaucaacuucgaguccaacggcaacuucaucgcgcccgagaacgccuacaagaucgugaagaagggcgacagcaccaucaugaaguccgagcuggaguacgggaacugcaacaccaagugccagacccccaucggcgccaucaacagcagcaugccguuccacaacauccacccccugacgaucggggagugccccaaguacgucaaguccaaccggcucgugcuggccaccggccugcgcaacagcccccagggcgagcggcgccggaagaagcgcggccucuucggggccaucgcgggguucaucgagggcggguggcagggcaugguggacggcugguacggguaccaccacuccaacgagcagggcagcggguacgccgccgacaaggaguccacccagaaggccaucgacggcgucaccaacaaggugaacagcaucaucgacaagaugaacacgcaguucgaggccguggggcgggaguucaacaaccuggagcgccggaucgagaaccugaacaagaagauggaggacggcuuccucgacgucuggaccuacaacgcggagcugcuggugcucauggagaacgagcgcacccuggacuuccacgacuccaacgucaagaaccuguacgacaaggugcggcuccagcugcgcgacaacgccaaggagcugggcaacgggugcuucgaguucuaccaccggugcgacaacgagugcauggagagcgugcgcaacggcaccuacgacuacccgcaguacuccgaggaggcccggcucaagcgcgaggagaucagcggggucaagcuggaguccaucggcacguaccagauccugagcaucuacuccaccguggccagcucccucgcccuggcgaucaugguggccgggcuguuccucuggaugugcagcaacggcucccugcagugccgcaucugcaucuga

SEQ ID NO: 68788 - RNA, 1704 nt, Artificial Sequence
  derived and/or modified CDS sequence (opt1) from hemagglutinin__InfluenzaA__ADG21420
auggagaagaucgugcugcuccuggccaucgucagcaucgugaaguccgaccagaucugcaucggcuaccacgccaacaacagcaccgagcaggucgacaccaucauggagaagaacgugacggugacccacgcgcaggacauccuggagaagacccacaacgggaagcucugcaaccuggacggcgugaagccccugauccuccgcgacugcuccgucgccggguggcugcugggcaacccgaugugcgacgaguuccucaacgugcccgaguggagcuacaucguggagaagaucaaccccgccaacgaccugugcuaccccgggaacuucaacgacuacgaggagcugaagcaccuccugucccggaucaaccacuucgagaagauccagaucaucccgaagaacagcugguccgaccacgaggccagcggcgucuccagcgccugccccuaccagggccgcuccagcuucuuccggaacgugguguggcugaccaagaagaacaacgcguaccccacgaucaagaaguccuacaacaacaccaaccaggaggaccuccugguccugugggggauccaccaccccaacgacgccgccgagcagacccgccucuaccagaacccgaccacguacaucagcgugggcaccuccacccugaaccagcggcuggugcccaagaucgccacccgcagcaaggucaacgggcaguccggccggauggaguucuucuggacgauccucaagagcaacgacgcgaucaacuucgaguccaacgggaacuucaucgcccccgagaacgccuacaagaucgugaagaagggcgacagcaccaucaugaaguccgagcuggaguacggcaacugcaacaccaagugccagacccccaucggggccaucaacagcagcaugccguuccacaacauccacccccugacgaucggcgagugccccaaguacgugaaguccaaccgccucguccuggccaccgggcugcggaacagcccccagggcgagcgccggcgcaagaagcggggccucuucggggcgaucgccggcuucaucgagggcggguggcaggggaugguggacggcugguacggcuaccaccacuccaacgagcaggggagcggcuacgccgccgacaaggaguccacccagaaggccaucgacggggugaccaacaaggucaacagcaucaucgacaagaugaacacgcaguucgaggcggugggccgcgaguucaacaaccuggagcggcgcaucgagaaccugaacaagaagauggaggacggguuccucgacguguggaccuacaacgccgagcugcugguccucauggagaacgagcggacccuggacuuccacgacuccaacgugaagaaccuguacgacaagguccgccuccagcugcgggacaacgccaaggagcugggcaacggcugcuucgaguucuaccaccgcugcgacaacgagugcauggagagcgugcggaacgggaccuacgacuacccgcaguacuccgaggaggcccgccucaagcgcgaggagaucagcggcgugaagcuggaguccaucgggacguaccagauccugagcaucuacuccaccgucgccagcucccucgcgcuggccaucaugguggccggccuguuccucuggaugugcagcaacgggucccugcagugccggaucugcaucuga

SEQ ID NO: 68789 - RNA, 1704 nt, Artificial Sequence
  derived and/or modified CDS sequence (opt1) from hemagglutinin__InfluenzaA__ADG21422
auggagaagaucgugcugcuccuggccaucgucagccuggugaaguccgaccagaucugcaucggcuaccacgccaacaacagcaccgagcaggucgacaccaucauggagaagaacgugacggugacccacgcgcaggacauccucgagaagacccacaacgggaagcugugcaaccuggacggcgugaagccccucauccugcgcgacugcuccgucgccggguggcugcucggcaacccgaugugcgacgaguuccugaacgugcccgaguggagcuacaucguggagaagaucaaccccaccaacgaccugugcuaccccgggaacuucaacgacuacgaggagcucaagcaccuccugucccggaucaaccacuucgagaagauccagaucaucccgaagaacagcugguccgaccacgaggccagcggcgucuccagcgccugccccuaccagggccgcuccagcuucuuccggaacgugguguggcugacgaagaagaacaacgccuaccccaccaucaagcgcuccuacaacaacaccaaccaggaggaccugcugguccucugggggauccaccaccccaacgacgcggccgagcagacccggcuguaccagaacccgacgaccuacaucagcgugggcaccuccacccugaaccagcgccucgugcccaagaucgccacgcggagcaaggucaacgggcaguccggccgcauggaguucuucuggaccauccucaagagcaacgacgccaucaacuucgaguccaacgggaacuucaucgcgcccgagaacgccuacaagaucgugaagaagggcgacagcaccaucaugaaguccgagcuggaguacggcaacugcaacaccaagugccagacgcccaucggggccaucaacagcagcaugccguuccacaacauccacccccugaccaucggcgagugccccaaguacgugaaguccaaccggcugguccuggccaccgggcuccgcaacagcccccagggcgagcggcgccggaagaagcgcggccuguucggggccaucgcgggcuucaucgagggcggguggcaggggaugguggacggcugguacggcuaccaccacuccaacgagcaggggagcggcuacgccgccgacaaggaguccacccagaaggccaucgacggggugacgaacaaggucaacagcaucaucgacaagaugaacacccaguucgaggccgugggccgggaguucaacaaccuggagcgccggaucgagaaccucaacaagaagauggaggacggguuccuggacguguggaccuacaacgcggagcugcucguccugauggagaacgagcgcacccuggacuuccacgacuccaacgugaagaaccucuacgacaagguccggcugcagcugcgcgacaacgccaaggagcucggcaacggcugcuucgaguucuaccaccggugcgacaacgagugcauggagagcgugcgcaacgggacguacgacuacccgcaguacuccgaggaggcccgcagcaagcgggaggagaucuccggcgugaagcuggagagcaucgggaccuaccagauccuguccaucuacagcaccgucgccuccagccucgcccuggcgaucaugguggccggccuguuccucuggaugugcuccaacgggagccugcagugccgcaucugcaucuga

SEQ ID NO: 68790 - RNA, 1704 nt, Artificial Sequence
  derived and/or modified CDS sequence (opt1) from hemagglutinin__InfluenzaA__ADG21425
auggagaagaucgugcugcuccuggccaucgucagccuggugaaguccgaccagaucugcaucggcuaccacgccaacaacagcaccgagcaggucgacaccaucauggagaagaacgugacggugacccacgcgcaggacauccucgagaagacccacaacgggaagcugugcaaccuggacggcgugaagccccucauccugcgcgacugcuccgucgccggguggcugcucggcaacccgaugugcgacgaguuccugaacgugcccgaguggagcuacaucguggagaagaucaaccccgccaacgaccugugcuaccccgggaacuucaacgacuacgaggagcucaagcaccuccugucccggaucaaccacuucgagaagauccagaucaucccgaagaacagcugguccgaccacggcgccagcggcgucuccagcgccugccccuaccaggggcgcuccagcuucuuccggaacgugguguggcugaccaagaagaacaacgcguaccccacgaucaagaaguccuacaacaacaccaaccaggaggaccugcugguccucuggggcauccaccaccccaacgacgccgaggagcagacccgccuguaccagaacccgaccacguacaucagcguggggaccuccacccugaaccagcggcucgugcccaagaucgccacccgcagcaaggucaacggccaguccgggcggauggaguucuucuggacgauccucaagagcaacgacgccaucaacuucgaguccaacggcaacuucaucgcgcccgagaacgccuacaagaucgugaagaagggcgacagcaccaucaugaaguccgagcuggaguacgacaacugcaacaccaagugccagacccccaucggggccaucaacagcagcaugccguuccacaacauccacccccugacgaucggcgagugccccaaguacgugaaguccaacaagcugguccuggccaccgggcuccgcaacagcccccagggcgagaagcggcgcaagaagcggggccuguucggggccaucgcgggcuucaucgagggcggguggcaggggaugguggacggcugguacggcuaccaccacuccaacgagcaggggagcggcuacgccgccgacaaggaguccacccagaaggccaucgacggggugaccaacaaggucaacagcaucaucgacaagaugaacacgcaguucgaggccgugggccgcgaguucaacgcgcuggagcggcgcaucgagaaccucaacaagaagauggaggacggguuccuggacguguggaccuacaacgccgagcugcucguccugauggagaacgagcggacccuggacuuccacgacuccaacgugaagaaccucuacgacaagguccgccugcagcugcgggacaacgccaaggagcucggcaacggcugcuucgaguucuaccaccgcugcgacaacgagugcauggagagcgugcggaacgggaccuacgacuacccgcaguacuccgaggaggcccgccugaagcgggaggagaucagcggcgugaagcuggaguccaucgggacguaccagauccucagcaucuacuccaccgucgccagcucccuggcgcuggccaucaugguggccggccucagccuguggaugugcuccaacgggagccugcagugccgcaucugcaucuga

SEQ ID NO: 68791 - RNA, 1704 nt, Artificial Sequence
  derived and/or modified CDS sequence (opt1) from hemagglutinin__InfluenzaA__ADG21429
auggagaagaucgugcugcuccuggccaucgucagcaucgugaaguccgaccagaucugcaucggcuaccacgccaacaacagcaccgagcaggucgacaccaucauggagaagaacgugacggugacccacgcgcaggacauccuggagaagacccacaacgggaagcucugcaaccuggacggcguggagccccugauccuccgcgacugcuccgucgccggguggcugcugggcaacccgaugugcgacgaguuccucaacgugcccgaguggagcuacaucguggagaagaucaaccccgccaacgaccugugcuaccccgggaacuucaacgacuacgaggagcugaagcaccuccugucccggaucaaccacuucgagaagauccagaucaucccgaagaacagcugguccgaccacgaggccagcggcgucuccagcgccugccccuaccagggccgcuccagcuucuuccggaacgugguguggcugaccaagaagaacaacgcguaccccacgaucaagaaguccuacaacaacaccaaccaggaggaccuccugguccugugggggauccaccaccccaacgacgccgccgagcagacccgccucuaccagaacccgaccacguacaucagcgugggcaccuccacccugaaccagcggcuggugcccaagaucgccacccgcagcaaggucaacgggcaguccggccggauggaguucuucuggacgauccucaagagcaacgacgugaucaacuucgaguccaacgggaacuucaucgcgcccgagaacgccuacaagaucgugaagaagggcgacagcaccaucaugaaguccgagcuggaguacggcaacugcaacaccaagugccagacccccaucggggccaucaacagcagcaugccguuccacaacauccacccccugacgaucggcgagugccccaaguacgucaaguccgaccgccucgugcuggccaccgggcugcggaacagcccccagggcgagcgccggcgcaagaagcggggccucuucggggccaucgcgggcuucaucgagggcggguggcaggggaugguggacggcugguacggcuaccaccacuccaacgagcaggggagcggcuacgccgccgacaaggaguccacccagaaggccaucgacggggucaccaacaaggugaacagcaucaucgacaagaugaacacgcaguucgaggccgugggccgcgaguucaacaaccuggagcggcgcaucgagaaccugaacaagaagauggaggacggguuccucgacgucuggaccuacaacgcggagcugcuggugcucauggagaacgagcggacccuggacuuccacgacuccaacgucaagaaccuguacgacaaggugcgccuccagcugcgggacaacgccaaggagcugggcaacggcugcuucgaguucuaccaccgcugcgacaacgagugcauggagagcgugcggaacgggaccuacgacuacccgcaguacuccgaggaggcccgccucaagcgcgaggagaucagcggcgucaagcuggaguccaucgggacguaccagauccugagcaucuacuccaccguggccagcucccucgcccuggcgaucaugguggccggccugcuccuguggaugugcagcaacgggucccugcagugccggaucugcaucuga

SEQ ID NO: 68792 - RNA, 1704 nt, Artificial Sequence
  derived and/or modified CDS sequence (opt1) from hemagglutinin__InfluenzaA__ADG21437
auggagaagaucgugcugcuccuggccaucgucagcaucgugaaguccgaccagaucugcaucggcuaccacgccaacaacagcaccgagcaggucgacaccaucauggagaagaacgugacggugacccacgcgcaggacauccuggagaagacccacaacgggaagcucugcaaccuggacggcgugaagccccugauccuccgcgacugcuccgucgccggguggcugcugggcaacccgaugugcgacgaguuccucaacgugcccgaguggagcuacaucguggagaagaucaaccccgccaacgaccugugcuaccccgggaacuucaacgacuacgaggagcugaagcaccuccugucccggaucaaccacuucgagaagauccagaucaucccgaagaacagcugguccgaccacgaggccagcggcgucuccagcgccugccccuaccagggccgcuccagcuucuuccggaacgugguguggcugacccagaagaacaacgcguaccccacgaucaagaaguccuacaacaacaccaaccaggaggaccuccugguccugugggggauccaccaccccaacgacgccgccgagcagacccgccucuaccagaacccgaccacguacaucagcgugggcaccuccacccugaaccagcggcuggugcccaagaucgccacccgcagcaaggucaacgggcaguccggccggauggaguucuucuggacgauccucaagagcaacgacgugaucaacuucgaguccaacgggaacuucaucgcgcccgagaacgccuacaagaucgugaagaagggcgacagcaccaucaugaaguccgagcuggaguacggcaacugcaacaccaagugccagacccccaucggggccaucaacagcagcaugccguuccacaacauccacccccugacgaucggcgagugccccaaguacgucaaguccaaccgccucgugcuggccaccgggcugcggaacagcccccagggcgagcgccggcgcaagaagcggggccucuucggggccaucgcgggcuucaucgagggcggguggcaggggaugguggacggcugguacggcuaccaccacuccaacgagcaggggagcggcuacgccgccgacaaggaguccacccagaaggccaucgacggggucaccaacaaggugaacagcaucaucgacaagaugaacacgcaguucgaggccgugggccgcgaguucaacaaccuggagcggcgcaucgagaaccugaacaagaagauggaggacggguuccucgacgucuggaccuacaacgcggagcugcuggugcucauggagaacgagcggacccuggacuuccacgacuccaacgucaagaaccuguacgacaaggugcgccuccagcugcgggacaacgccaaggagcugggcaacggcugcuucgaguucuaccaccgcugcgacaacgagugcauggagagcgugcggaacgggaccuacgacuacccgcaguacuccgaggaggcccgccucaagcgcgaggagaucagcggcgucaagcuggaguccaucgggacguaccagauccugagcaucuacuccaccguggccagcucccucgcccuggcgaucaugguggccggccuguuccucuggaugugcagcaacgggucccugcagugccggaucugcaucuga

SEQ ID NO: 68793 - RNA, 1704 nt, Artificial Sequence
  derived and/or modified CDS sequence (opt1) from hemagglutinin__InfluenzaA__ADG21439
auggagaagaucgugcugcuccuggccaucgucagcaucgugaaguccgaccagaucugcaucggcuaccacgccaacaacagcaccgagcaggucgacaccaucauggagaagaacgugacggugacccacgcgcaggacauccuggagaagacccacaacgggaagcucugcaaccuggacggcgugaagccccugauccuccgcgacugcuccgucgccggguggcugcugggcaacccgaugugcgacgaguuccucaacgugcccgaguggagcuacaucguggagaagaucaaccccgccaacgaccugugcuaccccgggaacuucaacgacuacgaggagcugaagcaccuccugucccggaucaaccacuucgagaagauccagaucaucccgaagggcagcugguccgaccacgaggccagcggcgucuccagcgccugccccuaccaggggcgcuccagcuucuuccggaacgugguguggcugaccaagaagaacaacgcguaccccacgaucaagaaguccuacaacaacaccaaccaggaggaccuccugguccuguggggcauccaccaccccaacgacgccgccgagcagacccgccucuaccagaacccgaccacguacaucagcguggggaccuccacccugaaccagcggcuggugccccagaucgccacccgcagcaaggucaacggccaguccgggcggauggaguucuucuggacgauccucaagagcaacgacgcgaucaacuucgaguccaacggcaacuucaucgcccccgagaacgccuacaagaucgugaagaagggcgacagcaccaucaugaaguccgagcuggaguacgggaacugcaacaccaagugccagacccccaucggcgccaucaacagcagcaugccguuccacaacauccacccccugacgaucggggagugccccaaguacgugaaguccaaccgccucguccuggccaccggccugcggaacagcccccagggcgagcgccggcgcaagaagcggggccucuucggggcgaucgccggguucaucgagggcggguggcagggcaugguggacggcugguacggguaccaccacuccaacgagcagggcagcggguacgccgccgacaaggaguccacccagaaggccaucgacggcgugaccaacaaggucaacagcaucaucgacaagaugaacacgcaguucgaggcgguggggcgcgaguucaacaaccuggagcggcgcaucgagaaccugaacaagaagauggaggacggcuuccucgacguguggaccuacaacgccgagcugcugguccucauggagaacgagcggacccuggacuuccacgacuccaacgugaagaaccuguacgacaagguccgccuccagcugcgggacaacgccaaggagcugggcaacgggugcuucgaguucuaccaccgcugcgacaacgagugcauggagagcgugcggaacggcaccuacgacuacccgcaguacuccgaggaggcccgccucaagcgcgaggagaucagcggggugaagcuggaguccaucggcacguaccagauccugagcaucuacuccaccgucgccagcucccucgcgcuggccaucaugguggccgggcuguuccucuggaugugcagcaacggcucccugcagugccggaucugcaucuga

SEQ ID NO: 68794 - RNA, 1704 nt, Artificial Sequence
  derived and/or modified CDS sequence (opt1) from hemagglutinin__InfluenzaA__ADG21441
auggagaagaucgugcugcuccuggccaucgucagcaucgugaaguccgaccagaucugcaucggcuaccacgccaacaacagcaccgagcaggucgacaccaucauggagaagaacgugacggugacccacgcgcaggacauccuggagaagacccacaacgggaagcucugcaaccuggacggcgugaagccccugauccuccgcgacugcuccgucgccggguggcugcugggcaacccgaugugcgacgaguuccucaacgugcccgaguggagcuacaucguggagaagaucaaccccuccaacgaccugugcuaccccgggaacuucaacgacuacgaggagcugaagcaccuccugagccggaucaaccacuucgagaagauccagaucaucccgaagaacuccuggagcgaccacgaggccuccggcgucagcuccgccugccccuaccagggccgcagcuccuucuuccggaacgugguguggcugaccaagaagaacaacgccuaccccacgaucaagaaguccuacaacaacaccaaccaggaggaccuccugguccugugggggauccaccaccccaacgacgaggcggagcagaccagccucuaccagaacccgaccacguacaucagcgugggcaccuccacccugaaccagcgccuggugcccaagaucgccacccggagcaaggucaacgggcaguccggccgcauggaguucuucuggacgauccucaagagcaacgacgccaucaacuucgagagcaacgggaacuucaucgcccccgagaacgcguacaagaucgugaagaagggcgacuccaccaucaugaaguccgagcuggaguacggcaacugcaacaccaagugccagacccccaucggggccaucaacagcagcaugccguuccacaacauccacccccugacgaucggcgagugccccaaguacgugaaguccaaccggcucguccuggccaccgggcugcgcaacagcccccagggcgagcggcgccggaagaagcgcggccucuucggggccaucgccggcuucaucgagggcggguggcaggggaugguggacggcugguacggcuaccaccacuccaacgagcaggggagcggcuacgcggccgacaaggaguccacccagaaggccaucgacggggugaccaacaaggucaacagcaucaucgacaagaugaacacgcaguucgaggccgugggccgggaguucaacaaccuggagcgccggaucgagaaccugaacaagaagauggaggacggguuccucgacguguggaccuacaacgccgagcugcugguccucauggagaacgagcgcacccuggacuuccacgacuccaacgugaagaaccuguacgacaagguccggcuccagcugcgcgacaacgcgaaggagcugggcaacggcugcuucgaguucuaccaccggugcgacaacgagugcauggagagcgugcgcaacgggaccuacgacuacccgcaguacuccgaggaggcccggcucaagcgcgaggagaucagcggcgugaagcuggaguccaucgggacguaccagauccugagcaucuacuccaccgucgccagcucccucgcccuggccaucaugguggcgggccuguuccucuggaugugcagcaacgggagccugcagugccgcaucugcaucuga

SEQ ID NO: 68795 - RNA, 1704 nt, Artificial Sequence
  derived and/or modified CDS sequence (opt1) from hemagglutinin__InfluenzaA__ADG21443
auggagaagaucgugcugcuccuggccaucgucagcaucgugaaguccgaccagaucugcaucggcuaccacgccaacaacagcaccgagcaggucgacaccaucauggagaagaacgugacggugacccacgcgcaggacauccuggagaagacccacaacgggaagcucugcaaccuggacggcgugaagccccugauccuccgcgacugcuccgucgccggguggcugcugggcaacccgaugugcgacgaguuccucaacgugcccgaguggagcuacaucguggagaagaucaaccccaccaacgaccugugcuaccccgggaacuucaacgacuacgaggagcugaagcaccuccugucccggaucaaccacuucgagaagauccagaucaucccgaagaacagcugguccgaccacgaggccagcggcgucuccagcgccugccccuaccagggccgcuccagcuucuuccggaacgugguguggcugacgaagaagaacaacgccuaccccaccaucaagaaguccuacaacaacaccaaccaggaggaccuccugguccugugggggauccaccaccccaacgacgcggccgagcagacccgccucuaccagaacccgacgaccuacaucagcgugggcaccuccacccugaaccagcggcuggugcccaagaucgccacgcgcagcaaggucaacgggcaguccggccggauggaguucuucuggaccauccucaagagcaacgacgccaucaacuucgaguccaacgggaacuucaucgcgcccgagaacgccuacaagaucgugaagaagggcgacagcaccaucaugaaguccgagcuggaguacggcaacugcaacaccaagugccagacgcccaucggggccaucaacagcagcaugccguuccacaacauccacccccugaccaucggcgagugccccaaguacgugaaguccaaccgccucguccuggccaccgggcugcggaacagcccccagggcgagcgccggcgcaagaagcggggccucuucggggccaucgcgggcuucaucgagggcggguggcaggggaugguggacggcugguacggcuaccaccacuccaacgagcaggggagcggcuacgccgccgacaaggaguccacccagaaggccaucgacggggugacgaacaaggucaacagcaucaucgacaagaugaacacccaguucgaggccgugggccgcgaguucaacaaccuggagcggcgcaucgagaaccugaacaagaagauggaggacggguuccucgacguguggaccuacaacgcggagcugcugguccucauggagaacgagcggacccuggacuuccacgacuccaacgugaagaaccuguacgacaagguccgccuccagcugcgggacaacgccaaggagcugggcaacggcugcuucgaguucuaccaccgcugcgacaacgagugcauggagagcgugcggaacgggacguacgacuacccgcaguacuccgaggaggcccgccucaagcgcgaggagaucagcggcgugaagcuggaguccaucgggaccuaccagauccugagcaucuacuccaccgucgccagcucccucgcccuggcgaucaugguggccggccuguuccucuggaugugcagcaacgggucccugcagugccggaucugcaucuga

SEQ ID NO: 68796 - RNA, 1704 nt, Artificial Sequence
  derived and/or modified CDS sequence (opt1) from hemagglutinin__InfluenzaA__ADG21445
auggagaagaucgugcugcuccuggccaucgucagcaucgugaaguccgaccagaucugcaucggcuaccacgccaacaacagcaccgagcaggucgacaccaucauggagaagaacgugacggugacccacgcgcaggacauccuggagaagacccacaacgggaagcucugcaaccuggacggcgugaagccccugauccuccgcgacugcuccgucgccggguggcugcugggcaacccgaugugcgacgaguuccucaacgugcccgaguggagcuacaucguggagaagaucaaccccuccaacgaccugugcuaccccgggaacuucaacgacuacgaggagcugaagcaccuccugagccggaucaaccacuucgagaagauccagaucaucccgaagaacuccuggagcgaccacgaggccuccggcgucagcuccgccugccccuaccagggccgcagcuccuucuuccggaacgugguguggcugaccaagaagaacaacgccuaccccacgaucaagaaguccuacaacaacaccaaccaggaggaccuccugguccugugggggauccaccaccccaacgacgaggcggagcagacccgccucuaccagaacccgaccacguacaucuccgugggcaccagcacccugaaccagcggcuggugcccaagaucgccacccgcuccaaggucaacgggcagagcggccggauggaguucuucuggacgauccucaaguccaacgacgccaucaacuucgagagcaacgggaacuucaucgcccccgagaacgcguacaagaucgugaagaagggcgacagcaccaucaugaaguccgagcuggaguacggcaacugcaacaccaagugccagacccccaucggggccaucaacagcuccaugccguuccacaacauccacccccugacgaucggcgagugccccaaguacgucaagagcaaccgccucgugcuggccaccgggcugcggaacagcccccagggcgagcgccggcgcaagaagcggggccucuucggggccaucgccggcuucaucgagggcggguggcaggggaugguggacggcugguacggcuaccaccacagcaacgagcagggguccggcuacgcggccgacaaggagagcacccagaaggccaucgacggggugaccaacaaggucaacuccaucaucgacaagaugaacacgcaguucgaggccgugggccgcgaguucaacaaccuggagcggcgcaucgagaaccugaacaagaagauggaggacggguuccucgacguguggaccuacaacgccgagcugcugguccucauggagaacgagcggacccuggacuuccacgacagcaacgugaagaaccuguacgacaagguccgccuccagcugcgggacaacgcgaaggagcugggcaacggcugcuucgaguucuaccaccgcugcgacaacgagugcauggaguccgugcggaacgggaccuacgacuacccgcaguacagcgaggaggcccgccucaagcgcgaggagaucuccggcgugaagcuggagagcaucgggacguaccagauccuguccaucuacagcaccgucgccuccagccucgcccuggccaucaugguggcgggccuguuccucuggaugugcuccaacgggagccugcagugccggaucugcaucuga

SEQ ID NO: 68797 - RNA, 1701 nt, Artificial Sequence; identical to SEQ ID NO: 66935
  derived and/or modified CDS sequence (opt1) from hemagglutinin__InfluenzaA__ADG21912

SEQ ID NO: 68798 - RNA, 1701 nt, Artificial Sequence; identical to SEQ ID NO: 66693
  derived and/or modified CDS sequence (opt1) from hemagglutinin__InfluenzaA__ADG21913

SEQ ID NO: 68799 - RNA, 1701 nt, Artificial Sequence
  derived and/or modified CDS sequence (opt1) from hemagglutinin__InfluenzaA__ADG21914
augaaggccaucaucgugguccugcucuacaccuucgccaccgcgaacgccgacacgcugugcaucggcuaccacgccaacaacagcaccgacaccguggacaccgugcuggagaagaacgucacggugacccacuccgugaaccuccuggaggacaagcacaacgggaagcugugcaagcuccgcggcgucgcgccccugcaccuggggaagugcaacaucgccggcuggauccucgggaacccggagugcgagagccuguccaccgccagcuccuggagcuacaucguggagaccuccagcuccgacaacggcacgugcuaccccggcgacuucaucgacuacgaggagcugcgggagcagcucagcuccgugagcuccuucgagcgcuucgagaucuuccccaagaccagcuccuggcccaaccacgacagcaacaagggggucaccgccgccugcccgcacgccggcgcgaaguccuucuacaagaaccugaucuggcuggugaagaaggggaacagcuaccccaagcucuccaagagcuacaucaacgacaagggcaaggaggugcugguccugugggggauccaccaccccagcaccuccgccgaccagcagagccucuaccagaacgccgacgccuacguguucgugggcacgucccgguacagcaagaaguucaagcccgagaucgccauccgcccgaagguccgggaccaggagggccgcaugaacuacuacuggacccugguggagcccggggacaagaucaccuucgaggcgaccggcaaccugguggucccccgguacgccuucgccauggagcgcaacgccggguccggcaucaucaucagcgacacgcccgugcacgacugcaacacgaccugccagaccccgaagggcgccaucaacaccucccuccccuuccagaacauccaccccaucaccaucgggaagugccccaaguacgucaagagcaccaagcugcggcuggcgaccggccuccgcaacgugccguccauccagagccgggggcuguucggcgccaucgccggguucaucgagggcggcuggacggggaugguggacggcugguacggguaccaccaccagaacgagcagggcuccggguacgccgccgaccucaagagcacccagaacgcgaucgacgagaucaccaacaaggugaacuccgucaucgagaagaugaacacccaguucacggccgugggcaaggaguucaaccaccuggagaagcgcaucgagaaccugaacaagaaggucgacgacggcuuccuggacaucuggaccuacaacgccgagcuccuggugcugcucgagaacgagcggacccuggacuaccacgacagcaacgugaagaaccuguacgagaagguccgcucccagcucaagaacaacgccaaggagaucgggaacggcugcuucgaguucuaccacaagugcgacaacacgugcauggagagcgugaagaacgggaccuacgacuaccccaaguacuccgaggaggccaagcugaaccgggaggagaucgacggcgugaagcuggagagcacccgcaucuaccagauccucgcgaucuacuccaccgucgccagcagccuggugcugguggucucccucggggccaucagcuucuggaugugcuccaacggcagccugcagugccggaucugcaucuga

SEQ ID NO: 68800 - RNA, 1701 nt, Artificial Sequence
  derived and/or modified CDS sequence (opt1) from hemagglutinin__InfluenzaA__ADG21915
auggaggccauccuggugguccuccuguacaccuucgccaccgcgaacgccgacacgcugugcaucggcuaccacgccaacaacagcaccgacaccguggacaccgugcucgagaagaacgucacggugacccacuccgugaacauccuggaggacaagcacaacgggaagcugugcaagcuccgcggcgucgcgccccugcaccuggggaagugcaacaucgccggcuggauccucgggaacccggagugcgagagccuguccaccgccagcuccuggagcuacaucguggagaccuccagcuccgacaacggcacgugcuaccccggcgacuucaucgacuacgaggagcugcgggagcagcucagcuccgugagcuccuucgagcgcuucgagaucuuccccaagaccagcuccuggcccaaccacgacagcaacaagggggucaccgccgccugcccgcacgccggcgcgaaguccuucuacaagaaccugaucuggcuggugaagaaggggaacagcuaccccaagcucuccaagagcuacaucaacgacaagggcaaggaggugcugguccugugggggauccaccaccccagcaccuccgccgaccagcagagccucuaccagaacgccgacgccuacguguucgugggcuccagccgguacuccaagaaguucaagcccgagaucgccauccgcccgaagguccgggaccaggagggccgcaugaacuacuacuggacgcugguggagcccggggacaagaucaccuucgaggcgaccggcaaccugguggucccccgguacgccuucgccaucgagcgcaacgccgggagcggcaucaucaucuccgacacccccgugcacgacugcaacacgaccugccagaccccgaagggcgccaucaacaccagccuccccuuccacaacauccaccccaucacgaucgggaagugccccaaguacgugaaguccaccaagcugcggcuggcgaccggccuccgcaacgucccgagcauccagucccgggggcuguucggcgccaucgccggguucaucgagggcggcuggaccgggaugguggacggcugguacggguaccaccaccagaacgagcagggcagcggguacgccgccgaccugaaguccacgcagaacgcgaucgacgagaucaccaacaaggugaacagcgucaucgagaagaugaacacccaguucaccgccgugggcaaggaguucaaccaccucgagaagcgcaucgagaaccugaacaagaaggucgacgacggcuuccuggacaucuggacguacaacgccgagcuccuggugcugcucgagaacgagcggacccuggacuaccacgacuccaacgugaagaaccuguacgagaagguccgcagccagcucaagaacaacgccaaggagaucgggaacggcugcuucgaguucuaccacaagugcgacaacacgugcauggaguccgugaagaacgggaccuacgacuaccccaaguacagcgaggaggccaagcugaaccgggaggagaucgacggcgugaagcuggaguccacccgcaucuaccagauccucgcgaucuacagcaccgucgccagcucccuggugcugguggucagccucggggccaucuccuucuggaugugcagcaacggcucccugcagugccggaucugcaucuga

SEQ ID NO: 68801 - RNA, 1701 nt, Artificial Sequence; identical to SEQ ID NO: 66935
  derived and/or modified CDS sequence (opt1) from hemagglutinin__InfluenzaA__ADG21916

SEQ ID NO: 68802 - RNA, 1701 nt, Artificial Sequence; identical to SEQ ID NO: 66693
  derived and/or modified CDS sequence (opt1) from hemagglutinin__InfluenzaA__ADG21917

SEQ ID NO: 68803 - RNA, 1701 nt, Artificial Sequence; identical to SEQ ID NO: 68193
  derived and/or modified CDS sequence (opt1) from hemagglutinin__InfluenzaA__ADG21918

SEQ ID NO: 68804 - RNA, 1701 nt, Artificial Sequence
  derived and/or modified CDS sequence (opt1) from hemagglutinin__InfluenzaA__ADG21919
augaaggccauccuggugguccuccuguacaccuucgccaccgcgaacgccgacacgcugugcaucggcuaccacgccaacaacagcaccgacaccguggacaccgugcucgagaagaacgucacggugacccacuccgugaaccugcuggaggacaagcacaacgggaagcucugcaagcugcgcggcgucacgccccugcaccucgggaagugcaacaucgccggcuggauccuggggaacccggagugcgagagccuguccaccgccagcuccuggagcuacaucguggagaccuccagcuccgacaacgggaccugcuaccccggcgacuucaucgacuacgaggagcuccgggagcagcugagcuccgugagcuccuucgagcgcuucgagaucuuccccaagaccagcuccuggcccaaccacgacagcaacaagggcgucaccgcggccugcccgcacgccggcgccaaguccuucuacaagaaccugaucuggcucgugaagaaggggaacagcuaccccaagcuguccaagagcuacaucaacgacaagggcaaggaggugcugguccucugggggauccaccaccccagcacguccgcggaccagcagagccuguaccagaacgccgacgccuacguguucgugggcaccucccgguacagcaagaaguucaagcccgagaucgccauccgcccgaagguccgggaccaggagggccgcaugaacuacuacuggacccugguggagcccggggacaagaucaccuucgaggccacgggcaaccucguggucccccgguacgcguucgccauggagcgcaacgccggguccggcaucaucaucagcgacacccccgugcacgacugcaacacgaccugccagaccccgaagggcgccaucaacaccucccugcccuuccagaacauccaccccaucaccaucgggaagugccccaaguacgucaagagcaccaagcugcggcucgccacgggccugcgcaacgugccguccauccagagccgggggcuguucggcgcgaucgccggguucaucgagggcggcuggaccgggaugguggacggcugguacggguaccaccaccagaacgagcagggcuccggguacgccgccgaccucaagagcacccagaacgccaucgacgagaucaccaacaaggugaacuccgucaucgagaagaugaacacgcaguucaccgcggugggcaaggaguucaaccaccuggagaagcgcaucgagaaccugaacaagaagaucgacgacggcuuccucgacaucuggaccuacaacgccgagcugcugguccuccuggagaacgagcggacccuggacuaccacgacagcaacgugaagaaccucuacgagaaggugcgcucccagcugaagaacaacgccaaggagaucgggaacggcugcuucgaguucuaccacaagugcgacaacacgugcauggagagcgucaagaacgggaccuacgacuaccccaaguacuccgaggaggccaagcugaaccgggaggagaucgacggcgugaagcucgagagcacccgcaucuaccagauccuggccaucuacuccaccguggcgagcagccugguccucguggugucccugggggccaucagcuucuggaugugcuccaacggcagccugcagugccggaucugcaucuga

SEQ ID NO: 68805 - RNA, 1701 nt, Artificial Sequence; identical to SEQ ID NO: 66935
  derived and/or modified CDS sequence (opt1) from hemagglutinin__InfluenzaA__ADG21921

SEQ ID NO: 68806 - RNA, 1701 nt, Artificial Sequence; identical to SEQ ID NO: 66693
  derived and/or modified CDS sequence (opt1) from hemagglutinin__InfluenzaA__ADG21922

SEQ ID NO: 68807 - RNA, 1701 nt, Artificial Sequence
  derived and/or modified CDS sequence (opt1) from hemagglutinin__InfluenzaA__ADG21923
augaaggccauccuggugguccuccuguacaccuucgccaccgcgaacgccgacacgcugugcaucggcuaccacgccaacaacagcaccgacaccguggacaccgugcucgagaagaacgucacggugacccacuccgccaaccugcuggaggacaagcacaacgggaagcucugcaagcugcgcggcguggcgccccugcaccucgggaagugcaacaucgccggcuggauccuggggaacccggagugcgagagccuguccaccgccagcuccuggagcuacaucgucgagaccuccagcuccgacaacggcacgugcuaccccggcgacuucaucgacuacgaggagcuccgggagcagcugagcuccgugagcuccuucgagcgcuucgagaucuuccccaagaccagcuccuggcccaaccacgacagcaacaagggggugaccgccgccugcccgcacgcgggcgccaaguccuucuacaagaaccugaucuggcucgucaagaaggggaacagcuaccccaagcuguccaagagcuacaucaacgacaagggcaaggaggugcuggugcucugggggauccaccaccccagcaccuccgccgaccagcagagccuguaccagaacgccgacgccuacgucuucgugggcuccagcaaguacuccaagaaguucaagcccgagaucgcgauccggccgaaggugcgcgaccaggagggccggaugaacuacuacuggacgcuggucgagcccggggacaagaucaccuucgaggccaccggcaaccucguggugccccgcuacgccuucgccauggagcggaacgccgggagcggcaucaucaucuccgacacccccguccacgacugcaacacgaccugccagaccccgaagggcgcgaucaacaccagccugcccuuccacaacauccaccccaucacgaucgggaagugccccaaguacgugaaguccaccaagcugcgccucgccaccggccugcggaacgugccgagcauccagucccgcgggcuguucggcgccaucgccggguucaucgagggcggcuggaccgggauggucgacggcugguacggguaccaccaccagaacgagcagggcagcggguacgccgcggaccucaaguccacgcagaacgccaucgacgagaucaccaacaaggugaacagcgugaucgagaagaugaacacccaguucaccgccgucggcaaggaguucaaccaccuggagaagcggaucgagaaccugaacaagaagguggacgacggcuuccucgacaucuggacguacaacgccgagcugcugguccuccuggagaacgagcgcacccuggacuaccacgacuccaacgugaagaaccucuacgagaaggugcggagccagcugaagaacaacgccaaggagaucgggaacggcugcuucgaguucuaccacaagugcgacaacacgugcauggaguccgucaagaacgggaccuacgacuaccccaaguacagcgaggaggcgaagcugaaccgcgaggagaucgacggcgugaagcucgaguccacccggaucuaccagauccuggccaucuacagcaccguggccagcucccugguccucguggugagccugggggccaucuccuucuggaugugcagcaacggcucccugcagugccgcaucugcaucuga

SEQ ID NO: 68808 - RNA, 1701 nt, Artificial Sequence
  derived and/or modified CDS sequence (opt1) from hemagglutinin__InfluenzaA__ADG21924
auggaggccauccuggugguccuccuguacaccuucgccaccgcgaacgccgacacgcugugcaucggcuaccacgccaacaacagcaccgacaccguggacaccgugcucgagaagaacgucacggugacccacuccgugaaccugcuggagaacaagcacaacgggaagcucugcaagcugcgcggcgucgcgccccugcaccucgggaagugcaacaucgccggcuggauccuggggaacccggagugcgagagccuguccaccgccagcuccuggagcuacaucguggagaccuccagcuccgacaacggcacgugcuaccccggcgacuucaucgacuacgaggagcuccgggagcagcugagcuccgugagcuccuucgagcgcuucgagaucuuccccaagaccagcuccuggcccaaccacgacagcaacaagggggucaccgccgccugcccgcacgccggcgcgaaguccuucuacaagaaccugaucuggcucgugaagaaggggaacagcuaccccaagcuguccaagagcuacaucaacgacaagggcaaggaggugcugguccucugggggauccaccaccccagcaccuccgccgaccagcagagccuguaccagaacgccgacgccuacguguucgugggcuccagccgguacuccaagaaguucaagcccgagaucgccauccgcccgaagguccgggaccaggagggccgcaugaacuacuacuggacgcugguggagcccggggacaagaucaccuucgaggcgaccggcaaccucguggucccccgguacgccuucgccauggagcgcaacgccgggagcggcaucaucaucuccgacacccccgugcacgacugcaacacgaccugccagaccccgaagggcgccaucaacaccagccugcccuuccacaacauccaccccaucacgaucgggaagugccccaaguacgugaaguccaccaagcugcggcucgcgaccggccugcgcaacgucccgagcauccagucccgggggcuguucggcgccaucgccggguucaucgagggcggcuggaccgggaugguggacggcugguacggguaccaccaccagaacgagcagggcagcggguacgccgccgaccucaaguccacgcagaacgcgaucgacgagaucaccaacaaggugaacagcgucaucgagaagaugaacacccaguucaccgccgugggcaaggaguucaaccaccuggagaagcgcaucgagaaccugaacaagaaggucgacgacggcuuccucgacaucuggacguacaacgccgagcugcuggugcuccuggagaacgagcggacccuggacuaccacgacuccaacgugaagaaccucuacgagaagguccgcagccagcugaagaacaacgccaaggagaucgggaacggcugcuucgaguucuaccacaagugcgacaacacgugcauggaguccgugaagaacgggaccuacgacuaccccaaguacagcgaggaggccaagcugaaccgggaggagaucgacggcgugaagcucgaguccacccgcaucuaccagauccuggcgaucuacagcaccgucgccagcucccuggugcucguggucagccugggggccaucuccuucuggaugugcagcaacggcucccugcagugccggaucugcaucuga

SEQ ID NO: 68809 - RNA, 1701 nt, Artificial Sequence
  derived and/or modified CDS sequence (opt1) from hemagglutinin__InfluenzaA__ADG21925
augaaggccauccuggugguccuccuguacaccuucgccaccgcgaacgccgacacgcugugcaucggcuaccacgccaacaacagcaccgacaccguggacaccgugcucgagaagaacgucacggugacccacuccgugaaccugcuggaggacaagcacaacgggaagcucugcaagcugcgcggcgucgcgccccugcaccucgggaagugcaacaucgccggcuggauccuggggaacccggagugcgagagccuguccaccgccagcuccuggagcuacaucguggagaccuccagcuccgacaacggcacgugcuaccccggcgacuucaucgacuacgaggagcuccgggagcagcugagcuccgugagcuccuucgagcgcuucgagaucuuccccaagaccagcuccuggcccaaccacgacagcaacaagggggucaccgccgccugcccgcacgccggcgcgaaguccuucuacaagaaccugaucuggcucgugaagaaggggaacagcuaccccaagcuguccaagagcuacaucaacgacaagggcaaggaggugcugguccucugggggauccaccaccccagcaccuccgccgaccagcagagccuguaccagaacgccgacgccuacguguucgugggcacgucccgguacagcaagaaguucaagcccgagaucgccauccgcccgaagguccgggaccaggagggccgcaugaacuacuacuggacccugguggagcccggggacaagaucaccuucgaggcgaccggcaaccucguggucccccgguacgccuucgccauggagcgcgacgccggguccggcaucaucaucagcgacacgcccgugcacgacugcaacacgaccugccagaccccgaagggcgccaucaacaccucccugcccuuccagaacauccaccccaucaccaucgggaagugccccaaguacgucaagagcaccaagcugcggcucgcgaccggccugcgcaacgugccguccauccagagccgggggcuguucggcgccaucgccggguucaucgagggcggcuggacggggaugguggacggcugguacggguaccaccaccagaacgagcagggcuccggguacgccgccgaccucaagagcacccagaacgcgaucgacgagaucaccaacaaggugaacuccgucaucgagaagaugaacacccaguucacggccgugggcaaggaguucaaccaccuggagaagcgcaucgagaaccugaacaagaagaucgacgacggcuuccucgacaucuggaccuacaacgccgagcugcugguccuccuggagaacgagcggacccuggacuaccacgacagcaacgugaagaaccucuacgagaaggugcgcucccagcugaagaacaacgccaaggagaucgggaacggcugcuucgaguucuaccacaagugcgacaacacgugcauggagagcgucaagaacgggaccuacgacuaccccaaguacuccgaggaggccaagcugaaccgggaggagaucgacggcgugaagcucgagagcacccgcaucuaccagauccuggcgaucuacuccaccguggccagcagccugguccucguggugucccugggggccaucagcuucuggaugugcuccaacggcagccugcagugccggaucugcaucuga

SEQ ID NO: 68810 - RNA, 1701 nt, Artificial Sequence
  derived and/or modified CDS sequence (opt1) from hemagglutinin__InfluenzaA__ADG21926
augaaggccauccuggugguccuccuguacaccuucgccaccgcgaacgccgacacgcugugcaucggcuaccacgccaacaacagcaccgacaccguggacaccauccucgagaagaacgugacggucacccacuccgugaaccugcuggaggacaagcacaacgggaagcucugcaagcugcgcggcguggcgccccugcaccucgggaagugcaacaucgccggcuggauccuggggaacccggagugcgagagccuguccaccgccagcuccuggagcuacaucgucgagaccuccagcuccgacaacggcacgugcuaccccggcgacuucaucgacuacgaggagcuccgggagcagcugagcuccgugagcuccuucgagcgcuucgagaucuuccccaagaccagcuccuggcccaaccacgacagcaacaagggggugaccgccgccugcccgcacgccggcgcgaaguccuucuacaagaaccugaucuggcucgucaagaaggggaacagcuaccccaagcuguccaagagcuacaucaacgacaagggcaaggaggugcuggugcucugggggauccaccaccccagcaccuccgccgaccagcagagccuguaccagaacgccgacgccuacgucuucgugggcacgucccgguacagcaagaaguucaagcccgagaucgccauccgcccgaaggugcgggaccaggagggccgcaugaacuacuacuggacccuggucgagcccggggacaagaucaccuucgaggcgaccggcaaccucguggugccccgguacgccuucgccauggagcgcaacgccggguccggcaucaucaucagcgacacgcccguccacgacugcaacacgaccugccagaccccgaagggcgccaucaacaccucccugcccuuccagaacauccaccccaucaccaucgggaagugccccaaguacgucaagagcaccaagcugcggcucgcgaccggccugcgcaacgugccguccauccagagccgggggcuguucggcgccaucgccggguucaucgagggcggcuggacggggaugguggacggcugguacggguaccaccaccagaacgagcagggcuccggguacgccgccgaccucaagagcacccagaacgcgaucgacgagaucaccaacaaggugaacuccgugaucgagaagaugaacacccaguucacggccgucggcaaggaguucaaccaccuggagaagcgcaucgagaaccugaacaagaagguggacgacggcuuccucgacaucuggaccuacaacgccgagcugcugguccuccuggagaacgagcggaaccuggacuaccacgacagcaacgugaagaaccucuacgagaaggugcgcucccagcugaagaacaacgccaaggagaucgggaacggcugcuucgaguucuaccacaagugcgacaacacgugcauggagagcgucaagaacgggaccuacgacuaccccaaguacuccgaggaggccaagcugaaccgggaggagaucgacggcgugaagcucgagagcacccgcaucuaccagauccuggcgaucuacuccaccguggccagcagccugguccucguggugucccugggggccaucagcuucuggaugugcuccaacggcagccugcagugccggaucugcaucuga

SEQ ID NO: 68811 - RNA, 1701 nt, Artificial Sequence; identical to SEQ ID NO: 66935
  derived and/or modified CDS sequence (opt1) from hemagglutinin__InfluenzaA__ADG21927

SEQ ID NO: 68812 - RNA, 1701 nt, Artificial Sequence
  derived and/or modified CDS sequence (opt1) from hemagglutinin__InfluenzaA__ADG21928
augaaggccacccuggugguccuccuguacaccuucgccacggcgaacgccgacacccugugcaucggcuaccacgccaacaacagcaccgacaccguggacacggugcucgagaagaacgucaccgugacccacuccgugaaccugcuggaggacaagcacaacgggaagcucugcaagcugcgcggcgucgcgccccugcaccucgggaagugcaacaucgccggcuggauccuggggaacccggagugcgagagccuguccaccgccagcuccuggagcuacaucguggagacguccagcuccgacaacgggaccugcuaccccggcgacuucaucgacuacgaggagcuccgggagcagcugagcuccgugagcuccuucgagcgcuucgagaucuuccccaagaccagcuccuggcccaaccacgacagcaacaagggcgucaccgccgccugcccgcacgccggcgcgaaguccuucuacaagaaccugaucuggcucgugaagaaggggaacagcuaccccaagcuguccaagagcuacaucaacgacaagggcaaggaggugcugguccucugggggauccaccaccccagcacguccgccgaccagcagagccuguaccagaacgccgacgccuacguguucgugggcaccucccgguacagcaagaaguucaagcccgagaucgccauccgcccgcggguccgcgaccaggagggccggaugaacuacuacuggacccugguggagcccggggacaagaucaccuucgaggcgacgggcaaccucguggucccccgcuacgccuucgccauggagcgggacgccggguccggcaucaucaucagcgacacccccgugcacgacugcaacacgaccugccagaccccgaagggcgccaucaacaccucccugcccuuccagaacauccaccccaucaccaucgggaagugccccaaguacgucaagagcaccaagcugcgccucgcgacgggccugcggaacgugccguccauccagagccgcgggcuguucggcgccaucgccggguucaucgagggcggcuggaccgggaugguggacggcugguacggguaccaccaccagaacgagcagggcuccggguacgccgccgaccucaagagcacccagaacgcgaucgacgagaucaccaacaaggugaacuccgucaucgagaagaugaacacgcaguucaccgccgugggcaaggaguucaaccaccuggagaagcggaucgagaaccugaacaagaagaucgacgacggcuuccucgacaucuggaccuacaacgccgagcugcugguccuccuggagaacgagcgcacccuggacuaccacgacagcaacgugaagaaccucuacgagaaggugcggucccagcugaagaacaacgccaaggagaucgggaacggcugcuucgaguucuaccacaagugcgacaacacgugcauggagagcgucaagaacgggaccuacgacuaccccaaguacuccgaggaggccaagcugaaccgcgaggagaucgacggcgugaagcucgagagcacccggaucuaccagauccuggcgaucuacuccaccguggccagcagccugguccucguggugucccugggggccaucagcuucuggaugugcuccaacggcagccugcagugccgcaucugcaucuga

SEQ ID NO: 68813 - RNA, 1701 nt, Artificial Sequence; identical to SEQ ID NO: 68809
  derived and/or modified CDS sequence (opt1) from hemagglutinin__InfluenzaA__ADG21930

SEQ ID NO: 68814 - RNA, 1701 nt, Artificial Sequence; identical to SEQ ID NO: 66935
  derived and/or modified CDS sequence (opt1) from hemagglutinin__InfluenzaA__ADG21931

SEQ ID NO: 68815 - RNA, 1701 nt, Artificial Sequence; identical to SEQ ID NO: 66935
  derived and/or modified CDS sequence (opt1) from hemagglutinin__InfluenzaA__ADG21932

SEQ ID NO: 68816 - RNA, 1701 nt, Artificial Sequence; identical to SEQ ID NO: 66935
  derived and/or modified CDS sequence (opt1) from hemagglutinin__InfluenzaA__ADG21933

SEQ ID NO: 68817 - RNA, 1701 nt, Artificial Sequence; identical to SEQ ID NO: 68809
  derived and/or modified CDS sequence (opt1) from hemagglutinin__InfluenzaA__ADG21934

SEQ ID NO: 68818 - RNA, 1701 nt, Artificial Sequence
  derived and/or modified CDS sequence (opt1) from hemagglutinin__InfluenzaA__ADG21935
auggaggccauccuggugguccuccuguacaccuucgccaccgcgaacgccgacacgcugugcaucggcuaccacgccaacaacagcaccgacaccguggacaccgugcucgagaagaacgucacggugacccacuccgugaaccugcuggaggacaagcacaacgggaagcucugcaagcugcgcggcgucgcgccccugcaccucgggaagugcaacaucgccggcuggauccuggggaacccggagugcgagagccuguccaccgccagcuccuggagcuacaucguggagaccuccagcuccgacaacggcacgugcuaccccggcgacuucaucgacuacgaggagcuccgggagcagcugagcuccgugagcuccuucgagcgcuucgagaucuuccccaagaccagcuccuggcccaaccacgacagcaacaagggggucaccgccgccugcccgcacgccggcgcgaaguccuucuacaagaaccugaucuggcucgugaagaaggggaacagcuaccccaagcuguccaagagcuacaucaacgacaagggcaaggaggugcugguccucugggggauccaccaccccagcaccuccgccgaccagcagagccuguaccagaacgccgacgccuacguguucgugggcuccagccgguacuccaagaaguucaagcccgagaucgccauccgcccgaagguccgggaccaggagggccgcaugaacuacuacuggacgcugguggagcccggggacaagaucaccuucgaggcgaccggcaaccucguggucccccgguacgccuucgccauggagcgcaacgccgggagcggcaucaucaucuccgacacccccgugcacgacugcaacacgaacugccagaccccgaacggcgccaucaacaccagccugcccuuccacaacauccaccccaucaccaucgggaagugccccaaguacgugaaguccacgaagcugcggcucgcgaccggccugcgcaacgucccgagcauccagucccgggggcuguucggcgccaucgccggguucaucgagggcggcuggaccgggaugguggacggcugguacggguaccaccaccagaacgagcagggcagcggguacgccgccgaccucaaguccacccagaacgcgaucgacgagaucacgaacaaggugaacagcgucaucgagaagaugaacacccaguucaccgccgugggcaaggaguucaaccaccuggagaagcgcaucgagaaccugaacaagaaggucgacgacggcuuccucgacaucuggaccuacaacgccgagcugcuggugcuccuggagaacgagcggacgcuggacuaccacgacuccaacgugaagaaccucuacgagaagguccgcagccagcugaagaacaacgccaaggagaucgggaacggcugcuucgaguucuaccacaagugcgacaacacgugcauggaguccgugaagaacgggaccuacgacuaccccaaguacagcgaggaggccaagcugaaccgggaggagaucgacggcgugaagcucgaguccacccgcaucuaccagauccuggcgaucuacagcaccgucgccagcucccuggugcucguggucagccugggggccaucuccuucuggaugugcagcaacggcucccugcagugccggaucugcaucuga

SEQ ID NO: 68819 - RNA, 1701 nt, Artificial Sequence; identical to SEQ ID NO: 66935
  derived and/or modified CDS sequence (opt1) from hemagglutinin__InfluenzaA__ADG21936

SEQ ID NO: 68820 - RNA, 1701 nt, Artificial Sequence; identical to SEQ ID NO: 66935
  derived and/or modified CDS sequence (opt1) from hemagglutinin__InfluenzaA__ADG21937

SEQ ID NO: 68821 - RNA, 1701 nt, Artificial Sequence
  derived and/or modified CDS sequence (opt1) from hemagglutinin__InfluenzaA__ADG21938
auggaggccauccuggugguccuccuguacaccuucgccaccgcgaacgccgacacgcugugcaucggcuaccacgccaacaacagcaccgacaccguggacaccgugcucgagaagaacgucacggugacccacuccgugaaccugcuggaggacaagcacaacgggaagcucugcaagcugcgcggcgucgcgccccugcaccucgggaagugcaacaucgccggcuggauccuggggaacccggagugcgagagccuguccaccgccagcuccuggagcuacaucguggagaccuccagcuccgacaacggcacgugcuaccccggcgacuucaucgacuacgaggagcuccgggagcagcugagcuccgugagcuccuucgagcgcuucgagaucuuccccaagaccagcuccuggcccaaccacgacagcaacaagggggucaccgccgccugcccgcacgccggcgcgaaguccuucuacaagaaccugaucuggcucgugaagaaggggaacagcuaccccaagcuguccaagagcuacaucaacgacaagggcaaggaggugcugguccucugggggauccaccaccccagcaccuccgccgaccagcagagccuguaccagaacgccgacgccuacguguucgugggcuccagccgguacuccaagaaguucaagcccgagaucgccauccgcccgaagguccgggaccaggagggccgcaugaacuacuacuggacgcugguggagcccggggacaagaucaccuucgaggcgaccggcaaccucguggucccccgguacgccuucgccauggagcgcaacgccgggagcggcaucaucaucuccgacacccccgugcacgacugcaacacgaccugccagaccccgaagggcgccaucaacaccagccugcccuuccacaacauccaccccaucacgaucgggaagugccccaaguacgugaaguccaccaagcugcggcucgcgaccggccugcgcaacgucccgagcauccagucccgggggcuguucggcgccaucgccggguucaucgagggcggcuggaccgggaugguggacggcugguacggguaccaccaccagaacgagcagggcagcggguacgccgccgaccucaaguccacgcagaacgcgaucgacgagaucaccaacaaggugaacagcgucaucgagaagaugaacacccaguucaccgccgugggcaaggaguucaaccaccuggagaagcgcaucgagaaccugaacaagaaggucgacgacggcuuccucgacaucuggacguacaacgccgagcugcuggugcuccuggagaacgagcggaaccuggacuaccacgacuccaacgugaagaaccucuacgagaagguccgcagccagcugaagaacaacgccaaggagaucgggaacggcugcuucgaguucuaccacaagugcgacaacacgugcauggaguccgugaagaacgggaccuacgacuaccccaaguacagcgaggaggccaagcugaaccgggaggagaucgacggcgugaagcucgaguccacccgcaucuaccagauccuggcgaucuacagcaccgucgccagcucccuggugcucguggucagccugggggccaucuccuucuggaugugcagcaacggcucccugcagugccggaucugcaucuga

SEQ ID NO: 68822 - RNA, 1701 nt, Artificial Sequence; identical to SEQ ID NO: 66935
  derived and/or modified CDS sequence (opt1) from hemagglutinin__InfluenzaA__ADG21939

SEQ ID NO: 68823 - RNA, 1701 nt, Artificial Sequence; identical to SEQ ID NO: 66935
  derived and/or modified CDS sequence (opt1) from hemagglutinin__InfluenzaA__ADG21940

SEQ ID NO: 68824 - RNA, 1701 nt, Artificial Sequence
  derived and/or modified CDS sequence (opt1) from hemagglutinin__InfluenzaA__ADG21941
auggaggccauccuggugguccuccuguacaccuucgccaccgcgaacgccgacacgcugugcaucggcuaccacgccaacaacagcaccgacaccguggacaccgugcucgagaagaacgucacggugacccacuccgugaaccugcuggaggacaagcacaacgggaagcucugcaagcugcgcggcgucgcgccccugcaccucgggaagugcaacaucgccggcuggauccuggggaacccggagugcgagagccuguccaccgccagcuccuggagcuacaucguggagaccuccagcuccgacaacggcacgugcuaccccggcgacuucaucgacuacgaggagcuccgggagcagcugagcuccgugagcuccuucgagcgcuucgagaucuuccccaagaccagcuccuggcccaaccacgacagcaacaagggggucaccgccgccugcccgcacgccggcgcgaaguccuucuacaagaaccugaucuggcucgugaagaaggggaacagcuaccccaagcuguccaagagcuacaucaacgacaagggcaaggaggugcugguccucugggggauccaccaccccagcaccuccgccgaccagcagagccuguaccagaacgccgacgccuacguguucgugggcuccagccgguacuccaagaaguucaagcccgagaucgccauccgcccgaagguccgggaccaggagggccgcaugaacuacuacuggacgcugguggagcccggggacaagaucaccuucgaggcgaccggcaaccucguggucccccgguacgccuucgccauggagcgcaacgccgggagcggcaucaucaucuccgacacccccgugcacgacugcaacacgaccugccagaccccgaagggcgccaucaacaccagccugcccuuccacaacauccaccccaucacgaucgggaagugccccaaguacgugaaguccaccaagcugcggcucgcgaccggccugcgcaacgucccgagcauccagucccgggggcuguucggcgccaucgccggguucaucgagggcggcuggaccgggaugguggacggcugguacggguaccaccaccagaacgagcagggcagcggguacgccgccgaccucaaguccacgcagaacgcgaucgacgagaucaccaacaaggugaacagcgucaucgagaagaugaacacccaguucaccgccgugggcaaggaguucaaccaccuggagaagcgcaucgagaaccugaacaagaagaucgacgacggcuuccucgacaucuggacguacaacgccgagcugcugguccuccuggagaacgagcggacccuggacuaccacgacuccaacgugaagaaccucuacgagaaggugcgcagccagcugaagaacaacgccaaggagaucgggaacggcugcuucgaguucuaccacaagugcgacaacacgugcauggaguccgucaagaacgggaccuacgacuaccccaaguacagcgaggaggccaagcugaaccgggaggagaucgacggcgugaagcucgaguccacccgcaucuaccagauccuggcgaucuacagcaccguggccagcucccugguccucguggugagccugggggccaucuccuucuggaugugcagcaacggcucccugcagugccggaucugcaucuga

SEQ ID NO: 68825 - RNA, 1701 nt, Artificial Sequence
  derived and/or modified CDS sequence (opt1) from hemagglutinin__InfluenzaA__ADG21943
augaaggccauccuggugguccuccuguacaccuucgccaccgcgaacgccgacacgcugugcaucggcuaccacgccaacaacagcaccgacaccguggacaccgugcucgagaagaacgucacggugacccacuccgugaaccugcuggaggacaagcacaacgggaagcucugcaagcugcgcggcgucgcgccccugcaccucgggaagugcaacaucgccggcuggauccuggggaacccggagugcgagagccuguccaccgcgaacagcugguccuacaucguggagaccagcuccagcgacaacggcacgugcuaccccggcgacuucaucgacuacgaggagcuccgggagcagcuguccagcguguccagcuucgagcgcuucgagaucuuccccaagaccuccagcuggcccaaccacgacuccaacaagggggucaccgccgccugcccgcacgccggcgccaagagcuucuacaagaaccugaucuggcucgugaagaaggggaacuccuaccccaagcugagcaaguccuacaucaacgacaagggcaaggaggugcugguccucugggggauccaccaccccagcaccagcgccgaccagcagucccuguaccagaacgccgacgccuacguguucgugggcacgagccgguacuccaagaaguucaagcccgagaucgccauccgcccgaagguccgggaccaggagggccgcaugaacuacuacuggacccugguggagcccggggacaagaucaccuucgaggcgaccggcaaccucguggucccccgguacgccuucgccauggagcgcgacgccgggagcggcaucaucaucuccgacacgcccgugcacgacugcaacacgaccugccagaccccgaagggcgccaucaacaccagccugcccuuccagaacauccaccccaucaccaucgggaagugccccaaguacgugaaguccaccaagcugcggcucgcgaccggccugcgcaacgucccgagcauccagucccgggggcuguucggcgccaucgccggguucaucgagggcggcuggacggggaugguggacggcugguacggguaccaccaccagaacgagcagggcagcggguacgccgccgaccucaaguccacccagaacgcgaucgacgagaucaccaacaaggugaacagcgucaucgagaagaugaacacccaguucacggccgugggcaaggaguucaaccaccuggagaagcgcaucgagaaccugaacaagaagaucgacgacggcuuccucgacaucuggaccuacaacgccgagcugcugguccuccuggagaacgagcggacccuggacuaccacgacuccaacgugaagaaccucuacgagaaggugcgcagccagcugaagaacaacgccaaggagaucgggaacggcugcuucgaguucuaccacaagugcgacaacacgugcauggaguccgucaagaacgggaccuacgacuaccccaaguacagcgaggaggccaagcugaaccgggaggagaucgacggcgugaagcucgaguccacccgcaucuaccagauccuggcgaucuacagcaccguggccuccagccugguccucguggugagccugggggccaucuccuucuggaugugcagcaacggcucccugcagugccggaucugcaucuga

SEQ ID NO: 68826 - RNA, 1701 nt, Artificial Sequence
  derived and/or modified CDS sequence (opt1) from hemagglutinin__InfluenzaA__ADG21944
auggaggccauccugaucgugcuccuguacaccuucgccaccgcgaacgccgacacgcugugcaucggcuaccacgccaacaacagcaccgacaccgucgacaccgugcucgagaagaacgugacggucacccacuccgugaaccugcuggaggacaagcacaacgggaagcucugcaagcugcgcggcguggcgccccugcaccucgggaagugcaacaucgccggcuggauccuggggaacccggagugcgagagccuguccaccgccagcuccuggagcuacaucgucgagaccuccagcuccgacaacggcacgugcuaccccggcgacuucaucgacuacgaggagcuccgggagcagcugagcuccgugagcuccuucgagcgcuucgagaucuuccccaagaccagcuccuggcccaaccacgacagcaacaagggggugaccgccgccugcccgcacgccggcgcgaaguccuucuacaagaaccugaucuggcucgucaagaaggggaacagcuaccccaagcuguccaagagcuacaucaacgacaagggcaaggaggugcuggugcucugggggauccaccaccccagcaccuccgccgaccagcagagccuguaccagaacgccgacgccuacgucuucgugggcuccagccgguacuccaagaaguucaagcccgagaucgccauccgcccgaaggugcgggaccaggagggccgcaugaacuacuacuggacgcuggucgagcccggggacaagaucaccuucgaggcgaccggcaaccucguggugccccgguacgccuucgccauggagcgcaacgccgggagcggcaucaucaucuccgacacccccguccacgacugcaacacgaccugccagaccccgaagggcgccaucaacaccagccugcccuuccacaacauccaccccaucacgaucgggaagugccccaaguacgugaaguccaccaagcugcggcucgcgaccggccugcgcaacgugccgagcauccagucccgggggcuguucggcgccaucgccggguucaucgagggcggcuggaccgggauggucgacggcugguacggguaccaccaccagaacgagcagggcagcggguacgccgccgaccucaaguccacgcagaacgcgaucgacgagaucaccaacaaggugaacagcgugaucgagaagaugaacacccaguucaccgccgucggcaaggaguucaaccaccuggagaagcgcaucgagaaccugaacaagaagguggacgacggcuuccucgacaucuggacguacaacgccgagcugcugguccuccuggagaacgagcggacccuggacuaccacgacuccaacgugaagaaccucuacgagaaggugcgcagccagcugaagaacaacgccaaggagaucgggaacggcugcuucgaguucuaccacaagugcgacaacacgugcauggaguccgucaagaacgggaccuacgacuaccccaaguacagcgaggaggccaagcugaaccgggaggagaucgacggcgugaagcucgaguccacccgcaucuaccagauccuggcgaucuacagcaccguggccagcucccugguccucguggugagccugggggccaucuccuucuggaugugcagcaacggcucccugcagugccggaucugcaucuga

SEQ ID NO: 68827 - RNA, 1701 nt, Artificial Sequence; identical to SEQ ID NO: 66935
  derived and/or modified CDS sequence (opt1) from hemagglutinin__InfluenzaA__ADG21945

SEQ ID NO: 68828 - RNA, 1701 nt, Artificial Sequence; identical to SEQ ID NO: 66935
  derived and/or modified CDS sequence (opt1) from hemagglutinin__InfluenzaA__ADG21946

SEQ ID NO: 68829 - RNA, 1701 nt, Artificial Sequence; identical to SEQ ID NO: 66935
  derived and/or modified CDS sequence (opt1) from hemagglutinin__InfluenzaA__ADG21947

SEQ ID NO: 68830 - RNA, 1701 nt, Artificial Sequence
  derived and/or modified CDS sequence (opt1) from hemagglutinin__InfluenzaA__ADG21948
auggaggccauccuggugguccuccuguacaccuucgccaccgcgaacgccgacacgcugugcaucggcuaccacgccaacaacagcaccgacaccguggacaccgugcucgagaagaacgucacggugacccacuccgugaaccugcuggaggacaagcacaacgggaagcucugcaagcugcgcggcgucgcgccccugcaccucgggaagugcaacaucgccggcuggauccuggggaacccggagugcgagagccuguccaccgccagcuccuggagcuacaucguggagaccuccagcuccgacaacggcacgugcuaccccggcgacuucaucgacuacgaggagcuccgggagcagcugagcuccgugagcuccuucgagcgcuucgagaucuuccccaagaccagcuccuggcccaaccacgacagcaacaagggggucaccgccgccugcccgcacgccggcgcgaaguccuucuacaagaaccugaucuggcucgugaagaaggggaacagcuaccccaagcuguccaagagcuacaucaacgacaagggcaaggaggugcugguccucugggggauccaccaccccagcaccuccgccgaccagcagagccuguaccagaacgccgacgccuacguguucgugggcuccagccgguacuccaagaaguucaagcccgagaucgccauccgcccgaagguccgggaccaggagggccgcaugaacuacuacuggacgcugguggagcccggggacaagaucaccuucgaggcgaccggcaaccucguggucccccgguacgccuucgccauggagcgcaacgccgggagcggcaucaucaucuccgacacccccgugcacgacugcaacacgaccugccagaccccgaagggcgccaucaacaccagccugcccuuccacaacauccaccccaucacgaucgggaagugccccaaguacgugaaguccaccaagcugcggcucgcgaccggccugcgcaacgucccgagcauccagucccgggggcuguucggcgccaucgccggguucaucgagggcggcuggaccgggaugguggacggcugguacggguaccaccaccagaacgagcagggcagcggguacgccgccgaccucaaguccacgcagaacgcgaucgacgagaucaccaacaaggugaacagcgucaucgagaagaugaacacccaguucaccgccgugggcaaggaguucaaccaccuggagaagcgcaucgagaaccugaacaagaaggucgacgacggcuuccucgacaucuggacguacaacgccgagcugcuggugcuccuggagaacgagcggacccuggaccaccacgacuccaacgugaagaaccucuacgagaagguccgcagccagcugaagaacaacgccaaggagaucgggaacggcugcuucgaguucuaccacaagugcgacaacacgugcauggaguccgugaagaacgggaccuacgacuaccccaaguacagcgaggaggccaagcugaaccgggaggagaucgacggcgugaagcucgaguccacccgcaucuaccagauccuggcgaucuacagcaccgucgccagcucccuggugcucguggucagccugggggccaucuccuucuggaugugcagcaacggcucccugcagugccggaucugcaucuga

SEQ ID NO: 68831 - RNA, 1701 nt, Artificial Sequence
  derived and/or modified CDS sequence (opt1) from hemagglutinin__InfluenzaA__ADG27794
augaaggccauccuggugguccuccuguacaccuucgccaccgcgaacgccgacacgcugugcaucggcuaccacgccaacaacagcaccgacaccguggacaccgugcucgagaagaacgucacggugacccacuccgugaaccugcuggaggacaagcacaacgggaagcucugcaagcugcgcggcgucgcgccccugcaccucgggaagugcaacaucgccggcuggauccuggggaacccggagugcgagagccuguccaccgccagcuccuggagcuacaucguggagaccuccagcuccgacaacggcacgugcuaccccggcgacuucaucgacuacgaggagcuccgggagcagcugagcuccgugagcuccuucgagcgcuucgagaucuuccccaagaccagcuccuggcccaaccacgacagcaacaagggggucaccgccgccugcccgcacgccggcgcgaaguccuucuacaagaaccugaucuggcucgugaagaaggggaacagcuaccccaagcuguccaagagcuacaucaacgacaagggcaaggaggugcugguccucugggggauccaccaccccagcaccuccgccgaccagcagagccuguaccagaacgccgacgccuacguguucgugggcacgucccgguacagcaagaaguucaagcccgagaucgccauccgcccgaagguccgggaccaggagggccgcaugaacuacuacuggacccugguggagcccggggacaagaucaccuucgaggcgaccggcaaccucguggucccccgguacgccuucgccauggagcgcaacgccggguccggcaucaucaucagcgacacgcccgugcacgacugcaacacgaccugccagaccccgaagggcgccaucaacaccucccugcccuuccagaacauccaccccaucaccaucgggaagugccccaaguacgucaagagcaccaagcugcggcucgcgaccggccugcgcaacgugccguccauccagagccgggggcuguucggcgccaucgccggguucaucgagggcggcuggacggggaugguggacggcugguacggguaccaccaccagaacgagcagggcuccggguacgccgccgaccucaagagcacccagaacgcgaucgacgagaucaccaacaaggugaacuccgucaucgagaagaugaacacccaguucacggccgugggcaaggaguucaaccaccuggagaagcgcaucgagaaccugaacaagaaggucgacgacggcuuccucgacaucuggaccuacaacgccgagcugcuggugcuccuggagaacgagcggacccuggacuaccacgacagcaacgugaagaaccucuacgagaagguccgcucccagcugaagaacaacgccaaggagaucgggaacggcugcuucgaguucuaccacaagugcgacaacacgugcauggagagcgugaagaacgggaccuacgacuaccccaaguacuccgaggaggccaagcugaaccgggaggagaucgacggcgugaagcucgagagcacccgcaccuaccagauccuggcgaucuacuccaccgucgccagcagccuggugcucguggucucccugggggccaucagcuucuggaugugcuccaacggcagccugcagugccggaucugcaucuga

SEQ ID NO: 68832 - RNA, 1701 nt, Artificial Sequence; identical to SEQ ID NO: 66680
  derived and/or modified CDS sequence (opt1) from hemagglutinin__InfluenzaA__ADG27948

SEQ ID NO: 68833 - RNA, 1701 nt, Artificial Sequence; identical to SEQ ID NO: 66680
  derived and/or modified CDS sequence (opt1) from hemagglutinin__InfluenzaA__ADG27966

SEQ ID NO: 68834 - RNA, 1701 nt, Artificial Sequence
  derived and/or modified CDS sequence (opt1) from hemagglutinin__InfluenzaA__ADG27974
augaaggccauccuggugguccuccuguacaccuucgccaccgcgaacgccgacacgcugugcaucggcuaccacgccaacaacagcaccgacaccguggacaccgugcucgagaagaacgucacggugacccacuccgugaaccugcuggaggacaagcacaacgggaagcucugcaagcugcgcggcgucgcgccccugcaccucgggaagugcaacaucgccggcuggauccuggggaacccggagugcgagagccuguccaccgccagcuccuggagcuacaucguggagaccuccagcuccgacaacggcacgugcuaccccggcgacuucaucgacuacgaggagcuccgggagcagcugagcuccgugagcuccuucgagcgcuucgagaucuuccccaagaccagcuccuggcccaaccacgacagcaacaagggggucaccgccgccugcccgcacgccggcgcgaaguccuucuacaagaaccugaucuggcucgugaagaaggggaacagcuaccccaagcuguccaagagcuacaucaacgacaagggcaaggaggugcugguccucugggggauccaccaccccagcaccuccgccgaccagcagagccuguaccagaacgccgacgccuacguguucgugggcuccagccgguacuccaagaaguucaagcccgagaucgccauccgcccgaagguccgggaccaggagggccgcaugaacuacuacuggacgcugguggagcccggggacaagaucaccuucgaggcgaccggcaaccucguggucccccgguacgccuucgccauggagcgcaacgccgggagcggcaucaucaucuccgacacccccgugcacgacugcaacacgaccugccagaccccgaagggcgccaucaacaccagccugcccuuccagaacauccaccccaucacgaucgggaagugccccaaguacgugaaguccaccaagcugcggcucgcgaccggccugcgcaacgucccgagcauccagucccgggggcuguucggcgccaucgccggguucaucgagggcggcuggaccgggaugguggacggcugguacggguaccaccaccagaacgagcagggcagcggguacgccgccgaccucaaguccacgcagaacgcgaucgacgagaucaccaacaaggugaacagcgucaucgagaagaugaacacccaguucaccgccgugggcaaggaguucaaccaccuggagaagcgcaucgagaaccugaacaagaaggucgacgacggcuuccucgacaucuggacguacaacgccgagcugcuggugcuccuggagaacgagcggacccuggacuaccacgacuccaacgugaagaaccucuacgagaagguccgcagccagcugaagaacaacgccaaggagaucgggaacggcugcuucgaguucuaccacaagugcgacaacacgugcauggaguccgugaagaacgggaccuacgacuaccccaaguacagcgaggaggccaagcugaaccgggaggagaucgacggcgugaagcucgaguccacccgcaucuaccagauccuggcgaucuacagcaccgucgccagcucccugauccucguggugagccugggggccaucuccuucuggaugugcagcaacggcucccugcagugccggaucugcaucuga

SEQ ID NO: 68835 - RNA, 1701 nt, Artificial Sequence
  derived and/or modified CDS sequence (opt1) from hemagglutinin__InfluenzaA__ADG27982
augaaggccauccuggugguccuccuguacaccuucgccaccgcgaacgccgacacgcugugcaucggcuaccacgccaacaacagcaccgacaccguggacaccgugcucgagaagaacgucacggugacccacuccgugaaccugcuggaggacaagcacaacgggaagcucugcaagcugcgcggcgucgcgccccugcaccucgggaagugcaacaucgccggcuggauccuggggaacccggagugcgagagccuguccaccgccagcuccuggagcuacaucguggagaccuccagcuccgacaacggcacgugcuaccccggcgacuucaucgacuacgaggagcuccgggagcagcugagcuccgugagcuccuucgagcgcuucgagaucuuccccaagaccagcuccuggcccaaccacgacagcaacaagggggucaccgccgccugcccgcacgccggcgcgaaguccuucuacaagaaccugaucuggcucgugaagaaggggaacagcuaccccaagcuguccaagagcuacaucaacgacaagggcaaggaggugcugguccucugggggauccaccaccccagcaccuccgccgaccagcagagccuguaccagaacgccgacgccuacguguucgugggcuccagccgguacuccaagaaguucaagcccgagaucgccauccgcccgaagguccgggaccaggagggccgcaugaacuacuacuggacgcugguggagcccggggacaagaucaccuucgaggcgaccggcaaccucguggucccccgguacgccuucgccauggagcgcaacgccgggagcggcaucaucaucuccgacacccccgugcacgacugcaacacgaccugccagaccccgaagggcgccaucaacaccagccugcccuuccagaacauccaccccaucacgaucgggaagugccccaaguacgugaaguccaccaagcugcggcucgcgaccggccugcgcaacgucccgagcauccagucccgggggcuguucggcgccaucgccggguucaucgagggcggcuggaccgggaugguggacggcugguacggguaccaccaccagaacgagcagggcagcggguacgccgccgaccucaaguccacgcagaacgcgaucgacgagaucaccaacaaggugaacagcgucaucgagaagaugaacacccaguucaccgccgugggcaaggaguucaaccaccuggagaagcgcaucgagaaccugaacaagaaggucgacgacggcuuccucgacaucuggacguacaacgccgagcugcuggugcuccuggagaacgagcggacccuggacuaccacgacuccaacgugaagaagcucuacgagaagguccgcagccagcugaagaacaacgccaaggagaucgggaacggcugcuucgaguucuaccacaagugcgacaacacgugcauggaguccgugaagaacgggaccuacgacuaccccaaguacagcgaggaggccaagcugaaccgggaggagaucgacggcgugaagcucgaguccacccgcaucuaccagauccuggcgaucuacagcaccgucgccagcucccuggugcucguggucagccugggggccaucuccuucuggaugugcagcaacggcucccugcagugccggaucugcaucuga

SEQ ID NO: 68836 - RNA, 1701 nt, Artificial Sequence; identical to SEQ ID NO: 66680
  derived and/or modified CDS sequence (opt1) from hemagglutinin__InfluenzaA__ADG27988

SEQ ID NO: 68837 - RNA, 1701 nt, Artificial Sequence; identical to SEQ ID NO: 66680
  derived and/or modified CDS sequence (opt1) from hemagglutinin__InfluenzaA__ADG27997

SEQ ID NO: 68838 - RNA, 1701 nt, Artificial Sequence; identical to SEQ ID NO: 66680
  derived and/or modified CDS sequence (opt1) from hemagglutinin__InfluenzaA__ADG28011

SEQ ID NO: 68839 - RNA, 1701 nt, Artificial Sequence; identical to SEQ ID NO: 68245
  derived and/or modified CDS sequence (opt1) from hemagglutinin__InfluenzaA__ADG42093

SEQ ID NO: 68840 - RNA, 1701 nt, Artificial Sequence; identical to SEQ ID NO: 67857
  derived and/or modified CDS sequence (opt1) from hemagglutinin__InfluenzaA__ADG42103

SEQ ID NO: 68841 - RNA, 1701 nt, Artificial Sequence; identical to SEQ ID NO: 67046
  derived and/or modified CDS sequence (opt1) from hemagglutinin__InfluenzaA__ADG42113

SEQ ID NO: 68842 - RNA, 1701 nt, Artificial Sequence; identical to SEQ ID NO: 68245
  derived and/or modified CDS sequence (opt1) from hemagglutinin__InfluenzaA__ADG42123

SEQ ID NO: 68843 - RNA, 1701 nt, Artificial Sequence
  derived and/or modified CDS sequence (opt1) from hemagglutinin__InfluenzaA__ADG42133
augaaggccauccuggugguccuccuguacaccuucgccaccgcgaacgccgacacgcugugcaucggcuaccacgccaacaacagcaccgacaccguggacaccgugcucgagaagaacgucacggugacccacuccgugaaccugcuggaggacaagcacaacgggaagcucugcaagcugcgcggcgucgcgccccugcaccucgggaagugcaacaucgccggcuggauccuggggaacccggagugcgagagccuguccaccgccagcuccuggagcuacaucguggagaccuccagcuccgacaacggcacgugcuaccccggcgacuucaucgacuacgaggagcuccgggagcagcugagcuccgugagcuccuucgagcgcuucgagaucuuccccaagaccagcuccuggcccaaccacgacagcaacaagggggucaccgccgccugcccguacgccggcgcgaaguccuucuacaagaaccugaucuggcucgugaagaaggggaacagcuaccccaagcuguccaagagcuacaucaacgacaagggcaaggaggugcugguccucugggggauccaccaccccagcaccuccgccgaccagcagagccuguaccagaacgccgacgccuacguguucgugggcacgucccgguacagcaagaaguucaagcccgagaucgccauccgcccgaagguccgggaccaggagggccgcaugaacuacuacuggacccugguggagcccggggacaagaucaccuucgaggcgaccggcaaccucguggucccccgguacgccuucgccauggagcgcaacgccggguccggcaucaucaucagcgacacgcccgugcacgacugcaacacgaccugccagaccccgaagggcgccaucaacaccucccugcccuuccagaacauccaccccaucaccaucgggaagugccccaaguacgucaagagcaccaagcugcggcucgugaccggccugcgcaacgugccguccauccagagccgggggcuguucggcgcgaucgccggguucaucgagggcggcuggacggggaugguggacggcugguacggguaccaccaccagaacgagcagggcuccggguacgccgccgaccucaagagcacccagcacgccaucgacgagaucaccaacaaggucaacuccgugaucgagaagaugaacacccaguucacggcggucggcaaggaguucaaccaccuggagaagcgcaucgagaaccugaacaagaagguggacgacggcuuccucgacaucuggaccuacaacgccgagcugcuggugcuccuggagaacgagcggacccuggacuaccacgacagcaacgucaagaaccucuacgagaaggugcgcucccagcugaagaacaacgccaaggagaucgggaacggcugcuucgaguucuaccacaagugcgacaacacgugcauggagagcgugaagaacgggaccuacgacuaccccaaguacuccgaggaggccaagcugaaccgggaggagaucgacggcgucaagcucgagagcacccgcaucuaccagauccuggccaucuacuccaccguggcgagcagccuggugcucgucgugucccugggggccaucagcuucuggaugugcuccaacggcagccugcagugccggaucugcaucuga

SEQ ID NO: 68844 - RNA, 1701 nt, Artificial Sequence
  derived and/or modified CDS sequence (opt1) from hemagglutinin__InfluenzaA__ADG42143
augaaggccauccuggugguccuccuguacaccuucgccaccgcgaacgccgacacgcugugcaucggcuaccacgccaacaacagcaccgacaccguggacaccgugcucgagaagaacgucacggugacccacuccgugaacauccuggaggacaagcacaacgggaagcugugcaagcuccgcggcgucgcgccccugcaccuggggaagugcaacaucgccggcuggauccucgggaacccggagugcgagagccuguccaccgccagcuccuggagcuacaucguggagaccuccagcuccgacaacggcacgugcuaccccggcgacuucaucgacuacgaggagcugcgggagcagcucagcuccgugagcuccuucgagcgcuucgagaucuuccccaagaccagcuccuggcccaaccacgacagcaacaagggggucaccgccgccugcccgcacgccggcgcgaaguccuucuacaagaaccugaucuggcuggugaagaaggggaacagcuaccccaagcucuccaagagcuacaucaacgacaagggcaaggaggugcugguccugugggggauccaccaccccagcaccuccgccgaccagcagagccucuaccagaacgccgacgccuacguguucgugggcuccagccgguacuccaagaaguucaagcccgagaucgccauccgcccgaagguccgggaccaggagggccgcaugaacuacuacuggacgcugguggagcccggggacaagaucaccuucgaggcgaccggcaaccugguggucccccgguacgccuucgccauggagaagaacgccgggagcggcaucaucaucuccgacacccccgugcacgacugcaacacgaccugccagaccccgaagggcgccaucaacaccagccuccccuuccagaacauccaccccaucacgaucgggaagugccccaaguacgugaaguccaccaagcugcgccuggcgaccggccuccggaacgucccgagcauccagucccgcgggcuguucggcgccaucgccggguucaucgagggcggcuggaccgggaugguggacggcugguacggguaccaccaccagaacgagcagggcagcggguacgccgccgaccugaaguccacgcagaacgcgaucgacgagaucaccaacaaggugaacagcgucaucgagaagaugaacacccaguucaccgccgugggcaaggaguucaaccaccucgagaagcggaucgagaaccugaacaagaaggucgacgacggcuuccuggacaucuggacguacaacgccgagcuccuggugcugcucgagaacgagcgcacccuggacuaccacgacuccaacgugaagaaccuguacgagaagguccggagccagcucaagaacaacgccaaggagguggggaacggcugcuucgaguucuaccacaagugcgacaacacgugcauggaguccgugaagaacgggaccuacgacuaccccaaguacagcgaggaggccaagcugaaccgcgaggagaucgacggcgucaagcuggaguccacccggaucuaccagauccucgcgaucuacagcaccgccgccagcucccuggugcugguggucagccucggggccaucuccuucuggaugugcagcaacggcucccugcagugccgcaucugcaucuga

SEQ ID NO: 68845 - RNA, 1701 nt, Artificial Sequence
  derived and/or modified CDS sequence (opt1) from hemagglutinin__InfluenzaA__ADG42153
augaaggccauccuggugguccuccuguacaccuucgccaccgcgaacgccgacacgcugugcaucggcuaccacgccaacaacagcaccgacaccguggacaccgugcucgagaagaacgucacggugacccacuccgugaaccugcuggaggacaagcacaacgggaagcucugcaagcugcgcggcgucgcgccccugcaccucgggaagugcaacaucgccggcuggauccuggggaacccggagugcgagagccuguccaccgccagcuccuggagcuacaucguggagaccuccagcuccgacaacggcacgugcuaccccggcgacuucaucgacuacgaggagcuccgggagcagcugagcuccgugagcuccuucgagcgcuucgagaucuuccccaagaccagcuccuggcccaaccacgacagcaacaaggggaucaccgccgccugcccgcacgccggcgcgaaguccuucuacaagaaccugaucuggcucgucaagaaggggaacagcuaccccaagcuguccaagagcuacaucaacgacaagggcaaggaggugcuggugcucugggggauccaccaccccagcaccuccgccgaccagcagagccuguaccagaacgccgacgccuacgucuucgugggcacgucccgguacagcaagaaguucaagcccgagaucgccauccgcccgaaggugcgggaccaggagggccgcaugaacuacuacuggacccuggucgagcccggggacaagaucaccuucgaggcgaccggcaaccucguggugccccgguacgccuucgccauggagcgcaacgccggguccggcaucaucaucagcgacacgcccguccuggacugcaacacgaccugccagaccccgaagggcgccaucaacaccucccugcccuuccagaacauccaccccaucaccaucgggaagugccccaaguacgucaagagcaccaagcuccggcuggcgaccggccugcgcaacgugccguccauccagagccgggggcuguucggcgccaucgccggguucaucgagggcggcuggacggggaugguggacggcugguacggguaccaccaccagaacgagcagggcuccggguacgccgccgaccucaagagcacccagaacgcgaucgacgagaucaccaacaaggugaacuccgugaucgagaagaugaacacccaguucacggccgucggcaaggaguucaaccaccuggagaagcgcaucgagaaccucaacaagaagguggacgacggcuuccuggacaucuggaccuacaacgccgagcugcucguccugcuggagaacgagcggacccucgacuaccacgacagcaacgugaagaaccuguacgagaaggugcgcucccagcugaagaacaacgccaaggagaucgggaacggcugcuucgaguucuaccacaagugcgacaacacgugcauggagagcgucaagaacgggaccuacgacuaccccaaguacuccgaggaggccaagcucaaccgggaggagaucgacggcgugaagcuggagagcacccgcaucuaccagauccuggcgaucuacuccaccguggccagcagccucguccugguggugucccugggggccaucagcuucuggaugugcuccaacggcagccuccagugccggaucugcaucuga

SEQ ID NO: 68846 - RNA, 1701 nt, Artificial Sequence; identical to SEQ ID NO: 66693
  derived and/or modified CDS sequence (opt1) from hemagglutinin__InfluenzaA__ADG42193

SEQ ID NO: 68847 - RNA, 1701 nt, Artificial Sequence; identical to SEQ ID NO: 66693
  derived and/or modified CDS sequence (opt1) from hemagglutinin__InfluenzaA__ADG42213

SEQ ID NO: 68848 - RNA, 1701 nt, Artificial Sequence; identical to SEQ ID NO: 66693
  derived and/or modified CDS sequence (opt1) from hemagglutinin__InfluenzaA__ADG42233

SEQ ID NO: 68849 - RNA, 1701 nt, Artificial Sequence
  derived and/or modified CDS sequence (opt1) from hemagglutinin__InfluenzaA__ADG42243
augaaggccauccuggugguccuccuguacaccuucgccaccgcgaacgccgacacgcugugcaucggcuaccacgccaacaacagcaccgacaccguggacaccgugcucgagaagaacgucacggugacccacuccgugaaccugcuggaggacaagcacaacgggaagcucugcaagcugcgcggcgucgcgccccugcaccucgggaagugcaacaucgccggcuggauccuggggaacccggagugcgagagccuguccaccgccagcuccuggagcuacaucguggagaccuccagcuccgacaacggcacgugcuaccccggcgacuucaucgacuacgaggagcuccgggagcagcugagcuccgugagcuccuucgagcgcuucgagaucuuccccaagaccagcuccuggcccaaccacgacagcaacaagggggucaccgccgccugcccgcacgccggcgcgaaguccuucuacaagaaccugaucuggcucgugaagaaggggaacagcuaccccaagcuguccaagagcuacaucaacgacaagggcaaggaggugcugguccucugggggauccaccaccccagcaccuccgccgaccagcagagccuguaccagaacgccgacgccuacguguucgugggcacgucccgguacagcaagaaguucaagcccgagaucgccauccgcccgaagguccgggaccaggagggccgcaugaacuacuacuggacccugguggagcccggggacaagaucaccuucgaggcgaccggcaaccucguggucccccgguacgccuucgccauggagcgcaacgccggguccggcaucaucaucagcgacacgcccgugcuggacugcaacacgaccugccagaccccgaagggcgccaucaacaccucccugcccuuccagaacauccaccccaucaccaucgggaagugccccaaguacgucaagagcaccaagcuccggcuggcgaccggccugcgcaacgugccguccauccagagccgggggcuguucggcgccaucgccggguucaucgagggcggcuggacggggaugguggacggcugguacggguaccaccaccagaacgagcagggcuccggguacgccgccgaccucaagagcacccagcacgcgaucgacgagaucaccaacaaggugaacuccgucaucgagaagaugaacacccaguucacggccgugggcaaggaguucaaccaccuggagaagcgcaucgagaaccucaacaagaaggucgacgacggcuuccuggacaucuggaccuacaacgccgagcugcucgugcugcuggagaacgagcggacccucgacuaccacgacagcaacgugaagaaccuguacgagaagguccgcucccagcugaagaacaacgccaaggagaucgggaacggcugcuucgaguucuaccacaagugcgacaacacgugcauggagagcgugaagaacgggaccuacgacuaccccaaguacuccgaggaggccaagcucaaccgggaggagaucgacggcgugaagcuggagagcacccgcaucuaccagauccuggcgaucuacuccaccgucgccagcagccucgugcugguggucucccugggggccaucagcuucuggaugugcuccaacggcagccuccagugccggaucugcaucuga

SEQ ID NO: 68850 - RNA, 1701 nt, Artificial Sequence; identical to SEQ ID NO: 68113
  derived and/or modified CDS sequence (opt1) from hemagglutinin__InfluenzaA__ADG42253

SEQ ID NO: 68851 - RNA, 1701 nt, Artificial Sequence; identical to SEQ ID NO: 66693
  derived and/or modified CDS sequence (opt1) from hemagglutinin__InfluenzaA__ADG42263

SEQ ID NO: 68852 - RNA, 1701 nt, Artificial Sequence; identical to SEQ ID NO: 67794
  derived and/or modified CDS sequence (opt1) from hemagglutinin__InfluenzaA__ADG42273

SEQ ID NO: 68853 - RNA, 1701 nt, Artificial Sequence; identical to SEQ ID NO: 67794
  derived and/or modified CDS sequence (opt1) from hemagglutinin__InfluenzaA__ADG42283

SEQ ID NO: 68854 - RNA, 1701 nt, Artificial Sequence; identical to SEQ ID NO: 68376
  derived and/or modified CDS sequence (opt1) from hemagglutinin__InfluenzaA__ADG42293

SEQ ID NO: 68855 - RNA, 1701 nt, Artificial Sequence
  derived and/or modified CDS sequence (opt1) from hemagglutinin__InfluenzaA__ADG42303
augaaggccauccuggugguccuccuguacaccuucgccaccgcgaacgccgacacgcugugcaucggcuaccacgccaacaacagcaccgacaccguggacaccgugcucgagaagaacgucacggugacccacuccgugaaccugcuggaggacaagcacaacgggaagcucugcaagcugaagggcgucgcgccccugcaccucgggaagugcaacaucgccggcuggauccuggggaacccggagugcgagagccuguccaccgccagcuccuggagcuacaucguggagaccuccagcuccgacaacggcacgugcuaccccggcgacuucaucgacuacgaggagcuccgcgagcagcugagcuccgugagcuccuucgagcgguucgagaucuuccccaagaccagcuccuggcccaaccacgacagcaacaagggggucaccgccgccugcccgcacgccggcgcgaaguccuucuacaagaaccugaucuggcucgugaagaaggggaacagcuaccccaagcuguccaagagcuacaucaacgacaagggcaaggaggugcugguccucugggggauccaccaccccagcaccuccgccgaccagcagagccuguaccagaacgccgacgccuacguguucgugggcacgucccgcuacagcaagaaguucaagcccgagaucgccauccggccgaagguccgcgaccaggagggccggaugaacuacuacuggacccugguggagcccggggacaagaucaccuucgaggcgaccggcaaccucguggucccccgcuacgccuucgccauggagcggaacgccggguccggcaucgugaucagcgacacgcccgugcacgacugcaacacgaccugccagaccccgaagggcgccaucaacaccucccugcccuuccagaacauccaccccaucaccaucgggaagugccccaaguacgucaagagcaccaagcugcgccucgcgaccggccugcggaacgugccguccauccagagccgcgggcuguucggcgccaucgccggguucaucgagggcggcuggacggggaugguggacggcugguacggguaccaccaccagaacgagcagggcuccggguacgccgccgaccucaagagcacccagaacgcgaucgacgagaucaccaacaaggucaacuccgugaucgagaagaugaacacccaguucacggccgucggcaaggaguucaaccaccuggagaagcggaucgagaaccugaacaagaagguggacgacggcuuccucgacaucuggaccuacaacgccgagcugcuggugcuccuggagaacgagcgcacccuggacuaccacgacagcaacgucaagaaccucuacgagaaggugcggucccagcugaagaacaacgccaaggagaucgggaacggcugcuucgaguucuaccacaagugcgacaacacgugcauggagagcgugaagaacgggaccuacgacuaccccaaguacuccgaggaggccaagcugaaccgcgaggagaucgacggcgucaagcucgagagcacccggaucuaccagauccuggcgaucuacuccaccguggccagcagccuggugcucgucgugucccugggggccaucagcuucuggaugugcuccaacggcagccugcagugccgcaucugcaucuga

SEQ ID NO: 68856 - RNA, 1701 nt, Artificial Sequence; identical to SEQ ID NO: 68403
  derived and/or modified CDS sequence (opt1) from hemagglutinin__InfluenzaA__ADG42313

SEQ ID NO: 68857 - RNA, 1701 nt, Artificial Sequence
  derived and/or modified CDS sequence (opt1) from hemagglutinin__InfluenzaA__ADG42323
augaaggccauccuggugguccuccuguacaccuucgccaccgcgaacgccgacacgcugugcaucggcuaccacgccaacaacagcaccgacaccguggacaccgugcucgagaagaacgucacggugacccacuccgugaaccugcuggaggacaagcacaacgggaagcucugcaagcugcgcggcgucgcgccccugcaccucgggaagugcaacaucgccggcuggauccuggggaacccggagugcgagagccuguccaccgccagcuccuggagcuacaucguggagaccuccagcuccgacaacggcacgugcuaccccggcgacuucaucgacuacgaggagcuccgggagcagcugagcuccgugagcuccuucgagcgcuucgagauguuccccaagaccagcuccuggcccaaccacgacagcaacaagggggucaccgccgccugcccgcacgccggcgcgaaguccuucuacaagaaccugaucuggcucgugaagaaggggaacagcuaccccaagcuguccaagagcuacaucaacgacaagggcaaggaggugcugguccucugggggauccaccaccccagcaccuccgccgaccagcagagccuguaccagaacgccgacgccuacguguucgugggcacgucccgguacagcaagaaguucaagcccgagaucgccauccgcccgaagguccgggaccaggagggccgcaugaacuacuacuggacccugguggagcccggggacaagaucaccuucgaggcgaccggcaaccucguggucccccgguacgccuucgccauggagcgcaacgccggguccggcaucaucaucagcgacacgcccgugcacgacugcaacacgaccugccagaccccgaagggcgccaucaacaccucccugcccuuccagaacauccaccccaucaccaucgggaagugccccaaguacgucaagagcaccaagcugcggcucgcgaccggccugcgcaacgugccguccauccagagccgggggcuguucggcgccaucgccggguucaucgagggcggcuggacggggaugguggacggcugguacggguaccaccaccagaacgagcagggcuccggguacgccgccgaccucaagagcacccagaacgcgaucgacgagaucaccaacaaggugaacuccgucaucgagaagaugaacacccaguucacggccgugggcaaggaguucaaccaccuggagaagcgcaucgagaaccugaacaagaaggucgacgacggcuuccucgacaucuggaccuacaacgccgagcugcuggugcuccuggagaacgagcggacccuggacuaccacgacagcaacgugaagaaccucuacgagaagguccgcucccagcugaagaacaacgccaaggagguggggaacggcugcuucgaguucuaccacaagugcgacaacacgugcauggagagcgugaagaacgggaccuacgacuaccccaaguacuccgaggaggccaagcugaaccgggaggagaucgacggcgucaagcucgagagcacccgcaucuaccagauccuggcgaucuacuccaccguggccagcagccuggugcucgucgugucccugggggccaucagcuucuggaugugcuccaacggcagccugcagugccggaucugcaucuga

SEQ ID NO: 68858 - RNA, 1701 nt, Artificial Sequence
  derived and/or modified CDS sequence (opt1) from hemagglutinin__InfluenzaA__ADG42333
augaaggccauccuggugguccuccuguacacccuggccaccgcgaacgccgacacgcucugcaucggcuaccacgccaacaacagcaccgacaccguggacaccgugcuggagaagaacgucacggugacccacuccgugaaccugcucgaggacaagcacaacgggaagcugugcaagcugcgcggcaucgcgccccuccaccuggggaagugcaacaucgccggcuggauccuggggaacccggagugcgagagccucuccaccgccagcuccuggagcuacaucgucgagaccuccagcuccgacaacggcacgugcuaccccggcgacuucaucgacuacgaggagcugcgggagcagcugagcuccgugagcuccuucgagcgcuucgagaucuuccccaagaccagcuccuggcccaaccacgacagcaacaagggggugaccgccgccugcccgcacgccggcgcgaaguccuucuacaagaaccucaucuggcuggucaagaaggggaacagcuaccccaagcuguccaagagcuacaucaacgacaagggcaaggaggugcucgugcugugggggauccaccaccccagcaccuccgccgaccagcagagccuguaccagaacgccgacgccuacgucuucgugggcacgucccgguacagcaagaaguucaagcccgagaucgccauccgcccgaaggugcgggaccaggagggccgcaugaacuacuacuggacccucgucgagcccggggacaagaucaccuucgaggcgaccggcaaccugguggugccccgguacgccuucgccauggagcgcaacgccggguccggcaucaucaucagcgacgcccccguccacgacugcaacacgaccugccagaccccgaagggcgcgaucaacaccucccugcccuuccagaacauccaccccaucacgaucgggaagugccccaaguacgucaagagcaccaagcuccggcuggccaccggccugcgcaacgugccguccauccagagccgggggcuguucggcgccaucgccggguucaucgagggcggcuggaccgggaugguggacggcugguacggguaccaccaccagaacgagcagggcuccggguacgccgcggaccucaagagcacgcagaacgccaucgacgagaucaccaacaaggugaacuccgugaucgagaagaugaacacccaguucaccgccgucggcaaggaguucaaccaccuggagaagcgcaucgagaaccucaacaagaagguggacgacggcuuccuggacaucuggacguacaacgccgagcugcucguccugcuggagaacgagcggacccucgacuaccacgacagcaacgugaagaaccuguacgagaaggugcgcucccagcugaagaacaacgccaaggagaucgggaacggcugcuucgaguucuaccacaagugcgacaacacgugcauggagagcgucaagaacgggaccuacgacuaccccaaguacuccgaggaggcgaagcucaaccgggaggagaucgacggcgugaagcuggagagcacccgcaucuaccagauccuggccaucuacuccaccguggccagcagccucguccugguggugucccugggggccaucagcuucuggaugugcuccaacggcagccuccagugccggaucugcaucuga

SEQ ID NO: 68859 - RNA, 1701 nt, Artificial Sequence
  derived and/or modified CDS sequence (opt1) from hemagglutinin__InfluenzaA__ADG42343
augaaggccauccuggugguccuccuguacaccuucgccaccgcgaacgccgacacgcugugcaucggcuaccacgccaacaacagcaccgacaccguggacaccgugcucgagaagaacgucacggugacccacuccgugaaccugcuggaggacaagcacaacgggaagcucugcaagcugcgcggcgucgcgccccugcaccucgggaagugcaacaucgccggcuggauccuggggaacccggagugcgagagccuguccaccgccagcuccuggagcuacaucguggagaccuccagcuccgacaacggcacgugcuaccccggcgacuucaucgacuacgaggagcuccgggagcagcugagcuccgugagcuccuucgagcgcuucgagaucuuccccaagaccagcuccuggcccaaccacgacagcaacaagggggucaccgccgccugcccgcacgccggcgcgaaguccuucuacaagaaccugaucuggcucgugaagaaggggaacagcuaccccaagcuguccaagagcuacaucaacgacaagggcaaggaggugcugguccucugggggauccaccaccccagcaccuccgccgaccagcagagccuguaccagaacgccgacgccuacguguucgugggcacgucccgguacagcaagaaguucaagcccgagaucgccauccgcccgaagguccgggaccaggagggccgcaugaacuacuacuggacccugguggagcccggggacaagaucaccuucgaggcgaccggcaaccucguggucccccgguacgccuucgccauggaguccaacgccgggagcggcaucaucaucuccgacacgcccgugcacgacugcaacacgaccugccagaccccgaagggcgccaucaacaccagccugcccuuccagaacauccaccccaucaccaucgggaagugccccaaguacgugaaguccaccaagcugcgccucgcgaccggccugcggaacgucccgagcauccagucccgcgggcuguucggcgccaucgccggguucaucgagggcggcuggacggggaugguggacggcugguacggguaccaccaccagaacgagcagggcagcggguacgccgccgaccucaaguccacccagcacgcgaucgacgagaucaccaacaaggugaacagcgucaucgagaagaugaacacccaguucacggccgugggcaaggaguucaaccaccuggagaagcggaucgagaaccugaacaagaaggucgacgacggcuuccucgacaucuggaccuacaacgccgagcugcuggugcuccuggagaacgagcgcacccuggacuaccacgacuccaacgugaagaaccucuacgagaagguccggagccagcugaagaacaacgccaaggagaucgggaacggcugcuucgaguucuaccacaagugcgacaacacgugcauggaguccgugaagaacgggaccuacgacuaccccaaguacagcgaggaggccaagcugaaccgcgaggagaucgacggcgugaagcucgaguccacccggaucuaccagauccuggcgaucuacagcaccgucgccagcucccuggugcucguggucagccugggggccaucuccuucuggaugugcagcaacggcucccugcagugccgcaucugcaucuga

SEQ ID NO: 68860 - RNA, 1701 nt, Artificial Sequence
  derived and/or modified CDS sequence (opt1) from hemagglutinin__InfluenzaA__ADG42363
augaaggccauccuggugguccuccuguacaccuucgccaccgcgaacgccgacacgcugugcaucggcuaccacgccaacaacagcaccgacaccguggacaccgugcucgagaagaacgucacggugacccacuccgugaaccugcuggaggacaagcacaacgggaagcucugcaagcugcgcggcaucgcgccccugcaccucgggaagugcaacaucgccggcuggauccuggggaacccggagugcgagagccuguccaccgccagcuccuggagcuacaucgucgagaccuccagcuccgacaacggcacgugcuaccccggcgacuucaucgacuacgaggagcuccgggagcagcugagcuccgugagcuccuucgagcgcuucgagaucuuccccaagaccagcuccuggcccaaccacgacagcaacaagggggugaccgccgccugcccgcacgccggcgcgaaguccuucuacaagaaccugaucuggcucgucaagaaggggaacagcuaccccaagcuguccaagagcuacaucaacgacaagggcaaggaggugcuggugcucugggggauccaccaccccagcaccuccgccgaccagcagagccuguaccagaacgccgacgccuacgucuucgugggcacgucccgguacagcaagaaguucaagcccgagaucgccauccgcccgaaggugcgggaccaggagggccgcaugaacuacuacuggacccuggucgagcccggggacaagaucaccuucgaggcgaccggcaaccucguggugccccgguacgccuucgccauggagcgcaacgccggguccggcaucaucaucagcgacacgcccguccacgacugcaacacgaccugccagaccccgaagggcgccaucaacaccucccugcccuuccagaacauccaccccaucaccaucgggaagugccccaaguacgucaagagcaccaagcugcggcucgcgaccggccugcgcaacgugccguccauccagagccgggggcuguucggcgccaucgccggguucaucgagggcggcuggacggggaugguggacggcugguacggguaccaccaccagaacgagcagggcuccggguacgccgccgaccucaagagcacccagaacgcgaucgacgagaucaccaacaaggugaacuccgugaucgagaagaugaacacccaguucacggccgucggcaaggaguucaaccaccuggagaagcgcaucgagaaccugaacaagaagguggacgacggcuuccucgacaucuggaccuacaacgccgagcugcugguccuccuggagaacgagcggacccuggacuaccacgacagcaacgugaagaaccucuacgagaaggugcgcucccagcugaagaacaacgccaaggagaucgggaacggcugcuucgaguucuaccacaagugcgacaacacgugcauggagagcgucaagaacgggaccuacgacuaccccaaguacuccgaggaggccaagcugaaccgggaggagaucgacggcgugaagcucgagagcacccgcaucuaccagauccuggcgaucuacuccaccguggccagcagccugguccucguggugucccugggggccaucagcuucuggaugugcuccaacggcagccugcagugccggaucugcaucuga

SEQ ID NO: 68861 - RNA, 1701 nt, Artificial Sequence
  derived and/or modified CDS sequence (opt1) from hemagglutinin__InfluenzaA__ADG42373
augaaggccauccuggugguccuccuguacaccuucgccaccgcgaacgccgacacgcugugcaucggcuaccacgccaacaacagcaccgacaccguggacaccgugcucgagaagaacgucacggugacccacuccgugaaccugcuggaggacaagcacaacgggaagcucugcaagcugcgcggcgucgcgccccugcaccucgggaagugcaacaucgccggcuggauccuggggaacccggagugcgagagccuguccaccgccagcuccuggagcuacaucguggagaccuccagcuccgacaacggcacgugcuaccccggcgacuucaucgacuacgaggagcuccgggagcagcugagcuccgugagcuccuucgagcgcuucgagaucuuccccaagaccagcuccuggcccaaccacgacagcaacaagggggucaccgccgccugcccgcacgccggcgcgaaguccuucuacaagaaccugaucuggcucgugaagaaggggaacagcuaccccaagcuguccaagagcuacaucaacgacaagggcaaggaggugcugguccucugggggauccaccaccccagcaccuccgccgaccagcagagccuguaccagaacgccgacgccuacguguucgugggcacgucccgguacagcaagaaguucaagcccgagaucgccauccgcccgaagguccgggaccaggagggccgcaugaacuacuacuggacccugguggagcccggggacaagaucaccuucgaggcgaccggcaaccucguggucccccgguacgccuucgccauggagcgcaacgccggguccggcaucaucaucagcgacacgcccgugcacgacugcaacacgaccugccagaccccgaagggcgccaucaacaccucccugcccuuccagaacauccaccccaucaccaucgggaagugccccaaguacgucaagagcaccaagcugcggcucgcgaccggccugcgcaacgugccguccauccagagccgggggcuguucggcgccaucgccggguucaucgagggcggcuggacggggaugguggacggcugguacggguaccaccaccagaacgagcagggcuccggguacgccgccgaccucaagagcacccagaacgcgaucgacgagaucaccaacaaggugaacuccgucaucgagaagaugaacacccaguucacggccgugggcaaggaguucaaccaccuggagaagcgcaucgagaaccugaacaagaaggucgacgacggcuuccucgacaucuggaccuacaacgccgagcugcuggugcuccuggagaacgagcggacccuggacuaccacgacagcaacgugaagaaccucuacgagaagguccgcaaccagcugaagaacaacgccaaggagaucgggaacggcugcuucgaguucuaccacaagugcgacaacacgugcauggaguccgugaagaacgggaccuacgacuaccccaaguacagcgaggaggccaagcugaaccgggaggagaucgacggcgugaagcucgaguccacccgcaucuaccagauccuggcgaucuacagcaccgucgccuccagccuggugcucguggucagccugggggccaucuccuucuggaugugcagcaacggcucccugcagugccggaucugcaucuga

SEQ ID NO: 68862 - RNA, 1701 nt, Artificial Sequence
  derived and/or modified CDS sequence (opt1) from hemagglutinin__InfluenzaA__ADG42393
augaaggccauccuggugguccuccuguacaccuucgccaccgcgaacgccgacacgcugugcaucggcuaccacgccaacaacagcaccgacaccguggacaccgugcucgagaagaacgucacggugacccacuccgugaaccugcuggaggacaagcacaacgagaagcucugcaagcugcgcggggucgcgccccugcaccucggcaagugcaacaucgccggguggauccugggcaacccggagugcgagagccuguccaccgccagcuccuggagcuacaucguggagaccuccagcuccgacaacgggacgugcuaccccggcgacuucaucgacuacgaggagcuccgggagcagcugagcuccgugagcuccuucgagcgcuucgagaucuuccccaagaccagcuccuggcccaaccacgacagcaacaagggcgucaccgccgccugcccgcacgccggggcgaaguccuucuacaagaaccugaucuggcucgugaagaagggcaacagcuaccccaagcuguccaagagcuacaucaacgacaaggggaaggaggugcugguccucuggggcauccaccaccccagcaccuccgccgaccagcagagccuguaccagaacgccgacgccuacguguucguggggacgucccgguacagcaagaaguucaagcccgagaucgccauccgcccgaagguccgggagcaggagggccgcaugaacuacuacuggacccugguggagcccggcgacaagaucaccuucgaggcgaccgggaaccucguggucccccgguacgccuucgccauggagcgcaacgccggcuccgggaucaucaucagcgacacgcccgugcacgacugcaacacgaccugccagaccccgaagggcgccaucaacaccucccugcccuuccagaacauccaccccaucaccaucggcaagugccccaaguacgucaagagcaccaagcugcggcucgcgaccgggcugcgcaacgugccguccauccagagccggggccuguucggggccaucgccggcuucaucgagggcggguggacgggcaugguggacgggugguacggcuaccaccaccagaacgagcagggguccggcuacgccgccgaccucaagagcacccagaacgcgaucgacgagaucaccaacaaggugaacuccgucaucgagaagaugaacacccaguucacggccguggggaaggaguucaaccaccuggagaagcgcaucgagaaccugaacaagaaggucgacgacggcuuccucgacaucuggaccuacaacgccgagcugcuggugcuccuggagaacgagcggacccuggacuaccacgacagcaacgugaagaaccucuacgagaagguccgcucccagcugaagaacaacgccaaggagaucggcaacgggugcuucgaguucuaccacaagugcgacaacacgugcauggagagcgugaagaacggcaccuacgacuaccccaaguacuccgaggaggccaagcugaaccgggaggagaucgacggggugaagcucgagagcacccgcaucuaccagauccuggcgaucuacuccaccgucgccagcagccuggugcuccuggugucccugggcgccaucagcuucuggaugugcuccaacgggagccuccagugccggaucugcaucuga

SEQ ID NO: 68863 - RNA, 1701 nt, Artificial Sequence; identical to SEQ ID NO: 67857
  derived and/or modified CDS sequence (opt1) from hemagglutinin__InfluenzaA__ADG42403

SEQ ID NO: 68864 - RNA, 1701 nt, Artificial Sequence; identical to SEQ ID NO: 68113
  derived and/or modified CDS sequence (opt1) from hemagglutinin__InfluenzaA__ADG42413

SEQ ID NO: 68865 - RNA, 1701 nt, Artificial Sequence; identical to SEQ ID NO: 68860
  derived and/or modified CDS sequence (opt1) from hemagglutinin__InfluenzaA__ADG42423

SEQ ID NO: 68866 - RNA, 1701 nt, Artificial Sequence; identical to SEQ ID NO: 68113
  derived and/or modified CDS sequence (opt1) from hemagglutinin__InfluenzaA__ADG42443

SEQ ID NO: 68867 - RNA, 1701 nt, Artificial Sequence
  derived and/or modified CDS sequence (opt1) from hemagglutinin__InfluenzaA__ADG42453
augaaggccauccuggugguccuccuguacaccuucgccaccgcgaacgccgacacgcugugcaucggcuaccacgccaacaacagcaccgacaccguggacaccgugcucgagaagaacgucacggugacccacuccgugaacauccuggaggacaagcacaacgggaagcugugcaagcuccgcggcgucgcgccccugcaccuggggaagugcaacaucgccggcuggauccucgggaacccggagugcgagagccuguccaccgccagcuccuggagcuacaucguggagaccuccagcuccgacaacggcacgugcuaccccggcgacuucaucgacuacgaggagcugcgggagcagcucagcuccgugagcuccuucgagcgcuucgagaucuuccccaagaccagcuccuggcccaaccacgacagcaacaagggggucaccgccgccugcccgcacgccggcgcgaaguccuucuacaagaaccugaucuggcuggugaagaaggggaacagcuaccccaagcucuccaagagcuacaucaacgacaagggcaaggaggugcugguccugugggggauccaccaccccagcaccuccgccgaccagcagagccucuaccagaacgccgacgccuacguguucgugggcacgucccgguacagcaagaaguucaagcccgagaucgccauccgcccgaagguccgggaccaggagggccgcaugaacuacuacuggacccugguggagcccggggacaagaucaccuucgaggcgaccggcaaccugguggucccccgguacgccuucgccauggagcgcaacgccggguccggcaucaucaucagcgacacgcccgugcacgacugcaacacgaccugccagaccccgaagggcgccaucaacaccucccuccccuuccagaacauccaccccaucaccaucgggaagugccccaaguacgucaagagcaccaagcugcggcuggcgaccggccuccgcaacgugccguccauccagagccgggggcuguucggcgccaucgccggguucaucgagggcggcuggacggggaugguggacggcugguacggguaccaccaccagaacgagcagggcuccggguacgccgccgaccucaagagcacccagaacgcgaucgacgagaucaccaacaaggugaacuccgucaucgagaagaugaacacccaguucacggccgugggcaaggaguucaaccaccuggagaagcgcgucgagaaccugaacaagaagguggacgacggcuuccuggacaucuggaccuacaacgccgagcuccuggugcugcucgagaacgagcggacccuggacuaccacgacagcaacgucaagaaccuguacgagaaggugcgcucccagcucaagaacaacgccaaggagaucgggaacggcugcuucgaguucuaccacaagugcgacaacacgugcauggagagcgugaagaacgggaccuacgacuaccccaaguacuccgaggaggccaagcugaaccgggaggagaucgacggcgucaagcuggagagcacccgcaucuaccagauccucgcgaucuacuccaccguggccagcagccuggugcuggucgugucccucggggccaucagcuucuggaugugcuccaacggcagccugcagugccggaucugcaucuga

SEQ ID NO: 68868 - RNA, 1701 nt, Artificial Sequence; identical to SEQ ID NO: 67046
  derived and/or modified CDS sequence (opt1) from hemagglutinin__InfluenzaA__ADG42463

SEQ ID NO: 68869 - RNA, 1701 nt, Artificial Sequence; identical to SEQ ID NO: 66693
  derived and/or modified CDS sequence (opt1) from hemagglutinin__InfluenzaA__ADG42473

SEQ ID NO: 68870 - RNA, 1701 nt, Artificial Sequence; identical to SEQ ID NO: 68113
  derived and/or modified CDS sequence (opt1) from hemagglutinin__InfluenzaA__ADG42483

SEQ ID NO: 68871 - RNA, 1701 nt, Artificial Sequence; identical to SEQ ID NO: 68245
  derived and/or modified CDS sequence (opt1) from hemagglutinin__InfluenzaA__ADG42493

SEQ ID NO: 68872 - RNA, 1701 nt, Artificial Sequence; identical to SEQ ID NO: 68306
  derived and/or modified CDS sequence (opt1) from hemagglutinin__InfluenzaA__ADG42503

SEQ ID NO: 68873 - RNA, 1701 nt, Artificial Sequence; identical to SEQ ID NO: 67794
  derived and/or modified CDS sequence (opt1) from hemagglutinin__InfluenzaA__ADG42513

SEQ ID NO: 68874 - RNA, 1701 nt, Artificial Sequence
  derived and/or modified CDS sequence (opt1) from hemagglutinin__InfluenzaA__ADG42533
augaaggccauccuggugguccuccuguacaccuucgccaccgcgaaggccgacacgcugugcaucggcuaccacgccaacaacagcaccgacaccguggacaccgugcucgagaagaacgucacggugacccacuccgugaaccugcuggaggacaagcacaacgggaagcucugcaagcugcgcggcgucgcgccccugcaccucgggaagugcaacaucgccggcuggauccuggggaacccggagugcgagagccuguccaccgccagcuccuggagcuacaucguggagaccuccagcuccgacaacggcacgugcuaccccggcgacuucaucgacuacgaggagcuccgggagcagcugagcuccgugagcuccuucgagcgcuucgagaucuuccccaagaccagcuccuggcccaaccacgacagcaacaagggggucaccgccgccugcccgcacgccggcgcgaaguccuucuacaagaaccugaucuggcucgugaagaaggggaacagcuaccccaagcuguccaagagcuacaucaacgacaagggcaaggaggugcugguccucugggggauccaccaccccagcaccuccgccgaccagcagagccuguaccagaacgccgacgccuacguguucgugggcacgucccgguacagcaagaaguucaagcccgagaucgccauccgcccgaagguccgggaccaggagggccgcaugaacuacuacuggacccugguggagcccggggacaagaucaccuucgaggcgaccggcaaccucguggucccccgguacgccuucgccauggagcgcaacgccggguccggcaucaucaucagcgacacgcccgugcacgacugcaacacgaccugccagaccccgaagggcgccaucaacaccucccugcccuuccagaacauccaccccaucaccaucgggaagugccccaaguacgucaagagcaccaagcugcggcucgcgaccggccugcgcaacaucccguccauccagagccgggggcuguucggcgccaucgccggguucaucgagggcggcuggacggggaugguggacggcugguacggguaccaccaccagaacgagcagggcuccggguacgccgccgaccucaagagcacccagaacgcgaucgacgagaucaccaacaaggugaacuccgugaucgagaagaugaacacccaguucacggccgucggcaaggaguucaaccaccuggagaagcgcaucgagaaccugaacaagaagguggacgacggcuuccucgacaucuggaccuacaacgccgagcugcugguccuccuggagaacgagcggacccuggacuaccacgacagcaacgugaagaaccucuacgagaaggugcgcucccagcugaagaacaacgccaaggagaucgggaacggcugcuucgaguucuaccacaagugcgacaacacgugcauggagagcgucaagaacgggaccuacgacuaccccaaguacuccgaggaggccaagcugaaccgggaggagaucgacggcgugaagcucgagagcacccgcaucuaccagauccuggcgaucuacuccaccguggccagcagccugguccucguggugucccugggggccaucagcuucuggaugugcuccaacggcagccugcagugccggaucugcaucuga

SEQ ID NO: 68875 - RNA, 1701 nt, Artificial Sequence
  derived and/or modified CDS sequence (opt1) from hemagglutinin__InfluenzaA__ADG42553
augaaggccauccuggugguccuccuguacaccuucgccaccgcgaacgccgacacgcugugcaucggcuaccacgccaacaacagcaccgacaccguggacaccgugcucgagaagaacgucacggugacccacuccgugaaccugcuggaggacaagcacaacgggaagcucugcaagcugcgcggcgucgcgccccugcaccucgggaagugcaacaucgccggcuggauccuggggaacccggagugcgagagccuguccaccgcgagcuccuggagcuacaucguggagaccuccagcuccgacaacggcacgugcuaccccggcgacuucaucgacuacgaggagcuccgggagcagcugagcuccgugagcuccuucgagcgcuucgagaucuuccccaagaccagcuccuggcccaaccacgacagcaacaagggggucaccgccgccugcucccacgccggcgccaagagcuucuacaagaaccugaucuggcucgugaagaaggggaacuccuacccgaagcugaacaagagcuacaucaacgacaagggcaaggaggugcugguccucugggggauccaccaccccagcaccuccgccgaccagcagagccuguaccagaacgccgacgccuacguguucgugggcacgucccgguacagcaagaaguucaagcccgagaucgccauccgccccaagguccgggagcaggagggccgcaugaacuacuacuggacccugguggagccgggggacaagaucaccuucgaggcgaccggcaaccucguggucccccgguacgccuucgccauggagcgcaacgccggguccggcaucaucaucagcgacacgcccgugcacgacugcaacacgaccugccagacccccaagggcgccaucaacaccucccugccguuccagaacauccaccccaucaccaucgggaagugccccaaguacgucaagagcaccaagcugcggcucgcgaccggccugcgcaacgugcccuccauccagagccgggggcuguucggcgccaucgccggguucaucgagggcggcuggacggggaugguggacggcugguacggguaccaccaccagaacgagcagggcuccggguacgccgccgaccucaagagcacccagaacgcgaucgacgagaucaccaacaaggugaacuccgucaucgagaagaugaacacccaguucacggccgugggcaaggaguucaaccaccuggagaagcgcaucgagaaccugaacaagaaggucgacgacggcuuccucgacaucuggaccuacaacgccgagcugcuggugcuccuggagaacgagcggacccuggacuaccacgacagcaacgugaagaaccucuacgagaagguccgcucccagcugaagaacaacgccaaggagaucgggaacggcugcuucgaguucuaccacaagugcgacaacacgugcauggagagcgugaagaacgggaccuacgacuacccgaaguacuccgaggaggccaagcugaaccgggaggagaucgacggcgugaagcucgagagcacccgcaucuaccagauccuggcgaucuacuccaccgucgccagcagccuggugcucguggucucccugggggccaucagcuucuggaugugcuccaacggcagccugcagugccggaucugcaucuga

SEQ ID NO: 68876 - RNA, 1701 nt, Artificial Sequence
  derived and/or modified CDS sequence (opt1) from hemagglutinin__InfluenzaA__ADG42573
augaaggccauccuggugguccuccuguacaccuucgccaccgcgaacgccgacacgcugugcaucggcuaccacgccaacaacagcaccgacaccguggacaccgugcucgagaagaacgucacggugacccacuccgugaaccugcuggaggacaagcacaacgggaagcucugcaagcugcgcggcgucgcgccccugcaccucgggaagugcaacaucgccggcuggauccuggggaacccggagugcgagagccuguccaccgccagcuccuggagcuacaucguggagaccuccagcuccgacaacggcacgugcuaccccggcgacuucaucgacuacgaggagcuccgggagcagcugagcuccgugagcuccuucgagcgcuucgagaucuuccccaagaccagcuccuggcccaaccacgacagcaacaagggggucaccgccgccugcccgcacgccggcgcgaaguccuucuacaagaaccugaucuggcucgugaagaaggggaacagcuaccccaagcuguccaagagcuacaucaacgacaagggcaaggaggugcugguccucugggggauccaccaccccagcaccuccgccgaccagcagagccuguaccagaacgccgacgccuacguguucgugggcacgucccgguacagcaagaaguucaagcccgagaucgccauccgcccgaagguccgggaccaggagggccgcaugaacuacuacuggacccugaucgagcccggggacaagaucaccuucgaggcgaccggcaaccucguggugccccgguacgccuucgccauggagcgcaacgccggguccggcaucaucaucagcgacacgcccguccacgacugcaacacgaccugccagaccccgaagggcgccaucaacaccucccugcccuuccagaacauccaccccaucaccaucgggaagugccccaaguacgucaagagcaccaagcugcggcucgcgaccggccugcgcaacgugccguccauccagagccgggggcuguucggcgccaucgccggguucaucgagggcggcuggacggggaugguggacggcugguacggguaccaccaccagaacgagcagggcuccggguacgccgccgaccucaagagcacccagaacgcgaucgacgagaucaccaacaaggugaacuccgugaucgagaagaugaacacccaguucacggccgucggcaaggaguucaaccaccuggagaagcgcaucgagaaccugaacaagaagguggacgacggcuuccucgacaucuggaccuacaacgccgagcugcugguccuccuggagaacgagcggacccuggacuaccacgacagcaacgugaagaagcucuacgagaaggugcgcucccagcugaagaacaacgccaaggagaucgggaacggcugcuucgaguucuaccacaagugcgacaacacgugcauggagagcgucaagaacgggaccuacgacuaccccaaguacuccgaggaggccaagcugaaccgggaggagaucgacggcgugaagcucgagagcacccgcaucuaccagauccuggcgaucuacuccaccguggccagcagccugguccucguggugucccugggggccaucagcuucuggaugugcuccaacggcagccugcagugccggaucugcaucuga

SEQ ID NO: 68877 - RNA, 1701 nt, Artificial Sequence
  derived and/or modified CDS sequence (opt1) from hemagglutinin__InfluenzaA__ADG42583
augaaggccauccuggugguccuccuguacaccuucgccaccgcgaacgccgacacgcugugcaucggcuaccacgccaacaacagcaccgacaccguggacaccgugcucgagaagaacgucacggugacccacuccgugaaccugcuggaggacaagcacaacgggaagcucugcaagcugcgcggcgucgcgccccugcaccucgggaagugcaacaucgccggcuggauccuggggaacccggagugcgagagccuguccaccgccagcuccuggagcuacaucguggagaccuccagcuccgacaacggcacgugcuaccccggcgacuucaucgacuacgaggagcuccgggagcagcugagcuccgugagcuccuucgagcgcuucgagaucuuccccaagaccagcuccuggcccaaccacgacagcaacaagggggucaccgccgccugcccgcacgccggcgcgaaguccuucuacaagaaccugaucuggcucgugaagaaggggaacagcuaccccaagcuguccaagagcuacaucaacgacaagggcaaggaggugcugguccucugggggauccaccaccccagcaccuccgccgaccagcagagccuguaccagaacgccgacuccuacguguucgugggcacgagccgguacuccaagaaguucaagcccgagaucgccauccgcccgaagguccgggaccaggagggccgcaugaacuacuacuggacccugguggagcccggggacaagaucaccuucgaggccaccggcaaccucguggucccccgguacgcguucgccauggagcgcaacgccgggagcggcaucaucaucuccgacacgcccgugcacgacugcaacacgaccugccagaccccgaagggcgccaucaacaccagccugcccuuccagaacauccaccccaucaccaucgggaagugccccaaguacgugaaguccaccaagcugcggcucgccaccggccugcgcaacgucccgagcauccagucccgggggcuguucggcgcgaucgccggguucaucgagggcggcuggacggggaugguggacggcugguacggguaccaccaccagaacgagcagggcagcggguacgccgccgaccucaaguccacccagcacgccaucgacgagaucaccaacaaggugaacagcgucaucgagaagaugaacacccaguucacggcggugggcaaggaguucaaccaccuggagaagcgcaucgagaaccugaacaagaaggucgacgacggcuuccucgacaucuggaccuacaacgccgagcugcuggugcuccuggagaacgagcggacccuggacuaccacgacuccaacgugaagaaccucuacgagaagguccgcagccagcugaagaacaacgccaaggagaucgggaacggcugcuucgaguucuaccacaagugcgacaacacgugcauggaguccgugaagaacgggaccuacgacuaccccaaguacagcgaggaggccaagcugaaccgggaggagaucgacggcgugaagcucgaguccacccgcaucuaccagauccuggccaucuacagcaccgucgcgagcucccuggugcucguggucagccugggggccaucuccuucuggaugugcagcaacggcucccugcagugccggaucugcaucuga

SEQ ID NO: 68878 - RNA, 1701 nt, Artificial Sequence; identical to SEQ ID NO: 68290
  derived and/or modified CDS sequence (opt1) from hemagglutinin__InfluenzaA__ADG42593

SEQ ID NO: 68879 - RNA, 1701 nt, Artificial Sequence
  derived and/or modified CDS sequence (opt1) from hemagglutinin__InfluenzaA__ADG42603
augaaggccauccuggugguccuccuguacaccuucgccaccgcgaacgccgacacgcugugcaucggcuaccacgccaacaacagcaccgacaccguggacaccgugcucgagaagaacgucacggugacccacuccgugaaccugcuggaggacaagcacaacgggaagcucugcaagcugcgcggcgucgcgccccugcaccucgggaagugcaacaucgccggcuggauccuggggaacccggagugcgagagccuguccaccgccagcuccuggagcuacaucguggagaccuccagcuccgacaacggcacgugcuaccccggcgacuucaucgacuacgaggagcuccgggagcagcugagcuccgugagcuccuucgagcgcuucgagaucuuccccaagaccagcuccuggcccaaccacgacagcaacaagggggucaccgccgccugcccgcacgccggcgcgaaguccuucuacaagaaccugaucuggcucgugaagaaggggaacagcuaccccaagcugcggaaguccuacaucaacgacaagggcaaggaggugcugguccucugggggauccaccaccccagcaccagcgccgaccagcagucccuguaccagaacgccgacgccuacguguucgugggcacgagccgcuacuccaagaaguucaagcccgagaucgccacccggccgaagguccgcgaccaggagggccggaugaacuacuacuggacccugguggagcccggggacaagaucaccuucgaggcgacgggcaaccucguggucccccgcuacgccuucgccauggagcggaacgccgggagcggcaucaucaucuccgacacccccgugcacgacugcaacacgaccugccagaccccgaagggcagcaucaacaccucccugcccuuccagaacauccaccccaucaccaucgggaagugccccaaguacgucaagagcaccaagcugcgccucgccacgggccugcggaacgugccguccauccagagccgcgggcuguucggcgcgaucgccggguucaucgagggcggcuggaccgggaugguggacggcugguacggguaccaccaccagaacgagcagggcuccggguacgccgccgaccucaagagcacccagcacgccaucgacgagaucaccaacaaggugaacuccgucaucgagaagaugaacacgcaguucaccgcggugggcaaggaguucaaccaccuggagaagcggaucgagaaccugaacaagaaggucgacgacggcuuccucgacaucuggaccuacaacgccgagcugcuggugcuccuggagaacgagcgcacccuggacuaccacgacagcaacgugaagaaccucuacgagaagguccggucccagcugaagaacaacgccaaggagaucgggaacggcugcuucgaguucuaccacaagugcgacaacacgugcauggagagcgugaagaacgggaccuacgacuaccccaaguacuccgaggaggccaagcugaaccgcgaggagaucgacggcgugaagcucgagagcacccggaucuaccagauccuggccaucuacuccaccgucgcgagcagccuggugcucguggucucccugggggccaucagcuucuggaugugcuccaacggcagccugcagugccgcaucugcaucuga

SEQ ID NO: 68880 - RNA, 1701 nt, Artificial Sequence
  derived and/or modified CDS sequence (opt1) from hemagglutinin__InfluenzaA__ADG42613
augaaggccauccuggugguccuccuguacaccuucgccaccgcgaacgccgacacgcugugcaucggcuaccacgccaacaacagcaccgacaccguggacaccgugcucgagaagaacgucacggugacccacuccgugaacauccuggaggacaagcacaacgggaagcugugcaagcuccgcggcgucgcgccccugcaccuggggaagugcaacaucgccggcuggauccucgggaacccggagugcgagagccuguccaccgccagcuccuggagcuacaucguggagaccuccagcuccgacaacggcacgugcuaccccggcgacuucaucgacuacgaggagcugcgggagcagcucagcuccgugagcuccuucgagcgcuucgagaucuuccccaagaccagcuccuggcccaaccacgacagcaacaagggggucaccgccgccugcccgcacgccggcgcgaaguccuucuacaagaaccugaucuggcuggugaagaaggggaacagcuaccccaagcucuccaagagcuacaucaacgacaagggcaaggaggugcugguccugugggggauccaccaccccagcaccuccgccgaccagcagagccucuaccagaacgccgacgccuacguguucgugggcacgucccgguacagcaagaaguucaagcccgagaucgccauccgcccgaagguccgggaccaggagggccgcaugaacuacuacuggacccugguggagcccggggacaagaucaccuucgaggcgaccggcaaccugguggucccccgguacgccuucgccauggagcgcaacgccggguccggcaucaucaucagcgacacgcccgugcacgacugcaacacgaccugccagaccccgaagggcgccaucaacaccucccuccccuuccagaacauccaccccaucaccaucgggaagugccccaaguacgucaagagcaccaagcugcggcuggcgaccggccuccgcaacgugccguccauccagagccgggggcuguucggcgccaucgccggguucaucgagggcggcuggacggggaugguggacggcugguacggguaccaccaccagaacgagcagggcuccggguacgccgccgaccucaagagcacccagaacgcgaucgacgagaucaccaacaaggugaacuccgucaucgagaagaugaacacccaguucacggccgugggcaaggaguucaaccaccuggagaagcgcaucgagaaccugaacaagaaggucgacgacggcuuccuggacaucuggaccuacaacgccgagcuccuggugcugcucgagaacgagcggacccuggacuaccacgacagcaacgugaagaaccuguacgagaagguccgcucccagcucaagaacaacgccaaggagaucgggaacggcugcuucgaguucuaccacaagugcgacaacacgugcauggagagcgugaagaacgggaccuacgacuaccccaaguacuccgaggaggccaagcugaaccgggagaagaucgacggcgugaagcuggagagcacccgcaucuaccagauccucgcgaucuacuccaccgucgccagcagccuggugcugguggucucccucggggccaucagcuucuggaugugcuccaacggcagccugcagugccggaucugcaucuga

SEQ ID NO: 68881 - RNA, 1701 nt, Artificial Sequence; identical to SEQ ID NO: 68320
  derived and/or modified CDS sequence (opt1) from hemagglutinin__InfluenzaA__ADG42623

SEQ ID NO: 68882 - RNA, 1701 nt, Artificial Sequence; identical to SEQ ID NO: 66693
  derived and/or modified CDS sequence (opt1) from hemagglutinin__InfluenzaA__ADG42633

SEQ ID NO: 68883 - RNA, 1701 nt, Artificial Sequence
  derived and/or modified CDS sequence (opt1) from hemagglutinin__InfluenzaA__ADG42643
augaaggccauccuggugguccuccuguacaccuucgccaccgcgaacgccgacacgcugugcaucggcuaccacgccaacaacagcaccgacaccguggacaccgugcucgagaagaacgucacggugacccacuccgccaaccugcuggaggacaagcacaacgggaagcucugcaagcugcgcggcgccgcgccccugcaccucgggaagugcaacaucgccggcuggauccuggggaacccggagugcgagagccuguccaccgccagcuccuggagcuacaucguggagaccuccagcuccgacaacggcacgugcuaccccggcgacuucaucgacuacgaggagcuccgggagcagcugagcuccgucagcuccuucgagcgcuucgagauguuccccaagaccagcuccuggcccaaccacgacagcaacaagggggugaccgccgcgugcccgcacgccggcgccaaguccuucuacaagaaccugaucuggcucgugaagaaggggaacagcuaccccaagcuguccaagagcuacgucaacgacaagggcaaggaggugcuggugcucugggggauccaccaccccagcaccuccgccgaccagcagagccuguaccagaacgccgacgcguacgucuucgugggcacgucccgguacagcaagaaguucaagcccgagaucgccauccgcccgaaggugcgggaccaggagggccgcaugaacuacuacuggacccuggucgagcccggggacaagaucaccuucgaggccaccggcaaccucguggugccccgguacgccuucgccauggagcgcaacgcgggguccggcaucaucaucagcgacacgcccguccacgacugcaacacgaccugccagaccccgaagggcgccaucaacaccucccugcccuuccagaacauccaccccaucaccaucgggaagugccccaaguacgucaagagcaccaagcugcggcucgccaccggccugcgcaacgugccguccauccagagccgggggcuguucggcgccaucgccggguucaucgagggcggcuggacggggaugguggacggcugguacggguaccaccaccagaacgagcagggcuccggguacgcggccgaccucaagagcacccagaacgccaucgacgagaucaccaacaaggugaacuccgugaucgagaagaugaacacccaguucacggccgucggcaaggaguucaaccaccuggagaagcgcaucgagaaccugaacaagaagguggacgacggcuuccucgacaucuggaccuacaacgccgagcugcugguccuccuggagaacgagcggacccuggacuaccacgacagcaacgugaagaaccucuacgagaaggugcgcucccagcugaagaacaacgcgaaggagaucgggaacggcugcuucgaguucuaccacaagugcgacaacacgugcauggagagcgucaagaacgggaccuacgacuaccccaaguacuccgaggaggccaagcugaaccgggaggagaucgacggcgugaagcucgagagcacccgcaucuaccagauccuggccaucuacuccaccguggccagcagccugguccucguggugucccugggggcgaucagcuucuggaugugcuccaacggcagccugcagugccggaucugcaucuga

SEQ ID NO: 68884 - RNA, 1701 nt, Artificial Sequence
  derived and/or modified CDS sequence (opt1) from hemagglutinin__InfluenzaA__ADG42653
augaaggccauccuggugguccuccuguacaccagcgccaccgcgaacgccgacacgcugugcaucggcuaccacgccaacaacuccaccgacaccguggacaccgugcucgagaagaacgucacggugacccacagcgugaaccugcuggaggacaagcacaacgggaagcucugcaagcugcgcggcgucgcgccccugcaccucgggaagugcaacaucgccggcuggauccuggggaacccggagugcgagucccugagcaccgcguccagcugguccuacaucguggagaccagcuccagcgacaacggcacgugcuaccccggcgacuucaucgacuacgaggagcuccgggagcagcuguccagcguguccagcuucgagcgcuucgagauguuccccaagaccuccagcuggcccaaccacgacuccaacaagggggucaccgccgccugcccgcacgccggcgccaagagcuucuacaagaaccugaucuggcucgugaagaaggggaacuccuaccccaagcugagcaagagcuacaucaacgacaagggcaaggaggugcugguccucugggggauccaccaccccuccaccagcgccgaccagcagucccuguaccagaacgccgacgccuacguguucgugggcacgagccgguacuccaagaaguucaagcccgagaucgccauccgcccgaagguccgggaccaggagggccgcaugaacuacuacuggacccugguggagcccggggacaagaucaccuucgaggcgaccggcaaccucguggucccccgguacgccuucgccauggagcgcaacgccgggagcggcaucaucaucuccgacacgcccgugcacgacugcaacacgaccugccagaccccgaagggcgccaucaacaccagccugcccuuccagaacauccaccccaucaccaucgggaagugccccaaguacgugaaguccaccaagcugcggcucgcgaccggccugcgcaacgucccgagcauccagucccgggggcuguucggcgccaucgccggguucaucgagggcggcuggacggggaugguggacggcugguacggguaccaccaccagaacgagcagggcagcggguacgccgccgaccucaaguccacccagaacgcgaucgacgagaucaccaacaaggugaacagcgucaucgagaagaugaacacccaguucacggccgugggcaaggaguucaaccaccuggagaagcgcaucgagaaccugaacaagaaggucgacgacggcuuccucgacaucuggaccuacaacgccgagcugcuggugcuccuggagaacgagcggacccuggacuaccacgacuccaacgugaagaaccucuacgagaagguccgcagccagcugaagaacaacgccaaggagaucgggaacggcugcuucgaguucuaccacaagugcgacaacacgugcauggaguccgugaagaacgggaccuacgacuaccccaaguacagcgaggaggccaagcugaaccgggaggagaucgacggcgugaagcucgaguccacccgcaucuaccagauccuggcgaucuacagcaccgucgccagcucccuggugcucguggucagccugggggccaucuccuucuggaugugcagcaacggcucccugcagugccggaucugcaucuga

SEQ ID NO: 68885 - RNA, 1701 nt, Artificial Sequence; identical to SEQ ID NO: 67857
  derived and/or modified CDS sequence (opt1) from hemagglutinin__InfluenzaA__ADG42663

SEQ ID NO: 68886 - RNA, 1701 nt, Artificial Sequence
  derived and/or modified CDS sequence (opt1) from hemagglutinin__InfluenzaA__ADG42673
augaaggccauccuggugguccuccuguacaccuucgccaccgcgaacgccgacacgcugugcaucggcuaccacgccaacaacagcaccgacaccguggacaccgugcucgagaagaacgucacggugacccacuccgugaaccugcuggaggacaagcacaacgggaagcucugcaagcugaagggcgucgcgccccugcaccucgggaagugcaacaucgccggcuggauccuggggaacccggagugcgagagccuguccaccgcgggcagcugguccuacaucguggagaccagcuccagcgacaacggcacgugcuaccccggggacuucaucgacuacgaggagcuccgcgagcagcuguccagcguguccagcuucgagcgguucgagaucuuccccaagaccuccagcuggcccaaccacgacuccaacaagggcgucaccgccgccugcccgcacgccggggccaagagcuucuacaagaaccugaucuggcucgugaagaagggcaacuccuaccccaagcugagcaaguccuacaucaacgacaaggggaaggaggugcugguccucuggggcauccaccaccccagcaccagcgccgaccagcagucccuguaccagaacgccgacgccuacguguucgugggcacgagccgcuacuccaagaaguucaagcccgagaucgccauccggccgaagguccgcgaccaggaggggcggaugaacuacuacuggacccugguggagcccggcgacaagaucaccuucgaggcgaccgggaaccucguggucccccgcuacgccuucgccauggagcggaacgccggcagcggcaucaucaucuccgacacgcccgugcacgacugcaacacgaccugccagaccccgaagggggccaucaacaccagccugcccuuccagaacauccaccccaucaccaucggcaagugccccaaguacgugaaguccaccaagcugcgccucgcgaccgggcugcggaacgucccgagcauccagucccgcggccuguucggggccaucgccggcuucaucgagggcggguggacgggcaugguggacgggugguacggcuaccaccaccagaacgagcaggggagcggcuacgccgccgaccucaaguccacccagaacgcgaucgacggcaucaccaacaaggugaacagcgucaucgagaagaugaacacccaguucacggccguggggaaggaguucaaccaccuggagaagcggaucgagaaccugaacaagaaggucgacgacggcuuccucgacaucuggaccuacaacgccgagcugcuggugcuccuggagaacgagcgcacccuggacuaccacgacuccaacgugaagaaccucuacgagaagguccggagccagcugaagaacaacgccaaggagaucgggaacggcugcuucgaguucuaccacaagugcgacaacacgugcauggaguccgugaagaacgggaccuacgacuaccccaaguacagcgaggaggccaagcugaaccgcgaggagaucgacggcgugaagcucgaguccacccggaucuaccagauccuggcgaucuacagcaccgucgccuccagccuggugcucguggucagccugggcgccaucuccuucuggaugugcagcaacgggucccugcagugccgcaucugcaucuga

SEQ ID NO: 68887 - RNA, 1701 nt, Artificial Sequence
  derived and/or modified CDS sequence (opt1) from hemagglutinin__InfluenzaA__ADG42683
augaaggccauccuggugguccuccuguacaccuucgccaccgcgaacgccgacacgcugugcaucggcuaccacgccaacaacagcaccgacaccguggacaccgugcucgagaagaacgucacggugacccacuccgugaacauccuggaggacaagcacaacgggaagcugugcaagcuccgcggcgucgcgccccugcaccuggggaagugcaacaucgccggcuggauccucgggaacccggagugcgagagccuguccaccgccagcuccuggagcuacaucguggagaccuccagcuccgacaacggcacgugcuaccccggcaacuucaucgacuacgaggagcugcgggagcagcucagcuccgugagcuccuucgagcgcuucgagaucuuccccaagaccagcuccuggcccaaccacgacagcaacaagggggucaccgccgccugcccgcacgccggcgcgaaguccuucuacaagaaccugaucuggcuggugaagaaggggaacagcuaccccaagcucuccaagagcuacaucaacgacaagggcaaggaggugcugguccugugggggauccaccaccccagcaccuccgccgaccagcagagccucuaccagaacgccgacgccuacguguucgugggcacgucccgguacagcaagaaguucaagcccgagaucgccauccgcccgaagguccgggaccaggagggccgcaugaacuacuacuggacccugguggagcccggggacaagaucaccuucgaggcgaccggcaaccugguggucccccgguacgccuucgccauggagcgcaacgccggguccggcaucaucaucagcgacacgcccgugcacgacugcaacacgaccugccagaccccgaagggcgccaucaacaccucccuccccuuccagaacauccaccccaucaccaucgggaagugccccaaguacgucaagagcaccaagcugcggcuggcgaccggccuccgcaacgugccguccauccagagccgggggcuguucggcgccaucgccggguucaucgagggcggcuggacggggaugguggacggcugguacggguaccaccaccagaacgagcagggcuccggguacgccgccgaccucaagagcacccagaacgcgaucgacgagaucaccaacaaggugaacuccgucaucgagaagaugaacacccaguucacggccgugggcaaggaguucaaccaccuggagaagcgcaucgagaaccugaacaagaaggucgacgacggcuuccuggacaucuggaccuacaacgccgagcuccuggugcugcucgagaacgagcggacccuggacuaccacgacagcaacgugaagaaccuguacgagaagguccgcucccagcucaagaacaacgccaaggagaucgggaacggcugcuucgaguucuaccacaagugcgacaacacgugcauggagagcgugaagaacgggaccuacgacuaccccaaguacuccgaggaggccaagcugaaccgggaggagaucgacggcgugaagcuggagagcacccgcaucuaccagauccucgcgaucuacuccaccgucgccagcagccuggugcugguggucucccucggggccaucagcuucuggaugugcuccaacggcagccugcagugccggaucugcaucuga

SEQ ID NO: 68888 - RNA, 1701 nt, Artificial Sequence; identical to SEQ ID NO: 67857
  derived and/or modified CDS sequence (opt1) from hemagglutinin__InfluenzaA__ADG42693

SEQ ID NO: 68889 - RNA, 1701 nt, Artificial Sequence; identical to SEQ ID NO: 68565
  derived and/or modified CDS sequence (opt1) from hemagglutinin__InfluenzaA__ADG42703

SEQ ID NO: 68890 - RNA, 1701 nt, Artificial Sequence
  derived and/or modified CDS sequence (opt1) from hemagglutinin__InfluenzaA__ADG42723
augaaggccauccuggugguccuccuguacaccuucgccaccgcgaacgccgacacgcugugcaucggcuaccacgccaacaacagcaccgacaccguggacaccgugcucgagaagaacgucacggugacccacuccgugaaccugcuggaggacaagcacaacgggaagcucugcaagcugcgcggcgucgcgccccugcaccucgggaagugcaacaucgccggcuggauccuggggaacccggagugcgagagccuguccaccgccagcuccuggagcuacaucguggagaccuccagcuccgacaacggcacgugcuaccccggcgacuucaucgacuacgaggagcuccgggagcagcugagcuccgugagcuccuucgagcgcuucgagaucuuccccaagaccagcuccuggcccaaccacgacagcaacaagggggucaccgccgccugcccgcacgccggcgcgaaguccuucuacaagaaccugaucuggcucgugaagaaggggaacagcuaccccaagcuguccaagagcuacaucaacgacaagggcaaggaggugcugguccucugggggauccaccaccccagcaccuccgccgaccagcagagccuguaccagaacgccgacgccuacguguucgugggcacgucccgguacagcaagaaguucaagcccgagauggccauccgcccgaagguccgggaccaggagggccgcaugaacuacuacuggacccugguggagcccggggacaagaucaccuucgaggcgaccggcaaccucguggucccccgguacgccuucgccauggagcgcaacgccggguccggcaucaucaucagcgacacgcccgugcacgacugcaacacgaccugccagaccccgaagggcgccaucaacaccucccugcccuuccagaacauccaccccaucaccaucgggaagugccccaaguacgucaagagcaccaagcugcggcucgcgaccggccugcgcaacgugccguccauccagagccgggggcuguucggcgccaucgccggguucaucgagggcggcuggacggggaugguggacggcugguacggguaccaccaccagaacgagcagggcuccggguacgccgccgaccucaagagcacccagaacgcgaucgacaagaucaccaacaaggugaacuccgucaucgagaagaugaacacccaguucacggccgugggcaaggaguucaaccaccuggagaagcgcaucgagaaccugaacaagaaggucgacgacggcuuccucgacaucuggaccuacaacgccgagcugcuggugcuccuggagaacgagcggacccuggacuaccacgacagcaacgugaagaaccucuacgagaagguccgcucccagcugaagaacaacgccaaggagaucgggaacggcugcuucgaguucuaccacaagugcgacaacacgugcauggagagcgugaagaacgggaccuacgacuaccccaaguacuccgaggaggccaagcugaaccgggaggagaucgacggcgugaagcucgagagcacccgcaucuaccagauccuggcgaucuacuccaccgucgccagcagccuggugcucguggucucccugggggccaucagcuucuggaugugcuccaacggcagccugcagugccggaucugcaucuga

SEQ ID NO: 68891 - RNA, 1701 nt, Artificial Sequence; identical to SEQ ID NO: 68320
  derived and/or modified CDS sequence (opt1) from hemagglutinin__InfluenzaA__ADG42743

SEQ ID NO: 68892 - RNA, 1701 nt, Artificial Sequence
  derived and/or modified CDS sequence (opt1) from hemagglutinin__InfluenzaA__ADG42753
augaaggccauccuggugguccuccuguacaccuucgccaccgcgaacgccgacacgcugugcaucggcuaccacgccaacaacagcaccgacaccguggacaccgugcucgagaagaacgucacggugacccacuccgugaaccugcuggaggacaagcacaacgggaagcucugcaagcugcgcggcgucgcgccccugcaccucgggaagugcaacaucgccggcuggauccuggggaacccggagugcgagagccuguccaccgccagcuccuggagcuacaucguggagaccuccagcuccgacaacggcacgugcuaccccggcgacuucaucgacuacgaggagcuccgggagcagcugagcuccgugagcuccuucgagcgcuucgagaucuuccccaagaccagcuccuggcccaaccacgacagcaacaagggggucaccgccgccugcccgcacgccggcgcgaaguccuucuacaagaaccugaucuggcucgugaagaaggggaacagcuaccccaagcuguccaagagcuacaucaacgacaagggcaaggaggugcugguccucugggggauccaccaccccagcaccuccacggaccagcagagccuguaccagaacgccgacgccuacguguucgugggcaccucccgguacagcaagaaguucaagcccgagaucgccauccgcccgaagguccgggaccaggagggccgcaugaacuacuacuggacccugguggagcccggggacaagaucaccuucgaggccacgggcaaccucguggucccccgguacgcguucgccauggagcgcaacuccgggagcggcaucaucaucuccgacacccccgugcacgacugcaacacgaccugccagaccccgaagggcgccaucaacaccagccugcccuuccagaacauccaccccaucaccaucgggaagugccccaaguacgugaaguccaccaagcugcggcucgccacgggccugcgcaacgucccgagcauccagucccgggggcuguucggcgccaucgcgggguucaucgagggcggcuggaccgggaugguggacggcugguacggguaccaccaccagaacgagcagggcagcggguacgccgccgaccucaaguccacccagaacgccaucgacgagaucaccaacaaggugaacagcgucaucgagaagaugaacacgcaguucaccgccgugggcaaggaguucaaccaccuggagaagcgcaucgagaaccugaacaagaaggucgacgacggcuuccucgacaucuggaccuacaacgcggagcugcuggugcuccuggagaacgagcggacccuggacuaccacgacuccaacgugaagaaccucuacgagaagguccgcagccagcugaagaacaacgccaaggagaucgggaacggcugcuucgaguucuaccacaagugcgacaacacgugcauggaguccgugaagaacgggaccuacgacuaccccaaguacagcgaggaggccaagcugaaccgggaggagaucgacggcgugaagcucgaguccacccgcaucuaccagauccuggccaucuacagcaccgucgccagcucccuggugcucguggucagccugggggcgaucuccuucuggaugugcagcaacggcucccugcagugccggaucugcaucuga

SEQ ID NO: 68893 - RNA, 1701 nt, Artificial Sequence; identical to SEQ ID NO: 67857
  derived and/or modified CDS sequence (opt1) from hemagglutinin__InfluenzaA__ADG42763

SEQ ID NO: 68894 - RNA, 1701 nt, Artificial Sequence; identical to SEQ ID NO: 67857
  derived and/or modified CDS sequence (opt1) from hemagglutinin__InfluenzaA__ADG42773

SEQ ID NO: 68895 - RNA, 1701 nt, Artificial Sequence
  derived and/or modified CDS sequence (opt1) from hemagglutinin__InfluenzaA__ADG42783
augaaggccauccuggugguccuccuguacaccuucgccaccgcgaacgccgacacgcugugcaucggcuaccacgccaacaacagcaccgacaccguggacaccgugcucgagaagaacgucacggugacccacuccgugaaccugcuggaggacaagcacaacgggaagcucugcaagcugcgcggcgucgcgccccugcaccucgggaagugcaacaucgccggcuggauccuggggaacccggagugcgagagccuguccaccgccagcuccuggagcuacaucguggagaccuccagcuccgacaacggcacgugcuaccccggcgacuucaucgacuacgaggagcuccgggagcagcugagcuccgugagcuccuucgagcgcuucgagauguuccccaagaccagcuccuggcccaaccacgacagcaacaagggggucaccgccgccugcccgcacgccggcgcgaaguccuucuacaagaaccugaucuggcucgugaagaaggggaacagcuaccccaagcuguccaagagcuacaucaacgacaagggcaaggaggugcugguccucugggggauccaccaccccagcaccuccacggaccagcagagccuguaccagaacgccgacgccuacguguucgugggcaccucccgguacagcaagaaguucaagcccgagaucgccauccgcccgaagguccgggaccaggagggccgcaugaacuacuacuggacccugguggagcccggggacaagaucaccuucgaggccacgggcaaccucguggucccccgguacgcguucgccauggagcgcaacgccggguccggcaucaucaucagcgacacccccgugcacgacugcaacacgaccugccagaccccgaagggcgccaucaacaccucccugcccuuccagaacauccaccccaucaccaucgggaagugccccaaguacgucaagagcaccaagcugcggcucgccacgggccugcgcaacgugccguccauccagagccgggggcuguucggcgcgaucgccggguucaucgagggcggcuggaccgggaugguggacggcugguacggguaccaccaccagaacgagcagggcuccggguacgccgccgaccucaagagcacccagaacgccaucgacaagaucaccaacaaggugaacuccgucaucgagaagaugaacacgcaguucaccgcggugggcaaggaguucaaccaccuggagaagcgcaucgagaaccugaacaagaaggucgacgacggcuuccucgacaucuggaccuacaacgccgagcugcuggugcuccuggagaacgagcggacccuggacuaccacgacagcaacgugaagaaccucuacgagaagguccgcucccagcugaagaacaacgccaaggagaucgggaacggcugcuucgaguucuaccacaagugcgacaacacgugcauggagagcgugaagaacgggaccuacgacuaccccaaguacuccgaggaggccaagcugaaccgggaggagaucgacggcgugaagcucgagagcacccgcaucuaccagauccuggccaucuacuccaccgucgcgagcagccuggugcucguggucucccugggggccaucagcuucuggaugugcuccaacggcagccugcagugccggaucugcaucuga

SEQ ID NO: 68896 - RNA, 1701 nt, Artificial Sequence; identical to SEQ ID NO: 67857
  derived and/or modified CDS sequence (opt1) from hemagglutinin__InfluenzaA__ADG42793

SEQ ID NO: 68897 - RNA, 1701 nt, Artificial Sequence; identical to SEQ ID NO: 68895
  derived and/or modified CDS sequence (opt1) from hemagglutinin__InfluenzaA__ADG42803

SEQ ID NO: 68898 - RNA, 1701 nt, Artificial Sequence; identical to SEQ ID NO: 68245
  derived and/or modified CDS sequence (opt1) from hemagglutinin__InfluenzaA__ADG42813

SEQ ID NO: 68899 - RNA, 1701 nt, Artificial Sequence; identical to SEQ ID NO: 68388
  derived and/or modified CDS sequence (opt1) from hemagglutinin__InfluenzaA__ADG42823

SEQ ID NO: 68900 - RNA, 1701 nt, Artificial Sequence; identical to SEQ ID NO: 68290
  derived and/or modified CDS sequence (opt1) from hemagglutinin__InfluenzaA__ADG42833

SEQ ID NO: 68901 - RNA, 1701 nt, Artificial Sequence; identical to SEQ ID NO: 67857
  derived and/or modified CDS sequence (opt1) from hemagglutinin__InfluenzaA__ADG42843

SEQ ID NO: 68902 - RNA, 1701 nt, Artificial Sequence; identical to SEQ ID NO: 67857
  derived and/or modified CDS sequence (opt1) from hemagglutinin__InfluenzaA__ADG42853

SEQ ID NO: 68903 - RNA, 1701 nt, Artificial Sequence; identical to SEQ ID NO: 68411
  derived and/or modified CDS sequence (opt1) from hemagglutinin__InfluenzaA__ADG42863

SEQ ID NO: 68904 - RNA, 1701 nt, Artificial Sequence; identical to SEQ ID NO: 68431
  derived and/or modified CDS sequence (opt1) from hemagglutinin__InfluenzaA__ADG42883

SEQ ID NO: 68905 - RNA, 1701 nt, Artificial Sequence
  derived and/or modified CDS sequence (opt1) from hemagglutinin__InfluenzaA__ADG42893
augaaggccauccuggugguccuccuguacaccuucgccaccgcgaacgccgacacgcugugcaucggcuaccacgccaacaacagcaccgacaccguggacaccgugcucgagaagaacgucacggugacccacuccgugaaccugcuggaggacaagcacaacgggaagcucugcaagcugcgcggcgucgcgccccugcaccucgggaagugcaacaucgccggcuggauccuggggaacccggagugcgagagccuguccaccgccagcuccuggagcuacaucguggagaccuccagcuccgacaacggcacgugcuaccccggcgacuucaucgacuacgaggagcuccgggagcagcugagcuccgugagcuccuucgagcgcuucgagaucuuccccaagaccagcuccuggcccaaccacgacagcaacaagggggucaccgccgccugcccgcacgccggcgcgaaguccuucuacaagaaccugaucuggcucgugaagaaggggaacagcuaccccaagcuguccaagagcuacaucaacgacaagggcaaggaggugcugguccucugggggauccaccaccccagcaccuccgccgaccagcagagccuguaccagaacgccgacgccuacguguucgugggcacgucccgguacagcaagaaguucaagcccgagaucgccauccgcccgaagguccgggaccaggagggccgcaugaacuacuacuggacccugguggagcccggggacaagaucaccuucgaggcgaccggcaaccucguggucccccgguacgccuucgccauggagcgcaacgccggguccggcaucaucaucagcgacacgcccgugcacgacugcaacacgaccugccagaccccgaagggcgccaucaacaccucccugcccuuccagaacauccaccccaucaccaucgggaagugccccaaguacgucaagagcaccaaccugcggcucgcgaccggccugcgcaacgugccguccauccagagccgggggcuguucggcgccaucgccggguucaucgagggcggcuggacggggaugguggacggcugguacggguaccaccaccagaacgagcagggcuccggguacgccgccgaccucaagagcacccagaacgcgaucgacgagaucaccaacaaggugaacuccgucaucgagaagaugaacacccaguucacggccgugggcaaggaguucaaccaccuggagaagcgcaucgagaaccugaacaagaaggucgacgacggcuuccucgacaucuggaccuacaacgccgagcugcuggugcuccuggagaacgagcggacccuggacuaccacgacagcaacgugaagaaccucuacgagaagguccgcucccagcugaagaacaacgccaaggagaucgggaacggcugcuucgaguucuaccacaagugcgacaacacgugcauggagagcgugaagaacgggaccuacgacuaccccaaguacuccgaggaggccaagcugaaccgggaggagaucgacggcgugaagcucgagagcacccgcaucuaccagauccuggcgaucuacuccaccgucgccagcagccuggugcucguggucucccugggggccaucagcuucuggaugugcuccaacggcagccugcagugccggaucugcaucuga

SEQ ID NO: 68906 - RNA, 1701 nt, Artificial Sequence; identical to SEQ ID NO: 66693
  derived and/or modified CDS sequence (opt1) from hemagglutinin__InfluenzaA__ADG42903

SEQ ID NO: 68907 - RNA, 1701 nt, Artificial Sequence; identical to SEQ ID NO: 67857
  derived and/or modified CDS sequence (opt1) from hemagglutinin__InfluenzaA__ADG42913

SEQ ID NO: 68908 - RNA, 1701 nt, Artificial Sequence; identical to SEQ ID NO: 68421
  derived and/or modified CDS sequence (opt1) from hemagglutinin__InfluenzaA__ADG42923

SEQ ID NO: 68909 - RNA, 1701 nt, Artificial Sequence
  derived and/or modified CDS sequence (opt1) from hemagglutinin__InfluenzaA__ADG57087
augaaggccauccuggugguccuccuguacaccuucgccaccgcgaacgccgacacgcugugcaucggcuaccacgccaacaacagcaccgacaccguggacaccgugcucgagaagaacgucacggugacccacuccgugaaccugcuggaggacaagcacaacgggaagcucugcaagcugcgcggcgucgcgccccugcaccucgggaagugcaacaucgccggcuggauccuggggaacccggagugcgagagccuguccaccgccagcuccuggagcuacaucguggagaccuccagcuccgacaacggcacgugcuaccccggcgacuucaucgacuacgaggagcuccgggagcagcugagcuccgugagcuccuucgagcgcuucgagaucuuccccaagaccagcuccuggcccaaccacgacagcaacaagggggucaccgccgccugcccgcacgccggcgcgaaguccuucuacaagaaccugaucuggcucgugaagaaggggaacagcuaccccaagcuguccaagagcuacaucaacgacaagggcaaggaggugcugguccucugggggauccaccaccccagcaccuccgccgaccagcagagccuguaccagaacgccgacgccuacguguucgugggcacgucccgguacagcaagaaguucaagcccgagaucgccauccgcccgaagguccgggaccaggagggccgcaugaacuacuacuggacccugguggagcccggggacaagaucaccuucgaggcgaccggcaaccucguggucccccgguacgccuucgccauggagcgcaacgccggguccggcaucaucaucagcgacacgcccgugcacgacugcaacacgaccugccagaccccgaagggcgccaucaacaccucccugcccuuccagaacauccaccccaucaccaucgggaagugccccaaguacgucaagagcaccaagcugcggcucgcgaccggccugcgcaacgugccguccauccagagccgggggcuguucggcgccaucgccggguucaucgagggcggcuggacggggaugguggacggcugguacggguaccaccaccagaacgagcagggcuccggguacgccgccgaccucaagagcacccagaacgcgaucgacgagaucaccaacaaggugaacuccgucaucgagaagaugaacacccaguucacggccgugggcaaggaguucaaccaccuggagaagcgcaucgagaaccugaacaagaaggucgacgacggcuuccucgacaucuggaccuacaacgccgagcugcuggugcuccuggagaacgagcggacccuggacuaccacgacagcaacgugaagaaccucuacgagaagguccgcucccagcugaagaacaacgccaaggagaucgggaacggcugcuucgaguucuaccacaagugcgacaacacgugcauggagagcgugaagaacgggaccuacgacuaccccaaguacuccgaggaggccaagcugaaccgggaggagaucgacggcgugaagcucgagagcacccgcaucuaccagauccuggcgaucuacuccaccgucgccaucagccuggugcucguggucagccugggggccaucuccuucuggaugugcagcaacggcucccugcggugccgcaucugcaucuga

SEQ ID NO: 68910 - RNA, 1701 nt, Artificial Sequence; identical to SEQ ID NO: 66693
  derived and/or modified CDS sequence (opt1) from hemagglutinin__InfluenzaA__ADG57088

SEQ ID NO: 68911 - RNA, 1701 nt, Artificial Sequence
  derived and/or modified CDS sequence (opt1) from hemagglutinin__InfluenzaA__ADG57089
auggaggccauccuggugguccuccuguacaccuucgccaccgcgaacgccgacacgcugugcaucggcuaccacgccaacaacagcaccgacaccguggacaccgugcucgagaagaacgucacggugacccacuccgugaaccugcuggaggacaagcacaacgggaagcucugcaagcugcgcggcgucgcgccccugcaccucgggaagugcaacaucgccggcuggauccuggggaacccggagugcgagagccuguccaccgccagcuccuggagcuacaucguggagaccuccagcuccgacaacggcacgugcuaccccggcgacuucauccaguacgaggagcuccgggagcagcugagcuccgugagcuccuucgagcgcuucgagaucuuccccaagaccagcuccuggcccaaccacgacagcaacaagggggucaccgccgccugcccgcacgccggcgcgaaguccuucuacaagaaccugaucuggcucgugaagaaggggaacagcuaccccaagcuguccaagagcuacaucaacgacaagggcaaggaggugcugguccucugggggauccaccaccccagcaccuccgccgaccagcagagccuguaccagaacgccgacgccuacguguucgugggcuccagccgguacuccaagaaguucaagcccgagaucgccauccgcccgaagguccgggaccaggagggccgcaugaacuacuacuggacgcugguggagcccggggacaagaucaccuucgaggcgaccggcaaccucguggucccccgguacgccuucgccauggagcgcaacgccgggagcggcaucaucaucuccgacacccccgugcacgacugcaacacgaccugccagaccccgaagggcgccaucaacaccagccugcccuuccacaacauccaccccaucacgaucgggaagugccccaaguacgugaaguccaccaagcugcggcucgcgaccggccugcgcaacgucccgagcauccagucccgggggcuguucggcgccaucgccggguucaucgagggcggcuggaccgggaugguggacggcugguacggguaccaccaccagaacgagcagggcagcggguacgccgccgaccucaaguccacgcagaacgcgaucgacgagaucaccaacaaggugaacagcgucaucgagaagaugaacacccaguucaccgccgugggcaaggaguucaaccaccuggagaagcgcaucgagaaccugaacaagaaggucgacgacggcuuccucgacaucuggacguacaacgccgagcugcuggugcuccuggagaacgagcggacccuggacuaccacgacuccaacgugaagaaccucuacgagaagguccgcagccagcugaagaacaacgccgaggagaucgggaacggcugcuucgaguucuaccacaagugcgacaacacgugcauggaguccgugaagaacgggaccuacgacuaccccaaguacagcgaggaggccaagcugaaccgggaggagaucgacggcgugaagcucgaguccacccgcaucuaccagauccuggcgaucuacagcaccgucgccagcucccuggugcucguggucagccugggggccaucuccuucuggaugugcagcaacggcucccugcagugccggaucugcaucuga

SEQ ID NO: 68912 - RNA, 1701 nt, Artificial Sequence
  derived and/or modified CDS sequence (opt1) from hemagglutinin__InfluenzaA__ADG57090
augaaggccauccuggugguccuccuguacaccuucgccaccgcgaacgccgacacgcugugcaucggcuaccacgccaacaacagcaccgacaccguggacaccgugcucgagaagaacgucacggugacccacuccgugaaccugcuggaggacaagcacaacgggaagcucugcaagcugcgcggcgucgcgccccugcaccucgggaagugcaacaucgccggcuggauccuggggaacccggagugcgagagccuguccaccgccagcuccuggagcuacaucguggagaccuccagcuccgacaacggcacgugcuaccccggcgacuucaucgacuacgaggagcuccgggagcagcugagcuccgugagcuccuucgagcgcuucgagaucuuccccaagaccagcuccuggcccaaccacgacagcaacaagggggucaccgccgccugcccgcacgccggcgcgaaguccuucuacaagaaccugaucuggcucgugaagaaggggaacagcuaccccaagcuguccaagagcuacaucaacgacaagggcaaggaggugcugguccucugggggauccaccaccccagcaccuccgccgaccagcagagcaucuaccagaacgccgacgccuacguguucgugggcacgucccgguacagcaagaaguucaagcccgagaucgccauccgcccgaagguccgggaccaggagggccgcaugaacuacuacuggacccugguggagcccggggacaagaucaccuucgaggcgaccggcaaccugguggucccccgguacgccuucgccauggagcgcaacgccggguccggcaucaucaucagcgacacgcccgugcacgacugcaacacgaccugccagaccccgaagggcgccaucaacaccucccuccccuuccagaacauccaccccaucaccaucgggaagugccccaaguacgucaagagcaccaagcugcggcuggcgaccggccuccgcaacgugccguccauccagagccgggggcuguucggcgccaucgccggguucaucgagggcggcuggacggggaugguggacggcugguacggguaccaccaccagaacgagcagggcuccggguacgccgccgaccucaagagcacccagaacgcgaucgacgagaucaccaacaaggugaacuccgucaucgagaagaugaacacccaguucacggccgugggcaaggaguucaaccaccuggagaagcgcaucgagaaccugaacaagaaggucgacgacggcuuccuggacaucuggaccuacaacgcccagcuccuggugcugcucgagaacgagcggacccuggacuaccacgacagcaacgugaagaaccuguacgagaagguccgcucccagcucaagaacaacgccaaggagaucgggaacggcugcuucgaguucuaccacaagugcgacaacacgugcauggagagcgugaagaacgggaccuacgacuaccccaaguacuccgaggaggccaagcugaaccgggaggagaucgacggcgugaagcuggagagcacccgcaucuaccagauccucgcgaucuacuccaccgucgccagcagccuggugcugguggucucccucggggccaucagcuucuggaugugcuccaacggcagccugcagugccggaucugcaucuga

SEQ ID NO: 68913 - RNA, 1701 nt, Artificial Sequence
  derived and/or modified CDS sequence (opt1) from hemagglutinin__InfluenzaA__ADG57091
auggaggccauccuggugguccuccuguacaccuucgccaccgcgaacgccgacacgcugugcaucggcuaccacgccaacaacagcaccgacaccguggacaccgugcucgagaagaacgucacggugacccacuccgugaaccugcuggaggacaagcacaacgggaagcucugcaagcugcgcggcgucgcgccccugcaccucgggaagugcaacaucgccggcuggauccuggggaacccggagugcgagagccuguccaccgccagcuccuggagcuacaucguggagaccuccagcuccgacaacggcacgugcuaccccggcgacuucaucgacuacgaggagcuccgggagcagcugagcuccgugagcuccuucgagcgcuucgagaucuuccccaagaccagcuccuggcccaaccacgacagcaacaagggggucaccgccgccugcccgcacgccggcgcgaaguccuucuacaagaaccugaucuggcucgugaagaaggggaacagcuaccccaagcuguccaagagcuacaucaacgacaagggcaaggaggugcugguccucugggggauccaccaccccagcaccuccgccgaccagcagagccuguaccagaacgccgacgccuacguguucgugggcuccagccgguacuccaagaaguucaagcccgagaucgccauccgcccgaagguccgggaccaggagggccgcaugaacuacuacuggacgcugguggagcccggggacaagaucaccuucgaggcgaccggcaaccucguggucccccgguacgccuucgccauggagcgcaacgccgggagcggcaucaucaucuccgacacccccgugcacgacugcaacacgaccugccagaccccgaagggcgccaucaacaccagccugcccuuccacaacauccaccccaucacgaucgggaagugccccaaguacgugaaguccaccaagcugcggcucgcgaccggccugcgcaacgucccgagcauccagucccgggggcuguucggcgccaucgccggguucaucgagcgcggcuggaccggcaugguggacgggugguacggcuaccaccaccagaacgagcaggggagcggcuacgccgccgaccucaaguccacgcagaacgcgaucgacgagaucaccaacaaggugaacagcgucaucgagaagaugaacacccaguucaccgccguggggaaggaguucaaccaccuggagaagcggaucgagaaccugaacaagaaggucgacgacggcuuccucgacaucuggacguacaacgccgagcugcuggugcuccuggagaacgagcgcacccuggacuaccacgacuccaacgugaagaaccucuacgagaagguccggagccagcugaagaacaacgccaaggagaucggcaacgggugcuucgaguucuaccacaagugcgacaacacgugcauggaguccgugaagaacggcaccuacgacuaccccaaguacagcgaggaggccaagcugaaccgcgaggagaucgacggggugaagcucgaguccacccggaucuaccagauccuggcgaucuacagcaccgucgccagcucccuggugcucguggucagccugggcgccaucuccuucuggaugugcagcaacgggucccugcagugccgcaucugcaucuga

SEQ ID NO: 68914 - RNA, 1701 nt, Artificial Sequence
  derived and/or modified CDS sequence (opt1) from hemagglutinin__InfluenzaA__ADG57092
augaaggccauccuggugguccuccuguacaccuucgccaccgcgaacgccgacacgcugugcaucggcuaccacgccaacaacagcaccgacaccguggacaccgugcucgagaagaacgucacggugacccacuccgugaaccugcuggaggacaagcacaacgggaagcucugcaagcugcgcggcgucgcgccccugcaccucgggaagugcaacaucgccggcuggauccuggggaacccggagugcgagagccuguccaccgccagcuccuggagcuacaucguggagaccuccagcuccgacaacggcacgugcuaccccggcgacuucaucgacuacgaggagcuccgggagcagcugagcuccgugagcuccuucgagcgcuucgagaucuuccccaagaccagcuccuggcccaaccacgacagcaacaagggggucaccgccgccugcccgcacgccggcgcgaaguccuucuacaagaaccugaucuggcucgugaagaaggggaacagcuaccccaagcugaucaaguccuacaucaacgacaagggcaaggaggugcugguccucugggggauccaccaccccagcaccagcgccgaccagcagucccuguaccagaacgccgacgccuacguguucgugggcacgagccgguacuccaagaaguucaagcccgagaucgccauccgcccgaagguccgggaccaggagggccgcaugaacuacuacuggacccugguggagcccggggacaagaucaccuucgaggcgaccggcaaccucguggucccccgguacgccuucgccauggagcgcaacgccgggagcggcaucaucaucuccgacacgcccgugcacgacugcaacacgaccugccagaccccgaagggcgccaucaacaccagccugcccuuccagaacauccaccccaucaccaucgggaagugccccaaguacgugaaguccaccaagcugcggcucgcgaccggccugcgcaacgucccgagcauccagucccgggggcuguucggcgccaucgccggguucaucgagggcggcuggacggggaugguggacggcugguacggguaccaccaccagaacgagcagggcagcggguacgccgccgaccucaaguccacccagaacgcgaucgacgagaucaccaacaaggugaacagcgucaucgagaagaugaacacccaguucacggccgugggcaaggaguucaaccaccuggagaagcgcaucgagaaccugaacaagaaggucgacgacggcuuccucgacaucuggaccuacaacgccgagcugcuggugcuccuggagaacgagcggacccuggacuaccacgacuccaacgugaagaaccucuacgagaagguccgcagccagcugaagaacaacgccaaggagaucgggaacggcugcuucgaguucuaccacaagugcgacaacacgugcauggaguccgugaagaacgggaccuacgacuaccccaaguacagcgaggaggccaagcugaaccgggaggagaucgacggcgugaagcucgaguccacccgcaucuaccagauccuggcgaucuacagcaccgucgccuccagccuggugcucguggucagccugggggccaucuccuucuggaugugcagcaacggcucccugcagugccggaucugcaucuga

SEQ ID NO: 68915 - RNA, 1701 nt, Artificial Sequence
  derived and/or modified CDS sequence (opt1) from hemagglutinin__InfluenzaA__ADG57093
auggaggccauccuggugguccuccuguacaccuucgccaccgcgaacgccgacacgcugugcaucggcuaccacgccaacaacagcaccgacaccguggacaccgugcucgagaagaacgucacggugacccacuccgugaaccugcuggaggacaagcacaacgggaagcucugcaagcugcgcggcgucgcgccccugcaccucgggaagugcaacaucgccggcuggauccuggggaacccggagugcgagagccuguccaccgccagcuccuggagcuacaucguggagaccuccagcuccgacaacggcacgugcuaccccggcgacuucaucgacuacgaggagcuccgggagcagcugagcuccgugagcuccuucgagcgcuucgagaucuuccccaagaccagcuccuggcccaaccacgacagcaacaagggggucaccgccgccugcccgcacgccggcgcgaaguccuucuacaagaaccugaucuggcucgugaagaaggggaacagcuaccccaagcuguccaagagcuacaucaacgacaagggcaaggagauccuggugcucugggggauccaccaccccagcaccuccgccgaccagcagagccuguaccagaacgccgacgccuacgucuucgugugguccagccgguacuccaagaaguucaagcccgagaucgccauccgcccgaaggugcgggaccaggagggccgcaugaacuacuacuggacgcuggucgagcccggcgacaagaucaccuucgaggcgaccgggaaccuccuggugccccgguacgccuucgccauggagcgcaacgccggcagcgggaucaucaucuccgacacccccgugcacgacugcaacacgaccugccagaccccgaagggcgccaucaacaccagccugcccuuccacaacauccaccccaucacgaucggcaagugccccaaguacgucaaguccaccaagcuccggcuggcgaccgggcugcgcaacgugccgagcauccagucccggggccucuucggggccaucgccggcuucaucgagggcggguggaccggcaugguggacgggugguacggcuaccaccaccagaacgagcaggggagcggcuacgccgccgaccugaaguccacgcagaacgcgaucgacgagaucaccaacaaggucaacagcgugaucgagaagaugaacacccaguucaccgccguggggaaggaguucaaccaccuggagaagcgcaucgagaaccucaacaagaaggucgacgacggcuuccuggacaucuggacguacaacgccgagcugcucgugcugcuggagaacgagcggacccucgacuaccacgacuccaacgucaagaaccuguacgagaaggugcgcagccagcugaagaacaacgccaaggagaucggcaacgggugcuucgaguucuaccacaagugcgacaacacgugcauggaguccgugaagaacggcaccuacgacuaccccaaguacagcgaggaggccaagcucaaccgggaggagaucgacggggucaagcuggaguccacccgcaucuaccagauccuggcgaucuacagcaccguggccagcucccucgugcuggucgugagccugggcgccaucuccuucuggaugugcagcaacgggucccuccagugccggaucugcaucuga

SEQ ID NO: 68916 - RNA, 1701 nt, Artificial Sequence
  derived and/or modified CDS sequence (opt1) from hemagglutinin__InfluenzaA__ADG57094
augaaggccauccuggugguccuccuguacaccuucgccaccgcgaacgccgacacgcugugcgugggcuaccacgccaacaacagcaccgacaccguggacaccguccucgagaagaacgugacggugacccacuccgucaaccugcuggaggacaagcacaacgggaagcucugcaagcugcgcggcguggcgccccugcaccucgggaagugcaacaucgccggcuggauccuggggaacccggagugcgagagccuguccaccgccagcuccuggagcuacaucguggagaccuccagcuccgacaacggcacgugcuaccccggcgacuucaucgacuacgaggagcuccgggagcagcugagcuccgucagcuccuucgagcgcuucgagaucuuccccaagaccagcuccuggcccaaccacgacagcaacaagggggugaccgccgccugcccgcacgccggcgcgaaguccuucuacaagaaccugaucuggcucgugaagaaggggaacagcuaccccaagcuguccaagagcuacaucaacgacaagggcaaggagguccuggugcucugggggauccaccaccccagcaccuccgccgaccagcagagccuguaccagaacgccgacgccuacguguucgucggcacgucccgguacagcaagaaguucaagcccgagaucgccauccgcccgaaggugcgggaccgcgagggccggaugaacuacuacuggacccugguggagcccggggacaagaucaccuucgaggcgaccggcaaccucgucgugccccgcuacgccuucgccauggagcggaacgccggguccggcaucaucaucagcgacacgcccgugcacgacugcaacacgaccugccagaccccgaagggcgccaucaacaccucccugcccuuccagaacauccaccccaucaccaucgggaagugccccaaguacgucaagagcaccaagcugcgccucgcgaccggccugcggaacgugccguccauccagagccgcgggcuguucggcgccaucgccggguucaucgagggcggcuggacggggaugguggacggcugguacggguaccaccaccagaacgagcagggcuccggguacgccgccgaccucaagagcacccagaacgcgaucgacgagaucaccaacaaggucaacuccgugaucgagaagaugaacacccaguucacggccgucggcaaggaguucaaccaccuggagaagcggaucgagaaccugaacaagaagguggacgacggcuuccucgacaucuggaccuacaacgccgagcugcuggugcuccuggagaacgagcgcacccuggacuaccacgacagcaacgucaagaaccucuacgagaaggugcggucccagcugaagaacaacgccaaggagaucgggaacggcugcuucgaguucuaccacaagugcgacaacacgugcauggagagcgugaagaacgggaccuacgacuaccccaaguacuccgaggaggccaagcugaaccgcgaggagaucgacggcgucaagcucgagagcacccggaucuaccagauccuggcgaucuacuccaccguggccagcagccuggugcucgucgugucccugggggccaucagcuucuggaugugcuccaacggcagccugcagugccgcaucugcaucuga

SEQ ID NO: 68917 - RNA, 1701 nt, Artificial Sequence; identical to SEQ ID NO: 66693
  derived and/or modified CDS sequence (opt1) from hemagglutinin__InfluenzaA__ADG57095

SEQ ID NO: 68918 - RNA, 1701 nt, Artificial Sequence
  derived and/or modified CDS sequence (opt1) from hemagglutinin__InfluenzaA__ADG57097
auggaggccauccuggugguccuccuguacaccuucgccaccgcgaacgccgacacgcugugcaucggcuaccacgccaacaacagcaccgacaccguggacaccgugcucgagaagaacgucacggugacccacuccgugaaccugcuggaggacaagcacaacgggaagcucugcaagcugcgcggcgucgcgccccugcaccucgggaagugcaacaucgccggcuggauccuggggaacccggagugcgagagccuguccaccgccagcuccuggagcuacaucguggagaccuccagcuccgacaacggcacgugcuaccccggcgacuucaucgacuacgaggagcuccgggagcagcugagcuccgugagcuccuucgagcgcuucgagaucuuccccaagaccagcuccuggcccaaccacgacagcaacaagggggucaccgccgccugcccgcacgccggcgcgaaguccuucuacaagaaccugaucuggcucgugaagaaggggaacagcuaccccaagcuguccaagagcuacaucaacgacaagggcaaggaggugcugguccucugggggauccaccaccccagcaccuccgccgaccagcagagccuguaccagaacgccgacgccuacguguucgugggcuccagccgguacuccaagaaguucaagcccgagaucgccauccgcccgaagguccggggccaggaggggcgcaugaacuacuacuggacgcugguggagcccggcgacaagaucaccuucgaggcgaccgggaaccucguggucccccgguacgccuucgccauggagcgcaacgccggcagcggcaucaucaucuccgacacccccgugcacgacugcaacacgaccugccagaccccgaagggggccaucaacaccagccugcccuuccacaacauccaccccaucacgaucggcaagugccccaaguacgugaaguccaccaagcugcggcucgcgaccgggcugcgcaacgucccgagcauccagucccggggccuguucggggccaucgccggcuucaucgagggcggguggaccggcaugguggacgggugguacggcuaccaccaccagaacgagcaggggagcggcuacgccgccgaccucaaguccacgcagaacgcgaucgacgagaucaccaacaaggugaacagcgucaucgagaagaugaacacccaguucaccgccgugggcaaggaguucaaccaccuggagaagcgcaucgagaaccugaacaagaaggucgacgacggguuccucgacaucuggacguacaacgccgagcugcuggugcuccuggagaacgagcggacccuggacuaccacgacuccaacgugaagaaccucuacgagaagguccgcagccagcugaagaacaacgccaaggagaucggcaacgggugcuucgaguucuaccacaagugcgacaacacgugcauggaguccgugaagaacggcaccuacgacuaccccaaguacagcgaggaggccaagcugaaccgggaggagaucgacggggugaagcucgaguccacccgcaucuaccagauccuggcgaucuacagcaccgucgccagcucccuggugcucguggucagccugggcgccaucuccuucuggaugugcagcaacggcucccugcagugccggaucugcaucuga

SEQ ID NO: 68919 - RNA, 1701 nt, Artificial Sequence; identical to SEQ ID NO: 67857
  derived and/or modified CDS sequence (opt1) from hemagglutinin__InfluenzaA__ADG57098

SEQ ID NO: 68920 - RNA, 1701 nt, Artificial Sequence
  derived and/or modified CDS sequence (opt1) from hemagglutinin__InfluenzaA__ADG57099
augaaggccauccuggugguccuccuguacaccuucgccaccgcgaacgccgacacgcugugcaucggcuaccacgccaacaacagcaccgacaccguggacaccgugcucgagaagaacgucacggugacccacuccgugaaccugcuggaggacaagcacaacgggaagcucugcaagcugcgcggcgucgcgccccugcaccucgggaagugcaacaucgccggcuggauccuggggaacccggagugcgagagccuguccaccgccagcuccuggagcuacaucguggagaccuccagcuccgacaacggcacgugcuaccccggcgacuucaucgacuacgaggagcuccgggagcagcugagcuccgugagcuccuucgagcgcuucgagaucuuccccaagaccagcuccuggcccaaccacgacagcaacaagggggucaccgccgccugcccgcacgccggcgcgaaguccuucuacaagaaccugaucuggcucgugaagaaggggaacagcuaccccaagcuguccaagagcuacaucaacgacaagggcaaggaggugcugguccucugggggauccaccaccccagcaccuccgccgaccagcagagccuguaccagaacgccgacgccuacguguucgugggcacgucccgguacagcaagaaguucaagcccgagaucgccauccgcccgaagguccgggaccaggagggccgcaugaacuaccacuggacccugguggagcccggggacaagaucaccuucgaggcgaccggcaaccucguggucccccgguacgccuucgccauggagcgcaacgccggguccggcaucaucaucacggacacccccgugcacgacugcaacacgaccugccagaccccgaagggcgccgugaacaccagccugcccuuccagaacauccaccccaucaccaucgggaagugccccaaguacgucaaguccaccaagcugcggcucgcgacgggccugcgcaacgugccgagcauccagucccgggggcuguucggcgccaucgccggguucaucgagggcggcuggaccgggaugguggacggcugguacggguaccaccaccagaacgagcagggcagcggguacgccgccgaccucaaguccacccagaacgcgaucgacaagaucaccaacaaggucaacagcgugaucgagaagaugaacacgcaguucaccgccgucggcaaggaguucaaccaccuggagaagcgcaucgagaaccugaacaagaagguggacgacggcuuccucgacaucuggaccuacaacgccgagcugcuggugcuccuggagaacgagcggacccuggacuaccacgacuccaacgucaagaaccucuacgagaaggugcgcagccagcugaagaacaacgccaaggagaucgggaacggcugcuucgaguucuaccacaagugcgacaacacgugcauggaguccgugaagaacgggaccuacgacuaccccaaguacagcgaggaggccaagcugaaccgggaggagaucgacggcgucaagcucgaguccacccgcaucuaccagauccuggcgaucuacagcaccguggccuccagccuggugcucgucgugagccugggggccaucuccuucuggaugugcagcaacggcucccugcagugccggaucugcaucuga

SEQ ID NO: 68921 - RNA, 1701 nt, Artificial Sequence
  derived and/or modified CDS sequence (opt1) from hemagglutinin__InfluenzaA__ADG57100
augaaggccauccuggugguccuccuguacaccuucgccaccgcgaacgccgacacgcugugcaucggcuaccacgccaacaacagcaccgacaccguggacaccgugcucgagaagaacgucacggugacccacuccgugaaccugcuggaggacaagcacaacgggaagcucugcaagcugcgcggcgucgcgccccugcaccucgggaagugcaacaucgccggcuggauccuggggaacccggagugcgagagccuguccaccgccagcuccuggagcuacaucguggagaccuccagcuccgacaacggcacgugcuaccccggcgacuucaucgacuacgaggagcuccgggagcagcugagcuccgugagcuccuucgagcgcuucgagaucuuccccaagaccagcuccuggcccaaccacgacagcaacaagggggucaccgccgccugcccgcacgccggcgcgaaguccuucuacaagaaccugaucuggcucgugaagaaggggaacagcuaccccaagcuguccaagagcuacaucaacgacaagggcaaggaggugcugguccucugggggauccaccaccccagcaccuccgccgaccagcagagccuguaccagaacgccgacgccuacguguucgugggcacgucccgguacagcaagaaguucaagcccgagaucgccauccgcccgaagguccgggaccaggagggccgcaugaacuacuacuggacccugguggagcccggggacaagaucaccuucgaggcgaccggcaaccucguggucccccgguacgccuucgccauggagcgcaacgccggguccggcaucaucaucagcgacacgcccgugcacgacugcaacacgaccugccagaccccgaagggcgccaucaacaccucccugcccuuccagaacauccaccccaucaccaucgggaagugccccaaguacgucaagagcaccaagcugcggcucgcgaccggccugcgcaacgugccguccauccagagccgggggcuguucggcgccaucgccggguucaucgagggcggcuggacggggaugguggacggcugguacggguaccaccaccagaacgagcagggcuccggguacgccgccgaccucaagagcacccagaacgcgaucgacaagaucaccaacaaggugaacuccgucaucgagaagaugaacacccaguucacggccggcggcaaggaguucaaccaccuggagaagcgcaucgagaaccugaacaagaagguggacgacggguuccucgacaucuggaccuacaacgccgagcugcugguccuccuggagaacgagcggacccuggacuaccacgacagcaacgugaagaaccucuacgagaaggugcgcucccagcugaagaacaacgccaaggagaucggcaacgggugcuucgaguucuaccacaagugcgacaacacgugcauggagagcgucaagaacggcaccuacgacuaccccaaguacuccgaggaggccaagcugaaccgggaggagaucgacggggugaagcucgagagcacccgcaucuaccagauccuggcgaucuacuccaccguggccagcagccugguccucguggugucccugggcgccaucagcuucuggaugugcuccaacggcagccugcagugccggaucugcaucuga

SEQ ID NO: 68922 - RNA, 1701 nt, Artificial Sequence; identical to SEQ ID NO: 66693
  derived and/or modified CDS sequence (opt1) from hemagglutinin__InfluenzaA__ADG58939

SEQ ID NO: 68923 - RNA, 1701 nt, Artificial Sequence; identical to SEQ ID NO: 66693
  derived and/or modified CDS sequence (opt1) from hemagglutinin__InfluenzaA__ADG58940

SEQ ID NO: 68924 - RNA, 1701 nt, Artificial Sequence
  derived and/or modified CDS sequence (opt1) from hemagglutinin__InfluenzaA__ADG58941
augaaggccauccuggugguccuccuguacaccuucgccaccgcgaacgccgacacgcugugcaucggcuaccacgccaacaacagcaccgacaccguggacaccgugcucgagaagaacgucacggugacccacuccgugaaccugcuggaggacaagcacaacgggaagcucugcaagcugcgcggcgucgcgccccugcaccucgggaagugcaacaucgccggcuggauccuggggaacccggagugcgagagccuguccaccgccagcuccuggagcuacaucguggagaccuccagcuccgacaacggcacgugcuaccccggcgacuucaucgacuacgaggagcuccgggagcagcugagcuccgugagcuccuucgagcgcuucgagaucuuccccaagaccagcuccuggcccaaccacgacagcaacaagggggucaccgccgccugcccgcacgccggcgcgaaguccuucuacaagaaccugaucuggcucgugaagaaggggaacagcuaccccaagcuguccaagagcuacaucaacgacaagggcaaggaggugcugguccucugggggauccaccaccccagcaccuccgccgaccagcagagccuguaccagaacgccgacacguacguguucgugggcaccucccgguacagcaagaaguucaagcccgagaucgccauccgcccgaagguccgggaccaggagggccgcaugaacuacuacuggacccugguggagcccggggacaagaucaccuucgaggccacgggcaaccucguggucccccgguacgcguucgccauggagcgcaacgccggguccggcaucaucaucagcgacacccccgugcacgacugcaacacgaccugccagaccccgaagggcgccaucaacaccucccugcccuuccagaacauccaccccaucaccaucgggaagugccccaaguacgucaagagcaccaagcugcggcucgccacgggccugcgcaacgugccguccauccagagccgggggcuguucggcgcgaucgccggguucaucgagggcggcuggaccgggaugguggacggcugguacggguaccaccacgagaacgagcagggcuccggguacgccgccgaccucaagagcacccagaacgccaucgacgagaucaccaacaaggugaacuccgucaucgagaagaugaacacgcaguucaccgcggugggcaaggaguucaaccaccuggagaagcgcaucgagaaccugaacaagaagaucgacgacggcuuccucgacaucuggaccuacaacgccgagcugcugguccuccuggagaacgagcggacccuggacuaccacgacagcaacgugaagaaccucuacgagaaggugcgcucccagcugaagaacaacgccaaggagaucgggaacggcugcuucgaguucuaccacaagugcgacaacacgugcauggagagcgucaagaacgggaccuacgacuaccccaaguacuccgaggaggccaagcugaaccgggaggagaucgacggcgugaagcucgagagcacccgcaucuaccagauccuggccaucuacuccaccguggcgagcagccugguccucguggugucccugggggccaucagcuucuggaugugcuccaacggcagccugcagugccggaucugcaucuga

SEQ ID NO: 68925 - RNA, 1701 nt, Artificial Sequence
  derived and/or modified CDS sequence (opt1) from hemagglutinin__InfluenzaA__ADG58942
augaaggccauccuggugguccuccuguacaccuucgccaccgcgaacgccgacacgcugugcaucggcuaccacgccaacaacagcaccgacaccguggacaccgugcucgagaagaacgucacggugacccacuccgugaaccugcuggaggacaagcacaacgggaagcucugcaagcugcgcggcgucgcgccccugcaccucgggaagugcaacaucgccggcuggauccuggggaacccggagugcgagagccuguccaccgccagcuccuggagcuacaucguggagaccuccagcuccgacaacggcacgugcuaccccggcgacuucaucgacuacgaggagcuccgggagcagcugagcuccgugagcuccuucgagcgcuucgagaucuuccccaagaccagcuccuggcccaaccacgacagcaacaagggggucaccgccgccugcccgcacgccggcgcgaaguccuucuacaagaaccugaucuggcucgugaagaaggggaacagcuaccccaagcuguccaagagcuacaucaacgacaagggcaaggaggugcugguccucugggggauccaccaccccagcaccuccgccgaccagcagagccuguaccagaacgccgacacguacguguucgugggcaccucccgguacagcaagaaguucaagcccgagaucgccauccgcccgaagguccgggaccaggagggccgcaugaacuacuacuggacccugguggagcccggggacaagaucaccuucgaggccacgggcaaccucguggucccccgguacgcguucgccauggagcgcaacgccggguccggcaucaucaucagcgacacccccgugcacgacugcaacacgaccugccagaccccgaagggcgccaucaacaccucccugcccuuccagaacauccaccccaucaccaucgggaagugccccaaguacgucaagagcaccaagcugcggcucgccacgggccugcgcaacgugccguccauccagagccgggggcuguucggcgcgaucgccggguucaucgagggcggcuggaccgggaugguggacggcugguacggguaccuccaccagaacgagcagggcuccggguacgccgccgaccucaagagcacccagaacgccaucgacgagaucaccaacaaggugaacuccgucaucgagaagaugaacacgcaguucaccgcggugggcaaggaguucaaccaccuggagaagcgcaucgagaaccugaacaagaagaucgacgacggcuuccuggacaucuggaccuacaacgccgagcugcucguccugcuggagaacgagcggacccucgacuaccacgacagcaacgugaagaaccuguacgagaaggugcgcucccagcugaagaacaacgccaaggagaucgggaacggcugcuucgaguucuaccacaagugcgacaacacgugcauggagagcgucaagaacgggaccuacgacuaccccaaguacuccgaggaggccaagcucaaccgggaggagaucgacggcgugaagcuggagagcacccgcaucuaccagauccuggccaucuacuccaccguggcgagcagccucguccugguggugucccugggggccaucagcuucuggaugugcuccaacggcagccuccagugccggaucugcaucuga

SEQ ID NO: 68926 - RNA, 1701 nt, Artificial Sequence; identical to SEQ ID NO: 66693
  derived and/or modified CDS sequence (opt1) from hemagglutinin__InfluenzaA__ADG58943

SEQ ID NO: 68927 - RNA, 1701 nt, Artificial Sequence
  derived and/or modified CDS sequence (opt1) from hemagglutinin__InfluenzaA__ADG58944
augaaggccauccuggugguccuccuguacaccuucgccaccgcgaacgccgacacgcugugcaucggcuaccacgccaacaacagcaccgacaccguggacaccgugcucgagaagaacgucacggugacccacuccgugaaccugcuggaggacaagcacaacgggaagcucugcaagcugcgcggcgucgcgccccugcaccucgggaagugcaacaucgccggcuggauccuggggaacccggagugcgagagccuguccaccgccagcuccuggagcuacaucguggagaccuccagcuccgacaacggcacgugcuaccccggcgacuucaucgacuacgaggagcuccgggagcagcugagcuccgugagcuccuucgagcgcuucgagaucuuccccaagaccagcuccuggcccaaccacgacagcaacaagggggucaccgccgccugcccgcacgccggcgcgaaguccuucuacaagaaccugaucuggcucgugaagaaggggaacagcuaccccaagcuguccaagagcuacaucaacgacaagggcaaggaggugcugguccucugggggauccaccaccccagcaccuccgccgaccagcagagccuguaccagaacgccgacgccuacguguucgugggcacgucccgguacagcaagaaguucaagcccgagaucgccauccgcccgaagguccgggaccaggagggccgcaugaacuacuacuggacccugguggagcccggggacaagaucaccuucgaggcgaccggcaaccuccuggugccccgguacgccuucgccauggagcgcaacgccggguccggcaucaucaucagcgacacgcccguccacgacugcaacacgaccugccagaccccgaagggcgccaucaacaccucccugcccuuccagaacauccaccccaucaccaucgggaagugccccaaguacgucaagagcaccaagcuccggcuggcgaccggccugcgcaacgugccguccauccagagccgggggcuguucggcgccaucgccggguucaucgagggcggcuggacggggaugguggacggcugguacggguaccaccaccagaacgagcagggcuccggguacgccgccgaccucaagagcacccagaacgcgaucgacgagaucaccaacaaggugaacuccgugaucgagaagaugaacacccaguucacggccgucggcaaggaguucaaccaccuggagaagcgcaucgagaaccucaacaagaagguggacgacggcuuccuggacaucuggaccuacaacgccgagcugcucguccugcuggagaacgagcggacccucgacuaccacgacagcaacgugaagaaccuguacgagaaggugcgcucccagcugaagaacaacgccaaggagaucgggaacggcugcuucgaguucuaccacaagugcgacaacacgugcauggagagcgucaagaacgggaccuacgacuaccccaaguacuccgaggaggccaagcucaaccgggaggagaucgacggcgugaagcuggagagcacccgcaucuaccagauccuggcgaucuacuccaccguggccagcagccucguccugguggugucccugggggccaucagcuucuggaugugcuccaacggcagccuccagugccggaucugcaucuga

SEQ ID NO: 68928 - RNA, 1701 nt, Artificial Sequence; identical to SEQ ID NO: 67491
  derived and/or modified CDS sequence (opt1) from hemagglutinin__InfluenzaA__ADG58946

SEQ ID NO: 68929 - RNA, 1701 nt, Artificial Sequence; identical to SEQ ID NO: 66693
  derived and/or modified CDS sequence (opt1) from hemagglutinin__InfluenzaA__ADG58947

SEQ ID NO: 68930 - RNA, 1701 nt, Artificial Sequence
  derived and/or modified CDS sequence (opt1) from hemagglutinin__InfluenzaA__ADG58948
augaaggccauccugaucgugcuccuguacaccuucgccaccgcgaacgccgacacgcugugcaucggcuaccacgccaacaacagcaccgacaccgucgacaccgugcucgagaagaacgugacggucacccacuccgugaaccugcuggaggacaagcacaacgggaagcucugcaagcugcgcggcguggcgccccugcaccucgggaagugcaacaucgccggcuggauccuggggaacccggagugcgagagccuguccaccgccagcuccuggagcuacaucgucgagaccuccagcuccgacaacggcacgugcuaccccggcgacuucaucgacuacgaggagcuccgggagcagcugagcuccgugagcuccuucgagcgcuucgagaucuuccccaagaccagcuccuggcccaaccacgacagcaacaagggggugaccgccgccugcccgcacgccggcgcgaaguccuucuacaagaaccugaucuggcucgucaagaaggggaacagcuaccccaagcuguccaagagcuacaucaacgacaagggcaaggaggugcuggugcucugggggauccaccaccccagcaccuccgccgaccagcagagccuguaccagaacgccgacacguacgucuucgugggcaccucccgguacagcaagaaguucaagcccgagaucgccauccgcccgaaggugcgggaccaggagggccgcaugaacuacuacuggacccuggucgagcccggggacaagaucaccuucgaggccacgggcaaccucguggugccccgguacgcguucgccauggagcgcaacgccggguccggcaucaucaucagcgacacccccguccacgacugcaacacgaccugccagaccccgaagggcgccaucaacaccucccugcccuuccagaacauccaccccaucaccaucgggaagugccccaaguacgucaagagcaccaagcugcggcucgccacgggccugcgcaacgugccguccauccagagccgggggcuguucggcgcgaucgccggguucaucgagggcggcuggaccgggaugguggacggcugguacggguaccaccaccagaacgagcagggcuccggguacgccgccgaccucaagagcacccagaacgccaucgacgagaucaccaacaaggugaacuccgugaucgagaagaugaacacgcaguucaccgcggucggcaaggaguucaaccaccuggagaagcgcaucgagaaccugaacaagaagaucgacgacggcuuccucgacaucuggaccuacaacgccgagcugcuggugcuccuggagaacgagcggacccuggacuaccacgacagcaacgucaagaaccucuacgagaaggugcgcucccagcugaagaacaacgccaaggagaucgggaacggcugcuucgaguucuaccacaagugcgacaacacgugcauggagagcgugaagaacgggaccuacgacuaccccaaguacuccgaggaggccaagcugaaccgggaggagaucgacggcgucaagcucgagagcacccgcaucuaccagauccuggccaucuacuccaccguggcgagcagccuggugcucgucgugucccugggggccaucagcuucuggaugugcuccaacggcagccugcagugccggaucugcaucuga

SEQ ID NO: 68931 - RNA, 1701 nt, Artificial Sequence
  derived and/or modified CDS sequence (opt1) from hemagglutinin__InfluenzaA__ADG58949
augaaggccauccuggugguccuccuguacaccuucgccaccgcgaacgccgacacgcugugcaucggcuaccacgccaacaacagcaccgacaccguggacaccgugcucgagaagaacgucacggugacccacuccgugaaccugcuggaggacaagcacaacgggaagcucugcaagcugcgcggcgucgcgccccugcaccucgggaagugcaacaucgccggcuggauccuggggaacccggagugcgagagccuguccaccgccagcuccuggagcuacaucguggagaccuccagcuccgacaacggcacgugcuaccccggcgacuucaucgacuacgaggagcuccgggagcagcugagcuccgugagcuccuucgagcgcuucgagaucuuccccaagaccagcuccuggcccaaccacgacagcaacaagggggucaccgccgccugcccgcacgccggcgcgaaguccuucuacaagaaccugaucuggcucgugaagaaggggaacagcuaccccaagcuguccaagagcuacaucaacgacaagggcaaggaggugcugguccucugggggauccaccaccccagcaccuccgccgaccagcagagccuguaccagaacgccgacacguacguguucgugggcaccucccgguacagcaagaaguucaagcccgagaucgccauccgcccgaagguccgggaccaggagggccgcaugaacuacuacuggacccugguggagcccggggacaagaucaccuucgaggccacgggcaaccucguggucccccgguacgcguucgccauggagcgcaacgccggguccggcaucaucaucagcgacaccuccgugcacgacugcaacacgaccugccagacccccaagggcgccaucaacaccagccugccguuccagaacauccaccccaucaccaucgggaagugccccaaguacgugaaguccaccaagcugcggcucgccacgggccugcgcaacguccccagcauccagucccgggggcuguucggcgcgaucgccggguucaucgagggcggcuggaccgggaugguggacggcugguacggguaccaccaccagaacgagcagggcagcggguacgccgccgaccucaaguccacccagaacgccaucgacgagaucaccaacaaggugaacagcgucaucgagaagaugaacacgcaguucaccgcggugggcaaggaguucaaccaccuggagaagcgcaucgagaaccugaacaagaagaucgacgacggcuuccucgacaucuggaccuacaacgccgagcugcugguccuccuggagaacgagcggacccuggacuaccacgacuccaacgugaagaaccucuacgagaaggugcgcagccagcugaagaacaacgccaaggagaucgggaacggcugcuucgaguucuaccacaagugcgacaacacgugcauggaguccgucaagaacgggaccuacgacuacccgaaguacagcgaggaggccaagcugaaccgggaggagaucgacggcgugaagcucgaguccacccgcaucuaccagauccuggccaucuacagcaccguggcgagcucccugguccucguggugagccugggggccaucuccuucuggaugugcagcaacggcucccugcagugccggaucugcaucuga

SEQ ID NO: 68932 - RNA, 1701 nt, Artificial Sequence
  derived and/or modified CDS sequence (opt1) from hemagglutinin__InfluenzaA__ADG58951
augaaggccauccuggugguccuccugcacaccuucgccaccgcgaacgccgacacgcugugcaucggcuaccacgccaacaacagcaccgacaccguggacaccgugcucgagaagaacgucacggugacccacuccgugaaccugcuggaggacaagcacaacgggaagcucugcaagcugcgcggcgucgcgccccugcaccucgggaagugcaacaucgccggcuggauccuggggaacccggagugcgagagccuguccaccgcgagcuccuggagcuacaucguggagaccuccaacagcggcaacggcacgugcuaccccggggaguucaucgacuacgaggagcuccgggagcagcuguccagcguguccagcuucgagcgcuucgagaucuuccccaagaccuccagcuggcccaaccacgacuccaacaagggcgucaccgccgccugcccgcacgccggggccaagagcuucuacaagaaccugaucuggcucgugaagaagggcaacuccuaccccaagcugagcaaguccuacaucaacgacaaggggaaggaggugcugguccucuggggcauccaccaccccagcaccagcgccgaccagcagucccuguaccagaacgccgacgccuacguguucgugggcacgagccgguacuccaagaaguucaagcccgagaucgccauccgcccgaagguccgggaccaggaggggcgcaugaacuacuacuggacccugguggagcccggcgacaagaucaccuucgaggcgaccgggaaccucguggucccccgguacgccuucgccauggagcgcaacgccggcagcggcaucaucaucuccgacacgcccgugcacgacugcaacacgaccugccagaccccgaagggggccaucaacaccagccugcccuuccagaacauccaccccaucaccaucggcaagugccccaaguacgugaaguccaccaagcugcggcucgcgaccgggcugcgcaacgucccgagcauccagucccggggccuguucggggccaucgccggcuucaucgagggcggguggacgggcaugguggacgggugguacggcuaccaccaccagaacgagcaggggagcggcuacgccgccgaccucaaguccacccagaacgcgaucgacgagaucaccaacaaggugaacagcgucaucgagaagaugaacacccaguucacggccgugggcaaggaguucaaccaccuggagaagcgcaucgagaaccugaacaagaaggucgacgacggguuccucgacaucuggaccuacaacgccgagcugcuggugcuccuggagaacgagcggacccuggacuaccacgacuccaacgugaagaaccucuacgagaagguccgcagccagcugaagaacaacgccaaggagaucggcaacgggugcuucgaguucuaccacaagugcgacaacacgugcaucgaguccgugaagaacggcaccuacgacuaccccaaguacagcgaggaggccaagcugaaccgggaggagaucgacggggugaagcucgaguccacccgcaucuaccagauccuggcgaucuacagcaccgucgccuccagccuggugcucguggucagccugggcgccaucuccuucuggaugugcagcaacggcucccugcagugccggaucugcaucuga

SEQ ID NO: 68933 - RNA, 1701 nt, Artificial Sequence; identical to SEQ ID NO: 68932
  derived and/or modified CDS sequence (opt1) from hemagglutinin__InfluenzaA__ADG58952

SEQ ID NO: 68934 - RNA, 1701 nt, Artificial Sequence; identical to SEQ ID NO: 68932
  derived and/or modified CDS sequence (opt1) from hemagglutinin__InfluenzaA__ADG58953

SEQ ID NO: 68935 - RNA, 1701 nt, Artificial Sequence; identical to SEQ ID NO: 68932
  derived and/or modified CDS sequence (opt1) from hemagglutinin__InfluenzaA__ADG58954

SEQ ID NO: 68936 - RNA, 1701 nt, Artificial Sequence; identical to SEQ ID NO: 68932
  derived and/or modified CDS sequence (opt1) from hemagglutinin__InfluenzaA__ADG58955

SEQ ID NO: 68937 - RNA, 1701 nt, Artificial Sequence; identical to SEQ ID NO: 68932
  derived and/or modified CDS sequence (opt1) from hemagglutinin__InfluenzaA__ADG58956

SEQ ID NO: 68938 - RNA, 1701 nt, Artificial Sequence
  derived and/or modified CDS sequence (opt1) from hemagglutinin__InfluenzaA__ADG58957
augaaggccauccuggugguccuccugcacaccuucgccaccgcgaacgccgacacgcugugcaucggcuaccacgccaacaacagcaccgacaccguggacaccgugcucgagaagaacgucacggugacccacuccgugaaccugcuggaggacaagcacaacgggaagcucugcaagcugcgcggcgucgcgccccugcaccucgggaagugcaacaucgccggcuggauccuggggaacccggagugcgagagccuguccaccgcgagcuccuggagcuacaucguggagaccuccaacagcggcaacggcacgugcuaccccggggaguucaucgacuacgaggagcuccgggagcagcuguccagcguguccagcuucgagcgcuucgagaucuuccccaagaccuccagcuggcccaaccacgacuccaacaagggcgucaccgccgccugcccgcacgccggggccaagagcuucuacaagaaccugaucuggcucgugaagaagggcaacuccuaccccaagcugagcaaguccuacaucaacgacaaggggaaggaggugcugguccucuggggcauccaccaccccagcaccagcgccgaccagcagucccuguaccagaacgccgacgccuacguguucgugggcacgagccgguacuccaagaaguucaagcccgagaucgccauccgcccgaagguccgggaccaggaggggcgcaugaacuacuacuggacccugguggagcccggcgacaagaucaccuucgaggcgaccgggaaccucguggucccccgguacgccuucgccauggagcgcaacgccggcagcggcaucaucaucuccgacacgcccgugcacgacugcaacacgaccugccagaccccgaagggggccaucaacaccagccugcccuuccagaacauccaccccaucaccaucggcaagugccccaaguacgugaaguccaccaagcugcggcucgcgaccgggcugcgcaacgucccgagcauccagucccggggccuguucggggccaucgccggcuucaucgagggcggguggacgggcaugguggacgggugguacggcuaccaccaccagaacgagcaggggagcggcuacgccgccgaccucaaguccacccagaacgcgaucgacgagaucaccaacaaggugaacagcgucaucgagaagaugaacacccaguucacggccgugggcaaggaguucaaccaccuggagaagcgcaucgagaaccugaacaagaaggucgacgacggguuccucgacaucuggaccuacaacgccgagcugcuggugcuccuggagaacgagcggacccuggacuaccacgacuccaacgugaagaaccucuacgagaagguccgcagccagcugaagaacaacgccaaggagaucggcaacgggugcuucgaguucuaccacaagugcgacaacacgugcauggaguccgugaagaacggcaccuacgacuaccccaaguacagcgaggaggccaagcugaaccgggaggagaucgacggggugaagcucgaguccacccgcaucuaccagauccuggcgaucuacagcaccgucgccuccagccuggugcucguggucagccugggcgccaucuccuucuggaugugcagcaacggcucccugcagugccggaucugcaucuga

SEQ ID NO: 68939 - RNA, 1701 nt, Artificial Sequence
  derived and/or modified CDS sequence (opt1) from hemagglutinin__InfluenzaA__ADG58959
augaaggccauccuggugguccuccuguacaccuucgccaccgcgaacgccgacacgcugugcaucggcuaccacgccaacaacagcaccgacaccguggacaccgugcucgagaagaacgucacggugacccacuccgugaaccugcuggaggacaagcacaacgggaagcucugcaagcugcgcggcgucgcgccccugcaccucgggaagugcaacaucgccggcuggauccuggggaacccggagugcgagagccuguccaccgcgaacagcugguccuacaucguggagaccagcuccagcgacaacggcacgugcuaccccggcgacuucaucgacuacgaggagcuccgggagcagcuguccagcguguccagcuucgagcgcuucgagaucuuccccaagaccuccagcuggcccaaccacgacuccaacaagggggucaccgccgccugcccgcacgccggcgccaagagcuucuacaagaaccugaucuggcucgugaagaaggggaacuccuaccccaagcugagcaaguccuacaucaacgacaagggcaaggaggugcugguccucugggggauccaccaccccagcaccagcgccgaccagcagucccuguaccagaacgccgacgccuacguguucgugggcacgagccgguacuccaagaaguucaagcccgagaucgccauccgcccgaagguccgggaccaggagggccgcaugaacuacuacuggacccugguggagcccggggacaagaucaccuucgaggcgaccggcaaccucguggucccccgguacgccuucgccauggagcgcaacgccgggagcggcaucaucaucuccgacacgcccgugcacgacugcaacacgaccugccagaccccgaagggcgccaucaacaccagccugcccuuccagaacauccaccccaucaccaucgggaagugccccaaguacgugaaguccaccaagcugcggcucgcgaccggccugcgcaacgucccgagcauccagucccgggggcuguucggcgccaucgccggguucaucgagggcggcuggacggggaugguggacggcugguacggguaccaccaccagaacgagcagggcagcggguacgccgccgaccucaaguccacccagaacgcgaucgacgagaucaccaacaaggugaacagcgucaucgagaagaugaacacccaguucacggccgugggcaaggaguucaaccaccuggagaagcgcaucgagaaccugaacaagaaggucgacgacggcuuccucgacaucuggaccuacaacgccgagcugcuggugcuccuggagaacgagcggacccuggacuaccacgacuccaacgugaagaaccucuacgagaagguccgcagccagcugaagaacaacgccaaggagaucgggaacggcugcuucgaguucuaccacaagugcgacaacacgugcauggaguccgugaagaacgggaccuacgacuaccccaaguacagcgaggaggccaagcugaaccgggaggagaucgacggcgugaagcucgaguccacccgcaucuaccagauccuggcgaucuacagcaccgucgccuccagccuggugcucguggucagccugggggccaucuccuucuggaugugcagcaacggcucccugcagugccggaucugcaucuga

SEQ ID NO: 68940 - RNA, 1701 nt, Artificial Sequence; identical to SEQ ID NO: 68857
  derived and/or modified CDS sequence (opt1) from hemagglutinin__InfluenzaA__ADG58960

SEQ ID NO: 68941 - RNA, 1701 nt, Artificial Sequence; identical to SEQ ID NO: 68857
  derived and/or modified CDS sequence (opt1) from hemagglutinin__InfluenzaA__ADG58961

SEQ ID NO: 68942 - RNA, 1701 nt, Artificial Sequence; identical to SEQ ID NO: 68857
  derived and/or modified CDS sequence (opt1) from hemagglutinin__InfluenzaA__ADG58962

SEQ ID NO: 68943 - RNA, 1701 nt, Artificial Sequence; identical to SEQ ID NO: 68857
  derived and/or modified CDS sequence (opt1) from hemagglutinin__InfluenzaA__ADG58963

SEQ ID NO: 68944 - RNA, 1701 nt, Artificial Sequence; identical to SEQ ID NO: 68857
  derived and/or modified CDS sequence (opt1) from hemagglutinin__InfluenzaA__ADG58964

SEQ ID NO: 68945 - RNA, 1701 nt, Artificial Sequence; identical to SEQ ID NO: 68857
  derived and/or modified CDS sequence (opt1) from hemagglutinin__InfluenzaA__ADG58965

SEQ ID NO: 68946 - RNA, 1701 nt, Artificial Sequence; identical to SEQ ID NO: 68857
  derived and/or modified CDS sequence (opt1) from hemagglutinin__InfluenzaA__ADG58966

SEQ ID NO: 68947 - RNA, 1701 nt, Artificial Sequence; identical to SEQ ID NO: 68857
  derived and/or modified CDS sequence (opt1) from hemagglutinin__InfluenzaA__ADG58967

SEQ ID NO: 68948 - RNA, 1701 nt, Artificial Sequence; identical to SEQ ID NO: 68857
  derived and/or modified CDS sequence (opt1) from hemagglutinin__InfluenzaA__ADG58968

SEQ ID NO: 68949 - RNA, 1701 nt, Artificial Sequence; identical to SEQ ID NO: 66693
  derived and/or modified CDS sequence (opt1) from hemagglutinin__InfluenzaA__ADG59628

SEQ ID NO: 68950 - RNA, 1701 nt, Artificial Sequence; identical to SEQ ID NO: 66693
  derived and/or modified CDS sequence (opt1) from hemagglutinin__InfluenzaA__ADG59629

SEQ ID NO: 68951 - RNA, 1701 nt, Artificial Sequence; identical to SEQ ID NO: 66693
  derived and/or modified CDS sequence (opt1) from hemagglutinin__InfluenzaA__ADG59630

SEQ ID NO: 68952 - RNA, 1701 nt, Artificial Sequence; identical to SEQ ID NO: 66693
  derived and/or modified CDS sequence (opt1) from hemagglutinin__InfluenzaA__ADG59631

SEQ ID NO: 68953 - RNA, 1701 nt, Artificial Sequence; identical to SEQ ID NO: 66693
  derived and/or modified CDS sequence (opt1) from hemagglutinin__InfluenzaA__ADG59632

SEQ ID NO: 68954 - RNA, 1701 nt, Artificial Sequence; identical to SEQ ID NO: 67794
  derived and/or modified CDS sequence (opt1) from hemagglutinin__InfluenzaA__ADG59633

SEQ ID NO: 68955 - RNA, 1701 nt, Artificial Sequence; identical to SEQ ID NO: 67794
  derived and/or modified CDS sequence (opt1) from hemagglutinin__InfluenzaA__ADG59634

SEQ ID NO: 68956 - RNA, 1701 nt, Artificial Sequence; identical to SEQ ID NO: 66693
  derived and/or modified CDS sequence (opt1) from hemagglutinin__InfluenzaA__ADG59635

SEQ ID NO: 68957 - RNA, 1701 nt, Artificial Sequence
  derived and/or modified CDS sequence (opt1) from hemagglutinin__InfluenzaA__ADG59636
augaaggccauccuggugguccuccuguacaccuucgccaccgcgaacgccgacacgcugugcaucggcuaccacgccaacaacagcaccgacaccguggacaccgugcucgagaagaacgucacggugacccacuccgugaaccugcuggaggacaagcacaacgggaagcucugcaagcugcgcggcgucgcgccccugcaccucgggaagugcaacaucgccggcuggauccuggggaacccggagugcgagagccuguccaccgccagcuccuggagcuacaucguggagaccuccagcuccgacaacggcacgugcuaccccggcgacuucaucgacuacgaggagcuccgggagcagcugagcuccgugagcuccuucgagcgcuucgagaucuuccccaagaccagcuccuggcccaaccacgacagcaacaagggggucaccgccgccugcccgcacgccggcgcgaaguccuucuacaagaaccugaucuggcucgugaagaaggggaacagcuaccccaagcuguccaagagcuacaucaacgacaagggcaaggaggugcugguccucugggggauccaccaccccagcaccuccgccgaccagcagagccuguaccagaacgccgacgccuacguguucgugggcacgucccgguacagcaagaaguucaagcccgagaucgccauccgcccgaagguccggggccaggaggggcgcaugaacuacuacuggacccugguggagcccggcgacaagaucaccuucgaggcgaccgggaaccucguggucccccgguacgccuucgccauggagcgcaacgccggcuccggcaucaucaucagcgacacgcccgugcacgacugcaacacgaccugccagaccccgaagggggccaucaacaccucccugcccuuccagaacauccaccccaucaccaucggcaagugccccaaguacgucaagagcaccaagcugcggcucgcgaccgggcugcgcaacaucccguccauccagagccggggccuguucggggccaucgccggcuucaucgagggcggguggacgggcaugguggacgggugguacggcuaccaccaccagaacgagcagggguccggcuacgccgccgaccucaagagcacccagaacgcgaucgacgagaucaccaacaaggugaacuccgugaucgagaagaugaacacccaguucacggccgucggcaaggaguucaaccaccuggagaagcgcaucgagaaccugaacaagaagguggacgacggguuccucgacaucuggaccuacaacgccgagcugcugguccuccuggagaacgagcggacccuggacuaccacgacagcaacgugaagaaccucuacgagaaggugcgcucccagcugaagaacaacgccaaggagaucggcaacgggugcuucgaguucuaccacaagugcgacaacacgugcauggagagcgucaagaacggcaccuacgacuaccccaaguacuccgaggaggccaagcugaaccgggaggagaucgacggggugaagcucgagagcacccgcaucuaccagauccuggcgaucuacuccaccguggccagcagccugguccucguggugucccugggcgccaucagcuucuggaugugcuccaacggcagccugcagugccggaucugcaucuga

SEQ ID NO: 68958 - RNA, 1701 nt, Artificial Sequence; identical to SEQ ID NO: 67441
  derived and/or modified CDS sequence (opt1) from hemagglutinin__InfluenzaA__ADG59638

SEQ ID NO: 68959 - RNA, 1701 nt, Artificial Sequence; identical to SEQ ID NO: 67794
  derived and/or modified CDS sequence (opt1) from hemagglutinin__InfluenzaA__ADG59639

SEQ ID NO: 68960 - RNA, 1701 nt, Artificial Sequence; identical to SEQ ID NO: 67046
  derived and/or modified CDS sequence (opt1) from hemagglutinin__InfluenzaA__ADG59641

SEQ ID NO: 68961 - RNA, 1701 nt, Artificial Sequence; identical to SEQ ID NO: 67536
  derived and/or modified CDS sequence (opt1) from hemagglutinin__InfluenzaA__ADG59643

SEQ ID NO: 68962 - RNA, 1701 nt, Artificial Sequence; identical to SEQ ID NO: 66680
  derived and/or modified CDS sequence (opt1) from hemagglutinin__InfluenzaA__ADG59644

SEQ ID NO: 68963 - RNA, 1701 nt, Artificial Sequence; identical to SEQ ID NO: 66693
  derived and/or modified CDS sequence (opt1) from hemagglutinin__InfluenzaA__ADG59646

SEQ ID NO: 68964 - RNA, 1701 nt, Artificial Sequence; identical to SEQ ID NO: 67794
  derived and/or modified CDS sequence (opt1) from hemagglutinin__InfluenzaA__ADG59647

SEQ ID NO: 68965 - RNA, 1701 nt, Artificial Sequence; identical to SEQ ID NO: 67857
  derived and/or modified CDS sequence (opt1) from hemagglutinin__InfluenzaA__ADG59648

SEQ ID NO: 68966 - RNA, 1701 nt, Artificial Sequence; identical to SEQ ID NO: 67857
  derived and/or modified CDS sequence (opt1) from hemagglutinin__InfluenzaA__ADG59649

SEQ ID NO: 68967 - RNA, 1701 nt, Artificial Sequence; identical to SEQ ID NO: 67857
  derived and/or modified CDS sequence (opt1) from hemagglutinin__InfluenzaA__ADG59650

SEQ ID NO: 68968 - RNA, 1701 nt, Artificial Sequence; identical to SEQ ID NO: 67857
  derived and/or modified CDS sequence (opt1) from hemagglutinin__InfluenzaA__ADG59651

SEQ ID NO: 68969 - RNA, 1701 nt, Artificial Sequence; identical to SEQ ID NO: 66693
  derived and/or modified CDS sequence (opt1) from hemagglutinin__InfluenzaA__ADG59652

SEQ ID NO: 68970 - RNA, 1701 nt, Artificial Sequence; identical to SEQ ID NO: 66693
  derived and/or modified CDS sequence (opt1) from hemagglutinin__InfluenzaA__ADG59653

SEQ ID NO: 68971 - RNA, 1701 nt, Artificial Sequence; identical to SEQ ID NO: 68957
  derived and/or modified CDS sequence (opt1) from hemagglutinin__InfluenzaA__ADG59655

SEQ ID NO: 68972 - RNA, 1701 nt, Artificial Sequence; identical to SEQ ID NO: 67794
  derived and/or modified CDS sequence (opt1) from hemagglutinin__InfluenzaA__ADG59656

SEQ ID NO: 68973 - RNA, 1701 nt, Artificial Sequence
  derived and/or modified CDS sequence (opt1) from hemagglutinin__InfluenzaA__ADG59657
augaaggccauccuggugguccuccuguacaccuucgccaccgcgaacgccgacacgcugugcaucggcuaccacgccaacaacagcaccgacaccguggacaccgugcucgagaagaacgucacggugacccacuccgugaaccugcuggaggacaagcacaacgggaagcucugcaagcugcgcggcgucgcgccccugcaccucgggaagugcaacaucgccggcuggauccuggggaacccggagugcgagagccuguccaccgccagcuccuggagcuacaucguggagaccuccagcuccgacaacggcacgugcuaccccggcgacuucaucgacuacgaggagcuccgggagcagcugagcuccgugagcuccuucgagcgcuucgagaucuuccccaagaccagcuccuggcccaaccacgacagcaacaagggggucaccgccgccugcccgcacgccggcgcgaaguccuucuacaagaaccugaucuggcucgugaagaaggggaacagcuaccccaagcuguccaagagcuacaucaacgacaagggcaaggaggugcugguccucugggggauccaccaccccagcaccuccgccgaccagcagagccuguaccagaacgccgacgccuacguguucgugggcuccagcaaguacuccaagaaguucaagcccgagaucgccauccggccgaagguccgcgaccaggagggccggaugaacuacuacuggacgcugguggagcccggggacaagaucaccuucgaggcgaccggcaaccucguggucccccgcuacgccuucgccauggagcggaacgccgggagcggcaucaucaucuccgacacccccgugcacgacugcaacacgaccugccagaccccgaagggcgccaucaacaccagccugcccuuccagaacauccaccccaucacgaucgggaagugccccaaguacgugaaguccaccaagcugcgccucgcgaccggccugcggaacgucccgagcacccagucccgcgggcuguucggcgccaucgccggguucaucgagggcggcuggacggggaugguggacggcugguacggguaccaccaccagaacgagcagggcagcggguacgccgccgaccucaaguccacccagaacgcgaucgacgagaucaccaacaaggugaacagcgucaucgagaagaugaacacccaguucacggccgugggcaaggaguucaaccaccuggagaagcggaucgagaaccugaacaagaaggucgacgacggcuuccucgacaucuggaccuacaacgccgagcugcuggugcuccuggagaacgagcgcacccuggacuaccacgacuccaacgugaagaaccucuacgagaagguccggagccagcugaagaacaacgccaaggagaucgggaacggcugcuucgaguucuaccacaagugcgacaacacgugcauggaguccgugaagaacgggaccuacgacuaccccaaguacagcgaggaggccaagcugaaccgcgaggagaucgacggcgugaagcucgaguccacccggaucuaccagauccuggcgaucuacagcaccgucgccagcucccuggugcucguggucagccugggggccaucuccuucuggaugugcagcaacggcucccugcagugccgcaucugcaucuga

SEQ ID NO: 68974 - RNA, 1701 nt, Artificial Sequence
  derived and/or modified CDS sequence (opt1) from hemagglutinin__InfluenzaA__ADG59658
augaaggccauccuggugguccuccuguacaccuucgccaccgcgaacgccgacacgcugugcaucggcuaccacgccaacaacagcaccgacaccaucgacaccgugcucgagaagaacgugacggucacccacuccgugaaccugcuggaggacaagcacaacgggaagcucugcaagcugcgcggcguggcgccccugcaccucgggaagugcaacaucgccggcuggauccuggggaacccggagugcgagagccuguccaccgccagcuccuggagcuacaucgucgagaccuccagcuccgacaacggcacgugcuaccccggcgacuucaucgacuacgaggagcuccgggagcagcugagcuccgugagcuccuucgagcgcuucgagaucuuccccaagaccagcuccuggcccaaccacgacagcaacaagggggugaccgccgccugcccgcacgccggcgcgaaguccuucuacaagaaccugaucuggcucgucaagaaggggaacagcuaccccaagcuguccaagagcuacaucaacgacaagggcaaggaggugcuggugcucugggggauccaccaccccagcaccuccgccgaccagcagagccuguaccagaacgccgacgccuacgucuucgugggcacgucccgguacagcaagaaguucaagcccgagaucgccauccgcccgaaggugcggaaccaggagggccgcaugaacuacuacuggacccuggucgagcccggggacaagaucaccuucgaggcgaccggcaaccucguggugccccgguacgccuucgccauggagcgcaacgccggguccggcaucaucaucagcgacacgcccguccacgacugcaacacgaccugccagaccccgaagggcgccaucaacaccucccugcccuuccagaacauccaccccaucaccaucgggaagugccccaaguacgucaagagcaccaagcugcggcucgcgaccggccugcgcaacaucccguccauccagagccgggggcuguucggcgccaucgccggguucaucgagggcggcuggacggggaugguggacggcugguacggguaccaccaccagaacgagcagggcuccggguacgccgccgaccucaagagcacccagaacgcgaucgacgagaucaccaacaaggugaacuccgugaucgagaagaugaacacccaguucacggccgugggcaaggaguucaaccaccuggagaagcgcaucgagaaccugaacaagaaggucgacgacggcuuccucgacaucuggaccuacaacgccgagcugcuggugcuccuggagaacgagcggacccuggacuaccacgacagcaacgucaagaaccucuacgagaaggugcgcucccagcugaagaacaacgccaaggagaucgggaacggcugcuucgaguucuaccacaagugcgacaacacgugcauggagagcgugaagaacgggaccuacgacuaccccaaguacuccgaggaggccaagcugaaccgggaggagaucgacggcgucaagcucgagagcacccgcaucuaccagauccuggcgaucuacuccaccguggccagcagccuggugcucgucgugucccugggggccaucagcuucuggaugugcuccaacggcagccugcagugccggaucugcaucuga

SEQ ID NO: 68975 - RNA, 1701 nt, Artificial Sequence; identical to SEQ ID NO: 67140
  derived and/or modified CDS sequence (opt1) from hemagglutinin__InfluenzaA__ADG59659

SEQ ID NO: 68976 - RNA, 1701 nt, Artificial Sequence; identical to SEQ ID NO: 67140
  derived and/or modified CDS sequence (opt1) from hemagglutinin__InfluenzaA__ADG59660

SEQ ID NO: 68977 - RNA, 1701 nt, Artificial Sequence; identical to SEQ ID NO: 67046
  derived and/or modified CDS sequence (opt1) from hemagglutinin__InfluenzaA__ADG59662

SEQ ID NO: 68978 - RNA, 1701 nt, Artificial Sequence
  derived and/or modified CDS sequence (opt1) from hemagglutinin__InfluenzaA__ADG59663
augaaggccauccuggugguccuccuguacaccuucgccaccgcgaacgccgacacgcugugcaucggcuaccacgccaacaacagcaccgacaccguggacaccgugcucgagaagaacgucacggugacccacuccgugaaccugcuggaggacaagcacaacgggaagcucugcaagcugcgcggcgucgcgccccugcaccucgggaagugcaacaucgccggcuggauccuggggaacccggagugcgagagccuguccaccgccagcuccuggagcuacaucguggagaccuccagcuccgacaacggcacgugcuaccccggcgacuucaucgacuacgaggagcuccgggagcagcugagcuccgugagcuccuucgagcgcuucgagaucuuccccaagaccagcuccuggcccaaccacgacagcaacaagggggucaccgccgccugcccgcacgccggcgcgaaguccuucuacaagaaccugaucuggcucgugaagaaggggaacagcuaccccaagcuguccaagagcuacaucaacgacaagggcaaggaggugcugguccucugggggauccaccaccccagcaccuccgccgaccagcagagccuguaccagaacgccgacgccuacguguucgugggcacgucccgguacagcaagaaguucaagcccgagaucgccauccgcccgaagguccgggaccaggagggccgcaugaacuacuacuggacccugguggagcccggggacaagaucaccuucgaggcgaccggcaaccucguggucccccgguacgccuucgccauggagcgcaacgccggguccggcaucaucaucagcgacacgcccuuccacgacugcaacacgaccugccagaccccgaagggcgccaucaacaccucccugcccuuccagaacauccaccccaucaccaucgggaagugccccaaguacgucaagagcaccaagcugcggcucgcgaccggccugcgcaacaucccguccauccagagccgggggcuguucggcgccaucgccggguucaucgagggcggcuggacggggaugguggacggcugguacggguaccaccaccagaacgagcagggcuccggguacgccgccgaccucaagagcacccagaacgcgaucgacgagaucaccaacaaggugaacuccgugaucgagaagaugaacacccaguucacggccgugggcaaggaguucaaccaccuggagaagcgcaucgagaaccugaacaagaaggucgacgacggcuuccucgacaucuggaccuacaacgccgagcugcuggugcuccuggagaacgagcggacccuggacuaccacgacagcaacgucaagaaccucuacgagaaggugcgcucccagcugaagaacaacgccaaggagaucgggaacggcugcuucgaguucuaccacaagugcgacaacacgugcauggagagcgugaagaacgggaccuacgacuaccccaaguacuccgaggaggccaagcugaaccgggaggagaucgacggcgucaagcucgagagcacccgcaucuaccagauccuggcgaucuacuccaccguggccagcagccuggugcucgucgugucccugggggccaucagcuucuggaugugcuccaacggcagccugcagugccggaucugcaucuga

SEQ ID NO: 68979 - RNA, 1701 nt, Artificial Sequence; identical to SEQ ID NO: 67046
  derived and/or modified CDS sequence (opt1) from hemagglutinin__InfluenzaA__ADG59664

SEQ ID NO: 68980 - RNA, 1701 nt, Artificial Sequence
  derived and/or modified CDS sequence (opt1) from hemagglutinin__InfluenzaA__ADG59666
augaaggccauccuggugguccuccuguacaccuucgccaccgcgaacgccgacacgcugugcaucggcuaccacgccaacaacagcaccgacaccguggacaccgugcucgagaagaacgucacggugacccacuccgugaaccugcuggaggacaagcacaacgggaagcucugcaagcugcgcggcgucgcgccccugcaccucgggaagugcaacaucgccggcuggauccuggggaacccggagugcgagagccuguccaccgccagcuccuggagcuacaucguggagaccuccagcuccgacaacggcacgugcuaccccggcgacuucaucgacuacgaggagcuccgggagcagcugagcuccgugagcuccuucgagcgcuucgagaucuuccccaagaccagcuccuggcccaaccacgacagcaacaagggggucaccgccgccugcccgcacgccggcgcgaaguccuucuacaagaaccugaucuggcucgugaagaaggggaacagcuaccccaagcuguccaagagcuacaucaacgacaagggcaaggaggugcugguccucugggggauccaccaccccagcaccuccgccgaccagcagagccuguaccagaacgccgacgccuacguguucgugggcacgucccgguacagcaagaaguucaagcccgagaucgccauccgcccgaagguccgggaccaggagggccgcaugaacuacuacuggacccugguggagcccggggacaagaucaccuucgaggcgaccggcaaccucguggucccccgguacgccuucgccauggagcgcgacgccggguccggcaucaucaucagcgacacgcccgugcacgacugcaacacgaccugccagaccccgaagggcgccaucaacaccucccugcccuuccagaacauccaccccaucaccaucgggaagugccccaaguacgucaagagcaccaagcugcggcucgcgaccggccugcgcaacgugccguccauccagagccgggggcuguucggcgccaucgccggguucaucgagggcggcuggacggggaugguggacggcugguacggguaccaccaccagaacgagcagggcuccggguacgccgccgaccucaagagcacccagaacgcgaucgacgagaucaccaacaaggugaacuccgucaucgagaagaugaacacccaguucacggccgugggcaaggaguucaaccaccuggagaagcgcaucgagaaccugaacaagaagaucgacgacggcuuccucgacaucuggaccuacaacgccgagcugcugguccuccuggagaacgagcggacccuggacuaccacgacagcaacgugaagaaccucuacgagaaggugcgcucccagcugaagaacaacgccaaggagaucgggaacggcugcuucgaguucuaccacaagugcgacaacacgugcauggagagcgucaagaacgggaccuacgacuaccccaaguacuccgaggaggccaagcugaaccgggaggagaucgacggcgugaagcucgagagcacccgcaucuaccagauccuggcgaucuacuccgccguggccagcagccugguccucguggugucccugggggccaucagcuucuggaugugcuccaacggcagccugcagugccggaucugcaucuga

SEQ ID NO: 68981 - RNA, 1701 nt, Artificial Sequence; identical to SEQ ID NO: 67795
  derived and/or modified CDS sequence (opt1) from hemagglutinin__InfluenzaA__ADG59667

SEQ ID NO: 68982 - RNA, 1701 nt, Artificial Sequence
  derived and/or modified CDS sequence (opt1) from hemagglutinin__InfluenzaA__ADG59669
augaaggccauccuggugguccuccuguacaccuucgccaccgcgaacgccgacacgcugugcaucggcuaccacgccaacaacagcaccgacaccguggacaccgugcucgagaagaacgucacggugacccacuccgugaaccugcuggaggacaagcacaacgggaagcucugcaagcugcgcggcgucgcgccccugcaccucgggaagugcaacaucgccggcuggauccuggggaacccggagugcgagagccuguccaccgccagcuccuggagcuacaucguggagaccuccagcuccgacaacggcacgugcuaccccggcgacuucaucgacuacgaggagcuccgggagcagcugagcuccgugagcuccuucgagcgcuucgagaucuuccccaagaccagcuccuggcccaaccacgacagcaacaagggggucaccgccgccugcccgcacgccggcgcgaaguccuucuacaagaaccugaucuggcucgugaagaaggggaacagcuaccccaagcuguccaagagcuacaucaacgacaagggcaaggaggugcugguccucugggggauccaccaccccagcaccuccgccgaccagcagagccuguaccagaacgccgacgccuacguguucgugggcacgucccgguacagcaagaaguucaagcccgagaucgccauccgcccgaagguccgggagcaggagggccgcaugaacuacuacuggacccugguggaccccggggacaagaucaccuucgaggcgaccggcaaccucguggucccccgguacgccuucgccauggagcgcaacgccggguccggcaucaucaucagcgacacgcccgugcacgacugcaacacgaccugccagaccccgaagggcgccaucaacaccucccugcccuuccagaacauccacagcaucaccaucgggaagugccccaaguacgugaaguccaccaagcugcggcucgcgaccggccugcgcaacguccccagcauccagucccgggggcuguucggcgccaucgccggguucaucgagggcggcuggacggggaugguggacggcugguacggguaccaccaccagaacgagcagggcagcggguacgccgccgaccucaaguccacccagaacgcgaucgacgagaucaccaacaaggugaacagcgucaucgagaagaugaacacccaguucacggccgugggcaaggaguucaaccaccuggagaagcgcaucgagaaccugaacaagaaggucgacgacggcuuccucgacaucuggaccuacaacgccgagcugcuggugcuccuggagaacgagcggacccuggacuaccacgacuccaacgugaagaaccucuacgagaagguccgcagccagcugaagaacaacgccaaggagaucgggaacggcugcuucgaguucuaccacaagugcgacaacacgugcauggaguccgugaagaacgggaccuacgacuacccgaaguacagcgaggaggccaagcugaaccgggaggagaucgacggcgugaagcucgaguccacccgcaucuaccagauccuggcgaucuacagcaccgucgccagcucccuggugcucguggucagccugggggccaucuccuucuggaugugcagcaacggcucccugcagugccggaucugcaucuga

SEQ ID NO: 68983 - RNA, 1701 nt, Artificial Sequence; identical to SEQ ID NO: 68982
  derived and/or modified CDS sequence (opt1) from hemagglutinin__InfluenzaA__ADG59670

SEQ ID NO: 68984 - RNA, 1701 nt, Artificial Sequence; identical to SEQ ID NO: 68982
  derived and/or modified CDS sequence (opt1) from hemagglutinin__InfluenzaA__ADG59671

SEQ ID NO: 68985 - RNA, 1701 nt, Artificial Sequence; identical to SEQ ID NO: 68982
  derived and/or modified CDS sequence (opt1) from hemagglutinin__InfluenzaA__ADG59672

SEQ ID NO: 68986 - RNA, 1701 nt, Artificial Sequence
  derived and/or modified CDS sequence (opt1) from hemagglutinin__InfluenzaA__ADG59673
augaaggccauccuggugguccuccuguacaccuucgccaccgcgaacgccgacacgcugugcaucggcuaccacgccaacaacagcaccgacaccguggacaccgugcucgagaagaacgucacggugacccacuccguggaccugcuggaggacaagcacaacgggaagcucugcaagcugcgcggcgucgcgccccugcaccucggggagugcaacaucgccggcuggauccuggggaacccggagugcgagagccuguccaccgccagcuccuggagcuacaucguggagaccuccagcuccgacaacggcacgugcuaccccggcgacuucaucgacuacgaggagcuccgggagcagcugagcuccgugagcuccuucgagcgcuucgagaucuuccccaagaccagcuccuggcccaaccacgacagcaacaagggggucaccgccgccugcccgcacgccggcgcgaaguccuucuacaagaaccugaucuggcucgugaagaaggggaacagcuaccccaagcuguccaagagcuacaucaacgacaagggcaaggaggugcugguccucugggggauccaccaccccagcaccuccgccgaccagcagagccuguaccagaacgccgacgccuacguguucgugggcacgucccgguacagcaagaaguucaagcccgagaucgccauccgcccgaagguccgggaccaggagggccgcaugaacuacuacuggacccugguggagcccggggacaagaucaccuucgaggcgaccggcaaccucguggucccccgguacgccuucgccauggagcgcaacgccggguccggcaucaucaucagcgacacgcccgugcacgacugcaacacgaccugccagaccccgaagggcgccaucaacaccucccugcccuuccagaacauccaccccaucaccaucgggaagugccccaaguacgucaagagcaccaagcugcggcucgcgaccggccugcgcaacgugccguccauccagagccgggggcuguucggcgccaucgccggguucaucgagggcggcuggacggggaugguggacggcugguacggguaccaccaccagaacgagcagggcuccggguacgccgccgaccucaagagcacccagaacgcgaucgacgagaucaccaacaaggugaacuccgucaucgagaagaugaacacccaguucacggccgugggcaaggaguucaaccaccuggagaagcgcaucgagaaccugaacaagaaggucgacgacggcuuccucgacaucuggaccuacaacgccgagcugcuggugcuccuggagaacgagcggacccuggacuaccacgacagcaacgugaagaaccucuacgagaagguccgcucccagcugaagaacaacgccaaggagaucgggaacggcugcuucgaguucuaccacaagugcgacaacacgugcauggagagcgugaagaacgggaccuacgacuaccccaaguacuccgaggaggccaagcugaaccgggaggagaucgacggcgugaagcucgagagcacccgcaucuaccagauccuggcgaucuacuccaccgucgccagcagccuggugcucguggucucccugggggccaucagcuucuggaugugcuccaacggcagccugcagugccggaucugcaucuga

SEQ ID NO: 68987 - RNA, 1701 nt, Artificial Sequence
  derived and/or modified CDS sequence (opt1) from hemagglutinin__InfluenzaA__ADG59674
augaaggccauccuggugguccuccuguacaccuucgccaccgcgaacgccgacacgcugugcgugggcuaccacgccaacaacagcaccgacaccguggacaccguccucgagaagaacgugacggugacccacuccgucaaccugcuggaggacaagcacaacgggaagcucugcaagcugcgcggcguggcgccccugcaccucgggaagugcaacaucgccggcuggauccuggggaacccggagugcgagagccuguccaccgccagcuccuggagcuacaucguggagaccuccagcuccgacaacggcacgugcuaccccggcgacuucaucgacuacgaggagcuccgggagcagcugagcuccgucagcuccuucgagcgcuucgagaucuuccccaagaccagcuccuggcccaaccacgacagcaacaagggggugaccgccgccugcccgcacgccggcgcgaaguccuucuacaagaaccugaucuggcucgugaagaaggggaacagcuaccccaagcuguccaagagcuacaucaacgacaagggcaaggagguccuggugcucugggggauccaccaccccagcaccuccgccgaccagcagagccuguaccagaacgccgacgccuacguguucgucggcacgucccgguacagcaagaaguucaagcccgagaucgccauccgcccgaaggugcgggagcaggagggccgcaugaacuacuacuggacccugguggagcccggggacaagaucaccuucgaggcgaccggcaaccucgucgugccccgguacgccuucgccauggagcgcaacgccggguccggcaucaucaucagcgacacgcccgugcacgacugcaacacgaccugccagaccccgaagggcgccaucaacaccucccugcccuuccagaacguccaccccaucaccaucgggaagugccccaaguacgucaagagcaccaagcugcggcucgcgaccggccugcgcaacgugccguccauccagagccgggggcuguucggcgccaucgccggguucaucgagggcggcuggacggggaugguggacggcugguacggguaccaccaccagaacgagcagggcuccggguacgccgccgaccucaagagcacccagaacgcgaucgacgagaucaccaacaaggugaacuccgucaucgagaagaugaacacccaguucacggccgugggcaaggaguucaaccaccuggagaagcgcaucgagaaccugaacaagaagguggacgacggcuuccucgacaucuggaccuacaacgccgagcugcugguccuccuggagaacgagcggacccuggacuaccacgacagcaacgugaagaaccucuacgagaaggugcgcucccagcugaagaacaacgccaaggagaucgggaacggcugcuucgaguucuaccacaagugcgacaacacgugcauggagagcgucaagaacgggaccuacgacuaccccaaguacuccgaggaggccaagcugaaccgggaggagaucgacggcgugaagcucgagagcaccaagaucuaccagauccuggcgaucuacuccaccguggccagcagccugguccucguggugucccugggggccaucagcuucuggaugugcuccaacggcagccugcagugccgcaucugcaucuga

SEQ ID NO: 68988 - RNA, 1701 nt, Artificial Sequence
  derived and/or modified CDS sequence (opt1) from hemagglutinin__InfluenzaA__ADG59675
augaaggccauccuggugguccuccuguacaccuucgccaccgcgaacgccgacacgcugugcaucggcuaccacgccaacaacagcaccgacaccguggacaccgugcucgagaagaacgucacggugacccacuccgugaaccugcuggaggacaagcacaacgggaagcucugcaagcugcgcggcgucgcgccccugcaccucgggaagugcaacaucgccggcuggauccuggggaacccggagugcgagagccuguccaccgccagcuccuggagcuacaucguggagaccuccagcuccgacaacggcacgugcuaccccggcgacuucaucgacuacgaggagcuccgggagcagcugagcuccgugagcuccuucgagcgcuucgagaucuuccccaagaccagcuccuggcccaaccacgacagcaacaagggggucaccgccgccugcccgcacgccggcgcgaaguccuucuacaagaaccugaucuggcucgugaagaaggggaacagcuaccccaagcuguccaagagcuacaucaacgacaagggcaaggaggugcugguccucugggggauccaccaccccagcaccuccgccgaccagcagagccuguaccagaacgccgacgccuacguguucgugggcuccagccgguacuccaagaaguucaagcccgagaucgccauccgcccgaagguccgggaccaggagggccgcaugaacuacuacuggacgcugguggagcccggggacaagaucaccuucgaggcgaccggcaaccucguggucccccgguacgccuucgccauggagcgcaacgccgggagcggcaucaucaucuccgacacccccgugcacgacugcaacacgaccugccagaccccgaacggcgccaucaacaccagccugcccuuccacaacauccaccccaucacgaucgggaagugccccaaguacgugaaguccaccaagcugcggcucgcgaccggccugcgcaacgucccgagcauccagucccgggggcuguucggcgccaucgccggguucaucgagggcggcuggaccgggaugguggacggcugguacggguaccaccaccagaacgagcagggcagcggguacgccgccgaccucaaguccacgcagaacgcgaucgacgagaucaccaacaaggugaacagcgucaucgagaagaugaacacccaguucaccgccgugggcaaggaguucaaccaccuggagaagcgcaucgagaaccugaacaagaaggucgacgacggcuuccucgacaucuggacguacaacgccgagcugcuggugcuccuggagaacgagcggacccuggacuaccacgacuccaacgugaagaaccucuacgagaagguccgcagccagcugaagaacaacgccaaggagaucgggaacggcugcuucgaguucuaccacaagugcgacaacacgugcauggaguccgugaagaacgggaccuacgacuaccccaaguacagcgaggaggccaagcugaaccgggaggagaucgacggcgugaagcucgaguccacccgcaucuaccagauccuggcgaucuacagcaccgucgccagcucccuggugcucguggucagccugggggccaucuccuucuggaugugcagcaacggcucccugcagugccggaucugcaucuga

SEQ ID NO: 68989 - RNA, 1701 nt, Artificial Sequence
  derived and/or modified CDS sequence (opt1) from hemagglutinin__InfluenzaA__ADG59676
augaaggccauccuggugguccuccuguacaccuucgccaccgcgaacgccgacacgcugugcaucggcuaccacgccaacaacagcaccgacaccguggacaccgugcucgagaagaacgucacggugacccacuccgugaaccugcuggaggacaagcacaacgggaagcucugcaagcugcgcggcgucgcgccccugcaccucgggaagugcaacaucgccggcuggauccuggggaacccggagugcgagagccuguccaccgccagcuccuggagcuacaucguggagaccuccagcuccgacaacggcacgugcuaccccggcgacuucaucgacuacgaggagcuccgggagcagcugagcuccgugagcuccuucgagcgcuucgagaucuuccccaagaccagcuccuggcccaaccacgacagcaacaagggggucaccgccgccugcccgcacgccggcgcgaaguccuucuacaagaaccugaucuggcucgugaagaaggggaacagcuaccccaagcuguccaagagcuacaucaacgacaagggcaaggaggugcugguccucugggggauccaccaccccagcaccuccgccgaccagcagagccuguaccagaacgccgacgccuacguguucgugggcacgucccgguacagcaagaaguucaagcccgagaucgccauccgcccgaagguccgggaccaggagggccgcaugaacuacuacuggacccugguggagcccggggacaagaucaccuucgaggcgaccggcaaccucguggucccccgguacgccuucgccauggagcgcaacgccggguccggcaucaucaucagcgacacgcccgugcacgacugcaacgcgaccugccagaccccgaagggcgccaucaacaccucccugcccuuccagaacauccaccccaucacgaucgggaagugccccaaguacgucaagagcaccaagcugcggcucgccaccggccugcgcaacaucccguccauccagagccgggggcuguucggcgccaucgccggguucaucgagggcggcuggaccgggaugguggacggcugguacggguaccaccaccagaacgagcagggcuccggguacgccgcggaccucaagagcacgcagaacgccaucgacgagaucaccaacaaggugaacuccgugaucgagaagaugaacacccaguucaccgccgucggcaaggaguucaaccaccuggagaagcgcaucgagaaccugaacaagaagguggacgacggcuuccucgacaucuggacguacaacgccgagcugcugguccuccuggagaacgagcggacccuggacuaccacgacagcaacgugaagaaccucuacgagaaggugcgcucccagcugaagaacaacgccaaggagaucgggaacggcugcuucgaguucuaccacaagugcgacaacacgugcauggagagcgucaagaacgggaccuacgacuaccccaaguacuccgaggaggcgaagcugaaccgggaggagaucgacggcgugaagcucgagagcacccgcaucuaccagauccuggccaucuacuccaccguggccagcagccugguccucguggugucccugggggccaucagcuucuggaugugcuccaacggcagccugcagugccggaucugcaucuga

SEQ ID NO: 68990 - RNA, 1701 nt, Artificial Sequence; identical to SEQ ID NO: 67794
  derived and/or modified CDS sequence (opt1) from hemagglutinin__InfluenzaA__ADG59678

SEQ ID NO: 68991 - RNA, 1701 nt, Artificial Sequence; identical to SEQ ID NO: 68957
  derived and/or modified CDS sequence (opt1) from hemagglutinin__InfluenzaA__ADG59680

SEQ ID NO: 68992 - RNA, 1701 nt, Artificial Sequence; identical to SEQ ID NO: 68957
  derived and/or modified CDS sequence (opt1) from hemagglutinin__InfluenzaA__ADG59681

SEQ ID NO: 68993 - RNA, 1701 nt, Artificial Sequence
  derived and/or modified CDS sequence (opt1) from hemagglutinin__InfluenzaA__ADG59683
augaaggccauccuggugguccuccuguacaccuucgccaucgcgaacgccgacacccugugcaucggcuaccacgccaacaacagcacggacaccguggacaccgugcucaagaagaacgucaccgugacgcacuccgugaaccugcuggaggacaagcacaacgggaagcucugcaagcugcgcggcgucgcgccccugcaccucgggaagugcaacaucgccggcuggauccuggggaacccggagugcgagagccuguccaccgccagcuccuggagcuacaucguggagaccuccagcuccgacaacgggaccugcuaccccggcgacuucaucgacuacgaggagcuccgggagcagcugagcuccgugagcuccuucgagcgcuucgagaucuuccccaagacgagcuccuggcccaaccacgacagcaacaagggcgucaccgccgccugcccgcacgccggcgcgaaguccuucuacaagaaccugaucuggcucgugaagaaggggaacagcuaccccaagcuguccaagagcuacaucaacgacaagggcaaggaggugcugguccucugggggauccaccaccccagcaccuccgccgaccagcagagccuguaccagaacgccgacgccuacguguucgugggcaccucccgguacagcaagaaguucaagcccgagaucgccauccgcccgaagguccgggaccaggagggccgcaugaacuacuacuggacgcugguggagcccggggacaagaucaccuucgaggcgaccggcaaccucguggucccccgguacgccuucgccauggagcgcaacgccggguccggcaucgugaucagcgacacccccgugcacgacugcaacacgaccugccagaccccgaagggcgccaucaacaccucccugcccuuccagaacauccaccccaucacgaucgggaagugccccaaguacgucaagagcaccaagcugcggcucgcgaccggccugcgcaacgugccguccauccagagccgggggcuguucggcgccaucgccggguucaucgagggcggcuggaccgggaugguggacggcugguacggguaccaccaccagaacgagcagggcuccggguacgccgccgaccucaagagcacgcagaacgcgaucgacgagaucaccaacaaggucaacuccgugaucgagaagaugaacacccaguucaccgccgucggcaaggaguucaaccaccuggagaagcgcaucgagaaccugaacaagaagguggacgacggcuuccucgacaucuggacguacaacgccgagcugcuggugcuccuggagaacgagcggacccuggacuaccacgacagcaacgucaagaaccucuacgagaaggugcgcucccagcugaagaacaacgccaaggagaucgggaacggcugcuucgaguucuaccacaagugcgacaacacgugcauggagagcgugaagaacgggaccuacgacuaccccaaguacuccgaggaggccaagcugaaccgggaggagaucgacggcgucaagcucgagagcacccgcaucuaccagauccuggcgaucuacuccaccguggccagcagccuggugcucgucgugucccugggggccaucagcuucuggaugugcuccaacggcagccugcagugccggaucugcaucuga

SEQ ID NO: 68994 - RNA, 1701 nt, Artificial Sequence; identical to SEQ ID NO: 67794
  derived and/or modified CDS sequence (opt1) from hemagglutinin__InfluenzaA__ADG59684

SEQ ID NO: 68995 - RNA, 1701 nt, Artificial Sequence
  derived and/or modified CDS sequence (opt1) from hemagglutinin__InfluenzaA__ADG59685
augaaggccauccuggugguccuccuguacaccuucgccaccgcgaacgccgacacgcugugcaucggcuaccacgccaacaacagcaccgacaccaucgacaccgugcucgagaagaacgugacggucacccacuccgugaaccugcuggaggacaagcacaacgggaagcucugcaagcugcgcggcguggcgccccugcaccucgggaagugcaacaucgccggcuggauccuggggaacccggagugcgagagccuguccaccgccagcuccuggagcuacaucgucgagaccuccagcuccgacaacggcacgugcuaccccggcgacuucaucgacuacgaggagcuccgggagcagcugagcuccgugagcuccuucgagcgcuucgagaucuuccccaagaccagcuccuggcccaaccacgacagcaacaagggggugaccgccgccugcccgcacgccggcgcgaaguccuucuacaagaaccugaucuggcucgucaagaaggggaacagcuaccccaagcuguccaagagcuacaucaacgacaagggcaaggaggugcuggugcucugggggauccaccaccccagcaccuccgccgaccagcagagccuguaccagaacgccgacgccuacgucuucgugggcacgucccgguacagcaagaaguucaagcccgagaucgccauccgcccgaaggugcgggaccaggagggccgcaugaacuacuacuggacccuggucgagcccggggacaagaucaccuucgaggcgaccggcaaccucguggugccccgguacgccuucgccauggagcgcaacgccggguccggcaucaucaucagcgacacgcccguccacgacugcaacacgaccugccagaccccgaagggcgccaucaacaccucccugcccuuccagaacauccaccccaucaccaucgggaagugccccaaguacgucaagagcaccaagcugcggcucgcgaccggccugcgcaacaucccguccauccagagccgggggcuguucggcgccaucgccggguucaucgagggcggcuggacggggaugguggacggcugguacggguaccaccaccagaacgagcagggcuccggguacgccgccgaccucaagagcacccagaacgcgaucgacgagaucaccaacaaggugaacuccgugaucgagaagaugaacacccaguucacggccgugggcaaggaguucaaccaccuggagaagcgcaucgagaaccugaacaagaaggucgacgacggcuuccucgacaucuggaccuacaacgccgagcugcuggugcuccuggagaacgagcggacccuggacuaccacgacagcaacgucaagaaccucuacgagaaggugcgcucccagcugaagaacaacgccaaggagaucgggaacggcugcuucgaguucuaccacaagugcgacaacacgugcauggagagcgugaagaacgggaccuacgacuaccccaaguacuccgaggaggccaagcugaaccgggaggagaucgacggcgucaagcucgagagcacccgcaucuaccagauccuggcgaucuacuccaccguggccagcagccuggugcucgucgugucccugggggccaucagcuucuggaugugcuccaacggcagccugcagugccggaucugcaucuga

SEQ ID NO: 68996 - RNA, 1701 nt, Artificial Sequence; identical to SEQ ID NO: 67794
  derived and/or modified CDS sequence (opt1) from hemagglutinin__InfluenzaA__ADG59686

SEQ ID NO: 68997 - RNA, 1701 nt, Artificial Sequence; identical to SEQ ID NO: 68957
  derived and/or modified CDS sequence (opt1) from hemagglutinin__InfluenzaA__ADG59687

SEQ ID NO: 68998 - RNA, 1701 nt, Artificial Sequence
  derived and/or modified CDS sequence (opt1) from hemagglutinin__InfluenzaA__ADG59688
augaaggccauccuggugguccuccuguacaccaucgccaccgcgaacgccgacacgcugugcaucggcuaccacgccaacaacagcaccgacaccaucgacaccgugcucgagaagaacgugacggucacccacuccgugaaccugcuggaggacaagcacaacgggaagcucugcaagcugcgcggcguggcgccccugcaccucgggaagugcaacaucgccggcuggauccuggggaacccggagugcgagagccuguccaccgccagcuccuggagcuacaucgucgagaccuccagcuccgacaacggcacgugcuaccccggcgacuucaucgacuacgaggagcuccgggagcagcugagcuccgugagcuccuucgagcgcuucgagaucuuccccaagaccagcuccuggcccaaccacgacagcaacaagggggugaccgccgccugcccgcacgccggcgcgaaguccuucuacaagaaccugaucuggcucgucaagaaggggaacagcuaccccaagcuguccaagagcuacaucaacgacaagggcaaggaggugcuggugcucugggggauccaccaccccagcaccuccgccgaccagcagagccuguaccagaacgccgacgccuacgucuucgugggcacgucccgguacagcaagaaguucaagcccgagaucgccauccgcccgaaggugcggggccaggaggggcgcaugaacuacuacuggacccuggucgagcccggcgacaagaucaccuucgaggcgaccgggaaccucguggugccccgguacgccuucgccauggagcgcaacgccggcuccggcaucaucaucagcgacacgcccguccacgacugcaacacgaccugccagaccccgaagggggccaucaacaccucccugcccuuccagaacauccaccccaucaccaucggcaagugccccaaguacgucaagagcaccaagcugcggcucgcgaccgggcugcgcaacaucccguccauccagagccggggccuguucggggccaucgccggcuucaucgagggcggguggacgggcaugguggacgggugguacggcuaccaccaccagaacgagcagggguccggcuacgccgccgaccucaagagcacccagaacgcgaucgacgagaucaccaacaaggugaacuccgugaucgagaagaugaacacccaguucacggccgugggcaaggaguucaaccaccuggagaagcgcaucgagaaccugaacaagaaggucgacgacggguuccucgacaucuggaccuacaacgccgagcugcuggugcuccuggagaacgagcggacccuggacuaccacgacagcaacgucaagaaccucuacgagaaggugcgcucccagcugaagaacaacgccaaggagaucggcaacgggugcuucgaguucuaccacaagugcgacaacacgugcauggagagcgugaagaacggcaccuacgacuaccccaaguacuccgaggaggccaagcugaaccgggaggagaucgacggggucaagcucgagagcacccgcaucuaccagauccuggcgaucuacuccaccguggccagcagccuggugcucgucgugucccugggcgccaucagcuucuggaugugcuccaacggcagccugcagugccggaucugcaucuga

SEQ ID NO: 68999 - RNA, 1701 nt, Artificial Sequence; identical to SEQ ID NO: 66693
  derived and/or modified CDS sequence (opt1) from hemagglutinin__InfluenzaA__ADG59689

SEQ ID NO: 69000 - RNA, 1701 nt, Artificial Sequence; identical to SEQ ID NO: 66693
  derived and/or modified CDS sequence (opt1) from hemagglutinin__InfluenzaA__ADG59691

SEQ ID NO: 69001 - RNA, 1701 nt, Artificial Sequence
  derived and/or modified CDS sequence (opt1) from hemagglutinin__InfluenzaA__ADG59693
augaaggccauccuggugguccuccuguacaccuucgccaccgcgaacgccgacacgcugugcaucggcuaccacgccaacaacagcaccgacaccguggacaccgugcucgagaagaacgucacggugacccacuccgugaaccugcuggaggacaagcacaacgggaagcucugcaagcugcgcggcgucgcgccccugcaccucgggaagugcaacaucgccggcuggauccuggggaacccggagugcgagagccuguccaccgccagcuccuggagcuacaucguggagaccuccagcuccgacaacggcacgugcuaccccggcgacuucaucgacuacgaggagcuccgggagcagcugagcuccgugagcuccuucgagcgcuucgagaucuuccccaagaccagcuccuggcccaaccacgacagcaacaagggggucaccgccgccugcccgcacgccggcgcgaaguccuucuacaagaaccugaucuggcucgugaagaaggggaacagcuaccccaagcuguccaagagcuacaucaacgacaagggcaaggaggugcugguccucugggggauccaccaccccagcaccuccgccgaccagcagagccuguaccagaacgccgacgccuacguguucgugggcacgucccgguacagcaagaaguucaagcccgagaucgccauccgcccgaagguccggaaccaggagggccgcaugaacuacuacuggacccugguggagcccggggacaagaucaccuucgaggcgaccggcaaccucguggucccccgguacgccuucgccauggagcgcaacgccggguccggcaucaucaucagcgacacgcccgugcacgacugcaacacgaccugccagaccccgaagggcgccaucaacaccucccugcccuuccagaacauccaccccaucaccaucgggaagugccccaaguacgucaagagcaccaagcugcggcucgcgaccggccugcgcaacaucccguccauccagagccgggggcuguucggcgccaucgccggguucaucgagggcggcuggacggggaugguggacggcugguacggguaccaccaccagaacgagcagggcuccggguacgccgccgaccucaagagcacccagaacgcgaucgacgagaucaccaacaaggugaacuccgugaucgagaagaugaacacccaguucacggccgucggcaaggaguucaaccaccuggagaagcgcaucgagaaccugaacaagaagguggacgacggcuuccucgacaucuggaccuacaacgccgagcugcugguccuccuggagaacgagcggacccuggacuaccacgacagcaacgugaagaaccucuacgagaaggugcgcucccagcugaagaacaacgccaaggagaucgggaacggcugcuucgaguucuaccacaagugcgacaacacgugcauggagagcgucaagaacgggaccuacgacuaccccaaguacuccgaggaggccaagcugaaccgggaggagaucgacggcgugaagcucgagagcacccgcaucuaccagauccuggcgaucuacuccaccguggccagcagccugguccucguggugucccugggggccaucagcuucuggaugugcuccaacggcagccugcagugccggaucugcaucuga

SEQ ID NO: 69002 - RNA, 1701 nt, Artificial Sequence
  derived and/or modified CDS sequence (opt1) from hemagglutinin__InfluenzaA__ADG59696
augaaggccauccuggugguccuccuguacaccuucgccaccgcgaacgccgacacgcugugcaucggcuaccacgccaacaacagcaccgacaccguggacaccgugcucgagaagaacgucacggugacccacuccgugaaccugcuggaggacaagcacaacgggaagcucugcaagcugcgcggcgucgcgccccugcaccucgggaagugcaacaucgccggcuggauccuggggaacccggagugcgagagccuguccaccgccagcuccuggagcuacaucguggagaccuccagcuccgacaacggcacgugcuaccccggcgacuucaucgacuacgaggagcuccgggagcagcugagcuccgugagcuccuucgagcgcuucgagaucuuccccaagaccagcuccuggcccaaccacgacagcaacaagggggucaccgccgccugcccgcacgccggcgcgaaguccuucuacaagaaccugaucuggcucgugaagaaggggaacagcuaccccaagcuguccaagagcuacaucaacgacaagggcaaggaggugcugguccucugggggauccaccaccccagcaccuccgccgaccagcagagccuguaccagaacgccgacgccuacguguucgugggcacgucccgguacagcaagaaguucaagcccgagaucgccauccgcccgaagguccgggagcaggagggccgcaugaacuacuacuggacccugguggagcccggggacaagaucaccuucgaggcgaccggcaaccucguggucccccgguacgccuucgccauggagcgcgacgccggguccggcaucaucaucagcgacacgcccgugcacgacugcaacacgaccugccagaccccgaagggcgccaucaacaccucccugcccuuccagaacauccaccccaucaccaucgggaagugccccaaguacgucaagagcaccaagcugcggcucgcgaccggccugcgcaacgugccguccauccagagccgggggcuguucggcgccaucgccggguucaucgagggcggcuggacggggaugguggacggcugguacggguaccaccaccagaacgagcagggcuccggguacgccgccgaccucaagagcacccagaacgcgaucgacgagaucaccaacaaggugaacuccgucaucgagaagaugaacacccaguucacggccgugggcaaggaguucaaccaccuggagaagcgcaucgagaaccugaacaagaaggucgacgacggcuuccucgacaucuggaccuacaacgccgagcugcuggugcuccuggagaacgagcggacccuggacuaccacgacagcaacgugaagaaccucuacgagaagguccgcucccagcugaagaacaacgccaaggagaucgggaacggcugcuucgaguucuaccacaagugcgacaacacgugcauggagagcgugaagaacgggaccuacgacuaccccaaguacuccgaggaggccaagcugaaccgggaggagaucgacggcgugaagcucgagagcacccgcaucuaccagauccuggcgaucuacuccaccgucgccagcagccuggugcucguggucucccugggggccaucagcuucuggaugugcuccaacggcagccugcagugccggaucugcaucuga

SEQ ID NO: 69003 - RNA, 1701 nt, Artificial Sequence
  derived and/or modified CDS sequence (opt1) from hemagglutinin__InfluenzaA__ADG59697
augaaggccauccuggugguccuccuguacaccuucgccaccgcgaacgccgacacgcugugcaucggcuaccacgccaacaacagcaccgacaccguggacaccgugcucgagaagaacgucacggugacccacuccgugaaccugcuggaggacaagcacaacgggaagcucugcaagcugcgcggcgucgcgccccugcaccucgggaagugcaacaucgccggcuggauccuggggaacccggagugcgagagccuguccaccgccagcuccuggagcuacaucguggagaccuccagcuccgacaacggcacgugcuaccccggcgacuucaucgacuacgaggagcuccgggagcagcugagcuccgugagcuccuucgagcgcuucgagaucuuccccaagaccagcuccuggcccaaccacgacagcaacaagggggucaccgccgccugcccgcacgccggcgcgaagaacuucuacaagaaccugaucuggcucgugaagaaggggaacuccuaccccaagcugagcaaguccuacaucaacgacaagggcaaggaggugcugguccucugggggauccaccaccccagcaccagcgccgaccagcagucccuguaccagaacgccgacgccuacguguucgugggcacgagccgguacuccaagaaguucaagcccgagaucgccauccgcccgaagguccggggccaggaggggcgcaugaacuacuacuggacccugguggagcccggcgacaagaucaccuucgaggcgaccgggaaccucguggucccccgguacgccuucgccauggagcgcaacgccggcagcggcaucaucaucuccgacacgcccgugcacgacugcaacacgaccugccagaccccgaagggggccaucaacaccagccugcccuuccagaacauccaccccaucaccaucggcaagugccccaaguacgugaaguccaccaagcugcggcucgcgaccgggcugcgcaacgucccgagcauccagucccggggccuguucggggccaucgccggcuucaucgagggcggguggacgggcaugguggacgggugguacggcuaccaccaccagaacgagcaggggagcggcuacgccgccgaccucaaguccacccagaacgcgaucgacgagaucaccaacaaggugaacagcgucaucgagaagaugaacacccaguucacggccgugggcaaggaguucaaccaccuggagaagcgcaucgagaaccugaacaagaaggucgacgacggguuccucgacaucuggaccuacaacgccgagcugcuggugcuccuggagaacgagcggacccuggacuaccacgacuccaacgugaagaaccucuacgagaagguccgcagccagcugaagaacaacgccaaggagaucggcaacgggugcuucgaguucuaccacaagugcgacaacacgugcauggaguccgugaagaacggcaccuacgacuaccccaaguacagcgaggaggccaagcugaaccgggaggagaucgacggggugaagcucgaguccacccgcaucuaccagauccuggcgaucuacagcaccgucgccuccagccuggugcucguggucagccugggcgccaucuccuucuggaugugcagcaacggcucccugcagugccggaucugcaucuga

SEQ ID NO: 69004 - RNA, 1701 nt, Artificial Sequence
  derived and/or modified CDS sequence (opt1) from hemagglutinin__InfluenzaA__ADG59700
augaaggccauccuggugguccuccuguacaccuucgccaccgcgaacgccgacacgcugugcaucggcuaccacgccaacaacagcaccgacaccguggacaccgugcucgagaagaacgucacggugacccacuccgugaaccugcuggaggacaagcacaacgggaagcucugcaagcugcgcggcgucgcgccccugcaccucgggaagugcaacaucgccggcuggauccuggggaacccggagugcgagagccuguccaccgccagcuccuggagcuacaucguggagaccuccagcuccgacaacggcacgugcuaccccggcgacuucaucgacuacgaggagcuccgggagcagcugagcuccgugagcuccuucgagcgcuucgagaucuuccccaagaccagcuccuggcccaaccacgacagcaacaagggggucaccgccgccugcccgcacgccggcgcgaaguccuucuacaagaaccugaucuggcucgugaagaaggggaacagcuaccccaagcuguccaagagcuacaucaacgacaagggcaaggaggugcugguccucugggggauccaccaccccagcaccuccgccgaccagcagagccuguaccagaacgccgacgccuacguguucgugggcacgucccgguacagcaagaaguucaagcccgagaucgccauccgcccgaagguccgggaccaggagggccgcaugaacuacuacuggacccugguggagcccggggacaagaucaccuucgaggcgaccggcaaccucguggucccccgguacgccuucgccauggagcgcaacgccggguccggcaucaucaucagcgacacgcccgugcacgacugcaacacgaccugccagacccugaagggcgccaucaacaccucccugccguuccagaacauccaccccaucaccaucgggaagugccccaaguacgucaagagcaccaagcuccggcuggcgaccggccugcgcaacauccccuccauccagagccgggggcuguucggcgccaucgccggguucaucgagggcggcuggacggggaugguggacggcugguacggguaccaccaccagaacgagcagggcuccggguacgccgccgaccucaagagcacccagaacgcgaucgacgagaucaccaacaaggugaacuccgugaucgagaagaugaacacccaguucacggccgucggcaaggaguucaaccaccuggagaagcgcaucgagaaccucaacaagaagguggacgacggcuuccuggacaucuggaccuacaacgccgagcugcucguccugcuggagaacgagcggacccucgacuaccacgacagcaacgugaagaaccuguacgagaaggugcgcucccagcugaagaacaacgccaaggagaucgggaacggcugcuucgaguucuaccacaagugcgacaacacgugcauggagagcgucaagaacgggaccuacgacuacccgaaguacuccgaggaggccaagcucaaccgggaggagaucgacggcgugaagcuggagagcacccgcaucuaccagauccuggcgaucuacuccaccguggccagcagccucguccugguggugucccugggggccaucagcuucuggaugugcuccaacggcagccuccagugccggaucugcaucuga

SEQ ID NO: 69005 - RNA, 1701 nt, Artificial Sequence
  derived and/or modified CDS sequence (opt1) from hemagglutinin__InfluenzaA__ADG59701
augaaggccauccuggugguccuccuguacaccuucgccgcggccaacgccgacacccugugcaucggcuaccacgccaacaacagcacggacaccguggacaccgugcucgagaagaacgucaccgugacgcacuccgugaaccugcuggaggacaagcacaacgggaagcucugcaagcugcgcggcgucgcgccccugcaccucgggaagugcaacaucgccggcuggauccuggggaacccggagugcgagagccuguccaccgccagcuccuggagcuacaucguggagaccuccagcuccgacaacgggaccugcuaccccggcgacuucaucgacuacgaggagcuccgggagcagcugagcuccgugagcuccuucgagcgcuucgagaucuuccccaagacgagcuccuggcccaaccacgacagcaacaagggcgucaccgccgccugcccgcacgcgggcgccaaguccuucuacaagaaccugaucuggcucgugaagaaggggaacagcuaccccaagcuguccaagagcuacaucaacgacaagggcaaggaggugcugguccucugggggauccaccaccccagcaccuccgccgaccagcagagccuguaccagaacgccgacgccuacguguucgugggcaccucccgguacagcaagaaguucaagcccgagaucgcgauccgcccgaagguccgggaccaggagggccgcaugaacuacuacuggacgcugguggagcccggggacaagaucaccuucgaggccaccggcaaccucguggucccccgguacgccuucgccauggagcgcaacgccggguccggcaucaucaucagcgacacccccgugcacgacugcaacacgaccugccagaccccgaagggcgcgaucaacaccucccugcccuuccagaacauccaccccaucacgaucgggaagugccccaaguacgucaagagcaccaagcugcggcucgccaccggccugcgcaacgugccguccauccagagccgggggcuguucggcgccaucgccggguucaucgagggcggcuggaccgggaugguggacggcugguacggguaccaccaccagaacgagcagggcuccggguacgccgcggaccucaagagcacgcagaacgccaucgacaagaucaccaacaaggugaacuccgucaucgagaagaugaacacccaguucaccgccgugggcaaggaguucaaccaccuggagaagcgcaucgagaaccugaacaagaaggucgacgacggcuuccucgacaucuggacguacaacgccgagcugcuggugcuccuggagaacgagcggacccuggacuaccacgacagcaacgugaagaaccucuacgagaagguccgcucccagcugaagaacaacgccaaggagaucgggaacggcugcuucgaguucuaccacaagugcgacaacacgugcauggagagcgugaagaacgggaccuacgacuaccccaaguacuccgaggaggcgaagcugaaccgggaggagaucgacggcgugaagcucgagagcacccgcaucuaccagauccuggccaucuacuccaccgucgccagcagccuggugcucguggucucccugggggccaucagcuucuggaugugcuccaacggcagccugcagugccggaucugcaucuga

SEQ ID NO: 69006 - RNA, 1701 nt, Artificial Sequence
  derived and/or modified CDS sequence (opt1) from hemagglutinin__InfluenzaA__ADG59702
augaaggccauccuggugguccuccuguacaccuucgccaccgcgaacgccgacacgcugugcaucggcuaccacgccaacaacagcaccgacaccguggacaccgugcucgagaagaacgucacggugacccacuccgugaaccugcuggaggacaagcacaacgggaagcucugcaagcugcgcggcgucgcgccccugcaccucgggaagugcaacaucgccggcuggauccuggggaacccggagugcgagagccuguccaccgccagcuccuggagcuacaucguggagaccuccagcuccgacaacggcacgugcuaccccggcgacuucaucgacuacgaggagcuccgggagcagcugagcuccgugagcuccuucgagcgcuucgagaucuuccccaagaccagcuccuggcccaaccacgacagcaacaagggggucaccgccgccugcccgcacgccggcgcgaaguccuucuacaagaaccugaucuggcucgugaagaaggggaacagcuaccccaagcuguccaagagcuacaucaacgacaagggcaaggaggugcugguccucugggggauccaccaccccagcaccuccgccgaccagcagagccuguaccagaacgccgacgccuacguguucgugggcacgucccgguacagcaagaaguucaagcccgagaucgccauccgcccgaagguccgggaccaggagggccgcaugaacuacuacuggacccugguggagcccggggacaagaucaccuucgaggcgaccggcaaccucguggucccccgguacgccuucgccauggagcgcaacgccggguccggcaucaucaucagcgacacgcccgugcacgacugcaacacgaccugccagaccccgaagggcgccaucaacaccucccugcccuuccagaacauccaccccaucaccaucgggaagugccccaaguacgucaagagcaccaagcugcggcucgcgaccggccugcgcaacaucccguccauccagagccgggggcuguucggcgccaucgccggguucaucgagggcggcuggacggggaugguggacggcugguacggguaccaccaccagaacgagcagggcuccggguacgccgccgaccucaagagcacccagaacgcgaucgacgagaucaccaacaaggugaacuccgugaucgagaagaugaacacccaguucacggccgucggcaaggaguucaaccaccuggagaagcgcaucgagaaccugaacaagaagguggacgacggcuuccucgacaucuggaccuacaacgccgagcugcugguccuccuggagaacgagcggaaccuggacuaccacgacagcaacgugaagaaccucuacgagaaggugcgcucccagcugaagaacaacgccaaggagaucgggaacggcugcuucgaguucuaccacaagugcgacaacacgugcauggagagcgucaagaacgggaccuacgacuaccccaaguacuccgaggaggccaagcugaaccgggaggagaucgacggcgugaagcucgagagcacccgcaucuaccagauccuggcgaucuacuccaccguggccagcagccugguccucguggugucccugggggccaucagcuucuggaugugcuccaacggcagccugcagugccggaucugcaucuga

SEQ ID NO: 69007 - RNA, 1701 nt, Artificial Sequence
  derived and/or modified CDS sequence (opt1) from hemagglutinin__InfluenzaA__ADG59703
augaaggccauccuggugguccuccuguacaccuucgccaccgcgaacgccgacacgcugugcaucggcuaccacgccaacaacagcaccgacaccguggacaccgugcucgagaagaacgucacggugacccacuccgugaaccugcuggaggacaagcacaacgggaagcucugcaagcugcgcggcgucgcgccccugcaccucgggaagugcaacaucgccggcuggauccuggggaacccggagugcgagagccuguccaccgcgagcuccuggagcuacaucguggagaccuccagcuccgacaacggcacgugcuaccccggcgacuucaucgacuacgaggagcuccgggagcagcugagcuccgugagcuccuucgagcgcuucgagaucuuccccaagaccagcuccuggcccaaccacgacccgaacaagggggucaccgccgccugcccccacgccggcgccaagagcuucuacaagaaccugaucuggcucgugaagaaggggaacuccuaccccaagcugagcaaguccuacaucaacgacaagggcaaggaggugcugguccucugggggauccaccaccccagcaccagcgccgaccagcagucccuguaccagaacgccgacgccuacguguucgugggcacgagccgguacuccaagaaguucaagccggagaucgccauccgccccaagguccgggaccaggagggccgcaugaacuacuacuggacccugguggagcccggggacaagaucaccuucgaggcgaccggcaaccucguggucccccgguacgccuucgccauggagcgcaacgccgggagcggcaucgugaucuccgacacgccggugcacgacugcaacacgaccugccagacccccaagggcgccaucaacaccagccugcccuuccagaacauccaccccaucaccaucgggaagugcccgaaguacgucaaguccaccaagcugcggcucgcgaccggccugcgcaacgugcccagcauccagucccgggggcuguucggcgccaucgccggguucaucgagggcggcuggacggggaugguggacggcugguacggguaccaccaccagaacgagcagggcagcggguacgccgccgaccucaaguccacccagaacgcgaucgacgagaucaccaacaaggucaacagcgugaucgagaagaugaacacccaguucacggccgucggcaaggaguucaaccaccuggagaagcgcaucgagaaccugaacaagaagguggacgacggcuuccucgacaucuggaccuacaacgccgagcugcuggugcuccuggagaacgagcggacccuggacuaccacgacuccaacgucaagaaccucuacgagaaggugcgcagccagcugaagaacaacgccaaggagaucgggaacggcugcuucgaguucuaccacaagugcgacaacacgugcauggaguccgugaagaacgggaccuacgacuaccccaaguacagcgaggaggccaagcugaaccgggaggagaucgacggcgucaagcucgaguccacccgcaucuaccagauccuggcgaucuacagcaccguggccuccagccuggugcucgucgugagccugggggccaucuccuucuggaugugcagcaacggcucccugcagugccggaucugcaucuga

SEQ ID NO: 69008 - RNA, 1701 nt, Artificial Sequence; identical to SEQ ID NO: 66708
  derived and/or modified CDS sequence (opt1) from hemagglutinin__InfluenzaA__ADG76646

SEQ ID NO: 69009 - RNA, 1701 nt, Artificial Sequence
  derived and/or modified CDS sequence (opt1) from hemagglutinin__InfluenzaA__ADG76652
augaaggccauccuggugguccuccuguacaccuucgccaccgcgaacgccgacacgcugugcaucggcuaccacgccaacaacagcaccgacaccguggacaccgugcucgagaagaacgucacggugacccacuccgugaaccugcuggaggacaagcacaacgggaagcucugcaagcugcgcggcgucgcgccccugcaccucgggaagugcaacaucgccggcuggauccuggggaacccggagugcgagagcuucuccaccagcuccagcugguccuacaucguggagacccccagcuccgacaacggcacgugcuaccccggcgacuucaucgacuacgaggagcugcgggagcagcucagcuccgugagcuccuucgagcgcuucgagaucuuccccaagaccagcuccuggccgaaccacgacagcaacaagggggucaccgccgccugcccccacgccggcgccaaguccuucuacaagaaccugaucuggcuggugaagaaggggaacagcuaccccaagcucuccaagagcuacaucaacgacaagggcaaggaggugcugguccugugggggauccaccaccccagcaccuccgcggaccagcagagccucuaccagaacgccgacacguacguguucgugggcuccagccgguacuccaagaaguucaagccggagaucgccauccgccccaagguccgggaccaggagggccgcaugaacuacuacuggacccugguggagcccggggacaagaucaccuucgaggccaccggcaaccugguggucccccgguacgccuucgcgauggagcgcaacgccgggagcggcaucaucaucuccgacacgccggugcacgacugcaacacgaccugccagacccccaagggcgccaucaacaccagccuccccuuccagaacauccaccccaucaccaucgggaagugcccgaaguacgugaaguccaccaagcugcggcuggccaccggccuccgcaacauccccagcauccagucccgggggcuguucggcgccaucgcgggguucaucgagggcggcuggacggggauggucgacggcugguacggguaccaccaccagaacgagcagggcagcggguacgccgccgaccugaaguccacccagaacgccaucgacgagaucaccaacaaggugaacagcgugaucgagaagaugaacacccaguucacggccgucggcaaggaguucaaccaccucgagaagcgcaucgagaaccugaacaagaagguggacgacggcuuccuggacaucuggaccuacaacgcggagcuccugguccugcucgagaacgagcggacccuggacuaccacgacuccaacgugaagaaccuguacgagaaggugcgcagccagcucaagaacaacgccaaggagaucgggaacggcugcuucgaguucuaccacaagugcgacaacacgugcauggaguccgucaagaacgggaccuacgacuaccccaaguacagcgaggaggccaagcugaaccgggaggagaucgacggcgugaagcuggaguccacccgcaucuaccagauccucgccaucuacagcaccguggccagcucccugguccugguggugagccucggggcgaucuccuucuggaugugcagcaacggcucccugcagugccggaucugcaucuga

SEQ ID NO: 69010 - RNA, 1701 nt, Artificial Sequence; identical to SEQ ID NO: 66935
  derived and/or modified CDS sequence (opt1) from hemagglutinin__InfluenzaA__ADH01808

SEQ ID NO: 69011 - RNA, 1701 nt, Artificial Sequence
  derived and/or modified CDS sequence (opt1) from hemagglutinin__InfluenzaA__ADH01818
augaaggccauccuggugguccuccuguacaccuucgccaccgcgaacgccgacacgcugugcaucggcuaccacgccaacaacagcaccgacaccguggacaccgugcucgagaagaacgucacggugacccacuccgugaaccugcuggaggacaagcacaacgggaagcucugcaagcugcgcggcgucgcgccccugcaccucgggaagugcaacaucgccggcuggauccuggggaacccggagugcgagagccuguccaccgccagcuccuggagcuacaucguggagaccuccagcuccgacaacggcacgugcuaccccggcgacuucaucgacuacgaggagcuccgggagcagcugagcuccgugagcuccuucgagcgcuucgagaucuuccccaagaccagcuccuggcccaaccacgacagcaacaagggggucaccgccgccugcccgcacgccggcgcgaaguccuucuacaagaaccugaucuggcucgugaagaaggggaacagcuaccccaagcuguccaagagcuacaucaacgacaagggcaaggaggugcugguccucugggggauccaccaccccagcaccuccgccgaccagcagagccuguaccagaacgccgacgccuacguguucgugggcacgucccgguacagcaagaaguucaagcccgagaucgccauccgcccgaagguccgggaccaggagggccgcaugaacuacuacuggacccugguggagcccggggacaagaucaccuucgaggcgaccggcaaccucguggucccccgguacgccuucgccauggagcgcaacgccggguccggcaucaucaucagcgacacgcccgugcacgacugcaacacgaccugccagaccccgaagggcgccaucaacaccucccugcccuuccagaacauccaccccaucaccaucgggaagugccccaaguacgucaagagcaccaagcugcggcucgcgaccggccugcgcaacgugccguccauccagagccgggggcuguucggcgccaucgccggguucaucgagggcggcuggacggggaugguggacggcugguacggguaccaccaccagaacgagcagggcuccggguacgccgccgaccucaagagcacccagaacgcgaucgacgagaucaccaacaaggugaacuccgucaucgagaagaugaacacccaguucacggccgugggcaaggaguucaaccaccuggagaagcgcaucgagaaccugaacaagaaggucgacgacggcuuccucgacaucuggaccuacaacgccgagcugcuggugcuccuggagaacgagcggacccuggacuaccacgacagcaacgugaagaaccucuacgagaagguccgcucccagcugaagaacaacgccaaggagaucgggaacggcugcuucgaguucuaccacaagugcgacaacacgugcauggagagcgugaagaacgggaccuacgacuaccccaaguacuccgaggaggccaagcugaaccgggaggagaucgacggcgugaagcucgagagcacccgcaucuaccagauccuggcgaucuacuccaccgucgccagcagccuggugcucaucgugucccugggggccaucagcuucuggaugugcuccaacggcagccugcagugccggaucugcaucuga

SEQ ID NO: 69012 - RNA, 1701 nt, Artificial Sequence; identical to SEQ ID NO: 66935
  derived and/or modified CDS sequence (opt1) from hemagglutinin__InfluenzaA__ADH01828

SEQ ID NO: 69013 - RNA, 1701 nt, Artificial Sequence; identical to SEQ ID NO: 66693
  derived and/or modified CDS sequence (opt1) from hemagglutinin__InfluenzaA__ADH01838

SEQ ID NO: 69014 - RNA, 1701 nt, Artificial Sequence; identical to SEQ ID NO: 66935
  derived and/or modified CDS sequence (opt1) from hemagglutinin__InfluenzaA__ADH01848

SEQ ID NO: 69015 - RNA, 1701 nt, Artificial Sequence; identical to SEQ ID NO: 66935
  derived and/or modified CDS sequence (opt1) from hemagglutinin__InfluenzaA__ADH01858

SEQ ID NO: 69016 - RNA, 1701 nt, Artificial Sequence; identical to SEQ ID NO: 66693
  derived and/or modified CDS sequence (opt1) from hemagglutinin__InfluenzaA__ADH01868

SEQ ID NO: 69017 - RNA, 1701 nt, Artificial Sequence; identical to SEQ ID NO: 66693
  derived and/or modified CDS sequence (opt1) from hemagglutinin__InfluenzaA__ADH01878

SEQ ID NO: 69018 - RNA, 1701 nt, Artificial Sequence; identical to SEQ ID NO: 66935
  derived and/or modified CDS sequence (opt1) from hemagglutinin__InfluenzaA__ADH01888

SEQ ID NO: 69019 - RNA, 1701 nt, Artificial Sequence; identical to SEQ ID NO: 66693
  derived and/or modified CDS sequence (opt1) from hemagglutinin__InfluenzaA__ADH01898

SEQ ID NO: 69020 - RNA, 1701 nt, Artificial Sequence; identical to SEQ ID NO: 66784
  derived and/or modified CDS sequence (opt1) from hemagglutinin__InfluenzaA__ADH01908

SEQ ID NO: 69021 - RNA, 1701 nt, Artificial Sequence
  derived and/or modified CDS sequence (opt1) from hemagglutinin__InfluenzaA__ADH01918
augaaggccauccuggugguccuccuguacaccuucgccaccgcgaacgccgacacgcugugcaucggcuaccacgccaacaacagcaccgacaccguggacaccgugcucgagaagaacgucacggugacccacuccgugaaccugcuggaggacaagcacaacgggaagcucugcaagcugcgcggcgucgcgccccugcaccucgggaagugcaacaucgccggcuggauccuggggaacccggagugcgagagccuguccaccgagagcuccuggagcuacaucguggagaccuccagcuccgacaacggcacgugcuaccccggcgacuucaucgacuacgaggagcuccgggagcagcugagcuccgugagcuccuucgagcgcuucgagaucuuccccaagaccagcuccuggcccaaccacgacagcaacaagggggucaccgccgccugcccgcacgccggcgccaaguccuucuacaagaaccugaucuggcucgugaagaaggggaacagcuaccccaagcuguccaagagcuacaucaacgacaaggagaaggaggugcugguccucuggggcauccaccaccccagcaccuccgcggaccagcagagccuguaccagaacgccgacgccuacguguucguggggacgucccgguacagcaagaaguucaagcccgagaucgccauccgcccgaagguccgggaccaggagggccgcaugaacuacuacuggacccugguggagcccggcgacaagaucaccuucgaggccaccgggaaccucguggucccccgguacgcguucgccauggagcgcaacgccggcuccgggaucaucaucagcgacacgcccgugcacgacugcaacacgaccugccagaccccgaagggcgccaucaacaccucccugcccuuccagaacauccaccccaucaccaucggcaagugccccaaguacgucaagagcaccaagcugcggcucgccaccgggcugcgcaacgugccguccauccagagccggggccuguucggggcgaucgccggcuucaucgagggcggguggacgggcaugguggacgggugguacggcuaccaccaccagaacgagcagggguccggcuacgccgccgaccucaagagcacccagaacgccaucgacaagaucaccaacaaggugaacuccgucaucgagaagaugaacacccaguucacggcgguggggaaggaguucaaccaccuggagaagcgcaucgagaaccugaacaagaaggucgacgacggcuuccucgacaucuggaccuacaacgccgagcugcuggugcuccuggagaacgagcggacccuggacuaccacgacagcaacgugaagaaccucuacgagaagguccgcucccagcugaagaacaacgccaaggagaucggcaacgggugcuucgaguucuaccacaagugcgacaacacgugcauggagagcgugaagaacggcaccuacgacuaccccaaguacuccgaggaggccaagcugaaccgggaggagaucgacggggugaagcucgagagcacccgcaucuaccagauccuggccaucuacuccaccgucgcgagcagccuggugcucguggucucccugggcgccaucagcuucuggaugugcuccaacgggagccugcagugccggaucugcaucuga

SEQ ID NO: 69022 - RNA, 1701 nt, Artificial Sequence
  derived and/or modified CDS sequence (opt1) from hemagglutinin__InfluenzaA__ADH01928
augaaggccauccuggugguccuccuguacaccuucgccaccgcgaacgccgacacgcugugcaucggcuaccacgccaacaacagcaccgacaccguggacaccgugcucgagaagaacgucacggugacccacuccgugaaccugcuggaggacaagcacaacgggaagcucugcaagcugcgcggcgucgcgccccugcaccucgggaagugcaacaucgccggcuggauccuggggaacccggagugcgagagccuguccaccgccagcuccuggagcuacaucguggagaccuccagcuccgacaacggcacgugcuaccccggcgacuucaucgacuacgaggagcuccgggagcagcugagcuccgccagcuccuucgagcgcuucgagaucuuccccaagaccagcuccuggcccaaccacgacagcaacaagggggugaccgccgccugcccgcacgcgggcgccaaguccuucuacaagaaccugaucuggcucgucaagaaggggaacagcuaccccaagcuguccaagagcuacaucaacgacaagggcaaggaggugcuggugcucugggggauccaccaccccagcaccuccgccgaccagcagagccuguaccagaacgccgacgccuacgucuucgugggcacgucccgguacagcaagaaguucaagcccgagaucgcgauccgcccgaaggugcgggaccaggagggccgcaugaacuacuacuggacccuggucgagcccggggacaagaucaccuucgaggccaccggcaaccucguggugccccgguacgccuucgccauggagcgcaacgccggguccggcaucaucaucagcgacacgcccguccacgacugcaacacgaccugccagaccccgaagggcgcgaucaacaccucccugcccuuccagaacauccaccccaucaccaucgggaagugccccaaguacgucaagagcaccaagcugcggcucgccaccggccugcgcaacaucccguccauccagagccgggggcuguucggcgccaucgccggguucaucgagggcggcuggacggggaugguggacggcugguacggguaccaccaccagaacgagcagggcuccggguacgccgcggaccucaagagcacccagaacgccaucgacgagaucaccaacaaggugaacuccgugaucgagaagaugaacacccaguucacggccgugggcaaggaguucaaccaccuggagaagcgcaucgagaaccugaacaagaaggucgacgacggcuuccucgacaucuggaccuacaacgccgagcugcuggugcuccuggagaacgagcggacccuggacuaccacgacagcaacgucaagaaccucuacgagaaggugcgcucccagcugaagaacaacgccaaggagaucgggaacggcugcuucgaguucuaccacaagugcgacaacacgugcauggagagcgugaagaacgggaccuacgacuaccccaaguacuccgaggaggcgaagcugaaccgggaggagaucgacggcgucaagcucgagagcacccgcaucuaccagauccuggccaucuacuccaccguggccagcagccuggugcucgucgugucccugggggccaucagcuucuggaugugcuccaacggcagccugcagugccggaucugcaucuga

SEQ ID NO: 69023 - RNA, 1701 nt, Artificial Sequence
  derived and/or modified CDS sequence (opt1) from hemagglutinin__InfluenzaA__ADH01938
augaaggccauccuggugguccuccuguacaccuucgccaccgcgaacgccgacacgcugugcaucggcuaccacgccaacaacagcaccgacaccguggacaccgugcucgagaagaacgucacggugacccacuccgugaaccugcuggaggacaagcacaacgggaagcucugcaagcugcgcggcgucgcgccccugcaccucgggaagugcaacaucgccggcuggauccuggggaacccggagugcgagagccuguccaccgccagcuccuggagcuacaucguggagaccuccagcuccgacaacggcacgugcuaccccggcgacuucaucgacuacgaggagcuccgggagcagcugagcuccgugagcuccuucgagcgcuucgagaucuuccccaagaccagcuccuggcccaaccacgacagcaacaagggggucaccgccgccugcccgcacgccggcgcgaaguccuucuacaagaaccugaucuggcucgugaagaaggggaacagcuaccccaagcuguccaagagcuacaucaacgacaagggcaaggaggugcugguccucugggggauccaccaccccagcaccuccgccgaccagcagagccuguaccagaacgccgacgccuacguguucgugggcacgucccgguacagcaagaaguucaagcccgagaucgccauccgcccgaagguccgggaccaggagggccgcaugaacuacuacuggacccugguggagcccggggacaagaucaccuucgaggcgaccggcaaccucguggucccccgguacgccuucgccauggagcgcaacgccggguccggcaucaucaucagcgacacgcccgugcacgacugcaacacgaccugccagaccccgaagggcgccaucaacaccucccugcccuuccagaacauccaccccaucaccaucgggaagugccccaaguacgucaagagcaccaagcugcggcucgcgaccggccugcgcaacgugccguccauccagagccgggggcuguucggcgccaucgccggguucaucgagggcggcuggacggggaugguggacggcugguacggguaccaccaccagaacgagcagggcuccggguacgccgccgaccucaagagcacccagaacgcgaucgacgagaucaccaacaaggugaacuccgucaucgagaagaugaacacccaguucacggccgugggcaaggaguucaaccaccuggagaagcgcaucgagaaccugaacaagaaggucgacgacggcuuccucgacaucuggaccuacaacgccgagcugcuggugcuccuggagaacgagcggacccuggacuaccacgacagcaacgugaagaaccucuacaagaagguccgcucccagcugaagaacaacgccaaggagaucgggaacggcugcuucgaguucuaccacaagugcgacaacacgugcauggagagcgugaagaacgggaccuacgacuaccccaaguacuccgaggaggccaagcugaaccgggaggagaucgacggcgugaagcucgagagcacccgcaucuaccagauccuggcgaucuacuccaccgucgccagcagccuggugcucguggucucccugggggccaucagcuucuggaugugcuccaacggcagccugcagugccggaucugcaucuga

SEQ ID NO: 69024 - RNA, 1701 nt, Artificial Sequence; identical to SEQ ID NO: 67857
  derived and/or modified CDS sequence (opt1) from hemagglutinin__InfluenzaA__ADH01948

SEQ ID NO: 69025 - RNA, 1701 nt, Artificial Sequence
  derived and/or modified CDS sequence (opt1) from hemagglutinin__InfluenzaA__ADH01958
augaaggccauccuggugguccuccuguacaccuucgccaccgcgaacgccgacacgcugugcaucggcuaccacgccaacaacagcaccgacaccguggacaccgugcucgagaagaacgucacggugacccacuccgugaaccugcuggaggacaagcacaacgggaagcucugcaagcugcgcggcgucgcgccccugcaccucgggaagugcaacaucgccggcuggauccuggggaacccggagugcgagagccuguccaccgccagcuccuggagcuacaucguggagaccuccagcuccgacaacggcacgugcuaccccggcgacuucaucgacuacgaggagcuccgggagcagcugagcuccgugagcuccuucgagcgcuucgagaucuuccccaagaccagcuccuggcccaaccacgacagcaacaagggggucaccgccgccugcccgcacgccggcgcgaaguccuucuacaagaaccugaucuggcucgugaagaaggggaacagcuaccccaagcuguccaagagcuacaucaacgacaagggcaaggaggugcugguccucugggggauccaccaccccagcaccuccgccgaccagcagagccuguaccagaacgccgacgccuacguguucgugggcacgucccgguacagcaagaaguucaagcccgagaucgccauccgcccgaagguccgggaccaggagggccgcaugaacuacuacuggacccugguggagcccggggacaagaucaccuucgaggcgaccggcaaccucguggucccccgguacgccuucgccauggagcgcaacgccggguccggcaucaucaucagcgacacgcccgugcacgacugcaacacgaccugccagaccccgaagggcgccaucaacaccucccugcccuuccagaacauccaccccaucaccaucgggaacugccccaaguacgucaagagcaccaagcugcggcucgcgaccggccugcgcaacgugccguccauccagagccgggggcuguucggcgccaucgccggguucaucgagggcggcuggacggggaugguggacggcugguacggguaccaccaccagaacgagcagggcuccggguacgccgccgaccucaagagcacccagaacgcgaucgacaagaucaccaacaaggugaacuccgucaucgagaagaugaacacccaguucacggccgugggcaaggaguucaaccaccuggagaagcgcaucgagaaccugaacaagaaggucgacgacggcuuccucgacaucuggaccuacaacgccgagcugcuggugcuccuggagaacgagcggacccuggacuaccacgacagcaacgugaagaaccucuacgagaagguccgcucccagcugaagaacaacgccaaggagaucgggaacggcugcuucgaguucuaccacaagugcgacaacacgugcauggagagcgugaagaacgggaccuacgacuaccccaaguacuccgaggaggccaagcugaaccgggaggagaucgacggcgugaagcucgagagcacccgcaucuaccagauccuggcgaucuacuccaccgucgccagcagccuggugcucaucgugucccugggggccaucagcuucuggaugugcuccaacggcagccugcagugccggaucugcaucuga

SEQ ID NO: 69026 - RNA, 1701 nt, Artificial Sequence
  derived and/or modified CDS sequence (opt1) from hemagglutinin__InfluenzaA__ADH01968
augaaggccauccuggugguccuccuguacaccuucgccaccgcgaacgccgacacgcugugcaucggcuaccacgccaacaacagcaccgacaccguggacaccgugcucgagaagaacgucacggugacccacuccgugaaccugcuggaggacaagcacaacgggaagcucugcaagcugcgcggcgucgcgccccugcaccucgggaagugcaacaucgccggcuggauccuggggaacccggagugcgagagccuguccaccgccagcuccuggagcuacaucguggagaccuccagcuccgacaacggcacgugcuaccccggcgacuucaucgacuacgaggagcuccgggagcagcugagcuccgugagcuccuucgagcgcuucgagaucuuccccaagaccagcuccuggcccaaccacgacagcaacaagggggucaccgccgccugcccgcacgccggcgcgaaguccuucuacaagaaccugaucuggcucgugaagaaggggaacagcuaccccaagcuguccaagagcuacaucaacgacaagggcaaggaggugcugguccucugggggauccaccaccccagcaccuccgccgaccagcagagccuguaccagaacgccgacgccuacguguucgugggcacgucccgguacagcaagaaguucaagcccgagaucgccauccgcccgaagguccgggagcaggagggccgcaugaacuacuacuggacccugguggagcccggggacaagaucaccuucgaggcgaccggcaaccucguggucccccgguacgccuucgccauggagcgcaacgccggguccggcaucaucaucagcgacacgcccgugcacgacugcaacacgaccugccagaccccgaagggcgccaucaacaccucccugcccuuccagaacauccaccccaucaccaucgggaagugccccaaguacgucaagagcaccaagcugcggcucgcgaccggccugcgcaacgugccguccauccagagccgggggcuguucggcgccaucgccggguucaucgagggcggcuggacggggaugguggacggcugguacggguaccaccaccagaacgagcagggcuccggguacgccgccgaccucaagagcacccagaacgcgaucgacaagaucaccaacaaggugaacuccgucaucgagaagaugaacacccaguucacggccgugggcaaggaguucaaccaccuggagaagcgcaucgagaaccugaacaagaaggucgacgacggcuuccucgacaucuggaccuacaacgccgagcugcuggugcuccuggagaacgagcggacccuggacuaccacgacagcaacgugaagaaccucuacgagaagguccgcaaccagcugaagaacaacgccaaggagaucgggaacggcugcuucgaguucuaccacaagugcgacaacacgugcauggaguccgugaagaacgggaccuacgacuaccccaaguacagcgaggaggccaagcugaaccgggaggagaucgacggcgugaagcucgaguccacccgcaucuaccagauccuggcgaucuacagcaccgucgccuccagccuggugcucguggucagccugggggccaucuccuucuggaugugcagcaacggcucccugcagugccggaucugcaucuga

SEQ ID NO: 69027 - RNA, 1701 nt, Artificial Sequence; identical to SEQ ID NO: 67857
  derived and/or modified CDS sequence (opt1) from hemagglutinin__InfluenzaA__ADH01978

SEQ ID NO: 69028 - RNA, 1701 nt, Artificial Sequence; identical to SEQ ID NO: 67857
  derived and/or modified CDS sequence (opt1) from hemagglutinin__InfluenzaA__ADH01988

SEQ ID NO: 69029 - RNA, 1701 nt, Artificial Sequence; identical to SEQ ID NO: 68860
  derived and/or modified CDS sequence (opt1) from hemagglutinin__InfluenzaA__ADH01998

SEQ ID NO: 69030 - RNA, 1701 nt, Artificial Sequence
  derived and/or modified CDS sequence (opt1) from hemagglutinin__InfluenzaA__ADH02008
augaaggccauccuggugguccuccuguacaccuucgccaccgcgaacgccgacacgcugugcaucggcuaccacgccaacaacagcaccgacaccguggacaccgugcucgagaagaacgucacggugacccacuccgugaaccugcuggaggggaagcacaacggcaagcucugcaagcugcgcggggucgcgccccugcaccucggcaagugcaacaucgccggguggauccugggcaacccggagugcgagagccuguccaccgccagcuccuggagcuacaucguggagaccuccagcuccgacaacggcacgugcuaccccggggacuucaucgacuacgaggagcuccgggagcagcugagcuccgugagcuccuucgagcgcuucgagaucuuccccaagaccagcuccuggcccaaccacgacagcaacaagggcgucaccgccgccugcccgcacgccggggcgaaguccuucuacaagaaccugaucuggcucaucaagaagggcaacagcuaccccaagcuguccaagagcuacaucaacgacaaggagaaggaggugcuggugcucugggggauccaccaccccagcaccuccgccgaccagcagagccuguaccagaacgccgacgccuacgucuucgugggcacgucccgguacagcaagaaguucaagcccgagaucgccauccgcccgaaggugcgggaccaggagggccgcaugaacuacuacuggacccuggucgagcccggggacaagaucaccuucgaggcgaccggcaaccucguggugccccgguacgccuucgccauggagcgcaacgccggguccggcaucaucaucagcgacacgcccguccacgacugcaacacgaccugccagaccccgaagggcgccaucaacaccucccugcccuuccagaacauccaccccaucaccaucgggaagugccccaaguacgucaagagcaccaagcugcggcucgcgaccggccugcgcaacaucccguccauccagagccgggggcuguucggcgccaucgccggguucaucgagggcggcuggacggggaugguggacggcugguacggguaccaccaccagaacgagcagggcuccggguacgccgccgaccucaagagcacccagaacgcgaucgacgagaucaccaacaaggugaacuccgugaucgagaagaugaacacccaguucacggccgugggcaaggaguucaaccaccuggagaagcgcaucgagaaccugaacaagaaggucgacgacggcuuccucgacaucuggaccuacaacgccgagcugcuggugcuccuggagaacgagcggacccuggacuaccacgacagcaacgucaagaaccucuacgagaaggugcgcucccagcugaagaacaacgccaaggagaucgggaacggcugcuucgaguucuaccacaagugcgacaacacgugcauggagagcgugaagaacgggaccuacgacuaccccaaguacuccgaggaggccaagcugaaccgggaggagaucgacggcgucaagcucgagagcacccgcaucuaccagauccuggcgaucuacuccaccguggccagcagccuggugcucgucgugucccugggggccaucagcuucuggaugugcuccaacggcagccugcagugccggaucugcaucuga

SEQ ID NO: 69031 - RNA, 1701 nt, Artificial Sequence; identical to SEQ ID NO: 67857
  derived and/or modified CDS sequence (opt1) from hemagglutinin__InfluenzaA__ADI24508

SEQ ID NO: 69032 - RNA, 1701 nt, Artificial Sequence
  derived and/or modified CDS sequence (opt1) from hemagglutinin__InfluenzaA__ADI24515
augaaggccauccuggugguccuccuguacaccuucgccaccgcgaacgccgacacgcugugcgugggcuaccacgccaacaacagcaccgacaccguggacaccguccucgagaagaacgugacggugacccacuccgucaaccugcuggaggacaagcacaacgggaagcucugcaagcugcgcggcguggcgccccugcaccucgggaagugcaacaucgccggcuggauccuggggaacccggagugcgagagccugcccaccgcguccagcugguccuacaucguggagaccagcuccagcgacaacggcacgugcuaccccggcgacuucaucgacuacgaggagcuccgggagcagcuguccagcgucuccagcuucgagcgcuucgagaucuuccccaagaccuccagcuggccgaaccacgacuccaacaagggggugaccgccgccugcccccacgccggcgccaagagcuucuacaagaaccugaucuggcucgugaagaaggggaacuccuaccccaagcugagcaaguccuacaucaacgacaagggcaaggagguccuggugcucugggggauccaccaccccagcaccagcgccgaccagcagucccuguaccagaacgccgacgccuacguguucgucggcacgagccgguacuccaagaaguucaagccggagaucgccauccgccccaaggugcgggaccaggagggccgcaugaacuacuacuggacccugguggagcccggggacaagaucaccuucgaggcgaccggcaaccucgucgugccccgguacgccuucgccauggagcgcaacgccgggagcggcaucaucaucuccgacacgccggugcacgacugcaacacgaccugccagacccccaagggcgccaucaacaccagccugcccuuccagaacauccaccccaucaccaucgggaagugcccgaaguacgucaaguccaccaagcugcggcucgcgaccggccugcgcaacgugcccagcauccagucccgggggcuguucggcgccaucgccggguucaucgagggcggcuggacggggaugguggacggcugguacggguaccaccaccagaacgagcagggcagcggguacgccgccgaccucaaguccacccagaacgcgaucgacaagagcaccaacaaggucaacuccgugaucgagaagaugaacacccaguucacggccgucggcaaggaguucaaccaccuggagaagcgcaucgagaaccugaacaagaagguggacgacggcuuccucgacaucuggaccuacaacgccgagcugcuggugcuccuggagaacgagcggacccuggacuaccacgacagcaacgucaagaaccucuacgagaaggugcgcucccagcugaagaacaacgccaaggagaucgggaacggcugcuucgaguucuaccacaagugcgacaacacgugcauggagagcgugaagaacgggaccuacgacuaccccaaguacuccgaggaggccaagcugaaccgggaggagaucgacggcgucaagcucgagagcacccgcaucuaccagauccuggcgaucuacuccaccguggccagcagccuggugcucgucgugucccugggggccaucagcuucuggaugugcuccaacggcagccugcagugccggaucugcaucuga

SEQ ID NO: 69033 - RNA, 1701 nt, Artificial Sequence; identical to SEQ ID NO: 67857
  derived and/or modified CDS sequence (opt1) from hemagglutinin__InfluenzaA__ADI24517

SEQ ID NO: 69034 - RNA, 1701 nt, Artificial Sequence; identical to SEQ ID NO: 67857
  derived and/or modified CDS sequence (opt1) from hemagglutinin__InfluenzaA__ADI24519

SEQ ID NO: 69035 - RNA, 1701 nt, Artificial Sequence; identical to SEQ ID NO: 67857
  derived and/or modified CDS sequence (opt1) from hemagglutinin__InfluenzaA__ADI24521

SEQ ID NO: 69036 - RNA, 1701 nt, Artificial Sequence; identical to SEQ ID NO: 68245
  derived and/or modified CDS sequence (opt1) from hemagglutinin__InfluenzaA__ADI24523

SEQ ID NO: 69037 - RNA, 1701 nt, Artificial Sequence
  derived and/or modified CDS sequence (opt1) from hemagglutinin__InfluenzaA__ADI24525
augaaggccauccuggugguccuccuguacaccuucgccaccgcgaacgccgacacgcugugcaucggcuaccacgccaacaacagcaccgacaccguggacaccgugcucgagaagaacgucacggugacccacuccgugaaccugcuggaggacaagcacaacgggaagcucugcgagcugcgcggcgucgcgccccugcaccucgggaagugcaacaucgccggcuggauccuggggaacccggagugcgagagccuguccaccgcgcggagcugguccuacaucguggagaccagcuccagcgacaacggcacgugcuaccccggcgacuucaucgacuacgaggagcuccgcgagcagcuguccagcguguccagcuucgagcgguucgagaucuuccccaagaccuccagcuggcccaaccacgacuccaacaagggggucaccgccgccugcccgcacgccggcgccaagagcuucuacaagaaccugaucuggcucgugaagaaggggaacuccuaccccaagcugagcaaguccuacaucaacgacaagggcaaggaggugcugguccucugggggauccaccaccccagcaccagcgccgaccagcagucccuguaccagaacgccgacgccuacguguucgugggcacgagccgcuacuccaagaaguucaagcccgagaucgccauccggccgaagguccgcgaccaggagggccggaugaacuacuacuggacccugguggagcccggggacaagaucaccuucgaggcgaccggcaaccucguggucccccgcuacgccuucgccauggagcggaacgccgggagcggcaucaucaucuccgacacgcccgugcacgacugcaacacgaccugccagaccccgaagggcgccaucaacaccagccugcccuuccagaacauccaccccaucaccaucgggaagugccccaaguacgugaaguccaccaagcugcgccucgcgaccggccugcggaacgucccgagcauccagucccgcgggcuguucggcgccaucgccggguucaucgagggcggcuggacggggaugguggacggcugguacggguaccaccaccagaacgagcagggcagcggguacgccgccgaccucaaguccacccagaacgcgaucgacaagaucaccaacaaggugaacagcgucaucgagaagaugaacacccaguucacggccgugggcaaggaguucaaccaccuggagaagcggaucgagaaccugaacaagaaggucgacgacggcuuccucgacaucuggaccuacaacgccgagcugcuggugcuccuggagaacgagcgcacccuggacuaccacgacuccaacgugaagaaccucuacgagaaggucaagagccagcugaagaacaacgccaaggagaucgggaacggcugcuucgaguucuaccacaagugcgacaacacgugcauggaguccgugaagaacgggaccuacgacuaccccaaguacagcgaggaggccaagcugaaccgggaggagaucgacggcgugaagcucgaguccacccgcaucuaccagauccuggcgaucuacagcaccgucgccuccagccuggugcucguggucagccugggggccaucuccuucuggaugugcagcaacggcucccugcagugccggaucugcaucuga

SEQ ID NO: 69038 - RNA, 1701 nt, Artificial Sequence; identical to SEQ ID NO: 67857
  derived and/or modified CDS sequence (opt1) from hemagglutinin__InfluenzaA__ADI24527

SEQ ID NO: 69039 - RNA, 1701 nt, Artificial Sequence; identical to SEQ ID NO: 68245
  derived and/or modified CDS sequence (opt1) from hemagglutinin__InfluenzaA__ADI24529

SEQ ID NO: 69040 - RNA, 1701 nt, Artificial Sequence
  derived and/or modified CDS sequence (opt1) from hemagglutinin__InfluenzaA__ADI24531
augaaggccauccuggugguccuccuguacaccuucgccaccgcgaacgccgacacgcugugcaucggcuaccacgccaacaacagcaccgacaccguggacaccgugcucgagaagaacgucacggugacccacuccgugaaccugcuggaggacaagcacaacgggaagcucugcaagcugcgcggcgucgcgccccugcaccucgggaagugcaacaucgccggcuggauccuggggaacccggagugcgagagccuguccaccgccagcuccuggagcuacaucguggagaccuccagcuccgacaacggcacgugcuaccccggcgacuucaucaacuacgaggagcuccgggagcagcugagcuccgugagcuccuucgagcgcuucgagaucuuccccaagaccagcuccuggcccaaccacgacagcaacaagggggucaccgccgccugcccgcacgccggcgcgaaguccuucuacaagaaccugaucuggcucgugaagaaggggaacagcuaccccaagcuguccaagagcuacaucaacgacaagggcaaggaggugcugguccucugggggauccaccaccccagcaccuccgccgaccagcagagccuguaccagaacgccgacgccuacguguucgugggcacgucccgguacagcaagaaguucaagcccgagaucgccauccgcccgaagguccgggaccaggagggccgcaugaacuacuacuggacccugguggagcccggggacaagaucaccuucgaggcgaccggcaaccucguggucccccgguacgccuucgccauggagcgcaacgccggguccggcaucaucaucagcgacacgcccgugcacgacugcaacacgaccugccagaccccgaagggcgccaucaacaccucccugcccuuccagaacauccaccccaucaccaucgggaagugccccaaguacgucaagagcaccaagcugcggcucgcgaccggccugcgcaacgugccguccauccagagccgggggcugcucggcgccaucgccggguucaucgagggcggcuggacggggaugguggacggcugguacggguaccaccaccagaacgagcagggcuccggguacgccgccgaccucaagagcacccagaacgcgaucgacaagaucaccaacaaggugaacuccgucaucgagaagaugaacacccaguucacggccgugggcaaggaguucaaccaccuggagaagcgcaucgagaaccugaacaagaaggucgacgacggcuuccuggacaucuggaccuacaacgccgagcugcucgugcugcuggagaacgagcggacccucgacuaccacgacagcaacgugaagaaccuguacgagaagguccgcucccagcugaagaacaacgccaaggagaucgggaacggcugcuucgaguucuaccacaagugcgacaacacgugcauggagagcgugaagaacgggaccuacgacuaccccaaguacuccgaggaggccaagcucaaccgggaggagaucgacggcgugaagcuggagagcacccgcaucuaccagauccuggcgaucuacuccaccgucgccagcagccucgugcugguggucucccugggggccaucagcuucuggaugugcuccaacggcagccuccagugcaagaucugcaucuga

SEQ ID NO: 69041 - RNA, 1701 nt, Artificial Sequence
  derived and/or modified CDS sequence (opt1) from hemagglutinin__InfluenzaA__ADI24536
augaaggccauccuggugguccuccuguacaccuucgccaccgcgaacgccgacacgcugugcaucggcuaccacgccaacaacagcaccgacaccguggacaccgugcucgagaagaacgucacggugacccacuccgugaaccugcuggaggacaagcacaacgggaagcucugcaagcugcgcggcgucgcgccccugcaccucgggaagugcaacaucgccggcuggauccuggggaacccggagugcgagagccuguccaccgccagcuccuggagcuacaucguggagaccuccagcuccgacaacggcacgugcuaccccggcgacuucaucgacuacgaggagcuccgggagcagcugagcuccgugagcuccuucgagcgcuucgagaucuuccccaagaccagcuccuggcccaaccacgacagcaacaagggggucaccgccgccugcccgcacgccggcgcgaaguccuucuacaagaaccugaucuggcucgugaagaaggggaacagcuaccccaagcuguccaagagcuacaucaacgacaagggcaaggaggugcugguccucugggggauccaccaccccagcaccuccgccgaccagcagagccuguaccagaacgccgacgccuacguguucgugggcacgucccgguacagcaagaaguucaagcccgagaucgccauccgcccgaagguccgggaccaggagggccgcaugaacuacuacuggacccugguggagcccggggacaagaucaccuucgaggcgaccggcaaccucguggucccccgguacgccuucgccauggagcgcgacgccggguccggcaucaucaucagcgacacgcccgugcacgacugcaacacgaccugccagaccccgaagggcgccaucaacaccucccugcccuuccagaacauccaccccaucaccaucgggaagugccccaaguacgucaagagcaccaagcugcggcucgcgaccggccugcgcaacgugccguccauccagagccgggggcuguucggcgccaucgccggguucaucgagggcggcuggacggggaugguggacggcugguacggguaccaccaccagaacgagcagggcuccggguacgccgccgaccucaagagcacccagaacgcgaucgacaagaucaccaacaaggugaacuccgucaucgagaagaugaacacccaguucacggccgugggcaaggaguucaaccaccuggagaagcgcaucgagaaccugaacaagaagaucgacgacggcuuccucgacaucuggaccuacaacgccgagcugcugguccuccuggagaacgagcggacccuggacuaccacgacagcaacgugaagaaccucuacgagaaggugcgcucccagcugaagaacaacgccaaggagaucgggaacggcugcuucgaguucuaccacaagugcgacaacacgugcauggagagcgucaagaacgggaccuacgacuaccccaaguacuccgaggaggccaagcugaaccgggaggagaucgacggcgugaagcucgagagcacccgcaucuaccagauccuggcgaucuacuccaccguggccagcagccugguccucguggugucccugggggccaucagcuucuggaugugcuccaacggcagccugcagugccggaucugcaucuga

SEQ ID NO: 69042 - RNA, 1701 nt, Artificial Sequence; identical to SEQ ID NO: 67857
  derived and/or modified CDS sequence (opt1) from hemagglutinin__InfluenzaA__ADI24546

SEQ ID NO: 69043 - RNA, 1701 nt, Artificial Sequence; identical to SEQ ID NO: 67857
  derived and/or modified CDS sequence (opt1) from hemagglutinin__InfluenzaA__ADI24553

SEQ ID NO: 69044 - RNA, 1701 nt, Artificial Sequence; identical to SEQ ID NO: 67857
  derived and/or modified CDS sequence (opt1) from hemagglutinin__InfluenzaA__ADI24555

SEQ ID NO: 69045 - RNA, 1701 nt, Artificial Sequence
  derived and/or modified CDS sequence (opt1) from hemagglutinin__InfluenzaA__ADI24557
augaaggccauccuggugguccuccuguacaccuucgccaccgcgaacgccgacacgcugugcaucggcuaccacgccaacaacagcaccgacaccguggacaccgugcucgagaagaacgucacggugacccacuccgugaaccugcuggaggacaagcacaacgggaagcucugcaagcugcgcggcgucgcgccccugcaccucgggaagugcaacaucgccggcuggauccuggggaacccggagugcgagagccuguccaccgccagcuccuggagcuacaucguggagaccuccagcuccgacaacggcacgugcuaccccggcgacuucaucgacuacgaggagcuccgggagcagcugagcuccgugagcuccuucgagcgcuucgagaucuuccccaagaccagcuccuggcccaaccacgacagcaacaagggggucaccgccgccugcccgcacgccggcgcgaaguccuucuacaagaaccugaucuggcucgugaagaaggggaacagcuaccccaagcuguccaagagcuacaucaacgacaagggcaaggagauccuggugcucugggggauccaccaccccagcaccuccgccgaccagcagagccuguaccagaacgccgacgccuacgucuucgugggcacgucccgguacagcaagaaguucaagcccgagaucgccauccgcccgaaggugcgggaccaggagggccgcaugaacuacuacuggacccuggucgagcccggggacaagaucaccuucgaggcgaccggcaaccucguggugccccgguacgccuucgccauggagcgcaacgccggguccggcaucaucaucagcgacacgcccguccacgacugcaacacgaccugccagaccccgaagggcgccaucaacaccucccugcccuuccagaacauccaccccaucaccaucgggaagugccccaaguacgucaagagcaccaagcugcggcucgcgaccggccugcgcaacgugccguccauccagagccgggggcuguucggcgccaucgccggguucaucgagggcggcuggacggggaugguggacggcugguacggguaccaccaccagaacgagcagggcuccggguacgccgccgaccucaagagcacccagaacgcgaucgacaagaucaccaacaaggugaacuccgugaucgagaagaugaacacccaguucacggccgucggcaaggaguucaaccaccuggagaagcgcaucgagaaccugaacaagaagguggacgacggcuuccucgacaucuggaccuacaacgccgagcugcugguccuccuggagaacgagcggacccuggacuaccacgacagcaacgugaagaaccucuacgagaaggugcgcucccagcugaagaacaacgccaaggagaucgggaacggcugcuucgaguucuaccacaagugcgacaacacgugcauggagagcgucaagaacgggaccuacgacuaccccaaguacuccgaggaggccaagcugaaccgggaggagaucgacggcgugaagcucgagagcacccgcaucuaccagauccuggcgaucuacuccaccguggccagcagccugguccucguggugucccugggggccaucagcuucuggaugugcuccaacggcagccugcagugccggaucugcaucuga

SEQ ID NO: 69046 - RNA, 1701 nt, Artificial Sequence; identical to SEQ ID NO: 67857
  derived and/or modified CDS sequence (opt1) from hemagglutinin__InfluenzaA__ADI24559

SEQ ID NO: 69047 - RNA, 1701 nt, Artificial Sequence
  derived and/or modified CDS sequence (opt1) from hemagglutinin__InfluenzaA__ADI24561
augaaggccauccuggugauccuccuguacaccuucgccaccgcgaacgccgacacgcugugcaucggcuaccacgccaacaacagcaccgacaccgucgacaccgugcucgagaagaacgugacggucacccacuccgugaaccugcuggaggacaagcacgacgggaagcucugcaagcugcgcggcguggcgccccugcaccucgggaagugcaacaucgccggcuggauccuggggaacccggagugcgagagccuguccaccgccagcuccuggagcuacaucgucgagaccuccagcuccgacaacggcacgugcuaccccggcgacuucaucgacuacgaggagcuccgggagcagcugagcuccgugagcuccuucgagcgcuucgagaucuuccccaagaccagcuccuggcccaaccacgacagcaacaagggggugaccgccgccugcccgcacgccggcgcgaaguccuucuacaagaaccugaucuggcucgucaagaaggggaacagcuaccccaagcuguccaagagcuacaucaacgacaagggcaaggaggugcuggugcucugggggauccaccaccccagcaccuccgccgaccagcagagccuguaccagaacgccgacgccuacgucuucgugggcacgucccgguacagcaagaaguucaagcccgagaucgccauccgcccgaaggugcgggaccaggagggccgcaugaacuacuacuggacccuggucgagcccggggacaagaucaccuucgaggcgaccggcaaccucguggugccccgguacgccuucgccauggagcgcaacgccggguccggcaucaucaucagcgacacgcccguccacgacugcaacacgaccugccagaccccgaagggcgccaucaacaccucccugcccuuccagaacauccaccccaucaccaucgggaagugccccaaguacgucaagagcaccaagcugcggcucgcgaccggccugcgcaacgugccguccauccagagccgggggcuguucggcgccaucgccggguucaucgagggcggcuggacggggaugguggacggcugguacggguaccaccaccagaacgagcagggcuccggguacgccgccgaccucaagagcacccagaacgcgaucgacaagaucaccaacaaggugaacuccgugaucgagaagaugaacacccaguucacggccgucggcaaggaguucaaccaccuggagaagcgcaucgagaaccugaacaagaagguggacgacggcuuccucgacaucuggaccuacaacgccgagcugcugguccuccuggagaacgagcggacccuggacuaccacgacagcaacgugaagaaccucuacgagaaggugcgcucccagcugaagaacaacgccaaggagaucgggaacggcugcuucgaguucuaccacaagugcgacaacacgugcauggagagcgucaagaacgggaccuacgacuaccccaaguacuccgaggaggccaagcugaaccgggaggagaucgacggcgugaagcucgagagcacccgcaucuaccagauccuggcgaucuacuccaccguggccagcagccugguccucguggugucccugggggccaucagcuucuggaugugcuccaacggcagccugcagugccggaucugcaucuga

SEQ ID NO: 69048 - RNA, 1701 nt, Artificial Sequence; identical to SEQ ID NO: 67857
  derived and/or modified CDS sequence (opt1) from hemagglutinin__InfluenzaA__ADI24563

SEQ ID NO: 69049 - RNA, 1701 nt, Artificial Sequence
  derived and/or modified CDS sequence (opt1) from hemagglutinin__InfluenzaA__ADI24565
augaaggccauccuggugguccuccuguacaccuucgccaccgcgaacgccgacacgcugugcaucggcuaccacgccaacaacagcaccgacaccguggacaccgugcucgagaagaacgucacggugacccacuccgugaaccugcuggaggacaagcacgacgggaagcucugcaagcugcgcggcgucgcgccccugcaccucgggaagugcaacaucgccggcuggauccuggggaacccggagugcgagagccuguccaccgccagcuccuggagcuacaucguggagaccuccagcuccgacaacggcacgugcuaccccggcgacuucaucgacuacgaggagcuccgggagcagcugagcuccgugagcuccuucgagcgcuucgagaucuuccccaagaccagcuccuggcccaaccacgacagcaacaagggggucaccgccgccugcccgcacgccggcgcgaaguccuucuacaagaaccugaucuggcucgugaagaaggggaacagcuaccccaagcuguccaagagcuacaucaacgacaagggcaagaaggugcugguccucugggggauccaccaccccagcaccuccgccgaccagcagagccuguaccagaacgccgacgccuacguguucgugggcacgucccgguacagcaagaaguucaagcccgagaucgccauccgcccgaagguccgggaccaggagggccgcaugaacuacuacuggacccugguggagcccggggacaagaucaccuucgaggcgaccggcaaccucguggucccccgguacgccuucgccauggagcgcaacgccggguccggcaucaucaucagcgacacgcccgugcacgacugcaacacgaccugccagaccccgaagggcgccaucaacaccucccugcccuuccagaacauccaccccaucaccaucgggaagugccccaaguacgucaagagcaccaagcugcggcucgcgaccggccugcgcaacgugccguccauccagagccgggggcuguucggcgccaucgccggguucaucgagggcggcuggacggggaugguggacggcugguacggguaccaccaccagaacgagcagggcuccggguacgccgccgaccucaagagcacccagaacgcgaucgacaagaucaccaacaaggugaacuccgucaucgagaagaugaacacccaguucacggccgugggcaaggaguucaaccaccuggagaagcgcaucgagaaccugaacaagaaggucgacgacggcuuccucgacaucuggaccuacaacgccgagcugcuggugcuccuggagaacgagcggacccuggacuaccacgacagcaacgugaagaaccucuacgagaagguccgcucccagcugaagaacaacgccaaggagaucgggaacggcugcuucgaguucuaccacaagugcgacaacacgugcauggagagcgugaagaacgggaccuacgacuaccccaaguacuccgaggaggccaagcugaaccgggaggagaucgacggcgugaagcucgagagcacccgcaucuaccagauccuggcgaucuacuccaccgucgccagcagccuggugcucguggucucccugggggccaucagcuucuggaugugcuccaacggcagccugcagugccggaucugcaucuga

SEQ ID NO: 69050 - RNA, 1701 nt, Artificial Sequence; identical to SEQ ID NO: 67857
  derived and/or modified CDS sequence (opt1) from hemagglutinin__InfluenzaA__ADI24567

SEQ ID NO: 69051 - RNA, 1701 nt, Artificial Sequence
  derived and/or modified CDS sequence (opt1) from hemagglutinin__InfluenzaA__ADI24569
augaaggccauccuggugguccuccuguacaccuucgccaccgcgaacgccgacacgcugugcaucggcuaccacgccaacaacagcaccgacaccguggacaccgugcucgagaagaacgucacggugacccacuccgugaaccugcuggaggacaagcacaacgggaagcucugcaagcugcgcggcgucgcgccccugcaccucgggaagugcaacaucgccggcuggauccuggggaacccggagugcgagagccuguccaccgccagcuccuggagcuacaucguggagaccuccagcuccgacaacggcacgugcuaccccggcgacuucaucgacuacgaggagcuccgggagcagcugagcuccgugagcuccuucgagcgcuucgagaucuuccccaagaccagcuccuggcccaaccacgacagcaacaagggggucaccgccgccugcccgcacgccggcgcgaaguccuucuacaagaaccugaucuggcucgugaagaaggggaacagcuaccccaagcuguccaagagcuacaucaacgacaagggcaaggaggugcugguccucugggggauccaccaccccagcaccuccgccgaccagcagagccuguaccagaacgccgacgccuacguguucgugggcacgucccgguacagcaagaaguucaagcccgagaucgccauccgcccgaagguccgggaccaggagggccgcaugaacuacuacuggacccugguggagcccggggacaagaucaccuucgaggcgaccggcaaccucguggucccccgguacgccuucgccaucgagcgcaacgccggguccggcaucaucaucagcgacacgcccgugcacgacugcaacacgaccugccagaccccgaagggcgccaucaacaccucccugcccuuccagaacauccaccccaucaccaucgggaagugccccaaguacgucaagagcaccaagcugcggcucgcgaccggccugcgcaacgugccguccauccagagccgggggcuguucggcgccaucgccggguucaucgagggcggcuggacggggaugguggacggcugguacggguaccaccaccagaacgagcagggcuccggguacgccgccgaccucaagagcacccagaacgcgaucgacaagaucaccaacaaggugaacuccgucaucgagaagaugaacacccaguucacggccgugggcaaggaguucaaccaccuggagaagcgcaucgagaaccugaacaagaaggucgacgacggcuuccucgacaucuggaccuacaacgccgagcugcuggugcuccuggagaacgagcggacccuggacuaccacgacagcaacgugaagaaccucuacgagaagguccgcucccagcugaagaacaacgccaaggagaucgggaacggcugcuucgaguucuaccacaagugcgacaacacgugcauggagagcgugaagaacgggaccuacgacuaccccaaguacuccgaggaggccaagcugaaccgggaggagaucgacggcgugaagcucgagagcacccgcaucuaccagauccuggcgaucuacuccaccgucgccagcagccuggugcucguggucucccugggggccaucagcuucuggaugugcuccaacggcagccugcagugccggaucugcaucuga

SEQ ID NO: 69052 - RNA, 1701 nt, Artificial Sequence; identical to SEQ ID NO: 67857
  derived and/or modified CDS sequence (opt1) from hemagglutinin__InfluenzaA__ADI24571

SEQ ID NO: 69053 - RNA, 1701 nt, Artificial Sequence; identical to SEQ ID NO: 68245
  derived and/or modified CDS sequence (opt1) from hemagglutinin__InfluenzaA__ADI24573

SEQ ID NO: 69054 - RNA, 1701 nt, Artificial Sequence
  derived and/or modified CDS sequence (opt1) from hemagglutinin__InfluenzaA__ADI24575
augaaggccauccuggugguccuccuguacaccuucgccaccgcgaacgccgacacgcugugcaucggcuaccacgccaacaacagcaccgacaccguggacaccgugcucgagaagaacgucacggugacccacuccgugaaccugcuggaggacaagcacaacgggaagcucugcaagcugcgcggcgucgcgccccugcaccucgggaagugcaacaucgccggcuggauccuggggaacccggagugcgagagccuguccaccgccagcuccuggagcuacaucguggagaccuccagcuccgacaacggcacgugcuaccccggcgacuucaucaacuacgaggagcuccgggagcagcugagcuccgugagcuccuucgagcgcuucgagaucuuccccaagaccagcuccuggcccaaccacgacagcaacaagggggucaccgccgccugcccgcacgccggcgcgaaguccuucuacaagaaccugaucuggcucgugaagaaggggaacagcuaccccaagcuguccaagagcuacaucaacgacaagggcaaggaggugcugguccucugggggauccaccaccccagcaccuccgccgaccagcagagccuguaccagaacgccgacgccuacguguucgugggcacgucccgguacagcaagaaguucaagcccgagaucgccauccgcccgaagguccgggaccaggagggccgcaugaacuacuacuggacccugguggagcccggggacaagaucaccuucgaggcgaccggcaaccucguggucccccgguacgccuucgccauggagcgcaacgccggguccggcaucaucaucagcgacacgcccgugcacgacugcaacacgaccugccagaccccgaagggcgccaucaacaccucccugcccuuccagaacauccaccccaucaccaucgggaagugccccaaguacgucaagagcaccaagcugcggcucgcgaccggccugcgcaacgugccguccauccagagccgggggcuguucggcgccaucgccggguucaucgagggcggcuggacggggaugguggacggcugguacggguaccaccaccagaacgagcagggcuccggguacgccgccgaccucaagagcacccagaacgcgaucgacaagaucaccaacaaggugaacuccgucaucgagaagaugaacacccaguucacggccgugggcaaggaguucaaccaccuggagaagcgcaucgagaaccugaacaagaaggucgacgacggcuuccucgacaucuggaccuacaacgccgagcugcuggugcuccuggagaacgagcggacccuggacuaccacgacagcaacguggagaaccucuacgagaagguccgcucccagcugaagaacaacgccaaggagaucgggaacggcugcuucgaguucuaccacaagugcgacaacacgugcauggagagcgugaagaacgggaccuacgacuaccccaaguacuccgaggaggccaagcugaaccgggaggagaucgacggcgugaagcucgagagcacccgcaucuaccagauccuggcgaucuacuccaccgucgccagcagccuggugcucguggucucccugggggccaucagcuucuggaugugcuccaacggcagccugcagugccggaucugcaucuga

SEQ ID NO: 69055 - RNA, 1701 nt, Artificial Sequence; identical to SEQ ID NO: 67857
  derived and/or modified CDS sequence (opt1) from hemagglutinin__InfluenzaA__ADI24577

SEQ ID NO: 69056 - RNA, 1701 nt, Artificial Sequence
  derived and/or modified CDS sequence (opt1) from hemagglutinin__InfluenzaA__ADI24581
augaaggccauccuggugguccuccuguacaccuucgccaccgcgaacgccgacacgcugugcaucggcuaccacgccaacaacagcaccgacaccguggacaccgugcucgagaagaacgucacggugacccacuccgugaaccugcuggaggacaagcacaacgggaagcucugcaagcugcgcggcgucgcgccccugcaccucgggaagugcaacaucgccggcugggugcuggggaacccggagugcgagagccuguccaccgccagcuccuggagcuacaucguggagaccuccagcuccgacaacggcacgugcuaccccggcgacuucaucgacuacgaggagcuccgggagcagcugagcuccgucagcuccuucgagcgcuucgagaucuuccccaagaccagcuccuggcccaaccacgacagcaacaagggggugaccgccgccugcccgcacgccggcgcgaaguccuucuacaagaaccugaucuggcucgugaagaaggggaacagcuaccccaagcuguccaagagcuacaucaacgacaagggcaaggagguccuggugcucugggggauccaccaccccagcaccuccgccgaccagcagagccuguaccagaacgccgacgccuacguguucgucggcacgucccgguacagcaagaaguucaagcccgagaucgccauccgcccgaaggugcgggaccaggagggccgcaugaacuacuacuggacccugguggagcccggggacaagaucaccuucgaggcgaccggcaaccucgucgugccccgguacgccuucgccauggagcgcaacgccggguccggcaucaucaucagcgacacgcccgugcacgacugcaacacgaccugccagaccccgaagggcgccaucaacaccucccugcccuuccagaacauccaccccaucaccaucgggaagugccccaaguacgucaagagcaccaagcugcggcucgcgaccggccugcgcaacgugccguccauccagagccgggggcuguucggcgccaucgccggguucaucgagggcggcuggacggggaugguggacggcugguacggguaccaccaccagaacgagcagggcuccggguacgccgccgaccucaagagcacccagaacgcgaucgacaagaucaccaacaaggucaacuccgugaucgagaagaugaacacccaguucacggccgucggcaaggaguucaaccaccuggagaagcgcaucgagaaccugaacaagaagguggacgacggcuuccucgacaucuggaccuacaacgccgagcugcuggugcuccuggagaacgagcggacccuggacuaccacgacagcaacgucaagaaccucuacgagaaggugcgcucccagcugaagaacaacgccaaggagaucgggaacggcugcuucgaguucuaccacaagugcgacaacacgugcauggagagcgugaagaacgggaccuacgacuaccccaaguacuccgaggaggccaagcugaaccgggaggagaucgacggcgucaagcucgagagcacccgcaucuaccagauccuggcgaucuacuccaccguggccagcagccuggugcucgucgugucccugggggccaucagcuucuggaugugcuccaacggcagccugcagugccggaucugcaucuga

SEQ ID NO: 69057 - RNA, 1701 nt, Artificial Sequence
  derived and/or modified CDS sequence (opt1) from hemagglutinin__InfluenzaA__ADI24583
augaaggccauccuggugguccuccuguacaccuucgccaccgcgaacgccgacacgcugugcaucggcuaccacgccaacaacagcaccgacaccguggacaccauccucgagaagaacgugacggucacccacuccgugaaccugcuggaggacaagcacaacgggaagcucugcaagcugcgcggcguggcgccccugcaccucgggaagugcaacaucgccggcuggauccuggggaacccggagugcgagagccuguccaccgccagcuccuggagcuacaucgucgagaccuccagcuccgacaacggcacgugcuaccccggcgacuucaucgacuacgaggagcuccgggagcagcugagcuccgugagcuccuucgagcgcuucgagaucuuccccaagaccagcuccuggcccaaccacgacagcaacaagggggugaccgccgccugcccgcacgccggcgcgaaguccuucuacaagaaccugaucuggcucgucaagaaggggaacagcuaccccaagcuguccaagagcuacaucaacgacaagggcaaggaggugcuggugcucugggggauccaccaccccagcaccuccgccgaccagcagagccuguaccagaacgccgacgccuacgucuucgugggcacgucccgguacagcaagaaguucaagcccgagaucgccauccgcccgaaggugcgggaccaggagggccgcaugaacuacuacuggacccuggucgagcccggggacaagaucaccuucgaggcgaccggcaaccucguggugccccgguacgccuucgccauggagcgcaacgccggguccggcaucaucaucagcgacacgcccguccacgacugcaacacgaccugccagaccccgaagggcgccaucaacaccucccugcccuuccagaacauccaccccaucaccaucgggaagugccccaaguacgucaagagcaccaagcugcggcucgcgaccggccugcgcaacgugccguccauccagagccgggggcuguucggcgccaucgccggguucaucgagggcggcuggacggggaugguggacggcugguacggguaccaccaccagaacgagcagggcuccggguacgccgccgaccucaagagcacccagaacgcgaucgacaagaucaccaacaaggugaacuccgugaucgagaagaugaacacccaguucacggccgucggcaaggaguucaaccaccuggagaagcgcaucgagaaccugaacaagaagguggacgacggcuuccucgacaucuggaccuacaacgccgagcugcugguccuccuggagaacgagcggacccuggacuaccacgacagcaacgugaagaaccucuacgagaaggugcgcucccagcugaagaacaacgccaaggagaucgggaacggcugcuucgaguucuaccacaagugcgacaacacgugcauggagagcgucaagaacgggaccuacgacuaccccaaguacuccgaggaggccaagcugaaccgggaggagaucgacggcgugaagcucgagagcacccgcaucuaccagauccuggcgaucuacuccaccguggccagcagccugguccucguggugucccugggggccaucagcuucuggaugugcuccaacggcagccugcagugccggaucugcaucuga

SEQ ID NO: 69058 - RNA, 1701 nt, Artificial Sequence
  derived and/or modified CDS sequence (opt1) from hemagglutinin__InfluenzaA__ADI24590
augaaggccauccuggugguccuccuguacaccuucgccaccgcgaacgccgacacgcugugcaucggcuaccacgccaacaacagcaccgacaccguggacaccgugcucgagaagaacgucacggugacccacuccgccaaccugcuggaggacaagcacaacgggaagcucugcaagcugcgcggcguggcgccccugcaccucgggaagugcaacaucgccggcuggauccuggggaacccggagugcgagagccuguccaccgccagcuccuggagcuacaucgucgagaccuccagcuccgacaacggcacgugcuaccccggcgacuucaucgacuacgaggagcuccgggagcagcugagcuccgugagcuccuucgagcgcuucgagaucuuccccaagaccagcuccuggcccaaccacgacagcaacaagggggugaccgccgccugcccgcacgcgggcgccaaguccuucuacaagaaccugaucuggcucgucaagaaggggaacagcuaccccaagcuguccaagagcuacaucaacgacaagggcaaggaggugcuggugcucugggggauccaccaccccagcaccuccgccgaccagcagagccuguaccagaacgccgacgccuacgucuucgugggcacgucccgguacagcaagaaguucaagcccgagaucgcgauccgcccgaaggugcgggaccaggagggccgcaugaacuacuacuggacccuggucgagcccggggacaagaucaccuucgaggccaccggcaaccucguggugccccgguacgccuucgccauggagcgcaacgccggguccggcaucaucaucagcgacacgcccguccacgacugcaacacgaccugccagaccccgaagggcgcgaucaacaccucccugcccuuccagaacauccaccccaucaccaucgggaagugccccaaguacgucaagagcaccaagcugcggcucgccaccggccugcgcaacgugccguccauccagagccgggggcuguucggcgccaucgccggguucaucgagggcggcuggacggggaugguggacggcugguacggguaccaccaccagaacgagcagggcuccggguacgccgcggaccucaagagcacccagaacgccaucgacaagaucaccaacaaggugaacuccgugaucgagaagaugaacacccaguucacggccgucggcaaggaguucaaccaccuggagaagcgcaucgagaaccugaacaagaagguggacgacggcuuccucgacaucuggaccuacaacgccgagcugcugguccuccuggagaacgagcggacccuggacuaccacgacagcaacgugaagaaccucuacgagaaggugcgcucccagcugaagaacaacgccaaggagaucgggaacggcugcuucgaguucuaccacaagugcgacaacacgugcauggagagcgucaagaacgggaccuacgacuaccccaaguacuccgaggaggcgaagcugaaccgggaggagaucgacggcgugaagcucgagagcacccgcaucuaccagauccuggccaucuacuccaccguggccagcagccugguccucguggugucccugggggccaucagcuucuggaugugcuccaacggcagccugcagugccggaucugcaucuga

SEQ ID NO: 69059 - RNA, 1701 nt, Artificial Sequence
  derived and/or modified CDS sequence (opt1) from hemagglutinin__InfluenzaA__ADI24597
augaaggccauccuggugguccuccuguacaccuucgccaccgcgaacgccgacacgcugugcaucggcuaccacgccaacaacagcaccgacaccguggacaccgugcucgagaagaacgucacggugacccacuccgccaaccugcuggaggacaagcacaacgggaagcucugcaagcugcgcggcguggcgccccugcaccucgggaacugcaacaucgccggcuggauccuggggaacccggagugcgagagccuguccaccgccagcuccuggagcuacaucgucgagaccuccagcuccgacaacggcacgugcuaccccggcgacuucaucgacuacgaggagcuccgggagcagcugagcuccgugagcuccuucgagcgcuucgagaucuuccccaagaccagcuccuggcccaaccacgacagcaacaagggggugaccgccgccugcccgcacgcgggcgccaaguccuucuacaagaaccugaucuggcucgucaagaaggggaacagcuaccccaagcuguccaagagcuacaucaacgacaagggcaaggaggugcuggugcucugggggauccaccaccccagcaccuccgccgaccagcagagccuguaccagaacgccgacgccuacgucuucgugggcacgucccgguacagcaagaaguucaagcccgagaucgcgauccgcccgaaggugcgggaccaggagggccgcaugaacuacuacuggacccuggucgagcccggggacaagaucaccuucgaggccaccggcaaccucguggugccccgguacgccuucgccauggagcgcaacgccggguccggcaucaucaucagcgacacgcccguccacgacugcaacacgaccugccagaccccgaagggcgcgaucaacaccucccugcccuuccagaacauccaccccaucaccaucgggaagugccccaaguacgucaagagcaccaagcugcggcucgccaccggccugcgcaacgugccguccauccagagccgggggcuguucggcgccaucgccggguucaucgagggcggcuggacggggaugguggacggcugguacggguaccaccaccagaacgagcagggcuccggguacgccgcggaccucaagagcacccagaacgccaucgacaagaucaccaacaaggugaacuccgugaucgagaagaugaacacccaguucacggccgucggcaaggaguucaaccaccuggagaagcgcaucgagaaccugaacaagaagguggacgacggcuuccucgacaucuggaccuacaacgccgagcugcugguccuccuggagaacgagcggacccuggacuaccacgacagcaacgugaagaaccucuacgagaaggugcgcucccagcugaagaacaacgccaaggagaucgggaacggcugcuucgaguucuaccacaagugcgacaacacgugcauggagagcgucaagaacgggaccuacgacuaccccaaguacuccgaggaggcgaagcugaaccgggaggagaucgacggcgugaagcucgagagcacccgcaucuaccagauccuggccaucuacuccaccguggccagcagccugguccucguggugucccugggggccaucagcuucuggaugugcuccaacggcagccugcagugccggaucugcaucuga

SEQ ID NO: 69060 - RNA, 1701 nt, Artificial Sequence; identical to SEQ ID NO: 69058
  derived and/or modified CDS sequence (opt1) from hemagglutinin__InfluenzaA__ADI24612

SEQ ID NO: 69061 - RNA, 1701 nt, Artificial Sequence
  derived and/or modified CDS sequence (opt1) from hemagglutinin__InfluenzaA__ADI24619
augaaggccauccuggugguccuccuguacaccuucgccaccgcgaacgccgacacgcugugcaucggcuaccacgccaacaacagcaccgacaccguggacaccgugcucgagaagaacgucacggugacccacuccgccaaccugcuggaggacaagcacaacgggaagcucugcaagcugcgcggcguggcgccccugcaccucgggaagugcaacaucgccggcuggauccuggggaacccggagugcgagagccuguccaccgccagcuccuggagcuacaucgucgagaccuccagcuccgacaacggcacgugcuaccccggcgacuucaucgacuacgaggagcuccgggagcagcugagcuccgugagcuccuucgagcgcuucgagaucuuccccaagaccagcuccuggcccaaccacgacagcaacaagggggugaccgccgccugcccgcacgcgggcgccaaguccuucuacaagaaccugaucuggcucgucaagaaggggaacagcuaccccaagcuguccaagagcuacaucaacgacaagggcaaggaggugcuggugcucugggggauccaccaccccagcaccuccgucgaccagcagagccuguaccagaacgccgacgccuacguguucgugggcacgucccgguacagcaagaaguucaagcccgagaucgccauccgcccgaagguccgggaccaggagggccgcaugaacuacuacuggacccugguggagcccggggacaagaucaccuucgaggcgaccggcaaccucguggucccccgguacgccuucgccauggagcgcaacgccggguccggcaucaucaucagcgacacgcccgugcacgacugcaacacgaccugccagaccccgaagggcgccaucaacaccucccugcccuuccagaacauccaccccaucaccaucgggaagugccccaaguacgucaagagcaccaagcugcggcucgcgaccggccugcgcaacgugccguccauccagagccgggggcuguucggcgccaucgccggguucaucgagggcggcuggacggggaugguggacggcugguacggguaccaccaccagaacgagcagggcuccggguacgccgccgaccucaagagcacccagaacgcgaucgacaagaucaccaacaaggugaacuccgucaucgagaagaugaacacccaguucacggccgugggcaaggaguucaaccaccuggagaagcgcaucgagaaccugaacaagaaggucgacgacggcuuccucgacaucuggaccuacaacgccgagcugcuggugcuccuggagaacgagcggacccuggacuaccacgacagcaacgugaagaaccucuacgagaagguccgcucccagcugaagaacaacgccaaggagaucgggaacggcugcuucgaguucuaccacaagugcgacaacacgugcauggagagcgugaagaacgggaccuacgacuaccccaaguacuccgaggaggccaagcugaaccgggaggagaucgacggcgugaagcucgagagcacccgcaucuaccagauccuggcgaucuacuccaccgucgccagcagccuggugcucguggucucccugggggccaucagcuucuggaugugcuccaacggcagccugcagugccggaucugcaucuga

SEQ ID NO: 69062 - RNA, 1701 nt, Artificial Sequence
  derived and/or modified CDS sequence (opt1) from hemagglutinin__InfluenzaA__ADI24621
augaaggccauccuggugguccuccuguacaccuucgccaccgcgaacgccgacacgcugugcaucggcuaccacgccaacaacagcaccgacaccguggacaccgugcucgagaagaacgucacggugacccacuccgugaaccugcuggaggacaagcacaacgggaagcucugcaagcugcgcggcgucgcgccccugcaccucgggaagugcaacaucgccggcuggauccuggggaacccggagugcgagagccuguccaccgccagcuccuggagcuacaucguggagaccuccagcuccgacaacggcacgugcuaccccggcgacuucaucgacuacgaggagcuccgggagcagcugagcuccgugagcuccuucgagcgcuucgagaucuuccccaagaccagcuccuggcccaaccacgacagcaacaagggggucaccgccgccugcccgcacgccggcgcgaaguccuucuacaagaaccugaucuggcucgugaagaaggggaacagcuaccccaagcuguccaagagcuacaucaacgacaagggcaaggaggugcugguccucugggggauccaccaccccagcaccuccgccgaccagcagagccuguaccagaacgccgacgccuacguguucgugggcacgucccgguacagcaagaaguucaagcccgagaucgccauccgcccgaagguccgggaccaggagggccgcaugaacuacuacuggacccugguggagcccggggacaagaucaccuucgaggcgaccggcaaccucguggucccccgguacgccuucgccauggagcgcaacgccggguccggcaucaucaucagcgacacgcccgugcacgacugcaacacgaccugccagaccccgaagggcaccaucaacaccucccugcccuuccagaacauccaccccaucaccaucgggaagugccccaaguacgucaagagcaccaagcugcggcucgccacgggccugcgcaacgugccguccauccagagccgggggcuguucggcgcgaucgccggguucaucgagggcggcuggaccgggaugguggacggcugguacggguaccaccaccagaacgagcagggcuccggguacgccgccgaccucaagagcacccagaacgccaucgacaagaucaccaacaaggugaacuccgucaucgagaagaugaacacgcaguucaccgcggugggcaaggaguucaaccaccuggagaagcgcaucgagaaccugaacaagaaggucgacgacggcuuccucgacaucuggaccuacaacgccgagcugcuggugcuccuggagaacgagcggacccuggacuaccacgacagcaacgugaagaaccucuacgagaagguccgcucccagcugaagaacaacgccaaggagaucgggaacggcugcuucgaguucuaccacaagugcgacaacacgugcauggagagcgugaagaacgggaccuacgacuaccccaaguacuccgaggaggccaagcugaaccgggaggagaucgacggcgugaagcucgagagcacccgcaucuaccagauccuggccaucuacuccaccgucgcgagcagccuggugcucaucgugucccugggggccaucagcuucuggaugugcuccaacggcagccugcagugccggaucugcaucuga

SEQ ID NO: 69063 - RNA, 1701 nt, Artificial Sequence
  derived and/or modified CDS sequence (opt1) from hemagglutinin__InfluenzaA__ADI48184
augaaggccauccuggugguccuccuguacaccuucgccaccgcgaacgccgacacgcugugcaucggcuaccacgccaacaacagcaccgacaccguggacaccgugcucgagaagaacgucacggugacccacuccgugaaccugcuggaggacaagcacaacgggaagcucugcaagcugcgcggcgucgcgccccugcaccucgggaagugcaacaucgccggcuggauccuggggaacccggagugcgagagccuguccaccgccagcuccuggagcuacaucguggagaccuccagcuccgacaacggcacgugcuaccccggcgacuucaucgacuacgaggagcuccgggagcagcugagcuccgugagcuccuucgagcgcuucgagaucuuccccaagaccagcuccuggcccaaccacgacagcaacaagggggucaccgccgccugcccgcacgccggcgcgaaguccuucuacaagaaccugaucuggcucgugaagaaggggaacagcuaccccaagcuguccaagagcuacaucaacgacaagggcaaggaggugcugguccucugggggauccaccaccccagcaccuccgccgaccagcagagccuguaccagaacgccgacgccuacguguucgugggcacgucccgguacagcaagaaguucaagcccgagaucgccauccgcccgaagguccgggaccaggagggccgcaugaacuacuacuggacccugguggagcccggggacaagaucaccuucgaggcgaccggcaaccucguggucccccgguacgccuucgccauggggcgcaacgccggcuccggcaucaucaucagcgacacgcccgugcacgacugcaacacgaccugccagaccccgaagggggccaucaacaccucccugcccuuccagaacauccaccccaucaccaucggcaagugccccaaguacgucaagagcaccaagcugcggcucgcgaccgggcugcgcaacgugccguccauccagagccggggccuguucggggccaucgccggcuucaucgagggcggguggacgggcaugguggacgggugguacggcuaccaccaccagaacgagcagggguccggcuacgccgccgaccucaagagcacccagaacgcgaucgacaagaucaccaacaaggugaacuccgucaucgagaagaugaacacccaguucacggccgugggcaaggaguucaaccaccuggagaagcgcaucgagaaccugaacaagaaggucgacgacggguuccucgacaucuggaccuacaacgccgagcugcuggugcuccuggagaacgagcggacccuggacuaccacgacagcaacgugaagaaccucuacgagcgcguccggucccagcugaagaacaacgccaaggagaucggcaacgggugcuucgaguucuaccacaagugcgacaacacgugcauggagagcgugaagaacggcaccuacgacuaccccaaguacuccgaggaggccaagcugaaccgcgaggagaucgacggggugaagcucgagagcacccggaucuaccagauccuggcgaucuacuccaccgucgccagcagccuggugcucguggucucccugggcgccaucagcuucuggaugugcuccaacggcagccugcagugccgcaucugcaucuga

SEQ ID NO: 69064 - RNA, 1701 nt, Artificial Sequence; identical to SEQ ID NO: 67857
  derived and/or modified CDS sequence (opt1) from hemagglutinin__InfluenzaA__ADI48186

SEQ ID NO: 69065 - RNA, 1701 nt, Artificial Sequence
  derived and/or modified CDS sequence (opt1) from hemagglutinin__InfluenzaA__ADI48188
augaaggccauccuggugguccuccuguacaccuucgccaccgcgaacgccgacacgcugugcaucggcuaccacgccaacaacagcaccgacaccguggacaccgugcucgagaagaacgucacggugacccacuccgugaaccugcuggaggacaagcacaacgggaagcucugcaagcugcgcggcgucgcgccccugcaccucgggaagugcaacaucgccggcuggauccuggggaacccggagugcgagagccuguccaccgccagcuccuggagcuacaucguggagaccuccagcuccgacaacggcacgugcuaccccggcgacuucaucgacuacgaggagcuccgggagcagcugagcuccgugagcuccuucgagcgcuucgagaucuuccccaagaccagcuccuggcccaaccacgacagcaacaagggggucaccgccgccugcccgcacgccggcgcgaaguccuucuacaagaaccugaucuggcucgugaagaaggggaacagcuaccccaagcuguccaagagcuacaucaacgacaagggcaaggaggugcugguccucugggggauccaccaccccagcaccuccgccgaccagcagagccuguaccagaacgccgacgccuacguguucgugggcacgucccgguacagcaagaaguucaagcccgagaucgccauccgcccgaagguccgggaccaggagggccgcaugaacuacuacuggacccugguggagcccggggacaagaucaccuucgaggcgaccggcaaccucguggucccccgguacgccuucgccauggagcgcaacgccggguccgacaucaucaucagcgacacgcccgugcacgacugcaacacgaccugccagaccccgaagggcgccaucaacaccucccugcccuuccagaacauccaccccaucaccaucggcaagugccccaaguacgucaagagcaccaagcugcggcucgcgaccgggcugcgcaacgugccguccauccagagccggggccuguucggggccaucgccggcuucaucgagggcggguggacgggcaugguggacgggugguacggcuaccaccaccagaacgagcagggguccggcuacgccgccgaccucaagagcacccagaacgcgaucgacaagaucaccaacaaggugaacuccgucaucgagaagaugaacacccaguucacggccguggggaaggaguucaaccaccuggagaagcgcaucgagaaccugaacaagaaggucgacgacggcuuccucgacaucuggaccuacaacgccgagcugcuggugcuccuggagaacgagcggacccuggacuaccacgacagcaacgugaagaaccucuacgagaagguccgcucccagcugaagaacaacgccaaggagaucggcaacgggugcuucgaguucuaccacaagugcgacaacacgugcauggagagcgugaagaacggcaccuacgacuaccccaaguacuccgaggaggccaagcugaaccgggaggagaucgacggggugaagcucgagagcacccgcaucuaccagauccuggcgaucuacuccaccgucgccagcagccuggugcucguggucucccugggcgccaucagcuucuggaugugcuccaacgggagccugcagugccggaucugcaucuga

SEQ ID NO: 69066 - RNA, 1701 nt, Artificial Sequence
  derived and/or modified CDS sequence (opt1) from hemagglutinin__InfluenzaA__ADI48190
augaaggccauccuggugguccuccuguacaccuucgccaccgcgaacgccgacacgcugugcaucggcuaccacgccaacaacagcaccgacaccguggacaccgugcucgagaagaacgucacggugacccacuccgugaaccugcuggaggacaagcacaacgggaagcucugcaagcugcgcggcgucgcgccccugcaccucgggaagugcaacaucgccggcuggauccuggggaacccggagugcgagagccuguccaccgccagcuccuggagcuacaucguggagaccuccagcuccgacaacggcacgugcuaccccggcgacuucaucgacuacgaggagcuccgggagcagcugagcuccgugagcuccuucgagcgcuucgagaucuuccccaagaccagcuccuggcccaaccacgacagcaacaagggggucaccgccgccugcccgcacgccggcgcgaaguccuucuacaagaaccugaucuggcucgugaagaaggggaacagcuaccccaagcuguccaagagcuacaucaacgacaagggcaaggaggugcugguccucugggggauccaccaccccagcaccuccgccgaccagcagagccuguaccagaacgccgacgccuacguguucgugggcacgucccgguacagcaagaaguucaagcccgagaucgccauccgcccgaagguccgggaccaggagggccgcaugaacuacuacuggacccugguggagcccggggacaagaucaccuucgaggcgaccggcaaccucguggucccccgguacgccuucgccauggagcgcaacgccggguccggcaucaucaucagcgacacgcccgugcacgacugcaacacgaccugccagaccccgaagggcgccaucaacaccucccugcccuuccagaacauccaccccaucaccaucgggaagugccccaaguacgucaagagcaccaagcugcggcucgcgaccggccugcgcaacgugccguccauccagagccgggggcuguucggcgccaucgccggguucaucgagggcggcuggacggggaugguggacggcugguacggguaccaccaccagaacgagcagggcuccggguacgccgccgaccucaagagcacccagaacgcgaucgacaagaucaccaacaaggugaacuccgucaucgagaagaugaacacccaguucacggccgugggcaaggaguucaaccaccuggagaagcgcaucgagaaccugaacaagaaggucgacgacggcuuccucgacaucuggaccuacaacgccgagcugcuggugcuccuggagaacgagcggacccuggacuaccacgacagcaacgugaagaaccucuacgagaagguccgcucccagcugaagaacaacgccaaggagaucgggaacggcugcuucgaguucuaccacaagugcgacaacacgugcauggagagcgugaagaacgggaccuacgacuaccccaaguacuccgaggaggccaagcugaaccgggaggagaucgacggcgugaagcucgagagcaccaagaucuaccagauccuggcgaucuacuccaccgucgccagcagccuggugcucguggucucccugggggccaucagcuucuggaugugcuccaacggcagccugcagugccgcaucugcaucuga

SEQ ID NO: 69067 - RNA, 1701 nt, Artificial Sequence
  derived and/or modified CDS sequence (opt1) from hemagglutinin__InfluenzaA__ADI48192
augaaggccauccuggugguccuccuguacaccuucgccaccgcgaacgccgacacgcugugcaucggcuaccacgccaacaacagcaccgacaccguggacaccgugcucgagaagaacgucacggugacccacuccgugaaccugcuggaggacaagcacaacgggaagcucugcaagcugcgcggcgucgcgccccugcaccucgggaagugcaacaucgccggcuggauccuggggaacccggagugcgagagccuguccaccgccagcuccuggagcuacaucguggagaccuccagcuccgacaacggcacgugcuaccccggcgacuucaucgacuacgaggagcuccgggagcagcugagcuccgugagcuccuucgagcgcuucgagaucuuccccaagaccagcuccuggcccaaccacgacagcaacaagggggucaccgccgccugcccgcacgccggcgcgaaguccuucuacaagaaccugaucuggcucgugaagaaggggaacagcuaccccaagcuguccaagagcuacaucaacgacaagggcaaggaggugcugguccucugggggauccaccaccccagcaccuccgccgaccagcagagccuguaccagaacgccgacgccuacguguucgugggcacgucccgguacagcaagaaguucaagcccgagaucgccauccgcccgaagguccgggaccaggagggccgcaugaacuacuacuggacccugguggagcccggggacaagaucaccuucgaggcgaccggcaaccucguggucccccgguacgccuucgccauggagcgcaacgccggguccggcaucaucaucagcgacacgcccgugcacgacugcaacacgaccugccagaccccgaagggcgccaucaacaccucccugcccuuccagaacauccaccccaucaccaucgggaagugccccaaguacgucaagagcaccaagcugcggcucgcgaccggccugcgcaacgugccguccauccagagccgggggcuguucggcgccaucgccggguucaucgagggcggcuggacggggaugguggacggcugguacggguaccaccaccagaacgagcagggcuccggguacgccgccgaccucaagagcacccagaacgcgaucgacaagaucaccaacaaggugaacuccgucaucgagaagaugaacacccaguucacggccgugggcaaggaguucaaccaccuggagaagcgcaucgagaaccugaacaagaaggucgacgacggcuuccucgacaucuggaccuacaacgccgagcugcuggugcuccuggagaacgagcggacccuggacuaccacgacagcaacgugaagaaccucuacgagaagguccgcucccagcugaagaacaacgccaaggagaucgggaacggcugcuucgaguucuaccacaagugcgacaacacgugcauggagagcgugaagaacgggaccuacgacuaccccaaguacuccgaggaggccaagcugaaccgggaggagaucgacggcgugaagcucgagagcacccgcaucuaccagauccugaccaucuacuccaccgucgcgagcagccuggugcucguggucucccugggggccaucagcuucuggaugugcuccaacggcagccugcagugccggaucugcaucuga

SEQ ID NO: 69068 - RNA, 1701 nt, Artificial Sequence
  derived and/or modified CDS sequence (opt1) from hemagglutinin__InfluenzaA__ADI48194
augaaggccauccuggugguccuccuguacaccuucgccaccgcgaacgccgacacgcugugcaucggcuaccacgccaacaacagcaccgacaccguggacaccgugcucgagaagaacgucacggugacccacuccgugaaccugcuggaggacaagcacaacgggaagcucugcaagcugcgcggcgucgcgccccugcaccucgggaagugcaacaucgccggcuggauccuggggaacccggagugcgagagccuguccaccgccagcuccuggagcuacaucguggagaccuccagcuccgacaacggcacgugcuaccccggcgacuucaucgacuacgaggagcuccgggagcagcugagccugguguccagcuucgagcgcuucgagaucuuccccaagaccaacuccuggcccaaccacgacagcaacaagggggucaccgccgccugcccgcacgccggcgcgaaguccuucuacaagaaccucaucuggcuggugaagaaggggaacagcuaccccaagcuguccaagagcuacaucaacgacaagggcaaggaggugcucguccugugggggauccaccaccccuccaccagcgccgaccagcagagccuguaccagaacgccgacgccuacguguucgugggcacgucccgguacagcaagaaguucaagcccgagaucgccauccgcccgaagguccgggaccaggagggccgcaugaacuacuacuggacccucguggagcccggggacaagaucaccuucgaggcgaccggcaaccugguggucccccgguacgccuucgccauggagcgcaacgccggguccggcaucaucaucagcgacacgcccgugcacgacugcaacacgaccugccagaccccgaagggcgccaucaacaccucccugcccuuccagaacauccaccccaucaccaucgggaagugccccaaguacgucaagagcaccaagcuccggcuggcgaccggccugcgcaacgugccguccauccagagccgggggcuguucggcgccaucgccggguucaucgagggcggcuggacggggaugguggacggcugguacggguaccaccaccagaacgagcagggcuccggguacgccgccgaccucaagagcacccagaacgcgaucgacaagaucaccaacaaggugaacuccgucaucgagaagaugaacacccaguucacggccgugggcaaggaguucaaccaccuggagaagcgcaucgagaaccucaacaagaaggucgacgacggcuuccuggacaucuggaccuacaacgccgagcugcucgugcugcuggagaacgagcggacccucgacuaccacgacagcaacgugaagaaccuguacgagaagguccgcucccagcugaagaacaacgccaaggagaucgggaacggcugcuucgaguucuaccacaagugcgacaacacgugcauggagagcgugaagaacgggaccuacgacuaccccaaguacuccgaggaggccaagcucaaccgggaggagaucgacggcgugaagcuggagagcacccgcaucuaccagauccuggcgaucuacuccaccgucgccagcucccucgugcugguggucagccugggggccaucagcuucuggaugugcuccaacggcagccuccagugccggaucugcaucuga

SEQ ID NO: 69069 - RNA, 1701 nt, Artificial Sequence
  derived and/or modified CDS sequence (opt1) from hemagglutinin__InfluenzaA__ADI48196
augaaggccauccuggugguccuccuguacaccuucgccaccgcgaacgccgacacgcugugcaucggcuaccacgccaacaacagcaccgacaccguggacaccgugcucgagaagaacgucacggugacccacuccgugaaccugcuggaggacaagcacaacgggaagcucugcaagcugcgcggcgucgcgccccugcaccucgggaagugcaacaucgccggcuggauccuggggaacccggagugcgagagccuguccaccgccagcuccuggagcuacaucguggagaccuccagcuccgacaacggcacgugcuaccccggcgacuucaucgacuacgaggagcuccgggagcagcugagcuccgugagcuccuucgagcgcuucgagaucuuccccaagaccagcuccuggcccaaccacgacagcaacaagggggucaccgccgccugcccgcacgccggcgcgaaguccuucuacaagaaccugaucuggcucgugaagaaggggaacagcuaccccaagcuguccaagagcuacaucaacgacaagggcaaggaggugcugguccucugggggauccaccaccccagcaccuccgccgaccagcagagccuguaccagaacgccgacgccuacguguucgugggcacgucccgguacagcaagaaguucaagcccgagaucgccauccgcccgaagguccgggaccaggagggccgcaugaacuacuacuggacccugguggagcccggggacaagaucaccuucgaggcgaccggcaaccucguggucccccgguacgccuucgccauggagcgcaacgccggguccggcaucaucaucagcgacacgcccgugcacgacugcaacacgaccugccagaccccgaagggcgccaucaacaccucccugcccuuccagaacauccaccccaucaccaucgggaagugccccaaguacgucaagagcaccaagcugcggcucgcgaccggccugcgcaacgugccguccauccagagccgggggcuguucggcgccaucgccggguucaucgagggcggcuggacggggaugguggacggcugguacggguaccaccaccagaacgagcagggcuccggguacgccgccgaccucaagagcacccagaacgcgaucgacaagaucaccaacaaggugaacuccgucaucgagaagaugaacacccaguucacggccgugggcaaggaguucaaccaccuggagaagcgcaucgagaaccugaacaagaaggucgacgacggcuuccucgacaucuggaccuacaacgccgagcugcuggugcuccuggagaacgagcggacccuggacuaccacgacagcaacgugaagaaccucuacgagaagguccgcucccagcugaagaacaacgccaaggagaucgggaacggcugcuucgaguucuaccacaagugcgacaacacgugcauggagagcgugaagaacgggaccuacgacuaccccaaguacuccgaggaggccaagcugaaccgggaggagaucgacggcgugaagcucgacagcacccgcaucuaccagauccuggcgaucuacuccaccgucgccagcagccuggugcucguggucucccugggggccaucagcuucuggaugugcuccaacggcagccugcagugccggaucugcaucuga

SEQ ID NO: 69070 - RNA, 1701 nt, Artificial Sequence; identical to SEQ ID NO: 67857
  derived and/or modified CDS sequence (opt1) from hemagglutinin__InfluenzaA__ADI48198

SEQ ID NO: 69071 - RNA, 1701 nt, Artificial Sequence; identical to SEQ ID NO: 67857
  derived and/or modified CDS sequence (opt1) from hemagglutinin__InfluenzaA__ADI48200

SEQ ID NO: 69072 - RNA, 1701 nt, Artificial Sequence
  derived and/or modified CDS sequence (opt1) from hemagglutinin__InfluenzaA__ADI48202
augaaggccauccuggugguccuccuguacaccuucgccaccgcgaacgccgacacgcugugcaucggcuaccacgccaacaacagcaccgacaccguggacaccgugcucgagaagaacgucacggugacccacuccgugaaccugcuggaggacaagcacaacgggaagcucugcaagcugcgcggcgucgcgccccugcaccucgggaagugcaacaucgccggcuggauccuggggaacccggagugcgagagccuguccaccgccagcuccuggagcuacaucguggagaccuccagcuccgacaacggcacgugcuaccccggcgacuucaucgacuacgaggagcuccgggagcagcugagcuccgugagcuccuucgagcgcuucgagaucuuccccaagaucagcuccuggcccaaccacgacagcaacaagggggucaccgccgccugcccgcacgccggcgcgaaguccuucuacaagaaccugaucuggcucgugaagaaggggaacagcuaccccaagcuguccaagagcuacaucaacgacaagggcaaggaggugcugguccucugggggauccaccaccccagcaccuccgccgaccagcagagccuguaccagaacgccgacgccuacguguucgugggcaccucccgguacagcaagaaguucaagcccgagaucgccauccgcccgaagguccgggaccaggagggccgcaugaacuacuacuggacgcugguggagcccggggacaagaucaccuucgaggcgaccggcaaccucguggucccccgguacgccuucgccauggagcgcaacgccggguccggcaucaucaucagcgacacccccgugcacgacugcaacacgaccugccagaccccgaagggcgccaucaacaccucccugcccuuccagaacauccaccccaucacgaucgggaagugccccaaguacgucaagagcaccaagcugcggcucgcgaccggccugcgcaacgugccguccauccagagccgggggcuguucggcgccaucgccggguucaucgagggcggcuggaccgggaugguggacggcugguacggguaccaccaccagaacgagcagggcuccggguacgccgccgaccucaagagcacgcagaacgcgaucgacaagaucaccaacaaggugaacuccgucaucgagaagaugaacacccaguucaccgccgugggcaaggaguucaaccaccuggagaagcgcaucgagaaccugaacaagaaggucgacgacggcuuccucgacaucuggacguacaacgccgagcugcuggugcuccuggagaacgagcggacccuggacuaccacgacagcaacgugaagaaccucuacgagaagguccgcucccagcugaagaacaacgccaaggagaucgggaacggcugcuucgaguucuaccacaagugcgacaacacgugcauggagagcgugaagaacgggaccuacgacuaccccaaguacuccgaggaggccaagcugaaccgggaggagaucgacggcgugaagcucgagagcacccgcaucuaccagauccuggcgaucuacuccaccgucgccagcagccuggugcucguggucucccugggggccaucagcuucuggaugugcuccaacggcagccugcagugccggaucugcaucuga

SEQ ID NO: 69073 - RNA, 1701 nt, Artificial Sequence
  derived and/or modified CDS sequence (opt1) from hemagglutinin__InfluenzaA__ADI48204
augaaggccauccuggugguccuccuguacaccuucgccaccgcgaacgccgacacgcugugcaucggcuaccacgccaacaacagcaccgacaccguggacaccgugcucgagaagaacgucacggugacccacuccgugaaccugcuggaggacaagcacaacgggaagcucugcaagcugcgcggcgucgcgccccugcaccucgggaagugcaacaucgccggcuggauccuggggaacccggagugcgagagccuguccaccgccagcuccuggagcuacaucguggagaccuccagcuccgacaacggcacgugcuaccccggcgacuucaucgacuacgaggagcuccgggagcagcugagcuccgugagcuccuucgagcgcuucgagaucuuccccaagaccagcuccuggcccaaccacgacagcaacaagggggucaccgccgccugcccgcacgccggcgcgaaguccuucuacaagaaccugaucuggcucgugaagaaggggaacagcuaccccaagcuguccaagagcuacaucaacgacaagggcaaggaggugcugguccucugggggauccaccaccccagcaccuccgccgaccagcagagccuguaccagaacguggacgccuacguguucgucggcacgucccgguacagcaagaaguucaagcccgagaucgccauccgcccgaaggugcgggaccaggagggccgcaugaacuacuacuggacccugguggagcccggggacaagaucaccuucgaggccaccggcaaccucgucgugccccgguacgcguucgccauggagcgcaacgccggguccggcaucaucaucagcgacacgcccgugcacgacugcaacacgaccugccagaccccgaagggcgccaucaacaccucccugcccuuccagaacauccaccccaucaccaucgggaagugccccaaguacgucaagagcaccaagcugcggcucgccaccggccugcgcaacgugccguccauccagagccgggggcuguucggcgcgaucgccggguucaucgagggcggcuggacggggaugguggacggcugguacggguaccaccaccagaacgagcagggcuccggguacgccgccgaccucaagagcacccagaacgccaucgacaagaucaccaagaaggucaacuccgugaucgagaagaugaacacccaguucacggcggucggcaaggaguucaaccaccuggagaagcgcaucgagaaccugaacaagaagguggacgacggcuuccucgacaucuggaccuacaacgccgagcugcuggugcuccuggagaacgagcggacccuggacuaccacgacagcaacgucaagaaccucuacgagaaggugcgcucccagcugaagaacaacgccaaggagaucgggaacggcugcuucgaguucuaccacaagugcgacaacacgugcauggagagcgugaagaacgggaccuacgacuaccccaaguacuccgaggaggccaagcugaaccgggaggagaucgacggcgucaagcucgagagcacccgcaucuaccagauccuggccaucuacuccaccguggcgagcagccuggugcucgucgugucccugggggccaucagcuucuggaugugcuccaacggcagccugcagugccggaucugcaucuga

SEQ ID NO: 69074 - RNA, 1701 nt, Artificial Sequence; identical to SEQ ID NO: 67857
  derived and/or modified CDS sequence (opt1) from hemagglutinin__InfluenzaA__ADI48208

SEQ ID NO: 69075 - RNA, 1701 nt, Artificial Sequence; identical to SEQ ID NO: 67857
  derived and/or modified CDS sequence (opt1) from hemagglutinin__InfluenzaA__ADI48210

SEQ ID NO: 69076 - RNA, 1701 nt, Artificial Sequence
  derived and/or modified CDS sequence (opt1) from hemagglutinin__InfluenzaA__ADI48212
augaaggccauccuggugguccuccuguacaccuucgccaccgcgaacgccgacacgcugugcaucggcuaccacgccaacaacagcaccgacaccguggacaccgugcucgagaagaacgucacggugacccacuccgugaaccugcuggaggacaagcacaacgggaagcucugcaagcugcgcggcgucgcgccccugcaccucgggaagugcaacaucgccggcuggauccuggggaacccggagugcgagagccuguccaccgccagcuccuggagcuacaucguggagaccuccagcuccgacaacggcacgugcuaccccggcgacuucaucgacuacgaggagcuccgggagcagcugagcuccgugagcuccuucgagcgcuucgagaucuuccccaagaccagcuccuggcccaaccacgacagcaacaagggggucaccgccgccugcccgcacgccggcgcgaaguccuucuacaagaaccugaucuggcucgugaagaaggggaacagcuaccccaagcuguccaagagcuacaucaacgacaagggcaaggaggugcugguccucugggggauccaccaccccagcaccuccgccgaccagcagagccuguaccagaacgccgacgccuacguguucgugggcacgucccgguacagcaagaaguucaagcccgagaucgccauccgcccgaagguccgggaccaggagggccgcaugaacuacuacuggacccugguggagcccggggacaagaucaccuucgaggcgaccggcaaccucguggucccccgguacgccuucgccauggagcgcaacgccggguccggcaucaucaucagcgacacgcccgugcacgacugcaacacgaccugccagaccccgaagggcgccaucaacaccucccugcccuuccagaacauccaccccaucaccaucgggaagugccccaaguacgucaagagcaccaagcugcggcucgcgaccggccugcgcaacgugccguccauccagagccgggggcuguucggcgccaucgccggguucaucgagggcggcuggacggggaugguggacggcugguacggguaccaccaccagaacgagcagggcuccggguacgccgccgaccucaagagcacccagaacgcgaucgacaagaucaccaacaaggugaacuccgucaucgagaagaugaacacccaguucacggccgugggcaaggaguucaaccaccuggagaagcgcaucgagaaccugaacaagaaggucgacgacggcuuccucgacguguggaccuacaacgccgagcugcuggugcuccuggagaacgagcggacccuggacuaccacgacagcaacgucaagaaccucuacgagaaggugcgcucccagcugaagaacaacgccaaggagaucgggaacggcugcuucgaguucuaccacaagugcgacaacacgugcauggagagcgugaagaacgggaccuacgacuaccccaaguacuccgaggaggccaagcugaaccgggaggagaucgacggcgucaagcucgagagcacccgcaucuaccagauccuggcgaucuacuccaccguggccagcagccuggugcucgucgugucccugggggccaucagcuucuggaugugcuccaacggcagccugcagugccggaucugcaucuga

SEQ ID NO: 69077 - RNA, 1701 nt, Artificial Sequence
  derived and/or modified CDS sequence (opt1) from hemagglutinin__InfluenzaA__ADI48214
augaaggccauccuggugguccuccuguacaccuucgccaucgcgaacgccgacacccugugcaucggcuaccacgccaacaacagcacggacaccguggacaccgugcucgagaagaacgucaccgugacgcacuccgugaaccugcuggaggacaagcacaacgggaagcucugcaagcugcgcggcgucgcgccccugcaccucgggaagugcaacaucgccggcuggauccuggggaacccggagugcgagagccuguccaccgccagcuccuggagcuacaucguggagaccuccagcuccgacaacgggaccugcuaccccggcgacuucaucgacuacgaggagcuccgggagcagcugagcuccgugagcuccuucgagcgcuucgagaucuuccccaagacgagcuccuggcccaaccacgacagcaacaagggcgucaccgccgccugcccgcacgccggcgcgaaguccuucuacaagaaccugaucuggcucgugaagaaggggaacagcuaccccaagcuguccaagagcuacaucaacgacaagggcaaggaggugcugguccucugggggauccaccaccccagcaccuccgccgaccagcagagccuguaccagaacgccgacgccuacguguucgugggcaccucccgguacagcaagaaguucaagcccgagaucgccauccgcccgaagguccgggaccaggagggccgcaugaacuacuacuggacgcugguggagcccggggacaagaucaccuucgaggcgaccggcaaccucguggucccccgguacgccuucgccauggagcgcaacgccggguccggcaucaucaucagcgacacccccgugcacgacugcaacacgaccugccagaccccgaagggcgccaucaacaccucccugcccuuccagaacauccaccccaucacgaucgggaagugccccaaguacgucaagagcaccaagcugcggcucgcgaccggccugcgcaacgugccguccauccagagccgggggcuguucggcgccaucgccggguucaucgagggcggcuggaccgggaugguggacggcugguacggguaccaccaccagaacgagcagggcuccggguacgccgccgaccucaagagcacgcagaacgcgaucgacaagaucaccaacaaggugaacuccgucaucgagaagaugaacacccaguucaccgccgugggcaaggaguucaaccaccuggagaagcgcaucgagaaccugaacaagaaggucgacgacggcuuccucgacaucuggacguacaacgccgagcugcuggugcuccuggagaacgagcggacccuggacuaccacgacagcaacgugaagaaccucuacgagaagguccgcucccagcugaagaacaacgccaaggagaucgggaacggcugcuucgaguucuaccacaagugcgacaacacgugcauggagagcgugaagaacgggaccuacgacuaccccaaguacuccgaggaggccaagcugaaccgggaggagaucgacggcgugaagcucgagagcacccgcaucuaccagauccuggcgaucuacuccaccgucgccagcagccuggugcucgccgugucccugggggccaucagcuucuggaugugcuccaacggcagccugcagugccggaucugcaucuga

SEQ ID NO: 69078 - RNA, 1701 nt, Artificial Sequence; identical to SEQ ID NO: 69076
  derived and/or modified CDS sequence (opt1) from hemagglutinin__InfluenzaA__ADI48216

SEQ ID NO: 69079 - RNA, 1701 nt, Artificial Sequence
  derived and/or modified CDS sequence (opt1) from hemagglutinin__InfluenzaA__ADI48218
augaaggccauccuggugguccuccuguacaccuucgccaccgcgaacgccgacacgcugugcaucggcuaccacgccaacaacagcaccgacaccguggacaccgugcucgagaagaacgucacggugacccacuccgugaaccugcuggaggacaagcacaacgggaagcucugcaagcugcgcggcgucgcgccccugcaccucgggaagugcaacaucgccggcuggauccuggggaacccggagugcgagagccuguccaccgccagcuccuggagcuacaucguggagaccuccagcuccgacaacggcacgugcuaccccggcgacuucaucgacuacgaggagcuccgggagcagcugagcuccgugagcuccuucgagcgcuucgagaucuuccccaagaccagcuccuggcccaaccacgacagcaacaagggggucaccgccgccugcccgcacgccggcgcgaaguccuucuacaagaaccugaucuggcucgugaagaaggggaacagcuaccccaagcuguccaagagcuacaucaacgacaagggcaaggaggugcugguccucugggggauccaccaccccagcaccuccgccgaccagcagagccuguaccagaacgccgacgccuacguguucgugggcacgucccgguacagcaagaaguucaagcccgagaucgccauccgcccgaagguccgggaccaggagggccgcaugaacuacuacuggacccugguggagcccggggacaagaucaccuucgaggcgaccggcaaccucguggucccccgguacgccuucgccauggagcgcaacgccggguccggcaucaucaucagcgacacgcccgugcacgacugcaacacgaccugccagaccccgaagggcgccaucaacaccucccugcccuuccagaacauccaccccaucaccaucgggaagugccccaaguacgucaagagcaccaagcugcggcucgcgaccggccugcgcaacgugccguccauccagagccgggggcuguucggcgccaucgccggguucaucgagggcggcuggacggggaugguggacggcugguacggguaccaccaccagaacgagcagggcuccggguacgccgccgaccucaagagcacccagaacgcgaucgacaagaucaccaacaaggugaacuccgucaucgagaagaugaacacccaguucacggccgugggcaaggaguucaaccaccuggagaagcgcaucgagaaccugaacaagaaggucgacgacggcuuccucgacaucuggaccuacaacgccgagcugcuggugcuccuggagaacgagcggacccuggacuaccaggacagcaacgugaagaaccucuacgagaagguccgcucccagcugaagaacaacgccaaggagaucgggaacggcugcuucgaguucuaccacaagugcgacaacacgugcauggagagcgugaagaacgggaccuacgacuaccccaaguacuccgaggaggccaagcugaaccgggaggagaucgacggcgugaagcucgagagcacccgcaucuaccagauccuggcgaucuacuccaccgucgccagcagccuggugcucguggucucccugggggccaucagcuucuggaugugcuccaacggcagccugcagugccggaucugcaucuga

SEQ ID NO: 69080 - RNA, 1701 nt, Artificial Sequence
  derived and/or modified CDS sequence (opt1) from hemagglutinin__InfluenzaA__ADI48220
augaaggccauccuggugguccuccuguacaccuucgccaccgcgaacgccgacacgcugugcaucggcuaccacgccaacaacagcaccgacaccguggacaccgugcucgagaagaacgucacggugacccacuccgugaaccugcuggaggacaagcacaacgggaagcucugcaagcugcgcggcgucgcgccccugcaccucgggaagugcaacaucgccggcuggauccuggggaacccggagugcgagagccuguccaccgccagcuccuggagcuacaucguggagaccuccagcuccgacaacggcacgugcuaccccggcgacuucaucgacuacgaggagcuccgggagcagcugagcuccgugagcuccuucgagcgcuucgagaucuuccccaagaccagcuccuggcccaaccacgacagcaacaagggggucaccgccgccugcccgcacgccggcgcgaaguccuucuacaagaaccugaucuggcucgugaagaaggggaacagcuaccccaagcuguccaagagcuacaucaacgacaagggcaaggaggugcugguccucugggggauccaccaccccagcaccuccgccgaccagcagagccuguaccagaacgccgacgccuacguguucgugggcacgucccgguacagcaagaaguucaagcccgagaucgccauccgcccgaagguccgggaccaggagggccgcaugaacuacuacuggacccugguggagcccggggacaagaucaccuucgagaccacgggcaaccucguggucccccgguacgcguucgccauggagcgcaacgccggguccggcaucaucaucagcgacacccccgugcacgacugcaacacgaccugccagaccccgaagggcgccaucaacaccucccugcccuuccagaacauccaccccaucaccaucgggaagugccccaaguacgucaagagcaccaagcugcggcucgccacgggccugcgcaacgugccguccauccagagccgggggcuguucggcgcgaucgccggguucaucgagggcggcuggaccgggaugguggacggcugguacggguaccaccaccagaacgagcagggcuccggguacgccgccgaccucaagagcacccagaacgccaucgacaagaucaccaacaaggugaacuccgucaucgagaagaugaacacgcaguucaccgcggugggcaaggaguucaaccaccuggagaagcgcaucgagaaccugaacaagaaggucgacgacggcuuccucgacaucuggaccuacaacgccgagcugcuggugcuccuggagaacgagcggacccugggguaccacgacagcaacgugaagaaccucuacgagaagguccgcucccagcugaagaacaacgccaaggagaucggcaacgggugcuucgaguucuaccacaagugcgacaacacgugcauggagagcgugaagaacggcaccuacgacuaccccaaguacuccgaggaggccaagcugaaccgggaggagaucgacggggugaagcucgagagcacccgcaucuaccagauccuggccaucuacuccaccgucgcgagcagccuggugcucguggucucccugggcgccaucagcuucuggaugugcuccaacggcagccugcagugccggaucugcaucuga

SEQ ID NO: 69081 - RNA, 1701 nt, Artificial Sequence
  derived and/or modified CDS sequence (opt1) from hemagglutinin__InfluenzaA__ADI48622
augaaggccauccugguguuccuccuguacaccuucgccaccgcgaacgccgacacgcugugcaucggcuaccacgccaacaacagcaccgacaccgucgacaccgugcucgagaagaacgugacggucacccacuccgugaaccugcuggaggacaagcacaacgggaagcucugcaagcugcgcggcguggcgccccugcaccucgggaagugcaacaucgccggcuggauccuggggaacccggagugcgagagccuguccaccgccagcuccuggagcuacaucgucgagaccuccagcuccgacaacggcacgugcuaccccggcgacuucaucgacuacgaggagcuccgggagcagcugagcuccgugagcuccuucgagcgcuucgagaucuuccccaagaccagcuccuggcccaaccacgacagcaacaagggggugaccgccgccugcccgcacgccggcgcgaaguccuucuacaagaaccugaucuggcucgucaagaaggggaacagcuaccccaagcuguccaagagcuacaucaacgacaagggcaaggaggugcuggugcucugggggauccaccaccccagcaccuccgccgaccagcagagccuguaccagaacgccgacgccuacgucuucgugggcacgucccgguacagcaagaaguucaagcccgagaucgccauccgcccgaaggugcgggaccaggagggccgcaugaacuacuacuggacccuggucgagcccggggacaagaucaccuucgaggcgaccggcaaccucguggugccccgguacgccuucgccauggagcgcaacgccggguccggcaucaucaucagcgacacgcccguccacgacugcaacacgaccugccagaccccgaagggcgccaucaacaccucccugcccuuccagaacauccaccccaucaccaucgggaagugccccaaguacgucaagagcaccaagcugcggcucgcgaccggccugcgcaacgugccguccauccagagccgggggcuguucggcgccaucgccggguucaucgagggcggcuggacggggaugguggacggcugguacggguaccaccaccagaacgagcagggcuccggguacgccgccgaccucaagagcacccagaacgcgaucgacgagaucaccaacaaggugaacuccgugaucgagaagaugaacacccaguucacggccgucggcaaggaguucaaccaccuggagaagcgcaucgagaaccugaacaagaagguggacgacggcuuccucgacaucuggaccuacaacgccgagcugcugguccuccuggagaacgagcggacccuggacuaccacgacagcaacgugaagaaccucuacgagaaggugcgcucccagcugaagaacaacgccaaggagaucgggaacggcugcuucgaguucuaccacaagugcgacaacacgugcauggagagcgucaagaacgggaccuacgacuaccccaaguacuccgaggaggccaagcugaaccgggaggagaucgacggcgugaagcucgagagcacccgcaucuaccagauccuggcgaucuacuccaccguggccagcagccugguccucguggugucccugggggccaucagcuucuggaugugcuccaacggcagccugcagugccggaucugcaucuga

SEQ ID NO: 69082 - RNA, 1701 nt, Artificial Sequence
  derived and/or modified CDS sequence (opt1) from hemagglutinin__InfluenzaA__ADI48632
auggaggccauccuggugguccuccuguacaccuucgccaccgcgaacgccgacacgcugugcaucggcuaccacgccaacaacagcaccgacaccguggacaccgugcucgagaagaacgucacggugacccacuccgugaaccugcuggaggacaagcacaacgggaagcucugcaagcugcgcggcgucgcgccccugcaccucgggaagugcaacaucgccggcuggauccuggggaacccggagugcgagagccuguccaccgccagcuccuggagcuacaucguggagaccuccagcuccgacaacggcacgugcuaccccggcgacuucaucgacuacgaggagcuccgggagcagcugagcuccgugagcuccuucgagcgcuucgagaucuuccccaagaccagcuccuggcccaaccacgacagcaacaagggggucaccgccgccugcccgcacgccggcgcgaaguccuucuacaagaaccugaucuggcucgugaagaaggggaacagcuaccccaagcuguccaagagcuacaucaacgacaagggcaaggaggugcugguccucuggggcgugcaccaccccagcaccuccgccgaccagcagagccuguaccagaacgccgacgccuacguguucgucggguccagccgguacuccaagaaguucaagcccgagaucgccauccgcccgaaggugcgggaccaggagggccgcaugaacuacuacuggacgcugguggagcccggggacaagaucaccuucgaggcgaccggcaaccucgucgugccccgguacgccuucgccauggagcgcaacgccgggagcggcaucaucaucuccgacacccccgugcacgacugcaacacgaccugccagaccccgaagggcgccaucaacaccagccugcccuuccacaacauccaccccaucacgaucgggaagugccccaaguacgucaaguccaccaagcugcggcucgcgaccggccugcgcaacgugccgagcauccagucccgggggcuguucggcgccaucgccggguucaucgagggcggcuggaccgggaugguggacggcugguacggguaccaccaccagaacgagcagggcagcggguacgccgccgaccucaaguccacgcagaacgcgaucgacgagaucaccaacaaggucaacagcgugaucgagaagaugaacacccaguucaccgccgucggcaaggaguucaaccaccuggagaagcgcaucgagaaccugaacaagaagguggacgacggcuuccucgacaucuggacguacaacgccgagcugcuggugcuccuggagaacgagcggacccuggacuaccacgacuccaacgucaagaaccucuacgagaaggugcgcagccagcugaagaacaacgccaaggagaucgggaacggcugcuucgaguucuaccacaagugcgacaacacgugcauggaguccgugaagaacgggaccuacgacuaccccaaguacagcgaggaggccaagcugaaccgggaggagaucgacggcgucaagcucgaguccacccgcaucuaccagauccuggcgaucuacagcaccguggccagcucccuggugcucgucgugagccugggggccaucuccuucuggaugugcagcaacggcucccugcagugccggaucugcaucuga

SEQ ID NO: 69083 - RNA, 1701 nt, Artificial Sequence; identical to SEQ ID NO: 66935
  derived and/or modified CDS sequence (opt1) from hemagglutinin__InfluenzaA__ADI48642

SEQ ID NO: 69084 - RNA, 1701 nt, Artificial Sequence; identical to SEQ ID NO: 66935
  derived and/or modified CDS sequence (opt1) from hemagglutinin__InfluenzaA__ADI48652

SEQ ID NO: 69085 - RNA, 1701 nt, Artificial Sequence
  derived and/or modified CDS sequence (opt1) from hemagglutinin__InfluenzaA__ADI48672
auggaggccauccuggugguccuccuguacaccuucgccaccgcgaacgccgacacgcugugcaucggcuaccacgccaacaacagcaccgacaccguggacaccgugcucgagaagaacgucacggugacccacuccgugaaccugcuggaggacaagcacaacgggaagcucugcaagcugcgcggcgucgcgccccugcaccucgggaagugcaacaucgccggcuggauccuggggaacccggagugcgagagccuguccaccgccagcuccuggagcuacaucguggagaccuccagcuccgacaacggcacgugcuaccccggcgacuucaucgacuacgaggagcuccgggagcagcugagcuccgugagcuccuucgagcgcuucgagaucuuccccaagaccagcuccuggcccaaccacgacagcaacaagggggucaccgccgccugcccgcacgccggcgcgaaguccuucuacaacaaccugaucuggcucgugaagaaggggaacagcuaccccaagcuguccaagagcuacaucaacgacaagggcaaggaggugcugguccucugggggauccaccaccccagcaccuccgccgaccagcagagccuguaccagaacgccgacgccuacguguucgugggcuccagccgguacuccaagaaguucaagcccgagaucgccauccgcccgaagguccgggaccaggagggccgcaugaacuacuacuggacgcugguggagcccggggacaagaucaccuucgaggcgaccggcaaccucguggucccccgguacgccuucgccauggagcgcaacgccgggagcggcaucaucaucuccgacacccccgugcacgacugcaacacgaccugccagaccccgaagggcgccaucaacaccagccugcccuuccacaacauccaccccaucacgaucgggaagugccccaaguacgugaaguccaccaagcugcggcucgcgaccggccugcgcaacgucccgagcauccagucccgggggcuguucggcgccaucgccggguucaucgagggcggcuggaccgggaugguggacggcugguacggguaccaccaccagaacgagcagggcagcggguacgccgccgaccucaaguccacgcagaacgcgaucgacgagaucaccaacaaggugaacagcgucaucgagaagaugaacacccaguucaccgccgugggcaaggaguucaaccaccuggagaagcgcaucgagaaccugaacaagaaggucgacgacggcuuccucgacaucuggacguacaacgccgagcugcuggugcuccuggagaacgagcggacccuggacuaccacgacuccaacgugaagaaccucuacgagaagguccgcagccagcugaagaacaacgccaaggagaucgggaacggcugcuucgaguucuaccacaagugcgacaacacgugcauggaguccgugaagaacgggaccuacgacuaccccaaguacagcgaggaggccaagcugaaccgggaggagaucgacggcgugaagcucgaguccacccgcaucuaccagauccuggcgaucuacagcaccgucgccagcucccuggugcucguggucagccugggggccaucuccuucuggaugugcagcaacggcucccugcagugccggaucugcaucuga

SEQ ID NO: 69086 - RNA, 1701 nt, Artificial Sequence; identical to SEQ ID NO: 66693
  derived and/or modified CDS sequence (opt1) from hemagglutinin__InfluenzaA__ADI48682

SEQ ID NO: 69087 - RNA, 1701 nt, Artificial Sequence; identical to SEQ ID NO: 66935
  derived and/or modified CDS sequence (opt1) from hemagglutinin__InfluenzaA__ADI48692

SEQ ID NO: 69088 - RNA, 1701 nt, Artificial Sequence; identical to SEQ ID NO: 66873
  derived and/or modified CDS sequence (opt1) from hemagglutinin__InfluenzaA__ADI48702

SEQ ID NO: 69089 - RNA, 1701 nt, Artificial Sequence; identical to SEQ ID NO: 66935
  derived and/or modified CDS sequence (opt1) from hemagglutinin__InfluenzaA__ADI48712

SEQ ID NO: 69090 - RNA, 1701 nt, Artificial Sequence; identical to SEQ ID NO: 66935
  derived and/or modified CDS sequence (opt1) from hemagglutinin__InfluenzaA__ADI48722

SEQ ID NO: 69091 - RNA, 1701 nt, Artificial Sequence; identical to SEQ ID NO: 66693
  derived and/or modified CDS sequence (opt1) from hemagglutinin__InfluenzaA__ADI48732

SEQ ID NO: 69092 - RNA, 1701 nt, Artificial Sequence; identical to SEQ ID NO: 66693
  derived and/or modified CDS sequence (opt1) from hemagglutinin__InfluenzaA__ADI48742

SEQ ID NO: 69093 - RNA, 1701 nt, Artificial Sequence
  derived and/or modified CDS sequence (opt1) from hemagglutinin__InfluenzaA__ADI48752
auggaggccauccugguguuccuccuguacaccuucgccaccgcgaacgccgacacgcugugcaucggcuaccacgccaacaacagcaccgacaccgucgacaccgugcucgagaagaacgugacggucacccacuccgugaaccugcuggaggacaagcacaacgggaagcucugcaagcugcgcggcguggcgccccugcaccucgggaagugcaacaucgccggcuggauccuggggaacccggagugcgagagccuguccaccgccagcuccuggagcuacaucgucgagaccuccagcuccgacaacggcacgugcuaccccggcgacuucaucgacuacgaggagcuccgggagcagcugagcuccgugagcuccuucgagcgcuucgagaucuuccccaagaccagcuccuggcccaaccacgacagcaacaaggggaucaccgccgccugcccgcacgccggcgcgaaguccuucuacaagaaccugaucuggcucgugaagaaggggaacagcuaccccaagcuguccaagagcuacaucaacgacaagggcaaggagguccuggugcucugggggauccaccaccccagcaccuccgccgaccagcagagccuguaccagaacgccgacgccuacguguucgucggcuccagccgguacuccaagaaguucaagcccgagaucgccauccgcccgaaggugcgggaccaggagggccgcaugaacuacuacuggacgcugguggagcccggggacaagaucaccuucgaggcgaccggcaaccucgucgugccccgguacgccuucgccauggagcgcaacgccgggagcggcaucaucaucuccgacacccccgugcacgacugcaacacgaccugccagaccccgaagggcgccaucaacaccagccugcccuuccacaacauccaccccaucacgaucgggaagugccccaaguacgucaaguccaccaagcugcggcucgcgaccggccugcgcaacgugccgagcauccagucccgggggcuguucggcgccaucgccggguucaucgagggcggcuggaccgggaugguggacggcugguacggguaccaccaccagaacgagcagggcagcggguacgccgccgaccucaaguccacgcagaacgcgaucgacgagaucaccaacaaggucaacagcgugaucgagaagaugaacacccaguucaccgccgugggcaaggaguucaaccaccuggagaagcgcaucgagaaccugaacaagaaggucgacgacggcuuccucgacaucuggacguacaacgccgagcugcuggugcuccuggagaacgagcggacccuggacuaccacgacuccaacgucaagaaccucuacgagaaggugcgcagccagcugaagaacaacgccaaggagaucgggaacggcugcuucgaguucuaccacaagugcgacaacacgugcauggaguccgugaagaacgggaccuacgacuaccccaaguacagcgaggaggccaagcugaaccgggaggagaucgacggcgucaagcucgaguccacccgcaucuaccagauccuggcgaucuacagcaccguggccagcucccuggugcucgucgugagccugggggccaucuccuucuggaugugcagcaacggcucccugcagugccggaucugcaucuga

SEQ ID NO: 69094 - RNA, 1701 nt, Artificial Sequence; identical to SEQ ID NO: 66935
  derived and/or modified CDS sequence (opt1) from hemagglutinin__InfluenzaA__ADI48762

SEQ ID NO: 69095 - RNA, 1701 nt, Artificial Sequence
  derived and/or modified CDS sequence (opt1) from hemagglutinin__InfluenzaA__ADI48772
auggaggccauccuggugguccuccuguacaccuucgccaccgcgaacgccgacacgcugugcaucggcuaccaggccaacaacagcaccgacaccguggacaccgugcucgagaagaacgucacggugacccacuccgugaaccugcuggaggacaagcacaacgggaagcucugcaagcugcgcggcgucgcgccccugcaccucgggaagugcaacaucgccggcuggauccuggggaacccggagugcgagagccuguccaccgccagcuccuggagcuacaucguggagaccuccagcuccgacaacggcacgugcuaccccggcgacuucaucgacuacgaggagcuccgggagcagcugagcuccgugagcuccuucgagcgcuucgagaucuuccccaagaccagcuccuggcccaaccacgacagcaacaagggggucaccgccgccugcccgcacgccggcgcgaaguccuucuacaagaaccugaucuggcucgugaagaaggggaacagcuaccccaagcuguccaagagcuacaucaacgacaagggcaaggaggugcugguccucugggggauccaccaccccagcaccuccgccgaccagcagagccuguaccagaacgccgacgccuacguguucgugggcuccagccgguacuccaagaaguucaagcccgagaucgccauccgcccgaagguccgggaccaggagggccgcaugaacuacuacuggacgcugguggagcccggggacaagaucaccuucgaggcgaccggcaaccucguggucccccgguacgccuucgccauggagcgcaacgccgggagcggcaucaucaucuccgacacccccgugcacgacugcaacacgaccugccagaccccgaagggcgccaucaacaccagccugcccuuccacaacauccaccccaucacgaucgggaagugccccaaguacgugaaguccaccaagcugcggcucgcgaccggccugcgcaacgucccgagcauccagucccgggggcuguucggcgccaucgccggguucaucgagggcggcuggaccgggaugguggacggcugguacggguaccaccaccagaacgagcagggcagcggguacgccgccgaccucaaguccacgcagaacgcgaucgacgagaucaccaacaaggugaacagcgucaucgagaagaugaacacccaguucaccgccgugggcaaggaguucaaccaccuggagaagcgcaucgagaaccugaacaagaaggucgacgacggcuuccucgacaucuggacguacaacgccgagcugcuggugcuccuggagaacgagcggacccuggacuaccacgacuccaacgugaagaaccucuacgagaagguccgcagccagcugaagaacaacgccaaggagaucgggaacggcugcuucgaguucuaccacaagugcgacaacacgugcauggaguccgugaagaacgggaccuacgacuaccccaaguacagcgaggaggccaagcugaaccgggaggagaucgacggcgugaagcucgaguccacccgcaucuaccagauccuggcgaucuacagcaccgucgccagcucccuggugcucguggucagccugggggccaucuccuucuggaugugcagcaacggcucccugcagugccggaucugcaucuga

SEQ ID NO: 69096 - RNA, 1701 nt, Artificial Sequence
  derived and/or modified CDS sequence (opt1) from hemagglutinin__InfluenzaA__ADI48782
augaaggccauccuggugguccuccuguacaccuucgccaccgcgaacgccgacacgcugugcaucggcuaccacgccaacaacagcaccgacaccguggacaccgugcucgagaagaacgucacggugacccacuccgugaaccugcuggaggacaagcacaacgggaagcucugcaagcugcgcggcgucgcgccccugcaccucgggaagugcaacaucgccggcuggauccuggggaacccggagugcgagagccuguccaccgccagcuccuggagcuacaucguggagaccuccagcuccgacaacggcacgugcuaccccggcgacuucaucgacuacgaggagcuccgggagcagcugagcuccgugagcuccuucgagcgcuucgagaucuuccccaagaccagcuccuggcccaaccacgacagcaacaagggggucaccgccgccugcccgcacgccggcgcgaaguccuucuacaagaaccugaucuggcucgugaagaaggggaacagcuaccccaagcuguccaagagcuacaucaacgacaagggcaaggaggugcugguccucugggggauccaccaccccagcaccuccgccgaccagcagagccuguaccagaacgccgacgccuacguguucgugggcacgucccgguacagcaagaaguucaagcccgagaucgccauccgcccgaagguccgggaccaggagggccgcaugaacuacuacuggacccugguggagcccggggacaagaucaccuucgaggcgaccggcaaccucguggucccccgguacgccuucgccauggagcgcaacgccggguccggcaucaucaucagcgacacgcccgugcacgacugcaacacgaccugccagaccccgaagggcgccaucaacaccucccugcccuuccagaacauccaccccaucaccaucgggaagugccccaaguacgucaagagcaccaagcugcggcucgcgaccggccugcgcaacgugccguccauccagagccgggggcuguucggcgccaucgccggguucaucgagggcggcuggacggggaugguggacggcugguacggguaccaccaccagaacgagcagggcuccggguacgccgccgaccucaagagcacccagaacgcgaucgacgagaucaccaacaaggugaacuccgucaucgagaagaugaacacccaguucacggccgugggcaaggaguucaaccaccuggagaagcgcaucgagaaccugaacaagaaggucgacgacggcuuccucgacaucuggaccuacaacgccgagcugcuggugcuccuggagaacgagcggacccuggacuaccacgacagcaacgugaagaaccucuacgagaagguccgcucccagcugaagaacaacgccaaggagaucgggaacggcugcuucgaguucuaccacaagugcgacaacacgugcauggagagcgugaagaacgggaccuacgacuaccccaaguacuccgaggagagcaagcugaaccgggaggagaucgacggcgugaagcucgaguccacccgcaucuaccagauccuggccaucuacagcaccgucgcgagcucccuggugcucguggucagccugggggccaucuccuucuggaugugcagcaacggcucccugcagugccggaucugcaucuga

SEQ ID NO: 69097 - RNA, 1701 nt, Artificial Sequence
  derived and/or modified CDS sequence (opt1) from hemagglutinin__InfluenzaA__ADI48792
auggaggccauccuggugguccuccuguacaccuucgccaccgcgaacgccgacacgcugugcaucggcuaccacgccaacaacagcaccgacaccguggacaccgugcucgagaagaacgucacggugacccacuccgugaaccugcuggaggacaagcacaacgggaagcucugcaagcugcgcggcgucgcgccccugcaccucgggaagugcaacaucgccggcuggauccuggggaacccggagugcgagagccuguccaccgccagcuccuggagcuacaucguggagaccuccagcuccgacaacggcacgugcuaccccggcgacuucaucgacuacgaggagcuccgggagcagcugagcuccgugagcuccuucgagcgcuucgagaucuuccccaagaccagcuccuggcccaaccacgacagcaacaagggggucaccgccgccugcccgcacgccggcgcgaaguccuucuacaagaaccugaucuggcucgugaagaaggggaacagcuaccccaagcuguccaagagcuacaucaacgacaagggcaaggaggugcugguccucugggggauccaccaccccagcaccuccgccgaccagcagagccuguaccagaacgccgacgccuacaucuucgugggcuccagccgguacuccaagaaguucaagcccgagaucgccauccgcccgaaggugcgggaccaggagggccgcaugaacuacuacuggacgcuggucgagcccggggacaagaucaccuucgaggcgaccggcaaccucguggugccccgguacgccuucgccauggagcgcaacgccgggagcggcaucaucaucuccgacacccccguccacgacugcaacacgaccugccagaccccgaagggcgccaucaacaccagccugcccuuccacaacauccaccccaucacgaucgggaagugccccaaguacgugaaguccaccaagcugcggcucgcgaccggccugcgcaacgugccgagcauccagucccgggggcuguucggcgccaucgccggguucaucgagggcggcuggaccgggauggucgacggcugguacggguaccaccaccagaacgagcagggcagcggguacgccgccgaccucaaguccacgcagaacgcgaucgacgagaucaccaacaaggugaacagcgugaucgagaagaugaacacccaguucaccgccgucggcaaggaguucaaccaccuggagaagcgcaucgagaaccugaacaagaagguggacgacggcuuccucgacaucuggacguacaacgccgagcugcugguccuccuggagaacgagcggacccuggacuaccacgacuccaacgugaagaaccucuacgagaaggugcgcagccagcugaagaacaacgccaaggagaucgggaacggcugcuucgaguucuaccacaagugcgacaacacgugcauggaguccgucaagaacgggaccuacgacuaccccaaguacagcgaggaggccaagcugaaccgggaggagaucgacggcgugaagcucgaguccacccgcaucuaccagauccuggcgaucuacagcaccguggccagcucccugguccucguggugagccugggggccaucuccuucuggaugugcagcaacggcucccugcagugccggaucugcaucuga

SEQ ID NO: 69098 - RNA, 1701 nt, Artificial Sequence
  derived and/or modified CDS sequence (opt1) from hemagglutinin__InfluenzaA__ADI49029
auggaggccauccuggugguccuccuguacaccuucgccaccgcgaacgccgacacgcugugcaucggcuaccacgccaacaacagcaccgacaccguggacaccgugcucgagaagaacgucacggugacccacuccgugaaccugcuggaggacaagcacaacgggaagcucugcaagcugcgcggcgucgcgccccugcaccucgggaagugcaacaucgccggcuggauccuggggaacccggagugcgagagccuguccaccgcgagcuccuggagcuacaucguggagaccuccaucagcgacaacggcacgugcuaccccggcgacuucaucgacuacgaggagcuccgggagcagcuguccagcguguccagcuucgagcgcuucgagaucuuccccaagaccuccagcuggcccaaccacgacuccaacaagggggucaccgccgccugcccgcacgccggcgccaagagcuucuacaagaaccugaucuggcucgugaagaaggggaacuccuaccccaagcugagcaaguccuacaucaacgacaagggcaaggaggugcugguccucugggggauccaccaccccagcaccagcgccgaccagcagucccuguaccagaacgccgacgccuacguguucgugggcagcucccgguacagcaagaaguucaagcccgagaucgccauccgcccgaagguccgggaccaggagggccgcaugaacuacuacuggacgcugguggagcccggggacaagaucaccuucgaggcgaccggcaaccucguggucccccgguacgccuucgccauggagcgcaacgccggguccggcaucaucaucagcgacacccccgugcacgacugcaacacgaccugccagaccccgaagggcgccaucaacaccucccugcccuuccacaacauccaccccaucacgaucgggaagugccccaaguacgucaagagcaccaagcugcggcucgcgaccggccugaagaacgugccguccauccagagccgcgggcuguucggcgccaucgccggguucaucgagggcggcuggaccgggaugguggacggcugguacggguaccaccaccagaacgagcagggcuccggguacgccgccgaccucaagagcacgcagaacgcgaucgacgagaucaccaacaaggugaacuccgucaucgagaagaugaacacccaguucaccgccgugggcaaggaguucaaccaccuggagaagcggaucgagaaccugaacaagaaggucgacgacggcuuccucgacaucuggacguacaacgccgagcugcuggugcuccuggagaacgagcgcacccuggacuaccacgacagcaacgugaagaaccucuacgagaagguccggucccagcugaagaacaacgccaaggagaucgggaacggcugcuucgaguucuaccacaagugcgacaacacgugcauggagagcgugaagaacgggaccuacgacuaccccaaguacuccgaggaggccaagcugaaccgcgaggagaucgacggcgugaagcucgagagcacccggaucuaccagauccuggcgaucuacuccaccgucgccagcagccuggugcucguggucucccugggggccaucagcuucuggaugugcuccaacggcagccugcagugccgcaucugcaucuga

SEQ ID NO: 69099 - RNA, 1701 nt, Artificial Sequence; identical to SEQ ID NO: 66935
  derived and/or modified CDS sequence (opt1) from hemagglutinin__InfluenzaA__ADI49240

SEQ ID NO: 69100 - RNA, 1701 nt, Artificial Sequence; identical to SEQ ID NO: 66935
  derived and/or modified CDS sequence (opt1) from hemagglutinin__InfluenzaA__ADI49260

SEQ ID NO: 69101 - RNA, 1701 nt, Artificial Sequence
  derived and/or modified CDS sequence (opt1) from hemagglutinin__InfluenzaA__ADI49270
augaaggccauccuggugguccuccuguacaccuucgccaccgcgaacgccgacacgcugugcaucggcuaccacgccaacaacagcaccgacaccguggacaccgugcucgagaagaacgucacggugacccacuccgugaaccugcuggaggacaagcacaacgggaagcucugcaagcugcgcggcgucgcgccccugcaccucgggaagugcaacaucgccggcuggauccuggggaacccggagugcgagagccuguccaccgccagcuccuggagcuacaucguggagaccuccagcuccgacaacggcacgugcuaccccggcgacuucaucgacuacgaggagcuccgggagcagcugagcuccgugagcuccuucgagcgcuucgagaucuuccccaagaccagcuccuggcccaaccacgacagcaacaagggggucaccgccgccugcccgcacgccggcgcgaaguccuucuacaagaaccugaucuggcucgugaagaaggggaacagcuaccccaagcuguccaagagcuacaucaacgacaagggcaaggaggugcugguccucugggggauccaccaccccagcaccuccgccgaccagcagagccuguaccagaacgccgacgccuacguguucgugggcacgucccgguacagcaagaaguucaagcccgagaucgccauccgcccgaagguccgggaccaggagggccgcaugaacuacuacuggacccugguggagcccggggacaagaucaccuucgaggcgaccggcaaccucguggucccccgguacgccuucgccauggagcgcaacgccggguccggcaucaucaucagcgacacgcccgugcacgacugcaacacgaccugccagaccccgaagggcgccaucaacaccucccugcccuuccagaacauccaccccaucaccaucgggaagugccccaaguacgucaagagcaccaagcugcggcucgcgaccggccugcgcaacgugccguccauccagagccgggggcuguucggcgccaucgccggguucaucgagggcggcuggacggggaugguggacggcugguacggguaccaccaccagaacgagcagggcuccggguacgccgccgaccucaagagcacccagaacgcgaucgacgagaucaccaacaaggugaacuccgucaucgagaagaugaacacccaguucacggccgugggcaaggaguucaaccaccuggagaagcgcaucgagaaccugaacaagaaggucgacgacggcuuccucgacaucuggaccuacaacgccgagcugcuggugcuccuggagaacgagcggacccuggacuaccacgacagcaacgugaagaaccucuacgagaagguccgcucccagcugaagaacaacgcccgggagaucgggaacggcugcuucgaguucuaccacaagugcgacaacacgugcauggagagcgugaagaacgggaccuacgacuaccccaaguacuccgaggaggccaagcugaaccgcgaggagaucgacggcgugaagcucgagagcacccggaucuaccagauccuggcgaucuacuccaccgucgccagcagccuggugcucguggucucccugggggccaucagcuucuggaugugcuccaacggcagccugcagugccgcaucugcaucuga

SEQ ID NO: 69102 - RNA, 1701 nt, Artificial Sequence; identical to SEQ ID NO: 66935
  derived and/or modified CDS sequence (opt1) from hemagglutinin__InfluenzaA__ADI49280

SEQ ID NO: 69103 - RNA, 1701 nt, Artificial Sequence; identical to SEQ ID NO: 66935
  derived and/or modified CDS sequence (opt1) from hemagglutinin__InfluenzaA__ADI49312

SEQ ID NO: 69104 - RNA, 1701 nt, Artificial Sequence; identical to SEQ ID NO: 66935
  derived and/or modified CDS sequence (opt1) from hemagglutinin__InfluenzaA__ADI49322

SEQ ID NO: 69105 - RNA, 1701 nt, Artificial Sequence; identical to SEQ ID NO: 66935
  derived and/or modified CDS sequence (opt1) from hemagglutinin__InfluenzaA__ADI49332

SEQ ID NO: 69106 - RNA, 1701 nt, Artificial Sequence; identical to SEQ ID NO: 67262
  derived and/or modified CDS sequence (opt1) from hemagglutinin__InfluenzaA__ADI49342

SEQ ID NO: 69107 - RNA, 1701 nt, Artificial Sequence; identical to SEQ ID NO: 66935
  derived and/or modified CDS sequence (opt1) from hemagglutinin__InfluenzaA__ADI49352

SEQ ID NO: 69108 - RNA, 1701 nt, Artificial Sequence; identical to SEQ ID NO: 66693
  derived and/or modified CDS sequence (opt1) from hemagglutinin__InfluenzaA__ADI49362

SEQ ID NO: 69109 - RNA, 1701 nt, Artificial Sequence; identical to SEQ ID NO: 68245
  derived and/or modified CDS sequence (opt1) from hemagglutinin__InfluenzaA__ADI49382

SEQ ID NO: 69110 - RNA, 1701 nt, Artificial Sequence; identical to SEQ ID NO: 67046
  derived and/or modified CDS sequence (opt1) from hemagglutinin__InfluenzaA__ADI49392

SEQ ID NO: 69111 - RNA, 1701 nt, Artificial Sequence; identical to SEQ ID NO: 66680
  derived and/or modified CDS sequence (opt1) from hemagglutinin__InfluenzaA__ADI49717

SEQ ID NO: 69112 - RNA, 1701 nt, Artificial Sequence
  derived and/or modified CDS sequence (opt1) from hemagglutinin__InfluenzaA__ADI49727
augaaggccauccuggugguccuccuguacaccuucgccaccgcgaacgccgacacgcugugcaucggcuaccacgccaacaacagcaccgacaccguggacaccgugcucgagaagaacgucacggugacccacuccgugaaccugcuggaggacaagcacaacgggaagcucugcaagcugcgcggcgucgcgccccugcaccucgggaagugcaacaucgccggcuggauccuggggaacccggagugcgagagccuguccaccgccagcuccuggagcuacaucguggagaccuccagcuccgacaacggcacgugcuaccccggcgacuucaucgacuacgaggagcuccgggagcagcugagcuccgugagcuccuucgagcgcuucgagaucuuccccaagaccagcuccuggcccaaccacgacagcaacaagggggucaccgccgccugcccgcacgccggcgcgaaguccuucuacaagaaccugaucuggcucgugaagaaggggaacagcuaccccaagcuguccaagagcuacaucaacgacaagggcaaggaggugcugguccucugggggauccaccaccccagcaccuccgccgaccagcagagccuguaccagaacgccgacgccuacguguucgugggcuccagccgguacuccaagaaguucaagcccgagaucgccauccgcccgaagguccgggaccaggagggccgcaugaacuacuacuggacgcugguggagcccggggacaagaucaccuucgaggcgaccggcaaccucguggucccccgguacgccuucgccauggagcgcaacgccgggagcggcaucaucaucuccgacacccccgugcacgacugcaacacgaccugccagaccccgaagggcgccaucaacaccagccugcccuuccagaacauccaccccaucacgaucgggaagugccccaaguacgugaaguccaccaagcugcggcucgcgaccggccugcgcaacgucccgagcauccagucccgggggcuguucggcgccaucgccggguucaucgagggcggcuggaccgggaugguggacggcugguacggguaccaccaccagaacgagcagggcagcggguacgccgccgaccucaaguccacgcagaacgcgaucgacgagaucaccaacaaggugaacagcaucaucgagaagaugaacacccaguucaccgccgucggcaaggaguucaaccaccuggagaagcgcaucgagaaccugaacaagaagguggacgacggcuuccucgacaucuggacguacaacgccgagcugcugguccuccuggagaacgagcggacccuggacuaccacgacuccaacgugaagaaccucuacgagaaggugcgcagccagcugaagaacaacgccaaggagaucgggaacggcugcuucgaguucuaccacaagugcgacaacacgugcauggaguccgucaagaacgggaccuacgacuaccccaaguacagcgaggaggccaagcugaaccgggaggagaucgacggcgugaagcucgaguccacccgcaucuaccagauccuggcgaucuacagcaccguggccagcucccugguccucguggugagccugggggccaucuccuucuggaugugcagcaacggcucccugcagugccggaucugcaucuga

SEQ ID NO: 69113 - RNA, 1701 nt, Artificial Sequence; identical to SEQ ID NO: 66680
  derived and/or modified CDS sequence (opt1) from hemagglutinin__InfluenzaA__ADI49737

SEQ ID NO: 69114 - RNA, 1701 nt, Artificial Sequence; identical to SEQ ID NO: 66680
  derived and/or modified CDS sequence (opt1) from hemagglutinin__InfluenzaA__ADI49747

SEQ ID NO: 69115 - RNA, 1701 nt, Artificial Sequence; identical to SEQ ID NO: 66680
  derived and/or modified CDS sequence (opt1) from hemagglutinin__InfluenzaA__ADI49757

SEQ ID NO: 69116 - RNA, 1701 nt, Artificial Sequence; identical to SEQ ID NO: 66680
  derived and/or modified CDS sequence (opt1) from hemagglutinin__InfluenzaA__ADI49767

SEQ ID NO: 69117 - RNA, 1701 nt, Artificial Sequence
  derived and/or modified CDS sequence (opt1) from hemagglutinin__InfluenzaA__ADI49777
augaaggccauccuggugguccuccuguacaccuucgccaccgcgaacgccgacacgcugugcaucggcuaccacgccaacaacagcaccgacaccguggacaccgugcucgagaagaacgucacggugacccacuccgugaacauccuggaggacaagcacaacgggaagcugugcaagcuccgcggcgucgcgccccugcaccuggggaagugcaacaucgccggcuggauccucgggaacccggagugcgagagccuguccaccgccagcuccuggagcuacaucguggagaccuccagcuccgacaacggcacgugcuaccccggcgacuucaucgacuacgaggagcugcgggagcagcucagcuccgugagcuccuucgagcgcuucgagaucuuccccaagaccagcuccuggcccaaccacgacagcaacaagggggucaccgccgccugcccgcacgccggcgcgaaguccuucuacaagaaccugaucuggcuggugaagaaggggaacagcuaccccaagcucuccaagagcuacaucaacgacaagggcaaggaggugcugguccugugggggauccaccaccccagcaccuccacggaccagcagagccucuaccagaacgccgacgccuacguguucgugggcuccagccgguacuccaagaaguucaagcccgagaucgccauccgcccgaagguccgggaccaggagggccgcaugaacuacuacuggacccugguggagcccggggacaagaucaccuucgaggccaccggcaaccugguggucccccgguacgcguucgccauggagcgcaacgccgggagcggcaucaucaucuccgacacgcccgugcacgacugcaacacgaccugccagaccccgaagggcgccaucaacaccagccuccccuuccagaacauccaccccaucaccaucgggaagugccccaaguacgugaaguccaccaagcugcggcuggccaccggccuccgcaacgucccgagcauccagucccgggggcuguucggcgcgaucgccggguucaucgagggcggcuggacggggaugguggacggcugguacggguaccaccaccagaacgagcagggcagcggguacgccgccgaccugaaguccacccagaacgccaucgacgagaucaccaacaaggugaacagcgucaucgagaagaugaacacccaguucacggcggugggcaaggaguucaaccaccucgagaagcgcaucgagaaccugaacaagaaggucgacgacggcuuccuggacaucuggaccuacaacgccgagcuccuggugcugcucgagaacgagcggacccuggacuaccacgacuccaacgugaagaaccuguacgagaagguccgcagccagcucaagaacaacgccaaggagaucgggaacggcugcuucgaguucuaccacaagugcgacaacacgugcauggaguccgugaagaacgggaccuacgacuaccccaaguacagcgaggaggccaagcugaaccgggaggagaucgacggcgugaagcuggaguccacccgcaucuaccagauccucgccaucuacagcaccgucgcgagcucccuggugcugguggucagccucggggccaucuccuucuggaugugcagcaacggcucccugcagugccggaucugcaucuga

SEQ ID NO: 69118 - RNA, 1701 nt, Artificial Sequence
  derived and/or modified CDS sequence (opt1) from hemagglutinin__InfluenzaA__ADI49787
augaaggccauccuggugguccuccuguacaccuucgccaccgcgaacgccgacacgcugugcaucggcuaccacgccaacaacagcaccgacaccguggacaccgugcucgagaagaacgucacggugacccacuccgugaaccugcuggaggacaagcacaacgggaagcucugcaagcugcgcggcgucgcgccccugcaccucgggaagugcaacaucgccggcuggauccuggggaacccggagugcgagagcaucuccaccgccagcuccuggagcuacaucguggagaccuccagcuccgacaacggcacgugcuaccccggcgacuucaucgacuacgaggagcugcgggagcagcucagcuccgugagcuccuucgagcgcuucgagaucuuccccaagaccagcuccuggcccaaccacgacagcaacaagggggucaccgccgccugcccgcacgccggcgcgaaguccuucuacaagaaccugaucuggcuggugaagaaggggaacagcuaccccaagcucuccaagagcuacaucaacgacaagggcaaggaggugcugguccugugggggauccaccaccccagcaccuccgccgaccagcagagccucuaccagaacgccgacgccuacguguucgugggcuccagccgguacuccaagaaguucaagcccgagaucgccauccgcccgaagguccgggaccaggagggccgcaugaacuacuacuggacgcugguggagcccggggacaagaucaccuucgaggcgaccggcaaccugguggucccccgguacgccuucgccauggagcgcaacgccgggagcggcaucaucaucuccgacacccccgugcacgacugcaacacgaccugccagaccccgaagggcgccaucaacaccagccuccccuuccagaacauccaccccaucacgaucgggaagugccccaaguacgugaaguccaccaagcugcggcuggcgaccggccuccgcaacgucccgagcauccagucccgggggcuguucggcgccaucgccggguucaucgagggcggcuggaccgggaugguggacggcugguacggguaccaccaccagaacgagcagggcagcggguacgccgccgaccugaaguccacgcagaacgcgaucgacgagaucaccaacaaggugaacagcgucaucgagaagaugaacacccaguucaccgccgugggcaaggaguucaaccaccucgagaagcgcaucgagaaccugaacaagaaggucgacgacggcuuccuggacaucuggacguacaacgccgagcuccuggugcugcucgagaacgagcggacccuggacuaccacgacuccaacgugaagaaccuguacgagaagguccgcagccagcucaagaacaacgccaaggagaucgggaacggcugcuucgaguucuaccacaagugcgacaacacgugcauggaguccgugaagaacgggaccuacgacuaccccaaguacagcgaggaggccaagcugaaccgggaggagaucgacggcgugaagcuggaguccacccgcaucuaccagauccucgcgaucuacagcaccgucgccagcucccuggugcugguggucagccucggggccaucuccuucuggaugugcagcaacggcucccugcagugccggaucugcaucuga

SEQ ID NO: 69119 - RNA, 1701 nt, Artificial Sequence; identical to SEQ ID NO: 68028
  derived and/or modified CDS sequence (opt1) from hemagglutinin__InfluenzaA__ADI49822

SEQ ID NO: 69120 - RNA, 1701 nt, Artificial Sequence
  derived and/or modified CDS sequence (opt1) from hemagglutinin__InfluenzaA__ADI50027
augaaggccauccuggugguccuccuguacaccuucgccaccgcgaacgccgacacgcugugcaucggcuaccacgccaacaacagcaccgacaccguggacaccgugcucgagaagaacgucacggugacccacuccgugaaccugcuggaggacaagcacaacgggaagcucugcaagcugcgcggcgucgcgccccugcaccucgggaagugcaacaucgccggcuggauccuggggaacccggagugcgagagccuguccaccgccagcuccuggagcuacaucguggagaccuccagcuccgacaacggcacgugcuaccccggcgacuucaucgacuacgaggagcuccgggagcagcugagcuccgugagcuccuucgagcgcuucgagaucuuccccaagaccagcuccuggcccaaccacgacagcaacaagggggucaccgccgccugcccgcacgccggcgcgaaguccuucuacaagaaccugaucuggcucgugaagaaggggaacagcuaccccaagcuguccaagagcuacaucaacgacaagggcaaggaggugcugguccucugggggauccaccaccccagcaccuccgccgaccagcagagccuguaccagaacgccgacgccuacguguucgugggcuccagccgguacuccaagaaguucaagcccgagaucgccauccgcccgaagguccgggaccaggagggccgcaugaaguacuacuggacgcugguggagcccggggacaagaucaccuucgaggcgaccggcaaccucguggucccccgguacgccuucgccauggagcgcaacgccgggagcggcaucaucaucuccgacacccccgugcacgacugcaacacgaccugccagaccccgaagggcgccaucaacaccagccugcccuuccagaacauccaccccaucacgaucgggaagugccccaaguacgugaaguccaccaagcugcggcucgcgaccggccugcgcaacgucccgagcauccagucccgggggcuguucggcgccaucgccggguucaucgagggcggcuggaccgggaugguggacggcugguacgggcaccaccaccagaacgagcagggcagcggguacgccgccgaccucaaguccacgcagaacgcgaucgacgagaucaccaacaaggugaacagcgucaucgagaagaugaacacccaguucaccgccgugggcaaggaguucaaccaccuggagaagcgcaucgagaaccugaacaagaaggucgacgacggcuuccucgacaucuggacguacaacgccgagcugcuggugcuccuggagaacgagcggacccuggacuaccacgacuccaacgugaagaaccucuacgagaagguccgcagccagcugaagaacaacgccaaggagaucgggaacggcugcuucgaguucuaccacaagugcgacaacacgugcauggaguccgugaagaacgggaccuacgacuaccccaaguacagcgaggaggccaagcugaaccgggaggagaucgacggcaucaagcucgaguccacccgcaucuaccagauccuggcgaucuacagcaccguggccagcucccugguccucguggugagccugggggccaucuccuucuggaugugcagcaacggcucccugcagugccggaucugcaucuga

SEQ ID NO: 69121 - RNA, 1701 nt, Artificial Sequence
  derived and/or modified CDS sequence (opt1) from hemagglutinin__InfluenzaA__ADI52834
augaaggccauccuggugguccuccuguacaccuucgccaccgcgaacgccgacacgcugugcaucggcuaccacgccaacaacagcaccgacaccguggacaccgugcucgagaagaacgucacggugacccacuccgugaacauccuggaggacaagcacaacgggaagcugugcaagcuccgcggcgucgcgccccugcaccuggggaagugcaacaucgccggcuggauccucgggaacccggagugcgagagccuguccaccgccagcuccuggagcuacaucguggagaccuccagcuccgacaacggcacgugcuaccccggcgacuucaucgacuacgaggagcugcgggagcagcucagcuccgugagcuccuucgagcgcuucgagaucuuccccaagaccagcuccuggcccaaccacgacagcaacaagggggucaccgccgccugcccgcacgccggcgcgaaguccuucuacaagaaccugaucuggcuggugaagaaggggaacagcuaccccaagcucuccaagagcuacaucaacgacaagggcaaggaggugcugguccugugggggauccaccacccgcccaccagcgccgaccagcagucccucuaccagaacgccgacgccuacguguucgugggcagcucccgguacagcaagaaguucaagcccgagaucgccauccgccccaagguccgggaccaggagggccgcaugaacuacuacuggacgcugguggagcccggggacaagaucaccuucgaggcgaccggcaaccugguggucccccgguacgccuucgccauggagcgcaacgccggguccggcaucaucaucagcgacaccccggugcacgacugcaacacgaccugccagacccccaagggcgccaucaacaccucccuccccuuccagaacauccaccccaucacgaucgggaagugcccgaaguacgucaagagcaccaagcugcggcuggcgaccggccuccgcaacgugcccuccauccagagccgggggcuguucggcgccaucgccggguucaucgagggcggcuggaccgggaugguggacggcugguacggguaccaccaccagaacgagcagggcuccggguacgccgccgaccucaagagcacgcagaacgcgaucgacgagaucaccaacaaggugaacuccgucaucgagaagaugaacacccaguucaccgccgugggcaaggaguucaaccaccuggagaagcgcaucgagaaccugaacaagaaggucgacgacggcuuccuggacaucuggacguacaacgccgagcuccuggugcugcucgagaacgagcggacccuggacuaccacgacagcaacgugaagaaccuguacgagaagguccgcucccagcucaagaacaacgccaaggagguggggaacggcugcuucgaguucuaccacaagugcgacaacacgugcauggagagcgugaagaacgggaccuacgacuaccccaaguacuccgaggaggccaagcugaaccgggaggagaucgacggcgucaagcuggagagcacccgcaucuaccagauccucgcgaucuacuccaccgccgccagcagccuggugcugguggucucccucggggccaucagcuucuggaugugcuccaacggcagccugcagugccggaucugcaucuga

SEQ ID NO: 69122 - RNA, 1701 nt, Artificial Sequence
  derived and/or modified CDS sequence (opt1) from hemagglutinin__InfluenzaA__ADI52835
auggaggccauccuggugguccuccuguacaccuucgccaccgcgaacgccgacacgcugugcaucggcuaccacgccaacaacagcaccgacaccguggacaccgugcucgagaagaacgucacggugacccacuccgugaaccugcuggaggacaagcacaacgggaagcucugcaagcugcgcggcgucgcgccccugcaccucgggaagugcaacaucgccggcuggauccuggggaacccggagugcgagagccuguccaccgccagcuccuggagcuacaucguggagaccuccagcuccgacaacggcacgugcuaccccggcgacuucaucgacuacgaggagcuccgggagcagcugagcuccgugagcuccuucgagcgcuucgagaucuuccccaagaccagcuccuggcccaaccacgacagcaacaagggggucaccgccgccugcccgcacgccggcgcgaaguccuucuacaagaaccugaucuggcucgugaagaaggggaacagcuaccccaagcuguccaagagcuacaucaacgacaagggcaaggaggugcugguccucugggggauccaccacccgcccaccagcgccgaccagcagucccuguaccagaacgccgacgccuacguguucgugggcagcuccaaguacagcaagaaguucaagcccgagaucgccauccggcccaagguccgcgaccaggagggccggaugaacuacuacuggacgcugguggagcccggggacaagaucaccuucgaggcgaccggcaaccucguggucccccgcuacgccuucgccauggagcggaacgccggguccggcaucaucaucagcgacaccccggugcacgacugcaacacgaccugccagacccccaagggcgccaucaacaccucccugcccuuccacaacauccaccccaucacgaucgggaagugcccgaaguacgucaagagcaccaagcugcgccucgcgaccggccugcggaacgugcccuccauccagagccgcgggcuguucggcgccaucgccggguucaucgagggcggcuggaccgggaugguggacggcugguacggguaccaccaccagaacgagcagggcuccggguacgccgccgaccucaagagcacgcagaacgcgaucgacgagaucaccaacaaggugaacuccgucaucgagaagaugaacacccaguucaccgccgugggcaaggaguucaaccaccuggagaagcggaucgagaaccugaacaagaaggucgacgacggcuuccucgacaucuggacguacaacgccgagcugcuggugcuccuggagaacgagcgcacccuggacuaccacgacagcaacgugaagaaccucuacgagaagguccggucccagcugaagaacaacgccaaggagaucgggaacggcugcuucgaguucuaccacaagugcgacaacacgugcauggagagcgugaagaacgggaccuacgacuaccccaaguacuccgaggaggccaagcugaaccgcgaggagaucgacggcgugaagcucgagagcaccaagaucuaccagauccuggcgaucuacuccaccgucgccagcagccuggugcucguggucucccugggggccaucagcuucuggaugugcuccaacggcagccugcagugccggaucugcaucuga

SEQ ID NO: 69123 - RNA, 1701 nt, Artificial Sequence
  derived and/or modified CDS sequence (opt1) from hemagglutinin__InfluenzaA__ADI52836
auggaggccauccuggugguccuccuguacaccuucgccaccgcgaacgccgacacgcugugcaucggcuaccacgccaacaacagcaccgacaccguggacaccgugcucgagaagaacgucacggugacccacuccgugaaccugcuggaggacaagcacaacgggaagcucugcaagcugcgcggcgucgcgccccugcaccucgggaagugcaacaucgccggcuggauccuggggaacccggagugcgagagccuguccaccgccagcuccuggagcuacaucguggagaccuccagcuccgacaacggcacgugcuaccccggcgacuucaucgacuacgaggagcuccgggagcagcugagcuccgugagcuccuucgagcgcuucgagaucuuccccaagaccagcuccuggcccaaccacgacagcaacaagggggucaccgccgccugcccgcacgccggcgcgaaguccuucuacaagaaccugaucuggcucgugaagaaggagaacagcuaccccaagcuguccaagagcuacaucaacgacaaggggaaggaggugcugguccucuggggcauccaccaccccagcaccuccgccgaccagcagcggcuguaccagaacgccgacgccuacguguucguggggagcuccaaguacagcaagaaguucaagcccgagaucgccauccgcccgaagguccgggaccaggagggccgcaugaacuacuacuggacgcugguggagcccggcgacaagaucaccuucgaggcgaccgggaaccucguggucccccgguacgccuucgccauggagcgcaacgccggcuccgggaucaucaucagcgacacccccgugcacgacugcaacacgaccugccagaccccgaagggcgccaucaacaccucccugcccuuccacaacauccaccccaucacgaucggcaagugccccaaguacgucaagagcaccaagcugcggcucgcgaccgggcugcgcaacgugccguccauccagagccggggccuguucggggccaucgccggcuucaucgagggcggguggaccggcaugguggacgggugguacggcuaccaccaccagaacgagcagggguccggcuacgccgccgaccucaagagcacgcagaacgcgaucgacgagaucaccaacaaggugaacuccgucaucgagaagaugaacacccaguucaccgccguggggaaggaguucaaccaccuggagaagcgcaucgagaaccugaacaagaaggucgacgacggcuuccucgacaucuggacguacaacgccgagcugcuggugcuccuggagaacgagcggacccuggacuaccacgacagcaacgugaagaaccucuacgagaagguccgcucccagcugaagaacaacgccaaggagaucggcaacgggugcuucgaguucuaccacaagugcgacaacacgugcauggagagcgugaagaacggcaccuacgacuaccccaaguacuccgaggaggccaagcugaaccgggaggagaucgacggggugaagcucgagagcaccaagaucuaccagauccuggcgaucuacuccaccgucgccagcagccuggugcucguggucucccugggcgccaucagcuucuggaugugcuccaacgggagccugcagugccgcaucugcaucuga

SEQ ID NO: 69124 - RNA, 1701 nt, Artificial Sequence
  derived and/or modified CDS sequence (opt1) from hemagglutinin__InfluenzaA__ADI52837
auggaggccauccuggugguccuccuguacaccuucgccaccgcgaacgccgacacgcugugcaucggcuaccacgccaacaacagcaccgacaccguggacaccgugcucgagaagaacgucacggugacccacuccgugaaccugcuggaggucaagcacaacgggaagcucugcaagcugcgcggcguggcgccccugcaccucgggaagugcaacaucgccggcuggauccuggggaacccggagugcgagagccuguccaccgccagcuccuggagcuacaucguggagaccuccagcuccgacaacggcacgugcuaccccggcgacuucaucgacuacgaggagcuccgggagcagcugagcuccgucagcuccuucgagcgcuucgagaucuuccccaagaccagcuccuggcccaaccacgacagcaacaagggggugaccgccgccugcccgcacgccggcgcgaaguccuucuacaagaaccugaucuggcucgugaagaaggggaacagcuaccccaagcuguccaagagcuacaucaacgacaagggcaaggagguccuggugcucugggggauccaccaccccagcaccuccgccgaccagcagagccuguaccagaacgccgacgccuacguguucgucggcuccagcaaguacuccaagaaguucaagcccgagaucgccauccggccgaaggugcgcgaccaggagggccggaugaacuacuacuggacgcugguggagcccggggacaagaucaccuucgaggcgaacggcaaccucgucgugccccgcuacgccuucgccauggagcggaacgccgggagcggcaucaucaucuccgacacccccgugcacgacugcaacaccacgugccagaccccgaagggcgccaucaacaccagccugcccuuccacaacauccaccccaucaccaucgggaagugccccaaguacgucaaguccacgaagcugcgccucgcgaccggccugcggaacgugccgagcauccagucccgcgggcuguucggcgccaucgccggguucaucgagggcggcuggaccgggaugguggacggcugguacggguaccaccaccagaacgagcagggcagcggguacgccgccgaccucaaguccacccagaacgcgaucgacgagaucacgaacaaggucaacagcgugaucgagaagaugaacacccaguucaccgccgucggcaaggaguucaaccaccuggagaagcggaucgagaaccugaacaagaagguggacgacggcuuccucgacaucuggaccuacaacgccgagcugcuggugcuccuggagaacgagcgcacgcuggacuaccacgacuccaacgucaagaaccucuacgagaaggugcggagccagcugaagaacaacgccaaggagaucgggaacggcugcuucgaguucuaccacaagugcgacaacacgugcauggaguccgugaagaacgggaccuacgacuaccccaaguacagcgaggaggccaagcugaaccgcgaggagaucgacggcgucaagcucgaguccaccaagaucuaccagauccuggcgaucuacagcaccguggccagcucccuggugcucgucgugagccugggggccaucuccuucuggaugugcagcaacggcucccugcagugccggaucugcaucuga

SEQ ID NO: 69125 - RNA, 1701 nt, Artificial Sequence; identical to SEQ ID NO: 67491
  derived and/or modified CDS sequence (opt1) from hemagglutinin__InfluenzaA__ADI72915

SEQ ID NO: 69126 - RNA, 1701 nt, Artificial Sequence; identical to SEQ ID NO: 67491
  derived and/or modified CDS sequence (opt1) from hemagglutinin__InfluenzaA__ADI72916

SEQ ID NO: 69127 - RNA, 1701 nt, Artificial Sequence; identical to SEQ ID NO: 67491
  derived and/or modified CDS sequence (opt1) from hemagglutinin__InfluenzaA__ADI72917

SEQ ID NO: 69128 - RNA, 1701 nt, Artificial Sequence
  derived and/or modified CDS sequence (opt1) from hemagglutinin__InfluenzaA__ADI72918
augaaggccauccuggugguccuccuguacaccuucgccaccgcgaacgccgacacgcugugcaucggcuaccacgccaacaacagcaccgacaccguggacaccgugcucgagaagaacgucacggugacccacuccgugaaccugcuggaggacaagcacaacgggaagcucugcaagcugcgcggcgucgcgccccugcaccucgggaagugcaacaucgccggcuggauccuggggaacccggagugcgagagccuguccaccgcgagcuccuggagcuacaucguggagaccuccagcuccgacaacggcacgugcuaccccggcgacuucaucgacuacgaggagcuccgggagcagcugagcuccgugagcuccuucgagcgcuucgagaucuuccccaagaccagcuccuggcccaaccacgacccgaacaagggggucaccgccgccugcccccacgccggcgccaagagcuucuacaagaaccugaucuggcucgugaagaaggggaacuccuaccccaagcugagcaaguccuacaucaacgaccggggcaaggaggugcugguccucugggggauccaccaccccagcaccagcgccgaccagcagucccuguaccagaacgccgacgccuacguguucgugggcacgagccgcuacuccaagaaguucaagccggagaucgccauccggcccaagguccgcgaccaggagggccggaugaacuacuacuggacccugguggagcccggggacaagaucaccuucgaggcgaccggcaaccucguggucccccgcuacgccuucgccauggagcggaacgccgggagcggcaucaucaucuccgacacgccggugcacgacugcaacacgaccugccagacccccaagggcgccaucaacaccagccugcccuuccagaacauccaccccaucaccaucgggaagugcccgaaguacgugaaguccaccaagcugcgccucgcgaccggccugcggaacguccccagcauccagucccgcgggcuguucggcgccaucgccggguucaucgagggcggcuggacggggaugguggacggcugguacggguaccaccaccagaacgagcagggcagcggguacgccgccgaccucaaguccacccagaacgcgaucgacgagaucaccaacaaggugaacagcgucaucgagaagaugaacacccaguucacggccgugggcaaggaguucaaccaccuggagaagcggaucgagaaccugaacaagaaggucgacgacggcuuccucgacaucuggaccuacaacgccgagcugcuggugcuccuggagaacgagcgcacccuggacuaccacgacuccaacgugaagaagcucuacgagaagguccggagccagcugaagaacaacgccaaggagaucgggaacggcugcuucgaguucuaccacaagugcgacaacacgugcauggaguccgugaagaacgggaccuacgacuaccccaaguacagcgaggaggccaagcugaaccgcgaggagaucgacggcgugaagcucgaguccacccggaucuaccagauccuggcgaucuacagcaccgucgccuccagccuggugcucguggucagccugggggccaucuccuucuggaugugcagcaacggcucccugcagugccgcaucugcaucuga

SEQ ID NO: 69129 - RNA, 1701 nt, Artificial Sequence; identical to SEQ ID NO: 67491
  derived and/or modified CDS sequence (opt1) from hemagglutinin__InfluenzaA__ADI72919

SEQ ID NO: 69130 - RNA, 1701 nt, Artificial Sequence; identical to SEQ ID NO: 67491
  derived and/or modified CDS sequence (opt1) from hemagglutinin__InfluenzaA__ADI72920

SEQ ID NO: 69131 - RNA, 1701 nt, Artificial Sequence
  derived and/or modified CDS sequence (opt1) from hemagglutinin__InfluenzaA__ADI72921
augaaggccauccuggugguccuccuguacaccuucgccaccgcgaacgccgacacgcugugcaucggcuaccacgccaacaacagcaccgacaccguggacaccgugcucgagaagaacgucacggugacccacuccgugaaccugcuggaggacaagcacaacgggaagcucugcaagcugcgcggcgucgcgccccugcaccucgggaagugcaacaucgccggcuggauccuggggaacccggagugcgagagccuguccaccgcgagcuccuggagcuacaucguggagaccuccagcuccgacaacggcacgugcuaccccggcgacuucaucgacuacgaggagcuccgggagcagcugagcuccgugagcuccuucgagcgcuucgagaucuuccccaagaccagcuccuggcccaaccacgacccgaacaagggggucaccgccgccugcccccacgccggcgccaagagcuucuacaagaaccugaucuggcucgugaagaaggggaacuccuaccccaagcugagcaaguccuacaucaacgacaagggcaaggaggugcugguccucugggggauccaccaccccagcaccagcgccgaccagcagucccuguaccagaacgccgacgccuacguguucgugggcacgagccgguacuccaagaaguucaagccggagaucgccauccgccccaagguccgggaccaggagggccgcaugaacuacuacuggacccugguggagcccggggacaagaucaccuucgaggcgaccggcaaccucguggucccccgguacgccuucgccauggagcgcaacgccgggagcggcaucaucaucuccgacacgccggugcacgacugcaacacgaccugccagacccccaagggcgccaucaacaccagccugcccuuccagaacauccaccccaucaccaucgggaagugcccgaaguacgugaaguccaccaagcugcggcucgcgaccggccugcgcaacguccccagcauccagucccgggggcuguucggcgccaucgccggguucaucgagggcggcuggacggggaugguggacggcugguacggguaccaccaccagaacgagcagggcagcggguacgccgccgaccucaaguccacccagaacgcgcuggacgagaucaccaacaaggugaacagcgucaucgagaagaugaacacccaguucacggccgugggcaaggaguucaaccaccuggagaagcgcaucgagaaccucaacaagaaggucgacgacggcuuccuggacaucuggaccuacaacgccgagcugcucgugcugcuggagaacgagcggacccucgacuaccacgacuccaacgugaagaaccuguacgagaagguccgcagccagcugaagaacaacgccaaggagaucgggaacggcugcuucgaguucuaccacaagugcgacaacacgugcauggaguccgugaagaacgggaccuacgacuaccccaaguacagcgaggaggccaagcucaaccgggaggagaucgacggcgugaagcuggaguccacccgcaucuaccagauccuggcgaucuacagcaccgucgccuccagccucgugcugguggucagccugggggccaucuccuucuggaugugcagcaacggcucccuccagugccggaucugcaucuga

SEQ ID NO: 69132 - RNA, 1701 nt, Artificial Sequence; identical to SEQ ID NO: 66693
  derived and/or modified CDS sequence (opt1) from hemagglutinin__InfluenzaA__ADI72922

SEQ ID NO: 69133 - RNA, 1701 nt, Artificial Sequence
  derived and/or modified CDS sequence (opt1) from hemagglutinin__InfluenzaA__ADI72923
augaaggccauccuggugguccuccuguacaccuucgccaccagcaacgcggacacgcugugcaucggcuaccacgccaacaacuccaccgacaccguggacaccgugcucgagaagaacgucacggugacccacagcgugaaccugcuggaggacaagcacaacgggaagcucugcaagcugcgcggcgucgcgccccugcaccucgggaagugcaacaucgccggcuggauccuggggaacccggagugcgagucccugagcaccgccuccagcugguccuacaucguggagaccagcuccagcgacaacggcacgugcuaccccggcgacuucaucgacuacgaggagcuccgggagcagcuguccagcguguccagcuucgagcgcuucgagaucuuccccaagaccuccagcuggcccaaccacgacccgaacaagggggucaccgccgccugcccccacgccggcgccaaguccuucuacaagaaccugaucuggcucgugaagaaggggaacagcuaccccaagcuguccaagagcuacaucaacgacaagggcaaggaggugcugguccucugggggauccaccaccccagcaccuccgcggaccagcagagccuguaccagaacgccgacgccuacguguucgugggcacgucccgguacagcaagaaguucaagccggagaucgccauccgccccaagguccgggaccaggagggccgcaugaacuacuacuggacccugguggagcccggggacaagaucaccuucgaggccaccggcaaccucguggucccccgguacgcguucgccauggagcgcaacgccgggccgggcaucaucaucuccgacacgcccgugcacgacugcaacacgaccugccagacccccaagggcgccaucaacaccagccugcccuuccagaacauccacccgaucaccaucgggaagugccccaaguacgugaaguccaccaagcugcggcucgccaccggccugcgcaacguccccagcauccagucccgggggcuguucggcgcgaucgccggguucaucgagggcggcuggacggggaugguggacggcugguacggguaccaccaccagaacgagcagggcagcggguacgccgccgaccucaaguccacccagaacgccaucgacgagaucaccaacaaggugaacagcgucaucgagaagaugaacacccaguucacggcggugggcaaggaguucaaccaccuggagaagcgcaucgagaaccugaacaagaaggucgacgacggcuuccucgacaucuggaccuacaacgccgagcugcuggugcuccuggagaacgagcggacccuggacuaccacgacuccaacgugaagaaccucuacgagaagguccgcagccagcugaagaacaacgccaaggagaucgggaacggcugcuucgaguucuaccacaagugcgacaacacgugcauggaguccgugaagaacgggaccuacgacuaccccaaguacagcgaggaggccaagcugaaccgggaggagaucgacggcgugaagcucgaguccacccgcaucuaccagauccuggccaucuacagcaccgucgcguccagccuggugcucguggucagccugggggccaucuccuucuggaugugcagcaacggcucccugcagugccggaucugcaucuga

SEQ ID NO: 69134 - RNA, 1701 nt, Artificial Sequence; identical to SEQ ID NO: 67491
  derived and/or modified CDS sequence (opt1) from hemagglutinin__InfluenzaA__ADI72924

SEQ ID NO: 69135 - RNA, 1701 nt, Artificial Sequence; identical to SEQ ID NO: 66693
  derived and/or modified CDS sequence (opt1) from hemagglutinin__InfluenzaA__ADI72925

SEQ ID NO: 69136 - RNA, 1701 nt, Artificial Sequence
  derived and/or modified CDS sequence (opt1) from hemagglutinin__InfluenzaA__ADI72926
augaaggccauccuggugguccuccuguacaccuucgccaccgcgaacgccgacacgcugugcaucggcuaccacgccaacaacagcaccgacaccguggacaccgugcucgagaagaacgucacggugacccacuccgugaaccugcuggaggacaagcacaacgggaagcucugcaagcugcgcggcgucgcgccccugcaccucgggaagugcaacaucgccggcuggauccuggggaacccggagugcgagagccuguccaccgcgagcuccuggagcuacaucguggagaccuccagcuccgacaacggcacgugcuaccccggcgacuucaucgacuacgaggagcuccgggagcagcugagcuccgugagcuccuucgagcgcuucgagaucuuccccaagaccagcuccuggcccaaccacgacccgaacaagggggucaccgccgccugcccccacgccggcgccaagagcuucuacaagaaccugaucuggcucgugaagaaggggaacuccuaccccaagcugagcaaguccuacaucaacgacaagggcaaggaggugcugguccucugggggauccaccaccccagcaccagcgccgaccagcagucccuguaccagaacgccgacgccuacguguucgugggcacgagcggcuacuccaagaaguucaagccggagaucgccauccggcccaagguccgcgaccaggaggggcggaugaacuacuacuggacccugguggagcccggcgacaagaucaccuucgaggcgaccgggaaccucguggucccccgcuacgccuucgccauggagcggaacgccggcagcggcaucaucaucuccgacacgccggugcacgacugcaacacgaccugccagacccccaagggggccaucaacaccagccugcccuuccagaacauccaccccaucaccaucggcaagugcccgaaguacgugaaguccaccaagcugcgccucgcgaccgggcugcggaacguccccagcauccagucccgcggccuguucggggccaucgccggcuucaucgagggcggguggacgggcaugguggacgggugguacggcuaccaccaccagaacgagcaggggagcggcuacgccgccgaccucaaguccacccagaacgcgaucgacgagaucaccaacaaggugaacagcgucaucgagaagaugaacacccaguucacggccgugggcaaggaguucaaccaccuggagaagcggaucgagaaccugaacaagaaggucgacgacggguuccucgacaucuggaccuacaacgccgagcugcuggugcuccuggagaacgagcgcacccuggacuaccacgacuccaacgugaagaaccucuacgagaagguccggagccagcugaagaacaacgccaaggagaucggcaacgggugcuucgaguucuaccacaagugcgacaacacgugcauggaguccgugaagaacggcaccuacgacuaccccaaguacagcgaggaggccaagcugaaccgcgaggagaucgacggggugaagcucgaguccacccggaucuaccagauccuggcgaucuacagcaccgucgccuccagccuggugcucguggucagccugggcgccaucuccuucuggaugugcagcaacggcucccugcagugccgcaucugcaucuga

SEQ ID NO: 69137 - RNA, 1701 nt, Artificial Sequence
  derived and/or modified CDS sequence (opt1) from hemagglutinin__InfluenzaA__ADI72927
augaaggccauccuggugguccuccuguacaccuucgccaccgcgaacgccgacacgcugugcaucggcuaccacgccaacaacagcaccgacaccguggacaccgugcucgagaagaacgucacggugacccacuccgugaaccugcuggaggacaagcacaacgggaagcucugcaagcugcgcggcgucgcgccccugcaccucgggaagugcaacaucgccggcuggauccuggggaacccggagugcgagagccuguccaccgcgagcuccuggagcuacaucguggagaccuccagcuccgacaacggcacgugcuaccccggcgacuucaucgacuacgaggagcuccgggagcagcugagcuccgugagcuccuucgagcgcuucgagaucuuccccaagaccagcuccuggcccaaccacgacccgaacaagggggucaccgccgccugcccccacgccggcgccaagagcuucuacaagaaccugaucuggcucgugaagaaggggaacuccuaccccaagcugagcaaguccuacaucaacgacaagggcaaggaggugcugguccucugggggauccaccaccccagcaccagcgccgaccagcagucccuguaccagaacgccgacgccuacguguucgugggcacgagccgguacuccaagaaguucaagccggagaucgccauccgccccaagguccgggaccaggagggccgcaugaacuacuacuggacccugguggagcccggggacaagaucaccuucgaggcgaccggcaaccucguggucccccgguacgccuucgccauggagcgcaacgccgggagcggcaucaucacguccgacaccccggugcacgacugcaacacgaccugccagacccccaagggcgccaucaacaccagccugcccuuccagaacauccaccccaucaccaucgggaagugcccgaaguacgugaaguccaccaagcugcggcucgcgacgggccugcgcaacguccccagcauccagucccgggggcuguucggcgccaucgccggguucaucgagggcggcuggaccgggaugguggacggcugguacggguaccaccaccagaacgagcagggcagcggguacgccgccgaccucaaguccacccagaacgcgaucgacgagaucaccaacaaggugaacagcgucaucgagaagaugaacacgcaguucaccgccgugggcaaggaguucaaccaccuggagaagcgcaucgagaaccugaacaagaaggucgacgacggcuuccucgacaucuggaccuacaacgccgagcugcuggugcuccuggagaacgagcggacccuggacuaccacgacuccaacgugaagaaccucuacgagaagguccgcagccagcugaagaacaacgccaaggagaucgggaacggcugcuucgaguucuaccacaagugcgacaacacgugcauggaguccgugaagaacgggaccuacgacuaccccaaguacagcgaggaggccaagcugaaccgggaggagaucgacggcgugaagcucgaguccacccgcaucuaccagauccuggcgaucuacagcaccgucgccuccagccuggugcucguggucagccugggggccaucuccuucuggaugugcagcaacggcucccugcagugccggaucugcaucuga

SEQ ID NO: 69138 - RNA, 1701 nt, Artificial Sequence
  derived and/or modified CDS sequence (opt1) from hemagglutinin__InfluenzaA__ADI72928
augaaggccauccuggugguccuccuguacaccuucgccaccgcgaacgccgacacgcugugcaucggcuaccacgccaacaacagcaccgacaccguggacaccauccucgagaagaacgugacggucacccacuccgugaaccugcuggaggacaagcacaacgggaagcucugcaagcugcgcggcguggcgccccugcaccucgggaagugcaacaucgccggcuggauccuggggaacccggagugcgagagccuguccaccgcgagcuccuggagcuacaucgucgagaccuccagcuccgacaacggcacgugcuaccccggcgacuucaucgacuacgaggagcuccgggagcagcugagcuccgugagcuccuucgagcgcuucgagaucuuccccaagaccagcuccuggcccaaccacgacccgaacaagggggugaccgccgccugcccccacgccggcgccaagagcuucuacaagaaccugaucuggcucgucaagaaggggaacuccuaccccaagcugagcaaguccuacaucaacgacaagggcaaggaggugcuggugcucugggggauccaccaccccagcaccagcgccgaccagcagucccuguaccagaacgccgacgccuacgucuucgugggcacgagccgguacuccaagaaguucaagccggagaucgccauccgccccaaggugcgggaccaggagggccgcaugaacuacuacuggacccuggucgagcccggggacaagaucaccuucgaggcgaccggcaaccucguggugccccgguacgccuucgccauggagcgcaacgccgggagcggcaucaucaucuccgacacgccgguccacgacugcaacacgaccugccagacccccaagggcgccaucaacaccagccugcccuuccagaacauccaccccaucaccaucgggaagugcccgaaguacgugaaguccaccaagcugcggcucgcgaccggccugcgcaacgugcccagcauccagucccgggggcuguucggcgccaucgccggguucaucgagggcggcuggacggggauggucgacggcugguacggguaccaccaccagaacgagcagggcagcggguacgccgccgaccucaaguccacccagaacgcgaucgacgagaucaccaacaaggugaacagcgugaucgagaagaugaacacccaguucacggccgucggcaaggaguucaaccaccuggagaagcgcaucgagaaccugaacaagaagguggacgacggcuuccucgacaucuggaccuacaacgccgagcugcugguccuccuggagaacgagcggacccuggacuaccacgacuccaacgugaagaaccucuacgagaaggugcgcagccagcugaagaacaacgccaaggagaucgggaacggcugcuucgaguucuaccacaagugcgacaacacgugcauggaguccgucaagaacgggaccuacgacuaccccaaguacagcgaggaggccaagcugaaccggaaggagaucgacggcgugaagcucgaguccacccgcaucuaccagauccuggcgaucuacagcaccguggccuccagccugguccucguggugagccugggggccaucuccuucuggaugugcagcaacggcucccugcagugccggaucugcaucuga

SEQ ID NO: 69139 - RNA, 1701 nt, Artificial Sequence; identical to SEQ ID NO: 66693
  derived and/or modified CDS sequence (opt1) from hemagglutinin__InfluenzaA__ADI72929

SEQ ID NO: 69140 - RNA, 1701 nt, Artificial Sequence; identical to SEQ ID NO: 66693
  derived and/or modified CDS sequence (opt1) from hemagglutinin__InfluenzaA__ADI72930

SEQ ID NO: 69141 - RNA, 1701 nt, Artificial Sequence
  derived and/or modified CDS sequence (opt1) from hemagglutinin__InfluenzaA__ADI72931
augaaggccauccuggugguccuccuguacaccuucgccaccgcgaacgccgacacgcugugcaucggcuaccacgccaacaacagcaccgacaccguggacaccgugcucgagaagaacgucacggugacccacuccgugaaccugcuggaggacaagcacaacgggaagcucugcaagcugcgcggcgucgcgccccugcaccucgggaagugcaacaucgccggcuggauccuggggaacccggagugcgagagccuguccaccgcgagcuccuggagcuacaucguggagaccuccagcuccgacaacggcacgugcuaccccggcgacuucaucgacuacgaggagcuccgggagcagcugagcuccgugagcuccuucgagcgcuucgagaucuuccccaagaccagcuccuggcccaaccacgacccgaacaagggggucaccgccgccugcccccacgccggcgccaagagcuucuacaagaaccugaucuggcucgugaagaaggggaacuccuaccccaagcugagcaaguccuacaucaacgacaagggcaaggaggugcugguccucugggggauccaccaccccagcaccagcgccgaccagcagucccuguaccagaacgccgacgccuacguguucgugggcacgagccgguacuccaagaaguucaagccggagaucgccauccgccccaagguccgggaccaggagggccgcaugaacuacuacuggacccugguggagcccggggacaagaucaccuucgaggcgaccggcaaccucguggucccccgguacgccuucgccauggagcgcaacgccgggagcggcaucaucaucuccgacacgccggugcacgacugcaacacgaccugccagacccccaagggcgccaucaacaccagccugcccuuccagaacauccaccccaucaccaucgggaagugcccgaaguacgugaaguccaccaagcugcggcucgcgaccggccugcgcaacguccccagcauccagucccgggggcuguucggcgccaucgccggguucaucgagggcggcuggacggggaugguggacggcugguacggguaccaccaccagaacgagcagggcagcggguacgccgccgaccucaaguccacccagaacgcgaucgacgagaucaccaacaaggugaacagcgucaucgagaagaugaacacccaguucacggccgugggcaaggaguucaaccaccuggagaagcgcaucgagaaccugaacaagaaggucgacgacggcuuccucgacaucuggaccuacaacgccgagcugcuggugcuccuggagaacgagcggacccuggacuaccacgacuccaacgugaagaaccucuacgagaagguccgcagccagcugaagaacaacgccaaggagaucgggaacggcugcuucgaguucuaccacaagugcgacaacacgugcauggaguccgugaagaacgggaccuacgacuaccccaaguacagcgaggaggccaagcugaaccgggaggagaucgacggcaucaagcucgaguccacccgcaucuaccagauccuggcgaucuacagcaccguggccuccagccugguccucguggugagccugggggccaucuccuucuggaugugcagcaacggcucccugcagugccggaucugcaucuga

SEQ ID NO: 69142 - RNA, 1701 nt, Artificial Sequence; identical to SEQ ID NO: 68349
  derived and/or modified CDS sequence (opt1) from hemagglutinin__InfluenzaA__ADI72932

SEQ ID NO: 69143 - RNA, 1698 nt, Artificial Sequence
  derived and/or modified CDS sequence (opt1) from hemagglutinin__InfluenzaA__ADI75818
augaaggugaagcugcucguccugcugugcaccuucaccgccacguacgccgacaccaucugcaucggcuaccacgcgaacaacagcaccgacaccguggacacggugcucgagaagaacgucaccgugacccacuccgugaaccugcuggagaacagccacaacgggaagcucugccugcugaagggcaucgcgccccuccagcuggggaacugcuccgucgccggcuggauccuggggaacccggagugcgagcuccugaucagcaaggaguccuggagcuacaucguggagaagcccaaccccgagaacgggaccugcuaccccggccacuucgccgacuacgaggagcugcgcgagcagcucuccagcguguccagcuucgagcgguucgagaucuucccgaaggaguccagcuggcccaaccacacggucaccgggguguccgccagcugcucccacaacggcgagagcuccuucuacaagaaccugcuguggcucaccgagaagaacgggcuguaccccaaccugagcaaguccuacgccaacaacaaggagaaggaggugcucguccuguggggcgugcaccacccgcccagcaucagcgaccagaagacccuguaccacacggagaacgccuacguguccgucgugagcucccacuacagccgcaaguucacccccgagaucgccaagcggcccaaggugcgcgaccaggaggggcggaucaacuacuacuggacccuccuggagcccggcgacaccaucaucuucgaggccaacggcaaccugaucgcgccgcgcuacgccuucgcccucucccggggguucggcagcgggaucaucaacuccaacgcccccauggacaagugcgacgccaagugccagacgccccagggcgcgaucaacagcucccugcccuuccagaacguccacccggugaccaucggcgagugccccaaguacgugcgcagcgccaagcugcggauggucaccgggcuccgcaacauccccuccauccagagccggggccuguucggggccaucgccggcuucaucgagggcggcuggaccggcaugguggacgggugguacggcuaccaccaccagaacgagcagggguccggcuacgccgcggaccagaaguccacgcagaacgccaucaacgggaucaccaacaaggugaacagcgucaucgagaagaugaacacccaguucaccgccgugggcaaggaguucaacaagcuggagcgccggauggagaaccucaacaagaaggucgacgacggcuucaucgacaucuggacguacaacgccgagcugcuggugcuccuggagaacgagcgcacccuggacuuccacgacagcaacgugaagaaccucuacgagaaggucaagaaccagcugaagaacaacgccaaggagaucgggaacggcugcuucgaguucuaccacaagugcaacgacgagugcauggaguccgugaagaacgggaccuacgacuaccccaaguacagcgaggaguccaagcugaaccgggagaagaucgacggcgugaagcucgagagcaugggggucuaccagauccuggcgaucuacagcaccguggccuccagccuggugcuccuggucucccugggcgccaucagcuucuggaugugcuccaacggcagccuccagugccgcaucugcaucuga

SEQ ID NO: 69144 - RNA, 1698 nt, Artificial Sequence
  derived and/or modified CDS sequence (opt1) from hemagglutinin__InfluenzaA__ADI75851
augaaggugaagcugcucguccugcugugcaccuucaccgccacguacgccgacaccaucugcaucggcuaccacgcgaacaacagcaccgacaccguggacacggugcucgagaagaacgucaccgugacccacuccgugaaccugcuggagaacagccacaacgggaagcucugccugcugaagggcaucgcgccccuccagcuggggaacugcuccgucgccggcuggauccuggggaacccggagugcggccuccugaucagcaaggaguccuggagcuacaucguggagaagcccaaccccgagaacgggaccugcuaccccgggcacuucgccgacuacgaggagcugcgcgagcagcucuccagcguguccagcuucgagcgguucgagaucuucccgaaggaguccagcuggcccaaccacacggucaccggcguguccgccagcugcucccacaacggggagagcuccuucuaccgcaaccugcuguggcucaccggcaagaacgggcuguaccccaaccugagcaaguccuacgccaacaacaaggagaaggaggugcucguccuguggggcgugcaccacccgcccaacaucguggaccagaagacccuguaccggacggagaacgccuacgucagcguggugagcucccacuacagccgcaaguucacccccgagaucgccaagcggcccaagguccgcgaccaggagggccggaucaacuacuacuggacccuccuggagcccggggacaccaucaucuucgaggccaacggcaaccugaucgcgccgcgcuacgccuucgcccucucccggggguucggcagcggcaucaucaacuccaacgcccccauggggaagugcgacgccaagugccagacgccccagggcgcgaucaacagcucccugcccuuccagaacgugcacccggugaccaucggggagugccccaaguacguccgcagcgccaagcugcggauggugaccggccuccgcaacauccccuccauccagagccgggggcuguucggcgccaucgccggcuucaucgagggcggcuggaccgggaugguggacggcugguacggguaccaccaccagaacgagcagggcuccggcuacgccgcggaccagaaguccacgcagaacgccaucaacgggaucaccaacaaggucaacagcgugaucgagaagaugaacacccaguucaccgccgucggcaaggaguucaacaagcuggagcgccggauggagaaccucaacaagaagguggacgacggguucaucgacaucuggacguacaacgccgagcugcuggugcuccuggagaacgagcgcacccuggacuuccacgacagcaacgucaagaaccucuacgagaaggugaagucccagcugaagaacaacgccaaggagaucggcaacgggugcuucgaguucuaccacaagugcaacgacgagugcauggagagcgugaagaacggcaccuacgacuaccccaaguacuccgaggagagcaagcugaaccgggagaagaucgacggcgucaagcucgaguccauggggguguaccagauccuggcgaucuacagcaccguggccagcucccugguccuccuggugagccugggcgccaucuccuucuggaugugcagcaacgggucccuccagugccgcaucugcaucuga

SEQ ID NO: 69145 - RNA, 1701 nt, Artificial Sequence; identical to SEQ ID NO: 66458
  derived and/or modified CDS sequence (opt1) from hemagglutinin__InfluenzaA__ADI75884

SEQ ID NO: 69146 - RNA, 1701 nt, Artificial Sequence; identical to SEQ ID NO: 66458
  derived and/or modified CDS sequence (opt1) from hemagglutinin__InfluenzaA__ADI75917

SEQ ID NO: 69147 - RNA, 1698 nt, Artificial Sequence
  derived and/or modified CDS sequence (opt1) from hemagglutinin__InfluenzaA__ADI77349
augaaggugaagcugcucguccugcugugcaccuucaccgccacguacgccgacaccaucugcaucggcuaccacgcgaacaacagcaccgacaccguggacacggugcucgagaagaacgucaccgugacccacuccgugaaccugcuggagaacagccacaacgggaagcucugccugcugaagggcaucgcgccccuccagcuggggaacugcuccgucgccggcuggauccuggggaacccggagugcgagcuccugaucagcaaggaguccuggagcuacaucguggagaagcccaaccccgagaacgggaccugcuaccccggccacuucgccgacuacgaggagcugcgcgagcagcucuccagcguguccagcuucgagcgguucgagaucuucccgaaggaguccagcuggcccaaccacacggucaccgggguguccgccagcugcucccacaacggcgagaacagcuucuaccgcaaccugcuguggcucaccgggaagaacggccuguaccccaaccuguccaagagcuacgccaacaacaaggagaaggaggugcucauccuguggggcguccaccacccgcccaacauggccgaccagaagacccuguaccacacggagaacgccuacguguccguggucagcagccacuacucccggaaguucacccccgagaucgccaagcgccccaaggugcgggaccaggagggccgcaucaacuacuacuggacccuccuggagcccggcgacaccaucaucuucgaggcgaacgggaaccugaucgccccgcgguacgccuucgcccucagccgcggcuucggguccggcaucaucaacagcaacgcccccauggacaagugcgacacgaagugccagacgccccagggcgcgaucaacuccagccugcccuuccagaacgugcacccggucaccaucggggagugccccaaguacgugcgguccgccaagcugcgcauggugaccggccuccggaacauccccagcauccagucccgcgggcuguucggcgccaucgccggguucaucgagggcggcuggaccgggauggucgacggcugguacggguaccaccaccagaacgagcagggcagcggguacgccgcggaccagaaguccacccagaacgccaucaacggcaucaccaacaaggugaacagcgugaucgagaagaugaacacccaguucacggccgucggcaaggaguucaacaagcuggagcggcgcauggagaaccucaacaagaagguggacgacggguucaucgacaucuggaccuacaacgccgagcugcugguccuccuggagaacgagcggacccuggacuuccacgacuccaacgugaagaaccucuacgagaaggucaagagccagcugaagaacaacgccaaggagaucggcaacgggugcuucgaguucuaccacaagugcaacgacgagugcauggaguccgugaagaacggcaccuacgacuaccccaaguacagcgaggaguccaagcugaaccgcgagaagaucgacggggugaagcucgagagcaugggcguguaccagauccuggcgaucuacuccacggucgccagcagccuggugcuccuggugucccugggcgccaucagcuucuggaugugcuccaacgggagccuccagugccggaucugcaucuga

SEQ ID NO: 69148 - RNA, 1701 nt, Artificial Sequence; identical to SEQ ID NO: 66693
  derived and/or modified CDS sequence (opt1) from hemagglutinin__InfluenzaA__ADI77360

SEQ ID NO: 69149 - RNA, 1701 nt, Artificial Sequence
  derived and/or modified CDS sequence (opt1) from hemagglutinin__InfluenzaA__ADI99498
augaagaccauccuggugguccuccuguacaccuucgccacggccaacgcggacacccugugcaucggcuaccacgccaacaacagcaccgacaccguggacacggugcucgagaagaacgucaccgugacccacuccgugaaccugcuggaggacaagcacaacgggaagcucugcaagcugcgcggcgucgcgccccugcaccucgggaagugcaacaucgccggcuggauccuggggaacccggagugcgagagccuguccaccgccagcuccuggagcuacaucguggagacguccagcuccgacaacgggaccugcuaccccggcgacuucaucgacuacgaggagcuccgggagcagcugagcuccgugagcuccuucgagcgcuucgagaucuuccccaagaccagcuccuggcccaaccacgacagcaacaagggcgucaccgccgccugcccgcacgccggcgccaaguccuucuacaagaaccugaucuggcucgugaagaaggggaacagcuaccccaagcugaacaaguccuacaucaacgacaagggcaaggaggugcugguccucugggggauccaccaccccagcacgagcgcggaccagcagucccuguaccagaacgccgacgccuacguguucgugggcaccagccgguacuccaagaaguucaagcccgagaucgccauccgcccgaagguccggggccaggaggggcgcaugaacuacuacuggacccuggugaagcccggcgacaagaucaccuucgaggccacggggaaccucguggucccccgguacgcguucgccauggagcgcaacgccggcagcggcaucaucaucuccgacacccccgugcacgacugcaacacgaccugccagaccccgaagggggccaucaacaccagccugcccuuccagaacauccaccccaucaccaucggcaagugccccaaguacgugaaguccaccaagcugcggcucgccacggggcugcgcaacgucccgagcauccagucccggggccuguucggggcgaucgccggcuucaucgagggcggguggaccggcaugguggacgggugguacggcuaccaccaccagaacgagcaggggagcggcuacgccgccgaccucaaguccacccagaacgccaucgacgagaucaccaacaaggugaacagcgucaucgagaagaugaacacgcaguucaccgcggugggcaaggaguucaaccaccuggagaagcgcaucgagaaccugaacaagaaggucgacgacggguuccucgacaucuggaccuacaacgccgagcugcuggugcuccuggagaacgagcggacccuggacuaccacgacuccaacgugaagaaccucuacgagaagguccgcagccagcugaagaacaacgccaaggagaucggcaacgggugcuucgaguucuaccacaagugcgacaacacgugcauggaguccgugaagaacggcaccuacgacuaccccaaguacagcgaggaggccaagcugaaccgggaggagaucgacggggugaagcucgaguccacccgcaucuaccagauccuggccaucuacagcaccgucgcguccagccuggugcucguggucagccugggcgccaucuccuucuggaugugcagcaacggcucccugcagugccggaucugcaucuga

SEQ ID NO: 69150 - RNA, 1701 nt, Artificial Sequence
  derived and/or modified CDS sequence (opt1) from hemagglutinin__InfluenzaA__ADI99560
augaaggccauccuggugguccuccuguacaccuucgccaccgcgaacgccgacacgcugugcaucggcuaccacgccaacaacagcaccgacaccguggacaccgugcucgagaagaacgucacggugacccacuccgugaaccugcuggaggacaagcacaacgggaagcucugcaagcugcgcggcgucgcgccccugcaccucgggaagugcaacaucgccggcuggauccuggggaacccggagugcgagagccuguccaccgccagcuccuggagcuacaucguggagaccuccagcuccgacaacggcacgugcuaccccggcgacuucaucaacuacgaggagcuccgggagcagcugagcuccgugagcuccuucgagcgcuucgagaucuuccccaagaccagcuccuggcccaaccacgacagcaacaagggggucaccgccgccugcccgcacgccggcgcgaaguccuucuacaagaaccugaucuggcucgugaagaaggggaacagcuaccccaagcuguccaagagcuacaucaacgacaagggcaaggaggugcugguccucugggggauccaccaccccagcaccuccgccgaccagcagagccuguaccagaacgccgacgccuacguguucgugggcacgucccgguacagcaagaaguucaagcccgagaucgccauccgcccgaagguccgggaccaggagggccgcaugaacuacuacuggacccugguggagcccggggacaagaucaccuucgaggcgaccggcaaccucguggucccccgguacgccuucgccauggagcgcaacgccggguccggcaucaucaucagcgacacgcccgugcacgacugcaacacgaccugccagaccccgaagggcgccaucaacaccucccugcccuuccagaacauccaccccaucaccaucgggaagugccccaaguacgucaagagcaccaagcugcggcucgcgaccggccugcgcaacgugccguccauccagagccgggggcuguucggcgccaucgccggguucaucgagggcggcuggacggggaugguggacggcugguacggguaccaccaccagaacgagcagggcuccggguacgccgccgaccucaagagcacccagaacgcgaucgacaagaucaccaacaaggugaacuccgucaucgagaagaugaacacccaguucacggccgugggcaaggaguucaaccaccuggagaagcgcaucgagaaccugaacaagaaggucgacgacggcuuccucgacaucuggaccuacaacgccgagcugcuggugcuccuggagaacgagcggacccuggacuaccacgacagcaacgugaagaaccucuacgagaagguccgcucccagcugaagaacaacgccaaggagaucgggaacggcugcuucgaguucuaccacaagugcaacaacacgugcauggagagcgugaagaacgggaccuacgacuaccccaaguacuccgaggaggccaagcugaaccgggaggagaucgacggcgugaagcucgagagcacccgcaucuaccagauccuggcgaucuacuccaccgucgccagcagccuggugcucguggucucccugggggccaucagcuucuggaugugcuccaacggcagccugcagugccggaucugcaucuga

SEQ ID NO: 69151 - RNA, 1701 nt, Artificial Sequence; identical to SEQ ID NO: 69150
  derived and/or modified CDS sequence (opt1) from hemagglutinin__InfluenzaA__ADI99570

SEQ ID NO: 69152 - RNA, 1701 nt, Artificial Sequence; identical to SEQ ID NO: 69150
  derived and/or modified CDS sequence (opt1) from hemagglutinin__InfluenzaA__ADI99580

SEQ ID NO: 69153 - RNA, 1701 nt, Artificial Sequence; identical to SEQ ID NO: 68306
  derived and/or modified CDS sequence (opt1) from hemagglutinin__InfluenzaA__ADI99590

SEQ ID NO: 69154 - RNA, 1701 nt, Artificial Sequence
  derived and/or modified CDS sequence (opt1) from hemagglutinin__InfluenzaA__ADI99610
augaaggccauccuggugguccuccuguacaccuucgccaccgcgaacgccgacacgcugugcaucggcuaccacgccaacaacagcaccgacaccguggacaccgugcucgagaagaacgucacggugacccacuccgugaaccugcuggaggacaagcacaacgggaagcucugcaagcugcgcggcgucgcgccccugcaccucgggaagugcaacaucgccggcuggauccuggggaacccggagugcgagagccuguccaccgccagcuccuggagcuacaucguggagaccuccagcuccgacaacggcacgugcuaccccggcgacuucaucaacuacgaggagcuccgggagcagcugagcuccgugagcuccuucgagcgcuucgagaucuuccccaagaccagcuccuggcccaaccacgacagcaacaagggggucaccgccgccugcccgcacgccggcgcgaaguccuucuacaagaaccugaucuggcucgugaagaaggggaacagcuaccccaagcuguccaagagcuacaucaacgacaagggcaaggagauccuggugcucugggggauccaccaccccagcaccuccgccgaccagcagagccuguaccagaacgccgacgccuacgucuucgugggcacgucccgguacagcaagaaguucaagcccgagaucgccauccgcccgaaggugcgggaccaggagggccgcaugaacuacuacuggacccuggucgagcccggggacaagaucaccuucgaggcgaccggcaaccucguggugccccgguacgccuucgccauggagcgcaacgccggguccggcaucaucaucagcgacacgcccguccacgacugcaacacgaccugccagaccccgaagggcgccaucaacaccucccugcccuuccagaacauccaccccaucaccaucgggaagugccccaaguacgucaagagcaccaagcugcggcucgcgaccggccugcgcaacgugccguccauccagagccgggggcuguucggcgccaucgccggguucaucgagggcggcuggacggggaugguggacggcugguacggguaccaccaccagaacgagcagggcuccggguacgccgccgaccucaagagcacccagaacgcgaucgacaagaucaccaacaaggugaacuccgugaucgagaagaugaacacccaguucacggccgucggcaaggaguucaaccaccuggagaagcgcaucgagaaccugaacaagaagguggacgacggcuuccucgacaucuggaccuacaacgccgagcugcugguccuccuggagaacgagcggacccuggacuaccacgacagcaacgugaagaaccucuacgagaaggugcgcucccagcugaagaacaacgccaaggagaucgggaacggcugcuucgaguucuaccacaagugcgacaacacgugcauggagagcgucaagaacgggaccuacgacuaccccaaguacuccgaggaggccaagcugaaccgggaggagaucgacggcgugaagcucgagagcacccgcaucuaccagauccuggcgaucuacuccaccguggccagcagccugguccucguggugucccugggggccaucagcuucuggaugugcuccaacggcagccugcagugccggaucugcaucuga

SEQ ID NO: 69155 - RNA, 1701 nt, Artificial Sequence
  derived and/or modified CDS sequence (opt1) from hemagglutinin__InfluenzaA__ADI99620
augaaggccauccuggugguccuccuguacaccuucgccaccgcgaacgccgacacgcugugcaucggcuaccacgccaacaacagcaccgacaccguggacaccgugcucgagaagaacgucacggugacccacuccgugaaccugcuggaggacaagcacaacgggaagcucugcaagcugcgcggcgucgcgccccugcaccucgggaagugcaacaucgccggcuggauccuggggaacccggagugcgagagccuguccaccgccagcuccuggagcuacaucguggagaccuccagcuccgacaacggcacgugcuaccccggcgacuucaucaacuacgaggagcuccgggagcagcugagcuccgugagcuccuucgagcgcuucgagaucuuccccaagaccagcuccuggcccaaccacgacagcaacaagggggucaccgccgccugcccgcacgccggcgcgaaguccuucuacaagaaccugaucuggcucgugaagaaggggaacagcuaccccaagcuguccaagagcuacaucaacgacaagggcaaggaggugcugguccucugggggauccaccaccccagcaccuccgccgaccagcagagccuguaccagaacgccgacgccuacguguucgugggcacgucccgguacagcaagaaguucaagcccgagaucgccauccgcccgaagguccgggaccaggagggccgcaugaacuacuacuggacccugguggagcccggggacaagaucaccuucgaggcgaccggcaaccucguggucccccgguacgccuucgccauggagcgcaacgccggguccggcaucaucaucacggacacccccgugcacgacugcaacacgaccugccagaccccgaagggcgccaucaacaccagccugcccuuccagaacauccaccccaucaccaucgggaagugccccaaguacgugaaguccaccaagcugcggcucgcgacgggccugcgcaacgucccgagcauccagucccgggggcuguucggcgccaucgccggguucaucgagggcggcuggaccgggaugguggacggcugguacggguaccaccaccagaacgagcagggcagcggguacgccgccgaccucaaguccacccagaacgcgaucgacaagaucaccaacaaggugaacagcgucaucgagaagaugaacacgcaguucaccgccgugggcaaggaguucaaccaccuggagaagcgcaucgagaaccugaacaagaaggucgacgacggcuuccucgacaucuggaccuacaacgccgagcugcuggugcuccuggagaacgagcggacccuggacuaccacgacuccaacgugaagaaccucuacgagaagguccgcagccagcugaagaacaacgccaaggagaucgggaacggcugcuucgaguucuaccacaagugcgacaacacgugcauggaguccgugaagaacgggaccuacgacuaccccaaguacagcgaggaggccaagcugaaccgggaggagaucgacggcgugaagcucgaguccacccgcaucuaccagauccuggcgaucuacagcaccgucgccuccagccuggugcucguggucagccugggggccaucuccuucuggaugugcagcaacggcucccugcagugccggaucugcaucuga

SEQ ID NO: 69156 - RNA, 1701 nt, Artificial Sequence
  derived and/or modified CDS sequence (opt1) from hemagglutinin__InfluenzaA__ADI99630
augaaggccauccuggugguccuccuguacaccuucgccaccgcgaacgccgacacgcugugcaucggcuaccacgccaacaacagcaccgacaccguggacaccgugcucgagaagaacgucacggugacccacuccgugaaccugcuggaggacaagaacaacgggaagcucugcaagcugcgcggcgucgcgccccugcaccucgggaagugcaacaucgccggcuggauccuggggaacccggagugcgagagccuguccaccgccagcuccuggagcuacaucguggagaccuccagcuccgacaacggcacgugcuaccccggcaacuucaucgacuacgaggagcuccgggagcagcugagcuccgugagcuccuucgagcgcuucgagaucuuccccaagaccagcuccuggcccaaccacgacagcaacaagggggucaccgccgccugcccgcacgccggcgcgaaguccuucuacaagaaccugaucuggcucgugaagaaggggaacagcuaccccaagcuguccaagagcuacaucaacgacaagggcaaggaggugcugguccucugggggauccaccaccccagcaccuccgccgaccagcagagccuguaccagaacgccgacgccuacguguucgugggcacgucccgguacagcaagaaguucaagcccgagaucgccauccgcccgaagguccgggaccaggagggccgcaugaacuacuacuggacccugguggagcccggggacaagaucaccuucgaggcgaccggcaaccucguggucccccgguacgccuucgccauggagcgcaacgccggguccggcaucaucaucagcgacacgcccgugcacgacugcaacacgaccugccagaccccgaagggcgccaucaacaccucccugcccuuccagaacauccaccccaucaccaucgggaagugccccaaguacgucaagagcaccaagcugcggcucgcgaccggccugcgcaacgugccguccauccagagccgggggcuguucggcgccaucgccggguucaucgagggcggcuggacggggaugguggacggcugguacggguaccaccaccagaacgagcagggcuccggguacgccgccgaccucaagagcacccagaacgcgaucgacaagaucaccaacaaggugaacuccgucaucgagaagaugaacacccaguucacggccgugggcaaggaguucaaccaccuggagaagcgcaucgagaaccugaacaagaaggucgacgacggcuuccucgacaucuggaccuacaacgccgagcugcuggugcuccuggagaacgagcggacccuggacuaccacgacagcaacgugaagaaccucuacgagaagguccgcucccagcugaagaacaacgccaaggagaucgggaacggcugcuucgaguucuaccacaagugcgacaacacgugcauggagagcgugaagaacgggaccuacgacuaccccaaguacuccgaggaggccaagcugaaccgggaggagaucgacggcgugaagcucgagagcacccgcaucuaccagauccuggcgaucuacuccaccgucgccagcagccuggugcucguggucucccugggggccaucagcuucuggaugugcuccaacggcagccugcagugccggaucugcaucuga

SEQ ID NO: 69157 - RNA, 1701 nt, Artificial Sequence
  derived and/or modified CDS sequence (opt1) from hemagglutinin__InfluenzaA__ADI99640
augaaggccauccuggugguccuccuguacaccuucgccaccgcgaacgccgacacgcugugcaucggcuaccacgccaacaacagcaccgacaccguggacaccgugcucgagaagaacgucacggugacccacuccgugaaccugcuggaggacaagcacaacgggaagcucugcaagcugcgcggcgucgcgccccugcaccucgggaagugcaacaucgccggcuggauccuggggaacccggagugcgagagccuguccaccgccagcuccuggagcuacaucguggagaccuccagcuccgacaacggcacgugcuaccccggcgacuucaucgacuacgaggagcuccgggagcagcugagcuccgugagcuccuucgagcgcuucgagaucuuccccaagaccagcuccuggcccaaccacgacagcaacaagggggucaccgccgccugcccgcacgccggcgcgaaguccuucuacaagaaccugaucuggcucgugaagaaggggaacagcuaccccaagcuguccaagagcuacaucaacgacaagggcaaggaggugcugguccucugggggauccaccaccccagcaccuccacggaccagcagagccuguaccagaacgccgacuccuacguguucgugggcaccagccgguacuccaagaaguucaagcccgagaucgccauccgcccgaagguccgggaccaggagggccgcaugaacuacuacuggacccugguggagcccggggacaagaucaccuucgaggccacgggcaaccucguggucccccgguacgccuucgcgauggagcgcaacgccgggagcggcaucaucaucuccgacacccccauccacgacugcaacacgaccugccagaccccggagggcgccaucaacaccagccugcccuuccagaacauccaccccaucaccaucgggaagugccccaaguacgugaaguccaccaagcugcggcucgccacgggccugcgcaacgugccgagcauccagucccgggggcuguucggcgccaucgcgggguucaucgagggcggcuggaccgggauggucgacggcugguacggguaccaccaccagaacgagcagggcagcggguacgccgccgaccucaaguccacccagaacgccaucgacgagaucaccaacaaggugaacagcgugaucgagaagaugaacacgcaguucaccgccgucggcaaggaguucaaccaccuggagaagcgcaucgagaaccugaacaagaagguggacgacggcuuccucgacaucuggaccuacaacgcggagcugcugguccuccuggagaacgagcggacccuggacuaccacgacuccaacgugaagaaccucuacgagaaggugcgcagccagcugaagaacaacgccaaggagaucgggaacggcugcuucgaguucuaccacaagugcgacaacacgugcauggaguccgucaagaacgggaccuacgacuaccccaaguacagcgaggaggccaagcugaaccgggaggagaucgacggcgugaagcucgaguccacccgcaucuaccagauccuggccaucuacagcaccguggccagcucccugguccucguggugagccugggggcgaucuccuucuggaugugcagcaacggcucccugcagugccggaucugcaucuga

SEQ ID NO: 69158 - RNA, 1701 nt, Artificial Sequence; identical to SEQ ID NO: 68245
  derived and/or modified CDS sequence (opt1) from hemagglutinin__InfluenzaA__ADI99660

SEQ ID NO: 69159 - RNA, 1701 nt, Artificial Sequence
  derived and/or modified CDS sequence (opt1) from hemagglutinin__InfluenzaA__ADI99670
augaaggccauccuggugguccuccuguacaccuucgccaccgcgaacgccgacacgcugugcaucggcuaccacgccaacaacagcaccgacaccguggacaccgugcucgagaagaacgucacggugacccacuccgugaacauccuggaggacaagcacaacgggaagcugugcaagcuccgcggcgucgcgccccugcaccuggggaagugcaacaucgccggcuggauccucgggaacccggagugcgagagccuguccaccgccagcuccuggagcuacaucguggagaccuccagcuccgacaacggcacgugcuaccccggcgacuucaucgacuacgaggagcugcgggagcagcucagcuccgugagcuccuucgagcgcuucgagaucuuccccaagaccagcuccuggcccaaccacgacagcaacaagggggucaccgccgccugcccgcacgccggcgcgaaguccuucuacaagaaccugaucuggcuggugaagaaggggaacagcuaccccaagcucuccaagagcuacaucaacgacaagggcaaggaggugcugguccugugggggauccaccaccccagcaccuccgccgaccagcagagccucuaccagaacgccgacgccuacguguucgugggcacgucccgguacagcaagaaguucaagcccgagaucgccauccgcccgaagguccgggaccaggagggccgcaugaacuacuacuggacccugguggagcccggggacaagaucaccuucgaggcgaccggcaaccugguggucccccgguacgccuucgccauggagcgcaacgccggguccggcaucaucaucagcgacacgcccgugcacgacugcaacacgaccugccagaccccgaagggcgccaucaacaccucccuccccuuccagaacauccaccccaucaccaucgggaagugccccaaguacgucaagagcaccaagcugcggcuggcgaccggccuccgcaacgugccguccauccagagccgggggcuguucggcgccaucgccggguucaucgagggcggcuggacggggaugguggacggcugguacggguaccaccaccagaacgagcagggcuccggguacgccgccgaccucaagagcacccagaacgcgaucgacgagaucaccaacaaggugaacuccgucaucgagaagaugaacacccaguucacggccgugggcaaggaguucaaccaccuggagaagcgcaucgagaaccugaacaagaaggucgacgacggcuuccuggacaucuggaccuacaacgccgagcuccuggugcugcucgagaacgagcggacccuggacuaccacgacagcaacgugaagaaccuguacgagaagguccgcucccagcucaagaacaacgccaaggagaucgggaacggcugcuucgaguucuaccacaagugcgacaacacgugcauggagagcgugaagaacgggaccuacggcuaccccaaguacuccgaggaggccaagcugaaccgggaggagaucgacggggugaagcuggagagcacccgcaucuaccagauccucgcgaucuacuccaccgucgccagcagccuggugcugguggucucccucggcgccaucagcuucuggaugugcuccaacggcagccugcagugccggaucugcaucuga

SEQ ID NO: 69160 - RNA, 1701 nt, Artificial Sequence
  derived and/or modified CDS sequence (opt1) from hemagglutinin__InfluenzaA__ADI99680
augaaggccauccuggugguccuccuguacaccuucgccaccgcgaacgccgacacgcugugcaucggcuaccacgccaacaacagcaccgacaccguggacaccgugcucgagaagaacgucacggugacccacuccgugaacauccuggaggacaagcacaacgggaagcugugcaagcuccgcggcgucgcgccccugcaccuggggaagugcaacaucgccggcuggauccucgggaacccggagugcgagagccuguccaccgccagcuccuggagcuacaucguggagaccuccagcuccgacaacggcacgugcuaccccggcgacuucaucgacuacgaggagcugcgggagcagcucagcuccgugagcuccuucgagcgcuucgagaucuuccccaagaccagcuccuggcccaaccacgacagcaacaagggggucaccgccgccugcccgcacgccggcgcgaaguccuucuacaagaaccugaucuggcuggugaagaaggggaacagcuaccccaagcucuccaagagcuacaucaacgacaagggcaaggaggugcugguccugugggggauccaccaccccagcaccuccgccgaccagcagagccucuaccagaacgccgacgccuacguguucgugggcacgucccgguacagcaagaaguucaagcccgagaucgccauccgcccgaagguccgggaccaggagggccgcaugaacuacuacuggaccaucguggagcccggggacaagaucaccuucgaggcgaccggcaaccugguggucccccgguacgccuucgccauggagcgcaacgccggguccggcaucaucaucagcgacacgcccgugcacgacugcaacacgaccugccagaccccgaagggcgccaucaacaccucccugcccuuccagaacauccaccccaucaccaucgggaagugccccaaguacgucaagagcaccaagcuccggcuggcgaccggccugcgcaacgugccguccauccagagccgggggcuguucggcgccaucgccggguucaucgagggcggcuggacggggaugguggacggcugguacggguaccaccaccagaacgagcagggcuccggguacgccgccgaccucaagagcacccagaacgcgaucgacgagaucaccaacaaggugaacuccgucaucgagaagaugaacacccaguucacggccgugggcaaggaguucaaccaccuggagaagcgcaucgagaaccucaacaagaaggucgacgacggcuuccuggacaucuggaccuacaacgccgagcugcucgugcugcuggagaacgagcggacccucgacuaccacgacagcaacgugaagaaccuguacgagaagguccgcucccagcugaagaacaacgccaaggagaucgggaacggcugcuucgaguucuaccacaagugcgacaacacgugcauggagagcgugaagaacgggaccuacgacuaccccaaguacuccgaggaggccaagcucaaccgggaggagaucgacggcgugaagcuggagagcacccgcaucuaccagauccuggcgaucuacuccaccgucgccagcagccucgugcugguggucucccugggggccaucagcuucuggaugugcuccaacggcagccuccagugccggaucugcaucuga

SEQ ID NO: 69161 - RNA, 1701 nt, Artificial Sequence
  derived and/or modified CDS sequence (opt1) from hemagglutinin__InfluenzaA__ADI99690
augaaggccauccuggccgugcuccuguacaccuucgcgaucgccaacgccgacacccugugcaucggcuaccacgccaacaacagcacggacaccgucgacaccgugcucgagaagaacgugaccgucacgcacuccgugaacauccuggaggacaagcacaacgggaagcugugcaagcuccgcggcguggcgccccugcaccuggggaagugcaacaucgccggcuggauccucgggaacccggagugcgagagccuguccaccgccagcuccuggagcuacaucgucgagaccuccagcuccgacaacgggaccugcuaccccggcgacuucaucgacuacgaggagcugcgggagcagcucagcuccgugagcuccuucgagcgcuucgagaucuuccccaagacgagcuccuggcccaaccacgacagcaacaagggcgugaccgccgccugcccgcacgcgggcgccaaguccuucuacaagaaccugaucuggcuggucaagaaggggaacagcuaccccaagcucuccaagagcuacaucaacgacaagggcaagaaggugcuggugcugugggggauccaccaccccagcaccuccgccgaccagcagagccucuaccagaacgccgacgccuacgucuucgugggcaccucccgguacagcaagaaguucaagcccgagaucgcgauccgcccgaaggugcgggaccaggagggccgcaugaacuacuacuggacgcuggucgagcccggggacaagaucaccuucgaggccaccggcaaccugguggugccccgguacgccuucgccauggagcgcaacgccggguccggcaucaucaucagcgacacccccguccacgacugcaacacgaccugccagaccccgaagggcgcgaucaacaccucccuccccuuccagaacauccaccccaucacgaucgggaagugccccaaguacgucaagagcaccaagcugcggcuggccaccggccuccgcaacgugccguccauccagagccgggggcuguucggcgccaucgccggguucaucgagggcggcuggaccgggaugguggacggcugguacggguaccaccaccagaacgagcagggcuccggguacgccgcggaccucaagagcacgcagaacgccaucgacgagaucaccaacaaggugaacuccgugaucgagaagaugaacacccaguucaccgccgucggcaaggaguucaaccaccuggagaagcgcaucgagaaccugaacaagaagguggacgacggcuuccuggacaucuggacguacaacgccgagcuccugguccugcucgagaacgagcggacccuggacuaccacgacagcaacgugaagaaccuguacgagaaggugcgcucccagcucaagaacaacgccaaggagaucgggaacggcugcuucgaguucuaccacaagugcgacaacacgugcauggagagcgucaagaacgggaccuacgacuaccccaaguacuccgaggaggcgaagcugaaccgggaggagaucgacggcgugaagcuggagagcacccgcaucuaccagauccucgccaucuacuccaccguggccagcagccugguccugguggugucccucggggccaucagcuucuggaugugcuccaacggcagccugcagugccggaucugcaucuga

SEQ ID NO: 69162 - RNA, 1701 nt, Artificial Sequence
  derived and/or modified CDS sequence (opt1) from hemagglutinin__InfluenzaA__ADI99700
augaaggccauccuggugguccuccuguacaccuucgccaccgcgaacgccgacacgcugugcaucggcuaccacgccaacaacagcaccgacaccguggacaccgugcucgagaagaacgucacggugacccacuccgugaaccugcuggaggacaagcacaacgggaagcucugcaagcugcgcggcgucagcccccugcaccucgggaagugcaacaucgccggcuggauccuggggaacccggagugcgagucccugagcaccgccuccagcugguccuacaucguggagaccagcuccagcgacaacggcacgugcuaccccggcgacuucaucgacuacgaggagcuccgggagcagcuguccagcguguccagcuucgagcgcuucgagaucuuccccaagaccuccagcuggcccaaccacgacuccaacaagggggucaccgcggccugcccgcacgccggcgccaagagcuucuacaagaaccugaucuggcucgugaagaaggggaacuccuaccccaagcugagcaagagcuacaucaacgacaagggcaaggaggugcugguccucuggggcgugcaccaccccuccaccagcgcggaccagcagucccuguaccagaacgccgacgccuacguguucgucgggacgagccgguacuccaagaaguucaagcccgagaucgccauccgcccgaaggugcgggaccaggagggccgcaugaacuacuacuggacccugguggagcccggggacaagaucaccuucgaggccaccggcaaccucgucgcgccccgguacgccuucgccauggagcgcaacgccgggagcggcaucaucaucuccgacacgcccgugcacgacugcaacacgaccugccagaccccgaagggcgccaucaacaccagccugcccuuccagaacauccaccccaucaccaucgggaagugccccaaguacgugaaguccaccaagcugcggcucgcgaccggccugcgcaacgucccgagcauccagucccgggggcuguucggcgccaucgccggguucaucgagggcggcuggacggggaugguggacggcugguacggguaccaccaccagaacgagcagggcagcggguacgccgccgaccucaaguccacccagaacgcgaucgacgagaucaccaacaaggugaacagcgucaucgagaagaugaacacccaguucacggccgugggcaaggaguucaaccaccuggagaagcgcaucgagaaccugaacaagaaggucgacgacggcuuccucgacaucuggaccuacaacgccgagcugcuggugcuccuggagaacgagcggacccuggacuaccacgacuccaacgugaagaaccucuacgagaagguccgcagccagcugaagaacaacgccaaggagaucgggaacggcugcuucgaguucuaccacaagugcgacaacacgugcauggaguccgugaagaacgggaccuacgacuaccccaaguacagcgaggaggccaagcugaaccgggaggagaucgacggcgugaagcucgaguccacccgcaucuaccagauccuggcgaucuacagcaccgucgccagcucccuggugcucguggucagccugggggccaucuccuucuggaugugcagcaacggcucccugcagugccggaucugcaucuga

SEQ ID NO: 69163 - RNA, 1701 nt, Artificial Sequence; identical to SEQ ID NO: 68342
  derived and/or modified CDS sequence (opt1) from hemagglutinin__InfluenzaA__ADI99710

SEQ ID NO: 69164 - RNA, 1701 nt, Artificial Sequence
  derived and/or modified CDS sequence (opt1) from hemagglutinin__InfluenzaA__ADI99720
augaaggccauccuggugguccuccuguacaccuucgccaccgcgaacgccgacacgcugugcaucggcuaccacgccaacaacagcaccgacaccguggacaccgugcucgagaagaacgucacggugacccacuccgugaaccugcuggaggacaagcacaacgggaagcucugcaagcugcgcggcgucgcgccccugcaccucgggaagugcaacaucgccggcuggauccuggggaacccggagugcgagagccuguccaccgccagcuccuggagcuacaucguggagaccuccagcuccgacaacggcacgugcuaccccggcgacuucaucgacuacgaggagcuccgggagcagcugagcuccgugagcuccuucgagcgcuucgagaucuuccccaagaccagcuccuggcccgaccacgacagcaacaagggggucaccgccgccugcccgcacgccggcgcgaaguccuucuacaagaaccugaucuggcucgugaagaaggggaacagcuaccccaagcuguccaagagcuacaucaacgacaagggcaaggaggugcugguccucugggggauccaccaccccagcaccuccgccgaccagcagagccuguaccagaacgccgacgccuacguguucgugggcacgucccgguacagcaagaaguucaagcccgagaucgccauccgcccgaagguccggggccaggaggggcgcaugaacuacuacuggacccugguggagcccggcgacaagaucaccuucgaggcgaccgggaaccucguggucucccgguacgccuucgccauggagcgcaacgccggcagcggcaucaucaucuccgacacgcccgugcacgacugcaacacgaccugccagacccccaagggggccaucaacaccagccugccguuccagaacauccaccccaucaccaucggcaagugccccaaguacgugaaguccaccaagcugcggcucgcgaccgggcugcgcaacguccccagcauccagucccggggccuguucggggccaucgccggcuucaucgagggcggguggacgggcaugguggacgggugguacggcuaccaccaccagaacgagcaggggagcggcuacgccgccgaccucaaguccacccagaacgcgaucgacgagaucaccaacaaggugaacagcgucaucgagaagaugaacacccaguucacggccgugggcaaggaguucaaccaccuggagaagcgcaucgagaaccugaacaagaaggucgacgacggguuccucgacaucuggaccuacaacgccgagcugcuggugcuccuggagaacgagcggacccuggacuaccacgacuccaacgugaagaaccucuacgagaagguccgcagccagcugaagaacaacgccaaggagaucggcaacgggugcuucgaguucuaccacaagugcgacaacacgugcauggaguccgugaagaacggcaccuacgacuacccgaaguacagcgaggaggccaagcugaaccgggaggagaucgacggggugaagcucgaguccacccgcaucuaccagauccuggcgaucuacagcaccgucgccagcucccuggugcucguggucagccugggcgccaucuccuucuggaugugcagcaacggcucccugcagugccggaucugcaucuga

SEQ ID NO: 69165 - RNA, 1701 nt, Artificial Sequence; identical to SEQ ID NO: 66693
  derived and/or modified CDS sequence (opt1) from hemagglutinin__InfluenzaA__ADI99730

SEQ ID NO: 69166 - RNA, 1701 nt, Artificial Sequence; identical to SEQ ID NO: 66693
  derived and/or modified CDS sequence (opt1) from hemagglutinin__InfluenzaA__ADJ00497

SEQ ID NO: 69167 - RNA, 1701 nt, Artificial Sequence; identical to SEQ ID NO: 66693
  derived and/or modified CDS sequence (opt1) from hemagglutinin__InfluenzaA__ADJ00498

SEQ ID NO: 69168 - RNA, 1701 nt, Artificial Sequence; identical to SEQ ID NO: 67887
  derived and/or modified CDS sequence (opt1) from hemagglutinin__InfluenzaA__ADJ00501

SEQ ID NO: 69169 - RNA, 1701 nt, Artificial Sequence; identical to SEQ ID NO: 67857
  derived and/or modified CDS sequence (opt1) from hemagglutinin__InfluenzaA__ADJ18163

SEQ ID NO: 69170 - RNA, 1701 nt, Artificial Sequence; identical to SEQ ID NO: 67857
  derived and/or modified CDS sequence (opt1) from hemagglutinin__InfluenzaA__ADJ18165

SEQ ID NO: 69171 - RNA, 1701 nt, Artificial Sequence
  derived and/or modified CDS sequence (opt1) from hemagglutinin__InfluenzaA__ADJ18167
augaaggccauccuggugguccuccuguacaccuucgccaccgcgaacgccgacacgcugugcaucggcuaccacgccaacaacagcaccgacaccguggacaccgugcucgagaagaacgucacggugacccacuccgugaaccugcuggaggacaagcacaacgggaagcucugcaagcugcgcggcgucgcgccccugcaccucgggaagugcaacaucgccggcuggauccuggggaacccggagugcgagagccuguccaccgccagcuccuggagcuacaucguggagaccuccagcuccgacaacggcacgugcuaccccggcgacuucaucgacuacgaggagcuccgggagcagcugagcuccgugagcuccuucgagcgcuucgagaucuuccccaagaccagcuccuggcccaaccacgacagcaacaagggggucaccgccgccugcccguacgccggcgcgaaguccuucuacaagaaccugaucuggcucgugaagaaggggaacagcuaccccaagcuguccaagagcuacaucaacgacaagggcaaggaggugcugguccucugggggauccaccaccccagcaccuccgccgaccagcagagccuguaccagaacgccgacgccuacguguucgugggcacgucccgguacagcaagaaguucaagcccgagaucgccauccgcccgaagguccgggaccgcgagggccggaugaacuacuacuggacccugguggagcccggggacaagaucaccuucgaggcgaccggcaaccucguggucccccgcuacgccuucgccauggagcggaacgccggguccggcaucaucaucagcgacacgcccgugcacgacugcaacacgaccugccagaccccgaagggcgccaucaacaccucccugcccuuccagaacauccaccccaucaccaucgggaagugccccaaguacgucaagagcaccaagcugcgccucgcgaccggccugcggaacaucccguccauccagagccgcgggcuguucggcgccaucgccggguucaucgagggcggcuggacggggaugguggacggcugguacggguaccaccaccagaacgagcagggcuccggguacgccgccgaccucaagagcacccagaacgcgaucgacaagaucaccaacaaggugaacuccgugaucgagaagaugaacacccaguucacggccgucggcaaggaguucaaccaccuggagaagcggaucgagaaccugaacaagaagguggacgacggcuuccucgacaucuggaccuacaacgccgagcugcugguccuccuggagaacgagcgcacccuggacuaccacgacagcaacgugaagaaccucuacgagaaggugcggucccagcugaagaacaacgccaaggagaucgggaacggcugcuucgaguucuaccacaagugcgacaacacgugcauggagagcgucaagaacgggaccuacgacuaccccaaguacuccgaggaggccaagcugaaccgcgaggagaucgacggcgugaagcucgagagcacccggaucuaccagauccuggcgaucuacuccaccguggccagcagccugguccucguggugucccugggggccaucagcuucuggaugugcuccaacggcagccugcagugccgcaucugcaucuga

SEQ ID NO: 69172 - RNA, 1701 nt, Artificial Sequence
  derived and/or modified CDS sequence (opt1) from hemagglutinin__InfluenzaA__ADJ18169
augaaggccauccuggugguccuccuguacaccuucgccaccgcgaacgccgacacgcugugcaucggcuaccacgccaacaacagcaccgacaccguggacaccgugcucgagaagaacgucacggugacccacuccgugaaccugcuggaggacaagcacaacgggaagcucugcaagcugcgcggcgucgcgccccugcaccucgggaagugcaacaucgccggcuggauccuggggaacccggagugcgagagccuguccaccgccagcuccuggagcuacaucguggagaccuccagcuccgacaacggcacgugcuaccccggcgacuucaucgacuacgaggagcuccgggagcagcugagcuccgugagcuccuucgagcgcuucgagaucuuccccaagaccagcuccuggcccaaccacgacagcaacaagggggucaccgccgccugcccgcacgccggcgcgaaguccuucuacaagaaccugaucuggcucgugaagaaggggaacagcuaccccaagcuguccaagagcuacaucaacgacaagggcaaggaggugcugguccucugggggauccaccaccccagcaccuccgccgaccagcagagccuguaccagaacgccgacgccuacguguucgugggcacgucccgguacagcaagaaguucaagcccgagaucgccauccgcccgaagguccgggaccgcgagggccggaugaacuacuacuggacccugguggagcccggggacaagaucaccuucgaggcgaccggcaaccucguggucccccgcuacgccuucgccauggagcggaacgccggguccggcaucaucaucagcgacacgcccgugcacgacugcaacacgaccugccagaccccgaagggcgccaucaacaccucccugcccuuccagaacauccaccccaucaccaucgggaagugccccaaguacgucaagagcaccaagcugcgccucgcgaccggccugcggaacgugccguccauccagagccgcgggcuguucggcgccaucgccggguucaucgagggcggcuggacggggaugguggacggcugguacggguaccaccaccagaacgagcagggcuccggguacgccgccgaccucaagagcacccagaacgcgaucgacaagaucaccaacaaggugaacuccgucaucgagaagaugaacacccaguucacggccgugggcaaggaguucaaccaccuggagaagcggaucgagaaccugaacaagaaggucgacgacggcuuccucgacaucuggaccuacaacgccgagcugcuggugcuccuggagaacgagcgcacccuggacuaccacgacagcaacgugaagaaccucuacgagaagguccggucccagcugaagaacaacgccaaggagaucgggaacggcugcuucgaguucuaccacaagugcgacaacacgugcauggagagcgugaagaacgggaccuacgacuaccccaaguacuccgaggaggccaagcugaaccgcgaggagaucgacggcgugaagcucgagagcacccggaucuaccagauccuggcgaucuacuccaccgucgccagcagccuggugcucguggucucccugggggccaucagcuucuggaugugcuccaacggcagccugcagugccgcaucugcaucuga

SEQ ID NO: 69173 - RNA, 1701 nt, Artificial Sequence
  derived and/or modified CDS sequence (opt1) from hemagglutinin__InfluenzaA__ADJ18171
augaaggccauccuggugguccuccuguacaccuucgccaccgcgaacgccgacacgcugugcaucggcuaccacgccaacaacagcaccgacaccguggacaccgugcucgagaagaacgucacggugacccacuccgugaaccugcuggaggacaagcacaacgggaagcucugcaagcugcgcggcgucgcgccccugcaccucgggaagugcaacaucgccggcuggauccuggggaacccggagugcgagagccuguccaccgcgagcuccuggcccuacaucguggagaccagcuccagcgacaacggcacgugcuaccccggcgacuucaucgacuacgaggagcuccgggagcagcuguccagcguguccagcuucgagcgcuucgagaucuuccccaagaccuccagcuggccgaaccacgacuccaacaagggggucaccgccgccugcccccacgccggcgccaagagcuucuaccagaaccugaucuggcucgugaagaaggggaacuccuaccccaagcugagcaaguccuacauccacgacaagggcaaggaggugcugguccucugggggauccaccaccccagcaccagcgccgaccagcagucccuguaccagaacgccgacgccuacguguucgugggcacgagccgguacuccaagaaguucaagccggagaucgccauccgccccaagguccgggaccgccagggccggaugaacuacuacuggacccugguggagcucggggacaagaucaccuucgaggcgaccggcaaccugguggucccccgcuacgccuucgccauggagcggaacgccgggagcggcaucaucaucuccgacacgcccgugcacaacugcaacacgaccugccagaccaccaccggcgccaucaacaccagccugccguuccagaacauccaccccaucaccaucgggaagugccccaaguacgugaaguccacgaagcuccgccuggcgaccggccugcggaacguccccagcauccagucccgcggccucuucggggccaucgccggguucaucgagggcggcuggaccgggaugguggacggcugguacggguaccaccaccagaacgagcagggcagcggguacgccgccgaccugaaguccacccagaacgcgaucgacaagaucacgaacaaggugaacagcgucaucgagaagaugaacacccaguucaccgccgugggcaaggaguucaaccaccuggagaagcggaucgagaaccucaacaagaaggucgacgacggcuuccuggacaucuggaccuacaacgccgagcugcucgugcugcuggagaacgagcgcacgcucgacuaccacgacuccaacgugaagaaccuguacgagaagguccggagccagcugaagaacaacgccaaggagaucgggaacggcugcuucgaguucuaccacaagugcgacaacacgugcauggaguccgugaagaacgggaccuacgacuacccgaaguacagcgaggaggccaagcucaaccgcgaggagaucgacggcgugaagcuggaguccacccggaucuaccagauccuggcgaucuacagcaccgucgccuccagccucgugcugguggucagccugggggccaucuccuucuggaugugcagcaacggcucccuccagugccgcaucugcaucuga

SEQ ID NO: 69174 - RNA, 1701 nt, Artificial Sequence; identical to SEQ ID NO: 67857
  derived and/or modified CDS sequence (opt1) from hemagglutinin__InfluenzaA__ADJ18173

SEQ ID NO: 69175 - RNA, 1701 nt, Artificial Sequence; identical to SEQ ID NO: 67857
  derived and/or modified CDS sequence (opt1) from hemagglutinin__InfluenzaA__ADJ18175

SEQ ID NO: 69176 - RNA, 1701 nt, Artificial Sequence
  derived and/or modified CDS sequence (opt1) from hemagglutinin__InfluenzaA__ADJ18177
augaaggccauccuggugguccuccuguacaccuucgccaccgcgaacgccgacacgcugugcaucggcuaccacgccaacaacagcaccgacaccguggacaccgugcucgagaagaacgucacggugacccacuccgugaaccugcuggaggacaagcacaacgggaagcucugcaagcugcgcggcgucgcgccccugcaccucgggaagugcaacaucgccggcuggauccuggggaacccggagugcgagagccuguccaccgccagcuccuggagcuacaucguggagaccuccagcuccgacaacggcacgugcuaccccggcgacuucaucgacuacgaggagcuccgggagcagcugagcuccgugagcuccuucgagcgcuucgagaucuuccccaagaccagcuccuggcccaaccacgacagcaacaagggggucaccgccgccugcccgcacgccggcgcgaaguccuucuacaagaaccugaucuggcucgugaagaaggggaacagcuaccccaagcuguccaagagcuacaucaacgacaagggcaaggaggugcugguccucugggggauccaccaccccagcaccuccgccgaccagcagagccuguaccagaacgccgacgccuacguguucgugggcacgucccgguacagcaagaaguucaagcccgagaucgccauccgcccgaagguccggggccaggaggggcgcaugaacuacuacuggacccugguggagcccggcgacaagaucaccuucgaggcgaccgggaaccucguggucccccgguacgccuucgccauggagcgcaacgccggcuccggcaucaucaucagcgacacgcccgugcacgacugcaacacgaccugccagaccccgaagggggccaucaacaccucccugcccuuccagaacauccaccccaucaccaucggcaagugccccaaguacgucaagagcaccaagcugcggcucgcgaccgggcugcgcaacaucccguccgugcagagccggggccuguucggggccaucgccggcuucaucgagggcggguggacgggcaugguggacgggugguacggcuaccaccaccagaacgagcagggguccggcuacgccgccgaccucaagagcacccagaacgcgaucgacaagaucaccaacaaggugaacuccgucaucgagaagaugaacacccaguucacggccgugggcaaggaguucaaccaccuggagaagcgcaucgagaaccugaacaagaaggucgacgacggguuccucgacaucuggaccuacaacgccgagcugcuggugcuccuggagaacgagcggacccuggacuaccacgacagcaacgugaagaaccucuacgagaagguccgcucccagcugaagaacaacgccaaggagaucggcaacgggugcuucgaguucuaccacaagugcgacaacacgugcauggagagcgugaagaacggcaccuacgacuaccccaaguacuccgaggaggccaagcugaaccgggaggagaucgacggggugaagcucgagagcacccgcaucuaccagauccuggcgaucuacuccaccgucgccagcagccuggugcucguggucucccugggcgccaucagcuucuggaugugcuccaacggcagccugcagugccggaucugcaucuga

SEQ ID NO: 69177 - RNA, 1701 nt, Artificial Sequence
  derived and/or modified CDS sequence (opt1) from hemagglutinin__InfluenzaA__ADJ40444
augaaggccauccuggugguccuccuguacaccuucgccaccgcgaacgccgacacgcugugcaucggcuaccacgccaacaacagcaccgacaccguggacaccgugcucaagaagaacgucacggugacccacuccgugaaccugcuggaggacaagcacaacgggaagcucugcaagcugcgcggcgucgcgccccugcaccucgggaagugcaacaucgccggcuggauccuggggaacccggagugcgagagccuguccaccgccagcuccuggagcuacaucguggagaccuccagcuccgacaacggcacgugcuaccccggcgacuucaucgacuacgaggagcuccgggagcagcugagcuccgugagcuccuucgagcgcuucgagaucuuccccaagaccagcuccuggcccaaccacgacagcaacaagggggucaccgccgccugcccgcacgccggcgcgaaguccuucuacaagaaccugaucuggcucgugaagaaggggaacagcuaccccaagcuguccaagagcuacaucaacgacaagggcaaggaggugcugguccucugggggauccaccaccccagcaccuccgccgaccagcagagccuguaccagaacgccgacgccuacguguucgugggcacgucccgguacagcaagaaguucaagcccgagaucgccauccgcccgaagguccgggaccaggagggccgcaugaacuacuacuggacccugguggagcccggggacaagaucaccuucgaggcgaccggcaaccucguggucccccgguacgccuucgccauggagcgcaacgccggguccggcaucaucaucagcgacacgcccgugcacgacugcaacacgaccugccagaccccgaagggcgccaucaacaccucccugcccuuccagaacauccaccccaucaccaucgggaagugccccaaguacgucaagagcaccaagcugcggcucgcgaccggccugcgcaacgugccguccauccagagccgggggcuguucggcgccaucgccggguucaucgagggcggcuggacggggaugguggacggcugguacggguaccaccaccagaacgagcagggcuccggguacgccgccgaccucaagagcacccagaacgcgaucgacgagaucaccaacaaggugaacuccgucaucgagaagaugaacacccaguucacggccgugggcaaggaguucaaccaccuggagaagcgcaucgagaaccugaacaagaaggucgacgacggcuuccucgacaucuggaccuacaacgccgagcugcuggugcuccuggagaacgagcggacccuggacuaccacgacagcaacgugaagaaccucuacgagaagguccgcucccagcugaagaacaacgccaaggagaucgggaacggcugcuucgaguucuaccacaagugcgacaacacgugcauggagagcgugaagaacgggaccuacgacuaccccaaguacuccgaggaggccaagcugaaccgggaggagaucgacggcgugaagcucgagagcacccgcaucuaccagauccuggcgaucuacuccaccgucgccagcagccuggugcucguggucucccugggggccaucagcuucuggaugugcuccaacggcagccugcagugccggaucugcaucuga

SEQ ID NO: 69178 - RNA, 1701 nt, Artificial Sequence
  derived and/or modified CDS sequence (opt1) from hemagglutinin__InfluenzaA__ADJ40454
augaaggccauccuggugguccuccuguacaccuucgccaccgcgaacgccgacacgcugugcaucggcuaccacgccaacaacagcaccgacaccguggacaccgugcucgagaagaacgucacggugacccacuccgugaaccugcuggaggacaagcacaacgggaagcucugcaagcugcgcggcgucgcgccccugcaccucgggaagugcaacaucgccggcuggauccuggggaacccggagugcgagagccuguccaccgccagcuccuggagcuacaucguggagaccuccagcuccgacaacggcacgugcuaccccggcgacuucaucgacuacgaggagcuccgggagcagcugagcuccgugagcuccuucgagcgcuucgagaucuuccccaagaccagcuccuggcccaaccacgacagcaacaagggggucaccgccgccugcccgcacgccggcgcgaaguccuucuacaagaaccugaucuggcucgugaagaaggggaacagcuaccccaagcuguccaagagcuacaucaacgacaagggcaaggaggugcugguccucugggggauccaccaccccagcaccuccgccgaccagcagagccuguaccagaacgccgacgccuacguguucgugggcacgucccgguacagcaagaaguucaagcccgagaucgccauccgcccgaagguccggaaccaggagggccgcaugaacuacuacuggacccugguggagcccggggacaagaucaccuucgaggcgaccggcaaccucguggucccccgguacgccuucgccauggagcgcaacgccggguccggcaucaucaucagcgacacgcccgugcacgacugcaacacgaccugccagaccccgaagggcgccaucaacaccucccugcccuuccagaacauccaccccaucaccaucgggaagugccccaaguacgucaagagcaccaagcugcggcucgcgaccggccugcgcaacaucccguccauccagagccgggggcuguucggcgccaucgccggguucaucgagggcggcuggacggggaugguggacggcugguacggguaccaccaccagaacgagcagggcuccggguacgccgccgaccucaagagcacccagaacgcgaucgacaagaucaccaacaaggugaacuccgugaucgagaagaugaacacccaguucacggccgucggcaaggaguucaaccaccuggagaagcgcaucgagaaccugaacaagaagguggacgacggcuuccucgacaucuggaccuacaacgccgagcugcugguccuccuggagaacgagcggacccuggacuaccacgacagcaacgugaagaaccucuacgagaaggugcgcucccagcugaagaacaacgccaaggagaucgggaacggcugcuucgaguucuaccacaagugcgacaacacgugcauggagagcgucaagaacgggaccuacgacuaccccaaguacuccgaggaggccaagcugaaccgggaggagaucgacggcguggagcucgagagcacccgcaucuaccagauccuggcgaucuacuccaccguggccagcagccugguccucguggugucccugggggccaucagcuucuggaugugcuccaacggcagccugcagugccggaucugcaucuga

SEQ ID NO: 69179 - RNA, 1701 nt, Artificial Sequence
  derived and/or modified CDS sequence (opt1) from hemagglutinin__InfluenzaA__ADJ40464
augaaggccauccuggugguccuccuguacaccuucgccaccgcgaacacggacacccugugcaucggcuaccacgccaacaacagcaccgacaccguggacacggugcucgagaagaacgucaccgugacccacuccgugaaccugcuggaggacaagcacaacgggaagcucugcaagcugcgcggcgucgcgccccugcaccucgggaagugcaacaucgccggcuggauccuggggaacccggagugcgagagccuguccaccgccagcuccuggagcuacaucguggagacguccagcuccgacaacgggaccugcuaccccggcgacuucaucgacuacgaggagcuccgggagcagcugagcuccgugagcuccuucgagcgcuucgagaucuuccccaagaccagcuccuggcccaaccacgacagcaacaagggcgucaccgccgccugcccgcacgccggcgccaaguccuucuacaagaaccugaucuggcucgugaagaaggggaacagcuaccccaagcuguccaagagcuacaucaacgacaagggcaaggaggugcugguccucugggggauccaccaccccagcacguccgcggaccagcagagccuguaccagaacgccgacgccuacguguucgugggcaccucccgguacagcaagaaguucaagcccgagaucgccauccgcccgaagguccgggaccaggagggccgcaugaacuacuacuggacccugguggagcccggggacaagaucaccuucgaggccacgggcaaccucguggucccccgguacgcguucgccauggagcgcaacgccggguccggcaucaucaucagcgacacccccgugcacgacugcaacacgaccugccagaccccgaagggcgccaucaacaccucccugcccuuccagaacauccaccccaucaccaucgggaagugccccaaguacgucaagagcaccaagcugcggcucgccacgggccugcgcaacgugccguccauccagagccgggggcuguucggcgcgaucgccggguucaucgagggcggcuggaccgggaugguggacggcugguacggguaccaccaccagaacgagcagggcuccggguacgccgccgaccucaagagcacccagaacgccaucgacgagaucaccaacaaggugaacuccgucaucgagaagaugaacacgcaguucaccgcggugggcaaggaguucaaccaccuggagaagcgcaucgagaaccugaacaagaaggucgacgacggcuuccucgacaucuggaccuacaacgccgagcugcugauccuccuggagaacgagcggacccuggacuaccacgacagcaacgugaagaaccucuacgagaaggugcgcucccagcugaagaacaacgccaaggagaucgggaacggcugcuucgaguucuaccacaagugcgacaacacgugcauggagagcgucaagaacgggaccuacgacuaccccaaguacuccgaggaggccaagcugaaccgggaggagaucgacggcgugaagcucgagagcacccgcaucuaccagauccuggccaucuacuccaccguggcgagcagccugguccucguggugucccugggggccaucagcuucuggaugugcuccaacggcagccugcagugccggaucugcaucuga

SEQ ID NO: 69180 - RNA, 1701 nt, Artificial Sequence
  derived and/or modified CDS sequence (opt1) from hemagglutinin__InfluenzaA__ADJ40474
augaaggccauccuggugguccuccuguacaccuucgccaccgcgaacgccgacacgcugugcaucggcuaccacgccaacaacagcaccgacaccguggacaccgugcucgagaagaacgucacggugacccacuccgugaaccugcuggaggacaagcacaacgggaagcucugcaagcugcgcggcgucgcgccccugcaccucgggaagugcaacaucgccggcuggauccuggggaacccggagugcgagagccuguccaccgccagcuccuggagcuacaucguggagaccuccagcuccgacaacggcacgugcuaccccggcgacuucaucgacuacgaggagcuccgggagcagcugagcuccgugagcuccuucgagcgcuucgagaucuuccccaagaccagcuccuggcccaaccacgacagcaacaagggggucaccgccgccugcccgcacgccggcgcgaaguccuucuacaagaaccugaucuggcucgugaagaaggggaacagcuaccccaagcuguccaagagcuacaucaacgacaagggcaaggaggugcugguccucugggggauccaccaccccagcaccuccgccgaccagcagagccuguaccagaacgccgacgccuacguguucgugggcacgucccgguacagcaagaaguucaagcccgagaucgccauccgcccgaagguccgggagcaggagggccgcaugaacuacuacuggacccugguggagcccggggacaagaucaccuucgaggcgaccggcaaccucguggucccccgguacgccuucgccauggagcgcaacgccggguccggcaucaucaucagcgacacgcccgugcacgacugcaacacgaccugccagaccccgaagggcgccaucaacaccucccugcccuuccagaacauccaccccaucaccaucgggaagugccccaaguacgucaagagcaccaagcugcggcucgcgaccggccugcgcaacgugccguccauccagagccgggggcuguucggcgccaucgccggguucaucgagggcggcuggacggggaugguggacggcugguacggguaccaccaccagaacgagcagggcuccggguacgccgccgaccucaagagcacccagaacgcgaucgacgagaucaccaacaaggugaacuccgucaucgagaagaugaacacccaguucacggccgugggcaaggaguucaaccaccuggagaagcgcaucgagaaccugaacaagaaggucgacgacggcuuccucgacaucuggaccuacaacgccgagcugcuggugcuccuggagaacgagcggacccuggacuaccacgacagcaacgugaagaaccucuacgagaagguccgccggcagcugaagaacaacgccaaggagaucgggaacggcugcuucgaguucuaccacaagugcgacaacacgugcauggaguccgugaagaacgggaccuacgacuaccccaaguacagcgaggaggccaagcugaaccgcgaggagaucgacggcgugaagcucgaguccacccggaucuaccagauccuggcgaucuacagcaccgucgccuccagccuggugcucguggucagccugggggccaucuccuucuggaugugcagcaacggcucccugcagugccgcaucugcaucuga

SEQ ID NO: 69181 - RNA, 1701 nt, Artificial Sequence
  derived and/or modified CDS sequence (opt1) from hemagglutinin__InfluenzaA__ADJ40494
augaaggccauccuggugguccuccuguacaccuucgccaccgcgaacgccgacacgcugugcaucggcuaccacgccaacaacagcaccgacaccguggacaccgugcucgagaagaacgucacggugacccacuccguggaccugcuggaggacaagcacaacgggaagcucugcaagcugcgcggcgucgcgccccugcaccucgggaagugcaacaucgccggcuggauccuggggaacccggagugcgagagccuguccaccgccagcuccuggagcuacaucguggagaccuccagcuccgacaacggcacgugcuaccccggcgacuucaucgacuacgaggagcuccgggagcagcugagcuccgugagcuccuucgagcgcuucgagaucuuccccaagaccagcuccuggcccaaccacgacagcaacaagggggucaccgccgccugcccgcacgccggcgcgaaguccuucuacaagacccugaucuggcucgugaagaaggggaacagcuaccccaagcuguccaagagcuacaucaacgacaagggcaaggaggugcugguccucugggggauccaccaccccagcacguccgccgaccagcagagccuguaccagaacgccgacgccuacguguucgugggcaccucccgguacagcaagaaguucaagcccgagaucgccauccgcccgaagguccgggaccaggagggccgcaugaacuacuacuggacccugguggagcccggggacaagaucaccuucgaggcgacgggcaaccucguggucccccgguacgccuucgccauggagcgcaacgccggguccggcaucaucaucagcgacacccccgugcacgacugcaacacgaccugccagaccccgaagggcgccaucaacaccucccugcccuuccagaacauccaccccaucaccaucgggaagugccccaaguacgucaagagcaccaagcugcggcucgcgacgggccugcgcaacgugccguccauccagagccgggggcuguucggcgccaucgccggguucaucgagggcggcuggaccgggaugguggacggcugguacggguaccaccaccagaacgagcagggcuccggguacgccgccgaccucaagagcacccagaacgcgaucgacgagaucaccaacaaggugaacuccgucaucgagaagaugaacacgcaguucaccgccgugggcaaggaguucaaccaccuggagaagcgcaucgagaaccugaacaagaaggucgacgacggcuuccucgacaucuggaccuacaacgccgagcugcuggugcuccuggagaacgagcggacccuggacuaccacgacagcaacgugaagaaccucuacgagaagguccgcucccagcugaagaacaacgccaaggagaucgggaacggcugcuucgaguucuaccacaagugcgacaacacgugcauggagagcgugaagaacgggaccuacgacuaccccaaguacuccgaggaggccaagcugaaccgggaggagaucgacggcgugaagcucgagagcacccgcaucuaccagauccuggcgaucuacuccaccgucgccagcagccuggugcucguggucucccugggggccaucagcuucuggaugugcuccaacggcagccugcagugccggaucugcaucuga

SEQ ID NO: 69182 - RNA, 1701 nt, Artificial Sequence
  derived and/or modified CDS sequence (opt1) from hemagglutinin__InfluenzaA__ADJ40514
augaaggccgugcuggucgugcuccuguacaccuucgccaccacgaacgcggacacccugugcaucggcuaccacgccaacaacagcaccgacaccguggacacgguccucgagaagaacgugaccgugacccacuccgucaaccugcuggaggacaagcacaacgggaagcucugcaagcugcgcggcguggcgccccugcaccucgggaagugcaacaucgccggcuggauccuggggaacccggagugcgagagccuguccaccgccagcuccuggagcuacaucguggagacguccagcuccgacaacgggaccugcuaccccggcgacuucaucgacuacgaggagcuccgggagcagcugagcuccgucagcuccuucgagcgcuucgagaucuuccccaagaccagcuccuggcccaaccacgacagcaacaagggcgugaccgccgccugcccgcacgccggcgccaaguccuucuacaagaaccugaucuggcucgugaagaaggggaacagcuaccccaagcuguccaagagcuacaucaacgacaagggcaaggagguccuggugcucugggggauccaccaccccagcacguccgcggaccagcagagccuguaccagaacgccgacgccuacguguucgucggcaccucccgguacagcaagaaguucaagcccgagaucgccauccgcccgaaggugcggaaccaggagggccgcaugaacuacuacuggacccugguggagcccggggacaagaucaccuucgaggccacgggcaaccucgucgugccccgguacgcguucgccauggagcgcaacgccggguccggcaucaucaucagcgacacccccgugcacgacugcaacacgaccugccagaccccgaagggcgccaucaacaccucccugcccuuccagaacauccaccccaucaccaucgggaagugccccaaguacgucaagagcaccaagcugcggcucgccacgggccugcgcaacgugccguccauccagagccgggggcuguucggcgcgaucgccggguucaucgagggcggcuggaccgggaugguggacggcugguacggguaccaccaccagaacgagcagggcuccggguacgccgccgaccucaagagcacccagaacgccaucgacgagaucaccaacaaggucaacuccgugaucgagaagaugaacacgcaguucaccgcggucggcaaggaguucaaccaccuggagaagcgcaucgagaaccugaacaagaagguggacgacggcuuccucgacaucuggaccuacaacgccgagcugcuggugcuccuggagaacgagcggacccuggacuaccacgacagcaacgucaagaaccucuacgagaaggugcgcucccagcugaagaacaacgccaaggagaucgggaacggcugcuucgaguucuaccacaagugcgacaacacgugcauggagagcgugaagaacgggaccuacgacuaccccaaguacuccgaggaggccaagcugaaccgggaggagaucgacggcgucaagcucgagagcacccgcaucuaccagauccuggccaucuacuccaccguggcgagcagccuggugcucgucgugucccugggggccaucagcuucuggaugugcuccaacggcagccugcagugccggaucugcaucuga

SEQ ID NO: 69183 - RNA, 1701 nt, Artificial Sequence; identical to SEQ ID NO: 66693
  derived and/or modified CDS sequence (opt1) from hemagglutinin__InfluenzaA__ADJ40524

SEQ ID NO: 69184 - RNA, 1701 nt, Artificial Sequence; identical to SEQ ID NO: 67046
  derived and/or modified CDS sequence (opt1) from hemagglutinin__InfluenzaA__ADJ40534

SEQ ID NO: 69185 - RNA, 1701 nt, Artificial Sequence
  derived and/or modified CDS sequence (opt1) from hemagglutinin__InfluenzaA__ADJ40554
augaaggccauccuggugguccuccuguacaccuucgccaccgcgaacgccgacacgcugugcaucggcuaccacgccaacaacagcaccgacaccguggacaccgugcucgagaagaacgucacggugacccacuccgugaaccugcuggaggacaagcacaacgggaagcucugcaagcugcgcggcgucgcgccccugcaccucgggaagugcaacaucgccggcuggauccuggggaacccggagugcgagagccuguccaccgccagcuccuggagcuacaucguggagaccuccagcuccgacaacggcacgugcuaccccggcgacuucaucgacuacgaggagcuccgggagcagcugagcuccgugagcuccuucgagcgcuucgagaucuuccccaacaccagcuccuggcccaaccacgacagcaacaagggggucaccgccgccugcccgcacgccggcgcgaaguccuucuacaagaaccugaucuggcucgugaagaaggggaacagcuaccccaagcuguccaagagcuacaucaacgacaagggcaaggaggugcugguccucugggggauccaccaccccagcaccuccgccgaccagcagagccuguaccagaacgccgacgccuacguguucgugggcacgucccgguacagcaagaaguucaagcccgagaucgccauccgcccgaagguccgggaccaggagggccgcaugaacuacuacuggacccugguggagcccggggacaagaucaccuucgaggcgaccggcaaccucguggucccccgguacgccuucgccauggagcgcaacgccggguccggcaucaucaucagcgacacgcccgugcacgacugcaacacgaccugccagaccccgaagggcgccaucaacaccucccugcccuuccagaacauccaccccaucaccaucgggaagugccccaaguacgucaagagcaccaagcugcggcucgcgaccggccugcgcaacgugccguccauccagagccgggggcuguucggcgccaucgccggguucaucgagggcggcuggacggggaugguggacggcugguacggguaccaccaccagaacgagcagggcuccggguacgccgccgaccucaagagcacccagaacgcgaucgacgagaucaccaacaaggugaacuccgucaucgagaagaugaacacccaguucacggccgugggcaaggaguucaaccaccuggagaagcgcaucgagaaccugaacaagaaggucgacgacggcuuccucgacaucuggaccuacaacgccgagcugcuggugcuccuggagaacgagcggacccuggacuaccacgacagcaacgugaagaaccucuacgagaagguccgcucccagcugaagaacaacgccaaggagaucgggaacggcugcuucgaguucuaccacaagugcgacaacacgugcauggagagcgugaagaacgggaccuacgacuaccccaaguacuccgaggaggccaagcugaaccgggaggagaucgacggcgugaagcucgagagcacccgcaucuaccagauccuggcgaucuacuccaccgucgccagcagccuggugcucguggucucccugggggccaucagcuucuggaugugcuccaacggcagccugcagugccggaucugcaucuga

SEQ ID NO: 69186 - RNA, 1701 nt, Artificial Sequence; identical to SEQ ID NO: 66693
  derived and/or modified CDS sequence (opt1) from hemagglutinin__InfluenzaA__ADJ40564

SEQ ID NO: 69187 - RNA, 1701 nt, Artificial Sequence; identical to SEQ ID NO: 66693
  derived and/or modified CDS sequence (opt1) from hemagglutinin__InfluenzaA__ADJ40574

SEQ ID NO: 69188 - RNA, 1701 nt, Artificial Sequence; identical to SEQ ID NO: 68113
  derived and/or modified CDS sequence (opt1) from hemagglutinin__InfluenzaA__ADJ40584

SEQ ID NO: 69189 - RNA, 1701 nt, Artificial Sequence; identical to SEQ ID NO: 66693
  derived and/or modified CDS sequence (opt1) from hemagglutinin__InfluenzaA__ADJ40594

SEQ ID NO: 69190 - RNA, 1701 nt, Artificial Sequence; identical to SEQ ID NO: 67262
  derived and/or modified CDS sequence (opt1) from hemagglutinin__InfluenzaA__ADJ40604

SEQ ID NO: 69191 - RNA, 1701 nt, Artificial Sequence; identical to SEQ ID NO: 67262
  derived and/or modified CDS sequence (opt1) from hemagglutinin__InfluenzaA__ADJ40614

SEQ ID NO: 69192 - RNA, 1701 nt, Artificial Sequence; identical to SEQ ID NO: 66693
  derived and/or modified CDS sequence (opt1) from hemagglutinin__InfluenzaA__ADJ40634

SEQ ID NO: 69193 - RNA, 1701 nt, Artificial Sequence; identical to SEQ ID NO: 66693
  derived and/or modified CDS sequence (opt1) from hemagglutinin__InfluenzaA__ADJ40644

SEQ ID NO: 69194 - RNA, 1701 nt, Artificial Sequence; identical to SEQ ID NO: 66693
  derived and/or modified CDS sequence (opt1) from hemagglutinin__InfluenzaA__ADJ40654

SEQ ID NO: 69195 - RNA, 1701 nt, Artificial Sequence; identical to SEQ ID NO: 66693
  derived and/or modified CDS sequence (opt1) from hemagglutinin__InfluenzaA__ADJ40664

SEQ ID NO: 69196 - RNA, 1701 nt, Artificial Sequence; identical to SEQ ID NO: 66693
  derived and/or modified CDS sequence (opt1) from hemagglutinin__InfluenzaA__ADJ40674

SEQ ID NO: 69197 - RNA, 1701 nt, Artificial Sequence
  derived and/or modified CDS sequence (opt1) from hemagglutinin__InfluenzaA__ADJ41816
augaagaccaucaucgcccugagcuacauguucugccucguguucgcccagaaccugcccggcaacgacaacuccaccgcgacgcugugccucgggcaccacgccgucccgaacggcacccuggugaagaccaucaccaacgaccagaucgaggugacgaacgccaccgagcugguccagagcuccagcaccgggcgcaucugcgacagcccccaccggauccucgacggcaagaacugcacccugaucgacgcccugcucggggacccccacugcgacggcuuccagaacgagaagugggaccuguucguggagcgcuccaaggccuucuccaacugcuaccccuacgacgugccggacuacgcgagccugcggucccucgucgccagcuccggcacgcuggaguucaucaacgagggguucaacuggaccggcgugacccagagcgggggcuccugcacgugcaagcgcgggagcaacgacuccuucuucagccggcugaacuggcucuacgaguccgagagcaaguaccccgugcugaacgucaccaugcccaacaacggcaaguucgacaagcuguacaucuggggcauccaccaccccuccaccgacaaggagcagaccaaccucuacauccgcgccagcgggcgggugaccgugagcacgaagcgcucccagcagaccgucaucccgaacaucggcagccggcccugggugcgcgggcuguccagccggaucuccaucuacuggaccaucgugaagcccggcgacauccugcucaucagcuccaccggcaaccugaucgcgccccgcggguacuucaagauccggacgggcaagagcuccaucaugcgcagcgacgccccgaucgggaccugcuccagcgagugcaucacccccaacggcuccauccccaacgacaagcccuuccagaacgucaacaagaucaccuacggggccugcccgcgguacgugaagcagaacacgcugaagcucgccaccggcaugcgcaacgugcccgagaagcagacccggggcaucuucggggccaucgccggcuucaucgagaacgggugggagggcauggucgacgggugguacggcuuccgccaccagaacagcgagggcaccgggcaggcggccgaccugaaguccacgcaggccgccaucgaccagaucaacggcaagcugaaccgggugaucgagaagaccaacgagaaguuccaccagaucgagaaggaguucagcgagguggaggggcgcauccaggaccucgagaaguacgucgaggacaccaagaucgaccugugguccuacaacgccgagcugcucguggcgcuggagaaccagcacaccaucgaccugacggacagcgagaugaacaagcuguucgagaagacccggaagcagcuccgcgagaacgccgaggacaugggcaacgggugcuucaagaucuaccacaagugcgacaacgccugcaucggcuccauccgcaacggcaccuacgaccacgacguguaccgggacgaggcccugaacaaccgcuuccagaucaagggggucgagcucaagagcggcuacaaggacuggauccuguggaucagcuucgccaucuccugcuuccugcucugcgugguccugcugggguucaucaugugggcgugccagaagggcaacauccggugcaacaucugcaucuga

SEQ ID NO: 69198 - RNA, 1701 nt, Artificial Sequence; identical to SEQ ID NO: 66693
  derived and/or modified CDS sequence (opt1) from hemagglutinin__InfluenzaA__ADJ56640

SEQ ID NO: 69199 - RNA, 1701 nt, Artificial Sequence; identical to SEQ ID NO: 67491
  derived and/or modified CDS sequence (opt1) from hemagglutinin__InfluenzaA__ADJ56650

SEQ ID NO: 69200 - RNA, 1701 nt, Artificial Sequence; identical to SEQ ID NO: 66784
  derived and/or modified CDS sequence (opt1) from hemagglutinin__InfluenzaA__ADJ67983

SEQ ID NO: 69201 - RNA, 1701 nt, Artificial Sequence; identical to SEQ ID NO: 66784
  derived and/or modified CDS sequence (opt1) from hemagglutinin__InfluenzaA__ADJ67984

SEQ ID NO: 69202 - RNA, 1701 nt, Artificial Sequence; identical to SEQ ID NO: 66784
  derived and/or modified CDS sequence (opt1) from hemagglutinin__InfluenzaA__ADJ67985

SEQ ID NO: 69203 - RNA, 1701 nt, Artificial Sequence
  derived and/or modified CDS sequence (opt1) from hemagglutinin__InfluenzaA__ADJ80241
augaaggccauccuggugguccuccuguacaccuucgccaccgcgaacgccgacacgcugugcaucggcuaccacgccaacaacagcaccgacaccguggacaccgugcucgagaagaacgucacggugacccacuccgugaaccugcuggaggacaagcacaacgggaagcucugcaagcugcgcggcgucgcgccccugcaccucgggaagugcaacaucgccggcuggauccuggggaacccggagugcgagagccuguccaccgccagcuccuggagcuacaucguggagaccuccagcuccgacaacggcacgugcuaccccggcgacuucaucgacuacgaggagcuccgggagcagcugagcuccgugagcuccuucgagcgcuucgagaucuuccccaagaccagcuccuggcccaaccacgacagcaacaagggggucaccgccgccugcccgcacgccggcgcgaaguccuucuacaagaaccugaucuggcucgugaagaaggggaacagcuaccccaagcuguccaagagcuacaucaacgacaagggcaaggaggugcugguccucugggggauccaccaccccagcaccuccgccgaccagcagagccuguaccagaacgccgacgccuacguguucgugggcacgucccgguacagcaagaaguucaagcccgagaucgccauccgcccgaagguccggaaccaggagggccgcaugaacuacuacuggacccugguggagcccggggacaagaucaccuucgaggcgaccggcaaccucguggucccccgguacgccuucgccauggagcgcaacgccggguccggcaucaucaucagcgacacgcccgugcacgacugcaacacgaccugccagaccccgaagggcgccaucaacaccucccugcccuuccagaacauccaccccaucaccaucgggaagugccccaaguacgucaagagcaccaagcugcggcucgcgaccggccugcgcaacgugccguccauccagagccgggggcuguucggcgccaucgccggguucaucgagggcggcuggacggggaugguggacggcugguacggguaccaccaccagaacgagcagggcuccggguacgccgccgaccucaagagcacccagaacgcgaucgacaagaucaccaacaaggugaacuccgucaucgagaagaugaacacccaguucacggccgugggcaaggaguucaaccaccuggagaagcgcaucgagaaccugaacaagaaggucgacgacggcuuccucgacaucuggaccuacaacgccgagcugcuggugcuccuggagaacgagcggacccuggacuaccacgacagcaacgugaagaaccucuacgagaagguccgcucccagcugaagaacaacgccaaggagaucgggaacggcugcuucgaguucuaccacaagugcgacaacacgugcauggagagcgugaagaacgggaccuacgacuaccccaaguacuccgaggaggccaagcugaaccgggaggagaucgacggcgugaagcucgagagcacccgcaucuaccagauccuggcgaucuacuccaccgucgccagcagccuggugcucguggucucccugggggccaucagcuucuggaugugcuccaacggcagccugcagugccggaucugcaucuga

SEQ ID NO: 69204 - RNA, 1701 nt, Artificial Sequence
  derived and/or modified CDS sequence (opt1) from hemagglutinin__InfluenzaA__ADJ80242
augaaggccauccuggugguccuccuguacaccuucgccaccgcgaacgccgacacgcugugcaucggcuaccacgccaacaacagcaccgacaccguggacaccgugcucgagaagaacgucacggugacccacuccgugaaccugcuggaggacaagcacaacgggaagcucugcaagcugcgcggcgucgcgccccugcaccucgggaagugcaacaucgccggcuggauccuggggaacccggagugcgagagccuguccaccgccagcuccuggagcuacaucguggagaccuccagcuccgacaacggcacgugcuaccccggcgacuucaucgacuacgaggagcuccgggagcagcugagcuccgugagcuccuucgagcgcuucgagaucuuccccaagaccagcuccuggcccaaccacgacagcaacaagggggucaccgccgccugcccgcacgccggcgcgaaguccuucuacaagaaccugaucuggcucgugaagaaggggaacagcuaccccaagcuguccaagagcuacaucaacgacaagggcaaggaggugcugguccucugggggauccaccaccccagcaccuccgccgaccagcagagccuguaccagaacgccgacgccuacguguucgugggcacgucccgguacagcaagaaguucaagcccgagaucgccauccgcccgaagguccgggaccaggagggccgcaugaacuacuacuggacccugguggagcccggggacaagaucaccuucgaggcgaccggcaaccucguggucccccgguacgccuucgccauggagcgcaacgccggguccggcaucaucaucagcgacacgcccgugcacgacugcaacacgaccugccagaccccgaagggcgccaucaacaccucccugcccuuccagaacauccaccccaucaccaucgggaagugccccaaguacgucaagagcaccaagcugcggcucgcgaccggccugcgcaacgugccguccauccagagccgggggcuguucggcgccaucgccggguucaucgagggcggcuggacggggaugguggacggcugguacggguaccaccaccagaacgagcagggcuccggguacgccgccgaccucaagagcacccagaacgcgaucgacgagaucaccaacaaggugaacuccgucaucgagaagaugaacacccaguucacggccgugggcaaggaguucaaccaccuggagaagcgcaucgagaaccugaacaagaaggucgacgacggcuuccucgacaucuggaccuacaacgccgagcugcuggugcuccuggagaacgagcggacccuggacuaccacgacagcaacgugaagaaccucuacgagaagguccgcucccagcugaagaacaacgccaaggagaucgggaacggcugcuucgaguucuaccacaagugcgacaacacgugcauggagagcgugaagaacgggaccuacgacuaccccaaguacuccgaggaggccaagcugaaccgggaggagaucgacggcgugaagcucgagagcacccgcaucuaccagauccuggcgaucuacuccaccgccgccagcagccugguccucguggugucccugggggccaucagcuucuggaugugcuccaacggcagccugcagugccggaucugcaucuga

SEQ ID NO: 69205 - RNA, 1701 nt, Artificial Sequence; identical to SEQ ID NO: 68245
  derived and/or modified CDS sequence (opt1) from hemagglutinin__InfluenzaA__ADJ80243

SEQ ID NO: 69206 - RNA, 1701 nt, Artificial Sequence; identical to SEQ ID NO: 66693
  derived and/or modified CDS sequence (opt1) from hemagglutinin__InfluenzaA__ADJ80634

SEQ ID NO: 69207 - RNA, 1701 nt, Artificial Sequence; identical to SEQ ID NO: 68695
  derived and/or modified CDS sequence (opt1) from hemagglutinin__InfluenzaA__ADJ80644

SEQ ID NO: 69208 - RNA, 1701 nt, Artificial Sequence; identical to SEQ ID NO: 68695
  derived and/or modified CDS sequence (opt1) from hemagglutinin__InfluenzaA__ADJ80654

SEQ ID NO: 69209 - RNA, 1701 nt, Artificial Sequence; identical to SEQ ID NO: 67857
  derived and/or modified CDS sequence (opt1) from hemagglutinin__InfluenzaA__ADJ80674

SEQ ID NO: 69210 - RNA, 1701 nt, Artificial Sequence; identical to SEQ ID NO: 67857
  derived and/or modified CDS sequence (opt1) from hemagglutinin__InfluenzaA__ADJ80684

SEQ ID NO: 69211 - RNA, 1701 nt, Artificial Sequence
  derived and/or modified CDS sequence (opt1) from hemagglutinin__InfluenzaA__ADJ80694
augaaggccauccuggugguccuccuguacaccuucgccaccgcgaacgccgacacgcugugcaucggcuaccacgccaacaacagcaccgacaccguggacaccgugcucgagaagaacgucacggugacccacuccgugaacauccuggaggacaaccacaacgggaagcugugcaagcuccgcggcgucgcgccccugcaccuggggaagugcaacaucgccggcuggauccucgggaacccggagugcgagagccuguccaccgccagcuccuggagcuacaucguggagaccuccagcuccgacaacggcacgugcuaccccggcgacuucaucgacuacgaggagcugcgggagcagcucagcuccgugagcuccuucgagcgcuucgagaucuuccccaagaccagcuccuggcccaaccacgacagcaacaagggggucaccgccgccugcccgcacgccggcgcgaaguccuucuacaagaaccugaucuggcuggugaagaaggggaacagcuaccccaagcucuccaagagcuacaucaacgacaagggcaaggaggugcugguccugugggggauccaccaccccagcaccuccgccgaccagcagagccucuaccagaacgccgacgccuacguguucgugggcuccagccgguacuccaagaaguucaagcccgagaucgccauccgcccgaagguccgggaccaggagggccgcaugaacuacuacuggacgcugguggagcccggggacaagaucaccuucgaggcgaccggcaaccugguggucccccgguacgccuucgccauggagcgcaacgccgggagcggcaucaucaucuccgacacccccgugcacgacugcaacacgaccugccagaccccgaagggcgccaucaacaccagccuccccuuccagaacauccaccccaucacgaucgggaagugccccaaguacgugaaguccaccaagcugcggcuggcgaccggccuccgcaacgucccgagcauccagucccgggggcuguucggcgccaucgccggguucaucgagggcggcuggaccgggaugguggacggcugguacggguaccaccaccagaacgagcagggcagcggguacgccgccgaccugaaguccacgcagaacgcgaucgacgagaucaccaacaaggugaacagcgucaucgagaagaugaacacccaguucaccgccgugggcaaggaguucaaccaccucgagaagcgcaucgagaaccugaacaagaaggucgacgacggcuuccuggacaucuggacguacaacgccgagcuccuggugcugcucgagaacgagcggacccuggacuaccacgacuccaacgugaagaaccuguacgagaagguccgcagccagcucaagaacaacgccaaggagguggggaacggcugcuucgaguucuaccacaagugcgacaacacgugcauggaguccgugaagaacgggaccuacgacuaccccaaguacagcgaggaggccaagcugaaccgggaggagaucgacggcgucaagcuggaguccacccgcaucuaccagauccucgcgaucuacagcaccgccgccagcucccuggugcugguggucagccucggggccaucuccuucuggaugugcagcaacggcucccugcagugccggaucugcaucuga

SEQ ID NO: 69212 - RNA, 1701 nt, Artificial Sequence; identical to SEQ ID NO: 67857
  derived and/or modified CDS sequence (opt1) from hemagglutinin__InfluenzaA__ADJ80704

SEQ ID NO: 69213 - RNA, 1701 nt, Artificial Sequence
  derived and/or modified CDS sequence (opt1) from hemagglutinin__InfluenzaA__ADJ80714
augaaggccauccuggugguccuccuguacaccuucgccaccgcgaacgccgacacgcugugcaucggcuaccacgccaacaacagcaccgacaccguggacaccgugcucgagaagaacgucacggugacccacuccgugaaccugcuggaggacaagcacaacgggaagcucugcaagcugcgcggcgccgcgccccugcaccucgggaagugcaacaucgccggcuggauccuggggaacccggagugcgagagccuguccaccgccagcuccuggagcuacaucgucgagaccuccagcuccgacaacggcacgugcuaccccggcgacuucaucgacuacgaggagcuccgggagcagcugagcuccgugagcuccuucgagcgcuucgagaucuuccccaagaccagcuccuggcccaaccacgacagcaacaagggggugaccgccgccugcccgcacgcgggcgccaaguccuucuacaagaaccugaucuggcucgucaagaaggggaacagcuaccccaagcuguccaagagcuacaucaacgacaagggcaaggaggugcuggugcucugggggauccaccaccccagcaccuccgccgaccagcagagccuguaccagaacgccgacgccuacgucuucgugggcacgucccgguacagcaagaaguucaagcccgagaucgcgauccgcccgaaggugcgggaccaggagggccgcaugaacuacuacuggacccuggucgagcccggggacaagaucaccuucgaggccaccggcaaccucguggugccccgguacgccuucgccauggagcgcaacgccggguccggcaucaucaucagcgacacgcccguccacgacugcaacacgaccugccagaccccgaagggcgcgaucaacaccucccugcccuuccagaacauccaccccaucaccaucgggaagugccccaaguacgucaagagcaccaagcugcggcucgccaccggccugcgcaacgugccguccauccagagccgggggcuguucggcgccaucgccggguucaucgagggcggcuggacggggaugguggacggcugguacggguaccaccaccagaacgagcagggcuccggguacgccgcggaccucaagagcacccagaacgccaucgacaagaucaccaacaaggugaacuccgugaucgagaagaugaacacccaguucacggccgucggcaaggaguucaaccaccuggagaagcgcaucgagaaccugaacaagaagguggacgacggcuuccucgacaucuggaccuacaacgccgagcugcugguccuccuggagaacgagcggacccuggacuaccacgacagcaacgugaagaaccucuacgagaaggugcgcucccagcugaagaacaacgccaaggagaucgggaacggcugcuucgaguucuaccacaagugcgacaacacgugcauggagagcgucaagaacgggaccuacgacuaccccaaguacuccgaggaggcgaagcugaaccgggaggagaucgacggcgugaagcucgagagcacccgcaucuaccagauccuggccaucuacuccaccguggccagcagccugguccucguggugucccugggggccaucagcuucuggaugugcuccaacggcagccugcagugccggaucugcaucuga

SEQ ID NO: 69214 - RNA, 1701 nt, Artificial Sequence; identical to SEQ ID NO: 66693
  derived and/or modified CDS sequence (opt1) from hemagglutinin__InfluenzaA__ADJ80724

SEQ ID NO: 69215 - RNA, 1701 nt, Artificial Sequence; identical to SEQ ID NO: 67857
  derived and/or modified CDS sequence (opt1) from hemagglutinin__InfluenzaA__ADJ80734

SEQ ID NO: 69216 - RNA, 1701 nt, Artificial Sequence; identical to SEQ ID NO: 67857
  derived and/or modified CDS sequence (opt1) from hemagglutinin__InfluenzaA__ADJ80744

SEQ ID NO: 69217 - RNA, 1701 nt, Artificial Sequence; identical to SEQ ID NO: 67857
  derived and/or modified CDS sequence (opt1) from hemagglutinin__InfluenzaA__ADJ80754

SEQ ID NO: 69218 - RNA, 1701 nt, Artificial Sequence
  derived and/or modified CDS sequence (opt1) from hemagglutinin__InfluenzaA__ADJ80774
augaaggccauccuggugguccuccuguacaccuucgccaccgcgaacgccgacacgcugugcaucggcuaccacgccaacaacagcaccgacaccguggacaccgugcucgagaagaacgucacggugacccacuccgugaacauccuggaggacaagcacaacgggaagcugugcaagcuccgcggcgucgcgccccugcaccuggggaagugcaacaucgccggcuggauccucgggaacccggagugcgagagccuguccaccgcgaacagcugguccuacaucguggagaccagcuccagcgacaacggcacgugcuaccccggcgacuucaucgacuacgaggagcugcgggagcagcucuccagcguguccagcuucgagcgcuucgagaucuuccccaagaccuccagcuggcccaaccacgacuccaacaagggggucaccgccgccugcccgcacgccggcgccaagagcuucuacaagaaccugaucuggcuggugaagaaggggaacuccuaccccaagcucagcaaguccuacaucaacgacaagggcaaggaggugcugguccugugggggauccaccaccccagcaccagcgccgaccagcagucccucuaccagaacgccgacgccuacguguucgugggcagcucccgguacagcaagaaguucaagcccgagaucgccauccgcccgaagguccgggaccaggagggccgcaugaacuacuacuggacgcugguggagcccggggacaagaucaccuucgaggcgaccggcaaccugguggucccccgguacgccuucgccauggagcgcaacgccggguccggcaucaucaucagcgacacccccgugcacgacugcaacacgaccugccagaccccgaagggcgccaucaacaccucccuccccuuccagaacauccaccccaucacgaucgggaagugccccaaguacgucaagagcaccaagcugcggcuggcgaccggccuccgcaacgugccguccauccagagccgggggcuguucggcgccaucgccggguucaucgagggcggcuggaccgggaugguggacggcugguacggguaccaccaccagaacgagcagggcuccggguacgccgccgaccucaagagcacgcagaacgcgaucgacgagaucaccaacaaggugaacuccgucaucgagaagaugaacacccaguucaccgccgugggcaaggaguucaaccaccuggagaagcgcaucgagaaccugaacaagaaggucgacgacggcuuccuggacaucuggacguacaacgccgagcuccuggugcugcucgagaacgagcggacccuggacuaccacgacagcaacgugaagaaccuguacgagaagguccgcucccagcucaagaacaacgccaaggagguggggaacggcugcuucgaguucuaccacaagugcgacaacacgugcauggagagcgugaagaacgggaccuacgacuaccccaaguacuccgaggaggccaagcugaaccgggaggagaucgacggcgucaagcuggagagcacccgcaucuaccagauccucgcgaucuacuccaccgccgccagcagccuggugcugguggucucccucggggccaucagcuucuggaugugcuccaacggcagccugcagugccggaucugcaucuga

SEQ ID NO: 69219 - RNA, 1701 nt, Artificial Sequence
  derived and/or modified CDS sequence (opt1) from hemagglutinin__InfluenzaA__ADJ80784
augaaggccauccuggugguccuccuguacaccuucgccaccgcgaacgccgacacgcugugcaucggcuaccacgccaacaacagcaccgacaccguggacaccgugcucgagaagaacgucacggugacccacuccgugaaccugcuggaggacaagcacaacgggaagcucugcaagcugcgcggcgucgcgccccugcaccucgggaagugcaacaucgccggcuggauccuggggaacccggagugcgagagccuguccaccgccagcuccuggagcuacaucguggagaccuccagcuccgacaacggcacgugcuaccccggcgacuucaucgacuacgaggagcuccgggagcagcugagcuccgugagcuccuucgagcgcuucgagaucuuccccaagaccagcuccuggcccaaccacgacagcaacaagggggucaccgccgccugcccgcacgccggcgcgaaguccuucuacaagaaccugaucuggcucgugaagaaggggaacagcuaccccaagcuguccaagagcuacaucaacgacaagggcaaggaggugcugguccucugggggauccaccaccccagcaccuccgccgaccagcagagccuguaccagaacgccgacgccuacguguucgugggcacgucccgguacagcaagaaguucaagcccgagaucgccauccgcccgaagguccgggaccaggagggccgcaugaacuacuacuggacccugguggagcccggggacaagaucaccuucgaggcgaccggcaaccucguggucccccgguacgccuucgccauggagcgcaacgccggguccggcaucaucaucagcgacacgcccgugcacgacugcaacacgaccugccagaccccgaagggcgccaucaacaccucccugcccuuccacaacauccaccccaucaccaucgggaagugccccaaguacgucaagagcaccaagcugcggcucgcgaccggccugcgcaacgugccguccauccagagccgggggcuguucggcgccaucgccggguucaucgagggcggcuggacggggaugguggacggcugguacggguaccaccaccagaacgagcagggcuccggguacgccgccgaccucaagagcacccagaacgcgaucgacaagaucaccaacaaggugaacuccgucaucgagaagaugaacacccaguucacggccgugggcaaggaguucaaccaccuggagaagcgcaucgagaaccugaacaagaaggucgacgacggcuuccucgacaucuggaccuacaacgccgagcugcuggugcuccuggagaacgagcggacccuggacuaccacgacagcaacgugaagaaccucuacgagaagguccgcucccagcugaagaacaacgccaaggagaucgggaacggcugcuucgaguucuaccacaagugcgacaacacgugcauggagagcgugaagaacgggaccuacgacuaccccaaguacuccgaggaggccaagcugaaccgggaggagaucgacggcgugaagcucgagagcacccgcaucuaccagauccuggcgaucuacuccaccgucgccagcagccuggugcucguggucucccugggggccaucagcuucuggaugugcuccaacggcagccugcagugccggaucugcaucuga

SEQ ID NO: 69220 - RNA, 1701 nt, Artificial Sequence; identical to SEQ ID NO: 67857
  derived and/or modified CDS sequence (opt1) from hemagglutinin__InfluenzaA__ADJ80794

SEQ ID NO: 69221 - RNA, 1701 nt, Artificial Sequence; identical to SEQ ID NO: 68695
  derived and/or modified CDS sequence (opt1) from hemagglutinin__InfluenzaA__ADJ80804

SEQ ID NO: 69222 - RNA, 1701 nt, Artificial Sequence
  derived and/or modified CDS sequence (opt1) from hemagglutinin__InfluenzaA__ADJ80814
augaaggccauccuggugguccuccuguacaccuucgccaccgcgaacgccgacacgcugugcaucggcuaccacgccaacaacagcaccgacaccguggacaccgugcucgagaagaacgucacggugacccacuccgugaaccugcuggaggacaagcacaacgggaagcucugcaagcugcgcggcgucgcgccccugcaccucgggaagugcaacaucgccggcuggauccuggggaacccggagugcgagagccuguccaccgccagcuccuggagcuacaucguggagaccuccagcuccgacaacggcacgugcuaccccggcgacuucaucgacuacgaggagcuccgggagcagcugagcuccgugagcuccuucgagcgcuucgagaucuuccccaagaccagcuccuggcccaaccacgacagcaacaagggggucaccgccgccugcccgcgggccggcgcgaaguccuucuacaagaaccugaucuggcucgugaagaaggggaacagcuaccccaagcuguccaagagcuacaucaacgacaagggcaaggaggugcugguccucugggggauccaccaccccagcaccuccgccgaccagcagagccuguaccagaacgccgacgccuacguguucgugggcacgucccgcuacagcaagaaguucaagcccgagaucgccauccggccgaagguccgcgaccaggagggccggaugaacuacuacuggacccugguggagcccggggacaagaucaccuucgaggcgaccggcaaccucguggucccccgcuacgccuucgccaucgagcggaacgccggguccggcaucaucaucagcgacacgcccgugcacgacugcaacacgaccugccagaccccgaagggcgccaucaacaccucccugcccuuccagaacauccaccccaucaccaucgggaagugccccaaguacgucaagagcaccaagcugcgccucgcgaccggccugcggaacgugccguccauccagagccgcgggcuguucggcgccaucgccggguucaucgagggcggcuggacggggaugguggacggcugguacggguaccaccaccagaacgagcagggcuccggguacgccgccgaccucaagagcacccagaacgcgaucgacaagaucaccaacaaggugaacuccgucaucgagaagaugaacacccaguucacggccgugggcaaggaguucaaccaccuggagaagcggaucgagaaccugaacaagaaggucgacgacggcuuccucgacaucuggaccuacaacgccgagcugcuggugcuccuggagaacgagcgcacccuggacuaccacgacagcaacgugaagaaccucuacgagaagguccggucccagcugaagaacaacgccaaggagaucgggaacggcugcuucgaguucuaccacaagugcgacaacacgugcauggagagcgugaagaacgggaccuacgacuaccccaaguacuccgaggaggccaagcugaaccgcgaggagaucgacggcgugaagcucgagagcacccggaucuaccagauccuggcgaucuacuccaccgucgccagcagccuggugcucguggucucccugggggccaucagcuucuggaugugcuccaacggcagccugcagugccgcaucugcaucuga

SEQ ID NO: 69223 - RNA, 1701 nt, Artificial Sequence
  derived and/or modified CDS sequence (opt1) from hemagglutinin__InfluenzaA__ADJ80834
augaaggccauccuggugguccuccuguacaccuucgccaccgcgaacgccgacacgcugugcaucggcuaccacgccaacaacagcaccgacaccguggacaccgugcucgagaagaacgucacggugacccacuccgugaaccugcuggaggacaagcacaacgggaagcucugcaagcugcgcggcgucgcgccccugcaccucgggaagugcaacaucgccggcuggauccuggggaacccggagugcgagagccuguccaccgccagcuccuggagcuacaucguggagaccuccagcuccgacaacggcacgugcuaccccggcgacuucaucgacuacgaggagcuccgggagcagcugagcuccgugagcuccuucgagcgcuucgagaucuuccccaagaccagcuccuggcccaaccacgacagcaacaagggggucaccgccgccugcccgcacgccggcgcgaaguccuucuacaagaaccugaucuggcucgugaagaaggggaacagcuaccccaagcuguccaagagcuacaucaacgacaagggcaaggaggugcugguccucugggggauccaccaccccagcaccuccacggaccagcagagccuguaccagaacgccgacgccuacguguucgugggcaccucccgguacagcaagaaguucaagcccgagaucgccauccgcccgaagguccgggaccaggagggccgcaugaacuacuacuggacccugguggagcccggggacaagaucaccuucgaggccacgggcaaccucguggucccccgguacgcguucgccauggagcgcaacuccgggagcggcaucaucaucuccgacacccccgugcacuacugcaacacgaccugccagaccccgaagggcgccaucaacaccagccugcccuuccagaacauccaccccaucaccaucgggaagugccccaaguacgugaaguccaccaagcugcggcucgccacgggccugcgcaacgucccgagcauccagucccgggggcuguucggcgccaucgcgggguucaucgagggcggcuggaccgggaugguggacggcugguacggguaccaccaccagaacgagcagggcagcggguacgccgccgaccucaaguccacccagaacgccaucgacgagaucaccaacaaggugaacagcgucaucgagaagaugaacacgcaguucaccgccgugggcaaggaguucaaccaccuggagaagcgcaucgagaaccugaacaagaaggucgacgacggcuuccucgacaucuggaccuacaacgcggagcugcuggugcuccuggagaacgagcggacccuggacuaccacgacuccaacgugaagaaccucuacgagaagguccgcagccagcugaagaacaacgccaaggagaucgggaacggcugcuucgaguucuaccacaagugcgacaacacgugcauggaguccgugaagaacgggaccuacgacuaccccaaguacagcgaggaggccaagcugaaccgggaggagaucgacggcgugaagcucgaguccacccgcaucuaccagauccuggccaucuacagcaccgucgccagcucccuggugcucguggucagccugggggcgaucuccuucuggaugugcagcaacggcucccugcagugccggaucugcaucuga

SEQ ID NO: 69224 - RNA, 1701 nt, Artificial Sequence; identical to SEQ ID NO: 68895
  derived and/or modified CDS sequence (opt1) from hemagglutinin__InfluenzaA__ADJ80848

SEQ ID NO: 69225 - RNA, 1701 nt, Artificial Sequence
  derived and/or modified CDS sequence (opt1) from hemagglutinin__InfluenzaA__ADJ80858
augaagaccauccuggugguccuccuguacaccuucgccacggccaacgcggacacccugugcaucggcuaccacgccaacaacagcaccgacaccguggacacggugcucgagaagaacgucaccgugacccacuccgugaaccugcuggaggacaagcacaacgggaagcucugcaagcugcgcggcgucgcgccccugcaccucgggaagugcaacaucgccggcuggauccuggggaacccggagugcgagagccuguccaccgccagcuccuggagcuacaucguggagacguccagcuccgacaacgggaccugcuaccccggcgacuucaucgacuacgaggagcuccgggagcagcugagcuccgugagcuccuucgagcgcuucgagaucuuccccaagaccagcuccuggcccaaccacgacagcaacaagggcgucaccgccgccugcccgcacgccggcgccaaguccuucuacaagaaccugaucuggcucgugaagaaggggaacagcuaccccaagcuguccaagagcuacaucaacgacaagggcaaggaggugcugguccucugggggauccaccaccccagcacguccgcggaccagcagagccuguaccagaacgccgacgccuacguguucgugggcaccucccgguacagcaagaaguucaagcccgagaucgccauccgcccgaagguccgggaccaggagggccgcaugaacuacuacuggacccugguggagcccggggacaagaucaccuucgaggccacgggcaaccucguggucccccgguacgcguucgccauggagcgcaacgccggguccggcaucaucaucagcgacacccccgugcacgacugcaacacgaccugccagaccccgaagggcgccaucaacaccucccugcccuuccagaacauccaccccaucaccaucgggaagugccccaaguacgucaagagcaccaagcugcggcucgccacgggccugcgcaacgugccguccauccagagccgggggcuguucggcgcgaucgccggguucaucgagggcggcuggaccgggaugguggacggcugguacggguaccaccaccagaacgagcagggcuccggguacgccgccgaccucaagagcacccagaacgccaucgacaagaucaccaacaaggugaacuccgucaucgagaagaugaacacgcaguucaccgcggugggcaaggaguucaaccaccuggagaagcgcaucgagaaccugaacaagaaggucgacgacggcuuccucgacaucuggaccuacaacgccgagcugcuggugcuccuggagaacgagcggacccuggacuaccacgacagcaacgugaagaaccucuacgagaagguccgcucccagcugaagaacaacgccaaggagaucgggaacggcugcuucgaguucuaccacaagugcgacaacacgugcauggagagcgugaagaacgggaccuacgacuaccccaaguacuccgaggaggccaagcugaaccgggaggagaucgacggcgugaagcucgagagcacccgcaucuaccagauccuggccaucuacuccaccgucgcgagcagccuggugcucguggucucccugggggccaucagcuucuggaugugcuccaacggcagccugcagugccggaucugcaucuga

SEQ ID NO: 69226 - RNA, 1701 nt, Artificial Sequence
  derived and/or modified CDS sequence (opt1) from hemagglutinin__InfluenzaA__ADJ80868
augaaggccauccuggugguccuccuguacaccuucgccaccgcgaacgccgacacgcugugcaucggcuaccacgccaacaacagcaccgacaccguggacaccgugcucgagaagaacgucacggugacccacuccgugaaccugcuggaggacaagcacaacgggaagcucugcaagcugcgcggcgucgcgccccugcaccucgggaagugcaacaucgccggcuggauccuggggaacccggagugcgagagccuguccaccgccagcuccuggagcuacaucguggagaccuccagcuccgacaacggcacgugcuaccccggcgacuucaucgacuacgaggagcuccgggagcagcugagcuccgugagcuccuucgagcgcuucgagaucuuccccaagaccagcuccuggcccaaccacgacagcaacaagggggucaccgccgccugcccgaacgccggcgcgaaguccuucuacaagaaccugaucuggcucgugaagaaggggaacagcuaccccaagcuguccaagagcuacaucaacgacaagggcaaggaggugcugguccucugggggauccaccaccccagcaccuccgccgaccagcagagccuguaccagaacgccgacgccuacguguucgugggcacgucccgguacagcaagaaguucaagcccgagaucgccauccgcccgaagguccgggaccaggagggccgcaugaacuacuacuggacccugguggagcccgggggcaagaucaccuucgaggcgaccgggaaccucguggucccccgguacgccuucgccauggagcgcaacgccggcuccggcaucaucaucagcgacacgcccgugcacgacugcaacacgaccugccagaccccgaagggggccaucaacaccucccugcccuuccagaacauccaccccaucaccaucggcaagugccccaaguacgucaagagcaccaagcugcggcucgcgaccgggcugcgcaacgugccguccauccagagccggggccuguucggggccaucgccggcuucaucgagggcggguggacgggcaugguggacgggugguacggcuaccaccaccagaacgagcagggguccggcuacgccgccgaccucaagagcacccagaacgcgaucgacaagaucaccaacaaggugaacuccgucaucgagaagaugaacacccaguucacggccgugggcaaggaguucaaccaccuggagaagcgcaucgagaaccugaacaagaaggucgacgacggguuccucgacaucuggaccuacaacgccgagcugcuggugcuccuggagaacgagcggacccuggacuaccacgacagcaacgugaagaaccucuacgagaagguccgcucccagcugaagaacaacgccaaggagaucggcaacgggugcuucgaguucuaccacaagugcgacaacacgugcauggagagcgugaagaacggcaccuacgacuaccccaaguacuccgaggaggccaagcugaaccgggaggagaucgacggggugaagcucgagagcacccgcaucuaccagauccuggcgaucuacuccaccgucgccagcagccuggugcucguggucucccugggcgccaucagcuucuggaugugcuccaacggcagccugcagugccggaucugcaucuga

SEQ ID NO: 69227 - RNA, 1701 nt, Artificial Sequence; identical to SEQ ID NO: 67857
  derived and/or modified CDS sequence (opt1) from hemagglutinin__InfluenzaA__ADJ80883

SEQ ID NO: 69228 - RNA, 1701 nt, Artificial Sequence; identical to SEQ ID NO: 67857
  derived and/or modified CDS sequence (opt1) from hemagglutinin__InfluenzaA__ADJ80893

SEQ ID NO: 69229 - RNA, 1701 nt, Artificial Sequence; identical to SEQ ID NO: 67857
  derived and/or modified CDS sequence (opt1) from hemagglutinin__InfluenzaA__ADJ80910

SEQ ID NO: 69230 - RNA, 1701 nt, Artificial Sequence; identical to SEQ ID NO: 66693
  derived and/or modified CDS sequence (opt1) from hemagglutinin__InfluenzaA__ADJ80927

SEQ ID NO: 69231 - RNA, 1701 nt, Artificial Sequence
  derived and/or modified CDS sequence (opt1) from hemagglutinin__InfluenzaA__ADJ80937
augaaggccauccuggugguccuccuguacaccuucgccaccgcgaacgccgacacgcugugcaucggcuaccacgccaacaacagcaccgacaccguggacaccgugcucgagaagaacgucacggugacccacuccgugaaccugcuggaggacaagcacaacgggaagcucugcaagcugcgcggcgucgcgccccugcaccucgggaagugcaacaucgccggcuggauccuggggaacccggagugcgagagccuguccaccgccagcuccuggagcuacaucguggagaccuccagcuccgacaacggcacgugcuaccccggcgacuucaucgacuacgaggagcuccgggagcagcugagcuccgugagcuccuucgagcgcuucgagaucuuccccaagaccagcuccuggcccaaccacgacagcaacaagggggucaccgccgccugcccgcacgccggcgcgaaguccuucuacaagaaccugaucuggcucgugaagaaggggaacagcuaccccaagcuguccaagagcuacaucaacgacaagggcaaggaggugcugguccucugggggauccaccaccccagcaccuccgccgaccagcagagccuguaccagaacgccgacgccuacgccuucgugggcacgucccgguacagcaagaaguucaagcccgagaucgcgauccgcccgaaggugcgggaccaggagggccgcaugaacuacuacuggacccuggucgagcccggggacaagaucaccuucgaggccaccggcaaccucguggugccccgguacgccuucgccauggagcgcaacgccggguccggcaucaucaucagcgacacgcccguccacaacugcaacacgaccugccagaccccgaagggcgcgaucaacaccucccugcccuuccagaacauccaccccaucaccaucgggaagugccccaaguacgucaagagcaccaagcugcggcucgccaccggccugcgcaacgugccguccauccagagccgggggcuguucggcgccaucgccggguucaucgagggcggcuggacggggaugguggacggcugguacggguaccaccaccagaacgagcagggcuccggguacgccgcggaccucaagagcacccagaacgccaucgacgagaucaccaacaaggugaacuccgugaucgagaagaugaacacccaguucacggccgucggcaaggaguucaaccaccuggagaagcgcaucgagaaccugaacaagaagguggacgacggcuuccucgacaucuggaccuacaacgccgagcugcugguccuccuggagaacgagcggacccuggacuaccacgacagcaacgugaagucccucuacgagaaggugcgcagccagcugaagaacaacgccaaggagaucgggaacggcugcuucgaguucuaccacaagugcgacaacacgugcauggaguccgucaagaacgggaccuacgacuaccccaaguacagcgaggaggcgaagcugaaccgggaggagaucgacggcgugaagcucgaguccacccgcaucuaccagauccuggccaucuacagcaccguggccagcucccugguccucguggugagccugggggccaucuccuucuggaugugcagcaacggcucccugcagugccggaucugcaucuga

SEQ ID NO: 69232 - RNA, 1701 nt, Artificial Sequence; identical to SEQ ID NO: 67857
  derived and/or modified CDS sequence (opt1) from hemagglutinin__InfluenzaA__ADJ80947

SEQ ID NO: 69233 - RNA, 1701 nt, Artificial Sequence; identical to SEQ ID NO: 67857
  derived and/or modified CDS sequence (opt1) from hemagglutinin__InfluenzaA__ADJ80967

SEQ ID NO: 69234 - RNA, 1701 nt, Artificial Sequence; identical to SEQ ID NO: 67857
  derived and/or modified CDS sequence (opt1) from hemagglutinin__InfluenzaA__ADJ80977

SEQ ID NO: 69235 - RNA, 1701 nt, Artificial Sequence
  derived and/or modified CDS sequence (opt1) from hemagglutinin__InfluenzaA__ADJ80993
augaaggccauccuggugguccuccuguacaccuucgccaccgcgaacgccgacacgcugugcaucggcuaccacgccaacaacagcaccgacaccguggacaccgugcucgagaagaacgucacggugacccacuccgugaaccugcuggaggacaagcacaacgggaagcucugcaagcugcgcggcgucgcgccccugcaccucgggaagugcaacaucgccggcuggauccuggggaacccggagugcgagagccuguccaccgccagcuccuggagcuacaucguggagaccuccagcuccgacaacggcacgugcuaccccggcgacuucaucgacuacgaggagcuccgggagcagcugagcuccgugagcuccuucgagcgcuucgagaucuuccccaagaccagcuccuggcccaaccacgacagcaacaagggggucaccgccgccugcccgaacgccggcgcgaaguccuucuacaagaaccugaucuggcucgugaagaaggggaacagcuaccccaagcuguccaagagcuacaucaacgacaagggcaaggaggugcugguccucugggggauccaccaccccagcaccuccgccgaccagcagagccuguaccagaacgccgacgccuacguguucgugggcacgucccgguacagcaagaaguucaagcccgagaucgccauccgcccgaagguccgggaccaggagggccgcaugaacuacuacuggacccugguggagcccggggacaagaucaccuucgaggcgaccggcaaccucguggucccccgguacgccuucgccauggagcgcaacgccggguccggcaucaucaucagcgacacgcccgugcacgacugcaacacgaccugccagaccccgaagggcgccaucaacaccucccugcccuuccagaacauccaccccaucaccaucgggaagugccccaaguacgucaagagcaccaagcugcggcucgcgaccggccugcgcaacgugccguccauccagagccgggggcuguucggcgccaucgccggguucaucgagggcggcuggacggggaugguggacggcugguacggguaccaccaccagaacgagcagggcuccggguacgccgccgaccucaagagcacccagaacgcgaucgacaagaucaccaacaaggugaacuccgucaucgagaagaugaacacccaguucacggccgugggcaaggaguucaaccaccuggagaagcgcaucgagaaccugaacaagaaggucgacgacggcuuccucgacaucuggaccuacaacgccgagcugcuggugcuccuggagaacgagcggacccuggacuaccacgacagcaacgugaagaaccucuacgagaagguccgcucccagcugaagaacaacgccaaggagaucgggaacggcugcuucgaguucuaccacaagugcgacaacacgugcauggagagcgugaagaacgggaccuacgacuaccccaaguacuccgaggaggccaagcugaaccgggaggagaucgacggcgugaagcucgagagcacccgcaucuaccagauccuggcgaucuacuccaccgucgccagcagccuggugcucguggucucccugggggccaucagcuucuggaugugcuccaacggcagccugcagugccggaucugcaucuga

SEQ ID NO: 69236 - RNA, 1701 nt, Artificial Sequence
  derived and/or modified CDS sequence (opt1) from hemagglutinin__InfluenzaA__ADJ81003
augaaggccauccuggugguccuccuguacaccuucgccaccgcgaacgccgacacgcugugcaucggcuaccacgccaacaacagcaccgacaccguggacaccgugcucgagaagaacgucacggugacccacuccgugaaccugcuggaggacaagcacaacgggaagcucugcaagcugcgcggcgucgcgccccugcaccucgggaagugcaacaucgccggcuggauccuggggaacccggagugcgagagccuguccaccgccagcuccuggagcuacaucguggagaccuccagcuccgacaacggcacgugcuaccccggcgacuucaucgacuacgaggagcuccgggagcagcugagcuccgugagcuccuucgagcgcuucgagaucuuccccaagaccagcuccuggcccaaccacgacagcaacaagggggucaccgccgccugcccgcacgccggcgcgaaguccuucuacaagaaccugaucuggcucgugaagaaggggaacagcuaccccaagcuguccaagagcuacaucaacgacaagggcaaggaggugcugguccucugggggauccaccaccccagcaccuccgccgaccagcagagccuguaccagaacgccgacgccuacguguucgugggcacgucccgguacagcaagaaguucaagcccgagaucgccauccgcccgaagguccgggaccaggagggccgcaugaacuacuacuggacccugguggagcccggggacaagaucaccuucgaggcgaccggcaaccucguggucccccgguacgccuucgccauggagcgcaacgccggguccggcaucaucaucagcgacacgcccgugcacgacugcaacacgaccugccagaccccgaagggcgccaucaacaccucccugcccuuccagaacauccaccccaucaccaucgggaagugccccaaguacgucaagagcaccaagcugcggcucgcgaccggccugcgcaacgugccguccauccagagccgggggcuguucggcgccaucgccggguucaucgagggcggcuggacggggaugguggacggcugguacggguaccaccaccagaacgagcagggcuccggguacgccgccgaccucaagagcacccagaacgcgaucgacaagaucaccaacaaggugaacuccgucaucgagaagaugaacacccaguucacggccgugggcaaggaguucaaccaccuggagaagcgcaucgagaaccugaacaagaaggucgacgacggcuuccucgacaucuggaccuacaacgccgagcugcuggugcuccuggagaacgagcggacccuggacuaccacgacagcaacgugaagaaccucuacgagaagguccgcucccagcugaagaacaacgccaaggagaucgggaacggcugcuucgaguucuaccacaagugcgacaacacgugcauggagagcgugaagaacgggaccuacgacuaccccaaguacuccgaggaggccaagcugaaccgggagaagaucgacggcgugaagcucgagagcacccgcaucuaccagauccuggcgaucuacuccaccgucgccagcagccuggugcucguggucucccugggggccaucagcuucuggaugugcuccaacggcagccugcagugccggaucugcaucuga

SEQ ID NO: 69237 - RNA, 1701 nt, Artificial Sequence; identical to SEQ ID NO: 68895
  derived and/or modified CDS sequence (opt1) from hemagglutinin__InfluenzaA__ADJ81013

SEQ ID NO: 69238 - RNA, 1701 nt, Artificial Sequence
  derived and/or modified CDS sequence (opt1) from hemagglutinin__InfluenzaA__ADJ81023
augaaggccauccuggugguccuccuguacaccuucgccaccgcgaacgccgacacgcugugcaucggcuaccacgccaacaacagcaccgacaccguggacaccgugcucgagaagaacgucacggugacccacuccgugaaccugcuggaggacaagcacaacgggaagcucugcaagcugcgcggcgucgcgccccugcaccucgggaagugcaacaucgccggcuggauccuggggaacccggagugcgagagccuguccaccgccagcuccuggagcuacaucguggagaccuccagcuccgacaacggcacgugcuaccccggcgacuucaucgacuacgaggagcuccgggagcagcugagcuccgugagcuccuucgagcgcuucgagauguuccccaagaccagcuccuggcccaaccacgacagcaacaagggggucaccgccgccugcccgcacgccggcgcgaaguccuucuacaagaaccugaucuggcucgugaagaaggggaacagcuaccccaagcugaacaaguccuacaucaacgacaagggcaaggaggugcugguccucugggggauccaccaccccagcaccagcgccgaccagcagucccuguaccagaacgccgacgccuacguguucgugggcacgagccgguacuccaagaaguucaagcccgagaucgccauccgcccgaagguccgggaccaggagggccgcaugaacuacuacuggacccugguggagcccggggacaagaucaccuucgaggcgaccggcaaccucguggucccccgguacgccuucgccauggagcgcaacgccgggagcggcaucaucaucuccgacacgcccgugcacgacugcaacacgaccugccagaccccgaagggcgccaucaacaccagccugcccuuccagaacauccaccccaucaccaucgggaagugccccaaguacgugaaguccaccaagcugcggcucgcgaccggccugcgcaacgucccgagcauccagucccgggggcuguucggcgccaucgccggguucaucgagggcggcuggacggggaugguggacggcugguacggguaccaccaccagaacgagcagggcagcggguacgccgccgaccucaaguccacccagaacgcgaucgacgagaucaccaacaaggugaacagcgucaucgagaagaugaacacccaguucacggccgugggcaaggaguucaaccaccuggagaagcgcaucgagaaccugaacaagaaggucgacgacggcuuccucgacaucuggaccuacaacgccgagcugcuggugcuccuggagaacgagcggacccuggacuaccacgacuccaacgugaagaaccucuacgagaagguccgcagccagcugaagaacaacgccaaggagaucgggaacggcugcuucgaguucuaccacaagugcgacaacacgugcauggaguccgugaagaacgggaccuacgacuaccccaaguacagcgaggaggccaagcugaaccgggaggagaucgacggcgugaagcucgaguccacccgcaucuaccagauccuggcgaucuacagcaccgucgccuccagccuggugcucguggucagccugggggccaucuccuucuggaugugcagcaacggcucccugcagugccggaucugcaucuga

SEQ ID NO: 69239 - RNA, 1701 nt, Artificial Sequence; identical to SEQ ID NO: 67857
  derived and/or modified CDS sequence (opt1) from hemagglutinin__InfluenzaA__ADJ81033

SEQ ID NO: 69240 - RNA, 1701 nt, Artificial Sequence; identical to SEQ ID NO: 66693
  derived and/or modified CDS sequence (opt1) from hemagglutinin__InfluenzaA__ADJ81043

SEQ ID NO: 69241 - RNA, 1701 nt, Artificial Sequence
  derived and/or modified CDS sequence (opt1) from hemagglutinin__InfluenzaA__ADJ81053
augaaggccauccuggugguccuccuguacaccuucaccacggccaacgcggacacccugugcaucggcuaccacgccaacaacagcaccgacaccguggacacggugcucgagaagaacgucaccgugacccacuccgugaaccugcuggaggacaagcacaacgggaagcucugcaagcugcgcggcgucgcgccccugcaccucgggaagugcaacaucgccggcuggauccuggggaacccggagugcgagagccuguccaccgccagcuccuggagcuacaucguggagacguccagcuccgacaacgggaccugcuaccccggcgacuucaucgacuacgaggagcuccgggagcagcugagcuccgugagcuccuucgagcgcuucgagaucuuccccaagaccagcuccuggcccaaccacgacagcaacaagggcgucaccgccgccugcccgcacgccggcgccaaguccuucuacaagaaccugaucuggcucgugaagaaggggaacagcuaccccaagcuguccaagagcuacaucaacgacaagggcaaggaggugcugguccucugggggauccaccaccccagcacguccgcggaccagcagagccuguaccagaacgccgacgccuacguguucgugggcaccucccgguacagcaagaaguucaagcccgagaucgccauccgcccgaagguccgggaccaggagggccgcaugaacuacuacuggacccugguggagcccggggacaagaucaccuucgaggccacgggcaaccucguggucccccgguacgcguucgccauggagcgcaacgccggguccggcaucaucaucagcgacacccccgugcacgacugcaacacgaccugccagaccccgaagggcgccaucaacaccucccugcccuuccagaacauccaccccaucaccaucgggaagugccccaaguacgucaagagcaccaagcugcggcucgccacgggccugcgcaacgugccguccauccagagccgggggcuguucggcgcgaucgccggguucaucgagggcggcuggaccgggaugguggacggcugguacggguaccaccaccagaacgagcagggcuccggguacgccgccgaccucaagagcacccagaacgccaucgacaagaucaccaacaaggugaacuccgucaucgagaagaugaacacgcaguucaccgcggugggcaaggaguucaaccaccuggagaagcgcaucgagaaccugaacaagaaggucgacgacggcuuccucgacaucuggaccuacaacgccgagcugcuggugcuccuggagaacgagcggacccuggacuaccacgacagcaacgugaagaaccucuacgagaagguccgcucccagcugaagaacaacgccaaggagaucgggaacggcugcuucgaguucuaccacaagugcgacaacacgugcauggagagcgugaagaacgggaccuacgacuaccccaaguacuccgaggaggccaagcugaaccgggaggagaucgacggcgugaagcucgagagcacccgcaucuaccagauccuggccaucuacuccaccgucgcgagcagccuggugcucguggucucccugggggccaucagcuucuggaugugcuccaacggcagccugcagugccggaucugcaucuga

SEQ ID NO: 69242 - RNA, 1701 nt, Artificial Sequence; identical to SEQ ID NO: 67857
  derived and/or modified CDS sequence (opt1) from hemagglutinin__InfluenzaA__ADJ81063

SEQ ID NO: 69243 - RNA, 1701 nt, Artificial Sequence; identical to SEQ ID NO: 67637
  derived and/or modified CDS sequence (opt1) from hemagglutinin__InfluenzaA__ADJ84772

SEQ ID NO: 69244 - RNA, 1701 nt, Artificial Sequence
  derived and/or modified CDS sequence (opt1) from hemagglutinin__InfluenzaA__ADJ88782
augaagaccaucaucgcccugagcuacaugcucugccugguguucgcccagaagcugcccggcaacgacaacuccaccgcgacgcucugccuggggcaccacgccgucccgaacggcaccaucgugaagaccaucaccaacgaccagaucgaggugacgaacgccaccgagcugguccagagcuccagcaccggggagaucugcgacagcccccaccagauccucgacggcgagaacugcacccugaucgacgcccugcucggggacccccagugcgacggcuuccagaacaagaagugggaccuguucguggagcgcagcaaggccuacuccaacugcuaccccuacgacgugccggacuacgcgagccugcggucccucaucgccagcuccggcacgcuggaguucaacaacgagagcuucaacuggaccggggucacccagaacggcaccuccagcgccugcauccgccgguccaacaacagcuucuucucccgccugaacuggcucacgcaccugaaguucaaguaccccgcccugaacgugaccaugcccaacaacgagcaguucgacaagcucuacaucuggggcgugcaccaccccgggaccgacaacgaccagaucuuccuguacgcgcaggccagcgggcggaucaccgucuccacgaagcgcagccagcagaccgugaucccgaacaucggcagccggccccgcgugcggaacauccccucccgcaucagcaucuacuggaccaucgucaagcccggcgacauccugcucaucaacuccaccgggaaccugaucgccccgcggggcuacuucaagauccgcagcgggaaguccagcaucaugcgguccgacgcccccaucggcaagugcaacagcgagugcaucacgcccaacggcuccauccccaacgacaagccguuccagaacgugaaccgcaucaccuacggggccugcccccgguacgugaagcagaacacccugaagcucgcgaccggcaugcgcaacguccccgagaagcagacgcgggggaucuucggcgccaucgccggguucaucgagaacggcugggagggcaugguggacgggugguacggcuuccgccaccagaacagcgaggggcggggccaggccgccgaccugaaguccacccaggcggccaucgaccagaucaacgggaagcugaaccgccucaucggcaagaccaacgagaaguuccaccagaucgagaaggaguucagcgagguggagggccggauccaggaccuggagaaguacgucgaggacaccaagaucgaccugugguccuacaacgccgagcuccugguggcccuggagaaccagcacacgaucgaccucaccgacagcgagaugaacaagcuguucgagaagaccaagaagcagcugggggagaacgccgaggacaugggcaacgggugcuucaagaucuaccacaagugcgacaacgcgugcaucggcuccauccgcaacgggaccuacgaccacgacguguaccgcgacgaggcccucaacaaccgguuccagaucaagggcgucgagcugaaguccggcuacaaggacuggauccuguggaucuccuucgccaucagcugcuuccuccugugcguggcccugcucggguucaucaugugggccugccagaagggcaacauccgcugcaacaucugcaucuga

SEQ ID NO: 69245 - RNA, 1701 nt, Artificial Sequence
  derived and/or modified CDS sequence (opt1) from hemagglutinin__InfluenzaA__ADK21733
augaaggccauccuggugguccuccuguacaccuucgccaccgcgaacgccgacacgcugugcaucggcuaccacgccaacaacagcaccgacaccguggacaccgugcucgagaagaacgucacggugacccacuccgugaaccugcuggaggacaagcacaacgggaagcucugcaagcugcgcggcgucgcgccccugcaccucgggaagugcaacaucgccggcuggauccuggggaacccggagugcgagagccuguccaccgccagcuccuggagcuacaucguggagaccuccagcuccgacaacggcacgugcuaccccggcgacuucaucgacuacgaggagcuccgggagcagcugagcuccgugagcuccuucgagcgcuucgagaucuuccccaagaccagcuccuggcccaaccacgacagcaacaagggggucaccgccgccugcccgcacgccggcgcgaaguccuucuacaagaaccugaucuggcucgugaagaaggggaacagcuaccccaagcuguccaagagcuacaucaacgacaagggcaaggaggugcugguccucugggggauccaccaccccagcaccuccacggaccagcagagccuguaccagaacgccgacgccuacguguucgugggcaccucccgguacagcaagaaguucaagcccgagaucgccauccgcccgaagguccgggaccaggagggccgcaugaacuacuacuggacccugguggagcccggggacaagaucaccuucgaggccacgggcaaccucguggucccccgguacgcguucgccauggagcgcaacgccggguccggcaucaucaucagcgacacccccgcccacgacugcaacacgaccugccagaccccgaagggcgccaucaacaccucccugcccuuccagaacauccaccccaucaccaucgggaagugccccaaguacgucaagagcaccaagcugcggcucgcgacgggccugcgcaacgugccguccauccagagccgggggcuguucggcgccaucgccggguucaucgagggcggcuggaccgggaugguggacggcugguacggguaccaccaccagaacgagcagggcuccggguacgccgccgaccucaagagcacccagaacgcgaucgacaagaucaccaacaaggugaacuccgugaucgagaagaugaacacgcaguucaccgccgucggcaaggaguucaaccaccuggagaagcgcaucgagaaccugaacaagaagguggacgacggcuuccucgacaucuggaccuacaacgccgagcugcugguccuccuggagaacgagcggacccuggacuaccacgacagcaacgugaagaaccucuacgagaaggugcgcucccagcugaagaacaacgccaaggagaucgggaacggcugcuucgaguucuaccacaagugcgacaacacgugcauggagagcgucaagaacgggaccuacgacuaccccaaguacuccgaggaggccaagcugaaccgggaggagaucgacggcgugaagcucgagagcacccgcaucuaccagauccuggcgaucuacuccaccguggccagcagccugguccucguggugucccugggggccaucagcuucuggaugugcuccaacggcagccugcagugccggaucugcaucuga

SEQ ID NO: 69246 - RNA, 1701 nt, Artificial Sequence
  derived and/or modified CDS sequence (opt1) from hemagglutinin__InfluenzaA__ADK21743
augaaggccauccuggugguccuccuguacaccuucgccaccgcgaacgccgacacgcugugcaucggcuaccacgccaacaacagcaccgacaccguggacaccgugcucgagaagaacgucacggugacccacuccgugaaccugcuggaggacaagcacaacgggaagcucugcaagcugcgcggcgucgcgccccugcaccucgggaagugcaacaucgccggcuggauccuggggaacccggagugcgagagccuguccaccgccagcuccuggagcuacaucguggagaccuccagcuccgacaacggcacgugcuaccccggcgacuucaucgacuacgaggagcuccgggagcagcugagcuccgugagcuccuucgagcgcuucgagaucuuccccaagaccagcuccuggcccaaccacgacagcaacaagggggucaccgccgccugcccgcacgccggcgcgaaguccuucuacaagaaccugaucuggcucgugaagaaggggaacagcuaccccaagaucuccaacagcuacaucaacgacaagggcaaggaggugcugguccugugggggauccaccaccccagcaccuccgccgaccagcagagccucuaccagaacgccgacgccuacguguucgugggcacgucccgguacagcaagaaguucaagcccgagaucgccauccgcccgaagguccgggaccaggagggccgcaugaacuacuacuggacccugguggagcccggggacaagaucaccuucgaggcgaccggcaaccugguggucccccgguacgccuucgccauggagcgcaacgccggguccggcaucaucaucagcgacacgcccgcccacgacugcaacacgaccugccagaccccgaagggcgcgaucaacaccucccuccccuuccagaacauccaccccaucaccaucgggaagugccccaaguacgucaagagcaccaagcugcggcuggccaccggccuccgcaacgugccguccauccagagccgggggcuguucggcgccaucgccggguucaucgagggcggcuggacggggaugguggacggcugguacggguaccaccaccagaacgagcagggcuccggguacgccgcggaccucaagagcacccagaacgccaucgacgagaucaccaacaaggugaacuccgugaucgagaagaugaacacccaguucacggccgucggcaaggaguucaaccaccuggagaagcgcaucgagaaccugaacaagaagguggacgacggcuuccuggacaucuggaccuacaacgccgagcuccugguccugcucgagaacgagcggacccuggacuaccacgacagcaacgugaagaaccuguacgagaaggugcgcucccagcucaagaacaacgccaaggagaucgggaacggcugcuucgaguucuaccacaagugcgacaacacgugcauggagagcgucaagaacgggaccuacgacuaccccaaguacuccgaggaggcgaagcugaaccgggaggagaucgacggcgugaagcuggagagcacccgcaucuaccagauccucgccaucuacuccaccguggccagcagccugguccugguggugucccucggggccaucagcuucuggaugugcuccaacggcagccugcagugccggaucugcaucuga

SEQ ID NO: 69247 - RNA, 1701 nt, Artificial Sequence
  derived and/or modified CDS sequence (opt1) from hemagglutinin__InfluenzaA__ADK21753
augaaggccauccuggugguccuccuguacaccuucgccaccgcgaacgccgacacgcugugcaucggcuaccacgccaacaacagcaccgacaccguggacaccgugcucgagaagaacgucacggugacccacuccgugaaccugcuggaggacaagcacaacgggaagcucugcaagcugcgcggcgucgcgccccugcaccucgggaagugcaacaucgccggcuggauccuggggaacccggagugcgagagccuguccaccgccagcuccuggagcuacaucguggagaccuccagcuccgacaacggcacgugcuaccccggcgacuucaucgacuacgaggagcuccgggagcagcugagcuccgugagcuccuucgagcgcuucgagaucuuccccaagaccagcuccuggcccaaccacgacagcaacaagggggucaccgccgccugcccgcacgccggcgcgaaguccuucuacaagaaccugaucuggcucgugaagaaggggaacagcuaccccaagcuguccaagagcuacaucaacgacaagggcaaggaggugcugguccucugggggauccaccaccccagcaccuccgccgaccagcagagccuguaccagaacgccgacgccuacguguucgugggcacgucccgguacagcaagaaguucaagcccgagaucgccauccgcccgaagguccgggaccaggagggccgcaugaacuacuacuggacccugguggagcccggggacaagaucaccuucgaggcgaccggcaaccucguggucccccgguacgccuucgccauggaggggaacgccggcuccggcaucaucaucagcgacacgcccgugcacgacugcaacacgaccugccagaccccgaagggggccaucaacaccucccugcccuuccagaacauccaccccaucaccaucggcaagugccccaaguacgucaagagcaccaagcugcgccucgcgaccgggcugcggaacgugccguccauccagagccgcggccuguucggggccaucgccggcuucaucgagggcggguggacgggcaugguggacgggugguacggcuaccaccaccagaacgagcagggguccggcuacgccgccgaccucaagagcacccagaacgcgaucgacaagaucaccaacaaggugaacuccgucaucgagaagaugaacacccaguucacggccgugggcaaggaguucaaccaccuggagaagcggaucgagaaccugaacaagaaggucgacgacggguuccucgacaucuggaccuacaacgccgagcugcuggugcuccuggagaacgagcgcacccuggacuaccacgacagcaacgugaagaaccucuacgagaagguccggucccagcugaagaacaacgccaaggagaucggcaacgggugcuucgaguucuaccacaagugcgacaacacgugcauggagagcgugaagaacggcaccuacgacuaccccaaguacuccgaggaggccaagcugaaccgcgaggagaucgacggggugaagcucgagagcacccggaucuaccagauccuggcgaucuacuccaccgucgccagcagccuggugcucguggucucccugggcgccaucagcuucuggaugugcuccaacggcagccugcagugccgcaucugcaucuga

SEQ ID NO: 69248 - RNA, 1701 nt, Artificial Sequence
  derived and/or modified CDS sequence (opt1) from hemagglutinin__InfluenzaA__ADK21763
augaaggccauccuggugguccuccuguacaccuucgccaccgcgaacgccgacacgcugugcaucggcuaccacgccaacaacagcaccgacaccguggacaccgugcucgagaagaacgucacggugacccacuccgugaaccugcuggaggacaagcacaacgggaagcucugcaagcugcgcggcgucgcgccccugcaccucgggaagugcaacaucgccggcuggauccuggggaacccggagugcgagagccuguccaccgccagcuccuggagcuacaucguggagaccuccagcuccgacaacggcacgugcuaccccggcgacuucaucgacuacgaggagcuccgggagcagcugagcuccgugagcuccuucgagcgcuucgagaucuuccccaagaccagcuccuggcccaaccacgacagcaacaagggggucaccgccgccugcccgcacgccggcgcgaaguccuucuacaagaaccugaucuggcucgugaagaaggggaacagcuaccccaagcuguccaagagcuacaucaacgacaagggcaaggaggugcugguccucugggggauccaccaccccagcaccuccgccgaccagcagagccuguaccagaacgccgacgccuacguguucgugggcacguccaaguacagcaagaaguucaagcccgagaucgccauccggccgaagguccgcgaccaggagggccggaugaacuacuacuggacccugguggagcccggggacaagaucaccuucgaggcgaccggcaaccucguggucccccgcuacgccuucgccauggagcggaacgccggguccggcaucaucaucagcgacacgcccgugcacgacugcaacacgaccugccagaccccgaagggcgccaucaacaccucccugcccuuccagaacauccaccccaucaccaucgggaagugccccaaguacgucaagagcaccaagcugcgccucgcgaccggccugcggaacgugccguccauccagagccgcgggcuguucggcgccaucgccggguucaucgagggcggcuggacggggaugguggacggcugguacggguaccaccaccagaacgagcagggcuccggguacgccgccgaccucaagagcacccagaacgcgaucgacgagaucaccaacaaggugaacuccgucaucgagaagaugaacacccaguucacggccgugggcaaggaguucaaccaccuggagaagcggaucgagaaccugaacaagaaggucgacgacggcuuccucgacaucuggaccuacaacgccgagcugcuggugcuccuggagaacgagcgcacccuggacuaccacgacagcaacgugaagaaccucuacgagaagguccggucccagcugaagaacaacgccaaggagaucgggaacggcugcuucgaguucuaccacaagugcgacaacacgugcauggagagcgugaagaacgggaccuacgacuaccccaaguacuccgaggaggccaagcugaaccgcgaggagaucgacggcgugaagcucgagagcacccggaucuaccagauccuggcgaucuacuccaccgucgccagcagccuggugcucguggucucccugggggccaucagcuucuggaugugcuccaacggcagccugcagugccgcaucugcaucuga

SEQ ID NO: 69249 - RNA, 1701 nt, Artificial Sequence; identical to SEQ ID NO: 67857
  derived and/or modified CDS sequence (opt1) from hemagglutinin__InfluenzaA__ADK21773

SEQ ID NO: 69250 - RNA, 1701 nt, Artificial Sequence; identical to SEQ ID NO: 67857
  derived and/or modified CDS sequence (opt1) from hemagglutinin__InfluenzaA__ADK21783

SEQ ID NO: 69251 - RNA, 1701 nt, Artificial Sequence; identical to SEQ ID NO: 66693
  derived and/or modified CDS sequence (opt1) from hemagglutinin__InfluenzaA__ADK21813

SEQ ID NO: 69252 - RNA, 1701 nt, Artificial Sequence; identical to SEQ ID NO: 68113
  derived and/or modified CDS sequence (opt1) from hemagglutinin__InfluenzaA__ADK21823

SEQ ID NO: 69253 - RNA, 1701 nt, Artificial Sequence
  derived and/or modified CDS sequence (opt1) from hemagglutinin__InfluenzaA__ADK21833
augaaggccauccuggugguccuccuguacaccuucgccaccgcgaacgccgacacgcugugcaucggcuaccacgccaacaacagcaccgacaccguggacaccgugcucgagaagaacgucacggugacccacuccgugaaccugcuggaggacaagcacaacgggaagcucugcaagcugcgcggcgucgcgccccugcaccucgggaagugcaacaucgccggcuggauccuggggaacccggagugcgagagccuguccaccgccagcuccuggagcuacaucguggagaccuccagcuccgacaacggcacgugcuaccccggcgacuucaucgacuacgaggagcuccgggagcagcugagcuccgugagcuccuucgagcgcuucgagaucuuccccaagaccagcuccuggcccaaccacgacagcaacaagggggucaccgccgccugcccgcacgccggcgcgaaguccuucuacaagaaccugaucuggcucgugaagaaggggaacagcuaccccaagcuguccaagagcuacaucaacgacaagggcaaggaggugcugguccucugggggauccaccaccccagcaccuccgccgaccagcagagccuguaccagaacgccgacgccuacguguucgugggcacgucccgguacagcaagaaguucaagcccgagaucgccauccgcccgaagguccgggaccaggagggccgcaugaacuacuacuggacccugguggagcccggggacaagaucaccuucgaggcgaccggcaaccucguggucccccgguacgccuucgccauggagcgcaacgccggguccggcaucaucaucagcgacacgcccgugcgggacugcaacacgaccugccagaccccgaagggcgccaucaacaccucccugcccuuccagaacauccaccccaucaccaucgggaagugccccaaguacgucaagagcaccaagcugcgccucgcgaccggccugcggaacgugccguccauccagagccgcgggcuguucggcgccaucgccggguucaucgagggcggcuggacggggaugguggacggcugguacggguaccaccaccagaacgagcagggcuccggguacgccgccgaccucaagagcacccagaacgcgaucgacgagaucaccaacaaggugaacuccgucaucgagaagaugaacacccaguucacggccgugggcaaggaguucaaccaccuggagaagcggaucgagaaccugaacaagaaggucgacgacggcuuccucgacaucuggaccuacaacgccgagcugcuggugcuccuggagaacgagcgcacccuggacuaccacgacagcaacgugaagaaccucuacgagaagguccggucccagcugaagaacaacgccaaggagaucgggaacggcugcuucgaguucuaccacaagugcgacaacacgugcauggagagcgugaagaacgggaccuacgacuaccccaaguacuccgaggaggccaagcugaaccgcgaggagaucgacggcgugaagcucgagagcacccggaucuaccagauccuggcgaucuacuccaccgucgccagcagccuggugcucguggucucccugggggccaucagcuucuggaugugcuccaacggcagccugcagugccgcaucugcaucuga

SEQ ID NO: 69254 - RNA, 1701 nt, Artificial Sequence; identical to SEQ ID NO: 67857
  derived and/or modified CDS sequence (opt1) from hemagglutinin__InfluenzaA__ADK21843

SEQ ID NO: 69255 - RNA, 1701 nt, Artificial Sequence; identical to SEQ ID NO: 67046
  derived and/or modified CDS sequence (opt1) from hemagglutinin__InfluenzaA__ADK21853

SEQ ID NO: 69256 - RNA, 1701 nt, Artificial Sequence; identical to SEQ ID NO: 68342
  derived and/or modified CDS sequence (opt1) from hemagglutinin__InfluenzaA__ADK21863

SEQ ID NO: 69257 - RNA, 1701 nt, Artificial Sequence; identical to SEQ ID NO: 67140
  derived and/or modified CDS sequence (opt1) from hemagglutinin__InfluenzaA__ADK21873

SEQ ID NO: 69258 - RNA, 1701 nt, Artificial Sequence
  derived and/or modified CDS sequence (opt1) from hemagglutinin__InfluenzaA__ADK21883
augaaggccauccuggugguccuccuguacaccuucgccaccgcgaacgccgacacgcugugcaucggcuaccacgccaacaacagcaccgacaccguggacaccgugcucgagaagaacgucacggugacccacuccgugaaccugcuggaggacaagcacaacgggaagcucugcaagcugcgcggcgucgcgccccugcaccucgggaagugcaacaucgccggcuggauccuggggaacccggagugcgagagccuguccaccgccagcuccuggagcuacaucguggagaccuccagcuccgacaacggcacgugcuaccccggcgacuucaucgacuacgaggagcuccgggagcagcugagcuccgugagcuccuucgagcgcuucgagaucuuccccaagaccagcuccuggcccaaccacgacagcaacaagggggucaccgccgccugcccgcacgccggcgcgaaguccuucuacaagaaccugaucuggcucgugaagaaggggaacagcuaccccaagcuguccaagagcuacaucaacgacaagggcaaggaggugcugguccucugggggauccaccaccccagcaccuccgccgaccagcagagccuguaccagaacgccgacgccuacguguucgugggcacgucccgguacagcaagaaguucaagcccgagaucgccauccgcccgaagguccgggaccaggagggccgcaugaacuacuacuggacccugguggagcccggggacaagaucaccuucgaggcgaccggcaaccucgugguccccaaguacgccuucgccauggagcggaacgccggguccggcaucaucaucagcgacacgcccgugcacgacugcaacacgaccugccagaccccgaagggcgccaucaacaccucccugcccuuccagaacauccaccccaucaccaucgggaagugccccaaguacgucaagagcaccaagcugcgccucgcgaccggccugcggaacaucccguccauccagagccgcgggcuguucggcgccaucgccggguucaucgagggcggcuggacggggaugguggacggcugguacggguaccaccaccagaacgagcagggcuccggguacgccgccgaccucaagagcacccagaacgcgaucgacgagaucaccaacaaggugaacuccgugaucgagaagaugaacacccaguucacggccgucggcaaggaguucaaccaccuggagaagcggaucgagaaccugaacaagaagguggacgacggcuuccucgacaucuggaccuacaacgccgagcugcugguccuccuggagaacgagcgcacccuggacuaccacgacagcaacgugaagaaccucuacgagaaggugcggucccagcugaagaacaacgccaaggagaucgggaacggcugcuucgaguucuaccacaagugcgacaacacgugcauggagagcgucaagaacgggaccuacgacuaccccaaguacuccgaggaggccaagcugaaccgcgaggagaucgacggcgugaagcucgagagcacccggaucuaccagauccuggcgaucuacuccaccguggccagcagccugguccucguggugucccugggggccaucagcuucuggaugugcuccaacggcagccugcagugccgcaucugcaucuga

SEQ ID NO: 69259 - RNA, 1701 nt, Artificial Sequence; identical to SEQ ID NO: 66693
  derived and/or modified CDS sequence (opt1) from hemagglutinin__InfluenzaA__ADK21893

SEQ ID NO: 69260 - RNA, 1701 nt, Artificial Sequence; identical to SEQ ID NO: 68290
  derived and/or modified CDS sequence (opt1) from hemagglutinin__InfluenzaA__ADK21903

SEQ ID NO: 69261 - RNA, 1701 nt, Artificial Sequence; identical to SEQ ID NO: 68403
  derived and/or modified CDS sequence (opt1) from hemagglutinin__InfluenzaA__ADK21913

SEQ ID NO: 69262 - RNA, 1701 nt, Artificial Sequence
  derived and/or modified CDS sequence (opt1) from hemagglutinin__InfluenzaA__ADK21923
augaaggccauccuggugguccuccuguacaccuucgccaccgcgaacgccgacacgcugugcaucggcuaccacgccaacaacagcaccgacaccguggacaccgugcucgagaagaacgucacggugacccacuccgugaacauccuggaggacaagcacaacgggaagcugugcaagcuccgcggcgucgcgccccugcaccuggggaagugcaacaucgccggcuggauccucgggaacccggagugcgagagccuguccaccgccagcuccuggagcuacaucguggagaccuccagcuccgacaacggcacgugcuaccccggcgacuucaucgacuacgaggagcugcgggagcagcucagcuccgugagcuccuucgagcgcuucgagaucuuccccaagaccagcuccuggcccaaccacgacagcaacaagggggucaccgccgccugcccgcacgccggcgcgaaguccuucuacaagaaccugaucuggcuggugaagaaggggaacagcuaccccaagcucuccaagagcuacaucaacgacaagggcaaggaggugcugguccugugggggauccaccaccccagcaccuccgccgaccagcagagccucuaccagaacgccgacgccuacguguucgugggcacgucccgguacagcaagaaguucaagcccgagaucgccauccgcccgaagguccgggaccaggagggccgcaugaacuacuacuggacccugguggagcccggggacaagaucaccuucgaggcgaccggcaaccugguggucccccgguacgccuucgccauggagcgcaacgccggguccggcaucaucaucagcgacacgcccgugcacgacugcaacacgaccugccagaccccgaagggcgccaucaacaccucccuccccuuccagaacauccaccccaucaccaucgggaagugccccaaguacgucaagagcaccaagcugcggcuggcgaccggccuccgcaacgugccguccauccagagccgggggcuguucggcgccaucgccggguucaucgagggcggcuggacggggaugguggacggcugguacggguaccaccaccagaacgagcagggcuccggguacgccgccgaccucaagagcacccagaacgcgaucgacgagaucaccaacaaggugaacuccgucaucgagaagaugaacacccaguucacggccgugggcaaggaguucaaccaccuggagaagcgcaucgagaaccugaacaagaaggucgacgacggcuuccuggacaucuggaccuacaacgccgagcuccuggugcugcucgagaacgagcggacccuggacuaccacgacagcaacgugaagaaccuguacgagaaggcccgcucccagcucaagaacaacgccaaggagaucgggaacggcugcuucgaguucuaccacaagugcgacaacacgugcauggagagcgucaagaacgggaccuacgacuaccccaaguacuccgaggaggcgaagcugaaccgggagaagaucgacggcgugaagcuggagagcacccgcaucuaccagauccucgccaucuacuccaccguggccagcacccugguccugguggugagccucggggccaucuccuucuggaugugcagcaacggcucccugcagugccggaucugcaucuga

SEQ ID NO: 69263 - RNA, 1701 nt, Artificial Sequence
  derived and/or modified CDS sequence (opt1) from hemagglutinin__InfluenzaA__ADK21933
augaaggccauccuggugguccuccuguacaccuucgccaccgcgaacgccgacacgcugugcaucggcuaccacgccaacaacagcaccgacaccguggacaccgugcucgagaagaacgucacggugacccacuccguggaccugcuggaggacaagcacaacgggaagcucugcaagcugcgcggcgucgcgccccugcaccucgggaagugcaacaucgccggcuggauccuggggaacccggagugcgagagccuguccaccgccagcuccuggagcuacaucguggagaccuccagcuccgacaacggcacgugcuaccccggcgacuucaucgacuacgaggagcuccgggagcagcugagcuccgugagcuccuucgagcgcuucgagaucuuccccaagaccagcuccuggcccaaccacgacagcaacaagggggucaccgccgccugcccgaacgccggcgcgaaguccuucuacaagaaccugaucuggcucgugaagaaggggaacagcuaccccaagcuguccaagagcuacaucaacgacaagggcaaggaggugcugguccucugggggauccaccaccccagcaccuccgccgaccagcagagccuguaccagaacgccgacgccuacguguucgugggcacgucccgguacagcaagaaguucaagcccgagaucgccauccgcccgaagguccgggaccaggagggccgcaugaacuacuacuggacccugguggagcccggggacaagaucaccuucgaggcgaccggcaaccucguggucccccgguacgccuucgccauggagcgcaacgccggguccggcaucaucaucagcgacacgcccgugcacgacugcaacacgaccugccagaccccgaagggcgccaucaacaccucccugcccuuccagaacauccaccccaucaccaucgggaagugccccaaguacgucaagagcaccaagcugcggcucgcgaccggccugcgcaacgugccguccauccagagccgggggcuguucggcgccaucgccggguucaucgagggcggcuggacggggaugguggacggcugguacggguaccaccaccagaacgagcagggcuccggguacgccgccgaccucaagagcacccagaacgcgaucgacgagaucaccaacaaggugaacuccgucaucgagaagaugaacacccaguucacggccgugggcaaggaguucaaccaccuggagaagcgcaucgagaaccugaacaagaaggucgacgacggcuuccucgacaucuggaccuacaacgccgagcugcuggugcuccuggagaacgagcggacccuggacuaccacgacagcaacgugaagaaccucuacgagaagguccgcucccagcugaagaacaacgccaaggagaucgggaacggcugcuucgaguucuaccacaagugcgacaacacgugcauggagagcgugaagaacgggaccuacgacuaccccaaguacuccgaggaggccaagcugaaccgggaggagaucgacggcgugaagcucgagagcacccgcaucuaccagauccuggcgaucuacuccaccgucgccagcagccuggugcucguggucucccugggggccaucagcuucuggaugugcuccaacggcagccugcagugccggaucugcaucuga

SEQ ID NO: 69264 - RNA, 1701 nt, Artificial Sequence; identical to SEQ ID NO: 66693
  derived and/or modified CDS sequence (opt1) from hemagglutinin__InfluenzaA__ADK21943

SEQ ID NO: 69265 - RNA, 1701 nt, Artificial Sequence
  derived and/or modified CDS sequence (opt1) from hemagglutinin__InfluenzaA__ADK21953
augaaggccauccuggugguccuccuguacaccuucgccaccgcgaacgccgacacgcugugcaucggcuaccacgccaacaacagcaccgacaccguggacaccgugcucgagaagaacgucacggugacccacuccgugaaccugcuggaggacaagcacaacgggaagcucugcaagcugcgcggcgucgcgccccugcaccucgggaagugcaacaucgccggcuggauccuggggaacccggagugcgagagccuguccaccgccagcuccuggagcuacaucguggagaccuccagcuccgacaacggcacgugcuaccccggcgacuucaucgaccacgaggagcuccgggagcagcugagcuccgugagcuccuucgagcgcuucgagaucuuccccaagaccagcuccuggcccaaccacgacagcaacaagggggucaccgccgccugcccgcacgccggcgcgaaguccuucuacaagaaccugaucuggcucgugaagaaggggaacagcuaccccaagcuguccaagagcuacaucaacgacaagggcaaggaggugcugguccucugggccauccaccaccccagcaccuccgccgaccagcagagccuguaccagaacgccgacgccuacguguucguggggacgucccgguacagcaagaaguucaagcccgagaucgcgauccgcccgaagguccgggaccaggagggccgcaugaacuacuacuggacccugguggagcccggcgacaagaucaccuucgaggccaccgggaaccucguggucccccgguacgccuucgccauggagcgcaacgccggcuccgggaucaucaucagcgacacgcccgugcacgacugcaacacgaccugccagaccccgaagggcgcgaucaacaccucccugcccuuccagaacauccaccccaucaccaucggcaagugccccaaguacgucaagagcaccaagcugcggcucgccaccgggcugcgcaacgugccguccauccagagccggggccuguucggggccaucgccggcuucaucgagggcggguggacgggcaugguggacgggugguacggcuaccaccaccagaacgagcagggguccggcuacgccgcggaccucaagagcacccagaacgccaucgacgagaucaccaacaaggugaacuccgucaucgagaagaugaacacccaguucacggccguggggaaggaguucaaccaccuggagaagcgcaucgagaaccugaacaagaaggucgacgacggcuuccucgacaucuggaccuacaacgccgagcugcuggugcuccuggagaacgagcggacccuggacuaccacgacagcaacgugaagaaccucuacgagaagguccgcucccagcugaagaacaacgccaaggagaucggcaacgggugcuucgaguucuaccacaagugcgacaacacgugcauggagagcgugaagaacggcaccuacgacuaccccaaguacuccgaggaggcgaagcugaaccgggaggagaucgacggggugaagcucgagagcacccgcaucuaccagauccuggccaucuacuccaccgucgccagcagccuggugcucguggucucccugggcgccaucagcuucuggaugugcuccaacgggagccugcagugccggaucugcaucuga

SEQ ID NO: 69266 - RNA, 1701 nt, Artificial Sequence; identical to SEQ ID NO: 68880
  derived and/or modified CDS sequence (opt1) from hemagglutinin__InfluenzaA__ADK32390

SEQ ID NO: 69267 - RNA, 1701 nt, Artificial Sequence; identical to SEQ ID NO: 68880
  derived and/or modified CDS sequence (opt1) from hemagglutinin__InfluenzaA__ADK32400

SEQ ID NO: 69268 - RNA, 1701 nt, Artificial Sequence
  derived and/or modified CDS sequence (opt1) from hemagglutinin__InfluenzaA__ADK32420
augaaggccauccuggugguccuccuguacaccuucgccaccgcgaacgccgacacgcugugcaucggcuaccacgccaacaacagcaccgacaccguggacaccgugcucgagaagaacgucacggugacccacuccgugaaccugcuggaggacaagcacaacgggaagcucugcaagcugcgcggcgucgcgccccugcaccucgggaagugcaacaucgccggcuggauccuggggaacccggagugcgagagccuguccaccgccagcuccuggagcuacaucguggagaccuccagcuccgacaacggcacgugcuaccccggcgacuucaucgacuacgaggagcuccgggagcagcugagcuccgugagcuccuucgagcgcuucgagaucuuccccaagaccagcuccuggcccaaccacgacagcaacaagggggucaccgccgccugcccgcacgccggcgcgaaguccuucuacaagaaccugaucuggcucgugaagaaggggaacagcuaccccaagcuguccaagagcuacaucaacgacaagggcaaggaggugcugguccucugggggauccaccaccccagcaccuccgccgaccagcagagccuguaccagaacgccgacgccuacguguucgugggcacgucccgguacagcaagaaguucaagcccgagaucgccauccgcccgaagguccgggagcaggagggccgcaugaacuacuacuggacccugguggagcccggggacaagaucaccuucgaggcgaccggcaaccucguggucccccgguacgccuucgccauggagcgcaacgccggguccggcaucaucaucagcgacacgcccgugcacgacugcaacacgaccugccagaccccgaagggcgccaucaacaccucccugcccuuccagaacauccacagcaucaccaucgggaagugccccaaguacgugaaguccaccaagcugcggcucgcgaccggccugcgcaacguccccagcauccagucccgggggcuguucggcgccaucgccggguucaucgagggcggcuggacggggaugguggacggcugguacggguaccaccaccagaacgagcagggcagcggguacgccgccgaccucaaguccacccagaacgcgaucgacgagaucaccaacaaggugaacagcgucaucgagaagaugaacacccaguucacggccgugggcaaggaguucaaccaccuggagaagcgcaucgagaaccugaacaagaaggucgacgacggcuuccucgacaucuggaccuacaacgccgagcugcuggugcuccuggagaacgagcggacccuggacuaccacgacuccaacgugaagaaccucuacgagaagguccgcaaccagcugaagaacaacgccaaggagaucgggaacggcugcuucgaguucuaccacaagugcgacaacacgugcauggagagcgugaagaacgggaccuacgacuacccgaaguacuccgaggaggccaagcugaaccgggaggagaucgacggcgugaagcucgagagcacccgcaucuaccagauccuggcgaucuacuccaccgucgccagcagccuggugcucguggucucccugggggccaucagcuucuggaugugcuccaacggcagccugcagugccggaucugcaucuga

SEQ ID NO: 69269 - RNA, 1701 nt, Artificial Sequence; identical to SEQ ID NO: 68245
  derived and/or modified CDS sequence (opt1) from hemagglutinin__InfluenzaA__ADK32430

SEQ ID NO: 69270 - RNA, 1701 nt, Artificial Sequence
  derived and/or modified CDS sequence (opt1) from hemagglutinin__InfluenzaA__ADK32440
augaaggccauccuggugguccuccuguacaccuucgccaccgcgaacgccgacacgcugugcaucggcuaccacgccaacaacagcaccgacaccguggacaccgugcucgagaagaacgucacggugacccacuccgugaaccugcuggaggacaagcacaacgggaagcucugcaagcugcgcggcgucgcgccccugcaccucgggaagugcaacaucgccggcuggauccuggggaacccggagugcgagagccuguccaccgccagcuccuggagcuacaucguggagaccuccagcuccgacaacggcacgugcuaccccggcgacuucaucgacuacgaggagcuccgggagcagcugagcuccgugagcuccuucgagcgcuucgagaucuuccccaagaccagcuccuggcccaaccacgacagcaacaagggggucaccgccgccugcccgcacgccggcgcgaaguccuucuacaagaaccugaucuggcucgugaagaaggggaacagcuaccccaagcuguccaagagcuacaucaacgacaagggcaaggaggugcugguccucugggggauccaccaccccagcaccuccgccgaccagcagagccuguaccagaacgccgacgccuacguguucgugggcacgucccgguacagcaagaaguucaagcccgagaucgccauccgcccgaagguccgggaccaggagggccgcaugaacuacuacuggacccugguggagcccggggacaagaucaccuucgaggcgaccggcaaccucguggucccccgguacgccuucgccauggagcgcaacgccggguccggcaucaucaucagcgacacgcccgugcacgacugcaacacgaccugccagaccccgaagggcgccaucaacaccucccugcccuuccagaacauccaccccaucaccaucgggaagugccccaaguacgucaagagcaccaagcugcggcucgcgaccggccugcgcaacgugccguccauccagagccgggggcuguucggcgccaucgccggguucaucgagggcggcuggacggggaugguggacggcugguacggguaccaccaccagaacgagcagggcuccggguacgccgccgaccucaagagcacccagaacgcgaucgacggcaucaccaacaaggugaacuccgucaucgagaagaugaacacccaguucacggccgugggcaaggaguucaaccaccuggagaagcgcaucgagaaccugaacaagaaggucgacgacggguuccucgacaucuggaccuacaacgccgagcugcuggugcuccuggagaacgagcggacccuggacuaccacgacagcaacgugaagaaccucuacgagaagguccgcucccagcugaagaacaacgccaaggagaucggcaacgggugcuucgaguucuaccacaagugcgacaacacgugcauggagagcgugaagaacggcaccuacgacuaccccaaguacuccgaggaggccaagcugaaccgggaggagaucgacggggugaagcucgagagcacccgcaucuaccagauccuggcgaucuacuccaccgucgccagcagccuggugcucguggucucccugggcgccaucagcuucuggaugugcuccaacggcagccugcagugccggaucugcaucuga

SEQ ID NO: 69271 - RNA, 1701 nt, Artificial Sequence
  derived and/or modified CDS sequence (opt1) from hemagglutinin__InfluenzaA__ADK32450
augaaggccauccuggugguccuccuguacaccuucgccaccgcgaacgccgacacgcugugcaucggcuaccacgccaacaacagcaccgacaccguggacaccgugcucgagaagaacgucacggugacccacuccgugaacauccuggaggacaagcacaacgggaagcugugcaagcuccgcggcgucgcgccccugcaccuggggaagugcaacaucgccggcuggauccucgggaacccggagugcgagagccuguccaccgccagcuccuggagcuacaucguggagaccuccagcuccgacaacggcacgugcuaccccggcgacuucaucgacuacgaggagcugcgggagcagcucagcuccgugagcuccuucgagcgcuucgagaucuuccccaagaccagcuccuggcccaaccacgacagcaacaagggggucaccgccgccugcccgcacgccggcgcgaaguccuucuacaagaaccugaucuggcuggugaagaaggggaacagcuaccccaagcucuccaagagcuacaucaacgacaagggcaaggaggugcugguccugugggggauccaccaccccagcaccuccgccgaccagcagagccucuaccagaacgccgacgccuacguguucgugggcuccagccgguacuccaagaaguucaagcccgagaucgccauccgcccgaagguccgggaccaggagggccgcaugaacuacuacuggacgcugguggagcccggggacaagaucaccuucgaggcgaccggcaaccugguggucccccgguacgccuucgccauggagcgcaacgccgggagcggcaucaucaucuccgacgcccccgugcacgacugcaacaccacgugccagaccccgaagggcgcgaucaacaccagccuccccuuccagaacauccaccccaucaccaucgggaagugccccaaguacgugaaguccacgaagcugcggcuggccaccggccuccgcaacgucccgagcauccagucccgggggcuguucggcgccaucgccggguucaucgagggcggcuggaccgggaugguggacggcugguacggguaccaccaccagaacgagcagggcagcggguacgccgcggaccugaaguccacccagaacgccaucgacgagaucacgaacaaggugaacagcgucaucgagaagaugaacacccaguucaccgccgugggcaaggaguucaaccaccucgagaagcgcaucgagaaccugaacaagaaggucgacgacggcuuccuggacaucuggaccuacaacgccgagcuccuggugcugcucgagaacgagcggacgcuggacuaccacgacuccaacgugaagaaccuguacgagaagguccgcagccagcucaagaacaacgccaaggagguggggaacggcugcuucgaguucuaccacaagugcgacaacacgugcauggaguccgugaagaacgggaccuacgacuaccccaaguacagcgaggaggcgaagcugaaccgggaggagaucgacggcgucaagcuggaguccacccgcaucuaccagauccucgccaucuacagcaccgccgccagcucccuggugcugguggucagccucggggcgaucuccuucuggaugugcagcaacggcucccugcagugccggaucugcaucuga

SEQ ID NO: 69272 - RNA, 1701 nt, Artificial Sequence
  derived and/or modified CDS sequence (opt1) from hemagglutinin__InfluenzaA__ADK32460
augaaggccauccuggugguccuccuguacaccuucgccaccgcgaacgccgacacgcugugcaucggcuaccacgccaacaacagcaccgacaccguggacaccgugcucgagaagaacgucacggugacccacuccgugaaccugcuggaggacaagcacaacgggaagcucugcaagcugcgcggcgucgcgccccugcaccucgggaagugcaacaucgccggcuggauccuggggaacccggagugcgagagccuguccaccgccagcuccuggagcuacaucguggagaccuccagcuccgacaacggcacgugcuaccccggcgacuucaucgacuacgaggagcuccgggagcagcugagcuccgugagcuccuucgagcgcuucgagaucuuccccaagaccagcuccuggcccaaccacgacagcaacaagggggucaccgccgccugcccgcacgccggcgcgaaguccuucuacaagaaccugaucuggcucgugaagaaggggaacagcuaccccaagcuguccaagagcuacaucaacgacaagggcaaggaggugcugguccucugggggauccaccaccccagcaccuccgccgaccagcagagccuguaccagaacgccgacgccuacgccuucgugggcacgucccgguacagcaagaaguucaagcccgagaucgcgauccgcccgaaggugcgggaccaggagggccgcaugaacuacuacuggacccuggucgagcccggggacaagaucaccuucgaggccaccggcaaccucguggugccccgguacgccuucgccauggagcgcaacgccggguccggcaucaucaucagcgacacgcccguccacgacugcaacacgaccugccagaccccgaagggcgcgaucaacaccucccugcccuuccagaacauccaccccaucaccaucgggaagugccccaaguacgucaagagcaccaagcugcggcucgccaccggccugcgcaacgugccguccauccagagccgggggcuguucggcgccaucgccggguucaucgagggcggcuggacggggaugguggacggcugguacggguaccaccaccagaacgagcagggcuccggguacgccgcggaccucaagagcacccagaacgccaucgacgagaucaccaacaaggugaacuccgugaucgagaagaugaacacccaguucacggccgucggcaaggaguucaaccaccuggagaagcgcaucgagaaccugaacaagaagguggacgacggcuuccucgacaucuggaccuacaacgccgagcugcugguccuccuggagaacgagcggacccuggacuaccacgacagcaacgugaagaaccucuacgagaaggugcgcucccagcugaagaacaacgccaaggagaucgggaacggcugcuucgaguucuaccacaagugcgacaacacgugcauggagagcgucaagaacgggaccuacgacuaccccaaguacuccgaggaggcgaagcugaaccgggaggagaucgacggcgugaagcucgagagcacccgcaucuaccagauccuggccaucuacuccaccguggccagcagccugguccucguggugucccugggggccaucagcuucuggaugugcuccaacggcagccugcagugccggaucugcaucuga

SEQ ID NO: 69273 - RNA, 1701 nt, Artificial Sequence; identical to SEQ ID NO: 67857
  derived and/or modified CDS sequence (opt1) from hemagglutinin__InfluenzaA__ADK32470

SEQ ID NO: 69274 - RNA, 1701 nt, Artificial Sequence
  derived and/or modified CDS sequence (opt1) from hemagglutinin__InfluenzaA__ADK32480
augaaggccauccuggugguccuccuguacaccuucgccaccgcgaacgccgacacgcugugcaucggcuaccacgccaacaacagcaccgacaccguggacaccgugcucgagaagaacgucacggugacccacuccgugaaccugcuggaggacaagcacaacgggaagcucugcaagcugcgcggcgucgcgccccugcaccucgggaagugcaacaucgccggcuggauccuggggaacccggagugcgagagccuguccaccgccagcuccuggagcuacaucguggagaccuccagcuccgacaacggcacgugcuaccccggcgacuucaucgacuacgaggagcuccgggagcagcugagcuccgugagcuccuucgagcgcuucgagaucuuccccaagaccagcuccuggcccaaccacgacagcaacaagggggucaccgccgccugcccgcacgccggcgcgaaguccuucuacaagaaccugaucuggcucgugaagaaggggaacagcuaccccaagcuguccaagagcuacaucaacgacaagggcaaggaggugcugguccucugggggauccaccaccccagcaccuccgccgaccagcagagccuguaccagaacgccgacgccuacguguucgugggcacgucccgguacagcaagaaguucaagcccgagaucgccauccgcccgaagguccgggaccaggagggccgcaugaacuacuacuggacccugguggagcccggggacaagaucaccuucgaggcgaccggcaaccucguggucccccgguacgccuucgccauggagcgcaacgccggguccggcaucaucaucagcgacacgcccgcccacgacugcaacacgaccugccagaccccgaagggcgcgaucaacaccucccugcccuuccagaacauccaccccaucaccaucgggaagugccccaaguacgucaagagcaccaagcugcggcucgccaccggccugcgcaacgugccguccauccagagccgggggcuguucggcgccaucgccggguucaucgagggcggcuggacggggaugguggacggcugguacggguaccaccaccagaacgagcagggcuccggguacgccgcggaccucaagagcacccagaacgccaucgacaagaucaccaacaaggugaacuccgugaucgagaagaugaacacccaguucacggccgucggcaaggaguucaaccaccuggagaagcgcaucgagaaccugaacaagaagguggacgacggcuuccucgacaucuggaccuacaacgccgagcugcugguccuccuggagaacgagcggacccuggacuaccacgacagcaacgugaagaaccucuacgagaaggugcgcucccagcugaagaacaacgccaaggagaucgggaacggcugcuucgaguucuaccacaagugcgacaacacgugcauggagagcgucaagaacgggaccuacgacuaccccaaguacuccgaggaggcgaagcugaaccgggaggagaucgacggcgugaagcucgagagcacccgcaucuaccagauccuggccaucuacuccaccguggccagcagccugguccucguggugucccugggggccaucagcuucuggaugugcuccaacggcagccugcagugccggaucugcaucuga

SEQ ID NO: 69275 - RNA, 1701 nt, Artificial Sequence; identical to SEQ ID NO: 67857
  derived and/or modified CDS sequence (opt1) from hemagglutinin__InfluenzaA__ADK32490

SEQ ID NO: 69276 - RNA, 1701 nt, Artificial Sequence; identical to SEQ ID NO: 67857
  derived and/or modified CDS sequence (opt1) from hemagglutinin__InfluenzaA__ADK32502

SEQ ID NO: 69277 - RNA, 1701 nt, Artificial Sequence; identical to SEQ ID NO: 68329
  derived and/or modified CDS sequence (opt1) from hemagglutinin__InfluenzaA__ADK32637

SEQ ID NO: 69278 - RNA, 1701 nt, Artificial Sequence; identical to SEQ ID NO: 67857
  derived and/or modified CDS sequence (opt1) from hemagglutinin__InfluenzaA__ADK32647

SEQ ID NO: 69279 - RNA, 1701 nt, Artificial Sequence; identical to SEQ ID NO: 68021
  derived and/or modified CDS sequence (opt1) from hemagglutinin__InfluenzaA__ADK32657

SEQ ID NO: 69280 - RNA, 1701 nt, Artificial Sequence; identical to SEQ ID NO: 68245
  derived and/or modified CDS sequence (opt1) from hemagglutinin__InfluenzaA__ADK32677

SEQ ID NO: 69281 - RNA, 1701 nt, Artificial Sequence
  derived and/or modified CDS sequence (opt1) from hemagglutinin__InfluenzaA__ADK32687
augaaggccauccuggugguccuccuguacaccuucgccaccgcgaacgccgacacgcugugcaucggcuaccacgccaacaacagcaccgacaccguggacaccgugcucgagaagaacgucacggugacccacuccgugaaccugcuggaggacaagcacaacgggaagcucugcaagcugcgcggcgucgcgccccugcaccucgggaagugcaacaucgccggcuggauccuggggaacccggagugcgagagccuguccaccgccagcuccuggagcuacaucguggagaccuccagcuccgacaacggcacgugcuaccccggcgacuucaucgacuacgaggagcuccgggagcagcugagcuccgugagcuccuucgagcgcuucgagaucuuccccaagaccagcuccuggcccaaccacgacagcaacaagggggucaccgccgccugcccgcacgccggcgcgaagaacuucuacaagaaccugaucuggcucgugaagaaggggaacuccuaccccaagcugagcaaguccuacaucaacgacaagggcaaggaggugcugguccucugggggauccaccaccccagcaccagcgccgaccagcagucccuguaccagaacgccgacgccuacguguucgugggcacgagccgguacuccaagaaguucaagcccgagaucgccauccgcccgaagguccgggaccaggagggccgcaugaacuacuacuggacccugguggagcccggggacaagaucaccuucgaggcgaccggcaaccucguggucccccgguacgccuucgccauggagcgcaacgccgggagcggcaucaucaucuccgacacgcccgugcacgacugcaacacgaccugccagaccccgaagggcgccaucaacaccagccugcccuuccagaacauccaccccaucaccaucgggaagugccccaaguacgugaaguccaccaagcugcggcucgcgaccggccugcgcaacgucccgagcauccagucccgggggcuguucggcgccaucgccggguucaucgagggcggcuggacggggaugguggacggcugguacggguaccaccaccagaacgagcagggcagcggguacgccgccgaccucaaguccacccagaacgcgaucgacaagaucaccaacaaggugaacagcgucaucgagaagaugaacacccaguucacggccgugggcaaggaguucaaccaccuggagaagcgcaucgagaaccugaacaagaaggucgacgacggcuuccucgacaucuggaccuacaacgccgagcugcuggugcuccuggagaacgagcggacccuggacuaccacgacuccaacgugaagaaccucuacgagaagguccgcagccagcugaagaacaacgccaaggagaucgggaacggcugcuucgaguucuaccacaagugcgacaacacgugcauggaguccgugaagaacgggaccuacgacuaccccaaguacagcgaggaggccaagcugaaccgggaggagaucgacggcgugaagcucgaguccacccgcaucuaccagauccuggcgaucuacagcaccgucgccuccagccuggugcucguggucagccugggggccaucuccuucuggaugugcagcaacggcucccugcagugccggaucugcaucuga

SEQ ID NO: 69282 - RNA, 1701 nt, Artificial Sequence; identical to SEQ ID NO: 68484
  derived and/or modified CDS sequence (opt1) from hemagglutinin__InfluenzaA__ADK32697

SEQ ID NO: 69283 - RNA, 1701 nt, Artificial Sequence; identical to SEQ ID NO: 67857
  derived and/or modified CDS sequence (opt1) from hemagglutinin__InfluenzaA__ADK32776

SEQ ID NO: 69284 - RNA, 1701 nt, Artificial Sequence; identical to SEQ ID NO: 68245
  derived and/or modified CDS sequence (opt1) from hemagglutinin__InfluenzaA__ADK33621

SEQ ID NO: 69285 - RNA, 1701 nt, Artificial Sequence
  derived and/or modified CDS sequence (opt1) from hemagglutinin__InfluenzaA__ADK33631
augaaggccauccuggugguccuccuguacaccuucgccaccgcgaacgccgacacgcugugcaucggcuaccacgccaacaacagcaccgacaccguggacaccgugcucgagaagaacgucacggugacccacuccgugaaccugcuggaggucaagcacaacgggaagcucugcaagcugcgcggcguggcgccccugcaccucgggaagugcaacaucgccggcuggauccuggggaacccggagugcgagagccuguccaccgccagcuccuggagcuacaucguggagaccuccagcuccgacaacggcacgugcuaccccggcgacuucaucaacuacgaggagcuccgggagcagcugagcuccgucagcuccuucgagcgcuucgagaucuuccccaagaccagcuccuggcccaaccacgacagcaacaagggggugaccgccgccugcccgcacgccggcgcgaaguccuucuacaagaaccugaucuggcucgugaagaaggggaacagcuaccccaagcuguccaagagcuacaucaacgacaagggcaaggagguccuggugcucugggggauccaccaccccagcaccuccgccgaccagcagagccuguaccagaacgccgacgccuacguguucgucggcacgucccgguacagcaagaaguucaagcccgagaucgccauccgcccgaaggugcgggaccaggagggccgcaugaacuacuacuggacccugguggagcccggggacaagaucaccuucgaggcgaccggcaaccucgucgugccccgguacgccuucgccauggagcgcaacgccggguccggcaucaucaucagcgacacgcccgugcacgacugcaacacgaccugccagaccccgaagggcgccaucaacaccucccugcccuuccagaacauccaccccaucaccaucgggaagugccccaaguacgucaagagcaccaagcugcggcucgcgaccggccugcgcaacgugccguccauccagagccgggggcuguucggcgccaucgccggguucaucgagggcggcuggacggggaugguggacggcugguacggguaccaccaccagaacgagcagggcuccggguacgccgccgaccucaagagcacccagaacgcgaucgacaagaucaccaacaaggucaacuccgugaucgagaagaugaacacccaguucacggccgucggcaaggaguucaaccaccuggagaagcgcaucgagaaccugaacaagaagguggacgacggcuuccucgacaucuggaccuacaacgccgagcugcuggugcuccuggagaacgagcggacccuggacuaccacgacagcaacgucaagaaccucuacgagaaggugcgcucccagcugaagaacaacgccaaggagaucgggaacggcugcuucgaguucuaccacaagugcgacaacacgugcauggagagcgugaagaacgggaccuacgacuaccccaaguacuccgaggaggccaagcugaaccgggaggagaucgacggcgucaagcucgagagcacccgcaucuaccagauccuggcgaucuacuccaccguggccagcagccuggugcucgucgugucccugggggccaucagcuucuggaugugcuccaacggcagccugcagugccggaucugcaucuga

SEQ ID NO: 69286 - RNA, 1701 nt, Artificial Sequence; identical to SEQ ID NO: 68245
  derived and/or modified CDS sequence (opt1) from hemagglutinin__InfluenzaA__ADK33641

SEQ ID NO: 69287 - RNA, 1701 nt, Artificial Sequence; identical to SEQ ID NO: 67857
  derived and/or modified CDS sequence (opt1) from hemagglutinin__InfluenzaA__ADK33651

SEQ ID NO: 69288 - RNA, 1701 nt, Artificial Sequence; identical to SEQ ID NO: 67857
  derived and/or modified CDS sequence (opt1) from hemagglutinin__InfluenzaA__ADK33661

SEQ ID NO: 69289 - RNA, 1701 nt, Artificial Sequence; identical to SEQ ID NO: 67857
  derived and/or modified CDS sequence (opt1) from hemagglutinin__InfluenzaA__ADK33671

SEQ ID NO: 69290 - RNA, 1701 nt, Artificial Sequence
  derived and/or modified CDS sequence (opt1) from hemagglutinin__InfluenzaA__ADK33681
augaaggccauccuggugguccuccuguacaccuucgccaccgcgaacgccgacacgcugugcaucggcuaccacgccaacaacagcaccgacaccguggacaccgugcucgagaagaacgucacggugacccacuccgugaaccugcuggaggacaagcacaacgggaagcucugcaagcugcgcggcgucgcgccccugcaccucgggaagugcaacaucgccggcuggauccuggggaacccggagugcgagagccuguccaccgccagcuccuggagcuacaucguggagaccuccagcuccgacaacggcacgugcuaccccggcgacuucaucgacuacgaggagcuccgggagcagcugagcuccgugagcuccuucgagcgcuucgagaucuuccccaagaccagcuccuggcccaaccacgacagcaacaagggggucaccgccgccugcccgcacgccggcgcgaaguccuucuacaagaaccugaucuggcucgugaagaaggggaacagcuaccccaagcuguccaagagcuacaucaacgacaagggcaaggaggugcugguccucugggggauccaccaccccagcaccuccgccgaccagcagagccuguaccagaacgccgacgccuacguguucgugggcacgucccgguacagcaagaaguucaagcccgagaucgccauccgcccgaagguccgggaccaggagggccgcaugaacuacuacuggacccugguggagcccggggacaagaucaccuucgaggcgaccggcaaccucguggucccccgguacgccuucgccauggagcgcaacgccggguccggcaucaucaucagcgacacgcccgugcacgacugcaacacgaccugccagaccccgaagggcgccaucaacaccucccugcccuuccagaacauccaccccaucaccaucgggaagugccccaaguacgucaagagcaccaagcugcggcucgcgaccggccugcgcaacgugccguccauccagagccgggggcuguucggcgccaucgccggguucaucgagggcggcuggacggggaugguggacggcugguacggguaccaccaccagaacgagcagggcuccggguacgccgccgaccucaagagcacccagaacgcgaucgacgagaucaccaacaaggugaacuccgucaucgagaagaugaacacccaguucacggccgugggcaaggaguucaaccaccuggagaagcgcaucgagaaccugaacaagaaggucgacgacggcuuccucgacaucuggaccuacaacgccgagcugcuggugcuccuggagaacgagcggacccuggacuaccacgacagcaacgugaagaagcucuacgagaagguccgcucccagcugaagaacaacgccaaggagaucgggaacggcugcuucgaguucuaccacaagugcgacaacacgugcauggagagcgugaagaacgggaccuacgacuaccccaaguacuccgaggaggccaagcugaaccgggaggagaucgacggcgugaagcucgagagcacccgcaucuaccagauccuggcgaucuacuccaccgucgccagcagccuggugcucguggucucccugggggccaucagcuucuggaugugcuccaacggcagccugcagugccggaucugcaucuga

SEQ ID NO: 69291 - RNA, 1701 nt, Artificial Sequence; identical to SEQ ID NO: 68306
  derived and/or modified CDS sequence (opt1) from hemagglutinin__InfluenzaA__ADK33691

SEQ ID NO: 69292 - RNA, 1701 nt, Artificial Sequence
  derived and/or modified CDS sequence (opt1) from hemagglutinin__InfluenzaA__ADK33701
augaaggccauccuggugguccuccuguacaccuucgccaccgcgaacgccgacacgcugugcaucggcuaccacgccaacaacagcaccgacaccguggacaccgugcucgagaagaacgucacggugacccacuccgugaaccugcuggaggacaagcacaacgggaagcucugcaagcugcgcggcgucgcgccccugcaccucgggaagugcaacaucgccggcuggauccuggggaacccggagugcgagagccuguccaccgccagcuccuggagcuacaucguggagaccuccagcuccgacaacggcacgugcuaccccggcgacuucaucgacuacgaggagcuccgggagcagcugagcuccgugagcuccuucgagcgcuucgagaucuuccccaagaccagcuccuggcccaaccacgacagcaacaagggggucaccgccgccugcccgcacgccggcgcgaaguccuucuacaagaaccugaucuggcucgugaagaaggggaacagcuaccccaagcuguccaagagcuacaucaacgacaagggcaaggaggugcugguccucugggggauccaccaccccagcaccuccgccgaccagcagagccuguaccagaacgccgacgccuacguguucgugggcacgucccgguacagcaagaaguucaagcccgagaucgccauccgcccgaagguccgggaccaggagggccgcaugaacuacuacuggacccugguggagcccggggacaagaucaccuucgaggcgaccggcaaccucguggucccccgguacgccuucgccauggagcgcaacgccggguccggcaucaucaucagcgacacgcccgugcacgacugcaacacgaccugccagaccccgaagggcgccaucaacaccucccugcccuuccagaacauccaccccaucaccaucgggaagugccccaaguacgucaagagcaccaagcugcggcucgcgaccggccugcgcaacgugccguccauccagagccgggggcuguucggcgccaucgccggguucaucgagggcggcuggacggggaugguggacggcugguacggguaccaccaccagaacgagcagggcuccggguacgccgccgaccucaagagcacccagaacgcgaucgacaagaucaccaacaaggugaacuccgucaucgagaagaugaacacccaguucacggccgugggcaaggaguucaaccaccuggagaagcgcaucgagaaccugaacaagaaggucgacgacggcuuccucgacaucuggaccuacaacgccgagcugcuggugcuccuggagaacgagcggacccuggacuaccacgacagcaacgugaagaaccucuacgagaagguccgcucccagcugaagaacaacgccaaggagaucgggaacggcugcuucgaguucuaccacaagugcgacaacacgugcauggagagcgugaagaacgggaccuacgacuaccccaaguacuccgaggaggccaagcugaaccgggaggagaucgacggcgugaagcucgagagcacccgcgucuaccagauccuggcgaucuacuccaccguggccagcagccuggugcucgucgugucccugggggccaucagcuucuggaugugcuccaacggcagccugcagugccggaucugcaucuga

SEQ ID NO: 69293 - RNA, 1701 nt, Artificial Sequence
  derived and/or modified CDS sequence (opt1) from hemagglutinin__InfluenzaA__ADK33711
augaaggccauccuggugguccuccuguacaccuucgccaccgcgaacgccgacacgcugugcaucggcuaccacgccaacaacagcaccgacaccguggacaccgugcucgagaagaacgucacggugacccacuccgugaaccugcuggaggacaagcacaacgggaagcucugcaagcugcgcggcgucgcgccccugcaccucgggaagugcaacaucgccggcuggauccuggggaacccggagugcgagagccuguccaccgccagcuccuggagcuacaucguggagaccuccagcuccgacaacggcacgugcuaccccggcgacuucaucgacuacgaggagcuccgggagcagcugagcuccgugagcuccuucgagcgcuucgagaucuuccccaagaccagcuccuggcccaaccacgacagcaacaagggggucaccgccgccugcccgcacgccggcgcgaaguccuucuacaagaaccugaucuggcucgugaagaaggggaacagcuaccccaagcuguccaagagcuacaucaacgacaagggcaaggagauccuggugcucugggggauccaccaccccagcaccuccgccgaccagcagagccuguaccagaacgccgacgccuacgucuucgugggcacgucccgguacagcaagaaguucaagcccgagaucgccauccgcccgaaggugcgggaccaggagggccgcaugaacuacuacuggacccuggucgagcccggggacaagaucaccuucgaggcgaccggcaaccucguggugccccgguacgccuucgccauggagcgcaacgccggguccggcaucaucaucagcgacacgcccguccacgacugcaacacgaccugccagaccccgaagggcgccaucaacaccucccugcccuuccagaacauccaccccaucaccaucgggaagugccccaaguacgucaagagcaccaagcugcggcucgcgaccggccugcgcaacaucccguccauccagagccgggggcuguucggcgccaucgccggguucaucgagggcggcuggacggggaugguggacggcugguacggguaccaccaccagaacgagcagggcuccggguacgccgccgaccucaagagcacccagaacgcgaucgacgagaucaccaacaaggugaacuccgugaucgagaagaugaacacccaguucacggccgugggcaaggaguucaaccaccuggagaagcgcaucgagaaccugaacaagaaggucgacgacggcuuccucgacaucuggaccuacaacgccgagcugcuggugcuccuggagaacgagcggacccuggacuaccacgacagcaacgucaagaaccucuacgagaaggugcgcucccagcugaagaacaacgccaaggagaucgggaacggcugcuucgaguucuaccacaagugcgacaacacgugcauggagagcgugaagaacgggaccuacgacuaccccaaguacuccgaggaggccaagcugaaccgggaggagaucgacggcgucaagcucgagagcacccgcaucuaccagauccuggcgaucuacuccaccguggccagcagccuggugcucgucgugucccugggggccaucagcuucuggaugugcuccaacggcagccugcagugccggaucugcaucuga

SEQ ID NO: 69294 - RNA, 1701 nt, Artificial Sequence
  derived and/or modified CDS sequence (opt1) from hemagglutinin__InfluenzaA__ADK33721
augaaggccauccuggugguccuccuguacaccuucgugaccgccaacgcggacacgcugugcaucggcuaccacgccaacaacagcaccgacaccguggacaccguccucgagaagaacgugacggugacccacuccgucaaccugcuggaggacaagcacaacgggaagcucugcaagcugcgcggcguggcgccccugcaccucgggaagugcaacaucgccggcuggauccuggggaacccggagugcgagagccuguccaccgccagcuccuggagcuacaucguggagaccuccagcuccgacaacggcacgugcuaccccggcgacuucaucgacuacgaggagcuccgggagcagcugagcuccgucagcuccuucgagcgcuucgagaucuuccccaagaccagcuccuggcccaaccacgacagcaacaagggggugaccgccgccugcccgcacgccggcgccaaguccuucuacaagaaccugaucuggcucgugaagaaggggaacagcuaccccaagcuguccaagagcuacaucaacgacaagggcaaggagguccuggugcucugggggauccaccaccccagcaccuccgcggaccagcagagccuguaccagaacgccgacgccuacguguucgucggcacgucccgguacagcaagaaguucaagcccgagaucgccauccgcccgaaggugcgggaccaggagggccgcaugaacuacuacuggacccugguggagcccggggacaagaucaccuucgaggccaccggcaaccucgucgugccccgguacgcguucgccauggagcgcaacgccggguccggcaucaucaucagcgacacgcccgugcacgacugcaacacgaccugccagaccccgaagggcgccaucaacaccucccugcccuuccagaacauccaccccaucaccaucgggaagugccccaaguacgucaagagcaccaagcugcggcucgccaccggccugcgcaacgugccguccauccagagccgggggcuguucggcgcgaucgccggguucaucgagggcggcuggacggggaugguggacggcugguacggguaccaccaccagaacgagcagggcuccggguacgccgccgaccucaagagcacccagcacgccaucgacgagaucaccaacaaggucaacuccgugaucgagaagaugaacacccaguucacggcggucggcaaggaguucaaccaccuggagaagcgcaucgagaaccugaacaagaagguggacgacggcuuccucgacaucuggaccuacaacgccgagcugcuggugcuccuggagaacgagcggacccuggacuaccacgacagcaacgucaagaaccucuacgagaaggugcgcucccagcugaagaacaacgccaaggagaucgggaacggcugcuucgaguucuaccacaagugcgacaacacgugcauggagagcgugaagaacgggaccuacgacuaccccaaguacuccgaggaggccaagcugaaccgggaggagaucgacggcgucaagcucgagagcacccgcaucuaccagauccuggccaucuacuccaccguggcgagcagccuggugcucgucgugucccugggggccaucagcuucuggaugugcuccaacggcagccugcagugccggaucugcaucuga

SEQ ID NO: 69295 - RNA, 1701 nt, Artificial Sequence
  derived and/or modified CDS sequence (opt1) from hemagglutinin__InfluenzaA__ADK33731
augaaggccacccuggugguccuccuguacaccuucgccacggcgaacgccgacacccugugcaucggcuaccacgccaacaacagcaccgacaccguggacacggugcucgagaagaacgucaccgugacccacuccgugaaccugcuggaggacaagcacaacgggaagcucugcaagcugcgcggcgucgcgccccugcaccucgggaagugcaacaucgccggcuggauccuggggaacccggagugcgagagccuguccaccgccagcuccuggagcuacaucguggagacguccagcuccggcaacgggaccugcuaccccggcgacuucaucgacuacgaggagcuccgggagcagcugagcuccgugagcuccuucgagcgcuucgagaucuuccccaagaccagcuccuggcccaaccacgacagcaacaagggcgucaccgccgccugcccgcacgccggggcgaaguccuucuacaagaaccugaucuggcucgugaagaagggcaacagcuaccccaagcuguccaagagcuacaucaacgacaaggggaaggaggugcugguccucuggggcauccaccaccccagcacguccgccgaccagcagagccuguaccagaacgccgacgccuacgccuucgugggcaccucccgguacagcaagaaguucaagcccgagaucgcgauccgcccgaaggugcgggaccaggaggggcgcaugaacuacuacuggacccuggucgagcccggcgacaagaucaccuucgaggccacggggaaccuccuggugccccgguacgccuucgccauggagcgcaacgccggcuccggcaucaucaucagcgacacccccgugcacgacugcaacacgaccugccagaccccgaagggggcgaucaacaccucccugcccuuccagaacauccaccccaucaccaucggcaagugccccaaguacgucaagagcaccaagcuccggcuggccacggggcugcgcaacgugccguccauccagagccggggccucuucggggccaucgccggcuucaucgagggcggguggaccggcaugguggacgggugguacggcuaccaccaccagaacgagcagggguccggcuacgccgcggaccucaagagcacccagaacgccaucgacgagaucaccaacaaggucaacuccgugaucgagaagaugaacacgcaguucaccgccgugggcaaggaguucaaccaccuggagaagcgcaucgagaaccugaacaagaaggucgacgacggguuccuggacaucuggaccuacaacgccgagcugcucgugcugcuggagaacgagcggacccucgacuaccacgacagcaacgucaagaaccuguacgagaaggugcgcucccagcugaagaacaacgccaaggagaucggcaacgggugcuucgaguucuaccacaagugcgacaacacgugcauggagagcgugaagaacggcaccuacgacuaccccaaguacuccgaggaggcgaagcucaaccgggaggagaucgacggggucaagcuggagagcacccgcaucuaccagauccuggccaucuacuccaccguggccagcagccucgugcuggucgugucccugggcgccaucagcuucuggaugugcuccaacggcagccuccagugccggaucugcaucuga

SEQ ID NO: 69296 - RNA, 1701 nt, Artificial Sequence; identical to SEQ ID NO: 68860
  derived and/or modified CDS sequence (opt1) from hemagglutinin__InfluenzaA__ADK33741

SEQ ID NO: 69297 - RNA, 1701 nt, Artificial Sequence; identical to SEQ ID NO: 66693
  derived and/or modified CDS sequence (opt1) from hemagglutinin__InfluenzaA__ADK33751

SEQ ID NO: 69298 - RNA, 1701 nt, Artificial Sequence
  derived and/or modified CDS sequence (opt1) from hemagglutinin__InfluenzaA__ADK33761
augaaggccauccuggugguccuccuguacaccuucgccaccgcgaacgccgacacgcugugcaucggcuaccacgccaacaacagcaccgacaccguggacaccgugcucgagaagaacgucacggugacccacuccgugaaccugcuggaggacaagcacaacgggaagcucugcaagcugcgcggcgucgcgccccugcaccucgggaagugcaacaucgccggcuggauccuggggaacccggagugcgagagccuguccaccgccagcuccuggagcuacaucguggagaccuccagcuccgacaacggcacgugcuaccccggcgacuucaucgacuacgaggagcuccgggagcagcugagcuccgugagcuccuucgagcgcuucgagaucuuccccaagaccagcuccuggcccaaccacgacagcaacaagggggucaccgccgccugcccgcacgccggcgcgaaguccuucuacaagaaccugaucuggcucgugaagaaggggaacagcuaccccaagcuguccaagagcuacaucaacgacaagggcaaggaggugcugguccucugggggauccaccaccccagcaccuccgccgaccagcagagccuguaccagaacgccgacgccuacguguucgugggcacgucccgguacagcaagaaguucaagcccgagaucgccauccgcccgaagguccgggaccaggagggccgcaugaacuacuacuggacccugguggagcccggggacaagaucaccuucgaggcgaccggcaaccucguggucccccgguacgccuucgccauggagcgcaacgccggguccggcaucaucaucagcgacacgcccgugcacgacugcaacacgaccugccagaccccgaagggcgccaucaacaccucccugcccuuccagaacauccaccccaucaccaucgggaagugccccaaguacgucaagagcaccaagcugucccucgcgaccggccugcggaacgugccgagcauccagucccgcgggcuguucggcgccaucgccggguucaucgagggcggcuggacggggaugguggacggcugguacggguaccaccaccagaacgagcagggcagcggguacgccgccgaccucaaguccacccagaacgcgaucgacgagaucaccaacaaggugaacagcgucaucgagaagaugaacacccaguucacggccgugggcaaggaguucaaccaccuggagaagcggaucgagaaccugaacaagaaggucgacgacggcuuccucgacaucuggaccuacaacgccgagcugcuggugcuccuggagaacgagcgcacccuggacuaccacgacuccaacgugaagaaccucuacgagaagguccggagccagcugaagaacaacgccaaggagaucgggaacggcugcuucgaguucuaccacaagugcgacaacacgugcauggaguccgugaagaacgggaccuacgacuaccccaaguacagcgaggaggccaagcugaaccgcgaggagaucgacggcgugaagcucgaguccacccggaucuaccagauccuggcgaucuacagcaccgucgccagcucccuggugcucguggucagccugggggccaucuccuucuggaugugcagcaacggcucccugcagugccgcaucugcaucuga

SEQ ID NO: 69299 - RNA, 1701 nt, Artificial Sequence; identical to SEQ ID NO: 67857
  derived and/or modified CDS sequence (opt1) from hemagglutinin__InfluenzaA__ADK33771

SEQ ID NO: 69300 - RNA, 1701 nt, Artificial Sequence; identical to SEQ ID NO: 67857
  derived and/or modified CDS sequence (opt1) from hemagglutinin__InfluenzaA__ADK33781

SEQ ID NO: 69301 - RNA, 1701 nt, Artificial Sequence; identical to SEQ ID NO: 67794
  derived and/or modified CDS sequence (opt1) from hemagglutinin__InfluenzaA__ADK33791

SEQ ID NO: 69302 - RNA, 1701 nt, Artificial Sequence; identical to SEQ ID NO: 69292
  derived and/or modified CDS sequence (opt1) from hemagglutinin__InfluenzaA__ADK33801

SEQ ID NO: 69303 - RNA, 1701 nt, Artificial Sequence
  derived and/or modified CDS sequence (opt1) from hemagglutinin__InfluenzaA__ADK33811
augaaggccauccuggugguccuccuguacaccuucgccaccgcgaacgccgacacgcugugcaucggcuaccacgccaacaacagcaccgacaccguggacaccgugcucgagaagaacgucacggugacccacuccgugaaccugcuggaggacaagcacaacgggaagcucugcaagcugcgcggcgucgcgccccugcaccucgggaagugcaacaucgccggcuggauccuggggaacccggagugcgagagccuguccaccgccagcuccuggagcuacaucguggagaccuccagcuccgacaacggcacgugcuaccccggcgacuucaucgacuacgaggagcuccgggagcagcugagcuccgugagcuccuucgagcgcuucgagaucuuccccaagaccagcuccuggcccaaccacgacagcaacaagggggucaccgccgccugcccgcacgccggcgcgaaguccuucuacaagaaccugaucuggcucgugaagaaggggaacagcuaccccaagcuguccaagagcuacaucaacgacaagggcaaggaggugcugguccucugggggauccaccaccccagcaccuccgccgaccagcagagccuguaccagaacgccgacgccuacguguucgugggcacgucccgguacagcaagaaguucaagcccgagaucgccauccgcccgaagguccgggaccaggagggccgcaugaacuacuacuggacccugguggagcccggggacaagaucaccuucgaggcgaccggcaaccucguggucccccgguacgccuucgccauggagcgcaacgccggguccggcaucaucaucagcgacacgcccgugcacgacugcaacacgaccugccagaccccgaagggcgccaucaacaccucccugcccuuccagaacauccaccccaucaccaucgggaagugccccaaguacgucaagagcaccaagcugcggcucgcgaccggccugcgcaacgugccguccauccagagccgggggcuguucggcgccaucgccggguucaucgagggcggcuggacggggaugguggacggcugguacggguaccaccaccagaacgagcagggcuccggguacgccgccgaccucaagagcacccagcacgcgaucgacgagaucaccaacaaggugaacuccgucaucgagaagaugaacacccaguucacggccgugggcaaggaguucaaccaccuggagaagcgcaucgagaaccugaacaagaaggucgacgacggcuuccucgacaucuggaccuacaacgccgagcugcuggugcuccuggagaacgagcggacccuggacuaccacgacagcaacgugaagaaccucuacgagaagguccgcucccagcugaagaacaacgccaaggagaucgggaacggcugcuucgaguucuaccacaagugcgacaacacgugcauggagagcgugaagaacgggaccuacgacuaccccaaguacuccgaggaggccaagcugaaccgggaggagaucgacggcaucaagcucgagagcacccgcaucuaccagauccuggcgaucuacuccaccguggccagcagccugguccucguggugucccugggggccaucagcuucuggaugugcuccaacggcagccugcagugccggaucugcaucuga

SEQ ID NO: 69304 - RNA, 1701 nt, Artificial Sequence
  derived and/or modified CDS sequence (opt1) from hemagglutinin__InfluenzaA__ADK33821
augaaggccauccuggugguccuccuguacaccuucgccaccgcgaacgccgacacgcugugcaucggcuaccacgccaacaacagcaccgacaccguggacaccgugcucgagaagaacgucacggugacccacuccgugaaccugcuggaggacaagcacaacgggaagcucugcaagcugcgcggcgucgcgccccugcaccucgggaagugcaacaucgccggcuggauccuggggaacccggagugcgagagccuguccaccgccagcuccuggagcuacaucguggagaccuccagcuccgacaacggcacgugcuaccccggcgacuucaucgacuacgaggagcuccgggagcagcugagcuccgugagcuccuucgagcgcuucgagaucuuccccaagaccagcuccuggcccaaccacgacagcaacaagggggucaccgccgccugcccgcacgccggcgcgaaguccuucuacaagaaccugaucuggcucgugaagaaggggaacagcuaccccaagcuguccaagagcuacaucaacgacaagggcaaggaggugcugguccucugggggauccaccaccccagcaccuccgccgaccagcagagccuguaccagaacgccgacgccuacguguucgugggcacgucccgguacagcaagaaguucaagcccgagaucgccauccgcccgaagguccgggaccaggagggccgcaugaacuacuacuggacccugguggagcccggggacaagaucaccuucgaggcgaccggcaaccucguggucccccgguacgccuucacgauggagcgcaacgccggguccggcaucaucaucagcgacacccccgugcacgacugcaacacgaccugccagaccccgaagggcgccaucaacaccucccugcccuuccagaacauccaccccaucaccaucgggaagugccccaaguacgucaagagcaccaagcugcggcucgccacgggccugcgcaacgugccguccauccagagccgggggcuguucggcgcgaucgccggguucaucgagggcggcuggaccgggaugguggacggcugguacggguaccaccaccagaacgagcagggcuccggguacgccgccgaccucaagagcacccagaacgccaucgacgagaucaccaacaaggugaacuccgucaucgagaagaugaacacgcaguucaccgcggugggcaaggaguucaaccaccuggagaagcgcaucgagaaccugaacaagaaggucgacgacggcuuccucgacaucuggaccuacaacgccgagcugcuggugcuccuggagaacgagcggacccuggacuaccacgacagcaacgugaagaaccucuacgagaagguccgcaaccagcugaagaacaacgccaaggagaucgggaacggcugcuucgaguucuaccacaagugcgacaacacgugcauggaguccgugaagaacgggaccuacgacuaccccaaguacagcgaggaggccaagcugaaccgggaggagaucgacggcgugaagcucgaguccacccgcaucuaccagauccuggccaucuacagcaccgucgcguccagccuggugcucgccgugagccugggggccaucuccuucuggaugugcagcaacggcucccugcagugccggaucugcaucuga

SEQ ID NO: 69305 - RNA, 1701 nt, Artificial Sequence
  derived and/or modified CDS sequence (opt1) from hemagglutinin__InfluenzaA__ADK33831
augaaggccauccuggugguccuccuguacaccuucgccaccgcgaacgccgacacgcugugcaucggcuaccacgccaacaacagcaccgacaccguggacaccgugcucgagaagaacgucacggugacccacuccgugaaccugcuggaggacaagcacaacgggaagcucugcaagcugcgcggcaucgcgccccugcaccucgggaagugcaacaucgccggcuggauccuggggaacccggagugcgagagccuguccaccgccagcuccuggagcuacaucgucgagaccuccagcuccgacaacggcacgugcuaccccggcgacuucaucgacuacgaggagcuccgggagcagcugagcuccgugagcuccuucgagcgcuucgagaucuuccccaacaccagcuccuggcccaaccacgacagcaacaagggggugaccgccgccugcccgcacgccggcgcgaaguccuucuacaagaaccugaucuggcucgucaagaaggggaacagcuaccccaagcuguccaagagcuacaucaacgacaagggcaaggaggugcuggugcucugggggauccaccaccccagcaccuccgccgaccagcagagccuguaccagaacgccgacgccuacgucuucgugggcacgucccgguacagcaagaaguucaagcccgagaucgccauccgcccgaaggugcgggaccaggagggccgcaugaacuacuacuggacccuggucgagcccggggacaagaucaccuucgaggcgaccggcaaccucguggugccccgguacgccuucgccauggagcgcaacgccggguccggcaucaucaucagcgacacgcccguccacgacugcaacacgaccugccagaccccgaagggcgccaucaacaccucccugcccuuccagaacauccaccccaucaccaucgggaagugccccaaguacgucaagagcaccaagcugcggcucgcgaccggccugcgcaacgugccguccauccagagccgggggcuguucggcgccaucgccggguucaucgagggcggcuggacggggaugguggacggcugguacggguaccaccaccagaacgagcagggcuccggguacgccgccgaccucaagagcacccagaacgcgaucgacgagaucaccaacaaggugaacuccgugaucgagaagaugaacacccaguucacggccgucggcaaggaguucaaccaccuggagaagcgcaucgagaaccugaacaagaagguggacgacggcuuccucgacaucuggaccuacaacgccgagcugcugguccuccuggagaacgagcggacccuggacuaccacgacagcaacgugaagaaccucuacgagaaggugcgcucccagcugaagaacaacgccaaggagaucgggaacggcugcuucgaguucuaccacaagugcgacaacacgugcauggagagcgucaagaacgggaccuacgacuaccccaaguacuccgaggaggccaagcugaaccgggaggagaucgacggcgugaagcucgagagcacccgcaucuaccagauccuggcgaucuacuccaccguggccagcagccugguccucguggugucccugggggccaucagcuucuggaugugcuccaacggcagccugcagugccggaucugcaucuga

SEQ ID NO: 69306 - RNA, 1701 nt, Artificial Sequence; identical to SEQ ID NO: 68113
  derived and/or modified CDS sequence (opt1) from hemagglutinin__InfluenzaA__ADK33841

SEQ ID NO: 69307 - RNA, 1701 nt, Artificial Sequence; identical to SEQ ID NO: 68860
  derived and/or modified CDS sequence (opt1) from hemagglutinin__InfluenzaA__ADK33851

SEQ ID NO: 69308 - RNA, 1701 nt, Artificial Sequence; identical to SEQ ID NO: 66693
  derived and/or modified CDS sequence (opt1) from hemagglutinin__InfluenzaA__ADK33861

SEQ ID NO: 69309 - RNA, 1701 nt, Artificial Sequence
  derived and/or modified CDS sequence (opt1) from hemagglutinin__InfluenzaA__ADK33871
augaaggccauccuggugguccuccuguacaccuucgccaccgcgaacgccgacacgcugugcaucggcuaccacgccaacaacagcaccgacaccguggacaccgugcucgagaagaacgucacggugacccacuccgugaaccugcuggaggacaagcacaacgggaagcucugcaagcugcgcggcgucgcgccccugcaccucgggaagugcaacaucgccggcuggauccuggggaacccggagugcgagagccuguccaccgccagcuccuggagcuacaucguggagaccuccagcuccgacaacggcacgugcuaccccggcgacuucaucgacuacgaggagcuccgggagcagcugagcuccgugagcuccuucgagcgcuucgagaucuuccccaagaccagcuccuggcccaaccacgacagcaacaagggggucaccgccgccugcccgcacgccggcgcgaaguccuucuacaagaaccugaucuggcucgugaagaaggggaacagcuaccccaagcuguccaagagcuacaucaacgacaagggcaaggaggugcugguccucugggggauccaccaccccagcaccuccgccgaccagcagagccuguaccagaacgccgacgccuacguguucgugggcacgucccgguacagcaagaaguucaagcccgagaucgccauccgcccgaagguccgggagcaggagggccgcaugaacuacuacuggacccugguggagcccggggacaagaucaccuucgaggcgaccggcaaccucgugaucccccgguacgccuucgccauggagcgcaacgccggguccggcaucaucaucagcgacacgcccguccacgacugcaacacgaccugccagaccccgaagggcgccaucaacaccucccugcccuuccagaacauccaccccaucaccaucgggaagugccccaaguacgucaagagcaccaagcugcggcucgcgaccggccugcgcaacgugccguccauccagagccgggggcuguucggcgccaucgccggguucaucgagggcggcuggacggggaugguggacggcugguacggguaccaccaccagaacgagcagggcuccggguacgccgccgaccucaagagcacccagaacgcgaucgacgagaucaccaacaaggugaacuccgugaucgagaagaugaacacccaguucacggccgucggcaaggaguucaaccaccuggagaagcgcaucgagaaccugaacaagaagguggacgacggcuuccucgacaucuggaccuacaacgccgagcugcugguccuccuggagaacgagcggacccuggacuaccacgacagcaacgugaagaaccucuacgagaaggugcgcucccagcugaagaacaacgccaaggagaucgggaacggcugcuucgaguucuaccacaagugcgacaacacgugcauggagagcgucaagaacgggaccuacgacuaccccaaguacuccgaggaggccaagcugaaccgggaggagaucgacggcgugaagcucgagagcacccgcaucuaccagauccuggcgaucuacuccaccguggccagcagccugguccuccuggugucccugggggccaucagcuucuggaugugcuccaacggcagccuccagugccggaucugcaucuga

SEQ ID NO: 69310 - RNA, 1701 nt, Artificial Sequence
  derived and/or modified CDS sequence (opt1) from hemagglutinin__InfluenzaA__ADK33881
augaaggccauccuggugguccuccuguacaccuucgccaccgcgaacgccgacacgcugugcaucggcuaccacgccaacaacagcaccgacaccguggacaccgugcucgagaagaacgucacggugacccacuccgugaacauccuggaggacaagcacaacgggaagcugugcaagcuccgcggcgucgcgccccugcaccuggggaagugcaacaucgccggcuggauccucgggaacccggagugcgagagccuguccaccgccagcuccuggagcuacaucguggagaccuccagcuccgacaacggcacgugcuaccccggcgacuucaucgacuacgaggagcugcgggagcagcucagcuccgugagcuccuucgagcgcuucgagaucuuccccaagaccagcuccuggcccaaccacgacagcaacaagggggucaccgccgccugcccgcacgccggcgcgaaguccuucuacaagaaccugaucuggcuggugaagaaggggaacagcuaccccaagcucuccaagagcuacaucaacgacaagggcaaggaggugcugguccugugggggauccaccaccccagcaccuccgccgaccagcagagccucuaccagaacgccgacgccuacguguucgugggcacgucccgguacagcaagaaguucaagcccgagaucgccauccgcccgaagguccgggaccaggagggccgcaugaacuacuacuggacccugguggagcccggggacaagaucaccuucgaggcgaccggcaaccugguggucccccgguacgccuucgccauggagcgcaacgccggguccggcaucaucaucagcgacacgcccgugcacgacugcaacacgaccugccagaccccgaagggcgccaucaacaccucccuccccuuccagaacauccaccccaucaccaucgggaagugccccaaguacgucaagagcaccaagcugcggcuggcgaccggccuccgcaacgugccguccauccagagccgggggcuguucggcgccaucgccggguucaucgagggcggcuggacggggaugguggacggcugguacggguaccaccaccagaacgagcagggcuccggguacgccgccgaccucaagagcacccagaacgcgaucgacgagaucaccaacaaggugaacuccgucaucgagaagaugaacacccaguucacggccgugggcaaggaguucaaccaccuggagaagcgcaucgagaaccugaacaagaaggucgacgacggcuuccuggacaucuggaccuacaacgccgagcuccuggugcugcucgagaacgagcggacccuggacuaccacgacagcaacgugaagaaccuguacgagaagguccgcucccagcucaagaacaacgccaaggagaucgggaacggcugcuucgaguucuaccacaagugcgacaacacgugcauggagagcgugaagaacgggaccuacgacuaccccaaguacuccgaggaggccaagcugaaccgggaggagaucgacggcgugaagcuggagagcaccaagaucuaccagauccucgcgaucuacuccaccgucgccagcagccuggugcugguggucucccucggggccaucagcuucuggaugugcuccaacggcagccugcagugccgcaucugcaucuga

SEQ ID NO: 69311 - RNA, 1701 nt, Artificial Sequence
  derived and/or modified CDS sequence (opt1) from hemagglutinin__InfluenzaA__ADK33891
augaaggccauccuggugguccuccuguacaccuucgccaccgcgaacgccgacacgcugugcaucggcuaccacgccaacaacagcaccgacaccguggacaccgugcucgagaagaacgucacggugacccacuccgugaaccugcuggaggacaagcacaacgggaagcucugcaagcugcgcggcaucgcgccccugcaccucgggaagugcaacaucgccggcuggauccuggggaacccggagugcgagagccuguccaccgccagcuccuggagcuacaucgucgagaccuccagcuccgacaacggcacgugcuaccccggcgacuucaucgacuacgaggagcuccgggagcagcugagcuccgugagcuccuucgagcgcuucgagaucuuccccaagaccagcuccuggcccaaccacgacagcaacaagggggugaccgccgccugcccgcacgccggcgcgaaguccuucuacaagaaccugaucuggcucgucaagaaggggaacagcuaccccaagcuguccaagagcuacaucaacgacaagggcaaggaggugcuggugcucugggggauccaccaccccagcaccuccgccgaccagcagagccuguaccagaacgccgacgccuacgucuucgugggcacgucccgguacagcaagaaguucaagcccgagaucgccauccgcccgaaggugcgggaccaggagggccgcaugaacuacuacuggacccuggucgagcccggggacaagaucaccuucgaggcgaccggcaaccucguggugccccgguacgccuucgccauggagcgcaacgccggguccggcaucaucaucagcgacacgcccguccacgacugcaacacgaccugccagaccccgaagggcgccaucaacaccucccugcccuuccagaacauccaccccaucaccaucgggaagugccccaaguacgucaagagcaccaagcugcggcucgcgaccggccugcgcaacgugccguccauccagagccgggggcuguucggcgccaucgccggguucaucgagggcggcuggacggggaugguggacggcugguacggguaccaccaccagaacgagcagggcuccggguacgccgccgaccucaagagcacccagaacgcgaucgacgagaucaccaacaaggugaacuccgugaucgagaagaugaacacccaguucacggccgucggcaaggaguucaaccaccuggagaagcgcaucgagaaccugaacaagaagguggacgacggcuuccucgacaucuggaccuacaacgccgagcugcugguccuccuggagaacgagcggacccuggacuaccacgacagcaacgugaagaaccucuacgagaaggugcgcaaccagcugaagaacaacgccaaggagaucgggaacggcugcuucgaguucuaccacaagugcgacaacacgugcauggaguccgucaagaacgggaccuacgacuaccccaaguacagcgaggaggccaagcugaaccgggaggagaucgacggcgugaagcucgaguccacccgcaucuaccagauccuggcgaucuacagcaccguggccuccagccugguccucguggugagccugggggccaucuccuucuggaugugcagcaacggcucccugcagugccggaucugcaucuga

SEQ ID NO: 69312 - RNA, 1701 nt, Artificial Sequence; identical to SEQ ID NO: 68860
  derived and/or modified CDS sequence (opt1) from hemagglutinin__InfluenzaA__ADK33901

SEQ ID NO: 69313 - RNA, 1701 nt, Artificial Sequence
  derived and/or modified CDS sequence (opt1) from hemagglutinin__InfluenzaA__ADK33911
augaaggccauccuggugguccuccuguacaccuucgccaccgcgaacgccgacacgcugugcaucggcuaccacgccaacaacagcaccgacaccguggacaccgugcucgagaagaacgucacggugacccacuccgugaaccugcuggaggggaagcacaacggcaagcucugcaagcugcgcggggucgcgccccugcaccucggcaagugcaacaucgccggguggauccugggcaacccggagugcgagagccuguccaccgccagcuccuggagcuacaucguggagaccuccagcuccgacaacggcacgugcuaccccggggacuucaucgacuacgaggagcuccgggagcagcugagcuccgugagcuccuucgagcgcuucgagaucuuccccaagaccagcuccuggcccaaccacgacagcaacaagggcgucaccgccgccugcccgcacgccggggcgaaguccuucuacaagaaccugaucuggcucaucaagaagggcaacagcuaccccaagcuguccaagagcuacaucaacgacaaggggaaggaggugcuggugcucuggggcauccaccaccccagcaccuccgccgaccagcagagccuguaccagaacgccgacgccuacgucuucgugggcacgucccgguacagcaagaaguucaagcccgagaucgccauccgcccgaaggugcgggaccaggaggggcgcaugaacuacuacuggacccuggucgagcccggcgacaagaucaccuucgaggcgaccgggaaccucguggugccccgguacgccuucgccauggagcgcaacgccggcuccggcaucaucaucagcgacacgcccguccacgacugcaacacgaccugccagaccccgaagggggccaucaacaccucccugcccuuccagaacauccaccccaucaccaucggcaagugccccaaguacgucaagagcaccaagcugcggcucgcgaccgggcugcgcaacaucccguccauccagagccggggccuguucggggccaucgccggcuucaucgagggcggguggacgggcaugguggacgggugguacggcuaccaccaccagaacgagcagggguccggcuacgccgccgaccucaagagcacccagaacgcgaucgacgagaucaccaacaaggugaacuccgugaucgagaagaugaacacccaguucacggccgugggcaaggaguucaaccaccuggagaagcgcaucgagaaccugaacaagaaggucgacgacggguuccucgacaucuggaccuacaacgccgagcugcuggugcuccuggagaacgagcggacccuggacuaccacgacagcaacgucaagaaccucuacgagaaggugcgcucccagcugaagaacaacgccaaggagaucggcaacgggugcuucgaguucuaccacaagugcgacaacacgugcauggagagcgugaagaacggcaccuacgacuaccccaaguacuccgaggaggccaagcugaaccgggaggagaucgacggggucaagcucgagagcacccgcaucuaccagauccuggcgaucuacuccaccguggccagcagccuggugcucgucgugucccugggcgccaucagcuucuggaugugcuccaacggcagccugcagugccggaucugcaucuga

SEQ ID NO: 69314 - RNA, 1701 nt, Artificial Sequence
  derived and/or modified CDS sequence (opt1) from hemagglutinin__InfluenzaA__ADK33931
augaaggccauccuggugguccuccuguacaccuucgccaccgcgaacgccgacacgcugugcaucggcuaccacgccaacaacagcaccgacaccguggacaccgugcucgagaagaacgucacggugacccacuccgugaaccugcuggaggacaagcacaacgggaagcucugcaagcugcgcggcgucgcgccccugcaccucgggaagugcaacaucgccggcuggauccuggggaacccggagugcgagagccuguccaccgccagcuccuggagcuacaucguggagaccuccagcuccgacaacggcacgugcuaccccggcgacuucaucgacuacgaggagcuccgggagcagcugagcuccgugagcuccuucgagcgcuucgagaucuuccccaagaccagcuccuggcccaaccacgacagcaacaagggggucaccgccgccugcccgcacgccggcgcgaaguccuucuacaagaaccugaucuggcucgugaagaaggggaacagcuaccccaagcuguccaagagcuacaucaacgacaagggcaaggaggugcugguccucugggggauccaccaccccagcaccuccgccgaccagcagagccuguaccagaacgccgacgccuacguguucgugggcacgucccgguacagcaagaaguucaagcccgagaucgccauccgcccgaagguccgggagcaggagggccgcaugaacuacuacuggacccugguggagcccggggacaagaucaccuucgaggcgaccggcaaccucguggucccccgguacgccuucgccauggagcgcaacgccggguccggcaucaucaucagcgacacgcccgugcacgacugcaacacgaccugccagaccccgaagggcgccaucaacaccucccugcccuuccagaacauccaccccaucaccaucgggaagugccccaaguacgucaagagcaccaagcugcggcucgcgaccggccugcgcaacgugccguccauccagagccgggggcuguucggcgccaucgccggguucaucgagggcggcuggacggggaugguggacggcugguacggguaccaccaccagaacgagcagggcuccggguacgccgccgaccucaagagcacccagaacgcgaucgacgagaucaccaacaaggugaacuccgucaucgagaagaugaacacccaguucacggccgugggcaaggaguucaaccaccuggagaagcgcaucgagaaccugaacaagaaggucgacgacggcuuccucgacaucuggaccuacaacgccgagcugcuggugcuccuggagaacgagcggacccuggacuaccacgacagcaacgugaagaaccucuacgagaagguccgcucccagcugaagaacaacgccaaggagaucgggaacggcugcuucgaguucuaccacaagugcgacaacacgugcauggagagcgugaagaacgggaccuacgacuaccccaaguacuccgaggaggccaagcugaaccgggaggagaucgacggcgugaagcucgagagcacccgcaucuaccagauccuggcgaucuacuccaccgucgccagcagccuggugcuccuggugucccugggggccaucagcuucuggaugugcuccaacggcagccuccagugccggaucugcaucuga

SEQ ID NO: 69315 - RNA, 1701 nt, Artificial Sequence
  derived and/or modified CDS sequence (opt1) from hemagglutinin__InfluenzaA__ADK33941
augaaggccauccuggugguccuccuguacaccuucgccaccgcgaacgccgacacgcugugcaucggcuaccacgccaacaacagcaccgacaccguggacaccgugcucgagaagaacgucacggugacccacuccgugaaccugcuggaggacaagcacaacgggaagcucugcaagcugcgcggcgucgcgccccugcaccucgggaagugcaacaucgccggcuggauccuggggaacccggagugcgagagccuguccaccgccagcuccuggagcuacaucguggagaccuccagcuccgacaacggcacgugcuaccccggcgacuucaucgacuacgaggagcuccgggagcagcugagcuccgugagcuccuucgagcgcuucgagaucuuccccaagaccagcuccuggcccaaccacgacagcaacaagggggucaccgccgccugcccgcacgccggcgcgaaguccuucuacaagaaccugaucuggcucgugaagaaggggaacagcuaccccaagcuguccaagagcuacaucaacgacaagggcaaggaggugcugguccucugggggauccaccaccccagcaccuccgccgaccagcagagccuguaccagaacgccgacgccuacguguucgugggcacgucccgguacagcaagaaguucaagcccgagaucgccauccgcccgaagguccgggaccaggagggccgcaugaacuacuacuggacccugguggagcccggggacaagaucaccuucgaggcgaccggcaaccucguggucccccgguacgccuucgccauggagcgcaacgccggguccggcaucgugaucagcgacacgcccgugcacgacugcaacacgaccugccagaccccgaagggcgccaucaacaccucccugcccuuccagaacauccaccccaucaccaucgggaagugccccaaguacgucaagagcaccaagcugcggcucgcgaccggccugcgcaacaucccguccauccagagccgggggcuguucggcgccaucgccggguucaucgagggcggcuggacggggaugguggacggcugguacggguaccaccaccagaacgagcagggcuccggguacgccgccgaccucaagagcacccagaacgcgaucgacaagaucaccaacaaggugaacuccgucaucgagaagaugaacacccaguucacggccgugggcaaggaguucaaccaccuggagaagcgcaucgagaaccugaacaagaaggucgacgacggcuuccucgacaucuggaccuacaacgccgagcugcuggugcuccuggagaacgagcggacccuggacuaccacgacagcaacgugaagaaccucuacgagaagguccgcucccagcugaagaacaacgccaaggagaucgggaacggcugcuucgaguucuaccacaagugcgacaacacgugcauggagagcgugaagaacgggaccuacgacuaccccaaguacuccgaggaggccaagcugaaccgggaggagaucgacggcgugaagcucgagagcacccgcaucuaccagauccuggcgaucuacuccaccgucgccagcagccuggugcucguggucucccugggggccaucagcuucuggaugugcuccaacggcagccugcagugccggaucugcaucuga

SEQ ID NO: 69316 - RNA, 1701 nt, Artificial Sequence; identical to SEQ ID NO: 69313
  derived and/or modified CDS sequence (opt1) from hemagglutinin__InfluenzaA__ADK33951

SEQ ID NO: 69317 - RNA, 1701 nt, Artificial Sequence; identical to SEQ ID NO: 67857
  derived and/or modified CDS sequence (opt1) from hemagglutinin__InfluenzaA__ADK33961

SEQ ID NO: 69318 - RNA, 1701 nt, Artificial Sequence; identical to SEQ ID NO: 67637
  derived and/or modified CDS sequence (opt1) from hemagglutinin__InfluenzaA__ADK45312

SEQ ID NO: 69319 - RNA, 1701 nt, Artificial Sequence
  derived and/or modified CDS sequence (opt1) from hemagglutinin__InfluenzaA__ADK45410
augaagaccaucaucgcccugagcuacauccucugccugguguucgcccagaagcugcccggcaacgacaacuccaccgcgacgcucugccuggggcaccacgccgucccgaacggcaccaucgugaagaccaucaccaacgaccagaucgaggugacgaacgccaccgagcugguccagagcuccagcaccggggagaucugcgacagcccccaccagauccucgacggcgagaacugcacccugaucgacgcccugcucggggacccccagugcgacggcuuccagaacaagaagugggaccuguucguggagcgcagcaaggcccacuccaacugcuaccccuacgacgugccggacuacgcgagccugcggucccucgucgccagcuccggcacgcuggaguucaacaacgagagcuucaacuggaccggggugacccagaacggcaccuccagcgccugcauccgccgguccaacaacagcuucuucucccgccugaacuggcucacgcaccugaaguucaaguaccccgcccugaacgugaccaugcccaacaacgagcaguucgacaagcucuacaucuggggcguccaccaccccgggaccgacaacgaccagaucuuccuguacgcgcaggccagcgggcggaucaccguguccacgaagcgcagccagcagaccgugaucccgaacaucggcagccggccccgcguccggaacauccccucccgcaucagcaucuacuggaccaucgugaagcccggcgacauccugcucaucaacuccaccgggaaccugaucgccccgcggggcuacuucaagauccgcagcgggaaguccagcaucaugcgguccgacgcccccaucggcaagugcaacagcgagugcaucacgcccaacggcuccauccccaacgacaagccguuccagaacgugaaccgcaucaccuacggggccugcccccgguacgucaagcagaacacccugaagcucgcgaccggcaugcgcaacgugcccgagaagcagacgcgggggaucuucggcgccaucgccggguucaucgagaacggcugggagggcaugguggacgggugguacggcuuccgccaccagaacagcgaggggcggggccaggccgccgaccugaaguccacccaggcggccaucgaccagaucaacgggaagcugaaccgccucaucggcaagaccaacgagaaguuccaccagaucgagaaggaguucagcgaggucgagggccggauccaggaccuggagaaguacguggaggacaccaagaucgaccugugguccuacaacgccgagcuccugguggcccuggagaaccagcacacgaucgaccucaccgacagcgagaugaacaagcuguucgagaagaccaagaagcagcugcgcgagaacgccgaggacauggggaacggcugcuucaagaucuaccacaagugcgacaacacgugcaucggguccauccgcaacggcaccuacgaccacgacgucuaccgggacgaggcgcucaacaaccgcuuccagaucaaggggguggagcugaaguccggcuacaaggacuggauccuguggaucuccuucgccaucagcugcuuccuccugugcguggcccugcucggcuucaucaugugggccugccagaaggggaacauccggugcaacaucugcaucuga

SEQ ID NO: 69320 - RNA, 1701 nt, Artificial Sequence
  derived and/or modified CDS sequence (opt1) from hemagglutinin__InfluenzaA__ADK45421
augaagaccaucaucgcccugagcuacauccucugccugguguucgcccagaagcugcccggcaacgacaacuccaccgcgacgcucugccuggggcaccacgccgucccgaacggcaccaucgugaagaccaucaccaacgaccagaucgaggugacgaacgccaccgagcugguccagagcuccagcaccggggagaucugcgacagcccccaccagauccucgacggcaagaacugcacccugaucgacgcccugcucggggacccccagugcgacggcuuccagaacaagaagugggaccuguucguggagcgcagcaaggccuacuccaacugcuaccccuacgacgugccggacuacgcgagccugcggucccucgucgccagcuccggcacgcuggaguucaacaacgagagcuucaacuggaccggggugacccagaacggcaccuccagcgccugcauccgccgguccaagaacagcuucuucucccgccugaacuggcucacgcaccugaacuucaaguaccccgcccugaacgugaccaugcccaacaacgagcaguucgacaagcucuacaucuggggcguccaccaccccgggaccgacaaggaccagaucuuccuguacgcgcaggccagcgggcggaucaccguguccacgaagcgcagccagcagaccgugaucccgaacaucggcagccggccccgcauccggaacauccccucccgcaucagcaucuacuggaccaucgucaagcccggcgacauccugcucaucaacuccaccgggaaccugaucgccccgcggggcuacuucaagauccgcagcgggaaguccagcaucaugcgguccgacgcccccaucggcaagugcaacagcgagugcaucacgcccaacggcuccauccccaacgacaagccguuccagaacgugaaccgcaucaccuacggggccugcccccgguacgugaagcagagcacccugaagcucgcgaccggcaugcgcaacguccccgagaagcagacgcgggggaucuucggcgccaucgccggguucaucgagaacggcugggagggcaugguggacgggugguacggcuuccgccaccagaacuccgaggggcggggccaggccgccgaccugaaguccacccaggcggccaucgaccagaucaacgggaagcugaaccgccucaucggcaagaccaacgagaaguuccaccagaucgagaaggaguucuccgagguggagggccggauccaggaccuggagaaguacgucgaggacaccaagaucgaccuguggagcuacaacgccgagcuccugguggcccuggagaaccagcacacgaucgaccucaccgacuccgagaugaacaagcuguucgagaagaccaagaagcagcugcgcgagaacgccgaggacauggggaacggcugcuucaagaucuaccacaagugcgacaacgcgugcaucgggagcauccgcaacggcaccuacgaccacgacguguaccgggacgaggcccucaacaaccgcuuccagaucaagggggucgagcugaaguccggcuacaaggacuggauccuguggaucagcuucgccaucuccugcuuccuccugugcguggcccugcucggcuucaucaugugggccugccagaaggggaacauccggugcaacaucugcaucuga

SEQ ID NO: 69321 - RNA, 1701 nt, Artificial Sequence
  derived and/or modified CDS sequence (opt1) from hemagglutinin__InfluenzaA__ADK45432
augaagaccaucaucgcccugagcuacacccucugccugguguucgcccagaagcugccccgcaacgacaacuccacggcgacccucugccugggccaccacgccgucccgaacgggaccaucgugaagaccaucacgaacgaccagaucgaggugaccaacgccaccgagcugguccagagcuccagcaccggcgagaucugcgacaacccccaccagauccucgacggggagaacugcacgcugaucgacgcccugcucggcgacccccagugcgacggguuccagaacaagaagugggaccuguucguggagcgguccaaggccuacagcaacugcuaccccuacgacgugccggacuacgcgucccugcgcagccucgucgccuccagcggcacccuggaguucaacaacgaguccuucaacuggaccggcgugacccagaacgggacgagcuccgccugcauccggcgcagcaacaacuccuucuucagccggcugaacuggcucacccaccugaaguucaaguaccccgcccugaacgugaccaugcccaacaacgagcaguucgacaagcucuacaucuggggcguccaccaccccgggaccgacaacgaccagaucuuccuguacgcgcaggccuccggccgcaucacggugagcaccaagcggucccagcagaccgugaucccgaacaucgggagccgcccccggguccgcaacauccccagccggaucuccaucuacuggaccaucgugaagcccggcgacauccugcucaucaacagcacgggcaaccugaucgccccgcgcggguacuucaagauccgguccggcaagagcuccaucaugcgcagcgacgcccccaucgggaagugcaacuccgagugcaucacccccaacggcagcauccccaacgacaagccguuccagaacgugaaccggaucaccuacggcgccugcccccgcuacgucaagcagaacacccugaagcucgcgacggggaugcggaacgugcccgagaagcagacccgcggcaucuucggggccaucgccggcuucaucgagaacgggugggagggcaugguggacggcugguacggguuccggcaccagaacuccgagggccgcgggcaggccgccgaccucaagagcacccaggcggccaucgaccagaucaacggcaagcugaaccggcugaucgggaagaccaacgagaaguuccaccagaucgagaaggaguucuccgaggucgagggccgcauccaggaccuggagaaguacguggaggacacgaagaucgaccuguggagcuacaacgccgagcuccugguggcccuggagaaccagcacaccaucgaccucaccgacuccgagaugaacaagcuguucgagaagaccaagaagcagcugcgcgagaacgccgaggacaugggcaacgggugcuucaagaucuaccacaagugcgacaacgcgugcaucggcagcauccggaacgggacguacgaccacgacgucuaccgcgacgaggcccucaacaaccgguuccagaucaagggcguggagcugaaguccggguacaaggacuggauccuguggaucagcuucgccaucuccugcuuccuccugugcguggcccugcucggcuucaucaugugggccugccagaagggcaacauccgcugcaacaucugcaucuga

SEQ ID NO: 69322 - RNA, 1701 nt, Artificial Sequence; identical to SEQ ID NO: 66458
  derived and/or modified CDS sequence (opt1) from hemagglutinin__InfluenzaA__ADK45443

SEQ ID NO: 69323 - RNA, 1701 nt, Artificial Sequence; identical to SEQ ID NO: 68857
  derived and/or modified CDS sequence (opt1) from hemagglutinin__InfluenzaA__ADK48798

SEQ ID NO: 69324 - RNA, 1701 nt, Artificial Sequence; identical to SEQ ID NO: 67857
  derived and/or modified CDS sequence (opt1) from hemagglutinin__InfluenzaA__ADK62683

SEQ ID NO: 69325 - RNA, 1701 nt, Artificial Sequence
  derived and/or modified CDS sequence (opt1) from hemagglutinin__InfluenzaA__ADK62693
augaaggccauccuggugguccuccuguacaccuucgccaccgcgaacgccgacacgcugugcaucggcuaccacgccaacaacagcaccgacaccguggacaccgugcucgagaagaacgucacggugacccacuccgugaaccugcuggaggacaagcacaacgggaagcucugcaagcugcgcggcgucgcgccccugcaccucgggaagugcaacaucgccggcuggauccuggggaacccggagugcggcagccuguccaccgccagcuccuggagcuacaucguggagaccuccagcuccgacaacggcacgugcuaccccggggacuucaucgacuacgaggagcuccgggagcagcugagcuccgugagcuccuucgagcgcuucgagaucuuccccaagaccagcuccuggcccaaccacgacagcaacaagggcgucaccgccgccugcccgcacgccggggcgaaguccuucuacaagaaccugaucuggcucgugaagaagggcaacagcuaccccaagcuguccaagagcuacaucaacgacaaggggaaggaggugcugguccucuggggcauccaccaccccagcaccuccgccgaccagcagagccuguaccagaacgccgacgccuacguguucgugggcacgucccgguacagcaagaaguucaagcccgagaucgccauccgcccgaagguccgggagcaggaggggcgcaugaacuacuacuggacccugguggagcccggcgacaagaucaccuucgaggcgaccgggaaccucguggucccccgguacgccuucgccauggagcgcaacgccggcuccggcaucaucaucagcgacacgcccgugcacgacugcaacacgaccugccagaccccgaagggggccaucaacaccucccugcccuuccagaacgugcaccccaucaccaucggcaagugccccaaguacgucaagagcaccaagcugcggcucgcgaccgggcugcgcaacgugccguccauccagagccggggccuguucggggccaucgccggcuucaucgagggcggguggacgggcaugguggacgggugguacggcuaccaccaccagaacgagcagggguccggcuacgccgccgaccucaagagcacccagaacgcgaucgacgagaucaccaacaaggucaacuccgugaucgagaagaugaacacccaguucacggccgucggcaaggaguucaaccaccuggagaagcgcaucgagaaccugaacaagaagguggacgacggguuccucgacaucuggaccuacaacgccgagcugcuggugcuccuggagaacgagcggacccuggacuaccacgacagcaacgucaagaaccucuacgagaaggugcgcucccagcugaagaacaacgccaaggagaucggcaacgggugcuucgaguucuaccacaagugcgacaacacgugcauggagagcgugaagaacggcaccuacgacuaccccaaguacuccgaggaggccaagcugaaccgggaggagaucgacggggucaagcucgagagcacccgcaucuaccagauccuggcgaucuacuccaccguggccagcagccuggugcucgucgugucccugggcgccaucagcuucuggaugugcuccaacggcagccugcagugccggaucugcaucuga

SEQ ID NO: 69326 - RNA, 1701 nt, Artificial Sequence; identical to SEQ ID NO: 67794
  derived and/or modified CDS sequence (opt1) from hemagglutinin__InfluenzaA__ADK62703

SEQ ID NO: 69327 - RNA, 1701 nt, Artificial Sequence
  derived and/or modified CDS sequence (opt1) from hemagglutinin__InfluenzaA__ADK64992
augaaggccauccuggugguccuccuguacaccuucgccaccgcgaacgccgacacgcugugcaucggcuaccacgccaacaacagcaccgacaccguggacaccgugcucgagaagaacgucacggugacccacuccgugaaccugcuggaggacaagcacaacgggaagcucugcaagcugcgcggcgucgcgccccugcaccucgggaagugcaacaucgccggcuggauccuggggaacccggagugcgagagccuguccaccgccagcuccuggagcuacaucguggagaccuccagcuccgacaacggcacgugcuaccccggcgacuucaucgacuacgaggagcuccgggagcagcugagcuccgugagcuccuucgagcgcuucgagaucuuccccaagaccagcuccuggcccaaccacgacagcaacaagggggucaccgccgccugcccgcacgccggcgcgaaguccuucuacaagaaccugaucuggcucgugaagaaggggaacagcuaccccaagcuguccaagagcuacaucaacgacaagggcaaggaggugcugguccucugggggauccaccaccccagcaccuccgccgaccagcagagccuguaccagaacgccgacgccuacguguucgugggcacgucccgguacagcaagaaguucaagcccgagaucgccauccgcccgaagguccgggaccaggagggccgcaugaacuacuacuggacccugguggagcccggggacaagaucaccuucgaggcgaccggcaaccucguggucccccgguacgccuucgccauggagcgcaacgccggguccggcaucaucaucagcgacacgcccgugcacgacugcaacacgaccugccagaccccgaagggcgccaucaacaccucccugcccuuccagaacauccaccccaucaccaucgggaagugccccaaguacgucaagagcaccaagcugcggcucgcgaccggccugcgcaacgugccguccauccagagccgggggcuguucggcgccaucgccggguucaucgagggcggcuggacggggaugguggacggcugguacggguaccaccaccagaacgagcagggcuccggguacgccgccgaccucaagagcacccagaacgcgaucgacgagaucaccaacaaggugaacuccgucaucgagaagaugaacacccaguucacggccgugggcaaggaguucaaccaccuggagaagcgcaucgagaaccugaacaagaaggucgacgacggcuuccucgacaucuggaccuacaacgccgagcugcuggugcuccuggagaacgagcggacccuggacuaccacgacagcaacgugaagaaccucuacgagaagguccgcucccagcugaagaacaacgccaaggagaucgggaacggcugcuucgaguucuaccacaagugcgacaacacgugcauggagagcgugaagaacgggaccuacgacuaccccaaguacuccgaggaggccaagcugaaccgggaggagaucgacggcaucaagcucgagagcacccgcaucuaccagauccuggcgaucuacuccaccguggccagcagccugguccucguggugucccugggggccaucagcuucuggaugugcuccaacggcagccugcaguaccggaucugcaucuga

SEQ ID NO: 69328 - RNA, 1701 nt, Artificial Sequence
  derived and/or modified CDS sequence (opt1) from hemagglutinin__InfluenzaA__ADK65001
augaaggccauccuggugguccuccuguacaccuucgccaccgcgaacgccgacacgcugugcaucggcuaccacgccaacaacagcaccgacaccguggacaccgugcucgagaagaacgucacggugacccacuccgugaaccugcuggaggacaagcacaacgggaagcucugcaagcugggcggggucgcgccccugcaccucggcaagugcaacaucgccggguggauccugggcaacccggagugcgagagccuguccaccgccagcuccuggagcuacaucguggagaccuccagcuccgacaacggcacgugcuaccccggggacuucaucgacuacgaggagcuccgcgagcagcugagcuccgugagcuccuucgagcgguucgagaucuuccccaagaccagcuccuggcccaaccacgacagcaacaagggcgucaccgccgccugcccgcacgccggggcgaaguccuucuacaagaaccugaucuggcucgugaagaagggcaacagcuaccccaagcuguccaagagcuacaucaacgacaaggggaaggaggugcugguccucuggggcauccaccaccccagcaccuccgccgaccagcagagccuguaccagaacgccgacgccuacguguucgugggcacgucccgcuacagcaagaaguucaagcccgagaucgccauccggccgaagguccgcgaccaggaggggcggaugaacuacuacuggacccugguggagcccggcgacaagaucaccuucgaggcgaccgggaaccucguggucccccgcuacgccuucgccauggagcggaacgccggcuccggcaucaucaucagcgacacgcccgugcacgacugcaacacgaccugccagaccccgaagggggccaucaacaccucccugcccuuccagaacauccaccccaucaccaucggcaagugccccaaguacgucaagagcaccaagcugcgccucgcgaccgggcugcggaacgugccguccauccagagccgcggccuguucggggccaucgccggcuucaucgagggcggguggacgggcaugguggacgggugguacggcuaccaccaccagaacgagcagggguccggcuacgccgccgaccucaagagcacccagaacgcgaucgacgagaucaccaacaaggugaacuccgucaucgagaagaugaacacccaguucacggccgugggcaaggaguucaaccaccuggagaagcggaucgagaaccugaacaagaaggucgacgacggguuccucgacaucuggaccuacaacgccgagcugcuggugcuccuggagaacgagcgcacccuggacuaccacgacagcaacgugaagaaccucuacgagaagguccggucccagcugaagaacaacgccaaggagaucggcaacgggugcuucgaguucuaccacaagugcgacaacacgugccuggagagcgugaagaacggcaccuacgacuaccccaaguacuccgaggaggccaagcucaaccgcgaggagaucgacggggugaagcuggagagcacccggaucuaccagauccuggcgaucuacuccaccgucgccagcagccucgugcugguggucucccugggcgccaucagcuucuggaugugcuccaacggcagccuccagugccgcaucugcaucuga

SEQ ID NO: 69329 - RNA, 1701 nt, Artificial Sequence
  derived and/or modified CDS sequence (opt1) from hemagglutinin__InfluenzaA__ADK65009
augaaggccauccuggugguccuccuguacaccuucgccaccgcgaacgccgacacgcugugcaucggcuaccacgccaacaacagcaccgacaccguggacaccgugcucgagaagaacgucacggugacccacuccgugaaccugcuggaggacaagcacaacgggaagcucugcaagcugcgcggcgucgcgccccugcaccucgggaagugcaacaucgccggcuggauccuggggaacccggagugcgagagccuguccaccgcgagcuccuggagcuacaucguggagaccuccagcuccgacaacggcacgugcuaccccggcgacuucaucgacuacgaggagcuccgggagcagcugagcuccgugagcuccuucgagcgcuucgagaucuuccccaagaccagcuccuggcccaaccacgacccgaacaagggggucaccgccgccugcccccacgccggcgccaagagcuucuacaagaaccugaucuggcucgugaagaaggggaacuccuaccccaagcugagcaaguccuacaucaacgacaagggcaaggaggugcugguccucugggggauccaccaccccagcaccagcgccgaccagcagucccuguaccagaacgccgacgccuacguguucgugggcacgagccgguacuccaagaaguucaagccggagaucgccauccgccccaagguccgggaccaggagggccgcaugaacuacuacuggacccugguggagcccggggacaagaucaccuucggcgcgaccgggaaccucguggucccccgguacgccuucgccauggagcgcaacgccggcagcggcaucaucaucuccgacacgccggugcacgacugcaacacgaccugccagacccccaagggggccaucaacaccagccugcccuuccagaacauccaccccaucaccaucggcaagugcccgaaguacgugaaguccaccaagcugcggcucgcgaccgggcugcgcaacguccccagcauccagucccggggccuguucggggccaucgccggcuucaucgagggcggguggacgggcaugguggacgggugguacggcuaccaccaccagaacgagcaggggagcggcuacgccgccgaccucaaguccacccagaacgcgaucgacgagaucaccaacaaggugaacagcgucaucgagaagaugaacacccaguucacggccgugggcaaggaguucaaccaccuggagaagcgcaucgagaaccugaacaagaaggucgacgacggguuccucgacaucuggaccuacaacgccgagcugcuggugcuccuggagaacgagcggacccuggacuaccacgacuccaacgugaagaaccucuacgagaagguccgcagccagcugaagaacaacgccaaggagaucggcaacgggugcuucgaguucuaccacaagugcgacaacacgugcauggaguccgugaagaacggcaccuacgacuaccccaaguacagcgaggaggccaagcugaaccgggaggagaucgacggggugaagcucgaguccacccgcaucuaccagauccuggcgaucuacagcaccgucgccuccagccuggugcucguggucagccugggcgccaucuccuucuggaugugcagcaacggcucccugcagugccggaucugcaucuga

SEQ ID NO: 69330 - RNA, 1701 nt, Artificial Sequence
  derived and/or modified CDS sequence (opt1) from hemagglutinin__InfluenzaA__ADK87287
augaagaccaucaucgcccugagcuacauccucugccugguguucgcccagaagcugcccggcaacgacaacuccaccgcgacgcucugccuggggcaccacgccgucccgaacggcaccaucgugaagaccaucaccaacgaccagaucgaggugacgaacgccaccgagcugguccagagcuccagcaccggggagaucugcgacagcccccaccagauccucgacggcaagaacugcacccugaucgacgcccugcucggggacccccagugcgacggcuuccagaacaagaagugggaccuguucguggagcgcagcaaggccuacuccaacugcuaccccuacgacgugccggacuacgcgagccugcggucccucgucgccagcuccggcacgcuggaguucaacaacgagagcuucaacuggaccggggugacccagaacggcaccuccagcgccugcauccgccgguccaagaacagcuucuucucccgccugaacuggcucacgcaccugaacuucaaguaccccgcccugaacgugaccaugcccaacaacgagcaguucgacaagcucuacaucuggggcguccaccaccccgggaccgacaaggaccagaucuuccuguacgcgcaggccagcgggcggaucaccguguccacgaagcgcagccagcagaccgccaucccgaacaucggcagccggccccgcgugcggaacauccccucccgcaucagcaucuacuggaccaucgucaagcccggcgacauccugcucaucaacuccaccgggaaccugaucgccccgcggggcuacuucaagauccgcagcgggaaguccagcaucaugcgguccgacgcccugaucggcaagugcaacagcgagugcaucacgcccaacggcuccauccccaacgacaagcccuuccagaacgugaaccgcaucaccuacggggcgugcccgcgguacgugaagcagaacacccucaagcuggccaccggcaugcgcaacguccccgagaagcagacgcgggggaucuucggcgccaucgccggguucaucgagaacggcugggagggcaugguggacgggugguacggcuuccgccaccagaacagcgaggggcggggccaggccgcggaccugaaguccacccaggccgccaucgaccagaucaacgggaagcucaaccgccugaucggcaagaccaacgagaaguuccaccagaucgagaaggaguucagcgagguggagggccggauccaggaccuggagaaguacgucgaggacaccaagaucgaccucugguccuacaacgccgagcugcugguggcccucgagaaccagcacacgaucgaccugaccgacagcgagaugaacaagcuguucgagaagaccaagaagcagcuccgcgagaacgcggaggacauggggaacggcugcuucaagaucuaccacaagugcgacaacgccugcaucggguccauccgcaacggcaccuacgaccacgacguguaccgggacgaggcccugaacaaccgcuuccagaucaagggggucgagcugaaguccggcuacaaggacuggauccucuggaucuccuucgccaucagcugcuuccugcugugcguggcccuccugggcuucaucaugugggcgugccagaaggggaacauccggugcaacaucugcaucuga

SEQ ID NO: 69331 - RNA, 1701 nt, Artificial Sequence
  derived and/or modified CDS sequence (opt1) from hemagglutinin__InfluenzaA__ADK87288
augaagaccaucaucgcccugagcuacauccucugccugguguucgcccagaagcugcccggcaacgacaacuccaccgcgacgcucugccuggggcaccacgccgucccgaacggcaccaucgugaagaccaucaccaacgaccagaucgaggugacgaacgccaccgagcugguccagagcuccagcaccggggagaucugcgacagcccccaccagauccucgacggcaagaacugcacccugaucgacgcccugcucggggacccccagugcgacggcuuccagaacaagaagugggaccuguucguggagcgcagcaaggccuacuccaacugcuaccccuacgacgugccggacuacgcgagccugcggucccucgucgccagcuccggcacgcuggaguucaacaacgagagcuucaacuggaccggggugacccagaacggcaccuccagcgccugcauccgccgguccaagaacagcuucuucucccgccugaacuggcucacgcaccugaacuucaaguaccccgcccugaacgugaccaugcccaacaacgagcaguucgacaagcucuacaucuggggcguccaccaccccgggaccgacaaggaccagaucuuccuguacgcgcaggccaccgggcggaucacggugagcaccaagcgcucccagcagaccgccaucccgaacaucggcagccggccccgcgugcggaacauccccagccgcaucuccaucuacuggaccaucgucaagcccggcgacauccugcucaucaacagcacggggaaccugaucgccccgcggggcuacuucaagauccgcuccgggaaguccuccaucaugcggagcgacgcccccaucggcaagugcaacuccgagugcaucacccccaacggcagcauccccaacgacaagccguuccagaacgugaaccgcaucaccuacggggcgugcccccgguacgugaagcagaacacccugaagcucgccacgggcaugcgcaacguccccgagaagcagacccgggggaucuucggcgccaucgccggguucaucgagaacggcugggagggcaugguggacgggugguacggcuuccgccaccagaacuccgaggggcggggccaggccgcggaccucaagagcacccaggccgccaucgaccagaucaacgggaagcugaaccgccugaucggcaagaccaacgagaaguuccaccagaucgagaaggaguucuccgagguggagggccggauccaggaccuggagaaguacgucgaggacacgaagaucgaccuguggagcuacaacgccgagcuccugguggcccuggagaaccagcacaccaucgaccucaccgacuccgagaugaacaagcuguucgagaagaccaagaagcagcugcgcgagaacgcggaggacauggggaacggcugcuucaagaucuaccacaagugcgacaacgccugcaucgggagcauccgcaacggcacguacgaccacgacguguaccgggacgaggcccucaacaaccgcuuccagaucaagggggucgagcugaaguccggcuacaaggacuggauccuguggaucagcuucgccaucuccugcuuccuccugugcguggcccugcucggcuucaucaugugggcgugccagaaggggaacauccggugcaacaucugcaucuga

SEQ ID NO: 69332 - RNA, 1701 nt, Artificial Sequence
  derived and/or modified CDS sequence (opt1) from hemagglutinin__InfluenzaA__ADK87289
augaagaccaucaucgcccugagcuacauccucugccugguguucgcccagaagcugcccggcaacgacaacuccaccgcgacgcucugccuggggcaccacgccgucccgaacggcaccaucgugaagaccaucaccaacgaccagaucgaggugacgaacgccaccgagcugguccagagcuccagcaccggggagaucugcgacagcccccaccagauccucgacggcaagaacugcacccugaucgacgcccugcucggggacccccagugcgacggcuuccagaacaagaagugggaccuguucguggagcgcagcaaggccuacuccaacugcuaccccuacgacgugccggacuacgcgagccugcggucccucgucgccagcuccggcacgcugggguucaacaacgagagcuucaacuggaccggcgugacccagaacgggaccuccagcgccugcauccgccgguccaagaacagcuucuucucccgccugaacuggcucacgcaccugaacuucaaguaccccgcccugaacgugaccaugcccaacaacgagcaguucgacaagcucuacaucuggggcguccaccaccccgggaccgacaaggaccagaucuuccuguacgcgcaggccagcggccggaucaccguguccacgaagcgcagccagcagaccgccaucccgaacaucggcagccggccccgcgugcggaacauccccucccgcaucagcaucuacuggaccaucgucaagcccggggacauccugcucaucaacuccaccggcaaccugaucgccccgcggggguacuucaagauccgcagcggcaaguccagcaucaugcgguccgacgcccccaucggcaagugcaacagcgagugcaucacgcccaacggguccauccccaacgacaagccguuccagaacgugaaccgcaucaccuacggcgcgugcccccgguacgugaagcagaacacccugaagcucgccaccgggaugcgcaacguccccgagaagcagacgcggggcaucuucggggccaucgccggcuucaucgagaacggcugggaggggaugguggacggcugguacggguuccgccaccagaacagcgagggccgggggcaggccgcggaccugaaguccacccaggccgccaucgaccagaucaacggcaagcugaaccgccucaucggcaagaccaacgagaaguuccaccagaucgagaaggaguucagcgagguggaggggcggauccaggaccugggcaaguacgucgaggacaccaagaucgaccugugguccuacaacgccgagcuccugguggcccuggagaaccagcacacgaucgaccucaccgacagcgagaugaacaagcuguucgagaagaccaagaagcagcugcgcgagaacgcggaggacauggggaacggcugcuucaagaucuaccacaagugcgacaacgccugcaucggguccauccgcaacggcaccuacgaccacgacguguaccgggacgaggcccucaacaaccgcuuccagaucaagggcgucgagcugaaguccggguacaaggacuggauccuguggaucuccuucgccaucagcugcuuccuccugugcguggcccugcucggcuucaucaugugggcgugccagaaggggaacauccggugcaacaucugcaucuga

SEQ ID NO: 69333 - RNA, 1701 nt, Artificial Sequence
  derived and/or modified CDS sequence (opt1) from hemagglutinin__InfluenzaA__ADK87291
augaagaccaucaucgcccugagcuacauccagugccucguguucgcccagaagcugcccggcaacgacaacuccaccgcgacgcugugccucgggcaccacgccgucccgaacggcaccaucgugaagaccaucaccaacgaccagaucgaggugacgaacgccaccgagcugguccagagcuccagcaccggggagaucugcgacagcccccaccagauccuggacggcaagaacugcacccucaucgacgcccugcugggggacccccagugcgacggcuuccagaacaagaagugggaccucuucguggagcgcagcaaggccuacuccaacugcuaccccuacgacgugccggacuacgcgagccugcggucccuggucgccagcuccggcacgcucgaguucaacaacgagagcuucaacuggaccggggugacccagaacggcaccuccagcgccugcauccgccgguccaagaacagcuucuucucccgccugaacuggcugacgcaccucaacuucaaguaccccgcccugaacgugaccaugcccaacaacgagcaguucgacaagcuguacaucuggggcguccaccaccccgggaccgacaaggaccagaucagccucuacgcgcaggccuccgggcggaucaccgugagcacgaagcgcagccagcagaccgccaucccgaacaucggcucccggccccgcgugcggaacauccccagccgcaucuccaucuacuggaccaucgucaagcccggcgacauccugcugaucaacagcaccgggaaccucaucgccccgcggggcuacuucaagauccgcuccgggaaguccuccaucaugcggagcgacgcccccaucggcaagugcaacuccgagugcaucacgcccaacggcagcauccccaacgacaagccguuccagaacgugaaccgcaucaccuacggggcgugcccccgguacgugaagcagaacacccugaagcuggccaccggcaugcgcaacguccccgagaagcagacgcgggggaucuucggcgccaucgccggguucaucgagaacggcugggagggcaugguggacgggugguacggcuuccgccaccagaacuccgaggggcggggccaggccgcggaccucaagagcacccaggccgccaucgaccagaucaacgggaagcugaaccgccugaucggcaagaccaacgagaaguuccaccagaucgagaaggaguucuccgagguggagggccggauccaggaccucgggaaguacgucgaggacaccaagaucgaccuguggagcuacaacgccgagcugcucguggcccuggagaaccagcacacgaucgaccugaccgacuccgagaugaacaagcuguucgagaagaccaagaagcagcuccgcgagaacgcggaggacaugggcaacgggugcuucaagaucuaccacaagugcgacaacgccugcaucggcagcauccgcaacgggaccuacgaccacgacguguaccgggacgaggcccugaacaaccgcuuccagaucaagggcgucgagcucaaguccggcuacaaggacuggauccuguggaucagcuucgccaucuccugcuuccugcucugcguggcccugcugggguucaucaugugggcgugccagaagggcaacauccggugcaacaucugcaucuga

SEQ ID NO: 69334 - RNA, 1701 nt, Artificial Sequence
  derived and/or modified CDS sequence (opt1) from hemagglutinin__InfluenzaA__ADK87293
augaagaccaucaucgcccugagcuacauccucugccugguguucgcccagaagcugcccggcaacgacaacuccaccgcgacgcucugccuggggcaccacgccgucccgaacggcaccaucgugaagaccaucaccaacgaccagaucgaggugacgaacgccaccgagcugguccagagcuccagcaccggggagaucugcgacagcccccaccagauccucgacggcaagaacugcacccugaucgacgcccugcucggggacccccagugcgacggcuuccagaacaagaagugggaccuguucguggagcgcuccaaggccuacuccaacugcuaccccuacgacgugccggacuacgcgagccugcggucccucgucgccagcuccggcacgcuggaguucaacaacgagagcuucaacuggaccggggugacccaggacggcaccuccagcgccugcauccgccgguccaagaacagcuucuucuccaagcugaacuggcucacgcaccugaacuucaaguaccccgcccugaacgugaccaugcccaacaacgagcaguucgacaagcucuacaucuggggcguccaccaccccgggaccgacaaggaccagaccuuccuguacgcgcaggccagcgggcgcaucacgguguccaccaagcggagccagcagaccgccaucccgaacaucggcagccgcccccgggugcgcaacauccccucccggaucagcaucuacuggaccaucgucaagcccggcgacauccugcucaucaacuccacggggaaccugaucgccccgcgcggcuacuucaagauccggagcgggaaguccagcaucaugcgcuccgacgcccccaucggcaagugcaacagcgagugcaucacccccaacggcuccauccccaacgacaagccguuccagaacgugaaccggaucaccuacggggcgugcccccgcuacgugaagcagaacacccugaagcucgccacgggcaugcggaacguccccgagaagcagacccgcgggaucuucggcgccaucgccggguucaucgagaacggcugggagggcaugguggacgggugguacggcuuccggcaccagaacagcgaggggcgcggccaggccgcggaccugaaguccacccaggccgccaucgaccagaucaacgggaagcugaaccggcucaucggcaagaccaacgagaaguuccaccagaucgagaaggaguucagcgagguggagggccgcauccaggaccuggagaaguacgucgaggacacgaagaucgaccugugguccuacaacgccgagcuccugguggcccuggagaaccagcacaccaucgaccucaccgacagcgagauguccaagcuguucgagaagaccaagaagcagcugcgggagaacgcggaggacauggggaacggcugcuucaagaucuaccacaagugcgacaacgccugcaucgggagcauccgcaacggcacguacgaccacgacguguaccgcgacgaggcccucaacaaccgguuccagaucaagggggucgagcugaaguccggcuacaaggacuggauccuguggaucagcuucgccaucuccugcuuccuccugugcguggcccugcucggcuucaucaugugggcgugccagaaggggaacauccgcugcaacaucugcaucuga

SEQ ID NO: 69335 - RNA, 1701 nt, Artificial Sequence
  derived and/or modified CDS sequence (opt1) from hemagglutinin__InfluenzaA__ADK87295
augaagaccaucaucgcccugagcuacauccucugccugguguucgcccagaagcugcccggcaacgacaacuccaccgcgacgcucugccuggggcaccacgccgucccgaacggcaccaucgugaagaccaucaccaacgaccagaucgaggugacgaacgccaccgagcugguccagagcuccagcaccggggagaucugcgacagcccccaccagauccucgacggcaagaacugcacccugaucgacgcccugcucggggacccccagugcgacggcuuccagaacaagaagugggaccuguucguggagcgcagcaaggccuacuccaacugcuaccccuacgacgugccggacuacgcgagccugcggucccucgucgccagcuccggcagccuggaguucaacaacgaguccuucaacuggacgggggugacccagaacggcaccagcuccgccugcauccgccggagcaagaacuccuucuucagccgccugaacuggcucacccaccugaacuucaaguaccccgcccugaacgugacgaugcccaacaacgagcaguucgacaagcucuacaucuggggcguccaccaccccgggaccgacaaggaccagaucuuccuguacgcgcaggccuccgggcggaucaccgugagcaccaagcgcagccagcagacggccaucccgaacaucggcucccggccccgcgugcggaacauccccagccgcaucuccaucuacuggaccaucgucaagcccggcgacauccugcucaucaacagcaccgggaaccugaucgccccgcggggcuacuucaagauccgcuccgggaaguccuccaucaugcggagcgacgcccccaucggcaagugcaacuccgagugcaucacccccaacggcagcauccccaacgacaagccguuccagaacgugaaccgcaucacguacggggcgugcccccgguacgugaagcagaacacccugaagcucgccaccggcaugcgcaacguccccgagaagcagacccgggggaucuucggcgccaucgccggguucaucgagaacggcugggagggcaugguggacgggugguacggcuuccgccaccagaacuccgaggggcggggccaggccgcggaccucaagagcacgcaggccgccaucgaccagaucaacgggaagcugaaccgccugaucggcaagaccaacgagaaguuccaccagaucgagaaggaguucuccgagguggagggccggauccaggaccuggagaaguacgucgaggacaccaagaucgaccuguggagcuacaacgccgagcuccugguggcccuggagaaccagcacaccaucgaccucacggacuccgagaugaacaagcuguucgagaagaccaagaagcagcugcgcgagaacgcggaggacauggggaacggcugcuucaagaucuaccacaagugcgacaacgccugcaucgggagcauccgcaacggcaccuacgaccacgacguguaccgggacgaggcccucaacaaccgcuuccagaucaagggggucgagcugaaguccggcuacaaggacuggauccuguggaucagcuucgccaucuccugcuuccuccugugcguggcccugcucggcuucaucaugugggcgugccagaaggggaacauccggcgcaacaucugcaucuga

SEQ ID NO: 69336 - RNA, 1701 nt, Artificial Sequence
  derived and/or modified CDS sequence (opt1) from hemagglutinin__InfluenzaA__ADK87296
augaaggccauccuggugguccuccuguacaccuucgccaccgcgaacgccgacacgcugugcaucggcuaccacgccaacaacagcaccgacaccguggacaccgugcucgagaagaacgucacggugacccacuccgugaaccugcuggaggacaagcacaacgggaagcucugcaagcugcgcggcgucgcgccccugcaccucgggaagugcaacaucgccggcuggauccuggggaacccggagugcgagagccuguccaccgcgagcuccuggagcuacaucguggagaccuccagcuccgacaacggcacgugcuaccccggcgacuucaucgacuacgaggagcuccgggagcagcugagcuccgugagcuccuucgagcgcuucgagaucuuccccaagaccagcuccuggcccaaccacgacccgaacaagggggucaccgccgccugcccccacgccggcgccaagagcuucuacaagaaccugaucuggcucgugaagaaggggaacuccuaccccaagcugagcaaguccuacaucaacgacaagggcaaggaggugcugguccucugggggauccaccaccccagcaccagcgccgaccagcagucccuguaccagaacgccgacgccuacguguucgugggcacgagccgguacuccaagaaguucaagccggagaucgccauccgccccaagguccgggaccaggagggccgcaugaacuacuacuggacccugguggagcccggggacaagaucaccuucgaggcgaccggcaaccucguggucccccggugcgccuucgccauggagcgcaacgccgggagcggcaucaucaucuccgacacgccggugcacgacugcaacacgaccugccagacccccaagggcgccaucaacaccagccugcccuuccagaacauccaccccaucaccaucgggaagugcccgaaguacgugaaguccaccaagcugcggcucgcgaccggccugcgcaacguccccagcauccagucccgggggcuguucggcgccaucgccggguucaucgagggcggcuggacggggaugguggacggcugguacggguaccaccaccagaacgagcagggcagcggguacgccgccgaccucaaguccacccagaacgcgaucgacgagaucaccaacaaggugaacagcgucaucgagaagaugaacacccaguucacggccgugggcaaggaguucaaccaccuggagaagcgcaucgagaaccugaacaagaaggucgacgacggcuuccucgacaucuggaccuacaacgccgagcugcuggugcuccuggagaacgagcggacccuggacuaccacgacuccaacgugaagaaccucuacgagaagguccgcagccagcugaagaacaacgccaaggagaucgggaacggcugcuucgaguucuaccacaagugcgacaacacgugcauggaguccgugaagaacgggaccuacgacuaccccaaguacagcgaggaggccaagcugaaccgggaggagaucgacggcgugaagcucgaguccacccgcaucuaccagauccuggcgaucuacagcaccgucgccuccagccuggugcucguggucagccugggggccaucuccuucuggaugugcagcaacggcucccugcagugccggaucugcaucuga

SEQ ID NO: 69337 - RNA, 1701 nt, Artificial Sequence
  derived and/or modified CDS sequence (opt1) from hemagglutinin__InfluenzaA__ADK87298
augaaggccauccuggugguccuccuguacaccuucgccaccgcgaacgccgacacgcugugcaucggcuaccacgccaacaacagcaccgacaccguggacaccgugcucgagaagaacgucacggugacccacuccgugaaccugcuggaggacaagcacaacgggaagcucugcaagcugcgcggcgucgcgccccugcaccucgggaagugcaacaucgccggcuggauccuggggaacccggagugcgagagccuguccaccgccagcuccuggagcuacaucguggagaccuccagcuccgacagcggcacgugcuaccccggcgacuucaucgacuacgaggagcuccgggagcagcuguccagcguguccagcuucgagcgcuucgagaucuuccccaagaccuccagcuggcccaaccacgacccgaacaagggggucaccgccgccugcccccacgccggcgcgaaguccuucuacaagaaccugaucuggcucgugaagaaggggaacagcuaccccaagcuguccaagagcuacaucaacgacaagggcaaggaggugcugguccucugggggauccaccaccccagcaccuccgccgaccagcagagccuguaccagaacgccgacgccuacguguucgugggcacgucccgguacagcaagaaguucaagccggagaucgccauccgccccaagguccgggaccaggagggccgcaugaacuacuacuggacccugguggagcccggggacaagaucaccuucgaggcgaccggcaaccucguggucccccgguacgccuucgccauggagcgcaacgccggguccggcaacaucaucagcgacacgccggugcacgacugcaacacgaccugccagacccccaagggcgccaucaacaccucccugcccuuccagaacauccaccccaucaccaucgggaagugcccgaaguacgucaagagcaccaagcugcggcucgcgaccggccugcgcaacgugcccuccauccagagccgggggcuguucggcgccaucgccggguucaucgagggcggcuggacggggaugguggacggcugguacggguaccaccaccagaacgagcagggcuccggguacgccgccgaccucaagagcacccagaacgcgaucgacgagaucaccaacaaggugaaccccgucaucgagaagaugaacacccaguucacggccgugggcaaggaguucaaccaccuggagaagcgcaucgagaaccugaacaagaaggucgacgacggcuuccucgacaucuggaccuacaacgccgagcugcuggugcuccuggagaacgagcggacccuggacuaccacgacuccaacgugaagaaccucuacgagaagguccgcagccagcugaagaacaacgccaaggagaucgggaacggcugcuucgaguucuaccacaagugcgacaacacgugcauggaguccgugaagaacgggaccuacgacuaccccaaguacagcgaggaggccaagcugaaccgggaggagaucgacggcgugaagcucgaguccacccgcaucuaccagauccuggcgaucuacagcaccgucgccuccagccuggugcucguggucagccugggggccaucuccuucuggaugugcagcaacggcucccugcagugccggaucugcaucuga

SEQ ID NO: 69338 - RNA, 1701 nt, Artificial Sequence
  derived and/or modified CDS sequence (opt1) from hemagglutinin__InfluenzaA__ADK87300
augaagaccaucaucgcccugagcuacauccucugcaugguguucgcccagaagcugcccggcaacgacaacuccaccgcgacgcugugccucgggcaccacgccgucccgaacggcaccaucgugaagaccaucaccaacgaccagaucgaggugacgaacgccaccgagcugguccagagcuccagcaccggggagaucugcgacagcccccaccagauccuggacggcaagaacugcacccucaucgacgcccugcugggggacccccagugcgacggcuuccagaacaagaagugggaccucuucguggagcgcagcaaggccuacuccaacugcuaccccuacgacgugccggacuacgcgagccugcggucccuggucgccagcuccggcacgcucgaguucaacaacgagagcuucaacuggaccggggugacccagaacggcaccuccagcgccugcauccgccgguccaagaacagccuguucucccgccugaacuggcucacgcaccugaacuucaaguaccccgcccugaacgugaccaugcccaacaacgagcaguucgacaagcucuacaucuggggcguccaccaccccgggaccgacaaggaccagaucuuccuguacgcgcaggccagcgggcggaucaccguguccacgaagcgcagccagcagaccgccaucccgaacaucggcagccggccccgcgugcggaacauccccucccgcaucagcaucuacuggaccaucgucaagcccggcgacauccugcucaucaacuccaccgggaaccugaucgccccgcggggcuacuucaagauccgcagcgggaaguccagcaucaugcgguccgacgcccccaucggcaagugcaacagcgagugcaucgcgcccaacggcuccauccccaacgacaagagcuuccagaacgugaaccgcaucacguacggggccugcccgcgguacgugaagcagaacacccugaagcucgccaccggcaugcgcaacguccccgagaagcagacccgggggaucuucggcgccaucgccggguucaucgagaacggcugggagggcaugguggacgggugguacggcuuccgccaccagaacuccgaggggcggggccaggcggccgaccugaaguccacgcaggccgccaucgaccagaucaacgggaagcugaaccgccucaucggcaagaccaacgagaaguuccaccagaucgagaaggaguucuccgagguggagggccggauccaggaccuggagaaguacgucgaggacaccaagaucgaccuguggagcuacaacgccgagcuccugguggcgcuggagaaccagcacaccaucgaccucacggacuccgagaugaacaagcuguucgagaagaccaagaagcagcugcgcgagaacgccgaggacauggggaacggcugcuucaagaucuaccacaagugcgacaacgccugcaucgggagcauccgcaacggcaccuacgaccacgacguguaccgggacgaggcccucaacaaccgcuuccagaucaagggggucgagcugaaguccggcuacaaggacuggauccuguggaucagcuucgccaucuccugcuuccuccugugcguggcgcugcucggcuucaucaugugggccugccagaaggggaacauccggugcaacaucugcaucuga

SEQ ID NO: 69339 - RNA, 1701 nt, Artificial Sequence
  derived and/or modified CDS sequence (opt1) from hemagglutinin__InfluenzaA__ADK87302
augaagaccaucaucgcccugagcuacauccucugcaugguguucgcccagaagcugcccggcaacgacaacuccaccgcgacgcugugccucgggcaccacgccgucccgaacggcaccaucgugaagaccaucaccaacgaccagaucgaggugacgaacgccaccgagcugguccagagcuccagcaccggggagaucugcgacagcccccaccagauccuggacggcaagaacugcacccucaucgacgcccugcugggggacccccagugcgacggcuuccagaacaagaagugggaccucuucguggagcgcuccaaggccuacuccaacugcuaccccuacgacgugccggacuacgcgagccugcggucccuggucgccagcuccggcacgcucgaguucaacaacgagagcuucaacuggaccggggugacccagaacggcaccuccagcgccugcauccgccgguccaagaacagcuucuucucccgccugaacuggcugacgcaccucaacuucaaguaccccgcccugaacgugaccaugcccaacaacgagcaguucgacaagcuguacaucuggggcguccaccaccccgggaccgacaaggaccagaucuuccucuacgcgcaggccagcgggcggaucaccguguccacgaagcgcagccagcagaccgccaucccgaacaucggcagccggccccgcgugcggaacauccccucccgcaucagcaucuacuggaccaucgucaagcccggcgacauccugcugaucaacuccaccgggaaccucaucgccccgcggggcuacuucaagauccgcagcgggaaguccagcaucaugcgguccgacgcccccaucggcaagugcaacagcgagugcaucacgcccaacggcuccauccccaacgacaagccguuccagaacgugaaccgcaucaccuacggggcgugcccccgguacgugaagcagaacacccugaagcuggccaccggcaugcgcaacguccccgagaagcagacgcgggggaucuucggcgccaucgccggguucaucgagaacggcugggagggcaugguggacgggugguacggcuuccgccaccagaacagcgaggggcggggccaggccgcggaccucaaguccacccaggccgccaucgaccagaucaacgggaagcugaaccgccugaucggcaagaccaacgagaaguuccaccagaucgagaaggaguucagcgagguggagggccggauccaggaccucgagaaguacgucgaggacaccaagaucgaccugugguccuacaacgccgagcugcucguggcccuggagaaccagcacacgaucgaccugaccgacagcgagaugaacaagcuguucgagaagaccaagaagcagcuccgcgagaacgcggaggacauggggaacggcugcuucaagaucuaccacaagugcgacaacgccugcaucggguccauccgcaacggcaccuacgaccacgacguguaccgggacgaggcccugaacaaccgcuuccagaucaagggggucgagcucaagagcggcuacaaggacuggauccuguggaucuccuucgccaucagcugcuuccugcucugcguggcccugcugggcuucaucaugugggcgugccagaaggggaacauccggugcgacaucugcaucuga

SEQ ID NO: 69340 - RNA, 1701 nt, Artificial Sequence
  derived and/or modified CDS sequence (opt1) from hemagglutinin__InfluenzaA__ADK87304
augaagaccaucaucgcccugagcuacauccucugccugguguucgcccagaagauccccggcaacgacaacuccaccgcgacgcugugccucgggcaccacgccgucccgaacggcaccaucgugaagaccaucaccaacgaccagaucgaggugacgaacgccaccgagcugguccagagcuccagcaccggggagaucugcgacagcccccaccagauccuggacggcaagaacugcacccucaucgacgcccugcugggggacccccagugcgacggcuuccagaacaagaagugggaccucuucguggagcgcuccaaggccuacuccaacugcuaccccuacgacgugccggacuacgcgagccugcggucccuggucgccagcuccggcacgcucgaguucaacaacgagagcuucaacuggaccggggugacccagaacggcaccuccagcgccugcauccgccgguccaagaacagcuucuucucccgccugaacuggcugacgcaccucaacuucaaguaccccgcccugaacgugaccaugcccaacaacgagcaguucgacaagcuguacaucuggggcguccaccaccccgggaccgacaaggaccagaucuuccucuacgcgcaggccagcgggcggaucaccguguccacgaagcgcagccagcagaccgccaucccgaacaucggcagccggccccgcgugcggaacauccccucccgcaucagcaucuacuggaccaucgucaagcccggcgacauccugcugaucaacuccaccgggaaccucaucgccccgcggggcuacuucaagauccgcagcgggaaguccagcaucaugcgguccgacgcccccaucggcaagugcaacagcggcugcaucacgcccaacggguccauccccaacgacaagccguuccagaacgugaaccgcaucaccuacggcgcgugcccccgguacgugaagcagaacacccugaagcuggccaccgggaugcgcaacguccccgagaagcagacgcggggcaucuucggggccaucgccggcuucaucgagaacggcugggaggggaugguggacggcugguacggguuccgccaccagaacagcgagggccgggggcaggccgcggaccucaaguccacccaggccgccaucgaccagaucaacggcaagcugaaccgccugaucggcaagaccaacgagaaguuccaccagaucgagaaggaguucagcgagguggaggggcggauccaggaccucgagaaguacgucgaggacaccaagaucgaccugugguccuacaacgccgagcugcucguggcccuggagaaccagcacacgaucgaccugaccgacagcgagaugaacaagcuguucgagaagaccaagaagcagcuccgcgagaacgcggaggacaugggcaacgggugcuucaagaucuaccacaagugcgacaacgccugcaucggcuccauccgcaacgggaccuacggccacgacguguaccgggacgaggcccugaacaaccgcuuccagaucaagggcgucgagcucaagagcggguacaaggacugguuccuguggaucuccuucgccaucagcugcuuccugcucugcguggcccugcugggcuucaucaugugggcgugccagaaggggaacauccggugcaacaucugcaucuga

SEQ ID NO: 69341 - RNA, 1701 nt, Artificial Sequence
  derived and/or modified CDS sequence (opt1) from hemagglutinin__InfluenzaA__ADK87306
augaagaccaucaucgcccugagcuacauccucugccugguguucgcccagaagcugcccggcaacgacaacuccaccgcgacgcucugccuggggcaccacgccgucccgaacggcaccaucgugaagaccaucaccaacgaccagaucgaggugacgaacgccgccgagcugguccagagcuccagcaccggggagaucugcgacagcccccaccagauccucgacggcaagaacugcacccugaucgacgcccugcucggggacccccagugcgacggcuuccagaacaagaagugggaccuguucgugggccgcuccaaggcguacuccaacugcuaccccuacgacgugccggacuacgccagccugcggucccucgucgccagcuccgggacccuggaguucaacaacgagagcuucaacuggacgggcgugacccagaacgggaccuccagcgccugcauccgccgguccaagaacagcuucuucucccgccugaacuggcucacccaccugaacuucaaguaccccgcgcugaacgugacgaugcccaacaacgagcaguucgacaagcucuacaucuggggcguccaccaccccgggaccgacaaggaccagaucuuccuguacgcccaggccagcggccggaucaccguguccaccaagcgcagccagcagacggccaucccgaacaucggcagccggccccgcgugcggaacauccccucccgcaucagcaucuacuggaccaucgucaagcccggggacauccugcucaucaacuccaccggcaaccugaucgccccgcggggguacuucaagauccgcagcggcaaguccagcaucaugcgguccgacgcgcccaucggcaagugcaacagcgagugcaucacccccaacggguccauccccaacgacaagccguuccagaacgugaaccgcaucacguacggcgccugcccccgguacgugaagcagaacacccugaagcucgccaccgggguccgcaacgugcccgagaagcagacccggggcaucuucggggccaucgccggcuucaucgagaacggcugggaggggaugguggacggcugguacggguuccgccaccagaacagcgagggccgggggcaggcggccgaccugaaguccacgcaggccgccauggaccagaucaacggcaagcugaaccgccucaucggcaagaccaacgagaagcugcaccagaccgagaaggaguucagcgaggucgaggggcggauccaggaccuggagaaguacguggaggacaccaagaucgaccucugguccuacaacgccgagcugcugguggcgcucgagagccagcacacgaucgaccugaccgacuccgagaugaacaagcuguucgagaagaccaagaagcagcuccgcgagaacgccgaggacaugggcaacgggugcuucaagaucuaccacaagugcgacaacgccugcaucggcagcauccgcaacgggaccuacgaccacgacgucuaccgggacgaggcccugaacaaccgcuuccagaucaagggcguggagcugaaguccggcuacaaggacuggauccucuggaucagcuucgccaucuccugcuuccugcugugcguggcgcuccugggguucaucaugugggccugccagaagggcaacauccggugcaacaucugcaucuga

SEQ ID NO: 69342 - RNA, 1701 nt, Artificial Sequence
  derived and/or modified CDS sequence (opt1) from hemagglutinin__InfluenzaA__ADK87308
augaagaccaucaucgcccugagcuacauccucugcaugguguucgcccagaagcugcccggcaacgacaacuccaccgcgacgcugugccucgggcaccacgccgucccgaacggcaccaucgugaagaccaucaccaacgaccagaucgaggugacgaacgccaccgagcugguccagagcuccagcaccggggagaucugcgacagcccccaccagauccuggacggcaagaacugcacccucaucgacgcccugcugggggacccccagugcgacggcuuccagaacaagaagugggaccucuucguggagcgcuccaaggccuacuccaacugcuaccccuacgacgugccggacuacgcgagccugcggucccuggucgccagcuccggcacgcucgaguucaacaacgagagcuucaacuggaccggggugacccagaacggcaccuccagcgccugcauccgccgguccaagaacagcuucuucucccgccugaacuggcugacgcaccucaacuucaaguaccccgcccugaacgugaccaugcccaacaacgagcaguucgacaagcuguacaucuggggcguccaccaccccgggaccgacaaggaccagaucuuccucuacgcgcaggccagcgggcggaucaccguguccacgaagcgcagccagcagaccgccaucccgaacaucggcagccggccccgcgugcggaacauccccucccgcaucagcaucuacuggaccaucgucaagcccggcgacauccugcugaucaacuccaccgggaaccucaucgccccgcggggcuacuucaagauccgcagcgggaaguccagcaucaugcgguccgacgcccccaucggcaagugcaacagcgagugcaucacgcccaacggcuccauccccaacgacaagccguuccagaacgugaaccgcaucaccuacggggcgugcccccgguacgugaagcagaacacccugaagcuggccaccggcaugcgcaacguccccgagaagcagacgcgggggaucuucggcgccaucgccggguucaucgagaacggcugggagggcaugguggacgggugguacggcuuccgccaccagaacagcgaggggcggggccaggccgcggaccucaaguccacccaggccgccaucgaccagaucaacgggaagcugaaccgccugaucggcaagaccaacgagaaguuccaccagaucgagaaggaguucagcgagguggagggccggauccaggaccucgagaaguacgucgaggacaccaagaucgaccugugguccuacaacgccgagcugcucguggcccuggagaaccagcacacgaucgaccugaccgacagcgagaugaacaagcuguucgagaagaccaagaagcagcuccgcgagaacgcggaggacauggggaacggcugcuucaagaucuaccacaagugcgacaacgccugcaucggguccauccgcaacggcaccuacgaccacgacguguaccgggacgaggcccugaacaaccgcuuccagaucaagggggucgagcucaagagcggcuacaaggacuggauccuguggaucuccuucgccaucagcugcuuccugcuccggguggcccugcugggcuucaucaugugggcgugccagaaggggaacauccgcugcaacaucugcaucuga

SEQ ID NO: 69343 - RNA, 1701 nt, Artificial Sequence
  derived and/or modified CDS sequence (opt1) from hemagglutinin__InfluenzaA__ADK87309
augaagaccaucaucgcccugagcuacauccucugccugguguucgcccagaagcugcccggcaacgacaacuccaccgcgacgcucugccuggggcaccacgccgucccgaacggcaccaucgugaagaccaucaccaacgaccagaucgaggugacgaacgccaccgagcugguccagagcuccagcaccggggagaucugcgacagcccccaccagauccucgacggcaagaacugcacccugaucgacgcccugcucggggacccccagugcgacggcuuccagaacaagaagugggaccuguucguggagcgcagcaaggccuacuccaacugcuaccccuacgacgugccggacuacgcgagccugcggucccucgucgccagcuccggcacgcuggaguucaacaacgagagcuucaacuggaccggggugacccagaacggcaccuccagcgccugcauccgccgguccaagaacagcuucuucucccgccugaacuggcucacgcaccugaacuucaaguaccccgcccugaacgugaccaugcccaacaacgagcaguucgacaagcucuacaucuggggcguccaccaccccgggaccgacaaggaccagaucuuccuguacgcgcaggccagcgggcggaucaccguguccacgaagcgcagccagcagaccgccaucccgaacaucggcagccggccccgcgugcggaacauccccucccgcaucagcaucuacuggaccaucgucaagcccggcgacauccugcucaucaacuccaccgggaaccugaucgccccgcggggcuacuucaagauccgcagcgggaaguccagcaucaugcgguccgacgcccccaucggcaagugcaacagcgagugcaucacgcccaacggcuccauccccaacgacaagccguuccagaacgugaaccgcaucaccuacggggcgugcccccgguacgugaagcagaacacccugaagcucgccaccggcaugcgcaacguccccgagaagcagacgcgggggaucuucggcgccaucgccggguucaucgagaacggcugggagggcaugguggacgggugguacggcuuccgccaccagaacagcgaggggcggggccaggccgcggaccugaaguccacccaggccgccaucgaccagaucaacgggaagcugaaccgccucaucggcaagaccaacgagaaguuccaccagaucgagaaggaguucagcgagguggagggccggauccaggaccuggagaaguacgucgaggacaccaagaucgaccugugguccuacaacgccgagcuccugguggcccuggagaaccagcacacgaucgaccucaccgacagcgagaugaacaagcuguucgagaagaccaagaagcagcugcgcgagaacgcggaggacauggggaacggcugcuucaagaucuaccacaagugcgacaacgccugcaucggguccauccgcaacggcaccuacgaccacgacguguaccgggacgaggcccucaacaaccgcuuccagaucaagggggucgagcugaaguccggcuacaaggacuggauccuguggaucuccuucgccaucagcugcuuccuccugugcguggcccuguccggcuucaucaugugggcgugccagaaggggaacauccggugcaacaucugcaucuga

SEQ ID NO: 69344 - RNA, 1701 nt, Artificial Sequence
  derived and/or modified CDS sequence (opt1) from hemagglutinin__InfluenzaA__ADK87310
augaaggccauccuggugguccuccuguacaccuucgccaccgcgaacgccgacacgcugugcaucggcuaccacgccaacaacagcaccgacaccguggacaccgugcucgagaagaacgucacggugacccacuccgugaaccugcuggaggacaagcacaacgggaagcucugcaagcugcgcggcgucgcgccccugcaccucgggaagugcaacaucgccggcuggauccuggggaacccggagugcgagagccuguccaccgccagcuccuggagcuacaucguggagaccuccagcuccgacaacggcacgugcuaccccggcgacuucaucgacuacgaggagcuccgggagcagcugagcuccgugagcuccuucgagcgcuucgagaucuuccccaagaccgggagcuggcccaaccacgacccgaacaagggcgucaccgccgccugcccccacgccggggcgaaguccuucuacaagaaccugaucuggcucgugaagaagggcaacagcuaccccaagcuguccaagagcuacaucaacgacaaggggaaggaggugcugguccucuggggcauccaccaccccuccaccagcgccgaccagcagagccuguaccagaacgccgacgccuacguguucgugggcacgucccgguacagcaagaaguucaagccggagaucgccauccgccccaagguccgggaccaggaggggcgcaugaacuacuacuggacccugguggagcccggcgacaagaucaccuucgaggcgaccgggaaccucguggucccccgguacgccuucgccauggagcgcaacgccggcuccggcaucaucaucagcgacacgccggugcacgacugcaacacgaccugccagacccccaagggggccaucaacaccucccugcccuuccagaacauccaccccaucaccaucggcaagugcccgaaguacgucaagagcaccaagcugcggcucgcgaccgggcugcgcaacgugcccuccauccagagccggggccuguucggggccaucgccggcuucaucgagggcggguggacgggcaugguggacgggugguacggcuaccaccaccagaacgagcagggguccggcuacgccgccgaccucaagagcacccagaacgcgaucgacgagaucaccaacaaggugaacuccgucaucgagaagaugaacacccaguucacggccgugggcaaggaguucaaccaccuggagaagcgcaucgagaaccugaacaagaaggucgacgacggguuccucgacaucuggaccuacaacgccgagcugcuggugcuccuggagaacgagcggacccuggacuaccacgacagcaacgugaagaaccucuacgagaagguccgcucccagcugaagaacaacgccaaggagaucggcaacgggugcuucgaguucuaccacaagugcgacaacacgugcauggagagcgugaagaacggcaccuacgacuaccccaaguacuccgaggaggccaagcugaaccgggaggagaucgacggggugaagcucgagagcacccgcaucuaccagauccuggcgaucuacuccaccgucgccagcucccuggugcucguggucagccugggcgccaucagcuucuggaugugcuccaacggcagccugcagugccggaucugcaucuga

SEQ ID NO: 69345 - RNA, 1701 nt, Artificial Sequence
  derived and/or modified CDS sequence (opt1) from hemagglutinin__InfluenzaA__ADK87311
augaaggccauccuggugguccuccuguacaccuucgccaccgcgaacgccgacacgcugugcaucggcuaccacgccgacaacagcaccgacaccguggacaccgugcucgagcgcaacgucacggugacccacuccgugaaccugcuggaggacaagcacaacgggaagcucugcaagcugcggggcgucgcgccccugcaccucgggaagugcaacaucgccggcuggauccuggggaacccggagugcgagagccuguccaccgccagcuccuggagcuacaucguggagaccuccagcuccgacaacggcacgugcuaccccggcgacuucaucgacuacgaggagcuccgcgagcagcugagcuccgugagcuccuucgagcgguucgagaucuuccccaagaccagcuccuggcccaaccacgacagcaacaagggggucaccgccgccugcccgcacgccggcgcgaaguccuucuacaagaaccugaucuggcucgugaagaaggggaacagcuaccccaagcuguccaagagcuacaucaacgacaagggcaaggaggugcugguccucugggggauccaccaccccagcaccuccgccggccagcagagccuguaccagaacgccgacgccuacguguucgugggcacgucccgcuacagcaagaaguucaagcccgagaucgccauccggccgaagguccgcgaccaggaggggcggaugaacuacuacuggacccugguggagcccggcgacaagaucaccuucgaggcgaccgggaaccucguggucccccgcuacgccuucgccauggagcggaacgccggcuccggcaucaucaucagcgacacgcccgugcacgacugcaacacgaccugccagaccccgaagggggccaucaacaccuccccgcccuuccagaacauccaccccaucaccaucggcaagugccccaaguacgucaagagcaccaagcugcgccuggcgaccgggcuccggaacgugcccuccauccagagccgcggccuguucggggccaucgccggcuucaucgagggcggguggacgggcaugguggacgggugguacggcuaccaccaccagaacgagcagggguccggcuacgccgccgaccucaagagcacccagaacgcgaucgacgagaucaccaacaaggugaacuccgucaucgagaagaugaacacccaguucacggccgugggcaaggaguucaaccaccuggagaagcggaucgagaaccugaacaagaaggucgacgacggguuccuggacaucuggaccuacaacgccgagcuccuggugcugcucgagaacgagcgcacccuggacuaccacgacagcaacgugaagaaccuguacgagaagguccggucccagcucaagaacaacgccaaggagaucggcaacgggugcuucgaguucuaccacaagugcgacaacacgugcauggagagcgugaagaacggcaccuacgacuaccccaaguacuccgaggaggccaagcugaaccgcgaggagaucgacggggugaagcuggagagcacccggaucuaccagauccucgcgaucuacuccaccgucgccagcagccuggugcugguggucucccucggcgccaucagcuucuggaugugcuccaacggcagccugcagugccgcaucugcaucuga

SEQ ID NO: 69346 - RNA, 1701 nt, Artificial Sequence
  derived and/or modified CDS sequence (opt1) from hemagglutinin__InfluenzaA__ADK87313
augaagaccaucaucgcccugagcuacauccucugccugguguucgcccagaagauccccggcaacgacaacuccaccgcgacgcugugccucgggcaccacgccgucccgaacggcaccaucgugaagaccaucaccaacgaccagaucgaggugacgaacgccaccgagcugguccagagcuccagcaccggggagaucugcgacagcccccaccagauccuggacggcaagaacugcacccucaucgacgcccugcugggggacccccagugcgacggcuuccagaacaagaagugggaccucuucguggagcgcuccaaggccuacuccaacugcuaccccuacgacgugccggacuacgcgagccugcggucccuggucgccagcuccggcacgcucgaguucaacaacgagagcuucaacuggaccggggugacccagaacggcaccuccagcgccugcauccgccgguccaagaacagcuucuucucccgccugaacuggcugacgcaccucaacuucaaguaccccgcccugaacgugaccaugcccaacaacgagcaguucgacaagcuguacaucuggggcguccaccaccccgggaccgacaaggaccagaucuuccucuacgcgcaggccagcgggcggaucgccguguccaccaagcgcagccagcagacggccaucccgaacaucggcagccggccccgcgugcggaacauccccucccgcaucagcaucuacuggaccaucgucaagcccggcgacauccugcugaucaacuccaccgggaaccucaucgccccgcggggcuacuucaagauccgcagcgggaaguccagcaucaugcgguccgacgcgcccaucggcaagugcaacagcggcugcaucacccccaacggguccauccccaacgacaagccguuccagaacgugaaccgcaucacguacggcgccugcccccgguacgugaagcagaacacccugaagcuggccaccgggaugcgcaacguccccgagaagcagacccggggcaucuucggggccaucgccggcuucaucgagaacggcugggaggggaugguggacggcugguacggguuccgccaccagaacagcgagggccgggggcaggcggccgaccucaaguccacgcaggccgccaucgaccagaucaacggcaagcugaaccgccugaucggcaagaccaacgagaaguuccaccagaucgagaaggaguucagcgagguggaggggcggauccaggaccucgagaaguacgucgaggacaccaagaucgaccugugguccuacaacgccgagcugcucguggcgcuggagaaccagcacaccaucgaccugacggacagcgagaugaacaagcuguucgagaagaccaagaagcagcuccgcgagaacgccgaggacaugggcaacgggugcuucaagaucuaccacaagugcgacaacgccugcaucggcuccauccgcaacgggaccuacgaccacgacguguaccgggacgaggcccugaacaaccgcuuccagaucaagggcgucgagcucaagagcggcuacaaggacugguuccuguggaucuccuucgccaucagcugcuuccugcucugcguggcgcugcugggguucaucaugugggccugccagaagggcaacauccggugcaacaucugcaucuga

SEQ ID NO: 69347 - RNA, 1701 nt, Artificial Sequence
  derived and/or modified CDS sequence (opt1) from hemagglutinin__InfluenzaA__ADK87315
augaaggccauccuggugguccuccuguacaccuucgccaccgcgaacgccgacacgcugugcaucggcuaccacgccaacaacagcaccgacaccguggacaccgugcucgagaagaacgucacggugacccacuccgugaaccugcuggaggacaagcacaacgggaagcucugcaagcugcgcggcgucgcgccccugcaccucgggaagugcaacaucgccggcuggauccuggggaacccggagugcgagagccuguccaccgccagcuccuggagcuacaucguggagaccuccagcuccgacaacggcacgugcuaccccggcgacuucaucgacuacgaggagcuccgggagcagcugagcuccgugagcuccuucgagcgcuucgagaucuuccccaagaccagccccuggccgaaccacgaccccaacaagggggucaccgccgccugcccccacgccggcgcgaaguccuucuacaagaaccugaucuggcucgugaagaaggggaacagcuaccccaagcuguccaagagcuacaucaacgacaagggcaaggaggugcugguccucugggggauccaccacccguccaccagcgccgaccagcagagccuguaccagaacgccgacgccuacguguucgugggcacgucccgguacagcaagaaguucaagcccgagaucgccauccgccccaagguccgggaccaggagggccgcaugaacuacuacuggacccugguggagcccggggacaagaucaccuucgaggcgaccggcaaccucguggucccgcgguacgccuucgccauggagcgcaacgccggguccggcaucaucaucagcgacacgcccgugcacgacugcaacacgaccugccagacccccaagggcgccaucaacaccucccugcccuuccagaacauccacccgaucaccaucgggaagugccccaaguacgucaagagcaccaagcugcggcucgcgaccggccugcgcaacgugcccuccauccagagccgggggcuguucggcgccaucgccggguucaucgagggcggcuggacggggaugguggacggcugguacggguaccaccaccagaacgagcagggcuccggguacgccgccgaccucaagagcacccagaacgcgaucgacgagaucaccaacaaggugaacuccgucaucgagaagaugaacacccaguucacggccgugggcaaggagagcaaccaccuggagacccgcaucgagaaccugaacaagaaggucgacgacggcuuccucgacaucuggaccuacaacgccgagcugcuggugcuccuggagaacgagcggacccuggacuaccacgacuccaacgugaagaaccucuacgagaagguccgcagccagcugaagaacaacgccaaggagaucgggaacggcugcuucgaguucuaccacaagugcgacuccacgugcauggagagcgugaagaacgggaccuacgacuaccccaaguacuccgaggaggccaagcugaaccgggaggagaucgacggcgugaagcucgagagcacccgcaucuaccagauccuggcgaucuacuccaccgucgccagcagccuggugcucguggucucccugggggccaucagcuucuggaugugcuccaacggcagccugcagugccggaucugcaucuga

SEQ ID NO: 69348 - RNA, 1701 nt, Artificial Sequence; identical to SEQ ID NO: 67491
  derived and/or modified CDS sequence (opt1) from hemagglutinin__InfluenzaA__ADK87317

SEQ ID NO: 69349 - RNA, 1701 nt, Artificial Sequence
  derived and/or modified CDS sequence (opt1) from hemagglutinin__InfluenzaA__ADK87319
augaaggccauccuggugguccuccuguacaccuucgccaccgcgaacgccgacacgcugugcaucggcuaccacgccaacaacagcaccgacaccguggacaccgugcucgagaagaacgucacggugacccacuccgugaaccugcuggaggacaagcacaacgggaagcucugcaagcugcgcggcgucgcgccccugcaccucgggaagugcaacaucgccggcuggauccuggggaacccggagugcgagagccuguccaccgcgagcuccuggagcuacaucguggagaccuccagcuccgacaacggcacgugcuaccccggcgacuucaucgacuacgaggagcuccgggagcagcugagcuccgugagcuccuucgagcgcuucgagaucuuccccaagaccagcuccuggcccaaccacgacccgaacaagggggucaccgccgccugcccccacgccggcgccaagagcuucuacaagaaccugaucuggcucgugaagaaggggaacuccuaccccaagcugagcaaguccuacaucaacgacaagggcaaggaggugcugguccucugggggauccaccaccccagcaccagcgccgaccagcagucccuguaccagaacgccgacgccuacguguucgugggcacgagccgguacuccaagaaguucaagccggagaucgccauccgccccaagguccgggaccaggagggccgcaugaacuacuacuggacccugguggagcccggggacaagaucaccuucgaggcgaccggcaaccucguggucccccgguacgccuucgccauggagcgcaacgccgggagcggcaucaucaucuccgacacgccggugcacgacugcaacacgaccugccagacccccaagggcgccaucaacaccagccugcccuuccagaacauccaccccaucaccaucgggaagugcccgaaguacgugaaguccaccgagcugcggcucgcgaccggccugcgcaacguccccagcauccagucccgggggcuguucggcgccaucgccggguucaucgagggcggcuggacggggaugguggacggcugguacggguaccaccaccagaacgagcagggcagcggguacgccgccgaccucaaguccacccagaacgcgaucgacgagaucaccaacaaggugaacagcgucaucgagaagaugaacacccaguucacggccgugggcaaggaguucaaccaccuggagaagcgcaucgagaaccugaacaagaaggucgacgacggcuuccucgacaucuggaccuacaacgccgagcugcuggugcuccuggagaacgagcggacccuggacuaccacgacuccaacgugaagaaccucuacgagaagguccgcagccagcugaagaacaacgccaaggagaucgggaacggcugcuucgaguucuaccacaagugcgacaacacgugcauggaguccgugaagaacgggaccuacgacuaccccaaguacagcgaggaggccaagcugaaccgggaggagaucgacggcgugaagcucgaguccacccgcaucuaccggauccuggcgaucuacagcaccgucgccuccagccuggugcucguggucagccugggggccaucuccuucuggaugugcagcaacggcucccugcagugccgcaucugcaucuga

SEQ ID NO: 69350 - RNA, 1701 nt, Artificial Sequence
  derived and/or modified CDS sequence (opt1) from hemagglutinin__InfluenzaA__ADK87321
augaagaccaucaucgcccugagcuacauccucugccugguguucgcccagaagauccccggcaacgacaacuccaccgcgacgcugugccucgggcaccacgccgucccgaacggcaccaucgugaagaccaucaccaacgaccagaucgaggugacgaacgccaccgagcugguccagagcuccagcaccggggagaucugcgacagcccccaccagauccuggacggcaagaacugcacccucaucgacgcccugcugggggacccccagugcgacggcuuccagaacaagaagugggaccucuucguggagcgcagcaaggccuacuccaacugcuaccccuacgacgugccggacuacgcgagccugcggucccuggucgccagcuccggcacgcucgaguucaacaacgagagcuucaacuggaccggggugacccagaacggcaccuccagcgccugcaugcgccgguccaagaacagcuucuucucccgccugaacuggcugacgcaccucaacuucaaguaccccgcccugaacgugaccaugcccaacaacgagcaguucgacaagcuguacaucuggggcguccaccaccccgggaccgacaaggaccagaucuuccucuacgcgcaggccagcgggcggaucaccguguccacgaagcgcagccagcagaccgccaucccgaacaucggcagccggccccgcgugcggaacauccccucccgcaucagcgucuacuggaccaucgugaagcccggcgacauccugcugaucaacuccaccgggaaccucaucgccccgcggggcuacuucaagauccgcagcgggaaguccagcaucaugcgguccgacgccagcaucggcaagugcaacuccggcugcaucacgcccaacgggagcauccccaacgacaagcccuuccagaacgugaaccgcaucaccuacggcgcgugcccgcgguacgucaagcagaacacccugaagcuggccaccgggaugcgcaacgugcccgagaagcagacgcggggcaucuucggggccaucgccggcuucaucgagaacggcugggaggggaugguggacggcugguacggguuccgccaccagaacuccgagggccgggggcaggccgcggaccucaagagcacccaggccgccaucgaccagaucaacggcaagcugaaccgccugaucggcaagaccaacgagaaguuccaccagaucgagaaggaguuccccgaggucgaggggcggauccaggaccucgagaaguacguggaggacaccaagaucgaccugugguccuacaacgccgagccccugguggcccucgagaaccagcacacgaucgaccugaccgacagcgagaugaacaagcuguucgagaagaccaagaagcagcuccgcgagaacgcggaggacaugggcaacgggugcuucaagaucuaccacaagugcgacaacgccugcaucggcuccauccgcaacgggaccuacgaccacgacgucuaccgggacgaggcccugaacaaccgcuuccagaucaagggcguggagcugaaguccggcuacaaggacugguuccucuggaucuccuucgccaucagcugcuuccugcugugcguggcccuccugggguucaucaugugggcgugccagaagggcaacauccggugcaacaucugcaucuga

SEQ ID NO: 69351 - RNA, 1701 nt, Artificial Sequence
  derived and/or modified CDS sequence (opt1) from hemagglutinin__InfluenzaA__ADK87323
augaagaccaucaucgcccugagcuacauccucugccugguguucgcccagaagcugcccggcaacgacaacuccaccgcgacgcucugccuggggcaccacgccgucccgaacggcaccaucgugaagaccaucaccaacgaccagaucgaggugacgaacgccaccgagcugguccagagcuccagcaccggggagaucugcgacagcccccaccagauccucgacggcaagaacugcacccugaucgacgcccugcucggggacccccagugcgacggcuuccagaacaagaagugggaccuguucguggagcgcagcaaggccuacuccaacugcuaccccuacgacgugccggacuacgcgagccugcggucccucgucgccagcuccggcacgcuggaguucaacaacgagagcuucaacuggaccggggugacccagaacggcaccuccagcgccugcauccgccgguccaagaacagcuucuucucccgccugaacuggcucacgcaccugaacuucaaguaccccgcccugaacgugaccaugcccaacaacgagcaguucgacaagcucuacaucuggggcguccaccaccccgggaccgacaaggaccagaucuuccuguacgcgcaggccagcgggcggaucaccguguccacgaagcgcagccagcagaccgccaucccgaacaucggcagccggccccgcgugggcaacauccccucccggaucagcaucuacuggaccaucgucaagcccggggacauccugcucaucaacuccaccggcaaccugaucgccccgcgcggguacuucaagauccggagcggcaaguccagcaucaugcgcuccgacgcccccaucggcaagugcaacagcgagugcaucacgcccaacggguccauccccaacgacaagccguuccagaacgugaaccggaucaccuacggcgcgugcccccgcuacgugaagcagaacacccugaagcucgccaccgggaugcggaacguccccgagaagcagacgcgcggcaucuucggggccaucgccggcuucaucgagaacggcugggaggggaugguggacggcugguacggguuccggcaccagaacagcgagggccgcgggcaggccgcggaccugaaguccacccaggccgccaucgaccagaucaacggcaagcugaaccggcucaucggcaagaccaacgagaaguuccaccagaucgagaaggaguucagcgagguggaggggcgcauccaggaccuggagaaguacgucgaggacaccaagaucgaccugugguccuacaacgccgagcuccugguggcccuggagaaccagcacacgaucgaccucaccgacagcgagaugaacaagcuguucgagaagaccaagaagcagcugcgggagaacgcggaggacaugggcaacgggugcuucaagaucuaccacaagugcgacaacgccugcaucggcuccauccgcaacgggaccuacgaccacgacguguaccgcgacgaggcccucaacaaccgguuccagaucaagggcgucgagcugaaguccggcuacaaggacuggauccuguggaucuccuucgccaucagcugcuuccuccugugcguggcccugcucggguucaucaugugggcgugccagaagggcaacauccgcugcaacaucugcaucuga

SEQ ID NO: 69352 - RNA, 1701 nt, Artificial Sequence
  derived and/or modified CDS sequence (opt1) from hemagglutinin__InfluenzaA__ADK87325
augaagaccaucaucgcccugagcuacauccucugccugguguucgcccagaagcugcccggcaacgacaacuccaccgcgacgcucugccuggggcaccacgccgucccgaacggcaccaucgugaagaccaucaccaacgaccagaucgaggugacgaacgccaccgagcugguccagagcuccagcaccggggagaucugcgacagcccccaccagauccucgacggcaagaacugcacccugaucgacgcccugcucggggacccccagugcgacggcuuccagaacaagaagugggaccuguucguggagcgcagcaaggccuacuccaacugcuaccccuacgacgugccggacuacgcgagccugcggucccucgucgccagcuccggcacgcuggaguucaacaacgagagcuucaacuggaccggggugacccagaacggcaccuccagcgccugcauccgccgguccaagaacagcuucuucucccgccugaacuggcucacgcaccugaacuucaaguaccccgcccugaacgugaccaugcccaacaacgagcaguucgacaagcucuacaucuggggcguccaccaccccgggaccgacaaggaccagaucuuccuguacgcgcaggccagcgggcggaucaccguguccacgaagcgcagccagcagaccgccaucccgaacaucggcagccggccccgcgugcggaacauccccucccgcaucagcaucuacuggaccaucgucaagcccggcgacauccugcucaucaacuccaccgggaaccugaucgccccgcggggcuacuucaagauccgcagcgggaaguccagcaucaugcgguccgacgcccccaucggcaagugcaacagcgagugcaucacgcccaacggcuccauccccaacgacaagccguuccagaacgugaaccgcaucaccuacggggcgugcccccggcacgugaagcagaacacccugaagcucgccaccggcaugcgcaacguccccgagaagcagacgcgggggaucuucggcgccaucgccggguucaucgagaacggcugggagggcaugguggacgggugguacggcuuccgccaccagaacagcgaggggcggggccaggccgcggaccugaaguccacccaggccgccaucgaccagaucaacgggaagcugaaccgccucaucggcaagaccaacgagaaguuccaccagaucgagaaggaguucagcgagguggagggccggauccaggaccuggagaaguacgucgaggacaccaagaucgaccugugguccuacaacgccgagcuccugguggcccuggagaaccagcacacgaucgaccucaccgacagcgagaugaacaagcuguucgagaagaccaagaagcagcugcgcgagaacgcggaggacauggggaacggcugcuucaagaucuaccacaagugcgacaacgccugcaucggguccauccgcaacggcaccuacgaccacgacguguaccgggacgaggcccucaacaaccgcuuccagaucaagggggucgagcugaaguccggcuacaaggacuggauccuguggaucuccuucgccaucagcugcuuccuccugugcguggcccugcucggcuucaucaugugggcgugccagaaggggaacauccggugcaacaucugcaucuga

SEQ ID NO: 69353 - RNA, 1701 nt, Artificial Sequence
  derived and/or modified CDS sequence (opt1) from hemagglutinin__InfluenzaA__ADK87326
augaagaccaucaucgcccugagcuacauccucugccugguguucgcccagaagcugcccggcaacgacaacuccaccgcgacgcucugccuggggcaccacgccgucccgaacggcaccaucgugaagaccaucaccaacgaccagaucgaggugacgaacgccaccgagcugguccagagcuccagcaccggggagaucugcgacagcccccaccagauccucgacggcaagaacugcacccugaucgacgcccugcucggggacccccagugcgacggcuuccagaacaagaagugggaccuguucguggagcgcagcaaggccuacuccaacugcuaccccuacgacgugccggacuacgcgagccugcggucccucgucgccagcuccggcacgcuggaguucaacaacgagagcuucaacuggaccggggugacccagaacggcaccuccagcgccugcauccgccgguccaagaacagcuucuucucccgccugaacuggcucacgcaccugaacuucaaguaccccgcccugaacgugaccaugcccaacaacgagcaguucgacaagcucuacaucuggggcguccaccaccccgggaccgacaaggaccagaucuuccuguacgcgcaggccagcgggcggaucaccguguccacgaagcgcagccagcagaccgccaucccgaacaucggcagccggccccgcgugcggaacauccccucccgcaucagcaucuacuggaccaucgucaagcccggcgacauccugcucaucaacuccaccgggaaccugaucgccccgcggggcuacuucaagauccgcagcgggaaguccagcaucaugcgguccgacgcccccaucggcaagugcaacagcgagugcaucacgcccaacggcuccauccccaacgacaagccguuccagaacgugaaccgcaucaccuacggggcgugcccccgguacgugaagcagaacacccugaagcucgccaccggcaugcgcaacguccccgagaagcagacgcgggggaucuucggcgccaucgccggguucaucgagaacggcugggagggcaugguggacgggugguacggcuuccgccaccagaacagcgaggggcggggccaggccgcggaccugaaguccacccaggccgccaucgaccagaucaacgggaagcugaaccgccucaucggcaagaccaacgagaaguuccaccagaucgagaaggaguucagcgagguggagggccggauccaggaccuggagaaguacgucgaggacaccaagaucgaccugugguccuacaacgccgagcuccugguggcccuggagaaccagcacacgaucgaccucaccgacagcgagaugaacaagcuguucgagaagaccaagaagcagcugcgcgagaacgcggaggacauggggaacggcugcuucaagaucuaccacaagugcgacaacgccugcaucggguccauccgcaacggcaccuacgaccacgacguguaccgggacgaggcccucaacaaccgcuuccagaucaagggggucgagcugaaguccggcugcaaggacuggauccuguggaucuccuucgccaucagcugcuuccuccugugcguggcccugcucggcuucacgaugugggcgugccagaaggggaacauccggugcaacaucugcaucuga

SEQ ID NO: 69354 - RNA, 1701 nt, Artificial Sequence
  derived and/or modified CDS sequence (opt1) from hemagglutinin__InfluenzaA__ADK87328
augaaggccauccuggugguccuccuguacaccuucgccaccgcgaacgccgacacgcugugcaucggcuaccacgccaacaacagcaccgacaccguggacaccgugcucgagaagaacgucacggugacccacuccgugaaccugcuggaggacaagcacaacgggaagcucugcaagcugcgcggcgucgcgccccugcaccucgggaagugcaacaucgccggcuggauccuggggaacccggagugcgagagccuguccaccgcgagcuccuggagcuacaucguggagaccuccagcuccgacaacggcacgugcuaccccggcgacuucaucgacuacgaggagcuccgggagcagcugagcuccgugagcuccuucgagcgcuucgagaucuuccccaagaccagcuccuggcccaaccacgacccgaacaagggggucaccgccgccugcccccacgccggcgccaagagcuucuacaagaaccugaucuggcucgugaagaaggggaacuccuaccccaagcugagcaaguccuacaucaacgacaagggcaaggaggugcugguccucugggggauccaccaccccagcaccagcgccgaccagcagucccuguaccagaacgccgacgccuacguguucgugggcacgagccgguacuccaagaaguucaagccggagaucgccauccgccccaagguccgggaccaggagggccgcaugaacuacuacuggacccugguggagcccggggacaagaucaccuucgaggcgaccggcaaccucguggucccccgguacgccuucgccauggagcgcaacgccgggagcggcaucaucaucuccgacacgccggugcacgacugcaacacgaccugccagacccccaagagcgccaucaacaccucccugcccuuccagaacauccaccccaucaccaucggcaagugcccgaaguacgucaagagcaccaagcugcggcucgcgaccgggcugcgcaacgugcccuccauccagagccggggccuguucggggccaucgccggcuucaucgagggcggguggacgggcaugguggacgggugguacggcuaccaccaccagaacgagcagggguccggcuacgccgccgaccucaagagcacccagaacgcgaucgacgagaucaccaacaaggugaacuccgucaucgagaagaugaacacccaguucacggccguggggaaggaguucaaccaccuggagaagcgcaucgagaaccugaacaagaaggucgacgacggcuuccucgacaucuggaccuacaacgccgagcugcuggugcuccuggagaacgagcggacccuggacuaccacgacagcaacgugaagaaccucuacgagaagguccgcucccagcugaagaacaacgccaaggagaucggcaacgggugcuucgaguucuaccacaagugcgacaacacgugcauggagagcgugaagaacggcaccuacgacuaccccaaguacuccgaggaggccaagcugaaccgggaggagaucgacggggugaagcucgagagcacccgcaucuaccagauccuggcgaucuacuccaccgucgccagcagccuggugcucguggucucccugggcgccaucagcuucuggaugugcuccaacgggagccugcagugccggaucugcaucuga

SEQ ID NO: 69355 - RNA, 1701 nt, Artificial Sequence
  derived and/or modified CDS sequence (opt1) from hemagglutinin__InfluenzaA__ADK87334
augaagaccaucaucgcccugagcuacauccucugccugguguucgcccagaagcugcccggcaacgacaacuccaccgcgacgcucugccuggggcaccacgccgucccgaacggcaccaucgugaagaccaucaccagcgaccagaucgaggugacgaacgccaccgagcugguccaguccagcuccaccggggagaucugcgacagcccccaccagauccucgacggcaagaacugcacccugaucgacgcccugcucggggacccccagugcgacggcuuccagaacaagaagugggaccuguucguggagcgcuccaaggccuacagcaacugcuaccccuacgacgugccggacuacgcgucccugcggagccucgucgccuccagcggcacgcuggaguucaacaacgaguccuucaacuggaccggggugacccagaacggcaccagcuccgccugcauccgccggagcaagaacuccuucuucagcaagcugaacuggcucacgcaccugaacuucaaguaccccgcccugaacgugaccaugcccaacaacgagcaguucgacaagcucuacaucuggggcguccgccaccccgggaccgacaaggaccagaucuuccuguacgcgcaggccuccgggcggaucaccgugagcacgaagcgcagccagcagaccgugaucccgaacaucggcucccggccccgcguccggaacauccccagccgcaucuccaccuacuggaccaucgugaagcccggcgacauccugcucaucaacagcacggggaaccugaucgccccgcggggcuacuucaagauccgcuccggcaagagcuccaucaugcggagcgacacccccaucgggaagugcaacuccgagugcaucacccccaacggcagcauccccaacgacaagccguuccagaacgugaaccgcaucaccuacggggccugcccccgguacgucaagcagaacacgcugaagcucgccaccggcaugcgcaacgugcccgagaagcagacccgggggaucuucggcgcgaucgccggguucaucgagaacggcugggagggcaugguggacgggugguacggcuuccgccaccagaacuccgaggggcggggccaggccgccgaccucaagagcacccaggccgcgaucgaccagaucaacgggaagcugaaccgccugaucggcaagacgaacgagaaguuccaccagaucgagaaggaguucuccgaggucgagggccggauccaggaccuggagaaguacguggaggacaccaagaucgaccuguggagcuacaacgccgagcuccugguggcccuggagaaccagcacaccaucgaccucaccgacuccgagaugaacaagcuguucgagaagacgaagaagcagcugcgcgagaacgccgaggacauggggaacggcugcuucaagaucuaccacaagugcgacaacgccugcaucgggagcauccgcaacggcaccuacgaccacgacgucuaccgggacgaggcgcucaacaaccgcuuccagaucaaggggguggagcugaaguccggcuacaaggacuggauccuguggaucagcuucgccaucuccugcuuccuccugugcguggcccugcucggcuucaucaugugggccugccagaaggggaacauccggugcaacaucugcaucuga

SEQ ID NO: 69356 - RNA, 1701 nt, Artificial Sequence
  derived and/or modified CDS sequence (opt1) from hemagglutinin__InfluenzaA__ADK87336
augaagaccaucaucgcccugagcuacauccucugccugguguucgcccagaagcugcccggcaacgacaacuccaccgcgacgcucugccuggggcaccacgccgucccgaacggcaccaucgugaagaccaucaccaacgaccagaucgaggugacgaacgccaccgagcugguccagagcuccagcaccggggagaucugcgacagcccccaccagauccucgacggcaagaacugcacccugaucgacgcccugcucggggacccccagugcgacggcuuccagaacaagaagugggaccuguucguggagcgcagcaaggccuacuccaacugcuaccccuacgacgugccggacuacgcgagccugcggucccucgucgccagcuccggcacgcuggaguucaacaacgagagcuucaacuggaccggggugacccagaacggcaccuccagcgccugcauccgccgguccaagaacagcuucuucuccaagcugaacuggcucacgcaccugaacuucaaguaccccgcccugaacgugaccaugcccaacaacgagcaguucgacaagcucuacaucuggggcguccaccaccccgggaccgaccgcgaccagaucuuccuguacgcgcaggccagcgggcggaucaccguguccacgaagcgcagccagcagaccgugaucccgaacaucggcagccggccccgcguccggaacauccccucccgcaucagcaucuacuggaccaucgugaagcccggcgacauccugcucaucaacuccaccgggaaccugaucgccccgcggggcuacuucaagauccgcagcgggaaguccagcaucaugcgguccgacacgcccaucggcaagagcaacuccgagugcaucacccccaacggcagcauccccaacgacaagccguuccagaacgugaaccgcaucaccuacggggccugcccccgguacgucaagcagaacacccugaagcucgccacgggcaugcgcaacgugcccgagaagcagacccgggggaucuucggcgcgaucgccggguucaucgagaacggcugggagggcaugguggacgggugguacggcuuccgccaccagaacuccgaggggcggggccaggccgccgaccugaaguccacccaggccgcgaucgaccagaucaacgggaagcugaaccgccucaucggcaagaccaacgagaaguuccaccagaucgagaaggaguucuccgaggucgagggccggauccaggaccuggagaaguacguggaggacacgaagaucgaccuguggagcuacaacgccgagcuccugguggcccuggagaaccagcacaccaucgaccucaccgacuccgagaugaacaagcuguucgagaagaccaagaagcagcugcgcgaggacgccgaggacauggggaacggcugcuucaagaucuaccacaagugcgacaacgccugcaucgggagcauccgcaacggcacguacgaccacgacgucuaccgggacgaggcgcucaacaaccgcuuccagaucaaggggguggagcugaaguccggcuacaaggacuggauccuguggaucagcuucgccaucuccugcuuccuccugugcguggcccugcucggcuucaucaugugggccugccagaaggggaacauccggugcaacaucugcaucuga

SEQ ID NO: 69357 - RNA, 1701 nt, Artificial Sequence; identical to SEQ ID NO: 66693
  derived and/or modified CDS sequence (opt1) from hemagglutinin__InfluenzaA__ADK87338

SEQ ID NO: 69358 - RNA, 1701 nt, Artificial Sequence
  derived and/or modified CDS sequence (opt1) from hemagglutinin__InfluenzaA__ADK90193
augaaggccauccuggugguccuccuguacaccuucgccaccgcgaacgccgacacgcugugcaucggcuaccacgccaacaacagcaccgacaccguggacaccgugcucgagaagaacgucacggugacccacuccgugaaccugcuggaggacaagcacaacgggaagcucugcaagcugcgcggcgucgcgccccugcaccucgggaagugcaacaucgccggcuggauccuggggaacccggagugcgagagccuguccaccgccagcuccuggagcuacaucguggagaccuccagcuccgacaacggcacgugcuaccccggcgacuucaucgacuacgaggagcuccgggagcagcugagcuccgugagcuccuucgagcgcuucgagaucuuccccaagaccagcuccuggcccaaccacgacagcaacaagggggucaccgccgccugcccgcacgccggcgcgaaguccuucuacaagaaccugaucuggcucgugaagaaggggaacagcuaccccaagcuguccaagagcuacaucaacgacaagggcaaggugguccuggugcucugggggauccaccaccccagcaccuccgccgaccagcagagccuguaccagaacgccgacgccuacguguucgucggcacgucccgguacagcaagaaguucaagcccgagaucgccauccgcccgaaggugcgggaccaggagggccgcaugaacuacuacuggacccugguggagcccggggacaagaucaccuucgaggcgaccggcaaccucgucgugccccgguacgccuucgccauggagcgcaacgccggguccggcaucaucaucagcgacacgcccgugcacgacugcaacacgaccugccagaccccgaagggcgccaucaacaccucccugcccuuccagaacauccaccccaucaccaucgggaagugccccaaguacgucaagagcaccaagcugcggcucgcgaccggccugcgcaacgugccguccauccagagccgggggcuguucggcgccaucgccggguucaucgagggcggcuggacggggaugguggacggcugguacggguaccaccaccagaacgagcagggcuccggguacgccgccgaccucaagagcacccagaacgcgaucgacgagaucaccaacaaggucaacuccgugaucgagaagaugaacacccaguucacggccgucggcaaggaguucaaccaccuggagaagcgcaucgagaaccugaacaagaagguggacgacggcuuccucgacaucuggaccuacaacgccgagcugcuggugcuccuggagaacgagcggacccuggacuaccacgacagcaacgucaagaaccucuacgagaaggugcgcucccagcugaagaacaacgccaaggagaucgggaacggcugcuucgaguucuaccacaagugcgacaacacgugcauggagagcgugaagaacgggaccuacgacuaccccaaguacuccgaggaggccaagcugaaccgggaggagaucgacggcgucaagcucgagagcacccgcaucuaccagauccuggcgaucuacuccaccguggccagcagccuggugcucgucgugucccugggggccaucagcuucuggaugugcuccaacggcagccugcagugccggaucugcaucuga

SEQ ID NO: 69359 - RNA, 1701 nt, Artificial Sequence
  derived and/or modified CDS sequence (opt1) from hemagglutinin__InfluenzaA__ADK90194
augaaggccauccuggugguccuccuguacaccuucgccaccgcgaacgccgacacgcugugcaucggcuaccacgccaacaacagcaccgacaccguggacaccgugcucgagaagaacgucacggugacccacuccgugaaccugcuggaggacaagcacaacgggaagcucugcaagcugcgcggcgucgcgccccugcaccucgggaagugcaacaucgccggcuggauccuggggaacccggagugcgagagccuguccaccgccagcuccuggagcuacaucguggagaccuccagcuccgacaacggcacgugcuaccccggcgacuucaucgacuacgaggagcuccgggagcagcugagcuccgugagcuccuucgagcgcuucgagaucuuccccaagaccagcuccuggcccaaccacgacagcaacaagggggucaccgccgccugcccgcacgccggcgcgaaguccuucuacaagaaccugaucuggcucgugaagaaggggaacagcuaccccaagcuguccaagagcuacaucaacgacaagggcaaggaggugcugguccucugggggauccaccaccccagcaccuccgccgaccagcagagccuguaccagaacgccgacgccuacguguucgugggcacguccaaguacagcaagaaguucaagcccgagaucgccauccggccgaagguccgcgaccaggagggccggaugaacuacuacuggacccugguggagcccggggacaagaucaccuucgaggcgaccggcaaccucguggucccccgcuacgccuucgccauggagcggaacgccggguccggcaucaucaucagcgacacgcccgugcacgacugcaacacgaccugccagaccccgaagggcgccaucaacaccucccugcccuuccagaacauccaccccaucaccaucgggaagugccccaaguacgucaagagcaccaagcugcgccucgcgaccggccugcggaacgugccguccauccagagccgcgggcuguucggcgccaucgccggguucaucgagggcggcuggacggggaugguggacggcugguacggguaccaccaccagaacgagcagggcuccggguacgccgccgaccucaagagcacccagaacgcgaucgacgagaucaccaacaaggugaacuccgucaucgagaagaugaacacccaguucacggccgugggcaaggaguucaaccaccuggagaagcggaucgagaaccugaacaagaagaucgacgacggcuuccucgacaucuggaccuacaacgccgagcugcugguccuccuggagaacgagcgcacccuggacuaccacgacagcaacgugaagaaccucuacgagaaggugcggucccagcugaagaacaacgccaaggagaucgggaacggcugcuucgaguucuaccacaagugcgacaacacgugcauggagagcgucaagaacgggaccuacgacuaccccaaguacuccgaggaggccaagcugaaccgcgaggagaucgacggcgugaagcucgagagcacccggaucuaccagauccuggcgaucuacuccaccguggccagcagccugguccucguggugucccugggggccaucagcuucuggaugugcuccaacggcagccugcagugccgcaucugcaucuga

SEQ ID NO: 69360 - RNA, 1701 nt, Artificial Sequence
  derived and/or modified CDS sequence (opt1) from hemagglutinin__InfluenzaA__ADK90195
augaaggccauccuggugguccuccuguacaccuucgccaccgcgaacgccgacacgcugugcaucggcuaccacgccaacaacagcaccgacaccguggacaccgugcucgagaagaacgucacggugacccacuccgugaaccugcuggaggacaagcacaacgggaagcucugcaagcugcgcggcgucgcgccccugcaccucgggaagugcaacaucgccggcuggauccuggggaacccggagugcgagagccuguccaccgccagcuccuggagcuacaucguggagaccuccagcuccgacaacggcacgugcuaccccggcgacuucaucgacuacgaggagcuccgggagcagcugagcuccgugagcuccuucgagcgcuucgagaucuuccccaagaccagcuccuggcccaaccacgacagcaacaagggggucaccgccgccugcccgcacgccggcgcgaaguccuucuacaagaaccugaucuggcucgugaagaaggggaacagcuaccccaagcuguccaagagcuacaucaacgacaagggcaaggaggugcugguccucugggggauccaccaccccagcaccuccgccgaccagcagagccuguaccagaacgccgacgccuacguguucgugggcacgucccgguacagcaagaaguucaagcccgagaucgccauccgcccgaagguccgggaccaggagggccgcaugaacuacuacuggacccugguggagcccggggacaagaucaccuucgaggcgaccggcaaccucguggucccccgguacgccuucgccauggagcgcaacgccggguccggcaucgugaucagcgacacgcccgugcacgacugcaacacgaccugccagaccccgaagggcgccaucaacaccucccugcccuuccagaacauccaccccaucaccaucgggaagugccccaaguacgucaagagcaccaagcugcggcucgcgaccggccugcgcaacgugccguccauccagagccgggggcuguucggcgccaucgccggguucaucgagggcggcuggacggggaugguggacggcugguacggguaccaccaccagaacgagcagggcuccggguacgccgccgaccucaagagcacccagaacgcgaucgacgagaucaccaacaaggucaacuccgugaucgagaagaugaacacccaguucacggccgucggcaaggaguucaaccaccuggagaagcgcaucgagaaccugaacaagaagaucgacgacggcuuccucgacaucuggaccuacaacgccgagcugcuggugcuccuggagaacgagcggacccuggacuaccacgacagcaacgugaagaaccucuacgagaagguccgcucccagcugaagaacaacgccaaggagaucgggaacggcugcuucgaguucuaccacaagugcgacaacacgugcauggagagcgugaagaacgggaccuacgacuaccccaaguacuccgaggaggccaagcugaaccgggaggagaucgacggcgugaagcucgagagcacccgcaucuaccagauccuggcgaucuacuccaccgucgccagcagccuggugcucguggucucccugggggccaucagcuucuggaugugcuccaacggcagccugcagugccggaucugcaucuga

SEQ ID NO: 69361 - RNA, 1701 nt, Artificial Sequence; identical to SEQ ID NO: 66680
  derived and/or modified CDS sequence (opt1) from hemagglutinin__InfluenzaA__ADK90196

SEQ ID NO: 69362 - RNA, 1701 nt, Artificial Sequence
  derived and/or modified CDS sequence (opt1) from hemagglutinin__InfluenzaA__ADK90197
augcgcgccauccugggcgugcuccuguacaccuucgccaccgcgaacgccgacacgcugugcaucggguaccacgccaacaacagcaccgacaccgucgacaccgugcucgagaagaacgugacggucacccacuccgugaaccugcuggaggacaagcacaacggcaagcucugcaagcugcgcgggguggcgccccugcaccucggcaagugcaacaucgccggguggauccugggcaacccggagugcgagagccuguccaccgccagcuccuggagcuacaucgucgagaccuccagcuccgacaacggcacgugcuaccccggggacuucaucgacuacgaggagcuccgggagcagcugagcuccgugagcuccuucgagcgguucgagaucuuccccaagaccagcuccuggcccaaccacgacagcaacaagggcgugaccgccgccugcccgcacgccggggcgaaguccuucuacaagaaccugaucuggcucgucaagaagggcaacagcuaccccaagcuguccaagagcuacaucaacgacaaggggaaggaggugcuggugcucuggggcauccaccaccccagcaccuccgccgaccagcagagccuguaccagaacgccgacgccuacgucuucgugggcacgucccgcuacagcaagaaguucaagcccgagaucgccauccggccgaaggugcgcgaccaggaggggcggaugaacuacuacuggacccuggucgagcccggcgacaagaucaccuucgaggcgaccgggaaccucguggugccccgcuacgccuucgccauggagcggaacgccggcuccggcaucaucaucagcgacacgcccguccacgacugcaacacgaccugccagaccccgaagggggccaucaacaccucccugcccuuccagaacauccaccccaucaccaucggcaagugccccaaguacgucaagagcaccaagcugcgccucgcgaccgggcugcggaacgugccguccauccagagccgcggccuguucggggccaucgccggcuucaucgagggcggguggacgggcaugguggacgggugguacggcuaccaccaccagaacgagcagggguccggcuacgccgccgaccucaagagcacccagaacgcgaucgacgagaucaccaacaaggugaacuccgugaucgagaagaugaacacccaguucacggccgucggcaaggaguucaaccaccuggagaagcggaucgagaaccugaacaagaagguggacgacggguuccucgacaucuggaccuacaacgccgagcugcugguccuccuggagaacgagcgcacccuggacuaccacgacagcaacgugaagaaccucuacgagaaggugcggucccagcugaagaacaacgccaaggagaucggcaacgggugcuucgaguucuaccacaagugcgacaacacgugcauggagagcgucaagaacggcaccuacgacuaccccaaguacuccgaggaggccaagcugaaccgcgaggagaucgacggggugaagcucgagagcacccggaucuaccagauccuggcgaucuacuccaccguggccagcagccugguccucguggugucccugggcgccaucagcuucuggaugugcuccaacggcagccugcagugccgcaucugcaucuga

SEQ ID NO: 69363 - RNA, 1701 nt, Artificial Sequence
  derived and/or modified CDS sequence (opt1) from hemagglutinin__InfluenzaA__ADK90198
augaaggccauccugggcgugcuccuguacaccuucgccaccgcgaacgccgacacgcugugcaucggguaccacgccaacaacagcaccgacaccgucgacaccgugcucgagaagaacgugacggucacccacuccgugaaccugcuggaggacaagcacaacggcaagcucugcaagcugcgcgggguggcgccccugcaccucggcaagugcaacaucgccggguggauccugggcaacccggagugcgagagccuguccaccgccagcuccuggagcuacaucgucgagaccuccagcuccgacaacggcacgugcuaccccggggacuucaucgacuacgaggagcuccgggagcagcugagcuccgugagcuccuucgagcgcuucgagaucuuccccaagaccagcuccuggcccaaccacgacagcaacaagggcgugaccgccgccugcccgcacgccggggcgaaguccuucuacaagaaccugaucuggcucgucaagaagggcaacagcuaccccaagcuguccaagagcuacaucaacgacaaggggaaggaggugcuggugcucuggggcauccaccaccccagcaccuccgccgaccagcagagccuguaccagaacgccgacgccuacgucuucgugggcacgucccgguacagcaagaaguucaagcccgagaucgccauccgcccgaaggugcgggaccaggaggggcgcaugaacuacuacuggacccuggucgagcccggcgacaagaucaccuucgaggcgaccgggaaccucguggugccccgguacgccuucgccauggagcgcaacgccggcuccggcaucaucaucagcgacacgcccguccacgacugcaacacgaccugccagaccccgaagggggccaucaacaccucccugcccuuccagaacauccaccccaucaccaucggcaagugccccaaguacgucaagagcaccaagcugcggcucgcgaccgggcugcgcaacgugccguccauccagagccggggccuguucggggccaucgccggcuucaucgagggcggguggacgggcaugguggacgggugguacggcuaccaccaccagaacgagcagggguccggcuacgccgccgaccucaagagcacccagaacgcgaucgacgagaucaccaacaaggugaacuccgugaucgagaagaugaacacccaguucacggccgucggcaaggaguucaaccaccuggagaagcgcaucgagaaccugaacaagaagguggacgacggguuccucgacaucuggaccuacaacgccgagcugcugguccuccuggagaacgagcggacccuggacuaccacgacagcaacgugaagaaccucuacgagaaggugcgcucccagcugaagaacaacgccaaggagaucggcaacgggugcuucgaguucuaccacaagugcgacaacacgugcauggagagcgucaagaacggcaccuacgacuaccccaaguacuccgaggaggccaagcugaaccgggaggagaucgacggggugaagcucgagagcacccgcaucuaccagauccuggcgaucuacuccaccguggccagcagccugguccucguggugucccugggcgccaucagcuucuggaugugcuccaacggcagccugcagugccggaucugcaucuga

SEQ ID NO: 69364 - RNA, 1701 nt, Artificial Sequence; identical to SEQ ID NO: 66693
  derived and/or modified CDS sequence (opt1) from hemagglutinin__InfluenzaA__ADK90199

SEQ ID NO: 69365 - RNA, 1701 nt, Artificial Sequence
  derived and/or modified CDS sequence (opt1) from hemagglutinin__InfluenzaA__ADK90200
augaaggccauccuggugguccuccuguacaccuucgccaccgcgaacgccgacacgcugugcaucggcuaccacgccaacaacagcaccgacaccguggacaccgugcucgagaagaacgucacggugacccacuccgugaaccugcuggaggacaagcacaacgggaagcucugcaagcugcgcggcgucgcgccccugcaccucgggaagugcaacaucgccggcuggauccuggggaacccggagugcgagagccuguccaccgccagcuccuggagcuacaucguggagaccuccagcuccgacaacggcacgugcuaccccggcgacuucaucgacuacgaggagcuccgggagcagcugagcuccgugagcuccuucgagcgcuucgagaucuuccccaagaccagcuccuggcccaaccacgacagcaacaagggggucaccgccgccugcccgcacgccggcgcgaaguccuucuacaagaaccugaucuggcucgugaagaaggggaacagcuaccccaagcuguccaagagcuacaucaacgacaagggcaaggaggugcugguccucugggggauccaccaccccagcaccuccgccgaccagcagagccuguaccagaacgccgacgccuacguguucgugggcacgucccgguacagcaagaaguucaagcccgagaucgccauccgcccgaagguccgggaccaggagggccgcaugaacuacuacuggacccugguggagcccggggacaagaucgcguucgaggccaccggcaaccucguggucccccgguacgccuucgccauggagcgcaacgccggguccggcaucaucaucagcgacacccccgugcacgacugcaacacgaccugccagaccccgaagggcgcgaucaacaccucccugcccuuccagaacauccaccccaucacgaucgggaagugccccaaguacgucaagagcaccaagcugcggcucgccaccggccugcgcaacgugccguccauccagagccgggggcuguucggcgccaucgccggguucaucgagggcggcuggaccgggaugguggacggcugguacggguaccaccaccagaacgagcagggcuccggguacgccgcggaccucaagagcacgcagaacgccaucgacgagaucaccaacaaggugaacuccgucaucgagaagaugaacacccaguucaccgccgugggcaaggaguucaaccaccuggagaagcgcaucgagaaccugaacaagaaggucgacgacggcuuccucgacaucuggacguacaacgccgagcugcuggugcuccuggagaacgagcggacccuggacuaccacgacagcaacgugaagaaccucuacgagaagguccgcucccagcugaagaacaacgccaaggagaucgggaacggcugcuucgaguucuaccacaagugcgacaacacgugcauggagagcgugaagaacgggaccuacgacuaccccaaguacuccgaggaggcgaagcugaaccgggaggagaucgacggcgugaagcucgagagcacccgcaucuaccagauccuggccgucuacuccaccguggccagcagccuggugcucgucgugucccugggggccaucagcuucuggaugugcuccaacggcagccugcagugccggaucugcaucuga

SEQ ID NO: 69366 - RNA, 1701 nt, Artificial Sequence
  derived and/or modified CDS sequence (opt1) from hemagglutinin__InfluenzaA__ADK90201
augaaggccauccuggugguccuccuguacaccuucgccaccgcgaacgccgacacgcugugcaucggcuaccacgccaacaacagcaccgacaccguggacaccgugcucgagaagaacgucacggugacccacuccgugaaccugcuggaggacaagcacaacgggaagcucugcaagcugcgcggcgucgcgccccugcaccucgggaagugcaacaucgccggcuggauccuggggaacccggagugcgagagccuguccaccgccagcuccuggagcuacaucguggagaccuccagcuccgacaacggcacgugcuaccccggcgacuucaucgacuacgaggagcuccgggagcagcugagcuccgugagcuccuucgagcgcuucgagaucuuccccaagaccagcuccuggcccaaccacgacagcaacaagggggucaccgccgccugcccgcacgccggcgcgaaguccuucuacaagaaccugaucuggcucgugaagaaggggaacagcuaccccaagcuguccaagagcuacaucaacgacaagggcaaggaggugcugguccucugggggauccaccaccccagcaccuccgccgaccagcagagccuguaccagaacgccgacgccuacguguucgugggcacgucccgguacagcaagaaguucaagcccgagaucgccguccgcccgaaggugcgggaccaggagggccgcaugaacuacuacuggacccugguggagcccggggacaagaucaccuucgaggcgaccggcaaccucgucgugccccgguacgccuucgccauggagcgcaacgccggguccggcaucaucaucagcgacacgcccgugcacgacugcaacacgaccugccagaccccgaagggcgccaucaacaccucccugcccuuccagaacauccaccccaucaccaucgggaagugccccaaguacgucaagagcaccaagcugcggcucgcgaccggccugcgcaacgugccguccauccagagccgggggcuguucggcgccaucgccggguucaucgagggcggcuggacggggaugguggacggcugguacggguaccaccaccagaacgagcagggcuccggguacgccgccgaccucaagagcacccagaacgcgaucgacgagaucaccaacaaggucaacuccgugaucgagaagaugaacacccaguucacggccgucggcaaggaguucaaccaccuggagaagcgcaucgagaaccugaacaagaagguggacgacggcuuccucgacaucuggaccuacaacgccgagcugcuggugcuccuggagaacgagcggacccuggacuaccacgacagcaacgucaagaaccucuacgagaaggugcgcucccagcugaagaacaacgccaaggagaucgggaacggcugcuucgaguucuaccacaagugcgacaacacgugcauggagagcgugaagaacgggaccuacgacuaccccaaguacuccgaggaggccaagcugaaccgggaggagaucgacggcgucaagcucgagagcacccgcaucuaccagauccuggcgaucuacuccaccguggccagcagccuggugcucgucgugucccugggggccaucagcuucuggaugugcuccaacggcagccugcagugccggaucugcaucuga

SEQ ID NO: 69367 - RNA, 1701 nt, Artificial Sequence
  derived and/or modified CDS sequence (opt1) from hemagglutinin__InfluenzaA__ADK90202
augaaggccauccuggugguccuccuguacaccuucgccaccgcgaacgccgacacgcugugcaucggcuaccacgccaacaacagcaccgacaccguggacaccgugcucgagaagaacgucacggugacccacuccgugaaccugcuggaggacaagcacaacgggaagcucugcaagcugcgcggcgucgcgccccugcaccucgggaagugcaacaucgccggcuggauccuggggaacccggagugcgagccccugagcaccgcguccagcugguccuacaucguggagaccagcuccagcgacaacggcacgugcuaccccggcgacuucaucgacuacgaggagcuccgggagcagcuguccagcguguccagcuucgagcgccuggagaucuuccccaagaccuccagcuggccgaaccacgacuccaacaagggggucaccgccgccugcccccacgccggcgccaagagcuucuacaagaaccucaucuggcuggugaagaaggggaacuccuaccccaagcugagcaaguccuacaucaacgacaagggcaaggaggugcucguccugugggggauccaccaccccagcaccagcgccgaccagcagucccuguaccagaacgccgacgccuacguguucgugggcacgagccgguacuccaagaaguucaagccggagaucgccauccgccccaagguccgggaccaggagggccgcaugaacuacuacuggacccucguggagcccggggacaagaucaccuucgaggcgaccggcaaccugguggucccccgguacgccuucgccauggagcgcaacgccgggagcggcaucaucaucuccgacacgccggugcacgacugcaacacgaccugccagacccccaacggcgccaucaacaccagccugcccuuccagaacauccaccccaucaccaucgggaagugcccgaaguacgugaaguccaccaagcuccggcuggcgaccggccugcgcaacguccccagcauccagucccggggccucuucggggccaucgccggguucaucgagggcggcuggacggggaugguggacggcugguacggguaccaccaccagaacgagcagggcagcggguacgccgccgaccugaaguccacccagaacgcgaucgacgagaucaccaacaaggugaacagcgucaucgagaagaugaacacccaguucacggccgugggcaaggaguucaaccaccuggagaagcgcaucgagaaccucaacaagaaggucgacgacggcuuccuggacaucuggaccuacaacgccgagcugcucgugcugcuggagaacgagcggacccucgacuaccacgacuccaacgugaagaaccuguacgagaagguccgcagccagcugaagaacaacgccaaggagaucgggaacggcugcuucgaguucuaccacaagugcgacaacacgugcauggaguccgugaagaacgggaccuacgacuaccccaaguacagcgaggaggccaagcucaaccgggaggagaucgacggcgugaagcuggaguccacccgcaucuaccagauccuggcgaucuacagcaccgucgccuccagccucgugcugguggucagccugggggccaucuccuucuggaugugcagcaacggcucccuccagugccggaucugcaucuga

SEQ ID NO: 69368 - RNA, 1701 nt, Artificial Sequence; identical to SEQ ID NO: 66873
  derived and/or modified CDS sequence (opt1) from hemagglutinin__InfluenzaA__ADK90203

SEQ ID NO: 69369 - RNA, 1701 nt, Artificial Sequence; identical to SEQ ID NO: 67794
  derived and/or modified CDS sequence (opt1) from hemagglutinin__InfluenzaA__ADK90204

SEQ ID NO: 69370 - RNA, 1701 nt, Artificial Sequence
  derived and/or modified CDS sequence (opt1) from hemagglutinin__InfluenzaA__ADK94191
augaagaccaucaucgcccugagcuacauccucugccugguguucgcccagaagcugcccggcaacgacaacuccaccgcgacgcucugccuggggcaccacgccgucccgaacggcaccguggugaagaccaucaccaacgaccagaucgaggucacgaacgccaccgagcuggugcagagcuccagcaccggggagaucugcgacagcccccaccagauccucgacggcaagaacugcacccugaucgacgcccugcucggggacccccagugcgacggcuuccagaacaagaagugggaccuguucguggagcgcagcaaggccuacuccaacugcuaccccuacgacgucccggacuacgcgagccugcggucccucguggccagcuccggcacgcuggaguucaacaacgagagcuucaacuggaccggggugacccagaacggcaccuccagcgccugcauccgccgguccaagaacagcuucuucucccgccugaacuggcucacgcaccugaacuucaaguaccccgcccugaacgucaccaugcccaacaacgagcaguucgacaagcucuacaucuggggcgugcaccaccccgggaccgacaaggaccagaucuuccuguacgcgcaggccagcgggcggaucaccguguccacgaagcgcagccagcagaccgucaucccgaacaucggcagccggccccgcgugcggaacauccccucccgcgugagcaucuacuggaccaucgucaagcccggcgacauccugcucaucaacuccaccgggaaccugaucgccccgcggggcuacuucaagauccgcagcgggaaguccagcaucaugcgguccgacgcccccaucggcaagugcaacagcgagugcaucacgcccaacggcuccauccccaacgacaagccguuccagaacgugaaccgcaucaccuacggggccugcccccgguacgugaagcagaacacccugaagcucgcgaccggcaugcgcaacguccccgagaagcagacgcgggggaucuucggcgccaucgccggguucaucgagaacggcugggagggcaugguggacgggugguacggcuuccgccaccagaacagcgaggggcggggccaggccgccgaccugaaguccacccaggcggccaucgaccagaucaacgggaagcugaaccgccucaucggcaagaccaacgagaaguuccaccagaucgagaaggaguucagcgagguggagggccggauccaggaccuggagaaguacgucgaggacaccaagaucgaccugugguccuacaacgccgagcuccugguggcccuggagaaccagcacacgaucgaccucaccgacagcgagaugaacaagcuguucgagaagaccaagaagcagcugcgcgagaacgccgaggacauggggaacggcugcuucaagaucuaccacaagugcgacaacgcgugcaucggguccauccgcaacggcaccuacgaccacgacguguaccgggacgaggcccucaacaaccgcuuccagaucaagggggucgagcugaaguccggcuacaaggacuggauccuguggaucuccuucgccaucagcugcuuccuccugugcguggcccugcucggcuucaucaugugggccugccagaaggggaacauccggugcaacaucugcaucuga

SEQ ID NO: 69371 - RNA, 1701 nt, Artificial Sequence
  derived and/or modified CDS sequence (opt1) from hemagglutinin__InfluenzaA__ADK94202
augaagaccaucaucgcccugagcuacauccucugccugguguucgcccagaagcugcccggcaacgacaacuccaccgcgacgcucugccuggggcaccacgccgucccgaacggcaccaucgugaagaccaucaccaacgaccagaucgaggugacgaacgccaccgagcugguccagagcuccagcaccggggagaucugcgacagcccccaccagauccucgacggcgagaacugcacccugaucgacgcccugcucggggacccccagugcgacggcuuccagaacaagaagugggaccuguucguggagcgcagcaaggccuacuccaacugcuaccccuacgacgugccggacuacgcgagccugcggucccucaucgccagcuccggcacgcuggaguucaacaacgagagcuucaacuggaccggggucacccagaacggcaccuccagcgccugcauccgccgguccaacaacagcuucuucucccgccugaacuggcucacgcaccugaaguucaaguaccccgcccugaacgugaccaugcccaacaacgagcaguucgacaagcucuacaucuggggcgugcaccaccccgggaccgacaacgaccagaucuuccuguacgcgcaggccagcgggcggaucaccgucuccacgaagcgcagccagcagaccgugaucccgaacaucggcagccggccccgcgugcggaacauccccucccgcaucagcaucuacuggaccaucgucaagcccggcgacauccugcucaucaacuccaccgggaaccugaucgccccgcggggcuacuucaagauccgcagcgggaaguccagcaucaugcgguccgacgcccccaucggcaagugcaacagcgagugcaucacgcccaacggcuccauccccaacgacaagccguuccagaacgugaaccgcaucaccuacggggccugcccccgguacgugaagcagaacacccugaagcucgcgaccggcaugcgcaacguccccgagaagcagacgcgggggaucuucggcgccaucgccggguucaucgagaacggcugggagggcaugguggacgggugguacggcuuccgccaccagaacagcgaggggcggggccaggccgccgaccugaaguccacccaggcggccaucgaccagaucaacgggaagcugaaccgccucaucggcaagaccaacgagaaguuccaccagaucgagaaggaguucagcgagguggagggccggauccaggaccuggagaaguacgucgaggacaccaagaucgaccugugguccuacaacgccgagcuccugguggcccuggagaaccagcacacgaucgaccucaccgacagcgagaugaacaagcuguucgagaagaccaagaagcagcugcgcgagaacgccgaggacauggggaacggcugcuucaagaucuaccacaagugcgacaacgcgugcaucggguccauccgcaacggcaccuacgaccacgacguguaccgggacgaggcccucaacaaccgcuuccagaucaagggggucgagcugaaguccggcuacaaggacuggauccuguggaucuccuucgccaucagcugcuuccuccugugcguggcccugcucggcuucaucaugugggccugccagaaggggaacauccggugcaacaucugcaucuga

SEQ ID NO: 69372 - RNA, 1701 nt, Artificial Sequence; identical to SEQ ID NO: 66458
  derived and/or modified CDS sequence (opt1) from hemagglutinin__InfluenzaA__ADK94213

SEQ ID NO: 69373 - RNA, 1701 nt, Artificial Sequence; identical to SEQ ID NO: 67637
  derived and/or modified CDS sequence (opt1) from hemagglutinin__InfluenzaA__ADK94224

SEQ ID NO: 69374 - RNA, 1701 nt, Artificial Sequence
  derived and/or modified CDS sequence (opt1) from hemagglutinin__InfluenzaA__ADK94257
auggagaccaucaucgcccugagcuacauccucugccugguguucgcccagaagcugcccggcaacgacaacuccaccgcgacgcucugccuggggcaccacgccgucccgaacggcaccaucgugaagaccaucaccaacgaccagaucgaggugacgaacgccaccgagcugguccagagcuccagcaccggggagaucugcgacagcccccaccagauccucgacggcaagaacugcacccugaucgacgcccugcucggggacccccagugcgacggcuuccagaacaagaagugggaccuguucguggagcgcagcaaggccuacuccaacugcuaccccuacgacgugccggacuacgcgagccugcggucccucgucgccagcuccggcacgcuggaguucaacaacgagagcuucaacuggaccggggugacccagaacggcaccuccagcgccugcauccgccgguccaagaacagcuucuucucccgccugaacuggcucacgcaccugaacuucaaguaccccgcccugaacgugaccaugcccaacaacgagcaguucgacaagcucuacaucuggggcguccaccaccccgggaccgacaaggaccagaucuuccuguacgcgcaggccagcgggcggaucaccguguccacgaagcgcagccagcagaccgugaucccgaacaucggcagccggccccgcguccggaacauccccucccgcaucagcaucuacuggaccaucgugaagcccggcgacauccugcucaucaacuccaccgggaaccugaucgccccgcggggcuacuucaagauccgcagcgggaaguccagcaucaugcgguccgacgcccccaucggcaagugcaacagcgagugcaucacgcccaacggcuccauccccaacgacaagccguuccagaacgugaaccgcaucaccuacggggccugcccccgguacgucaagcagagcacccugaagcucgcgaccggcaugcgcaacgugcccgagaagcagacgcgggggaucuucggcgccaucgccggguucaucgagaacggcugggagggcaugguggacgggugguacggcuuccgccaccagaacuccgaggggcggggccaggccgccgaccugaaguccacccaggcggccaucgaccagaucaacgggaagcugaaccgccucaucggcaagaccaacgagaaguuccaccagaucgagaaggaguucuccgaggucgagggccggauccaggaccuggagaaguacguggaggacaccaagaucgaccuguggagcuacaacgccgagcuccugguggcccuggagaaccagcacacgaucgaccucaccgacuccgagaugaacaagcuguucgagaagaccaagaagcagcugcgcgagaacgccgaggacauggggaacggcugcuucaagaucuaccacaagugcgacaacgcgugcaucgggagcauccgcaacggcaccuacgaccacgacgucuaccgggacgaggcccucaacaaccgcuuccagaucaaggggguggagcugaaguccggcuacaaggacuggauccuguggaucagcuucgccaucuccugcuuccuccugugcguggcccugcucggcuucaucaugugggccugccagaaggggaacauccggugcaacaucugcaucuga

SEQ ID NO: 69375 - RNA, 1701 nt, Artificial Sequence
  derived and/or modified CDS sequence (opt1) from hemagglutinin__InfluenzaA__ADK94268
augaagaccaucaucgcccugagcuacauccucugccugguguucgcccagaagcugcccggcaacgacaacuccaccgcgacgcucugccuggggcaccacgccgucccgaacggcaccaucgugaagaccaucaccaacgaccagaucgaggugacgaacgccaccgagcugguccagagcuccagcaccggggagaucugcgacagcccccaccagauccucgacggcaagaacugcacccugaucgacgcccugcucggggacccccagugcgacggcuuccagaacaagaagugggaccuguucguggagcgcagcaaggccuacuccaacugcuaccccuacgacgugccggacuacgcgagccugcggucccucgucgccagcuccggcacgcuggaguucaacaacgagagcuucaacuggaccggggugacccagaacggcaccuccagcgccugcauccgccgguccaagaacagcuucuucucccgccugaacuggcucacgcaccugaacuucaaguaccccgcccugaacgugaccaugcccaacaacgagcaguucgacaagcucuacaucuggggcguccaccaccccgggaccgacaaggaccagaucuuccuguacgcgcaggccagcgggcggaucaccguguccacgaagcgcagccagcagaccgugaucccgaacaucggcagccggccccgcguccggaacauccccucccgcaucagcaucuacuggaccaucgugaagcccggcgacauccugcucaucaacuccaccgggaaccugaucgccccgcggggcuacuucaagauccgcagcgggaaguccagcaucaugcgguccgacgcccccaucggcaagugcaacagcgagugcaucacgcccaacggcuccauccccaacgacaagccguuccagaacgugaaccgcaucaccuacggggccugcccccgguacgucaagcagagcacccugaagcucgcgaccggcaugcgcaacgugcccgagaagcagacgcgggggaucuucggcgccaucgccggguucaucgagaacggcugggagggcaugguggacgggugguacggcuuccgccaccagaacuccgaggggcggggccaggccgccgaccugaaguccacccaggcggccaucgaccagaucaacgggaagcugaaccgccucaucggcaagaccaacgagaaguuccaccagaucgagaaggaguucuccgaggucgagggccggauccaggaccuggagaaguacguggaggacaccaagaucgaccuguggagcuacaacgccgagcuccugguggcccuggagaaccagcacacgaucgaccucaccgacuccgagaugaacaagcuguucgagaagaccaagaagcagcugcgcgagaacgccgaggacauggggaacggcugcuucaagaucuaccacaagugcgacaacgcgugcaucgggagcauccgcaacggcaccuacgaccacgacgucuaccgggacgaggcccucaacaaccgcuuccagaucaaggggguggagcugaaguccggcuacaaggacuggauccuguggaucagcuucgccaucuccugcuuccuccugugcguggcccugcucggcuucaucaugugggccugccagaaggggaacauccggugcaacaucugcaucuga

SEQ ID NO: 69376 - RNA, 1701 nt, Artificial Sequence
  derived and/or modified CDS sequence (opt1) from hemagglutinin__InfluenzaA__ADK94279
augaagaccaucaucgcccugagcuacauccucugccugguguucgcccagaagcugcccggcaacgacaacuccaccgcgacgcucugccuggggcaccacgccgucccgaacggcaccaucgugaagaccaucaccaacgaccagaucgaggugacgaacgccaccgagcugguccagagcuccagcaccggggagaucugcaacagcccccaccagauccucgacggcgagaacugcacccugaucgacgcccugcucggggacccccagugcgacggcuuccagaacaagaagugggaccuguucguggagcgcagcaaggccuacuccaacugcuaccccuacgacgugccggacuacgcgagccugcggucccucgucgccagcuccggcacgcuggaguucaacaacgagagcuucaacuggaccggggugacccagaacggcaccuccagcgccugcauccgccgguccaacaacagcuucuucucccgccugaacuggcucacgcaccugaaguucaaguaccccgcccugaacgugaccaugcccaacaacgagcaguucgacaagcucuacaucuggggcguccaccaccccgggaccgacaacgaccagaucuuccuguacgcgcaggccagcgggcggaucaccguguccacgaagcgcagccagcagaccgugaucccgaacaucggcagccggccccgcguccggaacauccccucccgcaucagcaucuacuggaccaucgugaagcccggcgacauccugcucaucaacuccaccgggaaccugaucgccccgcggggcuacuucaagauccgcagcgggaaguccagcaucaugcgguccgacgcccccaucggcaagugcaacagcgagugcaucacgcccaacggcuccauccccaacgacaagccguuccagaacgugaaccgcaucaccuacggggccugcccccgguacgucaagcagaacacccugaagcucgcgaccggcaugcgcaacgugcccgagaagcagacgcgggggaucuucggcgccaucgccggguucaucgagaacggcugggagggcaugguggacgggugguacggcuuccgccaccagaacagcgaggggcggggccaggccgccgaccugaaguccacccaggcggccaucgaccagaucaacgggaagcugaaccgccucaucggcaagaccaacgagaaguuccaccagaucgagaaggaguucagcgaggucgagggccggauccaggaccuggagaaguacguggaggacaccaagaucgaccugugguccuacaacgccgagcuccugguggcccuggagaaccagcacacgaucgaccucaccgacagcgagaugaacaagcuguucgagaagaccaagaagcagcugcgcgagaacgccgaggacauggggaacggcugcuucaagaucuaccacaagugcgacaacgcgugcaucggguccauccgcaacggcaccuacgaccacgacgucuaccgggacgaggcccucaacaaccgcuuccagaucaaggggguggagcugaaguccggcuacaaggacuggauccuguggaucuccuucgccaucagcugcuuccuccugugcguggcccugcucggcuucaucaugugggccugccagaaggggaacauccggugcaacaucugcaucuga

SEQ ID NO: 69377 - RNA, 1701 nt, Artificial Sequence; identical to SEQ ID NO: 67637
  derived and/or modified CDS sequence (opt1) from hemagglutinin__InfluenzaA__ADK94290

SEQ ID NO: 69378 - RNA, 1701 nt, Artificial Sequence; identical to SEQ ID NO: 67637
  derived and/or modified CDS sequence (opt1) from hemagglutinin__InfluenzaA__ADK94301

SEQ ID NO: 69379 - RNA, 1701 nt, Artificial Sequence
  derived and/or modified CDS sequence (opt1) from hemagglutinin__InfluenzaA__ADK94323
augaagaccaucaucgcccugagcuacauccucugccugguguucgcccagaagcugcccggcaacgacaacuccaccgcgacgcucugccuggggcaccacgccgucccgaacggcaccaucgugaagaccaucaccaacgaccagaucgaggugacgaacgccaccgagcugguccagagcuccagcaccggggagaucugcgacagcccccaccagauccucgacggcaagaacugcacccugaucgacgcccugcucggggacccccagugcgacggcuuccagaacaagaagugggaccuguucguggagcgcagcaaggccuacuccaacugcuaccccuacgacgugccggacuacgcgagccugcggucccucgucgccagcuccggcacgcuggaguucaacaacgagagcuucaacuggaccggggugacccagaacggcaccuccagcgccugcauccgccgguccaagaacagcuucuucucccgccugaacuggcucacgcaccugaacuucaaguaccccgcccugaacgugaccaugcccaacaacgagcaguucgacaagcucuacaucuggggcguccaccaccccgggaccgacaaggaccagaucuuccuguacgcgcaggccagcgggcggaucaccguguccacgaagcgcagccagcagaccgugaucccgaacaucggcagccggccccgcauccggaacauccccucccgcaucagcaucuacuggaccaucgucaagcccggcgacauccugcucaucaacuccaccgggaaccugaucgccccgcggggcuacuucaagauccgcagcgggaaguccagcaucaugcgguccgacgcccccaucggcaagugcaacagcgagugcaucacgcccaacggcuccauccccaacgacaagccguuccagaacgugaaccgcaucaccuacggggccugcccccgguacgugaagcagaacacccugaagcucgcgaccggcaugcgcaacguccccgagaagcagacgcgggggaucuucggcgccaucgccggguucaucgagaacggcugggagggcaugguggacgggugguacggcuuccgccaccagaacagcgaggggcggggccaggccgccgaccugaaguccacccaggcggccaucgaccagaucaacgggaagcugaaccgccucaucggcaagaccaacgagaaguuccaccagaucgagaaggaguucagcgagguggagggccggauccaggaccuggagaaguacgucgaggacaccaagaucgaccugugguccuacaacgccgagcuccugguggcccuggagaaccagcacacgaucgaccucaccgacagcgagaugaacaagcuguucgagaagaccaagaagcagcugcgcgagaacgccgaggacauggggaacggcugcuucaagaucuaccacaagugcgacaacgcgugcaucggguccauccgcaacggcaccuacgaccacgacguguaccgggacgaggcccucaacaaccgcuuccagaucaagggggucgagcugaaguccggcuacaaggacuggauccuguggaucuccuucgccaucagcugcuuccuccugugcguggcccugcucggcuucaucaugugggccugccagaaggggaacauccggugcaacaucugcaucuga

SEQ ID NO: 69380 - RNA, 1701 nt, Artificial Sequence; identical to SEQ ID NO: 69370
  derived and/or modified CDS sequence (opt1) from hemagglutinin__InfluenzaA__ADK94441

SEQ ID NO: 69381 - RNA, 1701 nt, Artificial Sequence
  derived and/or modified CDS sequence (opt1) from hemagglutinin__InfluenzaA__ADK94476
augaagaccaucaucgcccugagcuacauccucugccugguguucgcccagaagcugcccggcaacgacaacuccaccgcgacgcucugccuggggcaccacgccgucccgaacggcaccaucgugaagaccaucaccaacgaccagaucgaggugacgaacgccaccgagcugguccagagcuccagcaccggggagaucugcgacagcccccaccagauccucgacggcaagaacugcacccugaucgacgcccugcucggggacccccagugcgacggcuuccagaacaagaagugggaccuguucguggagcgcagcaaggcccacuccaacugcuaccccuacgacgugccggacuacgcgagccugcggucccucgucgccagcuccggcacgcuggaguucaacaacgagagcuucaacuggaccggggugacccagaacggcaccuccagcgccugcauccgccgguccaagaacagcuucuucucccgccugaacuggcucacgcaccugaacuucaaguaccccgcccugaacgugaccaugcccaacaacgagcaguucgacaagcucuacaucuggggcgcgcaccaccccgggaccgacaaggaccagaucuuccuguacgcccaggccagcgggcggaucaccgucuccacgaagcgcagccagcagaccgugaucccgaacaucggcagccggccccgcgugcggaacauccccucccgcaucagcaucuacuggaccaucgucaagcccggcgacauccugcucaucaacuccaccgggaaccugaucgccccgcggggcuacuucaagauccgcagcgggaaguccagcaucaugcgguccgacgcccccaucggcaagugcaacagcgagugcaucacgcccaacggcuccauccccaacgacaagccguuccagaacgugaaccgcaucaccuacggggcgugcccccgguacgugaagcagaacacccugaagcucgccaccggcaugcgcaacguccccgagaagcagacgcgggggaucuucggcgccaucgccggguucaucgagaacggcugggagggcaugguggacgggugguacggcuuccgccaccagaacagcgaggggcggggccaggccgcggaccugaaguccacccaggccgccaucgaccagaucaacgggaagcugaaccgccucaucggcaagaccaacgagaaguuccaccagaucgagaaggaguucagcgagguggagggccggauccaggaccuggagaaguacgucgaggacaccaagaucgaccugugguccuacaacgccgagcuccugguggcccuggagaaccagcacacgaucgaccucaccgacagcgagaugaacaagcuguucgagaagaccaagaagcagcugcgcgagaacgcggaggacauggggaacggcugcuucaagaucuaccacaagugcgacaacgccugcaucggguccauccgcaacggcaccuacgaccacgacguguaccgggacgaggcccucaacaaccgcuuccagaucaagggggucgagcugaaguccggcuacaaggacuggauccuguggaucuccuucgccaucagcugcuuccuccugugcguggcccugcucggcuucaucaugugggcgugccagaaggggaacauccggugcaacaucugcaucuga

SEQ ID NO: 69382 - RNA, 1701 nt, Artificial Sequence; identical to SEQ ID NO: 67637
  derived and/or modified CDS sequence (opt1) from hemagglutinin__InfluenzaA__ADK94487

SEQ ID NO: 69383 - RNA, 1701 nt, Artificial Sequence
  derived and/or modified CDS sequence (opt1) from hemagglutinin__InfluenzaA__ADK94498
augaagaccaucaucgcccugagcuacauccucugccugguguucgcccagaagcugcccggcaacgacaacuccaccgcgacgcucugccuggggcaccacgccgucccgaacggcaccguggugaagaccaucaccaacgaccagaucgaggucacgaacgccaccgagcuggugcagagcuccagcaccggggagaucugcgacagcccccaccagauccucgacggcaagaacugcacccugaucgacgcccugcucggggacccccagugcgacggcuuccagaacaagaagugggaccuguucguggagcgcagcaaggccuacuccaacugcuaccccuacgacgucccggacuacgcgagccugcggucccucguggccagcuccggcacgcuggaguucaacaacgagagcuucaacuggaccggggugacccagaacggcaccuccagcgccugcauccgccgguccaagaacagcuucuucucccgccugaacuggcucacgcaccugaacuucaaguaccccgcccugaacgucaccaugcccaacaacgagcaguucgacaagcucuacaucuggggcgugcaccaccccgggaccgacaaggaccagaucuuccuguacgcgcaggccagcgggcggaucaccguguccacgaagcgcagccagcagaccgucaucccgaacaucggcagccggccccgcgugcggaacauccccucccgcaucagcaucuacuggaccaucgugaagcccggcgacauccugcucaucaacuccaccgggaaccugaucgccccgcggggcuacuucaagauccgcagcgggaaguccagcaucaugcgguccgacgcccccaucggcaagugcaacagcgagugcaucacgcccaacggcuccauccccaacgacaagccguuccagaacgucaaccgcaucaccuacggggccugcccccgguacgugaagcagaacacccugaagcucgcgaccggcaugcgcaacgugcccgagaagcagacgcgggggaucuucggcgccaucgccggguucaucgagaacggcugggagggcauggucgacgggugguacggcuuccgccaccagaacagcgaggggcggggccaggccgccgaccugaaguccacccaggcggccaucgaccagaucaacgggaagcugaaccgccucaucggcaagaccaacgagaaguuccaccagaucgagaaggaguucagcgagguggagggccggauccaggaccuggagaaguacguggaggacaccaagaucgaccugugguccuacaacgccgagcuccuggucgcccuggagaaccagcacacgaucgaccucaccgacagcgagaugaacaagcuguucgagaagaccaagaagcagcugcgcgagaacgccgaggacauggggaacggcugcuucaagaucuaccacaagugcgacaacgcgugcaucggguccauccgcaacggcaccuacaaccacgacguguaccgggacgaggcccucaacaaccgcuuccagaucaaggggguggagcugaaguccggcuacaaggacuggauccuguggaucuccuucgccaucagcugcuuccuccugugcgucgcccugcucggcuucaucaugugggccugccagaaggggaacauccggugcaacaucugcaucuga

SEQ ID NO: 69384 - RNA, 1701 nt, Artificial Sequence
  derived and/or modified CDS sequence (opt1) from hemagglutinin__InfluenzaA__ADK94509
augaagaccaucaucgcccugagcuacauccucugccugguguucgcccagaagcugcccggcaacgacaacuccaccgcgacgcucugccuggggcaccacgccgucccgaacggcaccaucgugaagaccaucaccaacgaccagaucgaggugacgaacgccaccgagcugguccagagcuccagcaccggggagaucugcgacagcccccaccagauccucgacggcaagaacugcacccugaucgacgcccugcucggggacccccagugcgacggcuuccagaacaagaagugggaccuguucguggagcgcagcaaggccuacuccaacugcuaccccuacgacgugccggacuacgcgagccugcggucccucgucgccagcuccggcacgcuggaguucaacaacgagagcuucaacuggaccggggugacccagaacggcaccuccagcgccugcauccgccgguccaagaacagcuucuucucccgccugaacuggcucacgcaccugaacuucaaguaccccgcccugaacgugaccaugcccaacaacgagcaguucgacaagcucuacaucuggggcguccaccaccccgggaccgacaaggaccagaucuuccuguacgcgcaggccagcgggcggaucaccguguccacgaagcgcagccagcagaccgccaucccgaacaucggcagccggccccgcgugcggaacauccccucccgcaucagcaucuacuggaccaucgucaagcccggcgacauccugcucaucaacuccaccgggaaccugaucgccccgcggggcuacuucaagauccgcagcgggaaguccagcaucaugcgguccgacgcccccaucggcaagugcaacagcgagugcaucacgcccaacggcuccauccccaacgacaagccguuccagaacgugaaccgcaucaccuacggggcgugcccccgguacaucaagcagaacacccugaagcucgccaccggcaugcgcaacgugcccgagaagcagacgcgggggaucuucggcgccaucgccggguucaucgagaacggcugggagggcauggucgacgggugguacggcuuccgccaccagaacagcgaggggcggggccaggccgcggaccugaaguccacccaggccgccaucgaccagaucaacgggaagcugaaccgccucaucggcaagaccaacgagaaguuccaccagaucgagaaggaguucagcgagguggagggccggauccaggaccuggagaaguacguggaggacaccaagaucgaccugugguccuacaacgccgagcuccuggucgcccuggagaaccagcacacgaucgaccucaccgacagcgagaugaacaagcuguucgagaagaccaagaagcagcugcgcgagaacgcggaggacauggggaacggcugcuucaagaucuaccacaagugcgacaacgccugcaucggguccauccgcaacggcaccuacgaccacgacguguaccgggacgaggcccucaacaaccgcuuccagaucaaggggguggagcugaaguccggcuacaaggacuggauccuguggaucuccuucgccaucagcugcuuccuccugugcgucgcccugcucggcuucaucaugugggcgugccagaaggggaacauccggugcaacaucugcaucuga

SEQ ID NO: 69385 - RNA, 1701 nt, Artificial Sequence
  derived and/or modified CDS sequence (opt1) from hemagglutinin__InfluenzaA__ADK94520
augaagaccaucaucgcccugagcuacauccucugccugguguucgcccagaagcugcccggcaacgacaacuccaccgcgacgcucugccuggggcaccacgccgucccgaacggcaccaucgugaagaccaucaccaacgaccagaucgaggugacgaacgccaccgagcugguccagagcuccagcaccggggagaucugcgacagcccccaccagauccucgacggcgagaacugcacccugaucgacgcccugcucggggacccccagugcgacggcuuccagaacaagaagugggaccuguucguggagcgcagcaaggccuacuccaacugcuaccccuacgacgugccggacuacgcgagccugcggucccucaucgccagcuccggcacgcuggaguucaacaacgagagcuucaacuggaccggggucacccagaacggcaccuccagcgccugcauccgccgguccaacaacagcuucuucucccgccugaacuggcucacgcaccuccgguucaaguaccccgcccugaacgugaccaugcccaacaacgagcaguucgacaagcuguacaucuggggcgugcaccaccccgggaccgacaacgaccagaucuuccuguacgcgcaggccagcgggcgcaucaccgucuccacgaagcggagccagcagaccgugaucccgaacaucggcagccgcccccgggugcgcaacauccccucccggaucagcaucuacuggaccaucgucaagcccggcgacauccugcucaucaacuccaccgggaaccugaucgccccgcgcggcuacuucaagauccggagcgggaaguccagcaucaugcgcuccgacgcccccaucggcaagugcaacagcgagugcaucacgcccaacggcuccauccccaacgacaagccguuccagaacgugaaccggaucaccuacggggccugcccccgcuacgugaagcagaacacccugaagcucgcgaccggcaugcggaacguccccgagaagcagacgcgcgggaucuucggcgccaucgccggguucaucgagaacggcugggagggcaugguggacgggugguacggcuuccggcaccagaacagcgaggggcgcggccaggccgccgaccugaaguccacccaggcggccaucgaccagaucaacgggaagcugaaccggcucaucggcaagaccaacgagaaguuccaccagaucgagaaggaguucagcgagguggagggccgcauccaggaccuggagaaguacgucgaggacaccaagaucgaccugugguccuacaacgccgagcuccugguggcccuggagaaccagcacacgaucgaccucaccgacagcgagaugaacaagcuguucgagaagaccaagaagcagcugcgcgagaacgccgaggacauggggaacggcugcuucaagaucuaccacaagugcgacaacgcgugcaucggguccauccggaacggcaccuacgaccacgacguguaccgcgacgaggcccucaacaaccgguuccagaucaagggggucgagcugaaguccggcuacaaggacuggauccuguggaucuccuucgccaucagcugcuuccuccugugcguggcccugcucggcuucaucaugugggccugccagaaggggaacaucaagugcaacaucugcaucuga

SEQ ID NO: 69386 - RNA, 1701 nt, Artificial Sequence; identical to SEQ ID NO: 67637
  derived and/or modified CDS sequence (opt1) from hemagglutinin__InfluenzaA__ADK94531

SEQ ID NO: 69387 - RNA, 1701 nt, Artificial Sequence; identical to SEQ ID NO: 66458
  derived and/or modified CDS sequence (opt1) from hemagglutinin__InfluenzaA__ADK94542

SEQ ID NO: 69388 - RNA, 1701 nt, Artificial Sequence
  derived and/or modified CDS sequence (opt1) from hemagglutinin__InfluenzaA__ADK94553
augaagaccaucaucgcccugagcuacauccucugccugguguucgcccagaagcugcccggcaacgacaacuccaccgcgacgcucugccuggggcaccacgccgucccgaacggcaccaucgugaagaccaucaccaacgaccagaucgaggugacgaacgccaccgagcugguccagagcuccagcaccggggagaucugcgacagcccccaccagauccucgacggcaagaacugcacccugaucgacgcccugcucggggacccccagugcgacggcuuccagaacaagaagugggaccuguucguggagcgcagcaaggccuacuccaacugcuaccccuacgacgugccggacuacgcgagccugcggucccucgucgccagcuccggcacgcuggaguucaacaacgagagcuucaacuggaccggggugacccagaacggcaccuccagcgccugcauccgccgguccaagaacagcuucuucucccgccugaacuggcucacgcaccugaacuucaaguaccccgcccugaacgugaccaugcccaacaacgagcaguucgacaagcucuacaucuggggcguccaccaccccgggaccgacaaggaccagaucuuccuguacgcgcaggccagcgggcggaucaccguguccacgaagcgcagccagcagaccgugaucccgaacaucggcagccggccccgcguccggaacauccccucccgcaucagcaucuacuggaccaucgugaagcccggcgacauccugcucaucaacuccaccgggaaccugaucgccccgcggggcuacuucaagauccgcagcgggaaguccagcaucaugcgguccgacgcccccaucggcaagugcaacagcgagugcaucacgcccaacggcuccauccccaacgacaagccguuccagaacgugaaccgcaucaccuacggggccugcccccgguacgucaagcagagcacccugaagcucgcgaccggcaugcgcaacgugcccgagaagcagacgcgggggaucuucggcgccaucgccggguucaucgagaacggcugggagggcaugguggacgggugguacggcuuccgccaccagaacuccgaggggcggggccaggccgccgaccugaaguccacccaggcggccaucgaccagaucaacgggaagcugaaccgccucaucggcaagaccaacgagaaguuccaccagaucgagaaggaguucuccgaggucgagggccggauccaggaccuggagaaguacguggaggacaccaagaucgaccuguggagcuacaacgccgagcuccugguggcccuggagaaccagcacacgaucgaccucaccgacuccgagaugaacaagcuguucgagaagaccaagaagcagcugcgcgagaacgccgaggacauggggaacggcugcuucaagaucuaccacaagugcaacaacgcgugcaucgggagcauccgcaacggcaccuacgaccacgacgucuaccgggacgaggcccucaacaaccgcuuccagaucaaggggguggagcugaaguccggcuacaaggacuggauccuguggaucagcuucgccaucuccugcuuccuccugugcguggcccugcucggcuucaucaugugggccugccagaaggggaacauccggugcaacaucugcaucuga

SEQ ID NO: 69389 - RNA, 1701 nt, Artificial Sequence; identical to SEQ ID NO: 67637
  derived and/or modified CDS sequence (opt1) from hemagglutinin__InfluenzaA__ADK94564

SEQ ID NO: 69390 - RNA, 1701 nt, Artificial Sequence
  derived and/or modified CDS sequence (opt1) from hemagglutinin__InfluenzaA__ADK98501
augaaggccauccuggugguccuccuguacaccuucgccaccgcgaacgccgacacgcugugcaucggcuaccacgccaacaacagcaccgacaccguggacaccgugcucgagaagaacgucacggugacccacuccgugaaccugcuggaggacaagcacaacgggaagcucugcaagcugcgcggcgucgcgccccugcaccucgggaagugcaacaucgccggcuggauccuggggaacccggagugcgagagccuguccaccgccagcuccuggagcuacaucguggagaccuccagcuccggcaacggcacgugcuaccccggggacuucaucgacuacgaggagcuccgggagcagcugagcuccgugagcuccuucgagcgcuucgagaucuuccccaagaccagcuccuggcccaaccacgacagcaacaagggcgucaccgccgccugcccgcacgccggggcgaaguccuucuacaagaaccugaucuggcucgugaagaagggcaacagcuaccccaagcuguccaagagcuacaucaacgacaaggggaaggaggugcugguccucuggggcauccaccaccccagcaccuccgccgaccagcagagccuguaccagaacgccgacgccuacguguucgugggcacgucccgguacagcaagaaguucaagcccgagaucgccauccgcccgaagguccgggaccaggaggggcgcaugaacuacuacuggacccugguggagcccggcgacaagaucaccuucgagaccacggggaaccucguggucccccgguacgcguucgccauggagcgcaacgccggcuccggcaucaucaucagcgacacccccgugcacgacugcaacacgaccugccagaccccgaagggggccaucaacaccucccugcccuuccagaacauccaccccaucaccaucggcaagugccccaaguacgucaagagcaccaagcugcggcucgccacggggcugcgcaacgugccguccauccagagccggggccuguucggggcgaucgccggcuucaucgagggcggguggaccggcaugguggacgggugguacggcuaccaccaccagaacgagcagggguccggcuacgccgccgaccucaagagcacccagaacgccaucgacgagaucaccaacaaggugaacuccgucaucgagaagaugaacacgcaguucaccgcggugggcaaggaguucaaccaccuggagaagcgcaucgagaaccugaacaagaaggucgacgacggguuccucgacaucuggaccuacaacgccgagcugcuggugcuccuggagaacgagcggacccuggacuaccacgacagcaacgugaagaaccucuacgagaagguccgcucccagcugaagaacaacgccaaggagaucggcaacgggugcuucgaguucuaccacaagugcgacaacacgugcauggagagcgugaagaacggcaccuacgacuaccccaaguacuccgaggaggccaagcugaaccgggaggagaucgacggggugaagcucgagagcacccgcaucuaccagauccuggccaucuacuccaccgucgcgagcagccuggugcucguggucucccugggcgccaucagcuucuggaugugcuccaacggcagccugcagugccggaucugcaucuga

SEQ ID NO: 69391 - RNA, 1701 nt, Artificial Sequence
  derived and/or modified CDS sequence (opt1) from hemagglutinin__InfluenzaA__ADK98503
augaaggccauccuggugguccuccuguacaccuucgccaccgcgaacgccgacacgcugugcaucggcuaccacgccaacaacagcaccgacaccguggacaccgugcucgagaagaacgucacggugacccacuccgugaaccugcuggaggacaagcacaacgggaagcucugcaagcugcgcggcgucgcgccccugcaccucgggaagugcaacaucgccggcuggauccuggggaacccggagugcgagagccuguccaccgcgagcuccuggagcuacaucguggagaccuccagcuccgacaacggcacgugcuaccccggcgacuucaucgacuacgaggagcuccgggagcagcugagcuccgugagcuccuucgagcgcuucgagaucuuccccaagaccagcuccuggcccaaccacgacccgaacaagggggucaccgccgccugcccccacgccggcgccaagagcuucuacaagaaccugaucuggcucgugaagaaggggaacuccuaccccaagcugagcaaguccuacaucaacgacaagggcaaggaggugcugguccucugggggauccaccaccccagcaccagcgccgaccagcagucccuguaccagaacguggacgccuacguguucgucggcacgagccgguacuccaagaaguucaagccggagaucgccauccgccccaaggugcgggaccaggagggccgcaugaacuacuacuggacccugguggagcccggggacaagaucaccuucgaggccaccggcaaccucgucgugccccgguacgcguucgccauggagcgcaacgccgggagcggcaucaucaucuccgacacgccggugcacgacugcaacacgaccugccagacccccaagggcgccaucaacaccagccugcccuuccagaacauccaccccaucaccaucgggaagugcccgaaguacgucaaguccaccaagcugcggcucgccaccggccugcgcaacgugcccagcauccagucccgggggcuguucggcgcgaucgccggguucaucgagggcggcuggacggggaugguggacggcugguacggguaccaccaccagaacgagcagggcagcggguacgccgccgaccucaaguccacccagaacgccaucgacgagaucaccaacaaggucaacagcgugaucgagaagaugaacacccaguucacggcggucggcaaggaguucaaccaccuggagaagcgcaucgagaaccugaacaagaagguggacgacggcuuccucgacaucuggaccuacaacgccgagcugcuggugcuccuggagaacgagcggacccuggacuaccacgacuccaacgucaagaaccucuacgagaaggugcgcagccagcugaagaacaacgccaaggagaucgggaacggcugcuucgaguucuaccacaagugcgacaacacgugcauggaguccgugaagaacgggaccuacgacuaccccaaguacagcgaggaggccaagcugaaccgggaggagaucgacggcgucaagcucgaguccacccgcaucuaccagauccuggccaucuacagcaccguggcguccagccuggugcucgucgugagccugggggccaucuccuucuggaugugcagcaacggcucccugcagugccggaucugcaucuga

SEQ ID NO: 69392 - RNA, 1701 nt, Artificial Sequence; identical to SEQ ID NO: 69375
  derived and/or modified CDS sequence (opt1) from hemagglutinin__InfluenzaA__ADK98623

SEQ ID NO: 69393 - RNA, 1701 nt, Artificial Sequence; identical to SEQ ID NO: 66458
  derived and/or modified CDS sequence (opt1) from hemagglutinin__InfluenzaA__ADK98634

SEQ ID NO: 69394 - RNA, 1701 nt, Artificial Sequence; identical to SEQ ID NO: 66458
  derived and/or modified CDS sequence (opt1) from hemagglutinin__InfluenzaA__ADK98645

SEQ ID NO: 69395 - RNA, 1701 nt, Artificial Sequence; identical to SEQ ID NO: 69321
  derived and/or modified CDS sequence (opt1) from hemagglutinin__InfluenzaA__ADK98656

SEQ ID NO: 69396 - RNA, 1701 nt, Artificial Sequence; identical to SEQ ID NO: 69388
  derived and/or modified CDS sequence (opt1) from hemagglutinin__InfluenzaA__ADK98667

SEQ ID NO: 69397 - RNA, 1701 nt, Artificial Sequence
  derived and/or modified CDS sequence (opt1) from hemagglutinin__InfluenzaA__ADK98678
augaagaccaucaucgcccugagcuacauccucugccugguguucgcccagaagcugcccggcaacgacaacuccaccgcgacgcucugccuggggcaccacgccgucccgaacggcaccaucgugaagaccaucaccaacgaccagaucgaggugacgaacgccaccgagcugguccagagcuccagcaccggggagaucugcgacagcccccaccagauccucgacggcgagaacugcacccugaucgacgcccugcucggggacccccagugcgacggcuuccagaacaagaagugggaccuguucguggagcgcagcaaggccuacuccaacugcuaccccuacgacgugccggacuacgcgagccugcggucccucgucgccagcuccggcacgcuggaguucaacaacgagagcuucaacuggaccggggugacccagaacggcaccuccagcgccugcauccgccgguccaacaacagcuucuucucccgccugaacuggcucacgcaccugaaguucaaguaccccgcccugaacgugaccaugcccaacaacgagcaguucgacaagcucuacaucuggggcguccaccaccccgggaccgacaacgaccagaucuuccuguacgcgcaggccagcgggcggaucaccguguccacgaagcgcagccagcagaccgugaucccgaacaucggcagccggccccgcguccggaacauccccucccgcaucagcaucuacuggaccaucgugaagcccggcgacauccugcucaucaacuccaccgggaaccugaucgccccgcggggcuacuucaagauccgcagcgggaaguccagcaucaugcgguccgacgcccccaucggcaagugcaacagcgagugcaucacgcagaacggcuccauccccaacgacaagcccuuccagaacgugaaccgcaucaccuacggggccugcccgcgguacgucaagcagaacacccugaagcucgcgaccggcaugcgcaacgugcccgagaagcagacgcgggggaucuucggcgccaucgccggguucaucgagaacggcugggagggcaugguggacgggugguacggcuuccgccaccagaacagcgaggggcggggccaggccgccgaccugaaguccacccaggcggccaucgaccagaucaacgggaagcugaaccgccucaucggcaagaccaacgagaaguuccaccagaucgagaaggaguucagcgaggucgagggccggauccaggaccuggagaaguacguggaggacaccaagaucgaccugugguccuacaacgccgagcuccugguggcccuggagaaccagcacacgaucgaccucaccgacagcgagaugaacaagcuguucgagaagaccaagaagcagcugcgcgagaacgccgaggacauggggaacggcugcuucaagaucuaccacaagugcgacaacgcgugcaucggguccauccgcaacggcaccuacgaccacgacgucuaccgggacgaggcccucaacaaccgcuuccagaucaaggggguggagcugaaguccggcuacaaggacuggauccuguggaucuccuucgccaucagcugcuuccuccugugcguggcccugcucggcuucaucaugugggccugccagaaggggaacauccggugcaacaucugcaucuga

SEQ ID NO: 69398 - RNA, 1701 nt, Artificial Sequence; identical to SEQ ID NO: 66458
  derived and/or modified CDS sequence (opt1) from hemagglutinin__InfluenzaA__ADK98689

SEQ ID NO: 69399 - RNA, 1701 nt, Artificial Sequence; identical to SEQ ID NO: 66458
  derived and/or modified CDS sequence (opt1) from hemagglutinin__InfluenzaA__ADK98700

SEQ ID NO: 69400 - RNA, 1701 nt, Artificial Sequence; identical to SEQ ID NO: 66458
  derived and/or modified CDS sequence (opt1) from hemagglutinin__InfluenzaA__ADK98711

SEQ ID NO: 69401 - RNA, 1701 nt, Artificial Sequence
  derived and/or modified CDS sequence (opt1) from hemagglutinin__InfluenzaA__ADK98722
augaagaccaucaucgcccugagcuacauccucugccugguguucgcccagaagcugcccggcaacgacaacuccaccgcgacgcucugccuggggcaccacgccgucccgaacggcaccaucgugaagaccaucaccaacgaccagaucgaggugacgaacgccaccgagcugguccagagcuccagcaccggggagaucugcgacagcccccaccagauccucgacggcgagaacugcacccugaucgacgcccugcucggggacccccagugcgacggcuuccagaacaagaagugggaccuguucguggagcgcagcaaggccuacuccaacugcuaccccuacgacgugccggacuacgcgagccugcggucccucgucgccagcuccggcacgcuggaguucaacaacgagagcuucaacuggaccggggugacccagaacggcaccuccagcgccugcauccgccgguccaacaacagcuucuucucccgccugaacuggcucacgcaccugaaguucaaguaccccgcccugaacgugaccaugcccaacaacgagcaguucgacaagcucuacaucuggggcguccaccaccccgggaccgacaacgaccagaucuuccuguacgcgcaggccagcgggcggaucaccguguccacgaagggcagccagcagaccgugaucccgaacaucggcagccgcccccggguccgcaacauccccucccggaucagcaucuacuggaccaucgugaagcccggggacauccugcucaucaacuccaccggcaaccugaucgccccgcgcggguacuucaagauccggagcggcaaguccagcaucaugcgcuccgacgcccccaucggcaagugcaacagcgagugcaucacgcccaacggguccauccccaacgacaagccguuccagaacgugaaccggaucaccuacggcgccugcccccgcuacgucaagcagaacacccugaagcucgcgaccgggaugcggaacgugcccgagaagcagacgcgcggcaucuucggggccaucgccggcuucaucgagaacggcugggaggggaugguggacggcugguacggguuccggcaccagaacagcgagggccgcgggcaggccgccgaccugaaguccacccaggcggccaucgaccagaucaacggcaagcugaaccggcucaucggcaagaccaacgagaaguuccaccagaucgagaaggaguucagcgaggucgaggggcgcauccaggaccuggagaaguacguggaggacaccaagaucgaccugugguccuacaacgccgagcuccugguggcccuggagaaccagcacacgaucgaccucaccgacagcgagaugaacaagcuguucgagaagaccaagaagcagcugcgggagaacgccgaggacaugggcaacgggugcuucaagaucuaccacaagugcgacaacgcgugcaucggcuccauccgcaacgggaccuacgaccacgacgucuaccgcgacgaggcccucaacaaccgguuccagaucaagggcguggagcugaaguccggcuacaaggacuggauccuguggaucuccuucgccaucagcugcuuccuccugugcguggcccugcucggguucaucaugugggccugccagaagggcaacauccgcugcaacaucugcaucuga

SEQ ID NO: 69402 - RNA, 1701 nt, Artificial Sequence; identical to SEQ ID NO: 69375
  derived and/or modified CDS sequence (opt1) from hemagglutinin__InfluenzaA__ADK98733

SEQ ID NO: 69403 - RNA, 1701 nt, Artificial Sequence; identical to SEQ ID NO: 66458
  derived and/or modified CDS sequence (opt1) from hemagglutinin__InfluenzaA__ADK98744

SEQ ID NO: 69404 - RNA, 1701 nt, Artificial Sequence; identical to SEQ ID NO: 66458
  derived and/or modified CDS sequence (opt1) from hemagglutinin__InfluenzaA__ADK98777

SEQ ID NO: 69405 - RNA, 1701 nt, Artificial Sequence; identical to SEQ ID NO: 66458
  derived and/or modified CDS sequence (opt1) from hemagglutinin__InfluenzaA__ADK98788

SEQ ID NO: 69406 - RNA, 1701 nt, Artificial Sequence; identical to SEQ ID NO: 67637
  derived and/or modified CDS sequence (opt1) from hemagglutinin__InfluenzaA__ADK98799

SEQ ID NO: 69407 - RNA, 1701 nt, Artificial Sequence
  derived and/or modified CDS sequence (opt1) from hemagglutinin__InfluenzaA__ADK98810
augaagaccaucaucgcccugagcuacauccucugccugguguucgcccagaagcugcccggcaacgacaacuccaccgcgacgcucugccuggggcaccacgccgucccgaacggcaccaucgugaagaccaucaccaacgaccagaucgaggugacgaacgccaccgagcugguccagagcuccagcaccggggagaucugcgacagcccccaccagauccucgacggcgagaacugcacccugaucgacgcccugcucggggacccccagugcgacggcuuccagaacaagaagugggaccuguucguggagcgcagcaaggccuacuccaacugcuaccccuacgacgugccggacuacgcgagccugcggucccucgucgccagcuccggcacgcuggaguucaacaacgagagcuucaacuggaccggggugacccagaacggcaccuccagcgccugcauccgccgguccaacaacagcuucuucucccgccugaacuggcucacgcaccugaaguucaaguaccccgcccugaacgugaccaugcccaacaacgagcaguucgacaagcucuacaucuggggcguccaccaccccgggaccgacaacgaccagaccuuccuguacgcgcaggccagcgggcggaucacgguguccaccaagcgcagccagcagaccgugaucccgaacaucggcagccggccccgcguccggaacauccccucccgcaucagcaucuacuggaccaucgugaagcccggcgacauccugcucaucaacuccacggggaaccugaucgccccgcggggcuacuucaagauccgcagcgggaaguccagcaucaugcgguccgacgcccccaucggcaagugcaacagcgagugcaucacccccaacggcuccauccccaacgacaagccguuccagaacgugaaccgcaucaccuacggggccugcccccgguacgucaagcagaacacccugaagcucgcgacgggcaugcgcaacgugcccgagaagcagacccgggggaucuucggcgccaucgccggguucaucgagaacggcugggagggcaugguggacgggugguacggcuuccgccaccagaacagcgaggggcggggccaggccgccgaccugaaguccacccaggcggccaucgaccagaucaacgggaagcugaaccgccucaucggcaagaccaacgagaaguuccaccagaucgagaaggaguucagcgaggucgagggccggauccaggaccuggagaaguacguggaggacacgaagaucgaccugugguccuacaacgccgagcuccugguggcccuggagaaccagcacaccaucgaccucaccgacagcgagaugaacaagcuguucgagaagaccaagaagcagcugcgcgagaacgccgaggacauggggaacggcugcuucaagaucuaccacaagugcgacaacgcgugcaucggguccauccgcaacggcacguacgaccacaacgucuaccgggacgaggcccucaacaaccgcuuccagaucaaggagguggagcugaaguccggguacaaggacuggauccuguggaucuccuucgccaucagcugcuuccuccugugcguggcccugcucggcuucaucaugugggccugccagaagggcaacauccggugcaacaucugcaucuga

SEQ ID NO: 69408 - RNA, 1701 nt, Artificial Sequence
  derived and/or modified CDS sequence (opt1) from hemagglutinin__InfluenzaA__ADK98821
augaagaccaucaucgcccugagcuacauccucugccugguguucgcccagaagcugcccggcaacgacaacuccaccgcgacgcucugccuggggcaccacgccgucccgaacggcaccaucgugaagaccaucaccaacgaccagaucgaggugacgaacgccaccgagcugguccagagcuccagcaccggggagaucugcgacagcccccaccagauccucgacggcaagaacugcacccugaucgacgcccugcucggggacccccagugcgacggcuuccagaacaagaagugggaccuguucguggagcgcagcaaggccuacuccaacugcuaccccuacgacgugccggacuacgcgagccugcggucccucgucgccagcuccggcacgcuggaguucaacaacgagagcuucaacuggaccggggugacccagaacggcaccuccagcgccugcauccgccgguccaagaacagcuucuucucccgccugaacuggcucacgcaccugaacuucaaguaccccgcccugaacgugaccaugcccaacaacgagcaguucgacaagcucuacaucuggggcguccaccaccccgggaccgacaaggaccagaucuuccuguacgcgcaggccagcgggcggaucaccguguccacgaagcgcagccagcagaccgccaucccgaacaucggcagccggccccgcgugcggaacauccccucccgcaucagcaucuacuggaccaucgucaagcccggcgacauccugcucaucaacuccaccgggaaccugaucgccccgcggggcuacuucaagauccgcagcgggaaguccagcaucaugcgguccgacgcccccaucggcaagugcaacagcgagugcaucacgcccaacggcuccauccccaacgacaagccguuccagaacgugaaccgcaucaccuacggggcgugcccccgguacgugaagcagaacacccugaagcucgccaccggcaugcgcaacguccccgagaagcagacgcgggggaucuucggcgccaucgccggguucaucgagaacggcugggagggcaugguggacgggugguacggcuuccgccaccagaacagcgaggggcggggccaggccgcggaccugaaguccacccaggccgccaucgaccagaucaacgggaagcugaaccgccucaucggcaagaccaacgagaaguuccaccagaucgagaaggaguucagcgagguggagggccggauccaggaccuggagaaguacgucgaggacaccaagaucgaccugugguccuacaacgccgagcuccugguggcccuggagaaccagcacacgaucgaccucaccgacagcgagaugaacaagcuguucgagaagacccgcaagcagcugcgcgagaacgcggaggacauggggaacggcugcuucaagaucuaccacaagugcgacaacgccugcaucggguccauccggaacggcaccuacgaccacgacguguaccgcgacgaggcccucaacaaccgguuccagaucaagggggucgagcugaaguccggcuacaaggacuggauccuguggaucuccuucgccaucagcugcuuccuccugugcguggcccugcucggcuucaucaugugggcgugccagaaggggaacauccgcugcaacaucugcaucuga

SEQ ID NO: 69409 - RNA, 1701 nt, Artificial Sequence; identical to SEQ ID NO: 66458
  derived and/or modified CDS sequence (opt1) from hemagglutinin__InfluenzaA__ADK98832

SEQ ID NO: 69410 - RNA, 1701 nt, Artificial Sequence; identical to SEQ ID NO: 69388
  derived and/or modified CDS sequence (opt1) from hemagglutinin__InfluenzaA__ADK98843

SEQ ID NO: 69411 - RNA, 1701 nt, Artificial Sequence
  derived and/or modified CDS sequence (opt1) from hemagglutinin__InfluenzaA__ADK98854
augaagaccaucaucgcccugagcuacauccucugccugguguucacccagaagcugcccggcaacgacaacuccacggccacccucugccuggggcaccacgcggucccgaacggcaccaucgugaagaccaucacgaacgaccagaucgaggugaccaacgccaccgagcugguccagagcuccagcaccggggagaucugcgacagcccccaccagauccucgacggcgagaacugcacgcugaucgacgcccugcucggggacccccagugcgacggcuuccagaacaagaagugggaccuguucguggagcgcuccaaggccuacuccaacugcuaccccuacgacgugccggacuacgccagccugcggucccucgucgcgagcuccggcacccuggaguucaacaacgagagcuucaacuggaccggggugacccagaacggcacguccagcgccugcauccgccgguccaacaacagcuucuucucccgccugaacuggcucacccaccugaaguucaaguaccccgcccugaacgugaccaugcccaacaacgagcaguucgacaagcucuacaucuggggcguccaccaccccgggaccgacaacgaccagaucuuccuguacgcccaggcgagcgggcggaucacgguguccaccaagcgcagccagcagaccgugaucccgaacaucggcagccggccccgcguccggaacauccccucccgcaucagcaucuacuggaccaucgugaagcccggcgacauccugcucaucaacuccacggggaaccugaucgccccgcggggcuacuucaagauccgcagcgggaaguccagcaucaugcgguccgacgcccccaucggcaagugcaacagcgagugcaucacccccaacggcuccauccccaacgacaagccguuccagaacgugaaccgcaucaccuacggggccugcccccgguacgucaagcagaacacccugaagcucgccacgggcaugcgcaacgugcccgagaagcagacccgggggaucuucggcgcgaucgccggguucaucgagaacggcugggagggcaugguggacgggugguacggcuuccgccaccagaacagcgaggggcggggccaggccgccgaccugaaguccacccaggccgcgaucgaccagaucaacgggaagcugaaccgccucaucggcaagaccaacgagaaguuccaccagaucgagaaggaguucagcgaggucgagggccggauccaggaccuggagaaguacguggaggacacgaagaucgaccugugguccuacaacgccgagcuccugguggcccuggagaaccagcacaccaucgaccucaccgacagcgagaugaacaagcuguucgagaagaccaagaagcagcugcgcgagaacgccgaggacauggggaacggcugcuucaagaucuaccacaagugcgacaacgccugcaucggguccauccgcaacggcacguacgaccacgacgucuaccgggacgaggcgcucaacaaccgcuuccagaucaaggggguggagcugaagcccggcuacaaggacuggauccuguggaucagcuucgccaucuccugcuuccuccugugcguggcccugcucggcuucaucaugugggccugccagaaggggaacauccggugcaacaucugcaucuga

SEQ ID NO: 69412 - RNA, 1701 nt, Artificial Sequence
  derived and/or modified CDS sequence (opt1) from hemagglutinin__InfluenzaA__ADK98865
augaagaccaucaucgcccugagcuacauccucugccugguguucgcccagaagcugcccggcuccgacaacagcaccgcgacgcucugccuggggcaccacgccgucccgaacggcaccaucgugaagaccaucaccaacgaccagaucgaggugacgaacgccaccgagcugguccaguccagcuccaccggggagaucugcgacagcccccaccagauccucgacggcgagaacugcacccugaucgacgcccugcucggggacccccagugcgacgacuuccagaacaagaagugggaccuguucguggagcgcuccaaggccuacagcaacugcuaccccuacgacgugccggacuacgcgucccugcggagccucgucgccuccagcggcacgcuggaguucaacaacgaguccuucaacuggaccggcgugacccagaacgggaccagcuccgccugcauccgccggagcuccaacagcuucuucucccgccugaacuggcucacgcaccuccgguucaaguaccccgcccugaacgugaccaugcccaacaacgagcaguucgacaagcuguacaucuggggcguccaccaccccgggaccgacaacgaccagaucuuccuguacgcgcaggccagcggccgcaucaccgugagcacgaagcggucccagcagaccgugaucccgaacaucgggagccgcccccggguccgcaacauccccucccggaucagcaucuacuggaccaucgugaagcccggcgacauccugcucaucaacuccaccggcaaccugaucgccccgcgcggguacuucaagauccggagcggcaaguccagcaucaugcgcuccgacgcccccaucgggaagugcaacagcgagugcaucacgcccaacggcuccauccccaacgacaagccguuccagaacgugaaccggaucaccuacggcgccugcccccgcuacgucaagcagaacacccugaagcucgcgaccgggaugcggaacgugcccgagaagcagacgcgcggcaucuucggggccaucgccggcuucaucgagaacgggugggagggcaugguggacggcugguacggguuccggcaccagaacagcgagggccgcgggcaggccgccgaccugaaguccacccaggcggccaucgaccagaucaacggcaagcugaaccggcucaucgggaagaccaacgagaaguuccaccagaucgagaaggaguucagcgaggucgagggccgcauccaggaccuggagaaguacguggaggacaccaagaucgaccugugguccuacaacgccgagcuccugguggcccuggagaaccagcacacgaucgaccucaccgacagcgagaugaacaagcuguucgagaagaccaagaagcagcugcgcgagaacgccgaggacaugggcaacgggugcuucaagaucuaccacaagugcgacaacgcgugcaucggcuccauccggaacgggaccuacgaccacgacgucuaccgcgacgaggcccucaacaaccgguuccagaucaagggcguggagcucaagagcggguacaaggacuggauccuguggaucuccuucgccaucagcugcuuccugcugugcguggcccugcucggcuucaucaugugggccugccagaagggcaacauccgcugcaacaucugcaucuga

SEQ ID NO: 69413 - RNA, 1701 nt, Artificial Sequence
  derived and/or modified CDS sequence (opt1) from hemagglutinin__InfluenzaA__ADK98876
augaagaccaucaucgcccugagcuacauccucugccugguguucgcccagaagcugcccggcaacgacaacuccaccgcgacgcucugccuggggcaccacgccgucccgaacggcaccaucgugaagaccaucaccaacgaccagaucgaggugacgaacgccaccgagcugguccagaacagcuccaccggggagaucugcgacagcccccaccagauccucgacggcaagaacugcacccugaucgacgcccugcucggggacccccagugcgacggcuuccagaacaagaagugggaccuguucguggagcgcuccaaggccuacagcaacugcuaccccuacgacgugccggacuacgcgucccugcggagccucgucgccuccagcggcacgcuggaguucaacaacgaguccuucaacuggaccggggugacccagaacggcaccagcuccgccugcauccgccggagcaagaacuccuucuucagccgccugaacuggcucacgcaccugaacuucaaguaccccgcccugaacgugaccaugcccaacaacgggcaguucgacaagcucuacaucuggggcguccaccaccccgggaccgacaaggaccagaucuuccuguacgcgcaggccuccggccggaucaccgugagcacgaagcgcucccagcagaccgugaucccgaacaucggcagccggccccgcguccggaacauccccagccgcaucuccaucuacuggaccaucgugaagcccggggacauccugcucaucaacagcaccggcaaccugaucgccccgcggggguacuucaagauccgcuccggcaagagcuccaucaugcggagcgacgcccccaucggcaagugcaacuccgagugcaucacgcccaacgggagcauccccaacgacaagccguuccagaacgugaaccgcaucaccuacggcgccugcccccgguacgucaagcagaacacccugaagcucgcgaccgggaugcgcaacgugcccgagaagcagacgcggggcaucuucggggccaucgccggcuucaucgagaacggcugggaggggaugguggacggcugguacggguuccgccaccagaacuccgagggccgggggcaggccgccgaccucaagagcacccaggcggccaucgaccagaucaacggcaagcugaaccgccugaucggcaagaccaacgagaaguuccaccagaucgagaaggaguucuccgaggucgaggggcggauccaggaccuggagaaguacguggaggacaccaagaucgaccuguggagcuacaacgccgagcuccugguggcccuggagaaccagcacacgaucgaccucaccgacuccgagaugaacaagcuguucgagaagaccaagaagcagcugcgcgagaacgccgaggacaugggcaacgggugcuucaagaucuaccacaagugcgacaacgcgugcaucggcagcauccgcaacgggaccuacgaccacgacgucuaccgggacgaggcccucaacaaccgcuuccagaucaagggcguggagcugaaguccggcuacaaggacuggauccuguggaucagcuucgccaucuccugcuuccuccugugcguggcccugcucggguucaucaugugggccugccagaagggcaacauccggugcaacaucugcaucuga

SEQ ID NO: 69414 - RNA, 1701 nt, Artificial Sequence; identical to SEQ ID NO: 69388
  derived and/or modified CDS sequence (opt1) from hemagglutinin__InfluenzaA__ADK98887

SEQ ID NO: 69415 - RNA, 1701 nt, Artificial Sequence; identical to SEQ ID NO: 66458
  derived and/or modified CDS sequence (opt1) from hemagglutinin__InfluenzaA__ADK98898

SEQ ID NO: 69416 - RNA, 1701 nt, Artificial Sequence
  derived and/or modified CDS sequence (opt1) from hemagglutinin__InfluenzaA__ADK98909
augaagaccaucaucgcccugagcuacauccucugccugguguucgcccagaagcugcccggcaacgacaacuccaccgcgacgcucugccuggggcaccacgccgucccgaacggcaccaucgugaagaccaucaccaacgaccagaucgaggugacgaacgccaccgagcugguccagaucagcuccaccggggagaucugcgacagcccccaccagauccucgacggcgagaacugcacccugaucgacgcccugcucggggacccccagugcgacggcuuccagaacaagaagugggaccuguucguggagcgcuccaaggccuacagcaacugcuaccccuacgacgugccggacuacgcgucccugcggagccucgucgccuccagcggcacgcuggaguucaacaacgaguccuucaacuggaccggggugacccagaacggcaccagcuccgccugcauccgccggagcaacaacuccuucuucagccgccugaacuggcucacgcaccugaaguucaaguaccccgcccugaacgugaccaugcccaacaacgagcaguucgacaagcucuacaucuggggcguccaccaccccgggaccgacaacgaccagaucuuccuguacgcgcaggccuccgggcggaucaccgugagcacgaagcgcucccagcagaccgugaucccgaacaucggcagccggccccgcguccggaacauccccagccgcaucuccaucuacuggaccaucgugaagcccggcgacauccugcucaucaacagcaccgggaaccugaucgccccgcggggcuacuucaagauccgcuccggcaagagcuccaucaugcggagcgacgcccccaucgggaagugcaacuccgagugcaucacgcccaacggcagcauccccaacgacaagccguuccagaacgugaaccgcaucaccuacggggccugcccccgguacgucaagcagaacacccugaagcucgcgaccggcaugcgcaacgugcccgagaagcagacgcgggggaucuucggcgccaucgccggguucaucgagaacggcugggagggcaugguggacgggugguacggcuuccgccaccagaacuccgaggggcggggccaggccgccgaccucaagagcacccaggcggccaucgaccagaucaacgggaagcugaaccgccugaucggcaagaccaacgagaaguuccaccagaucgagaaggaguucuccgaggucgagggccggauccaggaccuggagaaguacguggaggacaccaagaucgaccuguggagcuacaacgccgagcuccugguggcccuggagaaccagcacacgaucgaccucaccgacuccgagaugaacaagcuguucgagaagaccaagaagcagcugcgcgagaacgccgaggacauggggaacggcugcuucaagaucuaccacaagugcgacaacgcgugcaucgggagcauccgcaacggcaccuacgaccacgacgucuaccgggacgaggcccucaacaaccgcuuccagaucaaggggguggagcugaaguccggcuacaaggacuggauccuguggaucagcuucgccaucuccugcuuccuccugugcguggcccugcucggcuucaucaugugggccugccagaaggggaacauccggugcaacaucugcaucuga

SEQ ID NO: 69417 - RNA, 1701 nt, Artificial Sequence
  derived and/or modified CDS sequence (opt1) from hemagglutinin__InfluenzaA__ADK98920
augaagaccaucaucgcccugagcuacauccucugccugguguucgcccagaagcugcccggcaacgacaacuccaccgcgacgcucugccuggggcaccacgccgucccgaacggcaccaucgugaagaccaucaccaacgaccagaucgaggugacgaacgccaccgagcugguccagagcuccagcaccggggagaucugcgacagcccccaccagauccucgacggcaagaacugcacccugaucgacgcccugcucggggacccccagugcgacggcuuccagaacaagaagugggaccuguucguggagcgcggcaaggccuacagcaacugcuaccccuacgacgugccggacuacgcgucccugcggagccucgucgccuccagcgggacgcuggaguucaacaacgaguccuucaacuggaccggcgugacccagaacgggaccagcuccgccugcauccgccggagcaagaacuccuucuucagccgccugaacuggcucacgcaccugaacuucaaguaccccgcccugaacgugaccaugcccaacaacgagcaguucgacaagcucuacaucuggggcguccaccaccccgggaccgacaaggaccagaucuuccuguacgcgcaggccuccggccggaucaccgugagcacgaagcgcucccagcagaccgugaucccgaacaucggcagccggccccgcguccggaacauccccagccgcaucuccaucuacuggaccaucgugaagcccggggacauccugcucaucaacagcaccggcaaccugaucgccccgcggggguacuucaagauccgcuccggcaagagcuccaucaugcggagcgacgcccccaucggcaagugcaacuccgagugcaucacgcccaacgggagcauccccaacgacaagccguuccagaacgugaaccgcaucaccuacggcgccugcccccgguacgucaagcaguccacccugaagcucgcgaccgggaugcgcaacgugcccgagaagcagacgcggggcaucuucggggccaucgccggcuucaucgagaacggcugggaggggaugguggacggcugguacggguuccgccaccagaacagcgagggccgggggcaggccgccgaccugaaguccacccaggcggccaucgaccagaucaacggcaagcugaaccgccucaucggcaagaccaacgagaaguuccaccagaucgagaaggaguucagcgaggucgaggggcggauccaggaccuggagaaguacguggaggacaccaagaucgaccugugguccuacaacgccgagcuccugguggcccuggagaaccagcacacgaucgaccucaccgacagcgagaugaacaagcuguucgagaagaccaagaagcagcugcgcgagaacgccgaggacaugggcaacgggugcuucaagaucuaccacaagugcgacaacgcgugcaucggcuccauccgcaacgggaccuacgaccacgacgucuaccgggacgaggcccucaacaaccgcuuccagaucaagggcguggagcugaaguccggcuacaaggacuggauccuguggaucuccuucgccaucagcugcuuccuccugugcguggcccugcucggguucaucaugugggccugccagaagggcaacauccggugcaacaucugcaucuga

SEQ ID NO: 69418 - RNA, 1701 nt, Artificial Sequence; identical to SEQ ID NO: 66458
  derived and/or modified CDS sequence (opt1) from hemagglutinin__InfluenzaA__ADK98931

SEQ ID NO: 69419 - RNA, 1701 nt, Artificial Sequence
  derived and/or modified CDS sequence (opt1) from hemagglutinin__InfluenzaA__ADK98942
augaagaccaucaucgcccugagcuacauccucugccugguguucgcccagaagcugcccggcaacgacaacuccaccgcgacgcucugccuggggcaccacgccgucccgaacggcaccaucgugaagaccaucaccaacgaccagaucgaggugacgaacgccaccgagcugguccagagcuccagcaccggggagaucugcgacagcccccaccagauccucgacggcgagaacugcacccugaucgacgcccugcucggggacccccagugcgacggcuuccagaacaagaagugggaccuguucguggagcgcagcaaggccuacuccaacugcuaccccuacgacgugccggacuacgcgagccugcggucccucgucgccagcuccggcacgcuggaguucaacaacgagagcuucaacuggaccggggugacccagaacggcaccuccagcgccugcauccgccgguccaacaacagcuucuucucccgccugaacuggcucacgcaccugaaguucaaguaccccgcccugaacgugaccaugcccaacaacgagcaguucgacaagcucuacaucuggggcguccaccaccccgggaccgacaacgaccagaucuuccuguacgcgcaggccagcgggcggaucaccguguccacgaagcgcagccagcagaccgugaucagcaacaucggcucccggccgcgcguccggaacauccccagccgcaucuccaucuacuggaccaucgugaagcccggcgacauccugcucaucaacagcaccgggaaccugaucgcgccccggggcuacuucaagauccgcuccgggaaguccuccaucaugcggagcgacgccccgaucggcaagugcaacuccgagugcaucacgcccaacggcagcauccccaacgacaagcccuuccagaacgugaaccgcaucaccuacggggccugcccgcgguacgucaagcagaacacccugaagcucgccaccggcaugcgcaacgugcccgagaagcagacgcgggggaucuucggcgccaucgccggguucaucgagaacggcugggagggcaugguggacgggugguacggcuuccgccaccagaacuccgaggggcggggccaggccgccgaccucaagagcacccaggcggccaucgaccagaucaacgggaagcugaaccgccugaucggcaagaccaacgagaaguuccaccagaucgagaaggaguucuccgaggucgagggccggauccaggaccuggagaaguacguggaggacaccaagaucgaccuguggagcuacaacgccgagcuccugguggcccuggagaaccagcacacgaucgaccucaccgacuccgagaugaacaagcuguucgagaagaccaagaagcagcugcgcgagaacgccgaggacauggggaacggcugcuucaagaucuaccacaagugcgacaacgcgugcaucgggagcauccgcaacggcaccuacgaccacaacgucuaccgggacgaggcccucaacaaccgcuuccagaucaaggggguggagcugaaguccggcuacaaggacuggauccuguggaucagcuucgccaucuccugcuuccuccugugcguggcccugcucggcuucaucaugugggccugccagaaggggaacauccggugcaacaucugcaucuga

SEQ ID NO: 69420 - RNA, 1701 nt, Artificial Sequence
  derived and/or modified CDS sequence (opt1) from hemagglutinin__InfluenzaA__ADK98953
augaagaccaucaucgcccugagcuacaugcucugccugguguucgcccagaagcugcccggcaacgacaacuccaccgcgacgcucugccuggggcaccacgccgucccgaacggcaccaucgugaagaccaucaccaacgaccagaucgaggugacgaacgccaccgagcugguccagagcuccagcaccggggagaucugcgacagcccccaccagauccucgacggcgagaacugcacccugaucgacgcccugcucggggacccccagugcgacggcuuccagaacaagaagugggaccuguucguggagcgcagcaaggccuacuccaacugcuaccccuacgacgugccggacuacgcgagccugcggucccucaucgccagcuccggcacgcuggaguucaacaacgagagcuucaacuggaccggggucacccagaacggcaccuccagcgccugcauccgccgguccaacaacagcuucuucucccgccugaacuggcucacgcaccugaaguucaaguaccccgcccugaacgugaccaugcccaacaacgagcaguucgacaagcucuacaucuggggcgugcaccaccccgggaccgacaacgaccagaucuuccuguacgcgcaggccagcgggcggaucaccgucuccacgaagcgcagccagcagaccgugaucccgaacaucggcagccggccccgcgugcggaacauccccucccgcaucagcaucuacuggaccaucgucaagcccggcgacauccugcucaucaacuccaccgggaaccugaucgccccgcggggcuacuucaagauccgcagcgggaaguccagcaucaugcgguccgacgcccccaucggcaagugcaacagcgagugcaucacgcccaacggcuccauccccaacgacaagccguuccagaacgugaaccgcaucaccuacggggccugcccccgguacgugaagcagaacacccugaagcucgcgaccggcaugcgcaacguccccgagaagcagacgcgggggaucuucggcgccaucgccggguucaucgagaacggcugggagggcaugguggacgggugguacggcuuccgccaccagaacagcgaggggcggggccaggccgccgaccugaaguccacccaggcggccaucgaccagaucaacgggaagcugaaccgccucaucggcaagaccaacgagaaguuccaccagaucgagaaggaguucagcgagguggagggccggauccaggaccuggagaaguacgucgaggacaccaagaucgaccugugguccuacaacgccgagcuccugguggcccuggagaaccagcacacgaucgaccucaccgacagcgagaugaacaagcuguucgagaagaccaagaagcagcugcgcgagaacgccgaggacauggggaacggcugcuucaagaucuaccacaagugcgacaacgcgugcaucggguccauccgcaacggcaccuacgaccacgacguguaccgggacgaggcccucaacaaccgcuuccagaucaagggggucgagcugaaguccggcuacaaggacuggauccuguggaucuccuucgccaucagcugcuuccuccugugcguggcccugcucggcuucaucaugugggccugccagaaggggaacauccggugcaacaucugcaucuga

SEQ ID NO: 69421 - RNA, 1701 nt, Artificial Sequence; identical to SEQ ID NO: 66458
  derived and/or modified CDS sequence (opt1) from hemagglutinin__InfluenzaA__ADK98964

SEQ ID NO: 69422 - RNA, 1701 nt, Artificial Sequence; identical to SEQ ID NO: 69375
  derived and/or modified CDS sequence (opt1) from hemagglutinin__InfluenzaA__ADK98975

SEQ ID NO: 69423 - RNA, 1701 nt, Artificial Sequence; identical to SEQ ID NO: 69420
  derived and/or modified CDS sequence (opt1) from hemagglutinin__InfluenzaA__ADK98986

SEQ ID NO: 69424 - RNA, 1701 nt, Artificial Sequence; identical to SEQ ID NO: 67637
  derived and/or modified CDS sequence (opt1) from hemagglutinin__InfluenzaA__ADK98997

SEQ ID NO: 69425 - RNA, 1701 nt, Artificial Sequence; identical to SEQ ID NO: 69420
  derived and/or modified CDS sequence (opt1) from hemagglutinin__InfluenzaA__ADK99008

SEQ ID NO: 69426 - RNA, 1701 nt, Artificial Sequence
  derived and/or modified CDS sequence (opt1) from hemagglutinin__InfluenzaA__ADK99030
augaagaccaucaucgcccugagcuacauccucugccugguguucgcccagaagcugcccggcaacgacaacuccaccgcgacgcucugccuggggcaccacgccgucccgaacggcaccaucgugaagaccaucaccaacgaccagaucgaggugacgaacgccaccgagcugguccagagcuccagcaccggggagaucugcgacagcccccaccagauccucgacggcaagaacugcacccugaucgacgcccugcucggggacccccagugcgacggcuuccagaacaagaagugggaccuguucguggagcgcagcaaggccuacuccaacugcuaccccuacgacgugccggacuacgcgagccugcggucccucgucgccagcuccggcacgcuggaguucaacaacgagagcuucaacuggaccggggugacccagaacggcaccuccagcgccugcauccgccgguccaagaacagcuucuucucccgccugaacuggcucacgcaccugaacuucaaguaccccgcccugaacgugaccaugcccaacaacgagcgguucgacaagcucuacaucuggggcguccaccaccccgggaccgacaaggaccagaucuuccuguacgcgcaggccagcgggcgcaucaccguguccacgaagcggagccagcagaccgugaucccgaacaucggcagccgcccccggguccgcaacauccccucccggaucagcaucuacuggaccaucgugaagcccggcgacauccugcucaucaacuccaccgggaaccugaucgccccgcgcggcuacuucaagauccggagcgggaaguccagcaucaugcgcuccgacgcccccaucggcaagugcaacagcgagugcaucacgcccaacggcuccauccccaacgacaagccguuccagaacgugaaccggaucaccuacggggccugcccccgcuacgucaagcagaacacccugaagcucgcgaccggcaugcggaacgugcccgagaagcagacgcgcgggaucuucggcgccaucgccggguucaucgagaacggcugggagggcaugguggacgggugguacggcuuccggcaccagaacagcgaggggcgcggccaggccgccgaccugaaguccacccaggcggccaucgaccagaucaacgggaagcugaaccggcucaucggcaagaccaacgagaaguuccaccagaucgagaaggaguucagcgaggucgagggccgcauccaggaccuggagaaguacguggaggacaccaagaucgaccugugguccuacaacgccgagcuccugguggcccuggagaaccagcacacgaucgaccucaccgacagcgagaugaacaagcuguucgagaagaccaagaagcagcugcgcgagaacgccgaggacauggggaacggcugcuucaagaucuaccacaagugcgacaacgcgugcaucggguccauccggaacggcaccuacgaccacgacgucuaccgcgacgaggcccucaacaaccgguuccagaucaaggggguggagcugaaguccggcuacaaggacuggauccuguggaucuccuucgccaucagcugcuuccuccugugcguggcccugcucggcuucaucaugugggccugccagaaggggaacauccgcugcaacaucugcaucuga

SEQ ID NO: 69427 - RNA, 1701 nt, Artificial Sequence
  derived and/or modified CDS sequence (opt1) from hemagglutinin__InfluenzaA__ADK99041
augaagaccaucaucgcccugagcuacauccucugccugguguucgcccagaagcugcccggcaacgacaacuccaccgcgacgcucugccuggggcaccacgccgucccgaacggcaccaucgugaagaccaucgccaacgaccagaucgaggugaccaacgccacggagcugguccagagcuccagcaccggggagaucugcgacagcccccaccagauccucgacggcgagaacugcacccugaucgacgcccugcucggggacccccagugcgacggcuuccagaacaagaagugggaccuguucguggagcgcagcaaggcguacuccaacugcuaccccuacgacgugccggacuacgccagccugcggucccucgucgccagcuccggcacccuggaguucaacaacgagagcuucaacuggacgggggugacccagaacggcaccuccagcgccugcauccgccgguccaacaacagcuucuucucccgccugaacuggcucacccaccugaaguucaaguaccccgcgcugaacgugacgaugcccaacaacgagcaguucgacaagcucuacaucuggggcguccaccaccccgggaccgacaacgaccagaucuuccuguacgcccaggccagcgggcggaucaccguguccaccaagcgcagccagcagacggugaucccgaacaucggcagccggccccgcguccggaacauccccucccgcaucagcaucuacuggaccaucgugaagcccggcgacauccugcucaucaacuccaccgggaaccugaucgccccgcggggcuacuucaagauccgcagcgggaaguccagcaucaugcgguccgacgcccccaucggcaagugcaacagcgagugcaucacccccaacggcuccauccccaacgacaagccguuccagaacgugaaccgcaucacguacggggcgugcccccgguacgucaagcagaacacccugaagcucgccaccggcaugcgcaacgugcccgagaagcagacccgggggaucuucggcgccaucgccggguucaucgagaacggcugggagggcaugguggacgggugguacggcuuccgccaccagaacagcgaggggcggggccaggccgcggaccugaaguccacgcaggccgccaucgaccagaucaacgggaagcugaaccgccucaucggcaagaccaacgagaaguuccaccagaucgagaaggaguucagcgaggucgagggccggauccaggaccuggagaaguacguggaggacaccaagaucgaccugugguccuacaacgccgagcuccugguggcccuggagaaccagcacaccaucgaccucacggacagcgagaugaacaagcuguucgagaagaccaagaagcagcugcgcgagaacgcggaggacauggggaacggcugcuucaagaucuaccacaagugcgacaacgccugcaucggguccauccgcaacggcaccuacgaccacgacgucuaccgggacgaggcccucaacaaccgcuuccagaucaaggggguggagcugaaguccggcuacaaggacuggauccuguggaucuccuucgccaucagcugcuuccuccugugcguggcccugcucggcuucaucaugugggcgugccagaaggggaacauccggugcaacaucugcaucuga

SEQ ID NO: 69428 - RNA, 1701 nt, Artificial Sequence; identical to SEQ ID NO: 69375
  derived and/or modified CDS sequence (opt1) from hemagglutinin__InfluenzaA__ADK99063

SEQ ID NO: 69429 - RNA, 1701 nt, Artificial Sequence; identical to SEQ ID NO: 66458
  derived and/or modified CDS sequence (opt1) from hemagglutinin__InfluenzaA__ADK99085

SEQ ID NO: 69430 - RNA, 1701 nt, Artificial Sequence; identical to SEQ ID NO: 66458
  derived and/or modified CDS sequence (opt1) from hemagglutinin__InfluenzaA__ADK99096

SEQ ID NO: 69431 - RNA, 1701 nt, Artificial Sequence; identical to SEQ ID NO: 66458
  derived and/or modified CDS sequence (opt1) from hemagglutinin__InfluenzaA__ADK99107

SEQ ID NO: 69432 - RNA, 1701 nt, Artificial Sequence
  derived and/or modified CDS sequence (opt1) from hemagglutinin__InfluenzaA__ADK99118
augaagaccaucaucgcccugagcuacauccucugccugguguucgcccagaagcugcccggcaacgacaacuccaccgcgacgcucugccuggggcaccacgccgucccgaacggcaccaucgugaagaccaucaccaacgaccagaucgaggugacgaacgccaccgagcugguccagagcuccagcaccggggagaucugcgacaucccccaccagauccucgacggcaagaacugcacccugaucgacgcccugcucggggacccccagugcgacggcuuccagaacaagaagugggaccuguucguggagcgcuccaaggccuacagcaacugcuaccccuacgacgugccggacuacgcgucccugcggagccucgucgccuccagcggcacgcuggaguucaacaacgaguccuucaacuggaccggggugacccagaacggcaccagcuccgccugcauccgccggagcaagaacuccuucuucagccgccugaacuggcucacgcaccugaacuucaaguaccccgcccugaacgugaccaugcccaacaacgagcaguucgacaagcucuacaucuggggcguccaccaccccgggaccgacaaggaccagaucuuccuguacgcgcaggccuccgggcggaucaccgugagcacgaagcgcucccagcagaccgugaucccgaacaucggcagccggccccgcguccggaacauccccagccgcaucuccaucuacuggaccaucgugaagcccggcgacauccugcucaucaacagcaccgggaaccugaucgccccgcggggcuacuucaagauccgcuccggcaagagcuccaucaugcggagcgacgcccccaucgggaagugcaacuccgagugcaucacgcccaacggcagcauccccaacgacaagccguuccagaacgugaaccgcaucaccuacggggccugcccccgguacgucaagcaguccacccugaagcucgcgaccggcaugcgcaacgugcccgagaagcagacgcgggggaucuucggcgccaucgccggguucaucgagaacggcugggagggcaugguggacgggugguacggcuuccgccaccagaacagcgaggggcggggccaggccgccgaccugaaguccacccaggcggccaucgaccagaucaacgggaagcugaaccgccucaucggcaagaccaacgagaaguuccaccagaucgagaaggaguucagcgaggucgagggccggauccaggaccuggagaaguacguggaggacaccaagaucgaccugugguccuacaacgccgagcuccugguggcccuggagaaccagcacacgaucgaccucaccgacagcgagaugaacaagcuguucgagaagaccaagaagcagcugcgcgagaacgccgaggacauggggaacggcugcuucaagaucuaccacaagugcaacaacgcgugcaucggguccauccgcaacggcaccuacgaccacgacgucuaccgggacgaggcccucaacaaccgcuuccagaucaaggggguggagcucaagagcggcuacaaggacuggauccuguggaucuccuucgccaucagcugcuuccugcugugcguggcccugcucggcuucaucaugugggccugccagaaggggaacauccggugcaacaucugcaucuga

SEQ ID NO: 69433 - RNA, 1701 nt, Artificial Sequence
  derived and/or modified CDS sequence (opt1) from hemagglutinin__InfluenzaA__ADK99129
augaagaccaucaucgcccugagcuacauccucugccugguguucgcccagaagcugcccggcaacgacaacuccaccgcgacgcucugccuggggcaccacgccgucccgaacggcaccaucgugaagaccaucaccaacgaccagaucgaggugacgaacgccaccgagcugguccagagcuccagcaccggggagaucugcgacagcccccaccagauccucgacggcaagaacugcacccugaucgacgcccugcucggggacccccagugcgacggcuuccagaacaagaagugggaccuguucguggagcgcagcaaggccuacuccaacugcuaccccuacgacgugccggacuacgcgagccugcggucccucgucgccagcuccggcacgcuggaguucaacaacgagagcuucaacuggaccggggugacccagaacggcaccuccagcgccugcauccgccgguccaagaacagcuucuucucccgccugaacuggcucacgcaccugaacuucaaguaccccgcccugaacaugaccaugcccaacaacgagcaguucgacaagcucuacaucuggggcgugcaccaccccgggaccgacaaggaccagaucuuccuguacgcgcaggccagcgggcggaucaccgucuccacgaagcgcagccagcagaccgugaucccgaacaucggcagccggccccgcgugcggaacauccccucccgcaucagcaucuacuggaccaucgucaagcccggcgacauccugcucaucaacuccaccgggaaccugaucgccccgcggggcuacuucaagauccgcagcgggaaguccagcaucaugcgguccgacgcccccaucggcaagugcaacagcgagugcaucacgcccaacggcuccauccccaacgacaagccguuccagaacgugaaccgcaucaccuacggggccugcccccgguacgugaagcagagcacccugaagcucgcgaccggcaugcgcaacguccccgagaagcagacgcgggggaucuucggcgccaucgccggguucaucgagaacggcugggagggcaugguggacgggugguacggcuuccgccaccagaacuccgaggggcggggccaggccgccgaccugaaguccacccaggcggccaucgaccagaucaacgggaagcugaaccgccucaucggcaagaccaacgagaaguuccaccagaucgagaaggaguucuccgagguggagggccggauccaggaccuggagaaguacgucgaggacaccaagaucgaccuguggagcuacaacgccgagcuccugguggcccuggagaaccagcacacgaucgaccucaccgacuccgagaugaacaagcuguucgagaagaccaagaagcagcugcgcgagaacgccgaggacauggggaacggcugcuucaagaucuaccacaagugcaacaacgcgugcaucgggagcauccgcaacggcaccuacgaccacgacguguaccgggacgaggcccucaacaaccgcuuccagaucaagggggucgagcugaaguccggcuacaaggacuggauccuguggaucagcuucgccaucuccugcuuccuccugugcguggcccugcucggcuucaucaugugggccugccagaaggggaacauccggugcaacaucugcaucuga

SEQ ID NO: 69434 - RNA, 1701 nt, Artificial Sequence; identical to SEQ ID NO: 69375
  derived and/or modified CDS sequence (opt1) from hemagglutinin__InfluenzaA__ADK99140

SEQ ID NO: 69435 - RNA, 1701 nt, Artificial Sequence
  derived and/or modified CDS sequence (opt1) from hemagglutinin__InfluenzaA__ADK99151
augaagaccaucaucgcccugagcuacauccucugccugguguucgcccagaagcugcccggcaacgacaacuccaccgcgacgcucugccuggggcaccacgccgucccgaacggcaccaucgugaagaccaucaccaacgaccagaucgaggugacgaacgccaccgagcugguccagagcuccagcaccggggagaucugcgacagcccccaccagauccucgacggcaagaacugcacccugaucgacgcccugcucggggacccccagugcgacggccugcagaacaagaagugggaccuguucguggagcgcagcaaggccuacuccaacugcuaccccuacgacgugccggacuacgcgagccuccggucccuggucgccagcuccggcacgcuggaguucaacaacgagagcuucaacuggaccggggugacccagaacggcaccuccagcgccugcauccgccgguccaagaacagcuucuucucccgccucaacuggcugacgcaccugaacuucaaguaccccgcccucaacgugaccaugcccaacaacgagcaguucgacaagcuguacaucuggggcguccaccaccccgggaccgacaaggaccagaucuuccuguacgcgcaggccagcgggcggaucaccguguccacgaagcgcagccagcagaccgccaucccgaacaucggcagccggccccgcgugcggaacauccccucccgcaucagcaucuacuggaccaucgucaagcccggcgacauccuccugaucaacuccaccgggaaccugaucgccccgcggggcuacuucaagauccgcagcgggaaguccagcaucaugcgguccgacgcccccaucggcaagugcaacagcaagugcaucacgcccaacggcuccauccccaacgacaagccguuccagaacgugaaccgcaucaccuacggggcgugcccccgguacgugaagcagaacacccucaagcuggccaccggcaugcgcaacguccccgagaagcagacgcgggggaucuucggcgccaucgccggguucaucgagaacggcugggagggcaugguggacgggugguacggcuuccgccaccagaacagcgaggggcggggccaggccgcggaccugaaguccacccaggccgccaucgaccagaucaacgggaagcucaaccgccugaucggcaagaccaacgagaaguuccaccagaucgagaaggaguucagcgagguggagggccggauccaggaccuggagaaguacgucgaggacaccaagaucgaccucugguccuacaacgccgagcugcugguggcccucgagaaccagcacacgaucgaccugaccgacagcgagaugaacaagcuguucgagaagaccaagaagcagcuccgcgagaacgcggaggacauggggaacggcugcuucaagaucuaccacaagugcgacaacgccugcaucggguccauccgcaacggcaccuacgaccacgacguguaccgggacgaggcccugaacaaccgcuuccagaucaagggggucgagcugaaguccggcuacaaggacuggauccucuggaucuccuucgccaucagcugcuuccugcugugcguggcccuccugggcuucaucaugugggcgugccagaaggggaacauccggugcaacaucugcaucuga

SEQ ID NO: 69436 - RNA, 1701 nt, Artificial Sequence; identical to SEQ ID NO: 69375
  derived and/or modified CDS sequence (opt1) from hemagglutinin__InfluenzaA__ADK99162

SEQ ID NO: 69437 - RNA, 1701 nt, Artificial Sequence
  derived and/or modified CDS sequence (opt1) from hemagglutinin__InfluenzaA__ADK99173
augaagaccaucaucgcccugagcuacauccucugccugguguucgcccagaagcugcccggcaacgacaacuccaccgcgacgcucugccuggggcaccacgccgucccgaacggcaccaucgugaagaccaucaccaacgaccagaucgaggugacgaacgccaccgagcugauccagagcuccagcaccggggagaucugcgacagcccccaccagauccucgacggcgagaacugcacccugaucgacgcccugcucggggacccccagugcgacggccugcagaacaagaagugggaccuguucgucgagcgcagcaaggccuacuccaacugcuaccccuacgacgugccggacuacgcgagccuccggucccugguggccagcuccggcacgcuggaguucaacaacgagagcuucaacuggaccggggucacccagaacggcaccuccagcgccugcauccgccgguccaacaacagcuucuucucccgccucaacuggcugacgcaccugaaguucaaguaccccgcccucaacgugaccaugcccaacaacgagcaguucgacaagcuguacaucuggggcgugcaccaccccgggaccgacaacgaccagaucuuccuguacgcgcaggccagcgggcggaucaccgucuccacgaagcgcagccagcagaccgugaucccgaacaucggcagccggccccgcgugcggaacauccccucccgcaucagcaucuacuggaccaucgucaagcccggcgacauccuccugaucaacuccaccgggaaccugaucgccccgcggggcuacuucaagauccgcagcgggaaguccagcaucaugcgguccgacgcccccaucggcaagugcaacagcgagugcaucacgcccaacggcuccauccccaacgacaagccguuccagaacgugaaccgcaucaccuacggggccugcccccgguacgugaagcagaacacccucaagcuggcgaccggcaugcgcaacguccccgagaagcagacgcgggggaucuucggcgccaucgccggguucaucgagaacggcugggagggcaugguggacgggugguacggcuuccgccaccagaacagcgaggggcggggccaggccgccgaccugaaguccacccaggcggccaucgaccagaucaacgggaagcucaaccgccugaucggcaagaccaacgagaaguuccaccagaucgagaaggaguucagcgagguggagggccggauccaggaccuggagaaguacgucgaggacaccaagaucgaccucugguccuacaacgccgagcugcugguggcccucgagaaccagcacacgaucgaccugaccgacagcgagaugaacaagcuguucgagaagaccaagaagcagcuccgcgagaacgccgaggacauggggaacggcugcuucaagaucuaccacaagugcgacaacgcgugcaucggguccauccgcaacggcaccuacgaccacgacguguaccgggacgaggcccugaacaaccgcuuccagaucaagggggucgagcugaaguccggcuacaaggacuggauccucuggaucuccuucgccaucagcugcuuccugcugugcguggcccuccugggcuucaucaugugggccugccagaaggggaacauccggugcaacaucugcaucuga

SEQ ID NO: 69438 - RNA, 1701 nt, Artificial Sequence
  derived and/or modified CDS sequence (opt1) from hemagglutinin__InfluenzaA__ADK99184
augaagaccaucaucgcccugagcuacauccucugccugguguccgcccagaagcugcccggcaacgacaacagcaccgcgacgcucugccuggggcaccacgccgucccgaacggcaccaucgugaagaccaucaccaacgaccagaucgaggugacgaacgccaccgagcugguccaguccagcuccaccggggagaucugcaacagcccccaccagauccucgacggcgagaacugcacccugaucgacgcccugcucggggacccccagugcgacggcuuccagaacaagaagugggaccuguucguggagcgcuccaaggccuacagcaacugcuaccccuacgacgugccggacuacgcgucccugcggagccucgucgccuccagcggcacgcuggaguucaacaacgaguccuucaacuggaccggggugacccagaacggcaccagcuccgccugcauccgccggagcaacaacuccuucuucagccgccugaacuggcucacgcaccugaaguucaaguaccccgcccugaacgugaccaugcccaacaacgagcaguucgacaagcucuacaucuggggcguccaccaccccgggaccgacaacgaccagaucuuccuguacgcgcaggccuccgggcggaucaccgugagcacgaagcgcagccagcagaccgugaucccgaacaucggcucccggccccgcguccggaacauccccagccgcaucuccaucuacuggaccaucgugaagcccggcgacauccugcucaucaacagcaccgggaaccugaucgccccgcggggcuacuucaagauccgcuccggcaagagcuccaucaugcggagcgacgcccccaucgggaagugcaacuccgagugcaucacgcccaacggcagcauccccaacgacaagccguuccagaacgugaaccgcaucaccuacggggccugcccccgguacgucaagcagaacacccugaagcucgcgaccggcaugcgcaacgugcccgagaagcagacgcgggggaucuucggcgccaucgccggguucaucgagaacggcugggagggcaugguggacgggugguacggcuuccgccaccagaacuccgaggggcggggccaggccgccgaccucaagagcacccaggcggccaucgaccagaucaacgggaagcugaaccgccugaucggcaagaccaacgagaaguuccaccagaucgagaaggaguucuccgaggucgagggccggauccaggaccuggagaaguacguggaggacaccaagaucgaccuguggagcuacaacgccgagcuccugguggcccuggagaaccagcacacgaucgaccucaccgacuccgagaugaacaagcuguucgagaagaccaagaagcagcugcgcgagaacgccgaggacauggggaacggcugcuucaagaucuaccacaagugcgacaacgcgugcaucgggagcauccgcaacggcaccuacgaccacgacgucuaccgggacgaggcccucaacaaccgcuuccagaucaaggggguggagcugaaguccggcuacaaggacuggauccuguggaucagcuucgccaucuccugcuuccuccugugcguggcccugcucggcuucaucaugugggccugccagaaggggaacauccggugcaacaucugcaucuga

SEQ ID NO: 69439 - RNA, 1701 nt, Artificial Sequence; identical to SEQ ID NO: 66458
  derived and/or modified CDS sequence (opt1) from hemagglutinin__InfluenzaA__ADK99195

SEQ ID NO: 69440 - RNA, 1701 nt, Artificial Sequence
  derived and/or modified CDS sequence (opt1) from hemagglutinin__InfluenzaA__ADK99206
augaagaccaucaucgcccugagcuacauccucugccugguguucgcccagaagcugcccggcaacgacaacuccaccgcgacgcucugccuggggcaccacgccgucccgaacggcaccguggugaagaccaucaccaacgaccagaucgaggucacgaacgccaccgagcuggugcagagcuccagcaccggggagaucugcgacagcccccaccagauccucgacggcaagaacugcacccugaucgacgcccugcucggggacccccagugcgacggcuuccagaacaagaagugggaccuguucguggagcgcuccaaggccuacuccaacugcuaccccuacgacgucccggacuacgcgagccugcggucccucguggccagcuccggcacgcuggaguucaacaacgagagcuucaacuggaccggggugacccagaacggcaccuccagcgccugcauccgccgguccaagaacagcuucuucucccgccugaacuggcucacgcaccugaacuucaaguaccccgcccugaacgucaccaugcccaacaacgagcaguucgacaagcucuacaucuggggcgugcaccaccccgggaccgacaaggaccagaucuuccuguacgcgcaggccagcgggcggaucaccguguccacgaagcgcagccagcagaccgucaucccgaacaucggcagccggccccgcgugcggaacauccccucccgcgugagcaucuacuggaccaucgucaagcccggcgacauccugcucaucaacuccaccgggaaccugaucgccccgcggggcuacuucaagauccgcagcgggaaguccagcaucaugcgguccgacgcccccaucggcaagugcaacagcgagugcaucacgcccaacggcuccauccccaacgacaagccguuccagaacgugaaccgcaucaccuacggggccugcccccgguacgugaagcagaacacccugaagcucgcgaccggcaugcgcaacguccccgagaagcagacgcgggggaucuucggcgccaucgccggguucaucgagaacggcugggagggcaugguggacgggugguacggcuuccgccaccagaacagcgaggggcggggccaggccgccgaccugaaguccacccaggcggccaucgaccagaucaacgggaagcugaaccgccucaucggcaagaccaacgagaaguuccaccagaucgagaaggaguucagcgagguggagggccggauccaggaccuggagaaguacgucgaggacaccaagaucgaccugugguccuacaacgccgagcuccuggugagccuggagaaccagcacacgaucgaccucaccgacuccgagaugaacaagcuguucgagaagaccaagaagcagcugcgcgagaacgccgaggacauggggaacggcugcuucaagaucuaccacaagugcgacaacgccugcaucgggagcauccgcaacggcaccuacgaccacgacguguaccgggacgaggcgcucaacaaccgcuuccagaucaagggggucgagcugaaguccggcuacaaggacuggauccuguggaucagcuucgccaucuccugcuuccuccugugcguggcccugcucggcuucaucaugugggccugccagaaggggaacauccggugcaacaucugcaucuga

SEQ ID NO: 69441 - RNA, 1701 nt, Artificial Sequence; identical to SEQ ID NO: 69375
  derived and/or modified CDS sequence (opt1) from hemagglutinin__InfluenzaA__ADK99217

SEQ ID NO: 69442 - RNA, 1701 nt, Artificial Sequence; identical to SEQ ID NO: 69375
  derived and/or modified CDS sequence (opt1) from hemagglutinin__InfluenzaA__ADK99228

SEQ ID NO: 69443 - RNA, 1701 nt, Artificial Sequence
  derived and/or modified CDS sequence (opt1) from hemagglutinin__InfluenzaA__ADK99239
augaagaccaucaucgcccugagcuacauccucugccugguguucgcccagaagcugcccggcaacgacaacuccaccgcgacgcucugccuggggcaccacgccgucccgaacggcaccaucgugaagaccaucaccaacgaccagaucgaggugacgaacgccaccgagcugguccagagcuccagcaccggggagaucugcgacagcccccaccagauccucgacggcaagaacugcacccugaucgacgcccugcucggggacccccagugcgacggcuuccagaacaagaagugggaccuguucguggagcgcagcaaggccuacuccaacugcuaccccuacgacgugccggacuacgcgagccugcggucccucgucgccagcuccggcacgcuggaguucaacaacgagagcuucaacuggaccggggugacccagaacggcaccuccagcgccugcauccgccgguccaagaacagcuucuucucccgccugaacuggcucacgcaccugaacuucaaguaccccgcccugaacgugaccaugcccaacaacgagcaguucgacaagcucuacaucuggggcguccaccaccccgggaccgacaaggaccagaucuuccuguacgcgcaggccagcgggcggaucaccguguccacgaagcgcagccagcagaccgugaucccgaacaucggcagccggccccgcguccggaacauccccucccgcaucagcaucuacuggaccaucgugaagcccggcgacauccugcucaucaacuccaccgggaaccugaucgccccgcggggcuacuucaagauccgcagcgggaaguccagcaucaugcgguccgacgcccccaucggcaagugcaacagcgagugcaucacgcccaacggcuccauccccaacgacaagccguuccagaacgugaaccgcaucaccuacggggccugcccccgguacgucaagcagaacacccugaagcucgcgaccggcaugcgcaacgugcccgagaagcagacgcgggggaucuucggcgccaucgccggguucaucgagaacggcugggagggcaugguggacgggugguacggcuuccgccaccagaacagcgaggggcggggccaggccgccgaccugaaguccacccaggcggccaucgaccagaucaacgggaagcugaaccgccucaucggcaagaccaacgagaaguuccaccagaucgagaaggaguucagcgaggucgagggccggauccaggaccuggagaaguacguggaggacaccaagaucgaccugugguccuacaacgccgagcuccugguggcccuggagaaccagcacacgaucgaccucaccgacagcgagaugaacaagcuguucgagaagaccaagaagcagcugcgcgagaacgccgaggacauggggaacggcugcuucaagaucuaccacaagugcgacaacgcgugcaucggguccauccgcaacggcaccuacgaccacgacgucuaccgggacgaggcccucaacaaccgcuuccagaucaaggggguggagcugaaguccggcuacaaggacuggauccuguggaucuccuucgccaucagcugcuuccuccugugcguggcccugcucggcuucaucaugugggccugccagaaggggaacauccggugcaacaucugcaucuga

SEQ ID NO: 69444 - RNA, 1701 nt, Artificial Sequence
  derived and/or modified CDS sequence (opt1) from hemagglutinin__InfluenzaA__ADK99250
augaagaccaucaucgcccugagcuacauccucugccugguguucgcccagaagcugcccggcaacgacaacuccaccgcgacgcucugccuggggcaccacgccgucccgaacggcaccaucgugaagaccaucaccaacgaccagaucgaggugacgaacgccaccgagcugguccagagcuccagcaccggggagaucugcgacagcccccaccagauccucgacggcgagaacugcacccugaucgacgcccugcucggggacccccagugcgacggcuuccagaacaagaagugggaccuguucguggagcgcuccaaggccuacuccaacugcuaccccuacgacgugccggacuacgcgagccugcggucccucgucgccagcuccggcacgcuggaguucaacaacgagagcuucaacuggaccggggugacccagaacggcaccuccagcgccugcauccgccgguccaacaacagcuucuucucccgccugaacuggcucacgcaccugaaguucaaguaccccgcccugaacgugaccaugcccaacaacgagcaguucgacaagcucuacaucuggggcguccaccaccccgggaccgacaacgaccagaucuuccuguacgcgcaggccagcgggcggaucaccguguccacgaagcgcagccagcagaccgugaucccgaacaucggcagccggccccgcguccggaacauccccucccgcaucagcaucuacuggaccaucgugaagcccggcgacauccugcucaucaacuccaccgggaaccugaucgccccgcggggcuacuucaagauccgcagcgggaaguccagcaucaugcgguccgacgcccccaucggcaagugcaacagcgagugcaucacgcccaacggcuccauccccaacgacaagccguuccagaacgugaaccgcaucaccuacggggccugcccccgguacgucaagcagaacacccugaagcucgcgaccggcaugcgcaacgugcccgagaagcagacgcgggggaucuucggcgccaucgccggguucaucgagaacggcugggagggcaugguggacgggugguacggcuuccgccaccagaacagcgaggggcggggccaggccgccgaccugaaguccacccaggcggccaucgaccagaucaacgggaagcugaaccgccucaucggcaagaccaacgagaaguuccaccagaucgagaaggaguucagcgaggucgagggccggauccaggacaucgagaaguacguggaggacaccaagaucgaccugugguccuacaacgccgagcugcucguggcccuggagaaccagcacacgaucgaccugaccgacagcgagaugaacaagcuguucgagaagaccaagaagcagcuccgcgagaacgccgaggacauggggaacggcugcuucaagaucuaccacaagugcgacaacgcgugcaucggguccauccgcaacggcaccuacgaccacgacgucuaccgggacgaggcccugaacaaccgcuuccagaucaaggggguggagcucaagagcggcuacaaggacuggauccuguggaucuccuucgccaucagcugcuuccugcucugcguggcccugcugggcuucaucaugugggccugccagaaggggaacauccggugcaacaucugcaucuga

SEQ ID NO: 69445 - RNA, 1701 nt, Artificial Sequence; identical to SEQ ID NO: 69375
  derived and/or modified CDS sequence (opt1) from hemagglutinin__InfluenzaA__ADK99261

SEQ ID NO: 69446 - RNA, 1701 nt, Artificial Sequence
  derived and/or modified CDS sequence (opt1) from hemagglutinin__InfluenzaA__ADK99283
augaagaccaucaucgcccugagcuacauccucugccugguguucgcccagaagcugcccggcaacgacaacuccaccgcgacgcucugccuggggcaccacgccgucccgaacggcaccaucgugaagaccaucaccaacgaccagaucgaggugacgaacgccaccgagcugguccagagcuccagcaccggggagaucugcgacagcccccaccagauccucgacggcaagaacugcacccugaucgacgcccugcucggggacccccagugcgacggcuuccagaacaagaagugggaccuguucguggagcgcagcaaggccuacuccaacugcuaccccuacgacgugccggacuacgcgagccugcggucccucgucgccagcuccggcacgcuggaguucaacaacgagagcuucaacuggaccggggugacccagaacggcaccuccagcgccugcauccgccgguccaagaacagcuucuucucccgccugaacuggcucacgcaccugaacuucaaguaccccgcccugaacgugaccaugcccaacaacgagcaguucgacaagcucuacaucuggggcguccaccaccccgggaccgacaaggaccagaucuuccuguacgcgcaggccagcgggcggaucaccguguccacgaagcgcagccagcagaccgugaucccgaacaucggcagccggccccgcguccggaacauccccucccgcaucagcaucuacuggaccaucgugaagcccggcgacauccugcucaucaacuccaccgggaaccugaucgccccgcggggcuacuucaagauccgcagcgggaaguccagcaucaugcgguccgacgcccccaucggcaagugcaacagcgagugcaucacgcccaacggcuccauccccaacgacaagccguuccagaacgugaaccgcaucaccuacggggccugcccccgguacgucaagcagaacacccugaagcucgcgaccggcaugcgcaacgugcccgagaagcagacgcgggggaucuucggcgccaucgccggguucaucgagaacggcugggagggcaugguggacgggugguacggcuuccgccaccagaacagcgaggggcggggccaggccgccgaccugaaguccacccaggcggccaucgaccagaucaacgggaagcugaaccgccucaucggcaagaccaacgagaaguuccaccagaucgagaaggaguucagcgaggucgagggccggauccaggaccuggagcgcuacguggaggacaccaagaucgaccugugguccuacaacgccgagcuccugguggcccuggagaaccagcacacgaucgaccucaccgacagcgagaugaacaagcuguucgagaagaccaagaagcagcugcgcgagaacgccgaggacauggggaacggcugcuucaagaucuaccacaagugcgacaacgcgugcaucggguccauccggaacggcaccuacgaccacgacgucuaccgcgacgaggcccucaacaaccgguuccagaucaaggggguggagcugaaguccggcuacaaggacuggauccuguggaucuccuucgccaucagcugcuuccuccugugcguggcccugcucggcuucaucaugugggccugccagaaggggaacauccgcugcaacaucugcaucuga

SEQ ID NO: 69447 - RNA, 1701 nt, Artificial Sequence
  derived and/or modified CDS sequence (opt1) from hemagglutinin__InfluenzaA__ADK99294
augaagaccaucaucgcccugagcuacauccucugccugguguucgcccagaagcugcccggcaacgacaacuccaccgcgacgcucugccuggggcaccacgccgucccgaacggcaccaucgugaagaccaucaccaacgaccagaucgaggugacgaacgccaccgagcugguccagagcuccagcaccggggagaucugcgacagcccccaccagauccucgacggcgagaacugcacccugaucgacgcccugcucggggacccccagugcgacggcuuccaggacaagaagugggaccuguucguggagcgcagcaaggccuacuccaacugcuaccccuacgacgugccggacuacgcgagccugcggucccucgucgccagcuccggcacgcuggaguucaacaacgagagcuucaacuggaccggggugacccagaacggcaccuccagcgccugcauccgccgguccaacaacagcuucuucucccgccugaacuggcucacgcaccugaacuucaaguaccccgcccugaacgugaccaugcccaacaacgagcaguucgacaagcucuacaucuggggcguccaccaccccgggaccgacaaggaccagaucuuccuguacgcgcaggccagcgggcggaucaccguguccacgaagcgcagccagcaggccgugaucccgaacaucggcagccggccccgcguccggaacauccccucccgcaucagcaucuacuggaccaucgugaagcccggcgacauccugcucaucaacuccaccgggaaccugaucgccccgcggggcuacuucaagauccgcagcgggaaguccagcaucaugcgguccgacgcccccaucggcaagugcaacagcgagugcaucacccccaacggcuccauccccaacgacaagccguuccagaacgugaaccgcaucacguacggggcgugcccccgguacgucaagcagaacacccugaagcucgccaccggcaugcgcaacgugcccgagaagcagacccgggggaucuucggcgccaucgccggguucaucgagaacggcugggagggcaugguggacgggugguacggcuuccgccaccagaacagcgaggggcggggccaggccgcggaccugaaguccacgcaggccgccaucgaccagaucaacgggaagcugaaccgccucaucggcaagaccaacgagaaguuccaccagaucgagaaggaguucagcgaggucgagggccggauccaggaccuggagaaguacguggaggacaccaagaucgaccugugguccuacaacgccgagcuccugguggcccuggagaaccagcacaccaucgaccucacggacagcgagaugaacaagcuguucgagaagaccaagaagcagcugcgcgagaacgcggaggacauggggaacggcugcuucaagaucuaccacaagugcgacaacgccugcaucggguccauccgcaacggcaccuacgaccacgacgucuaccgggacgaggcccucaacaaccgcuuccagaucaaggggguggagcugaaguccggcuacaaggacuggauccuguggaucuccuucgccaucagcugcuuccuccugugcguggcccugcucggcuucaucaugugggcgugccagaaggggaacauccggugcaacaucugcaucuga

SEQ ID NO: 69448 - RNA, 1701 nt, Artificial Sequence; identical to SEQ ID NO: 66458
  derived and/or modified CDS sequence (opt1) from hemagglutinin__InfluenzaA__ADK99305

SEQ ID NO: 69449 - RNA, 1701 nt, Artificial Sequence; identical to SEQ ID NO: 66458
  derived and/or modified CDS sequence (opt1) from hemagglutinin__InfluenzaA__ADL27989

SEQ ID NO: 69450 - RNA, 1701 nt, Artificial Sequence
  derived and/or modified CDS sequence (opt1) from hemagglutinin__InfluenzaA__ADL28000
augaagaccaucaucgcccugagcuacauccucugccugguguucgcccagaagcugcccggcaacgacaacuccaccgcgacgcucugccuggggcaccacgccgucccgaacggcaccauggugaagaccaucaccaacgaccagaucgaggugacgaacgccaccgagcugguccagagcuccagcaccggggagaucugcgacagcccccaccagauccucgacggcaagaacugcacccugaucgacgcccugcucggggacccccagugcgacggcuuccagaacaagaagugggaccuguucguggagcgcagcaaggccuacuccaacugcuaccccuacgacgugccggacuacgcgagccugcggucccucgucgccagcuccggcacgcuggaguucaacaacgagagcuucaacuggaccggggugacccagaacggcaccuccagcgccugcauccgccgguccaagaacagcuucuucucccgccugaacuggcucacgcaccugaacuucaaguaccccgcccugaacgugaccaugcccaacaacgagcaguucgacaagcucuacaucuggggcguccaccaccccgggaccgacaaggaccagaucuuccuguacgcgcaggccagcgagcggaucaccguguccacgaagcgcagccagcagaccgugaucccgaacaucgggagccggccccgcguccggaacauccccucccgcaucagcaucuacuggaccaucgugaagcccggcgacauccugcucaucaacuccaccggcaaccugaucgccccgcggggguacuucaagauccgcagcggcaaguccagcaucaugcgguccgacgcccccaucgggaagugcaacagcgagugcaucacgcccaacggcuccauccccaacgacaagccguuccagaacgugaaccgcaucaccuacggcgccugcccccgguacgucaagcagagcacccugaagcucgcgaccgggaugcgcaacgugcccgagaagcagacgcggggcaucuucggggccaucgccggcuucaucgagaacgggugggagggcaugguggacggcugguacggguuccgccaccagaacuccgagggccgggggcaggccgccgaccugaaguccacccaggcggccaucgaccagaucaacggcaagcugaaccgccucaucgggaagaccaacgagaaguuccaccagaucgagaaggaguucuccgaggucgagggccggauccaggaccuggagaaguacguggaggacaccaagaucgaccuguggagcuacaacgccgagcuccugguggcccuggagaaccagcacacgaucgaccucaccgacuccgagaugaacaagcuguucgagaagaccaagaagcagcugcgcgagaacgccgaggacaugggcaacgggugcuucaagaucuaccacaagugcgacaacgcgugcaucggcagcauccgcaacgggaccuacgaccacgacgucuaccgggacgaggcccucaacaaccgcuuccagaucaagggcguggagcugaaguccggguacaaggacuggauccuguggaucagcuucgccaucuccugcuuccuccugugcguggcccugcucggcuucaucaugugggccugccagaagggcaacauccggugcaacaucugcaucuga

SEQ ID NO: 69451 - RNA, 1701 nt, Artificial Sequence
  derived and/or modified CDS sequence (opt1) from hemagglutinin__InfluenzaA__ADL28011
augaagaccaucaucgcccugagcuacauccucugccugguguucgcccagaagcugcccggcaacgacaacuccaccgcgacgcucugccuggggcaccacgccgucccgaacggcaccaucgugaagaccaucaccaacgaccagaucgaggugacgaacgccaccgagcugguccagagcuccagcaccggggagaucugcgacagcccccaccagauccucgacggcgagaacugcacccugaucgacgcccugcucggggacccccagugcgacggcuuccagaacaagaagugggaccuguucguggagcgcagcaaggccuacuccaacugcuaccccuacgacgugccggacuacgcgagccugcggucccucgucgccagcuccggcacgcuggaguucaacaacgagagcuucaacuggaccggggugacccagaacggcaccuccagcgccugcauccgccgguccaacaacagcuucuucucccgccugaacuggcucacgcaccugaaguucaaguaccccgcccugaacgugaccaugcccaacaacgagcaguucgacaagcucuacaucuggggcguccaccaccccgggaccgacaacgaccagaucuuccuguacgcgcaggccagcgggcggaucaccguguccacgcgccggagccagcagaccgugaucccgaacaucggcagccgcccccggguccgcaacauccccucccggaucagcaucuacuggaccaucgugaagcccggcgacauccugcucaucaacuccaccgggaaccugaucgccccgcgcggcuacuucaagauccggagcgggaaguccagcaucaugcgcuccgacgcccccaucggcaagugcaacagcgagugcaucacgcccaacggcuccauccccaacgacaagccguuccagaacgugaaccggaucaccuacggggccugcccccgcuacgucaagcagaacacccugaagcucgcgaccggcaugcggaacgugcccgagaagcagacgcgcgggaucuucggcgccaucgccggguucaucgagaacggcugggagggcaugguggacgggugguacggcuuccggcaccagaacagcgaggggcgcggccaggccgccgaccugaaguccacccaggcggccaucgaccagaucaacgggaagcugaaccggcucaucggcaagaccaacgagaaguuccaccagaucgagaaggaguucagcgaggucgagggccgcauccaggaccuggagaaguacguggaggacaccaagaucgaccugugguccuacaacgccgagcuccugguggcccuggagaaccagcacacgaucgaccucaccgacagcgagaugaacaagcuguucgagaagaccaagaagcagcugcgcgagaacgccgaggacauggggaacggcugcuucaagaucuaccacaagugcgacaacgcgugcaucggguccauccggaacggcaccuacgaccacgacgucuaccgcgacgaggcccucaacaaccgguuccagaucaaggggguggagcugaaguccggcuacaaggacuggauccuguggaucuccuucgccaucagcugcuuccuccugugcguggcccugcucggcuucaucaugugggccugccagaaggggaacauccgcugcaacaucugcaucuga

SEQ ID NO: 69452 - RNA, 1701 nt, Artificial Sequence; identical to SEQ ID NO: 69375
  derived and/or modified CDS sequence (opt1) from hemagglutinin__InfluenzaA__ADL28022

SEQ ID NO: 69453 - RNA, 1701 nt, Artificial Sequence; identical to SEQ ID NO: 66458
  derived and/or modified CDS sequence (opt1) from hemagglutinin__InfluenzaA__ADL28033

SEQ ID NO: 69454 - RNA, 1701 nt, Artificial Sequence; identical to SEQ ID NO: 67637
  derived and/or modified CDS sequence (opt1) from hemagglutinin__InfluenzaA__ADL28044

SEQ ID NO: 69455 - RNA, 1701 nt, Artificial Sequence
  derived and/or modified CDS sequence (opt1) from hemagglutinin__InfluenzaA__ADL28055
augaagaccaucguggcccugagcuacauccucugccuggucuucgcccagaagcugcccggcaacgacaacuccaccgcgacgcucugccuggggcaccacgccgugccgaacggcaccaucgugaagaccaucaccaacgaccagaucgaggucacgaacgccaccgagcuggugcagagcuccagcaccggggagaucugcgacagcccccaccagauccucgacggcgagaacugcacccugaucgacgcccugcucggggacccccagugcgacggcuuccagaacaagaagugggaccuguucguggagcgcagcaaggccuacuccaacugcuaccccuacgacgucccggacuacgcgagccugcggucccucguggccagcuccggcacgcuggaguucaacaacgagagcuucaacuggaccggggugacccagaacggcaccuccagcgccugcauccgccgguccaacaacagcuucuucucccgccugaacuggcucacgcaccugaaguucaaguaccccgcccugaacgucaccaugcccaacaacgagcaguucgacaagcucuacaucuggggcgugcaccaccccgggaccgacaacgaccagaucuuccuguacgcgcaggccagcgggcggaucaccguguccacgaagcgcagccagcagaccgucaucccgaacaucggcagccggccccgcgugcggaacauccccucccgcaucagcaucuacuggaccaucgugaagcccggcgacauccugcucaucaacuccaccgggaaccugaucgccccgcggggcuacuucaagauccgcagcgggaaguccagcaucaugcgguccgacgcccccaucggcaagugcaacagcgagugcaucacgcccaacggcuccauccccaacgacaagccguuccagaacgucaaccgcaucaccuacggggccugcccccgguacgugaagcagaacacccugaagcucgcgaccggcaugcgcaacgugcccgagaagcagacgcgggggaucuucggcgccaucgccggguucaucgagaacggcugggagggcauggucgacgggugguacggcuuccgccaccagaacagcgaggggcggggccaggccgccgaccugaaguccacccaggcggccaucgaccagaucaacgggaagcugaaccgccucaucggcaagaccaacgagaaguuccaccagaucgagaaggaguucagcgagguggagggccggauccaggaccuggagaaguacguggaggacaccaagaucgaccugugguccuacaacgccgagcuccuggucgcccuggagaaccagcacacgaucgaccucaccgacagcgagaugaacaagcuguucgagaagaccaagaagcagcugcgcgagaacgccgaggacauggggaacggcugcuucaagaucuaccacaagugcgacaacgcgugcaucggguccauccgcaacggcaccuacgaccacgacguguaccgggacgaggcccucaacaaccgcuuccagaucaaggggguggagcugaaguccggcuacaaggacuggauccuguggaucuccuucgccaucagcugcuuccuccugugcgucgcccugcucggcuucaucaugugggccugccagaaggggaacauccggugcaacaucugcaucuga

SEQ ID NO: 69456 - RNA, 1701 nt, Artificial Sequence; identical to SEQ ID NO: 66458
  derived and/or modified CDS sequence (opt1) from hemagglutinin__InfluenzaA__ADL28066

SEQ ID NO: 69457 - RNA, 1701 nt, Artificial Sequence; identical to SEQ ID NO: 69375
  derived and/or modified CDS sequence (opt1) from hemagglutinin__InfluenzaA__ADL28077

SEQ ID NO: 69458 - RNA, 1701 nt, Artificial Sequence
  derived and/or modified CDS sequence (opt1) from hemagglutinin__InfluenzaA__ADL28088
augaagaccaucaucgcccugagcuacauccucugccugguguucgcccagaagcugcccggcaacgacaacuccaccgcgacgcucugccuggggcaccacgccgucccgaacggcaccaucgugaagaccaucaccaacgaccagaucgaggugacgaacgccaccgagcugguccagagcuccagcaccggggagaucugcgacagcccccaccagauccucgacggcgagaacugcacccugaucgacgcccugcucggggacccccagugcgacggcuuccagaacaagaagugggaccuguucguggagcgcagcaaggccuacuccaacugcuaccccuacgacgugccggacuacgcgagccugcggucccucgucgccagcuccggcacgcuggaguucaacaacgagagcuucaacuggaccggggugacccagaacggcaccuccagcgccugcauccgccgguccaacaacagcuucuucucccgccugaacuggcucacgcaccugaaguucaaguaccccgcccugaacgugaccaugcccaacaacgagcaguucgacaagcucuacaucuggggcguccaccaccccgggaccgacaacgaccagaucuuccuguacagccaggcguccgggcggaucaccgugagcacgaagcgcagccagcagaccgugaucccgaacaucggcucccggccccgcguccggaacauccccagccgcaucuccaucuacuggaccaucgugaagcccggcgacauccugcucaucaacagcaccgggaaccugaucgccccgcggggcuacuucaagauccgcuccgggaaguccuccaucaugcggagcgacgcccccaucggcaagugcaacuccgagugcaucacgcccaacggcagcauccccaacgacaagccguuccagaacgugaaccgcaucaccuacggggccugcccccgguacgucaagcagaacacccugaagcucgccaccggcaugcgcaacgugcccgagaagcagacgcgggggaucuucggcgcgaucgccggguucaucgagaacggcugggagggcaugguggacgggugguacggcuuccgccaccagaacuccgaggggcggggccaggccgccgaccucaagagcacccaggccgcgaucgaccagaucaacgggaagcugaaccgccugaucggcaagaccaacgagaaguuccaccagaucgagaaggaguucuccgaggucgagggccggauccaggaccuggagaaguacguggaggacaccaagaucgaccuguggagcuacaacgccgagcuccugguggcccuggagaaccagcacacgaucgaccucaccgacuccgagaugaacaagcuguucgagaagaccaagaagcagcugcgcgagaacgccgaggacauggggaacggcugcuucaagaucuaccacaagugcgacaacgccugcaucgggagcauccgcaacggcaccuacgaccacgacgucuaccgggacgaggcgcucaacaaccgcuuccagaucaaggggguggagcugaaguccggcuacaaggacuggauccuguggaucagcuucgccaucuccugcuuccuccugugcguggcccugcucggcuucaucaugugggccugccagaaggggaacauccggugcaacaucugcaucuga

SEQ ID NO: 69459 - RNA, 1701 nt, Artificial Sequence; identical to SEQ ID NO: 66458
  derived and/or modified CDS sequence (opt1) from hemagglutinin__InfluenzaA__ADL28099

SEQ ID NO: 69460 - RNA, 1701 nt, Artificial Sequence
  derived and/or modified CDS sequence (opt1) from hemagglutinin__InfluenzaA__ADL28110
augaagaccaucaucgcccugagcuacauccucugccugguguucgcccagaagcugcccggcaacgacaacuccaccgcgacgcucugcaucgggcaccacgccgucccgaacggcaccaucgugaagaccaucaccaacgaccagaucgaggugacgaacgccaccgagcugguccagaacagcuccaccggggagaucugcgacagcccccaccagauccuggacggcaagaacugcacccucaucgacgcccugcugggggacccccagugcgacggcuuccagaacaagaagugggaccucuucguggagcgcuccaaggccuacagcaacugcuaccccuacgacgugccggacuacgcgucccugcggagccuggucgccuccagcggcacgcucgaguucaacaacgaguccuucaacuggaccggggugacccagaacggcaccagcuccgccugcauccgccggagcaagaacuccuucuucagccgccugaacuggcugacgcaccucaacuucaaguaccccgcccugaacgugaccaugcccaacaacgagcaguucgacaagcuguacaucuggggcguccaccaccccgggaccgacaaggaccagaucuuccucuacgcgcaggccuccgggcggaucaccgugagcacgaagcgcucccagcagaccgccaucccgaacaucggcagccggccccgcgugcggaacauccccagccgcaucuccaucuacuggaccaucgucaagcccggcgacauccugcugaucaacagcaccgggaaccucaucgccccgcggggcuacuucaagauccgcuccggcaagagcuccaucaugcggagcgacgcccccaucgacaagugcaacuccgagugcaucacgcccaacgggagcauccccaacgacaagccguuccagaacgugaaccgcaucaccuacggcgcgugcccccgguacgugaagcagaacacccugaagcuggccaccgggaugcgcaacguccccgagaagcagacgcggggcaucuucggggccaucgccggcuucaucgagaacgggugggagggcaugguggacggcugguacggguuccgccaccagaacuccgagggccgggggcaggccgcggaccucaagagcacccaggccgccaucgaccagaucaacggcaagcugaaccgccugaucgggaagaccaacgagaaguuccaccagaucgagaaggaguucuccgagguggagggccggauccaggaccucgagaaguacgucgaggacaccaagaucgaccuguggagcuacaacgccgagcugcucguggcccuggagaaccagcacacgaucgaccugaccgacuccgagaugaacaagcuguucgagaagaccaagaagcagcuccgcgagaacgcggaggacaugggcaacgggugcuucaagaucuaccacaagugcgacaacgccugcaucggcagcauccgcaacgggaccuacgaccacgacguguaccgggacgaggcccugaacaaccgcuuccagaucaagggcgucgagcucaaguccggguacaaggacuggauccuguggaucagcuucgccaucuccugcuuccugcucugcguggcccugcugggcuucaucaugugggcgugccagaagggcaacauccggugcaacaucugcaucuga

SEQ ID NO: 69461 - RNA, 1701 nt, Artificial Sequence
  derived and/or modified CDS sequence (opt1) from hemagglutinin__InfluenzaA__ADL28126
augaagaccaucaucgcccugagcuacauccucugccugguguucgcccagaagcugcccggcaacgacaacuccaccgcgacgcucugccuggggcaccacgccgucccgaacggcaccaucgugaagaccaucaccaacgaccagaucgaggugacgaacgccaccgagcugguccagagcuccagcaccggggagaucugcgacagcccccaccagauccucgacggcgagaacugcacccugaucgacgcccugcucggggacccccagugcgacggcuuccagaacaagaagugggaccuguucguggagcgcagcaaggccuacuccaacugcuaccccuacgacgugccggacuacgcgagccugcggucccucgucgccagcuccggcacgcuggaguucaacaacgagagcuucaacuggaccggggugaaccagaacggcaccuccagcgccugcauccgccgguccaacaacagcuucuucucccgccugaacuggcucacccaccugaaguucaaguaccccgcccugaacgugacgaugcccaacaacgagcaguucgacaagcucuacaucuggggcguccaccaccccgggaccgacaacgaccagaucuuccuguacgcgcaggccagcgggcggaucaccguguccaccaagcgcagccagcagacggugaucccgaacaucggcagccggccccgcguccggaacauccccucccgcaucagcaucuacuggaccaucgugaagcccggcgacauccugcucaucaacuccaccgggaaccugaucgccccgcggggcuacuucaagauccgcagcgggaaguccagcaucaugcgguccgacgcccccaucggcaagugcaacagcgagugcaucacccccaacggcuccauccccaacgacaagccguuccagaacgugaaccgcaucacguacggggccugcccccgguacgucaagcagaacacccugaagcucgcgaccggcaugcgcaacgugcccgagaagcagacccgggggaucuucggcgccaucgccggguucaucgagaacggcugggagggcaugguggacgggugguacggcuuccgccaccagaacagcgaggggcggggccaggccgccgaccugaaguccacgcaggcggccaucgaccagaucaacgggaagcugaaccgccucaucggcaagaccaacgagaaguuccaccagaucgagaaggaguucagcgaggucgagggccggauccaggaccuggagaaguacguggaggacaccaagaucgaccugugguccuacaacgccgagcuccugguggcccuggagaaccagcacaccaucgaccucacggacagcgagaugaacaagcuguucgagaagaccaagaagcagcugcgcgagaacgccgaggacauggggaacggcugcuucaagaucuaccacaagugcgacaacgcgugcaucggguccauccgcaacggcaccuacgaccacgacgucuaccgggacgaggcccucaacaaccgcuuccagaucaaggggguggagcugaaguccggcuacaaggacuggauccuguggaucuccuucgccaucagcugcuuccuccugugcguggcccugcucggcuucaucaugugggccugccagaaggggaacauccggugcaacaucugcaucuga

SEQ ID NO: 69462 - RNA, 1701 nt, Artificial Sequence
  derived and/or modified CDS sequence (opt1) from hemagglutinin__InfluenzaA__ADL28137
augaagaccaucaucgcccugagcuacauccucugccugguguccgcccagaagcugcccggcaacgacaacagcaccgcgacgcucugccuggggcaccacgccgucccgaacggcaccaucgugaagaccaucaccaacgaccagaucgaggugacgaacgccaccgagcugguccaguccagcuccaccggggagaucugcgacggcccccaccagauccucgacggggagaacugcacccugaucgacgcccugcucggcgacccccagugcgacggcuuccagaacaagaagugggaccuguucguggagcgcagcaaggccuacuccaacugcuaccccuacgacgugccggacuacgcgagccugcggucccucgucgccagcuccgggacgcuggaguucaacaacgagagcuucaacuggaccggcgugacccagaacgggaccuccagcgccugcauccgccgguccaacaacagcuucuucucccgccugaacuggcucacgcaccugaaguucaaguaccccgcccugaacgugaccaugcccaacaacgagcaguucgacaagcucuacaucuggggcguccaccaccccgggaccgacaacgaccagaucuuccuguacgcgcaggccagcggccggaucaccguguccacgaagcgcagccagcagaccgugaucccgaacaucggcagccggccccgcguccggaacauccccucccgcaucagcaucuacuggaccaucgugaagcccggggacauccugcucaucaacuccaccggcaaccugaucgccccgcggggguacuucaagauccgcagcggcaaguccagcaucaugcgguccgacgcccccaucggcaagugcaacagcgagugcaucacgcccaacggguccauccccaacgacaagccguuccagaacgugaaccgcaucaccuacggcgccugcccccgguacgucaagcagaacacccugaagcucgcgaccgggaugcgcaacgugcccgagaagcagacgcggggcaucuucggggccaucgccggcuucaucgagaacggcugggaggggaugguggacggcugguacggguuccgccaccagaacagcgagggccgggggcaggccgccgaccugaaguccacccaggcggccaucgaccagaucaacggcaagcugaaccgccucaucggcaagaccaacgagaaguuccaccagaucgagaaggaguucagcgaggucgaggggcggauccaggaccuggagaaguacguggaggacaccaagaucgaccugugguccuacaacgccgagcuccugguggcccuggagaaccagcacacgaucgaccucaccgacagcgagaugaacaagcuguucgagaagaccaagaagcagcugcgcgagaacgccgaggacaugggcaacgggugcuucaagaucuaccacaagugcgacaacgcgugcaucggcuccauccgcaacgggaccuacgaccacgacgucuaccgggacgaggcccucaacaaccgcuuccagaucaagggcguggagcucaagagcggcuacaaggacuggauccuguggaucuccuucgccaucagcugcuuccugcugugcguggcccugcucggguucaucaugugggccugccagaagggcaacauccggugcaacaucugcaucuga

SEQ ID NO: 69463 - RNA, 1701 nt, Artificial Sequence; identical to SEQ ID NO: 66458
  derived and/or modified CDS sequence (opt1) from hemagglutinin__InfluenzaA__ADL28148

SEQ ID NO: 69464 - RNA, 1701 nt, Artificial Sequence; identical to SEQ ID NO: 69375
  derived and/or modified CDS sequence (opt1) from hemagglutinin__InfluenzaA__ADL28170

SEQ ID NO: 69465 - RNA, 1701 nt, Artificial Sequence; identical to SEQ ID NO: 66458
  derived and/or modified CDS sequence (opt1) from hemagglutinin__InfluenzaA__ADL28181

SEQ ID NO: 69466 - RNA, 1701 nt, Artificial Sequence; identical to SEQ ID NO: 69370
  derived and/or modified CDS sequence (opt1) from hemagglutinin__InfluenzaA__ADL28192

SEQ ID NO: 69467 - RNA, 1701 nt, Artificial Sequence; identical to SEQ ID NO: 69376
  derived and/or modified CDS sequence (opt1) from hemagglutinin__InfluenzaA__ADL28203

SEQ ID NO: 69468 - RNA, 1701 nt, Artificial Sequence; identical to SEQ ID NO: 67435
  derived and/or modified CDS sequence (opt1) from hemagglutinin__InfluenzaA__ADL28214

SEQ ID NO: 69469 - RNA, 1701 nt, Artificial Sequence
  derived and/or modified CDS sequence (opt1) from hemagglutinin__InfluenzaA__ADL28225
augaagaccaucaucgcccugagcuacauccucugccugguguucgcccagaagcugcccggcaacgacaacuccaccgcgacgcucugccuggggcaccacgccgucccgaacggcaccaucgugaagaccaucaccaacgaccagaucgaggugacgaacgccaccgagcugguccagagcuccagcaccggggagaucugcgacagcccccaccagauccucgacggcgagaacugcacccugaucgacgcccugcucggggacccccagugcgacggcuuccagaacaagaagugggaccuguucguggagcgcagcaaggccuacuccaacugcuaccccuacgacgugccggacuacgcgagccugcggucccucgucgccagcuccggcacgcuggaguucaacaacgagagcuucaacuggaccggggugacccagaacggcaccuccagcgccugcauccgccgguccaacaacagcuucuucucccgccugaacuggcucacgcaccugaaguucaaguaccccgcccugaacgugaccaugcccaacaacgagcaguucgacaagcucuacaucuggggcguccaccaccccgggaccgacaacgaccagaucuuccuguacagccaggcguccgggcggaucaccgugagcacgaagcgcagccagcagaccgugaucccgaacaucggcucccggccccgcguccggaacauccccagccgcaucuccaucuacuggaccaucgugaagcccggcgacauccugcucaucaacagcaccgggaaccugaucgccccgcggggcuacuucaagauccgcuccgggaaguccuccaucaugcggagcgacgcccccaucggcaagugcaacuccgagugcaucacgcccaacggcagcauccccaacgacaagccguuccagaacgugaaccgcaucaccuacggggccugcccccgguacgucaagcagaacacccugaagcucgccaccggcaugcgcaacgugcccgagaagcagacgcgggggaucuucggcgcgaucgccggguucaucgagaacggcugggagggcaugguggacgggugguacggcuuccgccaccagaacuccgaggggcggggccaggccgccgaccucaagagcacccaggccgcgaucgaccagaucaacgggaagcugaaccgccugaucggcaagaccaacgagaaguuccaccagaucgagaaggaguucuccgaggucgagggccggauccaggaccuggagaaguacguggaggacaccaagacggaccuguggagcuacaacgccgagcuccugguggcccuggagaaccagcacaccaucgaccucaccgacuccgagaugaacaagcuguucgagaagaccaagaagcagcugcgcgagaacgccgaggacauggggaacggcugcuucaagaucuaccacaagugcgacaacgccugcaucgggagcauccgcaacggcacguacgaccacgacgucuaccgggacgaggcgcucaacaaccgcuuccagaucaaggggguggagcugaaguccggcuacaaggacuggauccuguggaucagcuucgccaucuccugcuuccuccugugcguggcccugcucggcuucaucaugugggccugccagaaggggaacauccggugcaacaucugcaucuga

SEQ ID NO: 69470 - RNA, 1701 nt, Artificial Sequence; identical to SEQ ID NO: 69375
  derived and/or modified CDS sequence (opt1) from hemagglutinin__InfluenzaA__ADL28236

SEQ ID NO: 69471 - RNA, 1701 nt, Artificial Sequence; identical to SEQ ID NO: 66458
  derived and/or modified CDS sequence (opt1) from hemagglutinin__InfluenzaA__ADL28247

SEQ ID NO: 69472 - RNA, 1701 nt, Artificial Sequence; identical to SEQ ID NO: 69388
  derived and/or modified CDS sequence (opt1) from hemagglutinin__InfluenzaA__ADL28258

SEQ ID NO: 69473 - RNA, 1701 nt, Artificial Sequence; identical to SEQ ID NO: 66458
  derived and/or modified CDS sequence (opt1) from hemagglutinin__InfluenzaA__ADL28370

SEQ ID NO: 69474 - RNA, 1701 nt, Artificial Sequence; identical to SEQ ID NO: 66693
  derived and/or modified CDS sequence (opt1) from hemagglutinin__InfluenzaA__ADL29672

SEQ ID NO: 69475 - RNA, 1701 nt, Artificial Sequence; identical to SEQ ID NO: 66935
  derived and/or modified CDS sequence (opt1) from hemagglutinin__InfluenzaA__ADL29682

SEQ ID NO: 69476 - RNA, 1701 nt, Artificial Sequence; identical to SEQ ID NO: 66693
  derived and/or modified CDS sequence (opt1) from hemagglutinin__InfluenzaA__ADL29692

SEQ ID NO: 69477 - RNA, 1701 nt, Artificial Sequence
  derived and/or modified CDS sequence (opt1) from hemagglutinin__InfluenzaA__ADL29702
augaaggccauccuggugguccuccuguacaccuucgccaccgcgaacgccgacacgcugugcaucggcuaccacgccaacaacagcaccgacaccguggacaccgugcucgagaagaacgucacggugacccacuccgugaaccugcuggaggacaagcacaacgggaagcucugcaagcugcgcggcgucgcgccccugcaccucgggaagugcaacaucgccggcuggauccuggggaacccggagugcgagagccuguccaccgccagcuccuggagcuacaucguggagaccuccagcuccgacaacggcacgugcuaccccggcgacuucaucgacuacgaggagcuccgggagcagcugagcuccgugagcuccuucgagcgcuucgagaucuuccccaagaccagcuccuggcccaaccacgacagcaacaagggggucaccgccgccugcccgcacgccggcgcgaaguccuucuacaagaaccugaucuggcucgugaagaaggggaacagcuaccccaagcuguccaagagcuacaucaacgacaagggcaaggaggugcugguccucugggggauccaccaccccagcaccuccgccgaccagcagagccuguaccagaacgccgacacguacguguucgugggcaccucccgguacagcaagaaguucaagcccgagaucgccauccgcccgaagguccgggaccaggagggccgcaugaacuacuacuggacccugguggagcccggggacaagaucaccuucgaggccacgggcaaccucguggucccccgguacgcguucgccauggagcgcaacgccggguccggcaucaucaucagcgacacccccgugcacgacugcaacacgaccugccagaccccgaagggcgccaucaacaccucccugcccuuccagaacauccaccccaucaccaucgggaagugccccaaguacgucaagagcaccaagcugcggcucgccacgggccugcgcaacgugccguccauccagagccgggggcuguucggcgcgaucgccggguucaucgagggcggcuggaccgggaugguggacggcugguacggguaccaccaccagaacgagcagggcuccggguacgccgccgaccucaagagcacccagaacgccaucgacgagaucaccaacaaggugaacuccgucaucgagaagaugaacacgcaguucaccgcggugggcaaggaguucaaccaccuggagaagcgcaucgagaaccugaacaagaagaucgacgacggcuuccucgacaucuggaccuacaacgccgagcugcugguccuccuggagaacgagcggacccuggacuaccacgacagcaacgugaagaaccucuacgagaaggugcgcaaccagcugaagaacaacgccaaggagaucgggaacggcugcuucgaguucuaccacaagugcgacaacacgugcauggaguccgucaagaacgggaccuacgacuaccccaaguacagcgaggaggccaagcugaaccgggaggagaucgacggcgugaagcucgaguccacccgcaucuaccagauccuggccaucuacagcaccguggcguccagccugguccucguggugagccugggggccaucuccuucuggaugugcagcaacggcucccugcagugccggaucugcaucuga

SEQ ID NO: 69478 - RNA, 1701 nt, Artificial Sequence; identical to SEQ ID NO: 66693
  derived and/or modified CDS sequence (opt1) from hemagglutinin__InfluenzaA__ADL29730

SEQ ID NO: 69479 - RNA, 1701 nt, Artificial Sequence; identical to SEQ ID NO: 66693
  derived and/or modified CDS sequence (opt1) from hemagglutinin__InfluenzaA__ADL29740

SEQ ID NO: 69480 - RNA, 1701 nt, Artificial Sequence; identical to SEQ ID NO: 66693
  derived and/or modified CDS sequence (opt1) from hemagglutinin__InfluenzaA__ADL29750

SEQ ID NO: 69481 - RNA, 1701 nt, Artificial Sequence
  derived and/or modified CDS sequence (opt1) from hemagglutinin__InfluenzaA__ADL29760
augaaggccauccuggugguccuccuguacaccuucgccaccgcgaacgccgacacgcugugcaucggcuaccacgccaacaacagcaccgacaccguggacaccgugcucgagaagaacgucacggugacccacuccgugaaccugcuggaguacaagcacaacgggaagcucugcaagcugcgcggcgucgcgccccugcaccucgggaagugcaacaucgccggcuggauccuggggaacccggagugcgagagccuguccaccgccagcuccuggagcuacaucguggagaccuccagcuccgacaacggcacgugcuaccccggcgacuucaucgacuacgaggagcuccgggagcagcugagcuccgugagcuccuucgagcgcuucgagaucuuccccaagaccagcuccuggcccaaccacgacagcaacaagggggucaccgccgccugcccgcacgccggcgcgaaguccuucuacaagaaccugaucuggcucgugaagaaggggaacagcuaccccaagcuguccaagagcuacaucaacgacaagggcaaggaggugcugguccucugggggauccaccaccccagcaccuccgccgaccagcagagccuguaccagaacgccgacgccuacguguucgugggcacgucccgguacagcaagaaguucaagcccgagaucgccauccgcccgaagguccgggaccaggagggccgcaugaacuacuacuggacccugguggagcccggggacaagaucaccuucgaggcgaccggcaaccucguggucccccgguacgccuucgccauggagcgcaacgccggguccggcaucaucaucagcgacacgcccgugcacgacugcaacacgaccugccagaccccgaagggcgccaucaacaccucccugcccuuccagaacauccaccccaucaccaucgggaagugccccaaguacgucaagagcaccaagcugcggcucgcgaccggccugcgcaacgugccguccauccagagccgggggcuguucggcgccaucgccggguucaucgagggcggcuggacggggaugguggacggcugguacggguaccaccaccagaacgagcagggcuccggguacgccgccgaccucaagagcacccagaacgcgaucgacgagaucaccaacaaggugaacuccgucaucgagaagaugaacacccaguucacggccgugggcaaggaguucaaccaccuggagaagcgcaucgagaaccugaacaagaaggucgacgacggcuuccucgacaucuggaccuacaacgccgagcugcuggugcuccuggagaacgagcggacccuggacuaccacgacagcaacgugaagaaccucuacgagaagguccgcucccagcugaagaacaacgccaaggagaucgggaacggcugcuucgaguucuaccacaagugcgacaacacgugcauggagagcgugaagaacgggaccuacgacuaccccaaguacuccgaggaggccaagcugaaccgggaggagaucgacggcgugaagcucgagagcacccgcaucuaccagauccuggcgaucuacuccaccgucgccagcagccuggugcucguggucucccugggggccaucagcuucuggaugugcuccaacggcagccugcagugccggaucugcaucuga

SEQ ID NO: 69482 - RNA, 1701 nt, Artificial Sequence; identical to SEQ ID NO: 66693
  derived and/or modified CDS sequence (opt1) from hemagglutinin__InfluenzaA__ADL29770

SEQ ID NO: 69483 - RNA, 1701 nt, Artificial Sequence; identical to SEQ ID NO: 68193
  derived and/or modified CDS sequence (opt1) from hemagglutinin__InfluenzaA__ADL29780

SEQ ID NO: 69484 - RNA, 1701 nt, Artificial Sequence
  derived and/or modified CDS sequence (opt1) from hemagglutinin__InfluenzaA__ADL29879
augaaggccauccuggugguccuccuguacaccuucgccaccgcgaacgccgacacgcugugcaucggcuaccacgccaacaacagcaccgacaccguggacaccgugcucgagaagaacgucacggugacccacuccgugaaccugcuggaggacaagcacaacgggaagcucugcaagcugcgcggcgucgcgccccugcaccucgggaagugcaacaucgccggcuggauccuggggaacccggagugcgagagccuguccaccgccagcuccuggagcuacaucguggagaccuccagcuccgacaacggcacgugcuaccccggcgacuucaucgacuacgaggagcuccgggagcagcugagcuccgugagcuccuucgagcgcuucgagaucuuccccaagaccagcuccuggcccaaccacgacagcaacaagggggucaccgccgccugcccgcacgccggcgcgaaguccuucuacaagaaccugaucuggcucgugaagaaggggaacagcuaccccaagcuguccaagagcuacaucaacgacaagggcaaggaggugcugguccucugggggauccaccaccccagcaccuccgccgaccagcagagccuguaccagaacgccgacuccuacguguucgugggcacgagcaaguacuccaagaaguucaagcccgagaucgccauccggccgaagguccgcgaccaggagggccggaugaacuacuacuggacccugguggagcccggggacaagaucaccuucgaggccaccggcaaccucguggucccccgcuacgcguucgccauggagcggaacgccgggagcggcaucaucaucuccgacacgcccgugcacgacugcaacacgaccugccagaccccgaagggcgccaucaacaccagccugcccuuccagaacauccaccccaucaccaucgggaagugccccaaguacgugaaguccaccaagcugcgccucgccaccggccugcggaacgucccgagcauccagucccgcgggcuguucggcgcgaucgccggguucaucgagggcggcuggacggggaugguggacggcugguacggguaccaccaccagaacgagcagggcagcggguacgccgccgaccucaaguccacccagaacgccaucgacgagaucaccaacaaggugaacagcgucaucgagaagaugaacacccaguucacggcggugggcaaggaguucaaccaccuggagaagcggaucgagaaccugaacaagaaggucgacgacggcuuccucgacaucuggaccuacaacgccgagcugcuggugcuccuggagaacgagcgcacccuggacuaccacgacuccaacgugaagaaccucuacgagaagguccggagccagcugaagaacaacgccaaggagaucgggaacggcugcuucgaguucuaccacaagugcgacaacacgugcauggaguccgugaagaacgggaccuacgacuaccccaaguacagcgaggaggccaagcugaaccgcgaggagaucgacggcgugaagcucgaguccacccggaucuaccagauccuggccaucuacagcaccgucgcgagcucccuggugcucguggucagccugggggccaucuccuucuggaugugcagcaacggcucccugcagugccgcaucugcaucuga

SEQ ID NO: 69485 - RNA, 1701 nt, Artificial Sequence
  derived and/or modified CDS sequence (opt1) from hemagglutinin__InfluenzaA__ADL32017
augaaggccauccuggugguccuccuguacaccuucgccaccgcgaacgccgacacgcugugcaucggcuaccacgccaacaacagcaccgacaccguggacaccgugcucgagaagaacgucacggugacccacuccgugaaccugcuggaggacaagcacaacgggaagcucugccagcugcgcggcgucgcgccccugcaccucgggaagugcaacaucgccggcuggauccuggggaacccggagugcgagagccuguccaccgccagcuccuggagcuacaucguggagaccuccagcuccgacaacggcacgugcuaccccggcgacuucaucgacuacgaggagcuccgggagcagcugagcuccgugagcuccuucgagcgcuucgagaucuuccccaagaccagcuccuggcccaaccacgacagcaacaagggggucaccgccgccugcccgcacgccggcgcgaaguccuucuacaagaaccugaucuggcucgugaagaaggggaacagcuaccccaagcuguccaagagcuacaucaacgacaagggcaaggaggugcugguccucugggggauccaccaccccagcaccuccgccgaccagcagagccuguaccagaacgccgacacguacguguucgugggcaccucccgguacagcaagaaguucaagcccgagaucgccauccgcccgaagguccgggaccaggagggccgcaugaacuacuacuggacccugguggagcccggggacaagaucaccuucgaggccacgggcaaccucguggucccccgguacgcguucgccauggagcgcaacgccggguccggcaucaucaucagcgacacccccgugcacgacugcaacacgaccugccagaccccgaagggcgccaucaacaccucccugcccuuccagaacauccaccccaucaccaucgggaagugccccaaguacgucaagagcaccaagcugcggcucgccacgggccugcgcaacgugccguccauccagagccgggggcuguucggcgcgaucgccggguucaucgagggcggcuggaccgggaugguggacggcugguacggguaccaccaccagaacgagcagggcuccggguacgccgccgaccucaagagcacccagaacgccaucgacgagaucaccaacaaggugaacuccgucaucgagaagaugaacacgcaguucaccgcggugggcaaggaguucaaccaccuggagaagcgcaucgagaaccugaacaagaagaucgacgacggcuuccucgacaucuggaccuacaacgccgagcugcugguccuccuggagaacgagcggacccuggacuaccacgacagcaacgugaagaaccucuacgagaaggugcgcucccagcugaagaacaacgccaaggagaucgggaacggcugcuucgaguucuaccacaagugcgacaacacgugcauggagagcgucaagaacgggaccuacgacuaccccaaguacuccgaggaggccaagcugaaccgggaggagaucgacggcgugaagcucgagagcacccgcaucuaccagauccuggccaucuacuccaccguggcgagcagccugguccucguggugucccugggggccaucagcuucuggaugugcuccaacggcagccugcagugccggaucugcaucuga

SEQ ID NO: 69486 - RNA, 1701 nt, Artificial Sequence
  derived and/or modified CDS sequence (opt1) from hemagglutinin__InfluenzaA__ADL32037
augaaggccauccuggugguccuccuguacaccuucgccaccgcgaacgccgacacgcugugcaucggcuaccacgccaacaacagcaccgacaccguggacaccgugcucgagaagaacgucacggugacccacuccgugaaccugcuggaggacaagcacaacgggaagcucugcaagcugcgcggcgucgcgccccugcaccucgggaagugcaacaucgccggcuggauccuggggaacccggagugcgagagccuguccaccgccagcuccuggagcuacaucguggagaccuccagcuccgacaacggcacgugcuaccccggcgacuucaucgacuacgaggagcuccgggagcagcugagcuccgugagcuccuucgagcgcuucgagaucuuccccaagaccagcuccuggcccaaccacgacagcaacaagggggucaccgccgccugcccgcacgccggcgcgaaguccuucuacaagaaccugaucuggcucgugaagaaggggaacagcuaccccaagcuguccaagagcuacaucaacgacaagggcaaggaggugcugguccucugggggauccaccaccccagcaccuccguggaccagcagagccuguaccagaacgccgacgccuacguguucgucggcacgucccgguacagcaagaaguucaagcccgagaucgccauccgcccgaaggugcgggaccaggagggccgcaugaacuacuacuggacccugguggagcccggggacaagaucaccuucgaggccaccggcaaccucgucgugccccgguacgcguucgccauggagcgcaacgccggguccggcaucaucaucagcgacacgcccgugcacgacugcaacacgaccugccagaccccgaagggcgccaucaacaccucccugcccuuccagaacauccaccccaucaccaucgggaagugccccaaguacgucaagagcaccaagcugcggcucgccaccggccugcgcaacgugccguccauccagagccgggggcuguucggcgcgaucgccggguucaucgagggcggcuggacggggaugguggacggcugguacggguaccaccaccagaacgagcagggcuccggguacgccgccgaccucaagagcacccagaacgccaucgacgagaucaccaacaaggucaacuccgugaucgagaagaugaacacccaguucacggcggucggcaaggaguucaaccaccuggagaagcgcaucgagaaccugaacaagaagguggacgacggcuuccucgacaucuggaccuacaacgccgagcugcuggugcuccuggagaacgagcggacccuggacuaccacgacagcaacgucaagaaccucuacgagaaggugcgcucccagcugaagaacaacgccaaggagaucgggaacggcugcuucgaguucuaccacaagugcgacaacacgugcauggagagcgugaagaacgggaccuacgacuaccccaaguacuccgaggaggccaagcugaaccgggaggagaucgacggcgucaagcucgagagcacccgcaucuaccagauccuggccaucuacuccaccguggcgagcagccuggugcucgucgugucccugggggccaucagcuucuggaugugcuccaacggcagccugcagugccggaucugcaucuga

SEQ ID NO: 69487 - RNA, 1701 nt, Artificial Sequence; identical to SEQ ID NO: 66693
  derived and/or modified CDS sequence (opt1) from hemagglutinin__InfluenzaA__ADL32047

SEQ ID NO: 69488 - RNA, 1701 nt, Artificial Sequence
  derived and/or modified CDS sequence (opt1) from hemagglutinin__InfluenzaA__ADL32057
augaaggccauccuggugguccuccuguacaccuucgccaccgcgaacgccgacacgcugugcaucggcuaccacgccaacaacagcaccgacaccguggacaccgugcucgagaagaacgucacggugacccacuccgugaaccugcuggaggacaagcacaacgggaagcucugcaagcugcgcggcgucgcgccccugcaccucgggaagugcaacaucgccggcuggauccuggggaacccggagugcgagagccuguccaccgccagcuccuggagcuacaucguggagaccuccagcuccgacaacggcacgugcuaccccggcgacuucaucgacuacgaggagcuccgggagcagcugagcuccgugagcuccuucgagcgcuucgagaucuuccccaagaccagcuccuggcccaaccacgacagcaacaagggggucaccgccgccugcccgcacgccggcgcgaaguccuucuacaagaaccugaucuggcucgugaagaaggggaacagcuaccccaagcuguccaagagcuacaucaacgacaagggcaaggaggugcugguccucugggggauccaccaccccagcaccuccgccgaccagcagggccuguaccagaacgccgacgccuacguguucgugggcacgagccgguacuccaagaaguucaagcccgagaucgccauccgcccgaagguccgggaccaggaggggcgcaugaacuacuacuggacccugguggagcccggcgacaagaucaccuucgaggcgaccgggaaccucguggucccccgguacgccuucgccauggagcgcaacgccggcagcggcaucaucaucuccgacacgcccgugcacgacugcaacacgaccugccagaccccgaagggggccaucaacaccagccugcccuuccagaacauccaccccaucaccaucggcaagugccccaaguacgugaaggggaccaagcugcggcucgcgaccggccugcgcaacgucccguccauccagagccgggggcuguucggcgccaucgccggcuucaucgagggcggguggacggggaugguggacggcugguacggguaccaccaccagaacgagcagggcuccggcuacgccgccgaccucaagagcacccagaacgcgaucgacgagaucaccaacaaggugaacuccgucaucgagaagaugaacacccaguucacggccguggggaaggaguucaaccaccuggagaagcgcaucgagaaccugaacaagaaggucgacgacggcuuccucgacaucuggaccuacaacgccgagcugcuggugcuccuggagaacgagcggacccuggacuaccacgacagcaacgugaagaaccucuacgagaagguccgcucccagcugaagaacaacgccaaggagaucgggaacggcugcuucgaguucuaccacaagugcgacaacacgugcauggagagcgugaagaacgggaccuacgacuaccccaaguacuccgaggaggccaagcugaaccgggaggagaucgacggcgugaagcucgagagcacccgcaucuaccagauccuggcgaucuacuccaccgucgccagcucccuggugcucguggucagccugggcgccaucagcuucuggaugugcuccaacgggagccugcagugccggaucugcaucuga

SEQ ID NO: 69489 - RNA, 1701 nt, Artificial Sequence; identical to SEQ ID NO: 66693
  derived and/or modified CDS sequence (opt1) from hemagglutinin__InfluenzaA__ADL32090

SEQ ID NO: 69490 - RNA, 1701 nt, Artificial Sequence; identical to SEQ ID NO: 66693
  derived and/or modified CDS sequence (opt1) from hemagglutinin__InfluenzaA__ADL32114

SEQ ID NO: 69491 - RNA, 1701 nt, Artificial Sequence; identical to SEQ ID NO: 66693
  derived and/or modified CDS sequence (opt1) from hemagglutinin__InfluenzaA__ADL32344

SEQ ID NO: 69492 - RNA, 1701 nt, Artificial Sequence; identical to SEQ ID NO: 67140
  derived and/or modified CDS sequence (opt1) from hemagglutinin__InfluenzaA__ADL32354

SEQ ID NO: 69493 - RNA, 1701 nt, Artificial Sequence
  derived and/or modified CDS sequence (opt1) from hemagglutinin__InfluenzaA__ADL32364
augaaggccauccuggugguccuccuguacaccuucgccaccgcgaacgccgacacgcugugcaucggcuaccacgccaacaacagcaccgacaccguggacaccgugcucgagaagaacgucacggugacccacuccgugaaccugcuggaggacaagcacaacgggaagcucugcaagcugcgcggcgucgcgccccugcaccucgggaagugcaacaucgccggcuggauccuggggaacccggagugcgagagccuguccaccgcgaucagcugguccuacaucguggagaccagcuccagcgacaacggcacgugcuaccccggcgacuucaucgacuacgaggagcuccgggagcagcuguccagcguguccagcuucgagcgcuucgagaucuuccccaagaccuccagcuggcccaaccacgacuccaacaagggggucaccgccgccugcccgcacgccggcgccaagagcuucuacaagaaccugaucuggcucgugaagaaggggaacuccuaccccaagcugagcaaguccuacaucaacgacaagggcaaggaggugcugguccucugggggauccaccaccccagcaccagcgccgaccagcagucccuguaccagaacgccgacacguacguguucgugggcaccagccgguacuccaagaaguucaagcccgagaucgccauccgcccgaagguccgggaccaggagggccgcaugaacuacuacuggacccugguggagcccggggacaagaucaccuucgaggccacgggcaaccucguggucccccgguacgcguucgccauggagcgcaacgccgggagcggcaucaucaucuccgacacccccgugcacgacugcaacacgaccugccagaccccgaagggcgccaucaacaccagccugcccuuccagaacauccaccccaucaccaucgggaagugccccaaguacgugaaguccaccaagcugcggcucgccacgggccugcgcaacgucccgagcauccagucccgggggcuguucggcgcgaucgccggguucaucgagggcggcuggaccgggaugguggacggcugguacggguaccaccaccagaacgagcagggcagcggguacgccgccgaccucaaguccacccagaacgccaucgacgagaucaccaacaaggugaacagcgucaucgagaagaugaacacgcaguucaccgcggugggcaaggaguucaaccaccuggagaagcgcaucgagaaccugaacaagaagaucgacgacggcuuccucgacaucuggaccuacaacgccgagcugcugguccuccuggagaacgagcggacccuggacuaccacgacuccaacgugaagaaccucuacgagaaggugcgcagccagcugaagaacaacgccaaggagaucgggaacggcugcuucgaguucuaccacaagugcgacaacacgugcauggaguccgucaagaacgggaccuacgacuaccccaaguacagcgaggaggccaagcugaaccgggaggagaucgacggcgugaagcucgaguccacccgcaucuaccagauccuggccaucuacagcaccguggcguccagccugguccucguggugagccugggggccaucuccuucuggaugugcagcaacggcucccugcagugccggaucugcaucuga

SEQ ID NO: 69494 - RNA, 1701 nt, Artificial Sequence; identical to SEQ ID NO: 66693
  derived and/or modified CDS sequence (opt1) from hemagglutinin__InfluenzaA__ADL32374

SEQ ID NO: 69495 - RNA, 1701 nt, Artificial Sequence
  derived and/or modified CDS sequence (opt1) from hemagglutinin__InfluenzaA__ADL32384
augaaggccauccuggugguccuccuguacaccuucgccaccgcgacggccgacacccugugcaucggcuaccacgccaacaacagcaccgacaccguggacacggugcucgagaagaacgucaccgugacccacuccgugaaccugcuggaggacaagcacaacgggaagcucugcaagcugcgcggcgucgcgccccugcaccucgggaagugcaacaucgccggcuggauccuggggaacccggagugcgagagccuguccaccgccagcuccuggagcuacaucguggagacguccagcuccgacaacgggaccugcuaccccggcgacuucaucgacuacgaggagcuccgggagcagcugagcuccgugagcuccuucgagcgcuucgagaucuuccccaagaccagcuccuggcccaaccacgacagcaacaagggcgucaccgccgccugcccgcacgccggcgcgaaguccuucuacaagaaccugaucuggcucgugaagaaggggaacagcuaccccaagcuguccaagagcuacaucaacgacaagggcaaggaggugcugguccucugggggauccaccaccccagcacguccgccgaccagcagagccuguaccagaacgccgacgccuacguguucgugggcaccucccgguacagcaagaaguucaagcccgagaucgccauccgcccgaagguccgggaccaggagggccgcaugaacuacuacuggacccugguggagcccggggacaagaucaccuucgaggcgacgggcaaccucguggucccccgguacgccuucgccauggagcgcaacgccggguccggcaucaucaucagcgacacccccgugcacgacugcaacacgaccugccagaccccgaagggcgccaucaacaccucccugcccuuccagaacauccaccccaucaccaucgggaagugccccaaguacgucaagagcaccaagcugcggcucgcgacgggccugcgcaacgugccguccauccagagccgggggcuguucggcgccaucgccggguucaucgagggcggcuggaccgggaugguggacggcugguacggguaccaccaccagaacgagcagggcuccggguacgccgccgaccucaagagcacccagaacgcgaucgacgagaucaccaacaaggugaacuccgucaucgagaagaugaacacgcaguucaccgccgugggcaaggaguucaaccaccuggagaagcgcaucgagaaccugaacaagaaggucgacgacggcuuccucgacaucuggaccuacaacgccgagcugcuggugcuccuggagaacgagcggacccuggacuaccacgacagcaacgugaagaaccucuacgagaagguccgcucccagcugaagaacaacgccaaggagaucgggaacggcugcuucgaguucuaccacaagugcgacaacacgugcauggagagcgugaagaacgggaccuacgacuaccccaaguacuccgaggaggccaagcugaaccgggaggagaucgacggcgugaagcucgagagcacccgcaucuaccagauccuggcgaucuacuccaccgucgccagcagccuggugcucguggucucccugggggccaucagcuucuggaugugcuccaacggcagccugcagugccggaucugcaucuga

SEQ ID NO: 69496 - RNA, 1701 nt, Artificial Sequence
  derived and/or modified CDS sequence (opt1) from hemagglutinin__InfluenzaA__ADL32394
augaaggccauccuggugguccuccuguacaccuucgccaccgcgaacgccgacacgcugugcaucggcuaccacgccaacaacagcaccgacaccguggacaccgugcucgagaagaacgucacggugacccacuccgugaaccugcuggaggacaagcacaacgggaagcucugcaagcugcgcggcgucgcgccccugcaccucgggaagugcaacaucgccggcuggauccuggggaacccggagugcgagagcuucuccaccaccagcuccuggagcuacaucguggagacguccagcuccgacaacgggaccugcuaccccggcgacuucaucgacuacgaggagcugcgggagcagcucagcuccgugagcuccuucgagcgcuucgagaucuuccccaagaccagcuccuggcccaaccacgacagcaacaagggcgucaccgccgccugcccgcacgccggcgccaaguccuucuacaagaaccugaucuggcuggugaagaaggggaacagcuaccccaagcucuccaagagcuacaucaacgacaagggcaaggaggugcugguccugugggggauccaccaccccagcacguccgcggaccagcagagccucuaccagaacgccgacaccuacguguucgugggcaccucccgguacagcaagaaguucaagcccgagaucgccauccgcccgaagguccgggaccaggagggccgcaugaacuacuacuggacccugguggagcccggggacaagaucacguucgaggccaccggcaaccugguggucccccgguacgccuucgcgauggagcgcaacgccggguccggcaucaucaucagcgacacccccgugcacgacugcaacaccacgugccagaccccgaagggcgccaucaacaccucccuccccuuccagaacauccaccccaucaccaucgggaagugccccaaguacgucaagagcacgaagcugcggcuggccaccggccuccgcaacgugccguccauccagagccgggggcuguucggcgccaucgcgggguucaucgagggcggcuggaccgggaugguggacggcugguacggguaccaccaccagaacgagcagggcuccggguacgccgccgaccucaagagcacccagaacgccaucgacgagaucacgaacaaggugaacuccgucaucgagaagaugaacacccaguucaccgccgugggcaaggaguucaaccaccuggagaagcgcaucgagaaccugaacaagaagaucgacgacggcuuccuggacaucuggaccuacaacgcggagcuccugguccugcucgagaacgagcggacgcuggacuaccacgacagcaacgugaagaaccuguacgagaaggugcgcucccagcucaagaacaacgccaaggagaucgggaacggcugcuucgaguucuaccacaagugcgacaacacgugcauggagagcgucaagaacgggaccuacgacuaccccaaguacuccgaggaggccaagcugaaccgggaggagaucgacggcgugaagcuggagagcacccgcaucuaccagauccucgccaucuacuccaccguggccagcagccugguccugguggugucccucggggcgaucagcuucuggaugugcuccaacggcagccugcagugccggaucugcaucuga

SEQ ID NO: 69497 - RNA, 1701 nt, Artificial Sequence; identical to SEQ ID NO: 66693
  derived and/or modified CDS sequence (opt1) from hemagglutinin__InfluenzaA__ADL32404

SEQ ID NO: 69498 - RNA, 1701 nt, Artificial Sequence
  derived and/or modified CDS sequence (opt1) from hemagglutinin__InfluenzaA__ADL32414
augaaggccauccuggugguccuccuguacaccuucgccaccgcgaacgccgacacgcugugcaucggcuaccacgccaacaacagcaccgacaccguggacaccgugcucgagaagaacgucacggugacccacuccgugaaccugcuggaggacaagcacaacgggaagcucugcaagcugcgcggcgucgcgccccugcaccucgggaagugcaacaucgccggcuggauccuggggaacccggagugcgagagccuguccaccgccagcuccuggagcuacaucguggagaccuccagcuccgacaacggcacgugcuaccccggcgacuucaucgacuacgaggagcuccgggagcagcugagcuccgugagcuccuucgagcgcuucgagaucuuccccaagaccagcuccuggcccaaccacgacagcaacaagggggucaccgccgccugcccgcacgccggcgcgaaguccuucuacaagaaccugaucuggcucgugaagaaggggaacagcuaccccaagcuguccaagagcuacaucaacgacaagggcaaggaggugcugguccucugggggauccaccaccccagcaccuccgccgaccagcagagccuguaccagaacgccgacgccuacguguucgugggcacgucccgguacagcaagaaguucaagcccgagaucgccauccgcccgaagguccgggcgcaggagggccgcaugaacuacuacuggacccugguggagcccggggacaagaucaccuucgaggccaccggcaaccucguggucccccgguacgccuucgccauggagcgcaacgccggguccggcaucaucaucagcgacacgcccgugcacgacugcaacacgaccugccagaccccgaagggcgcgaucaacaccucccugcccuuccagaacauccaccccaucaccaucgggaagugccccaaguacgucaagagcaccaagcugcggcucgccaccggccugcgcaacgugccguccauccagagccgggggcuguucggcgccaucgccggguucaucgagggcggcuggacggggaugguggacggcugguacggguaccaccaccagaacgagcagggcuccggguacgccgcggaccucaagagcacccagcacgccaucgacgagaucaccaacaaggugaacuccgucaucgagaagaugaacacccaguucacggccgugggcaaggaguucaaccaccuggagaagcgcaucgagaaccugaacaagaaggucgacgacggcuuccucgacaucuggaccuacaacgccgagcugcuggugcuccuggagaacgagcggacccuggacuaccacgacagcaacgugaagaaccucuacgagaagguccgcucccagcugaagaacaacgccaaggagaucgggaacggcugcuucgaguucuaccacaagugcgacaacacgugcauggagagcgugaagaacgggaccuacgacuaccccaaguacuccgaggaggcgaagcugaaccgggaggagaucgacggcgugaagcucgagagcacccgcaucuaccagauccuggccaucuacuccaccgucgccagcagccuggugcucguggucucccugggggccaucagcuucuggaugugcuccaacggcagccugcagugccggaucugcaucuga

SEQ ID NO: 69499 - RNA, 1701 nt, Artificial Sequence
  derived and/or modified CDS sequence (opt1) from hemagglutinin__InfluenzaA__ADL32424
augaaggccauccuggugguccuccuguacaccuucgccaucgcgaacgccgacacccugugcaucggcuaccacgccaacaacagcacggacaccguggacaccgugcucgagaagaacgucaccgugacgcacuccgugaaccugcuggaggacaagcacaacgggaagcucugcaagcugcgcggcgucgcgccccugcaccucgggaagugcaacaucgccggcuggauccuggggaacccggagugcgagagccuguccaccgccagcuccuggagcuacaucguggagaccuccagcuccgacaacgggaccugcuaccccggcgacuucaucgacuacgaggagcuccgggagcagcugagcuccgugagcuccuucgagcgcuucgagaucuuccccaagacgagcuccuggcccaaccacgacagcaacaagggcgucaccgccgccugcccgcacgccggcgcgaaguccuucuacaagaaccugaucuggcucgugaagaaggggaacagcuaccccaagcuguccaagagcuacaucaacgacaagggcaaggaggugcugguccucugggggauccaccaccccagcaccuccgccgaccagcagagccuguaccagaacgccgacgccuacguguucgugggcaccucccgguacagcaagaaguucaagcccgagaucgccauccgcccgaagguccgggaccaggagggccgcaugaacuaccacuggacgcugguggagcccggggacaagaucaccuucgaggcgaccggcaaccucguggucccccgguacgccuucgccauggagcgcaacgccggguccggcaucaucaucagcgacacccccgugcacgacugcaacacgaccugccagaccccgaagggcgccaucaacaccucccugcccuuccagaacauccaccccaucacgaucgggaagugccccaaguacgucaagagcaccaagcugcggcucgcgaccggccugcgcaacgugccguccauccagagccgggggcuguucggcgccaucgccggguucaucgagggcggcuggaccgggaugguggacggcugguacggguaccaccaccagaacgagcagggcuccggguacgccgccgaccucaagagcacgcagcacgcgaucgacgagaucaccaacaaggugaacuccgucaucgagaagaugaacacccaguucaccgccgugggcaaggaguucaaccaccuggagaagcgcaucgagaaccugaacaagaaggucgacgacggcuuccucgacaucuggacguacaacgccgagcugcuggugcuccuggagaacgagcggacccuggacuaccacgacagcaacgugaagaaccucuacgagaagguccgcucccagcugaagaacaacgccaaggagaucgggaacggcugcuucgaguucuaccacaagugcgacaacacgugcauggagagcgugaagaacgggaccuacgacuaccccaaguacuccgaggaggccaagcugaaccgggaggagaucaacggcgugaagcucgagagcacccgcaucuaccagauccuggcgaucuacuccaccgucgccagcagccuggugcucguggucucccugggggccaucagcuucuggaugugcuccaacggcagccugcagugccggaucugcaucuga

SEQ ID NO: 69500 - RNA, 1701 nt, Artificial Sequence
  derived and/or modified CDS sequence (opt1) from hemagglutinin__InfluenzaA__ADL32434
augaaggccauccuggugguccuccuguacaccuucgccaccgcgaacgccgacacgcugugcaucggcuaccacgccaacaacagcaccgacaccguggacaccgugcucgagaagaacgucacggugacccacuccgugaaccugcuggaggacaagcacaacgggaagcucugcaagcugcgcggcgucgcgccccugcaccucgggaagugcaacaucgccggcuggauccuggggaacccggagugcgagagccuguccaccgccagcuccuggagcuacaucguggagaccuccagcuccgacaacggcacgugcuaccccggcgacuucaucgacuacgaggagcuccgggagcagcugagcuccgugagcuccuucgagcgcuucgagaucuuccccaagaccagcuccuggcccauccacgacagcaacaagggggucaccgccgccugcccgcacgccggcgcgaaguccuucuacaagaaccugaucuggcucgugaagaaggggaacagcuaccccaagcuguccaagagcuacaucaacgacaagggcaaggaggugcugguccucugggggauccaccaccccagcaccuccgccgaccagcagagccuguaccagaacgccgacgccuacguguucgugggcacgucccgguacagcaagaaguucaagcccgagaucgccauccgcccgaagguccgggaccaggagggccgcaugaacuacuacuggauccugguggagcccggggacaagaucaccuucgaggcgaccggcaaccucguggucccccgguacgccuucgccauggagcgcaacgccggguccggcaucaucaucagcgacacccccgugcacgacugcaacacgaccugccagaccccgaagggcgccaucaacaccucccugcccuuccagaacauccaccccaucacgaucgggaagugccccaaguacgucaagagcaccaagcugcggcucgcgaccggccugcgcaacgugccguccauccagagccgggggcuguucggcgccaucgccggguucaucgagggcggcuggaccgggaugguggacggcugguacggguaccaccaccagaacgagcagggcuccggguacgccgccgaccucaagagcacgcagcacgcgaucgacgagaucaccaacaaggugaacuccgucaucgagaagaugaacacccaguucaccgccgugggcaaggaguucaaccaccuggagaagcgcaucgagaaccugaacaagaaggucgacgacggcuuccucgacaucuggacguacaacgccgagcugcuggugcuccuggagaacgagcggacccuggacuaccacgacagcaacgugaagaaccucuacgagaagguccgcucccagcugaagaacaacgccaaggagaucgggaacggcugcuucgaguucuaccacaagugcgacaacacgugcauggagagcgugaagaacgggaccuacgacuaccccaaguacuccgaggaggccaagcugaaccgggaggagaucgacggcgugaagcucgagagcacccgcaucuaccagauccuggcgaucuacuccaccgucgccagcagccuggugcucguggucucccugggggccaucagcuucuggaugugcuccaacggcagccugcagugccggaucugcaucuga

SEQ ID NO: 69501 - RNA, 1701 nt, Artificial Sequence; identical to SEQ ID NO: 68113
  derived and/or modified CDS sequence (opt1) from hemagglutinin__InfluenzaA__ADL32444

SEQ ID NO: 69502 - RNA, 1701 nt, Artificial Sequence
  derived and/or modified CDS sequence (opt1) from hemagglutinin__InfluenzaA__ADL32454
auggaggccauccuggugguccuccuguacaccuucgccaccgcgaacgccgacacgcugugcaucggcuaccacgccaacaacagcaccgacaccguggacaccgugcucgagaagaacgucacggugacccacuccgugaaccugcuggaggacaagcacaacgggaagcucugcaagcugcgcggcgucgcgccccugcaccucgggaagugcaacaucgccggcuggauccuggggaacccggagugcgagagccuguccaccgccagcuccuggagcuacaucguggagaccuccagcuccgacaacggcacgugcuaccccggcgacuucaucgacuacgaggagcuccgggagcagcugagcuccgugagcuccuucgagcgcuucgagaucuuccccaagaccagcuccuggcccaaccacgacagcaacaagggggucaccgccgccugcccgcacgccggcgcgaaguccuucuacaagaaccugaucuggcucgugaagaaggggaacagcuaccccaagcuguccaagagcuacaucaacgacaagggcaaggaggugcugguccucugggggauccaccaccccagcaccuccgccgaccagcagagccuguaccagaacgccgacgccuacguguucgugggcuccagccgguacuccaagaaguucaagcccgagaucgccauccgcccgaagguccgggaccaggagggccgcaugaacuacuacuggacgcugguggagcccggggacaagaucaccuucgaggcgaccggcaaccucguggucccccgguacgccuucgccauggagcgcaacgccgggagcggcaucaucaucuccgacacccccgugcacgacugcaacacgaccugccagaccccgaagggcgccaucaacaccagccugcccuuccacaacauccaccccaucacgaucgggaagugccccaaguacgugaaguccaccaagcugcggcucgcgaccggccugcgcaacgucccgagcauccagucccgggggcuguucggcgccaucgccggguucaucgagggcggcuggaccgggaugguggacggcugguacggguaccaccaccagaacgagcagggcagcggguacgccgccgaccucaaguccacgcagaacgcgaucgacgagaucaccaacaaggugaacagcgucaucgagaagaugaacacccaguucaccgccgugggcaaggaguucaaccaccuggagaagcgcaucgagaaccugaacaagaaggucgacgacggcuuccucgacaucuggacguacaacgccgagcugcuggugcuccuggagaacgagcggacccuggacuaccacgacuccaacgugaagaaccucuacgagaagguccgcagccagcugaagaacaacgccaaggagcuggggaacggcugcuucgaguucuaccacaagugcgacaacacgugcauggaguccgugaagaacgggaccuacgacuaccccaaguacagcgaggaggccaagcucaaccgggaggagaucgacggcgugaagcuggaguccacccgcaucuaccagauccuggcgaucuacagcaccgucgccagcucccucgugcugguggucagccugggggccaucuccuucuggaugugcagcaacggcucccuccagugccggaucugcaucuga

SEQ ID NO: 69503 - RNA, 1701 nt, Artificial Sequence; identical to SEQ ID NO: 68860
  derived and/or modified CDS sequence (opt1) from hemagglutinin__InfluenzaA__ADL32464

SEQ ID NO: 69504 - RNA, 1701 nt, Artificial Sequence; identical to SEQ ID NO: 68860
  derived and/or modified CDS sequence (opt1) from hemagglutinin__InfluenzaA__ADL32484

SEQ ID NO: 69505 - RNA, 1701 nt, Artificial Sequence
  derived and/or modified CDS sequence (opt1) from hemagglutinin__InfluenzaA__ADL32504
augaaggccauccuggugguccuccuguacaccuucgccaccgcgaacgccgacacgcugugcaucggcuaccacgccaacaacagcaccgacaccguggacaccgugcucgagaagaacgucacggugacccacuccgugaaccugcuggaggacaagcacaacgggaagcucugcaagcugcgcggcgucgcgccccugcaccucgggaagugcaacaucgccggcuggauccuggggaacccggagugcgagagccuguccaccgccagcuccuggagcuacaucguggagaccuccagcuccgacaacggcaugugcuaccccggcgacuucaucgacuacgaggagcuccgggagcagcugagcuccgugagcuccuucgagcgcuucgagaucuuccccaagacgagcuccuggcccaaccacgacagcaacaagggggucaccgccgccugcccgcacgccggcgcgaaguccuucuacaagaaccugaucuggcucgugaagaaggggaacagcuaccccaagcuguccaagagcuacaucaacgacaagggcaaggaggugcugguccucugggggauccaccaccccagcaccuccgccgaccagcagagccuguaccagaacgccgacgccuacguguucgugggcaccucccgguacagcaagaaguucaagcccgagaucgccauccgcccgaagguccgggaccaggagggccgcaugaacuacuacuggacgcugguggagcccggggacaagaucaccuucgaggcgaccggcaaccucguggucccccgguacgccuucgccauggagcgcaacgccggguccggcaucaucaucagcgacacccccgugcacgacugcaacacgaccugccagaccccgaagggcgccaucaacaccucccugcccuuccagaacauccaccccaucacgaucgggaagugccccaaguacgucaagagcaccaagcugcggcucgcgaccggccugcgcaacgugccguccauccagagccgggggcuguucggcgccaucgccggguucaucgagggcggcuggaccgggaugguggacggcugguacggguaccaccaccagaacgagcagggcuccggguacgccgccgaccucaagagcacgcagcacgcgaucgacgagaucaccaacaaggugaacuccgucaucgagaagaugaacacccaguucaccgccgugggcaaggaguucaaccaccuggagaagcgcaucgagaaccugaacaagaaggucgacgacggcuuccucgacaucuggacguacaacgccgagcugcuggugcuccuggagaacgagcggacccuggacuaccacgacagcaacgugaagaaccucuacgagaagguccgcucccagcugaagaacaacgccaaggagaucgggaacggcugcuucgaguucuaccacaagugcgacaacacgugcauggagagcgugaagaacgggaccuacgacuaccccaaguacuccgaggaggccaagcugaaccgggaggagaucgacggcgugaagcucgagagcacccgcaucuaccagauccuggcgaucuacuccaccgucgccagcagccuggugcucguggucucccugggggccaucagcuucuggaugugcuccaacggcagccugcagugccggaucugcaucuga

SEQ ID NO: 69506 - RNA, 1701 nt, Artificial Sequence; identical to SEQ ID NO: 68113
  derived and/or modified CDS sequence (opt1) from hemagglutinin__InfluenzaA__ADL32514

SEQ ID NO: 69507 - RNA, 1701 nt, Artificial Sequence; identical to SEQ ID NO: 68860
  derived and/or modified CDS sequence (opt1) from hemagglutinin__InfluenzaA__ADL32524

SEQ ID NO: 69508 - RNA, 1701 nt, Artificial Sequence
  derived and/or modified CDS sequence (opt1) from hemagglutinin__InfluenzaA__ADL32544
augaaggccauccuggugguccuccuguacaccuucgccaccagcaacgcggacacgcugugcaucggcuaccacgccaacaacuccaccgacaccguggacaccgugcucgagaagaacgucacggugacccacagcgugaaccugcuggaggacaagcacaacgggaagcucugcaagcugcgcggcgucgcgccccugcaccucgggaagugcaacaucgccggcuggauccuggggaacccggagugcgagucccugagcaccgccuccagcugguccuacaucguggagaccagcuccagcgacaacggcacgugcuaccccggcgacuucaucgacuacgaggagcuccgggagcagcuguccagcguguccagcuucgagcgcuucgagaucuuccccaagaccuccagcuggcccaaccacgacuccaacaagggggucaccgccgccugcccgcacgccggcgccaagagcuucuacaagaaccugaucuggcucgugaagaaggggaacuccuaccccaagcugcgcaagagcuacaucaacgacaagggcaaggaggugcugguccucugggggauccaccaccccagcaccuccgcggaccagcagagccuguaccagaacgccgacgccuacguguucgugggcacgucccgguacagcaagaaguucaagcccgagaucgccauccggccgaagguccgcgaccaggagggccggaugaacuacuacuggacccugguggagcccggggacaagaucaccuucgaggccaccggcaaccucguggucccccgcuacgcguucgccauggagcggaacgccggguccggcaucaucaucagcgacacgcccgugcacgacugcaacacgaccugccagaccccgaagggcgccaucaacaccucccugcccuuccagaacauccaccccaucaccaucgggaagugccccaaguacgucaagagcaccaagcugcgccucgccaccggccugcggaacgugccguccauccagagccgcgggcuguucggcgcgaucgccggguucaucgagggcggcuggacggggaugguggacggcugguacggguaccaccaccagaacgagcagggcuccggguacgccgccgaccucaagagcacccagcacgccaucgacgagaucaccaacaaggugaacuccgucaucgagaagaugaacacccaguucacggcggugggcaaggaguucaaccaccuggagaagcggaucgagaaccugaacaagaaggucgacgacggcuuccucgacaucuggaccuacaacgccgagcugcuggugcuccuggagaacgagcgcacccuggacuaccacgacagcaacgugaagaaccucuacgagaagguccggucccagcugaagaacaacgccaaggagaucgggaacggcugcuucgaguucuaccacaagugcgacaacacgugcauggagagcgugaagaacgggaccuacgacuaccccaaguacuccgaggaggccaagcugaaccgcgaggagaucgacggcgugaagcucgagagcacccggaucuaccagauccuggccaucuacuccaccgucgcgagcagccuggugcucguggucucccugggggccaucagcuucuggaugugcuccaacggcagccugcagugccgcaucugcaucuga

SEQ ID NO: 69509 - RNA, 1701 nt, Artificial Sequence; identical to SEQ ID NO: 69294
  derived and/or modified CDS sequence (opt1) from hemagglutinin__InfluenzaA__ADL32554

SEQ ID NO: 69510 - RNA, 1701 nt, Artificial Sequence; identical to SEQ ID NO: 68306
  derived and/or modified CDS sequence (opt1) from hemagglutinin__InfluenzaA__ADL32670

SEQ ID NO: 69511 - RNA, 1701 nt, Artificial Sequence
  derived and/or modified CDS sequence (opt1) from hemagglutinin__InfluenzaA__ADL32690
augaaggccauccuggugguccuccuguacaccuucgccaccgcgaacgccgacacgcugugcaucggcuaccacgccaacaacagcaccgacaccguggacaccgugcucgagaagaacgucacggugacccacuccgugaacauccuggaggacaagcacaacgggaagcugugcaagcuccgcggcgucgcgccccugcaccuggggaagugcaacaucgccggcuggauccucgggaacccggagugcgagagccuguccaccgccagcuccuggagcuacaucguggagaccuccagcuccgacaacggcacgugcuaccccggcgacuucaucgacuacgaggagcugcgggagcagcucagcuccgugagcuccuucgagcgcuucgagaucuuccccaagaccagcuccuggcccaaccacgacagcaacaagggggucaccgccgccugcccgcacgccggcgcgaaguccuucuacaagaaccugauguggcuggugaagaaggggaacagcuaccccaagcucuccaagagcuacaucaacgacaagggcaaggaggugcugguccugugggggauccaccaccccagcaccuccgccgaccagcagagccucuaccagaacgccgacgccuacguguucgugggcuccagccgguacuccaagaaguucaagcccgagaucgccauccgcccgaagguccgggaccaggagggccgcaugaacuacuacuggacgcugguggagcccggggacaagaucaccuucgaggcgaccggcaaccugguggucccccgguacgccuucgccauggagcgcaacgccgggagcggcaucaucaucuccgacacccccgugcacgacugcaacacgaccugccagaccccgaagggcgccaucaacaccagccuccccuuccagaacauccaccccaucacgaucgggaagugccccaaguacgugaaguccaccaagcugcggcuggcgaccggccuccgcaacgucccgagcauccagucccgggggcuguucggcgccaucgccggguucaucgagggcggcuggaccgggaugguggacggcugguacggguaccaccaccagaacgagcagggcagcggguacgccgccgaccugaaguccacgcagaacgcgaucgacgagaucaccaacaaggugaacagcgucaucgagaagaugaacacccaguucaccgccgugggcaaggaguucaaccaccucgagaagcgcaucgagaaccugaacaagaaggucgacgacggcuuccuggacaucuggacguacaacgccgagcuccuggugcugcucgagaacgagcggacccuggacuaccacgacuccaacgugaagaaccuguacgagaagguccgcagccagcucaagaacaacgccaaggagaucgggaacggcugcuucgaguucuaccacaagugcgacaacacgugcauggaguccgugaagaacgggaccuacgacuaccccaaguacagcgaggaggccaagcugaaccgggaggagaucgacggcgugaagcuggaguccacccgcaucuaccagauccucgcgaucuacagcaccgucgccagcucccuggugcugguggucagccucggggccaucuccuucuggaugugcagcaacggcucccugcagugccggaucugcaucuga

SEQ ID NO: 69512 - RNA, 1701 nt, Artificial Sequence; identical to SEQ ID NO: 66873
  derived and/or modified CDS sequence (opt1) from hemagglutinin__InfluenzaA__ADL32710

SEQ ID NO: 69513 - RNA, 1701 nt, Artificial Sequence; identical to SEQ ID NO: 66693
  derived and/or modified CDS sequence (opt1) from hemagglutinin__InfluenzaA__ADL32720

SEQ ID NO: 69514 - RNA, 1701 nt, Artificial Sequence; identical to SEQ ID NO: 68465
  derived and/or modified CDS sequence (opt1) from hemagglutinin__InfluenzaA__ADL32730

SEQ ID NO: 69515 - RNA, 1701 nt, Artificial Sequence; identical to SEQ ID NO: 68465
  derived and/or modified CDS sequence (opt1) from hemagglutinin__InfluenzaA__ADL32740

SEQ ID NO: 69516 - RNA, 1701 nt, Artificial Sequence; identical to SEQ ID NO: 67637
  derived and/or modified CDS sequence (opt1) from hemagglutinin__InfluenzaA__ADL39137

SEQ ID NO: 69517 - RNA, 1698 nt, Artificial Sequence
  derived and/or modified CDS sequence (opt1) from hemagglutinin__InfluenzaA__ADL39148
augaaggugaagcugcucguccugcugugcaccuucaccgccacguacgccgacaccaucugcaucggcuaccacgcgaacaacagcaccgacaccguggacacggugcucgagaagaacgucaccgugacccacuccgugaaccugcuggagaacagccacaacgggaagcucugccugcugaagggcaucgcgccccuccagcuggggaacugcuccgucgccggcuggauccuggggaacccggagugcgagcuccugaucagcaaggaguccuggagcuacaucguggagaagcccaaccccgagaacgggaccugcuaccccggccacuucgccgacuacgaggagcugcgcgagcagcucuccagcguguccagcuucgagcgguucgagaucuucccgaaggaguccagcuggcccaaccacacggucaccgggguguccgccagcugcucccacaacggcgagagcuccuucuaccgcaaccugcuguggcucaccgggaagaacggccuguaccccaaccugagcaaguccuacgccaacaacaaggagaaggaggugcucguccuguggggcgugcaccacccgcccaacaucguggaccagaagacccuguaccggacggagaacgccuacgucagcguggugagcucccacuacagccgcaaguucacccccgagaucgccaagcggcccaagguccgcgaccaggagggccggaucaacuacuacuggacccuccuggagcccggcgacaccaucaucuucgaggccaacgggaaccugaucgcgccgcgcuacgccuucgcccucucccgggacuucggcagcgggaucaucaacuccaacgcccccauggacaagugcgacgccaagugccagacgccccagggcgcgaucaacagcucccugcccuuccagaacgugcacccggugaccaucggcgagugccccaaguacguccgcagcgccaagcugcggauggugaccgggcuccgcaacauccccuccauccagagccggggccuguucggggccaucgccggcuucaucgagggcggguggaccggcaugguggacgggugguacggcuaccaccaccagaacgagcagggguccggcuacgccgcggaccagaaguccacgcagaacgccaucaacgggaucaccaacaaggucaacagcgugaucgagaagaugaacacccaguucaccgccgucggcaaggaguucaacaagcuggagcgccggauggagaaccucaacaagaagguggacgacggcuucaucgacaucuggacguacaacgccgagcugcuggugcuccuggagaacgagcgcacccuggacuuccacgacagcaacgucaagaaccucuacgagaaggugaagucccagcugaagaacaacgccaaggagaucgggaacggcugcuucgaguucuaccacaagugcaacgacgagugcauggagagcgugaagaacgggaccuacgacuaccccaaguacuccgaggagagcaagcugaaccgggagaagaucgacggcgucaagcucgaguccauggggguguaccagauccuggcgaucuacagcaccguggccagcucccugguccuccuggugagccugggcgccaucuccuucuggaugugcagcaacggcucccuccagugccgcaucugcaucuga

SEQ ID NO: 69518 - RNA, 1701 nt, Artificial Sequence
  derived and/or modified CDS sequence (opt1) from hemagglutinin__InfluenzaA__ADL39159
augaagaccaucaucgcccugagcuacauccucugccugguguucgcccagaagcugcccggcaacgacaacuccaccgcgacgcucugccuggggcaccacgccgucccgaacggcaccaucgugaagaccaucaccaacgaccagaucgaggugacgaacgccaccgagcugguccagagcuccagcaccggggagaucugcgacagcccccaccagaucaucgacggcgagaacugcacccucaucgacgcccugcugggggacccccagugcgacggcuuccagaacaagaagugggaccucuucguggagcgcuccaaggccuacuccaacugcuaccccuacgacgugccggacuacgcgagccugcggucccuggucgccagcuccggcacgcucgaguucaacaacgagagcuucaacuggaccggggugacccagaacggcaccuccagcgccugcauccgccgguccaacaacagcuucuucucccgccugaacuggcugacgcaccucaaguucaaguaccccgcccugaacgugaccaugcccaacaacgagcaguucgacaagcuguacaucuggggcguccaccaccccgggaccgacaacgaccagaucuuccucuacgcgcaggccagcgggcggaucaccguguccacgaagcgcagccagcagaccgugaucccgaacaucggcagccggccccgcguccggaacauccccucccgcaucagcaucuacuggaccaucgugaagcccggcgacauccugcugaucaacuccaccgggaaccucaucgccccgcggggcuacuucaagauccgcagcgggaaguccagcaucaugcgguccgacgcccccaucggcaagugcaacagcgagugcaucacgcccaacggcuccauccccaacgacaagccguuccagaacgugaaccgcaucaccuacggggccugcccccgguacgucaagcagaacacccugaagcuggcgaccggcaugcgcaacgugcccgagaagcagacgcgggggaucuucggcgccaucgccggguucaucgagaacggcugggagggcaugguggacgggugguacggcuuccgccaccagaacagcgaggggcggggccaggccgccgaccucaaguccacccaggcggccaucgaccagaucaacgggaagcugaaccgccugaucggcaagaccaacgagaaguuccaccagaucgagaaggaguucagcgaggucgagggccggauccaggaccucgagaaguacguggaggacaccaagaucgaccugugguccuacaacgccgagcugcucguggcccuggagaaccagcacacgaucgaccugaccgacagcgagaugaacaagcuguucgagaagaccaagaagcagcuccgcgagaacgccgaggacauggggaacggcugcuucaagaucuaccacaagugcgacaacgcgugcauccgcuccauccggaacgggaccuacgaccacgacgucuaccgcgacgaggcccugaacaaccgguuccagaucaagggcguggagcucaagagcggguacaaggacuggauccuguggaucuccuucgccaucagcugcuuccugcucugcuucgcccugcugggcuucaucaugugggccugccagaagggcaacauccgcugcaacaucugcaucuga

SEQ ID NO: 69519 - RNA, 1701 nt, Artificial Sequence
  derived and/or modified CDS sequence (opt1) from hemagglutinin__InfluenzaA__ADL39170
augaagaccaucaucgcccugagcuacauccucugccugguguucgcccagaagcugcccggcaacgacaacuccaccgcgacgcucugccuggggcaccacgccgucccgaacggcaccaucgugaagaccaucaccaacgaccagaucgaggugacgaacgccaccgagcugguccagagcuccagcaccggggagaucugcgacagcccccaccagauccucgacggcaagaacugcacccugaucgacgcccugcucggggacccccagugcgacggcuuccagaacaagaagugggaccuguucguggagcgcagcaaggccuacuccaacugcuaccccuacgacgugccggacuacgcgagccugcggucccucgucgccagcuccggcacgcuggaguucaacaacgagagcuucaacuggaccggggugacccagaacggcaccuccagcgccugcauccgccgguccaagaacagcuucuucucccgccugaacuggcucacgcaccugaacuucaaguaccccgcccugaacgugaccguccccaacaacgagcaguucgacaagcucuacaucuggggcgugcaccaccccgggaccgacaaggaccagaucuuccuguacgcgcaggccagcgggcggaucaccguguccacgaagcgcagccagcagaccgucaucccgaacaucggcagccggccccgcgugcggaacauccccucccgcaucagcaucuacuggaccaucgugaagcccggcgacguccugcucaucaacuccaccgggaaccugaucgccccgcggggcuacuucaagauccgcagcgggaaguccagcaucaugcgguccgacgcccccaucggcaagugcaacagcgagugcaucacgcccaacggcuccauccccaacgacaagccguuccagaacgugaaccgcaucaccuacggggccugcccccgguacgugaagcagaacacccugaagcucgcgaccggcaugcgcaacguccccgagaagcagacgcgggggaucuucggcgccaucgccggguucaucgagaacggcugggagggcaugguggacgggugguacggcuuccgccaccagaacagcgaggggcggggccaggccgccgaccugaaguccacccaggcggccaucgaccagaucaacgggaagcugaaccgccucaucggcaagaccaacgagaaguuccaccagaucgagaaggaguucagcgagguggagggccggauccaggaccuggagaaguacgucgaggacaccaagaucgaccugugguccuacaacgccgagcuccugguggcccuggagaaccagcacacgaucgaccucaccgacagcgagaugaacaagcuguucgagaagaccaagaagcagcugcgcgagaacgccgaggacauggggaacggcugcuucaagaucuaccacaagugcgacaacgcgugcaucggguccauccgcaacggcaccuacgaccacgacguguaccgggacgaggcccucaacaaccgcuuccagaucaagggggucgagcugaaguccggcuacaaggacuggauccuguggaucuccuucgccaucagcugcuuccuccugugcguggcccugcucggcuucaucaugugggccugccagaaggggaacauccggugcaacaucugcaucuga

SEQ ID NO: 69520 - RNA, 1701 nt, Artificial Sequence; identical to SEQ ID NO: 67637
  derived and/or modified CDS sequence (opt1) from hemagglutinin__InfluenzaA__ADL39203

SEQ ID NO: 69521 - RNA, 1701 nt, Artificial Sequence; identical to SEQ ID NO: 66458
  derived and/or modified CDS sequence (opt1) from hemagglutinin__InfluenzaA__ADL39214

SEQ ID NO: 69522 - RNA, 1698 nt, Artificial Sequence
  derived and/or modified CDS sequence (opt1) from hemagglutinin__InfluenzaA__ADL39225
augaaggugaagcugcucguccugcugugcaccuucaccgccacguacgccgacaccaucugcaucggcuaccacgcgaacaacagcaccgacaccguggacacggugcucgagaagaacgucaccgugacccacuccgugaaccugcuggagaacagccacaacgggaagcucugccugcugaagggcaucgcgccccuccagcuggggaacugcuccgucgccggcuggauccuggggaacccggagugcgagcuccugaucagcaaggaguccuggagcuacaucguggagaagcccaaccccgagaacgggaccugcuaccccggcuacuucgccgacuacgaggagcugcgcgagcagcucuccagcguguccagcuucgagcgguucgagaucuucccgaaggaguccagcuggcccaaccacacggucaccggggccuccgccagcugcucccacaacggcgagaacagcuucuaccgcaaccugcuguggcucaccgggaagaacggccuguaccccaaccuguccaagagcuacgccaacaacaaggagaaggaggugcucgugcuguggggcguccaccacccgcccaacaucgccgaccagaagacccuguaccacacggagaacgccuacguguccguggucagcagccacuacucccggaaguucacccccgagaucgcgaagcgccccaaggugcgggaccaggagggccgcaucaacuacuacuggacccuccuggagcccggcgacaccaucaucuucgaggccaacgggaaccugaucgccccgcgguacgccuucgcccucagccgcggcuucggguccggcaucaucaacagcaacgcgcccauggacaagugcgacgccaagugccagacgccccagggcgccaucaacuccagccugcccuuccagaacgugcacccggucaccaucggggagugccccaaguacgugcgguccgccaagcugcgcauggugaccggccuccggaacauccccagcauccagucccgcgggcuguucggcgccaucgcgggguucaucgagggcggcuggaccgggauggucgacggcugguacggguaccaccaccagaacgagcagggcagcggguacgccgccgaccagaaguccacgcagaacgccaucaacggcaucaccaacaaggugaacagcgugaucgagaagaugaacacccaguucaccgccgucggcaaggaguucaacaagcuggagcggcgcauggagaaccucaacaagaagguggacgacggguucaucgacaucuggacguacaacgcggagcugcugguccuccuggagaacgagcggacccuggacuuccacgacuccaacgugaagaaccucuacgagaaggucaagagccagcugaagaacaacgccaaggagaucggcaacgggugcuucgaguucuaccacaagugcaacgacgagugcauggaguccgugaagaacggcaccuacgacuaccccaaguacagcgaggaguccaagcugaaccgcgagaagaucgacggggugaagcucgagagcaugggcguguaccagauccuggccaucuacuccaccgucgccagcagccuggugcuccuggugucccugggcgccaucagcuucuggaugugcuccaacgggagccuccagugccggaucugcaucuga

SEQ ID NO: 69523 - RNA, 1698 nt, Artificial Sequence
  derived and/or modified CDS sequence (opt1) from hemagglutinin__InfluenzaA__ADL39236
augaaggugaagcugcucguccugcugugcaccuucaccgccacguacgccgacaccaucugcaucggcuaccacgcgaacaacagcaccgacaccguggacacggugcucgagaagaacgucaccgugacccacuccgugaaccugcuggagaacagccacaacgggaagcucugccugcugaagggcaucgcgccccuccagcuggggaacugcuccgucgccggcuggauccuggggaacccggagugcgagcuccugaucagcaaggaguccuggagcuacaucguggagaagcccaaccccgagaacgggaccugcuaccccggcuacuucgccgacuacgaggagcugcgcgagcagcucuccagcguguccagcuucgagcgguucgagaucuucccgaaggaguccagcuggcccaaccacacggucaccgggguguccgccagcugcucccacaacggcgagagcuccuucuaccgcaaccugcuguggcucaccgggaagaacggccuguaccccaaccugagcaaguccuacaccaacaacaaggagaaggaggugcucguccuguggggcgugcaccacccgcccaacaucguggaccagaagacgcuguaccggaccgagaacgccuacgucagcguggugagcucccacuacagccgcaaguucacccccgagaucgccaagcggcccaagguccgcgaccaggagggccggaucaacuacuacuggacccuccuggagcccggcgacacgaucaucuucgaggccaacgggaaccugaucgccccgcgcuacgcguucgcccucucccggggcuucgggagcggcaucaucaacuccaacgcccccaugggcaagugcgacgccaagugccagacgccccagggggccaucaacagcucccugcccuuccagaacgugcacccggugaccaucggcgagugccccaaguacguccgcagcgcgaagcugcggauggugaccgggcuccgcaacauccccuccauccagagccggggccuguucggggccaucgccggcuucaucgagggcggguggaccggcaugguggacgggugguacggcuaccaccaccagaacgagcagggguccggcuacgccgccgaccagaaguccacccagaacgcgaucaacggcaucaccaacaaggucaacagcgugaucgagaagaugaacacccaguucacggccgucgggaaggaguucaacaagcuggagcgccggauggagaaccucaacaagaagguggacgacggcuucaucgacaucuggaccuacaacgccgagcugcuggugcuccuggagaacgagcgcacccuggacuuccacgacagcaacgucaagaaccucuacgagaaggugaagucccagcugaagaacaacgccaaggagaucgggaacggcugcuucgaguucuaccacaagugcaacgacgagugcauggagagcgugaagaacgggaccuacgacuaccccaaguacuccgaggagagcaagcugaaccgggagaagaucgacggcgucaagcucgaguccaugggcguguaccagauccuggccaucuacagcacgguggcgagcucccugguccuccuggugagccugggggccaucuccuucuggaugugcagcaacggcucccuccagugccgcaucugcaucuga

SEQ ID NO: 69524 - RNA, 1701 nt, Artificial Sequence
  derived and/or modified CDS sequence (opt1) from hemagglutinin__InfluenzaA__ADL39280
augaagaccaucaucgcccugagcuacauccucugccugguguucgcccagaagcugcccggcaacgacaacuccaccgcgacgcucugccuggggcaccacgccgucccgaacggcaccaucgugaagaccaucaccaacgaccagaucgaggugacgaacgccaccgagcugguccagagcuccagcaccggggagaucugcgacagcccccaccagauccucgacggcgagaacugcacccugaucgacgcccugcucggggacccccagugcgacggcuuccagaacaagaagugggaccuguucguggagcgcagcaaggccuacuccaacugcuaccccuacgacgugccggacuacgcgagccugcggucccucgucgccagcuccggcacgcuggaguucaacaacgagagcuucaacuggaccggggugacccagaacggcaccuccagcgccugcauccgccgguccaacaacagcuucuucucccgccugaacuggcucacgcaccuccgguucaaguaccccgcccugaacgugaccaugcccaacaacgagcaguucgacaagcuguacaucuggggcguccaccaccccgggaccgacaacgaccagaucuuccuguacgcgcaggccagcgggcgcaucaccguguccacgaagcggagccagcagaccgugaucccgaacaucggcagccgcccccggguccgcaacauccccucccggaucagcaucuacuggaccaucgugaagcccggcgacauccugcucaucaacuccaccgggaaccugaucgccccgcgcggcuacuucaagauccggagcgggaaguccagcaucaugcgcuccgacgcccccaucggcaagugcaacagcgagugcaucacgcccaacggcuccauccccaacgacaagccguuccagaacgugaaccggaucaccuacggggccugcccccgcuacgucaagcagaacacccugaagcucgcgaccggcaugcggaacgugcccgagaagcagacgcgcgggaucuucggcgccaucgccggguucaucgagaacggcugggagggcaugguggacgggugguacggcuuccggcaccagaacagcgaggggcgcggccaggccgccgaccugaaguccacccaggcggccaucgaccagaucaacgggaagcugaaccggcucaucggcaagaccaacgagaaguuccaccagaucgagaaggaguucagcgaggucgagggccgcauccaggaccuggagaaguacguggaggacaccaagaucgaccugugguccuacaacgccgagcuccugguggcccuggagaaccagcacacgaucgaccucaccgacagcgagaugaacaagcuguucgagaagaccaagaagcagcugcgcgagaacgccgaggacauggggaacggcugcuucaagaucuaccacaagugcgacaacgcgugcaucggguccauccggaacggcaccuacgaccacgacgucuaccgcgacgaggcccucaacaaccgguuccagaucaaggggguggagcugaaguccggcuacaaggacuggauccuguggaucuccuucgccaucagcugcuuccuccugugcguggcccugcucggcuucaucaugugggccugccagaaggggaacauccgcugcaacaucugcaucuga

SEQ ID NO: 69525 - RNA, 1698 nt, Artificial Sequence
  derived and/or modified CDS sequence (opt1) from hemagglutinin__InfluenzaA__ADL39291
augaaggugaagcugcucguccugcugugcaccuucaccgccacguacgccgacaccaucugcaucggcuaccacgcgaacaacagcaccgacaccguggacacggugcucgagaagaacgucaccgugacccacuccgugaaccugcuggagaacagccacaacgggaagcucugccugcugaagggcaucgcgccccuccagcuggggaacugcuccgucgccggcuggauccuggggaacccggagugcgagcuccugaucagcaaggaguccuggagcuacaucguggagaagcccaaccccgagaacgggaccugcuaccccggccacuucgccgacuacgaggagcugcgcgagcagcucuccagcguguccagcuucgagcgguucgagaucuucccgaaggaguccagcuggcccaaccacacggucaccggcguguccgccagcugcucccacaacggcgagagcuccuucuaccgcaaccugcuguggcucaccgagaagaacgggcuguaccccaaccugagcaaguccuacgccaacaacaaggagaaggaggugcucguccuguggggcgugcaccacccgcccaacaugggggaccagaagacccuguaccacacggagaacgccuacgugagcgucgugagcucccacuacagccggaaguucacccccgagaucgccaagcgccccaaggugcgggaccaggagggccgcaucaacuacuacuggacccuccuggagcccggcgacaccaucaucuucgaggccaacgggaaccugaucgcgccgcgguacgccuucgcccucucccgcggcuucgggagcggcaucaucaacuccaacgcccccauggacaagugcgacgccaagugccagacgccccagggcgcgaucaacagcucccugcccuuccagaacguccacccggugaccaucggggagugccccaaguacgugcggagcgccaagcugcgcauggucaccggccuccggaacauccccuccauccagagccgcgggcuguucggcgccaucgccggguucaucgagggcggcuggaccgggaugguggacggcugguacggguaccaccaccagaacgagcagggcuccggguacgccgcggaccagaaguccacgcagaacgccaucaacggcaucaccaacaaggugaacagcgucaucgagaagaugaacacccaguucaccgccgugggcaaggaguucaacaagcuggagcggcgcauggagaaccucaacaagaaggucgacgacggguucaucgacaucuggacguacaacgccgagcugcuggugcuccuggagaacgagcggacccuggacuuccacgacagcaacgugaagaaccucuacgagaaggucaagucccagcugaagaacaacgccaaggagaucggcaacgggugcuucgaguucuaccacaagugcaacgacgagugcauggagagcgugaagaacggcaccuacgacuaccccaaguacuccgaggagagcaagcugaaccgcgagaagaucgacggggugaagcucgaguccaugggcgucuaccagauccuggcgaucuacagcaccguggccagcucccuggugcuccuggucagccugggcgccaucuccuucuggaugugcagcaacgggucccuccagugccggaucugcaucuga

SEQ ID NO: 69526 - RNA, 1701 nt, Artificial Sequence; identical to SEQ ID NO: 66458
  derived and/or modified CDS sequence (opt1) from hemagglutinin__InfluenzaA__ADL39302

SEQ ID NO: 69527 - RNA, 1701 nt, Artificial Sequence; identical to SEQ ID NO: 69524
  derived and/or modified CDS sequence (opt1) from hemagglutinin__InfluenzaA__ADL39313

SEQ ID NO: 69528 - RNA, 1701 nt, Artificial Sequence
  derived and/or modified CDS sequence (opt1) from hemagglutinin__InfluenzaA__ADL39335
augaagaccaucaucgcccugagcuacauccucugccugguguucgcccagaagcugcccggcaacgacaacuccaccgcgacgcucugccuggggcaccacgccgucccgaacggcaccaucgugaagaccaucaccaacgaccagaucgaggugacgaacgccaccgagcugguccagagcuccagcaccggggagaucugcgacagcccccaccagauccucgacggcgagaacugcacccugaucgacgcccugcucggggacccccagugcgacggcuuccagaacaagaagugggaccuguucguggagcgcagcaaggccuacuccaacugcuaccccuacgacgugccggacuacgcgagccugcggucccucgucgccagcuccggcacgcuggaguucaacaacgagagcuucaacuggaccggggugacccagaacggcaccuccagcgccugcauccgccgguccaacaacagcuucuucucccgccugaacuggcucacgcaccuccgguucaaguaccccgcccugaacgugaccaugcccaacaacgagcaguucgacaagcuguacaucuggggcguccaccaccccgggaccgacaacgaccagaucuuccuguacgcgcaggccagcgggcgcaucaccguguccacgaagcggagccagcagaccgugaucccgaacaucggcagccgcccccggguccgcaacauccccucccggaucagcaucuacuggaccaucgugaagcccggcgacauccugcucaucaacuccaccgggaaccugaucgccccgcgcggcuacuucaagauccggagcgggaaguccagcaucaugcgcuccgacgcccccaucggcaagugcaacagcgagugcaucacgcccaacggcuccauccccaacgacaagccguuccagaacgugaaccggaucaccuacggggccugcccccgcuacgucaagcagaacacccugaagcucgcgaccggcaugcggaacgugcccgagaagcagacgcgcgggaucuucggcgccaucgccggguucaucgagaacggcugggagggcaugguggacgggugguacggcuuccggcaccagaacagcgaggggcgcggccaggccgccgaccugaaguccacccaggcggccaucgaccagaucaacgggaagcugaaccggcucaucggcaagaccaacgagaaguuccaccagaucgagaaggaguucagcgaggucgagggccgcauccaggaccuggagaaguacguggaggacaccaagaucgaccugugguccuacaacgccgagcuccugguggcccuggagaaccagcacacgauccaccucaccgacagcgagaugaacaagcuguucgagaagaccaagaagcagcugcgcgagaacgccgaggacauggggaacggcugcuucaagaucuaccacaagugcgacaacgcgugcaucggguccauccggaacggcaccuacgaccacgacgucuaccgcgacgaggcccucaacaaccgguuccagaucaaggggguggagcugaaguccggcuacaaggacuggauccuguggaucuccuucgccaucagcugcuuccuccugugcguggcccugcucggcuucaucaugugggccugccagaaggggaacauccgcugcaacaucugcaucuga

SEQ ID NO: 69529 - RNA, 1701 nt, Artificial Sequence; identical to SEQ ID NO: 66458
  derived and/or modified CDS sequence (opt1) from hemagglutinin__InfluenzaA__ADL39368

SEQ ID NO: 69530 - RNA, 1698 nt, Artificial Sequence
  derived and/or modified CDS sequence (opt1) from hemagglutinin__InfluenzaA__ADL39390
augaaggugaagcugcucguccugcugugcaccuucaccgccacguacgccgacaccaucugcaucggcuaccacgcgaacaacagcaccgacaccguggacacggugcucgagaagaacgucaccgugacccacuccgugaaccugcuggagaacagccacaacgggaagcucugccugcugaagggcaucgcgccccuccagcuggggaacugcuccgucgccggcuggauccuggggaacccggagugcgagcuccugaucagcaaggaguccuggagcuacaucguggagaagcccaaccccgagaacgggaccugcuaccccggccacuucgccgacuacgaggagcugcgcgagcagcucuccagcguguccagcuucgagcgguucgagaucuucccgaaggaguccagcuggcccaaccacacggucaccgggguguccgccagcugcucccacaacggcgagagcuccuucuaccgcaaccugcuguggcucaccgggaagaacggccuguaccccagccuguccaagagcuacgccaacaacaaggagaaggaggugcucguccuguggggcgugcaccacccgcccaacaucguggaccagaagacccuguaccggacggagaacgccuacgucagcgugguguccagccacuacucccgcaaguucacccccgagaucgccaagcggcccaagguccgcgaccaggagggccggaucaacuacuacuggacccuccuggagcccggcgacaccaucaucuucgaggccaacgggaaccugaucgcgccgcgcuacgccuucgcccucagccggggcuucggguccggcaucaucaacagcaacgcccccaugggcaagugcgacgccaagugccagacgccccagggggcgaucaacuccagccugcccuuccagaacgugcacccggugaccaucggcgagugccccaaguacguccgcuccgccaagcugcggauggugaccgggcuccgcaacauccccagcauccagucccggggccuguucggggccaucgccggcuucaucgagggcggguggaccggcaugguggacgggugguacggcuaccaccaccagaacgagcaggggagcggcuacgccgcggaccagaaguccacgcagaacgccaucaacggcaucaccaacaaggucaacagcgugaucgagaagaugaacacccaguucaccgccgucgggaaggaguucaacaagcuggagcgccggauggagaaccucaacaagaagguggacgacggcuucaucgacaucuggacguacaacgccgagcugcuggugcuccuggagaacgagcgcacccuggacuuccacgacuccaacgucaagaaccucuacgagaaggucaagagccagcugaagaacaacgccaaggagaucgggaacggcugcuucgaguucuaccacaagugcaacgacgagugcauggaguccgugaagaacgggaccuacgacuaccccaaguacagcgaggaguccaagcugaaccgggagaagaucgacggcgugaagcucgagagcaugggcguguaccagauccuggcgaucuacagcaccguggccuccagccugguccuccuggugucccugggggccaucagcuucuggaugugcuccaacggcagccuccagugccgcaucugcaucuga

SEQ ID NO: 69531 - RNA, 1701 nt, Artificial Sequence
  derived and/or modified CDS sequence (opt1) from hemagglutinin__InfluenzaA__ADL39401
augaagaccaucaucgcccugagcuacauccucugccugguguucgcccagaagcugcccggcaacgacaacuccaccgcgacgcucugccuggggcaccacgccgucccgaacggcaccaucgugaagaccaucaccaacgaccagaucgaggugacgaacgccaccgagcugguccagagcuccagcaccggggagaucugcgacagcccccaccagauccucgacggcgagaacugcacccugaucgacgcccugcucggggacccccagugcgacggcuuccagaacaagaagugggaccuguucguggagcgcagcaaggccuacuccaacugcuaccccuacgacgugccggacuacgcgagccugcggucccucgucgccagcuccggcacgcuggaguucaacaacgagagcuucaacuggaccggggugacccagaacggcaccuccagcuccugcaugcgccggagcaacaacuccuucuucagccgccugaacuggcucacgcaccugaaguucaaguaccccgcccugaacgugaccaugcccaacaacgagcaguucgacaagcucuacaucuggggcguccaccaccccgggaccgacaacgaccagaucuuccuguacgcccaggcguccgggcggaucaccgugagcacgaagcgcagccagcagaccgugaucccgaacaucggcucccggccccgcguccggaacauccccagccgcaucuccaucuacuggaccaucgugaagcccggcgacauccugcucaucaacagcaccgggaaccugaucgccccgcggggcuacuucaagauccgcuccgggaaguccuccaucaugcggagcgacgcccccaucggcaagugcaacuccgagugcaucacgcccaacggcagcauccccaacgacaagccguuccagaacgugaaccgcaucaccuacggggccugcccccgguacgucaagcagaacacccugaagcucgccaccggcaugcgcaacgugcccgagaagcagacgcgggggaucuucggcgcgaucgccggguucaucgagaacggcugggagggcaugguggacgggugguacggcuuccgccaccagaacuccgaggggcggggccaggccgccgaccucaagagcacccaggccgcgaucgaccagaucaacgggaagcugaaccgccugaucggcaagaccaacgagaaguuccaccagaucgagaaggaguucuccgaggucgagggccggauccaggaccuggagaaguacguggaggacaccaagaucgaccuguggagcuacaacgccgagcuccugguggcccuggagaaccagcacacgaucgaccucaccgacuccgagaugaacaagcuguucgagaagaccaagaagcagcugcgcgagaacgccgaggacauggggaacggcugcuucaagaucuaccacaagugcgacaacgccugcaucgggagcauccgcaacggcaccuacgaccacgacgucuaccgggacgaggcgcucaacaaccgcuuccagaucaaggggguggagcugaaguccggcuacaaggacuggauccuguggaucagcuucgccaucuccugcuuccuccugugcguggcccugcucggcuucaucaugugggccugccagaaggggaacauccggugcaacaucugcaucuga

SEQ ID NO: 69532 - RNA, 1701 nt, Artificial Sequence
  derived and/or modified CDS sequence (opt1) from hemagglutinin__InfluenzaA__ADL39412
augaagaccaucaucgcccugagcuacauccucugccugguguucgcccagaagcugcccggcaacgacaacuccaccgcgacgcucugccuggggcaccacgccgucccgaacggcaccaucgugaagaccaucaccaacgaccagaucgaggugacgaacgccaccgagcugguccagagcuccagcaccggggagaucugcgacagcccccaccagauccucgacggcgagaacugcacccugaucgacgcccugcucggggacccccagugcgacggcuuccagaacaagaagugggaccuguucguggagcgcagcaaggccuacuccaacugcuaccccuacgacgugccggacuacgcgagccugcggucccucgucgccagcuccggcacgcuggaguucaacaacgagagcuucaacuggaccggggugacccagaacggcaccuccagcgccugcauccgccgguccaacaacagcuucuucucccgccugaacuggcucacgcaccugaaguucaaguaccccgcccugaacgugaccaugcccaacaacgagcaguucgacaagcucuacaucuggggcguccaccaccccgggaccgacaacgaccagaucuuccuguacgcgcaggccagcgggcggaucaccguguccacgaagcgcagccagcagaccgugaucccgaacaucggcagccggccccgcguccggaacauccccucccgcaucagcaucuacuggaccaucgugaagcccggcgacauccugcucaucaacuccaccgggaaccugaucgccccgcggggcuacuucaagauccgcagcgagaaguccagcaucaugcgguccgacgcccccaucgggaagugcaacagcgagugcaucacgcccaacggcuccauccccaacgacaagccguuccagaacgugaaccgcaucaccuacggcgccugcccccgguacgucaagcagaacacccugaagcucgcgaccgggaugcgcaacgugcccgagaagcagacgcggggcaucuucggggccaucgccggcuucaucgagaacgggugggagggcaugguggacggcugguacggguuccgccaccagaacagcgagggccgggggcaggccgccgaccugaaguccacccaggcggccaucgaccagaucaacggcaagcugaaccgccucaucgggaagaccaacgagaaguuccaccagaucgagaaggaguucagcgaggucgagggccggauccaggaccuggagaaguacguggaggacaccaagaucgaccugugguccuacaacgccgagcuccugguggcccuggagaaccagcacacgaucgaccucaccgacagcgagaugaacaagcuguucgagaagaccaagaagcagcugcgcgagaacgccgaggacaugggcaacgggugcuucaagaucuaccacaagugcgacaacgcgugcaucggcuccauccgcaacgggaccuacgaccacgacgucuaccgggacgaggcccucaacaaccgcuuccagaucaagggcguggagcugaaguccggguacaaggacuggauccuguggaucuccuucgccaucagcugcuuccuccugugcguggcccugcucggcuucaucaugugggccugccagaagggcaacauccggugcaacaucugcaucuga

SEQ ID NO: 69533 - RNA, 1698 nt, Artificial Sequence
  derived and/or modified CDS sequence (opt1) from hemagglutinin__InfluenzaA__ADL39423
augaaggugaagcugcucguccugcugugcaccuucaccgccacguacgccgacaccaucugcaucggcuaccacgcgaacaacagcaccgacaccguggacacggugcucgagaagaacgucaccgugacccacuccgugaaccugcuggagaacagccacaacgggaagcucugccugcugaagggcaucgcgccccuccagcuggggaacugcuccgucgccggcuggauccuggggaacccggagugcgagcuccugaucagcaaggaguccuggagcuacaucguggagaagcccaaccccgagaacgggaccugcuaccccggccacuucgccgacuacgaggagcugcgcgagcagcucuccagcguguccagcuucgagcgguucgagaucuucccgaaggaguccagcuggcccucccacacggucaccggggugagcgccuccugcagccacaacggcgagaacuccuucuaccgcaaccugcuguggcucaccgggaagaacggccuguaccccaaccugagcaaguccuacgccaacaacaaggagaaggaggugcucguccuguggggcgugcaccacccgcccaacaucgccgaccagaagacccuguaccacacggagaacgccuacgugagcgucgugagcucccacuacagccggaaguucacccccgagaucgccaagcgccccaaggugcgggaccaggagggccgcaucaacuacuacuggacccuccuggagcccggcgacaccaucaucuucgaggcgaacgggaaccugaucgccccgcgguacgccuucgcccucucccgcggcuucgggagcggcaucaucaacuccaacgcccccauggacaagugcgacgcgaagugccagacgccccagggcgccaucaacagcucccugcccuuccagaacguccacccggugaccaucggggagugccccaaguacgugcggagcgccaagcugcgcauggucaccggccuccggaacauccccuccauccagagccgcgggcuguucggcgccaucgccggguucaucgagggcggcuggaccgggaugguggacggcugguacggguaccaccaccagaacgagcagggcuccggguacgcggccgaccagaaguccacgcagaacgccaucaacggcaucaccaacaaggugaacagcgucaucgagaagaugaacacccaguucaccgccgugggcaaggaguucaacaagcuggagcggcgcauggagaaccucaacaagaaggucgacgacggguucaucgacaucuggacguacaacgccgagcugcuggugcuccuggagaacgagcggacccuggacuuccacgacagcaacgugaagaaccucuacgagaaggucaagaaccagcugaagaacaacgcgaaggagaucggcaacgggugcuucgaguucuaccacaagugcaacgacgagugcauggaguccgugaagaacggcaccuacgacuaccccaaguacagcgaggaguccaagcugaaccgcgagaagaucgacggggugaagcucgagagcaugggcgucuaccagauccuggccaucuacuccaccguggccagcagccuggugcuccuggucucccugggcgccaucagcuucuggaugugcuccaacgggagccuccagugccggaucugcaucuga

SEQ ID NO: 69534 - RNA, 1701 nt, Artificial Sequence
  derived and/or modified CDS sequence (opt1) from hemagglutinin__InfluenzaA__ADL39434
augaagaccaucaucgcccugagcuacauccucugccugguguucgcccagaagcugcccggcaacgacaacuccaccgcgacgcucugccuggggcaccacgccgucccgaacggcaccaucgugaagaccaucaccaacgaccagaucgaggugacgaacgccaccgagcugguccagagcuccagcaccggggagaucugcgacagcccccaccagauccucgacggcgagaacugcacccugaucgacgcccugcucggggacccccagugcgacggcuuccagaacaagaagugggaccuguucguggagcgcagcaaggccuacuccaacugcuaccccuacgacgugccggacuacgcgagccugcggucccucgucgccagcuccggcacgcuggaguucaacaacgagagcuucaacuggaccggggugacccagaacggcaccuccagcgccugcauccgccgguccaacaacagcuucuucucccgccugaacuggcucacgcaccuccgguucaaguaccccgcccugaacgugaccaugcccaacaacgagcaguucgacaagcuguacaucuggggcguccaccaccccgggaccgacaacgaccagaucuuccuguacgcgcaggccagcgggcgcaucaccguguccacgaagcggagccagcagaccgugaucccgaacaucggcagccgcccccggguccgcgacauccccucccggaucagcaucuacuggaccaucgugaagcccggcgacauccugcucaucaacuccaccgggaaccugaucgccccgcgcggcuacuucaagauccggagcgggaaguccagcaucaugcgcuccgacgcccccaucggcaagugcaacagcgagugcaucacgcccaacggcuccauccccaacgacaagccguuccagaacgugaaccggaucaccuacggggccugcccccgcuacgucaagcagaacacccugaagcucgcgaccggcaugcggaacgugcccgagaagcagacgcgcgggaucuucggcgccaucgccggguucaucgagaacggcugggagggcaugguggacgggugguacggcuuccggcaccagaacagcgaggggcgcggccaggccgccgaccugaaguccacccaggcggccaucgaccagaucaacgggaagcugaaccggcucaucggcaagaccaacgagaaguuccaccagaucgagaaggaguucagcgaggucgagggccgcauccaggaccuggagaaguacguggaggacaccaagaucgaccugugguccuacaacgccgagcuccugguggcccuggagaaccagcacacgaucgaccucaccgacagcgagaugaacaagcuguucgagaagaccaagaagcagcugcgcgagaacgccgaggacauggggaacggcugcuucaagaucuaccacaagugcgacaacgcgugcaucggguccauccggaacggcaccuacgaccacgacgucuaccgcgacgaggcccucaacaaccgguuccagaucaaggggguggagcugaaguccggcuacaaggacuggauccuguggaucuccuucgccaucagcugcuuccuccugugcguggcccugcucggcuucaucaugugggccugccagaaggggaacauccgcugcaacaucugcaucuga

SEQ ID NO: 69535 - RNA, 1698 nt, Artificial Sequence
  derived and/or modified CDS sequence (opt1) from hemagglutinin__InfluenzaA__ADL39445
augaaggugaagcugcucguccugcugugcaccuucaccgccacguacgccgacaccaucugcaucggcuaccacgcgaacaacagcaccgacaccguggacacggugcucgagaagaacgucaccgugacccacuccgugaaccugcuggagaacagccacaacgggaagcucugccugcugaagggcaucgcgccccuccagcuggggaacugcuccgucgccggcuggauccuggggaacccggagugcgagcuccugaucagcaaggaguccuggagcuacaucguggagaagcccaaccccgagaacgggaccugcuaccccggccacuucgccgacuacgaggagcugcgcgagcagcucuccagcguguccagcuucgagcgguucgagaucuucccgaaggaguccagcuggcccaaccacacggucaccgggguguccgccagcugcucccacaacggcgagagcuccuucuaccgcaaccugcuguggcucaccgggaagaacggccuguaccccacccugagcaaguccuacgccaacaacaaggagaaggaggugcucguccuguggggcgugcaccacccgcccaacaucguggaccagaagacgcuguaccggaccgagaacgccuacgucagcguggugagcucccacuacagccgcaaguucacccccgagaucgccaagcggcccaagguccgcgaccaggagggccggaucaacuacuacuggacccuccuggagcccggcgacacgaucaucuucgaggccaacgggaaccugaucgcgccgcgcuacgccuucgcccucucccggggcuucgggagcggcaucaucaacuccaacgcccccauggacaagugcgacgccaagugccagacgccccagggcgcgaucaacagcucccugcccuuccagaacgugcacccggugaccaucggggagugccccaaguacguccgcagcgccaagcugcggauggugaccggccuccgcaacauccccuccauccagagccgggggcuguucggcgccaucgccggguucaucgagggcggcuggaccgggaugguggacggcugguacggguaccaccaccagaacgagcagggcuccggguacgccgcggaccagaaguccacccagaacgccaucaacggcaucaccaacaaggucaacagcgugaucgagaagaugaacacccaguucacggccgucggcaaggaguucaacaagcuggagcgccggauggagaaccucaacaagaagguggacgacggguucaucgacaucuggaccuacaacgccgagcugcuggugcuccuggagaacgagcgcacccuggacuuccacgacagcaacgucaagaaccucuacgagaaggugaagucccagcugaagaacaacgccaaggagaucggcaacgggugcuucgaguucuaccacaagugcaacgacgagugcauggagagcgugaagaacggcaccuacgacuaccccaaguacuccgaggagagcaagcugaaccgggagaagaucgacggggucaagcucgaguccaugggcguguaccagauccuggcgaucuacagcacgguggccagcucccugguccuccuggugagccugggcgccaucuccuucuggaugugcagcaacgggucccuccagugccgcaucugcaucuga

SEQ ID NO: 69536 - RNA, 1698 nt, Artificial Sequence
  derived and/or modified CDS sequence (opt1) from hemagglutinin__InfluenzaA__ADL39456
augaaggugaagcugcucguccugcugugcaccuucaccgccacguacgccgacaccaucugcaucggcuaccacgcgaacaacagcaccgacaccguggacacggugcucgagaagaacgucaccgugacccacuccgugaaccugcuggagaacagccacaacgggaagcucugccugcugaagggcaucgcgccccuccagcuggggaacugcuccgucgccggcuggauccuggggaacccggagugcgagcuccugaucagcaaggaguccuggagcuacaucguggagaagcccaaccccgagaacgggaccugcuaccccggccacuucgccgacuacgaggagcugcgcgagcagcucuccagcguguccagcuucgagcgguucgagaucuucccgaaggaguccagcuggcccucccacacggucaccggggugagcgccuccugcagccacaacggcgagaacuccuucuaccgcaaccugcuguggcucaccgggaagaacggccuguaccccaaccugagcaaguccuacgccaacaacaaggagaaggaggugcucguccuguggggcgugcaccacccgcccaacaucgccgaccagaagacccuguaccacacggagaacgccuacgugagcgucgugagcucccacuacagccggaaguucacccccgagaucgccaagcgccccaaggugcgggaccaggagggccgcaucaacuacuacuggacccuccuggagcccggcgacaccaucaucuucgaggcgaacgggaaccugaucgccccgcgguacgccuucgcccucucccgcggcuucgggagcggcaucaucaacuccaacgcccccauggacaagugcgacgcgaagugccagacgccccagggcgccaucaacagcucccugcccuuccagaacguccacccggugaccaucggggagugccccaaguacgugcggagcgccaagcugcgcauggucaccggccuccggaacauccccuccauccagagccgcgggcuguucggcgccaucgccggguucaucgagggcggcuggaccgggaugguggacggcugguacggguaccaccaccagaacgagcagggcuccggguacgcggccgaccagaaguccacgcagaacgccaucaacggcaucaccaacaaggugaacagcgucaucgagaagaugaacacccaguucaccgccgugggcaaggaguucaacaagcuggagcggcgcauggagaaccucaacaagaaggucgacgacggguucaucgacaucuggacguacaacgccgagcugcuggugcuccuggagaacgagcggacccuggacuuccacgacagcaacgugaagaaccucuacgagaaggucaagucccagcugaagaacaacgcgaaggagaucggcaacgggugcuucgaguucuaccacaagugcaacgacgagugcauggagagcgugaagaacggcaccuacgacuaccccaaguacuccgaggagagcaagcugaaccgcgagaagaucgacggggugaagcucgaguccaugggcgucuaccagauccuggccaucuacagcaccguggccagcucccuggugcuccuggucagccugggcgccaucuccuucuggaugugcagcaacgggucccuccagugccggaucugcaucuga

SEQ ID NO: 69537 - RNA, 1698 nt, Artificial Sequence
  derived and/or modified CDS sequence (opt1) from hemagglutinin__InfluenzaA__ADL39467
augaaggugaagcugcucguccugcugugcaccuucaccgccacguacgccgacaccaucugcaucggcuaccacgcgaacaacagcaccgacaccguggacacggugcucgagaagaacgucaccgugacccacuccgugaaccugcuggagaacagccacaacgggaagcucugccugcugaagggcaucgcgccccuccagcuggggaacugcuccgucgccggcuggauccuggggaacccggagugcgagcuccugaucagcaaggaguccuggagcuacaucguggagaagcccaaccccgagaacgggaccugcuaccccggccacuucgccgacuacgaggagcugcgcgagcagcucuccagcguguccagcuucgagcgguucgagaucuucccgaaggaguccagcuggcccaaccacacggucaccgggguguccgccagcugcucccacaacggcgagagcuccuucuaccgcaaccugcuguggcucaccgggaagaacggccuguaccccaaccugagcaaguccuacgccaacaacaaggagaaggaggugcucguccuguggggcgugcaccacccgcccaacaucguggaccagaagacccuguaccggacggagaacgccuacgucagcguggugagcucccacuacagccgcaaguucacccccgagaucgccaagcggcccaagguccgcgaccaggagggccggaucaacuacuacuggacccuccuggagcccggcgacaccaucaucuucgaggccaacgggaaccugaucgcgccgcgcuacgccuucgcccucucccggggcuucgggagcggcaucaucaacuccaacgcccccaugggcaagugcgacgccaagugccagacgccccagggggcgaucaacagcucccugcccuuccagaacgugcacccggugaccaucggcgagugccccaaguacguccgcagcgccaagcugcggauggugaccgggcuccgcaacauccccuccauccagagccggggccuguucggggccaucgccggcuucaucgagggcggguggaccggcaugguggacgggugguacggcuaccaccaccagaacgagcagggguccggcuacgccgcggaccagaaguccacgcagaacgccaucaacggcaucaccaacaaggucaacagcgugaucgagaagaugaacacccaguucaccgccgucgggaaggaguucaacaagcuggagcgccggauggagaaccucaacaagaagguggacgacggcuucaucgacaucuggacguacaacgccgagcugcuggugcuccuggagaacgagcgcacccuggacuuccacgacagcaacgucaagaaccucuacgagaaggugaagucccagcugaagaacaacgccaaggagaucgggaacggcugcuucgaguucuaccacaagugcaacgacgagugcauggagagcgugaagaacgggaccuacgacuaccccaaguacuccgaggagagcaagcugaaccgggagaagaucgacggcgucaagcucgaguccaugggcguguaccagauccuggcgaucuacagcaccguggccagcucccugguccuccuggugagccugggggccaucuccuucuggaugugcagcaacggcucccuccagugccgcaucugcaucuga

SEQ ID NO: 69538 - RNA, 1701 nt, Artificial Sequence; identical to SEQ ID NO: 66693
  derived and/or modified CDS sequence (opt1) from hemagglutinin__InfluenzaA__ADL41164

SEQ ID NO: 69539 - RNA, 1701 nt, Artificial Sequence; identical to SEQ ID NO: 66786
  derived and/or modified CDS sequence (opt1) from hemagglutinin__InfluenzaA__ADL41173

SEQ ID NO: 69540 - RNA, 1698 nt, Artificial Sequence
  derived and/or modified CDS sequence (opt1) from hemagglutinin__InfluenzaA__ADL60242
augaaggugaagcugcucguccugcugugcaccuucaccgccacguacgccgacaccaucugcaucggcuaccacgcgaacaacagcaccgacaccguggacacggugcucgagaagaacgucaccgugacccacuccgugaaccugcuggagaacagccacaacgggaagcucugccugcugaagggcaucgcgccccuccagcuggggaacugcuccgucgccggcuggauccuggggaacccggagugcgagcuccugaucagcaaggaguccuggagcuacaucguggagaagcccaaccccgagaacgggaccugcuaccccggccacuucgccgacuacgaggagcugcgcgagcagcucuccagcguguccagcuucgagcgguucgagaucuucccgaaggaguccagcuggcccaaccacacggucaccgggguguccgccagcugcucccacaacggcgagcgcagcuucuaccggaaccugcuguggcucaccgggaagaacggccuguaccccaaccuguccaagagcuacgccaacaacaaggagaaggaggugcucguccuguggggcgugcaccacccgcccgacaucggcaaccagaagacccuguaccacacggagaacgccuacguguccgucgugagcagccacuacucccgcaaguucacccccgagaucgccaagcggcccaaggugcgcgaccaggagggccggaucaacuacuacuggacccuccuggagcccggggacaccaucaucuucgaggccaacggcaaccugaucgcgccgcgcuacgccuucgcccucagccggggguucggcuccggcaucaucaacagcaacgcccccauggacaagugcgacgccaagugccagacgccccagggggcgaucaacuccagccugcccuuccagaacguccacccggugaccaucggcgagugccccaaguacgugcgcuccgccaagcugcggauggucaccgggcuccgcaacauccccagcauccagucccggggccuguucggggccaucgccggcuucaucgagggcggguggaccggcaugguggacgggugguacggcuaccaccaccagaacgagcaggggagcggcuacgccgcggaccagaaguccacgcagaacgccaucaacggcaucaccaacaaggugaacagcgucaucgagaagaugaacacccaguucaccgccguggggaaggaguucaacaagcuggagcgccggauggagaaccucaacaagaaggucgacgacggcuucaucgacaucuggacguacaacgccgagcugcuggugcuccuggagaacgagcgcacccuggacuuccacgacuccaacgugaagaaccucuacgagaaggucaagagccagcugaagaacaacgccaaggagaucgggaacggcugcuucgaguucuaccacaagugcaacgacgagugcauggaguccgugaagaacgggaccuacgacuaccccaaguacagcgaggaguccaagcugaaccgggagaagaucgacggcgugaagcucgagagcaugggcgucuaccagauccuggcgaucuacuccaccguggccagcagccuggugcuccuggucucccugggggccaucagcuucuggaugugcuccaacggcagccuccagugccgcaucugcaucuga

SEQ ID NO: 69541 - RNA, 1698 nt, Artificial Sequence
  derived and/or modified CDS sequence (opt1) from hemagglutinin__InfluenzaA__ADL60253
augaaggugaagcugcucguccugcugugcaccuucaccgccacguacgccgacaccaucugcaucggcuaccacgcgaacaacagcaccgacaccguggacacggugcucgagaagaacgucaccgugacccacuccgugaaccugcuggagaacagccacaacgggaagcucugccugcugaagggcaucgcgccccuccagcuggggaacugcuccgucgccggcuggauccuggggaacccggagugcggccuccugaucagcaaggaguccuggagcuacaucguggagaagcccaaccccgagaacgggaccugcuaccccggguacuucgccgacuacgaggagcugcgcgagcagcucuccagcguguccagcuucgagcgguucgagaucuucccgaaggaguccagcuggcccaaccacacggucaccggcguguccgccagcugcucccacaacggggagagcuccuucuaccgcaaccugcuguggcucaccggcaagaacgggcuguaccccaaccugagcaaguccuacgccaacaacaaggagaaggaggugcucguccuguggggcgugcaccacccgcccaacaucggcaaccagaaggcccuguaccacaccgagaacgccuacgugagcgucgugagcucccacuacagccggaaguucacgcccgagaucgccaagcgccccaaggugcgggaccaggaggggcgcaucaacuacuacuggacccuccuggagcccggcgacaccaucaucuucgaggcgaacgggaaccugaucgccccgcgguacgccuucgcccucucccgcggcuucggcagcgggaucaucaacuccaacgcccccauggacaagugcgacgcgaagugccagacgccccagggcgccaucaacagcucccugcccuuccagaacguccacccggugaccaucggggagugccccaaguacgugcggagcgccaagcugcgcauggucaccggccuccggaacauccccuccauccagagccgcgggcuguucggcgccaucgccggcuucaucgagggcggcuggaccgggaugguggacggcugguacggguaccaccaccagaacgagcagggcuccggcuacgcggccgaccagaaguccacccagaacgccaucaacgggaucacgaacaaggugaacagcgucaucgagaagaugaacacccaguucaccgccgugggcaaggaguucaacaagcuggagcggcgcauggagaaccucaacaagaaggucgacgacggguucaucgacaucuggaccuacaacgccgagcugcuggugcuccuggagaacgagcggacgcuggacuuccacgacagcaacgugaagaaccucuacgagaaggucaagucccagcugaagaacaacgcgaaggagaucggcaacgggugcuucgaguucuaccacaagugcaacgacgagugcauggagagcgugaagaacggcaccuacgacuaccccaaguacuccgaggagagcaagcugaaccgcgagaagaucgacggcgugaagcucgaguccaugggggucuaccagauccuggccaucuacagcaccguggccagcucccuggugcuccuggucagccugggcgccaucuccuucuggaugugcagcaacgggucccuccagugccggaucugcaucuga

SEQ ID NO: 69542 - RNA, 1698 nt, Artificial Sequence; identical to SEQ ID NO: 69540
  derived and/or modified CDS sequence (opt1) from hemagglutinin__InfluenzaA__ADL60264

SEQ ID NO: 69543 - RNA, 1698 nt, Artificial Sequence; identical to SEQ ID NO: 69540
  derived and/or modified CDS sequence (opt1) from hemagglutinin__InfluenzaA__ADL60275

SEQ ID NO: 69544 - RNA, 1698 nt, Artificial Sequence
  derived and/or modified CDS sequence (opt1) from hemagglutinin__InfluenzaA__ADL60286
augaaggugaagcugcucguccugcugugcaccuucaccgccacguacgccgacaccaucugcaucggcuaccacgcgaacaacagcaccgacaccguggacacggugcucgagaagaacgucaccgugacccacuccgugaaccugcuggagaacagccacaacgggaagcucugccugcugaagggcaucgcgccccuccagcuggggaacugcuccgucgccggcuggauccuggggaacccggagugcgagcuccugaucagcaaggaguccuggagcuacaucguggagaagcccaaccccgagaacgggaccugcuaccccggccacuucgccgacuacgaggagcugcgcgagcagcucuccagcguguccagcuucgagcgguucgagaucuucccgaaggaguccagcuggcccaaccacacggucaccgggguguccgccagcugcucccacaacggcgagagcuccuucuaccgcaaccugcuguggcucaccgggaagaacggccuguaccccaaccugagcaaguccuacgccaacaacaaggagaaggaggugcucguccuguggggcgugcaccacccgcccagcaucagcaaccagaagacccuguaccacacggagaacgccuacguguccgucgugagcucccacuacagccggaaguucacccccgagguggccaagcgccccaagguccgggaccaggagggccgcaucaacuacuacuggacccuccuggagcccggcgacaccaucaucuucgaggccaacgggaaccugaucgcgccgcgguacgccuucgcccucucccgcggcuucgggagcggcaucaucaacuccaacgcccccauggacaagugcgacgccaagugccagacgccccagggcgcgaucaacagcucccugcccuuccagaacgugcacccggugaccaucggggagugccccaaguacguccggagcgccaagcugcgcauggugaccggccuccggaacauccccuccauccagagccgcgggcuguucggcgccaucgccggguucaucgagggcggcuggaccgggaugguggacggcugguacggguaccaccaccagaacgagcagggcuccggguacgccgcggaccagaaguccacgcagaacgccaucaacggcaucaccaacaaggucaacagcgugaucgagaagaugaacacccaguucaccgccgucggcaaggaguucaacaagcuggagcggcgcauggagaaccucaacaagaagguggacgacggguucaucgacaucuggacguacaacgccgagcugcuggugcuccuggagaacgagcggacccuggacuuccacgacagcaacgucaagaaccucuacgagaaggugaagucccagcugaagaacaacgccaaggagaucggcaacgggugcuucgaguucuaccacaagugcaacgacgagugcauggagagcgugaagaacggcaccuacgacuaccccaaguacuccgaggagagcaagcugaaccgcgagaagaucgacggggucaagcucgagagcaugggcguguaccagauccuggcgaucuacuccaccguggccagcucccugguccuccuggugagccugggcgccaucuccuucuggaugugcagcaacgggucccuccagugccggaucugcaucuga

SEQ ID NO: 69545 - RNA, 1698 nt, Artificial Sequence
  derived and/or modified CDS sequence (opt1) from hemagglutinin__InfluenzaA__ADL60297
augaaggugaagcugcucguccugcugugcaccuucaccgccacguacgccgacaccaucugcaucggcuaccacgcgaacaacagcaccgacaccguggacacggugcucgagaagaacgucaccgugacccacuccgugaaccugcuggagaacagccacaacgggaagcucugccugcugaagggcaucgcgccccuccagcuggggaacugcuccgucgccggcuggauccuggggaacccggagugcgagcuccugaucagcaaggaguccuggagcuacaucguggagaagcccaaccccgagaacgggaccugcuaccccggccacuucgccgacuacgaggagcugcgcgagcagcucuccagcguguccagcuucgagcgguucgagaucuucccgaaggaguccagcuggcccaaccacacggucaccggcguguccgccagcugcucccacaacggcgagagcuccuucuaccgcaaccugcuguggcucacccggaagaacgggcuguaccccaaccugagcaaguccuacgccaacaacaaggagaaggaggugcucguccuguggggcgugcaccacccgcccaacaucggggaccagaagacccuguaccacacggagaacgccuacgugagcgucgugagcucccacuacagccgcaaguucacccccgagaucgccaagcggcccaaggugcgcgaccaggagggccggaucaacuacuacuggacccuccuggagcccggcgacaccaucaucuucgaggccaacgggaaccugaucgcgccgcgcuacgccuucgcccucucccggggcuucgggagcggcaucaucaacuccaacgcccccauggacaagugcgacgccaagugccagacgccccagggcgcgaucaacagcucccugcccuuccagaacguccacccggugaccaucggggagugccccaaguacgugcgcagcgccaagcugcggauggucaccggccuccgcaacauccccuccauccagagccgggggcuguucggcgccaucgccggguucaucgagggcggcuggaccgggaugguggacggcugguacggguaccaccaccagaacgagcagggcuccggguacgccgcggaccagaaguccacgcagaacgccaucaacggcaucaccaacaaggugaacagcgucaucgagaagaugaacacccaguucaccgccgugggcaaggaguucaacaagcuggagcgccggauggagaaccucaacaagaaggucgacgacggguucaucgacaucuggacguacaacgccgagcugcuggugcuccuggagaacgagcgcacccuggacagccacgacuccaacgugaagaaccucuacgagaaggucaagagccagcugaagaacaacgccaaggagaucggcaacgggugcuucgaguucuaccacaagugcaacgacgagugcauggaguccgugaagaacggcaccuacgacuaccccaaguacagcgaggaguccaagcugaaccgggagaagaucgacggggugaagcucgagagcaugggcgucuaccagauccuggcgaucuacagcaccguggccuccagccuggugcuccuggucucccugggcgccaucagcuucuggaugugcuccaacgggagccuccagugccgcaucugcaucuga

SEQ ID NO: 69546 - RNA, 1698 nt, Artificial Sequence
  derived and/or modified CDS sequence (opt1) from hemagglutinin__InfluenzaA__ADL60308
augaaggugaagcugcucguccugcugugcaccuucgccgccaccuacgcggacacgaucugcaucggcuaccacgccaacaacagcaccgacaccguggacaccgugcucgagaagaacgucacggugacccacuccgugaaccugcuggagaacagccacaacgggaagcucugccugcugaagggcaucgcgccccuccagcuggggaacugcuccgucgccggcuggauccuggggaacccggagugcgagcuccugaucagcaaggaguccuggagcuacaucguggagaagcccaaccccgagaacgggaccugcuaccccggccacuucgccgacuacgaggagcugcgcgagcagcucuccagcguguccagcuucgagcgguucgagaucuucccgaaggaguccagcuggcccaaccacaccgucacggggguguccgccagcugcucccacaacggcgagagcuccuucuaccgcaaccugcuguggcucaccgggaagaacggccuguaccccaaccugagcaaguccuacgccaacaacaaggagaaggaggugcucguccuguggggcgugcaccacccgcccaacaucggcgugcagaaggcccuguaccacaccgagaacgccuacgucagcguggugagcucccacuacagccggaaguucacccccgagaucgcgaagcgccccaagguccgggaccaggagggccgcaucaacuacuacuggacgcuccuggagcccggggacaccaucaucuucgaggccaacggcaaccugaucgccccgcgguacgccuucgcccucucccgcggguucggcagcggcaucaucaacuccaacgcgcccauggacaagugcgacgccaagugccagacgccccagggggccaucaacagcucccugcccuuccagaacgugcacccggugaccaucggcgagugccccaaguacguccggagcgccaagcugcgcauggugaccgggcuccggaacauccccuccauccagagccgcggccuguucggggccaucgcgggcuucaucgagggcggguggaccggcaugguggacgggugguacggcuaccaccaccagaacgagcagggguccggcuacgccgccgaccagaaguccacccagaacgccaucaacggcaucaccaacaaggucaacagcgugaucgagaagaugaacacgcaguucaccgccgucgggaaggaguucaacaagcuggagcggcgcauggagaaccucaacaagaagguggacgacggcuucaucgacaucuggaccuacaacgcggagcugcuggugcuccuggagaacgagcggacccuggacuuccacgacagcaacgucaagaaccucuacgagaaggugaagucccagcugaagaacaacgccaaggagaucgggaacggcugcuucgaguucuaccacaagugcaacgacgagugcauggagagcgugaagaacgggacguacgacuaccccaaguacuccgaggagagcaagcugaaccgcgagaagaucgacggcgucaagcucgaguccaugggcguguaccagauccuggccaucuacagcaccguggccagcucccugguccuccuggugagccugggggccaucuccuucuggaugugcagcaacggcucccuccagugccggaucugcaucuga

SEQ ID NO: 69547 - RNA, 1698 nt, Artificial Sequence
  derived and/or modified CDS sequence (opt1) from hemagglutinin__InfluenzaA__ADL60341
augaaggugaagcugcucguccugcugugcaccuucaccgccacguacgccgacaccaucugcaucggcuaccacgcgaacaacagcaccgacaccguggacacggugcucgagaagaacgucaccgugacccacuccgugaaccugcuggagaacagccacaacgggaagcucugccugcugaagggcaucgcgccccuccagcuggggaacugcuccgucgccggcuggauccuggggaacccggagugcgagcuccugaucagcaaggaguccuggagcuacaucguggagaagcccaaccccgagaacgggaccugcuaccccggccacuucgccgacuacgaggagcugcgcgagcagcucuccagcguguccagcuucgagcgguucgagaucuucccgaaggaguccagcuggcccaaccacacggucaccgggguguccgccagcugcucccacaacggcgagagcuccuucuaccgcaaccugcuguggcucaccgggaagaacggccuguaccccaaccugagcaaguccuacgccaacaacaaggagaaggaggugcucguccuguggggcgugcaccacccgcccaacaucggcgugcagaaggcccuguaccacaccgagaucgccuacgucagcguggugagcucccacuacagccggaaguucacgcccgagaucgccaagcgccccaagguccgggaccaggagggccgcaucaacuacuacuggaccauccucgagcccggggacaccaucaucuucgaggcgaacggcaaccugaucgccccgcgguacgccuucgcccugucccgcggguucggcagcggcaucaucaacuccaacgcccccauggacaagugcgacgcgaagugccagacgccccagggggccaucaacagcucccuccccuuccagaacgugcacccggugaccaucggcgagugccccaaguacguccggagcgccaagcugcgcauggugaccgggcugcggaacauccccuccauccagagccgcggccucuucggggccaucgccggcuucaucgagggcggguggaccggcaugguggacgggugguacggcuaccaccaccagaacgagcagggguccggcuacgcggccgaccagaaguccacccagaacgccaucaacggcaucacgaacaaggucaacagcgugaucgagaagaugaacacccaguucaccgccgucgggaaggaguucaacaagcuggagcggcgcauggagaaccugaacaagaagguggacgacggcuucaucgacaucuggaccuacaacgccgagcuccuggugcugcucgagaacgagcggacgcuggacuuccacgacagcaacgucaagaaccuguacgagaaggugaagucccagcucaagaacaacgcgaaggagaucgggaacggcugcuucgaguucuaccacaagugcaacgacgagugcauggagagcgugaagaacgggaccuacgacuaccccaaguacuccgaggagagcaagcugaaccgcgagaagaucgacggcgucaagcuggaguccaugggcguguaccagauccucgccaucuacagcaccguggccagcucccugguccugcucgugagccugggggccaucuccuucuggaugugcagcaacggcucccugcagugccggaucugcaucuga

SEQ ID NO: 69548 - RNA, 1698 nt, Artificial Sequence
  derived and/or modified CDS sequence (opt1) from hemagglutinin__InfluenzaA__ADL60352
augaaggugaagcugcucguccugcugugcaccuucaccgccacguacgccgacaccaucugcaucggcuaccacgcgaacaacagcaccgacaccguggacacggugcucgagaagaacgucaccgugacccacuccgugaaccugcuggagaacagccacaacgggaagcucugccugcugaagggcaucgcgccccuccagcuggggaacugcuccgucgccggcuggauccuggggaacccggagugcgagcuccugaucagcaaggaguccuggagcuacaucguggagaagcccaaccccgagaacgggaccugcuaccccggccacuucgccggguacgaggagcugcgcgagcagcucuccagcguguccagcuucgagcgguucgagaucuucccgaaggaguccagcuggcccaaccacacggucaccggcguguccgccagcugcucccacaacggggagcgcagcuucuaccggaaccugcuguggcucaccggcaagaacgggcuguaccccaaccuguccaagagcuacgccaacaacaaggagaaggaggugcucguccuguggggcgugcaccacccgcccgacaucggcaaccagaagacccuguaccacacggagaacgccuacguguccgucgugagcagccacuacucccgcaaguucacccccgagaucgccaagcggcccaaggugcgcgaccaggaggggcggaucaacuacuacuggacccuccuggagcccggcgacaccaucaucuucgaggccaacgggaaccugaucgcgccgcgcuacgccuucgcccucagccggggcuucggcuccgggaucaucaacagcaacgcccccauggacaagugcgacgccaagugccagacgccccagggcgcgaucaacuccagccugcccuuccagaacguccacccggugaccaucggggagugccccaaguacgugcgcuccgccaagcugcggauggucaccggccuccgcaacauccccagcauccagucccgggggcuguucggcgccaucgccggcuucaucgagggcggcuggaccgggaugguggacggcugguacggguaccaccaccagaacgagcagggcagcggcuacgccgcggaccagaaguccacgcagaacgccaucaacgggaucaccaacaaggugaacagcgucaucgagaagaugaacacccaguucaccgccgugggcaaggaguucaacaagcuggagcgccggauggagaaccucaacaagaaggucgacgacggguucaucgacaucuggacguacaacgccgagcugcuggugcuccuggagaacgagcgcacccuggacuuccacgacuccaacgugaagaaccucuacgagaaggucaagagccagcugaagaacaacgccaaggagaucggcaacgggugcuucgaguucuaccacaagugcaacgacgagugcauggaguccgugaagaacggcaccuacgacuaccccaaguacagcgaggaguccaagcugaaccgggagaagaucgacggcgugaagcucgagagcaugggggucuaccagauccuggcgaucuacuccaccguggccagcagccuggugcuccuggucucccugggcgccaucagcuucuggaugugcuccaacgggagccuccagugccgcaucugcaucuga

SEQ ID NO: 69549 - RNA, 1701 nt, Artificial Sequence
  derived and/or modified CDS sequence (opt1) from hemagglutinin__InfluenzaA__ADL60363
augaagaccaucaucgcccugagcuacauccucugccugguguucgcccagaaguuccccggcaacgacaacuccaccgcgacgcugugccucgggcaccacgccgucccgaacggcaccaucgugaagaccaucaccaacgaccagaucgaggugacgaacgccaccgagcugguccagagcuccagcaccggggagaucugcgacagcccccaccagauccuggacggcgagaacugcacccucaucgacgcccugcugggggacccccagugcgacggcuuccagaacaagaacugggaccucuucguggagcgcagcaaggccuacuccaacugcuaccccuacgacgugccggacuacgcgagccugcggucccugaucgccagcuccggcacgcucgaguucaacaacgagagcuucaacuggaccggggucacccagaacggcaccuccagcgccugcauccgccgguccaacaacagcuucuucucccgccugaacuggcugacgcacagcaaguucaaguaccccgcccucaacgugaccaugcccaacaacgagaacuucgacaagcuguacaucuggggcgugcaccaccccgggaccgacaacgaccagaucuuccuguacgcgcaggccuccgggcggaucaccaucagcacgaagcgcagccagcagaccgucaucccgaacaucggcucccggccccgcgugcgggacauccccagccgcaucuccaucuacuggaccaucgugaagcccggcgacauccuccugaucaacagcaccgggaaccugaucgccccgcggggcuacuucaagauccgcuccgggaaguccuccaucaugcggagcgacgcccccaucggcaagugcaacuccgagugcaucacgcccaacggcagcauccccaacgacaagccguuccagaacgucaaccgcaucaccuacggggccugcccccgguacgugaagcagaacacccucaagcuggcgaccggcaugcgcaacgugcccgagaagcagacgcgggggaucuucggcgccaucgccggguucaucgagaacggcugggagggcauggucgacgggugguacggcuuccgccaccagaacuccgagggggugggccaggccgccgaccucaagagcacccaggcggccaucgaccagaucaacgggaagcugaaccggcugaucggcaagaccaacgagaaguuccaccagaucgagaaggaguucuccgagguggagggccgcauccaggaccuggagaaguacgucgaggacaccaagaucgaccucuggagcuacaacgccgagcugcugguggcccucgagaaccagcacacgaucgaccugaccgacuccgagaugaacaagcuguucgagaagaccaagaagcagcuccgggagaacgccgaggacauggggaacggcugcuucaagaucuaccacaagugcgacaacgcgugcaucgggagcauccgcaacggcaccuacgaccacgacguguaccgcgacgaggcccugaacaaccgguuccagaucaagggggucgagcugaaguccggcuacaaggacuggauccucuggaucagcuucgccaucuccugcuuccugcugugcaucgcccuccugggcuucaucaugugggccugccagaaggggaacauccgcugcaacaucugcaucuga

SEQ ID NO: 69550 - RNA, 1698 nt, Artificial Sequence
  derived and/or modified CDS sequence (opt1) from hemagglutinin__InfluenzaA__ADL60374
augaaggugaagcugcucguccugcugugcaccuucaccgccacguacgccgacaccaucugcaucggcuaccacgcgaacaacagcaccgacaccguggacacggugcucgagaagaacgucaccgugacccacuccgugaaccugcuggagaacagccacaacgggaagcucugccugcugaagggcaucgcgccccuccagcuggggaacugcuccgucgccggcuggauccuggggaacccggagugcgagcuccugaucagcaaggaguccuggagcuacaucguggagaagcccaaccccgagaacgggaccugcuaccccggccacuucgccgacuacgaggagcugcgcgagcagcucuccagcguguccagcuucgagcgguucgagaucuucccgaaggaguccagcuggcccaaccacacggucaccgggguguccgccagcugcucccacgacggcgagagcuccuucuaccgcaaccugcuguggcucaccgggaagaacggccuguaccccaaccugagcaaguccuacgccaacaacaaggagaaggaggugcucguccuguggggcgugcaccacccgcccaacaucggcgaccagaaggcccuguaccacaccgagaacgccuacgugagcgucgugagcucccacuacagccggaaguucacgcccgagaucgccaagcgccccaaggugcgggaccaggagggccgcaucaacuacuacuggacccuccuggagcccggggacaccaucaucuucgaggcgaacggcaaccugaucgccccgcgguacgccuucgcccucucccgcggguucggcagcggcaucaucaacuccaacgcccccauggacaagugcgacgcgaagugccagacgccccagggggccaucaacagcucccugcccuuccagaacguccacccggugaccaucggcgagugccccaaguacgugcggagcgccaagcugcgcgucgugaccgggcuccggaacauccccuccauccagagccgcggccuguucggggccaucgccggcuucaucgagggcggguggaccggcaugguggacgggugguacggcuaccaccaccagaacgagcagggguccggcuacgcggccgaccagaaguccacccagaacgccaucaacggcaucacgaacaaggucaacagcgugaucgagaagaugaacacccaguucaccgccgucgggaaggaguucaacaagcuggagcggcgcauggagaaccucaacaagaagguggacgacggcuucaucgacaucuggaccuacaacgccgagcugcuggugcuccuggagaacgagcggacgcuggacuuccacgacagcaacgucaagaaccucuacgagaaggugaagucccagcugaagaacaacgcgaaggagaucgggaacggcugcuucgaguucuaccacaagugcaacgacgagugcauggagagcgugaagaacgggaccuacgacuaccccaaguacuccgaggagagcaagcugaaccgcgagaagaucgacggcgucaagcucgaguccaugggcguguaccagauccuggccaucuacagcaccguggccagcucccugguccuccuggugagccugggggccaucuccuucuggaugugcagcaacggcucccuccagugccggaucugcaucuga

SEQ ID NO: 69551 - RNA, 1701 nt, Artificial Sequence
  derived and/or modified CDS sequence (opt1) from hemagglutinin__InfluenzaA__ADM07135
augaaggccauccuggugguccuccuguacaccuucgccaccgcgaacgccgacacgcugugcaucggcuaccacgccaacaacagcaccgacaccguggacaccgugcucgagaagaacgucacggugacccacuccgugaaccugcuggaggacaagcacaacgggaagcucugcaagcugcgcggcgucgcgccccugcaccucgggaagugcaacaucgccggcuggauccuggggaacccggagugcgagagccuguccaccgccagcuccuggagcuacaucguggagaccuccagcuccgacaacggcacgugcuaccccggcgacuucaucgacuacgaggagcuccgggagcagcugagcuccgugagcuccuucgagcgcuucgagaucuuccccaagaccagcuccuggcccaaccacgagagcaacaagggggucaccgccgccugcccgcacgccggcgcgaaguccuucuacaagaaccugaucuggcucgugaagaaggggaacagcuaccccaagcuguccaagagcuacaucaacgacaagggcaaggaggugcugguccucugggggauccaccaccccagcaccuccgccgaccagcagagccuguaccagaacgccgacgccuacguguucgugggcacgucccgguacagcaagaaguucaagcccgagaucgccauccgcccgaagguccgggaccaggagggccgcaugaacuacuacuggacccugguggagcccggggacaagaucaccuucgaggcgaccggcaaccucguggucccccgguacgccuucgccauggagcgcaacgccggguccggcaucaucaucagcgacacgcccgugcacgacugcaacacgaccugccagaccccgaagggcgccaucaacaccucccugcccuuccagaacauccaccccaucaccaucgggaagugccccaaguacgucaagagcaccaagcugcggcucgcgaccggccugcgcaacgugccguccauccagagccgggggcuguucggcgccaucgccggguucaucgagggcggcuggacggggaugguggacggcugguacggguaccaccaccagaacgagcagggcuccggguacgccgccgaccucaagagcacccagaacgcgaucgacgagaucaccaacaaggugaacuccgucaucgagaagaugaacacccaguucacggccgugggcaaggaguucaaccaccuggagaagcgcaucgagaaccugaacaagaaggucgacgacggcuuccucgacaucuggaccuacaacgccgagcugcuggugcuccuggagaacgagcggacccuggacuaccacgacagcaacgugaagaaccucuacgagaagguccgcucccagcugaagaacaacgccaaggagaucgggaacggcugcuucgaguucuaccacaagugcgacaacacgugcauggagagcgugaagaacgggaccuacgacuaccccaaguacuccgaggaggccaagcugaaccgggaggagaucgacggcgugaagcucgagagcacccgcaucuaccagauccuggcgaucuacuccaccgucgccagcagccuggugcucguggucucccugggggccaucagcuucuggaugugcuccaacggcagccugcagugccggaucugcaucuga

SEQ ID NO: 69552 - RNA, 1701 nt, Artificial Sequence; identical to SEQ ID NO: 67178
  derived and/or modified CDS sequence (opt1) from hemagglutinin__InfluenzaA__ADM07144

SEQ ID NO: 69553 - RNA, 1701 nt, Artificial Sequence
  derived and/or modified CDS sequence (opt1) from hemagglutinin__InfluenzaA__ADM07154
augaaggccauccuggugguccuccuguacaccuucgccaccgcgaacgccgacacgcugugcaucggcuaccacgccaacaacagcaccgacaccguggacaccgugcucgagaagaacgucacggugacccacuccgugaaccugcuggaggacaagcacaacgggaagcucugcaagcugcgcggcgucgcgccccugcaccucgggaagugcaacaucgccggcuggauccuggggaacccggagugcgagagccuguccaccgccagcuccuggagcuacaucguggagaccuccagcuccgacaacggcacgugcuaccccggcgacuucaucgacuacgaggagcuccgggagcagcugagcuccgugagcuccuucgagcgcuucgagaucuuccccaagaccagcuccuggcccaaccacgacagcaacaagggggucaccgccgccugcccgcacgccggcgcgaaguccuucuacaagaaccugaucuggcucgugaagaaggggaacagcuaccccaagcuguccaagagcuacaucaacgacaagggcaaggaggugcugguccucugggggauccaccacccgcccaccagcgccgaccagcagucccuguaccagaacgccgacgccuacguguucgugggcacgagccgguacuccaagaaguucaagcccgagaucgccauccgccccaagguccgggaccaggagggccgcaugaacuacuacuggacccugguggagcccggggacaagaucaccuucgaggcgaccggcaaccucguggucccccgguacgccuucgccauggugcgcaacgccgggagcggcaucaucaucuccgacacgccggugcacgacugcaacacgaccugccagacccccaagggcgccaucaacaccagccugcccuuccagaacauccaccccaucaccaucgggaagugcccgaaguacgucaaguccaccaagcugcggcucgcgaccggccugcgcaacgugcccagcauccagucccgggggcuguucggcgccaucgccggguucaucgagggcggcuggacggggaugguggacggcugguacggguaccaccaccagaacgagcagggcagcggguacgccgccgaccucaaguccacccagaacgcgaucgacgagaucaccaacaaggucaacagcgugaucgagaagaugaacacccaguucacggccgucggcaaggaguucaaccaccuggagaagcgcaucgagaaccugaacaagaagguggacgacggcuuccucgacaucuggaccuacaacgccgagcugcuggugcuccuggagaacgagcggacccuggacuaccacgacuccaacgucaagaaccucuacgagaaggugcgcagccagcugaagaacaacgccaaggagaucgggaacggcugcuucgaguucuaccacaagugcgacaacacgugcauggaguccgugaagaacgggaccuacgacuaccccaaguacagcgaggaggccaagcugaaccgggaggagaucgacggcgucaagcucgaguccacccgcaucuaccagauccuggcgaucuacagcaccguggccuccagccuggugcucgucgugagccugggggccaucuccuucuggaugugcagcaacggcucccugcagugccggaucugcaucuga

SEQ ID NO: 69554 - RNA, 1701 nt, Artificial Sequence; identical to SEQ ID NO: 67178
  derived and/or modified CDS sequence (opt1) from hemagglutinin__InfluenzaA__ADM07163

SEQ ID NO: 69555 - RNA, 1698 nt, Artificial Sequence; identical to SEQ ID NO: 69537
  derived and/or modified CDS sequence (opt1) from hemagglutinin__InfluenzaA__ADM07460

SEQ ID NO: 69556 - RNA, 1701 nt, Artificial Sequence
  derived and/or modified CDS sequence (opt1) from hemagglutinin__InfluenzaA__ADM07504
augaagaccaucaucgcccugagcuacauccucugccugguguucgcccagaagcugcccggcaacgacaacuccaccgcgacgcucugccuggggcaccacgccgucccgaacggcaccaucgugaagaccaucaccaacgaccagaucgaggugacgaacgccaccgagcugguccagagcuccagcaccggggagaucugcgacagcccccaccagauccucgacggcgagaacugcacccugaucgacgcccugcucggggacccccagugcgacggcuuccagaacaagaagugggaccuguucguggagcgcagcaaggccuacuccaacugcuaccccuacgacgugccggacuacgcgagccugcggucccucgucgccagcuccggcacgcuggaguucaacaacgagagcuucaacuggaccggggugacccagaacggcaccuccagcgccugcauccgccgguccaacaacagcuucuucucccgccugaacuggcucacgcaccugaacuucaaguaccccgcccugaacgugaccaugcccaacaacgagcaguucgacaagcucuacaucuggggcguccaccaccccgggaccgacaaggaccagaucuuccuguacgcgcaggccagcgggcggaucaccguguccacgaagcgcagccagcaggccgugaucccgaacaucggcagccggccccgcguccggaacauccccucccgcaucagcaucuacuggaccaucgugaagcccggcgacauccugcucaucaacuccaccgggaaccugaucgccccgcggggcuacuucaagauccgcaacgggaaguccuccaucaugcggagcgacgcccccaucggcaagugcaacuccgagugcaucacccccaacggcagcauccccaacgacaagccguuccagaacgugaaccgcaucacguacggggcgugcccccgguacgucaagcagaacacccugaagcucgccaccggcaugcgcaacgugcccgagaagcagacccgggggaucuucggcgccaucgccggguucaucgagaacggcugggagggcaugguggacgggugguacggcuuccgccaccagaacuccgaggggcggggccaggccgcggaccucaagagcacgcaggccgccaucgaccagaucaacgggaagcugaaccgccugaucggcaagaccaacgagaaguuccaccagaucgagaaggaguucuccgaggucgagggccggauccaggaccuggagaaguacguggaggacaccaagaucgaccuguggagcuacaacgccgagcuccugguggcccuggagaaccagcacaccaucgaccucacggacuccgagaugaacaagcuguucgagaagaccaagaagcagcugcgcgagaacgcggaggacauggggaacggcugcuucaagaucuaccacaagugcgacaacgccugcaucgggagcauccgcaacggcaccuacgaccacgacgucuaccgggacgaggcccucaacaaccgcuuccagaucaaggggguggagcugaaguccggcuacaaggacuggauccuguggaucagcuucgccaucuccugcuuccuccugugcguggcccugcucggcuucaucaugugggcgugccagaaggggaacauccggugcaacaucugcaucuga

SEQ ID NO: 69557 - RNA, 1701 nt, Artificial Sequence
  derived and/or modified CDS sequence (opt1) from hemagglutinin__InfluenzaA__ADM12806
augaagaccaucaucgcccugagcuacauccucugccugguguucgcccagaagcugcccggcaacgacaacuccaccgcgacgcucugccuggggcaccacgccgucccgaacggcaccaucgugaagaccaucaccaacgaccagaucgaggugacgaacgccaccgagcugguccagagcuccagcaccggggagaucugcgacagcccccaccagauccucgacggcgagaacugcacccugaucgacgcccugcucggggacccccagugcgacggcuuccagaacaagaagugggaccuguucguggagcgcagcaaggccuacuccaacugcuaccccuacgacgugccggacuacgcgagccugcggucccucgucgccagcuccggcacgcuggaguucaacaacgagagcuucaacuggaccggggugacccagaacggcaccuccagcgccugcauccgccgguccaacaacagcuucuucucccgccugaacuggcucacgcaccugaacuucaaguaccccgcccugaacgugaccaugcccaacaacgagcaguucgacaagcucuacaucuggggcguccaccaccccgggaccgacaaggaccagaucuuccuguacgcgcaggccagcgggcggaucaccguguccacgaagcgcagccagcaggccgugaucccgaacaucggcagccggccccgcguccggaacauccccucccgcaucagcaucuacuggaccaucgugaagcccggcgacauccugcucaucaacuccaccgggaaccugaucgccccgcggggcuacuucaagauccgcagcgggaaguccagcaucaugcgguccgacgcccccaucggcaagugcaacagcgagugcaucacccccaacggcuccauccccaacgacaagccguuccagaacgugaaccgcaucacguacggggcgugcccccgguacgucaagcagagcacccugaagcucgccaccggcaugcgcaacgugcccgagaagcagacccgggggaucuucggcgccaucgccggguucaucgagaacggcugggagggcaugguggacgggugguacggcuuccgccaccagaacuccgaggggcggggccaggccgcggaccugaaguccacgcaggccgccaucgaccagaucaacgggaagcugaaccgccucaucggcaagaccaacgagaaguuccaccagaucgagaaggaguucuccgaggucgagggccggauccaggaccuggagaaguacguggaggacaccaagaucgaccuguggagcuacaacgccgagcuccugguggcccuggagaaccagcacaccaucgaccucacggacuccgagaugaacaagcuguucgagaagaccaagaagcagcugcgcgagaacgcggaggacauggggaacggcugcuucaccaucuaccacaagugcgacaacgccugcaucgggagcauccgcaacggcaccuacgaccacaacgucuaccgggacgaggcccucaacaaccgcuuccagaucaaggggguggagcugaaguccggcuacaaggacuggauccuguggaucagcuucgccaucuccugcuuccuccugugcguggcccugcucggcuucaucaugugggcgugccagaaggggaacauccggugcaacaucugcaucuga

SEQ ID NO: 69558 - RNA, 1701 nt, Artificial Sequence; identical to SEQ ID NO: 69557
  derived and/or modified CDS sequence (opt1) from hemagglutinin__InfluenzaA__ADM12817

SEQ ID NO: 69559 - RNA, 1701 nt, Artificial Sequence; identical to SEQ ID NO: 69557
  derived and/or modified CDS sequence (opt1) from hemagglutinin__InfluenzaA__ADM12828

SEQ ID NO: 69560 - RNA, 1701 nt, Artificial Sequence; identical to SEQ ID NO: 69557
  derived and/or modified CDS sequence (opt1) from hemagglutinin__InfluenzaA__ADM12839

SEQ ID NO: 69561 - RNA, 1701 nt, Artificial Sequence
  derived and/or modified CDS sequence (opt1) from hemagglutinin__InfluenzaA__ADM12850
augaaggccaucaucgcccugagcuacauccucugccugguguucgcgcagaagcugcccggcaacgacaacuccaccgccacccucugccuggggcaccacgccgucccgaacggcacgaucgugaagaccaucaccaacgaccagaucgaggugaccaacgccacggagcugguccagagcuccagcaccggggagaucugcgacagcccccaccagauccucgacggcgagaacugcacccugaucgacgcccugcucggggacccccagugcgacggcuuccagaacaagaagugggaccuguucguggagcgcagcaaggcguacuccaacugcuaccccuacgacgugccggacuacgccagccugcggucccucgucgccagcuccggcacccuggaguucaacaacgagagcuucaacuggacgggggugacccagaacggcaccuccagcgccugcauccgccgguccaacaacagcuucuucucccgccugaacuggcucacccaccugaacuucaaguaccccgcgcugaacgugacgaugcccaacaacgagcaguucgacaagcucuacaucuggggcguccaccaccccgggaccgacaaggaccagaucuuccuguacgcccaggccagcgggcggaucaccguguccaccaagcgcagccagcaggccgugaucccgaacaucggcagccggccccgcguccggaacauccccucccgcaucagcaucuacuggacgaucgugaagcccggcgacauccugcucaucaacuccaccgggaaccugaucgccccgcggggcuacuucaagauccgcagcgggaaguccagcaucaugcgguccgacgcgcccaucggcaagugcaacagcgagugcaucacccccaacggcuccauccccaacgacaagccguuccagaacgugaaccgcaucaccuacggggccugcccccgguacgucaagcagagcacgcugaagcucgccaccggcaugcgcaacgugcccgagaagcagacccgggggaucuucggcgccaucgccggguucaucgagaacggcugggagggcaugguggacgggugguacggcuuccgccaccagaacuccgaggggcggggccaggcggccgaccugaaguccacccaggccgccaucgaccagaucaacgggaagcugaaccgccucaucggcaagacgaacgagaaguuccaccagaucgagaaggaguucuccgaggucgagggccggauccaggaccuggagaaguacguggaggacaccaagaucgaccuguggagcuacaacgccgagcuccugguggcgcuggagaaccagcacaccaucgaccucaccgacuccgagaugaacaagcuguucgagaagacgaagaagcagcugcgcgagaacgccgaggacauggggaacggcugcuucaccaucuaccacaagugcgacaacgccugcaucgggagcauccgcaacggcaccuacgaccacaacgucuaccgggacgaggcccucaacaaccgcuuccagaucaaggggguggagcugaaguccggcuacaaggacuggauccuguggaucagcuucgccaucuccugcuuccuccugugcguggcgcugcucggcuucaucaugugggccugccagaaggggaacauccggugcaacaucugcaucuga

SEQ ID NO: 69562 - RNA, 1701 nt, Artificial Sequence; identical to SEQ ID NO: 66693
  derived and/or modified CDS sequence (opt1) from hemagglutinin__InfluenzaA__ADM12861

SEQ ID NO: 69563 - RNA, 1701 nt, Artificial Sequence; identical to SEQ ID NO: 66693
  derived and/or modified CDS sequence (opt1) from hemagglutinin__InfluenzaA__ADM12871

SEQ ID NO: 69564 - RNA, 1701 nt, Artificial Sequence; identical to SEQ ID NO: 66693
  derived and/or modified CDS sequence (opt1) from hemagglutinin__InfluenzaA__ADM12881

SEQ ID NO: 69565 - RNA, 1701 nt, Artificial Sequence; identical to SEQ ID NO: 66693
  derived and/or modified CDS sequence (opt1) from hemagglutinin__InfluenzaA__ADM12891

SEQ ID NO: 69566 - RNA, 1701 nt, Artificial Sequence; identical to SEQ ID NO: 66693
  derived and/or modified CDS sequence (opt1) from hemagglutinin__InfluenzaA__ADM12901

SEQ ID NO: 69567 - RNA, 1701 nt, Artificial Sequence; identical to SEQ ID NO: 67795
  derived and/or modified CDS sequence (opt1) from hemagglutinin__InfluenzaA__ADM12911

SEQ ID NO: 69568 - RNA, 1701 nt, Artificial Sequence; identical to SEQ ID NO: 66693
  derived and/or modified CDS sequence (opt1) from hemagglutinin__InfluenzaA__ADM12921

SEQ ID NO: 69569 - RNA, 1701 nt, Artificial Sequence; identical to SEQ ID NO: 66693
  derived and/or modified CDS sequence (opt1) from hemagglutinin__InfluenzaA__ADM12931

SEQ ID NO: 69570 - RNA, 1701 nt, Artificial Sequence; identical to SEQ ID NO: 66693
  derived and/or modified CDS sequence (opt1) from hemagglutinin__InfluenzaA__ADM12941

SEQ ID NO: 69571 - RNA, 1701 nt, Artificial Sequence; identical to SEQ ID NO: 66693
  derived and/or modified CDS sequence (opt1) from hemagglutinin__InfluenzaA__ADM12951

SEQ ID NO: 69572 - RNA, 1701 nt, Artificial Sequence
  derived and/or modified CDS sequence (opt1) from hemagglutinin__InfluenzaA__ADM12961
augaaggccgugcuggucgugcuccuguacaccuucgccaccgcgaacgccgacacgcugugcaucggcuaccacgccaacaacagcaccgacaccguggacaccguccucgagaagaacgugacggugacccacuccgucaacauccuggaggacaagcacaacgggaagcugugcaagcucggcgggguggcgccccugcaccugggcaagugcaacaucgccggguggauccucggcaacccggagugcgagagccuguccaccgccagcuccuggagcuacaucguggagaccuccagcuccgacaacggcacgugcuaccccggggacuucaucgacuacgaggagcugcgcgagcagcucagcuccgucagcuccuucgagcgguucgagaucuuccccaagaccagcuccuggcccaaccacgacagcaacaagggcgugaccgccgccugcccgcacgccggggcgaaguccuucuacaagaaccugaucuggcuggugaagaagggcaacagcuaccccaagcucuccaagagcuacaucaacgacaaggggaaggagguccuggugcuguggggcauccaccaccccagcaccuccgccgaccagcagagccucuaccagaacgccgacgccuacguguucgucggcacgucccgcuacagcaagaaguucaagcccgagaucgccauccggccgaaggugcgcgaccaggaggggcggaugaacuacuacuggacccugguggagcccggcgacaagaucaccuucgaggcgaccgggaaccuggucgugccccgcuacgccuucgccauggagcggaacgccggcuccggcaucaucaucagcgacacgcccgugcacgacugcaacacgaccugccagaccccgaagggggccaucaacaccucccuccccuuccagaacauccaccccaucaccaucggcaagugccccaaguacgucaagagcaccaagcugcgccuggcgaccgggcuccggaacgugccguccauccagagccgcggccuguucggggccaucgccggcuucaucgagggcggguggacgggcaugguggacgggugguacggcuaccaccaccagaacgagcagggguccggcuacgccgccgaccucaagagcacccagaacgcgaucgacgagaucaccaacaaggucaacuccgugaucgagaagaugaacacccaguucacggccgucggcaaggaguucaaccaccuggagaagcggaucgagaaccugaacaagaagguggacgacggguuccuggacaucuggaccuacaacgccgagcuccuggugcugcucgagaacgagcgcacccuggacuaccacgacagcaacgucaagaaccuguacgagaaggugcggucccagcucaagaacaacgccaaggagaucggcaacgggugcuucgaguucuaccacaagugcgacaacacgugcauggagagcgugaagaacggcaccuacgacuaccccaaguacuccgaggaggccaagcugaaccgcgaggagaucgacggggucaagcuggagagcacccggaucuaccagauccucgcgaucuacuccaccguggccagcagccuggugcuggucgugucccucggcgccaucagcuucuggaugugcuccaacggcagccugcagugccgcaucugcaucuga

SEQ ID NO: 69573 - RNA, 1701 nt, Artificial Sequence; identical to SEQ ID NO: 68342
  derived and/or modified CDS sequence (opt1) from hemagglutinin__InfluenzaA__ADM12971

SEQ ID NO: 69574 - RNA, 1701 nt, Artificial Sequence; identical to SEQ ID NO: 67794
  derived and/or modified CDS sequence (opt1) from hemagglutinin__InfluenzaA__ADM12981

SEQ ID NO: 69575 - RNA, 1701 nt, Artificial Sequence
  derived and/or modified CDS sequence (opt1) from hemagglutinin__InfluenzaA__ADM12991
augaaggccauccuggugguccuccuguacaccuucgagaccgccaacgcggacacgcugugcaucggcuaccacgccaacaacagcaccgacaccguggacaccgugcucgagaagaacgucacggugacccacuccgugaaccugcuggaggacaagcacaacgggaagcucugcaagcugcgcggcgucgcgccccugcaccucgggaagugcaacaucgccggcuggauccuggggaacccggagugcgagagccuguccaccgccagcuccuggagcuacaucguggagaccuccagcuccgacaacggcacgugcuaccccggcgacuucaucgacuacgaggagcuccgggagcagcugagcuccgugagcuccuucgagcgcuucgagaucuuccccaagaccagcuccuggcccaaccacgacagcaacaagggggucaccgccgccugcccgcacgccggcgccaaguccuucuacaagaaccugaucuggcucgugaagaaggggaacagcuaccccaagcuguccaagagcuacaucaacgacaagggcaaggaggugcugguccucugggggauccaccaccccagcaccuccgcggaccagcagagccuguaccagaacgccgacgccuacguguucgugggcacgucccgguacagcaagaaguucaagcccgagaucgccauccgcccgaagguccgggaccaggagggccgcaugaacuacuacuggacccugguggagcccggggacaagaucaccuucgaggccaccggcaaccucguggucccccgguacgcguucgccauggagcgcaacgccggguccggcaucaucaucagcgacacgcccgugcacgacugcaacacgaccugccagaccccgaagggcgccaucaacaccucccugcccuuccagaacauccaccccaucaccaucgggaagugccccaaguacgucaagagcaccaagcugcggcucgccaccggccugcgcaacgugccguccauccagagccgggggcuguucggcgcgaucgccggguucaucgagggcggcuggacggggaugguggacggcugguacggguaccaccaccagaacgagcagggcuccggguacgccgccgaccucaagagcacccagcacgccaucgacgagaucaccaacaaggugaacuccgucaucgagaagaugaacacccaguucacggcggugggcaaggaguucaaccaccuggagaagcgcaucgagaaccugaacaagaaggucgacgacggcuuccucgacaucuggaccuacaacgccgagcugcuggugcuccuggagaacgagcggacccuggacuaccacgacagcaacgugaagaaccucuacgagaagguccgcucccagcugaagaacaacgccaaggagaucgggaacggcugcuucgaguucuaccacaagugcgacaacacgugcauggagagcgugaagaacgggaccuacgacuaccccaaguacuccgaggaggccaagcugaaccgggaggagaucgacggcgugaagcucgagagcacccgcaucuaccagauccuggccaucuacuccaccgucgcgagcagccuggugcucguggucucccugggggccaucagcuucuggaugugcuccaacggcagccugcagugccggaucugcaucuga

SEQ ID NO: 69576 - RNA, 1701 nt, Artificial Sequence
  derived and/or modified CDS sequence (opt1) from hemagglutinin__InfluenzaA__ADM13001
augaaggccauccuggugguccuccuguacaccuucgccaccgcgaacgccgacacgcugugcaucggcuaccacgccaacaacagcaccgacaccguggacaccgugcucgagaagaacgucacggugacccacuccgugaaccugcuggaggacaagcacaacgggaagcucugcaagcugcgcggcgucgcgccccugcaccucgggaagugcaacaucgccggcuggauccuggggaacccggagugcgagagccuguccaccgccagcuccuggagcuacaucguggagaccuccagcuccgacaacggcacgugcuaccccggcgacuucaucgacuacgaggagcuccgggagcagcugagcuccgugagcuccuucgagcgcuucgagaucuuccccaagaccagcuccuggcccaaccacgacagcaacaagggggucaccgccgccugcccgcacgccggcgcgaaguccuucuacaagaaccugaucuggcucgugaagaaggggaacagcuaccccaagcuguccaagagcuacaucaacgacaagggcaaggaggugcugguccucugggggauccaccaccccagcaccuccgccgaccagcagagccuguaccagaacgccgacgccuacguguucgugggcacgucccgguacagcaagaaguucaagcccgagaucgccauccgcccgaagguccgggaccaggagggccgcaugaacuacuacuggacccugguggagcccggggacaagaucaccuucgaggcgaccggcaaccucguggucccccgguacgccuucgccauggagcgcaacgccggguccggcaucaucaucagcgacacgcccgugcacgacugcaacacgaccugccagaccccgaagggcgccaucaacaccucccugcccuuccagaacauccaccccaucaccaucgggaagugccccaaguacgucaagagcaccaagcugcggcucgcgaccggccugcgcaacaucccguccauccagagccgggggcuguucggcgccaucgccggguucaucgagggcggcuggacggggaugguggacggcugguacggguaccaccaccagaacgagcagggcuccggguacgccgccgaccucaagagcacccagcacgcgaucgacgagaucaccaacaaggugaacuccgugaucgagaagaugaacacccaguucacggccgucggcaaggaguucaaccaccuggagaagcgcaucgagaaccugaacaagaagguggacgacggcuuccucgacaucuggaccuacaacgccgagcugcugguccuccuggagaacgagcggacccuggacuaccacgacagcaacgugaagaaccucuacgagaaggugcgcucccagcugaagaacaacgccaaggagaucgggaacggcugcuucgaguucuaccacaagugcgacaacacgugcauggagagcgucaagaacgggaccuacgacuaccccaaguacuccgaggaggccaagcugaaccgggaggagaucgacggcgugaagcucgagagcacccgcaucuaccagauccuggcgaucuacuccaccguggccagcagccugguccucguggugucccugggggccaucagcuucuggaugugcuccaacggcagccugcagugccggaucugcaucuga

SEQ ID NO: 69577 - RNA, 1701 nt, Artificial Sequence; identical to SEQ ID NO: 67857
  derived and/or modified CDS sequence (opt1) from hemagglutinin__InfluenzaA__ADM13011

SEQ ID NO: 69578 - RNA, 1701 nt, Artificial Sequence
  derived and/or modified CDS sequence (opt1) from hemagglutinin__InfluenzaA__ADM13021
augaaggccauccuggugguccuccuguacaccuucgccaccgcgaacgccgacacgcugugcaucggcuaccacgccaacaacagcaccgacaccaucgacaccgugcucgagaagaacgugacggucacccacuccgugaaccugcuggaggacaagcacaacgggaagcucugcaagcugcgcggcguggcgccccugcaccucgggaagugcaacaucgccggcuggauccuggggaacccggagugcgagagccuguccaccgccagcuccuggagcuacaucgucgagaccuccagcuccgacaacggcacgugcuaccccggcgacuucaucgacuacgaggagcuccgggagcagcugagcuccgugagcuccuucgagcgcuucgagaucuuccccaagaccagcuccuggcccaaccacgacagcaacaagggggugaccgccgccugcccgcacgccggcgcgaaguccuucuacaagaaccugaucuggcucgucaagaaggggaacagcuaccccaagcuguccaagagcuacaucaacgacaagggcaaggaggugcuggugcucugggggauccaccaccccagcaccuccgccgaccagcagagccuguaccagaacgccgacgccuacgucuucgugggcacgucccgguacagcaagaaguucaagcccgagaucgccauccgcccgaaggugcgggaccaggagggccgcaugaacuacuacuggacccuggucgagcccggggacaagaucaccuucgaggcgaccggcaaccucguggugccccgguacgccuucgccauggagcgcaacgccggguccggcaucaucaucagcgacacgcccguccacgacugcaacacgaccugccagaccccgaagggcgccaucaacaccucccugcccuuccagaacauccaccccaucaccaucgggaagugccccaaguacgucaagagcaccaagcugcggcucgcgaccggccugcgcaacgugccguccauccagagccgggggcuguucggcgccaucgccggguucaucgagggcggcuggacggggaugguggacggcugguacggguaccaccaccagaacgagcagggcuccggguacgccgccgaccucaagagcacccagaacgcgaucgacaagaucaccaacaaggugaacuccgugaucgagaagaugaacacccaguucacggccgucggcaaggaguucaaccaccuggagaagcgcaucgagaaccugaacaagaagguggacgacggcuuccucgacaucuggaccuacaacgccgagcugcugguccuccuggagaacgagcggacccuggacuaccacgacagcaacgugaagaaccucuacgagaaggugcgcucccagcugaagaacaacgccaaggagaucgggaacggcugcuucgaguucuaccacaagugcgacaacacgugcauggagagcgucaagaacgggaccuacgacuaccccaaguacuccgaggaggccaagcugaaccgggaggagaucgacggcgugaagcucgagagcacccgcaucuaccagauccuggcgaucuacuccaccguggccagcagccugguccucguggugucccugggggccaucagcuucuggaugugcuccaacggcagccugcagugccggaucugcaucuga

SEQ ID NO: 69579 - RNA, 1701 nt, Artificial Sequence; identical to SEQ ID NO: 68039
  derived and/or modified CDS sequence (opt1) from hemagglutinin__InfluenzaA__ADM13031

SEQ ID NO: 69580 - RNA, 1701 nt, Artificial Sequence
  derived and/or modified CDS sequence (opt1) from hemagglutinin__InfluenzaA__ADM13041
augaaggccauccuggugguccuccuguacaccuucgccaccgcgaacgccgacacgcugugcaucggcuaccacgccaacaacagcaccgacaccguggacaccgugcucgagaagaacgucacggugacccacuccgugaaccugcuggaggacaagcacaacgggaagcucugcaagcugcgcggcgucgcgccccugcaccucgggaagugcaacaucgccggcuggauccuggggaacccggagugcgagagccuguccaccgccagcuccuggagcuacaucguggagaccuccagcuccgacaacggcacgugcuaccccggcgacuucaucgacuacgaggagcuccgggagcagcugagcuccgugagcuccuucgagcgcuucgagaucuuccccaagaccagcuccuggcccaaccacgacagcaacaagggggucaccgccgccugcccgcacgccggcgcgaaguccuucuacaagaaccugaucuggcucgugaagaaggggaacagcuaccccaagcuguccaagagcuacaucaacgacaagggcaaggaggugcugguccucugggggauccaccaccccagcaccuccgccgaccagcagagccuguaccagaacgccgacgccuacguguucgugggcacgucccgguacagcaagaaguucaagcccgagaucgccauccgcccgaagguccgggagcaggagggccgcaugaacuacuacuggacccugguggagcccggggacaagaucaccuucgaggcgaccggcaaccucguggucccccgguacgccuucgccauggagcgcaacgccggguccggcaucaucaucagcgacacgcccgugcacgacugcaacacgaccugccagaccccgaagggcgccaucaacaccucccugcccuuccagaacgugcaccccaucaccaucgggaagugccccaaguacgucaagagcaccaagcugcggcucgcgaccggccugcgcaacgugccguccauccagagccgggggcuguucggcgccaucgccggguucaucgagggcggcuggacggggaugguggacggcugguacggguaccaccaccagaacgagcagggcuccggguacgccgccgaccucaagagcacccagaacgcgaucgacgagaucaccaacaaggucaacuccgugaucgagaagaugaacacccaguucacggccgucggcaaggaguucaaccaccuggagaagcgcaucgagaaccugaacaagaagguggacgacggcuuccucgacaucuggaccuacaacgccgagcugcuggugcuccuggagaacgagcggacccuggacuaccacgacagcaacgucaagaaccucuacgagaaggugcgcucccagcugaagaacaacgccaaggagaucgggaacggcugcuucgaguucuaccacaagugcgacaacacgugcauggagagcgugaagaacgggaccuacgacuaccccaaguacuccgaggaggccaagcugaaccgggaggagaucgacggcgucaagcucgagagcacccgcaucuaccagauccuggcgaucuacuccaccguggccagcagccuggugcucgucgugucccugggggccaucagcuucuggaugugcuccaacggcagccugcagugccggaucugcaucuga

SEQ ID NO: 69581 - RNA, 1701 nt, Artificial Sequence
  derived and/or modified CDS sequence (opt1) from hemagglutinin__InfluenzaA__ADM13051
augaaggccauccuggugguccuccuguacaccuucgccaccacgaacgcggacacccugugcaucggcuaccacgccaacaacagcaccgacaccguggacacggugcucgagaagaacgucaccgugacccacuccgugaaccugcuggaggacaagcacaacgggaagcucugcaagcugcgcggcgucgcgccccugcaccucgggaagugcaacaucgccggcuggauccuggggaacccggagugcgagagccuguccaccgccagcuccuggagcuacaucguggagacguccagcuccgacaacgggaccugcuaccccggcgacuucaucgacuacgaggagcuccgggagcagcugagcuccgugagcuccuucgagcgcuucgagaucuuccccaagaccagcuccuggcccaaccacgacagcaacaagggcgucaccgccgccugcccgcacgccggcgccaaguccuucuacaagaaccugaucuggcucgugaagaaggggaacagcuaccccaagcuguccaagagcuacaucaacgacaagggcaaggaggugcugguccucugggggauccaccaccccagcacguccgcggaccagcagagccuguaccagaacgccgacgccuacguguucgugggcaccucccgguacagcaagaaguucaagcccgagaucgccauccgcccgaagguccgggaccaggagggccgcaugaacuacuacuggacccugguggagcccggggacaagaucaccuucgaggccacgggcaaccucguggucccccgguacgcguucgccauggagcgcaacgccggguccggcaucaucaucagcgacacccccgugcacgacugcaacacgaccugccagaccccgaagggcgccaucaacaccucccugcccuuccagaacauccaccccaucaccaucgggaagugccccaaguacgucaagagcaccaagcugcggcucgccacgggccugcgcaacgugccguccauccagagccgggggcuguucggcgcgaucgccggguucaucgagggcggcuggaccgggaugguggacggcugguacggguaccaccaccagaacgagcagggcuccggguacgccgccgaccucaagagcacccagaacgccaucgacaagaucaccaacaaggugaacuccgucaucgagaagaugaacacgcaguucaccgcggugggcaaggaguucaaccaccuggagaagcgcaucgagaaccugaacaagaaggucgacgacggcuuccucgacaucuggaccuacaacgccgagcugcuggugcuccuggagaacgagcggacccuggacuaccacgacagcaacgugaagaaccucuacgagaagguccgcucccagcugaagaacaacgccaaggagaucgggaacggcugcuucgaguucuaccacaagugcgacaacacgugcauggagagcgugaagaacgggaccuacgacuaccccaaguacuccgaggaggccaagcugaaccgggaggagaucgacggcgugaagcucgagagcacccgcaucuaccagauccuggccaucuacuccaccgucgcgagcagccuggugcucguggucucccugggggccaucagcuucuggaugugcuccaacggcagccugcagugccggaucugcaucuga

SEQ ID NO: 69582 - RNA, 1701 nt, Artificial Sequence
  derived and/or modified CDS sequence (opt1) from hemagglutinin__InfluenzaA__ADM13061
augaaggccauccuggugguccuccuguacaccuucgccaccgcgaacgccgacacgcugugcaucggcuaccacgccaacaacagcaccgacaccguggacaccgugcucgagaagaacgucacggugacccacuccgugaaccugcuggaggacaagcacaacgggaagcucugcaagcugcgcggcaucgcgccccugcaccucgggaagugcaacaucgccggcuggauccuggggaacccggagugcgagagccuguccaccgccagcuccuggagcuacaucgucgagaccuccagcuccgacaacggcacgugcuaccccggcgacuucaucgacuacgaggagcuccgggagcagcugagcuccgugagcuccuucgagcgcuucgagaucuuccccaagaccagcuccuggcccaaccacgacagcaacaagggggugaccgccgccugcccgcacgccggcgcgaaguccuucuacaagaaccugaucuggcucgucaagaaggggaacagcuaccccaagcuguccaagagcuacaucaacgacaagggcaaggaggugcuggugcucugggggauccaccaccccagcaccuccgccgaccagcagagccuguaccagaacgccgacgccuacgucuucgugggcacgucccgguacagcaagaaguucaagcccgagaucgccauccgcccgaaggugcgggaccaggagggccgcaugaacuacuacuggacccuggucgagcccggggacaagaucaccuucgaggcgaccggcaaccucguggugccccgguacgccuucgccauggagcgcaacgccggguccggcaucaucaucagcgacacgcccguccacgacugcaacaccuccugccagaccccgaagggcgccaucaacaccagccugcccuuccagaacauccaccccaucacgaucgggaagugccccaaguacgugaaguccaccaagcugcggcucgcgaccggccugcgcaacgugccgagcauccagucccgggggcuguucggcgccaucgccggguucaucgagggcggcuggaccgggauggucgacggcugguacggguaccaccaccagaacgagcagggcagcggguacgccgccgaccucaaguccacgcagaacgcgaucgacgagaucaccaacaaggugaacagcgugaucgagaagaugaacacccaguucaccgccgucggcaaggaguucaaccaccuggagaagcgcaucgagaaccugaacaagaagguggacgacggcuuccucgacaucuggacguacaacgccgagcugcugguccuccuggagaacgagcggacccuggacuaccacgacuccaacgugaagaaccucuacgagaaggugcgcagccagcugaagaacaacgccaaggagaucgggaacggcugcuucgaguucuaccacaagugcgacaacacgugcauggaguccgucaagaacgggaccuacgacuaccccaaguacagcgaggaggccaagcugaaccgggaggagaucgacggcgugaagcucgaguccacccgcaucuaccagauccuggcgaucuacagcaccguggccagcucccugguccucguggugagccugggggccaucuccuucuggaugugcagcaacggcucccugcagugccggaucugcaucuga

SEQ ID NO: 69583 - RNA, 1701 nt, Artificial Sequence; identical to SEQ ID NO: 68860
  derived and/or modified CDS sequence (opt1) from hemagglutinin__InfluenzaA__ADM13071

SEQ ID NO: 69584 - RNA, 1701 nt, Artificial Sequence
  derived and/or modified CDS sequence (opt1) from hemagglutinin__InfluenzaA__ADM13081
augaaggccauccuggugguccuccuguacaccuucgccaccgcgaacgccgacacgcugugcaucggcuaccacgccaacaacagcaccgacaccguggacaccgugcucgagaagaacgucacggugacccacuccgugaaccugcuggaggacaagcacaacgggaagcucugcaagcugcgcggcaucgcgccccugcaccucgggaagugcaacaucgccggcuggauccuggggaacccggagugcgagagccuguccaccgcgagcuccuggagcuacaucgucgagaccuccggcagcgacaacggcacgugcuaccccggggacuucaucgacuacgaggagcuccgggagcagcuguccagcguguccagcuucgagcgcuucgagaucuuccccaagaccuccagcuggcccaaccacgacuccaacaagggcgugaccgccgccugcccgcacgccggggccaagagcuucuacaagaaccugaucuggcucgucaagaagggcaacuccuaccccaagcugagcaaguccuacaucaacgacaaggagaaggaggugcuggugcucugggggauccaccaccccagcaccagcgccgaccagcagucccuguaccagaacgccgacgccuacgucuucgugggcacgagccgguacuccaagaaguucaagcccgagaucgccauccgcccgaaggugcgggaccaggagggccgcaugaacuacuacuggacccuggucgagcccggggacaagaucaccuucgaggcgaccggcaaccucguggugccccgguacgccuucgccauggagcgcaacgccgggagcggcaucaucaucuccgacacgcccguccacgacugcaacacgaccugccagaccccgaagggcgccaucaacaccagccugcccuuccagaacauccaccccaucaccaucgggaagugccccaaguacgugaaguccaccaagcugcggcucgcgaccggccugcgcaacgugccgagcauccagucccgggggcuguucggcgccaucgccggguucaucgagggcggcuggacggggauggucgacggcugguacggguaccaccaccagaacgagcagggcagcggguacgccgccgaccucaaguccacccagaacgcgaucgacgagaucaccaacaaggugaacagcgugaucgagaagaugaacacccaguucacggccgucggcaaggaguucaaccaccuggagaagcgcaucgagaaccugaacaagaagguggacgacggcuuccucgacaucuggaccuacaacgccgagcugcugguccuccuggagaacgagcggacccuggacuaccacgacuccaacgugaagaaccucuacgagaaggugcgcagccagcugaagaacaacgccaaggagaucgggaacggcugcuucgaguucuaccacaagugcgacaacacgugcauggaguccgucaagaacgggaccuacgacuaccccaaguacagcgaggaggccaagcugaaccgggaggagaucgacggcgugaagcucgaguccacccgcaucuaccagauccuggcgaucuacagcaccguggccuccagccugguccucguggugagccugggggccaucuccuucuggaugugcagcaacggcucccugcagugccggaucugcaucuga

SEQ ID NO: 69585 - RNA, 1701 nt, Artificial Sequence; identical to SEQ ID NO: 68113
  derived and/or modified CDS sequence (opt1) from hemagglutinin__InfluenzaA__ADM13091

SEQ ID NO: 69586 - RNA, 1701 nt, Artificial Sequence; identical to SEQ ID NO: 67857
  derived and/or modified CDS sequence (opt1) from hemagglutinin__InfluenzaA__ADM13101

SEQ ID NO: 69587 - RNA, 1701 nt, Artificial Sequence
  derived and/or modified CDS sequence (opt1) from hemagglutinin__InfluenzaA__ADM13111
augaaggccauccuggugguccuccuguacaccuucgagaccgccaacgcggacacgcugugcaucggcuaccacgccaacaacagcaccgacaccguggacaccgugcucgagaagaacgucacggugacccacuccgugaaccugcuggaggacaagcacaacgggaagcucugcaagcugcgcggcgucgcgccccugcaccucgggaagugcaacaucgccggcuggauccuggggaacccggagugcgagagccuguccaccgccagcuccuggagcuacaucguggagaccuccagcuccgacaacggcacgugcuaccccggcgacuucaucaacuacgaggagcuccgggagcagcugagcuccgugagcuccuucgagcgcuucgagaucuuccccaagaccagcuccuggcccaaccacgacagcaacaagggggucaccgccgccugcccgcacgccggcgccaaguccuucuacaagaaccugaucuggcucgugaagaaggggaacagcuaccccaagcuguccaagagcuacaucaacgacaagggcaaggaggugcugguccucugggggauccaccaccccagcaccuccgcggaccagcagagccuguaccagaacgccgacgccuacguguucgugggcacgucccgguacagcaagaaguucaagcccgagaucgccauccgcccgaagguccgggaccaggagggccgcaugaacuacuacuggacccugguggaccccggggacaagaucaccuucgaggccaccggcaaccucguggucccccgguacgcguucgccauggagcgcaacgccggguccggcaucaucaucagcgacacgcccgugcacgacugcaacacgaccugccagaccccgaacggcgccaucaacaccucccugcccuuccagaacauccaccccaucaccaucgggaagugccccaaguacgucaagagcaccaagcugcggcucgccaccggccugcgcaacgugccguccauccagagccgggggcuguucggcgcgaucgccggguucaucgagggcggcuggacggggaugguggacggcugguacggguaccaccaccagaacgagcagggcuccggguacgccgccgaccucaagagcacccagaacgccaucgacaagaucaccaacaaggugaacuccgucaucgagaagaugaacacccaguucacggcggugggcaaggaguucaaccaccuggagaagcgcaucgagaaccugaacaagaaggucgacgacggcuuccucgacaucuggaccuacaacgccgagcugcuggugcuccuggagaacgagcggacccuggacuaccacgacagcaacgugaagaaccucuacgagaagguccgcucccagcugaagaacaacgccaaggagaucgggaacggcugcuucgaguucuaccacaagugcgacaacacgugcauggagagcgugaagaacgggaccuacgacuaccccaaguacuccgaggaggccaagcugaaccgggaggagaucgacggcgugaagcucgagagcacccgcaucuaccagauccuggccaucuacuccaccgucgcgagcagccuggugcucguggucucccugggggccaucagcuucuggaugugcuccaacggcagccugcagugccggaucugcaucuga

SEQ ID NO: 69588 - RNA, 1701 nt, Artificial Sequence; identical to SEQ ID NO: 66693
  derived and/or modified CDS sequence (opt1) from hemagglutinin__InfluenzaA__ADM13121

SEQ ID NO: 69589 - RNA, 1701 nt, Artificial Sequence; identical to SEQ ID NO: 67857
  derived and/or modified CDS sequence (opt1) from hemagglutinin__InfluenzaA__ADM13131

SEQ ID NO: 69590 - RNA, 1701 nt, Artificial Sequence; identical to SEQ ID NO: 68021
  derived and/or modified CDS sequence (opt1) from hemagglutinin__InfluenzaA__ADM13141

SEQ ID NO: 69591 - RNA, 1701 nt, Artificial Sequence; identical to SEQ ID NO: 68021
  derived and/or modified CDS sequence (opt1) from hemagglutinin__InfluenzaA__ADM13151

SEQ ID NO: 69592 - RNA, 1701 nt, Artificial Sequence; identical to SEQ ID NO: 67794
  derived and/or modified CDS sequence (opt1) from hemagglutinin__InfluenzaA__ADM13161

SEQ ID NO: 69593 - RNA, 1701 nt, Artificial Sequence; identical to SEQ ID NO: 68342
  derived and/or modified CDS sequence (opt1) from hemagglutinin__InfluenzaA__ADM13171

SEQ ID NO: 69594 - RNA, 1701 nt, Artificial Sequence; identical to SEQ ID NO: 68342
  derived and/or modified CDS sequence (opt1) from hemagglutinin__InfluenzaA__ADM13181

SEQ ID NO: 69595 - RNA, 1701 nt, Artificial Sequence
  derived and/or modified CDS sequence (opt1) from hemagglutinin__InfluenzaA__ADM13191
augaaggccauccuggugguccuccuguacacccuggccaccgcgaacgccgacacgcucugcaucggcuaccacgccaacaacagcaccgacaccguggacaccgugcuggagaagaacgucacggugacccacuccgugaaccugcucgaggacaagcacaacgggaagcugugcaagcugcgcggcgucgcgccccuccaccuggggaagugcaacaucgccggcuggauccuggggaacccggagugcgagagccucuccaccgccagcuccuggagcuacaucguggagaccuccagcuccgacaacggcacgugcuaccccggcgacuucaucgacuacgaggagcugcgggagcagcugagcuccgugagcuccuucgagcgcuucgagaucuuccccaagaccagcuccuggcccaaccacgacagcaacaagggggucaccgccgccugcccgcacgccggcgcgaaguccuucuacaagaaccucaucuggcuggugaagaaggggaacagcuaccccaagcuguccaagagcuacaucaacgacaagggcaaggaggugcucguccugugggggauccaccaccccagcaccuccgccgaccagcagagccuguaccagaacgccgacgccuacguguucgugggcacgucccgguacagcaagaaguucaagcccgagaucgccauccgcccgaagguccgggaccaggagggccgcaugaacuacuacuggacccucguggagcccggggacaagaucaccuucgaggcgaccggcaaccugguggucccccgguacgccuucgccauggagcgcaacgccggguccggcaucaucaucagcgacacgcccgugcacgacugcaacacgaccugccagaccccgaagggcgccaucaacaccucccugcccuuccagaacauccaccccaucaccaucgggaagugccccaaguacgucaagagcaccaagcuccggcuggcgaccggccugcgcaacgugccguccauccagagccgggggcuguucggcgccaucgccggguucaucgagggcggcuggacggggaugguggacggcugguacggguaccaccaccagaacgagcagggcuccggguacgccgccgaccucaagagcacccagcacgcgaucgacgagaucaccaacaaggugaacuccgucaucgagaagaugaacacccaguucacggccgugggcaaggaguucaaccaccuggagaagcgcaucgagaaccucaacaagaaggucgacgacggcuuccuggacaucuggaccuacaacgccgagcugcucgugcugcuggagaacgagcggacccucgacuaccacgacagcaacgugaagaaccuguacgagaagguccgcucccagcugaagaacaacgccaaggagaucgggaacggcugcuucgaguucuaccacaagugcgacaacacgugcauggagagcgugaagaacgggaccuacgacuaccccaaguacuccgaggaggccaagcucaaccgggaggagaucgacggcgugaagcuggagagcacccgcaucuaccagauccuggcgaucuacuccaccgucgccagcagccucgugcugguggucucccugggggccaucagcuucuggaugugcuccaacggcagccuccagugccggaucugcaucuga

SEQ ID NO: 69596 - RNA, 1701 nt, Artificial Sequence
  derived and/or modified CDS sequence (opt1) from hemagglutinin__InfluenzaA__ADM13211
augaaggccauccuggugguccuccuguacacccuggccaccgcgaacgccgacacgcucugcaucggcuaccacgccaacaacagcaccgacaccguggacaccgugcuggagaagaacgucacggugacccacuccgugaaccugcucgaggacaagcacaacgggaagcugugcaagcugcgcggcaucgcgccccuccaccuggggaagugcaacaucgccggcuggauccuggggaacccggagugcgagagccucuccaccgccagcuccuggagcuacaucgucgagaccuccagcuccgacaacggcacgugcuaccccggcgacuucaucgacuacgaggagcugcgggagcagcugagcuccgugagcuccuucgagcgcuucgagaucuuccccaagaccagcuccuggcccaaccacgacagcaacaagggggugaccgccgccugcccgcacgccggcgcgaaguccuucuacaagaaccucaucuggcuggucaagaaggggaacagcuaccccaagcuguccaagagcuacaucaacgacaagggcaaggaggugcucgugcugugggggauccaccaccccagcaccuccgccgaccagcagagccuguaccagaacgccgacgccuacgucuucgugggcacgucccgguacagcaagaaguucaagcccgagaucgccauccgcccgaaggugcgggaccaggagggccgcaugaacuacuacuggacccucgucgagcccggggacaagaucaccuucgaggcgaccggcaaccugguggugccccgguacgccuucgccauggagcgcaacgccggguccggcaucaucaucagcgacacgcccguccacgacugcaacacgaccugccagaccccgaagggcgccaucaacaccucccugcccuuccagaacauccaccccaucaccaucgggaagugccccaaguacgucaagagcaccaagcuccggcuggcgaccggccugcgcaacgugccguccauccagagccgggggcuguucggcgccaucgccggguucaucgagggcggcuggacggggaugguggacggcugguacggguaccaccaccagaacgagcagggcuccggguacgccgccgaccucaagagcacccagaacgcgaucgacgagaucaccaacaaggugaacuccgugaucgagaagaugaacacccaguucacggccgucggcaaggaguucaaccaccuggagaagcgcaucgagaaccucaacaagaagguggacgacggcuuccuggacaucuggaccuacaacgccgagcugcucguccugcuggagaacgagcggacccucgacuaccacgacagcaacgugaagaaccuguacgagaaggugcgcucccagcugaagaacaacgccaaggagaucgggaacggcugcuucgaguucuaccacaagugcgacaacacgugcauggagagcgucaagaacgggaccuacgacuaccccaaguacuccgaggaggccaagcucaaccgggaggagaucgacggcgugaagcuggagagcacccgcaucuaccagauccuggcgaucuacuccaccguggccagcagccucguccugguggugucccugggggccaucagcuucuggaugugcuccaacggcagccuccagugccggaucugcaucuga

SEQ ID NO: 69597 - RNA, 1701 nt, Artificial Sequence; identical to SEQ ID NO: 69596
  derived and/or modified CDS sequence (opt1) from hemagglutinin__InfluenzaA__ADM13221

SEQ ID NO: 69598 - RNA, 1701 nt, Artificial Sequence
  derived and/or modified CDS sequence (opt1) from hemagglutinin__InfluenzaA__ADM13231
augaaggccauccuggugguccuccuguacaccuucgagaccgccaacgcggacacgcugugcaucggcuaccacgccaacaacagcaccgacaccguggacaccgugcucgagaagaacgucacggugacccacuccgugaaccugcuggaggacaagcacaacgggaagcucugcaagcugcgcggcgucgcgccccugcaccucgggaagugcaacaucgccggcuggauccuggggaacccggagugcgagagccuguccaccgccagcuccuggagcuacaucguggagaccuccagcuccgacaacggcacgugcuaccccggcgacuucaucaacuacgaggagcuccgggagcagcugagcuccgugagcuccuucgagcgcuucgagaucuuccccaagaccagcuccuggcccaaccacgacagcaacaagggggucaccgccgccugcccgcacgccggcgccaaguccuucuacaagaaccugaucuggcucgugaagaaggggaacagcuaccccaagcuguccaagagcuacaucaacgacaagggcaaggaggugcugguccucugggggauccaccaccccagcaccuccgcggaccagcagagccuguaccagaacgccgacgccuacguguucgugggcacgucccgguacagcaagaaguucaagcccgagaucgccauccgcccgaagguccgggaccaggagggccgcaugaacuacuacuggacccugguggagcccggggacaagaucaccuucgaggccaccggcaaccucguggucccccgguacgcguucgccauggagcgcaacgccggguccggcaucaucaucagcgacacgcccgugcacgacugcaacacgaccugccagaccccgaacggcgccaucaacaccucccugcccuuccagaacauccaccccaucaccaucgggaagugccccaaguacgucaagagcaccaagcugcggcucgccaccggccugcgcaacgugccguccauccagagccgggggcuguucggcgcgaucgccggguucaucgagggcggcuggacggggaugguggacggcugguacggguaccaccaccagaacgagcagggcuccggguacgccgccgaccucaagagcacccagaacgccaucgacaagaucaccaacaaggugaacuccgucaucgagaagaugaacacccaguucacggcggugggcaaggaguucaaccaccuggagaagcgcaucgagaaccugaacaagaaggucgacgacggcuuccucgacaucuggaccuacaacgccgagcugcuggugcuccuggagaacgagcggacccuggacuaccacgacagcaacgugaagaaccucuacgagaagguccgcucccagcugaagaacaacgccaaggagaucgggaacggcugcuucgaguucuaccacaagugcgacaacacgugcauggagagcgugaagaacgggaccuacgacuaccccaaguacuccgaggaggccaagcugaaccgggaggagaucgacggcgugaagcucgagagcacccgcaucuaccagauccuggccaucuacuccaccgucgcgagcagccuggugcucguggucucccugggggccaucagcuucuggaugugcuccaacggcagccugcagugccggaucugcaucuga

SEQ ID NO: 69599 - RNA, 1701 nt, Artificial Sequence; identical to SEQ ID NO: 67857
  derived and/or modified CDS sequence (opt1) from hemagglutinin__InfluenzaA__ADM13241

SEQ ID NO: 69600 - RNA, 1701 nt, Artificial Sequence
  derived and/or modified CDS sequence (opt1) from hemagglutinin__InfluenzaA__ADM13251
augaaggccauccuggugguccuccuguacaccuucgccaccacgaacgcggacacccugugcaucggcuaccacgccaacaacagcaccgacaccguggacacggugcucgagaagaacgucaccgugacccacuccgugaaccugcuggaggacaagcacaacgggaagcucugcaagcugcgcggcgucgcgccccugcaccucgggaagugcaacaucgccggcuggauccuggggaacccggagugcgagagccuguccaccgccagcuccuggagcuacaucguggagacguccagcuccgacaacgggaccugcuaccccggcgacuucaucgacuacgaggagcuccgggagcagcugagcuccgugagcuccuucgagcgcuucgagaucuuccccaagaccagcuccuggcccaaccacgacagcaacaagggcgucaccgccgccugcccgcacgccggcgccaaguccuucuacaagaaccugaucuggcucgugaagaaggggaacagcuaccccaagcuguccaagagcuacaucaacgacaagggcaaggaggugcugguccucugggggauccaccaccccagcacguccgcggaccagcagagccuguaccagaacgccgacgccuacguguucgugggcaccucccgguacagcaagaaguucaagcccgagaucgccauccgcccgaagguccgggaccaggagggccgcaugaacuacuacuggacccugguggagcccggggacaagaucaccuucgaggccacgggcaaccucguggucccccgguacgcguucgccauggagcgcgacgccggguccggcaucaucaucagcgacacccccgugcacgacugcaacacgaccugccagaccccgaagggcgccaucaacaccucccugcccuuccagaacauccaccccaucaccaucgggaagugccccaaguacgucaagagcaccaagcugcggcucgccacgggccugcgcaacgugccguccauccagagccgggggcuguucggcgcgaucgccggguucaucgagggcggcuggaccgggaugguggacggcugguacggguaccaccaccagaacgagcagggcuccggguacgccgccgaccucaagagcacccagaacgccaucgacaagaucaccaacaaggugaacuccgucaucgagaagaugaacacgcaguucaccgcggugggcaaggaguucaaccaccuggagaagcgcaucgagaaccugaacaagaaggucgacgacggcuuccucgacaucuggaccuacaacgccgagcugcuggugcuccuggagaacgagcggacccuggacuaccacgacagcaacgugaagaaccucuacgagaagguccgcucccagcugaagaacaacgccaaggagaucgggaacggcugcuucgaguucuaccacaagugcgacaacacgugcauggagagcgugaagaacgggaccuacgacuaccccaaguacuccgaggaggccaagcugaaccgggaggagaucgacggcgugaagcucgagagcacccgcaucuaccagauccuggccaucuacuccaccgucgcgagcagccuggugcucguggucucccugggggccaucagcuucuggaugugcuccaacggcagccugcagugccggaucugcaucuga

SEQ ID NO: 69601 - RNA, 1701 nt, Artificial Sequence
  derived and/or modified CDS sequence (opt1) from hemagglutinin__InfluenzaA__ADM13261
augaaggccauccuggugguccuccuguacaccuucgccaccgcgaacgccgacacgcugugcaucggcuaccacgccaacaacagcaccgacaccguggacaccgugcucgagaagaacgucacggugacccacuccgugaaccugcuggaggacaagcacaacgggaagcucugcaagcugcgcggcaucgcgccccugcaccucgggaagugcaacaucgccggcuggauccuggggaacccggagugcgagagccuguccaccgcgagcuccuggagcuacaucgucgagaccuccggcagcgacaacggcacgugcuaccccggggacuucaucgacuacgaggagcuccgggagcagcuguccagcguguccagcuucgagcgcuucgagaucuuccccaagaccuccagcuggcccaaccacgacuccaacaagggcgugaccgccgccugcccgcacgccggggccaagagcuucuacaagaaccugaucuggcucgucaagaagggcaacuccuaccccaagcugagcaaguccuacaucaacgacaaggggaaggaggugcuggugcucuggggcauccaccaccccagcaccagcgccgaccagcagucccuguaccagaacgccgacgccuacgucuucgugggcacgagccgguacuccaagaaguucaagcccgagaucgccauccgcccgaaggugcgggaccaggaggggcgcaugaacuacuacuggacccuggucgagcccggcgacaagaucaccuucgaggcgaccgggaaccucguggugccccgguacgccuucgccauggagcgcaacgccggcagcggcaucaucaucuccgacacgcccguccacgacugcaacacgaccugccagaccccgaagggggccaucaacaccagccugcccuuccagaacauccaccccaucaccaucggcaagugccccaaguacgugaaguccaccaagcugcggcucgcgaccgggcugcgcaacgugccgagcauccagucccggggccuguucggggccaucgccggcuucaucgagggcggguggacgggcauggucgacgggugguacggcuaccaccaccagaacgagcaggggagcggcuacgccgccgaccucaaguccacccagaacgcgaucgacgagaucaccaacaaggugaacagcgugaucgagaagaugaacacccaguucacggccgucggcaaggaguucaaccaccuggagaagcgcaucgagaaccugaacaagaagguggacgacggguuccucgacaucuggaccuacaacgccgagcugcugguccuccuggagaacgagcggacccuggacuaccacgacuccaacgugaagaaccucuacgagaaggugcgcagccagcugaagaacaacgccaaggagaucggcaacgggugcuucgaguucuaccacaagugcgacaacacgugcauggaguccgucaagaacggcaccuacgacuaccccaaguacagcgaggaggccaagcugaaccgggaggagaucgacggggugaagcucgaguccacccgcaucuaccagauccuggcgaucuacagcaccguggccuccagccugguccucguggugagccugggcgccaucuccuucuggaugugcagcaacggcucccugcagugccggaucugcaucuga

SEQ ID NO: 69602 - RNA, 1701 nt, Artificial Sequence
  derived and/or modified CDS sequence (opt1) from hemagglutinin__InfluenzaA__ADM13271
augaaggccauccuggugguccuccuguacaccuucgccaccgcgaacgccgacacgcugugcaucggcuaccacgccaacaacagcaccgacaccguggacaccgugcucgagaagaacgucacggugacccacuccgugaaccugcuggaggacaagcacaacgggaagcucugcaagcugcgcggcgucgcgccccugcaccucgggaagugcaacaucgccggcuggauccuggggaacccggagugcgagagccuguccaccgccagcuccuggagcuacaucguggagaccuccagcuccgacaacggcacgugcuaccccggcgacuucaucgacuacgaggagcuccgggagcagcugagcuccgugagcuccuucgagcgcuucgagaucuuccccaagaccagcuccuggcccaaccacgacagcaacaagggggucaccgccgccugcccgcacgccggcgcgaaguccuucuacaagaaccugaucuggcucgugaagaaggggaacagcuaccccaagcuguccaagagcuacaucaacgacaagggcaaggaggugcugguccucugggggauccaccaccccagcaccuccgccgaccagcagagccuguaccagaacgccgacgccuacguguucgugggcacgucccgguacagcaagaaguucaagcccgagaucgccauccgcccgaagguccgggaccaggagggccgcaugaacuacuacuggacccugguggagcccggggacaagaucaccuucgaggcgaccggcaaccucguggucccccgguacgccuucgccauggagcgcaacgccggguccggcaucaucaucagcgacacgcccgugcacgacugcaacacgaccugccagaccccgaagggcgccaucaacaccucccugcccuuccagaacauccaccccaucaccaucgggaagugccccaaguacgucaagagcaccaagcugcggcucgcgaccggccugcgcaacgugccguccauccagagccgggggcuguucggcgccaucgccggguucaucgagggcggcuggacggggaugguggacggcugguacggguaccaccaccagaacgagcagggcuccggguacgccgccgaccucaagagcacccagaacgcgaucgacaagaucaccaacaaggugaacuccgucaucgagaagaugaacacccaguucacggccgugggcaaggaguucaaccaccuggagaagcgcaucgagaaccugaacaagaaggucgacgacggcuuccucgacaucuggaccuacaacgccgagcugcuggugcuccuggagaacgagcggacccuggacuaccacgacagcaacgugaagaaccucuacgagaagguccgcucccagcugaagaacaacgccaaggagaucgggaacggcugcuucgaguucuaccacaagugcgacaacacgugcauggagagcgugaagaacgggaccuacgacuaccccaaguacuccgaggaggccaagcugaaccgggaggagaucgacggcgugaagcucgagagcacccgcauccaccagauccuggcgaucuacuccaccgucgccagcagccuggugcucguggucucccugggggccaucagcuucuggaugugcuccaacggcagccugcagugccggaucugcaucuga

SEQ ID NO: 69603 - RNA, 1701 nt, Artificial Sequence; identical to SEQ ID NO: 69598
  derived and/or modified CDS sequence (opt1) from hemagglutinin__InfluenzaA__ADM13281

SEQ ID NO: 69604 - RNA, 1701 nt, Artificial Sequence; identical to SEQ ID NO: 67794
  derived and/or modified CDS sequence (opt1) from hemagglutinin__InfluenzaA__ADM13291

SEQ ID NO: 69605 - RNA, 1701 nt, Artificial Sequence
  derived and/or modified CDS sequence (opt1) from hemagglutinin__InfluenzaA__ADM13301
augaaggccauccuggugguccuccuguacaccuucgccaccgcgaacgccgacacgcugugcaucggcuaccacgccaacaacagcaccgacaccguggacaccauccucgagaagaacgugacggucacccacuccgugaaccugcuggaggacaagcacaacgggaagcucugcaagcugcgcggcguggcgccccugcaccucgggaagugcaacaucgccggcuggauccuggggaacccggagugcgagagccuguccaccgccagcuccuggagcuacaucgucgagaccuccagcuccgacaacggcacgugcuaccccggcgacuucaucgacuacgaggagcuccgggagcagcugagcuccgugagcuccuucgagcgcuucgagaucuuccccaagaccagcuccuggcccaaccacgacagcaacaagggggugaccgccgccugcccgcacgccggcgcgaaguccuucuacaagaaccugaucuggcucgucaagaaggagaacagcuaccccaagcuguccaagagcuacaucaacgacaaggggaaggaggugcuggugcucuggggcauccaccaccccagcaccuccgccgaccagcagagccuguaccagaacgucgacgccuacguguucguggggacgucccgguacagcaagaaguucaagcccgagaucgccauccgcccgaagguccgggaccaggagggccgcaugaacuacuacuggacccugguggagcccggcgacaagaucaccuucgaggccaccgggaaccucguggucccccgguacgcguucgccauggagcgcaacgccggcuccgggaucaucaucagcgacacgcccgugcacgacugcaacacgaccugccagaccccgaagggcgccaucaacaccucccugcccuuccagaacauccaccccaucaccaucggcaagugccccaaguacgucaagagcaccaagcugcggcucgccaccgggcugcgcaacgugccguccauccagagccggggccuguucggggcgaucgccggcuucaucgagggcggguggacgggcaugguggacgggugguacggcuaccaccaccagaacgagcagggguccggcuacgccgccgaccucaagagcacccagaacgccaucgacgagaucaccaacaaggugaacuccgucaucgagaagaugaacacccaguucacggcgguggggaaggaguucaaccaccuggagaagcgcaucgagaaccugaacaagaaggucgacgacggcuuccucgacaucuggaccuacaacgccgagcugcuggugcuccuggagaacgagcggacccuggacuaccacgacagcaacgugaagaaccucuacgagaagguccgcucccagcugaagaacaacgccaaggagaucggcaacgggugcuucgaguucuaccacaagugcgacaacacgugcauggagagcgugaagaacggcaccuacgacuaccccaaguacuccgaggaggccaagcugaaccgggaggagaucgacggggugaagcucgagagcacccgcaucuaccagauccuggccaucuacuccaccgucgcgagcagccuggugcucguggucucccugggcgccaucagcuucuggaugugcuccaacgggagccugcagugccggaucugcaucuga

SEQ ID NO: 69606 - RNA, 1701 nt, Artificial Sequence
  derived and/or modified CDS sequence (opt1) from hemagglutinin__InfluenzaA__ADM13311
augaaggccauccuggugguccuccuguacaccuucgccaccgcgaacgccgacacgcugugcaucggcuaccacgccaacaacagcaccgacaccguggacaccauccucgagaagaacgugacggucacccacuccgugaaccugcuggagaacaagcacaacgggaagcucugcaagcugcgcggcgugagcccccugcaccucgggaagugcaacaucgccggcuggauccuggggaacccggagugcgagucccugagcaccgccuccagcugguccuacaucgucgagaccagcuccagcgacaacggcacgugcuaccccggcgacuucaucgacuacgaggagcuccgggagcagcuguccagcguguccagcuucgagcgcuucgagaucuuccccaagaccuccagcuggcccaaccacgacuccaacaagggggugaccgcggccugcccgcacgccggcgccaagagcuucuacaagaaccugaucuggcucgucaagaaggggaacuccuaccccaagcugagcaagagcuacaucaacgacaagggcaaggaggugcuggugcucugggggauccaccaccccuccaccagcgcggaccagcagucccuguaccagaacgccgacgccuacgucuucgugggcacgagccgguacuccaagaaguucaagcccgagaucgccauccgcccgaaggugcgggaccaggagggccgcaugaacuacuacuggacccuggucgagcccggggacaagaucaccuucgaggccaccggcaaccucguggugccccgguacgcguucgccauggagcgcaacgccgggagcggcaucaucaucuccgacacgcccguccacgacugcaacacgaccugccagaccccgaagggcgccaucaacaccagccugcccuuccagaacauccaccccaucaccaucgggaagugccccaaguacgugaaguccaccaagcugcggcucgccaccggccugcgcaacgugccgagcauccagucccgggggcuguucggcgcgaucgccggguucaucgagggcggcuggacggggauggucgacggcugguacggguaccaccaccagaacgagcagggcagcggguacgccgccgaccucaaguccacccagaacgccaucgacgagaucaccaacaaggugaacagcgugaucgagaagaugaacacccaguucacggcggucggcaaggaguucaaccaccuggagaagcgcaucgagaaccugaacaagaagguggacgacggcuuccucgacaucuggaccuacaacgccgagcugcugguccuccuggagaacgagcggacccuggacuaccacgacuccaacgugaagaaccucuacgagaaggugcgcagccagcugaagaacaacgccaaggagaucgggaacggcugcuucgaguucuaccacaagugcgacaacacgugcauggaguccgucaagaacgggaccuacgacuaccccaaguacagcgaggaggccaagcugaaccgggaggagaucgacggcgugaagcucgaguccacccgcaucuaccagauccuggccaucuacagcaccgcggccagcucccuggugcucgucgugagccugggggccaucuccuucuggaugugcagcaacggcucccugcagugccggaucugcaucuga

SEQ ID NO: 69607 - RNA, 1701 nt, Artificial Sequence; identical to SEQ ID NO: 67857
  derived and/or modified CDS sequence (opt1) from hemagglutinin__InfluenzaA__ADM13321

SEQ ID NO: 69608 - RNA, 1701 nt, Artificial Sequence
  derived and/or modified CDS sequence (opt1) from hemagglutinin__InfluenzaA__ADM13331
augaaggccauccuggugguccuccuguacaccuucgccaccgcgaacgccgacacgcugugcaucggcuaccacgccaacaacagcaccgacaccguggacaccgugcucgagaagaacgucacggugacccacuccgugaaccugcuggaggacaagcacaacgggaagcucugcaagcugcgcggcgucgcgccccugcaccucgggaagugcaacaucgccggcuggauccuggggaacccggagugcgagagccuguccaccgccagcuccuggagcuacaucguggagaccuccagcuccgacaacggcacgugcuaccccggcgacuucaucgacuacgaggagcuccgggagcagcugagcuccgugagcuccuucgagcgcuucgagaucuuccccaagaccagcuccuggcccgaccacgacagcaacaagggggucaccgccgccugcccgcacgccggcgcgaaguccuucuacaagaaccugaucuggcucgugaagaaggggaacagcuaccccaagcuguccaagagcuacaucaacgacaagggcaaggaggugcugguccucugggggauccaccaccccagcaccuccgccgaccagcagagccuguaccagaacgccgacgccuacguguucgugggcacgucccgguacagcaagaaguucaagcccgagaucgccauccgcccgaagguccgggaccaggagggccgcaugaacuacuacuggacccugguggagcccggggacaagaucaccuucgaggcgaccggcaaccucguggucccccgguacgccuucgccauggagcgcaacgccggguccggcaucaucaucagcgacacgcccgugcacgacugcaacacgaccugccagaccccgaagggcgccaucaacaccucccugcccuuccagaacauccaccccaucaccaucgggaagugccccaaguacgucaagagcaccaagcugcggcucgcgaccggccugcgcaacgugccguccauccagagccgggggcuguucggcgccaucgccggguucaucgagggcggcuggacggggaugguggacggcugguacggguaccaccaccagaacgagcagggcuccggguacgccgccgaccucaagagcacccagaacgcgaucgacaagaucaccaacaaggugaacuccgucaucgagaagaugaacacccaguucacggccgugggcaaggaguucaaccaccuggagaagcgcaucgagaaccugaacaagaaggucgacgacggcuuccucgacaucuggaccuacaacgccgagcugcuggugcuccuggagaacgagcggacccuggacuaccacgacagcaacgugaagaaccucuacgagaagguccgcucccagcugaagaacaacgccaaggagaucgggaacggcugcuucgaguucuaccacaagugcgacaacacgugcauggagagcgugaagaacgggaccuacgacuaccccaaguacuccgaggaggccaagcugaaccgggaggagaucgacggcgugaagcucgagagcacccgcaucuaccagauccuggcgaucuacuccaccgucgccagcagccuggugcucguggucucccugggggccaucagcuucuggaugugcuccaacggcagccugcagugccggaucugcaucuga

SEQ ID NO: 69609 - RNA, 1701 nt, Artificial Sequence; identical to SEQ ID NO: 68306
  derived and/or modified CDS sequence (opt1) from hemagglutinin__InfluenzaA__ADM13341

SEQ ID NO: 69610 - RNA, 1701 nt, Artificial Sequence; identical to SEQ ID NO: 69272
  derived and/or modified CDS sequence (opt1) from hemagglutinin__InfluenzaA__ADM13351

SEQ ID NO: 69611 - RNA, 1701 nt, Artificial Sequence; identical to SEQ ID NO: 66353
  derived and/or modified CDS sequence (opt1) from hemagglutinin__InfluenzaA__ADM13442

SEQ ID NO: 69612 - RNA, 1701 nt, Artificial Sequence; identical to SEQ ID NO: 66353
  derived and/or modified CDS sequence (opt1) from hemagglutinin__InfluenzaA__ADM13443

SEQ ID NO: 69613 - RNA, 1701 nt, Artificial Sequence; identical to SEQ ID NO: 66353
  derived and/or modified CDS sequence (opt1) from hemagglutinin__InfluenzaA__ADM13444

SEQ ID NO: 69614 - RNA, 1701 nt, Artificial Sequence; identical to SEQ ID NO: 67300
  derived and/or modified CDS sequence (opt1) from hemagglutinin__InfluenzaA__ADM13445

SEQ ID NO: 69615 - RNA, 1701 nt, Artificial Sequence; identical to SEQ ID NO: 66353
  derived and/or modified CDS sequence (opt1) from hemagglutinin__InfluenzaA__ADM13446

SEQ ID NO: 69616 - RNA, 1701 nt, Artificial Sequence
  derived and/or modified CDS sequence (opt1) from hemagglutinin__InfluenzaA__ADM13447
augaagaccaucaucgcccugagcuacaucuucugccucgcccugggccaggaccugcccgggaacgacaacuccaccgcgacgcucugccugggccaccacgccgugccgaacgggacccuggucaagaccaucaccgacgaccagaucgaggugacgaacgccaccgagcucgugcagagcuccagcaccggcaagaucugcaacaacccccaccgcauccuggacgggaucgacugcacccugaucgacgcccuccugggcgacccccacugcgacgucuuccagaacgagacgugggaccuguucguggagcgguccaaggccuucagcaacugcuaccccuacgacgugccggacuacgcgucccuccgcagccuggucgccuccagcggcacccuggaguucaucaccgagggguucaccuggacgggcgugacccagaacgggggcuccaacgccugcaagcgggggcccggcagcggcuucuucucccgccucaacuggcugaccaagagcggguccaccuacagcgugcugaacgucacgaugcccaacaacgacaacuucgacaagcucuacaucuggggcgugcaccaccccuccaccaaccaggagcagaccagccuguacgugcaggccuccgggcgggucaccgugagcacgcgccggagccagcagaccaucaucccgaacaucggcucccgccccugggugcggggccugagcucccgcaucagcaucuacuggaccaucgucaagcccggggacgugcucgugaucaacuccaacggcaaccugaucgcgccccggggguacuucaagaugcgcaccggcaagagcuccaucaugcggagcgacgccccgaucgacacgugcaucuccgagugcaucacccccaacgggagcauccccaacgacaagcccuuccagaacgucaacaagaucaccuacggcgccugcccgaaguacgugaagcagaacacccugaagcucgccacgggcaugcgcaacgugcccgagaagcagacccgggggcuguucggcgccaucgcgggguucaucgagaacggcugggaggggaugaucgacggcugguacggcuuccgccaccagaacuccgaggggaccggccaggccgccgaccucaagagcacccaggccgccaucgaccagaucaacgggaagcugaaccgggucaucgagaagacgaacgagaaguuccaccagaucgagaaggaguucuccgagguggagggccgcauccaggaccuggagaaguacguggaggacaccaagaucgaccuguggagcuacaacgcggagcuccuggucgcccuggagaaccagcacaccaucgaccucaccgacuccgagaugaacaagcuguucgagaagacgcggcgccagcugcgggagaacgccgaggacauggggaacggcugcuucaagaucuaccacaagugcgacaacgccugcaucgagagcauccgcaacggcaccuacgaccacgacguguaccgcgacgaggcccucaacaaccgguuccagaucaagggggucgagcugaaguccggcuacaaggacuggauccuguggaucagcuucgcgaucuccugcuuccuccugugcguggugcugcucggguucaucaugugggccugccagcgcggcaacauccggugcaacaucugcaucuga

SEQ ID NO: 69617 - RNA, 1701 nt, Artificial Sequence; identical to SEQ ID NO: 66423
  derived and/or modified CDS sequence (opt1) from hemagglutinin__InfluenzaA__ADM13448

SEQ ID NO: 69618 - RNA, 1701 nt, Artificial Sequence
  derived and/or modified CDS sequence (opt1) from hemagglutinin__InfluenzaA__ADM13449
augaagaccaucaucgcccugagcuacaucuucugccucgccuucggccaggaccugcccgggaacgacaacuccaccgcgacgcugugccucggccaccacgccgugccgaacgggacccuggucaagaccaucaccgacgaccagaucgaggugacgaacgccaccgagcuggugcagagcuccagcaccggcaagaucugcaacaacccccaccgcauccucgacgggaucgacugcacccugaucgacgcccugcucggcgacccccacugcgacgucuuccagaacgagacgugggaccuguucguggagcgguccaaggccuucagcaacugcuaccccuacgacgugccggacuacgcgucccugcgcagccucgucgccuccagcggcacccuggaguucaucaccgagggguucaccuggacgggcgugacccagaacgggggcuccaacgccugcaagcgggggcccggcagcggcuucuucucccgccugaacuggcucaccaagagcggguccaccuaccccgugcugaacgucacgaugcccaacaacgacaacuucgacaagcuguacaucuggggcgugcaccacccgagcaccaaccaggagcagaccucccucuacgugcaggccagcgggcgggucaccguguccacgcgccggagccagcagaccaucauccccaacaucgagagccgccccugggugcggggccuguccagccgcaucuccaucuacuggaccaucgucaaccccggcgacgugcuggugaucaacagcaacgggaaccucaucgcgccgcggggcuacuucaagaugcgcaccgggaaguccagcaucaugcgguccgacgcccccaucgacacgugcaucagcgagugcaucacccccaacggcuccauccccaacgacaagccguuccagaacgucaacaagaucaccuacggggccugccccaaguacgugaagcagaacacccugaagcuggccacgggcaugcgcaacgugcccgagaagcagacccggggccucuucggggccaucgcgggcuucaucgagaacgggugggagggcaugaucgacgggugguacggcuuccgccaccagaacagcgagggcaccgggcaggccgccgaccugaaguccacccaggccgccaucgaccagaucaacggcaagcugaaccgggucaucgagaagacgaacgagaaguuccaccagaucgagaaggaguucagcgagguggaggggcgcauccaggaccucgagaaguacguggaggacaccaagaucgaccugugguccuacaacgcggagcugcucgucgcccuggagaaccagcacaccaucgaccugaccgacagcgagaugaacaagcuguucgagaagacgcggcgccagcuccgggagaacgccgaggacaugggcaacgggugcuucaagaucuaccacaagugcgacaacgccugcaucgaguccauccgcaacggcaccuacgaccacgacguguaccgcgacgaggcccugaacaaccgguuccagaucaagggcgucgagcucaagagcggguacaaggacuggauccuguggaucuccuucgcgaucagcugcuuccugcucugcguggugcugcugggcuucaucaugugggccugccagcgcgggaacauccggugcaacaucugcaucuga

SEQ ID NO: 69619 - RNA, 1701 nt, Artificial Sequence; identical to SEQ ID NO: 66455
  derived and/or modified CDS sequence (opt1) from hemagglutinin__InfluenzaA__ADM13450

SEQ ID NO: 69620 - RNA, 1701 nt, Artificial Sequence
  derived and/or modified CDS sequence (opt1) from hemagglutinin__InfluenzaA__ADM13451
augaagaccaucaucgcccugagcuacaucuucugccucgcccugggccaggaccugcccgggaacgacaaccgcaccgcgacgcucugccugggccaccacgccgugccgaacgggacccuggucaagaccaucaccgacgaccagaucgaggugacgaacgccaccgagcucgugcaguccagcuccaccggcaagaucugcaacaacccccaccggauccuggacgggaucgacugcacccugaucgacgcccuccugggcgacccccacugcgacgucuuccagaacgagacgugggaccuguucguggagcgcagcaaggccuucuccaacugcuaccccuacgacgugccggacuacgcgagccuccggucccuggucgccagcuccggcacccuggaguucaucaccgagggguucaccuggacgggcgugacccagaacgggggcagcaacgccugcaagcgcgggcccggcuccggcuucuucagccggcucaacuggcugaccaaguccgggagcaccuaccccgugcugaacgucacgaugcccaacaacgacaacuucgacaagcucuacaucuggggcgugcaccacccguccaccaaccaggagcagaccagccuguacgugcaggccuccgggcgcgucaccgugagcacgcggcgcucccagcagaccaucauccccaacaucggcagccggcccugggugcgcggccugagcucccggaucagcaucuacuggaccaucgucaagcccggggacgugcucgugaucaacuccaacggcaaccugaucgcgccgcgcggguacuucaagaugcggaccggcaagagcuccaucaugcgcagcgacgcccccaucgacacgugcaucuccgagugcaucacccccaacgggagcauccccaacgacaagccguuccagaacgucaacaagaucaccuacggcgccugccccaaguacgugaagcagaacacccugaagcucgccacgggcaugcggaacgugcccgagaagcagacccgcgggcuguucggcgccaucgcgggguucaucgagaacggcugggaggggaugaucgacggcugguacggcuuccggcaccagaacuccgaggggaccggccaggccgccgaccucaagagcacccaggccacgaucgaccagaucaacgggaagcugaaccgcgucaucgagaagaccaacgagaaguuccaccagaucgagaaggaguucuccgagguggagggccggauccaggaccuggagaaguacguggaggacaccaagaucgaccuguggagcuacaacgccgagcuccuggucgcgcuggagaaccagcacaccaucgaccucacggacuccgagaugaacaagcuguucgagaagacccgccggcagcugcgcgagaacgccgaggacauggggaacggcugcuucaagaucuaccacaagugcgacaacgccugcaucgagagcauccgcaacggcaccuacgaccacgacguguaccgggacgaggcccucaacaaccgcuuccagaucaagggggucgagcugaaguccggcuacaaggacuggauccuguggaucagcuucgccaucuccugcuuccuccugugcguggugcugcucggguucaucaugugggcgugccagcggggcaacauccgcugcaacaucugcaucuga

SEQ ID NO: 69621 - RNA, 1701 nt, Artificial Sequence; identical to SEQ ID NO: 66340
  derived and/or modified CDS sequence (opt1) from hemagglutinin__InfluenzaA__ADM13452

SEQ ID NO: 69622 - RNA, 1701 nt, Artificial Sequence
  derived and/or modified CDS sequence (opt1) from hemagglutinin__InfluenzaA__ADM14467
augaaggccauccuggugguccuccuguacaccuucgccaccgcgaacgccgacacgcugugcaucggcuaccacgccaacaacagcaccgacaccguggacaccgugcucgagaagaacgucacggugacccacuccgugaaccugcuggaggacaagcacaacgggaagcucugcaagcugcgcggcgucgcgccccugcaccucgggaagugcaacaucgccggcuggauccuggggaacccggagugcgagagccuguccaccgcgagcuccuggagcuacaucguggagaccuccagcuccgacaacggcacgugcuaccccggcgacuucaucgacuacgaggagcuccgggagcagcugagcuccgugagcuccuucgagcgcuucgagaucuuccccaagaccagcuccuggcccaaccacgacagcaacaagggggucaccgccgccugcucccacgccggcgccaagagcuucuacaagaaccugaucuggcucgugaagaaggggaacuccuacccgaagcugagcaagagcuacaucaacgacaagggcaaggaggugcugguccucugggggauccaccaccccuccaccagcgccgaccagcagucccuguaccagaacgccgacgccuacguguucgugggcacgagccgguacuccaagaaguucaagcccgagaucgccauccgccccaagguccgggaccaggagggccgcaugaacuacuacuggacccugguggagccgggggacaagaucaccuucgaggcgaccggcaaccucguggucccccgguacgccuucgccauggagcgcaacgccgggagcggcaucaucaucuccgacacgcccgugcacgacugcaacacgaccugccagacccccaagggcgccaucaacaccagccugccguuccaguccauccaccccaucaccaucgggaagugccccaaguacgucaagagcaccaagcugcggcucgcgaccggccugcgcaacgugcccuccauccagagccgggggcuguucggcgccaucgccggguucaucgagggcggcuggacggggaugguggacggcugguacggguaccaccaccagaacgagcagggcuccggguacgccgccgaccucaagagcacccagaacgcgaucgacaagaucaccaacaaggugaacuccgucaucgagaagaugaacacccaguucacggccgugggcaaggaguucaaccaccuggagaagcgcaucgagaaccugaacaagaaggucgacgacggcuuccucgacaucuggaccuacaacgccgagcugcuggugcuccuggagaacgagcggacccuggacuaccacgacagcaacgugaagaaccucuacgagaagguccgcucccagcugaagaacaacgccaaggagaucgggaacggcugcuucgaguucuaccacaagugcgacaacacgugcauggagagcgugaagaacgggaccuacgacuacccgaaguacuccgaggaggccaagcugaaccgggaggagaucgacggcgugaagcucgagagcacccgcaucuaccagauccuggcgaucuacagcaccgucgccuccagccuggugcucguggucucccugggggccaucagcuucuggaugugcuccaacggcagccugcagugccggaucugcaucuga

SEQ ID NO: 69623 - RNA, 1695 nt, Artificial Sequence
  derived and/or modified CDS sequence (opt1) from hemagglutinin__InfluenzaA__ADM14516
augaaggccauccuggugguccuccuguacaccuucgccaccgcgaacgccgacacgcugugcaucggcuaccacgccaacaacagcaccgacaccgugaacaccgugcucgagaagaacgucacggugacccacuccgugaaccugcuggaggacaagcacaacgggaagcucugcaagcugcgcggcgucgcgccccugcaccucgggaagugcaacaucgccggcuggauccuggggaacccggagugcgagagccuguccaccgccagcuccuggagcuacaucguggagaccuccagcuccgacaacggcacgugcuaccccggcgacuucaucgacuacgaggagcuccgggagcagcugagcuccgugagcuccuucgagcgcuucgagaucuuccccaagaccagcuccuggcccaaccacgacagcaacaagggggucaccgccgccugcccgcacgccggcgcgaaguccuucuacaagaaccugaucuggcucgugaagaaggggaacagcuaccccaagcuguccaagagcuacaucaacgacaagggcaaggaggugcugguccucugggggauccaccaccccagcaccuccacggaccagcagagccuguaccagaacgccgacgccuacguguucgugggcaccucccgguacagcaagaaguucaagcccgagaucgccauccgcccgaagguccgggaccaggagggccgcaugaacuacuacuggacccugguggagcccggggacaagaucaccuucgaggccacgggcaaccucguggucccccgguacgcguucgccauggagcgcaacgccggguccggcaucaucaucagcgacacccccgugcacgacugcaacacgaccugccagaccccgaagggcgccaucaacaccucccugcccuuccagaacauccaccccaucaccaucgggaagugccccaaguacgucaagagcaccaagcugcggcucgccacgggccugcgcaacgugccguccauccagagccgggggcuguucggcgcgaucgccggguucaucgagggcggcuggaccgggaugguggacggcugguacggguaccaccaccagaacgagcagggcuccggguacgccgccgaccucaagagcacccagaacgccaucgacgagaucaccaacaaggugaacuccgucaucgagaagaugaacacgcaguucaccgcggugggcaaggaguucaaccaccuggagaagcgcaucgagaaccugaacaagaaggucgacgacggcuuccucgacaucuggaccuacaacgccgagcugcuggugcuccuggagaacgagcggacccuggacuaccacgacagcaacgugaagaaccucuacgagaagguccgcucccagcugaagaacaacgccaaggagaucgggaacggcugcuucgaguucuaccacaagugcgacaacacgugcauggagagcgugaagaacgggaccuacgacuaccccaaguacuccgaggaggccaagcugaaccgggaggagaucgacggcgugaagcucgagagcacccgcaucuaccagauccuggccaucuacuccaccgucgcgagcagccuggugcucguggucucccugggggccaucagcuucuggaugugcuccggccacagcugccggaucugcaucuga

SEQ ID NO: 69624 - RNA, 1701 nt, Artificial Sequence
  derived and/or modified CDS sequence (opt1) from hemagglutinin__InfluenzaA__ADM14525
augaaggccacccuggugguccuccuguacaccuucgccacggcgaacgccgacacccugugcaucggcuaccacgccaacaacagcaccgacaccguggacacggugcucgagaagaacgucaccgugacccacuccgugaaccugcuggaggacaagcacaacgggaagcucugcaagcugcgcggcgucgcgccccugcaccucgggaagugcaacaucgccggcuggauccuggggaacccggagugcgagagccuguccaccgccagcuccuggagcuacaucguggagacguccagcuccgacaacgggaccugcuaccccggcgacuucaucgacuacgaggagcuccgggagcagcugagcucccugagcuccuucgagcgcuucgagaucuuccccaagaccagcuccuggcccaaccacgacagcaacaagggggugaccgccgccugcccgcacgccggcgcgaaguccuucuacaagaaccucaucuggcuggucaagaaggggaacagcuaccccaagcuguccaagagcuacaucaacgacaagggcaaggacgugcucgugcugugggggauccaccaccccagcacguccgccgaccagcagagccuguaccagaacgccgacgccuacgucuucgugggcaccucccgguacagcaagaaguucaagcccgagaucgccauccgcccgaaggugcgggaccaggagggccgcaugaacuacuacuggacccucgucgagcccggggacaagaucaccuucgaggcgacgggcaaccugguggugccccgguacgccuucgccauggagcgcaacgccggguccggcaucaucaucagcgacacccccguccacgacugcaacacgaccugccagaccccgaagggcgccaucaacaccucccugcccuuccagaacauccaccccaucaccaucgggaagugccccaaguacgucaagagcaccaagcuccggcuggcgacgggccugcgcaacgugccguccauccagagccggggccucuucggcgccaucgccggguucaucgagggcggcuggaccgggaugguggacggcugguacggguaccaccaccagaacgagcagggcuccggguacgccgccgaccucaagagcacccagaacgcgaucgacgagaucaccaacaaggugaacuccgugaucgagaagaugaacacgcaguucaccgccgucggcaaggaguucaaccaccuggagaagcgcaucgagaaccugaacaagaagguggacgacggcuuccuggacaucuggaccuacaacgccgagcugcucguccugcuggagaacgagcggacccucgacuaccacgacagcaacgugaagaaccuguacgagaaggugcgcucccagcugaagaacaacgccaaggagaucgggaacggcugcuucgaguucuaccacaagugcgacaacacgugcauggagagcgucaagaacgggaccuacgacuaccccaaguacuccgaggaggccaagcucaaccgggaggagaucgacggcgugaagcuggagagcacccgcaucuaccagauccuggcgaucuacuccaccguggccagcagccucguccugguggugucccugggggccaucagcuucuggaugugcuccaacggcagccuccagugccggaucugcaucuga

SEQ ID NO: 69625 - RNA, 1695 nt, Artificial Sequence
  derived and/or modified CDS sequence (opt1) from hemagglutinin__InfluenzaA__ADM14553
augaaggccauccuggugguccuccuguacaccuucgccaccgcgaacgccgacacgcugugcaucggcuaccacgccaacaacagcaccgacaccguggacaccauccucgagaagaacgugacggucacccacuccgugaaccugcuggaggacaagcacaacgggaagcucugcaagcugcgcggcguggcgccccugcaccucgggaagugcaacaucgccggcuggauccuggggaacccggagugcgagagccuguccaccgccagcuccuggagcuacaucgucgagaccuccagcuccgacaacggcacgugcuaccccggcgacuucaucgacuacgaggagcuccgggagcagcugagcuccgugagcuccuucgagcgcuucgagaucuuccccaagaccagcuccuggcccaaccacgacagcaacaagggggugaccgccgccugcccgcacgccggcgcgaaguccuucuacaagaaccugaucuggcucgucaagaaggggaacagcuaccccaagcuguccaagagcuacaucaacgacaagggcaaggaggugcuggugcucugggggauccaccaccccagcaccuccgccgaccagcagagccuguaccagaacgccgacgccuacgucuucguggagacgucccgguacagcaagaaguucaagcccgagaucgccauccgcccgaaggugcgggaccaggagggccgcaugaacuacuacuggacccuggucgagcccggcgacaagaucaccuucgaggcgaccgggaaccucguggugccccgguacgccuucgccauggagcgcaacgccggcuccgggaucaucaucagcgacacguccguccacgacugcaacacgaccugccagacccccaagggcgccaucaacaccagccugccguuccagaacauccaccccaucaccaucggcaagugccccaaguacgugaaguccaccaagcugcggcucgcgaccgggcugcgcaacgugcccagcauccagucccggggccuguucggggccaucgccggcuucaucgagggcggguggacgggcauggucgacgggugguacggcuaccaccaccagaacgagcaggggagcggcuacgccgccgaccucaaguccacccagaacgcgaucgacgagaucaccaacaaggugaacagcgugaucgagaagaugaacacccaguucacggccgucgggaaggaguucaaccaccuggagaagcgcaucgagaaccugaacaagaagguggacgacggcuuccucgacaucuggaccuacaacgccgagcugcugguccuccuggagaacgagcggacccuggacuaccacgacuccaacgugaagaaccucuacgagaaggugcgcagccagcugaagaacaacgccaaggagaucggcaacgggugcuucgaguucuaccacaagugcgacaacacgugcauggaguccgucaagaacggcaccuacgacuacccgaaguacagcgaggaggccaagcugaaccgggaggagaucgacggggugaagcucgaguccacccgcaucuaccagauccuggcgaucuacagcaccguggccagcucccugguccucguggugagccugggcgccaucuccuucuggaugugcagcgggcacuccugccggaucugcaucuga

SEQ ID NO: 69626 - RNA, 1701 nt, Artificial Sequence; identical to SEQ ID NO: 67140
  derived and/or modified CDS sequence (opt1) from hemagglutinin__InfluenzaA__ADM14562

SEQ ID NO: 69627 - RNA, 1701 nt, Artificial Sequence; identical to SEQ ID NO: 66693
  derived and/or modified CDS sequence (opt1) from hemagglutinin__InfluenzaA__ADM14571

SEQ ID NO: 69628 - RNA, 1701 nt, Artificial Sequence
  derived and/or modified CDS sequence (opt1) from hemagglutinin__InfluenzaA__ADM14580
augaaggccauccuggugguccuccuguacaccuucgccaccgcgaacgccgacacgcugugcaucggcuaccacgccaacaacagcaccgacaccguggacaccgugcucgagaagaacgucacggugacccacuccgugaaccugcuggaggacaagcacaacgggaagcucugcaagcugcgcggcgucgcgccccugcaccucgggaagugcaacaucgccggcuggauccuggggaacccggagugcgagagccuguccaccgccagcuccuggagcuacaucguggagaccuccagcuccgacaacggcacgugcuaccccggcgacuucaucgacuacgaggagcuccgggagcagcugagcuccgugagcuccuucgagcgcuucgagaucuuccccaagaccagcuccuggcccaaccacgacagcaacaagggggucaccgccgccugcccgcacgccggcgcgaaguccuucuacaagaaccugaucuggcucgugaagaaggggaacagcuaccccaagcuguccaagagcuacaucaacgacaagggcaaggaggugcugguccucugggggauccaccaccccagcaccuccgccgaccagcagagccuguaccagaacgccgacgccuacguguucgugggcacgucccgguacagcaagaaguucaagcccgagaucgccauccgcccgaagguccgggaccaggagggccgcaugaacuacuacuggacccugguggagcccggggacaagaucaccuucgaggcgaccggcaaccucguggucccccgguacgccuucgccauggagaagaacgccggguccggcaucaucaucagcgacacgcccgugcacgacugcaacacgaccugccagaccccgaagggcgccaucaacaccucccugcccuuccagaacauccaccccaucaccaucgggaagugccccaaguacgucaagagcaccaagcugcgccucgcgaccggccugcggaacgugccguccauccagagccgcgggcuguucggcgccaucgccggguucaucgagggcggcuggacggggaugguggacggcugguacggguaccaccaccagaacgagcagggcuccggguacgccgccgaccucaagagcacccagaacgcgaucgacgagaucaccaacaaggugaacuccgucaucgagaagaugaacacccaguucacggccgugggcaaggaguucaaccaccuggagaagcggaucgagaaccugaacaagaaggucgacgacggcuuccucgacaucuggaccuacaacgccgagcugcuggugcuccuggagaacgagcgcacccuggacuaccacgacagcaacgugaagaaccucuacgagaagguccggucccagcugaagaacaacgccaaggagaucgggaacggcugcuucgaguucuaccacaagugcgacaacacgugcauggagagcgugaagaacgggaccuacgacuaccccaaguacuccgaggaggccaagcugaaccgcgaggagaucaacggcgugaagcucgagagcacccggaucuaccagauccuggcgaucuacuccaccgucgccagcagccuggugcucguggucucccugggggccaucagcuucuggaugugcuccaacggcagccugcagugccgcaucugcaucuga

SEQ ID NO: 69629 - RNA, 1701 nt, Artificial Sequence
  derived and/or modified CDS sequence (opt1) from hemagglutinin__InfluenzaA__ADM14589
augaaggccauccuggugguccuccuguacaccuucgccaccgcgaacgccgacacgcugugcaucggcuaccacgccaacaacagcaccgacaccguggacaccgugcucgagaagaacgucacggugacccacuccgugaaccugcuggaggacaagcacaacgggaagcucugcaagcugcgcggcgucgcgccccugcaccucgggaagugcaacaucgccggcuggauccuggggaacccggagugcgagagccuguccaccgccagcuccuggagcuacaucguggagaccuccagcuccgacaacggcacgugcuaccccggcgacuucaucgacuacgaggagcuccgggagcagcugagcuccgugagcuccuucgagcgcuucgagaucuuccccaagaccagcuccuggcccaaccacgacagcaacaagggggucaccgccgccugcccgcacgccggcgcgaaguccuucuacaagaaccugaucuggcucgugaagaaggggaacagcuaccccaagcuguccaagagcuacaucaacgacaagggcaaggaggugcugguccucugggggauccaccaccccagcaccuccgccgaccagcagagccuguaccagaacgccgacgccuacguguucgugggcacgucccgguacagcaagaaguucaagcccgagaucgccauccgcccgaagguccgggaccaggagggccgcaugaacuacuacuggacccugguggagcccggggacaagaucaccuucgaggcgaccggcaaccucguggucccccgguacgccuucgccauggagaagaacgccggguccggcaucaucaucagcgacacgcccgugcacgacugcaacacgaccugccagaccccgaagggcgccaucaacaccucccugcccuuccagaacauccaccccaucaccaucgggaagugccccaaguacgucaagagcaccaagcugcgccucgcgaccggccugcggaacgugccguccauccagagccgcgggcuguucggcgccaucgccggguucaucgagggcggcuggacggggaugguggacggcugguacggguaccaccaccagaacggccagggguccggcuacgccgccgaccucaagagcacccagaacgcgaucgacgagaucaccaacaaggugaacuccgucaucgagaagaugaacacccaguucacggccgugggcaaggaguucaaccaccuggagaagcggaucgagaaccugaacaagaaggucgacgacggguuccucgacaucuggaccuacaacgccgagcugcuggugcuccuggagaacgagcgcacccuggacuaccacgacagcaacgugaagaaccucuacgagaagguccggucccagcugaagaacaacgccaaggagaucggcaacgggugcuucgaguucuaccacaagugcgacaacacgugcauggagagcgugaagaacggcaccuacgacuaccccaaguacuccgaggaggccaagcugaaccgcgaggagaucaacggggugaagcucgagagcacccggaucuaccagauccuggcgaucuacuccaccgucgccagcagccuggugcucguggucucccugggcgccaucagcuucuggaugugcuccaacggcagccugcagugccgcaucugcaucuga

SEQ ID NO: 69630 - RNA, 1701 nt, Artificial Sequence
  derived and/or modified CDS sequence (opt1) from hemagglutinin__InfluenzaA__ADM14599
augaaggccauccuggugguccuccuguacaccuucgccaccgcgaacgccgacacgcugugcaucggcuaccacgccaacaacagcaccgacaccguggacaccgugcucgagaagaacgucacggugacccacuccgugaaccugcuggaggacaagcacaacgggaagcucugcaagcugcgcggcgucgcgccccugcaccucgggaagugcaacaucgccggcuggauccuggggaacccggagugcgagagccuguccaccgccagcuccuggagcuacaucguggagaccuccagcuccgacaacggcacgugcuaccccggcgacuucaucgacuacgaggagcuccgggagcagcugagcuccgugagcuccuucgagcgcuucgagaucuuccccaagaccagcuccuggcccaaccacgacagcaacaagggggucaccgccgccugcccgcacgccggcgcgaaguccuucuacaagaaccugaucuggcucgugaagaaggggaacagcuaccccaagcuguccaagagcuacaucaacgacaagggcaaggaggugcugguccucugggggauccaccaccccagcaccuccgccgaccagcagagccuguaccagaacgccgacgccuacguguucgugggcacgucccgguacagcaagaaguucaagcccgagaucgucauccgcccgaaggugcgggaccaggagggccgcaugaacuacuacuggacccugguggagcccggggacaagaucaccuucgaggccaccggcaaccucgucgugccccgguacgcguucgccauggagcgcaacgccggguccggcaucaucaucagcgacacgcccgugcacgacugcaacacgaccugccagaccccgaagggcgccaucaacaccucccugcccuuccagaacauccaccccaucaccaucgggaagugccccaaguacgucaagagcaccaagcugcggcucgccaccggccugcgcaacgugccguccauccagagccgggggcuguucggcgcgaucgccggguucaucgagggcggcuggacggggaugguggacggcugguacggguaccaccaccagaacgagcagggcuccggguacgccgccgaccucaagagcacccagaacgccaucgacgagaucaccaacaaggucaacuccgugaucgagaagaugaacacccaguucacggcggucggcaaggaguucaaccaccuggagaagcgcaucgagaaccugaacaagaagguggacgacggcuuccucgacaucuggaccuacaacgccgagcugcuggugcuccuggagaacgagcggacccuggacuaccacgacagcaacgucaagaaccucuacgagaaggugcgcucccagcugaagaacaacgccaaggagaucgggaacggcugcuucgaguucuaccacaagugcgacaacacgugcauggagagcgugaagaacgggaccuacgacuaccccaaguacuccgaggaggccaagcugaaccgggaggagaucgacggcgucaagcucgagagcacccgcaucuaccagauccuggccaucuacuccaccguggcgagcagccuggugcucgucgugucccugggggccaucagcuucuggaugugcuccaacggcagccugcagugccggaucugcaucuga

SEQ ID NO: 69631 - RNA, 1701 nt, Artificial Sequence; identical to SEQ ID NO: 67853
  derived and/or modified CDS sequence (opt1) from hemagglutinin__InfluenzaA__ADM14609

SEQ ID NO: 69632 - RNA, 1701 nt, Artificial Sequence
  derived and/or modified CDS sequence (opt1) from hemagglutinin__InfluenzaA__ADM14618
augaaggccauccuggugguccuccuguacaccuucgccaccgcgaacgccgacacgcugugcaucggcuaccacgccaacaacagcaccgacaccguggacaccgugcucgagaagaacgucacggugacccacuccgugaaccugcuggaggacaagcacaacgggaagcucugcaagcugcgcggcgucgcgccccugcaccucgggaagugcaacaucgccggcuggauccuggggaacccggagugcgagagccuguccaccgccagcuccuggagcuacaucguggagaccuccagcuccgacaacggcacgugcuaccccggcgacuucaucgacuacgaggagcuccgggagcagcugagcuccgugagcuccuucgagcgcuucgagaucuuccccaagaccagcuccuggcccaaccacgacagcaacaagggggucaccgccgccugcccgcacgccggcgcgaaguccuucuacaagaaccugaucuggcucgugaagaaggggaacagcuaccccaagcuguccaagagcuacaucaacgacaagggcaaggaggugcugguccucugggggauccaccaccccagcaccuccgccgaccagcagagccuguaccagaacgccgacgccuacguguucgugggcacgucccgguacagcaagaaguucaagcccgagaucgccauccgcccgaagguccgggaccaggagggccgcaugaacuacuacuggacccugguggagcccggggacaagaucaccuucgaggcgaccggcaaccucguggucccccgguacgccuucgccauggagcgcaacgccggguccggcaucaucaucagcgacacgcccgugcacgacugcaacacgaccugccagaccccgaagggcgccaucaacaccucccugcccuuccagaacaaccaccccaucaccaucgggaagugccccaaguacgucaagagcaccaagcugcggcucgcgaccggccugcgcaacgugccguccauccagagccgggggcuguucggcgccaucgccggguucaucgagggcggcuggacggggaugguggacggcugguacggguaccaccaccagaacgagcagggcuccggguacgccgccgaccucaagagcacccagaacgcgaucgacgagaucaccaacaaggugaacuccgucaucgagaagaugaacacccaguucacggccgugggcaaggaguucaaccaccuggagaagcgcaucgagaaccugaacaagaaggucgacgacggcuuccucgacaucuggaccuacaacgccgagcugcuggugcuccuggagaacgagcggacccuggacuaccacgacagcaacgugaagaaccucuacgagaagguccgcucccagcugaagaacaacgccaaggagaucgggaacggcugcuucgaguucuaccacaagugcgacaacacgugcauggagagcgugaagaacgggaccuacgacuaccccaaguacuccgaggaggccaagcugaaccgggaggagaucgacggcgugaagcucgagagcacccgcaucuaccagauccuggcgaucuacuccaccgucgccagcagccuggugcucguggucucccugggggccaucagcuucuggaugugcuccaacggcagccugcagugccggaucugcaucuga

SEQ ID NO: 69633 - RNA, 1701 nt, Artificial Sequence; identical to SEQ ID NO: 66693
  derived and/or modified CDS sequence (opt1) from hemagglutinin__InfluenzaA__ADM14627

SEQ ID NO: 69634 - RNA, 1701 nt, Artificial Sequence
  derived and/or modified CDS sequence (opt1) from hemagglutinin__InfluenzaA__ADM14655
augaaggccauccuggugguccuccuguacaccuucgccaccgcgaacgccgacacgcugugcaucggcuaccacgccaacaacagcaccgacaccguggacaccgugcucgagaagaacgucacggugacccacuccgugaaccugcuggaggacaagcacaacgggaagcucugcaagcugcgcggcgucgcgccccugcaccucgggaagugcaacaucgccggcuggauccuggggaacccggagugcgagagccuguccaccgccagcuccuggagcuacaucguggagaccuccagcuccgacaacggcacgugcuaccccggcgacuucaucgacuacgaggagcuccgggagcagcugagcuccgugagcuccuucgagcgcuucgagaucuuccccaagaccagcuccuggcccaaccacgacagcaacaagggggucaccgccgccugcccgcacgccggcgcgaaguccuucuacaagaaccugaucuggcucgugaagaaggggaacagcuaccccaagcuguccaagagcuacaucaacgacaagggcaaggaggugcugguccucugggggauccaccaccccagcaccuccgccgaccagcagagccuguaccagaacgccgacgccuacguguucgugggcacgucccgguacagcaagaaguucaagcccgagaucgccauccgcccgaagguccgggaccaggagggccgcaugaacuacuacuggacccugguggagcccggggacaagaucaccuucgaggcgaccggcaaccucguggucccccgguacgccuucgccauggagcgcaacgccggguccggcaucaucaucagcgacacgcccgugcacgacugcaacacgaccugccagaccccgaagggcgccaucaacaccucccugcccuuccagaacauccaccccaucaccaucgggaagugccccaaguacgugcggagcaccaagcugcgccucgcgaccggccugcggaacgucccguccauccagagccgcgggcuguucggcgccaucgccggguucaucgagggcggcuggacggggaugguggacggcugguacggguaccaccaccagaacgagcagggcuccggguacgccgccgaccucaagagcacccagaacgcgaucgacgagaucaccaacaaggugaacuccgucaucgagaagaugaacacccaguucacggccgugggcaaggaguucaaccaccuggagaagcggaucgagaaccugaacaagaaggucgacgacggcuuccucgacaucuggaccuacaacgccgagcugcuggugcuccuggagaacgagcgcacccuggacuaccacgacagcaacgugaagaaccucuacgagaagguccggucccagcugaagaacaacgccaaggagaucgggaacggcugcuucgaguucuaccacaagugcgacaacacgugcauggagagcgugaagaacgggaccuacgacuaccccaaguacuccgaggaggccaagcugaaccgcgaggagaucgacggcgugaagcucgagagcacccggaucuaccagauccuggcgaucuacuccaccgucgccagcagccuggugcucguggucucccugggggccaucagcuucuggaugugcuccaacggcagccugcagugccgcaucugcaucuga

SEQ ID NO: 69635 - RNA, 1701 nt, Artificial Sequence
  derived and/or modified CDS sequence (opt1) from hemagglutinin__InfluenzaA__ADM14664
augaaggccauccuggugguccuccuguacaccuucgccaccgcgaacgccgacacgcugugcaucggcuaccacgccaacaacagcaccgacaccguggacaccgugcucgagaagaacgucacggugacccacuccgugaaccugcuggaggacaagcacaacgggaagcucugcaagcugcgcggcgucgcgccccugcaccucgggaagugcaacaucgccggcuggauccuggggaacccggagugcgagagccuguccaccgccagcuccuggagcuacaucguggagaccuccagcuccgacaacggcacgugcuaccccggcgacuucaucgacuacgaggagcuccgggagcagcugagcuccgugagcuccuucgagcgcuucgagaucuuccccaagaccagcuccuggcccaaccacgacagcaacaagggggucaccgccgccugcccgcacgccggcgcgaaguccuucuacaagaaccugaucuggcucgugaagaaggggaacagcuaccccaagcuguccaagagcuacaucaacgacaagggcaaggaggugcugguccucugggggauccaccaccccagcaccuccgccgaccagcagagccuguaccagaacgccgacgccuacguguucgugggcacgucccgguacagcaagaaguucaagcccgagaucgccauccgcccgaagguccgggaccaggagggccgcaugaacuacuacuggacccugguggagcccggggacaagaucaccuucgaggcgaccggcaaccucguggucccccgguacgccuucgccauggagcgcaacgccggguccggcaucaucaucagcgacacgcccgugcacgacugcaacacgaccugccagaccccgaacggcgccaucaacaccucccugcccuuccagaacauccaccccaucaccaucgggaagugccccaaguacgucaagagcaccaagcugcggcucgcgaccggccugcgcaacaucccguccauccagagccgggggcuguucggcgccaucgccggguucaucgagggcggcuggacggggaugguggacggcugguacggguaccaccaccagaacgagcagggcuccggguacgccgccgaccucaagagcacccagaacgcgaucgacgagaucaccaacaaggugaacuccgugaucgagaagaugaacacccaguucacggccgucggcaaggaguucaaccaccuggagaagcgcaucgagaaccugaacaagaagguggacgacggcuuccucgacaucuggaccuacaacgccgagcugcugguccuccuggagaacgagcggacccuggacuaccacgacagcaacgugaagaaccucuacgagaaggugcgcucccagcugaagaacaacgccaaggagaucgggaacggcugcuucgaguucuaccacaagugcgacaacacgugcauggagagcgucaagaacgggaccuacgacuaccccaaguacuccgaggaggccaagcugaaccgggaggagaucgacggcgugaagcucgagagcacccgcaucuaccagauccuggcgaucuacuccaccguggccagcagccugguccucguggugucccugggggccaucagcuucuggaugugcuccaacggcagccugcagugccggaucugcaucuga

SEQ ID NO: 69636 - RNA, 1701 nt, Artificial Sequence; identical to SEQ ID NO: 66693
  derived and/or modified CDS sequence (opt1) from hemagglutinin__InfluenzaA__ADM14673

SEQ ID NO: 69637 - RNA, 1701 nt, Artificial Sequence; identical to SEQ ID NO: 66693
  derived and/or modified CDS sequence (opt1) from hemagglutinin__InfluenzaA__ADM14682

SEQ ID NO: 69638 - RNA, 1701 nt, Artificial Sequence; identical to SEQ ID NO: 66693
  derived and/or modified CDS sequence (opt1) from hemagglutinin__InfluenzaA__ADM14691

SEQ ID NO: 69639 - RNA, 1701 nt, Artificial Sequence; identical to SEQ ID NO: 67857
  derived and/or modified CDS sequence (opt1) from hemagglutinin__InfluenzaA__ADM14700

SEQ ID NO: 69640 - RNA, 1695 nt, Artificial Sequence
  derived and/or modified CDS sequence (opt1) from hemagglutinin__InfluenzaA__ADM14709
augaaggccauccuggugguccuccuguacaccuucgccaccgcgaacgccgacacgcugugcaucggcuaccacgccaacaacagcaccgacaccguggacaccgugcucgagaagaacgucacggugacccacuccgugaaccugcuggaggacaagcacaacgggaagcucugcaagcugcgcggcgucgcgccccugcaccucgggaagugcaacaucgccggcuggauccuggggaacccggagugcgagagccuguccaccgcgagcuccuggagcuacaucguggagaccuccagcuccgacaacggcacgugcuaccccggcgacuucaucgacuacgaggagcuccgggagcagcugagcuccgugagcuccuucgagcgcuucgagaucuuccccaagaccaacagcuggcccaaccacgacuccaacaagggggucaccgccgccugcccgcacgccggcgccaagagcuucuacaagaaccugaucuggcucgugaagaaggggaacuccuaccccaagcugagcaaguccuacaucaacgacaagggcaaggaggugcugguccucugggggauccaccaccccagcaccagcgccgaccagcagucccuguaccagaacgccgacgccuacguguucgugggcacgagcaaguacuccaagaaguucaagcccgagaucgccauccggccgaagguccgcgaccaggagggccggaugaacuacuacuggacccugguggagcccggggacaagaucaccuucgaggcgaccggcaaccucguggucccccgcuacgccuucgccauggagcggaacgccgggagcggcaucaucaucuccgacacgcccgugcacgacugcaacacgaccugccagaccccgaagggcgccaucaacaccagccugcccuuccagaacauccaccccaucaccaucgggaagugccccaaguacgugaaguccaccaagcugcgccucgcgaccggccugcggaacgucccgagcauccagucccgcgggcuguucggcgccaucgccggguucaucgagggcggcuggacggggaugguggacggcugguacggguaccaccaccagaacgagcagggcagcggguacgccgccgaccucaaguccacccagaacgcgaucgacggcaucaccaacaagaucaacagcgugaucgagaagaugaacacccaguucacggccgucggcaaggaguucaaccaccuggagaagcggaucgagaaccugaacaagaagguggacgacggguuccucgacaucuggaccuacaacgccgagcugcugguccuccuggagaacgagcgcacccugaacuaccacgacuccaacgugaagaaccucuacgagaaggugcggagccagcugaagaacaacgccaaggagaucggcaacgggugcuucgaguucuaccacaagugcgacaacacgugcauggaguccgucaagaacggcaccuacgacuaccccaaguacagcgaggaggccaagcugaaccgcgaggagaucgacggggugaagcucgaguccacccggaucuaccagauccuggcgaucuacagcaccguggccuccagccugguccucguggugagccugggcgccaucuccuucuggaugugcagcggccacuccugccgcaucugcaucuga

SEQ ID NO: 69641 - RNA, 1701 nt, Artificial Sequence
  derived and/or modified CDS sequence (opt1) from hemagglutinin__InfluenzaA__ADM14718
augaaggccauccuggugguccuccuguacaccuucgccaccgcgaacgccgacacgcugugcaucggcuaccacgccaacaacagcaccgacaccguggacaccgugcucgagaagaacgucacggugacccacuccgugaaccugcuggaggacaagcacaacgggaagcucugcaagcugcgcggcgucgcgccccugcaccucgggaagugcaacaucgccggcuggauccuggggaacccggagugcgagagccuguccaccgccagcuccuggagcuacaucguggagaccuccagcuccgacaacggcacgugcuaccccggcgacuucaucgacuacgaggagcuccgggagcagcugagcuccaugagcuccuucgagcgcuucgagaucuuccccaagaccagcuccuggcccaaccacgacagcaacaagggggugaccgccgccugcccgcacgccggcgcgaaguccuucuacaagaaccugaucuggcucgucaagaaggggaacagcuaccccaagcuguccaagagcuacaucaacgacaagggcaaggaggugcuggugcucugggggauccaccaccccagcaccuccgccgaccagcagagccuguaccagaacgccgacgccuacgucuucgugggcacgucccgguacagcaagaaguucaagcccgagaucgccauccgcccgaaggugcgggaccaggagggccgcaugaacuacuacuggacccuggucgagcccggggacaagaucaccuucgaggcgaccggcaaccucguggugccccgguacgccuucgccauggagcgcaacgccggguccggcaucaucaucagcgacacgcccguccacgacugcaacacgaccugccagaccccgaagggcgccaucaacaccucccugcccuuccagaacauccaccccaucaccaucgggaagugccccaaguacgucaagagcaccaagcugcggcucgcgaccggccugcgcaacgugccguccauccagagccgggggcuguucggcgccaucgccggguucaucgagggcggcuggacggggaugguggacggcugguacggguaccaccaccagaacgagcagggcuccggguacgccgccgaccucaagagcacccagaacgcgaucgacaagaucaccaacaaggugaacuccgugaucgagaagaugaacacccaguucacggccgucggcaaggaguucaaccaccuggagaagcgcaucgagaaccugaacaagaagguggacgacggcuuccucgacaucuggaccuacaacgccgagcugcugguccuccuggagaacgagcggacccuggacuaccacgacagcaacgugaagaaccucuacgagaaggugcgcucccagcugaagaacaacgccaaggagaucgggaacggcugcuucgaguucuaccacaagugcgacaacacgugcauggagagcgucaagaacgggaccuacgacuaccccaaguacuccgaggaggccaagcugaaccgggaggagaucgacggcgugaagcucgagagcacccgcaucuaccagauccuggcgaucuacuccaccguggccagcagccugguccucguggugucccugggggccaucagcuucuggaugugcuccaacggcagccugcagugccggaucugcaucuga

SEQ ID NO: 69642 - RNA, 1695 nt, Artificial Sequence
  derived and/or modified CDS sequence (opt1) from hemagglutinin__InfluenzaA__ADM14728
augaaggccauccuggugguccuccuguacaccuucgccaccgcgaacgccgacacgcugugcaucggcuaccacgccaacaacagcaccgacaccguggacaccgugcucgagaagaacgucacggugacccacuccgugaaccugcuggaggacaagcacaacgggaagcucugcaagcugcgcggcgucgcgccccugcaccucgggaagugcaacaucgccggcuggauccuggggaacccggagugcgagagccuguccaccgccagcuccuggagcuacaucguggagaccuccagcuccgacaacggcacgugcuaccccggcgacuucaucgacuacgaggagcuccgggagcagcugagcuccgugagcuccuucgagcgcuucgagaucuuccccaagaccagcuccuggcccaaccacgacagcaacaagggggucaccgccgccugcccgcacgccggcgcgaaguccuucuacaagaaccugaucuggcucgugaagaaggggaacagcuaccccaagcuguccaacagcuacaucaacgacaagggcaaggaggugcugguccucugggggauccaccaccccagcaccuccgccgaccagcagagccuguaccagaacgccgacgccuacguguucgugggcacgucccgguacagcaagaaguucaagcccgagaucgccauccgcccgaagguccgggaccaggagggccgcaugaacuacuacuggacccugguggagcccggggacaagaucaccuucgaggcgaccggcaaccucguggucccccgguacgccuucgccauggagcgcaacgccggguccggcaucaucaucagcgacacgcccgcccacgacugcaacacgaccugccagaccccgaagggcgcgaucaacaccucccugcccuuccagaacauccaccccaucaccaucgggaagugccccaaguacgucaagagcaccaagcugcggcucgccaccggccugcgcaacgugccguccauccagagccgggggcuguucggcgccaucgccggguucaucgagggcggcuggacggggaugguggacggcugguacggguaccaccaccagaacgagcagggcuccggguacgccgcggaccucaagagcacccagaacgccaucgacgagaucaccaacaaggugaacuccgugaucgagaagaugaacacccaguucacggccgucggcaaggaguucaaccaccuggagaagcgcaucgagaaccugaacaagaagguggacgacggcuuccucgacaucuggaccuacaacgccgagcugcugguccuccuggagaacgagcggacccuggacuaccacgacagcaacgugaagaaccucuacgagaaggugcgcucccagcugaagaacaacgccaaggagaucgggaacggcugcuucgaguucuaccacaagugcgacaacacgugcauggagagcgucaagaacgggaccuacgacuaccccaaguacuccgaggaggcgaagcugaaccgggaggagaucgacggcgugaagcucgagagcacccgcaucuaccagauccuggccaucuacuccaccguggccagcagccugguccucguggugucccugggggccaucagcuucuggaugugcuccggccacagcugccggaucugcaucuga

SEQ ID NO: 69643 - RNA, 1701 nt, Artificial Sequence
  derived and/or modified CDS sequence (opt1) from hemagglutinin__InfluenzaA__ADM14737
augaaggccauccuggugguccuccuguacaccuucgccaccgcgaacgccgacacgcugugcaucggcuaccacgccaacaacagcaccgacaccgugaacaccgugcucgagaagaacgucacggugacccacuccgugaaccugcuggaggacaagcacaacgggaagcucugcaagcugcgcggcgucgcgccccugcaccucgggaagugcaacaucgccggcuggauccuggggaacccggagugcgagagccuguccaccgccagcuccuggagcuacaucguggagaccuccagcuccgacaacggcacgugcuaccccggcgacuucaucgacuacgaggagcuccgggagcagcugagcuccgugagcuccuucgagcgcuucgagaucuuccccaagaccagcuccuggcccaaccacgacagcaacaagggggucaccgccgccugcccgcacgccggcgcgaaguccuucuacaagaaccugaucuggcucgugaagaaggggaacagcuaccccaagcuguccaagagcuacaucaacgacaagggcaaggaggugcugguccucugggggauccaccaccccagcaccuccgccgaccagcagagccuguaccagaacgccgacgccuacguguucgugggcacgucccgguacagcaagaaguucaagcccgagaucgccauccgcccgaagguccgggaccaggagggccgcaugaacuacuacuggacccugguggagcccggggacaagaucaccuucgaggcgaccggcaaccucguggucccccgguacgccuucgccauggagaagaacgccggguccggcaucaucaucagcgacacgcccgugcacgacugcaacacgaccugccagaccccgaagggcgccaucaacaccucccugcccuuccagaacauccaccccaucaccaucgggaagugccccaaguacgucaagagcaccaagcugcgccucgcgaccggccugcggaacgugccguccauccagagccgcgggcuguucggcgccaucgccggguucaucgagggcggcuggacggggaugguggacggcugguacggguaccaccaccagaacgagcagggcuccggguacgccgccgaccucaagagcacccagaacgcgaucgacgagaucaccaacaaggugaacuccgucaucgagaagaugaacacccaguucacggccgugggcaaggaguucaaccaccuggagaagcggaucgagaaccugaacaagaaggucgacgacggcuuccucgacaucuggaccuacaacgccgagcugcuggugcuccuggagaacgagcgcacccuggacuaccacgacagcaacgugaagaaccucuacgagaagguccggucccagcugaagaacaacgccaaggagaucgggaacggcugcuucgaguucuaccacaagugcgacaacacgugcauggagagcgugaagaacgggaccuacgacuaccccaaguacuccgaggaggccaagcugaaccgcgaggagaucgacggcgugaagcucgagagcacccggaucuaccagauccuggcgaucuacuccaccgucgccagcagccuggugcucguggucucccugggggccaucagcuucuggaugugcuccaacggcagccugcagugccgcaucugcaucuga

SEQ ID NO: 69644 - RNA, 1701 nt, Artificial Sequence
  derived and/or modified CDS sequence (opt1) from hemagglutinin__InfluenzaA__ADM14746
augaaggccauccuggugguccuccuguacaccuucgccaccgcgaacgccgacacgcugugcaucggcuaccacgccaacaacagcaccgacaccguggacaccgugcucgagaagaacgucacggugacccacuccgugaaccugcuggaggacaagcacaacgggaagcucugcaagcugcgcggcgucgcgccccugcaccucgggaagugcaacaucgccggcugggugcuggggaacccggagugcgagagccuguccaccgcgagcuccuggagcuacaucguggagacccccuccagcgacaacggcacgugcuaccccggcgacuucaucgacuacgaggagcuccgggagcagcuguccagcgucuccagcuucgagcgcuucgagaucuuccccaagaccuccagcuggccgaaccacgacuccaacaagggggugaccgccgccugcccccacgccggcgccaagagcuucuacaagaaccugaucuggcucgugaagaaggggaacuccuaccccaagcugagcaaguccuacaucaacgacaagggcaaggagguccuggugcucugggggauccaccaccccagcaccagcgccgaccagcagucccuguaccagaacgccgacgccuacguguucgucggcacgagccgguacuccaagaaguucaagccggagaucgccauccgccccaaggugcgggaccaggagggccgcaugaacuacuacuggacccugguggagcccggggacaagaucaccuucgaggcgaccggcaaccucgucgugccccgguacgccuucgccauggagcgcaacgccgggagcggcaucaucaucuccgacacgccggugcacgacugcaacacgaccugccagacccccaagggcgccaucaacaccagccugcccuuccagaacauccaccccaucaccaucgggaagugcccgaaguacgucaaguccaagaagcugcggcucgcgaccggccugcgcaacgugcccagcauccagucccgggggcuguucggcgccaucgccggguucaucgagggcggcuggaccgggaugguggacggcugguacggguaccaccaccagaacgagcagggcagcggguacgccgccgaccucaaguccacgcagaacgcgaucgacgagaucaccaacaaggucaacagcgugaucgagaagaugaacacccaguucaccgccgucggcaaggaguucaaccaccuggagaagcgcaucgagaaccugaacaagaagguggacgacggcuuccucgacaucuggacguacaacgccgagcugcuggugcuccuggagaacgagcggacccuggacuaccacgacuccaacgucaagaaccucuacgagaaggugcgcagccagcugaagaacaacgccaaggagaucgggaacggcugcuucgaguucuaccacaagugcgacaacacgugcauggaguccgugaagaacgggaccuacgacuaccccaaguacagcgaggaggccaagcugaaccgggaggagaucgacggcgucaagcucgaguccacccgcaucuaccagauccuggcgaucuacagcaccguggccuccagccuggugcucgucgugagccugggggccaucuccuucuggaugugcagcaacggcucccugcagugccggaucugcaucuga

SEQ ID NO: 69645 - RNA, 1695 nt, Artificial Sequence
  derived and/or modified CDS sequence (opt1) from hemagglutinin__InfluenzaA__ADM14756
augaaggccauccuggugguccuccuguacaccuucgccaccgcgaacgccgacacgcugugcgugggcuaccacgccaacaacagcaccgacaccguggacaccguccucgagaagaacgugacggugacccacuccgucaaccugcuggaggacaagcacaacgggaagcucugcaagcugcgcggcguggcgccccugcaccucgggaagugcaacaucgccggcuggauccuggggaacccggagugcgagagccuguccaccgccagcuccuggagcuacaucguggagaccuccagcuccgacaacggcacgugcuaccccggcgacuucaucgacuacgaggagcuccgggagcagcugagcuccgucagcuccuucgagcgcuucgagaucuuccccaagaccagcuccuggcccaaccacgacagcaacaagggggugaccgccgccugcccgcacgccggcgcgaaguccuucuacaagaaccugaucuggcucgugaagaaggggaacagcuaccccaagcuguccaagagcuacaucaacgacaagggcaaggagguccuggugcucugggggauccaccaccccagcaccuccgccgaccagcagagccuguaccagaacgccgacgccuacguguucgucggcacgucccgguacagcaagaaguucaagcccgagaucgccauccgcccgaaggugcgggaccaggagggccgcaugaacuacuacuggacccugguggagcccggggacaagaucaccuucgaggcgaccggcaaccucgucgugccccgguacgccuucgccauggagcgcaacgccggguccggcaucaucaucagcgacacgcccgugcacgacugcaacacgaccugccagaccccgaagggcgccaucaacaccucccugcccuuccagaacauccaccccaucaccaucgggaagugccccaaguacgucaagagcaccaagcugcggcucgcgaccggccugcgcaacgugccguccauccagagccgggggcuguucggcgccaucgccggguucaucgagggcggcuggacggggaugguggacggcugguacggguaccaccaccagaacgagcagggcuccggguacgccgccgaccucaagagcacccagaacgcgaucgacaagaucaccaacaaggucaacuccgugaucgagaagaugaacacccaguucacggccgucggcaaggaguucaaccaccuggagaagcgcaucgagaaccugaacaagaagguggacgacggcuuccucgacaucuggaccuacaacgccgagcugcuggugcuccuggagaacgagcggacccuggacuaccacgacagcaacgucaagaaccucuacgagaaggugcgcucccagcugaagaacaacgccaaggagaucgggaacggcugcuucgaguucuaccacaagugcgacaacacgugcauggagagcgugaagaacgggaccuacgacuaccccaaguacuccgaggaggccaagcugaaccgggaggagaucgacggcgucaagcucgagagcacccgcaucuaccagauccuggcgaucuacuccaccguggccagcagccuggugcucgucgugucccugggggccaucagcuucuggaugugcuccggccacagcugccggaucugcaucuga

SEQ ID NO: 69646 - RNA, 1701 nt, Artificial Sequence; identical to SEQ ID NO: 67857
  derived and/or modified CDS sequence (opt1) from hemagglutinin__InfluenzaA__ADM14765

SEQ ID NO: 69647 - RNA, 1695 nt, Artificial Sequence
  derived and/or modified CDS sequence (opt1) from hemagglutinin__InfluenzaA__ADM14775
augaaggccauccuggugguccuccuguacaccuucgccaccgcgaacgccgacacgcugugcaucggcuaccacgccaacaacagcaccgacaccguggacaccgugcucgagaagaacgucacggugacccacuccgugaaccugcuggaggacaagcacaacgggaagcucugcaagcugcgcggcgucgcgccccugcaccucgggaagugcaacaucgccggcuggauccuggggaacccggagugcgagagccuguccaccgccagcuccuggagcuacaucguggagaccuccagcuccgacaacggcacgugcuaccccggcgacuucaucgacuacgaggagcuccgggagcagcugagcuccgugagcuccuucgagcgcuucgagaucuuccccaagaccagcuccuggcccaaccacgacagcaacaagggggucaccgccgccugcccgcacgccggcgcgaaguccuucuacaagaaccugaucuggcucgugaagaaggggaacagcuaccccaagcugaacaaguccuacaucaacgacaagggcaaggaggugcugguccucugggggauccaccaccccagcaccagcgccgaccagcagucccuguaccagaacgccgacgccuacguguucgugggcacgagccgguacuccaagaaguucaagcccgagaucgccauccgcccgaagguccgggaccaggagggccgcaugaacuacuacuggacccugguggagcccggggacaagaucaccuucgaggcgaccggcaaccucguggucccccgguacgccuucgccauggagcgcaacgccgggagcggcaucaucaucuccgacacgcccgugcacgacugcaacacgaccugccagaccccgaagggcgccaucaacaccagccugcccuuccagaacauccaccccaucaccaucggggagugccccaaguacgugaaguccaccaagcugcggcucgcgaccggccugcgcaacgucccgagcauccagucccgggggcuguucggcgccaucgccggguucaucgagggcggcuggacggggaugguggacggcugguacggguaccaccaccagaacgagcagggcagcggguacgccgccgaccucaaguccacccagaacgcgaucgacaagaucaccaacaaggugaacagcgucaucgagaagaugaacacccaguucacggccgugggcaaggaguucaaccaccuggagaagcgcaucgagaaccugaacaagaaggucgacgacggcuuccucgacaucuggaccuacaacgccgagcugcuggugcuccuggagaacgagcggacccuggacuaccacgacuccaacgugaagaaccucuacgagaagguccgcagccagcugaagaacaacgccaaggagaucgggaacggcugcuucgaguucuaccacaagugcgacaacacgugcauggaguccgugaagaacgggaccuacgacuaccccaaguacagcgaggaggccaagcugaaccgggaggagaucgacggcgugaagcucgaguccacccgcaucuaccagauccuggcgaucuacagcaccgucgccuccagccuggugcucguggucagccugggggccaucuccuucuggaugugcagcggccacuccugccggaucugcaucuga

SEQ ID NO: 69648 - RNA, 1695 nt, Artificial Sequence
  derived and/or modified CDS sequence (opt1) from hemagglutinin__InfluenzaA__ADM14802
augaaggccauccuggugguccuccuguacaccuucgccaccgcgaacgccgacacgcugugcaucggcuaccacgccaacaacagcaccgacaccguggacaccgugcucgagaagaacgucacggugacccacuccgugaaccugcuggaggacaagcacaacgggaagcucugcaagauccgcggcgucgcgccccugcaccuggggaagugcaacaucgccggcuggauccucgggaacccggagugcgagagccuguccaccgccagcuccuggagcuacaucguggagaccuccagcuccgacaacggcacgugcuaccccggcgacuucaucgacuacgaggagcugcgggagcagcucagcuccgugagcuccuucgagcgcuucgagaucuuccccaagaccagcuccuggcccaaccacgacagcaacaagggggucaccgccgccugcccgcacgccggcgcgaaguccuucuacaagaaccugaucuggcuggugaagaaggggaacagcuaccccaagcucuccaagagcuacaucaacgacaagggcaaggaggugcugguccugugggggauccaccaccccagcaccuccgccgaccagcagagccucuaccagaacgccgacgccuacguguucgugggcacgucccgguacagcaagaaguucaagcccgagaucgccauccgcccgaagguccgggaccaggagggccgcaugaacuacuacuggacccugguggagcccggggacaagaucaccuucgaggcgaccggcaaccugguggucccccgguacgccuucgccauggagcgcaacgccggguccggcaucaucaucagcgacacgcccgugcacgacugcaacacgaccugccagaccccgaagggcgccaucaacaccucccuccccuuccagaacauccaccccaucaccaucgggaagugccccaaguacgucaagagcaccaagcugcggcuggcgaccggccuccgcaacgugccguccauccagagccgggggcuguucggcgccaucgccggguucaucgagggcggcuggacggggaugguggacggcugguacggguaccaccaccagaacgagcagggcuccggguacgccgccgaccucaagagcacccagaacgcgaucgacgagaucaccaacaaggugaacuccgucaucgagaagaugaacacccaguucacggccgugggcaaggaguucaaccaccuggagaagcgcaucgagaaccugaacaagaaggucgacgacggcuuccuggacaucuggaccuacaacgccgagcuccuggugcugcucgagaacgagcggacccuggacuaccacgacagcaacgugaagaaccuguacgagaagguccgcucccagcucaagaacaacgccaaggagaucgggaacggcugcuucgaguucuaccacaagugcgacaacacgugcauggagagcgugaagaacgggaccuacgacuaccccaaguacuccgaggaggccaagcugaaccgggaggagaucgacggcgugaagcuggagagcacccgcaucuaccagauccucgcgaucuacuccaccgucgccagcagccuggugcugguggucucccucggggccaucagcuucuggaugugcuccggccacagcugccggaucugcaucuga

SEQ ID NO: 69649 - RNA, 1704 nt, Artificial Sequence
  derived and/or modified CDS sequence (opt1) from hemagglutinin__InfluenzaA__ADM14830
augaaggccauccuggugguccuccuguacaccuucgccaccgcgaacgccgacacgcugugcaucggcuaccacgccaacaacagcaccgacaccguggacaccgugcucgagaagaacgucacggugacccacuccgugaaccugcuggaggacaagcacaacgggaagcucugcaagcugcgcggcgucgcgccccugcaccucgggaagugcaacaucgccggcuggauccuggggaacccggagugcgagcugcucagcaccgcguccagcugguccuacaucguggagaccagcuccagcgacaacggcacgugcuaccccggcgacuucaucgacuacgaggagcugcgggagcagcuguccagcguguccagcuucgagcgcuucgagaucuuccccaagaccuccagcuggcccaaccacgacuccaacaagggggucaccgccgccugcccgcacgccggcgccaagagcuucuacaagaaccucaucuggcuggugaagaaggggaacuccuaccccaagcugagcaaguccuacaucaacgacaagggcaaggaggugcucguccugugggggauccaccaccccagcaccagcgccgaccagcagucccuguaccagaacgccgacgccuacguguucgugggcacgagccgguacuccaagaaguucaagcccgagaucgccauccgcccgaagguccgggaccaggagggccgcaugaacuacuacuggacccucguggagcccggggacaagaucaccuucgaggcgaccggcaaccugguggucccccgguacgccuucgccauggagcgcaacgccgagagcgggaucaucaucuccgacacgcccgugcacgacugcaacacgaccugccagaccccgaagggcgccaucaacaccagccugcccuuccagaacauccaccccaucaccaucggcaagugccccaaguacgugaaguccaccaagcuccggcuggcgaccgggcugcgcaacgucccgagcauccagucccggggccucuucggggccaucgccggcuucaucgagggcggguggacgggcaugguggacgggugguacggcuaccaccaccagaacgagcaggggagcggcuacgccgccgaccugaaguccacccagaacgcgaucgacgagaucaccaacaaggugaacagcgucaucgagaagaugaacacccaguucacggccguggggaaggaguucaaccaccuggagaagcgcaucgagaaccucaacaagaaggucgacgacggcuuccuggacaucuggaccuacaacgccgagcugcucgugcugcuggagaacgagcggacccucgacuaccacgacuccaacgugaagaagcuguacgagaagguccgcagccagcugaagaacaacgccaaggagaucggcaacgggugcuucgaguucuaccacaagugcgacaacacgugcauggaguccgugaagaacggcaccuacgacuaccccaaguacagcgaggaggccaagcucaaccgggaggagaucgacggggugaagcuggaguccacccgcaucuaccagauccuggcgaucuacagcaccgucgccuccagccucgugcugguggucagccugggcgccaucuccuucuggaugugcagcgggcacuccugccuccagugccggaucugcaucuga

SEQ ID NO: 69650 - RNA, 1695 nt, Artificial Sequence
  derived and/or modified CDS sequence (opt1) from hemagglutinin__InfluenzaA__ADM14848
augaaggccauccuggugguccuccuguacaccuucgccaccgcgaacgccgacacgcugugcaucggcuaccacgccaacaacagcaccgacaccguggacaccgugcucgagaagaacgucacggugacccacuccgugaaccugcuggaggacaagcacaacgggaagcucugcaagcugcgcggcgucgcgccccugcaccucgggaagugcaacaucgccggcuggauccuggggaacccggagugcgagagccuguccaccgccagcuccuggagcuacaucguggagaccuccagcuccgacaacggcacgugcuaccccggcgacuucaucgacuacgaggagcuccgggagcagcugagcuccgugagcuccuucgagcgcuucgagaucuuccccaagaccagcuccuggcccaaccacgacagcaacaagggggucaccgccgccugcccgcacgccggcgcgaaguccuucuacaagaaccugaucuggcucgugaagaaggggaacagcuaccccaagcuguccaagagcuacaucaacgacaagggcaaggaggugcugguccucugggggauccaccaccccagcaccuccgccgaccagcagagccuguaccagaacgccgacgccuacguguucgugggcuccagccgguacuccaagaaguucaagcccgagaucgccauccgcccgaagguccgggaccaggagggccgcaugaacuacuacuggacgcugguggagcccggggacaagaucaccuucgaggcgaccggcaaccucguggucccccgguacgccuucgccauggagcgcaacgccgggagcggcaucaucaucuccgacacccccgugcacgacugcaacacgaccugccagaccccgaagggcgccaucaacaccagccugcccuuccagaacauccaccccaucacgaucgggaagugccccaaguacgugaaguccaccaagcugcggcucgcgaccggccugcgcaacgucccgagcauccagucccgggggcuguucggcgccaucgccggguucaucgagggcggcuggaccgggaugguggacggcugguacggguaccaccaccagaacgagcagggcagcggguacgccgccgaccucaaguccacgcagaacgcgaucgacgagaucaccaacaaggugaacagcgucaucgagaagaugaacacccaguucaccgccgugggcaaggaguucaaccaccuggagaagcgcaucgagaaccugaacaagaaggucgacgacggcuuccucgacaucuggacguacaacgccgagcugcuggugcuccuggagaacgagcggacccuggacuaccacgacuccaacgugaagaaccucuacgagaagguccgcagccagcugaagaacaacgccaaggagaucgggaacggcugcuucgaguucuaccacaagugcgacaacacgugcauggaguccgugaagaacgggaccuacgacuaccccaaguacagcgaggaggccaagcugaaccgggaggagaucgacggcgugaagcucgaguccacccgcaucuaccagauccuggcgaucuacagcaccgucgccagcucccuggugcucguggucagccugggggccaucuccuucuggaugugcagcggccacuccugccggaucugcaucuga

SEQ ID NO: 69651 - RNA, 1695 nt, Artificial Sequence
  derived and/or modified CDS sequence (opt1) from hemagglutinin__InfluenzaA__ADM14866
augaaggccauccuggugguccuccuguacaccuucgccaccgcgaacgccgacacgcugugcaucggcuaccacgccaacaacagcaccgacaccguggacaccgugcucgagaagaacgucacggugacccacuccgugaaccugcuggaggacaagcacaacgggaagcucugcaagcugcgcggcgucgcgccccugcaccucgggaagugcaacaucgccggcuggauccuggggaacccggagugcgagagccuguccaccgccagcuccuggagcuacaucguggagaccuccagcuccgacaacggcacgugcuaccccggcgacuucaucgacuacgaggagcuccgggagcagcugagcuccgugagcuccuucgagcgcuucgagaucuuccccaagaccagcuccuggcccaaccacgacagcgacaagggggucaccgccgccugcccgcacgccggcgcgaaguccuucuacaagaaccugaucuggcucgugaagaaggggaacagcuaccccaagcuguccaagagcuacaucaacgacaagggcaaggaggugcugguccucugggggauccaccaccccagcaccuccgccgaccagcagagccuguaccagaacgccgacgccuacguguucgugggcacgucccgguacagcaagaaguucaagcccgagaucgccauccgcccgaagguccgggaccaggagggccgcaugaacuacuacuggacccugguggagcccggggacaagaucaccuucgaggcgaccggcaaccucguggucccccgguacgccuucgccauggagcgcaacgccggguccggcaucaucaucagcgacacgcccgugcacgacugcaacacgaccugccagaccccgaagggcgccaucaacaccucccugcccuuccagaacauccaccccaucaccaucgggaagugccccaaguacgucaagagcaucaagcugcggcucgcgaccggccugcgcaacgugccguccauccagagccgggggcuguucggcgccaucgccggguucaucgagggcggcuggaccgggaugguggacggcugguacggguaccaccaccagaacgagcagggcuccggguacgccgccgaccucaagagcacgcagaacgcgaucgacgagaucaccaacaaggugaacuccgucaucgagaagaugaacacccaguucaccgccgugggcaaggaguucaaccaccuggagaagcgcaucgagaaccugaacaagaaggucgacgacggcuuccucgacaucuggacguacaacgccgagcugcuggugcuccuggagaacgagcggacccuggacuaccacgacagcaacgugaagaaccucuacgagaagguccgcucccagcugaagaacaacgccaaggagaucgggaacggcugcuucgaguucuaccacaagugcgacaacacgugcauggagagcgugaagaacgggaccuacgacuaccccaaguacuccgaggaggccaagcugaaccgggaggagaucgacggcgugaagcucgagagcacccgcaucuaccagauccuggcgaucuacuccaccgucgccagcagccuggugcucguggucucccugggggccaucagcuucuggaugugcuccggccacagcugccggaucugcaucuga

SEQ ID NO: 69652 - RNA, 1695 nt, Artificial Sequence
  derived and/or modified CDS sequence (opt1) from hemagglutinin__InfluenzaA__ADM14876
augaaggccauccuggugguccuccuguacaccuucgccaccgcgaacgccgacacgcugugcaucggcuaccacgccaacaacagcaccgacaccguggacaccgugcucgagaagaacgucacggugacccacuccgugaaccugcuggaggacaagcacaacgggaagcucugcaagcugcgcggcgucgcgccccugcaccucgggaagugcaacaucgccggcuggauccuggggaacccggagugcgagagccuguccaccgccagcuccuggagcuacaucguggagaccuccagcuccgacaacggcacgugcuaccccggcgacuucaucgacuacgaggagcuccgggagcagcugagcuccgugagcuccuucgagcgcuucgagaucuuccccaagaccagcuccuggcccaaccacgacagcaacaagggggucaccgccgccugcccgcacgccggcgcgaaguccuucuacaagaaccugaucuggcucgugaagaaggggaacagcuaccccaagcuguccaagagcuacaucaacgacaaggagaaggaggugcugguccucuggggcauccaccaccccagcaccuccgccgaccagcagagccuguaccagaacgccgacgccuacguguucguggggacgucccgguacagcaagaaguucaagcccgagaucgccauccgcccgaagguccgggaccaggagggccgcaugaacuacuacuggacccugguggagcccggcgacaagaucaccuucgaggcgaccgggaaccucguggucccccgguacgccuucgccauggagcgcaacgccggcuccgggaucaucaucagcgacacgcccgugcacgacugcaacacgaccugccagaccccgaagggcgccaucaacaccucccugcccuuccagaacauccaccccaucaccaucggcaagugccccaaguacgucaagagcaccaagcugcggcucgcgaccgggcugcgcaacgugccguccauccagagccggggccuguucggggccaucgccggcuucaucgagggcggguggacgggcaugguggacgggugguacggcuaccaccaccagaacgagcagggguccggcuacgccgccgaccucaagagcacccagaacgcgaucgacgagaucaccaacaaggugaacuccgucaucgagaagaugaacacccaguucacggccguggggaaggaguucaaccaccuggagaagcgcaucgagaaccugaacaagaaggucgacgacggcuuccucgacaucuggaccuacaacgccgagcugcuggugcuccuggagaacgagcggacccuggacuaccacgacagcaacgugaagaaccucuacgagaagguccgcucccagcugaagaacaacgccaaggagaucggcaacgggugcuucgaguucuaccacaagugcgacaacacgugcauggagagcgugaagaacggcaccuacgacuaccccaaguacuccgaggaggccaagcugaaccgggaggagaucgacggggugaagcucgagagcacccgcaucuaccagauccuggcgaucuacuccaccgucgccagcagccuggugcucguggucucccugggcgccaucagcuucuggaugugcuccgggcacagcugccggaucugcaucuga

SEQ ID NO: 69653 - RNA, 1704 nt, Artificial Sequence
  derived and/or modified CDS sequence (opt1) from hemagglutinin__InfluenzaA__ADM14885
augaaggccauccuggugguccuccuguacaccuucgccaccgcgaacgccgacacgcugugcaucggcuaccacgccaacaacagcaccgacaccguggacaccgugcucgagaagaacgucacggugacccacuccgugaaccugcuggaggacaagcacaacgggaagcucugcaagcugcgcggcgucgcgccccugcaccucgggaagugcaacaucgccggcuggauccuggggaacccggagugcgagcugcucagcaccgcguccagcugguccuacaucguggagaccagcuccagcgacaacggcacgugcuaccccggcgacuucaucgacuacgaggagcugcgggagcagcuguccagcguguccagcuucgagcgcuucgagaucuuccccaagaccuccagcuggcccaaccacgacuccaacaagggggucaccgccgccugcccgcacgccggcgccaagagcuucuacaagaaccucaucuggcuggugaagaaggggaacuccuaccccaagcugagcaaguccuacaucaacgacaaggagaaggaggugcucguccuguggggcauccaccaccccagcaccagcgccgaccagcagucccuguaccagaacgccgacgccuacguguucguggggacgagccgguacuccaagaaguucaagcccgagaucgucauccgcccgaaggugcgggaccaggagggccgcaugaacuacuacuggacccucguggagcccggcgacaagaucaccuucgaggccaccgggaaccuggucgugccccgguacgcguucgccauggagcgcaacgccgagagcggcaucaucaucuccgacacgcccgugcacgacugcaacacgaccugccagaccccgaagggggccaucaacaccagccugcccuuccagaacauccaccccaucaccaucggcaagugccccaaguacgucaaguccaccaagcuccggcuggccaccggccugcgcaacgugccgagcauccagucccggggccucuucggggcgaucgccggguucaucgagggcggguggacgggcaugguggacggcugguacggguaccaccaccagaacgagcagggcagcggguacgccgccgaccugaaguccacccagaacgccaucgacgagaucaccaacaaggucaacagcgugaucgagaagaugaacacccaguucacggcggucggcaaggaguucaaccaccuggagaagcgcaucgagaaccucaacaagaagguggacgacggguuccuggacaucuggaccuacaacgccgagcugcucgugcugcuggagaacgagcggacccucgacuaccacgacuccaacgucaagaagcuguacgagaaggugcgcagccagcugaagaacaacgccaaggagaucggcaacggcugcuucgaguucuaccacaagugcgacaacacgugcauggaguccgugaagaacgggaccuacgacuaccccaaguacagcgaggaggccaagcucaaccgggaggagaucgacggcgucaagcuggaguccacccgcaucuaccagauccuggccaucuacagcaccguggcguccagccucgugcuggucgugagccugggggccaucuccuucuggaugugcagcggccacgggucccuccagugccggaucugcaucuga

SEQ ID NO: 69654 - RNA, 1695 nt, Artificial Sequence
  derived and/or modified CDS sequence (opt1) from hemagglutinin__InfluenzaA__ADM14894
augaaggccauccuggugguccuccuguacaccuucgccaccgcgaacgccgacacgcugugcaucggcuaccacgccaacaacagcaccgacaccguggacaccgugcucgagaagaacgucacggugacccacuccgugaaccugcuggaggacaagcacaacgggaagcucugcaagcugcgcggcgucgcgccccugcaccucgggaagugcaacaucgccggcuggauccuggggaacccggagugcgagagccuguccaccgccagcuccuggagcuacaucguggagaccuccagcuccgacaacggcacgugcuaccccggcgacuucaucgacuacgaggagcuccgggagcagcugagcuccgugagcuccuucgagcgcuucgagaucuuccccaagaccagcuccuggcccaaccacgacagcaacaagggggucaccgccgccugcccgcacgccggcgcgaaguccuucuacaagaaccugaucuggcucgugaagaaggggaacagcuaccccaagcuguccaagagcuacaucaacgacaaggagaaggaggugcugguccucuggggcauccaccaccccagcaccuccgccgaccagcagagccuguaccagaacgccgacgccuacguguucguggggacgucccgguacagcaagaaguucaagcccgagaucgucauccgcccgaaggugcgggaccaggagggccgcaugaacuacuacuggacccugguggagcccggcgacaagaucaccuucgaggccaccgggaaccucgucgugccccgguacgcguucgccauggagcgcaacgccggcuccgggaucgugaucagcgacacgcccguccacgacugcaacacgaccugccagaccccgaagggcgccaucaacaccucccugcccuuccagaacauccaccccaucaccaucggcaagugccccaaguacgucaagagcaccaagcugcggcucgccaccgggcugcgcaacgugccguccauccagagccggggccuguucggggcgaucgccggcuucaucgagggcggguggacgggcaugguggacgggugguacggcuaccaccaccagaacgagcagggguccggcuacgccgccgaccucaagagcacccagaacgccaucgacgagaucaccaacaaggugaacuccgucaucgagaagaugaacacccaguucacggcgguggggaaggaguucaaccaccuggagaagcgcaucgagaaccugaacaagaagguggacgacggcuuccucgacaucuggaccuacaacgccgagcugcugguccuccuggagaacgagcggacccuggacuaccacgacagcaacgugaagaagcucuacgagaaggugcgcucccagcugaagaacaacgccaaggagaucggcaacgggugcuucgaguucuaccacaagugcgacaacacgugcaugaaguccgucaagaacggcaccuacgacuaccccaaguacagcgaggaggccaagcugaaccgggaggagaucgacggggugaagcucgagagcacccgcaucuaccagauccuggccaucuacuccaccguggcgagcagccugguccucguggugucccugggcgccaucagcuucuggaugugcuccgggcacagcugccggaucugcaucuga

SEQ ID NO: 69655 - RNA, 1695 nt, Artificial Sequence
  derived and/or modified CDS sequence (opt1) from hemagglutinin__InfluenzaA__ADM14903
augaaggccauccuggugguccuccugugcaccuucgccaccgcgaacgccgacacgcugugcaucggcuaccacgccaacaacagcaccgacaccguggacaccgugcucgagaagaacgucacggugacccacuccgugaaccugcuggaggacaagcacaacgggaagcucugcaagcugcgcggcgucgcgccccugcaccucgggaagugcaacaucgccggcuggauccuggggaacccggagugcgagagccuguccaccgccagcuccuggagcuacaucguggagaccuccagcuccgacaacggcacgugcuaccccggcgacuucaucgacuacgaggagcuccgggagcagcugagcuccgugagcuccuucgagcgcuucgagaucuuccccaagaccagcuccuggcccaaccacgacagcaacaagggggucaccgccgccugcccgcacgccggcgcgaaguccuucuacaagaaccugaucuggcucgugaagaaggggaacagcuaccccaagcuguccaagagcuacaucaacgacaagggcaaggaggugcugguccucugggggauccaccaccccagcaccuccgccgaccagcagagccuguaccagaacgccgacgccuacguguucgugggcacgucccgguacagcaagaaguucaagcccgagaucgccauccgcccgaagguccgggaccaggagggccgcaugaacuacuacuggacccugguggagcccggggacaagaucaccuucgaggcgaccggcaaccucguggucccccgguacgccuucgccauggagcgcaacgccggguccggcaucaucaucagcgacacgcccgugcacgacugcaacacgaccugccagaccccgaagggcgccaucaacaccucccugcccuuccagaacauccaccccaucaccaucgggaagugccccaaguacgucaagagcaccaagcugcggcucgcgaccggccugcgcaacgugccguccauccagagccgggggcuguucggcgccaucgccggguucaucgagggcggcuggacggggaugguggacggcugguacggguaccaccaccagaacgagcagggcuccggguacgccgccgaccucaagagcacccagaacgcgaucgacaagaucaccaacaaggugaacuccgucaucgagaagaugaacacccaguucacggccgugggcaaggaguucaaccaccuggagaagcgcaucgagaaccugaacaagaaggucgacgacggcuuccucgacaucuggaccuacaacgccgagcugcuggugcuccuggagaacgagcggacccuggacuaccacgacagcaacgugaagaaccucuacgagaagguccgcucccagcugaagaacaacgccaaggagaucgggaacggcugcuucgaguucuaccacaagugcgacaacacgugcauggagagcgugaagaacgggaccuacgacuaccccaaguacuccgaggaggccaagcugaaccgggaggagaucgacggcgugaagcucgagagcacccgcaucuaccagauccuggcgaucuacuccaccgucgccagcagccuggugcucguggucucccugggggccaucagcuucuggaugugcuccggccacagcugccggaucugcaucuga

SEQ ID NO: 69656 - RNA, 1695 nt, Artificial Sequence
  derived and/or modified CDS sequence (opt1) from hemagglutinin__InfluenzaA__ADM14912
augaaggccauccuggugguccuccuguacaccuucgccaccgcgaacgccgacacgcugugcaucggcuaccacgccaacaacagcaccgacaccguggacaccgugcucgagaagaacgucacggugacccacuccgugaaccugcuggaggacaagcacaacgggaagcucugcaagcugcgcggcgucgcgccccugcaccucgggaagugcaacaucgccggcuggauccuggggaacccggagugcgagagccuguccaccgccagcuccuggagcuacaucguggagaccuccagcuccgacaacggcacgugcuaccccggcgacuucaucgacuacgaggagcuccgggagcagcugagcuccgugagcuccuucgagcgcuucgagaucuuccccaagaccagcuccuggcccaaccacgacagcaacaagggggucaccgccgccugcccgcacgccggcgcgaaguccuucuacaagaaccugaucuggcucgugaagaaggggaacagcuaccccaagcuguccaagagcuacaucaacgacaagggcaaggaggugcugguccucugggggauccaccaccccagcaccuccgccgaccagcagagccuguaccagaacgccgacgccuacguguucgugggcacgucccgguacagcaagaaguucaagcccgagaucgccauccgcccgaagguccgggaccaggagggccgcaugaacuacuacuggacccugguggagcccggggacaagaucaccuucgaggcgaccggcaaccucguggucccccgguacgccuucgccauggagcgcaacgccggguccggcaucaucaucagcgacacgcccgugcacgacugcaacacgaccugccagaccccggagggcgccaucaacaccucccugcccuuccagaacauccaccccaucaccaucgggaagugccccaaguacgucaagagcaccaagcugcggcucgcgaccggccugcgcaacgugccguccauccagagccgggggcuguucggcgccaucgccggguucaucgagggcggcuggacggggaugguggacggcugguacggguaccaccaccagaacgagcagggcuccggguacgccgccgaccucaagagcacccagaacgcgaucgacgagaucaccaacaaggugaacuccgucaucgagaagaugaacacccaguucacggccgugggcaaggaguucaaccaccuggagaagcgcaucgagaaccugaacaagaaggucgacgacggcuuccucgacaucuggaccuacaacgccgagcugcuggugcuccuggagaacgagcggacccuggacuaccacgacagcaacgugaagaaccucuacgagaagguccgcucccagcugaagaacaacgccaaggagaucgggaacggcugcuucgaguucuaccacaagugcgacaacacgugcauggagagcgugaagaacgggaccuacgacuaccccaaguacuccgaggaggccaagcugaaccgggaggagaucgacggcgugaagcucgagagcacccgcaucuaccagauccuggcgaucuacuccaccgucgccagcagccuggugcucguggucucccugggggccaucagcuucuggaugugcuccggccacagcugccggaucugcaucuga

SEQ ID NO: 69657 - RNA, 1695 nt, Artificial Sequence
  derived and/or modified CDS sequence (opt1) from hemagglutinin__InfluenzaA__ADM14921
augaaggccauccuggugguccuccuguacaccuucgccaccgcgaacgccgacacgcugugcaucggcuaccacgccaacaacagcaccgacaccguggacaccgugcucgagaagaacgucacggugacccacuccgugaaccugcuggaggacaagcacaacgggaagcucugcaagcugcgcggcgucgcgccccugcaccucgggaagugcaacaucgccggcuggauccuggggaacccggagugcgagagccuguccaccgccagcuccuggagcuacaucguggagaccuccagcuccgacaacggcacgugcuaccccggcgacuucaucgacuacgaggagcuccgggagcagcugagcuccgugagcuccuucgagcgcuucgagaucuuccccaagaccagcuccuggcccaaccacgacagcaacaagggggucaccgccgccugcccgcacgccggcgcgaaguccuucuacaagaaccugaucuggcucgugaagaaggggaacagcuaccccaagcuguccaagagcuacaucaacgacaagggcaaggaggugcugguccucugggggauccaccaccccagcaccuccgccgaccagcagagccuguaccagaacgccgacgccuacguguucgugggcacgucccgguacagcaagaaguucaagcccgagaucgccauccgcccgaagguccgggaccaggagggccgcaugaacuacuacuggacccugguggagcccggggacaagaucaccuucgaggcgaccggcaaccucguggucccccgguacgccuucgccauggagcgcaacgccggguccggcaucaucaucagcgacacgcccgugcacgacugcaacacgaccugccagaccccgaagggcgccaucaacaccucccugcccuuccagaacauccaccccaucaccaucgggaagugccccaaguacgucaagagcaccaagcugcggcucgcgaccggccugcgcaacgugccguccauccagagccgggggcuguucggcgccaucgccggguucaucgagggcggcuggacggggaugguggacggcugguacggguaccaccaccagaacgagcagggcuccggguacgccgccgaccucaagagcacccagaacgcgaucgacgagaucaccaacaaggugaacuccgucaucgagaagaugaacacccaguucacggccgugggcaaggaguucaaccaccuggagaagcgcaucgagaaccugaacaagaaggucgacgacggcuuccucgacaucuggaccuacaacgccgagcugcuggugcuccuggagaacgagcggacccuggacuaccacgacagcaacgugaagaaccucuacgagaagguccgcucccagcugaagaacaacgccaaggagaucgggaacggcugcuucgaguucuaccacaagugcgacaacacgugcauggagagcgugaagaacgggaccuacgacuaccccaaguacuccgaggaggccaagcugaaccgggaggagaucgacggcgugaagcucgagagcacccgcaucuaccagauccuggcgaucuacuccaccgucgccagcagccuggugcucguggucucccugggggccaucagcuucuggaugugcuccggccacagcugccggaucugcaucuga

SEQ ID NO: 69658 - RNA, 1701 nt, Artificial Sequence; identical to SEQ ID NO: 67857
  derived and/or modified CDS sequence (opt1) from hemagglutinin__InfluenzaA__ADM14930

SEQ ID NO: 69659 - RNA, 1701 nt, Artificial Sequence
  derived and/or modified CDS sequence (opt1) from hemagglutinin__InfluenzaA__ADM14948
augaaggccauccuggugguccuccuguacaccuucgccaccgcgaacgccgacacgcugugcaucggcuaccacgccaacaacagcaccgacaccguggacaccgugcucgagaagaacgucacggugacccacuccgugaaccugcuggaggacaagcacaacgggaagcucugcaagcugcgcggcgucgcgccccugcaccucgggaagugcaacaucgccggcuggauccuggggaacccggagugcgagagccuguccaccgccagcuccuggagcuacaucguggagaccuccagcuccgacaacggcacgugcuaccccggcgacuucaucgacuacgaggagcuccgggagcagcugagcuccgugagcuccuucgagcgcuucgagaucuuccccaagaccagcuccuggcccaaccacgacagcaacaagggggucaccgccgccugcccgcacgccggcgcgaagggguucuacaagaaccugaucuggcucgugaagaagggcaacuccuaccccaagcugagcaaguccuacaucaacgacaaggggaaggaggugcugguccucuggggcauccaccaccccagcaccagcgccgaccagcagucccuguaccagaacgccgacgccuacguguucgugggcacgagccgguacucccgcaaguucaagcccgagaucgccauccggccgaagguccgcgaccaggaggggcggaugaacuacuacuggacccugguggagcccggcgacaagaucaccuucgaggcgaccgggaaccucguggucccccgcuacgccuucgccauggagcggaacgccggcagcggcaucaucaucuccgacacgcccgugcacgacugcaacacgaccugccagaccccggagggggccaucaacaccagccugcccuuccagaacauccaccccaucaccaucggcaagugccccaaguacgugaaguccaccaagcugcgccucgcgaccgggcugcggaacgucccgagcauccagucccgcggccuguucggggccaucgccggcuucaucgagggcggguggacgggcaugguggacgggugguacggcuaccaccaccagaacgagcaggggagcggcuacgccgccgaccucaaguccacccagaacgcgaucgacgagaucaccaacaaggugaacagcgucaucgagaagaugaacacccaguucacggccgugggcaaggaguucaaccaccuggagaagcggaucgagaaccugaacaagaaggucgacgacggguuccucgacaucuggaccuacaacgccgagcugcuggugcuccuggagaacgagcgcacccuggacuaccacgacuccaacgugaagaaccucuacgagaagguccggagccagcugaagaacaacgccaaggagaucggcaacgggugcuucgaguucuaccacaagugcgacaacacgugcauggaguccgugaagaacggcaccuacgacuaccccaaguacagcgaggaggccaagcugaaccgcgaggagaucgacggggugaagcucgaguccacccggaucuaccagauccuggcgaucuacagcaccgucgccuccagccuggugcucguggucagccugggcgccaucuccuucuggaugugcagcaacggcucccugcagugccgcaucugcaucuga

SEQ ID NO: 69660 - RNA, 1695 nt, Artificial Sequence
  derived and/or modified CDS sequence (opt1) from hemagglutinin__InfluenzaA__ADM14966
augaaggccauccuggugguccuccuguacaccuucgccaccgcgaacgccgacacgcugugcaucggcuaccacgccaacaacagcaccgacaccguggacaccgugcucgagaagaacgucacggugacccacuccgugaacauccuggaggacaagcacaacgggaagcugugcaagcuccgcggcgucgcgccccugcaccuggggaagugcaacaucgccggcuggauccucgggaacccggagugcgagagccuguccaccgccagcuccuggagcuacaucguggagaccuccagcuccgacaacggcacgugcuaccccggcgacuucaucgacuacgaggagcugcgggagcagcucagcuccgugagcuccuucgagcgcuucgagaucuuccccaagaccagcuccuggcccaaccacgacagcaacaagggggucaccgccgccugcccgcacgccggcgcgaaguccuucuacaagaaccugaucuggcuggugaagaaggggaacagcuaccccaagcucuccaagagcuacaucaacgacaagggcaaggaggugcugguccugugggggauccaccaccccagcaccuccgccgaccagcagagccucuaccagaacgccgacgccuacguguucgugggcuccagccgguacuccaagaaguucaagcccgagaucgccauccgcccgaagguccgggaccaggagggccgcaugaacuacuacuggacgcugguggagcccggggacaagaucaccuucgaggcgaccggcaaccugguggucccccgguacgccuucgccauggagcgcaacgccgggagcggcaucaucaucuccgacacccccgugcacgacugcaacacgaccugccagaccccgaagggcgccaucaacaccagccuccccuuccagaacauccaccccaucacgaucgggaagugccccaaguacgugaaguccaccaagcugcggcuggcgaccggccuccgcaacgucccgagcauccagucccgggggcuguucggcgccaucgccggguucaucgagggcggcuggaccgggaugguggacggcugguacggguaccaccaccagaacgagcagggcagcggguacgccgccgaccugaaguccacgcagaacgcgaucgacgagaucaccaacaaggugaacagcgucaucgagaagaugaacacccaguucaccgccgugggcaaggaguucaaccaccucgagaagcgcaucgagaaccugaacaagaaggucgacgacggcuuccuggacaucuggacguacaacgccgagcuccuggugcugcucgagaacgagcggacccuggacuaccacgacuccaacgugaagaaccuguacgagaagguccgcagccagcucaagaacaacgccaaggagaucgggaacggcugcuucgaguucuaccacaagugcgacaacacgugcauggaguccgugaagaacgggaccuacgacuaccccaaguacagcgaggaggccaagcugaaccgggaggagaucgacggcgugaagcuggaguccacccgcaucuaccagauccucgcgaucuacagcaccgucgccagcucccuggugcugguggucagccucggggccaucuccuucuggaugugcagcggccacuccugccggaucugcaucuga

SEQ ID NO: 69661 - RNA, 1701 nt, Artificial Sequence; identical to SEQ ID NO: 66873
  derived and/or modified CDS sequence (opt1) from hemagglutinin__InfluenzaA__ADM14975

SEQ ID NO: 69662 - RNA, 1701 nt, Artificial Sequence
  derived and/or modified CDS sequence (opt1) from hemagglutinin__InfluenzaA__ADM14985
augaaggccauccuggugguccuccuguacaccuucgccaccgcgaacgccgacacgcugugcaucggcuaccacgccaacaacagcaccgacaccguggacaccgugcucgagaagaacgucacggugacccacuccgugaaccugcuggaggacaagcacaacgggaagcucugcaagcugcgcggcgucgcgccccugcaccucgggaagugcaacaucgccggcuggauccuggggaacccggagugcgagagccuguccaccgccagcuccuggagcuacaucguggagaccuccagcuccgacaacggcacgugcuaccccggcgacuucaucgacuacgaggagcuccgggagcagcugagcuccgugagcuccuucgagcgcuucgagaucuuccccaagaccagcuccuggcccaaccacgacagcaacaagggggucaccgccgccugcccgcacgccggcgcgaaguccuucuacaagaaccugaucuggcucgugaagaaggggaacagcuaccccaagcuguccaagagcuacaucaacgacaaggagaaggaggugcugguccucuggggcauccaccaccccagcaccuccgccgaccagcagagccuguaccagaacgccgacgccuacguguucguggggacgucccgguacagcaagaaguucaagcccgagaucgccauccgcccgaagguccggggccaggagggccgcaugaacuacuacuggacccugguggagcccggggacaagaucaccuucgaggcgaccggcaaccucguggucccccgguacgccuucgccauggagcgcaacgccggguccggcaucgugaucagcgacacgcccgugcacgacugcaacacgaccugccagaccccgaagggcgccaucaacaccucccugcccuuccagaacauccacagcaucaccaucgggaagugccccaaguacgucaaguccaccaagcugcggcucgcgaccggccugcgcaacgugcccagcauccagucccgggggcuguucggcgccaucgccggguucaucgagggcggcuggacggggaugguggacggcugguacggguaccaccaccagaacgagcagggcagcggguacgccgccgaccucaaguccacccagaacgcgaucgacgagaucaccaacaaggucaacagcgugaucgagaagaugaacacccaguucacggccgucggcaaggaguucaaccaccuggagaagcgcaucgagaaccugaacaagaagguggacgacggcuuccucgacaucuggaccuacaacgccgagcugcuggugcuccuggagaacgagcggacccuggacuaccacgacuccaacgucaagaaccucuacgagaaggugcgcagccagcugaagaacaacgccaaggagaucgggaacggcugcuucgaguucuaccacaagugcgacaacacgugcauggaguccgugaagaacgggaccuacgacuacccgaaguacagcgaggaggccaagcugaaccgggaggagaucgacggcgucaagcucgaguccacccgcaucuaccagauccuggcgaucuacagcaccguggccagcucccuggugcucgucgugagccugggggccaucuccuucuggaugugcagcaacggcucccugcagugccggaucugcaucuga

SEQ ID NO: 69663 - RNA, 1701 nt, Artificial Sequence
  derived and/or modified CDS sequence (opt1) from hemagglutinin__InfluenzaA__ADM23841
augaaggccauccuggugguccuccuguacaccuucgccaccgcgaacgccgacacgcugugcaucggcuaccacgccaacaacagcaccgacaccguggacaccgugcucgagaagaacgucacggugacccacuccgugaaccugcuggaggacaagcacaacgggaagcucugcaagcugcgcggcgucgcgccccugcaccucgggaagugcaacaucgccggcuggauccuggggaacccggagugcgagagccuguccaccgccagcuccuggagcuacaucguggagaccuccagcuccgacaacggcacgugcuaccccggcgacuucaucgacuacgaggagcuccgggagcagcugagcuccgugagcuccuucgagcgcuucgagaucuuccccaagaccagcuccuggcccaaccacgacagcaacaagggggucaccgccgccugcccgcacgccggcgcgaaguccuucuacaagaaccugaucuggcucgugaagaaggggaacagcuaccccaagcuguccaagagcuacaucaacgacaagggcaaggaggugcugguccucugggggauccaccaccagagcaccuccgccgaccagcagagccuguaccagaacgccgacgccuacguguucgugggcacgucccgguacagcaagaaguucaagcccgagaucgccauccgccccaagguccgggaccaggagggccgcaugaacuacuacuggacccugguggagccgggggacaagaucaccuucgaggcgaccggcaaccucguggucccccgguacgccuucgccauggagcgcaacgccggguccggcaucaucaucagcgacacgcccgugcacgacugcaacacgaccugccagacccccaagggcgccaucaacaccucccugccguuccagaacauccaccccaucaccaucgggaagugccccaaguacgucaagagcaccaagcugcggcucgcgaccggccugcgcaacgugcccuccauccagagccgggggcuguucggcgccaucgccggguucaucgagggcggcuggacggggaugguggacggcugguacggguaccaccaccagaacgagcagggcuccggguacgccgccgaccucaagagcacccagaacgcgaucgacgagaucaccaacaaggugaacuccgucaucgagaagaugaacacccaguucacggccgugggcaaggaguucaaccaccuggagaagcgcaucgagaaccugaacaagaaggucgacgacggcuuccucgacaucuggaccuacaacgccgagcugcuggugcuccuggagaacgagcggacccuggacuaccacgacagcaacgugaagaaccucuacgagaagguccgcucccagcugaagaacaacgccaaggagaucgggaacggcugcuucgaguucuaccacaagugcgacaacacgugcauggagagcgugaagaacgggaccuacgacuacccgaaguacuccgaggaggccaagcugaaccgggaggagaucgacggcgugaagcucgagagcacccgcaucuaccagauccuggcgaucuacuccaccgucgccagcagccuggugcucguggucucccugggggccaucagcuucuggaugugcuccaacggcagccugcagugccggaucugcaucuga

SEQ ID NO: 69664 - RNA, 1701 nt, Artificial Sequence; identical to SEQ ID NO: 67857
  derived and/or modified CDS sequence (opt1) from hemagglutinin__InfluenzaA__ADM23843

SEQ ID NO: 69665 - RNA, 1701 nt, Artificial Sequence
  derived and/or modified CDS sequence (opt1) from hemagglutinin__InfluenzaA__ADM23844
augaaggccauccuggugguccuccuguacaccuucgccaccgcgaacgccgacacgcugugcaucggcuaccacgccaacaacagcaccgacaccguggacaccgugcucgagaagaacgucacggugacccacuccgugaaccugcuggaggacaagcacaacgggaagcucugcaagcugcgcggcgucgcgccccugcaccucgggaagugcaacaucgccggcuggauccuggggaacccggagugcgagagccuguccaccgccagcuccuggagcuacaucguggagaccuccaucagcgacaacggcacgugcuaccccggcgacuucaucgacuacgaggagcuccgggagcagcuguccagcguguccagcuucgagcgcuucgagaucuuccccaagaccuccagcuggcccaaccacgacuccaacaagggggucaccaccgccugcccgcacgccggcgccaagggguucuacaagaaccugaucuggcucgugaagaagggcaacagcuaccccaagcuguccaagagcuacaucaacgacaaggggaaggaggugcugguccucuggggcauccaccaccaguccacgagcgcggaccagcagagccuguaccagaacgccgacgccuacguguucgugggcaccucccgguacagcaagaaguucaagcccgagaucgccauccgccccaagguccgggaccaggaggggcgcaugaacuacuacuggacccugguggagccgggcgacaagaucaccuucgaggccacggggaaccucguggucccccgguacgcguucgccauggagcgcaacgccggcuccggcaucaucaucagcgacacccccgugcacgacugcaacacgaccugccagacccccaagggggccaucaacaccucccugccguuccagaacauccaccccaucaccaucggcaagugccccaaguacgucaagagcaccaagcugcggcucgccacggggcugcgcaacgugcccuccauccagagccggggccuguucggggcgaucgccggcuucaucgagggcggguggaccggcaugguggacgggugguacggcuaccaccaccagaacgagcagggguccggcuacgccgccgaccucaagagcacccagaacgccaucgacaagaucaccaacaaggugaacuccgucaucgagaagaugaacacgcaguucaccgcggugggcaaggaguucaaccaccuggagaagcgcaucgagaaccugaacaagaaggucgacgacggguuccucgacaucuggaccuacaacgccgagcugcuggugcuccuggagaacgagcggacccuggacuaccacgacagcaacgugaagaaccucuacgagaagguccgcucccagcugaagaacaacgccaaggagaucggcaacgggugcuucgaguucuaccacaagugcgacaacacgugcauggagagcgugaagaacggcaccuacgacuacccgaaguacuccgaggaggccaagcugaaccgggaggagaucgacggggugaagcucgagagcacccgcaucuaccagauccuggccaucuacuccaccgucgcgagcucccuggugcucguggucagccugggcgccaucagcuucuggaugugcuccaacggcagccugcagugccggaucugcaucuga

SEQ ID NO: 69666 - RNA, 1701 nt, Artificial Sequence
  derived and/or modified CDS sequence (opt1) from hemagglutinin__InfluenzaA__ADM23845
augaaggccauccuggugguccuccuguacaccuucgccaccgcgaacgccgacacgcugugcaucggcuaccacgccaacaacagcaccgacaccguggacaccgugcucgagaagaacgucacggugacccacuccgugaaccugcuggaggacaagcacaacgggaagcucugcaagcugcgcggcgucgcgccccugcaccucgggaagugcaacaucgccggcuggauccuggggaacccggagugcgagagccuguccaccgccagcuccuggagcuacaucguggagaccuccaucagcgacaacggcacgugcuaccccggcgacuucaucgacuacgaggagcuccgggagcagcuguccagcguguccagcuucgagcgcuucgagaucuuccccaagaccuccagcuggcccaaccacgacuccaacaagggggucaccaccgccugcccgcacgccggcgccaagagcuucuacaagaaccugaucuggcucgugaagaaggggaacuccuaccccaagcugagcaaguccuacaucaacgacaagggcaaggaggugcugguccucugggggauccaccaccagagcacgagcgcggaccagcagucccuguaccagaacgccgacgccuacguguucgugggcaccagccgguacuccaagaaguucaagcccgagaucgccauccgccccaagguccgggaccaggagggccgcaugaacuacuacuggacccugguggagccgggggacaagaucaccuucgaggccacgggcaaccucguggucccccgguacgcguucgccauggagcgcaacgccgggagcggcaucaucaucuccgacacccccgugcacgacugcaacacgaccugccagacccccaagggcgccaucaacaccagccugccguuccagaacauccaccccaucaccaucgggaagugccccaaguacgugaaguccaccaagcugcggcucgccacgggccugcgcaacguccccagcauccagucccgggggcuguucggcgcgaucgccggguucaucgagggcggcuggaccgggaugguggacggcugguacggguaccaccaccagaacgagcagggcagcggguacgccgccgaccucaaguccacccagaacgccaucgacaagaucaccaacaaggugaacagcgucaucgagaagaugaacacgcaguucaccgcggugggcaaggaguucaaccaccuggagaagcgcaucgagaaccugaacaagaaggucgacgacggcuuccucgacaucuggaccuacaacgccgagcugcuggugcuccuggagaacgagcggacccuggacuaccacgacuccaacgugaagaaccucuacgagaagguccgcagccagcugaagaacaacgccaaggagaucgggaacggcugcuucgaguucuaccacaagugcgacaacacgugcauggaguccgugaagaacgggaccuacgacuacccgaaguacagcgaggaggccaagcugaaccgggaggagaucgacggcgugaagcucgaguccacccgcaucuaccagauccuggccaucuacagcaccgucgcguccagccuggugcucguggucagccugggggccaucuccuucuggaugugcagcaacggcucccugcagugccggaucugcaucuga

SEQ ID NO: 69667 - RNA, 1701 nt, Artificial Sequence
  derived and/or modified CDS sequence (opt1) from hemagglutinin__InfluenzaA__ADM23846
augaaggccauccuggugguccuccuguacaccuucgccaccgcgaacgccgacacgcugugcaucggcuaccacgccaacaacagcaccgacaccguggacaccgugcucgagaagaacgucacggugacccacuccgugaaccugcuggaggacaagcacaacgggaagcucugcaagcugcgcggcgucgcgccccugcaccucgggaagugcaacaucgccggcuggauccuggggaacccggagugcgagagccuguccaccgccagcuccuggagcuacaucguggagaccuccaucagcgacaacggcacgugcuaccccggcgacuucaucgacuacgaggagcuccgggagcagcuguccagcguguccagcuucgagcgcuucgagaucuuccccaagaccuccagcuggcccaaccacgacuccaacaagggggucaccaccgccugcccgcacgccggcgccaagagcuucuacaagaaccugaucuggcucgugaagaaggggaacuccuaccccaagcugagcaaguccuacaucaacgacaagggcaaggaggugcugguccucugggggauccaccaccccagcacgagcgcggaccagcagucccuguaccagaacgccgacgccuacguguucgugggcaccagccgguacuccaagaaguucaagcccgagaucgccauccgcccgaagguccgggaccaggagggccgcaugaacuacuacuggacccugguggagcccggggacaagaucaccuucgaggccacgggcaaccucguggucccccgguacgcguucgccauggagcgcaacgccgggagcggcaucaucaucuccgacacccccgugcacgacugcaacacgaccugccagaccccgaagggcgccaucaacaccagccugcccuuccagaacauccaccccaucaccaucgggaagugccccaaguacgugaaguccaccaagcugcggcucgccacgggccugcgcaacgucccgagcauccagucccgggggcuguucggcgcgaucgccggguucaucgagggcggcuggaccgggaugguggacggcugguacggguaccaccaccagaacgagcagggcagcggguacgccgccgaccucaaguccacccagaacgccaucgacaagaucaccaacaaggugaacagcgucaucgagaagaugaacacgcaguucaccgcggugggcaaggaguucaaccaccuggagaagcgcaucgagaaccugaacaagaaggucgacgacggcuuccucgacaucuggaccuacaacgccgagcugcuggugcuccuggagaacgagcggacccuggacuaccacgacuccaacgugaagaaccucuacgagaagguccgcagccagcugaagaacaacgccaaggagaucgggaacggcugcuucgaguucuaccacaagugcgacaacacgugcauggaguccgugaagaacgggaccuacgacuaccccaaguacagcgaggaggccaagcugaaccgggaggagaucgacggcgugaagcucgaguccacccgcaucuaccagauccuggccaucuacagcaccgucgcguccagccuggugcucguggucagccugggggccaucuccuucuggaugugcagcaacggcucccugcagugccggaucugcaucuga

SEQ ID NO: 69668 - RNA, 1701 nt, Artificial Sequence
  derived and/or modified CDS sequence (opt1) from hemagglutinin__InfluenzaA__ADM23847
augaaggccauccuggugguccuccuguacaccuucgccaccgcgaacgccgacacgcugugcaucggcuaccacgccaacaacagcaccgacaccguggacaccgugcucgagaagaacgucacggugacccacuccgugaaccugcuggaggacaagcacaacgggaagcucugcaagcugcgcggcgucgcgccccugcaccucgggaagugcaacaucgccggcuggauccuggggaacccggagugcgagagccuguccaccgccagcuccuggagcuacaucguggagaccuccaucagcgacaacggcacgugcuaccccggcgacuucaucgacuacgaggagcuccgggagcagcuguccagcguguccagcuucgagcgcuucgagaucuuccccaagaccuccagcuggcccaaccacgacuccaacaagggggucaccaccgccugcccgcacgccggcgccaagggguucuacaagaaccugaucuggcucgugaagaagggcaacagcuaccccaagcuguccaagagcuacaucaacgacaaggggaaggaggugcugguccucuggggcauccaccaccaguccacgagcgcggaccagcagagccuguaccagaacgccgacgccuacguguucgugggcaccucccgguacagcaagaaguucaagcccgagaucgccauccgccccaagguccgggaccaggaggggcgcaugaacuacuacuggacccugguggagccgggcgacaagaucaccuucgaggccacggggaaccucguggucccccgguacgcguucgccauggagcgcaacgugggcuccggcaucaucaucagcgacacccccgugcacgacugcaacacgaccugccagacccccaagggggccaucaacaccucccugccguuccagaacauccaccccaucaccaucggcaagugccccaaguacgucaagagcaccaagcugcggcucgccacggggcugcgcaacgugcccuccauccagagccggggccuguucggggccaucgcgggcuucaucgagggcggguggaccggcaugguggacgggugguacggcuaccaccaccagaacgagcagggguccggcuacgccgccgaccucaagagcacccagaacgccaucgacaagaucaccaacaaggucaacuccgugaucgagaagaugaacacgcaguucaccgccgucggcaaggaguucaaccaccuggagaagcgcaucgagaaccugaacaagaagguggacgacggguuccucgacaucuggaccuacaacgcggagcugcuggugcuccuggagaacgagcggacccuggacuaccacgacagcaacgucaagaaccucuacgagaaggugcgcucccagcugaagaacaacgccaaggagaucggcaacgggugcuucgaguucuaccacaagugcgacaacacgugcauggagagcgugaagaacggcaccuacgacuacccgaaguacuccgaggaggccaagcugaaccgggaggagaucgacggggucaagcucgagagcacccgcaucuaccagauccuggccaucuacuccaccguggccagcucccuggugcucgucgugagccugggcgcgaucagcuucuggaugugcuccaacggcagccugcagugccggaucugcaucuga

SEQ ID NO: 69669 - RNA, 1701 nt, Artificial Sequence
  derived and/or modified CDS sequence (opt1) from hemagglutinin__InfluenzaA__ADM23849
augaaggccauccuggugguccuccuguacaccuucgccaccgcgaacgccgacacgcugugcaucggcuaccacgccaacaacagcaccgacaccguggacaccgugcucgagaagaacgucacggugacccacuccgugaaccugcuggaggacaagcacaacgggaagcucugcaagcugcgcggcgucgcgccccugcaccucgggaagugcaacaucgccggcuggauccuggggaacccggagugcgagagccuguccaccgccagcuccuggagcuacaucguggagaccuccagcuccgacaacggcacgugcuaccccggcgacuucaucgacuacgaggagcuccgggagcagcugagcuccgugagcuccuucgagcgcuucgagaucuuccccaagaccagcuccuggcccaaccacgacagcaacaagggggucaccgccgccugcccgcacgccggcgcgaaguccuucuacaagaaccugaucuggcucgugaagaaggggaacagcuaccccaagcuguccaagagcuacaucaacgacaagggcaaggaggugcugguccucugggggauccaccaccagagcaccuccgccgaccagcagagccuguaccagaacgccgacgccuacguguucgugggcacgucccgguacagcaagaaguucaagcccgagaucgccauccgccccaagguccgggaccaggagggccgcaugaacuacuacuggacccugguggagccgggggacaagaucaccuucgaggcgaccggcaaccucguggucccccgguacgccuucgccauggagcgcaacgccggguccggcaucaucaucagcgacacgcccgugcacgacugcaacacgaccugccagacccccaagggcgccaucaacaccucccugccguuccagaacauccaccccaucaccaucgggaagugccccaaguacgucaagagcaccaagcugcggcucgcgaccggccugcgcaacgugcccuccauccagagccgggggcuguucggcgccaucgccggguucaucgagggcggcuggacggggaugguggacggcugguacggguaccaccaccagaacgagcagggcuccggguacgccgccgaccucaagagcacccagaacgcgaucgacaagaucaccaacaaggugaacuccgucaucgagaagaugaacacccaguucacggccgugggcaaggaguucaaccaccuggagaagcgcaucgagaaccugaacaagaaggucgacgacggcuuccucgacaucuggaccuacaacgccgagcugcuggugcuccuggagaacgagcggacccuggacuaccacgacagcaacgugaagaaccucuacgagaagguccgcucccagcugaagaacaacgccaaggagaucgggaacggcugcuucgaguucuaccacaagugcgacaacacgugcauggagagcgugaagaacgggaccuacgacuacccgaaguacuccgaggaggccaagcugaaccgggaggagaucgacggcgugaagcucgagagcacccgcaucuaccagauccuggcgaucuacuccaccgucgccagcagccuggugcucguggucucccugggggccaucagcuucuggaugugcuccaacggcagccugcagugccggaucugcaucuga

SEQ ID NO: 69670 - RNA, 1701 nt, Artificial Sequence
  derived and/or modified CDS sequence (opt1) from hemagglutinin__InfluenzaA__ADM23851
auggaggccauccuggugguccuccuguacaccuucgccaccgcgaacgccgacacgcugugcaucggcuaccacgccaacaacagcaccgacaccguggacaccgugcucgagaagaacgucacggugacccacuccgugaaccugcuggaggacaagcacaacgggaagcucugcaagcugcgcggcgucgcgccccugcaccucgggaagugcaacaucgccggcuggauccuggggaacccggagugcgagagccuguccaccgccagcuccuggagcuacaucguggagaccuccagcuccgacaacggcacgugcuaccccggcgacuucaucgacuacgaggagcuccgggagcagcugagcuccgugagcuccuucgagcgcuucgagaucuuccccaagaccagcuccuggcccaaccacgacagcaacaagggggucaccgccgccugcccgcacgccggcgcgaaguccuucuacaagaaccugaucuggcucgugaagaaggggaacagcuaccccaagcuguccaagagcuacaucaacgacaagggcaaggaggugcugguccucugggggauccaccaccagagcaccuccgccgaccagcagagccuguaccagaacgccgacgccuacguguucgugggcuccagccgguacuccaagaaguucaagcccgagaucgccauccgccccaagguccgggaccaggagggccgcaugaacuacuacuggacgcugguggagccgggggacaagaucaccuucgaggcgaccggcaaccucguggucccccgguacgccuucgccauggagcgcaacgccgggagcggcaucaucaucuccgacacccccgugcacgacugcaacacgaccugccagacccccaagggcgccaucaacaccagccugccguuccacaacauccaccccaucacgaucgggaagugccccaaguacgugaaguccaccaagcugcggcucgcgaccggccugcgcaacguccccagcauccagucccgggggcuguucggcgccaucgccggguucaucgagggcggcuggaccgggaugguggacggcugguacggguaccaccaccagaacgagcagggcagcggguacgccgccgaccucaaguccacgcagaacgcgaucgacgagaucaccaacaaggugaacagcgucaucgagaagaugaacacccaguucaccgccgugggcaaggaguucaaccaccuggagaagcgcaucgagaaccugaacaagaaggucgacgacggcuuccucgacaucuggacguacaacgccgagcugcuggugcuccuggagaacgagcggacccuggacuaccacgacuccaacgugaagaaccucuacgagaagguccgcagccagcugaagaacaacgccaaggagaucgggaacggcugcuucgaguucuaccacaagugcgacaacacgugcauggaguccgugaagaacgggaccuacgacuacccgaaguacagcgaggaggccaagcugaaccgggagaagaucgacggcgugaagcucgaguccacccgcaucuaccagauccuggcgaucuacagcaccgucgccagcucccuggugcucguggucagccugggggccaucuccuucuggaugugcagcaacggcucccugcagugccggaucugcaucuga

SEQ ID NO: 69671 - RNA, 1701 nt, Artificial Sequence
  derived and/or modified CDS sequence (opt1) from hemagglutinin__InfluenzaA__ADM23852
auggaggccauccuggugguccuccuguacaccuucgccaccgcgaacgccgacacgcugugcaucggcuaccacgccaacaacagcaccgacaccguggacaccgugcucgagaagaacgucacggugacccacuccgugaaccugcuggaggacaagcacaacgggaagcucugcaagcugcgcggcgucgcgccccugcaccucgggaagugcaacaucgccggcuggauccuggggaacccggagugcgagagccuguccaccgccagcuccuggagcuacaucguggagaccuccagcuccgacaacggcacgugcuaccccggcgacuucaucgacuacgaggagcuccgggagcagcugagcuccgugagcuccuucgagcgcuucgagaucuuccccaagaccagcuccuggcccaaccacgacagcaacaagggggucaccgccgccugcccgcacgccggcgcgaaguccuucuacaagaaccugaucuggcucgugaagaaggggaacagcuaccccaagcuguccaagagcuacaucaacgacaagggcaaggaggugcugguccucugggggauccaccaccccagcaccuccgccgaccagcagagccuguaccagaacgccgacgccuacguguucgugggcuccagccgguacuccaagaaguucaagcccgagaucgccauccgcccgaagguccgggaccaggagggccgcaugaacuacuacuggacgcugguggagcccggggacaagaucaccuucgaggcgaccggcaaccucguggucccccgguacgccuucgccauggagcgcaacgccgggagcggcaucaucaucuccgacacccccgugcacgacugcaacacgaccugccagaccccgaagggcgccaucaacaccagccugcccuuccacaacauccaccccaucacgaucgggaagugccccaaguacgugaaguccaccaagcugcggcucgcgaccggccugcgcaacgucccgagcauccagucccgggggcuguucggcgccaucgccggguucaucgagggcggcuggaccgggaugguggacggcugguacggguaccaccaccagaacgagcagggcagcggguacgccgccgaccucaaguccacgcagaacgcgaucgacgagaucaccaacaaggugaacagcgucaucgagaagaugaacacccaguucaccgccgugggcaaggaguucaaccaccuggagaagcgcaucgagaaccugaacaagaaggucgacgacggcuuccucgacaucuggacguacaacgccgagcugcuggugcuccuggagaacgagcggacccuggacuaccacgacuccaacgugaagaaccucuacgagaagguccgcagccagcugaagaacaacgccaaggagaucgggaacggcugcuucgaguucuaccacaagugcgacaacacgugcauggaguccgugaagaacgggaccuacgacuaccccaaguacagcgaggaggccaagcugaaccgggagaagaucgacggcgugaagcucgaguccacccgcaucuaccagauccuggcgaucuacagcaccgucgccagcucccuggugcucguggucagccugggggccaucuccuucuggaugugcagcaacggcucccugcagugccggaucugcaucuga

SEQ ID NO: 69672 - RNA, 1701 nt, Artificial Sequence; identical to SEQ ID NO: 69671
  derived and/or modified CDS sequence (opt1) from hemagglutinin__InfluenzaA__ADM23853

SEQ ID NO: 69673 - RNA, 1701 nt, Artificial Sequence; identical to SEQ ID NO: 66935
  derived and/or modified CDS sequence (opt1) from hemagglutinin__InfluenzaA__ADM23855

SEQ ID NO: 69674 - RNA, 1701 nt, Artificial Sequence
  derived and/or modified CDS sequence (opt1) from hemagglutinin__InfluenzaA__ADM23856
augaaggccauccuggugguccuccuguacaccuucgccaccgugaacgcggacacgcugugcaucggcuaccacgccaacaacagcaccgacaccguggacaccguccucgagaagaacgugacggugacccacuccgucaaccugcuggaggacaagcacaacgggaagcucugcaagcugcgcggcguggcgccccugcaccucgggaagugcaacaucgccggcuggauccuggggaacccggagugcgagagccuguccaccgccagcuccuggagcuacaucguggagaccuccagcuccgacaacggcacgugcuaccccggcgacuucaucgacuacgaggagcuccgggagcagcugagcuccgucagcuccuucgagcgcuucgagaucuuccccaagaccagcuccuggcccaaccacgacagcaacaagggggugaccgccgccugcccgcacgccggcgccaaguccuucuacaagaaccugaucuggcucgugaagaaggggaacagcuaccccaagcuguccaagagcuacaucaacgacaagcggaaggagguccuggugcucuggggcauccaccaccagagcaccuccgcggaccagcagagccuguaccagaacgccgacgccuacguguucgucgggacgucccgcuacagcaagaaguucaagcccgagaucgccauccggcccaaggugcgcgaccaggagggccggaugaacuacuacuggacccugguggagccgggcgacaagaucaccuucgaggccaccgggaaccucgucgugccccgcuacgcguucgccauggagcggaacgccggcuccgggaucaucaucagcgacacgcccgugcacgacugcaacacgaccugccagacccccaagggcgccaucaacaccucccugccguuccagaacauccaccccaucaccaucggcaagugccccaaguacgucaagagcaccaagcugcgccucgccaccgggcugcggaacgugcccuccauccagagccgcggccuguucggggcgaucgccggcuucaucgagggcggguggacgggcaugguggacgggugguacggcuaccaccaccagaacgagcagggguccggcuacgccgccgaccucaagagcacccagaacgccaucgacaagaucaccaacaaggucaacuccgugaucgagaagaugaacacccaguucacggcggucgggaaggaguucaaccaccuggagaagcggaucgagaaccugaacaagaagguggacgacggcuuccucgacaucuggaccuacaacgccgagcugcuggugcuccuggagaacgagcgcacccuggacuaccacgacagcaacgucaagaaccucuacgagaaggugcggucccagcugaagaacaacgccaaggagaucggcaacgggugcuucgaguucuaccacaagugcgacaacacgugcauggagagcgugaagaacggcaccuacgacuacccgaaguacuccgaggaggccaagcugaaccgcgaggagaucgacggggucaagcucgagagcacccggaucuaccagauccuggccaucuacuccaccguggcgagcagccuggugcucgucgugucccugggcgccaucagcuucuggaugugcuccaacgggagccugcagugccgcaucugcaucuga

SEQ ID NO: 69675 - RNA, 1701 nt, Artificial Sequence; identical to SEQ ID NO: 66693
  derived and/or modified CDS sequence (opt1) from hemagglutinin__InfluenzaA__ADM25945

SEQ ID NO: 69676 - RNA, 1701 nt, Artificial Sequence; identical to SEQ ID NO: 66935
  derived and/or modified CDS sequence (opt1) from hemagglutinin__InfluenzaA__ADM25948

SEQ ID NO: 69677 - RNA, 1701 nt, Artificial Sequence; identical to SEQ ID NO: 68722
  derived and/or modified CDS sequence (opt1) from hemagglutinin__InfluenzaA__ADM26264

SEQ ID NO: 69678 - RNA, 1701 nt, Artificial Sequence; identical to SEQ ID NO: 68722
  derived and/or modified CDS sequence (opt1) from hemagglutinin__InfluenzaA__ADM26265

SEQ ID NO: 69679 - RNA, 1701 nt, Artificial Sequence; identical to SEQ ID NO: 68722
  derived and/or modified CDS sequence (opt1) from hemagglutinin__InfluenzaA__ADM26266

SEQ ID NO: 69680 - RNA, 1701 nt, Artificial Sequence; identical to SEQ ID NO: 68722
  derived and/or modified CDS sequence (opt1) from hemagglutinin__InfluenzaA__ADM26267

SEQ ID NO: 69681 - RNA, 1701 nt, Artificial Sequence
  derived and/or modified CDS sequence (opt1) from hemagglutinin__InfluenzaA__ADM26268
augaaggccauccuggugguccuccuguacaccuucaccacggccaacgcggacacccugugcaucggcuaccacgccaacaacagcaccgacaccguggacacggugcucgagaagaacgucaccgugacccacuccgugaaccugcuggaggacaagcacaacgggaagcucugcaagcugcgcggcgucgcgccccugcaccucgggaagugcaacaucgccggcuggauccuggggaacccggagugcgagagccuguccaccgccagcuccuggagcuacaucguggagacguccagcuccgacaacgggaccugcuaccccggcgacuucaucgacuacgaggagcuccgggagcagcugagcuccgugagcuccuucgagcgcuucgagaucuuccccaagaccagcuccuggcccaaccacgacagcaacaagggcgucaccgccgccugcccgcacgccggcgccaaguccuucuacaagaaccugaucuggcucgugaagaaggggaacagcuaccccaagcuguccaagagcuacaucaacgacaagggcaaggaggugcugguccucugggggauccaccaccccagcacguccgcggaccagcagagccuguaccagaacgccgacgccuacguguucgugggcaccucccgguacagcaagaaguucaagcccgagaucgccauccgcccgaagguccgggagcaggagggccgcaugaacuacuacuggacccugguggagcccggggacaagaucaccuucgaggccacgggcaaccucguggucccccgguacgcguucgccauggagcgcaacgccggguccggcaucaucaucagcgacacccccgugcacgacugcaacacgaccugccagaccccgaagggcgccaucaacaccucccugcccuuccagaacauccacagcaucaccaucgggaagugccccaaguacgugaaguccaccaagcugcggcucgccacgggccugcgcaacguccccagcauccagucccgggggcuguucggcgcgaucgccggguucaucgagggcggcuggaccgggaugguggacggcugguacggguaccaccaccagaacgagcagggcagcggguacgccgccgaccucaaguccacccagaacgccaucgacgagaucaccaacaaggugaacagcgucaucgagaagaugaacacgcaguucaccgcggugggcaaggaguucaaccaccuggagaagcgcaucgagaaccugaacaagaaggucgacgacggcuuccucgacaucuggaccuacaacgccgagcugcuggugcuccuggagaacgagcggacccuggacuaccacgacuccaacgugaagaaccucuacgagaagguccgcagccagcugaagaacaacgccaaggagaucgggaacggcugcuucgaguucuaccacaagugcgacaacacgugcauggaguccgugaagaacgggaccuacgacuacccgaaguacagcgaggaggccaagcugaagcgggaggagaucgacggcgugaagcucgaguccacccgcaucuaccagauccuggccaucuacagcaccgucgcgagcucccuggugcucguggucagccugggggccaucuccuucuggaugugcagcaacggcucccugcagugccggaucugcaucuga

SEQ ID NO: 69682 - RNA, 1701 nt, Artificial Sequence
  derived and/or modified CDS sequence (opt1) from hemagglutinin__InfluenzaA__ADM26269
augaagaccauccuggugguccuccuguacaccuucacgaccgccaacgccgacacccugugcaucggcuaccacgcgaacaacagcaccgacacgguggacaccgugcucgagaagaacgucaccgugacccacuccgugaaccugcuggaggacaagcacaacgggaagcucugcaagcugcgcggcgucgcgccccugcaccucgggaagugcaacaucgccggcuggauccuggggaacccggagugcgagagccuguccacggccagcuccuggagcuacaucguggagaccuccagcuccgacaacgggaccugcuaccccggcgacuucaucgacuacgaggagcuccgggagcagcugagcuccgugagcuccuucgagcgcuucgagaucuuccccaagaccagcuccuggcccaaccacgacagcaacaagggcgucacggccgccugcccgcacgccggcgccaaguccuucuacaagaaccugaucuggcucgugaagaaggggaacagcuaccccaagcuguccaagagcuacaucaacgacaagggcaaggaggugcugguccucugggggauccaccaccccagcaccuccgccgaccagcagagccuguaccagaacgcggacgccuacguguucgugggcaccucccgguacagcaagaaguucaagcccgagaucgccauccgcccgaagguccgggagcaggagggccgcaugaacuacuacuggacccugguggagcccggggacaagaucacguucgaggccaccggcaaccucguggucccccgguacgccuucgcgauggagcgcaacgccggguccggcaucaucaucagcgacacccccgugcacgacugcaacaccacgugccagaccccgaagggcgccaucaacaccucccugcccuuccagaacauccacagcaucaccaucgggaagugccccaaguacgugaaguccacgaagcugcggcucgccaccggccugcgcaacguccccagcauccagucccgggggcuguucggcgccaucgcgggguucaucgagggcggcuggaccgggaugguggacggcugguacggguaccaccaccagaacgagcagggcagcggguacgccgccgaccucaaguccacccagaacgccaucgacgagaucacgaacaaggugaacagcgucaucgagaagaugaacacccaguucaccgccgugggcaaggaguucaaccaccuggagaagcgcaucgagaaccugaacaagaaggucgacgacggcuuccucgacaucuggaccuacaacgcggagcugcuggugcuccuggagaacgagcggacgcuggacuaccacgacuccaacgugaagaaccucuacgagaagguccgcagccagcugaagaacaacgccaaggagaucgggaacggcugcuucgaguucuaccacaagugcgacaacacgugcauggaguccgugaagaacgggaccuacgacuacccgaaguacagcgaggaggccaagcugaagcgggaggagaucgacggcgugaagcucgaguccacccgcaucuaccagauccuggccaucuacagcaccgucgccagcucccuggugcucguggucagccugggggcgaucuccuucuggaugugcagcaacggcucccugcagugccggaucugcaucuga

SEQ ID NO: 69683 - RNA, 1701 nt, Artificial Sequence
  derived and/or modified CDS sequence (opt1) from hemagglutinin__InfluenzaA__ADM26270
augaaggccauccuggugguccuccuguacaccuucaccacggccaacgcggacacccugugcaucggcuaccacgccaacaacagcaccgacaccguggacacggugcucgagaagaacgucaccgugacccacuccgugaaccugcuggaggacaagcacaacgggaagcucugcaagcugcgcggcgucgcgccccugcaccucgggaagugcaacaucgccggcuggauccuggggaacccggagugcgagagccuguccaccgccagcuccuggagcuacaucguggagacguccagcuccgacaacgggaccugcuaccccggcgacuucaucgacuacgaggagcuccgggagcagcugagcuccgugagcuccuucgagcgcuucgagaucuuccccaagaccagcuccuggcccaaccacgacagcaacaagggcgucaccgccgccugcccgcacgccggcgccaaguccuucuacaagaaccugaucuggcucgugaagaaggggaacagcuaccccaagcuguccaagagcuacaucaacgacaagggcaaggaggugcugguccucugggggauccaccaccccagcacguccgcggaccagcagagccuguaccagaacgccgacgccuacguguucgugggcaccucccgguacagcaagaaguucaagcccgagaucgccauccgcccgaagguccgggagcaggagggccgcaugaacuacuacuggacccugguggagcccggggacaagaucaccuucgaggccacgggcaaccucguggucccccgguacgcguucgccauggagcgcaacgccggguccggcaucaucaucagcgacacccccgugcacgacugcaacacgaccugccagaccccgaagggcgccaucaacaccucccugcccuuccagaacauccacagcaucaccaucgggcggugccccaaguacgugaaguccaccaagcugcgccucgccacgggccugcggaacguccccagcauccagucccgcgggcuguucggcgcgaucgccggguucaucgagggcggcuggaccgggaugguggacggcugguacggguaccaccaccagaacgagcagggcagcggguacgccgccgaccucaaguccacccagaacgccaucgacgagaucaccaacaaggugaacagcgucaucgagaagaugaacacgcaguucaccgcggugggcaaggaguucaaccaccuggagaagcggaucgagaaccugaacaagaaggucgacgacggcuuccucgacaucuggaccuacaacgccgagcugcuggugcuccuggagaacgagcgcacccuggaccaccacgacuccaacgugaagaaccucuacgagaagguccggagccagcugaagaacaacgccaaggagaucgggaacggcugcuucgaguucuaccacaagugcgacaacacgugcauggaguccgugaagaacgggaccuacgacuacccgaaguacagcgaggaggccaagcugaaccgcgaggagaucgacggcgugaagcucgaguccacccggaucuaccagauccuggccaucuacagcaccgucgcgagcucccuggugcucguggucagccugggggccaucuccuucuggaugugcagcaacggcucccugcagugccgcaucugcaucuga

SEQ ID NO: 69684 - RNA, 1701 nt, Artificial Sequence; identical to SEQ ID NO: 68722
  derived and/or modified CDS sequence (opt1) from hemagglutinin__InfluenzaA__ADM26271

SEQ ID NO: 69685 - RNA, 1701 nt, Artificial Sequence
  derived and/or modified CDS sequence (opt1) from hemagglutinin__InfluenzaA__ADM26272
augaaggccauccuggugguccuccuguacaccuucaccacggccaacgcggacacccugugcaucggcuaccacgccaacaacagcaccgacaccguggacacggugcucgagaagaacgucaccgugacccacuccgugaaccugcuggaggacaagcacaacgggaagcucugcaagcugcgcggcgucgcgccccugcaccucgggaagugcaacaucgccggcuggauccuggggaacccggagugcgagagccuguccaccgccagcuccuggagcuacaucguggagacguccagcuccgacaacgggaccugcuaccccggcgacuucaucgacuacgaggagcuccgggagcagcugagcuccgugagcuccuucgagcgcuucgagaucuuccccaagaccagcuccuggcccaaccacgacagcaacaagggcgucaccgccgccugcccgcacgccggcgccaaguccuucuacaagaaccugaucuggcucgugaagaaggggaacagcuaccccaagcuguccaagagcuacaucaacgacaagggcaaggaggugcugguccucugggggauccaccaccccagcacguccgcggaccagcagagccuguaccagaacgccgacgccuacguguucgugggcaccucccgguacagcaagaaguucaagcccgagaucgccauccgcccgaagguccgggagcaggagggccgcaugaacuacuacuggacccugguggagcccggggacaagaucaccuucgaggccacgggcaaccucguggucccccgguacgcguucgccauggagcgcaacgccggguccggcaucaucaucagcgacacccccgugcacgacugcaacacgaccugccagaccccgaagggcgccaucaacaccucccugcccuuccagaacauccacagcaucaccaucgggcggugccccaaguacgugaaguccaccaagcugcgccucgccacgggccugcggaacguccccagcauccagucccgcgggcuguucggcgcgaucgccggguucaucgagggcggcuggaccgggaugguggacggcugguacggguaccaccaccagaacgagcagggcagcggguacgccgccgaccucaaguccacccagaacgccaucgacgagaucaccaacaaggugaacagcgucaucgagaagaugaacacgcaguucaccgcggugggcaaggaguucaaccaccuggagaagcggaucgagaaccugaacaagaaggucgacgacggcuuccucgacaucuggaccuacaacgccgagcugcuggugcuccuggagaacgagcgcacccuggacuaccacgacuccaacgugaagaaccucuacgagaagguccggagccagcugaagaacaacgccaaggagaucgggaacggcugcuucgaguucuaccacaagugcgacaacacgugcauggaguccgugaagaacgggaccuacgacuacccgaaguacagcgaggaggccaagcugaaccgcgaggagaucgacggcgugaagcucgaguccacccggaucuaccagauccuggccaucuacagcaccgucgcgagcucccuggugcucguggucagccugggggccaucuccuucuggaugugcagcaacggcucccugcagugccgcaucugcaucuga

SEQ ID NO: 69686 - RNA, 1701 nt, Artificial Sequence
  derived and/or modified CDS sequence (opt1) from hemagglutinin__InfluenzaA__ADM26274
augaaggccauccuggugguccuccuguacaccuucaccacggccaacgcggacacccugugcaucggcuaccacgccaacaacagcaccgacaccguggacacggugcucgagaagaacgucaccgugacccacuccgugaaccugcuggaggacaagcacaacgggaagcucugcaagcugcgcggcgucgcgccccugcaccucgggaagugcaacaucgccggcuggauccuggggaacccggagugcgagagccuguccaccgccagcuccuggagcuacaucguggagacguccagcuccgacaacgggaccugcuaccccggcgacuucaucgacuacgaggagcuccgggagcagcugagcuccgugagcuccuucgagcgcuucgagaucuuccccaagaccagcuccuggcccaaccacgacagcaacaagggcgucaccgccgccugcccgcacgccggcgccaaguccuucuacaagaaccugaucuggcucgugaagaaggggaacagcuaccccaagcuguccaagagcuacaucaacgacaagggcaaggaggugcugguccucugggggauccaccaccccagcacguccgcggaccagcagagccuguaccagaacgccgacgccuacguguucgugggcaccucccgguacagcaagaaguucaagcccgagaucgccauccgcccgaagguccgggagcaggagggccgcaugaacuacuacuggacccugguggagcccggggacaagaucaccuucgaggccacgggcaaccucguggucccccgguacgcguucgccauggagcgcaacgccggguccggcaucaucaucagcgacacccccgugcacgacugcaacacgaccugccagaccccgaagggcgccaucaacaccucccugcccuuccagaacauccacagcaucaccaucgggaagugccccaaguacgugaaguccaccaagcugcggcucgccacgggccugcgcaacguccccagcauccagucccgggggcuguucggcgcgaucgccggguucaucgagggcggcuggaccgggaugguggacggcugguacggguaccaccaccagaacgagcagggcagcggguacgccgccgaccucaaguccacccagaacgccaucgacgagaucaccaacaaggugaacagcgucaucgagaagaugaacacgcaguucaccgcggugggcaaggaguucaaccaccuggagaagcgcaucgagaaccugaacaagaaggucgacgacggcuuccucgacaucuggaccuacaacgccgagcugcuggugcuccuggagaacgagcggacccuggacuaccacgacuccaacgugaaggaccucuacgagaagguccgcagccagcugaagaacaacgccaaggagaucgggaacggcugcuucgaguucuaccacaagugcgacaacacgugcauggaguccgugaagaacgggaccuacgacuacccgaaguacagcgaggaggccaagcugaaccgggaggagaucgacggcgugaagcucgaguccacccgcaucuaccagauccuggccaucuacagcaccgucgcgagcucccuggugcucguggucagccugggggccaucuccuucuggaugugcagcaacggcucccugcagugccggaucugcaucuga

SEQ ID NO: 69687 - RNA, 1701 nt, Artificial Sequence; identical to SEQ ID NO: 68722
  derived and/or modified CDS sequence (opt1) from hemagglutinin__InfluenzaA__ADM26276

SEQ ID NO: 69688 - RNA, 1701 nt, Artificial Sequence
  derived and/or modified CDS sequence (opt1) from hemagglutinin__InfluenzaA__ADM26277
augaaggccauccuggugguccuccuguacaccuucaccacggccaacgcggacacccugugcaucggcuaccacgccaacaacagcaccgacaccguggacacggugcucgagaagaacgucaccgugacccacuccgugaaccugcuggaggacaagcacaacgggaagcucugcaagcugcgcggcgucgcgccccugcaccucgggaagugcaacaucgccggcuggauccuggggaacccggagugcgagagccuguccaccgccagcuccuggagcuacaucguggagacguccagcuccgacaacgggaccugcuaccccggcgacuucaucgacuacgaggagcuccgggagcagcugagcuccgugagcuccuucgagcgcuucgagaucuuccccaagaccagcuccuggcccaaccacgacagcaacaagggcgucaccgccgccugcccgcacgccggcgccaaguccuucuacaagaaccugaucuggcucgugaagaaggggaacagcuaccccaagcuguccaagagcuacaucaacgacaagggcaaggaggugcugguccucugggggauccaccaccccagcacguccgcggaccagcagagccuguaccagaacgccgacgccuacguguucgugggcaccucccgguacagcaagaaguucaagcccgagaucgccauccgcccgaagguccgggagcaggagggccgcaugaacuacuacuggacccugguggagcccggggacaagaucaccuucgaggccacgggcaaccucguggucccccgguacgcguucgccauggagcgcaacgccggguccggcaucaucaucagcgacacccccgugcacgacugcaacacgaccugccagaccccgaagggcgccaucaacaccucccugcccuuccagaacauccacagcaucaccaucgggaagugccccaaguacgugaaguccaccaagcugcggcucgccacgggccugcgcaacguccccagcauccagucccgggggcuguucggcgcgaucgccggguucaucgagggcggcuggaccgggaugguggacggcugguacggguaccaccaccagaacgagcagggcagcggguacgccgccgaccucaaguccacccagaacgccaucgacgagaucaccaacaaggugaacagcgucaucgagaagaugaacacgcaguucaccgcggugggcaaggaguucaaccaccuggagaagcgcaucgagaaccugaacaagaaggucgacgacggcuuccucgacaucuggaccuacaacgccgagcugcuggugcuccuggagaacgagcggacccuggacuaccacgacuccaacgugaagaaccucuacgagaagguccgcagccagcugaagaacaacgccaaggagaucgggaacggcugcuucgaguucuaccacaagugcgacaacacgugcauggaguccgugaagaacgggaccuacgacuacccgaaguacagcgaggaggccaagcugaaccgggaggagaucgacggcgugaagcucgaguccacccgcaucuaccagauccuggccaucuacagcaccgucgcgagcucccuggugcucaucgugagccugggggccaucuccuucuggaugugcagcaacggcucccugcagugccggaucugcaucuga

SEQ ID NO: 69689 - RNA, 1701 nt, Artificial Sequence
  derived and/or modified CDS sequence (opt1) from hemagglutinin__InfluenzaA__ADM26278
augaaggccauccuggugguccuccuguacaccuucaccacggccaacgcggacacccugugcaucggcuaccacgccaacaacagcaccgacaccguggacacggugcucgagaagaacgucaccgugacccacuccgugaaccugcuggaggacaagcacaacgggaagcucugcaagcugcgcggcgucgcgccccugcaccucgggaagugcaacaucgccggcuggauccuggggaacccggagugcgagagccuguccaccgccagcuccuggagcuacaucguggagacguccagcuccgacaacgggaccugcuaccccggcgacuucaucgacuacgaggagcuccgggagcagcugagcuccgugagcuccuucgagcgcuucgagaucuuccccaagaccagcuccuggcccaaccacgacagcaacaagggcgucaccgccgccugcccgcacgccggcgccaaguccuucuacaagaaccugaucuggcucgugaagaaggggaacagcuaccccaagcuguccaagagcuacaucaacgacaagggcaaggaggugcugguccucugggggauccaccaccccagcacguccgcggaccagcagagccuguaccagaacgccgacgccuacguguccgugggcaccagccgguacuccaagaaguucaagcccgagaucgccauccgcccgaagguccgggagcaggagggccgcaugaacuacuacuggacccugguggagcccggggacaagaucaccuucgaggccacgggcaaccucguggucccccgguucgcguucgccauggagcgcaacgccgggagcggcaucaucaucuccgacacccccgugcacgacugcaacacgaccugccagaccccgaagggcgccaucaacaccagccugcccuuccagaacauccacuccaucaccaucgggaagugccccaaguacgucaagagcaccaagcugcggcucgccacgggccugcgcaacgugcccuccauccagagccgggggcuguucggcgcgaucgccggguucaucgagggcggcuggaccgggaugguggacggcugguacggguaccaccaccagaacgagcagggcuccggguacgccgccgaccucaagagcacccagaacgccaucgacgagaucaccaacaaggugaacuccgucaucgagaagaugaacacgcaguucaccgcggugggcaaggaguucaaccaccuggagaagcgcaucgagaaccugaacaagaaggucgacgacggcuuccucgacaucuggaccuacaacgccgagcugcuggugcuccuggagaacgagcggacccuggacuaccacgacagcaacgugaagaaccucuacgagaagguccgcucccagcugaagaacaacgccaaggagaucgggaacggcugcuucgaguucuaccacaagugcgacaacacgugcauggagagcgugaagaacgggaccuacgacuacccgaaguacuccgaggaggccaagcugaagcgggaggagaucgacggcgugaagcucgagagcacccgcaucuaccagauccuggccaucuacagcaccgucgcguccagccuggugcucguggucucccugggggccaucagcuucuggaugugcuccaacggcagccugcagugccggaucugcaucuga

SEQ ID NO: 69690 - RNA, 1701 nt, Artificial Sequence
  derived and/or modified CDS sequence (opt1) from hemagglutinin__InfluenzaA__ADM26279
augaaggccauccuggugguccuccuguacaccuucaccacggccaacgcggacacccugugcaucggcuaccacgccaacaacagcaccgacaccguggacacggugcucgagaagaacgucaccgugacccacuccgugaaccugcuggaggacaagcacaacgggaagcucugcaagcugcgcggcgucgcgccccugcaccucgggaagugcaacaucgccggcuggauccuggggaacccggagugcgagagccuguccaccgccagcuccuggagcuacaucguggagacguccagcuccgacaacgggaccugcuaccccggcgacuucaucgacuacgaggagcuccgggagcagcugagcuccgugagcuccuucgagcgcuucgagaucuuccccaagaccagcuccuggcccaaccacgacagcaacaagggcgucaccgccgccugcccgcacgccggcgccaaguccuucuacaagaaccugaucuggcucgugaagaaggggaacagcuaccccaagcuguccaagagcuacaucaacgacaagggcaaggaggugcugguccucugggggauccaccaccccagcacguccgcggaccagcagagccuguaccagaacgccgacgccuacguguucgugggcaccucccgguacagcaagaaguucaagcccgagaucgccauccgcccgaagguccggggccaggaggggcgcaugaacuacuacuggacccugguggagcccggcgacaagaucaccuucgaggccacggggaaccucguggucccccgguacgcguucgccauggagcgcaacgccggcuccggcaucaucaucagcgacacccccgugcacgacugcaacacgaccugccagaccccgaagggggccaucaacaccucccugcccuuccagaacauccacagcaucaccaucggcaagugccccaaguacgugaaguccaccaagcugcggcucgccacggggcugcgcaacguccccagcauccagucccggggccuguucggggcgaucgccggcuucaucgagggcggguggaccggcaugguggacgggugguacggcuaccaccaccagaacgagcaggggagcggcuacgccgccgaccucaaguccacccagaacgccaucgacgagaucaccaacaaggugaacagcgucaucgagaagaugaacacgcaguucaccgcggugggcaaggaguucaaccaccuggagaagcgcaucgagaaccugaacaagaaggucgacgacggguuccucgacaucuggaccuacaacgccgagcugcuggugcuccuggagaacgagcggacccuggacuaccacgacuccaacgugaagaaccucuacgagaagguccgcagccagcugaagaacaacgccaaggagaucggcaacgggugcuucgaguucuaccacaagugcgacaacacgugcauggaguccgugaagaacggcaccuacgacuacccgaaguacagcgaggaggccaagcugaaccgggaggagaucgacggggugaagcucgaguccacccgcaucuaccagauccuggccaucuacagcaccgucgcgagcucccuggugcucguggucagccugggcgccaucuccuucuggaugugcagcaacggcucccugcagugccggaucugcaucuga

SEQ ID NO: 69691 - RNA, 1701 nt, Artificial Sequence; identical to SEQ ID NO: 68722
  derived and/or modified CDS sequence (opt1) from hemagglutinin__InfluenzaA__ADM26280

SEQ ID NO: 69692 - RNA, 1701 nt, Artificial Sequence
  derived and/or modified CDS sequence (opt1) from hemagglutinin__InfluenzaA__ADM26281
augaaggccauccuggugguccuccuguacaccuucgccaccgcgaacgccgacacgcugugcaucggcuaccacgccaacaacagcaccgacaccguggacaccgugcucgagaagaacgucacggugacccacuccgugaaccugcuggaggacaagcacaacgggaagcucugcaagcugcgcggcgucgcgccccugcaccucgggaagugcaacaucgccggcuggauccuggggaacccggagugcgagagccuguccaccgccagcuccuggagcuacaucguggagaccuccagcuccgacaacggcacgugcuaccccggcgacuucaucgacuacgaggagcuccgggagcagcugagcuccgugagcuccuucgagcgcuucgagaucuuccccaagaccagcuccuggcccaaccacgacagcaacaagggggucaccgccgccugcccgcacgccggcgcgaaguccuucuacaagaaccugaucuggcucgugaagaaggggaacagcuaccccaagcuguccaagagcuacaucaacgacaagggcaaggaggugcugguccucugggggauccaccaccccagcaccuccgccgaccagcagagccuguaccagaacgccgacgccuacguguucgugggcacgucccgguacagcaagaaguucaagcccgagaucgccauccgcccgaagguccgggaccaggagggccgcaugaacuacuacuggacccugguggagcccggggacaagaucaccuucgaggcgaccggcaaccucguggucccccgguacgccuucgccauggagcgcaacgccggguccggcaucaucaucagcgacacgcccgugcacgacugcaacacgaccugccagaccccgaagggcgccaucaacaccucccugcccuuccagagcauccaccccaucaccaucgggaagugccccaaguacgugaaguccaccaagcugcggcucgcgaccggccugcgcaacgucccgagcauccagucccgggggcuguucggcgccaucgccggguucaucgagggcggcuggacggggaugguggacggcugguacggguaccaccaccagaacgagcagggcagcggguacgccgccgaccucaaguccacccagaacgcgaucgacaagaucaccaacaaggugaacagcgucaucgagaagaugaacacccaguucacggccgugggcaaggaguucaaccaccuggagcgccggaucgagaaccugaacaagaaggucgacgacggcuuccucgacaucuggaccuacaacgccgagcugcuggugcuccuggagaacgagcgcacccuggacuaccacgacuccaacgugaagaaccucuacgagaagguccggagccagcugaagaacaacgccaaggagaucgggaacggcugcuucgaguucuaccacaagugcgacaacacgugcauggaguccgugaagaacgggaccuacgacuaccccaaguacagcgaggaggccaagcugaaccgcgaggagaucgacggcgugaagcucgaguccacccgggucuaccagauccuggcgaucuacagcaccguggccagcucccuggugcucgucgugagccugggggccaucuccuucuggaugugcagcaacggcucccugcagugccgcaucugcaucuga

SEQ ID NO: 69693 - RNA, 1701 nt, Artificial Sequence
  derived and/or modified CDS sequence (opt1) from hemagglutinin__InfluenzaA__ADM26282
augaaggccauccuggugguccuccuguacaccuucaccacggccaacgcggacacccugugcaucggcuaccacgccaacaacagcaccgacaccguggacacggugcucgagaagaacgucaccgugacccacuccgugaaccugcuggaggacaagcacaacgggaagcucugcaagcugcgcggcgucgcgccccugcaccucgggaagugcaacaucgccggcuggauccuggggaacccggagugcgagagccuguccaccgccagcuccuggagcuacaucguggagacguccagcuccgacaacgggaccugcuaccccggcgacuucaucgacuacgaggagcuccgggagcagcugagcuccgugagcuccuucgagcgcuucgagaucuuccccaagaccagcuccuggcccaaccacgacagcaacaagggcgucaccgccgccugcccgcacgccggcgccaaguccuucuacaagaaccugaucuggcucgugaagaaggggaacagcuaccccaagcuguccaagagcuacaucaacgacaagggcaaggaggugcugguccucugggggauccaccaccccagcacguccgcggaccagcagagccuguaccagaacgccgacgccuacguguucgugggcaccucccgguacagcaagaaguucaagcccgagaucgccauccgcccgaagguccgggagcaggagggccgcaugaacuacuacuggacccugguggagcccggggacaagaucaccuucgaggccacgggcaaccucguggucccccgguacgcguucgccauggagcgcaacgccggguccggcaucaucaucagcgacacccccgugcacgacugcaacacgaccugccagaccccgaagggcgccaucaacaccucccugcccuuccagaacauccacagcaucaccaucgggaagugccccaaguacgugaaguccaccaagcugcggcucgccacgggccugcgcaacguccccagcauccagucccgggggcuguucggcgcgaucgccggguucaucgagggcggcuggaccgggaugguggacggcugguacggguaccaccaccagaacgagcagggcagcggguacgccgccgaccucaaguccacccagaacgccaucgacgagaucaccaacaaggugaacagcgucaucgagaagaugaacacgcaguucaccgcggugggcaaggaguucaaccaccuggagcgccggaucgagaaccugaacaagaaggucgacgacggcuuccucgacaucuggaccuacaacgccgagcugcuggugcuccuggagaacgagcgcacccuggacuaccacgacuccaacgugaagaaccucuacgagaagguccggagccagcugaagaacaacgccaaggagaucgggaacggcugcuucgaguucuaccacaagugcgacaacacgugcauggaguccgugaagaacgggaccuacgacuacccgaaguacagcgaggaggccaagcugaaccgcgaggagaucgacggcgugaagcucgaguccacccggaucuaccagauccuggccaucuacagcaccgucgcgagcucccuggugcucguggucagccugggggccaucuccuucuggaugugcagcaacggcucccugcagugccgcaucugcaucuga

SEQ ID NO: 69694 - RNA, 1701 nt, Artificial Sequence
  derived and/or modified CDS sequence (opt1) from hemagglutinin__InfluenzaA__ADM26283
augaaggccauccuggugguccuccuguacaccuucaccacggccaacgcggacacccugugcaucggcuaccacgccaacaacagcaccgacaccguggacacggugcucgagaagaacgucaccgugacccacuccgugaaccugcuggaggacaagcacaacgggaagcucugcaagcugcgcggcgucgcgccccugcaccucgggaagugcaacaucgccggcuggauccuggggaacccggagugcgagagccuguccaccgccagcuccuggagcuacaucguggagacguccagcuccgacaacgggaccugcuaccccggcgacuucaucgacuacgaggagcuccgggagcagcugagcuccgugagcuccuucgagcgcuucgagaucuuccccaagaccagcuccuggcccaaccacgacagcaacaagggcgucaccgccgccugcccgcacgccggcgccaaguccuucuacaagaaccugaucuggcucgugaagaaggggaacagcuaccccaagcuguccaagagcuacaucaacgacaagggcaaggaggugcugguccucugggggauccaccaccccagcacguccgcggaccagcagagccuguaccagaacgccgacgccuacguguucgugggcaccucccgguacagcaagaaguucaagcccgagaucgccauccgcccgaagguccgggagcaggagggccgcaugaacuacuacuggacccugguggagcccggggacaagaucaccuucgaggccacgggcaaccucguggucccccgguacgcguucgccauggagcgcaacgccggguccggcaucaucaucagcgacacccccgugcacgacugcaacacgaccugccagaccccgaagggcgccaucaacaccucccugcccuuccagaacauccacagcaucaccaucgggaagugccccaaguacgugaaguccaccaagcugcggcucgccacgggccugcgcaacguccccagcauccagucccgggggcuguucggcgcgaucgccggguucaucgagggcggcuggaccgggaugguggacggcugguacggguaccaccaccagaacgagcagggcagcggguacgccgccgaccucaaguccacccagaacgccaucgacgagaucaccaacaaggugaacagcgucaucgagaagaugaacacgcaguucaccgcggugggcaaggaguucaaccaccuggagaagcgcaucgagaaccugaacaagaaggucgacgacggcuuccucgacaucuggaccuacaacgccgagcugcuggugcuccuggagaacgagcggacccuggacuaccacgacuccaacgugaagaaccucuacgagaagguccgcagccagcugaagaacaacgccaaggagaucgggaacggcugcuucgaguucuaccacaagugcgacaacacgugcauggaguccgugaagaacgggaccuacgacuacccgaaguacagcgaggaggccaagcugaaccgggagaagaucgacggcgugaagcucgaguccacccgcaucuaccagauccuggccaucuacagcaccgucgcgagcucccuggugcucguggucagccugggggccaucuccuucuggaugugcagcaacggcucccugcagugccggaucugcaucuga

SEQ ID NO: 69695 - RNA, 1701 nt, Artificial Sequence; identical to SEQ ID NO: 68722
  derived and/or modified CDS sequence (opt1) from hemagglutinin__InfluenzaA__ADM26284

SEQ ID NO: 69696 - RNA, 1701 nt, Artificial Sequence; identical to SEQ ID NO: 68722
  derived and/or modified CDS sequence (opt1) from hemagglutinin__InfluenzaA__ADM26285

SEQ ID NO: 69697 - RNA, 1701 nt, Artificial Sequence
  derived and/or modified CDS sequence (opt1) from hemagglutinin__InfluenzaA__ADM26784
augaagaccaucaucgcccugagcuacauccucugccugguguucgcccagaagcugcccggcaacgacaacuccaccgcgacgcucugccuggggcaccacgccgucccgaacggcaccaucgugaagaccaucaccaacgaccagaucgaggugacgaacgccaccgagcugguccagagcuccagcaccggggagaucugcgacagcccccaccagauccucgacggcgagaacugcacccugaucgacgcccugcucggggacccccagugcgacggcuuccagaacaagaagugggaccuguucguggagcgcagcaaggccuacuccaacugcuaccccuacgacgugccggacuacgcgagccugcggucccucgucgccagcuccggcacgcuggaguucaacaacgagagcuucaacuggaccggggugacccagaacggcaccuccagcgccugcaugcgccgguccaacaacagcuucuucucccgccugaacuggcucacgcaccugaaguucaaguaccccgcccugaacgugaccaugcccaacaacgagcaguucgacaagcucuacaucuggggcguccaccaccccgggaccgacaacgaccagaucuuccuguacgcgcaggccagcgggcggaucaccguguccacgaagcgcagccagcagaccgugaucccgaacaucggcagccggccccgcguccggaacauccccucccgcaucagcaucuacuggaccaucgugaagcccggcgacauccugcucaucaacuccaccgggaaccugaucgccccgcggggcuacuucaagauccgcagcgggaaguccagcaucaugcgguccgacgcccccaucggcaagugcaacagcgagugcaucacgcccaacggcuccauccccaacgacaagccguuccagaacgugaaccgcaucaccuacggggccugcccccgguacgucaagcagaacacccugaagcucgcgaccggcaugcgcaacgugcccgagaagcagacgcgggggaucuucggcgccaucgccggguucaucgagaacggcugggagggcaugguggacgggugguacggcuuccgccaccagaacagcgaggggcggggccaggccgccgaccugaaguccacccaggcggccaucgaccagaucaacgggaagcugaaccgccucaucggcaagaccaacgagaaguuccaccagaucgagaaggaguucagcgaggucgagggccggauccaggaccuggagaaguacguggaggacaccaagaucgaccugugguccuacaacgccgagcuccugguggcccuggagaaccagcacacgaucgaccucaccgacagcgagaugaacaagcuguucgagaagaccaagaagcagcugcgcgagaacgccgaggacauggggaacggcugcuucaagaucuaccacaagugcgacaacgcgugcaucggguccauccgcaacggcaccuacgaccacgacgucuaccgggacgaggcccucaacaaccgcuuccagaucaaggggguggagcugaaguccggcuacaaggacuggauccuguggaucuccuucgccaucagcugcuuccuccugugcguggcccugcucggcuucaucaugugggccugccagaaggggaacauccggugcaacaucugcaucuga

SEQ ID NO: 69698 - RNA, 1701 nt, Artificial Sequence; identical to SEQ ID NO: 66458
  derived and/or modified CDS sequence (opt1) from hemagglutinin__InfluenzaA__ADM26795

SEQ ID NO: 69699 - RNA, 1701 nt, Artificial Sequence
  derived and/or modified CDS sequence (opt1) from hemagglutinin__InfluenzaA__ADM26817
augaagaccaccaucgcccugagccacauccucugccugguguucgcccagaagcugcccggcaacgacaacuccacggcgacccucugccuggggcaccacgccgucccgaacggcaccaucgugaagaccaucacgaacgaccagaucgaggugaccaacgccaccgagcugguccagagcuccagcgccggggagaucugcgacagcccccaccagauccucgacggcgagaacugcacccugaucgacgcccugcucggggacccccagugcgacggcuuccagaacaagaagugggaccuguucguggagcgccggcgcgcguacagcaacugcuaccccuacgacgugccggacuacgccucccugcggagccucgucgccuccagcggcacgcuggaguucaacaacgaguccuucaacuggaccggggugacccagaacggcaccagcuccgccugcauccgccggagcaacaacuccuucuucagccgccugaacuggcucacgcaccugaacuucaaguaccccgcgcugaacgugaccaugcccaacaacgagcaguucgacaagcucuacaucuggggcguccaccaccccgggaccgacaaggaccagaucuuccuguacgcccaggccuccgggcggaucaccgugagcacgaagcgcucccagcaggccgugaucccgaacaucggcagccggccccgcguccggaacauccccagccgcaucuccaucuacuggaccaucgugaagcccggcgacauccugcucaucaacagcaccgggaaccugaucgccccgcggggcuacuucaagauccgcuccgggaaguccuccaucaugcggagcgacgcgcccaucggcaagugcaacuccgagugcaucacccccaacggcagcauccccaacgacaagccguuccagaacgugaaccgcaucacguacggggccugcccccgguacgucaagcaguccacccugaagcucgccaccggcaugcgcaacgugcccgagaagcagacccgggggaucuucggcgccaucgccggguucaucgagaacggcugggagggcaugguggacgggugguacggcuuccgccaccagaacagcgaggggcggggccaggcggccgaccugaaguccacgcaggccgccaucgaccagaucaacgggaagcugaaccgccucaucggcaagaccaacgagaaguuccaccagaucgagaaggaguucagcgaggucgagggccgcauccaggaccuggagaaguacguggaggacaccaagaucgaccugugguccuacaacgccgagcuccugguggcgcuggagaaccagcacaccaucgaccucacggacagcgagaugaacaagcuguucgagaagaccaagaagcagcugcgggagaacgccgaggacauggggaacggcugcuucaagaucuaccacaagugcgacaacgccugcaucggguccauccgcaacggcaccuacgaccacgacgucuaccgggacgaggcccucaacaaccgcuuccagaucaaggggguggagcucaagagcggcuacaaggacuggauccuguggaucuccuucgccaucagcugcuuccugcugugcguggcgcugcucggcuucaucaugugggccugccagaaggggaacauccggugcaacaucugcaucuga

SEQ ID NO: 69700 - RNA, 1704 nt, Artificial Sequence
  derived and/or modified CDS sequence (opt1) from hemagglutinin__InfluenzaA__ADM31424
auggagaagaucgugcuccuguucaccaccaucagccuggucaaguccgaccacaucugcaucggcuaccacgccaacaacagcacggagcaggucgacaccaucauggagaagaacgugaccgugacccacgcccaggacauccuggagaagacgcacaacgggaagcucugcgaccugaacggcgugaagccccugauccucaaggacugcuccguggcgggguggcugcugggcaacccgcucugcgacgaguucaucaacguccccgaguggagcuacaucguggagaaggccaaccccgccaacgaccugugcuaccccgggaacuucaacgacuacgaggagcugaagcaccuccugucccgcaucaaccacuucgagaagauccagaucaucccgaaggacagcugguccgaccacgaggccagccugggcguguccgccgcgugcagcuaccagggcaacuccagcuucuuccggaacgucguguggcucaucaagaaggacaacgccuaccccaccaucaagaaggacuacaacaacaccaaccaggaggaccugcuggugcucugggggauccaccaccccaacgacgaggccgagcagacccgccuguaccagaaccccacgaccuacaucuccaucggcaccagcacccugaaccagcggcucgucccgaagaucgccacgcgcuccaagaucaacgggcagagcggccggaucgacuucuucuggaccauccugaagcccaacgacgcgauccacuucgaguccaacgggaacuucaucgcccccgaguacgccuacaagaucgugaagaagggcgacagcaccaucaugaaguccgagguggaguacggcaacugcaacacccgcugccagacgcccaucggggccaucaacagcagcaugccguuccacaacauccacccccugaccaucggcgagugccccaaguacgucaaguccaacaagcucgugcuggccaccgggcugcggaacagcccccagcgcgagcggcgccggaagcgcggccucuucggcgcgaucgccggguucaucgagggcggguggcagggcaugguggacgggugguacggcuaccaccacuccaacgagcagggcagcggguacgccgccgacaaggaguccacccagaaggccaucgacggcgucacgaacaaggugaacagcaucaucgacaagaugaacacccaguucgaggcgguggggcgggaguucaacaaccuggagcgccggaucgagaaccugaacaagaagauggaggacggcuuccucgacgucuggaccuacaacgccgagcugcuggugcucauggagaacgagcgcacccuggacuuccacgacuccaacgugaagaaccuguacgacaagguccggcuccagcugaaggacaacgccaaggagcuggggaacggcugcuucgaguucuaccacaagugcaacaacgagugcauggagagcgugcgcaacggcacguacgacuacccgcaguacuccgaggaggcccggcucaagcgcgaggagaucagcggggucaagcuggaguccaucggcaucuaccagauccugagcaucuacuccaccguggccagcucccucgugcuggcgaucaugauggccgggcugagccucuggaugugcuccaacggcagccugcagugccggaucugcaucuga

SEQ ID NO: 69701 - RNA, 1701 nt, Artificial Sequence; identical to SEQ ID NO: 69294
  derived and/or modified CDS sequence (opt1) from hemagglutinin__InfluenzaA__ADM31478

SEQ ID NO: 69702 - RNA, 1701 nt, Artificial Sequence
  derived and/or modified CDS sequence (opt1) from hemagglutinin__InfluenzaA__ADM31488
augaaggccauccuggugguccuccuguacaccuucgccaccgcgaacgccgacacgcugugcaucggcuaccacgccaacaacagcaccgacaccguggacaccgugcucgagaagaacgucacggugacccacuccgugaacauccuggaggacaagcacaacgggaagcugugcaagcuccgcggcgucgcgccccugcaccuggggaagugcaacaucgccggcuggauccucgggaacccggagugcgagagccuguccaccgccagcuccuggagcuacaucguggagaccuccagcuccgacaacggcacgugcuaccccggcgacuucaucgacuacgaggagcugcgggagcagcucagcuccgugagcuccuucgagcgcuucgagaucuuccccaagaccagcuccuggcccaaccacgacagcaacaagggggucaccgccgccugcccgcacgccggcgcgaaguccuucuacaagaaccugaucuggcuggugaagaaggggaacagcuaccccaagcucuccaagagcuacaucaacgacaagggcaaggaggugcugguccugugggggauccaccaccccagcaccuccgccgaccagcagagccucuaccagaacgccgacgccuacguguucgugggcuccagcaaguacuccaagaaguucaagcccgagaucgccauccggccgaagguccgcgaccaggagggccggaugaacuacuacuggacgcugguggagcccggggacaagaucaccuucgaggcgaccggcaaccugguggucccccgcuacgccuucgccauggagcggaacgccgggagcggcaucaucaucuccgacacccccgugcacgacugcaacacgaccugccagaccccgaagggcgccaucaacaccagccuccccuuccagaacauccaccccaucacgaucgggaagugccccaaguacgugaaguccaccaagcugcgccuggcgaccggccuccggaacgucccgagcauccagucccgcgggcuguucggcgccaucgccggguucaucgagggcggcuggaccgggaugguggacggcugguacggguaccaccaccagaacgagcagggcagcggguacgccgccgaccugaaguccacgcagaacgcgaucgacgagaucaccaacaaggugaacagcgucaucgagaagaugaacacccaguucaccgccgugggcaaggaguucaaccaccucgagaagcggaucgagaaccugaacaagaaggucgacgacggcuuccuggacaucuggacguacaacgccgagcuccuggugcugcucgagaacgagcgcacccuggacuaccacgacuccaacgugaagaaccuguacgagaagguccggagccagcucaagaacaacgccaaggagguggggaacggcugcuucgaguucuaccacaagugcgacaacacgugcauggaguccgugaagaacgggaccuacgacuaccccaaguacagcgaggaggccaagcugaaccgcgaggagaucgacggcgucaagcuggaguccacccggaucuaccagauccucgcgaucuacagcaccgccgccagcucccuggugcugguggucagccucggggccaucuccuucuggaugugcagcaacggcucccugcagugccgcaucugcaucuga

SEQ ID NO: 69703 - RNA, 1701 nt, Artificial Sequence
  derived and/or modified CDS sequence (opt1) from hemagglutinin__InfluenzaA__ADM31498
augaaggccauccuggugguccuccuguacaccuucgccaccgcgaacgccgacacgcugugcaucggcuaccacgccaacaacagcaccgacaccguggacaccgugcucgagaagaacgucacggugacccacuccgugaaccugcuggaggacaagcacaacgggaagcucugcaagcugcgcggcgucgcgccccugcaccucgggaagugcaacaucgccggcuggauccuggggaacccggagugcgagagccuguccaccgccagcuccuggagcuacaucguggagaccuccagcuccgacaacggcacgugcuaccccggcgacuucaucgacuacgaggagcuccgggagcagcugagcuccgugagcuccuucgagcgcuucgagaucuuccccaagaccagcuccuggcccaaccacgacagcaacaagggggucaccgccgccugcccgcacgccggcgcgaaguccuucuacaagaaccugaucuggcucgugaagaaggggaacagcuaccccaagcuguccaagagcuacaucaacgacaagggcaaggaggugcugguccucugggggauccaccaccccagcaccuccgccgaccagcagagccuguaccagaacgccgacgccuacguguucgugggcacgucccgguacagcaagaaguucaagcccgagaucgccauccgcccgaagguccgggaccaggagggccgcaugaacuacuacuggacccuggugaagcccggggacaagaucaccuucgaggcgaccggcaaccucguggucccccgguacgccuucgccauggagcgcaacgccggguccggcaucaucaucagcgacacgcccgugcacgacugcaacacgaccugccagaccccgaagggcgccaucaacaccucccugcccuuccagaacauccaccccaucaccaucgggaagugccccaaguacgucaagagcaccaagcugcggcucgcgaccggccugcgcaacgugccguccauccagagccgggggcuguucggcgccaucgccggguucaucgagggcggcuggacggggaugguggacggcugguacggguaccaccaccagaacgagcagggcuccggguacgccgccgaccucaagagcacccagcacgcgaucgacgagaucaccaacaaggugaacuccgucaucgagaagaugaacacccaguucacggccgugggcaaggaguucaaccaccuggagaagcgcaucgagaaccugaacaagaaggucgacgacggcuuccucgacaucuggaccuacaacgccgagcugcuggugcuccuggagaacgagcggacccuggacuaccacgacagcaacgugaagaaccucuacgagaagguccgcucccagcugaagaacaacgccaaggagaucgggaacggcugcuucgaguucuaccacaagugcgacaacacgugcauggagagcgugaagaacgggaccuacgacuaccccaaguacuccgaggaggccaagcugaaccgggaggagaucgacggcgugaagcucgagagcacccgcaucuaccagauccuggcgaucuacuccaccgucgccagcagccuggugcucguggucucccugggggccaucagcuucuggaugugcuccaacggcagccugcagugccggaucugcaucuga

SEQ ID NO: 69704 - RNA, 1701 nt, Artificial Sequence
  derived and/or modified CDS sequence (opt1) from hemagglutinin__InfluenzaA__ADM31508
augaaggccauccuggugguccuccuguacaccuucgccaccgcgaacgccgacacgcugugcaucggcuaccacgccaacaacagcaccgacaccguggacaccgugcucgagaagaacgucacggugacccacuccgugaaccugcuggaggacaagcacaacgggaagcucugcaagcugcgcggcgucgcgccccugcaccucgggaagugcaacaucgccggcuggauccuggggaacccggagugcgagagccuguccaccgcgagcuccuggagcuacaucguggagaccuccagcuccgacaacggcacgugcuaccccggcgacuucaucgacuacgaggagcuccgggagcagcugagcuccgugagcuccuucgagcgcuucgagaucuuccccaagacccggagcuggcccaaccacgacuccaacaagggggucaccgccgccugcccgcacgccggcgccaagagcuucuacaagucccugaucuggcucgugaagaaggggaacagcuaccccaagcuguccaagagcuacaucaacgacaagggcaaggaggugcugguccucugggggauccaccaccccagcaccuccgccgaccagcagagccuguaccagaacgccgacgccuacguguucgugggcacgucccgcuacagcaagaaguucaagcccgagaucgccauccggccgaagguccgcgaccaggagggccggaugaacuacuacuggacccugguggagcccggggacaagaucaccuucgaggcgaccggcaaccucguggucccccgcuacgccuucgccauggagcggaacgccggguccggcaucaucaucagcgacacgcccgugcacgacugcaacacgaccugccagaccccgaagggcgccaucaacaccucccugcccuuccagaacauccaccccaucaccaucgggaagugccccaaguacgucaagagcaccaagcugcgccucgcgaccggccugcggaacgugccguccauccagagccgcgggcuguucggcgccaucgccggguucaucgagggcggcuggacggggaugguggacggcugguacggguaccaccaccagaacgagcagggcuccggguacgccgccgaccucaagagcacccagcacgcgaucgacgagaucaccaacaaggugaacuccgucaucgagaagaugaacacccaguucacggccgugggcaaggaguucaaccaccuggagaagcggaucgagaaccugaacaagaaggucgacgacggcuuccucgacaucuggaccuacaacgccgagcugcuggugcuccuggagaacgagcgcacccuggacuaccacgacagcaacgugaagaaccucuacgagaagguccggucccagcugaagaacaacgccaaggagaucgggaacggcugcuucgaguucuaccacaagugcgacaacacgugcauggagagcgugaagaacgggaccuacgacuaccccaaguacuccgaggaggccaagcugaaccgcgaggagaucgacggcgugaagcucgagagcacccggaucuaccagauccuggcgaucuacuccaccgucgccagcagccuggugcucguggucucccugggggccaucagcuucuggaugugcuccaacggcagccugcagugccgcaucugcaucuga

SEQ ID NO: 69705 - RNA, 1701 nt, Artificial Sequence
  derived and/or modified CDS sequence (opt1) from hemagglutinin__InfluenzaA__ADM31518
augaaggccauccuggugguccuccuguacaccuucgccaccgcgaacgccgacacgcugugcaucggcuaccacgccaacaacagcaccgacaccguggacaccgugcucgagaagaacgucacggugacccacuccgugaaccugcuggaggacaagcacaacgggaagcucugcaagcugcgcggcgucgcgccccugcaccucgggaagugcaacaucgccggcuggauccuggggaacccggagugcgagagccuguccaccgccagcuccuggagcuacaucguggagaccuccagcuccgacaacggcacgugcuaccccggcgacuucaucgacuacgaggagcuccgggagcagcugagcuccgugagcuccuucgagcgcuucgagaucuuccccaagaccagcuccuggcccaaccacgacagcaacaagggggucaccgccgccugcccgcacgccggcgcgaaguccuucuacaagaaccugaucuggcucgugaagaaggggaacagcuaccccaagcuguccaagagcuacgugaacgacaagggcaaggagguccuggugcucugggggauccaccaccccagcaccuccgccgaccagcagagccuguaccagaacgccgacgccuacguguucgucggcacgucccgguacagcaagaaguucaagcccgagaucgccauccgcccgaaggugcgggaccaggagggccgcaugaacuacuacuggacccugguggagcccggggacaagaucaccuucgaggcgaccggcaaccucgucgugccccgguacgccuucgccauggagcgcaacgccggguccggcaucaucaucagcgacacgcccgugcacgacugcaacacgaccugccagaccccgaagggcgccaucaacaccucccugcccuuccagaacauccaccccaucaccaucgggaagugccccaaguacgucaagagcaccaagcugcggcucgcgaccggccugcgcaacaucccguccauccagagccgggggcuguucggcgccaucgccggguucaucgagggcggcuggacggggaugguggacggcugguacggguaccaccaccagaacgagcagggcuccggguacgccgccgaccucaagagcacccagaacgcgaucgacgagaucaccaacaaggugaacuccgucaucgagaagaugaacacccaguucacggccgugggcaaggaguucaaccaccuggagaagcgcaucgagaaccugaacaagaaggucgacgacggcuuccucgacaucuggaccuacaacgccgagcugcuggugcuccuggagaacgagcggacccuggacuaccacgacagcaacgugaagaaccucuacgagaagguccgcucccagcugaagaacaacgccaaggagaucgggaacggcugcuucgaguucuaccacaagugcgacaacacgugcauggagagcgugaagaacgggaccuacgacuaccccaaguacuccgaggaggccaagcugaaccgggaggagaucgacggcgugaagcucgagagcacccgcaucuaccagauccuggcgaucuacuccaccgucgccagcagccuggugcucguggucucccugggggccaucagcuucuggaugugcuccaacggcagccugcagugccggaucugcaucuga

SEQ ID NO: 69706 - RNA, 1701 nt, Artificial Sequence
  derived and/or modified CDS sequence (opt1) from hemagglutinin__InfluenzaA__ADM31528
augaaggccauccuggugguccuccuguacaccuucgccaccgcgaacgccgacacgcugugcaucggcuaccacgccaacaacagcaccgacaccguggacaccgugcucgagaagaacgucacggugacccacuccgugaaccugcuggaggacaagcacaacgggaagcucugcaagcugcgcggcgucgcgccccugcaccucgggaagugcaacaucgccggcuggauccuggggaacccggagugcgagagccuguccaccgccagcuccuggagcuacaucguggagaccuccagcuccgacaacggcacgugcuaccccggcgacuucaucgacuacgaggagcuccgggagcagcugagcuccgugagcuccuucgagcgcuucgagauguuccccaagaccagcuccuggcccaaccacgacagcaacaagggggucaccgccgccugcccgcacgccggcgcgaaguccuucuacaagaaccugaucuggcucgugaagaaggggaacagcuaccccaagcuguccaagagcuacaucaacgacaagggcaaggaggugcugguccucugggggauccaccaccccagcaccuccgccgaccagcagagccuguaccagaacgccgacgccuacguguucgugggcacgucccgguacagcaagaaguucaagcccgagaucgccauccgcccgaagguccgggaccaggagggccgcaugaacuacuacuggacccugguggagcccggggacaagaucaccuucgaggcgaccggcaaccucguggucccccgguacgccuucgccauggagcgcaacgccggguccggcaucaucaucagcgacacgcccgugcacgacugcaacacgaccugccagaccccgaagggcgccaucaacaccucccugcccuuccagaacauccaccccaucaccaucgggaagugccccaaguacgucaagagcaccaagcugcggcucgcgaccggccugcgcaacgugccguccauccagagccgggggcuguucggcgccaucgccggguucaucgagggcggcuggacggggaugguggacggcugguacggguaccaccaccagaacgagcagggcuccggguacgccgccgaccucaagagcacccagaacgcgaucgacaagaucaccaacaaggugaacuccgucaucgagaagaugaacacccaguucacggccgugggcaaggaguucaaccaccuggagaagcgcaucgagaaccugaacaagaaggucgacgacggcuuccucgacaucuggaccuacaacgccgagcugcuggugcuccuggagaacgagcggacccuggacuaccacgacagcaacgugaagaaccucuacgagaagguccgcucccagcugaagaacaacgccaaggagguggggaacggcugcuucgaguucuaccacaagugcgacaacacgugcauggagagcgugaagaacgggaccuacgacuaccccaaguacuccgaggaggccaagcugaaccgggaggagaucgacggcgucaagcucgagagcacccgcaucuaccagauccuggcgaucuacuccaccguggccagcagccuggugcucgucgugucccugggggccaucagcuucuggaugugcuccaacggcagccugcagugccggaucugcaucuga

SEQ ID NO: 69707 - RNA, 1701 nt, Artificial Sequence
  derived and/or modified CDS sequence (opt1) from hemagglutinin__InfluenzaA__ADM31538
augaaggccauccuggugguccuccuguacaccuucgccaccgcgaacgccgacacgcugugcaucggcuaccacgccaacaacagcaccgacaccguggacaccgugcucgagaagaacgucacggugacccacuccgugaaccugcuggaggacaagcacgacgggaagcucugcaagcugcgcggcgucgcgccccugcaccucgggaagugcaacaucgccggcuggauccuggggaacccggagugcgagagccuguccaccgccagcuccuggagcuacaucguggagaccuccagcuccgacaacggcacgugcuaccccggcgacuucaucgacuacgaggagcuccgggagcagcugagcuccgugagcuccuucgagcgcuucgagaucuuccccaagaccagcuccuggcccaaccacgacagcaacaagggggucaccgccgccugcccgcacgccggcgcgaaguccuucuacaagaaccugaucuggcucgugaagaaggggaacagcuaccccaagcuguccaagagcuacaucaacgacaagggcaaggaggugcugguccucugggggauccaccaccccagcaccuccgccgaccagcagagccuguaccagaacgccgacgccuacguguucgugggcacgucccgguacagcaagaaguucaagcccgagaucgccauccgcccgaagguccgggaccaggagggccgcaugaacuacuacuggacccugguggagcccggggacaagaucaccuucgaggcgaccggcaaccucguggucccccgguacgccuucgccauggagcgcaacgccggguccggcaucaucaucagcgacacgcccgugcacgacugcaacacgaccugccagaccccgaagggcgccaucaacaccucccugcccuuccagaacauccaccccaucaccaucgggaagugccccaaguacgucaagagcaccaagcugcggcucgcgaccggccugcgcaacaucccguccauccagagccgggggcuguucggcgccaucgccggguucaucgagggcggcuggacggggaugguggacggcugguacggguaccaccaccagaacgagcagggcuccggguacgccgccgaccucaagagcacccagaacgcgaucgacaagaucaccaacaaggugaacuccgugaucgagaagaugaacacccaguucacggccgucggcaaggaguucaaccaccuggagaagcgcaucgagaaccugaacaagaagguggacgacggcuuccucgacaucuggaccuacaacgccgagcugcugguccuccuggagaacgagcggacccuggacuaccacgacagcaacgugaagaaccucuacgagaaggugcgcucccagcugaagaacaacgccaaggagaucgggaacggcugcuucgaguucuaccacaagugcgacaacacgugcauggagagcgucaagaacgggaccuacgacuaccccaaguacuccgaggaggccaagcugaaccgggaggagaucgacggcgugaagcucgagagcacccgcaucuaccagauccuggcgaucuacuccaccguggccagcagccugguccucguggugucccugggggccaucagcuucuggaugugcuccaacggcagccugcagugccggaucugcaucuga

SEQ ID NO: 69708 - RNA, 1701 nt, Artificial Sequence
  derived and/or modified CDS sequence (opt1) from hemagglutinin__InfluenzaA__ADM31548
augaaggccauccuggugguccuccuguacaccuucgccaccgcgaacgccgacacgcugugcaucggcuaccacgccaacaacagcaccgacaccguggacaccgugcucgagaagaacgucacggugacccacuccgugaaccugcuggaggacaagcacaacgggaagcucugcaagcugcgcggcgucgcgccccugcaccucgggaagugcaacaucgccggcuggauccuggggaacccggagugcgagagccuguccaccgccagcuccuggagcuacaucguggagaccuccagcuccgacaacggcacgugcuaccccggcgacuucaucgacuacgaggagcuccgggagcagcugagcuccgugagcuccuucgagcgcuucgagaucuuccccaagaccagcuccuggcccaaccacgacagcaacaagggggucaccgccgccugcccgcacgccggcgcgaaguccuucuacaagaaccugaucuggcucgugaagaaggggaacagcuaccccaagcuguccaagagcuacaucaacgacaagggcaaggaggugcugguccucugggggauccaccaccccagcaccuccgccgaccagcagagccuguaccagaacgccgacgccuacguguucgugggcacgucccgguacagcaagaaguucaagcccgaggucgccauccgcccgaaggugcgggaccaggagggccgcaugaacuacuacuggacccugguggagcccggggacaagaucaccuucgaggcgaccggcaaccucgucgugccccgguacgccuucgccauggagcgcaacgccggguccggcaucaucaucagcgacacgcccgugcacgacugcaacacgaccugccagaccccgaagggcgccaucaacaccucccugcccuuccagaacauccaccccaucaccaucgggaagugccccaaguacgucaagagcaccaagcugcggcucgcgaccggccugcgcaacaucccguccauccagagccgggggcuguucggcgccaucgccggguucaucgagggcggcuggacggggaugguggacggcugguacggguaccaccaccagaacgagcagggcuccggguacgccgccgaccucaagagcacccagaacgcgaucgacgagaucaccaacaaggugaacuccgucaucgagaagaugaacacccaguucacggccgugggcaaggaguucaaccaccuggagaagcgcaucgagaaccugaacaagaaggucgacgacggcuuccucgacaucuggaccuacaacgccgagcugcuggugcuccuggagaacgagcggacccuggacuaccacgacagcaacgugaagaaccucuacgagaagguccgcucccagcugaagaacaacgccaaggagaucgggaacggcugcuucgaguucuaccacaagugcgacaacacgugcauggagagcgugaagaacgggaccuacgacuaccccaaguacuccgaggaggccaagcugaaccgggaggagaucgacggcgugaagcucgagagcacccgcaucuaccagauccuggcgaucuacuccaccgucgccagcagccuggugcucguggucucccugggggccaucagcuucuggaugugcuccaacggcagccugcagugccggaucugcaucuga

SEQ ID NO: 69709 - RNA, 1701 nt, Artificial Sequence
  derived and/or modified CDS sequence (opt1) from hemagglutinin__InfluenzaA__ADM31558
augaaggccauccuggugguccuccuguacaccuucgccaccgcgaacgccgacacgcugugcaucggcuaccacgccaacaacagcaccgacaccguggacaccgugcucgagaagaacgucacggugacccacuccgugaaccugcuggaggacaagcacaacgggaagcucugcaagcugcgcggcgucgcgccccugcaccucgggaagugcaacaucgccggcuggauccuggggaacccggagugcgagagccuguccaccgccagcuccuggagcuacaucguggagaccuccagcuccgacaacggcacgugcuaccccggcgacuucaucgacuacgaggagcuccgggagcagcugagcuccgugagcuccuucgagcgcuucgagaucuuccccaagaccagcuccuggcccaaccacgacagcaacaagggggucaccgccgccugcccgcacgccggcgcgaaguccuucuacaagaaccugaucuggcucgugaagaaggggaacagcuaccccaagcuguccaagagcuacaucaacgacaagggcaaggaggugcugguccucugggggauccaccaccccagcaccuccgccgaccagcagagccuguaccagaacgccgacgccuacguguucgugggcacgucccgguacagcaagaaguucaagcccgagaucgccauccgcccgaagguccgggaccaggagggccgcaugaacuacuacuggacccugguggagcccggggacaagaucaccuucgaggcgaccggcaaccucguggucccccgguacgccuucgccauggagcgcaacgccggguccggcaucaucaucagcgacacgcccgugcacgacugcaacacgaccugccagaccccgaagggcgccaucaacaccucccugcccuuccagaacauccaccccaucaccaucgggaagugccccaaguacgucaagagcaccaagcugcggcucgcgaccggccugcgcaacaucccguccauccagagccgggggcuguucggcgccaucgccggguucaucgagggcggcuggacggggaugguggacggcugguacggguaccaccaccagaacgagcagggcuccggguacgccgccgaccucaagagcacccagaacgcgaucgacaagaucaccaacaaggugaacuccgugaucgagaagaugaacacccaguucacggccgucggcaaggaguucaaccaccuggagaagcgcaucgagaaccugaacaagaagguggacgacggcuuccucgacaucuggaccuacaacgccgagcugcugguccuccuggagaacgagcggacccuggacuaccacgacagcaacgugaagaaccucuacgagaaggugcgcucccagcugaagaacaacgccaaggagauccggaacgggugcuucgaguucuaccacaagugcgacaacacgugcauggagagcgucaagaacggcaccuacgacuaccccaaguacuccgaggaggccaagcugaaccgcgaggagaucgacggggugaagcucgagagcacccggaucuaccagauccuggcgaucuacuccaccguggccagcagccugguccucguggugucccugggcgccaucagcuucuggaugugcuccaacgggagccugcagugccgcaucugcaucuga

SEQ ID NO: 69710 - RNA, 1701 nt, Artificial Sequence; identical to SEQ ID NO: 68290
  derived and/or modified CDS sequence (opt1) from hemagglutinin__InfluenzaA__ADM31568

SEQ ID NO: 69711 - RNA, 1701 nt, Artificial Sequence; identical to SEQ ID NO: 66693
  derived and/or modified CDS sequence (opt1) from hemagglutinin__InfluenzaA__ADM31578

SEQ ID NO: 69712 - RNA, 1701 nt, Artificial Sequence
  derived and/or modified CDS sequence (opt1) from hemagglutinin__InfluenzaA__ADM31588
augaaggccauccuggugguccuccuguacaccuucgccaccgcgaacgccgacacgcugugcaucggcuaccacgccaacaacagcaccgacaccguggacaccauccucgagaagaacgugacggucacccacuccgugaaccugcuggaggacaagcacaacgggaagcucugcaagcugcgcggcguggcgccccugcaccucgggaagugcaacaucgccggcuggauccuggggaacccggagugcgagagccuguccaccgccagcuccuggagcuacaucgucgagaccuccagcuccgacaacggcacgugcuaccccggcgacuucaucgacuacgaggagcuccgggagcagcugagcuccgugagcuccuucgagcgcuucgagauguuccccaagaccagcuccuggcccaaccacgacagcaacaagggggugaccgccgccugcccgcacgccggcgcgaaguccuucuacaagaaccugaucuggcucgucaagaaggggaacagcuaccccaagcugaacaaguccuacaucaacgacaagggcaaggaggugcuggugcucugggggauccaccaccccagcaccagcgccgaccagcagucccuguaccagaacgccgacgccuacgucuucgugggcacgagccgguacuccaagaaguucaagaccgagaucgccauccgccccaaggugcgggaccaggagggccgcaugaacuacuacuggacccuggucgagccgggggacaagaucaccuucgaggcgacgggcaaccucguggugccccgguacgccuucgccauggagcgcaacgccgggagcggcaucaucaucuccgacacccccguccacgacugcaacacgaccugccagacccccaagggcgccaucaacaccagccugccguuccagaacauccaccccaucaccaucgggaagugccccaaguacgugaaguccaccaagcugcggcucgcgacgggccugcgcaacgugcccagcauccagucccgggggcuguucggcgccaucgccggguucaucgagggcggcuggaccgggauggucgacggcugguacggguaccaccaccagaacgagcagggcagcggguacgccgccgaccucaaguccacccagaacgcgaucgacgagaucaccaacaaggugaacagcgugaucgagaagaugaacacgcaguucaccgccgucggcaaggaguucaaccaccuggagaagcgcaucgagaaccugaacaagaagguggacgacggcuuccucgacaucuggaccuacaacgccgagcugcugguccuccuggagaacgagcggacccuggacuaccacgacuccaacgugaagaaccucuacgagaaggugcgcagccagcugaagaacaacgccaaggaggucgggaacggcugcuucgaguucuaccacaagugcgacaacacgugcauggaguccgugaagaacgggaccuacgacuacccgaaguacagcgaggaggccaagcugaaccgggaggagaucgacggcgugaagcucgaguccacccgcaucuaccagauccuggcgaucuacagcaccgucgccuccagccuggugcucguggucagccugggggccaucuccuucuggaugugcagcaacggcucccugcagugccggaucugcaucuga

SEQ ID NO: 69713 - RNA, 1701 nt, Artificial Sequence
  derived and/or modified CDS sequence (opt1) from hemagglutinin__InfluenzaA__ADM31598
augaacgccauccuggugguccuccuguacaccuucgccaccgcgaacgccgacacgcugugcaucggcuaccacgccaacaacagcaccgacaccguggacacccuccuggagaagaacgugacggucacccacuccgugaaccugcucgaggacaagcacaacgggaagcugugcaagcugcgcggcguggcgccccuccaccuggggaagugcgacaucgccggcuggauccuggggaacccggagugcgagagccucuccaccgccagcuccuggagcuacaucgucgagaccuccagcuccgacaacggcacgugcuaccccggcgacuucaucgacuacgaggagcugcgggagcagcugagcuccgugagcuccuucgagcgcuucgagaucuuccccaagaccagcuccuggcccgaccacgacagcaacaagggggugaccgccgccugcccgcacgccggcgcgaaguccuucuacaagaaccucaucuggcuggucaagaaggggaacagcuaccccaagcuguccaagagcuacaucaacgacaagggcaaggaggugcucgugcugugggggauccaccaccccagcaccuccgccgaccagcagagccuguaccagaacgccgacgccuacgucuucgugggcacgucccgguacagcaagaaguucaagcccgagaucgccauccgcccgaaggugcgggaccaggagggccgcaugaacuaccacuggacccucgucgagcccggggacaagaucaccuucgaggcgaccggcaaccugguggugccccgguacgccuucgccauggagcgcaacgccggguccggcaucaucaucagcgacgcccccguccacgacugcaacacgaccugccagaccccgaagggcgcgaucaacaccucccugcccuuccagaacauccaccccaucacgaucgggaagugccccaaguacgucaagagcaccaagcuccggcuggccaccggccugcgcaacgugccguccauccagagccgggggcuguucggcgccaucgccggguucaucgagggcggcuggaccgggaugguggacggcugguacggguaccaccaccagaacgagcagggcuccggguacgccgcggaccucaagagcacgcagaacgccaucgacgagaucaccaacaagaucaacuccgugaucgagaagaugaacacccaguucaccgccgugggcaaggaguucaaccaccuggagaagcgcaucgagaaccucaacaagaaggucgacgacggcuuccuggacaucuggacguacaacgccgagcugcucgugcugcuggagaacgagcggacccucgacuaccacgacagcaacgucaagaaccuguacgagaaggugcgcucccagcugaagaacaacgccaaggagaucgggaacggcugcuucgaguucuaccacaagugcgacaacacgugcauggagagcgugaagaacgggaccuacgacuaccccaaguacuccgaggaggcgaagcucaaccgggaggagaucgacggcgucaagcuggagagcacccgcaucuaccagauccuggccaucuacuccaccguggccagcagccucgugcuggucgugucccugggggccaucagcuucuggaugugcuccaacggcagccuccagugccggaucugcaucuga

SEQ ID NO: 69714 - RNA, 1701 nt, Artificial Sequence
  derived and/or modified CDS sequence (opt1) from hemagglutinin__InfluenzaA__ADM31608
augaaggccauccuggugguccuccuguacaccuucgccaccgugaacgcggacacgcugugcaucggcuaccacgccaacaacagcaccgacaccguggacaccguccucgagaagaacgugacggugacccacuccgucaaccugcuggaggacaagcacaacgggaagcucugcaagcugcgcggcguggcgccccugcaccucgggaagugcaacaucgccggcuggauccuggggaacccggagugcgagagccuguccaccgccagcuccuggagcuacaucguggagaccuccagcuccgacaacggcacgugcuaccccggcgacuucaucgacuacgaggagcuccgggagcagcugagcuccgucagcuccuucgagcgcuucgagaucuuccccaagaccagcuccuggcccaaccacgacagcaacaagggggugaccgccgccugcccgcacgccggcgccaaguccuucuacaagaaccugaucuggcucgugaagaaggggaacagcuaccccaagcuguccaagagcuacaucaacgacaagggcaaggagguccuggugcucugggggauccaccaccccagcaccuccgcggaccagcagagccuguaccagaacgccgacgccuacguguucgucggcacgucccgguacagcaagaaguucaagcccgagaucgccauccgcccgaaggugcgggaccaggagggccgcaugaacuacuacuggacccugguggagcccggggacaagaucaccuucgaggccaccggcaaccucgucgugccccgguacgcguucgccauggagcgcaacgccggguccggcaucaucaucagcgacacgcccgugcacgacugcaacacgaccugccagaccccgaagggcgccaucaacaccucccugcccuuccagaacauccaccccaucaccaucgggaagugccccaaguacgucaagagcaccaagcugcggcucgccaccggccugcgcaacgugccguccauccagagccgggggcuguucggcgcgaucgccggguucaucgagggcggcuggacggggaugguggacggcugguacggguaccaccaccagaacgagcagggcuccggguacgccgccgaccucaagagcacccagaacgccaucgacaagaucaccaacaaggucaacuccgugaucgagaagaugaacacccaguucacggcggucggcaaggaguucaaccaccuggagaagcgcaucgagaaccugaacaagaagguggacgacggcuuccucgacaucuggaccuacaacgccgagcugcuggugcuccuggagaacgagcggacccuggacuaccacgacagcaacgucaagaaccucuacgagaaggugcgcucccagcugaagaacaacgccaaggagaucgggaacggcugcuucgaguucuaccacaagugcgacaacacgugcauggagagcgugaagaacgggaccuacgacuaccccaaguacuccgaggaggccaagcugaaccgggaggagaucgacggcgucaagcucgagagcacccgcaucuaccagauccuggccaucuacuccaccguggcgagcagccuggugcucgucgugucccugggggccaucagcuucuggaugugcuccaacggcagccugcagugccggaucugcaucuga

SEQ ID NO: 69715 - RNA, 1701 nt, Artificial Sequence; identical to SEQ ID NO: 68245
  derived and/or modified CDS sequence (opt1) from hemagglutinin__InfluenzaA__ADM31618

SEQ ID NO: 69716 - RNA, 1701 nt, Artificial Sequence; identical to SEQ ID NO: 67857
  derived and/or modified CDS sequence (opt1) from hemagglutinin__InfluenzaA__ADM31628

SEQ ID NO: 69717 - RNA, 1701 nt, Artificial Sequence; identical to SEQ ID NO: 69596
  derived and/or modified CDS sequence (opt1) from hemagglutinin__InfluenzaA__ADM31638

SEQ ID NO: 69718 - RNA, 1701 nt, Artificial Sequence; identical to SEQ ID NO: 68113
  derived and/or modified CDS sequence (opt1) from hemagglutinin__InfluenzaA__ADM31648

SEQ ID NO: 69719 - RNA, 1701 nt, Artificial Sequence; identical to SEQ ID NO: 68860
  derived and/or modified CDS sequence (opt1) from hemagglutinin__InfluenzaA__ADM31658

SEQ ID NO: 69720 - RNA, 1701 nt, Artificial Sequence; identical to SEQ ID NO: 68113
  derived and/or modified CDS sequence (opt1) from hemagglutinin__InfluenzaA__ADM31668

SEQ ID NO: 69721 - RNA, 1701 nt, Artificial Sequence; identical to SEQ ID NO: 66693
  derived and/or modified CDS sequence (opt1) from hemagglutinin__InfluenzaA__ADM31688

SEQ ID NO: 69722 - RNA, 1701 nt, Artificial Sequence
  derived and/or modified CDS sequence (opt1) from hemagglutinin__InfluenzaA__ADM31698
augaaggccauccuggugguccuccuguacaccuucgccaccgcgaacgccgacacgcugugcaucggcuaccacgccaacaacagcaccgacaccguggacaccgugcucgagaagaacgucacggugacccacuccgugaaccugcuggaggacaagcacaacgggaagcucugcaagcugcgcggcgucgcgccccugcaccucgggaagugcaacaucgccggcuggauccuggggaacccggagugcgagagccuguccaccgccagcuccuggagcuacaucguggagaccuccagcuccgacaacggcacgugcuaccccggcgacuucaucgacuacgaggagcuccgggagcagcugagcuccgugagcuccuucgagcgcuucgagaucuuccccaagaccagcuccuggcccaaccacgacagcaacaagggggucaccgccgccugcccgcacgccggcgcgaaguccuucuacaagaaccugaucuggcucgugaagaaggggaacagcuaccccaagcuguccaagagcuacaucaacgacaagggcaaggaggugcugguccucugggggauccaccaccccagcaccuccgccgaccagcagagccuguaccagaacgccgacgccuacguguucgugggcacgucccgguacagcaagaaguucaagcccgagaucgccauccgcccgaagguccgggaccaggagggccgcaugaacuacuacuggacccugguggagcccggggacaagaucaccuucgaggcgaccggcaaccucguggucccccgguacgccuucgccauggagcgcaacgccggguccggcaucaucaucagcgacacgcccgugcacgacugcaacacgaccugccagaccccgaagggcgccaucaacaccucccugcccuuccagaacauccaccccaucaccaucgggaagugccccaaguacgucaagagcaccaagcugcggcucgcgaccggccugcgcaacaucccguccauccagagccgggggcuguucggcgccaucgccggguucaucgagggcggcuggacggggaugguggacggcugguacggguaccaccaccagaacgagcagggcuccggguacgccgccgaccucaagagcacccagaacgcgaucgacaagaucaccaacaaggugaacuccgugaucgagaagaugaacacccaguucacggccgucggcaaggaguucaaccaccuggagaagcgcaucgagaaccugaacaagaagguggacgacggcuuccucgacaucuggaccuacaacgccgagcugcugguccuccuggagaacgagcggacccuggacuaccacgacagcaacgugaagaaccucuacgagaaggugcgcucccagcugaagaacaacgccaaggagaucgggaacggcugcuucgaguucuaccacaagugcgacaacacgugcauggagagcgucaagaacgggaccuacgacuaccccaaguacuccgaggaggccaagcugaaccgggaggagaucgacggcgugaagcucgagagcacccgcaucuaccagauccuggcgaucuacuccaccguggccagcagccugauccucgucgugucccugggggccaucagcuucuggaugugcuccaacggcagccugcagugccggaucugcaucuga

SEQ ID NO: 69723 - RNA, 1701 nt, Artificial Sequence; identical to SEQ ID NO: 69598
  derived and/or modified CDS sequence (opt1) from hemagglutinin__InfluenzaA__ADM31708

SEQ ID NO: 69724 - RNA, 1701 nt, Artificial Sequence
  derived and/or modified CDS sequence (opt1) from hemagglutinin__InfluenzaA__ADM31718
augaaggccauccuggugguccuccuguacaccuucgccaccgcgaacgccgacacgcugugcaucggcuaccacgccaacaacagcaccgacaccguggacaccgugcucgagaagaacgucacggugacccacuccgugaaccugcuggaggacaagcacaacgggaagcucugcaagcugcgcggcgucgcgccccugcaccucgggaagugcaacaucgccggcuggauccuggggaacccggagugcgagagccuguccaccgccagcuccuggagcuacaucguggagaccuccagcuccgacaacggcacgugcuaccccggcgacuucaucgacuacgaggagcuccgggagcagcugagcuccgugagcuccuucgagcgcuucgagaucuuccccaagaccagcuccuggcccaaccacgacagcaacaagggggucaccgccgccugcccgcacgccggcgcgaaguccuucuacaagaaccugaucuggcucgugaagaaggggaacagcuaccccaagcuguccaagagcuacaucaacgacaagggcaaggaggugcugguccucugggggauccaccaccccagcaccuccgccgaccagcagagccuguaccagaacgccgacacguacguguucgugggcaccucccgguacagcaagaaguucaagcccgagaucgccauccgcccgaagguccgggaccaggagggccgcaugaacuacuacuggacccugguggagcccggggacaagaucaccuucgaggccacgggcaaccucguggucccccgguacgcguucgccauggagcgcaacgccggguccggcaucaucaucagcgacacccccgugcacgacugcaacacgaccugccagaccccgaagggcgccaucaacaccucccugcccuuccagaacauccaccccaucaccaucgggaagugccccaaguacgucaagagcaccaagcugcggcucgccacgggccugcgcaacgugccguccauccagagccgggggcuguucggcgcgaucgccggguucaucgagggcggcuggaccgggaugguggacggcugguacggguaccaccaccagaacgagcagggcuccggguacgccgccgaccucaagagcacccagaacgccaucgacaagaucaccaacaaggugaacuccgucaucgagaagaugaacacgcaguucaccgcggugggcaaggaguucaaccaccuggagaagcgcaucgagaaccugaacaagaaggucgacgacggcuuccucgacaucuggaccuacaacgccgagcugcuggugcuccuggagaacgagcggacccuggacuaccacgacagcaacgugaagaaccucuacgagaagguccgcucccagcugaagaacaacgccaaggagaucgggaacggcugcuucgaguucuaccacaagugcgacaacacgugcauggagagcgugaagaacgggaccuacgacuaccccaaguacuccgaggaggccaagcugaaccgggaggagaucgacggcgugaagcucgagagcacccgcaucuaccagauccuggccaucuacuccaccgucgcgagcagccuggugcucguggucucccugggggccaucagcuucuggaugugcuccaacggcagccugcagugccggaucugcaucuga

SEQ ID NO: 69725 - RNA, 1701 nt, Artificial Sequence
  derived and/or modified CDS sequence (opt1) from hemagglutinin__InfluenzaA__ADM31728
augaaggccauccugaucgugcuccuguacaccuucgccaccgcgaacgccgacacgcugugcaucggcuaccacgccaacaacagcaccgacaccgucgacaccgugcucgagaagaacgugacggucacccacuccgugaaccugcuggaggacaagcacaacgggaagcucugcaagcugcgcggcguggcgccccugcaccucgggaagugcaacaucgccggcuggauccuggggaacccggagugcgagagccuguccaccgccagcuccuggagcuacaucgucgagaccuccagcuccggcaacggcacgugcuaccccggggacuucaucgacuacgaggagcuccgggagcagcugagcuccgugagcuccuucgagcgcuucgagaucuuccccaagaccagcuccuggcccaaccacgacagcaacaagggcgugaccgccgccugcccgcacgccggggcgaaguccuucuacaagaaccugaucuggcucgucaagaagggcaacagcuaccccaagcuguccaagagcuacaucaacgacaaggggaaggaggugcuggugcucuggggcauccaccaccccagcaccuccgccgaccagcagagccuguaccagaacgccgacgccuacgucuucgugggcacgucccgguacagcaagaaguucaagcccgagaucgccauccgcccgaaggugcgggaccaggaggggcgcaugaacuacuacuggacccuggucgagcccggcgacaagaucaccuucgaggcgaccgggaaccucguggugccccgguacgccuucgccauggagcgcaacgccggcuccggcaucaucacgagcgacacccccguccacgacugcaacacgaccugccagaccccgaagggggccaucaacaccucccugcccuuccagaacauccaccccaucaccaucggcaagugccccaaguacgucaagagcaccaagcugcggcucgcgacggggcugcgcaacgugccguccauccagagccggggccuguucggggccaucgccggcuucaucgagggcggguggaccggcaugguggacgggugguacggcuaccaccaccagaacgagcagggguccggcuacgccgccgaccucaagagcacccagaacgcgaucgacgagaucaccaacaaggugaacuccgugaucgagaagaugaacacgcaguucaccgccgucggcaaggaguucaaccaccuggagaagcgcaucgagaaccugaacaagaagguggacgacggguuccucgacaucuggaccuacaacgccgagcugcugguccuccuggagaacgagcggacccuggacuaccacgacagcaacgugaagaaccucuacgagaaggugcgcucccagcugaagaacaacgccaaggagaucggcaacgggugcuucgaguucuaccacaagugcgacaacacgugcauggagagcgucaagaacggcaccuacgacuaccccaaguacuccgaggaggccaagcugaaccgggaggagaucgacggggugaagcucgagagcacccgcaucuaccagauccuggcgaucuacuccaccguggccagcagccugguccucguggugucccugggcgccaucagcuucuggaugugcuccaacggcagccugcagugccggaucugcaucuga

SEQ ID NO: 69726 - RNA, 1701 nt, Artificial Sequence
  derived and/or modified CDS sequence (opt1) from hemagglutinin__InfluenzaA__ADM31738
augaaggccauccuggugguccuccuguacaccuucgccaccgcgaacgccgacacgcugugcaucggcuaccacgccaacaacagcaccgacaccguggacaccgugcucgagaagaacgucacggugacccacuccgugaacauccuggaggacaagcacaacgggaagcugugcaagcuccgcggcgucgcgccccugcaccuggggaagugcaacaucgccggcuggauccucgggaacccggagugcgagagccuguccaccgccagcuccuggagcuacaucguggagaccuccagcuccgacaacggcacgugcuaccccggcgacuucaucgacuacgaggagcugcgggagcagcucagcuccgugagcuccuucgagcgcuucgagaucuuccccaagaccagcuccuggcccaaccacgacagcaacaagggggucaccgccgccugcccgcacgccggcgcgcgguccuucuacaagaaccugaucuggcuggugaagaaggggaacagcuaccccaagcucuccaagagcuacaucaacgacaagggcaaggaggugcugguccugugggggauccaccaccccagcaccuccgccgaccagcagagccucuaccagaacgccgacgccuacguguucgugggcacgucccgcuacagcaagaaguucaagcccgagaucgccauccggccgaagguccgcgaccaggagggccggaugaacuacuacuggacccugguggagcccggggacaagaucaccuucgaggcgaccggcaaccugguggucccccgcuacgccuucgccauggagcggaacgccggguccggcaucaucaucagcgacacgcccgugcacgacugcaacacgaccugccagaccccgaagggcgccaucaacaccucccuccccuuccagaacauccaccccaucaccaucgggaagugccccaaguacgucaagagcaccaagcugcgccuggcgaccggccuccggaacgugccguccauccagagccgcgggcuguucggcgccaucgccggguucaucgagggcggcuggacggggaugguggacggcugguacggguaccaccaccagaacgagcagggcuccggguacgccgccgaccucaagagcacccagaacgcgaucgacgagaucaccaacaaggugaacuccgucaucgagaagaugaacacccaguucacggccgugggcaaggaguucaaccaccuggagaagcggaucgagaaccugaacaagaaggucgacgacggcuuccuggacaucuggaccuacaacgccgagcuccuggugcugcucgagaacgagcgcacccuggacuaccacgacagcaacgugaagaaccuguacgagaagguccggucccagcucaagaacaacgccaaggagaucgggaacggcugcuucgaguucuaccacaagugcgacaacacgugcauggagagcgugaagaacgggaccuacgacuaccccaaguacuccgaggaggccaagcugaaccgcgaggagaucgacggcgugaagcuggagagcacccggaucuaccagauccucgcgaucuacuccaccgucgccagcagccuggugcugguggucucccucggggccaucagcuucuggaugugcuccaacggcagccugcagugccgcaucugcaucuga

SEQ ID NO: 69727 - RNA, 1701 nt, Artificial Sequence; identical to SEQ ID NO: 68342
  derived and/or modified CDS sequence (opt1) from hemagglutinin__InfluenzaA__ADM31748

SEQ ID NO: 69728 - RNA, 1701 nt, Artificial Sequence
  derived and/or modified CDS sequence (opt1) from hemagglutinin__InfluenzaA__ADM31758
augaaggccauccuggugguccuccuguacaccuucgccaccgcgaacgccgacacgcugugcaucggcuaccacgccaacaacagcaccgacaccguggacaccgugcucgagaagaacgucacggugacccacuccgugaaccugcuggaggacaagcacaacgggaagcucugcaagcugcgcggcaucgcgccccugcaccucgggaagugcaacaucgccggcuggauccuggggaacccggagugcgagagccuguccaccgccagcuccuggagcuacaucgucgagaccuccagcuccgacaacggcacgugcuaccccggcgacuucaucgacuacgaggagcuccgggagcagcugagcuccgugagcuccuucgagcgcuucgagaucuuccccaagaccagcuccuggcccaaccacgacagcaacaagggggugaccgccgccugcccgcacgccggcgcgaaguccuucuacaagaaccugaucuggcucgucaagaaggggaacagcuaccccaagcuguccaagagcuacaucaacgacaagggcaaggaggugcuggugcucugggggauccaccaccccagcaccuccgccgaccagcagagccuguaccagaacgccgacgccuacgucuucgugggcacgucccgguacagcaagaaguucaagcccgagaucgccauccgcccgaaggugcgggaccaggagggccgcaugaacuacuacuggacccugaucgaccccggggacaagaucaccuucgaggcgaccggcaaccucgucgugccccgguacgccuucgccauggagcgcaacgccggguccggcaucaucaucagcgacacgcccgugcacgacugcaacacgaccugccagaccccgaagggcgccaucaacaccucccugcccuuccagaacauccaccccaucaccaucgggaagugccccaaguacgucaagagcaccaagcugcggauggcgaccggccuccgcaacgugccguccauccagagccgggggcuguucggcgccaucgccggguucaucgagggcggcuggacggggaugguggacggcugguacggguaccaccaccagaacgagcagggcuccggguacgccgccgaccucaagagcacccagaacgcgaucgacgagaucaccaacaaggucaacuccgugaucgagaagaugaacacccaguucacggccgugggcaaggaguucaaccaccuggagaagcgcaucgagaaccugaacaagaaggucgacgacggcuuccuggacaucuggaccuacaacgccgagcuccuggugcugcucgagaacgagcggacccuggacuaccacgacagcaacgucaagaaccuguacgagaaggugcgcucccagcucaagaacaacgccaaggagaucgggaacggcugcuucgaguucuaccacaagugcgacaacacgugcauggagagcgugaagaacgggaccuacgacuaccccaaguacuccgaggaggccaagcugaaccgggaggagaucgacggcgucaagcuggagagcacccgcaucuaccagauccucgcgaucuacuccaccguggccagcagccuggugcuggucgugucccucggggccaucagcuucuggaugugcuccaacggcagccugcagugccggaucugcaucuga

SEQ ID NO: 69729 - RNA, 1701 nt, Artificial Sequence; identical to SEQ ID NO: 67053
  derived and/or modified CDS sequence (opt1) from hemagglutinin__InfluenzaA__ADM31768

SEQ ID NO: 69730 - RNA, 1701 nt, Artificial Sequence; identical to SEQ ID NO: 66693
  derived and/or modified CDS sequence (opt1) from hemagglutinin__InfluenzaA__ADM31778

SEQ ID NO: 69731 - RNA, 1701 nt, Artificial Sequence; identical to SEQ ID NO: 68860
  derived and/or modified CDS sequence (opt1) from hemagglutinin__InfluenzaA__ADM31798

SEQ ID NO: 69732 - RNA, 1701 nt, Artificial Sequence
  derived and/or modified CDS sequence (opt1) from hemagglutinin__InfluenzaA__ADM31808
augaaggccauccuggugguccuccuguacaccuucgccaccgcgaacgccgacacgcugugcaucggcuaccacgccaacaacagcaccgacaccguggacaccgugcucgagaagaacgucacggugacccacuccgugaaccugcuggaggacaagcacaacgggaagcucugcaagcugcgcggcgucgcgccccugcaccucgggaagugcaacaucgccggcuggauccuggggaacccggagugcgagagccuguccaccgccagcuccuggagcuacaucguggagaccuccagcuccggcaacggcacgugcuaccccggggacuucaucgacuacgaggagcuccgggagcagcugagcuccgugagcuccuucgagcgcuucgagaucuuccccaagaccagcuccuggcccaaccacgacagcaacaagggcgucaccgccgccugcccgcacgccggggcgaaguccuucuacaagaaccugcucuggcuggugaagaagggcaacagcuaccccaagcuguccaagagcuacaucaacgacaaggggaaggaggugcucguccuguggggcauccaccaccccagcaccuccgccgaccagcagagccuguaccagaacgccgacgccuacguguucgugggcacgucccgguacagcaagaaguucaagcccgagaucgccauccgcccgaagguccgggaccaggaggggcgcaugaacuacuacuggacccucgugggccccggggacaagaucaccuucgaggcgaccggcaaccugguggucccccgguacgccuucgccauggagcgcaacgccggcuccgggaucaucaucagcgacacgcccgugcacgacugcaacacgaccugccagaccccgaagggcgccaucaacaccucccugcccuuccagaacauccaccccaucaccaucgggaagugccccaaguacgucaagagcaccaagcuccggcuggcgaccggccugcgcaacgugccguccauccagagccgggggcuguucggcgccaucgccggcuucaucgagggcggguggacggggaugguggacggcugguacggguaccaccaccagaacgagcagggcuccggcuacgccgccgaccucaagagcacccagaacgcgaucgacgagaucaccaacaaggugaacuccgucaucgagaagaugaacacccaguucacggccguggggaaggaguucaaccaccuggagaagcgcaucgagaaccucaacaagaaggucgacgacggcuuccuggacaucuggaccuacaacgccgagcugcucgugcugcuggagaacgagcggacccucgacuaccacgacagcaacgugaagaaccuguacgagaagguccgcucccagcugaagaacaacgccaaggagaucgggaacggcugcuucgaguucuaccacaagugcgacaacacgugcauggagagcgugaagaacgggaccuacgacuaccccaaguacuccgaggaggccaagcucaaccgggaggagaucgacggcgugaagcuggagagcacccgcaucuaccagauccuggcgaucuacuccaccgucgccagcagccucgugcugguggucucccugggcgccaucagcuucuggaugugcuccaacgggagccuccagugccggaucugcaucuga

SEQ ID NO: 69733 - RNA, 1701 nt, Artificial Sequence; identical to SEQ ID NO: 68860
  derived and/or modified CDS sequence (opt1) from hemagglutinin__InfluenzaA__ADM31818

SEQ ID NO: 69734 - RNA, 1701 nt, Artificial Sequence
  derived and/or modified CDS sequence (opt1) from hemagglutinin__InfluenzaA__ADM31828
augaaggccauccuggugguccuccuguacaccuucgccaccgcgaacgccgacacgcugugcaucggcuaccacgccaacaacagcaccgacaccguggacaccgugcucgagcgcaacgucacggugacccacuccgugaaccugcuggaggacaagcacaacgggaagcucugcaagcugcggggcgucgcgccccugcaccucgggaagugcaacaucgccggcuggauccuggggaacccggagugcgagagccuguccaccgccagcuccuggagcuacaucguggagaccuccagcuccgacaacggcacgugcuaccccggcgacuucaucgacuacgaggagcuccgcgagcagcugagcuccgugagcuccuucgagcgguucgagaucuuccccaagaccagcuccuggcccaaccacgacagcaacaagggggucaccgccgccugcccgcacgccggcgcgaaguccuucuacaagaaccugaucuggcucgugaagaagggcaagagcuaccccaagcuguccaagagcuacaucaacgacaaggggaaggaggugcugguccucugggggauccaccaccccagcaccuccgccgaccagcagagccuguaccagaacgccgacgccuacguguucgugggcacgucccgcuacagcaagaaguucaagcccgagaucgccauccggccgaagguccgcgagcaggagggccggaugaacuacuacuggacccugguggagcccggggacaagaucaccuucgaggcgaccggcaaccucguggucccccgcuacgccuucgccauggagcggaacgccggguccggcaucaucaucagcgacacgcccgugcacgacugcaacacgaccugccagaccccgaagggcgccaucaacaccucccugcccuuccagaacauccaccccaucaccaucgggaagugccccaaguacgucaagagcaccaagcugcgccucgcgaccggccugcggaacgugccguccauccagagccgcgggcuguucggcgccaucgccggguucaucgagggcggcuggacggggaugguggacggcugguacggguaccaccaccagaacgagcagggcuccggguacgccgccgaccucaagagcacccagaacgcgaucgacgagaucaccaacaaggugaacuccgucaucgagaagaugaacacccaguucacggccgugggcaaggaguucaaccaccuggagaagcggaucgagaaccugaacaagaaggucgacgacggcuuccucgacaucuggaccuacaacgccgagcugcuggugcuccuggagaacgagcgcacccuggacuaccacgacagcaacgugaagaaccucuacgagaagguccggucccagcugaagaacaacgccaaggagaucgggaacggcugcuucgaguucuaccacaagugcgacaacacgugcauggagagcgugaagaacgggaccuacgacuaccccaaguacuccgaggaggccaagcugaaccgcgaggagaucgacggcgugaagcucgagagcacccggaucuaccagauccuggcgaucuacuccaccgucgccagcagccuggugcuccuggugucccugggggccaucagcuucuggaugugcuccaacggcagccuccagugccgcaucugcaucuga

SEQ ID NO: 69735 - RNA, 1701 nt, Artificial Sequence; identical to SEQ ID NO: 69734
  derived and/or modified CDS sequence (opt1) from hemagglutinin__InfluenzaA__ADM31838

SEQ ID NO: 69736 - RNA, 1701 nt, Artificial Sequence; identical to SEQ ID NO: 66693
  derived and/or modified CDS sequence (opt1) from hemagglutinin__InfluenzaA__ADM31848

SEQ ID NO: 69737 - RNA, 1701 nt, Artificial Sequence
  derived and/or modified CDS sequence (opt1) from hemagglutinin__InfluenzaA__ADM31858
augaaggccauccuggugguccuccuguacaccuucgccaccgcgaacgccgacacgcugugcaucggcuaccacgccaacaacagcaccgacaccguggacaccgugcucgagaagaacgucacggugacccacuccgugaaccugcuggaggacaagcacaacgggaagcucugcaagcugcgcggcgucgcgccccugcaccucgggaagugcaacaucgccggcuggauccuggggaacccggagugcgagagccuguccaccgcgagcuccuggagcuacaucguggagaccuccagcuccgacaacggcacgugcuaccccggcgacuucaucgacuacgaggagcuccgggagcagcugagcuccgugagcuccuucgagcgcuucgagaucuuccccaagaccagcuccuggcccaaccacgacagcaacaagggggucaccgccgccugcucccacgccggcgccaagagcuucuacaagaaccugaucuggcucgugaagaaggggaacuccuacccgaagcugaacaagagcuacaucaacgacaagggcaaggaggugcugguccucugggggauccaccaccccagcaccuccgccgaccagcagagccuguaccagaacgccgacgccuacguguucgugggcacgucccgguacagcaagaaguucaagcccgagaucgccauccgccccaagguccgggagcaggagggccgcaugaacuacuacuggacccugguggagccgggggacaagaucaccuucgaggcgaccggcaaccucguggucccccgguacgccuucgccauggagcgcaacgccggguccggcaucaucaucagcgacacgcccgugcacgacugcaacacgaccugccagacccccaagggcgccaucaacaccucccugccguuccagaacauccaccccaucaccaucgggaagugccccaaguacgucaagagcaccaagcugcggcucgcgaccggccugcgcaacgugcccuccauccagagccgggggcuguucggcgccaucgccggguucaucgagggcggcuggacggggaugguggacggcugguacggguaccaccaccagaacgagcagggcuccggguacgccgccgaccucaagagcacccagaacgcgaucgacgagaucaccaacaaggugaacuccgucaucgagaagaugaacacccaguucacggccgugggcaaggaguucaaccaccuggagaagcgcaucgagaaccugaacaagaaggucgacgacggcuuccucgacaucuggaccuacaacgccgagcugcuggugcuccuggagaacgagcggacccuggacuaccacgacagcaacgugaagaaccucuacgagaagguccgcucccagcugaagaacaacgccaaggagaucgggaacggcugcuucgaguucuaccacaagugcgacaacacgugcauggagagcgugaagaacgggaccuacgacuacccgaaguacuccgaggaggccaagcugaaccgggaggagaucgacggcguggagcucgagagcacccgcaucuaccagauccuggcgaucuacuccaccgucgccagcagccuggugcucguggucucccugggggccaucagcuucuggaugugcuccaacggcagccugcagugccggaucugcaucuga

SEQ ID NO: 69738 - RNA, 1701 nt, Artificial Sequence
  derived and/or modified CDS sequence (opt1) from hemagglutinin__InfluenzaA__ADM31868
augaaggccauccuggugguccuccuguacaccuucgccaccgcgaacgccgacacgcugugcaucggcuaccacgccaacaacagcaccgacaccguggacaccgugcucgagaagaacgucacggugacccacuccgugaaccugcuggaggacaagcacaacgggaagcucugcaagcugcgcggcgucgcgccccugcaccucgggaagugcaacaucgccggcuggauccuggggaacccggagugcgagcugcucagcaccgcguccagcugguccuacaucguggagaccagcuccagcgacaacggcacgugcuaccccggcgacuucaucaacuacgaggagcugcgggagcagcuguccagcguguccagcuucgagcgcuucgagaucuuccccaagaccuccagcuggcccaaccacgacuccaacaagggggucaccgccgccugcccgcacgccggcgccaagagcuucuacaagaaccucaucuggcuggugaagaaggggaacuccuaccccaagcugagcaaguccuacaucaacgacaagggcaaggaggugcucguccuguggggcgugcaccaccccagcaccagcgccgaccagcagucccuguaccagaacgccgacgccuacguguucgucgggacgagccgguacuccaagaaguucaagcccgagaucgccauccgcccgaaggugcgggaccaggagggccgcaugaacuacuacuggacccucguggagcccggggacaagaucaccuucgaggcgaccggcaaccuggucgugccccgguacgccuucagcauggagcgcaacgccggguccggcaucaucaucagcgacacgcccgugcacgacugcaacacgaccugccagaccccgaagggcgccaucaacaccucccugcccuuccagaacauccaccccaucaccaucgggaagugccccaaguacgucaagagcaccaagcuccggcuggccaccggccugcgcaacgugccguccauccagagccgggggcuguucggcgcgaucgccggguucaucgagggcggcuggacggggaugguggacggcugguacggguaccaccaccagaacgagcagggcuccggguacgccgccgaccucaagagcacccagaacgccaucgacaagaucaccaacaaggucaacuccgugaucgagaagaugaacacccaguucacggcggucggcaaggaguucaaccaccuggagaagcgcaucgagaaccucaacaagaagguggacgacggcuuccuggacaucuggaccuacaacgccgagcugcucgugcugcuggagaacgagcggacccucgacuaccacgacagcaacgucaagaaccuguacgagaaggugcgcucccagcugaagaacaacgccaaggagaucgggaacggcugcuucgaguucuaccacaagugcgacaacacgugcauggagagcgugaagaacgggaccuacgacuaccccaaguacuccgaggaggccaagcucaaccgggagaagaucgacggcgucaagcuggagagcacccgcaucuaccagauccuggccaucuacuccaccguggcgagcagccucgugcuggucgugucccugggggccaucagcuucuggaugugcuccaacggcagccuccagugccggaucugcaucuga

SEQ ID NO: 69739 - RNA, 1701 nt, Artificial Sequence
  derived and/or modified CDS sequence (opt1) from hemagglutinin__InfluenzaA__ADM31878
augaaggccauccuggugguccuccuguacaccuucgccaccgcgaacgccgacacgcugugcaucggcuaccacgccaacaacagcaccgacaccguggacaccgugcucgagaagaacgucacggugacccacuccgugaacauccuggaggacaagcacaacgggaagcugugcaagcuccgcggcgucgcgccccugcaccuggggaagugcaacaucgccggcuggauccucgggaacccggagugcgagagccuguccaccgccagcuccuggagcuacaucguggagaccuccagcuccgacaacggcacgugcuaccccggcgacuucaucgacuacgaggagcugcgggagcagcucagcuccgugagcuccuucgagcgcuucgagaucuuccccaaggccagcuccuggcccaaccacgacagcaacaagggggucaccgccgccugcccgcacgcgggcgccaaguccuucuacaagaaccugaucuggcuggugaagaaggggaacagcuaccccaagcucuccaagagcuacaucaacgacaagggcaaggaggugcugguccugugggggauccaccaccccagcaccuccgccgaccagcagagccucuaccagaacgccgacgccuacguguucgugggcaccucccgguacagcaagaaguucaagcccgagaucgcgauccgcccgaagguccgggaccaggagggccgcaugaacuacuacuggacgcugguggagcccggggacaagaucaccuucgaggccaccggcaaccugguggucccccgguacgccuucgccauggagcgcaacgccggguccggcaucaucaucagcgacacccccgugcacgacugcaacacgaccugccagaccccgaagggcgcgaucaacaccucccuccccuuccagaacauccaccccaucacgaucgggaagugccccaaguacgucaagagcaccaagcugcggcuggccaccggccuccgcaacgugccguccauccagagccgggggcuguucggcgccaucgccggguucaucgagggcggcuggaccgggaugguggacggcugguacggguaccaccaccagaacgagcagggcuccggguacgccgcggaccucaagagcacgcagaacgccaucgacgagaucaccaacaaggugaacuccgucaucgagaagaugaacacccaguucaccgccgugggcaaggaguucaaccaccuggagaagcgcaucgagaaccugaacaagaaggucgacgacggcuuccuggacaucuggacguacaacgccgagcuccuggugcugcucgagaacgagcggacccuggacuaccacgacagcaacgugaagaaccuguacgagaagguccgcucccagcucaagaacaacgccaaggagaucgggaacggcugcuucgaguucuaccacaagugcgacaacacgugcauggagagcgugaagaacgggaccuacgacuaccccaaguacuccgaggaggcgaagcugaaccgggaggagaucgacggcgugaagcuggagagcacccgcaucuaccagauccucgccaucuacuccaccgucgccagcagccuggugcugguggucucccucggggccaucagcuucuggaugugcuccaacggcagccugcagugccggaucugcaucuga

SEQ ID NO: 69740 - RNA, 1701 nt, Artificial Sequence; identical to SEQ ID NO: 68342
  derived and/or modified CDS sequence (opt1) from hemagglutinin__InfluenzaA__ADM31888

SEQ ID NO: 69741 - RNA, 1701 nt, Artificial Sequence; identical to SEQ ID NO: 66873
  derived and/or modified CDS sequence (opt1) from hemagglutinin__InfluenzaA__ADM31898

SEQ ID NO: 69742 - RNA, 1701 nt, Artificial Sequence
  derived and/or modified CDS sequence (opt1) from hemagglutinin__InfluenzaA__ADM31908
augaaggccauccuggugguccuccuguacaccuucgccaccgcgaacgccgacacgcugugcaucggcuaccacgccaacaacagcaccgacaccguggacaccgugcucgagaagaacgucacggugacccacuccgugaacauccuggaggacaagcacaacgggaagcugugcaagcuccgcggcgucgcgccccugcaccuggggaagugcaacaucgccggcuggauccucgggaacccggagugcgagagccuguccaccgccagcuccuggagcuacaucguggagaccuccagcuccgacaacggcacgugcuaccccggcgacuucaucgaccacgaggagcugcgggagcagcucagcuccgugagcuccuucgagcgcuucgagaucuuccccaagaccagcuccuggcccaaccacgacagcaacaagggggucaccgccgccugcccgcacgccggcgcgaaguccuucuacaagaaccugaucuggcuggugaagaaggggaacagcuaccccaagcucuccaagagcuacaucaacgacaagggcaaggaggugcugguccugugggggauccaccaccccagcaccuccgccgaccagcagagccucuaccagaacgccgacgccuacguguucgugggcuccagccgguacuccaagaaguucaagcccgagaucgccauccgcccgaagguccgggaccaggagggccgcaugaacuacuacuggacgcugguggagcccggggacaagaucaccuucgaggcgaccggcaaccugguggucccccgguacgccuucgccauggagcgcaacgccgggagcggcaucaucaucuccgacacccccgugcacgacugcaacacgaccugccagaccccgaagggcgccaucaacaccagccuccccuuccagaacauccaccccaucacgaucgggaagugccccaaguacgugaaguccaccaagcugcggcuggcgaccggccuccgcaacgucccgagcauccagucccgggggcuguucggcgccaucgccggguucaucgagggcggcuggaccgggaugguggacggcugguacggguaccaccaccagaacgagcagggcagcggguacgccgccgaccugaaguccacgcagaacgcgaucgacgagaucaccaacaaggugaacagcgucaucgagaagaugaacacccaguucaccgccgugggcaaggaguucaaccaccucgagaagcgcaucgagaaccugaacaagaaggucgacgacggcuuccuggacaucuggacguacaacgccgagcuccuggugcugcucgagaacgagcggacccuggacuaccacgacuccaacgugaagaaccuguacgagaagguccgcagccagcucaagaacaacgccaaggagaucgggaacggcugcuucgaguucuaccacaagugcgacaacacgugcauggaguccgugaagaacgggaccuacgacuaccccaaguacagcgaggaggccaagcugaaccgggaggagaucgacggcgugaagcuggaguccacccgcaucuaccagauccucgcgaucuacagcaccgucgccagcucccuggugcugguggucagccucggggccaucuccuucuggaugugcagcaacggcucccugcagugccggaucugcaucuga

SEQ ID NO: 69743 - RNA, 1701 nt, Artificial Sequence; identical to SEQ ID NO: 66873
  derived and/or modified CDS sequence (opt1) from hemagglutinin__InfluenzaA__ADM31918

SEQ ID NO: 69744 - RNA, 1701 nt, Artificial Sequence; identical to SEQ ID NO: 68465
  derived and/or modified CDS sequence (opt1) from hemagglutinin__InfluenzaA__ADM31928

SEQ ID NO: 69745 - RNA, 1701 nt, Artificial Sequence; identical to SEQ ID NO: 68465
  derived and/or modified CDS sequence (opt1) from hemagglutinin__InfluenzaA__ADM31948

SEQ ID NO: 69746 - RNA, 1701 nt, Artificial Sequence; identical to SEQ ID NO: 66693
  derived and/or modified CDS sequence (opt1) from hemagglutinin__InfluenzaA__ADM31958

SEQ ID NO: 69747 - RNA, 1701 nt, Artificial Sequence; identical to SEQ ID NO: 68465
  derived and/or modified CDS sequence (opt1) from hemagglutinin__InfluenzaA__ADM31968

SEQ ID NO: 69748 - RNA, 1701 nt, Artificial Sequence; identical to SEQ ID NO: 68281
  derived and/or modified CDS sequence (opt1) from hemagglutinin__InfluenzaA__ADM31978

SEQ ID NO: 69749 - RNA, 1701 nt, Artificial Sequence; identical to SEQ ID NO: 66873
  derived and/or modified CDS sequence (opt1) from hemagglutinin__InfluenzaA__ADM31998

SEQ ID NO: 69750 - RNA, 1701 nt, Artificial Sequence; identical to SEQ ID NO: 66873
  derived and/or modified CDS sequence (opt1) from hemagglutinin__InfluenzaA__ADM32008

SEQ ID NO: 69751 - RNA, 1701 nt, Artificial Sequence
  derived and/or modified CDS sequence (opt1) from hemagglutinin__InfluenzaA__ADM32018
augaaggccauccuggugguccuccuguacaccuucgccaucgcgaacgccgacacccugugcaucggcuaccacgccaacaacagcacggacaccguggacaccgugcucgagaagaacgucaccgugacgcacuccgugaaccugcuggaggacaagcacaacgggaagcucugcaagcugcgcggcgucgcgccccugcaccucgggaagugcgacaucgccggcuggauccuggggaacccggagugcgagagccuguccaccgccagcuccuggagcuacaucguggagaccuccagcuccgacaacgggaccugcuaccccggcgacuucaucgacuacgaggagcuccgggagcagcugagcuccgugagcuccuucgagcgcuucgagaucuuccccaagacgagcuccuggcccaaccacgacagcaacaagggcgucaccgccgccugcccgcacgccggcgcgaaguccuucuacaagaaccugaucuggcucgugaagaaggggaacagcuaccccaagcuguccaagagcuacaucaacgacaagggcaaggaggugcugguccucugggggauccaccaccccagcaccuccgccgaccagcagagccuguaccagaacgccgacgccuacguguucgugggcaccucccgguacagcaagaaguucaagcccgagaucgccauccgcccgaagguccgggaccaggagggccgcaugaacuacuacuggacgcugguggagcccggggacaagaucaccuucgaggcgaccggcaaccucguggucccccgguacgccuucgccauggagcgcaacgccggguccggcaucaucaucagcgacacccccgugcacgacugcaacacgaccugccagaccccgaagggcgccaucaacaccucccugcccuuccagaacauccaccccaucacgaucgggaagugccccaaguacgucaagagcaccaagcugcggcucgcgaccggccugcgcaacgugccguccauccagagccgggggcuguucggcgccaucgccggguucaucgagggcggcuggaccgggaugguggacggcugguacggguaccaccaccagaacgagcagggcuccggguacgccgccgaccucaagagcacgcagaacgcgaucgacgagaucaccaacaaggugaacuccgucaucgagaagaugaacacccaguucaccgccgugggcaaggaguucaaccaccuggagaagcgcaucgagaaccugaacaagaaggucgacgacggcuuccucgacaucuggacguacaacgccgagcugcuggugcuccuggagaacgagcggacccuggacuaccacgacagcaacgugaagaaccucuacgagaagguccgcucccagcugaagaacaacgccaaggagaucgggaacggcugcuucgaguucuaccacaagugcgacaacacgugcauggagagcgugaagaacgggaccuacgacuaccccaaguacuccgaggaggccaagcugaaccgggaggagaucgacggcgugaagcucgagagcacccgcaucuaccagauccuggcgaucuacuccaccgucgccagcagccuggugcucguggucucccugggggccaucagcuucuggaugugcuccaacggcagccugcagugccggaucugcaucuga

SEQ ID NO: 69752 - RNA, 1701 nt, Artificial Sequence
  derived and/or modified CDS sequence (opt1) from hemagglutinin__InfluenzaA__ADM32028
augaaggccauccuggugguccuccuguacaccuucgccaccgcgaacgccgacacgcugugcaucggcuaccacgccaacaacagcaccgacaccguggacaccgugcucgagaagaacgucacggugacccacuccguggaccugcuggaggacaagcacaacgggaagcucugcaagcugcgcggcgucgcgccccugcaccucgggaagugcaacaucgccggcuggauccuggggaacccggagugcgagagccuguccaccgccagcuccuggagcuacaucguggagaccuccagcuccgacaacggcacgugcuaccccggcgacuucaucgacuacgaggagcuccgggagcagcugagcuccgugagcuccuucgagcgcuucgagaucuuccccaagaccagcuccuggcccaaccacgacagcaacaagggggucaccgccgccugcccgcacgccggcgcgaaguccuucuacaagaaccugaucuggcucgugaagaaggggaacagcuaccccaagcuguccaagagcuacaucaacgacaagggcaaggaggugcugguccucugggggauccaccaccccagcaccuccgccgaccagcagagccuguaccagaacgccgacgccuacguguucgugggcacgucccgguacagcaagaaguucaagcccgagaucgccauccgcccgaagguccgggaccaggagggccgcaugaacuacuacuggacccugguggagcccggggacaagaucaccuucgaggcgaccggcaaccucguggucccccgguacgccuucgccauggagcgcaacgccggguccggcaucaucaucagcgacacgcccgugcacgacugcaacacgaccugccagaccccgaagggcgccaucaacaccucccugcccuuccagaacgugcaccccaucaccaucgggaagugccccaaguacgucaagagcaccaagcugcggcucgcgaccggccugcgcaacgugccguccauccagagccgggggcuguucggcgccaucgccggguucaucgagggcggcuggacggggaugguggacggcugguacggguaccaccaccagaacgagcagggcuccggguacgccgccgaccucaagagcacccagaacgcgaucgacgagaucaccaacaaggucaacuccgugaucgagaagaugaacacccaguucacggccgucggcaaggaguucaaccaccuggagaagcgcaucgagaaccugaacaagaagguggacgacggcuuccucgacaucuggaccuacaacgccgagcugcuggugcuccuggagaacgagcggacccuggacuaccacgacagcaacgucaagaaccucuacgagaaggugcgcucccagcugaagaacaacgccaaggagaucgggaacggcugcuucgaguucuaccacaagugcgacaacacgugcauggagagcgugaagaacgggaccuacgacuaccccaaguacuccgaggaggccaagcugaaccgggaggagaucgacggcgucaagcucgagagcacccgcaucuaccagauccuggcgaucuacuccaccguggccagcagccuggugcucgucgugucccugggggccaucagcuucuggaugugcuccaacggcagccugcagugccggaucugcaucuga

SEQ ID NO: 69753 - RNA, 1701 nt, Artificial Sequence; identical to SEQ ID NO: 68465
  derived and/or modified CDS sequence (opt1) from hemagglutinin__InfluenzaA__ADM32038

SEQ ID NO: 69754 - RNA, 1701 nt, Artificial Sequence; identical to SEQ ID NO: 66873
  derived and/or modified CDS sequence (opt1) from hemagglutinin__InfluenzaA__ADM32048

SEQ ID NO: 69755 - RNA, 1701 nt, Artificial Sequence; identical to SEQ ID NO: 67857
  derived and/or modified CDS sequence (opt1) from hemagglutinin__InfluenzaA__ADM32058

SEQ ID NO: 69756 - RNA, 1701 nt, Artificial Sequence; identical to SEQ ID NO: 67857
  derived and/or modified CDS sequence (opt1) from hemagglutinin__InfluenzaA__ADM32068

SEQ ID NO: 69757 - RNA, 1701 nt, Artificial Sequence; identical to SEQ ID NO: 66693
  derived and/or modified CDS sequence (opt1) from hemagglutinin__InfluenzaA__ADM32078

SEQ ID NO: 69758 - RNA, 1701 nt, Artificial Sequence; identical to SEQ ID NO: 68281
  derived and/or modified CDS sequence (opt1) from hemagglutinin__InfluenzaA__ADM32088

SEQ ID NO: 69759 - RNA, 1701 nt, Artificial Sequence
  derived and/or modified CDS sequence (opt1) from hemagglutinin__InfluenzaA__ADM32098
augaaggccauccuggugguccuccuguacaccuucgccaucgcgaacgccgacacccugugcaucggcuaccacgccaacaacagcacggacaccguggacaccgugcucgagaagaacgucaccgugacgcacuccgugaaccugcuggaggacaagcacaacgggaagcucugcaagcugcgcggcgucgcgccccugcaccucgggaagugcaacaucgccggcuggauccuggggaacccggagugcgagagccuguccaccgccagcuccuggagcuacaucguggagaccuccagcuccgacaacgggaccugcuaccccggcgacuucaucgacuacgaggagcuccgggagcagcugagcuccgugagcuccuucgagcgcuucgagaucuuccccaagacgagcuccuggcccaaccacgacagcaacaagggcgucaccgccgccugcccgcacgccggcgcgaaguccuucuacaagaaccugaucuggcucgugaagaaggggaacagcuaccccaagcuguccaagagcuacaucaacgacaagggcaaggaggugcugguccucugggggauccaccaccccagcaccuccgccgaccagcagagccuguaccagaacgccgacgccuacguguucgugggcaccucccgguacagcaagaaguucaagcccgagaucgccauccgcccgaagguccgggaccaggagggccgcaugaacuacuacuggacgcugguggagcccggggacaagaucaccuucgaggcgaccggcaaccucguggucccccgguacgccuucgccauggagcgcaacgccggguccggcaucaucaucagcgacacccccgugcacgacugcaacacgaccugccagaccccgaagggcgccaucaacaccucccugcccuuccagaacauccaccccaucacgaucgggaagugccccaaguacgucaagagcaccaagcugcggcucgcgaccggccugcgcaacgugccguccauccagagccgggggcuguucggcgccaucgccggguucaucgagggcggcuggaccgggaugguggacggcugguacggguaccaccaccagaacgagcagggcuccggguacgccgccgaccucaagagcacgcagaacgcgaucgacgagaucaccaacaaggugaacuccgucaucgagaagaugaacacccaguucaccgccgugggcaaggaguucaaccaccuggagaagcgcaucgagaaccugaacaagaaggucgacgacggcuuccucgacaucuggacguacaacgccgagcugcuggugcuccuggagaacgagcggacccuggacuaccacgacagcaacgugaagaaccucuacgagaagguccgcucccagcugaagaacaacgccaaggagaucgggaacggcugcuucgaguucuaccacaagugcgacaacacgugcauggagagcgugaagaacgggaccuacgacuaccccaaguacuccgaggaggccaagcugaaccgggaggagaucgacggcgugaagcucgagagcacccgcaucuaccagauccuggcgaucuacuccaccgucgccagcagccuggugcucguggucucccugggggccaucagcuucuggaugugcuccaacggcagccugcagugccggaucugcaucuga

SEQ ID NO: 69760 - RNA, 1701 nt, Artificial Sequence; identical to SEQ ID NO: 66693
  derived and/or modified CDS sequence (opt1) from hemagglutinin__InfluenzaA__ADM32108

SEQ ID NO: 69761 - RNA, 1701 nt, Artificial Sequence; identical to SEQ ID NO: 68465
  derived and/or modified CDS sequence (opt1) from hemagglutinin__InfluenzaA__ADM32551

SEQ ID NO: 69762 - RNA, 1701 nt, Artificial Sequence; identical to SEQ ID NO: 66873
  derived and/or modified CDS sequence (opt1) from hemagglutinin__InfluenzaA__ADM32561

SEQ ID NO: 69763 - RNA, 1701 nt, Artificial Sequence; identical to SEQ ID NO: 66873
  derived and/or modified CDS sequence (opt1) from hemagglutinin__InfluenzaA__ADM32571

SEQ ID NO: 69764 - RNA, 1701 nt, Artificial Sequence; identical to SEQ ID NO: 66693
  derived and/or modified CDS sequence (opt1) from hemagglutinin__InfluenzaA__ADM32581

SEQ ID NO: 69765 - RNA, 1701 nt, Artificial Sequence; identical to SEQ ID NO: 68465
  derived and/or modified CDS sequence (opt1) from hemagglutinin__InfluenzaA__ADM32591

SEQ ID NO: 69766 - RNA, 1701 nt, Artificial Sequence; identical to SEQ ID NO: 66693
  derived and/or modified CDS sequence (opt1) from hemagglutinin__InfluenzaA__ADM32601

SEQ ID NO: 69767 - RNA, 1701 nt, Artificial Sequence; identical to SEQ ID NO: 66693
  derived and/or modified CDS sequence (opt1) from hemagglutinin__InfluenzaA__ADM32611

SEQ ID NO: 69768 - RNA, 1701 nt, Artificial Sequence; identical to SEQ ID NO: 67857
  derived and/or modified CDS sequence (opt1) from hemagglutinin__InfluenzaA__ADM32621

SEQ ID NO: 69769 - RNA, 1701 nt, Artificial Sequence
  derived and/or modified CDS sequence (opt1) from hemagglutinin__InfluenzaA__ADM32631
augaaggccauccuggugguccuccuguacaccuucgccaccgcgaacgccgacacgcugugcaucggcuaccacgccaacaacagcaccgacaccguggacaccgugcucgagaagaacgucacggugacccacuccgugaacauccuggaggacaagcacaacgggaagcugugcaagcucaagggcgucgcgccccugcaccuggggaagugcaacaucgccggcuggauccucgggaacccggagugcgagagccuguccaccgccagcuccuggagcuacaucguggagaccuccagcuccgacaacggcacgugcuaccccggcgacuucaucgacuacgaggagcugcgcgagcagcucagcuccgugagcuccuucgagcgguucgagaucuuccccaagaccagcuccuggcccaaccacgacagcaacaagggggucaccgccgccugcccgcacgccggcgcgaaguccuucuacaagaaccugaucuggcuggugaagaaggggaaccucuaccccaagcugagcaaguccuacaucaacgacaagggcaaggaggugcugguccucugggggauccaccaccccagcaccagcgccgaccagcagucccuguaccagaacgccgacgccuacguguucgugggcagcuccaaguacagcaagaaguucaagcccgagaucgccauccgcccgaagguccgggaccaggagggccgcaugaacuacuacuggacgcugguggagcccggggacaagaucaccuucgaggcgaccggcaaccucguggucccccgguacgccuucgccauggagcgcaacgccggguccggcaucaucaucagcgacacccccgugcacaacugcaacacgaccugccagaccccgaagggcgccaucaacaccucccugcccuuccagaacauccaccccaucacgaucgggaagugccccaaguacgucaagagcaccaagcugcggcucgcgaccggccugcgcaacgugccguccauccagagccgggggcuguucggcgccaucgccggguucaucgagggcggcuggaccgggaugguggacggcugguacggguaccaccaccagaacgagcagggcuccggguacgccgccgaccucaagagcacgcagaacgcgaucgacgagaucaccaacaaggugaacuccgucaucgagaagaugaacacccaguucaccgccgugggcaaggaguucaaccaccuggagaagcgcaucgagaaccugaacaagaaggucgacgacggcuuccucgacaucuggacguacaacgccgagcugcuggugcuccuggagaacgagcggacccuggacuaccacgacagcaacgugaagaaccucuacgagaagguccgcucccagcugaagaacaacgccaaggagaucgggaacggcugcuucgaguucuaccacaagugcgacaacacgugcauggagagcgugaagaacgggaccuacgacuaccccaaguacuccgaggaggccaagcugaaccgggaggagaucgacggcgugaagcucgagagcacccgcaucuaccagauccuggcgaucuacuccaccgucgccagcagccuggugcucguggucucccugggggccaucagcuucuggaugugcuccaacggcagccugcagugccggaucugcaucuga

SEQ ID NO: 69770 - RNA, 1701 nt, Artificial Sequence; identical to SEQ ID NO: 67857
  derived and/or modified CDS sequence (opt1) from hemagglutinin__InfluenzaA__ADM32641

SEQ ID NO: 69771 - RNA, 1701 nt, Artificial Sequence; identical to SEQ ID NO: 66693
  derived and/or modified CDS sequence (opt1) from hemagglutinin__InfluenzaA__ADM32651

SEQ ID NO: 69772 - RNA, 1701 nt, Artificial Sequence
  derived and/or modified CDS sequence (opt1) from hemagglutinin__InfluenzaA__ADM32661
augaaggccauccuggugguccuccuguacaccuucgccaucgcgaacgccgacacccugugcaucggcuaccacgccaacaacagcacggacaccguggacaccgugcucgagaagaacgucaccgugacgcacuccgugaaccugcuggaggacaagcacaacgggaagcucugcaagcugcgcggcgucgcgccccugcaccucgggaagugcaacaucgccggcuggauccuggggaacccggagugcgagagccuguccaccgccagcuccuggagcuacaucguggagaccuccagcuccgacaacgggaccugcuaccccggcgacuucaacgacuacgaggagcuccgggagcagcugagcuccgugagcuccuucgagcgcuucgagaucuuccccaagacgagcuccuggcccaaccacgacagcaacaagggcgucaccgccgccugcccgcacgccggcgcgaaguccuucuacaagaaccugaucuggcucgugaagaaggggaacagcuaccccaagcuguccaagagcuacaucaacgacaagggcaaggaggugcugguccucugggggauccaccaccccagcaccuccgccgaccagcagagccuguaccagaacgccgacgccuacguguucgugggcaccucccgguacagcaagaaguucaagcccgagaucgccauccgcccgaagguccgggaccaggagggccgcaugaacuacuacuggacgcugguggagcccggggacaagaucaccuucgaggcgaccggcaaccucguggucccccgguacgccuucgccauggagcgcaacgccggguccggcaucaucaucagcgacacccccgugcacgacugcaacacgaccugccagaccccgaagggcgccaucaacaccucccugcccuuccagaacauccaccccaucacgaucgggaagugccccaaguacgucaagagcaccaagcugcggcucgcgaccggccugcgcaacgugccguccauccagagccgggggcuguucggcgccaucgccggguucaucgagggcggcuggaccgggaugguggacggcugguacggguaccaccaccagaacgagcagggcuccggguacgccgccgaccucaagagcacgcagaacgcgaucgacgagaucaccaacaaggugaacuccgucaucgagaagaugaacacccaguucaccgccgugggcaaggaguucaaccaccuggagaagcgcaucgagaaccugaacaagaaggucgacgacggcuuccucgacaucuggacguacaacgccgagcugcuggugcuccuggagaacgagcggacccuggacuaccacgacagcaacgugaagaaccucuacgagaagguccgcucccagcugaagaacaacgccaaggagaucgggaacggcugcuucgaguucuaccacaagugcgacaacacgugcauggagagcgugaagaacgggaccuacgacuaccccaaguacuccgaggaggccaagcugaaccgggaggagaucgacggcgugaagcucgagagcacccgcaucuaccagauccuggcgaucuacuccaccgucgccagcagccuggugcucguggucucccugggggccaucagcuucuggaugugcuccaacggcagccugcagugccggaucugcaucuga

SEQ ID NO: 69773 - RNA, 1701 nt, Artificial Sequence; identical to SEQ ID NO: 68281
  derived and/or modified CDS sequence (opt1) from hemagglutinin__InfluenzaA__ADM32671

SEQ ID NO: 69774 - RNA, 1701 nt, Artificial Sequence; identical to SEQ ID NO: 66693
  derived and/or modified CDS sequence (opt1) from hemagglutinin__InfluenzaA__ADM32681

SEQ ID NO: 69775 - RNA, 1701 nt, Artificial Sequence; identical to SEQ ID NO: 66873
  derived and/or modified CDS sequence (opt1) from hemagglutinin__InfluenzaA__ADM32691

SEQ ID NO: 69776 - RNA, 1701 nt, Artificial Sequence; identical to SEQ ID NO: 66693
  derived and/or modified CDS sequence (opt1) from hemagglutinin__InfluenzaA__ADM32701

SEQ ID NO: 69777 - RNA, 1701 nt, Artificial Sequence; identical to SEQ ID NO: 66873
  derived and/or modified CDS sequence (opt1) from hemagglutinin__InfluenzaA__ADM32711

SEQ ID NO: 69778 - RNA, 1701 nt, Artificial Sequence; identical to SEQ ID NO: 66873
  derived and/or modified CDS sequence (opt1) from hemagglutinin__InfluenzaA__ADM32721

SEQ ID NO: 69779 - RNA, 1701 nt, Artificial Sequence; identical to SEQ ID NO: 66873
  derived and/or modified CDS sequence (opt1) from hemagglutinin__InfluenzaA__ADM32741

SEQ ID NO: 69780 - RNA, 1701 nt, Artificial Sequence; identical to SEQ ID NO: 66873
  derived and/or modified CDS sequence (opt1) from hemagglutinin__InfluenzaA__ADM32751

SEQ ID NO: 69781 - RNA, 1701 nt, Artificial Sequence; identical to SEQ ID NO: 68281
  derived and/or modified CDS sequence (opt1) from hemagglutinin__InfluenzaA__ADM32761

SEQ ID NO: 69782 - RNA, 1701 nt, Artificial Sequence
  derived and/or modified CDS sequence (opt1) from hemagglutinin__InfluenzaA__ADM32771
augaaggccauccuggugguccuccuguacaccuucgccaccgcgaacgccgacacgcugugcaucggcuaccacgccaacaacagcaccgacaccguggacaccgugcucgagaagaacgucacggugacccacuccgugaaccugcuggaggacaagcacaacgggaagcucugcaagcugcgcggcgucgcgccccugcaccucgggaagugcaacaucgccggcuggauccuggggaacccggagugcgagagccuguccaccgccagcuccuggagcuacaucguggagaccuccagcuccgacaacggcacgugcuaccccggcgacuucaucgacuacgaggagcuccgggagcagcugagcuccgugagcuccuucgagcgcuucgagaucuuccccaagaccagcuccuggcccaaccacgacagcaacaagggggucaccgccgccugcccgcacgccggcgcgaaguccuucuacaagaaccugaucuggcucgugaagaaggggaacagcuaccccaagcuguccgagagcuacaucaacgacaagggcaaggaggugcugguccucugggggauccaccaccccagcaccuccgccgaccagcagagccuguaccagaacgccgacgccuacguguucgugggcacgucccgguacagcaagaaguucaagcccgagaucgccauccgcccgaagguccgggaccaggagggccgcaugaacuacuacuggacccugguggagcccggggacaagaucaccuucgaggcgaccggcaaccucguggucccccgguacgccuucgccauggagcgcaacgccggguccggcaucaucaucagcgacacgcccgugcacgacugcaacacgaccugccagaccccgaagggcgccaucaacaccucccugcccuuccagaacauccaccccaucaccaucgggaagugccccaaguacgucaagagcaccaagcugcggcucgcgaccggccugcgcaacgugccguccauccagagcaaggggcuguucggcgccaucgccggguucaucgagggcggcuggacggggaugguggacggcugguacggguaccaccaccagaacgagcagggcuccggguacgccgccgaccucaagagcacccagaacgcgaucgacgagaucaccaacaaggugaacuccgucaucgagaagaugaacacccaguucacggccgugggcaaggaguucaaccaccuggagaagcggaucgagaaccugaacaagaaggucgacgacggcuuccucgacaucuggaccuacaacgccgagcugcuggugcuccuggagaacgagcgcacccuggacuaccacgacagcaacgugaagaaccucuacgagaagguccggucccagcugaagaacaacgccaaggagaucgggaacggcugcuucgaguucuaccacaagugcgacaacacgugcauggagagcgugaagaacgggaccuacgacuaccccaaguacuccgaggaggccaagcugaaccgcgaggagaucgacggcgugaagcucgagagcacccggaucuaccagauccuggcgaucuacuccaccgucgccagcagccuggugcucguggucucccugggggccaucagcuucuggaugugcuccaacggcagccugcagugccgcaucugcaucuga

SEQ ID NO: 69783 - RNA, 1701 nt, Artificial Sequence
  derived and/or modified CDS sequence (opt1) from hemagglutinin__InfluenzaA__ADM32781
augaaggccauccuggugguccuccuguacaccuucgccaccgcgaacgccgacacgcugugcaucggcuaccacgccaacaacagcaccgacaccguggacaccgugcucgagaagaacgucacggugacccacuccguggaccugcuggaggacaagcacaacgggaagcucugcaagcugcgcggcgucgcgccccugcaccucgggaagugcaacaucgccggcuggauccuggggaacccggagugcgagagccuguccaccgccagcuccuggagcuacaucguggagaccuccagcuccgacaacggcacgugcuaccccggcgacuucaucgacuacgaggagcuccgggagcagcugagcuccgugagcuccuucgagcgcuucgagaucuuccccaagaccagcuccuggcccaaccacgacagcaacaagggggucaccgccgccugcccgcacgccggcgcgaaguccuucuacaagaaccugaucuggcucgugaagaaggggaacagcuaccccaagcuguccaagagcuacaucaacgacaagggcaaggaggugcugguccucugggggauccaccaccccagcaccuccgccgaccagcagagccuguaccagaacgccgacgccuacguguucgugggcacgucccgguacagcaagaaguucaagcccgagaucgccauccgcccgaagguccgggaccaggagggccgcaugaacuacuacuggacccugguggagcccggggacaagaucaccuucgaggcgaccggcaaccucguggucccccgguacgccuucgccauggagcgcaacgccggguccggcaucaucaucagcgacacgcccgugcacgacugcaacacgaccugccagaccccgaagggcgccaucaacaccuccuuccccuuccagaacauccaccccaucaccaucgggaagugccccaaguacgucaagagcaccaagcugcggcuggcgaccggccuccgcaacgugccguccauccagagccgggggcuguucggcgccaucgccggguucaucgagggcggcuggacggggaugguggacggcugguacggguaccaccaccagaacgagcagggcuccggguacgccgccgaccucaagagcacccagaacgcgaucgacgagaucaccaacaaggugaacuccgucaucgagaagaugaacacccaguucacggccgugggcaaggaguucaaccaccuggagaagcgcaucgagaaccugaacaagaaggucgacgacggcuuccuggacaucuggaccuacaacgccgagcuccuggugcugcucgagaacgagcggacccuggacuaccacgacagcaacgugaagaaccuguacgagaagguccgcucccagcucaagaacaacgccaaggagaucgggaacggcugcuucgaguucuaccacaagugcgacaacacgugcauggagagcgugaagaacgggaccuacgacuaccccaaguacuccgaggaggccaagcugaaccgggaggagaucgacggcgugaagcuggagagcacccgcaucuaccagauccucgcgaucuacuccaccgucgccagcagccuggugcugguggucucccucggggccaucagcuucuggaugugcuccaacggcagccugcagugccggaucugcaucuga

SEQ ID NO: 69784 - RNA, 1701 nt, Artificial Sequence; identical to SEQ ID NO: 66873
  derived and/or modified CDS sequence (opt1) from hemagglutinin__InfluenzaA__ADM32791

SEQ ID NO: 69785 - RNA, 1701 nt, Artificial Sequence
  derived and/or modified CDS sequence (opt1) from hemagglutinin__InfluenzaA__ADM32801
augaaggccauccuggugguccuccuguacaccuucgccaccgcgaacgccgacacgcugugcaucggcuaccacgccaacaacagcaccgacaccguggacaccgugcucgagaagaacgucacggugacccacuccgugaacauccuggagaacaagcacaacgggaagcugugcaagcuccgcggcgucgcgccccugcaccuggggaagugcaacaucgccggcuggauccucgggaacccggagugcgagagccuguccaccgccagcuccuggagcuacaucguggagaccuccagcuccgacaacggcacgugcuaccccggcgacuucaucgacuacgaggagcugcgggagcagcucagcuccgugagcuccuucgagcgcuucgagaucuuccccaagaccagcuccuggcccaaccacgacagcaacaagggggucaccgccgccugcccgcacgccggcgcgaaguccuucuacaagaaccugaucuggcuggugaagaaggggaacagcuaccccaagcucuccaagagcuacaucaacgacaagggcaaggaggugcugguccugugggggauccaccaccccagcaccuccgccgaccagcagagccucuaccagaacgccgacgccuacguguucgugggcuccagccgguacuccaagaaguucaagcccgagaucgccauccgcccgaagguccgggaccaggagggccgcaugaacuacuacuggacgcugguggagcccggggacaagaucaccuucgaggcgaccggcaaccugguggucccccgguacgccuucgccauggagcgcaacgccgggagcggcaucaucaucuccgacacccccgugcacgacugcaacacgaccugccagaccccgaagggcgccaucaacaccagccuccccuuccagaacauccaccccaucacgaucgggaagugccccaaguacgugaaguccaccaagcugcggcuggcgaccggccuccgcaacgucccgagcauccagucccgggggcuguucggcgccaucgccggguucaucgagggcggcuggaccgggaugguggacggcugguacggguaccaccaccagaacgagcagggcagcggguacgccgccgaccugaaguccacgcagaacgcgaucgacgagaucaccaacaaggugaacagcgucaucgagaagaugaacacccaguucaccgccgugggcaaggaguucaaccaccucgagaagcgcaucgagaaccugaacaagaaggucgacgacggcuuccuggacaucuggacguacaacgccgagcuccuggugcugcucgagaacgagcggacccuggacuaccacgacuccaacgugaagaaccuguacgagaagguccgcagccagcucaagaacaacgccaaggagaucgggaacggcugcuucgaguucuaccacaagugcgacaacacgugcauggaguccgugaagaacgggaccuacgacuaccccaaguacagcgaggaggccaagcugaaccgggaggagaucgacggcgugaagcuggaguccacccgcaucuaccagauccucgcgaucuacagcaccgucgccagcucccuggugcugguggucagccucggggccaucuccuucuggaugugcagcaacggcucccugcagugccggaucugcaucuga

SEQ ID NO: 69786 - RNA, 1701 nt, Artificial Sequence
  derived and/or modified CDS sequence (opt1) from hemagglutinin__InfluenzaA__ADM32811
augaaggccauccuggugguccuccuguacaccuucgccaccgcgaacgccgacacgcugugcaucggcuaccacgccaacaacagcaccgacaccguggacaccgugcucgagaagaacgucacggugacccacuccgugaaccugcuggaggacaagcacaacgggaagcucugcaagcugcgcggcgucgcgccccugcaccucgggaagugcaacaucgccggcuggauccuggggaacccggagugcgagagccuguccaccgccagcuccuggagcuacaucguggagaccuccagcuccgacaacggcacgugcuaccccggcgacuucaucgacuacgaggagcuccgggagcagcugagcuccgugagcuccuucgagcgcuucgagaucuuccccaagaccagcuccuggcccaaccacgacagcaacaagggggucaccgccgccugcccgcacgccggcgcgaaguccuucuacaagaaccugaucuggcucgugaagaaggggaacagcuaccccaagcuguccaagagcuacaucaacgacaagggcaaggaggugcugguccucugggggauccaccaccccagcaccuccgccgaccagcagagccuguaccagaacgccgacgccuacguguucgugggcacgucccgguacagcaagaaguucaagcccgagaucgccauccgcccgaagguccgggaccaggagggccgcaugaacuacuacuggacccugguggagcccggggacaagaucaccuucgaggcgaccggcaaccucguggucccccgguacgccuucgccauggagcgcaacgccggguccggcaucaucaucagcgacacgcccgugcacgacugcaacacgaccugccagaccccgaagggcgccaucaacaccucccugcccuuccacaacauccaccccaucaccaucgggaagugccccaaguacgucaagagcaccaagcugcggcucgcgaccggccugcgcaacgugccguccauccagagccgggggcuguucggcgccaucgccggguucaucgagggcggcuggacggggaugguggacggcugguacggguaccaccaccagaacgagcagggcuccggguacgccgccgaccucaagagcacccagaacgcgaucgacgagaucaccaacaaggugaacuccgucaucgagaagaugaacacccaguucacggccgugggcaaggaguucaaccaccuggagaagcgcaucgagaaccugaacaagaaggucgacgacggcuuccucgacaucuggaccuacaacgccgagcugcuggugcuccuggagaacgagcggacccuggacuaccacgacagcaacgugaagaaccucuacgagaagguccgcucccagcugaagaacaacgccaaggagaucgggaacggcugcuucgaguucuaccacaagugcgacaacacgugcauggagagcgugaagaacgggaccuacgacuaccccaaguacuccgaggaggccaagcugaaccgggaggagaucgacggcgugaagcucgagagcacccgcaucuaccagauccuggcgaucuacuccaccgucgccagcagccuggugcucguggucucccugggggccaucagcuucuggaugugcuccaacggcagccugcagugccggaucugcaucuga

SEQ ID NO: 69787 - RNA, 1701 nt, Artificial Sequence; identical to SEQ ID NO: 66693
  derived and/or modified CDS sequence (opt1) from hemagglutinin__InfluenzaA__ADM32821

SEQ ID NO: 69788 - RNA, 1701 nt, Artificial Sequence; identical to SEQ ID NO: 68281
  derived and/or modified CDS sequence (opt1) from hemagglutinin__InfluenzaA__ADM32831

SEQ ID NO: 69789 - RNA, 1701 nt, Artificial Sequence; identical to SEQ ID NO: 66873
  derived and/or modified CDS sequence (opt1) from hemagglutinin__InfluenzaA__ADM32841

SEQ ID NO: 69790 - RNA, 1701 nt, Artificial Sequence; identical to SEQ ID NO: 68281
  derived and/or modified CDS sequence (opt1) from hemagglutinin__InfluenzaA__ADM32851

SEQ ID NO: 69791 - RNA, 1701 nt, Artificial Sequence; identical to SEQ ID NO: 66873
  derived and/or modified CDS sequence (opt1) from hemagglutinin__InfluenzaA__ADM32861

SEQ ID NO: 69792 - RNA, 1701 nt, Artificial Sequence; identical to SEQ ID NO: 67857
  derived and/or modified CDS sequence (opt1) from hemagglutinin__InfluenzaA__ADM32871

SEQ ID NO: 69793 - RNA, 1701 nt, Artificial Sequence; identical to SEQ ID NO: 68860
  derived and/or modified CDS sequence (opt1) from hemagglutinin__InfluenzaA__ADM32881

SEQ ID NO: 69794 - RNA, 1701 nt, Artificial Sequence
  derived and/or modified CDS sequence (opt1) from hemagglutinin__InfluenzaA__ADM32929
augaaggccauccuggugguccuccuguacaccuucgccaccgcgaacgccgacacgcugugcaucggcuaccacgccaacaacagcaccgacaccguggacaccgugcucgagaagaacgucacggugacccacuccgugaaccugcuggaggacaagcacaacgggaagcucugcaagcugcgcggcgucgcgccccugcaccucgggaagugcaacaucgccggcuggauccuggggaacccggagugcgagagccuguccaccgccagcuccuggagcuacaucguggagaccuccagcuccgacaacggcacgugcuaccccggcgacuucaucgacuacgaggagcuccgggagcagcugagcuccgugagcuccuucgagcgcuucgagaucuuccccaagaccagcuccuggcccaaccacgacagcaacaagggggucaccgccgccugcccgcacgccggcgcgaaguccuucuacaagaaccugaucuggcucgugaagaaggggaacagcuaccccaagcuguccaagagcuacaucaacgacaagggcaaggaggugcugguccucugggggauccaccaccccagcaccuccgccgaccagcagagccuguaccagaacgccgacgccuacguguucgugggcacgucccgguacagcaagaaguucaagcccgagaucgccauccgcccgaagguccgggaccaggagggccgcaugaacuacuacuggacccugguggagcccggggacaagaucaccuucgaggcgaccggcaaccucguggucccccgguacgccuucgccauggagcgcaacgccggguccggcaucaucaucagcgacacgcccgugcacgacugcaacacgaccugccagaccccgaagggcgccaucaacaccucccugcccuuccagaacauccaccccaucaccaucgggaagugccccaaguacgucaagagcaccaagcugcggcucgcgaccggccugcgcaacgugccguccauccagagccgggggcuguucggcgccaucgccggguucaucgagggcggcuggacggggaugguggacggcugguacggguaccaccaccagaacgagcagggcuccggguacgccgccgaccucaagagcacccagaacgcgaucgacaagaucaccaacaaggugaacuccgucaucgagaagaugaacacccaguucacggccgugggcaaggaguucaaccaccuggagaagcgcaucgagaaccugaacaagaaggucgacgacggcuuccucgacaucuggaccuacaacgccgagcugcuggugcuccuggagaacgagcggacccuggacuaccacgacagcaacgugaagaaccucuacgagaagguccgcucccagcugaagaacaacgccaaggagaucgggaacggcugcuucgaguucuaccacaagugcgacaacacgugcauggagagcgugaagaacgggaccuacgacuaccccaaguacuccgaggaggccaagcugaaccgggaggagaucgacggcgugaagcucgagagcacccgcaucuaccagauccuggcgaucuacuccaccgucgccagcagccuggugcucguggucucccugggggccaucagcuucuggaugugcuccaacggcagccugcggugccgcaucugcaucuga

SEQ ID NO: 69795 - RNA, 1701 nt, Artificial Sequence
  derived and/or modified CDS sequence (opt1) from hemagglutinin__InfluenzaA__ADM32939
auggaggccauccuggugguccuccuguacaccuucgccaccgcgaacgccgacacgcugugcaucggcuaccacgccaacaacagcaccgacaccguggacaccgugcucgagaagaacgucacggugacccacuccgugaaccugcuggaggacaagcacaacgggaagcucugcaagcugcgcggcgucgcgccccugcaccucgggaagugcaacaucgccggcuggauccuggggaacccggagugcgagagccuguccaccgccagcuccuggagcuacaucguggagaccuccagcuccgacaacggcacgugcuaccccggcgacuucaucgacuacgaggagcuccgggagcagcugagcuccgugagcuccuucgagcgcuucgagaucuuccccaagaccagcuccuggcccaaccacgacagcaacaagggggucaccgccgccugcccgcacgccggcgcgaaguccuucuacaagaaccugaucuggcucgugaagaaggggaacagcuaccccaagcuguccaagagcuacaucaacgacaagggcaaggaggugcugguccucugggggauccaccaccccagcaccuccgccgaccagcagagccuguaccagaacgccgacgccuacguguucgugggcuccagccgguacuccaagaaguucaagcccgagaucgccauccgcccgaagguccgggaccaggagggccgcaugaacuacuacuggacgcugguggagcccggggacaagaucaccuucgaggcgaccggcaaccucguggucccccgguacgccuucgccauggagcgcaacgccgggagcggcaucaucaucuccgacacccccgugcacgacugcaacacgaccugccagaccccgaagggcgccaucaacaccagccugcccuuccacaacauccaccccaucacgaucgggaagugccccaaguacgugaaguccaccaagcugcggcucgcgaccggccugcgcaacaucccgagcauccagucccgggggcuguucggcgccaucgccggguucaucgagggcggcuggaccgggauggucgacggcugguacggguaccaccaccagaacgagcagggcagcggguacgccgccgaccucaaguccacgcagaacgcgaucgacgagaucaccaacaaggugaacagcgugaucgagaagaugaacacccaguucaccgccgucggcaaggaguucaaccaccuggagaagcgcaucgagaaccugaacaagaagguggacgacggcuuccucgacaucuggacguacaacgccgagcugcugguccuccuggagaacgagcggacccuggacuaccacgacuccaacgugaagaaccucuacgagaaggugcgcagccagcugaagaacaacgccaaggagaucgggaacggcugcuucgaguucuaccacaagugcgacaacacgugcauggaguccgucaagaacgggaccuacgacuaccccaaguacagcgaggaggccaagcugaaccgggaggagaucgacggcgugaagcucgaguccacccgcaucuaccagauccuggcgaucuacagcaccguggccagcucccugguccucguggugagccugggggccaucuccuucuggaugugcagcaacggcucccugcggugccgcaucugcaucuga

SEQ ID NO: 69796 - RNA, 1701 nt, Artificial Sequence
  derived and/or modified CDS sequence (opt1) from hemagglutinin__InfluenzaA__ADM32949
augaaggccauccuggugguccuccuguacaccuucgccaccgcgaacgccgacacgcugugcaucggcuaccacgccaacaacagcaccgacaccguggacaccgugcucgagaagaacgucacggugacccacuccgugaaccugcuggaggacaagcacaacgggaagcucugcaagcugcgcggcgucgcgccccugcaccucgggaagugcaacaucgccggcuggauccuggggaacccggagugcgagagccuguccaccgccagcuccuggagcuacaucguggagaccuccagcuccgacaacggcacgugcuaccccggcgacuucaucgacuacgaggagcuccgggagcagcugagcuccgugagcuccuucgagcgcuucgagaucuuccccaagaccagcuccuggcccaaccacgacagcaacaagggggucaccgccgccugcccgcacgccggcgcgaaguccuucuacaagaaccugaucuggcucgugaagaaggggaacagcuaccccaagcuguccaagagcuacaucaacgacaagggcaaggaggugcugguccucugggggauccaccaccccagcaccuccgccgaccagcagagccuguaccagaacgccgacgccuacguguucgugggcacgucccgguacagcaagaaguucaagcccgagaucgccauccgcccgaagguccgggaccaggagggccgcaugaacuacuacuggacccugguggagcccggggacaagaucaccuucgaggcgaccggcaaccucguggucccccgguacgccuucgccauggagcgcaacgccggguccggcaucaucaucagcgacacgcccgugcacgacugcaacacgaccugccagaccccgaacggcgccaucaacaccucccugcccuuccagaacauccaccccaucaccaucgggaagugccccaaguacgucaagagcaccaagcugcggcucgcgaccggccugcgcaacaucccguccauccagagccgggggcuguucggcgccaucgccggguucaucgagggcggcuggacggggaugguggacggcugguacggguaccaccaccagaacgagcagggcuccggguacgccgccgaccucaagagcacccagaacgcgaucgacgagaucaccaacaaggugaacuccgugaucgagaagaugaacacccaguucacggccgucggcaaggaguucaaccaccuggagaagcgcaucgagaaccugaacaagaagguggacgacggcuuccucgacaucuggaccuacaacgccgagcugcugguccuccuggagaacgagcggacccuggacuaccacgacagcaacgugaagaaccucuacgagaaggugcgcucccagcugaagaacaacgccaaggagaucgggaacggcugcuucgaguucuaccacaagugcgacaacacgugcauggagagcgucaagaacgggaccuacgacuaccccaaguacuccgaggaggccaagcugaaccgggaggagaucgacggcgugaagcucgagagcacccgcaucuaccagauccuggcgaucuacuccaccguggccagcagccugguccucguggugucccugggggccaucagcuucuggaugugcuccaacggcagccugcggugccgcaucugcaucuga

SEQ ID NO: 69797 - RNA, 1701 nt, Artificial Sequence
  derived and/or modified CDS sequence (opt1) from hemagglutinin__InfluenzaA__ADM32958
augaaggccauccugguguuccuccuguacaccuucgccaccgcgaacgccgacacgcugugcaucggcuaccacgccaacaacagcaccgacaccgucgacaccgugcucgagaagaacgugacggucacccacuccgugaacauccuggaggacaagcacaacgggaagcugugcaagcuccgcggcguggcgccccugcaccuggggaagugcaacaucgccggcuggauccucgggaacccggagugcgagagccuguccaccgccagcuccuggagcuacaucgucgagaccuccagcuccgacaacggcacgugcuaccccggcgacuucaucgacuacgaggagcugcgggagcagcucagcuccgugagcuccuucgagcgcuucgagaucuuccccaagaccagcuccuggcccaaccacgacagcaacaagggggugaccgccgccugcccgcacgccggcgcgaaguccuucuacaagaaccugaucuggcuggucaagaaggggaacagcuaccccaagcucuccaagagcuacaucaacgacaagggcaaggaggugcuggugcugugggggauccaccaccccagcaccuccgccgaccagcagagccucuaccagaacgccgacgccuacgucuucguggaguccagccgguacuccaagaaguucaagcccgagaucgccauccgcccgaaggugcgggaccaggagggccgcaugaacuacuacuggacgcuggucgagcccggcgacaagaucaccuucgaggcgaccgggaaccugguggugccccgguacgccuucgccauggagcgcaacgccggcagcgggaucaucaucuccgacacccccguccacgacugcaacacgaccugccagaccccgaagggcgccaucaacaccagccuccccuuccagaacauccaccccaucacgaucggcaagugccccaaguacgugaaguccaccaagcugcggcuggcgaccgggcuccgcaacgugccgagcauccagucccggggccuguucggggccaucgccggcuucaucgagggcggguggaccggcauggucgacgggugguacggcuaccaccaccagaacgagcaggggagcggcuacgccgccgaccugaaguccacgcagaacgcgaucgacgagaucaccaacaaggugaacagcgugaucgagaagaugaacacccaguucaccgccgucgggaaggaguucaaccaccucgagaagcgccuggagaaccugaacaagaagguggacgacggcuuccucgacaucuggacguacaacgccgagcugcugguccuccuggagaacgagcggacccuggacuaccacgacuccaacgugaagaaccucuacgagaaggugcgcagccagcugaagaacaacgccaaggaggucggcaacgggugcuucgaguucuaccacaagugcgacaacacgugcauggaguccgugaagaacggcaccuacgacuaccccaaguacagcgaggaggccaagcugaaccgggaggagaucgacggggugaagcucgaguccacccgcaucuaccagauccuggcgaucuacagcaccgccgccagcucccugguccucguggugagccugggcgccaucuccuucuggaugugcagcaacgggucccugcggugccgcaucugcaucuga

SEQ ID NO: 69798 - RNA, 1701 nt, Artificial Sequence
  derived and/or modified CDS sequence (opt1) from hemagglutinin__InfluenzaA__ADM32977
augaaggccauccuggugguccuccugugcaccuucgccaccgcgaacgccgacacgcugugcaucggcuaccacgccaacaacagcaccgacaccguggacaccgugcucgagaagaacgucacggugacccacuccgugaaccugcuggaggacaagcacaacgggaagcucugcaagcugcgcggcgucgcgccccugcaccucgggaagugcaacaucgccggcuggauccuggggaacccggagugcgagagccuguccaccgccagcuccuggagcuacaucguggagaccuccagcuccgacaacggcacgugcuaccccggcgacuucaucgacuacgaggagcuccgggagcagcugagcuccgugagcuccuucgagcgcuucgagaucuuccccaagaccagcuccuggcccaaccacgacagcaacaagggggucaccgccgccugcccgcacgccggcgcgaaguccuucuacaagaaccugaucuggcucgugaagaaggggaacagcuaccccaagcuguccaagagcuacaucaacgacaagggcaaggaggugcugguccucugggggauccaccaccccagcaccuccgccgaccagcagagccuguaccagaacgccgacgccuacguguucgugggcacguccaaguacagcaagaaguucaagcccgagaucgccauccggccgaagguccgcgaccaggagggccggaugaacuacuacuggacccugguggagcccggggacaagaucaccuucgaggcgaccggcaaccucguggucccccgcuacgccuucgccauggagcggaacgccggguccggcaucaucaucagcgacacgcccgugcacgacugcaacacgaccugccagaccccgaagggcgccaucaacaccucccugcccuuccagaacauccaccccaucaccaucgggaagugccccaaguacgucaagagcaccaagcugcgccucgcgaccggccugcggaacgugccguccauccagagccgcgggcuguucggcgccaucgccggguucaucgagggcggcuggacggggaugguggacggcugguacggguaccaccaccagaacgagcagggcuccggguacgccgccgaccucaagagcacccagaacgcgaucgacggcaucaccaacaagaucaacuccgugaucgagaagaugaacacccaguucacggccgucggcaaggaguucaaccaccuggagaagcggaucgagaaccugaacaagaagguggacgacggguuccucgacaucuggaccuacaacgccgagcugcugguccuccuggagaacgagcgcacccuggacuaccacgacagcaacgugaagaaccucuacgagaaggugcggucccagcugaagaacaacgccaaggagaucggcaacgggugcuucgaguucuaccacaagugcgacaacacgugcauggagagcgucaagaacggcaccuacgacuaccccaaguacuccgaggaggccaagcugaaccgcgaggagaucgacggggugaagcucgagagcacccggaucuaccagauccuggcgaucuacuccaccguggccagcagccugguccucguggugucccugggcgccaucagcuucuggaugugcuccaacggcagccugcgcugccggaucugcaucuga

SEQ ID NO: 69799 - RNA, 1701 nt, Artificial Sequence
  derived and/or modified CDS sequence (opt1) from hemagglutinin__InfluenzaA__ADM32986
augaaggccauccuggugguccuccuguacaccuucgccaccgcgaacgccgacacgcugugcaucggcuaccacgccaacaacagcaccgacaccguggacaccgugcucgagaagaacgucacggugacccacuccgugaaccugcuggaggacaagcacaacgggaagcucugcaagcugcgcggcgucgcgccccugcaccucgggaagugcaacaucgccggcuggauccuggggaacccggagugcgagagccuguccaccgcgagcuccuggagcuacaucguggagaccuccagcuccgacaacggcacgugcuaccccggcgacuucaucgacuacgaggagcuccgggagcagcugagcuccgugagcuccuucgagcgcuucgagaucuuccccaagaccaacagcuggcccaaccacgacuccaacaagggggucaccgccgccugcccgcacgccggcgccaagagcuucuacaagaaccugaucuggcucgugaagaaggggaacuccuaccccaagcugagcaaguccuacaucaacgacaagggcaaggaggugcugguccucugggggauccaccaccccagcaccagcgccgaccagcagucccuguaccagaacgccgacgccuacguguucgugggcacgagcaaguacuccaagaaguucaagcccgagaucgccauccggccgaagguccgcgaccaggagggccggaugaacuacuacuggacccugguggagcccggggacaagaucaccuucgaggcgaccggcaaccucguggucccccgcuacgccuucgccauggagcggaacgccgggagcggcaucaucaucuccgacacgcccgugcacgacugcaacacgaccugccagaccccgaagggcgccaucaacaccagccugcccuuccagaacauccaccccaucaccaucgggaagugccccaaguacgugaaguccaccaagcugcgccucgcgaccggccugcggaacgucccgagcauccagucccgcgggcuguucggcgccaucgccggguucaucgagggcggcuggacggggaugguggacggcugguacggguaccaccaccagaacgagcagggcagcggguacgccgccgaccucaaguccacccagaacgcgaucgacggcaucaccaacaagaucaacagcgugaucgagaagaugaacacccaguucacggccgucggcaaggaguucaaccaccuggagaagcggaucgagaaccugaacaagaagguggacgacggguuccucgacaucuggaccuacaacgccgagcugcugguccuccuggagaacgagcgcacccugaacuaccacgacuccaacgugaagaaccucuacgagaaggugcggagccagcugaagaacaacgccaaggagaucggcaacgggugcuucgaguucuaccacaagugcgacaacacgugcauggaguccgucaagaacggcaccuacgacuaccccaaguacagcgaggaggccaagcugaaccgcgaggagaucgacggggugaagcucgaguccacccggaucuaccagauccuggcgaucuacagcaccguggccuccagccugguccucguggugagccugggcgccaucuccuucuggaugugcagcaacggcucccugcgcugccggaucugcaucuga

SEQ ID NO: 69800 - RNA, 1701 nt, Artificial Sequence
  derived and/or modified CDS sequence (opt1) from hemagglutinin__InfluenzaA__ADM32995
augaaggccauccuggugguccuccuguacaccuucgccaccgcgaacgccgacacgcugugcaucggcuaccacgccaacaacagcaccgacaccguggacaccgugcucgagaagaacgucacggugacccacuccgugaaccugcuggaggacaagcacaacgggaagcucugcaagcugcgcggcgucgcgccccugcaccucgggaagugcaacaucgccggcuggauccuggggaacccggagugcgagagccuguccaccgcgagcuccuggagcuacaucguggagaccuccagcuccgacaacggcacgugcuaccccggcgacuucaucgacuacgaggagcuccgggagcagcugagcuccgugagcuccuucgagcgcuucgagaucuuccccaagaccaacagcuggcccaaccacgacuccaacaagggggucaccgccgccugcccgcacgccggcgccaagagcuucuacaagaaccugaucuggcucgugaagaaggggaacuccuaccccaagcugagcaaguccuacaucaacgacaagggcaaggaggugcugguccucugggggauccaccaccccagcaccagcgccgaccagcagucccuguaccagaacgccgacgccuacguguucgugggcacgagcaaguacuccaagaaguucaagcccgagaucgccauccggccgaagguccgcgaccaggagggccggaugaacuacuacuggacccugguggagcccggggacaagaucaccuucgaggcgaccggcaaccucguggucccccgcuacgccuucgccauggagcggaacgccgggagcggcaucaucaucuccgacacgcccgugcacgacugcaacacgaccugccagaccccgaagggcgccaucaacaccagccugcccuuccagaacauccaccccaucaccaucgggaagugccccaaguacgugaaguccaccaagcugcgccucgcgaccggccugcggaacgucccgagcauccagucccgcgggcuguucggcgccaucgccggguucaucgagggcggcuggacggggaugguggacggcugguacggguaccaccaccagaacgagcagggcagcggguacgccgccgaccucaaguccacccagaacgcgaucgacggcaucaccaacaagaucaacagcgugaucgagaagaugaacacccaguucacggccgucggcaaggaguucaaccaccuggagaagcggaucgagaaccugaacaagaagguggacgacggguuccucgacaucuggaccuacaacgccgagcugcugguccuccuggagaacgagcgcacccuggacuaccacgacuccaacgugaagaaccucuacgagaaggugcggagccagcugaagaacaacgccaaggagaucggcaacgggugcuucgaguucuaccacaagugcgacaacacgugcauggaguccgucaagaacggcaccuacgacuaccccaaguacagcgaggaggccaagcugaaccgcgaggagaucgacggggugaagcucgaguccacccggaucuaccagauccuggcgaucuacagcaccguggccuccagccugguccucguggugagccugggcgccaucuccuucuggaugugcagcaacggcucccugcgcugccggaucugcaucuga

SEQ ID NO: 69801 - RNA, 1701 nt, Artificial Sequence; identical to SEQ ID NO: 67794
  derived and/or modified CDS sequence (opt1) from hemagglutinin__InfluenzaA__ADM33004

SEQ ID NO: 69802 - RNA, 1701 nt, Artificial Sequence; identical to SEQ ID NO: 66693
  derived and/or modified CDS sequence (opt1) from hemagglutinin__InfluenzaA__ADM33023

SEQ ID NO: 69803 - RNA, 1701 nt, Artificial Sequence
  derived and/or modified CDS sequence (opt1) from hemagglutinin__InfluenzaA__ADM33040
augaaggccauccuggugguccuccuguacaccuucgccaccgcgaacgccgacacgcugugcaucggcuaccacgccaacaacagcaccgacaccguggacaccgugcucgagaagaacgucacggugacccacuccgugaaccugcuggaggacaagcacaacgggaagcucugcaagcugcgcggcgucgcgccccugcaccucgggaagugcaacaucgccggcuggauccuggggaacccggagugcgagagccuguccaccgccagcuccuggagcuacaucguggagaccuccagcuccgacaacggcacgugcuaccccggcgacuucaucgacuacgaggagcuccgggagcagcugagcuccgugagcuccuucgagcgcuucgagaucuuccccaagaccagcuccuggcccaaccacgacagcaacaagggggucaccgccgccugcccgcacgccggcgcgaaguccuucuacaagaaccugaucuggcucgugaagaaggggaacagcuaccccaagcuguccaagagcuacaucaacgacaagggcaaggaggugcugguccucugggggauccaccaccccagcaccuccgccgaccagcagagccuguaccagaacgccgacgccuacguguucgugggcuccagccgguacuccaagaaguucaagcccgagaucgccauccgcccgaagguccgggaccaggagggccgcaugaacuacuacuggacgcugguggagcccggggacaagaucaccuucgaggcgaccggcaaccucguggucccccgguacgccuucgccauggagcgcaacgccgggagcggcaucaucaucuccgacacccccgugcacgacugcaacacgaccugccagaccccgaagggcgccaucaacaccagccugcccuuccagaacauccaccccaucacgaucgggaagugccccaaguacgugaaguccaccaagcugcggcucgcgaccggccugcgcaacgucccgagcauccagucccgggggcuguucggcgccaucgccggguucaucgagggcggcuggaccgggaugguggacggcugguacggguaccaccaccagaacgagcagggcagcggguacgccgccgaccucaaguccacgcagaacgcgaucgacgagaucaccaacaaggugaacagcgucaucgagaagaugaacacccaguucaccgccgugggcaaggaguucaaccaccuggagaagcgcaucgagaaccugaacaagaaggucgacgacggcuuccucgacaucuggacguacaacgccgagcugcuggugcuccuggagaacgagcggacccuggacuaccacgacuccaacgugaagaaccucuacgagaagguccgcagccagcugaagaacaacgccaaggagaucgggaacggcugcuucgaguucuaccacaagugcgacaacacgugcauggaguccgugaagaacgggaccuacgacuaccccaaguacagcgaggaggccaagcugaaccgggaggagaucgacggcgugaagcucgaguccacccgcaucuaccagauccuggcgaucuacagcaccgucgccagcucccuggugcucguggucagccugggggccaucuccuucuggaugugcagcaacggcucccugcggugccgcaucugcaucuga

SEQ ID NO: 69804 - RNA, 1701 nt, Artificial Sequence
  derived and/or modified CDS sequence (opt1) from hemagglutinin__InfluenzaA__ADM33050
augaaggccauccuggugguccuccuguacaccuucgccaccgcgaacgccgacacgcugugcaucggcuaccacgccaacaacagcaccgacaccguggacaccgugcucgagaagaacgucacggugacccacuccgugaaccugcuggaggacaagcacaacgggaagcucugcaagcugcgcggcgucgcgccccugcaccucgggaagugcaacaucgccggcuggauccuggggaacccggagugcgagagccuguccaccgccagcuccuggagcuacaucguggagaccuccagcuccgacaacggcacgugcuaccccggcgacuucaucgacuacgaggagcuccgggagcagcugagcuccgugagcuccuucgagcgcuucgagaucuuccccaagaccagcuccuggcccaaccacgacagcaacaagggggucaccgccgccugcccgcacgccggcgcgaaguccuucuacaagaaccugaucuggcucgugaagaaggggaacagcuaccccaagcugaacaaguccuacaucaacgacaagggcaaggaggugcugguccucugggggauccaccaccccagcaccagcgccgaccagcagucccuguaccagaacgccgacgccuacguguucgugggcacgagccgguacuccaagaaguucaagcccgagaucgccauccgcccgaagguccgggaccaggagggccgcaugaacuacuacuggacccugguggagcccggggacaagaucaccuucgaggcgaccggcaaccuccuggugccccgguacgccuucgccauggagcgcaacgccgggagcggcaucaucaucuccgacacgcccguccacgacugcaacacgaccugccagaccccgaagggcgccaucaacaccagccugcccuuccagaacauccaccccaucaccaucgggaagugccccaaguacgugaaguccaccaagcuccggcuggcgaccggccugcgcaacgugccgagcauccagucccggggccucuucggggccaucgccggguucaucgagggcggcuggacggggauggucgacggcugguacggguaccaccaccagaacgagcagggcagcggguacgccgccgaccugaaguccacccagaacgcgaucgacgagaucaccaacaaggugaacagcgugaucgagaagaugaacacccaguucacggccgucggcaaggaguucaaccaccuggagaagcgcaucgagaaccucaacaagaagguggacgacggcuuccuggacaucuggaccuacaacgccgagcugcucguccugcuggagaacgagcggacccucgacuaccacgacuccaacgugaagaaccuguacgagaaggugcgcagccagcugaagaacaacgccaaggagaucgggaacggcugcuucgaguucuaccacaagugcgacaacacgugcauggaguccgucaagaacgggaccuacgacuaccccaaguacagcgaggaggccaagcucaaccgggaggagaucgacggcgugaagcuggaguccacccgcaucuaccagauccuggcgaucuacagcaccguggccuccagccucguccugguggugagccugggggccaucuccuucuggaugugcagcaacggcucccuccggugccgcaucugcaucuga

SEQ ID NO: 69805 - RNA, 1701 nt, Artificial Sequence
  derived and/or modified CDS sequence (opt1) from hemagglutinin__InfluenzaA__ADM33069
augaaggccauccuggugguccuccuguacaccuucgccaccgcgaacgccgacacgcugugcaucggcuaccacgccaacaacagcaccgacaccguggacaccgugcucgagaagaacgucacggugacccacuccgugaaccugcuggaggacaagcacaacgggaagcucugcaagcugcgcggcgucgcgccccugcaccucgggaagugcaacaucgccggcuggauccuggggaacccggagugcgagagccuguccaccgccagcuccuggagcuacaucguggagaccuccagcuccgacaacggcacgugcuaccccggcgacuucaucgacuacgaggagcuccgggagcagcugagcuccgugagcuccuucgagcgcuucgagaucuuccccaagaccagcuccuggcccaaccacgacagcaacaagggggucaccgccgccugcccgcacgccggcgcgaaguccuucuacaagaaccugaucuggcucgugaagaaggggaacagcuaccccaagcuguccaagagcuacaucaacgacaagggcaaggaggugcugguccucugggggauccaccaccccagcaccuccgccgaccagcagagccuguaccagaacgccgacgccuacguguucgugggcacgucccgguacagcaagaaguucaagcccgagaucgccauccgcccgaagguccgggaccaggagggccgcaugaacuacuacuggacccugguggagcccggggacaagaucaccuucgaggcgaccggcaaccucguggucccccgguacgccuucgccauggagcgcaacgccggguccggcaucaucaucagcgacacgcccgugcacgacugcaacacgaccugccagaccccggagggcgccaucaacaccucccugcccuuccagaacauccaccccaucaccaucgggaagugccccaaguacgucaagagcaccaagcugcggcucgcgaccggccugcgcaacgugccguccauccagagccgggggcuguucggcgccaucgccggguucaucgagggcggcuggacggggaugguggacggcugguacggguaccaccaccagaacgagcagggcuccggguacgccgccgaccucaagagcacccagaacgcgaucgacgagaucaccaacaaggugaacuccgucaucgagaagaugaacacccaguucacggccgugggcaaggaguucaaccaccuggagaagcgcaucgagaaccugaacaagaaggucgacgacggcuuccucgacaucuggaccuacaacgccgagcugcuggugcuccuggagaacgagcggacccuggacuaccacgacagcaacgugaagaaccucuacgagaagguccgcucccagcugaagaacaacgccaaggagaucgggaacggcugcuucgaguucuaccacaagugcgacaacacgugcauggagagcgugaagaacgggaccuacgacuaccccaaguacuccgaggaggccaagcugaaccgggaggagaucgacggcgugaagcucgagagcacccgcaucuaccagauccuggcgaucuacuccaccgucgccagcagccuggugcucguggucucccugggggccaucagcuucuggaugugcuccaacggcagccugcggugccgcaucugcaucuga

SEQ ID NO: 69806 - RNA, 1701 nt, Artificial Sequence
  derived and/or modified CDS sequence (opt1) from hemagglutinin__InfluenzaA__ADM33079
augaaggccauccuggugguccuccuguacaccuucgccaccgcgaacgccgacacgcugugcaucggcuaccacgccaacaacagcaccgacaccguggacaccgugcucgagaagaacgucacggugacccacuccgugaaccugcuggaggacaagcacaacgggaagcucugcaagcugcgcggcgucgcgccccugcaccucgggaagugcaacaucgccggcuggauccuggggaacccggagugcgagagccuguccaccgccagcuccuggagcuacaucguggagaccuccagcuccgacaacggcacgugcuaccccggcgacuucaucgacuacgaggagcuccgggagcagcugagcuccgugagcuccuucgagcgcuucgagaucuuccccaagaccagcuccuggcccaaccacgacagcaacaagggggucaccgccgccugcccgcacgccggcgcgaaguccuucuacaagaaccugaucuggcucgugaagaaggggaacagcuaccccaagcuguccaagagcuacaucaacgacaagggcaaggaggugcugguccucugggggauccaccaccccagcaccuccgccgaccagcagagccuguaccagaacgccgacgccuacguguucgugggcacgucccgguacagcaagaaguucaagcccgagaucgccauccgcccgaagguccgggaccaggagggccgcaugaacuacuacuggacccugguggagcccggggacaagaucaccuucgaggcgaccggcaaccucguggucccccgguacgccuucgccauggagcgcaacgccggguccggcaucaucaucagcgacacgcccgugcacgacugcaacacgaccugccagaccccgaagggcgccaucaacaccucccugcccuuccagaacauccaccccaucaccaucgggaagugccccaaguacgucaagagcaccaagcugcggcucgcgaccggccugcgcaacgugccguccauccagagccgggggcuguucggcgccaucgccggguucaucgagggcggcuggacggggaugguggacggcugguacggguaccaccaccagaacgagcagggcuccggguacgccgccgaccucaagagcacccagaacgcgaucgacgagaucaccaacaaggugaacuccgucaucgagaagaugaacacccaguucacggccgugggcaaggaguucaaccaccuggagaagcgcaucgagaaccugaacaagaaggucgacgacggcuuccucgacaucuggaccuacaacgccgagcugcuggugcuccuggagaacgagcggacccuggacuaccacgacagcaacgugaagaaccucuacgagaagguccgcucccagcugaagaacaacgccaaggagaucgggaacggcugcuucgaguucuaccacaagugcgacaacacgugcauggagagcgugaagaacgggaccuacgacuaccccaaguacuccgaggaggccaagcugaaccgggaggagaucgacggcgugaagcucgagagcacccgcaucuaccagauccuggcgaucuacuccaccgucgccagcagccuggugcucguggucucccugggggccaucagcuucuggaugugcuccaacggcagccugcggugccgcaucugcaucuga

SEQ ID NO: 69807 - RNA, 1701 nt, Artificial Sequence
  derived and/or modified CDS sequence (opt1) from hemagglutinin__InfluenzaA__ADM33099
augaaggccauccuggugguccuccuguacaccuucgccaccgcgaacgccgacacgcugugcaucggcuaccacgccaacaacagcaccgacaccguggacaccgugcucgagaagaacgucacggugacccacuccgugaaccugcuggaggacaagcacaacgggaagcucugcaagcugcgcggcgucgcgccccugcaccucgggaagugcaacaucgccggcuggauccuggggaacccggagugcgagagccuguccaccgccagcuccuggagcuacaucguggagaccuccagcuccgacaacggcacgugcuaccccggcgacuucaucgacuacgaggagcuccgggagcagcugagcuccgugagcuccuucgagcgcuucgagaucuuccccaagaccagcuccuggcccaaccacgacagcaacaagggggucaccgccgccugcccgcacgccggcgcgaaguccuucuacaagaaccugaucuggcucgugaagaaggggaacagcuaccccaagcuguccaagagcuacaucaacgacaagggcaaggaggugcugguccucugggggauccaccaccccagcaccuccgccgaccagcagagccuguaccagaacgccgacgccuacguguucgugggcacgucccgguacagcaagaaguucaagcccgagaucgccauccgcccgaagguccgggaccaggagggccgcaugaacuacuacuggacccugguggagcccggggacaagaucaccuucgaggcgaccggcaaccucauggugccccgguacgccuucgccauggagcgcaacgccggguccggcaucaucaucagcgacacgcccguccacgacugcaacacgaccugccagaccccgaagggcgccaucaacaccucccugcccuuccagaacauccaccccaucaccaucgggaagugccccaaguacgucaagagcaccaagcugcggcucgcgaccggccugcgcaacgugccguccauccagagccgggggcuguucggcgccaucgccggguucaucgagggcggcuggacggggaugguggacggcugguacggguaccaccaccagaacgagcagggcuccggguacgccgccgaccucaagagcacccagaacgcgaucgacgagaucaccaacaaggugaacuccgugaucgagaagaugaacacccaguucacggccgucggcaaggaguucaaccaccuggagaagcgcaucgagaaccugaacaagaagguggacgacggcuuccucgacaucuggaccuacaacgccgagcugcugguccuccuggagaacgagcggacccuggacuaccacgacagcaacgugaagaaccucuacgagaaggugcgcucccagcugaagaacaacgccaaggagaucgggaacggcugcuucgaguucuaccacaagugcgacaacacgugcauggagagcgucaagaacgggaccuacgacuaccccaaguacuccgaggaggccaagcugaaccgggaggagaucgacggcgugaagcucgagagcacccgcaucuaccagauccuggcgaucuacuccaccguggccagcagccugguccucguggugucccugggggccaucagcuucuggaugugcuccaacggcagccugcggugccgcaucugcaucuga

SEQ ID NO: 69808 - RNA, 1701 nt, Artificial Sequence; identical to SEQ ID NO: 69807
  derived and/or modified CDS sequence (opt1) from hemagglutinin__InfluenzaA__ADM33109

SEQ ID NO: 69809 - RNA, 1701 nt, Artificial Sequence
  derived and/or modified CDS sequence (opt1) from hemagglutinin__InfluenzaA__ADM33128
augaaggccauccuggugguccuccuguacaccuucgccaccgcgaacgccgacacgcugugcaucggcuaccacgccaacaacagcaccgacaccguggacaccgugcucgagaagaacgucacggugacccacuccgugaaccugcuggaggacaagcacaacgggaagcucugcaagcugcgcggcgucgcgccccugcaccucgggaagugcaacaucgccggcuggauccuggggaacccggagugcgagagccuguccaccgccagcuccuggagcuacaucguggagaccuccagcuccgacaacggcacgugcuaccccggcgacuucaucgacuacgaggagcuccgggagcagcugagcuccgugagcuccuucgagcgcuucgagaucuuccccaagaccagcuccuggcccaaccacgacagcaacaagggggucaccgccgccugcccgcacgccggcgcgaaguccuucuacaagaaccugaucuggcucgugaagaaggggaacagcuaccccaagcuguccaagagcuacaucaacgacaagggcaaggaggugcugguccucugggggauccaccaccccagcaccuccgccgaccagcagagccuguaccagaacgccgacgccuacguguucgugggcacgucccgguacagcaagaaguucaagcccgagaucgccauccgcccgaagguccgggagcaggagggccgcaugaacuacuacuggacccugguggagcccggggacaagaucaccuucgaggcgaccggcaaccucguggucccccgguacgccuucgccauggagcgcaacgccggguccggcaucaucaucagcgacacgcccgugcacgacugcaacacgaccugccagaccccgaagggcgccaucaacaccucccugcccuuccagaacauccaccccaucaccaucgggaagugccccaaguacgucaagagcaccaagcugcggcucgcgaccggccugcgcaacgugccguccauccagagccgggggcuguucggcgccaucgccggguucaucgagggcggcuggacggggaugguggacggcugguacggguaccaccaccagaacgagcagggcuccggguacgccgccgaccucaagagcacccagaacgcgaucgacgagaucaccaacaaggugaacuccgucaucgagaagaugaacacccaguucacggccgugggcaaggaguucaaccaccuggagaagcgcaucgagaaccugaacaagaaggucgacgacggcuuccucgacaucuggaccuacaacgccgagcugcuggugcuccuggagaacgagcggacccuggacuaccacgacagcaacgugaagaaccucuacgagaagguccgcucccagcugaagaacaacgccaaggagaucgggaacggcugcuucgaguucuaccacaagugcgacaacacgugcauggagagcgugaagaacgggaccuacgacuaccccaaguacuccgaggaggccaagcugaaccgggaggagaucgacggcgugaagcucgagagcacccgcaucuaccagauccuggcgaucuacuccaccgucgccagcagccuggugcucguggucucccugggggccaucagcuucuggaugugcuccaacggcagccugcggugccgcaucugcaucuga

SEQ ID NO: 69810 - RNA, 1701 nt, Artificial Sequence; identical to SEQ ID NO: 69809
  derived and/or modified CDS sequence (opt1) from hemagglutinin__InfluenzaA__ADM33137

SEQ ID NO: 69811 - RNA, 1701 nt, Artificial Sequence; identical to SEQ ID NO: 69809
  derived and/or modified CDS sequence (opt1) from hemagglutinin__InfluenzaA__ADM33147

SEQ ID NO: 69812 - RNA, 1701 nt, Artificial Sequence; identical to SEQ ID NO: 69809
  derived and/or modified CDS sequence (opt1) from hemagglutinin__InfluenzaA__ADM33157

SEQ ID NO: 69813 - RNA, 1701 nt, Artificial Sequence
  derived and/or modified CDS sequence (opt1) from hemagglutinin__InfluenzaA__ADM33167
augaaggccauccuggugguccuccuguacaccuucgccaccgcgaacgccgacacgcugugcaucggcuaccacgccaacaacagcaccgacaccguggacaccgugcucgagaagaacgucacggugacccacuccgugaacauccuggaggacaagcacaacgggaagcugugcaagcuccgcggcgucgcgccccugcaccuggggaagugcaacaucgccggcuggauccucgggaacccggagugcgagagccuguccaccgccagcuccuggagcuacaucguggagaccuccagcuccgacaacggcacgugcuaccccggcgacuucaucgacuacgaggagcugcgggagcagcucagcuccgugagcuccuucgagcgcuucgagaucuuccccaagaccagcuccuggcccaaccacgacagcaacaagggggucaccgccgccugcccgcacgccggcgcgaaguccuucuacaagaaccugaucuggcuggugaagaaggggaacagcuaccccaagcucuccaagagcuacaucaacgacaagggcaaggaggugcugguccugugggggauccaccaccccagcaccuccgccgaccagcagagccucuaccagaacgccgacgccuacguguucgugggcacgucccgguacagcaagaaguucaagcccgagaucgccauccgcccgaagguccgggaccaggagggccgcaugaacuacuacuggacccugguggagcccggggacaagaucaccuucgaggcgaccggcaaccugguggucccccgguacgccuucgccauggagcgcaacgccggguccggcaucaucaucagcgacacgcccgugcacgacugcaacacgaccugccagaccccgaagggcgccaucaacaccucccuccccuuccagaacauccaccccaucaccaucgggaagugccccaaguacgucaagagcaccaagcugcggcuggcgaccggccuccgcaacgugccguccauccagagccgggggcuguucggcgccaucgccggguucaucgagggcggcuggacggggaugguggacggcugguacggguaccaccaccagaacgagcagggcuccggguacgccgccgaccucaagagcacccagaacgcgaucgacgagaucaccaacaaggugaacuccgucaucgagaagaugaacacccaguucacggccgugggcaaggaguucaaccaccuggagaagcgcaucgagaaccugaacaagaaggucgacgacggcuuccuggacaucuggaccuacaacgccgagcuccuggugcugcucgagaacgagcggacccuggacuaccacgacagcaacgugaagaaccuguacgagaagguccgcucccagcucaagaacaacgccaaggagaucgggaacggcugcuucgaguucuaccacaagugcgacaacacgugcauggagagcgugaagaacgggaccuacgacuaccccaaguacuccgaggaggccaagcugaaccgggagaagaucgacggcgugaagcuggagagcacccgcaucuaccagauccucgcgaucuacuccaccgucgccagcagccuggugcugguggucucccucggggccaucagcuucuggaugugcuccaacggcagccugcggugccgcaucugcaucuga

SEQ ID NO: 69814 - RNA, 1701 nt, Artificial Sequence; identical to SEQ ID NO: 68880
  derived and/or modified CDS sequence (opt1) from hemagglutinin__InfluenzaA__ADM33177

SEQ ID NO: 69815 - RNA, 1701 nt, Artificial Sequence; identical to SEQ ID NO: 69809
  derived and/or modified CDS sequence (opt1) from hemagglutinin__InfluenzaA__ADM33186

SEQ ID NO: 69816 - RNA, 1701 nt, Artificial Sequence; identical to SEQ ID NO: 69809
  derived and/or modified CDS sequence (opt1) from hemagglutinin__InfluenzaA__ADM33195

SEQ ID NO: 69817 - RNA, 1701 nt, Artificial Sequence; identical to SEQ ID NO: 69806
  derived and/or modified CDS sequence (opt1) from hemagglutinin__InfluenzaA__ADM33204

SEQ ID NO: 69818 - RNA, 1701 nt, Artificial Sequence
  derived and/or modified CDS sequence (opt1) from hemagglutinin__InfluenzaA__ADM33222
auggaggccauccuggugguccuccuguacaccuucgccaccgcgaacgccgacacgcugugcaucggcuaccacgccaacaacagcaccgacaccguggacaccgugcucgagaagaacgucacggugacccacuccgugaaccugcuggaggacaagcacaacgggaagcucugcaagcugcgcggcgucgcgccccugcaccucgggaagugcaacaucgccggcuggauccuggggaacccggagugcgagagccuguccaccgccagcuccuggagcuacaucguggagaccuccagcuccgacaacggcacgugcuaccccggcgacuucaucgacuacgaggagcuccgggagcagcugagcuccgugagcuccuucgagcgcuucgagaucuuccccaagaccagcuccuggcccaaccacgacagcaacaagggggucaccgccgccugcccgcacgccggcgcgaaguccuucuacaagaaccugaucuggcucgugaagaaggggaacagcuaccccaagcuguccaagagcuacaucaacgacaagggcaaggaggugcugguccucugggggauccaccaccccagcaccuccgccgaccagcagagccuguaccagaacgccgacgccuacguguucgugggcuccagccgguacuccaagaaguucaagcccgagaucgccauccgcccgaagguccgggaccaggagggccgcaugaacuacuacuggacgcugguggagcccggggacaagaucaccuucgaggcgaccggcaaccucguggucccccgguacgccuucgccauggagcgcaacgccgggagcggcaucaucaucuccgacacccccgugcacgacugcaacacgaccugccagaccccgaagggcgccaucaacaccagccugcccuuccacaacauccaccccaucacgaucgggaagugccccaaguacgugaaguccaccaagcugcggcucgcgaccggccugcgcaacgucccgagcauccagucccgggggcuguucggcgccaucgccggguucaucgagggcggcuggaccgggaugguggacggcugguacggguaccaccaccagaacgagcagggcagcggguacgccgccgaccucaaguccacgcagaacgcgaucgacgagaucaccaacaaggugaacagcgucaucgagaagaugaacacccaguucaccgccgugggcaaggaguucaaccaccuggagaagcgcaucgagaaccugaacaagaaggucgacgacggcuuccucgacaucuggacguacaacgccgagcugcuggugcuccuggagaacgagcggacccuggacuaccacgacuccaacgugaagaaccucuacgagaagguccgcaaccagcugaagaacaacgccaaggagaucgggaacggcugcuucgaguucuaccacaagugcgacaacacgugcauggagagcgugaagaacgggaccuacgacuaccccaaguacuccgaggaggccaagcugaaccgggaggagaucgacggcgugaagcucgagagcacccgcaucuaccagauccuggcgaucuacuccaccgucgccagcagccuggugcucguggucucccugggggccaucagcuucuggaugugcuccaacggcagccugcggugccgcaucugcaucuga

SEQ ID NO: 69819 - RNA, 1701 nt, Artificial Sequence
  derived and/or modified CDS sequence (opt1) from hemagglutinin__InfluenzaA__ADM33232
auggaggccauccuggugguccuccuguacaccuucgccaccgcgaacgccgacacgcugugcaucggcuaccacgccaacaacagcaccgacaccguggacaccgugcucgagaagaacgucacggugacccacuccgugaaccugcuggaggacaagcacaacgggaagcucugcaagcugcgcggcgucgcgccccugcaccucgggaagugcaacaucgccggcuggauccuggggaacccggagugcgagagccuguccaccgccagcuccuggagcuacaucguggagaccuccagcuccgacaacggcacgugcuaccccggcgacuucaucgacuacgaggagcuccgggagcagcugagcuccgugagcuccuucgagcgcuucgagaucuuccccaagaccagcuccuggcccaaccacgacagcaacaagggggucaccgccgccugcccgcacgccggcgcgaaguccuucuacaagaaccugaucuggcucgugaagaaggggaacagcuaccccaagcuguccaagagcuacaucaacgacaagggcaaggaggugcugguccucugggggauccaccaccccagcaccuccgccgaccagcagagccuguaccagaacgccgacgccuacguguucgugggcuccagccgguacuccaagaaguucaagcccgagaucgccauccgcccgaagguccgggaccaggagggccgcaugaacuacuacuggacgcugguggagcccggggacaagaucaccuucgaggcgaccggcaaccucguggucccccgguacgccuucgccauggagcgcaacgccgggagcggcaucaucaucuccgacacccccgugcacgacugcaacacgaccugccagaccccgaagggcgccaucaacaccagccugcccuuccacaacauccaccccaucacgaucgggaagugccccaaguacgugaaguccaccaagcugcggcucgcgaccggccugcgcaacgucccgagcauccagucccgggggcuguucggcgccaucgccggguucaucgagggcggcuggaccgggaugguggacggcugguacggguaccaccaccagaacgagcagggcagcggguacgccgccgaccucaaguccacgcagaacgcgaucgacgagaucaccaacaaggugaacagcgucaucgagaagaccaacacccaguucacggccgugggcaaggaguucaaccaccuggagaagcgcaucgagaaccugaacaagaaggucgacgacggcuuccucgacaucuggaccuacaacgccgagcugcuggugcuccuggagaacgagcggacccuggacuaccacgacuccaacgugaagaaccucuacgagaagguccgcaaccagcugaagaacaacgccaaggagaucgggaacggcugcuucgaguucuaccacaagugcgacaacacgugcauggagagcgugaagaacgggaccuacgacuaccccaaguacuccgaggaggccaagcugaaccgggaggagaucgacggcgugaagcucgagagcacccgcaucuaccagauccuggcgaucuacuccaccgucgccagcagccuggugcucguggucucccugggggccaucagcuucuggaugugcuccaacggcagccugcagugccggaucugcaucuga

SEQ ID NO: 69820 - RNA, 1701 nt, Artificial Sequence
  derived and/or modified CDS sequence (opt1) from hemagglutinin__InfluenzaA__ADM33241
augaaggccauccuggugguccuccuguacaccuucgccaccgcgaacgccgacacgcugugcaucggcuaccacgccaacaacagcaccgacaccguggacaccgugcucgagaagaacgucacggugacccacuccgugaacauccuggaggacaagcacaacgggaagcugugcaagcuccgcggcgucgcgccccugcaccuggggaagugcaacaucgccggcuggauccucgggaacccggagugcgagagccuguccaccgccagcuccuggagcuacaucguggagaccuccagcuccgacaacggcacgugcuaccccggcgacuucaucgacuacgaggagcugcgggagcagcucagcuccgugagcuccuucgagcgcuucgagaucuuccccaagaccagcuccuggcccaaccacgacagcaacaagggggucaccgccgccugcccgcacgccggcgcgaaguccuucuacaagaaccugaucuggcuggugaagaaggagaacagcuaccccaagcucuccaagagcuacaucaacgacaaggggaaggaggugcugguccuguggggcauccaccaccccagcaccuccgccgaccagcagagccucuaccagaacgccgacgccuacguguucgugggguccagccgguacuccaagaaguucaagcccgagaucacgauccgcccgaagguccgggaccaggagggccgcaugaacuacuacuggacccugguggagcccggcgacaagaucaccuucgaggccaccgggaaccugguggucccccgguacgcguucgccauggagcgcaacgccggcagcgggaucaucaucuccgacacgcccgugcacgacugcaacacgaccugccagaccccgaagggcgccaucaacaccagccuccccuuccagaacauccaccccaucaccaucggcaagugccccaaguacgugaaguccaccaagcugcggcuggccaccgggcuccgcaacgucccgagcauccagucccggggccuguucggggcgaucgccggcuucaucgagggcggguggacgggcaugguggacgggugguacggcuaccaccaccagaacgagcaggggagcggcuacgccgccgaccugaaguccacccagaacgccaucgacgagaucaccaacaaggugaacagcgucaucgagaagaugaacacccaguucacggcgguggggaaggaguucaaccaccucgagaagcgcaucgagaaccugaacaagaaggucgacgacggcuuccuggacaucuggaccuacaacgccgagcuccuggugcugcucgagaacgagcggacccuggacuaccacgacuccaacgugaagaaccuguacgagaagguccgcagccagcucaagaacaacgccaaggagaucggcaacgggugcuucgaguucuaccacaagugcgacaacacgugcauggaguccgugaagaacggcaccuacgacuaccccaaguacagcgaggaggccaagcugaaccgggaggagaucgacggggugaagcuggaguccacccgcaucuaccagauccucgccaucuacagcaccgucgcgagcucccuggugcugguggucagccucggcgccaucuccuucuggaugugcagcaacgggucccugcggugccgcaucugcaucuga

SEQ ID NO: 69821 - RNA, 1701 nt, Artificial Sequence; identical to SEQ ID NO: 69818
  derived and/or modified CDS sequence (opt1) from hemagglutinin__InfluenzaA__ADM33251

SEQ ID NO: 69822 - RNA, 1701 nt, Artificial Sequence
  derived and/or modified CDS sequence (opt1) from hemagglutinin__InfluenzaA__ADM33260
augaaggccauccuggugguccuccuguacaccuucgccaccgcgaacgccgacacgcugugcaucggcuaccacgccaacaacagcaccgacaccguggacaccgugcucgagaagaacgucacggugacccacuccgugaacauccuggaggacaagcacaacgggaagcugugcaagcuccgcggcgucgcgccccugcaccuggggaagugcaacaucgccggcuggauccucgggaacccggagugcgagagccuguccaccgccagcuccuggagcuacaucguggagaccuccagcuccgacaacggcacgugcuaccccggcgacuucaucgacuacgaggagcugcgggagcagcucagcuccgugagcuccuucgagcgcuucgagaucuuccccaagaccagcuccuggcccaaccacgacagcaacaagggggucaccgccgccugcccgcacgccggcgcgaaguccuucuacaagaaccugaucuggcuggugaagaagggggacagcuaccccaagcucuccaagagcuacaucaacgacaagggcaaggaggugcugguccugugggggauccaccaccccagcaccuccgccgaccagcagagccucuaccagaacgccgacgccuacguguucgugggcuccagccgguacuccaagaaguucaagcccgagaucgccauccgcccgaagguccgggaccaggagggccgcaugaacuacuacuggacgcugguggagcccggggacaagaucaccuucgaggcgaccggcaaccugguggucccccgguacgccuucgccauggagcgcaacgccgggagcggcaucaucaucuccgacacccccgugcacgacugcaacacgaccugccagaccccgaagggcgccaucaacaccagccuccccuuccagaacauccaccccaucacgaucgggaagugccccaaguacgugaaguccaccaagcugcggcuggcgaccggccuccgcaacgucccgagcauccagucccgggggcuguucggcgccaucgccggguucaucgagggcggcuggaccgggaugguggacggcugguacggguaccaccaccagaacgagcagggcagcggguacgccgccgaccugaaguccacgcagaacgcgaucgacgagaucaccaacaaggugaacagcgucaucgagaagaugaacacccaguucaccgccgugggcaaggaguucaaccaccucgagaagcgcaucgagaaccugaacaagaaggucgacgacggcuuccuggacaucuggacguacaacaccgagcuccuggugcugcucgagaacgagcggacccuggacuaccacgacuccaacgugaagaaccuguacgagaagguccgcagccagcucaagaacaacgccaaggagaucgggaacggcugcuucgaguucuaccacaagugcgacaacacgugcauggaguccgugaagaacgggaccuacgacuaccccaaguacagcgaggaggccaagcugaaccgggaggagaucgacggcgugaagcuggaguccacccgcaucuaccagauccucgccaucuacagcaccgucgcgagcucccuggugcugguggucagccucggggccaucuccuucuggaugugcagcaacggcucccugcggugccgcaucugcaucuga

SEQ ID NO: 69823 - RNA, 1701 nt, Artificial Sequence
  derived and/or modified CDS sequence (opt1) from hemagglutinin__InfluenzaA__ADM33280
augaaggccauccuggugguccuccuguacaccuucgccaccgcgaacgccgacacgcugugcaucggcuaccacgccaacaacagcaccgacaccguggacaccgugcucgagaagaacgucacggugacccacuccgugaacauccuggaggacaagcacaacgggaagcugugcaagcuccgcggcgucgcgccccugcaccuggggaagugcaacaucgccggcuggauccucgggaacccggagugcgagagccuguccaccgugagcuccuggagcuacaucguggagaccuccagcuccgacaacggcacgugcuaccccggcgacuucaucgacuacgaggagcugcgggagcagcucagcuccgucagcuccuucgagcgcuucgagaucuuccccaagaccagcuccuggcccaaccacgacagcaacaagggggugaccgccgccugcccgcacgccggcgccaaguccuucuacaagaaccugaucuggcuggugaagaaggggaacagcuaccccaagcucuccaagagcuacaucaacgacaagggcaaggagguccuggugcugugggggauccaccaccccagcaccuccgcggaccagcagagccucuaccagaacgccgacgccuacguguucgucggcuccagccgguacuccaagaaguucaagcccgagaucgccauccgcccgaaggugcgggaccaggagggccgcaugaacuacuacuggacgcugguggagcccggggacaagaucaccuucgaggccaccggcaaccuggucgugccccgguacgcguucgccauggagcgcaacgccgggagcggcaucaucaucuccgacacccccgugcacgacugcaacacgaccugccagaccccgcggggcgccaucaacaccagccuccccuuccagaacauccaccccaucacgaucgggaagugccccaaguacgucaaguccaccaagcugcgccuggccaccggccuccggaacgugccgagcauccagucccgcgggcuguucggcgcgaucgccggguucaucgagggcggcuggaccgggaugguggacggcugguacggguaccaccaccagaacgagcagggcagcggguacgccgccgaccugaaguccacgcagaacgccaucgacgagaucaccaacaaggucaacagcgugaucgagaagaugaacacccaguucaccgcggucggcaaggaguucaaccaccucgagaagcggaucgagaaccugaacaagaagguggacgacggcuuccuggacaucuggacguacaacgccgagcuccuggugcugcucgagaacgagcgcacccuggacuaccacgacuccaacgucaagaaccuguacgagaaggugcggagccagcucaagaacaacgccaaggagaucgggaacggcugcuucgaguucuaccacaagugcgacaacacgugcauggaguccgugaagaacgggaccuacgacuaccccaaguacagcgaggaggccaagcugaaccgcgaggagaucgacggcgucaagcuggaguccacccggaucuaccagauccucgccaucuacagcaccguggcgagcucccuggugcuggucgugagccucggggccaucuccuucuggaugugcagcaacggcucccugcagugccgcaucugcaucuga

SEQ ID NO: 69824 - RNA, 1701 nt, Artificial Sequence; identical to SEQ ID NO: 67140
  derived and/or modified CDS sequence (opt1) from hemagglutinin__InfluenzaA__ADM33290

SEQ ID NO: 69825 - RNA, 1701 nt, Artificial Sequence; identical to SEQ ID NO: 66693
  derived and/or modified CDS sequence (opt1) from hemagglutinin__InfluenzaA__ADM33300

SEQ ID NO: 69826 - RNA, 1701 nt, Artificial Sequence; identical to SEQ ID NO: 66680
  derived and/or modified CDS sequence (opt1) from hemagglutinin__InfluenzaA__ADM33310

SEQ ID NO: 69827 - RNA, 1701 nt, Artificial Sequence
  derived and/or modified CDS sequence (opt1) from hemagglutinin__InfluenzaA__ADM33320
augaaggccauccugguggucaugcucuacaccuucgccaccgcgaacgccgacacgcugugcaucggcuaccacgccaacaacagcaccgacaccguggacaccgugcuggagaagaacgucacggugacccacuccgugaaccuccuggaggacaagcacaacgggaagcugugcaagcuccgcggcgucgcgccccugcaccuggggaagugcaacaucgccggcuggauccucgggaacccggagugcgagagccuguccaccgcgagcuccuggagcuacaucguggagaccuucuccagcgacaacggcacgugcuaccccggcgacuucaucgacuacgaggagcugcgggagcagcucuccagcguguccagcuucgagcgcuucgagaucuuccccaagaccuccagcuggcccaaccacgacuccaacaagggggucaccgccgccugcccgcacgccggcgccaagagcuucuacaagaaccugaucuggcuggugaagaaggggaacuccuaccccaagcucagcaaguccuacaucaacgacaagggcaaggaggugcugguccugugggggauccaccaccccagcaccagcgccgaccagcagucccucuaccagaacgccgacgccuacguguucgugggcagcucccgguacagcaagaaguucaagcccgagaucgccauccgcccgaagguccgggaccaggagggccgcaugaacuacuacuggacgcugguggagcccggggacaagaucaccuucgaggcgaccggcaaccugguggucccccgguacgccuucgccauggagcgcaacgccggguccggcaucaucaucagcgacacccccgugcacgacugcaacacgaccugccagaccccgaagggcgccaucaacaccucccuccccuuccagaacauccaccccaucacgaucgggaagugccccaaguacgucaagagcaccaagcugcggcuggcgaccggccuccgcaacgugccguccauccagagccgggggcuguucggcgccaucgccggguucaucgagggcggcuggaccgggaugguggacggcugguacggguaccaccaccagaacgagcagggcuccggguacgccgccgaccucaagagcacgcagaacgcgaucgacgagaucaccaacaaggugaacuccgucaucgagaagaugaacacccaguucaccgccgugggcaaggaguucaaccaccuggagaagcgcaucgagaaccugaacaagaaggucgacgacggcuuccuggacaucuggacguacaacgccgagcuccuggugcugcucgagaacgagcggacccuggacuaccacgacagcaacgugaagaaccuguacgagaagguccgcucccagcucaagaacaacgccaaggagaucgggaacggcugcuucgaguucuaccacaagugcgacaacacgugcauggagagcgugaagaacgggaccuacgacuaccccaaguacuccgaggaggccaagcugaaccgggaggagaucgacggcgugaagcuggagagcacccgcaucuaccagauccucgcgaucuacuccaccgucgccagcagccuggugcugguggucucccucggggccaucagcuucuggaugugcuccaacggcagccugcagugccggaucugcaucuga

SEQ ID NO: 69828 - RNA, 1701 nt, Artificial Sequence; identical to SEQ ID NO: 66719
  derived and/or modified CDS sequence (opt1) from hemagglutinin__InfluenzaA__ADM33340

SEQ ID NO: 69829 - RNA, 1701 nt, Artificial Sequence
  derived and/or modified CDS sequence (opt1) from hemagglutinin__InfluenzaA__ADM33355
augaaggccauccugguggucaugcucuacaccuucgccaccgcgaacgccgacacgcugugcaucggcuaccacgccaacaacagcaccgacaccguggacaccgugcuggagaagaacgucacggugacccacuccgugaaccuccuggaggacaagcacaacgggaagcugugcaagcuccgcggcgucgcgccccugcaccuggggaagugcaacaucgccggcuggauccucgggaacccggagugcgagagccuguccaccgccagcuccuggagcuacaucguggagaccuccagcuccgacaacggcacgugcuaccccggcgacuucaucgacuacgaggagcugcgggagcagcucagcuccgugagcuccuucgagcgcuucgagaucuuccccaagaccagcuccuggcccaaccacgacagcaacaagggggucaccgccgccugcccgcacgccggcgcgaaguccuucuacaagaaccugaucuggcuggugaagaaggggaacagcuaccccaagcucuccaagagcuacaucaacgacaagggcaaggaggugcugguccugugggggauccaccaccccagcaccuccgccgaccagcagagccucuaccagaacgccgacgccuacguguucgugggcuccagccgguacuccaagaaguucaagcccgagaucgccauccgcccgaagguccgggaccaggagggccgcaugaacuacuacuggacgcugguggagcccggggacaagaucaccuucgaggcgaccggcaaccugguggucccccgguacgccuucgccauggagcgcaacgccgggagcggcaucaucaucuccgacacccccgugcacaacugcaacacgaccugccagaccccgaagggcgccaucaacaccagccuccccuuccagaacauccaccccaucacgaucgggaagugccccaaguacgugaaguccaccaagcugcggcuggcgaccggccuccgcaacgucccgagcauccagucccgggggcuguucggcgccaucgccggguucaucgagggcggcuggaccgggaugguggacggcugguacggguaccaccaccagaacgagcagggcagcggguacgccgccgaccugaaguccacgcagaacgcgaucgacgagaucaccaacaaggugaacagcgucaucgagaagaugaacacccaguucaccgccgugggcaaggaguucaaccaccucgagaagcgcaucgagaaccugaacaagaaggucgacgacggcuuccuggacaucuggacguacaacgccgagcuccuggugcugcucgagaacgagcggacccuggacuaccacgacuccaacgugaagaaccuguacgagaagguccgcagccagcucaagaacaacgccaaggagaucgggaacggcugcuucgaguucuaccacaagugcgacaacacgugcauggaguccgugaagaacgggaccuacgacuaccccaaguacagcgaggaggccaagcugaaccgggaggagaucgacggcgugaagcuggaguccacccgcaucuaccagauccucgcgaucuacagcaccgucgccagcucccuggugcugguggucagccucggggccaucuccuucuggaugugcagcaacggcucccugcagugccggaucugcaucuga

SEQ ID NO: 69830 - RNA, 1701 nt, Artificial Sequence; identical to SEQ ID NO: 69829
  derived and/or modified CDS sequence (opt1) from hemagglutinin__InfluenzaA__ADM33365

SEQ ID NO: 69831 - RNA, 1701 nt, Artificial Sequence; identical to SEQ ID NO: 66719
  derived and/or modified CDS sequence (opt1) from hemagglutinin__InfluenzaA__ADM33375

SEQ ID NO: 69832 - RNA, 1701 nt, Artificial Sequence
  derived and/or modified CDS sequence (opt1) from hemagglutinin__InfluenzaA__ADM33385
augaaggccauccugguggucaugcucuacaccuucgccaccgcgaacgccgacacgcugugcaucggcuaccacgccaacaacagcaccgacaccguggacaccgugcuggagaagaacgucacggugacccacuccgugaaccuccuggaggacaagcacaacgggaagcugugcaagcuccgcggcgucgcgccccugcaccuggggaagugcaacaucgccggcuggauccucgggaacccggagugcgagagccuguccaccgccagcuccuggagcuacaucguggagaccuccagcuccgacaacggcacgugcuaccccggcgacuucaucgacuacgaggagcugcgggagcagcucagcuccgugagcuccuucgagcgcuucgagaucuuccccaagaccagcuccuggcccaaccacgacagcaacaagggggucaccgccgccugcccgcacgccggcgcgaaguccuucuacaagaaccugaucuggcuggugaagaaggggaacagcuaccccaagcucuccaagagcuacaucaacgacaagggcaaggaggugcugguccugugggggauccaccaccccagcaccuccgccgaccagcagagccucuaccagaacgccgacgccuacguguucgugggcuccagccgguacuccaagaaguucaagcccgagaucgccauccgcccgaagguccgggaccaggagggccgcaugaacuacuacuggacgcugguggagcccggggacaagaucaccuucgaggcgaccggcaaccugguggucccccgguacgccuucgccauggagcgcaacgccgggagcggcaucaucaucuccgacacccccgugcacgacugcaacacgaccugccagaccagcaagggcgccaucaacaccucccucccguuccagaacauccaccccaucacgaucgggaagugccccaaguacgucaagagcaccaagcugcggcuggcgaccggccuccgcaacgugcccuccauccagagccgggggcuguucggcgccaucgccggguucaucgagggcggcuggaccgggaugguggacggcugguacggguaccaccaccagaacgagcagggcuccggguacgccgccgaccucaagagcacgcagaacgcgaucgacgagaucaccaacaaggugaacuccgucaucgagaagaugaacacccaguucaccgccgugggcaaggaguucaaccaccuggagaagcgcaucgagaaccugaacaagaaggucgacgacggcuuccuggacaucuggacguacaacgccgagcuccuggugcugcucgagaacgagcggacccuggacuaccacgacagcaacgugaagaaccuguacgagaagguccgcucccagcucaagaacaacgccaaggagaucgggaacggcugcuucgaguucuaccacaagugcgacaacacgugcauggagagcgugaagaacgggaccuacgacuacccgaaguacuccgaggaggccaagcugaaccgggaggagaucgacggcgugaagcuggagagcacccgcaucuaccagauccucgcgaucuacagcaccgucgccuccagccuggugcugguggucucccucggggccaucagcuucuggaugugcuccaacggcagccugcagugccggaucugcaucuga

SEQ ID NO: 69833 - RNA, 1701 nt, Artificial Sequence; identical to SEQ ID NO: 67140
  derived and/or modified CDS sequence (opt1) from hemagglutinin__InfluenzaA__ADM33395

SEQ ID NO: 69834 - RNA, 1701 nt, Artificial Sequence; identical to SEQ ID NO: 67140
  derived and/or modified CDS sequence (opt1) from hemagglutinin__InfluenzaA__ADM33405

SEQ ID NO: 69835 - RNA, 1701 nt, Artificial Sequence; identical to SEQ ID NO: 69829
  derived and/or modified CDS sequence (opt1) from hemagglutinin__InfluenzaA__ADM33415

SEQ ID NO: 69836 - RNA, 1701 nt, Artificial Sequence; identical to SEQ ID NO: 67536
  derived and/or modified CDS sequence (opt1) from hemagglutinin__InfluenzaA__ADM33425

SEQ ID NO: 69837 - RNA, 1701 nt, Artificial Sequence
  derived and/or modified CDS sequence (opt1) from hemagglutinin__InfluenzaA__ADM34007
augaaggccauccuggugguccuccuguacaccuucgccaccgcgaacgccgacacgcugugcaucggcuaccacgccaacaacagcaccgacaccguggacaccgugcucgagaagaacgucacggugacccacuccgugaaccugcuggaggacaagcacaacgggaagcucugcaagcugcgcggcgucgcgccccugcaccucgggaagugcaacaucgccggcuggauccuggggaacccggagugcgagagccuguccaccgccagcuccuggagcuacaucguggagaccuccagcuccgacaacggcacgugcuaccccggcgacuucaucgacuacgaggagcuccgggagcagcugagcuccgugagcuccuucgagcgcuucgagaucuuccccaagaccagcuccuggcccaaccacgacagcaacaagggggucaccgccgccugcccgcacgccggcgcgaaguccuucuacaagaaccugaucuggcucgugaagaaggggaacagcuaccccaagcuguccaagagcuacaucaacgacaagggcaaggaggugcugguccucugggggauccaccaccccagcaccuccgccgaccagcagagccuguaccagaacgccgacgccuacguguucgugggcacgucccgguacagcaagaaguucaagcccgagaucgccauccgcccgaagguccgggaccaggagggccgcaugaacuacuacuggacccuggaggagcccggggacaagaucaccuucgaggcgaccggcaaccucguggugccccgguacgccuucgccauggagcgcaacgccggguccggcaucaucaucagcgacacgcccguccacgacugcaacacgaccugccagaccccgaagggcgccaucaacaccucccugcccuuccagaacauccaccccaucaccaucgggaagugccccaaguacgucaagagcaccaagcugcggcucgcgaccggccugcgcaacgugccguccauccagagccgggggcuguucggcgccaucgccggguucaucgagggcggcuggacggggaugguggacggcugguacggguaccaccaccagaacgagcagggcuccggguacgccgccgaccucaagagcacccagaacgcgaucgacgagaucaccaacaaggugaacuccgugaucgagaagaugaacacccaguucacggccgucggcaaggaguucaaccaccuggagaagcgcaucgagaaccugaacaagaagguggacgacggcuuccucgacaucuggaccuacaacgccgagcugcugguccuccuggagaacgagcggacccuggacuaccacgacagcaacgugaagaaccucuacgagaaggugcgcucccagcugaagaacaacgccaaggagaucgggaacggcugcuucgaguucuaccacaagugcgacaacacgugcauggagagcgucaagaacgggaccuacgacuaccccaaguacuccgaggaggccaagcugaaccgggaggagaucgacggcgugaagcucgagagcacccgcaucuaccagauccuggcgaucuacuccaccguggccagcagccugguccucguggugucccugggggccaucagcuucuggaugugcuccaacggcagccugcagugccggaucugcaucuga

SEQ ID NO: 69838 - RNA, 1701 nt, Artificial Sequence; identical to SEQ ID NO: 66693
  derived and/or modified CDS sequence (opt1) from hemagglutinin__InfluenzaA__ADM52443

SEQ ID NO: 69839 - RNA, 1701 nt, Artificial Sequence
  derived and/or modified CDS sequence (opt1) from hemagglutinin__InfluenzaA__ADM52453
augaaggccauccuggugguccuccuguacaccuucgccaccgcgaacgccgacacgcugugcaucggcuaccacgccaacaacagcaccgacaccguggacaccgugcucgagaagaacgucacggugacccacuccgugaacauccuggaggacaagcacaacgggaagcugugcaagcuccgcggcgucgcgccccugcaccuggggaagugcaacaucgccggcuggauccucgggaacccggagugcgagagccuguccaccgccagcuccuggagcuacaucguggagaccuccagcuccgacaacggcacgugcuaccccggcgacuucaucgacuacgaggagcugcgggagcagcucagcuccgugagcuccuucgagcgcuucgagaucuuccccaagaccagcuccuggcccaaccacgacagcaacaagggggucaccgccgccugcccgcacgccggcgcgaaguccuucuacaagaaccugaucuggcuggugaagaaggggaacagcuaccccaagcucuccaagagcuacaucaacgacaagggcaaggaggugcugguccugugggggauccaccaccccagcaccuccgccgaccagcagagccucuaccagaacgccgacgccuacguguucgugggcuccagccgguacuccaagaaguucaagcccgagaucgccauccgcccgaagguccgggaccaggagggccgcaugaacuacuacuggacgcugguggagcccggggacaagaucaccuucgaggcgaccggcaaccugguggucccccgguacgccuucgccauggagcgcaacgccgggagcggcaucaucaucuccgacacccccauccacgacugcaacacgaccugccagaccccgaagggcgccaucaacaccagccuccccuuccagaacgugcaccccaucacgaucgggaagugccccaaguacgugaaguccaccaagcugcggcuggcgaccggccuccgcaacgucccgagcauccagucccgggggcuguucggcgccaucgccggguucaucgagggcggcuggaccgggaugguggacggcugguacggguaccaccaccagaacgagcagggcagcggguacgccgccgaccugaaguccacgcagaacgcgaucgacgagaucaccaacaaggugaacagcgucaucgagaagaugaacacccaguucaccgccgugggcaaggaguucaaccaccucgagaagcgcaucgagaaccugaacaagaaggucgacgacggcuuccuggacaucuggacguacaacgccgagcuccuggugcugcucgagaacgagcggacccuggacuaccacgacuccaacgugaagaaccuguacgagaagguccgcagccagcucaagaacaacgccaaggagaucgggaacggcugcuucgaguucuaccacaagugcgacaacacgugcauggaguccgugaagaacgggaccuacgacuaccccaaguacagcgaggaggccaagcugaaccgggaggagaucgacggcgugaagcuggaguccacccgcaucuaccagauccucgcgaucuacagcaccgucgccagcucccuggugcugguggucagccucggggccaucuccuucuggaugugcagcaacggcucccugcagugccggaucugcaucuga

SEQ ID NO: 69840 - RNA, 1701 nt, Artificial Sequence
  derived and/or modified CDS sequence (opt1) from hemagglutinin__InfluenzaA__ADM52473
augaaggccauccuggccgugcuccuguacaccuucgcgaccgccaacgccgacacgcugugcaucggcuaccacgccaacaacagcaccgacaccgucgacaccgugcucgagaagaacgugacggucacccacuccgugaaccugcuggaggacaagcacaacgggaagcucugcaagcugcgcggcguggcgccccugcaccucgggaagugcaacaucgccggcuggauccuggggaacccggagugcgagagccuguccaccgccagcuccuggagcuacaucgucgagaccuccagcuccggcaacggcacgugcuaccccggggacuucaucgacuacgaggagcuccgggagcagcugagcuccgugagcuccuucgagcgcuucgagaucuuccccaagaccagcuccuggcccaaccacgacagcaacaagggcgugaccgccgccugcccgcacgcgggggccaaguccuucuacaagaaccugcucuggcuggucaagaagggcaacagcuaccccaagcuguccaagagcuacaucaacgacaaggggaaggaggugcucgugcuguggggcauccaccaccccagcaccuccgccgaccagcagagccuguaccagaacgccgacgccuacgucuucgugggcacgucccgguacagcaagaaguucaagcccgagaucgcgauccgcccgaaggugcgggaccaggaggggcgcaugaacuacuacuggacccucgucggccccggggacaagaucaccuucgaggccaccggcaaccugguggugccccgguacgccuucgccauggagcgcaacgccggcuccgggaucaucaucagcgacacgcccguccacgacugcaacacgaccugccagaccccgaagggcgcgaucaacaccucccugcccuuccagaacauccaccccaucaccaucgggaagugccccaaguacgucaagagcaccaagcuccggcuggccaccggccugcgcaacgugccguccauccagagccgggggcuguucggcgccaucgccggcuucaucgagggcggguggacggggaugguggacggcugguacggguaccaccaccagaacgagcagggcuccggcuacgccgcggaccucaagagcacccagaacgccaucgacgagaucaccaacaaggugaacuccgugaucgagaagaugaacacccaguucacggccgucgggaaggaguucaaccaccuggagaagcgcaucgagaaccucaacaagaagguggacgacggcuuccuggacaucuggaccuacaacgccgagcugcucguccugcuggagaacgagcggacccucgacuaccacgacagcaacgugaagaaccuguacgagaaggugcgcucccagcugaagaacaacgccaaggagaucgggaacggcugcuucgaguucuaccacaagugcgacaacacgugcauggagagcgucaagaacgggaccuacgacuaccccaaguacuccgaggaggcgaagcucaaccgggaggagaucgacggcgugaagcuggagagcacccgcaucuaccagauccuggccaucuacuccaccguggccagcagccucguccugguggugucccugggcgccaucagcuucuggaugugcuccaacgggagccuccagugccggaucugcaucuga

SEQ ID NO: 69841 - RNA, 1701 nt, Artificial Sequence; identical to SEQ ID NO: 67857
  derived and/or modified CDS sequence (opt1) from hemagglutinin__InfluenzaA__ADM52483

SEQ ID NO: 69842 - RNA, 1701 nt, Artificial Sequence; identical to SEQ ID NO: 66873
  derived and/or modified CDS sequence (opt1) from hemagglutinin__InfluenzaA__ADM52493

SEQ ID NO: 69843 - RNA, 1701 nt, Artificial Sequence; identical to SEQ ID NO: 66873
  derived and/or modified CDS sequence (opt1) from hemagglutinin__InfluenzaA__ADM52513

SEQ ID NO: 69844 - RNA, 1701 nt, Artificial Sequence; identical to SEQ ID NO: 66873
  derived and/or modified CDS sequence (opt1) from hemagglutinin__InfluenzaA__ADM52524

SEQ ID NO: 69845 - RNA, 1701 nt, Artificial Sequence; identical to SEQ ID NO: 66873
  derived and/or modified CDS sequence (opt1) from hemagglutinin__InfluenzaA__ADM52534

SEQ ID NO: 69846 - RNA, 1701 nt, Artificial Sequence; identical to SEQ ID NO: 66873
  derived and/or modified CDS sequence (opt1) from hemagglutinin__InfluenzaA__ADM52554

SEQ ID NO: 69847 - RNA, 1701 nt, Artificial Sequence; identical to SEQ ID NO: 66873
  derived and/or modified CDS sequence (opt1) from hemagglutinin__InfluenzaA__ADM52564

SEQ ID NO: 69848 - RNA, 1701 nt, Artificial Sequence; identical to SEQ ID NO: 66680
  derived and/or modified CDS sequence (opt1) from hemagglutinin__InfluenzaA__ADM52574

SEQ ID NO: 69849 - RNA, 1701 nt, Artificial Sequence; identical to SEQ ID NO: 66693
  derived and/or modified CDS sequence (opt1) from hemagglutinin__InfluenzaA__ADM52584

SEQ ID NO: 69850 - RNA, 1701 nt, Artificial Sequence
  derived and/or modified CDS sequence (opt1) from hemagglutinin__InfluenzaA__ADM52594
augaaggccauccuggugguccuccuguacaccuucgccaccgcgaacgccgacacgcugugcaucggcuaccacgccaacaacagcaccgacaccguggacaccgugcucgagaagaacgucacggugacccacuccgugaaccugcuggaggacaagcacaacgggaagcucugcaagcugcgcggcgucgcgccccugcaccucgggaagugcaacaucgccggcuggauccuggggaacccggagugcgagagccuguccaccgccagcuccuggagcuacaucguggagaccuccagcuccgacaacggcacgugcuaccccggcgacuucaucgacuacgaggagcuccgggagcagcugagcuccgugagcuccuucgagcgcuucgagaucuuccccaagaccagcuccuggcccaaccacgacagcaacaagggggucaccgccgccugcccgcacgccggcgcgaaguccuucuacaagaaccugaucuggcucgugaagaaggggaacagcuaccccaagcuguccaagagcuacaucaacgacaagggcaaggaggugcugguccucugggggauccaccaccccagcaccuccgccgaccagcagagccuguaccagaacgccgacgccuacguguucgugggcacguccaaguacagcaagaaguucaagcccgagaucgccauccggccgaagguccgcgaccaggagggccggaugaacuacuacuggacccugguggagcccggggacaagaucaccuucgaggcgaccggcaaccucguggucccccgcuacgccuucgccauggagcggaacgccggguccggcaucaucaucagcgacacgcccgugcacgacugcaacacgaccugccagaccccgaagggcgccaucaacaccucccugcccuuccagaacauccaccccaucaccaucgggaagugccccaaguacgucaagagcaccaagcugcgccucgcgaccggccugcggaacgugccguccauccagagccgcgggcuguucggcgccaucgccggguucaucgagggcggcuggacggggaugguggacggcugguacggguaccaccaccagaacgagcagggcuccggguacgccgccgaccucaagagcacccagaacgcgaucgacaagaucaccaacaaggugaacuccgucaucgagaagaugaacacccaguucacggccgugggcaaggaguucaaccaccuggagaagcggaucgagaaccugaacaagaaggucgacgacggcuuccucgacaucuggaccuacaacgccgagcugcuggugcuccuggagaacgagcgcacccuggacuaccacgacagcaacgugaagaaccucuacgagaagguccggucccagcugaagaacaacgccaaggagaucgggaacggcugcuucgaguucuaccacaagugcgacaacacgugcauggagagcgugaagaacgggaccuacgacuaccccaaguacuccgaggaggccaagcugaaccgcgaggagaucgacggcgugaagcucgagagcacccggaucuaccagauccuggcgaucuacuccaccgucgccagcagccuggugcucguggucucccugggggccaucagcuucuggaugugcuccaacggcagccugcagugccgcaucugcaucuga

SEQ ID NO: 69851 - RNA, 1701 nt, Artificial Sequence; identical to SEQ ID NO: 66873
  derived and/or modified CDS sequence (opt1) from hemagglutinin__InfluenzaA__ADM52604

SEQ ID NO: 69852 - RNA, 1701 nt, Artificial Sequence; identical to SEQ ID NO: 66873
  derived and/or modified CDS sequence (opt1) from hemagglutinin__InfluenzaA__ADM52614

SEQ ID NO: 69853 - RNA, 1701 nt, Artificial Sequence; identical to SEQ ID NO: 68465
  derived and/or modified CDS sequence (opt1) from hemagglutinin__InfluenzaA__ADM52624

SEQ ID NO: 69854 - RNA, 1701 nt, Artificial Sequence; identical to SEQ ID NO: 66873
  derived and/or modified CDS sequence (opt1) from hemagglutinin__InfluenzaA__ADM52634

SEQ ID NO: 69855 - RNA, 1701 nt, Artificial Sequence; identical to SEQ ID NO: 66873
  derived and/or modified CDS sequence (opt1) from hemagglutinin__InfluenzaA__ADM52644

SEQ ID NO: 69856 - RNA, 1701 nt, Artificial Sequence; identical to SEQ ID NO: 66873
  derived and/or modified CDS sequence (opt1) from hemagglutinin__InfluenzaA__ADM52654

SEQ ID NO: 69857 - RNA, 1701 nt, Artificial Sequence; identical to SEQ ID NO: 68281
  derived and/or modified CDS sequence (opt1) from hemagglutinin__InfluenzaA__ADM52664

SEQ ID NO: 69858 - RNA, 1701 nt, Artificial Sequence; identical to SEQ ID NO: 68465
  derived and/or modified CDS sequence (opt1) from hemagglutinin__InfluenzaA__ADM52674

SEQ ID NO: 69859 - RNA, 1701 nt, Artificial Sequence; identical to SEQ ID NO: 66873
  derived and/or modified CDS sequence (opt1) from hemagglutinin__InfluenzaA__ADM52684

SEQ ID NO: 69860 - RNA, 1701 nt, Artificial Sequence; identical to SEQ ID NO: 68465
  derived and/or modified CDS sequence (opt1) from hemagglutinin__InfluenzaA__ADM52704

SEQ ID NO: 69861 - RNA, 1701 nt, Artificial Sequence; identical to SEQ ID NO: 68281
  derived and/or modified CDS sequence (opt1) from hemagglutinin__InfluenzaA__ADM52714

SEQ ID NO: 69862 - RNA, 1701 nt, Artificial Sequence
  derived and/or modified CDS sequence (opt1) from hemagglutinin__InfluenzaA__ADM86399
augaaggccauccuggugguccuccuguacaccuucgccaccgcgaacgccgacacgcugugcaucggcuaccacgccaacaacagcaccgacaccguggacaccgugcucgagaagaacgucacggugacccacuccgugaacauccuggaggacaagcacaacgggaagcugugcaagcuccgcggcgucgcgccccugcaccuggggaagugcaacaucgccggcuggauccucgggaacccggagugcgagagccuguccaccgccagcuccuggagcuacaucguggagaccuccagcuccgacaacggcacgugcuaccccggcgacuucaucgacuacgaggagcugcgggagcagcucagcuccgugagcuccuucgagcgcuucgagaucuuccccaagaccagcuccuggcccaaccacgacagcaacaagggggucaccgccgccugcccgcacgccggcgcgaaguccuucuacaagaaccugaucuggcuggugaagaaggggaacagcuaccccaagcucuccaagagcuacaucaacgacaagggcaaggaggugcugguccugugggggauccaccaccccagcaccuccgccgaccagcagagccucuaccagaacgccgacgccuacguguucgugggcuccagccgguacuccaagaaguucaagcccgagaucgccauccgcccgaagguccgggaccaggagggccgcaugaacuacuacuggacgcugguggagcccggggacaagaucaccuucgaggcgaccggcaaccugguggucccccgguacgccuucgccauggagcgcaacgccgggagcggcaucaucaucuccgacacccccgugcacgacugcaacacgaccugccagaccccgaagggcgccgugaacaccagccuccccuuccagaacauccaccccaucacgaucgggaagugccccaaguacgucaaguccaccaagcugcggcuggcgaccggccuccgcaacgugccgagcauccagucccgggggcuguucggcgccaucgccggguucaucgagggcggcuggaccgggaugguggacggcugguacggguaccaccaccagaacgagcagggcagcggguacgccgccgaccugaaguccacgcagaacgcgaucgacgagaucaccaacaaggucaacagcgugaucgagaagaugaacacccaguucaccgccgucggcaaggaguucaaccaccucgagaagcgcaucgagaaccugaacaagaagguggacgacggcuuccuggacaucuggacguacaacgccgagcuccuggugcugcucgagaacgagcggacccuggacuaccacgacuccaacgucaagaaccuguacgagaaggugcgcagccagcucaagaacaacgccaaggagguggggaacggcugcuucgaguucuaccacaagugcgacaacacgugcauggaguccgucaagaacgggaccuacgacuaccccaaguacagcgaggaggccaagcugaaccgggaggagaucgacggcgugaagcuggaguccacccgcaucuaccagauccucgcgaucuacagcaccgccgccagcucccuggugcuggucgugagccucggggccaucuccuucuggaugugcagcaacggcucccugcagugccggaucugcaucuga

SEQ ID NO: 69863 - RNA, 1701 nt, Artificial Sequence; identical to SEQ ID NO: 66693
  derived and/or modified CDS sequence (opt1) from hemagglutinin__InfluenzaA__ADM86409

SEQ ID NO: 69864 - RNA, 1701 nt, Artificial Sequence; identical to SEQ ID NO: 66693
  derived and/or modified CDS sequence (opt1) from hemagglutinin__InfluenzaA__ADM86419

SEQ ID NO: 69865 - RNA, 1701 nt, Artificial Sequence; identical to SEQ ID NO: 68342
  derived and/or modified CDS sequence (opt1) from hemagglutinin__InfluenzaA__ADM86440

SEQ ID NO: 69866 - RNA, 1701 nt, Artificial Sequence; identical to SEQ ID NO: 66693
  derived and/or modified CDS sequence (opt1) from hemagglutinin__InfluenzaA__ADM86450

SEQ ID NO: 69867 - RNA, 1707 nt, Artificial Sequence
  derived and/or modified CDS sequence (opt1) from hemagglutinin__InfluenzaA__ADM95450
auggagaagaucgugcugcuguucgccaucgucagccuggugaaguccgaccagaucugcaucggcuaccacgccaacaacagcaccgagcaggucgacaccaucauggagaagaacgugacggugacccacgcgcaggacauccuggagaagacccacaacgggaagcucugcgaccuggacggcgugaagccccugauccuccgcgacugcuccgucgccggguggcugcugggcaacccgaugugcgacgaguucaucaacgugcccgaguggagcuacaucguggagaaggccaaccccgucaacgaccucugcuaccccggggacuucaacgacuacgaggagcugaagcaccuccucucccggaucaaccacuucgagaagauccagaucauccccaagagcuccuggcccagccacgaggccucccugggcgugagcgccgcgugccccuaccagggcaaguccagcuucuuccgcaacguggucuggcugaucaagaagaacaacaccuaccccacgaucaagcgguccuacaacaacaccaaccaggaggaccuccuggugaugugggggauccaccacccgaacgacgccgccgagcagaccaaccuguaccagaaccccaccacguacaucagcgugggcaccuccacccucaaccagcgccugaccccgcggaucgccacgcgcagcaaggucaacgggcaguccggccggauggaguucuucuggaccauccugaagcccaacgacgcgaucaacuucgagagcaacgggaacuucaucgccccggaguacgccuacaagaucgugaagaagggcgacuccaccaucaugaaguccgagcucgaguacggcaacugcaacaccaagugccagacgcccaugggggccaucaacagcuccaugcccuuccacaacauccacccccugaccaucggcgagugcccgaaguacgucaagagcaaccgccuggugcucgccaccgggcugcggaacagcccccagcgcgagggccggcgcaagaagcggggccuguucggggcgaucgccggcuucaucgagggcggguggcaggggaugguggacggcugguacggcuaccaccacagcaacgagcagggguccggcuacgccgccgacaaggagagcacccagaaggccaucgacggggugacgaacaaggucaacuccaucaucgacaagaugaacacccaguucgaggcggugggccgcgaguucaacaaccucgagcggcgcaucgagaaccugaacaagaagauggaggacggguuccuggacguguggaccuacaacgccgagcuccugguccugauggagaacgagcggacccucgacuuccacgacagcaacgugaagaaccuguacgacaagguccgccugcagcuccgggacaacgccaaggagcugggcaacggcugcuucgaguucuaccacaagugcgacaacgagugcauggaguccgugcgcaacgggacguacgacuacccccaguacagcgaggaggcccggcugaagcgcgaggagaucuccggcgugaagcucgagagcaucgggaucuaccagauccuguccaucuacagcaccgucgccuccagccuggcgcucgccaucaugguggccggccugucccuguggaugugcagcaacgggucccuccagugccgcaucugcaucuga

SEQ ID NO: 69868 - RNA, 1701 nt, Artificial Sequence; identical to SEQ ID NO: 66693
  derived and/or modified CDS sequence (opt1) from hemagglutinin__InfluenzaA__ADM95745

SEQ ID NO: 69869 - RNA, 1701 nt, Artificial Sequence; identical to SEQ ID NO: 66693
  derived and/or modified CDS sequence (opt1) from hemagglutinin__InfluenzaA__ADM95746

SEQ ID NO: 69870 - RNA, 1701 nt, Artificial Sequence; identical to SEQ ID NO: 66693
  derived and/or modified CDS sequence (opt1) from hemagglutinin__InfluenzaA__ADM95747

SEQ ID NO: 69871 - RNA, 1701 nt, Artificial Sequence; identical to SEQ ID NO: 66693
  derived and/or modified CDS sequence (opt1) from hemagglutinin__InfluenzaA__ADM95749

SEQ ID NO: 69872 - RNA, 1701 nt, Artificial Sequence
  derived and/or modified CDS sequence (opt1) from hemagglutinin__InfluenzaA__ADM95750
augaaggccauccuggugguccuccuguacaccuucgccaccgcgaacgccgacacgcugugcaucggcuaccacgccaacaacagcaccgacaccguggacaccgugcucgagaagaacgucacggugacccacuccuucaaccugcuggaggacaagcacaacgggaagcucugcaagcugcgcggcguggcgccccugcaccucgggaagugcaacaucgccggcuggauccuggggaacccggagugcgagagccuguccaccgccagcuccuggagcuacaucgucgagaccuccagcuccgacaacggcacgugcuaccccggcgacuucaucgacuacgaggagcuccgggagcagcugagcuccgugagcuccuucgagcgcuucgagaucuuccccaagaccagcuccuggcccaaccacgacagcaacaagggggugaccgccgccugcccgcacgccggcgcgaaguccuucuacaagaaccugaucuggcucgucaagaaggggagcuccuaccccaagcugagcaagagcuacaucaacgacaagggcaaggaggugcuggugcucugggggauccaccaccccuccaccagcgccgaccagcagucccuguaccagaacgccgacgccuacgucuucgugggcagcucccgguacagcaagaaguucaagcccgagaucgccauccgcccgaaggugcgggaccaggagggccgcaugaacuacuacuggacgcuggucgagcccggggacaagaucaccuucgaggcgaccggcaaccucguggugccccgguacgccuucgccauggagcgcaacgccggguccggcaucaucaucagcgacacccccguccacgacugcaacacgaccugccagaccccgaagggcgccaucaacaccucccugcccuuccagaacauccaccccaucacgaucgggaagugccccaaguacgucaagagcaccaagcugcggcucgcgaccggccugcgcaacgugccguccauccagagccgggggcuguucggcgccaucgccggguucaucgagggcggcuggaccgggaugguggacggcugguacggguaccaccaccagaacgagcagggcuccggguacgccgccgaccucaagagcacgcagaacgcgaucgacgagaucaccaacaaggugaacuccgugaucgagaagaugaacacccaguucaccgccgucggcaaggaguucaaccaccuggagaagcgcaucgagaaccugaacaagaagguggacgacggcuuccucgacaucuggacguacaacgccgagcugcugguccuccuggagaacgagcggacccuggacuaccacgacagcaacgugaagaaccucuacgagaaggugcgcucccagcugaagaacaacgccaaggagaucgggaacggcugcuucgaguucuaccacaagugcgacaacacgugcauggagagcgucaagaacgggaccuacgacuaccccaaguacuccgaggaggccaagcugaaccgggaggagaucgacggcgugaagcucgagagcacccgcaucuaccagauccuggcgaucuacagcaccguggccuccagccugguccucguggugucccugggggccaucagcuucuggaugugcuccaacggcagccugcagugccggaucugcaucuga

SEQ ID NO: 69873 - RNA, 1701 nt, Artificial Sequence; identical to SEQ ID NO: 66693
  derived and/or modified CDS sequence (opt1) from hemagglutinin__InfluenzaA__ADM95751

SEQ ID NO: 69874 - RNA, 1701 nt, Artificial Sequence; identical to SEQ ID NO: 66693
  derived and/or modified CDS sequence (opt1) from hemagglutinin__InfluenzaA__ADM95752

SEQ ID NO: 69875 - RNA, 1701 nt, Artificial Sequence; identical to SEQ ID NO: 66693
  derived and/or modified CDS sequence (opt1) from hemagglutinin__InfluenzaA__ADM95753

SEQ ID NO: 69876 - RNA, 1701 nt, Artificial Sequence; identical to SEQ ID NO: 66693
  derived and/or modified CDS sequence (opt1) from hemagglutinin__InfluenzaA__ADM95754

SEQ ID NO: 69877 - RNA, 1701 nt, Artificial Sequence; identical to SEQ ID NO: 66693
  derived and/or modified CDS sequence (opt1) from hemagglutinin__InfluenzaA__ADM95755

SEQ ID NO: 69878 - RNA, 1701 nt, Artificial Sequence; identical to SEQ ID NO: 66873
  derived and/or modified CDS sequence (opt1) from hemagglutinin__InfluenzaA__ADM95757

SEQ ID NO: 69879 - RNA, 1701 nt, Artificial Sequence; identical to SEQ ID NO: 66693
  derived and/or modified CDS sequence (opt1) from hemagglutinin__InfluenzaA__ADM95758

SEQ ID NO: 69880 - RNA, 1701 nt, Artificial Sequence
  derived and/or modified CDS sequence (opt1) from hemagglutinin__InfluenzaA__ADM95759
augaaggccauccuggugguccuccuguacaccuucgccaccgcgaacgccgacacgcugugcaucggcuaccacgccaacaacagcaccgacaccguggacaccgugcucgagaagaacgucacggugacccacuccgugaaccugcuggaggacaagcacaacgggaagcucugcaagcugcgcggcgucgcgccccugcaccucgggaagugcaacaucgccggcuggauccuggggaacccggagugcgagagccuguccaccgccagcuccuggagcuacaucguggagaccuccagcuccgacuacggcacgugcuaccccggcgacuucaucgacuacgaggagcuccgggagcagcugagcuccgugagcuccuucgagcgcuucgagaucuuccccaagaccagcuccuggcccaaccacgacagcaacaagggggucaccgccgccugcccgcacgccggcgcgaaguccuucuacaagaaccugaucuggcucgugaagaaggggaacagcuaccccaagcuguccaagagcuacaucaacgacaagggcaaggaggugcugguccucugggggauccaccaccccagcaccuccgccgaccagcagagccuguaccagaacgccgacgccuacguguucgugggcacgucccgguacagcaagaaguucaagcccgagaucgccauccgcccgaagguccgggaccaggagggccgcaugaacuacuacuggacccugguggagcccggggacaagaucaccuucgaggcgaccggcaaccucguggucccccgguacgccuucgccauggagcgcaacgccggguccggcaucaucaucagcgacacgcccgugcacgacugcaacacgaccugccagaccccgaagggcgccaucaacaccucccugcccuuccagaacauccaccccaucaccaucgggaagugccccaaguacgucaagagcaccaagcugcggcucgcgaccggccugcgcaacgugccguccauccagagccgggggcuguucggcgccaucgccggguucaucgagggcggcuggacggggaugguggacggcugguacggguaccaccaccagaacgagcagggcuccggguacgccgccgaccucaagagcacccagaacgcgaucgacgagaucaccaacaaggugaacuccgucaucgagaagaugaacacccaguucacggccgugggcaaggaguucaaccaccuggagaagcgcaucgagaaccugaacaagaaggucgacgacggcuuccucgacaucuggaccuacaacgccgagcugcuggugcuccuggagaacgagcggacccuggacuaccacgacagcaacgugaagaaccucuacgagaagguccgcucccagcugaagaacaacgccaaggagaucgggaacggcugcuucgaguucuaccacaagugcgacaacacgugcauggagagcgugaagaacgggaccuacgacuaccccaaguacuccgaggaggccaagcugaaccgggaggagaucgacggcgugaagcucgagagcacccgcaucuaccagauccuggcgaucuacuccaccgucgccagcagccuggugcucguggucucccugggggccaucagcuucuggaugugcuccaacggcagccugcagugccggaucugcaucuga

SEQ ID NO: 69881 - RNA, 1701 nt, Artificial Sequence; identical to SEQ ID NO: 66680
  derived and/or modified CDS sequence (opt1) from hemagglutinin__InfluenzaA__ADM95760

SEQ ID NO: 69882 - RNA, 1701 nt, Artificial Sequence; identical to SEQ ID NO: 66693
  derived and/or modified CDS sequence (opt1) from hemagglutinin__InfluenzaA__ADM95761

SEQ ID NO: 69883 - RNA, 1701 nt, Artificial Sequence
  derived and/or modified CDS sequence (opt1) from hemagglutinin__InfluenzaA__ADM95763
augaaggccauccuggugguccuccuguacaccuucgccaccgcgaacgccgacacgcugugcaucggcuaccacgccaacaacagcaccgacaccguggacaccgugcucgagaagaacgucacggugacccacuccgugaaccugcuggaggacaagaacaacgggaagcucugcaagcugcgcggcgucgcgccccugcaccucgggaagugcaacaucgccggcuggauccuggggaacccggagugcgagagccuguccaccgccagcuccuggagcuacaucguggagaccuccagcuccgacaacggcacgugcuaccccggcgacuucaucgacuacgaggagcuccgggagcagcugagcuccgugagcuccuucgagcgcuucgagaucuuccccaagaccagcuccuggcccaaccacgacagcaacaagggggucaccgccgccugcccgcacgccggcgcgaaguccuucuacaagaaccugaucuggcucgugaagaaggggaacagcuaccccaagcuguccaagagcuacaucaacgacaagggcaaggaggugcugguccucugggggauccaccaccccagcaccuccgccgaccagcagagccuguaccagaacgccgacgccuacguguucgugggcuccagccgguacuccaagaaguucaagcccgagaucgccauccgcccgaagguccgggaccaggagggccgcaugaacuacuacuggacgcugguggagcccggggacaagaucaccuucgaggcgaccggcaaccucguggucccccgguacgccuucgccauggagcgcaacgccgggagcggcaucaucaucuccgacacccccgugcacgacugcaacacgaccugccagaccccgaagggcgccaucaacaccagccugcccuuccagaacauccaccccaucacgaucgggaagugccccaaguacgugaaguccaccaagcugcggcucgcgaccggccugcgcaacgucccgagcauccagucccgggggcuguucggcgccaucgccggguucaucgagggcggcuggaccgggaugguggacggcugguacggguaccaccaccagaacgagcagggcagcggguacgccgccgaccucaaguccacgcagaacgcgaucgacgagaucaccaacaaggugaacagcgucaucgagaagaugaacacccaguucaccgccgugggcaaggaguucaaccaccuggagaagcgcaucgagaaccugaacaagaaggucgacgacggcuuccucgacaucuggacguacaacgccgagcugcuggugcuccuggagaacgagcggacccuggacuaccacgacuccaacgugaagaaccucuacgagaagguccgcagccagcugaagaacaacgccaaggagaucgggaacggcugcuucgaguucuaccacaagugcgacaacacgugcauggaguccgugaagaacgggaccuacgacuaccccaaguacagcgaggaggccaagcugaaccgggaggagaucgacggcgugaagcucgaguccacccgcaucuaccagauccuggcgaucuacagcaccgucgccagcucccuggugcucguggucagccugggggccaucuccuucuggaugugcagcaacggcucccugcagugccggaucugcaucuga

SEQ ID NO: 69884 - RNA, 1701 nt, Artificial Sequence; identical to SEQ ID NO: 66693
  derived and/or modified CDS sequence (opt1) from hemagglutinin__InfluenzaA__ADM95764

SEQ ID NO: 69885 - RNA, 1701 nt, Artificial Sequence; identical to SEQ ID NO: 66693
  derived and/or modified CDS sequence (opt1) from hemagglutinin__InfluenzaA__ADM95765

SEQ ID NO: 69886 - RNA, 1701 nt, Artificial Sequence; identical to SEQ ID NO: 66693
  derived and/or modified CDS sequence (opt1) from hemagglutinin__InfluenzaA__ADM95767

SEQ ID NO: 69887 - RNA, 1701 nt, Artificial Sequence; identical to SEQ ID NO: 67536
  derived and/or modified CDS sequence (opt1) from hemagglutinin__InfluenzaA__ADM95768

SEQ ID NO: 69888 - RNA, 1701 nt, Artificial Sequence; identical to SEQ ID NO: 67046
  derived and/or modified CDS sequence (opt1) from hemagglutinin__InfluenzaA__ADM95769

SEQ ID NO: 69889 - RNA, 1701 nt, Artificial Sequence; identical to SEQ ID NO: 68809
  derived and/or modified CDS sequence (opt1) from hemagglutinin__InfluenzaA__ADM95771

SEQ ID NO: 69890 - RNA, 1701 nt, Artificial Sequence; identical to SEQ ID NO: 66693
  derived and/or modified CDS sequence (opt1) from hemagglutinin__InfluenzaA__ADM95772

SEQ ID NO: 69891 - RNA, 1701 nt, Artificial Sequence; identical to SEQ ID NO: 66693
  derived and/or modified CDS sequence (opt1) from hemagglutinin__InfluenzaA__ADM95774

SEQ ID NO: 69892 - RNA, 1701 nt, Artificial Sequence; identical to SEQ ID NO: 66693
  derived and/or modified CDS sequence (opt1) from hemagglutinin__InfluenzaA__ADM95775

SEQ ID NO: 69893 - RNA, 1701 nt, Artificial Sequence; identical to SEQ ID NO: 67046
  derived and/or modified CDS sequence (opt1) from hemagglutinin__InfluenzaA__ADM95776

SEQ ID NO: 69894 - RNA, 1701 nt, Artificial Sequence; identical to SEQ ID NO: 67046
  derived and/or modified CDS sequence (opt1) from hemagglutinin__InfluenzaA__ADM95778

SEQ ID NO: 69895 - RNA, 1701 nt, Artificial Sequence
  derived and/or modified CDS sequence (opt1) from hemagglutinin__InfluenzaA__ADM95779
augaaggccauccuggugguccuccuguacaccuucgccaccgcgaacgccgacacgcugugcaucggcuaccacgccaacaacagcaccgacaccguggacaccgugcucgagaagaacgucacggugacccacuccgugaaccugcuggaggacaagcacaacgggaagcucugcaagcugcgcggcgucgcgccccugcaccucgggaagugcaacaucgccggcuggauccuggggaacccggagugcgagagccuguccaccgccagcuccuggagcuacaucguggagaccuccagcuccgacaacggcacgugcuaccccggcgacuucaucgacuacgaggagcuccgggagcagcugagcuccgugagcuccuucgagcgcuucgagaucuuccccaagaccagcuccuggcccaaccacgacagcaacaagggggucaccgccgccugcccgcacgccggcgcgaaguccuucuacaagaaccugaucuggcucgugaagaaggggaacagcuaccccaagcuguccaagagcuacaucaacgacaagggcaaggaggugcugguccucugggggauccaccaccccagcaccuccgccgaccagcagagccuguaccagaacgccgacgccuacguguucgugggcacgucccgguacagcaagaaguucaagcccgagaucgccauccgcccgaagguccgggaccaggagggccgcaugaacuacuacuggacccugguggagcccggggacaagaucaccuucgaggcgaccggcaaccucguggucccccgguacgccuucgccauggagcgcaacgccggguccggcaucaucaucagcgacacgcccgugcacgacugcaacacgaccugccagaccccgaagggcgccaucaacaccucccugcccuuccagaacauccaccccaucaccaucgggaagugccccaaguacgucaagagcaccaagcugcggcucgcgaccggccugcgcaacaucccguccauccagagccgggggcuguucggcgccaucgccggguucaucgagggcggcuggacggggaugguggacggcugguacggguaccaccaccagaacgagcagggcuccggguacgccgccgaccucaagagcacccagaacgcgaucgacgagaucaccaacaaggugaacuccgugaucgagaagaugaacacccaguucacggccgucggcaaggaguucaaccaccuggagaagcgcaucgagaaccugaacaagaagguggacgacggcuuccucgacaucuggaccuacaacgccgagcugcugguccuccuggagaacgagcggacccuggacuaccacgacagcaacgugaagaaccucuacgagaaggugcgcucccagcugaagaacaacgccaaggagaucgggaacggcugcuucgaguucuaccacaagugcgacaacacgugcauggagagcgucaagaacgggaccuacgacuaccccaaguacuccgaggaggccaagcugaaccgggaggagaucgacggcgugaagcucgagcccacccgcaucuaccagauccuggcgaucuacagcaccguggccuccagccugguccucguggugagccugggggccaucuccuucuggaugugcagcaacggcucccugcagugccggaucugcaucuga

SEQ ID NO: 69896 - RNA, 1701 nt, Artificial Sequence; identical to SEQ ID NO: 67046
  derived and/or modified CDS sequence (opt1) from hemagglutinin__InfluenzaA__ADM95780

SEQ ID NO: 69897 - RNA, 1701 nt, Artificial Sequence; identical to SEQ ID NO: 67536
  derived and/or modified CDS sequence (opt1) from hemagglutinin__InfluenzaA__ADM95783

SEQ ID NO: 69898 - RNA, 1701 nt, Artificial Sequence; identical to SEQ ID NO: 66693
  derived and/or modified CDS sequence (opt1) from hemagglutinin__InfluenzaA__ADM95784

SEQ ID NO: 69899 - RNA, 1701 nt, Artificial Sequence; identical to SEQ ID NO: 66693
  derived and/or modified CDS sequence (opt1) from hemagglutinin__InfluenzaA__ADM95785

SEQ ID NO: 69900 - RNA, 1701 nt, Artificial Sequence
  derived and/or modified CDS sequence (opt1) from hemagglutinin__InfluenzaA__ADM95786
augaaggccauccuggugguccuccuguacaccuucgccaccgcgaacgccgacacgcugugcaucggcuaccacgccaacaacagcaccgacaccguggacaccgugcucgagaagaacgucacggugacccacuccgugaaccugcuggaggacaagcacaacgggaagcucugcaagcugcgcggcgucgcgccccugcaccucgggaagugcaacaucgccggcuggauccuggggaacccggagugcgagagccuguccaccgcgagcuccuggagcuacaucguggagaccuccagcuccgacaacggcacgugcuaccccggcgacuucaucgacuacgaggagcuccgggagcagcugagcuccgugagcuccuucgagcgcuucgagaucuuccccaagaccagcuccuggcccaaccacgacagcaacaagggggucaccgccgccugcucccacgccggcgccaagagcuucuacaagaaccugaucuggcucgugaagaaggggaacuccuacccgaagcugagcaagagcuacaucaacgacaagggcaaggaggugcugguccucugggggauccaccaccccuccaccagcgccgaccagcagucccuguaccagaacgccgacgccuacguguucgugggcacgagccgguacuccaagaaguucaagcccgagaucgccauccgccccaagguccgggagcaggagggccgcaugaacuacuacuggacccugguggagccgggggacaagaucaccuucgaggcgaccggcaaccucguggucccccgguacgccuucgccauggagcgcaacgccgggagcggcaucaucaucuccgacacgcccgugcacgacugcaacacgaccugccagacccccaagggcgccaucaacaccagccugccguuccagaacauccaccccaucaccaucgggaagugccccaaguacgugaaguccaccaagcugcggcucgcgaccggccugcgcaacguccccagcauccagucccgggggcuguucggcgccaucgccggguucaucgagggcggcuggacggggaugguggacggcugguacggguaccaccaccagaacgagcagggcagcggguacgccgccgaccucaaguccacccagaacgcgaucgacgagaucaccaacaaggugaacagcgucaucgagaagaugaacacccaguucacggccgugggcaaggaguucaaccaccuggagaagcgcaucgagaaccugaacaagaaggucgacgacggcuuccucgacaucuggaccuacaacgccgagcugcuggugcuccuggagaacgagcggacccuggacuaccacgacuccaacgugaagaaccucuacgagaagguccgcagccagcugaagaacaacgccaaggagaucgggaacggcugcuucgaguucuaccacaagugcgacaacacgugcauggaguccgugaagaacgggaccuacgacuacccgaaguacagcgaggaggccaagcugaaccgggaggagaucgacggcgugaagcucgaguccacccgcaucuaccagauccuggcgaucuacagcaccgucgccagcucccuggugcucguggucagccugggggccaucuccuucuggaugugcagcaacggcucccugcagugccggaucugcaucuga

SEQ ID NO: 69901 - RNA, 1701 nt, Artificial Sequence; identical to SEQ ID NO: 67046
  derived and/or modified CDS sequence (opt1) from hemagglutinin__InfluenzaA__ADM95788

SEQ ID NO: 69902 - RNA, 1701 nt, Artificial Sequence; identical to SEQ ID NO: 67046
  derived and/or modified CDS sequence (opt1) from hemagglutinin__InfluenzaA__ADM95789

SEQ ID NO: 69903 - RNA, 1701 nt, Artificial Sequence
  derived and/or modified CDS sequence (opt1) from hemagglutinin__InfluenzaA__ADM95790
augaaggccauccuggugguccuccuguacaccuucgccaccgcgaacgccgacacgcugugcaucggcuaccacgccaacaacagcaccgacaccguggacaccgugcucgagaagaacgucacggugacccacuccgugaaccugcuggaggacaagcacaacgggaagcucugcaagcugcgcggcgucgcgccccugcaccucgggaagugcaacaucgccggcuggauccuggggaacccggagugcgagagccuguccaccgccagcuccuggagcuacaucguggagaccuccagcuccgacaacggcacgugcuaccccggcgacuucaucgacuacgaggagcuccgggagcagcugagcuccgugagcuccuucgagcgcuucgagaucuuccccaagaccagcuccuggcccaaccacgacagcaacaagggggucaccgccgccugcccgcacgccggcgcgaaguccuucuacaagaaccugaucuggcucgugaagaaggggaacagcuaccccaagcugcggaaguccuacaucaacgacaagggcaaggaggugcugguccucugggggauccaccaccccagcaccagcgccgaccagcagucccuguaccagaacgccgacgccuacguguucgugggcacgagccgcuacuccaagaaguucaagcccgagaucgccauccggccgaagguccgcgaccaggagggccggaugaacuacuacuggacccugguggagcccggggacaagaucaccuucgaggcgaccggcaaccucguggucccccgcuacgccuucgccauggagcggaacgccgggagcggcaucaucaucuccgacacgcccgugcacgacugcaacacgaccugccagaccccgaagggcgccaucaacaccagccugcccuuccagaacauccaccccaucaccaucgggaagugccccaaguacgugaaguccaccaagcugcgccucgcgaccggccugcggaacaucccgagcauccagucccgcgggcuguucggcgccaucgccggguucaucgagggcggcuggacggggauggucgacggcugguacggguaccaccaccagaacgagcagggcagcggguacgccgccgaccucaaguccacccagaacgcgaucgacgagaucaccaacaaggugaacagcgugaucgagaagaugaacacccaguucacggccgucggcaaggaguucaaccaccuggagaagcggaucgagaaccugaacaagaagguggacgacggcuuccucgacaucuggaccuacaacgccgagcugcugguccuccuggagaacgagcgcacccuggacuaccacgacuccaacgugaagaaccucuacgagaaggugcggagccagcugaagaacaacgccaaggagaucgggaacggcugcuucgaguucuaccacaagugcgacaacacgugcauggaguccgucaagaacgggaccuacgacuaccccaaguacagcgaggaggccaagcugaaccgcgaggagaucgacggcgugaagcucgaguccacccggaucuaccagauccuggcgaucuacagcaccguggccuccagccugguccucguggugagccugggggccaucuccuucuggaugugcagcaacggcucccugcagugccgcaucugcaucuga

SEQ ID NO: 69904 - RNA, 1701 nt, Artificial Sequence; identical to SEQ ID NO: 69903
  derived and/or modified CDS sequence (opt1) from hemagglutinin__InfluenzaA__ADM95791

SEQ ID NO: 69905 - RNA, 1701 nt, Artificial Sequence; identical to SEQ ID NO: 69903
  derived and/or modified CDS sequence (opt1) from hemagglutinin__InfluenzaA__ADM95792

SEQ ID NO: 69906 - RNA, 1701 nt, Artificial Sequence; identical to SEQ ID NO: 69290
  derived and/or modified CDS sequence (opt1) from hemagglutinin__InfluenzaA__ADM95793

SEQ ID NO: 69907 - RNA, 1701 nt, Artificial Sequence; identical to SEQ ID NO: 67046
  derived and/or modified CDS sequence (opt1) from hemagglutinin__InfluenzaA__ADM95794

SEQ ID NO: 69908 - RNA, 1701 nt, Artificial Sequence; identical to SEQ ID NO: 66693
  derived and/or modified CDS sequence (opt1) from hemagglutinin__InfluenzaA__ADM95795

SEQ ID NO: 69909 - RNA, 1701 nt, Artificial Sequence; identical to SEQ ID NO: 67795
  derived and/or modified CDS sequence (opt1) from hemagglutinin__InfluenzaA__ADM95798

SEQ ID NO: 69910 - RNA, 1701 nt, Artificial Sequence
  derived and/or modified CDS sequence (opt1) from hemagglutinin__InfluenzaA__ADM95799
augaaggccauccuggugguccuccuguacaccuucgccaccgcgaacgccgacacgcugugcaucggcuaccacgccaacaacagcaccgacaccguggacaccgugcucgagaagaacgucacggugacccacuccgugaaccugcuggaggacaagcacaacgggaagcucugcaagcugcgcggcgucgcgccccugcaccucgggaagugcaacaucgccggcuggauccuggggaacccggagugcgagagccuguccaccgccagcuccuggagcuacaucguggagaccuccagcuccgacaacggcacgugcuaccccggcgacuucaucgacuacgaggagcuccgggagcagcugagcuccgugagcuccuucgagcgcuucgagaucuuccccaagaccagcuccuggcccaaccacgacagcaacaagggggucaccgccgccugcccgcacgccggcgcgaaguccuucuacaagaaccugaucuggcucgugaagaaggggaacagcuaccccaagcuguccaagagcuacaucaacgacaagggcaaggaggugcugguccucugggggauccaccaccccagcaccuccgccgaccagcagagccuguaccagaacgccgacgccuacguguucgugggcacgucccgguacagcaagaaguucaagcccgagaucgccauccgcccgaagguccgggaccaggagggccgcaugaacuacuacuggacccugguggagcccggggacaagaucaccuucgaggcgaccggcaaccucguggucccccgguacgccuucgccauggagcgcaacgccggguccggcaucaucaucagcgacacgcccgugcacgacugcaacacgaccugccagaccccgaagggcgccaucaacaccucccugcccuuccagaacauccaccccaucaccaucgggaagugccccaaguacgucaagagcaccaagcugcggcucgcgaccggccugcgcaacgugccguccauccagagccgggggcuguucggcgccaucgccggguucaucgagggcggcuggacggggaugguggacggcugguacggguaccaccaccagaacgagcagggcuccggguacgccgccgaccucaagagcacccagaacgcgaucgacgagaucaccaacaaggugaacuccgucaucgagaagaugaacacccaguucacggccgugggcaaggaguucaaccaccuggagaagcgcaucgagaaccugaacaagaaggucgacgacggcuuccucgacaucuggaccuacaacgccgagcugcuggugcuccuggagaacgagcggacccuggacuaccacgacagcaacgugaagaaccucuacgagaagguccgcucccagcugaagaacaacgccaaggagaucgagaacgggugcuucgaguucuaccacaagugcgacaacacgugcauggagagcgugaagaacggcaccuacgacuaccccaaguacuccgaggaggccaagcugaaccgggaggagaucgacggggugaagcucgagagcacccgcaucuaccagauccuggcgaucuacuccaccgucgccagcagccuggugcucguggucucccugggcgccaucagcuucuggaugugcuccaacgggagccugcagugccggaucugcaucuga

SEQ ID NO: 69911 - RNA, 1701 nt, Artificial Sequence
  derived and/or modified CDS sequence (opt1) from hemagglutinin__InfluenzaA__ADM95800
augaaggccauccuggugguccuccuguacaccuucgccaccgcgaacgccgacacgcugugcaucggcuaccacgccaacaacagcaccgacaccguggacaccgugcucgagaagaacgucacggugacccacuccgugaaccugcuggaggacaagcacaacgggaagcucugcaagcugcgcggcgucgcgccccugcaccucgggaagugcaacaucgccggcuggauccuggggaacccggagugcgagagccuguccaccgccagcuccuggagcuacaucguggagaccuccagcuccgacaacggcacgugcuaccccggcgacuucaucgacuacgaggagcuccgggagcagcugagcuccgugagcuccuucgagcgcuucgagaucuuccccaagaccagcuccuggcccaaccacgacagcaacaagggggucaccgccgccugcccgcacgccggcgcgaaguccuucuacaagaaccugaucuggcucgugaagaaggggaacagcuaccccaagcuguccaagagcuacaucaacgacaagggcaaggaggugcugguccucugggggauccaccaccccagcaccuccgccgaccagcagagccuguaccagaacgccgacgccuacguguucgugggcacgucccgguacagcaagaaguucaagcccgagaucgccauccgcccgaagguccgggaccaggagggccgcaugaacuacuacuggacccugguggcgcccggggacaagaucaccuucgaggccaccggcaaccucguggucccccgguacgccuucgccauggagcgcaacgccggguccggcaucaucaucagcgacacgcccgugcacgacugcaacacgaccugccagaccccgaagggcgcgaucaacaccucccugcccuuccagaacauccaccccaucaccaucgggaagugccccaaguacgucaagagcaccaagcugcggcucgccaccggccugcgcaacgugccguccauccagagccgggggcuguucggcgccaucgccggguucaucgagggcggcuggacggggaugguggacggcugguacggguaccaccaccagaacgagcagggcuccggguacgccgcggaccucaagagcacccagaacgccaucgacgagaucaccaacaaggugaacuccgucaucgagaagaugaacacccaguucacggccgugggcaaggaguucaaccaccuggagaagcgcaucgagaaccugaacaagaaggucgacgacggcuuccucgacaucuggaccuacaacgccgagcugcuggugcuccuggagaacgagcggacccuggacuaccacgacagcaacgugaagaaccucuacgagaagguccgcucccagcugaagaacaacgccaaggagaucgggaacggcugcuucgaguucuaccacaagugcgacaacacgugcauggagagcgugaagaacgggaccuacgacuaccccaaguacuccgaggaggcgaagcugaaccgggaggagaucgacggcgugaagcucgagagcacccgcaucuaccagauccuggccaucuacuccaccgucgccagcagccuggugcucguggucucccugggggccaucagcuucuggaugugcuccaacggcagccugcagugccggaucugcaucuga

SEQ ID NO: 69912 - RNA, 1701 nt, Artificial Sequence; identical to SEQ ID NO: 67046
  derived and/or modified CDS sequence (opt1) from hemagglutinin__InfluenzaA__ADM95801

SEQ ID NO: 69913 - RNA, 1701 nt, Artificial Sequence; identical to SEQ ID NO: 67046
  derived and/or modified CDS sequence (opt1) from hemagglutinin__InfluenzaA__ADM95802

SEQ ID NO: 69914 - RNA, 1701 nt, Artificial Sequence; identical to SEQ ID NO: 69900
  derived and/or modified CDS sequence (opt1) from hemagglutinin__InfluenzaA__ADM95803

SEQ ID NO: 69915 - RNA, 1701 nt, Artificial Sequence
  derived and/or modified CDS sequence (opt1) from hemagglutinin__InfluenzaA__ADM95804
augaaggccauccuggugguccuccuguacaccuucgccaccgcgaacgccgacacgcugugcaucggcuaccacgccaacaacagcaccgacaccguggacaccgugcucgagaagaacgucacggugacccacuccgugaaccugcuggaggacaagcacaacgggaagcucugcaagcugcgcggcgucgcgccccugcaccucgggaagugcaacaucgccggcuggauccuggggaacccggagugcgagagccuguccaccgccagcuccuggagcuacaucguggagaccuccagcuccgacaacggcacgugcuaccccggcgacuucaucgacuacgaggagcuccgggagcagcugagcuccgugagcuccuucgagcgcuucgagaucuuccccaagaccagcuccuggcccaaccacgacagcaacaagggggucaccgccgccugcccgcacgccggcgcgaagaacuucuacaagaaccugaucuggcucgugaagaaggggaacuccuaccccaagcugagcaaguccuacaucaacgacaagggcaaggaggugcugguccucugggggauccaccaccccagcaccagcgccgaccagcagucccuguaccagaacgccgacgccuacguguucgugggcacgagccgguacuccaagaaguucaagcccgagaucgccauccgcccgaagguccgggaccaggagggccgcaugaacuacuacuggacccugguggagcccggggacaagaucaccuucgaggcgaccggcaaccucguggucccccgguacgccuucgccauggagcgcaacgccgggagcggcaucaucaucuccgacacgcccgugcacgacugcaacacgaccugccagaccccgaagggcgccaucaacaccagccugcccuuccagaacauccaccccaucaccaucgggaagugccccaaguacgugaaguccaccaagcugcggcucgcgaccggccugcgcaacgucccgagcauccagucccgggggcuguucggcgccaucgccggguucaucgagggcggcuggacggggaugguggacggcugguacggguaccaccaccagaacgagcagggcagcggguacgccgccgaccucaaguccacccagaacgcgaucgacgagaucaccaacaaggugaacagcgucaucgagaagaugaacacccaguucacggccgugggcaaggaguucaaccaccuggagaagcgcaucgagaaccugaacaagaaggucgacgacggcuuccucgacaucuggaccuacaacgccgagcugcuggugcuccuggagaacgagcggacccuggacuaccacgacuccaacgugaagaagcucuacgagaagguccgcagccagcugaagaacaacgccaaggagaucgggaacggcugcuucgaguucuaccacaagugcgacaacacgugcauggaguccgugaagaacgggaccuacgacuaccccaaguacagcgaggaggccaagcugaaccgggaggagaucgacggcgugaagcucgaguccacccgcaucuaccagauccuggcgaucuacagcaccgucgccuccagccuggugcucguggucagccugggggccaucuccuucuggaugugcagcaacggcucccugcagugccggaucugcaucuga

SEQ ID NO: 69916 - RNA, 1701 nt, Artificial Sequence; identical to SEQ ID NO: 68375
  derived and/or modified CDS sequence (opt1) from hemagglutinin__InfluenzaA__ADM95805

SEQ ID NO: 69917 - RNA, 1701 nt, Artificial Sequence; identical to SEQ ID NO: 67794
  derived and/or modified CDS sequence (opt1) from hemagglutinin__InfluenzaA__ADM95808

SEQ ID NO: 69918 - RNA, 1701 nt, Artificial Sequence; identical to SEQ ID NO: 67794
  derived and/or modified CDS sequence (opt1) from hemagglutinin__InfluenzaA__ADM95809

SEQ ID NO: 69919 - RNA, 1701 nt, Artificial Sequence; identical to SEQ ID NO: 67794
  derived and/or modified CDS sequence (opt1) from hemagglutinin__InfluenzaA__ADM95810

SEQ ID NO: 69920 - RNA, 1701 nt, Artificial Sequence
  derived and/or modified CDS sequence (opt1) from hemagglutinin__InfluenzaA__ADM95812
augaaggccauccuggugguccuccuguacaccuucgccaccgcgaacgccgacacgcugugcaucggcuaccacgccaacaacagcaccgacaccguggacaccgugcucgagaagaacgucacggugacccacuccgugaaccugcuggaggacaagcacaacgggaagcucugcaagcugcgcggcgucgcgccccugcaccucgggaagugcaacaucgccggcuggauccuggggaacccggagugcgagcugcucagcaccgcguccagcugguccuacaucguggagaccagcuccagcgacaacggcacgugcuaccccggcgacuucaucgacuacgaggagcugcgggagcagcuguccagcguguccagcuucgagcgcuucgagaucuuccccaagaccuccagcuggcccaaccacgacuccaacaagggggucaccgccgccugcccgcacgccggcgccaagagcuucuacaagaaccucaucuggcuggugaagaaggggaacuccuaccccaagcugagcaaguccuacaucaacgacaagggcaaggaggugcucguccugugggggauccaccaccccagcaccagcgccgaccagcagucccuguaccagaacgccgacgccuacguguucgugggcacgagccgguacuccaagaaguucaagcccgagaucgccauccgcccgaagguccgggaccaggagggccgcaugaacuacuacuggacccucguggagcccggggacaagaucaccuucgaggcgaccggcaaccugguggucccccgguacgccuucgccauggagcgcaacgccgggagcggcaucaucaucuccgacacgcccgugcacgacugcaacacgaccugccagaccccgaagggcgccaucaacaccagccugcccuuccagaacauccaccccaucaccaucgggaagugccccaaguacgugaaguccaccaagcuccggcuggcgaccggccugcgcaacgucccgagcauccagucccggggccucuucggggccaucgccggguucaucgagggcggcuggacggggaugguggacggcugguacggguaccaccaccagaacgagcagggcagcggguacgccgccgaccugaaguccacccagaacgcgaucgacgagaucaccaacaaggugaacagcgucaucgagaagaugaacacccaguucacggccgugggcaaggaguucaaccaccuggagaagcgcaucgagaaccucaacaagaaggucgacgacggcuuccuggacaucuggaccuacaacgccgagcugcucgugcugcuggagaacgagcggacccucgacuaccacgacuccaacgugaagaaccuguacgagaagguccgcagccagcugaagaacaacgccaaggagaucgggaacggcugcuucgaguucuaccacaagugcgacaacacgugcauggaguccgugaagaacgggaccuacgacuaccccaaguacagcgaggaggccaagcucaaccgggaggagaucgacggcgugaagcuggaguccacccgcaucuaccagauccuggcgaucuacagcaccgucgccuccagccucgugcugguggucagccugggggccaucuccuucuggaugugcagcaacggcucccuccagugccggaucugcaucuga

SEQ ID NO: 69921 - RNA, 1701 nt, Artificial Sequence; identical to SEQ ID NO: 69290
  derived and/or modified CDS sequence (opt1) from hemagglutinin__InfluenzaA__ADM95816

SEQ ID NO: 69922 - RNA, 1701 nt, Artificial Sequence; identical to SEQ ID NO: 69290
  derived and/or modified CDS sequence (opt1) from hemagglutinin__InfluenzaA__ADM95819

SEQ ID NO: 69923 - RNA, 1701 nt, Artificial Sequence; identical to SEQ ID NO: 68375
  derived and/or modified CDS sequence (opt1) from hemagglutinin__InfluenzaA__ADM95820

SEQ ID NO: 69924 - RNA, 1701 nt, Artificial Sequence; identical to SEQ ID NO: 69290
  derived and/or modified CDS sequence (opt1) from hemagglutinin__InfluenzaA__ADM95821

SEQ ID NO: 69925 - RNA, 1701 nt, Artificial Sequence; identical to SEQ ID NO: 67794
  derived and/or modified CDS sequence (opt1) from hemagglutinin__InfluenzaA__ADM95822

SEQ ID NO: 69926 - RNA, 1701 nt, Artificial Sequence; identical to SEQ ID NO: 67794
  derived and/or modified CDS sequence (opt1) from hemagglutinin__InfluenzaA__ADM95823

SEQ ID NO: 69927 - RNA, 1701 nt, Artificial Sequence
  derived and/or modified CDS sequence (opt1) from hemagglutinin__InfluenzaA__ADM95824
augaaggccauccuggugguccuccuguacaccuucgccaccgcgaacgccgacacgcugugcaucggcuaccacgccaacaacagcaccgacaccguggacaccgugcucgagaagaacgucacggugacccacuccgugaaccugcuggaggacaagcacaacgggaagcucugcaagcugcgcggcgucgcgccccugcaccucgggaagugcaacaucgccggcuggauccuggggaacccggagugcgagagccuguccaccgccagcuccuggagcuacaucguggagaccuccagcuccgacaacggcacgugcuaccccggcgacuucaucgacuacgaggagcuccgggagcagcugagcuccgugagcuccuucgagcgcuucgagaucuuccccaagaccagcuccuggcccaaccacgacagcaacaagggggucaccgccgccugcccgcacgccggcgcgaaguccuucuacaagaaccugaucuggcucgugaagaaggggaacagcuaccccaagcuguccaagagcuacaucaacgacaagggcaaggaggugcugguccucugggggauccaccaccccagcaccuccgccgaccagcagagccuguaccagaacgccgacgccuacguguucgugggcacgucccgguacagcaagaaguucaagcccgagaucgccauccgcccgaagguccgggaccaggagggccgcaugaacuaccacuggacccugguggagcccggggacaagaucaccuucgaggcgaccggcaaccucguggucccccgguacgccuucgccauggagcgcaacgccggguccggcaucaucaucagcgacacgcccgugcacgacugcaacacgaccugccagaccccgaagggcgccaucaacaccucccugcccuuccagaacauccaccccaucaccaucgggaagugccccaaguacgucaagagcaccaagcugcggauggcgaccggccuccgcaacgugccguccauccagagccgggggcuguucggcgccaucgccggguucaucgagggcggcuggacggggaugguggacggcugguacggguaccaccaccagaacgagcagggcuccggguacgccgccgaccucaagagcacccagaacgcgaucgacgagaucaccaacaaggugaacuccgucaucgagaagaugaacacccaguucacggccgugggcaaggaguucaaccaccuggagaagcgcaucgagaaccugaacaagaaggucgacgacggcuuccuggacaucuggaccuacaacgccgagcuccuggugcugcucgagaacgagcggacccuggacuaccacgacagcaacgugaagaaccuguacgagaagguccgcucccagcucaagaacaacgccaaggagaucgggaacggcugcuucgaguucuaccacaagugcgacaacacgugcauggagagcgugaagaacgggaccuacgacuaccccaaguacuccgaggaggccaagcugaaccgggaggagaucgacggcgugaagcuggagagcacccgcaucuaccagauccucgcgaucuacuccaccgucgccagcagccuggugcugguggucucccucggggccaucagcuucuggaugugcuccaacggcagccugcagugccggaucugcaucuga

SEQ ID NO: 69928 - RNA, 1701 nt, Artificial Sequence; identical to SEQ ID NO: 69290
  derived and/or modified CDS sequence (opt1) from hemagglutinin__InfluenzaA__ADM95825

SEQ ID NO: 69929 - RNA, 1701 nt, Artificial Sequence; identical to SEQ ID NO: 69290
  derived and/or modified CDS sequence (opt1) from hemagglutinin__InfluenzaA__ADM95826

SEQ ID NO: 69930 - RNA, 1701 nt, Artificial Sequence
  derived and/or modified CDS sequence (opt1) from hemagglutinin__InfluenzaA__ADM95827
augaaggccauccuggugguccuccuguacaccuucgccaccgcgaacgccgacacgcugugcaucggcuaccacgccaacaacagcaccgacaccguggacaccgugcucgagaagaacgucacggugacccacuccgugaaccugcuggaggacaagcacaacgggaagcucugcaagcugaagggcgucgcgccccugcaccucgggaagugcaacaucgccggcuggauccuggggaacccggagugcgagagccuguccaccgccagcuccuggagcuacaucguggagaccuccagcuccgacaacggcacgugcuaccccggcgacuucaucgacuacgaggagcuccgcgagcagcugagcuccgugagcuccuucgagcgguucgagaucuuccccaagaccagcuccuggcccaaccacgacagcaacaagggggucaccgccgccugcccgcacgccggcgcgaaguccuucuacaagaaccugaucuggcucgugaagaaggggaacagcuaccccaagcuguccaagagcuacaucaacgacaagggcaaggaggugcugguccucugggggauccaccaccccagcaccuccgccgaccagcagagccuguaccagaacgccgacgccuacguguucgugggcacgucccgcuacagcaagaaguucaagcccgagaucgccauccggccgaagguccgcgaccaggagggccggaugaacuacuacuggacccugguggagcccggggacaagaucaccuucgaggcgaccggcaaccucguggucccccgcuacgccuucgccauggagcggaacgccggguccggcaucaucaucagcgacacgcccgugcacgacugcaacacgaccugccagaccccgaagggcgccaucaacaccucccugcccuuccagaacauccaccccaucaccaucgggaagugccccaaguacgucaagagcaccaagcugcgccucgcgaccggccugcggaacgugccguccauccagagccgcgggcuguucggcgccaucgccggguucaucgagggcggcuggacggggaugguggacggcugguacggguaccaccaccagaacgagcagggcuccggguacgccgccgaccucaagagcacccagcacgcgaucgacgagaucaccaacaaggugaacuccgucaucgagaagaugaacacccaguucacggccgugggcaaggaguucaaccaccuggagaagcggaucgagaaccugaacaagaaggucgacgacggcuuccucgacaucuggaccuacaacgccgagcugcuggugcuccuggagaacgagcgcacccuggacuaccacgacagcaacgugaagaaccucuacgagaagguccggucccagcugaagaacaacgccaaggagaucgggaacggcugcuucgaguucuaccacaagugcgacaacacgugcauggagagcgugaagaacgggaccuacgacuaccccaaguacuccgaggaggccaagcugaaccgcgaggagaucgacggcgugaagcucgagagcacccggaucuaccagauccuggcgaucuacuccaccgucgccagcagccuggugcucguggucucccugggggccaucagcuucuggaugugcuccaacggcagccugcagugccgcaucugcaucuga

SEQ ID NO: 69931 - RNA, 1701 nt, Artificial Sequence
  derived and/or modified CDS sequence (opt1) from hemagglutinin__InfluenzaA__ADM95828
augaaggccauccuggugguccuccuguacaccuucgccaccgcgaacgccgacacgcugugcaucggcuaccacgccaacaacagcaccgacaccguggacaccgugcucgagaagaacgucacggugacccacuccgugaaccugcuggaggacaagcacaacgggaagcucugcaagcugcgcggcgucgcgccccugcaccucgggaagugcaacaucgccggcuggauccuggggaacccggagugcgagagccuguccaccgccagcuccuggagcuacaucguggagaccuccagcuccgacaacggcacgugcuaccccggcgacuucaucgacuacgaggagcuccgggagcagcugagcuccgugagcuccuucgagcgcuucgagaucuuccccaagaccagcuccuggcccaaccacgacagcaacaagggggucaccgccgccugcccgcacgccggcgcgaaguccuucuacaagaaccugaucuggcucgugaagaaggggaacagcuaccccaagcuguccaagagcuacaucaacgacaagggcaaggaggugcugguccucugggggauccaccaccccagcaccuccgccgaccagcagagccuguaccagaacgccgacgccuacguguucgugggcacgucccgguacagcaagaaguucaagcccgagaucgccauccgcccgaagguccgggaccaggagggccgcaugaacuacuacuggacccugguggagcccggggacaagaucaccuucgaggcgaccggcaaccucguggucccccgguacgccuucgccauggagcgcaacgccggguccggcaucaucaucagcgacacgcccgcccacgacugcaacacgaccugccagaccccgaagggcgcgaucaacaccucccugcccuuccagaacauccaccccaucaccaucgggaagugccccaaguacgucaagagcaccaagcugcggauggccaccggccuccgcaacgugccguccauccagagccgggggcuguucggcgccaucgccggguucaucgagggcggcuggacggggaugguggacggcugguacggguaccaccaccagaacgagcagggcuccggguacgccgcggaccucaagagcacccagaacgccaucgacgagaucaccaacaaggugaacuccgugaucgagaagaugaacacccaguucacggccgucggcaaggaguucaaccaccuggagaagcgcaucgagaaccugaacaagaagguggacgacggcuuccuggacaucuggaccuacaacgccgagcuccugguccugcucgagaacgagcggacccuggacuaccacgacagcaacgugaagaaccuguacgagaaggugcgcucccagcucaagaacaacgccaaggagaucgggaacggcugcuucgaguucuaccacaagugcgacaacacgugcauggagagcgucaagaacgggaccuacgacuaccccaaguacuccgaggaggcgaagcugaaccgggaggagaucgacggcgugaagcuggagagcacccgcaucuaccagauccucgccaucuacuccaccguggccagcagccugguccugguggugucccucggggccaucagcuucuggaugugcuccaacggcagccugcagugccggaucugcaucuga

SEQ ID NO: 69932 - RNA, 1701 nt, Artificial Sequence
  derived and/or modified CDS sequence (opt1) from hemagglutinin__InfluenzaA__ADM95829
augaaggccauccuggugguccuccuguacaccuucgccaccgcgaacgccgacacgcugugcaucggcuaccacgccaacaacagcaccgacaccguggacaccgugcucgagaagaacgucacggugacccacuccgugaaccugcuggaggacaagcacaacgggaagcucugcaagcugcgcggcgucgcgccccugcaccucgggaagugcaacaucgccggcuggauccuggggaacccggagugcgagagccuguccaccgccagcuccuggagcuacaucguggagaccuccagcuccgacaacggcacgugcuaccccggcgacuucaucgacuacgaggagcuccgggagcagcugagcuccgugagcuccuucgagcgcuucgagaucuuccccaagaccagcuccuggcccaaccacgacagcaacaagggggucaccgccgccugcccgcacgccggcgcgaaguccuucuacaagaaccugaucuggcucgugaagaaggggaacagcuaccccaagcuguccaagagcuacaucaacgacaagggcaaggaggugcugguccucugggggauccaccaccccagcaccuccgccgaccagcagagccuguaccagaacgccgacgccuacguguucgugggcacgucccgguacagcaagaaguucaagcccgagaucgccauccgcccgaagguccgggaccaggagggccgcaugaacuacuacuggacccugguggagcccggggacaagaucaccuucgaggcgaccggcaaccucguggucccccgguacgccuucgccauggagcgcaacgccggguccggcaucaucaucagcgacacgcccgugcacgacugcaacacgaccugccagaccccgaagggcgccaucaacaccucccugcccuuccagaacauccaccccaucaccaucgggaagugccccaaguacgucaagagcaccaagcugcggcucgcgaccggccugcgcaacgugccguccauccagagccgggggcuguucggcgccaucgccggguucaucgagggcggcuggacggggaugguggacggcugguacggguaccaccaccagaacgagcagggcuccggguacgccgccgaccucaagagcacccagaacgcgaucgacgagaucaccaacaaggugaacuccgucaucgagaagaugaacacccaguucacggccgugggcaaggaguucaaccaccuggagaagcgcaucgagaaccugaacaagaaggucgacgacggcuuccucgacaucuggaccuacaacgccgagcugcuggugcuccuggagaacgagcggacccuggacuaccacgacagcaacgugaagaagcucuacgagaagguccgcucccagcugaagaacaacgccaaggagaucgggaacggcugcuucgaguucuaccacaagugcgacaacaugugcauggagagcgugaagaacgggaccuacgacuaccccaaguacuccgaggaggccaagcugaaccgggaggagaucgacggcgugaagcucgagagcacgcgcaucuaccagauccuggcgaucuacuccaccgucgccagcagccuggugcucguggucucccugggggccaucagcuucuggaugugcuccaacggcagccugcagugccggaucugcaucuga

SEQ ID NO: 69933 - RNA, 1701 nt, Artificial Sequence
  derived and/or modified CDS sequence (opt1) from hemagglutinin__InfluenzaA__ADM95831
augaaggccauccuggugguccuccuguacaccuucgugaccgccaacgcggacacgcugugcaucggcuaccacgccaacaacagcaccgacaccguggacaccguccucgagaagaacgugacggugacccacuccgucaaccugcuggaggacaagcacaacgggaagcucugcaagcugcgcggcguggcgccccugcaccucgggaagugcaacaucgccggcuggauccuggggaacccggagugcgagagccuguccaccgccagcuccuggagcuacaucguggagaccuccagcuccgacaacggcacgugcuaccccggcgacuucaucgacuacgaggagcuccgggagcagcugagcuccgucagcuccuucgagcgcuucgagaucuuccccaagaccagcuccuggcccaaccacgacagcaacaagggggugaccgccgccugcccgcacgccggcgccaaguccuucuacaagaaccugaucuggcucgugaagaaggggaacagcuaccccaagcuguccaagagcuacaucaacgacaagggcaaggagguccuggugcucugggggauccaccaccccagcaccuccgcggaccagcagagccuguaccagaacgccgacgccuacguguucgucggcacgucccgguacagcaagaaguucaagcccgagaucgccauccgcccgaaggugcgggaccaggagggccgcaugaacuacuacuggacccugguggagcccggggacaagaucaccuucgaggccaccggcaaccucgucgugccccgguacgcguucgccauggagaagaacgccggguccggcaucaucaucagcgacacgcccgugcacgacugcaacacgaccugccagaccccgaagggcgccaucaacaccucccugcccuuccagaacauccaccccaucaccaucgggaagugccccaaguacgucaagagcaccaagcugcgccucgccaccggccugcggaacgugccguccauccagagccgcgggcuguucggcgcgaucgccggguucaucgagggcggcuggacggggaugguggacggcugguacggguaccaccaccagaacgagcagggcuccggguacgccgccgaccucaagagcacccagcacgccaucgacgagaucaccaacaaggucaacuccgugaucgagaagaugaacacccaguucacggcggucggcaaggaguucaaccaccuggagaagcggaucgagaaccugaacaagaagguggacgacggcuuccucgacaucuggaccuacaacgccgagcugcuggugcuccuggagaacgagcgcacccuggacuaccacgacagcaacgucaagaaccucuacgagaaggugcggucccagcugaagaacaacgccaaggagaucgggaacggcugcuucgaguucuaccacaagugcgacaacacgugcauggagagcgugaagaacgggaccuacgacuaccccaaguacuccgaggaggccaagcugaaccgcgaggagaucgacggcgucaagcucgagagcacccggaucuaccagauccuggccaucuacuccaccguggcgagcagccuggugcucgucgugucccugggggccaucagcuucuggaugugcuccaacggcagccugcagugccgcaucugcaucuga

SEQ ID NO: 69934 - RNA, 1701 nt, Artificial Sequence; identical to SEQ ID NO: 67794
  derived and/or modified CDS sequence (opt1) from hemagglutinin__InfluenzaA__ADM95832

SEQ ID NO: 69935 - RNA, 1701 nt, Artificial Sequence; identical to SEQ ID NO: 68375
  derived and/or modified CDS sequence (opt1) from hemagglutinin__InfluenzaA__ADM95833

SEQ ID NO: 69936 - RNA, 1701 nt, Artificial Sequence; identical to SEQ ID NO: 69920
  derived and/or modified CDS sequence (opt1) from hemagglutinin__InfluenzaA__ADM95834

SEQ ID NO: 69937 - RNA, 1701 nt, Artificial Sequence; identical to SEQ ID NO: 68375
  derived and/or modified CDS sequence (opt1) from hemagglutinin__InfluenzaA__ADM95836

SEQ ID NO: 69938 - RNA, 1701 nt, Artificial Sequence; identical to SEQ ID NO: 69290
  derived and/or modified CDS sequence (opt1) from hemagglutinin__InfluenzaA__ADM95837

SEQ ID NO: 69939 - RNA, 1701 nt, Artificial Sequence
  derived and/or modified CDS sequence (opt1) from hemagglutinin__InfluenzaA__ADM95838
augaaggccauccuggugguccuccuguacaccuucgccaccgcgaacgccgacacgcugugcaucggcuaccacgccaacaacagcaccgacaccguggacaccgugcucgagaagaacgucacggugacccacuccgugaaccugcuggaggacaagcacaacgggaagcucugcaagcugcgcggcgucgcgccccugcaccucgggaagugcaacaucgccggcuggauccuggggaacccggagugcgagagccuguccaccgccagcuccuggagcuacaucguggagaccuccagcuccgacaacggcacgugcuaccccggcgacuucaucgacuacgaggagcuccgggagcagcugagcuccgugagcuccuucgagcgcuucgagaucuuccccaagaccagcuccuggcccaaccacgacagcaacaagggggucaccgccgccugccugcacgccggcgcgaaguccuucuacaagaaccucaucuggcuggugaagaaggggaacagcuacccgaagcuguccaagagcuacaucaacgacaagggcaaggaggugcucguccugugggggauccaccaccccagcaccuccgccgaccagcagagccuguaccagaacgccgacgccuacguguucgugggcacgucccgguacagcaagaaguucaagcccgagaucgccauccgccccaagguccgggaccaggagggccgcaugaacuacuacuggacccucguggagccgggggacaagaucaccuucgaggcgaccggcaaccugguggucccccgguacgccuucgccauggagcgcaacgccggguccggcaucaucaucagcgacacgcccgugcacgacugcaacacgaccugccagacccccaagggcgccaucaacaccucccugccguuccagaacauccaccccaucaccaucgggaagugccccaaguacgucaagagcaccaagcuccggcuggcgaccggccugcgcaacgugcccuccauccagagccgggggcuguucggcgccaucgccggguucaucgagggcggcuggacggggaugguggacggcugguacggguaccaccaccagaacgagcagggcuccggguacgccgccgaccucaagagcacccagaacgcgaucgacaagaucaccaacaaggugaacuccgucaucgagaagaugaacacccaguucacggccgugggcaaggaguucaaccaccuggagaagcgcaucgagaaccucaacaagaaggucgacgacggcuuccuggacaucuggaccuacaacgccgagcugcucgugcugcuggagaacgagcggacccucgacuaccacgacagcaacgugaagaaccuguacgagaagguccgcucccagcugaagaacaacgccaaggagaucgggaacggcugcuucgaguucuaccacaagugcgacaacacgugcauggagagcgugaagaacgggaccuacgacuacccgaaguacuccgaggaggccaagcucaaccgggaggagaucgacggcgugaagcuggagagcacccgcaucuaccagauccuggcgaucuacuccaccgucgccagcagccucgugcugguggucucccugggggccaucagcuucuggaugugcuccaacggcagccuccagugccggaucugcaucuga

SEQ ID NO: 69940 - RNA, 1701 nt, Artificial Sequence; identical to SEQ ID NO: 68375
  derived and/or modified CDS sequence (opt1) from hemagglutinin__InfluenzaA__ADM95839

SEQ ID NO: 69941 - RNA, 1701 nt, Artificial Sequence; identical to SEQ ID NO: 69900
  derived and/or modified CDS sequence (opt1) from hemagglutinin__InfluenzaA__ADM95840

SEQ ID NO: 69942 - RNA, 1701 nt, Artificial Sequence; identical to SEQ ID NO: 69900
  derived and/or modified CDS sequence (opt1) from hemagglutinin__InfluenzaA__ADM95842

SEQ ID NO: 69943 - RNA, 1701 nt, Artificial Sequence; identical to SEQ ID NO: 69290
  derived and/or modified CDS sequence (opt1) from hemagglutinin__InfluenzaA__ADM95843

SEQ ID NO: 69944 - RNA, 1701 nt, Artificial Sequence; identical to SEQ ID NO: 69290
  derived and/or modified CDS sequence (opt1) from hemagglutinin__InfluenzaA__ADM95844

SEQ ID NO: 69945 - RNA, 1701 nt, Artificial Sequence
  derived and/or modified CDS sequence (opt1) from hemagglutinin__InfluenzaA__ADM95845
augaaggccauccuggugguccuccuguacaccuucgccaccgcgaacgccgacacgcugugcaucggcuaccacgccaacaacagcaccgacaccguggacaccgugcucgagaagaacgucacggugacccacuccgugaaccugcuggaggacaagcacaacgggaagcucugcaagcugcgcggcgucgcgccccugcaccucgggaagugcaacaucgccggcuggauccuggggaacccggagugcgagagccuguccaccgccagcuccuggagcuacaucguggagaccuccagcuccgacaacggcacgugcuaccccggcgacuucaucgacuacgaggagcuccgggagcagcugagcuccgugagcuccuucgagcgcuucgagaucuuccccaagaccagcuccuggcccaaccacgacagcaacaagggggucaccgccgccugcccgcacgccggcgcgaaguccuucuacaagaaccugaucuggcucgugaagaaggggaacagcuaccccaagcuguccaagagcuacaucaacgacaagggcaaggaggugcugguccucugggggauccaccaccccagcaccuccgccgaccagcagagccuguaccagaacgccgacgccuacguguucgugggcacgucccgguacagcaagaaguucaagcccgagaucgccauccgcccgaagguccgggaccaggagggccgcaugaacuacuacuggacccugguggagcccggggacaagaucaccuucgaggcgaccggcaaccucguggucccccgguacgccuucgccauggagcgcaacgccggguccggcaucaucaucagcgacacgcccgugcacgacugcaacacgaccugccagaccccgaagggcgccaucaacaccucccugcccuuccagaacauccaccccaucaccaucgggaagugccccaaguacgucaagagcaccaagcugcggauggcgaccggccuccgcaacgugccguccauccagagccgggggcuguucggcgccaucgccggguucaucgagggcggcuggacggggaugguggacggcugguacggguaccaccaccagaacgagcagggcuccggguacgccgccgaccucaagagcacccagaacgcgaucgacgagaucaccaacaaggugaacuccgucaucgagaagaugaacacccaguucacggccgugggcaaggaguucaaccaccuggagaagcgcaucgagaaccugaacaagaaggucgacgacggcuuccuggacaucuggaccuacaacgccgagcuccuggugcugcucgagaacgagcggacccuggacuaccacgacagcaacgugaagaaccuguacgagaagguccgcucccagcucaagaacaacgccaaggagaucgggaacggcugcuucgaguucuaccacaagugcgacaacacgugcauggagagcgugaagaacgggaccuacgacuaccccaaguacuccgaggagaccaagcugaaccgggaggagaucgacggcgugaagcuggagagcacccgcaucuaccagauccucgccaucuacuccaccgucgcgagcagccuggugcugguggucucccucggggccaucagcuucuggaugugcuccaacggcagccugcagugccggaucugcaucuga

SEQ ID NO: 69946 - RNA, 1701 nt, Artificial Sequence
  derived and/or modified CDS sequence (opt1) from hemagglutinin__InfluenzaA__ADM95846
augaaggccauccuggugguccuccuguacaccuucgccaccgcgaacgccgacacgcugugcaucggcuaccacgccaacaacagcaccgacaccguggacaccgugcucgagaagaacgucacggugacccacuccgugaaccugcuggaggacaagcacaacgggaagcucugcaagcugcgcggcgucgcgccccugcaccucgggaagugcaacaucgccggcuggauccuggggaacccggagugcgagagccuguccaccgccagcuccuggagcuacaucguggaggccuccagcuccgacaacgggaccugcuaccccggcgacuucaucgacuacgaggagcuccgggagcagcugagcuccgugagcuccuucgagcgcuucgagaucuuccccaagacgagcuccuggcccaaccacgacagcaacaagggcgucaccgccgccugcccgcacgcgggcgccaaguccuucuacaagaaccugaucuggcucgugaagaaggggaacagcuaccccaagcuguccaagagcuacaucaacgacaagggcaaggaggugcugguccucugggggauccaccaccccagcaccuccgccgaccagcagagccuguaccagaacgccgacgccuacguguucgugggcaccucccgguacagcaagaaguucaagcccgagaucgcgauccgcccgaagguccgggaccaggagggccgcaugaacuacuacuggacgcugguggagcccggggacaagaucaccuucgaggccaccggcaaccucguggucccccgguacgccuucgccauggagcgcaacgccggguccggcaucaucaucagcgacacccccgugcacgacugcaacacgaccugccagaccccgaagggcgcgaucaacaccucccugcccuuccagaacauccaccccaucacgaucgggaagugccccaaguacgucaagagcaccaagcugcggcucgccaccggccugcgcaacaucccguccauccagagccgggggcuguucggcgccaucgccggguucaucgagggcggcuggaccgggaugguggacggcugguacggguaccaccaccagaacgagcagggcuccggguacgccgcggaccucaagagcacgcagaacgccaucgacgagaucaccaacaaggugaacuccgugaucgagaagaugaacacccaguucaccgccgucggcaaggaguucaaccaccuggagaagcgcaucgagaaccugaacaagaagguggacgacggcuuccucgacaucuggacguacaacgccgagcugcugguccuccuggagaacgagcggacccuggacuaccacgacagcaacgugaagaaccucuacgagaaggugcgcucccagcugaagaacaacgccaaggagaucgggaacggcugcuucgaguucuaccacaagugcgacaacacgugcauggagagcgucaagaacgggaccuacgacuaccccaaguacuccgaggaggcgaagcugaaccgggaggagaucgacggcgugaagcucgagagcacccgcaucuaccagauccuggccaucuacuccaccguggccagcagccugguccucguggugucccugggggccaucagcuucuggaugugcuccaacggcagccugcagugccggaucugcaucuga

SEQ ID NO: 69947 - RNA, 1701 nt, Artificial Sequence; identical to SEQ ID NO: 67794
  derived and/or modified CDS sequence (opt1) from hemagglutinin__InfluenzaA__ADM95847

SEQ ID NO: 69948 - RNA, 1701 nt, Artificial Sequence; identical to SEQ ID NO: 67794
  derived and/or modified CDS sequence (opt1) from hemagglutinin__InfluenzaA__ADM95848

SEQ ID NO: 69949 - RNA, 1701 nt, Artificial Sequence
  derived and/or modified CDS sequence (opt1) from hemagglutinin__InfluenzaA__ADM95849
augaaggccauccuggugguccuccuguacaccuucgccaccgcgaacgccgacacgcugugcaucggcuaccacgccaacaacagcaccgacaccguggacaccgugcucgagaagaacgucacggugacccacuccgugaaccugcuggaggacaagcacaacgggaagcucugcaagcugcgcggcgucgcgccccugcaccucgggaagugcaacaucgccggcuggauccuggggaacccggagugcgagagccuguccaccgccagcuccuggagcuacaucguggagaccuccagcuccgacaacggcacgugcuaccccggcgacuucaucgacuacgaggagcuccgggagcagcugagcuccgugagcuccuucgagcgcuucgagaucuuccccaagaccagcuccuggcccaaccacgacagcaacaagggggucaccgccgccugcccgcacgccggcgcgaaguccuucuacaagaaccugaucuggcucgugaagaaggggaacagcuaccccaagcuguccaagagcuacaucaacgacaagggcaaggaggugcugguccucugggggauccaccaccccagcaccuccgccgaccagcagagccuguaccagaacgccgacgccuacguguucgugggcacgucccgguacagcaagaaguucaagcccgagaucgccauccgcccgaagguccgggaccaggagggccgcaugaacuacuacuggacccugguggagcccggggacaagaucaccuucgaggcgaccggcaaccucguggucccccgguacgccuucgccauggagcgcaacgccggguccggcaucaucaucagcgacacgcccgugcacgacugcaacacgaccugccagaccccgaagggcgccaucaacaccucccugcccuuccagaacauccaccccaucaccaucgggaagugccccaaguacgucaagagcaccaagcugcggcucgcgaccggccugcgcaacgugccguccauccagagccgggggcuguucggcgccaucgccggguucaucgagggcggcuggacggggaugguggacggcugguacggguaccaccaccagaacgagcagggcuccggguacgccgccgaccucaagagcacccagaacgcgaucgacgagaucaccaacaaggugaacuccgucaucgagaagaugaacacccaguucacggccgugggcaaggaguucaaccaccuggagaagcgcaucgagaaccugaacaagaaggucgacgacggcuuccucgacaucuggaccuacaacgccgagcugcuggugcuccuggagaacgagcggacccuggacuaccacgacagcaacgugaagaagcucuacgagaagguccgcucccagcugaagaacaacgccaaggagaucgggaacggcugcuucgaguucuaccacaagugcgacaacacgugcauggagagcgugaagaacgggaccuacgacuaccccaaguacuccgaggaggccaagcugaaccgggaggagaucgacggcgugaagcucgagagcacccgcaucuaccagauccuggcgaucuacuccaccgucgccagcagccuggugcucgugaucucccugggggccaucagcuucuggaugugcuccaacggcagccugcagugccggaucugcaucuga

SEQ ID NO: 69950 - RNA, 1701 nt, Artificial Sequence; identical to SEQ ID NO: 69290
  derived and/or modified CDS sequence (opt1) from hemagglutinin__InfluenzaA__ADM95850

SEQ ID NO: 69951 - RNA, 1701 nt, Artificial Sequence
  derived and/or modified CDS sequence (opt1) from hemagglutinin__InfluenzaA__ADM95851
augaaggccauccuggugguccuccuguacaccuucgccaccgcgaacgccgacacgcugugcaucggcuaccacgccaacaacagcaccgacaccguggacaccgugcucgagaagaacgucacggugacccacuccgugaaccugcuggaggacaagcacaacgggaagcucugcaagcugcgcggcgucgcgccccugcaccucgggaagugcaacaucgccggcuggauccuggggaacccggagugcgagagccuguccaccaccagcuccuggagcuacaucguggagacguccagcuccgacaacgggaccugcuaccccggcgacuucaucgacuacgaggagcuccgggagcagcugagcuccgugagcuccuucgagcgcuucgagaucuuccccaagaccagcuccuggcccaaccacgacagcaacaagggcgucaccgccgccugcccgcacgccggcgccaaguccuucuacaagaaccugaucuggcucgugaagaaggggaacagcuaccccaagcuguccaagagcuacaucaacgacaagggcaaggaggugcugguccucugggggauccaccaccccagcacguccgcggaccagcagagccuguaccagaacgccgacgccuacguguucgugggcaccucccgguacagcaagaaguucaagcccgagaucgccauccgcccgaagguccgggaccaggagggccgcaugaacuacuacuggacccugguggagcccggggacaagaucaccuucgaggccacgggcaaccucguggucccccgguacgcguucgccauggagcgcaacgccggguccggcaucaucaucagcgacacccccgugcacgacugcaacacgaccugccagaccccgaagggcgccaucaacaccucccugcccuuccagaacauccaccccaucaccaucgggaagugccccaaguacgucaagagcaccaagcugcggcucgccacgggccugcgcaacaucccguccauccagagccgggggcuguucggcgcgaucgccggguucaucgagggcggcuggaccgggaugguggacggcugguacggguaccaccaccagaacgagcagggcuccggguacgccgccgaccucaagagcacccagaacgccaucgacgagaucaccaacaaggugaacuccgugaucgagaagaugaacacgcaguucaccgcggucggcaaggaguucaaccaccuggagaagcgcaucgagaaccugaacaagaagguggacgacggcuuccucgacaucuggaccuacaacgccgagcugcugguccuccuggagaacgagcggacccuggacuaccacgacagcaacgugaagaaccucuacgagaaggugcgcucccagcugaagaacaacgccaaggagaucgggaacggcugcuucgaguucuaccacaagugcgacaacacgugcauggagagcgucaagaacgggaccuacgacuaccccaaguacuccgaggaggccaagcugaaccgggaggagaucgacggcgugaagcucgagagcacccgcaucuaccagauccuggccaucuacuccaccguggcgagcagccugguccucguggugucccugggggccaucagcuucuggaugugcuccaacggcagccugcagugccggaucugcaucuga

SEQ ID NO: 69952 - RNA, 1701 nt, Artificial Sequence
  derived and/or modified CDS sequence (opt1) from hemagglutinin__InfluenzaA__ADM95852
augaaggccauccuggugguccuccuguacaccuucgccaccgcgaacgccgacacgcugugcaucggcuaccacgccaacaacagcaccgacaccguggacaccgugcucgagaagaacgucacggugacccacuccgugaaccugcuggaggacaagcacaacgggaagcucugcaagcugcgcggcgucgcgccccugcaccucgggaagugcaacaucgccggcuggauccuggggaacccggagugcgagagccuguccaccgccagcuccuggagcuacaucguggagaccuccagcuccgacaacggcacgugcuaccccggcgacuucaucgacuacgaggagcuccgggagcagcugagcuccgugagcuccuucgagcgcuucgagaucuuccccaagaccagcuccuggcccaaccacgacagcaacaagggggucaccgccgccugcccgcacgccggcgcgaaguccuucuacaagaaccugaucuggcucgugaagaaggggaacagcuaccccaagcuguccaagagcuacaucaacgacaagggcaaggaggugcugguccucugggggauccaccaccccagcaccuccgccgaccagcagagccuguaccagaacgccgacgccuacguguucgugggcacgucccgguacagcaagaaguucaagcccgagaucgccauccgcccgaagguccgggaccaggagggccgcaugaacuacuacuggacccugguggagcccggggacaagaucaccuucgaggcgaccggcaaccucguggucccccgguacgccuucgccauggagcgcaacgccggguccggcaucaucaucagcgacacgcccgugcacgacugcaacacgaccugccagaccccgaagggcgccaucaacaccucccugcccuuccagaacauccaccccaucaccaucgggaagugccccaaguacgucaagagcaccaagcugcggcucgcgaccggccugcgcaacgugccguccauccagagccgggggcuguucggcgccaucgccggguucaucgagggcggcuggacggggaugguggacggcugguacggguaccaccaccagaacgagcagggcuccggguacgccgccgaccucaagagcacccagaacgcgaucgacgagaucaccaacaaggugaacuccgucaucgagaagaugaacacccaguucacggccgugggcaaggaguucaaccaccuggagaagcgcaucgagaaccugaacaagaaggucgacgacggcuuccucgacaucuggaccuacaacgccgagcugcuggugcuccuggagaacgagcggacccuggacuaccacgacagcaacgugaagaagcucuacgagaagauccgcucccagcugaagaacaacgccaaggagaucgggaacggcugcuucgaguucuaccacaagugcgacaacacgugcauggagagcgucaagaacgggaccuacgacuaccccaaguacuccgaggaggccaagcugaaccgggaggagaucgacggcgugaagcucgagagcacccgcaucuaccagauccuggcgaucuacuccaccguggccagcagccugguccucguggugucccugggggccaucagcuucuggaugugcuccaacggcagccugcagugccggaucugcaucuga

SEQ ID NO: 69953 - RNA, 1701 nt, Artificial Sequence; identical to SEQ ID NO: 68113
  derived and/or modified CDS sequence (opt1) from hemagglutinin__InfluenzaA__ADM95854

SEQ ID NO: 69954 - RNA, 1701 nt, Artificial Sequence
  derived and/or modified CDS sequence (opt1) from hemagglutinin__InfluenzaA__ADM95855
augaaggccauccuggugguccuccuguacaccuucgccaccacgaacgcggacacccugugcaucggcuaccacgccaacaacagcaccgacaccguggacacggugcucgagaagaacgucaccgugacccacuccgugaaccugcuggaggacaagcacaacgggaagcucugcaagcugcgcggcgucgcgccccugcaccucgggaagugcaacaucgccggcuggauccuggggaacccggagugcgagagccuguccaccgccagcuccuggagcuacaucguggagacguccagcuccgacaacgggaccugcuaccccggcgacuucaucgacuacgaggagcuccgggagcagcugagcuccgugagcuccuucgagcgcuucgagaucuuccccaagaccagcuccuggcccaaccacgacagcaacaagggcgucaccgccgccugcccgcacgccggcgccaaguccuucuacaagaaccugaucuggcucgugaagaaggggaacagcuaccccaagcuguccaagagcuacaucaacgacaagggcaaggaggugcugguccucugggggauccaccaccccagcacguccgcggaccagcagagccuguaccagaacgccgacgccuacguguucgugggcaccucccgguacagcaagaaguucaagcccgagaucgccauccgcccgaagguccgggaccaggagggccgcaugaacuacuacuggacccugguggagcccggggacaagaucaccuucgaggccacgggcaaccucguggucccccgguacgcguucgccauggagcgcaacgccggguccggcaucaucaucagcgacacccccgugcacgacugcaacacgaccugccagaccccgaagggcgccaucaacaccucccugcccuuccagaacauccaccccaucaccaucgggaagugccccaaguacgucaagagcaccaagcugcggcucgccacgggccugcgcaacgugccguccauccagagccgggggcuguucggcgcgaucgccggguucaucgagggcggcuggaccgggaugguggacggcugguacggguaccaccaccagaacgagcagggcuccggguacgccgccgaccucaagagcacccagaacgccaucgacgagaucaccaacaaggugaacuccgucaucgagaagaugaacacgcaguucaccgcggugggcaaggaguucaaccaccuggagaagcgcaucgagaaccugaacaagaaggucgacgacggcuuccucgacaucuggaccuacaacgccgagcugcuggugcuccuggagaacgagcggacccuggacuaccacgacagcaacgugaagaagcucuacgagaagguccgcucccagcugaagaacaacgccaaggagaucgggaacggcugcuucgaguucuaccacaagugcgacaacacgugcauggagagcgugaagaacgggaccuacgacuaccccaaguacuccgaggaggccaagcugaaccgggaggagaucgacggcgugaagcucgagagcacccgcaucuaccagauccuggccaucuacuccaccgucgcgagcagccuggugcucguggucucccugggggccaucagcuucuggaugugcuccaacggcagccugcagugccggaucugcaucuga

SEQ ID NO: 69955 - RNA, 1701 nt, Artificial Sequence
  derived and/or modified CDS sequence (opt1) from hemagglutinin__InfluenzaA__ADM95857
augaaggccauccuggugguccuccuguacaccuucgccaccgcgaacgccgacacgcugugcaucggcuaccacgccaacaacagcaccgacaccguggacaccgugcucgagaagaacgucacggugacccacuccgugaaccugcuggaggacaagcacaacgggaagcucugcaagcugcgcggcgucgcgccccugcaccucgggaagugcaacaucgccggcuggauccuggggaacccggagugcgagagccuguccaccgcgaacagcugguccuacaucguggagaccagcuccagcgacaacggcacgugcuaccccggcgacuucaucgacuacgaggagcuccgggagcagcuguccagcguguccagcuucgagcgcuucgagaucuuccccaagaccuccagcuggcccaaccacgacuccaacaagggggucaccgccgccugcccgcacgccggcgccaagagcuucuacaagaaccugaucuggcucgugaagaaggggaacuccuaccccaagcugagcaaguccuacaucaacgacaagggcaaggaggugcugguccucugggggauccaccaccccagcaccagcgccgaccagcagucccuguaccagaacgccgacgccuacguguucgugggcacgagccgguacuccaagaaguucaagcccgagaucgccauccgcccgaagguccgggaccaggagggccgcaugaacuacuacuggacccugguggagcccggggacaagaucaccuucgaggcgaccggcaaccucguggucccccgguacgccuucgccauggagcgcaacgccgggagcggcaucaucaucuccgacacgcccgugcacgacugcaacacgaccugccagaccccgaagggcgccaucaacaccagccugcccuuccagaacauccaccccaucaccaucgggaagugccccaaguacgugaaguccaccaagcugcggauggcgaccggccuccgcaacgucccgagcauccagucccgggggcuguucggcgccaucgccggguucaucgagggcggcuggacggggaugguggacggcugguacggguaccaccaccagaacgagcagggcagcggguacgccgccgaccugaaguccacccagaacgcgaucgacgagaucaccaacaaggugaacagcgucaucgagaagaugaacacccaguucacggccgugggcaaggaguucaaccaccucgagaagcgcaucgagaaccugaacaagaaggucgacgacggcuuccuggacaucuggaccuacaacgccgagcuccuggugcugcucgagaacgagcggacccuggacuaccacgacuccaacgugaagaaccuguacgagaagguccgcagccagcucaagaacaacgccaaggagaucgggaacggcugcuucgaguucuaccacaagugcgacaacacgugcauggaguccgugaagaacgggaccuacgacuaccccaaguacagcgaggaggccaagcugaaccgggaggagaucgacggcgugaagcuggaguccacccgcaucuaccagauccucgcgaucuacagcaccgucgccuccagccuggugcugguggucagccucggggccaucuccuucuggaugugcagcaacggcucccugcagugccggaucugcaucuga

SEQ ID NO: 69956 - RNA, 1701 nt, Artificial Sequence; identical to SEQ ID NO: 68375
  derived and/or modified CDS sequence (opt1) from hemagglutinin__InfluenzaA__ADM95858

SEQ ID NO: 69957 - RNA, 1701 nt, Artificial Sequence
  derived and/or modified CDS sequence (opt1) from hemagglutinin__InfluenzaA__ADM95859
augaaggccauccuggugguccuccuguacaccuucgccaccgcgaacgccgacacgcugugcaucggcuaccacgccaacaacagcaccgacaccguggacaccgugcucgagaagaacgucacggugacccacuccgugaaccugcuggaggacaagcacaacgagaagcucugcaagcugcgcggggucgcgccccugcaccucggcaagugcaacaucgccggguggauccugggcaacccggagugcgagagccuguccaccgccagcuccuggagcuacaucguggagaccuccagcuccgacaacgggacgugcuaccccggcgacuucaucgacuacgaggagcuccgggagcagcugagcuccgugagcuccuucgagcgcuucgagaucuuccccaagaccagcuccuggcccaaccacgacagcaacaagggcgucaccgccgccugcccgcacgccggggcgaaguccuucuacaagaaccugaucuggcucgugaagaagggcaacagcuaccccaagcuguccaagagcuacaucaacgacaaggggaaggaggugcugguccucuggggcauccaccaccccagcaccuccgccgaccagcagagccuguaccagaacgccgacgccuacguguucguggggacgucccgguacagcaagaaguucaagcccgagaucgccauccgcccgaagguccgggaccaggagggccgcaugaacuacuacuggacccugguggagcccggcgacaagaucaccuucgaggcgaccgggaaccucguggucccccgguacgccuucgccauggagcgcaacgccggcuccgggaucaucaucagcgacacgcccgugcacgacugcaacacgaccugccagaccccgaagggcgccaucaacaccucccugcccuuccagaacauccaccccaucaccaucggcaagugccccaaguacgucaagagcaccaagcugcggcucgcgaccgggcugcgcaacgugccguccauccagagccggggccuguucggggccaucgccggcuucaucgagggcggguggacgggcaugguggacgggugguacggcuaccaccaccagaacgagcagggguccggcuacgccgccgaccucaagagcacccagaacgcgaucgacgagaucaccaacaaggugaacuccgucaucgagaagaugaacacccaguucacggccguggggaaggaguucaaccaccuggagaagcgcaucgagaaccugaacaagaaggucgacgacggcuuccucgacaucuggaccuacaacgccgagcugcuggugcuccuggagaacgagcggacccuggacuaccacgacagcaacgugaagaagcucuacgagaagguccgcucccagcugaagaacaacgccaaggagaucggcaacgggugcuucgaguucuaccacaagugcgacaacacgugcauggagagcgugaagaacggcaccuacgacuaccccaaguacuccgaggaggccaagcugaaccgggaggagaucgacggggugaagcucgagagcacccgcaucuaccagauccuggcgaucuacuccaccgucgccagcagccuggugcucguggucucccugggcgccaucagcuucuggaugugcuccaacgggagccugcagugccggaucugcaucuga

SEQ ID NO: 69958 - RNA, 1701 nt, Artificial Sequence; identical to SEQ ID NO: 68320
  derived and/or modified CDS sequence (opt1) from hemagglutinin__InfluenzaA__ADM95860

SEQ ID NO: 69959 - RNA, 1701 nt, Artificial Sequence; identical to SEQ ID NO: 69920
  derived and/or modified CDS sequence (opt1) from hemagglutinin__InfluenzaA__ADM95862

SEQ ID NO: 69960 - RNA, 1701 nt, Artificial Sequence
  derived and/or modified CDS sequence (opt1) from hemagglutinin__InfluenzaA__ADM95864
augaaggccauccuggugguccuccuguacaccuucgccaccgcgaacgccgacacgcugugcaucggcuaccacgccaacaacagcaccgacaccguggacaccgugcucgagaagaacgucacggugacccacuccgugaaccugcuggaggacaagcacaacgggaagcucugcaagcugcgcggcgucgcgccccugcaccucgggaagugcaacaucgccggcuggauccuggggaacccggagugcgagagccuguccaccgccagcuccuggagcuacaucguggagaccuccagcuccgacaacggcacgugcuaccccggcgacuucaucgacuacgaggagcuccgggagcagcugagcuccgugagcuccuucgagcgcuucgagaucuuccccaagaccagcuccuggcccaaccacgacagcaacaagggggucaccgccgccugcccgcacgccggcgcgaaguccuucuacaagaaccugaucuggcucgugaagaaggggaacagcuaccccaagcuguccaagagcuacaucaacgacaagggcaaggaggugcugguccucugggggauccaccaccccagcaccuccgccgaccagcagagccuguaccagaacgccgacgccuacguguucgugggcacgucccgguacagcaagaaguucaagcccgagaucgccauccgcccgcggguccgcgaccaggagggccggaugaacuaccacuggacccugguggagcccggggacaagaucaccuucgaggcgaccggcaaccucguggucccccgcuacgccuucgccauggagcggaacgccggguccggcaucaucaucagcgacacgcccgugcacgacugcaacacgaccugccagaccccgaagggcgccaucaacaccucccugcccuuccagaacauccaccccaucaccaucgggaagugccccaaguacgucaagagcaccaagcugcgccucgcgaccggccugcggaacaucccguccauccagagccgcgggcuguucggcgccaucgccggguucaucgagggcggcuggacggggaugguggacggcugguacggguaccaccaccagaacgagcagggcuccggguacgccgccgaccucaagagcacccagaacgcgaucgacgagaucaccaacaaggugaacuccgugaucgagaagaugaacacccaguucacggccgucggcaaggaguucaaccaccuggagaagcggaucgagaaccugaacaagaagguggacgacggcuuccucgacaucuggaccuacaacgccgagcugcugguccuccuggagaacgagcgcacccuggacuaccacgacagcaacgugaagaaccucuacgagaaggugcggucccagcugaagaacaacgccaaggagaucgggaacggcugcuucgaguucuaccacaagugcgacaacacgugcauggagagcgucaagaacgggaccuacgacuaccccaaguacuccgaggaggccaagcugaaccgcgaggagaucgacggcgugaagcucgagagcacccggaucuaccagauccuggcgaucuacuccaccguggccagcagccugguccucguggugucccugggggccaucagcuucuggaugugcuccaacggcagccugcagugccgcaucugcaucuga

SEQ ID NO: 69961 - RNA, 1701 nt, Artificial Sequence; identical to SEQ ID NO: 68245
  derived and/or modified CDS sequence (opt1) from hemagglutinin__InfluenzaA__ADM95865

SEQ ID NO: 69962 - RNA, 1701 nt, Artificial Sequence
  derived and/or modified CDS sequence (opt1) from hemagglutinin__InfluenzaA__ADM95866
augaaggccauccuggugguccuccuguacaccuucgccaccacgaacgcggacacccugugcaucggcuaccacgccaacaacagcaccgacaccguggacacggugcucgagaagaacgucaccgugacccacuccgugaaccugcuggaggacaagcacaacgggaagcucugcaagcugcgcggcgucgcgccccugcaccucgggaagugcaacaucgccggcuggauccuggggaacccggagugcgagagccuguccaccgccagcuccuggagcuacaucguggagaucuccagcuccgacaacggcacgugcuaccccggcgacuucaucgacuacgaggagcuccgggagcagcugagcuccgugagcuccuucgagcgcuucgagaucuuccccaagaccagcuccuggcccaaccacgacagcaacaagggggucaccgccgccugcccgcacgccggcgccaaguccuucuacaagaaccugaucuggcucgugaagaaggggaacagcuaccccaagcuguccaagagcuacaucaacgacaagggcaaggaggugcugguccucugggggauccaccaccccagcaccuccgcggaccagcagagccuguaccagaacgccgacgccuacguguucgugggcacgucccgguacagcaagaaguucaagcccgagaucgccauccgcccgaagguccgggaccaggagggccgcaugaacuacuacuggacccugguggagcccggggacaagaucaccuucgaggccaccggcaaccucguggucccccgguacgcguucgccauggagcgcaacgccggguccggcaucaucaucagcgacacgcccgugcacgacugcaacacgaccugccagaccccgaagggcgccaucaacaccucccugcccuuccagaacauccaccccaucaccaucgggaagugccccaaguacgucaagagcaccaagcugcggcucgugaccggccugcgcaacgugccguccauccagagccgggggcuguucggcgccaucgcgggguucaucgagggcggcuggacggggaugguggacggcugguacggguaccaccaccagaacgagcagggcuccggguacgccgccgaccucaagagcacccagaacgccaucgacaagaucaccaacaaggucaacuccgugaucgagaagaugaacacccaguucacggccgucggcaaggaguucaaccaccuggagaagcgcaucgagaaccugaacaagaagguggacgacggcuuccucgacaucuggaccuacaacgcggagcugcuggugcuccuggagaacgagcggacccuggacuaccacgacagcaacgucaagaaccucuacgagaaggugcgcucccagcugaagaacaacgccaaggagaucgggaacggcugcuucgaguucuaccacaagugcgacaacacgugcauggagagcgugaagaacgggaccuacgacuaccccaaguacuccgaggaggccaagcugaaccgggaggagaucgacggcgucaagcucgagagcacccgcaucuaccagauccuggccaucuacuccaccgccgcgagcagccuggugcucguggucucccugggggccaucagcuucuggaugugcuccaacggcagccugcagugccggaucugcaucuga

SEQ ID NO: 69963 - RNA, 1698 nt, Artificial Sequence; identical to SEQ ID NO: 69537
  derived and/or modified CDS sequence (opt1) from hemagglutinin__InfluenzaA__ADN06300

SEQ ID NO: 69964 - RNA, 1698 nt, Artificial Sequence
  derived and/or modified CDS sequence (opt1) from hemagglutinin__InfluenzaA__ADN06311
augaaggugaagcugcucguccugcugugcacccucaccgccacguacgccgacaccaucugcaucggcuaccacgcgaacaacagcaccgacaccguggacacggugcuggagaagaacgucaccgugacccacuccgugaaccugcucgagaacagccacaacgggaagcugugccugcucaagggcaucgcgccccugcagcuggggaacugcuccgucgccggcuggauccucgggaacccggagugcgagcugcugaucagcaaggaguccuggagcuacaucguggagaagcccaaccccgagaacgggaccugcuaccccggccacuucgccgacuacgaggagcuccgcgagcagcuguccagcguguccagcuucgagcgguucgagaucuucccgaagggcuccagcuggcccaaccacacggucaccggcguguccgccagcugcucccacaacggggagaacagcuucuaccgcaaccugcucuggcugaccggcaagaacgggcuguaccccaaccucuccaagagcuacgccaacaacaaggagaaggaggugcugguccuguggggcgugcaccacccgcccaacaucgccgaccagaagacccucuaccacacggagaacgccuacguguccgucgugagcagccacuacucccggaaguucacccccgagaucgccaagcgccccaaggugcgggaccaggagggccgcaucaacuacuacuggacccugcuggagcccggggacaccaucaucuucgaggcgaacggcaaccucaucgccccgcgguacgccuucgcccugagccgcggguucggcuccggcaucaucaacagcaacgcccccauggacaagugcgacgcgaagugccagacgccccagggggccaucaacuccagccugcccuuccagaacguccacccggugaccaucggcgagugccccaaguacgugcgguccgccaagcuccgcauggucaccgggcugcggaacauccccagcauccagucccgcggccuguucggggccaucgccggcuucaucgagggcggguggaccggcaugguggacgggugguacggcuaccaccaccagaacgagcaggggagcggcuacgcggccgaccagaaguccacgcagaacgccaucaacggcaucaccaacaaggugaacagcgucaucgagaagaugaacacccaguucaccgccguggggaaggaguucaacaagcucgagcggcgcauggagaaccugaacaagaaggucgacgacggcuucaucgacaucuggacguacaacgccgagcugcucgugcugcuggagaacgagcggacccucgacuuccacgacuccaacgugaagaaccuguacgagaaggucaagagccagcugaagaacaacgcgaaggagaucgggaacggcugcuucgaguucuaccacaagugcaacgacgagugcauggaguccgugaagaacgggaccuacgacuaccccaaguacagcgaggaguccaagcucaaccgcgagaagaucgacggcgugaagcuggagagcaugggcgucuaccagauccuggccaucuacuccaccguggccagcagccucgugcugcuggucucccucggggccaucagcuucuggaugugcuccaacggcagccugcagugccggaucugcaucuga

SEQ ID NO: 69965 - RNA, 1698 nt, Artificial Sequence
  derived and/or modified CDS sequence (opt1) from hemagglutinin__InfluenzaA__ADN06322
augaaggugaagcugcucguccugcugugcaccuucaccgccacguacgccgacaccaucugcaucggcuaccacgcgaacaacagcaccgacaccguggacacggugcucgagaagaacgucaccgugacccacuccgugaaccugcuggagaacagccacaacgggaagcucugccugcugaagggcaucgcgccccuccagcuggggaacugcuccgucgccggcuggauccuggggaacccggagugcgagcuccugaucagcaaggaguccuggagcuacaucguggagaagcccaaccccgagaacgggaccugcuaccccggccacuucgccgacuacgaggagcugcgcgagcagcucuccagcguguccagcuucgagcgguucgagaucuucccgaaggaguccagcuggcccaaccacacggucaccgggguguccgccagcugcucccacaacggcgagagcuccuucuaccgcaaccugcuguggcucaccgggaagaacggccuguaccccaaccugagcaaguccuacgccaacaacaaggagaaggaggugcucguccuguggggcgugcaccacccgcccaacaugguggaccagcggacccuguaccgcacggagaacgccuacgucagcguggugagcucccacuacagccggaaguucacccccgagaucgccaagcgccccaagguccgggaccaggagggccgcaucaacuacuacuggacccuccuggagcccggcgacaccaucaucuucgaggccaacgggaaccugaucgcgccgcgguacgccuucgcccucucccgcggcuucgggagcggcaucaucaacuccaacgcccccaugggcaagugcgacgccaagugccagacgccccagggggcgaucaacagcucccugcccuuccagaacgugcacccggugaccaucggcgagugccccaaguacguccggagcgccaagcugcgcauggugaccgggcuccggaacauccccuccauccagagccgcggccuguucggggccaucgccggcuucaucgagggcggguggaccggcaugguggacgggugguacggcuaccaccaccagaacgagcagggguccggcuacgccgcggaccagaaguccacgcagaacgccaucaacggcaucaccaacaaggucaacagcgugaucgagaagaugaacacccaguucaccgccgucgggaaggaguucaacaagcuggagcggcgcauggagaaccucaacaagaagguggacgacggcuucaucgacaucuggacguacaacgccgagcugcuggugcuccuggagaacgagcggacccuggacuuccacgacagcaacgucaagaaccucuacgagaaggugaagucccagcugaagaacaacgccaaggagaucgggaacggcugcuucgaguucuaccacaagugcaacgacgagugcauggagagcgugaagaacgggaccuacgacuaccccaaguacuccgaggagagcaagcugaaccgcgagaagaucgacggcgucaagcucgaguccaugggcguguaccagauccuggcgaucuacagcaccguggccagcucccugguccuccuggugagccugggggccaucuccuucuggaugugcagcaacggcucccuccagugccggaucugcaucuga

SEQ ID NO: 69966 - RNA, 1698 nt, Artificial Sequence
  derived and/or modified CDS sequence (opt1) from hemagglutinin__InfluenzaA__ADN06344
augaaggugaagcugcucguccugcugugcaccuucaccgccacguacgccgacaccaucugcaucggcuaccacgcgaacaacagcaccgacaccguggacacggugcucgagaagaacgucaccgugacccacuccgugaaccugcuggagaacagccacaacgggaagcucugccugcugaagggcaucgcgccccuccagcuggggaacugcuccgucgccggcuggauccuggggaacccggagugcgagcuccugaucagcaaggaguccuggagcuacaucguggagaagcccaaccccgagaacgggaccugcuaccccggccacuucgccgacuacgaggagcugcgcgagcagcucuccagcguguccagcuucgagcgguucgagaucuucccgaaggaguccagcuggcccaaccacacggucaccgggguguccgccagcugcucccacaacggcgagagcuccuucuaccgcaaccugcuguggcucaccgggaagaacggccuguaccccaaccugagcaaguccuacgccaacaacaaggagaaggaggugcucguccuguggggcgugcaccacccgcccagcaucagcgaccagaagacccuguaccacacggagaacgccuacguguccgucgugagcucccacuacagccggaaguucacccccgagaucgccaagcgccccaaggugcgggaccaggagggccgcaucaacuacuacuggacccuccuggagcccggcgacaccaucaucuucgaggccaacgggaaccugaucgcgccgcgguacgccuucgcccucucccgcggcuucgggagcggcaucaucaacuccaacgcccccauggacaagugcgacgccaagugccagacgccccagggcgcgaucaacagcucccugcccuuccagaacguccacccggugaccaucggggagugccccaaguacgugcggagcgccaagcugcgcauggucaccggccuccggaacauccccuccauccagagccgcgggcuguucggcgccaucgccggguucaucgagggcggcuggaccgggaugguggacggcugguacggguaccaccaccagaacgagcagggcuccggguacgccgcggaccagaaguccacgcagaacgccaucaacggcaucaccaacaaggugaacagcgucaucgagaagaugaacacccaguucaccgccgugggcaaggaguucaacaagcuggagcggcgcauggagaaccucaacaagaaggucgacgacggguucaucgacaucuggacguacaacgccgagcugcuggugcuccuggagaacgagcggacccuggacuuccacgacagcaacgugaagaaccucuacgagaaggucaagucccagcugaagaacaacgccaaggagaucggcaacgggugcuucgaguucuaccacaagugcaacgacgagugcauggagagcgugaagaacggcaccuacgacuaccccaaguacuccgaggagagcaagcugaaccgcgagaagaucgacggggugaagcucgagagcaugggcgucuaccagauccuggcgaucuacuccaccguggccagcucccuggugcuccuggucagccugggcgccaucuccuucuggaugugcagcaacgggucccuccagugccggaucugcaucuga

SEQ ID NO: 69967 - RNA, 1701 nt, Artificial Sequence; identical to SEQ ID NO: 69557
  derived and/or modified CDS sequence (opt1) from hemagglutinin__InfluenzaA__ADN06366

SEQ ID NO: 69968 - RNA, 1701 nt, Artificial Sequence
  derived and/or modified CDS sequence (opt1) from hemagglutinin__InfluenzaA__ADN26165
augaaggccauccuggugguccuccuguacaccuucgccaccgcgaacgccgacacgcugugcaucggcuaccacgccaacaacagcaccgacaccguggacaccgugcucgagaagaacgucacggugacccacuccgugaaccugcuggaggggaagcacaacggcaagcucugcaagcugcgcggggucgcgccccugcaccucggcaagugcaacaucgccggguggauccugggcaacccggagugcgagagccuguccaccgccagcuccuggagcuacaucguggagaccuccagcuccgacaacggcacgugcuaccccggggacuucaucgacuacgaggagcuccgggagcagcugagcuccgugagcuccuucgagcgcuucgagaucuuccccaagaccagcuccuggcccaaccacgacagcaacaagggcgucaccgccgccugcccgcacgccggggcgaaguccuucuacaagaaccugaucuggcucaucaagaagggcaacagcuaccccaagcuguccaagagcuacaucaacgacaaggggaaggaggugcuggugcucuggggcauccaccaccccagcaccuccgccgaccagcagagccuguaccagaacgccgacgccuacgucuucgugggcacgucccgguacagcaagaaguucaagcccgagaucgccauccgcccgaaggugcgggaccaggaggggcgcaugaacuacuacuggacccuggucgagcccggcgacaagaucaccuucgaggcgaccgggaaccucguggugccccgguacgccuucgccauggagcgcaacgccggcuccggcaucaucaucagcgacacgcccguccacgacugcaacacgaccugccagaccccgaagggggccaucaacaccucccugcccuuccagaacauccaccccaucaccaucggcaagugccccaaguacgucaagagcaccaagcugcggcucgcgaccgggcugcgcaacaucccguccauccagagccggggccuguucggggccaucgccggcuucaucgagggcggguggacgggcaugguggacgggugguacggcuaccaccaccagaacgagcagggguccggcuacgccgccgaccucaagagcacccagaacgcgaucgacgagaucaccaacaaggugaacuccgugaucgagaagaugaacacccaguucacggccgugggcaaggaguucaaccaccuggagaagcgcaucgagaaccugaacaagaaggucgacgacggguuccucgacaucuggaccuacaacgccgagcugcuggugcuccuggagaacgagcggacccuggacuaccacgacagcaacgucaagaaccucuacgagaaggugcgcucccagcugaagaacaacgccaaggagaucggcaacgggugcuucgaguucuaccacaagugcgacaacacgugcauggagagcgugaagaacggcaccuacgacuaccccaaguacuccgaggaggccaagcugaaccgggaggagaucgacggggucaagcucgagagcgcgcgcaucuaccagauccuggccaucuacuccaccguggccagcagccuggugcucgucgugucccugggcgccaucagcuucuggaugugcuccaacggcagccugcagugccggaucugcaucuga

SEQ ID NO: 69969 - RNA, 1701 nt, Artificial Sequence; identical to SEQ ID NO: 66873
  derived and/or modified CDS sequence (opt1) from hemagglutinin__InfluenzaA__ADN26175

SEQ ID NO: 69970 - RNA, 1701 nt, Artificial Sequence
  derived and/or modified CDS sequence (opt1) from hemagglutinin__InfluenzaA__ADN78194
augaaggccauccuggugguccuccuguacaccuucgccaccacgaacgcggacacccugugcaucggcuaccacgccaacaacagcaccgacaccguggacacggugcucgagaagaacgucaccgugacccacuccgugaaccugcuggaggacaagcacaacgggaagcucugcaagcugcgcggcgucgcgccccugcaccucgggaagugcaacaucgccggcuggauccuggggaacccggagugcgagagccuguccaccgccagcuccuggagcuacaucguggagacguccagcuccgacaacgggaccugcuaccccggcgacuucaucgacuacgaggagcuccgggagcagcugagcuccgugagcuccuucgagcgcuucgagaucuuccccaagaccagcuccuggcccaaccacgacagcaacaagggcgucaccgccgccugcccgcacgccggcgccaaguccuucuacaagaaccugaucuggcucgugaagaaggggaacagcuaccccaagcuguccaagagcuacaucaacgacaagggcaaggaggugcugguccucugggggauccaccaccccagcacguccgcggaccagcagagccuguaccagaacgccgacgccuacguguucgugggcaccucccgguacagcaagaaguucaagcccgagaucgccauccgcccgaagguccgggaccaggagggccgcaugaacuacuacuggacccugguggagcccggggacaagaucaccuucgaggccacgggcaaccucguggucccccgguacgcguucgccauggagcgcaacgccggguccggcaucaucaucagcgacacccccgugcacgacugcaacacgaccugccagaccccgaagggcgccaucaacaccucccugcccuuccagaacauccaccccaucaccaucgggaagugccccaaguacgucaagagcaccaagcugcggcucgccacgggccugcgcaacgugccguccauccagagccgggggcuguucggcgcgaucgccggguucaucgagggcggcuggaccgggaugguggacggcugguacggguaccaccaccagaacgagcagggcuccggguacgccgccgaccucaagagcacccagaacgccaucgacaagaucaccaacaaggugaacuccgucaucgagaagaugaacacgcaguucaccgcggugggcaaggaguucaaccaccuggagaagcgcaucgagaaccugaacaagaaggucgacgacggccuccuggacaucuggaccuacaacgccgagcugcucgugcugcuggagaacgagcggacccucgacuaccacgacagcaacgugaagaaccuguacgagaagguccgcucccagcugaagaacaacgccaaggagaucgggaacggcugcuucgaguucuaccacaagugcgacaacacgugcauggagagcgugaagaacgggaccuacgacuaccccaaguacuccgaggaggccaagcucaaccgggaggagaucgacggcgugaagcuggagagcacccgcaucuaccagauccuggccaucuacuccaccgucgcgagcagccucgugcugguggucucccugggggccaucagcuucuggaugugcuccaacggcagccuccagugccggaucugcaucuga

SEQ ID NO: 69971 - RNA, 1701 nt, Artificial Sequence; identical to SEQ ID NO: 67857
  derived and/or modified CDS sequence (opt1) from hemagglutinin__InfluenzaA__ADN78195

SEQ ID NO: 69972 - RNA, 1701 nt, Artificial Sequence; identical to SEQ ID NO: 68245
  derived and/or modified CDS sequence (opt1) from hemagglutinin__InfluenzaA__ADN78212

SEQ ID NO: 69973 - RNA, 1701 nt, Artificial Sequence; identical to SEQ ID NO: 68245
  derived and/or modified CDS sequence (opt1) from hemagglutinin__InfluenzaA__ADN78221

SEQ ID NO: 69974 - RNA, 1698 nt, Artificial Sequence; identical to SEQ ID NO: 69964
  derived and/or modified CDS sequence (opt1) from hemagglutinin__InfluenzaA__ADN89050

SEQ ID NO: 69975 - RNA, 1698 nt, Artificial Sequence
  derived and/or modified CDS sequence (opt1) from hemagglutinin__InfluenzaA__ADN89061
augaaggugaagcugcucguccugcugugcaccuucaccgccacguacgccgacaccaucugcaucggcuaccacgcgaacaacagcaccgacaccguggacacggugcucgagaagaacgucaccgugacccacuccgugaaccugcuggagaacagccacaacgggaagcucugccugcugaagggcaucgcgccccuccagcuggggaacugcuccgucgccggcuggauccuggggaacccggagugcgagcuccugaucagcaaggaguccuggagcuacaucguggagaagcccaaccccgagaacgggaccugcuaccccggccacuucgccgacuacgaggagcugcgcgagcagcucuccagcguguccagcuucgagcgguucgagaucuucccgaaggaguccagcuggcccaaccacacggucaccgggguguccgccagcugcucccacaacggcgagagcuccuucuaccgcaaccugcuguggcucaccgagaagaacgggcuguaccccaaccugagcaaguccuacgccaacaacaaggagaaggaggugcucguccuguggggcgugcaccacccgcccagcaucagcgaccagaagacccuguaccacacggagaacgccuacguguccgucgugagcucccacuacagccggaaguucacccccgagaucgccaagcgccccaaggugcgggaccaggaggggcgcaucaacuacuacuggacccuccuggagcccggcgacaccaucaucuucgaggccaacggcaaccugaucgcgccgcgguacgccuucgcccucucccgcggguucggcagcgggaucaucaacuccaacgcccccauggacaagugcgacgccaagugccagacgccccagggcgcgaucaacagcucccugcccuuccagaacguccacccggugaccaucggcgagugccccaaguacgugcggagcgccaagcugcgcauggucaccgggcuccggaacauccccuccauccagagccgcggccuguucggggccaucgccggcuucaucgagggcggcuggaccggcaugguggacgggugguacggcuaccaccaccagaacgagcagggguccggcuacgccgcggaccagaaguccacgcagaacgccaucaacgagaucaccaacaaggugaacagcgucaucgagaagaugaacacccaguucaccgccguggggaaggaguucaacaagcuggagcggcgcauggagaaccucaacaagaaggucgacgacggcuucaucgacaucuggacguacaacgccgagcugcuggugcuccuggagaacgagcggacccuggacuuccacgacagcaacgugaagaaccucuacgagaaggucaagaaccagcugaagaacaacgccaaggagaucggcaacgggugcuucgaguucuaccacaagugcaacgacgagugcauggaguccgugaagaacggcaccuacgacuaccccaaguacagcgaggaguccaagcugaaccgcgagaagaucgacggggugaagcucgagagcaugggcgucuaccagauccuggcgaucuacagcaccguggccuccagccuggugcuccuggucucccugggggccaucagcuucuggaugugcuccaacggcagccuccagugccggaucugcaucuga

SEQ ID NO: 69976 - RNA, 1698 nt, Artificial Sequence; identical to SEQ ID NO: 69966
  derived and/or modified CDS sequence (opt1) from hemagglutinin__InfluenzaA__ADN89072

SEQ ID NO: 69977 - RNA, 1698 nt, Artificial Sequence
  derived and/or modified CDS sequence (opt1) from hemagglutinin__InfluenzaA__ADN89083
augaaggugaagcugcucguccugcugugcaccuucaccgccacguacgccgacaccaucugcaucggcuaccacgcgaacaacagcaccgacaccguggacacggugcucgagaagaacgucaccgugacccacuccgugaaccugcuggagaacagccacaacgggaagcucugccugcugaagggcaucgcgccccuccagcuggggaacugcuccgucgccggcuggauccuggggaacccggagugcgagcuccugaucagcaaggaguccuggagcuacaucguggagaagcccaaccccgagaacgggaccugcuaccccggccacuucgccgacuacgaggagcugcgcgagcagcucuccagcguguccagcuucgagcgguucgagaucuucccgaaggaguccagcuggcccaaccacacggucaccgggguguccgccagcugcucccacaacggcgagaacagcuucuaccgcaaccugcuguggcucaccgggaagaacggccuguaccccaaccuguccaagagcuacgccaacaacaaggagaaggaggugcucguccuguggggcgugcaccacccgcccaacauggccgaccagaagacccuguaccacacggagaacgccuacguguccgucgugagcagccacuacucccggaaguucacccccgagaucgccaagcgccccaaggugcgggaccaggagggccgcaucaacuacuacuggacccuccuggagcccggcgacaccaucaucuucgaggcgaacgggaaccugaucgccccgcgguacgccuucgcccucagccgcggcuucggguccggcaucaucaacagcaacgcccccauggacaagugcgacgcgaagugccagacgccccagggcgccaucaacuccagccugcccuuccagaacguccacccggugaccaucggggagugccccaaguacgugcgguccgccaagcugcgcauggucaccggccuccggaacauccccagcauccagucccgcgggcuguucggcgccaucgccggguucaucgagggcggcuggaccgggaugguggacggcugguacggguaccaccaccagaacgagcagggcagcggguacgcggccgaccagaaguccacgcagaacgccaucaacggcaucaccaacaaggugaacagcgucaucgagaagaugaacacccaguucaccgccgugggcaaggaguucaacaagcuggagcggcgcauggagaaccucaacaagaaggucgacgacggguucaucgacaucuggacguacaacgccgagcugcuggugcuccuggagaacgagcggacccuggacuuccacgacuccaacgugaagaaccucuacgagaaggucaagagccagcugaagaacaacgcgaaggagaucggcaacgggugcuucgaguucuaccacaagugcaacgacgagugcauggaguccgugaagaacggcaccuacgacuaccccaaguacagcgaggaguccaagcugaaccgcgagaagaucgacggggugaagcucgagagcaugggcgucuaccagauccuggccaucuacuccaccguggccagcagccuggugcuccuggucucccugggcgccaucagcuucuggaugugcuccaacgggagccuccagugccggaucugcaucuga

SEQ ID NO: 69978 - RNA, 1698 nt, Artificial Sequence
  derived and/or modified CDS sequence (opt1) from hemagglutinin__InfluenzaA__ADN89094
augaaggugaagcugcucguccugcugugcaccuucaccgccacguacgccgacaccaucugcaucggcuaccacgcgaacaacagcaccgacaccguggacacggcccucgagaagaacgugaccgucacccacuccgugaaccugcuggagaacagccacaacgggaagcucugccugcugaagggcaucgcgccccuccagcuggggaacugcuccguggccggcuggauccuggggaacccggagugcgagcuccugaucagcaaggaguccuggagcuacaucgucgagaagcccaaccccgagaacgggaccugcuaccccggccacuucgccgacuacgaggagcugcgcgagcagcucuccagcguguccagcuucgagcgguucgagaucuucccgaaggaguccagcuggcccaaccacacggugaccggcgucuccgccagcugcucccacaacggcgagaacagcuucuaccgcaaccugcuguggcucaccgggaagaacggccuguaccccaaccuguccaagagcuacgccaacaacaaggggaaggaggugcucgugcuguggggcguccaccacccgcccaacaucgccgaccagaagacccuguaccacacggagaacgccuacguguccguggucagcagccacuacucccggaaguucacccccgagaucgcgaagcgccccaaggugcgggaccaggagggccgcaucaacuacuacuggacccuccuggagcccggggacaccaucaucuucgaggccaacggcaaccugaucgccccgcgguacgccuucgcccucagccgcggguucggcuccggcaucaucaacagcaacgcgcccauggacaagugcgacgccaagugccagacgccccagggggccaucaacuccagccugcccuuccagaacgugcacccggucaccaucggcgagugccccaaguacgugcgguccgccaagcugcgcauggugaccgggcuccggaacauccccagcauccagucccgcggccuguucggggccaucgcgggcuucaucgagggcggguggaccggcauggucgacgggugguacggcuaccaccaccagaacgagcaggggagcggcuacgccgccgaccagaaguccacgcagaacgccaucaacggcaucaccaacaaggugaacagcgugaucgagaagaugaacacccaguucaccgccgucgggaaggaguucaacaagcuggagcggcgcauggagaaccucaacaagaagguggacgacggcuucaucgacaucuggacguacaacgcggagcugcugguccuccuggagaacgagcggacccuggacuuccacgacuccaacgugaagaaccucuacgagaaggucaagagccagcugaagaacaacgccaaggagaucgggaacggcugcuucgaguucuaccacaagugcaacgacgagugcauggaguccgugaagaacgggaccuacgacuaccccaaguacagcgaggaguccaagcugaaccgcgagaagaucgacggcgugaagcucgagagcaugggcguguaccagauccuggccaucuacuccaccgucgccagcagccuggugcuccuggugucccugggggccaucagcuucuggaugugcuccaacggcagccuccagugccggaucugcaucuga

SEQ ID NO: 69979 - RNA, 1698 nt, Artificial Sequence
  derived and/or modified CDS sequence (opt1) from hemagglutinin__InfluenzaA__ADN89116
augaaggugaagcugcucauccugcugugcaccuucaccgccacguacgccgacaccaucugcaucggcuaccacgcgaacaacagcaccgacaccgucgacacggugcucgagaagaacgugaccgucacccacuccgugaaccugcuggagaacagccacaacgggaagcucugccugcugaagggcaucgcgccccuccagcuggggaacugcuccguggccggcuggauccuggggaacccggagugcgagcuccugaucagcaaggaguccuggagcuacaucgucgagaagcccaaccccgagaacgggaccugcuaccccggccacuucgccgacuacgaggagcugcgcgagcagcucuccagcguguccagcuucgagcgguucgagaucuucccgaaggaguccagcuggcccaaccacacggugaccggggucuccgccagcugcucccacaacggcgagagcuccuucuaccgcaaccugcuguggcucaccgugaagaacgggcuguaccccaaccugagcaaguccuacgccaacaacaaggagaaggaggugcucguccuguggggcgugcaccacccgcccaacaucguggaccagaagacccuguaccggacggagaacgccuacgucagcguggugagcucccacuacagccgcaaguucacccccgagaucgccaagcggcccaagguccgcgaccaggaggggcggaucaacuacuacuggacccuccuggagcccggcgacaccaucaucuucgaggccaacggcaaccugaucgcgccgcgcuacgccuucgcccucucccggggguucggcagcgggaucaucaacuccaacgcccccauggacaagugcgacgccaagugccagacgccccgcggcgcgaucaacagcucccugcccuuccagaacgugcacccggugaccaucggcgagugccccaaguacguccggagcgccaagcugcgcauggugaccgggcuccggaacauccccuccauccagagccgcggccuguucggggccaucgccggcuucaucgagggcggcuggaccggcaugguggacgggugguacggcuaccaccaccagaacgagcagggguccggcuacgccgcggaccagaaguccacgcagaacgccaucaacgggaucaccaacaaggucaacagcgugaucgagaagaugaacacccaguucaccgccgucggcaaggaguucaacaaccuggagcggcgcauggagaaccucaacaagaagguggacgacggcuucaucgacaucuggacguacaacgccgagcugcuggugcuccuggagaacgagcggacccuggacuuccacgacagcaacgucaagaaccucuacgagaaggugaagucccagcugaagaacaacgccaaggagaucgggaacggcugcuucgaguucuaccacaagugcaacgacgagugcauggagagcgugaagaacgggaccuacgacuaccccaaguacuccgaggagagcaagcugaaccgcgagaagaucgacggcgucaagcucgaguccauggggguguaccagauccuggcgaucuacagcaccguggccagcucccugguccuccuggugagccugggcgccaucuccuucuggaugugcagcaacggcucccuccagugccggaucugcaucuga

SEQ ID NO: 69980 - RNA, 1698 nt, Artificial Sequence
  derived and/or modified CDS sequence (opt1) from hemagglutinin__InfluenzaA__ADN89127
augaaggugaagcugcucguccugcugugcacccucaccgccacguacgccgacaccaucugcaucggcuaccacgcgaacaacagcaccgacaccguggacacggugcuggagaagaacgucaccgugacccacuccgugaaccugcucgagaacagccacaacgggaagcugugccugcucaagggcaucgcgccccugcagcuggggaacugcuccgucgccggcuggauccucgggaacccggagugcgagcugcugaucagcaaggaguccuggagcuacaucguggagaagcccaaccccgagaacgggaccugcuaccccggccacuucgccgacuacgaggagcuccgcgagcagcuguccagcguguccagcuucgagcgguucgagaucuucccgaagggcuccagcuggcccaaccacacggucaccggcguguccgccagcugcucccacaacggggagaacagcuucuaccgcaaccugcucuggcugaccggcaagaacgggcuguaccccaaccucuccaagagcuacgccaacaacaaggagaaggaggugcugguccuguggggcgugcaccacccgcccaacaucgccgaccagaagacccucuaccacacggagaacgccuacguguccgucgugagcagccacuacucccggaaguucacccccgagaucgccaagcgccccaaggugcgggaccaggagggccgcaucaacuacuacuggacccugcuggagcccggggacaccaucaucuucgaggcgaacggcaaccucaucgccccgcgguacgccuucgcccugagccgcggguucggcuccggcaucaucaacagcaacgcccccauggacaagugcgacgcgaagugccagacgccccagggggccaucaacuccagccugcccuuccagaacguccacccggugaccaucggcgagugccccaaguacgugcgguccgccaagcuccgcauggucaccgggcugcggaacauccccagcauccagucccgcggccuguucggggccaucgccggcuucaucgagggcggguggaccggcaugguggacgggugguacggcuaccaccaccagaacgagcaggggagcggcuacgcggccgaccagaaguccacgcagaacgccaucaacggcaucaccaacaaggugaacagcgucaucgagaagaugaacacccaguucaccgccguggggaaggaguucaacaagcucgagcggcgcauggagaaccugaacaagaaggucgacgacggcuucaucgacaucuggacguacaacgccgagcugcucgugcugcuggagaacgagcggacccucgacuuccacgacuccaacgugaagaaccuguacgagaaggucaagagccagcugaagaacaacgcggaggagaucgggaacggcugcuucgaguucuaccacaagugcaacgacgagugcauggaguccgugaagaacgggaccuacgacuaccccaaguacagcgaggaguccaagcucaaccgcgagaagaucgacggcgugaagcuggagagcaugggcgucuaccagauccuggccaucuacuccaccguggccagcagccucgugcugcuggucucccucggggccaucagcuucuggaugugcuccaacggcagccugcagugccggaucugcaucuga

SEQ ID NO: 69981 - RNA, 1698 nt, Artificial Sequence
  derived and/or modified CDS sequence (opt1) from hemagglutinin__InfluenzaA__ADN89149
augaaggugaagcugcucguccugcugugcaccuucaccgccacguacgccgacaccaucugcaucggcuaccacgcgaacaacagcaccgacaccguggacacggugcucgagaagaacgucaccgugacccacuccgugaaccugcuggagaacagccacaacgggaagcucugccugcugaagggcaucgcgccccuccagcuggggaacugcuccgucgccggcuggauccuggggaacccggagugcgagcuccugaucagcaaggaguccuggagcuacaucguggagaagcccaaccccgagaacgggaccugcuaccccggccacuucgccgacuacgaggagcugcgcgagcagcucuccagcguguccagcuucgagcgguucgagaucuucccgaaggaguccagcuggcccaaccacacggucaccgggguguccgccagcugcucccacaacggcgagagcuccuucuaccgcaaccugcuguggcucaccgagaagaacgggcuguaccccaaccugagcaaguccuacgccaacaacaaggagaaggaggugcucguccuguggggcgugcaccacccgcccagcaucagcgaccagaagacccuguaccacacggagaacgccuacguguccgucgugagcucccacuacagccggaaguucacccccgagguggccaagcgccccaagguccgggaccaggaggggcgcaucaacuacuacuggacccuccuggagcccggcgacaccaucaucuucgaggccaacggcaaccugaucgcgccgcgguacgccuucgcccucucccgcggguucggcagcgggaucaucaacuccaacgcccccauggacaagugcgacgccaagugccagacgccccagggcgcgaucaacagcucccugcccuuccagaacgugcacccggugaccaucggcgagugccccaaguacguccggagcgccaagcugcgcauggugaccgggcuccggaacauccccuccauccagagccgcggccuguucggggccaucgccggcuucaucgagggcggcuggaccggcaugguggacgggugguacggcuaccaccaccagaacgagcagggguccggcuacgccgcggaccagaaguccacgcagaacgccaucaacgggaucaccaacaaggucaacagcgugaucgagaagaugaacacccaguucaccgccgucggcaaggaguucaacaagcuggagcggcgcauggagaaccucaacaagaagguggacgacggcuucaucgacaucuggacguacaacgccgagcugcuggugcuccuggagaacgagcggacccuggacuuccacgacagcaacgucaagaaccucuacgagaaggugaagucccagcugaagaacaacgccaaggagaucgggaacggcugcuucgaguucuaccacaagugcaacgacgagugcauggagagcgugaagaacgggaccuacgacuaccccaaguacuccgaggagagcaagcugaaccgcgagaagaucgacggcgucaagcucgagagcauggggguguaccagauccuggcgaucuacuccaccguggccagcucccugguccuccuggugagccugggcgccaucuccuucuggaugugcagcaacggcucccuccagugccggaucugcaucuga

SEQ ID NO: 69982 - RNA, 1698 nt, Artificial Sequence; identical to SEQ ID NO: 69537
  derived and/or modified CDS sequence (opt1) from hemagglutinin__InfluenzaA__ADN89171

SEQ ID NO: 69983 - RNA, 1698 nt, Artificial Sequence
  derived and/or modified CDS sequence (opt1) from hemagglutinin__InfluenzaA__ADN89182
augaaggugaagcugcucguccugcugugcacccucaccgccacguacgccgacaccaucugcaucggcuaccacgcgaacaacagcaccgacaccguggacacggugcuggagaagaacgucaccgugacccacuccgugaaccugcucgagaacagccacaacgggaagcugugccugcucaagggcaucgcgccccugcagcuggggaacugcuccgucgccggcuggauccucgggaacccggagugcgagcugcugaucagcaaggaguccuggagcuacaucguggagaagcccaaccccgagaacgggaccugcuaccccggccacuucgccgacuacgaggagcuccgcgagcagcuguccagcguguccagcuucgagcgguucgagaucuucccgaaggaguccagcuggcccaaccacacggucaccgggguguccgccagcugcucccacaacggcgagagcuccuucuaccgcaaccugcucuggcugaccgggaagaacggccuguaccccaaccucagcaaguccuacgccaacaacaaggagaaggaggugcugguccuguggggcgugcaccacccgcccaacaucguggaccagaagacccucuaccggacggagaacgccuacgucagcguggugagcucccacuacagccgcaaguucacccccgagaucgccaagcggcccaagguccgcgaccaggagggccggaucaacuacuacuggacccugcuggagcccggcgacaccaucaucuucgaggccaacgggaaccucaucgcgccgcgcuacgccuucgcccugucccggggcuucgggagcggcaucaucaacuccaacgcccccauggacaagugcgacgccaagugccagacgccccagggcgcgaucaacagcucccugcccuuccagaacgugcacccggugaccaucggggagugccccaaguacguccgcagcgccaagcuccggauggugaccggccugcgcaacauccccuccauccagagccgggggcuguucggcgccaucgccggguucaucgagggcggcuggaccgggaugguggacggcugguacggguaccaccaccagaacgagcagggcuccggguacgccgcggaccagaaguccacgcagaacgccaucaacggcaucaccaacaaggucaacagcgugaucgagaagaugaacacccaguucaccgccgucggcaaggaguucaacaagcucgagcgccggauggagaaccugaacaagaagguggacgacggguucaucgacaucuggacguacaacgccgagcugcucgugcugcuggagaacgagcgcacccucgacuuccacgacagcaacgucaagaaccuguacgagaaggugaagucccagcugaagaacaacgccaaggagaucggcaacgggugcuucgaguucuaccacaagugcaacgacgagugcauggagagcgugaagaacggcaccuacgacuaccccaaguacuccgaggagagcaagcucaaccgggagaagaucgacggggucaagcuggaguccaugggcguguaccagauccuggcgaucuacagcaccguggccagcucccucguccugcuggugagccucggcgccaucuccuucuggaugugcagcaacgggucccugcagugccgcaucugcaucuga

SEQ ID NO: 69984 - RNA, 1698 nt, Artificial Sequence; identical to SEQ ID NO: 69537
  derived and/or modified CDS sequence (opt1) from hemagglutinin__InfluenzaA__ADN89193

SEQ ID NO: 69985 - RNA, 1698 nt, Artificial Sequence; identical to SEQ ID NO: 69537
  derived and/or modified CDS sequence (opt1) from hemagglutinin__InfluenzaA__ADN89204

SEQ ID NO: 69986 - RNA, 1698 nt, Artificial Sequence; identical to SEQ ID NO: 69964
  derived and/or modified CDS sequence (opt1) from hemagglutinin__InfluenzaA__ADN89215

SEQ ID NO: 69987 - RNA, 1698 nt, Artificial Sequence
  derived and/or modified CDS sequence (opt1) from hemagglutinin__InfluenzaA__ADN89226
augaaggugaagcugcucguccugcugugcaccuucgccgccaccuacgcggacacgaucugcaucggcuaccacgccaacaacagcaccgacaccguggacaccgugcucgagaagaacgucacggugacccacuccgugaaccugcuggagaacagccacaacgggaagcucugccugcugaagggcaucgcgccccuccagcuggggaacugcuccgucgccggcuggauccuggggaacccggagugcgagcuccugaucagcaaggaguccuggagcuacaucguggagaagcccaaccccgagaacgggaccugcuaccccggccacuucgccgacuacgaggagcugcgcgagcagcucuccagcguguccagcuucgagcgguucgagaucuucccgaaggaguccagcuggcccaaccacaccgucacggggguguccgccagcugcucccacaacggcgagagcuccuucuaccgcaaccugcuguggcucaccgagaagaacgggcuguaccccaaccugagcaaguccuacgccaacaacaaggagaaggaggugcucguccuguggggcgugcaccacccgcccagcaucagcgaccagaagacccuguaccacaccgagaacgccuacguguccgucgugagcucccacuacagccggaaguucacgcccgagaucgccaagcgccccaaggugcgggaccaggaggggcgcaucaacuacuacuggacccuccuggagcccggcgacaccaucaucuucgaggcgaacggcaaccugaucgccccgcgguacgccuucgcccucaaccgcggguucggcuccgggaucaucaacagcaacgcccccauggacaagugcgacgcgaagugccagacgccccagggcgccaucaacuccagccugcccuuccagaacguccacccggugaccaucggcgagugccccaaguacgugcgguccgccaagcugcgcauggucaccgggcuccggaacauccccagcgugcagucccgcggccuguucggggccaucgccggcuucaucgagggcggcuggaccggcaugguggacgggugguacggcuaccaccaccagaacgagcaggggagcggcuacgcggccgaccagaaguccacccagaacgccaucaacgggaucacgaacaaggucaacagcgugaucgagaagaugaacacccaguucaccgccgucggcaaggaguucaacaagcuggagcggcgcauggagaaccucaacaagaagguggacgacggcuucaucgacaucuggaccuacaacgccgagcugcuggugcuccuggagaacgagcggacgcuggacuuccacgacuccaacgucaagaaccucuacgagaaggugaagaaccagcugaagaacaacgcgaaggagaucgggaacggcugcuucgaguucuaccacaagugcaacgacgagugcauggagagcgugaagaacgggaccuacgacuaccccaaguacuccgaggagagcaagcugaaccgcgagaagaucgacggcgucaagcucgaguccauggggguguaccagauccuggccaucuacagcaccguggccagcucccugguccuccuggugagccugggcgccaucuccuucuggaugugcagcaacggcucccuccagugccggaucugcaucuga

SEQ ID NO: 69988 - RNA, 1698 nt, Artificial Sequence; identical to SEQ ID NO: 69964
  derived and/or modified CDS sequence (opt1) from hemagglutinin__InfluenzaA__ADN89237

SEQ ID NO: 69989 - RNA, 1698 nt, Artificial Sequence
  derived and/or modified CDS sequence (opt1) from hemagglutinin__InfluenzaA__ADN89248
augaaggugaagcugcucguccugcugugcaccuucaccgccacguacgccgacaccaucugcaucggcuaccacgcgaacaacagcaccgacaccguggacacggugcucgagaagaacgucaccgugacccacuccgugaaccugcuggagaacagccacaacgggaagcucugccugcugaagggcaucgcgccccuccagcuggggaacugcuccaucgccggcuggauccuggggaacccggagugcgagcuccugaucagcaaggaguccuggagcuacaucgucgagaagcccaaccccgagaacgggaccugcuaccccggccacuucgccgacuacgaggagcugcgcgagcagcucuccagcguguccagcuucgagcgguucgagaucuucccgaaggaguccagcuggcccaaccacacggugaccggggucuccgccagcugcucccacaacggcgagagcuccuucuaccgcaaccugcuguggcucaccgggaagaacggccuguaccccaaccugagcaaguccuacgccaacaacaaggagaaggaggugcucgugcuguggggcguccaccacccgcccagcaucagcgaccagaagacccuguaccacacggagaacgccuacguguccguggucagcucccacuacagccggaaguucacccccgagaucgccaagcgccccaaggugcgggaccaggagggccgcaucaacuacuacuggacccuccuggagcccggcgacaccaucaucuucgaggccaacgggaaccugaucgcgccgcgguacgccuucgcccucucccgcggcuucgggagcggcaucaucaacuccaacgcccccauggacaagugcgacgccaagugccagacgccccagggcgcgaucaacagcucccugcccuuccagaacgugcacccggucaccaucggggagugccccaaguacgugcggagcgccaagcugcgcauggugaccggccuccggaacauccccuccauccagagccgcgggcuguucggcgccaucgccggguucaucgagggcggcuggaccgggauggucgacggcugguacggguaccaccaccagaacgagcagggcuccggguacgccgcggaccagaaguccacgcagaacgccaucaacggcaucaccaacaaggugaacagcgugaucgagaagaugaacacccaguucaccgccgucggcaaggaguucaacaagcuggagcggcgcauggagaaccucaacaagaagguggacgacggguucaucgacaucuggacguacaacgccgagcugcugguccuccuggagaacgagcggacccuggacuuccacgacagcaacgugaagaaccucuacgagaaggugaagucccagcugaagaacaacgccaaggagaucggcaacgggugcuucgaguucuaccacaagugcaacgacgagugcauggagagcgucaagaacggcaccuacgacuaccccaaguacuccgaggagagcaagcugaaccgcgagaagaucgacggggugaagcucgagagcaugggcguguaccagauccuggcgaucuacuccaccgucgccagcucccuggugcuccuggugagccugggcgccaucuccuucuggaugugcagcaacgggucccuccagugccggaucugcaucuga

SEQ ID NO: 69990 - RNA, 1698 nt, Artificial Sequence; identical to SEQ ID NO: 69977
  derived and/or modified CDS sequence (opt1) from hemagglutinin__InfluenzaA__ADN89259

SEQ ID NO: 69991 - RNA, 1698 nt, Artificial Sequence
  derived and/or modified CDS sequence (opt1) from hemagglutinin__InfluenzaA__ADN89281
augaaggugaagcugcucguccugcugugcaccuucaccgccacguacgccgacaccaucugcaucggcuaccacgcgaacaacagcaccgacaccguggacacggugcucgagaagaacgucaccgugacccacuccgugaaccugcuggagaacagccacaacgggaagcucugccugcugaagggcaucgcgccccuccagcuggggaacugcuccgucgccggcuggauccuggggaacccggagugcgagcuccugaucagcaaggaguccuggagcuacaucguggagaagcccaaccccgagaacgggaccugcuaccccggccacuucgccgacuacgaggagcugcgcgagcagcucuccagcguguccagcuucgagcgguucgagaucuucccgaaggaguccagcuggcccaaccacacggucaccgggguguccgccagcugcucccacaacggcgagagcuccuucuaccgcaaccugcuguggcucaccgagaagaacgggcuguaccccaaccugagcaaguccuacgccaacaacaaggagaaggaggugcucguccuguggggcgugcaccacccgcccagcaucagcgaccagaagacccuguaccacacggagaacgccuacguguccgucgugagcucccacuacagccggaaguucacccccgagaucgccaagcgccccaaggugcgggaccaggaggggcgcaucaacuacuacuggacccuccuggagcccggcgacaccaucaucuucgaggccaacggcaaccugaucgcgccgcgguacgccuucgcccucucccgcggguucggcagcgggaucaucaacuccaacgcccccauggacaagugcgacgccaagugccagacgccccagggcgcgaucaacagcucccugcccuuccagaacguccacccggugaccaucggcgagugccccaaguacgugcggagcgccaagcugcgcauggucaccgggcuccggaacauccccuccauccagagccgcggccuguucggggccaucgccggcuucaucgagggcggcuggaccggcaugguggacgggugguacggcuaccaccaccagaacgagcagggguccggcuacgccgcggaccagaaguccacgcagaacgccaucaacgggaucaccaacaaggugaacagcgucaucgagaagaugaacacccaguucaccgccgugggcaaggaguucaacaagcuggagcggcgcauggagaaccucaacaagaaggucgacgacggcuucaucgacaucuggacguacaacgccgagcugcuggugcuccuggagaacgagcggacccuggacuuccacgacagcaacgugaagaaccucuacgagaaggucaagaaccagcugaagaacaacgccaaggagaucgggaacggcugcuucgaguucuaccacaagugcaacgacgagugcauggaguccgugaagaacgggaccuacgacuaccccaaguacagcgaggaguccaagcugaaccgcgagaagaucgacggcgugaagcucgagagcaugggggucuaccagauccuggcgaucuacagcaccguggccuccagccuggugcuccuggucucccugggcgccaucagcuucuggaugugcuccaacggcagccuccagugccggaucugcaucuga

SEQ ID NO: 69992 - RNA, 1698 nt, Artificial Sequence; identical to SEQ ID NO: 69991
  derived and/or modified CDS sequence (opt1) from hemagglutinin__InfluenzaA__ADN89292

SEQ ID NO: 69993 - RNA, 1698 nt, Artificial Sequence; identical to SEQ ID NO: 69991
  derived and/or modified CDS sequence (opt1) from hemagglutinin__InfluenzaA__ADN89303

SEQ ID NO: 69994 - RNA, 1698 nt, Artificial Sequence; identical to SEQ ID NO: 67650
  derived and/or modified CDS sequence (opt1) from hemagglutinin__InfluenzaA__ADN89314

SEQ ID NO: 69995 - RNA, 1698 nt, Artificial Sequence; identical to SEQ ID NO: 67155
  derived and/or modified CDS sequence (opt1) from hemagglutinin__InfluenzaA__ADN89325

SEQ ID NO: 69996 - RNA, 1698 nt, Artificial Sequence
  derived and/or modified CDS sequence (opt1) from hemagglutinin__InfluenzaA__ADN89336
augaaggugaagcugcucguccugcugugcaccuucaccgccacguacgccgacaccaucugcaucggcuaccacgcgaacaacagcaccgacaccguggacacggugcucgagaagaacgucaccgugacccacuccgugaaccugcuggagaacagccacaacgggaagcucugccugcugaagggcaucgcgccccuccagcuggggaacugcuccgucgccggcuggauccuggggaacccggagugcgagcuccugaucagcaaggaguccuggagcuacaucguggagaagcccaaccccgagaacgggaccugcuaccccggccacuucgccgacuacgaggagcugcgcgagcagcucuccagcguguccagcuucgagcgguucgagaucuucccgaaggaguccagcuggcccaaccacacggucaccgggguguccgccagcugcucccacaacggcgagcgcagcuucuaccggaaccugcuguggcucaccgggaagaacggccuguaccccaaccuguccaagagcuacgccaacaacaaggagaaggaggugcucguccuguggggcgugcaccacccgcccgacaucggcgaccagaagacccuguaccacacggagaacgccuacguguccgucgugagcagccacuacucccgcaaguucacccccgagaucgccaagcggcccaaggugcgcgaccaggagggccggaucaacuacuacuggacccuccuggagcccggggacaccaucaucuucgaggccaacggcaaccugaucgcgccgcgcuacgccuucgcccucagccggggguucggcuccggcaucaucaacagcaacgcccccauggacaagugcgacgccaagugccagacgccccagggggcgaucaacuccagccugcccuuccagaacguccacccggugaccaucggcgagugccccaaguacgugcgcuccgccaagcugcggauggucaccgggcuccgcaacauccccagcauccagucccggggccuguucggggccaucgccggcuucaucgagggcggguggaccggcaugguggacgggugguacggcuaccaccaccagaacgagcaggggagcggcuacgccgcggaccagaaguccacgcagaacgccaucaacggcaucaccaacaaggugaacagcgucaucgagaagaugaacacccaguucaccgccguggggaaggaguucaacaagcuggagcgccggauggagaaccucaacaagaaggucgacgacggcuucaucgacaucuggacguacaacgccgagcugcuggugcuccuggagaacgagcgcacccuggacuuccacgacuccaacgugaagaaccucuacgagaaggucaagagccagcugaagaacaacgccaaggagaucgggaacggcugcuucgaguucuaccacaagugcaacgacgagugcauggaguccgugaagaacgggaccuacgacuaccccaaguacagcgaggaguccaagcugaaccgggagaagaucgacggcgugaagcucgagagcaugggcgucuaccagauccuggcgaucuacuccaccguggccagcagccuggugcuccuggucucccugggggccaucagcuucuggaugugcuccaacggcagccuccagugccgcaucugcaucuga

SEQ ID NO: 69997 - RNA, 1698 nt, Artificial Sequence; identical to SEQ ID NO: 69987
  derived and/or modified CDS sequence (opt1) from hemagglutinin__InfluenzaA__ADN89347

SEQ ID NO: 69998 - RNA, 1698 nt, Artificial Sequence; identical to SEQ ID NO: 67155
  derived and/or modified CDS sequence (opt1) from hemagglutinin__InfluenzaA__ADN89358

SEQ ID NO: 69999 - RNA, 1698 nt, Artificial Sequence
  derived and/or modified CDS sequence (opt1) from hemagglutinin__InfluenzaA__ADN89369
augaaggugaagcugcucguccugcugugcaccuucaccgccacguacgccgacaccaucugcaucggcuaccacgcgaacaacagcaccgacaccguggacacggugcucgagaagaacgucaccgugacccacuccgugaaccugcuggagaacagccacaacgggaagcucugccugcugaagggcaucgcgccccuccagcuggggaacugcuccgucgccggcuggauccuggggaacccggagugcgagcuccugaucagcaaggaguccuggagcuacaucguggagaagcccaaccccgagaacgggaccugcuaccccggccacuucgccgacuacgaggagcugcgcgagcagcucuccagcguguccagcuucgagcgguucgagaucuucccgaaggaguccagcuggcccaaccacacggucaccgggguguccgccagcugcucccacaacggcgagagcuccuucuaccgcaaccugcuguggcucaccgugaagaacgggcuguaccccaaccugagcaaguccuacgccaacaacaaggagaaggagguccucgugcuguggggcgugcaccacccgcccaacaucgucgaccagaagacccuguaccggacggagaacgccuacgugagcguggucagcucccacuacagccgcaaguucauccccgagaucgccaagcggcccaaggugcgcgaccaggaggggcggaucaacuacuacuggacccuccuggagcccggcgacaccaucaucuucgaggccaacggcaaccugaucgcgccgcgcuacgccuucgcccucucccggggguucggcagcgggaucaucaacuccaacgcccccauggacaagugcgacgccaagugccagacgccccgcggcgcgaucaacagcucccugcccuuccagaacgugcacccggucaccaucggcgagugccccaaguacgugcggagcgccaagcugcgcauggugaccgggcuccggaacauccccuccauccagagccgcggccuguucggggccaucgccggcuucaucgagggcggcuggaccggcauggucgacgggugguacggcuaccaccaccagaacgagcagggguccggcuacgccgcggaccagaaguccacccagaacgccaucaacgggaucacgaacaaggugaacagcgucaucgagaagaugaacacccaguucaccgccgugggcaaggaguucaacaagcuggagcggcgcauggagaaccucaacaagaagguggacgacggcuucaucgacaucuggaccuacaacgccgagcugcugguccuccuggagaacgagcggacgcuggacuuccacgacagcaacgugaagaaccucuacgagaaggugaagucccagcugaagaacaacgccaaggagaucgggaacggcugcuucgaguucuaccacaagugcaacgacgagugcauggagagcgucaagaacgggaccuacgacuaccccaaguacuccgaggagagcaagcugaaccgcgagaagaucgacggcgugaagcucgaguccauggggguguaccagauccuggcgaucuacagcaccgucgccagcucccuggugcuccuggugagccugggcgccaucuccuucuggaugugcagcaacggcucccuccagugccggaucugcaucuga

SEQ ID NO: 70000 - RNA, 1698 nt, Artificial Sequence
  derived and/or modified CDS sequence (opt1) from hemagglutinin__InfluenzaA__ADN89380
augaaggugaagcugcucguccugcugugcacccucaccgccacguacgccgacaccaucugcaucggcuaccacgcgaacaacagcaccgacaccguggacacggugcuggagaagaacgucaccgugacccacuccgugaaccugcucgagaacagccacaacgggaagcugugccugcucaagggcaucgcgccccugcagcuggggaacugcuccgucgccggcuggauccucgggaacccggagugcgagcugcugaucagcaaggaguccuggagcuacaucguggagaagcccaaccccgagaacgggaccugcuaccccggccacuucgccgacuacgaggagcuccgcgagcagcuguccagcguguccagcuucgagcgguucgagaucuucccgaaggaguccagcuggcccaaccacacggucaccgggguguccgccagcugcucccacaacggcgagagcuccuucuaccgcaaccugcucuggcugaccgggaagaacggccuguaccccaaccucagcaaguccuacgccaacaacaaggagaaggaggugcugguccuguggggcgugcaccacccgcccaacaucguggaccagaagacccucuaccggacggagaacgccuacgucagcguggugagcucccacuacagccgcaaguucacccccgagaucgccaagcggcccaagguccgcgaccaggagggccggaucaacuacuacuggacccugcuggagcccggcgacaccaucaucuucgaggccaacgggaaccucaucgcgccgcgcuacgccuucgcccugucccggggcuucgggagcggcaucaucaacuccaacgcccccauggacaagugcgacgccaagugccagacgccccagggcgcgaucaacagcucccugcccuuccagaacgugcacccggugaccaucggggagugccccaaguacguccgcagcgccaagcuccggauggugaccggccugcgcaacauccccuccauccagagccgggggcuguucggcgccaucgccggguucaucgagggcggcuggaccgggaugguggacggcugguacggguaccaccaccagaacgagcagggcuccggguacgccgcggaccagaaguccacgcagaacgccaucaacggcaucaccaacaaggucaacagcgugaucgagaagaugaacacccaguucaccgccgucggcaaggaguucaacaagcucgagcgccggauggagaaccugaacaagaagguggacgacggguucaucgacaucuggacguacaacgccgagcugcucgugcugcuggagaacgagcgcacccucgacuuccacgacagcaacgucaagaaccuguacgagaaggugaagucccagcugaagaacaacgccaaggagaucggcaacgggugcuucgaguucuaccacaagugcaacaacgagugcauggagagcgugaagaacggcaccuacgacuaccccaaguacuccgaggagagcaagcucaaccgggagaagaucgacggggucaagcuggaguccaugggcguguaccagauccuggcgaucuacagcaccguggccagcucccucguccugcuggugagccucggcgccaucuccuucuggaugugcagcaacgggucccugcagugccgcaucugcaucuga

SEQ ID NO: 70001 - RNA, 1698 nt, Artificial Sequence
  derived and/or modified CDS sequence (opt1) from hemagglutinin__InfluenzaA__ADN89391
augaaggugaagcugcucguccugcugugcaccuucaccgccacguacgccgacaccaucugcaucggcuaccacgcgaacaacagcaccgacaccguggacacggugcucgagaagaacgucaccgugacccacuccgugaaccugcuggagaacagccacaacgggaagcucugccugcugaagggcaucgcgccccuccagcuggggaacugcuccgucgccggcuggauccuggggaacccggagugcgagcuccugaucagcaaggaguccuggagcuacaucguggagaagcccaaccccgagaacgggaccugcuaccccggccacuucgccgacuacgaggagcugcgcgagcagcucuccagcguguccagcuucgagcgguucgagaucuucccgaaggaguccagcuggcccaaccacacggucaccgggguguccgccagcugcucccacaacggcgagcgcagcuucuacaagaaccugcuguggcucaccgggaagaacggccuguaccccaaccuguccaagagcuacgccaacaacaaggagaaggaggugcucguccuguggggcgugcaccacccgcccgacaucggcgaccagaagacccuguaccacacggagaacgccuacguguccgucgugagcagccacuacucccggaaguucacccccgagaucgccaagcgccccaaggugcgggaccaggagggccgcaucaacuacuacuggacccuccuggagcccggggacaccaucaucuucgaggccaacggcaaccugaucgcgccgcgguacgccuucgcccucagccgcggguucggcuccggcaucaucaacagcaacgcccccauggacaagugcgacgccaagugccagacgccccagggggcgaucaacuccagccugcccuuccagaacguccacccggugaccaucggcgagugccccaaguacgugcgguccgccaagcugcgcauggucaccgggcuccggaacauccccagcauccagucccgcggccuguucggggccaucgccggcuucaucgagggcggguggaccggcaugguggacgggugguacggcuaccaccaccagaacgagcaggggagcggcuacgccgcggaccagaaguccacgcagaacgccaucaacggcaucaccaacaaggugaacagcgucaucgagaagaugaacacccaguucaccgccguggggaaggaguucaacaagcuggagcggcgcauggagaaccucaacaagaaggucgacgacggcuucaucgacaucuggacguacaacgccgagcugcuggugcuccuggagaacgagcggacccuggacuuccacgacuccaacgugaagaaccucuacgagaaggucaagagccagcugaagaacaacgccaaggagaucgggaacggcugcuucgaguucuaccacaagugcaacgacgagugcauggaguccgugaagaacgggaccuacgacuaccccaaguacagcgaggaguccaagcugaaccgcgagaagaucgacggcgugaagcucgagagcaugggcgucuaccagauccuggcgaucuacuccaccguggccagcagccuggugcuccuggucucccugggggccaucagcuucuggaugugcuccaacggcagccuccagugccggaucugcaucuga

SEQ ID NO: 70002 - RNA, 1698 nt, Artificial Sequence
  derived and/or modified CDS sequence (opt1) from hemagglutinin__InfluenzaA__ADN89402
augaaggugaagcugcucguccugcugugcaccuucaccgccacguacgccgacaccaucugcaucggcuaccacgcgaacaacagcaccgacaccguggacacggugcucgagaagaacgucaccgugacccacuccgugaaccugcuggagaacagccacaacgggaagcucugccugcugaagggcaucgcgccccuccagcuggggaacugcuccgucgccggcuggauccuggggaacccggagugcgagcuccugaucagcaagaaguccuggagcuacaucguggagaagcccaaccccgagaacgggaccugcuaccccggccacuucgccgacuacgaggagcugaaggagcagcucuccagcguguccagcuucgagcgcuucgagaucuucccgaaggaguccagcuggcccaaccacacggucaccgggguguccgccagcugcucccacaacggcgagagcuccuucuaccggaaccugcuguggcucaccgggaagaacggccuguaccccaaccugagcaaguccuacgccaacaacaaggagaaggaggugcucguccuguggggcgugcaccacccgcccaacaucguggaccagaagacccuguaccgcacggagaacgccuacgucagcguggugagcucccacuacagccggaaguucacccccgagaucgccaagcgccccaagguccgggaccaggagggccgcaucaacuacuacuggacccuccuggagcccggcgacaccaucaucuucgaggccaacgggaaccugaucgcgccgcgguacgccuucgcccucucccgcggcuucgggagcggcaucaucaacuccaacgcccccaugggcaagugcgacgccaagugccagacgccccagggggcgaucaacagcucccugcccuuccagaacgugcacccggugaccaucggcgagugccccaaguacguccggagcgccaagcugcgcauggugaccgggcuccggaacauccccuccauccagagccgcggccuguucggggccaucgccggcuucaucgagggcggguggaccggcaugguggacgggugguacggcuaccaccaccagaacgagcagggguccggcuacgccgcggaccagaaguccacgcagaacgccaucaacggcaucaccaacaaggucaacagcgugaucgagaagaugaacacccaguucaccgccgucgggaaggaguucaacaagcuggagcggcgcauggagaaccucaacaagaagguggacgacggcuucaucgacaucuggacguacaacgccgagcugcuggugcuccuggagaacgagcggacccuggacuuccacgacagcaacgucaagaaccucuacgagaaggugaagucccagcugaagaacaacgccaaggagaucgggaacggcugcuucgaguucuaccacaagugcaacgacgagugcauggagagcgugaagaacgggaccuacgacuaccccaaguacuccgaggagagcaagcugaaccgcgagaagaucgacggcgucaagcucgaguccaugggcguguaccagauccuggcgaucuacagcaccguggccagcucccugguccuccuggugagccugggggccaucuccuucuggaugugcagcaacggcucccuccagugccggaucugcaucuga

SEQ ID NO: 70003 - RNA, 1698 nt, Artificial Sequence; identical to SEQ ID NO: 69964
  derived and/or modified CDS sequence (opt1) from hemagglutinin__InfluenzaA__ADN89413

SEQ ID NO: 70004 - RNA, 1698 nt, Artificial Sequence; identical to SEQ ID NO: 69537
  derived and/or modified CDS sequence (opt1) from hemagglutinin__InfluenzaA__ADN89424

SEQ ID NO: 70005 - RNA, 1698 nt, Artificial Sequence
  derived and/or modified CDS sequence (opt1) from hemagglutinin__InfluenzaA__ADN89435
augaaggugaagcugcucguccugcugugcaccuucaccgccacguacgccgacaccaucugcaucggcuaccacgcgaacaacagcaccgacaccguggacacggugcucgagaagaacgucaccgugacccacuccgugaaccugcuggagaacagccacaacgggaagcucugccugcugaagggcaucgcgccccuccagcuggggaacugcuccgucgccggcuggauccuggggaacccggagugcgagcuccugaucagcaaggaguccuggagcuacaucguggagaagcccaaccccgagaacgggaccugcuaccccggccacuucgccgacuacgaggagcugcgcgagcagcucuccagcguguccagcuucgagcgguucgagaucuucccgaaggaguccagcuggcccaaccacacggucaccgggguguccgccagcugcucccacaacggcgagaacagcuucuaccgcaaccugcuguggcucaccgggaagaacggccuguaccccaaccuguccaagagcuacgccaacaacaaggagaaggaggugcucguccuguggggcgugcaccacccgcccaacaucgccgaccagaagacccuguaccacacggagaacgccuacguguccgucgugagcagccacuacucccggaaguucacccccgagaucgccaagcgccccaaggugcgggaccaggagggccgcaucaacuacuacuggacccuccuggagcccggcgacaccaucaucuucgaggcgaacgggaaccugaucgccccgcgguacgccuucgcccucagccgcggcuucggguccggcaucaucaacagcaacgcccccauggacaagugcgacgcgaagugccagacgccccagggcgccaucaacuccagccugcccuuccagaacguccacccggugaccaucggggagugccccaaguacgugcgguccgccaagcugcgcauggucaccggccuccggaacauccccagcauccagucccgcgggcuguucggcgccaucgccggguucaucgagggcggcuggaccgggaugguggacggcugguacggguaccaccaccagaacgagcagggcagcggguacgcggccgaccagaaguccacgcagaacgccaucaacggcaucaccaacaaggugaacagcgucaucgagaagaugaacacccaguucaccgccgugggcaaggaguucaacaagcuggagcggcgcauggagaaccucaacaagaaggucgacgacggguucaucgacaucuggacguacaacgccgagcugcuggugcuccuggagaacgagcggacccuggacuuccacgacuccaacgugaagaaccucuacgagaaggucaagagccagcugaagaacaacgcgaaggagaucggcaacgggugcuucgaguucuaccacaagugcaacgacgagugcauggaguccgugaagaacggcaccuacgacuaccccaaguacagcgaggagucccgccugaaccgggagaagaucgacggggugaagcucgagagcaugggcgucuaccagauccuggccaucuacuccaccguggccagcagccuggugcuccuggucucccugggcgccaucagcuucuggaugugcuccaacgggagccuccagugccgcaucugcaucuga

SEQ ID NO: 70006 - RNA, 1698 nt, Artificial Sequence
  derived and/or modified CDS sequence (opt1) from hemagglutinin__InfluenzaA__ADN89446
augaaggccaagcugcucgugcugcugugcaccuucaccgccacguacgcggacaccaucugcaucggcuaccacgccaacaacagcaccgacaccgucgacacggugcucgagaagaacgugaccgucacccacuccgugaaccugcuggagaacagccacaacgggaagcucugccugcugaagggcaucgcgccccuccagcuggggaacugcuccguggccggcuggauccuggggaacccggagugcgagcuccugaucagcaaggaguccuggagcuacaucgucgagaagcccaaccccgagaacgggaccugcuaccccggccacuucgccgacuacgaggagcugcgcgagcagcucuccagcguguccagcuucgagcgguucgagaucuucccgaaggaguccagcuggcccaaccacacggugaccggggucuccgccagcugcucccacaacggcgagaacagcuucuaccgcaaccugcuguggcucaccgggaagaacggccuguaccccaaccuguccaagagcuacgccaacaacaaggagaaggaggugcucgugcuguggggcguccaccacccgcccaacaucgccgaccagaagacccuguaccacacggagaacgccuacguguccguggucagcagccacuacucccggaaguucacccccgagaucgcgaagcgccccaaggugcgggaccaggagggccgcaucaacuacuacuggacccuccuggagcccggcgacaccaucaucuucgaggccaacgggaaccugaucgccccgcgguacgccuucgcccucagccgcggcuucggguccggcaucaucaacagcaacgcgcccauggacaagugcgacgccaagugccagacgccccagggcgccaucaacuccagccugcccuuccagaacgugcacccggucaccaucggggagugccccaaguacgugcgguccgccaagcugcgcauggugaccggccuccggaacauccccagcauccagucccgcgggcuguucggcgccaucgcgggguucaucgagggcggcuggaccgggauggucgacggcugguacggguaccaccaccagaacgagcagggcagcggguacgccgccgaccagaaguccacgcagaacgccaucaacggcaucaccaacaaggugaacagcgugaucgagaagaugaacacccaguucaccgccgucggcaaggaguucaacaagcuggagcggcgcauggagaaccucaacaagaagguggacgacggguucaucgacaucuggacguacaacgcggagcugcugguccuccuggagaacgagcggacccuggacuuccacgacuccaacgugaagaaccucuacgagaaggucaagagccagcugaagaacaacgccaaggagaucggcaacgggugcuucgaguucuaccacaagugcaacgacgagugcauggaguccgugaagaacggcaccuacgacuaccccaaguacagcgaggaguccaagcugaaccgcgagaagaucgacggggugaagcucgagagcaugggcguguaccagauccuggccaucuacuccaccgucgccagcagccuggugcuccuggugucccugggcgccaucagcuucuggaugugcuccaacgggagccuccagugccggaucugcaucuga

SEQ ID NO: 70007 - RNA, 1698 nt, Artificial Sequence; identical to SEQ ID NO: 69537
  derived and/or modified CDS sequence (opt1) from hemagglutinin__InfluenzaA__ADN89457

SEQ ID NO: 70008 - RNA, 1698 nt, Artificial Sequence
  derived and/or modified CDS sequence (opt1) from hemagglutinin__InfluenzaA__ADN89468
augaaggugaagcugcucguccugcugugcaccuucaccgccacguacgccgacaccaucugcaucggcuaccacgcgaacaacagcaccgacaccguggacacggugcucgagaagaacgucaccgugacccacuccgugaaccugcuggagaacagccacaacgggaagcucugccugcugaagggcaucgcgccccuccagcuggggaacugcuccgucgccggcuggauccuggggaacccggagugcgagcuccugaucagcaaggaguccuggagcuacaucguggagaagcccaaccccgagaacgggaccugcuaccccggccacuucgccgacuacgaggagcugcgcgagcagcucuccagcguguccagcuucgagcgguucgagaucuucccgaaggacuccagcuggcccaaccacacggucaccgggguguccgccagcugcucccacaacggcgagagcuccuucuaccgcaaccugcuguggcucaccgggaagaacggccuguaccccaaccugagcaaguccuacgccaacaacaaggagaaggaggugcucguccuguggggcgugcaccacccgcccagcaucaacgaccagaagacccuguaccacacggagaacgccuacgugagcgucguguccagccacuacucccggaaguucacccccgagaucgccaagcgccccaaggugcgggaccaggagggccgcaucaacuacuacuggacccuccuggagcccggcgacaccaucaucuucgaggccaacgggaaccugaucgcgccgcgguacgccuucgcccucagccgcggcuucggguccggcaucaucaacagcaacgcccccauggacaagugcgacgccaagugccagacgccccagggcgcgaucaacuccagccugcccuuccagaacguccacccggugaccaucggggagugccccaaguacgugcgguccgccaagcugcgcauggucaccggccuccggaacauccccagcauccagucccgcgggcuguucggcgccaucgccggguucaucgagggcggcuggaccgggaugguggacggcugguacggguaccaccaccagaacgagcagggcagcggguacgccgcggaccagaaguccacgcagaacgccaucaacggcaucaccaacaaggugaacagcgucaucgagaagaugaacacccaguucaccgccgugggcaaggaguucuccaagcuggagcggcgcauggagaaccucaacaagaaggucgacgacggguucaucgacaucuggacguacaacgccgagcugcuggugcuccuggagaacgagcggacccuggacuuccacgacagcaacgugaagaaccucuacgagaaggucaagucccagcugaagaacaacgccaaggagaucggcaacgggugcuucgaguucuaccacaagugcaacgacgagugcauggagagcgugaagaacggcaccuacgacuaccccaaguacuccgaggagagcaagcugaaccgcgagaagaucgacggggugaagcucgagagcaugggcgucuaccagauccugaccaucuacuccacgguggcgagcucccuggugcuccugaucagccugggcgccaucuccuucuggaugugcagcaacgggucccuccagugccggaucugcaucuga

SEQ ID NO: 70009 - RNA, 1698 nt, Artificial Sequence; identical to SEQ ID NO: 69966
  derived and/or modified CDS sequence (opt1) from hemagglutinin__InfluenzaA__ADN89479

SEQ ID NO: 70010 - RNA, 1698 nt, Artificial Sequence; identical to SEQ ID NO: 69966
  derived and/or modified CDS sequence (opt1) from hemagglutinin__InfluenzaA__ADN89490

SEQ ID NO: 70011 - RNA, 1698 nt, Artificial Sequence; identical to SEQ ID NO: 69989
  derived and/or modified CDS sequence (opt1) from hemagglutinin__InfluenzaA__ADN89501

SEQ ID NO: 70012 - RNA, 1698 nt, Artificial Sequence; identical to SEQ ID NO: 69977
  derived and/or modified CDS sequence (opt1) from hemagglutinin__InfluenzaA__ADN89512

SEQ ID NO: 70013 - RNA, 1698 nt, Artificial Sequence; identical to SEQ ID NO: 69991
  derived and/or modified CDS sequence (opt1) from hemagglutinin__InfluenzaA__ADN89523

SEQ ID NO: 70014 - RNA, 1698 nt, Artificial Sequence; identical to SEQ ID NO: 70000
  derived and/or modified CDS sequence (opt1) from hemagglutinin__InfluenzaA__ADN89534

SEQ ID NO: 70015 - RNA, 1698 nt, Artificial Sequence; identical to SEQ ID NO: 70005
  derived and/or modified CDS sequence (opt1) from hemagglutinin__InfluenzaA__ADN89545

SEQ ID NO: 70016 - RNA, 1698 nt, Artificial Sequence; identical to SEQ ID NO: 67650
  derived and/or modified CDS sequence (opt1) from hemagglutinin__InfluenzaA__ADN89556

SEQ ID NO: 70017 - RNA, 1698 nt, Artificial Sequence; identical to SEQ ID NO: 69966
  derived and/or modified CDS sequence (opt1) from hemagglutinin__InfluenzaA__ADN89567

SEQ ID NO: 70018 - RNA, 1698 nt, Artificial Sequence
  derived and/or modified CDS sequence (opt1) from hemagglutinin__InfluenzaA__ADN89578
augaaggugaagcugcucguccugcugugcacccucaccgccacguacgccgacaccaucugcaucggcuaccacgcgaacaacagcaccgacaccguggacacggugcuggagaagaacgucaccgugacccacuccgugaaccugcucgagaacagccacaacgggaagcugugccugcucaagggcaucgcgccccugcagcuggggaacugcuccgucgccggcuggauccucgggaacccggagugcgagcugcugaucagcaaggaguccuggagcuacaucguggagaagcccaaccccgagaacgggaccugcuaccccggccacuucgccgacuacgaggagcuccgcgagcagcuguccagcguguccagcuucgagcgguucgagaucuucccgaagggcuccagcuggcccaaccacacggucaccggcguguccgccagcugcucccacaacggggagaacagcuucuaccgcaaccugcucuggcugaccggcaagaacgggcuguaccccaaccucuccaagagcuacgccaacaacaaggagaaggaggugcugcugcucuggggcguccaccacccgcccaacaucgccgaccagaagacccuguaccacacggagaacgccuacguguccguggucagcagccacuacucccggaaguucacccccgagaucgccaagcgccccaaggugcgggaccaggagggccgcaucaacuacuacuggacccugcucgagcccggggacaccaucaucuucgaggcgaacggcaaccugaucgccccgcgguacgccuucgcccugagccgcggguucggcuccggcaucaucaacagcaacgcccccauggacaagugcgacgcgaagugccagacgccccagggggccaucaacuccagccuccccuuccagaacgugcacccggucaccaucggcgagugccccaaguacgugcgguccgccaagcugcgcauggugaccgggcugcggaacauccccagcauccagucccgcggccucuucggggccaucgccggcuucaucgagggcggguggaccggcauggucgacgggugguacggcuaccaccaccagaacgagcaggggagcggcuacgcggccgaccagaaguccacgcagaacgccaucaacggcaucaccaacaaggugaacagcgugaucgagaagaugaacacccaguucaccgccgucgggaaggaguucaacaagcuggagcggcgcauggagaaccugaacaagaagguggacgacggcuucaucgacaucuggacguacaacgccgagcuccugguccugcucgagaacgagcggacccuggacuuccacgacuccaacgugaagaaccuguacgagaaggucaagagccagcucaagaacaacgcgaaggagaucgggaacggcugcuucgaguucuaccacaagugcaacgacgagugcauggaguccgugaagaacgggaccuacgacuaccccaaguacagcgaggaguccaagcugaaccgcgagaagaucgacggcgugaagcuggagagcaugggcguguaccagauccucgccaucuacuccaccgucgccagcagccuggugcugcucgugucccugggggccaucagcuucuggaugugcuccaacggcagccugcagugccggaucugcaucuga

SEQ ID NO: 70019 - RNA, 1698 nt, Artificial Sequence; identical to SEQ ID NO: 69537
  derived and/or modified CDS sequence (opt1) from hemagglutinin__InfluenzaA__ADN89589

SEQ ID NO: 70020 - RNA, 1698 nt, Artificial Sequence
  derived and/or modified CDS sequence (opt1) from hemagglutinin__InfluenzaA__ADN89600
augaaggugaagcugcucguccugcugugcaccuucaccgccacguacgccgacaccaucugcaucggcuaccacgcgaacaacagcaccgacaccguggacacggugcucgagaagaacgucaccgugacccacuccgugaaccugcuggagaacagccacaacgggaagcucugccugcugaagggcaucgcgccccuccagcuggggaacugcuccgucgccggcuggauccuggggaacccggagugcgagcuccugaucagcaaggaguccuggagcuacaucguggagaagcccaaccccgagaacgggaccugcuaccccggccacuucgccgacuacgaggagcugcgcgagcagcucuccagcguguccagcuucgagcgguucgagaucuucccgaaggaguccagcuggcccaaccacacggucaccggcguguccgccagcugcucccacaacggcgagagcuccuucuaccgcaaccugcuguggcucacccggaagaacgggcuguaccccaaccugagcaaguccuacgccaacaacaaggagaaggaggugcucguccuguggggcgugcaccacccgcccaacaugguggaccagaagacccuguaccgcacggagaacgccuacgucagcguggugagcucccacuacagccggaaguucacccccgagaucgccaagcgccccaagguccgggaccaggaggggcgcaucaacuacuacuggacccuccuggagcccggcgacaccaucaucuucgaggccaacggcaaccugaucgcgccgcgguacgccuucgcccucucccgcggguucggcagcgggaucaucaacuccaacgcccccaugggcaagugcgacgccaagugccagacgccccagggcgcgaucaacagcucccugcccuuccagaacgugcacccggugaccaucggggagugccccaaguacguccggagcgccaagcugcgcauggugaccggccuccggaacauccccuccauccagagccgcgggcuguucggcgccaucgccggguucaucgagggcggcuggaccgggaugguggacggcugguacggguaccaccaccagaacgagcagggcuccggguacgccgcggaccagaaguccacgcagaacgccaucaacggcaucaccaacaaggucaacagcgugaucgagaagaugaacacccaguucaccgccgucggcaaggaguucaacaagcuggagcggcgcauggagaaccucaacaagaagguggacgacggguucaucgacaucuggacguacaacgccgagcugcuggugcuccuggagaacgagcggacccuggacuuccacgacagcaacgucaagaaccucuacgagaaggugaagucccagcugaagaacaacgccaaggagaucggcaacgggugcuucgaguucuaccacaagugcaacgacgagugcauggagagcgugaagaacggcaccuacgacuaccccaaguacuccgaggagagcaagcugaaccgcgagaagaucgacggggucaagcucgaguccaugggcguguaccagauccuggcgaucuacagcaccguggccagcucccugguccuccuggugagccugggcgccaucuccuucuggaugugcagcaacgggucccuccagugccggaucugcaucuga

SEQ ID NO: 70021 - RNA, 1698 nt, Artificial Sequence; identical to SEQ ID NO: 69537
  derived and/or modified CDS sequence (opt1) from hemagglutinin__InfluenzaA__ADN89611

SEQ ID NO: 70022 - RNA, 1698 nt, Artificial Sequence; identical to SEQ ID NO: 69964
  derived and/or modified CDS sequence (opt1) from hemagglutinin__InfluenzaA__ADN89622

SEQ ID NO: 70023 - RNA, 1698 nt, Artificial Sequence; identical to SEQ ID NO: 70005
  derived and/or modified CDS sequence (opt1) from hemagglutinin__InfluenzaA__ADN89633

SEQ ID NO: 70024 - RNA, 1698 nt, Artificial Sequence; identical to SEQ ID NO: 69989
  derived and/or modified CDS sequence (opt1) from hemagglutinin__InfluenzaA__ADN89644

SEQ ID NO: 70025 - RNA, 1698 nt, Artificial Sequence; identical to SEQ ID NO: 70005
  derived and/or modified CDS sequence (opt1) from hemagglutinin__InfluenzaA__ADN89655

SEQ ID NO: 70026 - RNA, 1698 nt, Artificial Sequence; identical to SEQ ID NO: 69537
  derived and/or modified CDS sequence (opt1) from hemagglutinin__InfluenzaA__ADN89666

SEQ ID NO: 70027 - RNA, 1698 nt, Artificial Sequence; identical to SEQ ID NO: 69977
  derived and/or modified CDS sequence (opt1) from hemagglutinin__InfluenzaA__ADN89677

SEQ ID NO: 70028 - RNA, 1698 nt, Artificial Sequence; identical to SEQ ID NO: 69977
  derived and/or modified CDS sequence (opt1) from hemagglutinin__InfluenzaA__ADN89688

SEQ ID NO: 70029 - RNA, 1698 nt, Artificial Sequence; identical to SEQ ID NO: 69964
  derived and/or modified CDS sequence (opt1) from hemagglutinin__InfluenzaA__ADN89699

SEQ ID NO: 70030 - RNA, 1698 nt, Artificial Sequence; identical to SEQ ID NO: 69966
  derived and/or modified CDS sequence (opt1) from hemagglutinin__InfluenzaA__ADN89710

SEQ ID NO: 70031 - RNA, 1698 nt, Artificial Sequence; identical to SEQ ID NO: 69989
  derived and/or modified CDS sequence (opt1) from hemagglutinin__InfluenzaA__ADN89721

SEQ ID NO: 70032 - RNA, 1698 nt, Artificial Sequence; identical to SEQ ID NO: 69966
  derived and/or modified CDS sequence (opt1) from hemagglutinin__InfluenzaA__ADN89732

SEQ ID NO: 70033 - RNA, 1698 nt, Artificial Sequence; identical to SEQ ID NO: 69966
  derived and/or modified CDS sequence (opt1) from hemagglutinin__InfluenzaA__ADN89743

SEQ ID NO: 70034 - RNA, 1698 nt, Artificial Sequence; identical to SEQ ID NO: 69991
  derived and/or modified CDS sequence (opt1) from hemagglutinin__InfluenzaA__ADN89765

SEQ ID NO: 70035 - RNA, 1698 nt, Artificial Sequence
  derived and/or modified CDS sequence (opt1) from hemagglutinin__InfluenzaA__ADN89776
augaaggugaagcugcucguccugcugugcaccuucaccgccacguacgccgacaccaucugcaucggcuaccacgcgaacaacagcaccgacaccguggacacggugcucgagaagaacgucaccgugacccacuccgugaaccugcuggagaacagccacaacgggaagcucugccugcugaagggcaucgcgccccuccagcuggggaacugcuccgucgccggcuggauccuggggaacccggagugcgagcuccugaucagcaaggaguccuggagcuacaucguggagaagcccaaccccgagaacgggaccugcuaccccggccacuucgccgacuacgaggagcugcgcgagcagcucuccagcguguccagcuucgagcgguucgagaucuucccgaaggaguccagcuggcccaaccacacggucaccgggguguccgccagcugcucccacaacggcgagagcuccuucuaccgcaaccugcuguggcucaccgggaagaacggccuguaccccaaccugagcaaguccuacgccaacaacaaggagaaggaggugcucguccuguggggcgugcaccacccgcccagcaucagcgaccagaagacccuguaccacacggagaacgccuacguguccgucgugagcucccacuacagccggaaguucacccccgagguggccaagcgccccaagguccgggaccaggagggccgcaucaacuacuacuggacccuccuggagcccggcgacaccaucaucuucgaggccaacgggaaccugaucgcgccgcgguacgccuucgcccucucccgcggcuucgggagcggcaucaucaacuccaacgcccccauggacaagugcgacgccaagugccagacgccccagggcgcgaucaacagcucccugcccuuccagaacgugcacccggugaccaucggggagugccccaaguacguccggagcgccaagcugcgcauggugaccggccuccggaacauccccuccauccagagccgcgggcuguucggcgccaucgccggguucaucgagggcggcuggaccgggaugguggacggcugguacggguaccaccaccagaacgagcagggcuccggguacgccgcggaccagaaguccacgcagaacgccaucaacggcaucaccaacaaggucaacagcgugaucgagaagaugaacacccaguucaccgccgucggcaaggaguucaacaagcuggagcggcgcauggagaaccucaacaagaagguggacgacggguucaucgacaucuggacguacaacgccgagcugcuggugcuccuggagaacgagcggacccuggacuuccacgacagcaacgucaagaaccucuacgagaaggugaagucccagcugaagaacaacgccaaggagaucggcaacgggugcuucgaguucuaccacaagugcaacgacgagugcauggagagcgugaagaacggcaccuacgacuaccccaaguacuccgaggagagcaagcugaaccgcgagaagaucgacggggucaagcucgagagcaugggcguguaccagauccuggcgaucuacuccaccguggccagcucccugguccuccuggugagccugggcgccaucuccuucuggaugugcagcaacgggucccuccagugccggaucugcaucuga

SEQ ID NO: 70036 - RNA, 1698 nt, Artificial Sequence; identical to SEQ ID NO: 69977
  derived and/or modified CDS sequence (opt1) from hemagglutinin__InfluenzaA__ADN89787

SEQ ID NO: 70037 - RNA, 1698 nt, Artificial Sequence; identical to SEQ ID NO: 69991
  derived and/or modified CDS sequence (opt1) from hemagglutinin__InfluenzaA__ADN89798

SEQ ID NO: 70038 - RNA, 1698 nt, Artificial Sequence; identical to SEQ ID NO: 69537
  derived and/or modified CDS sequence (opt1) from hemagglutinin__InfluenzaA__ADN89809

SEQ ID NO: 70039 - RNA, 1698 nt, Artificial Sequence; identical to SEQ ID NO: 69537
  derived and/or modified CDS sequence (opt1) from hemagglutinin__InfluenzaA__ADN89820

SEQ ID NO: 70040 - RNA, 1698 nt, Artificial Sequence; identical to SEQ ID NO: 69537
  derived and/or modified CDS sequence (opt1) from hemagglutinin__InfluenzaA__ADN89831

SEQ ID NO: 70041 - RNA, 1698 nt, Artificial Sequence
  derived and/or modified CDS sequence (opt1) from hemagglutinin__InfluenzaA__ADN89842
augaaggugaagcugcucguccugcugugcaccuucaccgccacguacgccgacaccaucugcaucggcuaccacgcgaacaacagcaccgacaccguggacacggugcucgagaagaacgucaccgugacccacuccgugaaccugcuggagaaccgccacaacgggaagcucugccugcugaagggcaucgcgccccuccagcuggggaacugcagcgucgccggcuggauccuggggaacccggagugcgagcuccugaucuccaaggagagcugguccuacaucguggagaagcccaaccccgagaacgggaccugcuaccccggccacuucgccgacuacgaggagcugcgggagcagcucagcuccgugagcuccuucgagcgcuucgagaucuucccgaaggagagcuccuggcccaaccacacggucaccggggugagcgccuccugcagccacaacggcgaguccagcuucuaccggaaccugcuguggcucaccgggaagaacggccuguaccccaaccuguccaagagcuacgccaacaacaaggagaaggaggugcucguccuguggggcgugcaccacccgcccaacaucguggaccagaagacccuguaccgcacggagaacgccuacgucuccguggugagcagccacuacucccggaaguucacccccgagaucgccaagcgccccaagguccgggaccaggagggccgcaucaacuacuacuggacccuccuggagcccggcgacaccaucaucuucgaggccaacgggaaccugaucgcgccgcgguacgccuucgcccucagccgcggcuucggguccggcaucaucaacagcaacgcccccauggacaagugcgacgccaagugccagacgccccagggcgcgaucaacuccagccugcccuuccagaacgugcacccggugaccaucggggagugccccaaguacguccgguccgccaagcugcgcauggugaccggccuccggaacauccccagcauccagucccgcgggcuguucggcgccaucgccggguucaucgagggcggcuggaccgggaugguggacggcugguacggguaccaccaccagaacgagcagggcagcggguacgccgcggaccagaaguccacgcagaacgccaucaacggcaucaccaacaaggucaacagcgugaucgagaagaugaacacccaguucaccgccgucggcaaggaguucaacaagcuggagcggcgcauggagaaccucaacaagaagguggacgacggguucaucgacaucuggacguacaacgccgagcugcuggugcuccuggagaacgagcggacccuggacuuccacgacuccaacgucaagaaccucuacgagaaggucaagagccagcugaagaacaacgccaaggagaucggcaacgggugcuucgaguucuaccacaagugcaacgacgagugcauggaguccgugaagaacggcaccuacgacuaccccaaguacagcgaggaguccaagcugaaccgcgagaagaucgacggggugaagcucgagagcaugggcguguaccagauccuggcgaucuacuccaccguggccagcagccugguccuccuggugucccugggcgccaucagcuucuggaugugcuccaacgggagccuccagugccggaucugcaucuga

SEQ ID NO: 70042 - RNA, 1701 nt, Artificial Sequence; identical to SEQ ID NO: 69557
  derived and/or modified CDS sequence (opt1) from hemagglutinin__InfluenzaA__ADN89864

SEQ ID NO: 70043 - RNA, 1701 nt, Artificial Sequence; identical to SEQ ID NO: 69557
  derived and/or modified CDS sequence (opt1) from hemagglutinin__InfluenzaA__ADN89875

SEQ ID NO: 70044 - RNA, 1701 nt, Artificial Sequence
  derived and/or modified CDS sequence (opt1) from hemagglutinin__InfluenzaA__ADN89886
augaagaccaucaucgcccugagcuacauccucugccugguguucgcccagaagcugcccggcaacgacaacuccaccgcgacgcucugccuggggcaccacgccgucccgaacggcaccaucgugaagaccaucaccaacgaccagaucgaggugacgaacgccaccgagcugguccagagcuccagcaccggggagaucugcgacagcccccaccagauccucgacggcgagaacugcacccugaucgacgcccugcucggggacccccagugcgacggcuuccagaacaagaagugggaccuguucguggagcgcagcaaggccuacuccaacugcuaccccuacgacgugccggacuacgcgagccugcggucccucgucgccagcuccggcacgcuggaguucaacaacgagagcuucaacuggaccggggugacccagaacggcaccuccagcgccugcauccgccgguccaacaacagcuucuucucccgccugaacuggcucacgcaccugaacuucaaguaccccgcccugaacgugaccaugcccaacaacgagcaguucgacaagcucuacaucuggggcguccaccaccccgggaccgacaaggaccagaucuuccuguacgcgcaggccagcgggcggaucaccguguccacgaagcgcagccagcaggccgugaucccgaacaucggcagccggccccgcguccggaacauccccucccgcaucagcaucuacuggaccaucgugaagcccggcgacauccugcucaucaacuccaccgggaaccugaucgccccgcggggcuacuucaagauccgcagcgggaaguccagcaucaugcgguccgacgcccccaucggcaagugcaacagcgagugcaucacccccaacggcuccauccccaacgacaagccguuccagaacgugaaccgcaucacguacggggcgugcccccgguacgucaagcagagcacccugaagcucgccaccggcaugcgcaacgugcccgagaagcagacccgggggaucuucggcgccaucgccggguucaucgagaacggcugggagggcaugguggacgggugguacggcuuccgccaccagaacuccgaggggcggggccaggccgcggaccugaaguccacgcaggccgccaucgaccagaucaacgggaagcugaaccgccucaucggcaagaccaacgagaaguuccaccagaucgagaaggaguucuccgaggucgagggccggauccaggaccuggagaaguacguggaggacaccaagaucgaccuguggagcuacaacgccgagcuccugguggcccuggagaaccagcacaccaucgaccucacggacuccgagaugaacaagcuguucgagaagacccgcaagcagcugcgcgagaacgcggaggacauggggaacggcugcuucaccaucuaccacaagugcgacaacgccugcaucgggagcauccggaacggcaccuacgaccacaacgucuaccgcgacgaggcccucaacaaccgguuccagaucaaggggguggagcugaaguccggcuacaaggacuggauccuguggaucagcuucgccaucuccugcuuccuccugugcguggcccugcucggcuucaucaugugggcgugccagaaggggaacauccgcugcaacaucugcaucuga

SEQ ID NO: 70045 - RNA, 1701 nt, Artificial Sequence; identical to SEQ ID NO: 69557
  derived and/or modified CDS sequence (opt1) from hemagglutinin__InfluenzaA__ADN89897

SEQ ID NO: 70046 - RNA, 1701 nt, Artificial Sequence; identical to SEQ ID NO: 69557
  derived and/or modified CDS sequence (opt1) from hemagglutinin__InfluenzaA__ADN89908

SEQ ID NO: 70047 - RNA, 1701 nt, Artificial Sequence; identical to SEQ ID NO: 69557
  derived and/or modified CDS sequence (opt1) from hemagglutinin__InfluenzaA__ADN89919

SEQ ID NO: 70048 - RNA, 1701 nt, Artificial Sequence; identical to SEQ ID NO: 69557
  derived and/or modified CDS sequence (opt1) from hemagglutinin__InfluenzaA__ADN89930

SEQ ID NO: 70049 - RNA, 1701 nt, Artificial Sequence; identical to SEQ ID NO: 69557
  derived and/or modified CDS sequence (opt1) from hemagglutinin__InfluenzaA__ADN89941

SEQ ID NO: 70050 - RNA, 1701 nt, Artificial Sequence; identical to SEQ ID NO: 69557
  derived and/or modified CDS sequence (opt1) from hemagglutinin__InfluenzaA__ADN89952

SEQ ID NO: 70051 - RNA, 1701 nt, Artificial Sequence; identical to SEQ ID NO: 69557
  derived and/or modified CDS sequence (opt1) from hemagglutinin__InfluenzaA__ADN89963

SEQ ID NO: 70052 - RNA, 1701 nt, Artificial Sequence
  derived and/or modified CDS sequence (opt1) from hemagglutinin__InfluenzaA__ADN89974
augaagaccaucaucgcccugagcuacauccucugccugguguucgcccagaagcugcccggcaacgacaacuccaccgcgacgcucugccuggggcaccacgccgucccgaacggcaccaucgugaagaccaucaccaacgaccagaucgaggugacgaacgccaccgagcugguccagagcuccagcaccggggagaucugcgacagcccccaccagauccucgacggcgagaacugcacccugaucgacgcccugcucggggacccccagugcgacggcuuccagaacaagaagugggaccuguucguggagcgcagcaaggccuacuccaacugcuaccccuacgacgugccggacuacgcgagccugcggucccucgucgccagcuccggcacgcuggaguucaacaacgagagcuucaacuggaccggggugacccagaacggcaccuccagcgccugcauccgccgguccaacaacagcuucuucucccgccugaacuggcucacgcaccugaacuucaaguaccccgcccugaacgugaccaugcccaacaacgagcaguucgacaagcucuacaucuggggcguccaccaccccgggaccgacaaggaccagaucuuccuguacgcgcaggccagcgggcggaucaccguguccacgaagcgcagccagcaggccgugaucccgaacaucggcagccggccccgcguccggaacauccccucccgcaucagcaucuacuggaccaucgugaagcccggcgacauccugcucaucaacuccaccgggaaccugaucgccccgcggggcuacuucaagauccagagcgggaaguccagcaucaugcgcuccgacgcccccaucggcaagugcaacagcgagugcaucacccccaacggcuccauccccaacgacaagccguuccagaacgugaaccggaucacguacggggcgugcccccgcuacgucaagcagagcacccugaagcucgccaccggcaugcggaacgugcccgagaagcagacccgcgggaucuucggcgccaucgccggguucaucgagaacggcugggagggcaugguggacgggugguacggcuuccggcaccagaacuccgaggggcgcggccaggccgcggaccugaaguccacgcaggccgccaucgaccagaucaacgggaagcugaaccggcucaucggcaagaccaacgagaaguuccaccagaucgagaaggaguucuccgaggucgagggccgcauccaggaccuggagaaguacguggaggacaccaagaucgaccuguggagcuacaacgccgagcuccugguggcccuggagaaccagcacaccaucgaccucacggacuccgagaugaacaagcuguucgagaagaccaagaagcagcugcgggagaacgcggaggacauggggaacggcugcuucaccaucuaccacaagugcgacaacgccugcaucgggagcauccgcaacggcaccuacgaccacaacgucuaccgcgacgaggcccucaacaaccgguuccagaucaaggggguggagcugaaguccggcuacaaggacuggauccuguggaucagcuucgccaucuccugcuuccuccugugcguggcccugcucggcuucaucaugugggcgugccagaaggggaacauccgcugcaacaucugcaucuga

SEQ ID NO: 70053 - RNA, 1701 nt, Artificial Sequence; identical to SEQ ID NO: 69557
  derived and/or modified CDS sequence (opt1) from hemagglutinin__InfluenzaA__ADN89985

SEQ ID NO: 70054 - RNA, 1701 nt, Artificial Sequence; identical to SEQ ID NO: 69557
  derived and/or modified CDS sequence (opt1) from hemagglutinin__InfluenzaA__ADN89996

SEQ ID NO: 70055 - RNA, 1701 nt, Artificial Sequence; identical to SEQ ID NO: 69557
  derived and/or modified CDS sequence (opt1) from hemagglutinin__InfluenzaA__ADN90007

SEQ ID NO: 70056 - RNA, 1701 nt, Artificial Sequence; identical to SEQ ID NO: 69557
  derived and/or modified CDS sequence (opt1) from hemagglutinin__InfluenzaA__ADN90018

SEQ ID NO: 70057 - RNA, 1701 nt, Artificial Sequence; identical to SEQ ID NO: 69557
  derived and/or modified CDS sequence (opt1) from hemagglutinin__InfluenzaA__ADN90040

SEQ ID NO: 70058 - RNA, 1701 nt, Artificial Sequence; identical to SEQ ID NO: 69557
  derived and/or modified CDS sequence (opt1) from hemagglutinin__InfluenzaA__ADN90051

SEQ ID NO: 70059 - RNA, 1701 nt, Artificial Sequence; identical to SEQ ID NO: 69557
  derived and/or modified CDS sequence (opt1) from hemagglutinin__InfluenzaA__ADN90062

SEQ ID NO: 70060 - RNA, 1701 nt, Artificial Sequence; identical to SEQ ID NO: 69557
  derived and/or modified CDS sequence (opt1) from hemagglutinin__InfluenzaA__ADN90073

SEQ ID NO: 70061 - RNA, 1701 nt, Artificial Sequence; identical to SEQ ID NO: 69557
  derived and/or modified CDS sequence (opt1) from hemagglutinin__InfluenzaA__ADN90084

SEQ ID NO: 70062 - RNA, 1701 nt, Artificial Sequence; identical to SEQ ID NO: 69557
  derived and/or modified CDS sequence (opt1) from hemagglutinin__InfluenzaA__ADN90095

SEQ ID NO: 70063 - RNA, 1701 nt, Artificial Sequence; identical to SEQ ID NO: 69557
  derived and/or modified CDS sequence (opt1) from hemagglutinin__InfluenzaA__ADN90106

SEQ ID NO: 70064 - RNA, 1701 nt, Artificial Sequence; identical to SEQ ID NO: 69557
  derived and/or modified CDS sequence (opt1) from hemagglutinin__InfluenzaA__ADN90117

SEQ ID NO: 70065 - RNA, 1701 nt, Artificial Sequence; identical to SEQ ID NO: 69557
  derived and/or modified CDS sequence (opt1) from hemagglutinin__InfluenzaA__ADN90128

SEQ ID NO: 70066 - RNA, 1701 nt, Artificial Sequence; identical to SEQ ID NO: 69557
  derived and/or modified CDS sequence (opt1) from hemagglutinin__InfluenzaA__ADN90139

SEQ ID NO: 70067 - RNA, 1701 nt, Artificial Sequence; identical to SEQ ID NO: 69557
  derived and/or modified CDS sequence (opt1) from hemagglutinin__InfluenzaA__ADN90150

SEQ ID NO: 70068 - RNA, 1701 nt, Artificial Sequence; identical to SEQ ID NO: 69557
  derived and/or modified CDS sequence (opt1) from hemagglutinin__InfluenzaA__ADN90161

SEQ ID NO: 70069 - RNA, 1701 nt, Artificial Sequence; identical to SEQ ID NO: 69557
  derived and/or modified CDS sequence (opt1) from hemagglutinin__InfluenzaA__ADN90172

SEQ ID NO: 70070 - RNA, 1701 nt, Artificial Sequence; identical to SEQ ID NO: 69557
  derived and/or modified CDS sequence (opt1) from hemagglutinin__InfluenzaA__ADN90183

SEQ ID NO: 70071 - RNA, 1701 nt, Artificial Sequence; identical to SEQ ID NO: 69557
  derived and/or modified CDS sequence (opt1) from hemagglutinin__InfluenzaA__ADN90194

SEQ ID NO: 70072 - RNA, 1701 nt, Artificial Sequence; identical to SEQ ID NO: 69557
  derived and/or modified CDS sequence (opt1) from hemagglutinin__InfluenzaA__ADN90205

SEQ ID NO: 70073 - RNA, 1701 nt, Artificial Sequence; identical to SEQ ID NO: 69557
  derived and/or modified CDS sequence (opt1) from hemagglutinin__InfluenzaA__ADN90216

SEQ ID NO: 70074 - RNA, 1701 nt, Artificial Sequence; identical to SEQ ID NO: 67454
  derived and/or modified CDS sequence (opt1) from hemagglutinin__InfluenzaA__ADN92467

SEQ ID NO: 70075 - RNA, 1701 nt, Artificial Sequence
  derived and/or modified CDS sequence (opt1) from hemagglutinin__InfluenzaA__ADN92478
augaagaccaucaucgcccugagccacauccucugccugguguucgcccagaagcugcccggcaacgacaacuccaccgcgacgcucugccuggggcaccacgccgucccgaacggcaccaucgugaagaccaucaccaacgaccagaucgaggugacgaacgccaccgagcugguccagagcuccagcaccggggagaucugcgacagcccccaccagauccucgacggcaagaacugcacccugaucgacgcccugcucggggacccccagugcgacggcuuccagaacaagaagugggaccuguucguggagcgcagcaaggccuacuccaacugcuaccccuacgacgugccggacuacgcgagccugcggucccucgucgccagcuccggcacgcuggaguucaacaacgagagcuucaacuggaccggggugacccagaacggcaccuccagcgccugcauccgccgguccaagaacagcuucuucucccgccugaacuggcucacgcaccugaacuucaaguaccaggcccugaacgugaccaugcccaacaacgagcaguucgacaagcucuacaucuggggcguccaccaccccgggaccgacaaggaccagaucuuccuguacgcgcaggccagcgggcggaucaccguguccacgaagcgcagccagcagaccgugauccccaacaucggcagccggccgcgcguccggaacauccccucccgcaucagcaucuacuggaccaucgugaagcccggcgacauccugcucaucaacuccaccgggaaccugaucgcgccccggggcuacuucaagauccagagcgggaaguccagcaucaugcgcuccgacgccccgaucggcaagugcaacagcgagugcaucacgcccaacggcuccauccccaacgacaagcccuuccagaacgugaaccggaucaccuacggggccugcccgcgcuacgucaagcagaacacccugaagcucgccaccggcaugcggaacgugcccgagaagcagacgcgcgggaucuucggcgccaucgccggguucaucgagaacggcugggagggcaugguggacgggugguacggcuuccggcaccagaacagcgaggggcgcggccaggccgccgaccugaaguccacccaggcggccaucgaccagaucaacgggaagcugaaccggcucaucggcaagaccaacgagaaguuccaccagaucgagaaggaguucagcgaggucgagggccgcauccaggaccuggagaaguacguggaggacaccaagaucgaccugugguccuacaacgccgagcuccugguggcccuggagaaccagcacacgaucgaccucaccgacagcgagaugaacaagcuguucgagaagaccaagaagcagcugcgggagaacgccgaggacauggggaacggcugcuucaagaucuaccacaagugcgacaacgcgugcaucggguccauccgcaacggcaccuacgaccacgacgucuaccgcgacgaggcccucaacaaccgguuccagaucaaggggguggagcugaaguccggcuacaaggacuggauccuguggaucuccuucgccaucagcugcuuccuccugugcguggcccugcucggcuucaucaugugggccugccagaaggggaacauccgcugcaacaucugcaucuga

SEQ ID NO: 70076 - RNA, 1701 nt, Artificial Sequence
  derived and/or modified CDS sequence (opt1) from hemagglutinin__InfluenzaA__ADN92489
augaagaccaucaucgcccugagcuacauccucugccugguguucgcccagaagcugcccggcaacgacaacuccaccgcgacgcucugccuggggcaccacgccgucccgaacggcaccaucgugaagaccaucaccaacgaccagaucgaggugacgaacgccaccgagcugguccagagcuccagcaccggggagaucugcgacagcccccaccagauccucgacggcaagaacugcacccugaucgacgcccugcucggggacccccagugcgacggcuuccagaacaagaagugggaccuguucguggagcgcagcaaggccuacuccaacugcuaccccuacgacgugccggacuacgcgagccugcggucccucgucgccagcuccggcacgcuggaguucaacaacgagaacuucaacuggaccggggugacccagaacggcaccagcuccgccugcauccgccggagcaagaacuccuucuucagccgccugaacuggcucacgcaccugaacuucaaguaccaggcccugaacgugaccaugcccaacaacgagcaguucgacaagcucuacaucuggggcguccaccaccccgggaccgacaaggaccagaucuuccuguacgcgcaggccuccgggcggaucaccgugagcacgaagcgcucccagcagaccgugauccccaacaucggcagccggccgcgcguccggaacauccccagccgcaucuccaucuacuggaccaucgugaagcccggcgacauccugcucaucaacagcaccgggaaccugaucgcgccccggggcuacuucaagauccaguccgggaaguccuccaucaugcgcagcgacgccccgaucggcaagugcaacuccgagugcaucacgcccaacggcagcauccccaacgacaagcccuuccagaacgugaaccggaucaccuacggggccugcccgcgcuacgucaagcagaacacccugaagcucgccaccggcaugcggaacgugcccgagaagcagacgcgcgggaucuucggcgccaucgccggguucaucgagaacggcugggagggcaugguggacgggugguacggcuuccggcaccagaacuccgaggggcgcggccaggccgccgaccucaagagcacccaggcggccaucgaccagaucaacgggaagcugaaccggcugaucggcaagaccaacgagaaguuccaccagaucgagaaggaguucuccgaggucgagggccgcauccaggaccuggagaaguacguggaggacaccaagaucgaccuguggagcuacaacgccgagcuccugguggcccuggagaaccagcacacgaucgaccucaccgacuccgagaugaacaagcuguucgagaagaccaagaagcagcugcgggagaacgccgaggacauggggaacggcugcuucaagaucuaccacaagugcgacaacgcgugcaucgggagcauccgcaacggcaccuacgaccacgacgucuaccgcgacgaggcccucaacaaccgguuccagaucaaggggguggagcugaaguccggcuacaaggacuggauccuguggaucagcuucgccaucuccugcuuccuccugugcguggcccugcucggcuucaucaugugggccugccagaaggggaacauccgcugcaacaucugcaucuga

SEQ ID NO: 70077 - RNA, 1701 nt, Artificial Sequence; identical to SEQ ID NO: 67454
  derived and/or modified CDS sequence (opt1) from hemagglutinin__InfluenzaA__ADN92500

SEQ ID NO: 70078 - RNA, 1701 nt, Artificial Sequence; identical to SEQ ID NO: 66693
  derived and/or modified CDS sequence (opt1) from hemagglutinin__InfluenzaA__ADN92510

SEQ ID NO: 70079 - RNA, 1701 nt, Artificial Sequence; identical to SEQ ID NO: 66693
  derived and/or modified CDS sequence (opt1) from hemagglutinin__InfluenzaA__ADN92520

SEQ ID NO: 70080 - RNA, 1701 nt, Artificial Sequence; identical to SEQ ID NO: 67795
  derived and/or modified CDS sequence (opt1) from hemagglutinin__InfluenzaA__ADN92530

SEQ ID NO: 70081 - RNA, 1701 nt, Artificial Sequence; identical to SEQ ID NO: 66935
  derived and/or modified CDS sequence (opt1) from hemagglutinin__InfluenzaA__ADN92540

SEQ ID NO: 70082 - RNA, 1701 nt, Artificial Sequence; identical to SEQ ID NO: 66693
  derived and/or modified CDS sequence (opt1) from hemagglutinin__InfluenzaA__ADN92550

SEQ ID NO: 70083 - RNA, 1701 nt, Artificial Sequence; identical to SEQ ID NO: 66693
  derived and/or modified CDS sequence (opt1) from hemagglutinin__InfluenzaA__ADN92560

SEQ ID NO: 70084 - RNA, 1701 nt, Artificial Sequence
  derived and/or modified CDS sequence (opt1) from hemagglutinin__InfluenzaA__ADO00730
augaaggccauccuggugguccuccuguacaccuucgccaccgcgaacgccgacacgcugugcaucggcuaccacgccaacaacagcaccgacaccguggacaccgugcucgagaagaacgucacggugacccacuccgugaaccugcuggaggacaagcacaacgggaagcucugcaagcugcgcggcgucgcgccccugcaccucgggaagugcaacaucgccggcuggauccuggggaacccggagugcggcagccuguccaccgccagcuccuggagcuacaucguggagaccuccagcuccgacaacggcacgugcuaccccggggacuucaucgacuacgaggagcuccgggagcagcugagcuccgugagcuccuucgagcgcuucgagaucuuccccaagaccagcuccuggcccaaccacgacagcaacaagggcgucaccgccgccugcccgcacgccggggcgaaguccuucuacaagaaccugaucuggcucgugaagaagggcaacagcuaccccaagcuguccaagagcuacaucaacgacaaggggaaggaggugcugguccucuggggcauccaccaccccagcaccuccgccgaccagcagagccuguaccagaacgccgacgccuacguguucgugggcacgucccgguacagcaagaaguucaagcccgagaucgccauccgcccgaagguccgggaccaggaggggcgcaugaacuacuacuggacccugguggagcccggcgacaagaucaccuucgaggcgaccgggaaccucguggucccccgguacgccuucgccauggagcgcaacgccggcuccggcaucaucaucagcgacacgcccgugcacgacugcaacacgaccugccagaccccgaagggggccaucaacaccucccugcccuuccagaacauccaccccaucaccaucggcaagugccccaaguacgucaagagcaccaagcugcggcucgcgaccgggcugcgcaacgugccguccauccagagccggggccuguucggggccaucgccggcuucaucgagggcggguggacgggcaugguggacgggugguacggcuaccaccaccagaacgagcagggguccggcuacgccgccgaccucaagagcacccagaacgcgaucgacggcaucaccaacaaggugaacuccgucaucgagaagaugaacacccaguucacggccguggggaaggaguucaaccaccuggagaagcgcaucgagaaccugaacaagaaggucgacgacggcuuccucgacaucuggaccuacaacgccgagcugcuggugcuccuggagaacgagcggacccuggacuaccacgacagcaacgugaagaaccucuacgagaagguccgcucccagcugaagaacaacgccaaggagaucgggaacggcugcuucgaguucuaccacaagugcgacaacacgugcauggagagcgugaagaacgggaccuacgacuaccccaaguacuccgaggaggccaagcugaaccgggaggagaucgacggcgugaagcucgagagcacccgcaucuaccagauccuggcgaucuacuccaccgucgccagcagccuggugcucguggucucccugggcgccaucagcuucuggaugugcuccaacgggagccugcagugccggaucugcaucuga

SEQ ID NO: 70085 - RNA, 1701 nt, Artificial Sequence; identical to SEQ ID NO: 68113
  derived and/or modified CDS sequence (opt1) from hemagglutinin__InfluenzaA__ADO00740

SEQ ID NO: 70086 - RNA, 1701 nt, Artificial Sequence; identical to SEQ ID NO: 67857
  derived and/or modified CDS sequence (opt1) from hemagglutinin__InfluenzaA__ADO00750

SEQ ID NO: 70087 - RNA, 1701 nt, Artificial Sequence; identical to SEQ ID NO: 66693
  derived and/or modified CDS sequence (opt1) from hemagglutinin__InfluenzaA__ADO12143

SEQ ID NO: 70088 - RNA, 1701 nt, Artificial Sequence; identical to SEQ ID NO: 66693
  derived and/or modified CDS sequence (opt1) from hemagglutinin__InfluenzaA__ADO12153

SEQ ID NO: 70089 - RNA, 1701 nt, Artificial Sequence; identical to SEQ ID NO: 66693
  derived and/or modified CDS sequence (opt1) from hemagglutinin__InfluenzaA__ADO12163

SEQ ID NO: 70090 - RNA, 1701 nt, Artificial Sequence; identical to SEQ ID NO: 66693
  derived and/or modified CDS sequence (opt1) from hemagglutinin__InfluenzaA__ADO12173

SEQ ID NO: 70091 - RNA, 1701 nt, Artificial Sequence; identical to SEQ ID NO: 66693
  derived and/or modified CDS sequence (opt1) from hemagglutinin__InfluenzaA__ADO12183

SEQ ID NO: 70092 - RNA, 1701 nt, Artificial Sequence; identical to SEQ ID NO: 66693
  derived and/or modified CDS sequence (opt1) from hemagglutinin__InfluenzaA__ADO12193

SEQ ID NO: 70093 - RNA, 1701 nt, Artificial Sequence; identical to SEQ ID NO: 66693
  derived and/or modified CDS sequence (opt1) from hemagglutinin__InfluenzaA__ADO12203

SEQ ID NO: 70094 - RNA, 1701 nt, Artificial Sequence; identical to SEQ ID NO: 66693
  derived and/or modified CDS sequence (opt1) from hemagglutinin__InfluenzaA__ADO12213

SEQ ID NO: 70095 - RNA, 1701 nt, Artificial Sequence; identical to SEQ ID NO: 66693
  derived and/or modified CDS sequence (opt1) from hemagglutinin__InfluenzaA__ADO12223

SEQ ID NO: 70096 - RNA, 1701 nt, Artificial Sequence; identical to SEQ ID NO: 66693
  derived and/or modified CDS sequence (opt1) from hemagglutinin__InfluenzaA__ADO12233

SEQ ID NO: 70097 - RNA, 1701 nt, Artificial Sequence; identical to SEQ ID NO: 66693
  derived and/or modified CDS sequence (opt1) from hemagglutinin__InfluenzaA__ADO12243

SEQ ID NO: 70098 - RNA, 1701 nt, Artificial Sequence; identical to SEQ ID NO: 66693
  derived and/or modified CDS sequence (opt1) from hemagglutinin__InfluenzaA__ADO12253

SEQ ID NO: 70099 - RNA, 1701 nt, Artificial Sequence; identical to SEQ ID NO: 66693
  derived and/or modified CDS sequence (opt1) from hemagglutinin__InfluenzaA__ADO12263

SEQ ID NO: 70100 - RNA, 1701 nt, Artificial Sequence; identical to SEQ ID NO: 66693
  derived and/or modified CDS sequence (opt1) from hemagglutinin__InfluenzaA__ADO12273

SEQ ID NO: 70101 - RNA, 1701 nt, Artificial Sequence; identical to SEQ ID NO: 66693
  derived and/or modified CDS sequence (opt1) from hemagglutinin__InfluenzaA__ADO12283

SEQ ID NO: 70102 - RNA, 1701 nt, Artificial Sequence; identical to SEQ ID NO: 66693
  derived and/or modified CDS sequence (opt1) from hemagglutinin__InfluenzaA__ADO12293

SEQ ID NO: 70103 - RNA, 1701 nt, Artificial Sequence; identical to SEQ ID NO: 66693
  derived and/or modified CDS sequence (opt1) from hemagglutinin__InfluenzaA__ADO12303

SEQ ID NO: 70104 - RNA, 1701 nt, Artificial Sequence; identical to SEQ ID NO: 66693
  derived and/or modified CDS sequence (opt1) from hemagglutinin__InfluenzaA__ADO12313

SEQ ID NO: 70105 - RNA, 1701 nt, Artificial Sequence; identical to SEQ ID NO: 66693
  derived and/or modified CDS sequence (opt1) from hemagglutinin__InfluenzaA__ADO12323

SEQ ID NO: 70106 - RNA, 1701 nt, Artificial Sequence; identical to SEQ ID NO: 66693
  derived and/or modified CDS sequence (opt1) from hemagglutinin__InfluenzaA__ADO12333

SEQ ID NO: 70107 - RNA, 1701 nt, Artificial Sequence; identical to SEQ ID NO: 66693
  derived and/or modified CDS sequence (opt1) from hemagglutinin__InfluenzaA__ADO12343

SEQ ID NO: 70108 - RNA, 1701 nt, Artificial Sequence; identical to SEQ ID NO: 66693
  derived and/or modified CDS sequence (opt1) from hemagglutinin__InfluenzaA__ADO12353

SEQ ID NO: 70109 - RNA, 1701 nt, Artificial Sequence; identical to SEQ ID NO: 66693
  derived and/or modified CDS sequence (opt1) from hemagglutinin__InfluenzaA__ADO12363

SEQ ID NO: 70110 - RNA, 1701 nt, Artificial Sequence
  derived and/or modified CDS sequence (opt1) from hemagglutinin__InfluenzaA__ADO12373
augaaggccauccuggugguccuccuguacaccuucgccaccgcgaacgccgacacgcugugcaucggcuaccacgccaacaacagcaccgacaccguggacaccgugcucgagaagaacgucacggugacccacuccgugaaccugcuggaggacaagcacaacgggaagcucugcaagcugcgcggcgucgcgccccugcaccucgggaagugcaacaucgccggcuggauccuggggaacccggagugcgagagccuguccaccgccagcuccuggagcuacaucguggagaccuccagcuccgacaacggcacgugcuaccccggcgacuucaucgacuacgaggagcuccgggagcagcugagcuccgugagcuccuucgagcgcuucgagaucuuccccaagaccagcuccuggcccaaccacgacagcaacaagggggucaccgccgccugcccgcacgccggcgcgaaguccuucuacaagaaccugaucuggcucgugaagaaggggaacagcuaccccaagcuguccaagagcuacaucaacaacaagggcaaggaggugcugguccucugggggauccaccaccccagcaccuccgccgaccagcagagccuguaccagaacgccgacgccuacguguucgugggcacgucccgguacagcaagaaguucaagcccgagaucgccauccgcccgaagguccgggaccaggagggccgcaugaacuacuacuggacccugguggagcccggggacaagaucaccuucgaggcgaccggcaaccucguggucccccgguacgccuucgccauggagcgcaacgccggguccggcaucaucaucagcgacacgcccgugcacgacugcaacacgaccugccagaccccgaagggcgccaucaacaccucccugcccuuccagaacauccaccccaucaccaucgggaagugccccaaguacgucaagagcaccaagcugcggcucgcgaccggccugcgcaacgugccguccauccagagccgggggcuguucggcgccaucgccggguucaucgagggcggcuggacggggaugguggacggcugguacggguaccaccaccagaacgagcagggcuccggguacgccgccgaccucaagagcacccagaacgcgaucgacgagaucaccaacaaggugaacuccgucaucgagaagaugaacacccaguucacggccgugggcaaggaguucaaccaccuggagaagcgcaucgagaaccugaacaagaaggucgacgacggcuuccucgacaucuggaccuacaacgccgagcugcuggugcuccuggagaacgagcggacccuggacuaccacgacagcaacgugaagaaccucuacgagaagguccgcucccagcugaagaacaacgccaaggagaucgggaacggcugcuucgaguucuaccacaagugcgacaacacgugcauggagagcgugaagaacgggaccuacgacuaccccaaguacuccgaggaggccaagcugaaccgggaggagaucgacggcgugaagcucgagagcacccgcaucuaccagauccuggcgaucuacuccaccgucgccagcagccuggugcucguggucucccugggggccaucagcuucuggaugugcuccaacggcagccugcagugccggaucugcaucuga

SEQ ID NO: 70111 - RNA, 1701 nt, Artificial Sequence; identical to SEQ ID NO: 68178
  derived and/or modified CDS sequence (opt1) from hemagglutinin__InfluenzaA__ADO12383

SEQ ID NO: 70112 - RNA, 1701 nt, Artificial Sequence
  derived and/or modified CDS sequence (opt1) from hemagglutinin__InfluenzaA__ADO12403
augaaggccauccuggugguccuccuguacaccuucgccaccgcgaacgccgacacgcugugcaucggcuaccacgccaacaacagcaccgacaccguggacaccgugcucgagaagaacgucacggugacccacuccgugaaccugcuggaggacaagcacaacgggaagcucugcaagcugcgcggcgucgcgccccugcaccucgggaagugcaacaucgccggcuggauccuggggaacccggagugcgagagccuguccaccgccagcuccuggagcuacaucguggagaccuccagcuccgacaacggcacgugcuaccccggcgacuucaucgacuacgaggagcuccgggagcagcugagcuccgugagcuccuucgagcgcuucgagaucuuccccaagaccagcuccuggcccaaccacgacagcaacaagggggucaccgccgccugcccgcacgccggcgcgaaguccuucuacaagaaccugaucuggcucgugaagaaggggaacagcuaccccaagcuguccaagagcuacaucaacgacaagggcaaggaggugcugguccucugggggauccaccaccccagcaccuccgccgaccagcagagccuguaccagaacgccgacgccuacguguucgugggcacgucccgguacagcaagaaguucaagcccgagaucgccauccgcccgaagguccgggaccaggagggccgcaugaacuacuacuggacccugguggagcccggggacaagaucaccuucgaggcgaccggcaaccucguggucccccgguacgccuucgccauggagcgcaacgccggguccggcaucaucaucagcgacacgcccgugcacgacugcaacacgaccugccagaccccgaagggcgccaucaacaccucccugcccuuccagaacgugcaccccaucaccaucgggaagugccccaaguacgucaagagcaccaagcugcggcucgcgaccggccugcgcaacgugccguccauccagagccgggggcuguucggcgccaucgccggguucaucgagggcggcuggacggggaugguggacggcugguacggguaccaccaccagaacgagcagggcuccggguacgccgccgaccucaagagcacccagaacgcgaucgacgagaucaccaacaaggucaacuccgugaucgagaagaugaacacccaguucacggccgucggcaaggaguucaaccaccuggagaagcgcaucgagaaccugaacaagaagguggacgacggcuuccucgacaucuggaccuacaacgccgagcugcuggugcuccuggagaacgagcggacccuggacuaccacgacagcaacgucaagaaccucuacgagaaggugcgcucccagcugaagaacaacgccaaggagaucgggaacggcugcuucgaguucuaccacaagugcgacaacacgugcauggagagcgugaagaacgggaccuacgacuaccccaaguacuccgaggaggccaagcugaaccgggaggagaucgacggcgucaagcucgagagcacccgcaucuaccagauccuggcgaucuacuccaccguggccagcagccuggugcucgucgugucccugggggccaucagcuucuggaugugcuccaacggcagccugcagugccggaucugcaucuga

SEQ ID NO: 70113 - RNA, 1701 nt, Artificial Sequence; identical to SEQ ID NO: 68329
  derived and/or modified CDS sequence (opt1) from hemagglutinin__InfluenzaA__ADO12413

SEQ ID NO: 70114 - RNA, 1701 nt, Artificial Sequence; identical to SEQ ID NO: 66693
  derived and/or modified CDS sequence (opt1) from hemagglutinin__InfluenzaA__ADO12423

SEQ ID NO: 70115 - RNA, 1701 nt, Artificial Sequence; identical to SEQ ID NO: 66693
  derived and/or modified CDS sequence (opt1) from hemagglutinin__InfluenzaA__ADO12433

SEQ ID NO: 70116 - RNA, 1701 nt, Artificial Sequence; identical to SEQ ID NO: 66693
  derived and/or modified CDS sequence (opt1) from hemagglutinin__InfluenzaA__ADO12443

SEQ ID NO: 70117 - RNA, 1701 nt, Artificial Sequence; identical to SEQ ID NO: 66693
  derived and/or modified CDS sequence (opt1) from hemagglutinin__InfluenzaA__ADO12453

SEQ ID NO: 70118 - RNA, 1701 nt, Artificial Sequence; identical to SEQ ID NO: 66693
  derived and/or modified CDS sequence (opt1) from hemagglutinin__InfluenzaA__ADO12463

SEQ ID NO: 70119 - RNA, 1701 nt, Artificial Sequence
  derived and/or modified CDS sequence (opt1) from hemagglutinin__InfluenzaA__ADO12473
augaaggccauccuggugguccuccuguacaccuucgccaccgcgaacgccgacacgcugugcaucggcuaccacgccaacaacagcaccgacaccguggacaccgugcucgagaagaacgucacggugacccacuccgugaaccugcuggaggacaagcagaacgggaagcucugcaagcugcgcggcgucgcgccccugcaccucgggaagugcaacaucgccggcuggauccuggggaacccggagugcgagagccuguccaccgccagcuccuggagcuacaucguggagaccuccagcuccgacaacggcacgugcuaccccggcgacuucaucgacuacgaggagcuccgggagcagcugagcuccgugagcuccuucgagcgcuucgagaucuuccccaagaccagcuccuggcccaaccacgacagcaacaagggggucaccgccgccugcccgcacgccggcgcgaaguccuucuacaagaaccugaucuggcucgugaagaaggggaacagcuaccccaagcuguccaagagcuacaucaacgacaagggcaaggaggugcugguccucugggggauccaccaccccagcaccuccgccgaccagcagagccuguaccagaacgccgacgccuacguguucgugggcacgucccgguacagcaagaaguucaagcccgagaucgccauccgcccgaagguccgggaccaggagggccgcaugaacuacuacuggacccugguggagcccggggacaagaucaccuucgaggcgaccggcaaccucguggucccccgguacgccuucgccauggagcgcaacgccggguccggcaucaucaucagcgacacgcccgugcacgacugcaacacgaccugccagaccccgaagggcgccaucaacaccucccugcccuuccagaacauccaccccaucaccaucgggaagugccccaaguacgucaagagcaccaagcugcggcucgcgaccggccugcgcaacgugccguccauccagagccgggggcuguucggcgccaucgccggguucaucgagggcggcuggacggggaugguggacggcugguacggguaccaccaccagaacgagcagggcuccggguacgccgccgaccucaagagcacccagaacgcgaucgacgagaucaccaacaaggugaacuccgucaucgagaagaugaacacccaguucacggccgugggcaaggaguucaaccaccuggagaagcgcaucgagaaccugaacaagaaggucgacgacggcuuccucgacaucuggaccuacaacgccgagcugcuggugcuccuggagaacgagcggacccuggacuaccacgacagcaacgugaagaaccucuacgagaagguccgcucccagcugaagaacaacgccaaggagaucgggaacggcugcuucgaguucuaccacaagugcgacaacacgugcauggagagcgugaagaacgggaccuacgacuaccccaaguacuccgaggaggccaagcugaaccgggaggagaucgacggcgugaagcucgagagcacccgcaucuaccagauccuggcgaucuacuccaccgucgccagcagccuggugcucguggucucccugggggccaucagcuucuggaugugcuccaacggcagccugcagugccggaucugcaucuga

SEQ ID NO: 70120 - RNA, 1701 nt, Artificial Sequence; identical to SEQ ID NO: 66693
  derived and/or modified CDS sequence (opt1) from hemagglutinin__InfluenzaA__ADO12493

SEQ ID NO: 70121 - RNA, 1701 nt, Artificial Sequence
  derived and/or modified CDS sequence (opt1) from hemagglutinin__InfluenzaA__ADO12503
augaaggccauccuggugguccuccuguacaccuucgccaccgcgaacgccgacacgcugugcaucggcuaccacgccaacaacagcaccgacaccguggacaccgugcucgagaagaacgucacggugacccacuccgugaaccugcuggaggacaagcacaacgggaagcucugcaagcugcgcggcgucgcgccccugcaccucgggaagugcaacaucgccggcuggauccuggggaacccggagugcgagagccuguccaccgccagcuccuggagcuacaucguggagaccuccagcuccgacaacggcacgugcuaccccggcgacuucaucgacuacgaggagcuccgggagcagcugagcuccgugagcuccuucgagcgcuucgagaucuuccccaagaccagcuccuggcccaaccacgacagcaacaagggggucaccgccgccugcccgcacgccggcgcgaaguccuucuacaagaaccugaucuggcucgugaagaaggggaacagcuaccccaagcuguccaagagcuacaucaacgacaagggcaaggaggugcugguccucugggggauccaccaccccagcaccuccgccgaccagcagagccuguaccagaacgccgacgccuacguguucgugggcacgucccgguacagcaagaaguucaagcccgagaucgccauccgcccgaagguccgggaccaggagggccgcaugaacuacuacuggacccugguggagcccggggacaagaucaccuucgaggcgaccggcaaccucguggucccccgguacgccuucgccauggagcgcaacgccggguccggcaucaucaucagcgacacgcccgugcacgacugcaacacgaccugccagaccccgaagggcgccaucaacaccucccugcccuuccagaacauccaccccaucaccaucgggaagugccccaaguacgucaagagcaccaagcugcggcucgcgaccggccugcgcaacgugccguccauccagagccgggggcuguucggcgccaucgccggguucaucgagggcggcuggacggggaugguggacggcugguacggguaccaccaccagaacgagcagggcuccggguacgccgccgaccucaagagcacccagaacgcgaucgacgagaucaccaacaaggugaacuccgucaucgagaagaugaacacccaguucacggccgugggcaaggaguucaaccaccuggagaagcgcaucgagaaccugaacaagaaggucgacgacggcuuccucgacaucuggaccuacaacgccgagcugcuggugcuccuggagaacgagcggacccuggacuaccacgacagcaacgugaagaaccucuacgagaagguccgcucccagcugaagaacaacgccaaggagaucgggaacggcugcuucgaguucuaccacaagugcgacaacacgugcauggagagcgugaagaacgggaccuacgacuaccccaaguacuccgaggaggccaagcugaaccgggaggagaucgacggcgugaagcucgagagcacccgcaucuaccagauccuggcgaucuacuccaccgucgccagcagccuggugcucguggucucccugggggccaucaacuucuggaugugcagcaacggcucccugcagugccggaucugcaucuga

SEQ ID NO: 70122 - RNA, 1701 nt, Artificial Sequence
  derived and/or modified CDS sequence (opt1) from hemagglutinin__InfluenzaA__ADO12513
augaaggccauccuggugguccuccuguacaccuucgccaccgcgaacgccgacacgcugugcaucggcuaccacgccaacaacagcaccgacaccguggacaccgugcucgagaagaacgucacggugacccacuccgugaaccugcuggaggacaagcacaacgggaagcucugcaagcugcgcgaggucgcgccccugcaccucggcaagugcaacaucgccggguggauccugggcaacccggagugcgagagccuguccaccgccagcuccuggagcuacaucguggagaccuccagcuccgacaacgggacgugcuaccccggcgacuucaucgacuacgaggagcuccgggagcagcugagcuccgugagcuccuucgagcgcuucgagaucuuccccaagaccagcuccuggcccaaccacgacagcaacaagggcgucaccgccgccugcccgcacgccggggcgaaguccuucuacaagaaccugaucuggcucgugaagaagggcaacagcuaccccaagcuguccaagagcuacaucaacgacaaggggaaggaggugcugguccucuggggcauccaccaccccagcaccuccgccgaccagcagagccuguaccagaacgccgacgccuacguguucguggggacgucccgguacagcaagaaguucaagcccgagaucgccauccgcccgaagguccgggaccaggagggccgcaugaacuacuacuggacccugguggagcccggcgacaagaucaccuucgaggcgaccgggaaccucguggucccccgguacgccuucgccauggagcgcaacgccggcuccgggaucaucaucagcgacacgcccgugcacgacugcaacacgaccugccagaccccgaagggcgccaucaacaccucccugcccuuccagaacauccaccccaucaccaucggcaagugccccaaguacgucaagagcaccaagcugcggcucgcgaccgggcugcgcaacgugccguccauccagagccggggccuguucggggccaucgccggcuucaucgagggcggguggacgggcaugguggacgggugguacggcuaccaccaccagaacgagcagggguccggcuacgccgccgaccucaagagcacccagaacgcgaucgacgagaucaccaacaaggugaacuccgucaucgagaagaugaacacccaguucacggccguggggaaggaguucaaccaccuggagaagcgcaucgagaaccugaacaagaaggucgacgacggcuuccucgacaucuggaccuacaacgccgagcugcuggugcuccuggagaacgagcggacccuggacuaccacgacagcaacgugaagaaccucuacgagaagguccgcucccagcugaagaacaacgccaaggagaucggcaacgggugcuucgaguucuaccacaagugcgacaacacgugcauggagagcgugaagaacggcaccuacgacuaccccaaguacuccgaggaggccaagcugaaccgggaggagaucgacggggugaagcucgagagcacccgcaucuaccagauccuggcgaucuacuccaccgucgccagcagccuggugcucguggucucccugggcgccaucagcuucuggaugugcuccaacgggagccugcagugccggaucugcaucuga

SEQ ID NO: 70123 - RNA, 1701 nt, Artificial Sequence; identical to SEQ ID NO: 66693
  derived and/or modified CDS sequence (opt1) from hemagglutinin__InfluenzaA__ADO12523

SEQ ID NO: 70124 - RNA, 1701 nt, Artificial Sequence
  derived and/or modified CDS sequence (opt1) from hemagglutinin__InfluenzaA__ADO12533
augaaggccauccuggugguccuccuguacaccuucgccaccgcgaacgccgacacgcugugcaucggcuaccacgccaacaacagcaccgacaccguggacaccgugcucgagaagaacgucacggugacccacuccgugaaccugcuggaggacaagcacaacgggaagcucugcaagcugcgcggcgucgcgccccugcaccucgggaagugcaacaucgccggcuggauccuggggaacccggagugcgagagccuguccaccgccagcuccuggagcuacaucguggagaccuccagcuccgacaacggcacgugcuaccccggcgacuucaucgacuacgaggagcuccgggagcagcugagcuccgugagcuccuucgagcgcuucgagaucuuccccaagaccagcuccuggcccaaccacgacagcaacaagggggucaccgccgccugcccgcacgccggcgcgaaguccuucuacaagaaccugaucuggcucgugaagaaggggaacagcuaccccaagcuguccaagagcuacaucaacgacaagggcaaggaggugcugguccucugggggauccaccaccccagcaccuccgccgaccagcagagccuguaccagaacgccgacgccuacguguucgugggcacgucccgguacagcaagaaguucaagcccgagaucgccauccgcccgaagguccgggaccaggagggccgcaugaacuacuacuggacccugguggagcccggggacaagaucaccuucgaggcgaccggcaaccucguggucccccgguacgccuucgccauggagcgcaacgccggguccggcaucaucaucagcgacacgcccgugcacgacugcaacacgaccugccagaccccgaagggcgccaucaacaccucccugcccuuccagaacauccaccccaucaccaucgggaagugccccaaguacgucaagagcacccggcugcgccucgcgaccggccugcggaacgugccguccauccagagccgcgggcuguucggcgccaucgccggguucaucgagggcggcuggacggggaugguggacggcugguacggguaccaccaccagaacgagcagggcuccggguacgccgccgaccucaagagcacccagaacgcgaucgacgagaucaccaacaaggugaacuccgucaucgagaagaugaacacccaguucacggccgugggcaaggaguucaaccaccuggagaagcggaucgagaaccugaacaagaaggucgacgacggcuuccucgacaucuggaccuacaacgccgagcugcuggugcuccuggagaacgagcgcacccuggacuaccacgacagcaacgugaagaaccucuacgagaagguccggucccagcugaagaacaacgccaaggagaucgggaacggcugcuucgaguucuaccacaagugcgacaacacgugcauggagagcgugaagaacgggaccuacgacuaccccaaguacuccgaggaggccaagcugaaccgcgaggagaucgacggcgugaagcucgagagcacccggaucuaccagauccuggcgaucuacuccaccgucgccagcagccuggugcucguggucucccugggggccaucagcuucuggaugugcuccaacggcagccugcagugccgcaucugcaucuga

SEQ ID NO: 70125 - RNA, 1701 nt, Artificial Sequence; identical to SEQ ID NO: 66693
  derived and/or modified CDS sequence (opt1) from hemagglutinin__InfluenzaA__ADO12543

SEQ ID NO: 70126 - RNA, 1701 nt, Artificial Sequence; identical to SEQ ID NO: 66693
  derived and/or modified CDS sequence (opt1) from hemagglutinin__InfluenzaA__ADO12553

SEQ ID NO: 70127 - RNA, 1701 nt, Artificial Sequence; identical to SEQ ID NO: 66693
  derived and/or modified CDS sequence (opt1) from hemagglutinin__InfluenzaA__ADO12563

SEQ ID NO: 70128 - RNA, 1701 nt, Artificial Sequence; identical to SEQ ID NO: 66693
  derived and/or modified CDS sequence (opt1) from hemagglutinin__InfluenzaA__ADO12573

SEQ ID NO: 70129 - RNA, 1701 nt, Artificial Sequence
  derived and/or modified CDS sequence (opt1) from hemagglutinin__InfluenzaA__ADO12593
augaaggccauccuggugguccuccuguacaccuucgccaccgcgaacgccgacacgcugugcaucggcuaccacgccaacaacagcaccgacaucguggacaccgugcucgagaagaacgucaccgugacgcacuccgugaaccugcuggaggacaagcacaacgggaagcucugcaagcugcgcggcgucgcgccccugcaccucgggaagugcaacaucgccggcuggauccuggggaacccggagugcgagagccuguccaccgccagcuccuggagcuacaucguggagaccuccagcuccgacaacgggaccugcuaccccggcgacuucaucgacuacgaggagcuccgggagcagcugagcuccgugagcuccuucgagcgcuucgagaucuuccccaagacgagcuccuggcccaaccacgacagcaacaagggcgucaccgccgccugcccgcacgccggcgcgaaguccuucuacaagaaccugaucuggcucgugaagaaggggaacagcuaccccaagcuguccaagagcuacaucaacgacaagggcaaggaggugcugguccucugggggauccaccaccccagcaccuccgccgaccagcagagccuguaccagaacgccgacgccuacguguucgugggcaccucccgguacagcaagaaguucaagcccgagaucgccauccgcccgaagguccgggaccaggagggccgcaugaacuacuacuggacgcugguggagcccggggacaagaucaccuucgaggcgaccggcaaccucguggucccccgguacgccuucgccauggagcgcaacgccggguccggcaucaucaucagcgacacccccgugcacgacugcaacacgaccugccagaccccgaagggcgccaucaacaccucccugcccuuccagaacauccaccccaucacgaucgggaagugccccaaguacgucaagagcaccaagcugcggcucgcgaccggccugcgcaacgugccguccauccagagccgggggcuguucggcgccaucgccggguucaucgagggcggcuggaccgggaugguggacggcugguacggguaccaccaccagaacgagcagggcuccggguacgccgccgaccucaagagcacgcagaacgcgaucgacgagaucaccaacaaggugaacuccgucaucgagaagaugaacacccaguucaccgccgugggcaaggaguucaaccaccuggagaagcgcaucgagaaccugaacaagaaggucgacgacggcuuccucgacaucuggacguacaacgccgagcugcuggugcuccuggagaacgagcggacccuggacuaccacgacagcaacgugaagaaccucuacgagaagguccgcucccagcugaagaacaacgccaaggagaucgggaacggcugcuucgaguucuaccacaagugcgacaacacgugcauggagagcgugaagaacgggaccuacgacuaccccaaguacuccgaggaggccaagcugaaccgggaggagaucgacggcgugaagcucgagagcacccgcaucuaccagauccuggcgaucuacuccaccgucgccagcagccuggugcucguggucucccugggggccaucagcuucuggaugugcuccaacggcagccugcagugccggaucugcaucuga

SEQ ID NO: 70130 - RNA, 1701 nt, Artificial Sequence; identical to SEQ ID NO: 66693
  derived and/or modified CDS sequence (opt1) from hemagglutinin__InfluenzaA__ADO12603

SEQ ID NO: 70131 - RNA, 1701 nt, Artificial Sequence; identical to SEQ ID NO: 66693
  derived and/or modified CDS sequence (opt1) from hemagglutinin__InfluenzaA__ADO12613

SEQ ID NO: 70132 - RNA, 1701 nt, Artificial Sequence; identical to SEQ ID NO: 66693
  derived and/or modified CDS sequence (opt1) from hemagglutinin__InfluenzaA__ADO12623

SEQ ID NO: 70133 - RNA, 1701 nt, Artificial Sequence
  derived and/or modified CDS sequence (opt1) from hemagglutinin__InfluenzaA__ADO14349
augaaggccauccuggugguccuccuguacaccuucgccaccgcgaacgccgacacgcugugcaucggcuaccacgccaacaacagcaccgacaccguggacaccgugcucgagaagaacgucacggugacccacuccgugaaccugcuggaggacaagcacaaggggaagcucugcaagcugcgcggcgucgcgccccugcaccucgggaagugcaacaucgccggcuggauccuggggaacccggagugcgagagccuguccaccgccagcuccuggagcuacaucguggagaccuccagcuccgacaagggcacgugcuaccccggcgacuucaucgacuacgaggagcuccgggagcagcugagcuccgugagcuccuucgagcgcuucgagaucuuccccaagaccagcuccuggcccaaccacgacagcaacaagggggucaccgccgccugcccgcacgccggcgcgaaguccuucuacaagaaccugaucuggcucgugaagaaggggaacagcuaccccaagcuguccaagagcuacaucaacgacaagggcaaggaggugcugguccucugggggauccaccaccccagcaccuccgccgaccagcagagccuguaccagaacgccgacgccuacguguucgugggcacgucccgguacagcaagaaguucaagcccgagaucgccauccgcccgaagguccgggaccaggagggccgcaugaacuacuacuggacccugguggagcccggggacaagaucaccuucgaggcgaccggcaaccucguggucccccgguacgccuucgccauggagcgcaacgccggguccggcaucaucaucagcgacacgcccgugcacgacugcaacacgaccugccagaccccgaagggcgccaucaacaccucccugcccuuccagaacauccaccccaucaccaucgggaagugccccaaguacgucaagagcaccaagcugcggcucgcgaccggccugcgcaacaucccguccauccagagccgggggcuguucggcgccaucgccggguucaucgagggcggcuggacggggaugguggacggcugguacggguaccaccaccagaacgagcagggcuccggguacgccgccgaccucaagagcacccagaacgcgaucgacgagaucaccaacaaggugaacuccgugaucgagaagaugaacacccaguucacggccgucggcaaggaguucaaccaccuggagaagcgcaucgagaaccugaacaagaagguggacgacggcuuccucgacaucuggaccuacaacgccgagcugcugguccuccuggagaacgagcggacccuggacuaccacgacagcaacgugaagaaccucuacgagaaggugcgcucccagcugaagaacaacgccaaggagaucgggaacggcugcuucgaguucuaccacaagugcgacaacacgugcauggagagcgucaagaacgggaccuacgacuaccccaaguacuccgaggaggccaagcugaaccgggaggagaucgacggcgugaagcucgagagcacccgcaucuaccagauccuggcgaucuacuccaccguggccagcagccugguccucguggugucccugggggccaucagcuucuggaugugcuccaacggcagccugcagugccggaucugcaucuga

SEQ ID NO: 70134 - RNA, 1701 nt, Artificial Sequence; identical to SEQ ID NO: 68957
  derived and/or modified CDS sequence (opt1) from hemagglutinin__InfluenzaA__ADO14351

SEQ ID NO: 70135 - RNA, 1701 nt, Artificial Sequence
  derived and/or modified CDS sequence (opt1) from hemagglutinin__InfluenzaA__ADO14353
augaaggccauccuggugguccuccuguacaccuucgccaccgcgaacgccgacacgcugugcaucggcuaccacgccaacaacagcaccgacaccguggacaccgugcucgagaagaacgucacggugacccacuccgugaaccugcuggaggacaagcacaacgggaagcucugcaagcugcgcggcgucgcgccccugcaccucgggaagugcaacaucgccggcuggauccuggggaacccggagugcgagagccuguccaccgccagcuccuggagcuacaucguggagaccuccagcuccgacaacggcacgugcuaccccggcgacuucaucgacuacgaggagcuccgggagcagcugagcuccgugagcuccuucgagcgcuucgagaucuuccccaagaccagcuccuggcccaaccacgacagcaacaagggggucaccgccgccugcccgcacgccgaggcgaaguccuucuacaagaaccugaucuggcucgugaagaagggcaacagcuaccccaagcuguccaagagcuacaucaacgacaaggggaaggaggugcugguccucuggggcauccaccaccccagcaccuccgccgaccagcagagccuguaccagaacgccgacgccuacguguucguggggacgucccgguacagcaagaaguucaagcccgagaucgccauccgcccgaagguccgggaccaggagggccgcaugaacuacuacuggacccugguggagcccggcgacaagaucaccuucgaggcgaccgggaaccucguggucccccgguacgccuucgccauggagcgcaacgccggcuccgggaucaucaucagcgacacgcccgugcacgacugcaacacgaccugccagaccccgaagggcgccaucaacaccucccugcccuuccagaacauccaccccaucaccaucggcaagugccccaaguacgucaagagcaccaagcugcggcucgcgaccgggcugcgcaacaucccguccauccagagccggggccuguucggggccaucgccggcuucaucgagggcggguggacgggcaugguggacgggugguacggcuaccaccaccagaacgagcagggguccggcuacgccgccgaccucaagagcacccagaacgcgaucgacgagaucaccaacaaggugaacuccgugaucgagaagaugaacacccaguucacggccgucgggaaggaguucaaccaccuggagaagcgcaucgagaaccugaacaagaagguggacgacggcuuccucgacaucuggaccuacaacgccgagcugcugguccuccuggagaacgagcggacccuggacuaccacgacagcaacgugaagaaccucuacgagaaggugcgcucccagcugaagaacaacgccaaggagaucggcaacgggugcuucgaguucuaccacaagugcgacaacacgugcauggagagcgucaagaacggcaccuacgacuaccccaaguacuccgaggaggccaagcugaaccgggaggagaucgacggggugaagcucgagagcacccgcaucuaccagauccuggcgaucuacuccaccguggccagcagccugguccucguggugucccugggcgccaucagcuucuggaugugcuccaacgggagccugcagugccggaucugcaucuga

SEQ ID NO: 70136 - RNA, 1701 nt, Artificial Sequence
  derived and/or modified CDS sequence (opt1) from hemagglutinin__InfluenzaA__ADO14354
augaaggccauccuggugguccuccuguacaccuucgccaccgcgaacgccgacacgcugugcaugggcuaccacgccaacaacagcaccgacaccguggacaccgugcucgagaagaacgucacggugacccacuccgugaaccugcuggaggacaagcacaacgggaagcucugcaagcugcgcggcgucgcgccccugcaccucgggaagugcaacaucgccggcuggauccuggggaacccggagugcgagagccuguccaccgccagcuccuggagcuacaucguggagaccuccagcuccgacaacggcacgugcuaccccggcgacuucaucgacuacgaggagcuccgggagcagcugagcuccgugagcuccuucgagcgcuucgagaucuuccccaagaccagcuccuggcccaaccacgacagcaacaagggggucaccgccgccugcccgcacgccggcgcgaaguccuucuacaagaaccugaucuggcucgugaagaaggggaacagcuaccccaagcuguccaagagcuacaucaacgacaagggcaaggaggugcugguccucugggggauccaccaccccagcaccuccgccgaccagcagagccuguaccagaacgccgacgccuacguguucgugggcacgucccgguacagcaagaaguucaagcccgagaucgccauccgcccgaagguccgggagcaggagggccgcaugaacuacuacuggacccugguggagcccggggacaagaucaccuucgaggcgaccggcaaccucguggucccccgguacgccuucgccauggagcgcaacgccggguccggcaucaucaucagcgacacgcccgugcacgacugcaacacgaccugccagaccccgaagggcgccaucaacaccucccugcccuuccagaacauccaccccaucaccaucgggaagugccccaaguacgucaagagcaccaagcugcggcucgcgaccggccugcgcaacgugccguccauccagagccgggggcuguucggcgccaucgccggguucaucgagggcggcuggacggggaugguggacggcugguacggguaccaccaccagaacgagcagggcuccggguacgccgccgaccucaagagcacccagaacgcgaucgacgagaucaccaacaaggugaacuccgucaucgagaagaugaacacccaguucacggccgugggcaaggaguucaaccaccuggagaagcgcaucgagaaccugaacaagaaggucgacgacggcuuccucgacaucuggaccuacaacgccgagcugcuggugcuccuggagaacgagcggacccuggacuaccacgacagcaacgugaagaaccucuacgagaagguccgcucccagcugaagaacaacgccaaggagaucgggaacggcugcuucgaguucuaccacaagugcgacaacacgugcauggagagcgugaagaacgggaccuacgacuaccccaaguacuccgaggaggccaagcugaaccgggaggagaucgacggcgugaagcucgagagcacccgcaucuaccagauccuggcgaucuacuccaccgucgccagcagccuggugcucguggucucccugggggccaucagcuucuggaugugcuccaacggcagccugcagugccggaucugcaucuga

SEQ ID NO: 70137 - RNA, 1701 nt, Artificial Sequence
  derived and/or modified CDS sequence (opt1) from hemagglutinin__InfluenzaA__ADO14356
augaaggccauccuggugguccuccuguacaccuucgccaccgcgaacgccgacacgcugugcaucggcuaccacgccaacaacagcaccgacaccguggacaccgugcucgagaagaacgucacggugacccacuccgugaaccugcuggaggacaagcacaacgggaagcucugcaagcugcgcggcgucgcgccccugcaccucgggaagugcaacaucgccggcuggauccuggggaacccggagugcgagagccuguccaccgccagcuccuggagcuacaucguggagaccuccagcuccgacaacggcacgugcuaccccggcgacuucaucgacuacgaggagcuccgggagcagcugagcuccgugagcuccuucgagcgcuucgagaucuuccccaagaccagcuccuggcccaaccacgacagcaacaagggggucaccgccgccugcccgcacgccggcgcgaaguccuucuacaagaaccugaucuggcucgugaagaaggggaacagcuaccccaagcuguccaagagcuacaucaacgacaagggcaaggaggugcugguccucugggggauccaccaccccagcaccuccgccgaccagcagagccuguaccagaacgccgacgccuacguguucgugggcacgucccgguacagcaagaaguucaagcccgagaucgccauccgcccgaagguccggggccaggaggggcgcaugaacuacuacuggacccugguggagcccggcgacaagaucaccuucgaggcgaccgggaaccucguggucccccgguacgccuucgccauggagcgcaacgccggcuccggcaucaucaucagcgacacgcccgugcacgacugcaacacgaccugccagaccccgaagggggccaucaacaccucccugcccuuccagaacauccaccccaucaccaucggcaagugccccaaguacgucaagagcaccaagcugcggcucgcgaccgggcugcgcaacaucccguccauccagagccggggccuguucggggccaucgccggcuucaucgagggcggguggacgggcaugguggacgggugguacggcuaccaccaccagaacgagcagggguccggcuacgccgccgaccucaagagcacccagaacgcgaucgacgagaucaccaacaaggugaacuccgugaucgagaagaugaacacccaguucacggccgucggcaaggaguucaaccaccuggagaagcgcaucgagaaccugaacaagaagguggacgacggguuccucgacaucuggaccuacaacgccgagcugcugguccuccuggagaacgagcggacccuggacuaccacgacagcaacgugaagaaccucuacgagaaggugcgcucccagcugaagaacaacgccaaggagaucggcaacgggugcuucgaguucuaccacaagugcgacaacacgugcauggagagcgucaagaacggcaccuacgacuaccccgaguacuccgaggaggccaagcugaaccgggaggagaucgacggggugaagcucgagagcacccgcaucuaccagauccuggcgaucuacuccaccguggccagcagccugguccucguggugucccugggcgccaucagcuucuggaugugcuccaacggcagccugcagugccggaucugcaucuga

SEQ ID NO: 70138 - RNA, 1701 nt, Artificial Sequence; identical to SEQ ID NO: 68957
  derived and/or modified CDS sequence (opt1) from hemagglutinin__InfluenzaA__ADO14357

SEQ ID NO: 70139 - RNA, 1701 nt, Artificial Sequence
  derived and/or modified CDS sequence (opt1) from hemagglutinin__InfluenzaA__ADO14359
augaaggccauccuggugguccuccuguacaccuucgccaccgcgaacgccgacacgcugugcaucggcuaccacgccaacaacagcaccgacaccguggacaccgugcucgagaagaacgucacggugacccacuccgugaaccugcuggaggacaagcacaacgggaagcucugcaagcugcgcggcgucgcgccccugcaccucgggaagugcaacaucgccggcuggauccuggggaacccggagugcgagagccuguccaccgccagcuccuggagcuacaucguggagaccuccagcuccgacaacggcacgugcuaccccggcgacuucaucgacuacgaggagcuccgggagcagcugagcuccgugagcuccuucgagcgcuucgagaucuuccccaagaccagcuccuggcccaaccacgacagcaacaagggggucaccgccgccugcccgcacgccggcgcgaaguccuucuacaagaaccugaucuggcucgugaagaaggggaacagcuaccccaagcuguccaagagcuacaucaacgacaagggcaaggaggugcugguccucugggggauccaccacccgcccaccagcgccgaccagcagucccuguaccagaacgccgacgccuacguguucgugggcacgagccgguacuccaagaaguucaagcccgagaucgccauccgccccaagguccgggaccaggagggccgcaugaacuacuacuggacccugguggagcccggggacaagaucaccuucgaggcgaccggcaaccucguggucccccgguacgccuucgccauggagcgcaacgccgggagcggcaucaucaucuccgacacgccggugcacgacugcaacacgaccugccagacccccaagggcgccaucaacaccagccugcccuuccagaacauccaccccaucaccaucgggaagugcccgaaguacgugaaguccaccaagcugcggcucgcgaccggccugcgcaacguccccagcauccagucccgggggcuguucggcgccaucgccggguucaucgagggcggcuggacggggaugguggacggcugguacggguaccaccaccagaacgagcagggcagcggguacgccgccgaccucaaguccacccagaacgcgaucgacaagaucaccaacaaggugaacagcgucaucgagaagaugaacacccaguucacggccgugggcaaggaguucaaccaccuggagaagcgcaucgagaaccugaacaagaaggucgacgacggcuuccucgacaucuggaccuacaacgccgagcugcuggugcuccuggagaacgagcggacccuggacuaccacgacuccaacgugaagaaccucuacgagaagguccgcagccagcugaagaacaacgccaaggagaucgggaacggcugcuucgaguucuaccacaagugcgacaacacgugcauggaguccgugaagaacgggaccuacgacuaccccaaguacagcgaggaggccaagcugaaccgggaggagaucgacggcgugaagcucgaguccacccgcaucuaccagauccuggcgaucuacagcaccgucgccuccagccuggugcucguggucagccugggggccaucuccuucuggaugugcagcaacggcucccugcagugccggaucugcaucuga

SEQ ID NO: 70140 - RNA, 1701 nt, Artificial Sequence
  derived and/or modified CDS sequence (opt1) from hemagglutinin__InfluenzaA__ADO14361
augaaggccauccuggugguccuccuguacaccuucgccaccgcgaacgccgacacgcugugcaucggcuaccacgccaacaacagcaccgacaccguggacaccgugcucgagaagaacgucacggugacccacuccgugaaccugcuggaggacaagcacaacgggaagcucugcaagcugcgcggcgucgcgccccugcaccucgggaagugcaacaucgccggcuggauccuggggaacccggagugcgagagccuguccaccgccagcuccuggagcuacaucguggagaccuccagcuccgacaagggcacgugcuaccccggcgacuucaucgacuacgaggagcuccgggagcagcugagcuccgugagcuccuucgagcgcuucgagaucuuccccaagaccagcuccuggcccaaccacgacagcaacaagggggucaccgccgccugcccgcacgccggcgcgaaguccuucuacaagaaccugaucuggcucgugaagaaggggaacagcuaccccaagcuguccaagagcuacaucaacgacaagggcaaggaggugcugguccucugggggauccaccaccccagcaccuccgccgaccagcagagccuguaccagaacgccgacgccuacguguucgugggcacgucccgguacagcaagaaguucaagcccgagaucgccauccgcccgaagguccgggaccaggagggccgcaugaacuacuacuggacccugguggagcccggggacaagaucaccuucgaggcgaccggcaaccucguggucccccgguacgccuucgccauggagcgcaacgccggguccggcaucaucaucagcgacacgcccgugcacgacugcaacacgaccugccagaccccgaagggcgccaucaacaccucccugcccuuccagaacauccaccccaucaccaucgggaagugccccaaguacgucaagagcaccaagcugcggcucgcgaccggccugcgcaacaucccguccauccagagccgggggcuguucggcgccaucgccggguucaucgagggcggcuggacggggaugguggacggcugguacggguaccaccaccagaacgagcagggcuccggguacgccgccgaccucaagagcacccagaacgcgaucgacgagaucaccaacaaggugaacuccgugaucgagaagaugaacacccaguucacggccgucggcaaggaguucaaccaccuggagaagcgcaucgagaaccugaacaagaagguggacgacggcuuccucgacaucuggaccuacaacgccgagcugcugguccuccuggagaacgagcggacccuggacuaccacgacagcaacgugaagaaccucuacgagaaggugcgcucccagcugaagaacaacgccaaggagaucgggaacggcugcuucgaguucuaccacaagugcgacaacacgugcauggagagcgucaagaacgggaccuacgacuaccccaaguacuccgaggaggccaagcugaaccgggaggagaucgacggcgugaagcucgagagcacccgcaucuaccagauccuggcgaucuacuccaccguggccagcagccugguccucguggugucccugggggccaucagcuucuggaugugcuccaacggcagccugcagugccggaucugcaucuga

SEQ ID NO: 70141 - RNA, 1701 nt, Artificial Sequence
  derived and/or modified CDS sequence (opt1) from hemagglutinin__InfluenzaA__ADO14362
augaaggccauccuggugguccuccuguacaccuucgccaccgcgaacgccgacacgcugugcaucggcuaccacgccaacaacagcaccgacaccguggacaccgugcucgagaagaacgucacggugacccacuccgugaaccugcuggaggacaagcacaacgggaagcucugcaagcugcgcggcgucgcgccccugcaccucgggaagugcaacaucgccggcuggauccuggggaacccggagugcgagagccuguccaccgccagcuccuggagcuacaucguggagaccuccagcuccgacaacggcacgugcuaccccggcgacuucaucgacuacgaggagcuccgggagcagcugagcuccgugagcuccuucgagcgcuucgagaucuuccccaagaccagcuccuggcccaaccacgacagcaacaagggggucaccgccgccugcccgcacgccggcgcgaaguccuucuacaagaaccugaucuggcucgugaagaaggggaacagcuaccccaagcuguccaagagcuacaucaacgacaagggcaaggaggugcugguccucugggggauccaccaccccagcaacuccgccgaccagcagagccuguaccagaacgccgacgccuacguguucgugggcaccucccgguacagcaagaaguucaagcccgagaucgccauccgcccgaagguccgggaccaggagggccgcaugaacuacuacuggacgcugguggagcccggggacaagaucaccuucgaggcgaccggcaaccucguggucccccgguacgccuucgccauggagcgcaacgccggguccggcaucaucaucagcgacacccccgugcacgacugcaacacgaccugccagaccccgaagggcgccaucaacaccucccugcccuuccagaacauccaccccaucacgaucgggaagugccccaaguacgucaagagcaccaagcugcggcucgcgaccggccugcgcaacgugccguccauccagagccgggggcuguucggcgccaucgccggguucaucgagggcggcuggaccgggaugguggacggcugguacggguaccaccaccagaacgagcagggcuccggguacgccgccgaccucaagagcacgcagaacgcgaucgacgagaucaccaacaaggugaacuccgucaucgagaagaugaacacccaguucaccgccgugggcaaggaguucaaccaccuggagaagcgcaucgagaaccugaacaagaaggucgacgacggcuuccucgacaucuggacguacaacgccgagcugcuggugcuccuggagaacgagcggacccuggacuaccacgacagcaacgugaagaaccucuacgagaagguccgcucccagcugaagaacaacgccaaggagaucgggaacggcugcuucgaguucuaccacaagugcgacaacacgugcauggagagcgugaagaacgggaccuacgacuaccccaaguacuccgaggaggccaagcugaaccgggaggagaucgacggcgugaagcucgagagcacccgcaucuaccagauccuggcgaucuacuccaccgucgccagcagccuggugcucguggucucccugggggccaucagcuucuggaugugcuccaacggcagccugcagugccggaucugcaucuga

SEQ ID NO: 70142 - RNA, 1683 nt, Artificial Sequence
  derived and/or modified CDS sequence (opt1) from hemagglutinin__InfluenzaA__ADO21015
auggagguggucagccugaucaccauccuccugcuggugaccguguccaacgccgacaagaucugcaucggcuaccagagcacgaacuccaccgagaccgucgacacccucacggagaacaacgugcccguggcccacgcgaaggagcugcugcacaccgagcacaacgggaugcucugcgccaccaaccugggccacccgcugauccucgacacgugcaccaucgaggggcugaucuacggcaaccccagcugcgaccugcuccucgggggccgcgagugguccuacaucgucgagcggcccagcgccgugaacggccugugcuaccccgggaacguggagaaccuggaggagcugcgcucccuguucagcuccgccagcuccuaccagcggauccagaucuucccgggcaccaucuggaacgucagcuacgggggcaccuccaaggccugcagcgacuccuucuacaagagcaugcgcuggcucacccagaagaacaacgcguaccccauccaggacgcccaguacacgaacaaccgggggaagaacauccuguucauguggggcaucaaccacccgcccaccgacaccacccagacgaaccuguacacccgcaccgacaccacgaccuccguggccaccgaggacaucaaccggaccuucaagccccucaucggcccccgcccccuggugaacgggcagcagggccggaucgacuacuacuggagcguccugaagcccgggcagacgcuccgcgugcgguccaacggcaaccugaucgccccgugguacggccacauccugagcggggagagccacggccgcauccucaagaccgaccugaacuccgggaacugcgugguccagugccagaccgagcggggcgggcugaacaccacgcuccccuuccacaacgugagcaaguacgcguucggcaacugccccaaguacgugggcgucaagucccugaagcuggccguggggcuccgcaacgugcccgcccggagcucccgcggccuguucggggccaucgccggcuucaucgagggcggguggagcggccuggucgcggggugguacggcuuccagcacuccaacgaccagggggugggcauggccgccgaccgggacagcacccagaaggccaucgacaagaucaccuccaaggugaacaacaucgucgacaagaugaacaagcaguacgagaucaucgaccacgaguucagcgagguggagacccgccucaacaugaucaacaacaagaucgacgaccagauccaggacaucugggccuacaacgcggagcugcugguccuccuggagaaccagaagacgcuggacgagcacgacgccaacgugaacaaccucuacaacaaggugaagcgggcccugggguccaacgccgucgaggacggcaagggcugcuucgagcuguaccacaagugcgacgaccagugcauggagaccauccgcaacgggaccuacaaccggcgcaaguacaaggaggagagccgccucgagcggcagaagaucgagggcgugaagcuggaguccgaggggaccuacaagauccugacgaucuacagcaccguggccuccagccucgucaucgcgaugggcuucgccgccuuccuguucugggccauguccaacggcagcugccgcugcaacaucugcaucuga

SEQ ID NO: 70143 - RNA, 1683 nt, Artificial Sequence
  derived and/or modified CDS sequence (opt1) from hemagglutinin__InfluenzaA__ADO21026
auggagguggucagccugaucaccauccuccugcuggugaccguguccaacgccgacaagaucugcaucggcuaccagagcacgaacuccaccgagaccgucgacacccucacggagaacaacgugcccguggcccacgcgaaggagcugcugcacaccgagcacaacgggaugcucugcgccaccaaccugggccacccgcugauccucgacacgugcaccaucgaggggcugaucuacggcaaccccagcugcgaccugcuccucgggggccgcgagugguccuacaucgucgagcggcccagcgccgugaacggccugugcuaccccgggaacguggagaaccuggaggagcugcgcucccuguucagcuccgccagcuccuaccagcggauccagaucuucccgggcaccaucuggaacgucagcuacgggggcaccuccaaggccugcagcgacuccuucuacaagagcaugcgcuggcucacccagaagaacaacgcguaccccauccaggacgcccaguacacgaacaaccgggggaagaacauccuguucauguggggcaucaaccacccgcccaccgacaccacccagacgaaccuguacacccgcaccgacaccacgaccuccguggccaccgaggacaucaaccggaccuucaacccccucaucggcccccgcccccuggugaacgggcagcagggccggaucgacuacuacuggagcguccugaagcccgggcagacgcuccgcgugcgguccaacggcaaccugaucgccccgugguacggccacauccugagcggggagagccacggccgcauccucaagaccgaccugaacuccgggaacugcgugguccagugccagaccgagcggggcgggcugaacaccacgcuccccuuccacaacgugagcaaguacgcguucggcaacugccccaaguacgugggcgucaagucccugaagcuggccguggggcuccgcaacgugcccgcccggagcucccgcggccuguucggggccaucgccggcuucaucgagggcggguggagcggccuggucgcggggugguacggcuuccagcacuccaacgaccagggggugggcauggccgccgaccgggacagcacccagaaggccaucgacaagaucaccuccaaggugaacaacaucgucgacaagaugaacaagcaguacgagaucaucgaccacgaguucagcgagguggagacccgccucaacaucaucaacaacaagaucgacgaccagauccaggacaucugggccuacaacgcggagcugcugguccuccuggagaaccagaagacgcuggacgagcacgacgccaacgugaacaaccucuacaacaaggugaagcgggcccugggguccaacgccgucgaggacggcaagggcugcuucgagcuguaccacaagugcgacgaccagugcauggagaccauccgcaacgggaccuacaaccggcgcaaguacaaggaggagagccgccucgagcggcagaagaucgagggcgugaagcuggaguccgaggggaccuacaagauccugacgaucuacagcaccguggccuccagccucgucaucgcgaugggcuucgccgccuuccuguucugggccauguccaacggcagcugccgcugcaacaucugcaucuga

SEQ ID NO: 70144 - RNA, 1683 nt, Artificial Sequence
  derived and/or modified CDS sequence (opt1) from hemagglutinin__InfluenzaA__ADO21037
auggagguggucagccugaucaccauccuccugcuggugaccguguccaacgccgacaagaucugcaucggcuaccagagcacgaacuccaccgagaccgucgacacccucacggagaacaacgugcccguggcccacgcgaaggagcugcugcacaccgagcacaacgggaugcucugcgccaccaaccugggccacccgcugauccucgacacgugcaccaucgaggggcugaucuacggcaaccccagcugcgaccugcuccucgggggccgcgagugguccuacaucgucgagcggcccagcgccgugaacggccugugcuaccccgggaacguggagaaccuggaggagcugcgcucccuguucagcuccgccagcuccuaccagcggauccagaucuucccgggcaccaucuggaacgucagcuacgggggcaccuccaaggccugcagcgacuccuucuacaagagcaugcgcuggcucacccagaagaacaacgcguaccccauccaggacgcccaguacacgaacaaccgggggaagaacauccuguucauguggggcaucaaccacccgcccaccgacaccacccagacgaaccuguacacccgcaccgacaccacgaccuccguggccaccgaggacaucaaccggaccuucaagcccuacaucggcccccgcccccucgugaacgggcagcagggccggaucgacuacuacuggagcguccugaagcccgggcagacgcugcgcgugcgguccaacggcaaccucaucgccccgugguacggccacauccugagcggggagagccacggccgcauccugaagaccgaccucaacuccgggaacugcgugguccagugccagaccgagcggggcgggcugaacaccacgcugcccuuccacaacgugagcaaguacgcguucggcaacugccccaaguacgugggcgucaagucccucaagcuggccguggggcugcgcaacgugcccgcccggagcucccgcggccucuucggggccaucgccggcuucaucgagggcggguggagcggccuggucgcggggugguacggcuuccagcacuccaacgaccagggggugggcauggccgccgaccgggaccugacccagaaggccaucgacaagaucaccagcaaggugaacaacaucgucgacaagaugaacaagcaguacgagaucaucgaccacgaguucuccgagguggagacccgccucaacaugaucaacaacaagaucgacgaccagauccaggacaucugggccuacaacgcggagcugcugguccuccuggagaaccagaagacgcuggacgagcacgacgccaacgugaacaaccucuacaacaaggugaagcgggcccuggggagcaacgccgucgaggacggcaagggcugcuucgagcuguaccacaagugcgacgaccagugcauggagaccauccgcaacgggaccuacaaccggcgcaaguacaaggaggagucccgccucgagcggcagaagaucgagggcgugaagcuggagagcgaggggaccuacaagauccugacgaucuacuccaccguggccagcucccucgucaucgcgaugggcuucgccgccuuccuguucugggccaugagcaacggcuccugccgcugcaacaucugcaucuga

SEQ ID NO: 70145 - RNA, 1683 nt, Artificial Sequence
  derived and/or modified CDS sequence (opt1) from hemagglutinin__InfluenzaA__ADO21048
auggagguggucagccugaucaccauccuccugcuggugaccguguccaacgccgacaagaucugcaucggcuaccagagcacgaacuccaccgagaccgucgacacccucacggagaacaacgugcccguggcccacgcgaaggagcugcugcacaccgagcacaacgggaugcucugcgccaccaaccugggccacccgcugauccucgacacgugcaccaucgaggggcugaucuacggcaaccccagcugcgaccugcuccucgggggccgcgagugguccuacaucgucgagcggcccagcgccgugaacggccugugcuaccccgggaacguggagaaccuggaggagcugcgcucccuguucagcuccgccagcuccuaccagcggauccagaucuucccgggcaccaucuggaacgucagcuacgggggcaccuccaaggccugcagcgacuccuucuacaagagcaugcgcuggcucacccagaagaacaacgcguaccccauccaggacgcccaguacacgaacaaccgggggaagaacauccacuucauguggggcaucaaccacccgcccaccgacaccacccagacgaaccuguacacccgcaccgacaccacgaccuccguggccaccgaggacaucaaccggaccuucaagccccugaucggcccccgcccccucgugaacgggcagcagggccggaucgacuacuacuggagcguccugaagcccgggcagacgcugcgcgugcgguccaacggcaaccucaucgccccgugguacggccacauccugagcggggagagccacggccgcauccugaagaccgaccucaacuccgggaacugcgugguccagugccagaccgagcggggcgggcugaacaccacgcugcccuuccacaacgugagcaaguacgcguucggcaacugccccaaguacgugggcgucaagucccucaagcuggccguggggcugcgcaacgugcccgcccggagcucccgcggccucuucggggccaucgccggcuucaucgagggcggguggagcggccuggucgcggggugguacggcuuccagcacuccaacgaccagggggugggcauggccgccgaccgggugagcacccagaaggccaucgacaagaucaccuccaaggucaacaacaucguggacaagaugaacaagcaguacgagaucaucgaccacgaguucagcgaggucgagacccgccugaacaugaucaacaacaagaucgacgaccagauccaggacaucugggccuacaacgcggagcuccuggugcugcucgagaaccagaagacgcuggacgagcacgacgccaacgugaacaaccuguacaacaaggucaagcgggcccucggguccaacgccguggaggacggcaagggcugcuucgagcuguaccacaagugcgacgaccagugcauggagaccauccgcaacgggaccuacaaccggcgcaaguacaaggaggagagccgccuggagcggcagaagaucgagggcgugaagcucgaguccgaggggaccuacaagauccugacgaucuacagcaccgucgccuccagccuggugaucgcgaugggcuucgccgccuuccucuucugggccauguccaacggcagcugccgcugcaacaucugcaucuga

SEQ ID NO: 70146 - RNA, 1701 nt, Artificial Sequence
  derived and/or modified CDS sequence (opt1) from hemagglutinin__InfluenzaA__ADO25092
augaaggccauccuggugguccuccuguacaccuucgccaccgcgaacgccgacacgcugugcaucggcuaccacgccaacaacagcaccgacaccguggacaccgugcucgagaagaacgucacggugacccacuccgugaaccugcuggaggacaagcacaacgggaagcucugcaagcugcgcggcgucgcgccccugcaccucgggaagugcaacaucgccggcuggauccuggggaacccggagugcgagagccuguccaccgccagcuccuggagcuacaucguggagaccuccagcuccgacaacggcacgugcuaccccggcgacuucaucgacuacgaggagcuccgggagcagcugagcuccgugagcuccuucgagcgcuucgagaucuuccccaagaccagcuccuggcccaaccacgacagcaacaagggggucaccgccgccugcccgcacgccggcgcgaaguccuucuacaagaaccugaucuggcucgugaagaaggggaacagcuaccccaagcuguccaacagcuacaucaacgacaagggcaaggaggugcugguccucugggggauccaccaccccagcaccuccgccgaccagcagagccuguaccagaacgccgacgccuacguguucgugggcacgucccgguacagcaagaaguucaagcccgagaucgccauccgcccgaagguccgggaccaggagggccgcaugaacuacuacuggacccugguggagcccggggacaagaucaccuucgaggcgaccggcaaccucguggucccccgguacgccuucgccauggagcgcaacgccggguccggcaucaucaucagcgacacgcccgcccacgacugcaacacgaccugccagaccccgaagggcgcgaucaacaccucccugcccuuccagaacauccaccccaucaccaucgggaagugccccaaguacgucaagagcaccaagcugcggcucgccaccggccugcgcaacgugccguccauccagagccgggggcuguucggcgccaucgccggguucaucgagggcggcuggacggggaugguggacggcugguacggguaccaccaccagaacgagcagggcuccggguacgccgcggaccucaagagcacccagaacgccaucgacgagaucaccaacaaggugaacuccgugaucgagaagaugaacacccaguucacggccgucggcaaggaguucaaccaccuggagaagcgcaucgagaaccugaacaagaagguggacgacggcuuccucgacaucuggaccuacaacgccgagcugcugguccuccuggagaacgagcggacccuggacuaccacgacagcaacgugaagaaccucuacgagaaggugcgcucccagcugaagaacaacgccaaggagaucgggaacggcugcuucgaguucuaccacaagugcgacaacacgugcauggagagcgucaagaacgggaccuacgacuaccccaaguacuccgaggaggcgaagcugaaccgggaggagaucgacggcgugaagcucgagagcacccgcaucuaccagauccuggccaucuacuccaccguggccagcagccugguccucguggugucccugggggccaucagcuucuggaugugcuccaacggcagccugcagugccggaucugcaucuga

SEQ ID NO: 70147 - RNA, 1701 nt, Artificial Sequence; identical to SEQ ID NO: 68565
  derived and/or modified CDS sequence (opt1) from hemagglutinin__InfluenzaA__ADO25112

SEQ ID NO: 70148 - RNA, 1701 nt, Artificial Sequence; identical to SEQ ID NO: 68565
  derived and/or modified CDS sequence (opt1) from hemagglutinin__InfluenzaA__ADO25122

SEQ ID NO: 70149 - RNA, 1701 nt, Artificial Sequence
  derived and/or modified CDS sequence (opt1) from hemagglutinin__InfluenzaA__ADO25132
augaacgccauccuggugguccuccuguacaccuucgccaccgcgaacgccgacacgcugugcaucggcuaccacgccaacaacagcaccgacaccguggacacccuccuggagaagaacgugacggucacccacuccgugaaccugcucgaggacaagcacaacgggaagcugugcaagcugcgcggcguggcgccccuccaccuggggaagugcaacaucgccggcuggauccuggggaacccggagugcgagagccucuccaccgccagcuccuggagcuacaucgucgagaccuccagcuccgacaacggcacgugcuaccccggcgacuucaucgacuacgaggagcugcgggagcagcugagcuccgugagcuccuucgagcgcuucgagaucuuccccaagaccagcuccuggcccaaccacgacagcaacaagggggugaccgccgccugcccgcacgccggcgcgaaguccuucuacaagaaccucaucuggcuggucaagaaggggaacagcuaccccaagcuguccaagagcuacaucaacgacaagggcaaggaggugcucgugcugugggggauccaccaccccagcaccuccgccgaccagcagagccuguaccagaacgccgacgccuacgucuucgugggcacgucccgguacagcaagaaguucaagcccgagaucgccauccgcccgaaggugcgggaccaggagggccgcaugaacuacuacuggacccucgucgagcccggggacaagaucaccuucgaggcgaccggcaaccugguggugccccgguacgccuucgccauggagcgcaacgccggguccgacaucaucaucagcgacacgcccguccacgacugcaacacgaccugccagaccccgaagggcgccaucaacaccucccugcccuuccagaacauccaccccaucaccaucggcaagugccccaaguacgucaagagcaccaagcuccggcuggcgaccgggcugcgcaacgugccguccauccagagccggggccucuucggggccaucgccggcuucaucgagggcggguggacgggcaugguggacgggugguacggcuaccaccaccagaacgagcagggguccggcuacgccgccgaccucaagagcacccagaacgcgaucgacgagaucaccaacaagaucaacuccgugaucgagaagaugaacacccaguucacggccguggggaaggaguucaaccaccuggagaagcgcaucgagaaccugaacaagaaggucgacgacggcuuccuggacaucuggaccuacaacgccgagcugcucgugcugcuggagaacgagcggacccucgacuaccacgacagcaacgucaagaaccuguacgagaaggugcgcucccagcugaagaacaacgccaaggagaucggcaacgggugcuucgaguucuaccacaagugcgacaacacgugcauggagagcgugaagaacggcaccuacgacuaccccaaguacuccgaggaggccaagcucaaccgggaggagaucgacggggucaagcuggagagcacccgcaucuaccagauccuggcgaucuacuccaccguggccagcagccucgugcuggucgugucccugggcgccaucagcuucuggaugugcuccaacgggagccuccagugccggaucugcaucuga

SEQ ID NO: 70150 - RNA, 1701 nt, Artificial Sequence; identical to SEQ ID NO: 68306
  derived and/or modified CDS sequence (opt1) from hemagglutinin__InfluenzaA__ADO25142

SEQ ID NO: 70151 - RNA, 1701 nt, Artificial Sequence
  derived and/or modified CDS sequence (opt1) from hemagglutinin__InfluenzaA__ADO25152
augaaggccauccuggugguccuccuguacaccuucgccgcggccaacgccgacacccugugcaucggcuaccacgccaacaacagcacggacaccguggacaccgugcucgagaagaacgucaccgugacgcacuccgugaaccugcuggaggacaagcacaacgggaagcucugcaagcugcgcggcgucgcgccccugcaccucgggaagugcaacaucgccggcuggauccuggggaacccggagugcgagagccuguccaccgccagcuccuggagcuacaucguggagaccuccagcuccgacaacgggaccugcuaccccggcgacuucaucaacuacgaggagcuccgggagcagcugagcuccgugagccuguucgagcgcuucgagaucuuccccaagacguccagcuggcccaaccacgacuccaacaagggggucaccgccgccugcccgcacgcgggcgccaagagcuucuacaagaaccucaucuggcuggugaagaaggggaacuccuaccccaagcugagcaaguccuacaucaacgacaagggcaaggaggugcucguccugugggggauccaccaccccagcaccagcgccgaccagcagucccuguaccagaacgccgacgccuacguguucgugggcaccagccgguacuccaagaaguucaagcccgagaucgcgauccgcccgaagguccgggaccaggagggccgcaugaacuacuacuggacgcucguggagcccggggacaagaucaccuucgaggccaccggcaaccugguggucccccgguacgccuucgccauggagcgcaacgccgggagcggcaucaucaucuccgacacccccgugcacgacugcaacacgaccugccagaccccgaagggcgcgaucaacaccagccugcccuuccagaacauccaccccaucacgaucgggaagugccccaaguacgugaaguccaccaagcuccggcuggccaccggccugcgcaacgucccgagcauccagucccggggccucuucggcgccaucgccggguucaucgagggcggcuggaccgggaugguggacggcugguacggguaccaccaccagaacgagcagggcagcggguacgccgcggaccugaaguccacgcagaacgccaucgacaagaucaccaacaaggugaacagcgucaucgagaagaugaacacccaguucaccgccgugggcaaggaguucaaccaccuggagaagcgcaucgagaaccucaacaagaaggucgacgacggcuuccuggacaucuggacguacaacgccgagcugcucgugcugcuggagaacgagcggacccucgacuaccacgacuccaacgugaagaaccuguacgagaagguccgcagccagcugaagaacaacgccaaggagaucgggaacggcugcuucgaguucuaccacaagugcgacaacacgugcauggaguccgugaagaacgggaccuacgacuaccccaaguacagcgaggaggcgaagcucaaccgggaggagaucgacggcgugaagcuggaguccacccgcaucuaccagauccuggccaucuacagcaccgucgccuccagccucgugcugguggucagccugggggccaucuccuucuggaugugcagcaacggcucccuccagugccggaucugcaucuga

SEQ ID NO: 70152 - RNA, 1701 nt, Artificial Sequence; identical to SEQ ID NO: 68245
  derived and/or modified CDS sequence (opt1) from hemagglutinin__InfluenzaA__ADO25162

SEQ ID NO: 70153 - RNA, 1701 nt, Artificial Sequence; identical to SEQ ID NO: 68245
  derived and/or modified CDS sequence (opt1) from hemagglutinin__InfluenzaA__ADO25172

SEQ ID NO: 70154 - RNA, 1701 nt, Artificial Sequence; identical to SEQ ID NO: 68245
  derived and/or modified CDS sequence (opt1) from hemagglutinin__InfluenzaA__ADO25182

SEQ ID NO: 70155 - RNA, 1701 nt, Artificial Sequence; identical to SEQ ID NO: 66693
  derived and/or modified CDS sequence (opt1) from hemagglutinin__InfluenzaA__ADO25192

SEQ ID NO: 70156 - RNA, 1701 nt, Artificial Sequence; identical to SEQ ID NO: 66693
  derived and/or modified CDS sequence (opt1) from hemagglutinin__InfluenzaA__ADO25202

SEQ ID NO: 70157 - RNA, 1701 nt, Artificial Sequence
  derived and/or modified CDS sequence (opt1) from hemagglutinin__InfluenzaA__ADO25212
augaaggccauccuggugguccuccuguacaccuucgccaccgcgaacgccgacacgcugugcaucggcuaccacgccaacaacagcaccgacaccguggacaccgugcucgagaagaacgucacggugacccacuccgugaaccugcuggaggacaagcacaacgggaagcucugcaagcugcgcggcgucgcgccccugcaccucgggaagugcaacaucgccggcuggauccuggggaacccggagugcgagagccuguccaccgccagcuccuggagcuacaucguggagaccuccagcuccgacaacggcacgugcuaccccggcgacuucaucgacuacgaggagcuccgggagcagcugagcuccgugagcuccuucgagcgcuucgagaucuuccccaagaccagcuccuggcccaaccacgacagcaacaagggggucaccgccgccugcccgcacgccggcgcgaaguccuucuacaagaaccugaucuggcucgugaagaaggggaacagcuaccccaagcuguccaagagcuacaucaacgacaagcggaaggaggugcugguccucuggggcauccaccaccccagcaccuccgccgaccagcagagccuguaccagaacgccgacuccuacguguucguggggacgagccgcuacuccaagaaguucaagcccgagaucgccauccggccgaagguccgcgaccaggagggccggaugaacuacuacuggacccugguggagcccggcgacaagaucaccuucgaggccaccgggaaccucguggucccccgcuacgcguucgccauggagcggaacgccggcagcgggaucaucaucuccgacacgcccgugcacgacugcaacacgaccugccagaccccggagggcgccaucaacaccagccugcccuuccagaacauccaccccaucaccaucggcaagugccccaaguacgugaaguccaccaagcugcgccucgccaccgggcugcggaacgucccgagcauccagucccgcggccuguucggggcgaucgccggcuucaucgagggcggguggacgggcaugguggacgggugguacggcuaccaccaccagaacgagcaggggagcggcuacgccgccgaccucaaguccacccagaacgccaucgacgagaucaccaacaaggugaacagcgucaucgagaagaugaacacccaguucacggcgguggggaaggaguucaaccaccuggagaagcggaucgagaaccugaacaagaaggucgacgacggcuuccucgacaucuggaccuacaacgccgagcugcuggugcuccuggagaacgagcgcacccuggacuaccacgacuccaacgugaagaaccucuacgagaagguccggagccagcugaagaacaacgccaaggagaucggcaacgggugcuucgaguucuaccacaagugcgacaacacgugcauggaguccgugaagaacggcaccuacgacuaccccaaguacagcgaggaggccaagcugaaccgcgaggagaucgacggggugaagcucgaguccacccggaucuaccagauccuggccaucuacagcaccgucgcgagcucccuggugcucguggucagccugggcgccaucuccuucuggaugugcagcaacgggucccugcagugccgcaucugcaucuga

SEQ ID NO: 70158 - RNA, 1701 nt, Artificial Sequence
  derived and/or modified CDS sequence (opt1) from hemagglutinin__InfluenzaA__ADO25222
augaaggccauccuggugguccuccuguacaccuucgccaccgcgaacgccgacacgcugugcaucggcuaccacgccaacaacagcaccgacaccguggacaccgugcucgagaagaacgucacggugacccacuccgugaaccugcuggaggacaagcacaacgggaagcucugcaagcugcgcggcgucgcgccccugcaccucgggaagugcaacaucgccggcuggauccuggggaacccggagugcgagagccuguccaccgccagcuccuggagcuacaucguggagaccuccagcuccgacaacggcacgugcuaccccggcgacuucaucgacuacgaggagcuccgggagcagcugagcuccgugagcuccuucgagcgcuucgagaucuuccccaagaccagcuccuggcccaaccacgacagcaacaagggggucaccgccgccugcccgcacgccggcgcgaaguccuucuacaagaaccugaucuggcucgugaagaaggggaacagcuaccccaagcugaacaaguccuacaucaacgacaagggcaaggaggugcugguccucugggggauccaccaccccagcaccagcgccgaccagcagucccuguaccagaacgccgacgccuacguguucgugggcacgagccgguacuccaagaaguucaagcccgagaucgccauccgcccgaagguccgggaccaggagggccgcaugaacuacuacuggacccugguggagcccggggacaagaucaccuucgaggcgaccggcaaccucguggucccccgguacgccuucgccauggagcgcaacgccgggagcggcaucaucaucuccgacacgcccgugcacgacugcaacacgaccugccagaccccgaagggcgccaucaacaccagccugcccuuccagaacauccaccccaucaccaucgggaagugccccaaguacgugaaguccaccaagcugcggcucgcgaccggccugcgcaacgucccgagcauccagucccgggggcuguucggcgccaucgccggguucaucgagggcggcuggacggggaugguggacggcugguacggguaccaccaccagaacgagcagggcagcggguacgccgccgaccucaaguccacccagaacgcgaucgacaagaucaccaacaaggugaacagcgucaucgagaagaugaacacccaguucacggccgugggcaaggaguucaaccaccuggagaagcgcaucgagaaccugaacaagaaggucgacgacggcuuccucgacaucuggaccuacaacgccgagcugcuggugcuccuggagaacgagcggacccuggacuaccacgacuccaacgugaagaaccucuacgagaagguccgcagccagcugaagaacaacgccaaggagaucgggaacggcugcuucgaguucuaccacaagugcgacaacacgugcauggaguccgugaagaacgggaccuacgacuaccccaaguacagcgaggaggccaagcugaaccgggaggagaucgacggcgugaagcucgaguccacccgcaucuaccagauccuggcgaucuacagcaccgucgccuccagccuggugcucguggucagccugggggccaucuccuucuggaugugcagcaacggcucccugcagugccggaucugcaucuga

SEQ ID NO: 70159 - RNA, 1701 nt, Artificial Sequence; identical to SEQ ID NO: 68306
  derived and/or modified CDS sequence (opt1) from hemagglutinin__InfluenzaA__ADO25232

SEQ ID NO: 70160 - RNA, 1701 nt, Artificial Sequence; identical to SEQ ID NO: 68245
  derived and/or modified CDS sequence (opt1) from hemagglutinin__InfluenzaA__ADO25242

SEQ ID NO: 70161 - RNA, 1701 nt, Artificial Sequence; identical to SEQ ID NO: 68323
  derived and/or modified CDS sequence (opt1) from hemagglutinin__InfluenzaA__ADO25252

SEQ ID NO: 70162 - RNA, 1701 nt, Artificial Sequence; identical to SEQ ID NO: 68565
  derived and/or modified CDS sequence (opt1) from hemagglutinin__InfluenzaA__ADO25262

SEQ ID NO: 70163 - RNA, 1701 nt, Artificial Sequence
  derived and/or modified CDS sequence (opt1) from hemagglutinin__InfluenzaA__ADO25272
augaaggccauccuggugguccuccuguacaccuucgccaccgcgaacgccgacacgcugugcaucggcuaccacgccaacaacagcaccgacaccguggacaccgugcucgagaagaacgucacggugacccacuccgugaaccugcuggaggacaagcacaacgggaagcucugcaagcugcgcggcgucgcgccccugcaccucgggaagugcaacaucgccggcuggauccuggggaacccggagugcgagagccuguccaccgccagcuccuggagcuacaucguggagaccuccagcuccgacaacggcacgugcuaccccggcgacuucaucgacuacgaggagcuccgggagcagcugagcuccgugagcuccuucgagcgcuucgagauguuccccaagaccagcuccuggcccaaccacgacagcaacaagggggucaccgccgccugcccgcacgccggcgugaaguccuucuacaagaaccugaucuggcucgugaagaaggggaacagcuaccccaagcuguccaagagcuacaucaacgacaagggcaaggagguccuggugcucugggggauccaccaccccagcaccuccgcggaccagcagagccuguaccagaacgccgacgccuacguguucgucggcacgucccgguacagcaagaaguucaagcccgagaucgccauccgcccgaaggugcgggaccaggagggccgcaugaacuacuacuggacccugguggagcccggggacaagaucaccuucgaggccaccggcaaccucgucgugccccgguacgcguucgccauggagcgcaacgccggguccggcaucaucaucagcgacacgcccgugcacgacugcaacacgaccugccagaccccgaagggcgccaucaacaccucccugcccuuccagaacauccaccccaucaccaucgggaagugccccaaguacgucaagagcaccaagcugcggcucgccaccggccugcgcaacgugccguccauccagagccgggggcuguucggcgcgaucgccggguucaucgagggcggcuggacggggaugguggacggcugguacggguaccaccaccagaacgagcagggcuccggguacgccgccgaccucaagagcacccagaacgccaucgacgagaucaccaacaaggucaacuccgugaucgagaagaugaacacccaguucacggcggucggcaaggaguucaaccaccuggagaagcgcaucgagaaccugaacaagaagguggacgacggcuuccucgacaucuggaccuacaacgccgagcugcuggugcuccuggagaacgagcggacccuggacuaccacgacagcaacgucaagaaccucuacgagaaggugcgcucccagcugaagaacaacgccaaggagaucgggaacggcugcuucgaguucuaccacaagugcgacaacacgugcauggagagcgugaagaacgggaccuacgacuaccccaaguacuccgaggaggccaagcugaaccgggaggagaucgacggcgucaagcucgagagcacccgcaucuaccagauccuggccaucuacuccaccguggcgagcagccuggugcucgucgugucccugggggccaucagcuucuggaugugcuccaacggcagccugcagugccggaucugcaucuga

SEQ ID NO: 70164 - RNA, 1701 nt, Artificial Sequence; identical to SEQ ID NO: 68306
  derived and/or modified CDS sequence (opt1) from hemagglutinin__InfluenzaA__ADO25282

SEQ ID NO: 70165 - RNA, 1698 nt, Artificial Sequence; identical to SEQ ID NO: 66512
  derived and/or modified CDS sequence (opt1) from hemagglutinin__InfluenzaA__ADO27622

SEQ ID NO: 70166 - RNA, 1701 nt, Artificial Sequence; identical to SEQ ID NO: 66693
  derived and/or modified CDS sequence (opt1) from hemagglutinin__InfluenzaA__ADO29887

SEQ ID NO: 70167 - RNA, 1701 nt, Artificial Sequence
  derived and/or modified CDS sequence (opt1) from hemagglutinin__InfluenzaA__ADO29888
augaaggccauccuggugguccuccuguacaccuucgccaccgcgaacgccgacacgcugugcaucggcuaccacgccaacaacagcaccgacaccguggacaccgugcucgagaagaacgucacggugacccacuccgugaaccugcuggaggacaagcacaacgggaagcucugccgccugcggggcgucgcgccccugcaccucgggaagugcaacaucgccggcuggauccuggggaacccggagugcgagagccuguccaccgcgagcuccuggagcuacaucguggagaccuccagcuccgacaacggcacgugcuaccccggcgacuucaucgacuacgaggagcuccgcgagcagcugagcuccgugagcuccuucgagcgguucgagaucuuccccaagaccagcuccuggcccaaccacgacccgaacaagggggucaccgccgccugcccccacgccggcgccaagagcuucuacaagaaccugaucuggcucgugaagaaggggaacuccuaccccaagcugagcaaguccuacaucaacgacaagggcaaggaggugcugguccucugggggauccaccaccccagcaccagcgccgaccagcagucccuguaccagaacgccgacgccuacguguucgugggcacgagccgcuacuccaagaaguucaagccggagaucgccauccggcccaagguccgcgaccaggagggccggaugaacuacuacuggacccugguggagcccggggacaagaucaccuucgaggcgaccggcaaccucguggucccccgcuacgccuucgccauggagcggaacgccgggagcggcaucaucaucuccgacacgccggugcacgacugcaacacgaccugccagacccccaagggcgccaucaacaccagccugcccuuccagaacauccaccccaucaccaucgggaagugcccgaaguacgugaaguccaccaagcugcgccucgcgaccggccugcggaacguccccagcauccagucccgcgggcuguucggcgccaucgccggguucaucgagggcggcuggacggggaugguggacggcugguacggguaccaccaccagaacgagcagggcagcggguacgccgccgaccucaaguccacccagaacgcgaucgacgagaucaccaacaaggugaacagcgucaucgagaagaugaacacccaguucacggccgugggcaaggaguucaaccaccuggagaagcggaucgagaaccugaacaagaaggucgacgacggcuuccucgacaucuggaccuacaacgccgagcugcuggugcuccuggagaacgagcgcacccuggacuaccacgacuccaacgugaagaaccucuacgagaagguccggagccagcugaagaacaacgccaaggagaucgggaacggcugcuucgaguucuaccacaagugcgacaacacgugcauggaguccgugaagaacgggaccuacgacuaccccaaguacagcgaggaggccaagcugaaccgcgaggagaucgacggcgugaagcucgaguccacccggaucuaccagauccuggcgaucuacagcaccgucgccuccagccuggugcucguggucagccugggggccaucuccuucuggaugugcagcaacggcucccugcagugccgcaucugcaucuga

SEQ ID NO: 70168 - RNA, 1701 nt, Artificial Sequence
  derived and/or modified CDS sequence (opt1) from hemagglutinin__InfluenzaA__ADO29889
augaaggccauccuggugguccuccuguacaccuucgccaccgcgaacgccgacauccugugcaucggcuaccacgccaacaacagcacggacaccguggacaccgugcucgagaagaacgucaccgugacgcacuccgugaaccugcuggaggacaagcacaacgggaagcucugcaagcugcgcggcgucgcgccccugcaccucgggaagugcaacaucgccggcuggauccuggggaacccggagugcgagagcuucuccaccagcuccagcugguccuacaucguggagaccagcuccagcgacaacgggaccugcuaccccggcgacuucaucgacuacgaggagcugcgggagcagcucuccagcguguccagcuucgagcgcuucgagaucuuccccaagacguccagcuggcccaaccacgacuccaacaagggcgucaccgccgccugcccgcacgccggcgccaagagcuucuacaagaaccugaucuggcuggugaagaaggggaacuccuaccccaagcucagcaagagcuacaucaacgacaagggcaaggaggugcugguccugugggggauccaccaccccuccaccagcgcggaccagcagucccucuaccagaacgccgacgccuacguguucgugggcaccagccgguacuccaagaaguucaagcccgagaucgccauccgcccgaagguccgggaccaggagggccgcaugaacuacuacuggacgcugguggagcccggggacaagaucaccuucgaggccaccggcaaccugguggucccccgguacgcguucgccauggagcgcaacgccgggagcggcaucaucaucuccgacacccccgugcacgacugcaacacgaccugccagaccccgaagggcgccaucaacaccagccuccccuuccagaacauccaccccaucacgaucgggaagugccccaaguacgugaaguccaccaagcugcggcuggccaccggccuccgcaacgucccgagcauccagucccgggggcuguucggcgcgaucgccggguucaucgagggcggcuggaccgggaugguggacggcugguacggguaccaccaccagaacgagcagggcagcggguacgccgccgaccugaaguccacgcagaacgccaucgacgagaucaccaacaaggugaacagcgucaucgagaagaugaacacccaguucaccgcggugggcaaggaguucaaccaccucgagaagcgcaucgagaaccugaacaagaaggucgacgacggcuuccuggacaucuggacguacaacgccgagcuccuggugcugcucgagaacgagcggacccuggacuaccacgacuccaacgugaagaaccuguacgagaagguccgcagccagcucaagaacaacgccaaggagaucgggaacggcugcuucgaguucuaccacaagugcgacaacacgugcauggaguccgugaagaacgggaccuacgacuaccccaaguacagcgaggaggccaagcugaaccgggaggagaucgacggcgugaagcuggaguccacccgcaucuaccagauccucgccaucuacagcaccgucgcgagcucccuggugcugguggucagccucggggccaucuccuucuggaugugcagcaacggcucccugcagugccggaucugcaucuga

SEQ ID NO: 70169 - RNA, 1701 nt, Artificial Sequence
  derived and/or modified CDS sequence (opt1) from hemagglutinin__InfluenzaA__ADO29890
augaaggccauccuggugguccuccuguacaccuucgccaccgcgaaggccgacacgcugugcaucggcuaccacgccaacaacagcgccgacaccguggacaccgugcucgagaagaacgucaccgugacgcacuccgugaaccugcuggaggacaagcacaacgggaagcucugcaagcugcgcggcgucgcgccccugcaccucgggaagugcaacaucgccggcuggauccuggggaacccggagugcgagagccuguccaccgccagcuccuggagcuacaucguggagaccuccagcuccgacaacgggaccugcuaccccggcgacuucaucgacuacgaggagcuccgggagcagcugagcuccgugagcuccuucgagcgcuucgagaucuuccccaagacgagcuccuggcccaaccacgacccgaacaagggcgucaccgccgccugcccccacgcgggcgccaagagcuucuacaagaaccugaucuggcucgugaagaaggggaacuccuaccccaagcugagcaaguccuacaucaacgacaagggcaaggaggugcugguccucugggggauccaccaccccagcaccagcguggaccagcagucccuguaccagaacgccgacgccuacguguucgucggcaccagccgguacuccaagaaguucaagccggagaucgccauccgccccaaggugcgggaccaggagggccgcaugaacuacuacuggacgcugguggagcccggggacaagaucaccuucgaggcgaccggcaaccucgucgugccccgguacgccuucgccauggagcgcaacgccgggagcggcaucaucaucuccgacaccccggugcacgacugcaacacgaccugccagacccccaagggcgccaucaacaccagccugcccuuccagaacauccaccccaucacgaucgggaagugcccgaaguacgucaaguccaccaagcugcggcucgcgaccggccugcgcaacgugcccagcauccagucccgggggcuguucggcgccaucgccggguucaucgagggcggcuggaccgggaugguggacggcugguacggguaccaccaccagaacgagcagggcagcggguacgccgccgaccucaaguccacgcagaacgcgaucgacgagaucaccaacaaggucaacagcgugaucgagaagaugaacacccaguucaccgccgucggcaaggaguucaaccaccuggagaagcgcaucgagaaccugaacaagaagguggacgacggcuuccucgacaucuggacguacaacgccgagcugcuggugcuccuggagaacgagcggacccuggacuaccacgacuccaacgucaagaaccucuacgagaaggugcgcagccagcugaagaacaacgccaaggagaucgggaacggcugcuucgaguucuaccacaagugcgacaacacgugcauggaguccgugaagaacgggaccuacgacuaccccaaguacagcgaggaggccaagcugaaccgggaggagaucgacggcgucaagcucgaguccacccgcaucuaccagauccuggcgaucuacagcaccguggccuccagccuggugcucgucgugagccugggggccaucuccuucuggaugugcagcaacggcucccugcagugccggaucugcaucuga

SEQ ID NO: 70170 - RNA, 1701 nt, Artificial Sequence
  derived and/or modified CDS sequence (opt1) from hemagglutinin__InfluenzaA__ADO29891
augaaggccauccuggugguccuccuguacaccuucgccaccgcgaacgccgacacgcugugcaucggcuaccacgccaacaacagcaccgacaccguggacaccgugcucgagaagaacgucacggugacccacuccgugaaccugcuggaggacaagcacaacgggaagcucugcaagcugcgcggcgucgcgccccugcaccucgggaagugcaacaucgccggcuggauccuggggaacccggagugcgagagccuguccaccgccagcuccuggagcuacaucguggagaccuccagcuccgacaacggcacgugcuaccccggcgacuucaucgacuacgaggagcuccgggagcagcugagcuccgugagcuccuucgagcgcuucgagaucuuccccaagaccagcuccuggcccaaccacgacagcaacaagggggucaccgccgccugcccgcacgccggcgcgaaguccuucuacaagaaccugaucuggcucgugaagaaggggaacagcuaccccaagcuguccaagagcuacaucaacgacaagggcaaggaggugcugguccucugggggauccaccaccccagcaccuccgccgaccagcagagccuguaccagaacgccgacgccuacguguucgugggcacgucccgguacagcaagaaguucaagcccgagaucgccauccgcccgaagguccgggaccaggagggccgcaugaacuacuacuggacccugguggagcccggggacaagaccaccuucgaggcgacgggcaaccucguggucccccgguacgccuucgccauggagcgcaacgccggguccggcaucaucaucagcgacacccccgugcacgacugcaacacgaccugccagaccccgaagggcgccaucaacaccucccugcccuuccagaacauccaccccaucaccaucgggaagugccccaaguacgucaagagcaccaagcugcggcucgcgacgggccugcgcaacgugccguccauccagagccgggggcuguucggcgccaucgccggguucaucgagggcggcuggaccgggaugguggacggcugguacggguaccaccaccagaacgagcagggcuccggguacgccgccgaccucaagagcacccagaacgcgaucgacaagaucaccaacaaggugaacuccgucaucgagaagaugaacacgcaguucaccgccgugggcaaggaguucaaccaccuggagaagcgcaucgagaaccugaacaagaaggucgacgacggcuuccucgacaucuggaccuacaacgccgagcugcuggugcucagcgagaacgagcggacccuggacuaccacgacuccaacgugaagaaccuguacgagaagguccgcagccagcucaagaacaacgccaaggagaucgggaacggcugcuucgaguucuaccacaagugcgacaacacgugcauggaguccgugaagaacgggaccuacgacuaccccaaguacagcgaggaggccaagcugaaccgggaggagaucgacggcgugaagcuggaguccacccgcaucuaccagauccucgcgaucuacagcaccgucgccagcucccuggugcugguggucagccucggggccaucuccuucuggaugugcagcaacggcucccugcagugccggaucugcaucuga

SEQ ID NO: 70171 - RNA, 1701 nt, Artificial Sequence
  derived and/or modified CDS sequence (opt1) from hemagglutinin__InfluenzaA__ADO29892
augaaggccauccuggugguccuccuguacaccuucgccaccgcgaaggccgacacgcugugcaucggcuaccacgccaacaacagcaccgacaccguggacaccgugcucgagaagaacgucacggugacccacuccgugaaccugcuggaggacaagcacaacgggaagcucugcaagcugcgcggcgucgcgccccugcaccucgggaagugcaacaucgccggccggauccuggggaacccggagugcgagagccuguccaccgcgagcuccuggagcuacaucguggagaccuccagcuccgacaacggcacgugcuaccccggcgacuucaucgacuacgaggagcuccgcgagcagcugagcuccgugagcuccuucgagcgguucgagaucuuccccaagaccagcuccuggcccaaccacgacccgaacaagggggucaccgccgccugcccccacgccggcgccaagagcuucuacaagaaccugaucuggcucgugaagaaggggaacuccuaccccaagcugagcaaguccuacaucaacgacaagggcaaggaggugcugguccucugggggauccaccaccccagcaccagcguggaccagcagucccuguaccagaacgccgacgccuacguguucgucggcacgagccgcuacuccaagaaguucaagccggagaucgccauccggcccaaggugcgcgaccaggagggccggaugaacuacuacuggacccugguggagcccggggacaagaucaccuucgaggccaccggcaaccucgucgugccccgcuacgcguucgccauggagcggaacgccgggagcggcaucaucaucuccgacacgccggugcacgacugcaacacgaccugccagacccccaagggcgccaucaacaccagccugcccuuccagaacauccaccccaucaccaucgggaagugcccgaaguacgucaaguccaccaagcugcgccucgccaccggccugcggaacgugcccagcauccagucccgcgggcuguucggcgcgaucgccggguucaucgagggcggcuggacggggaugguggacggcugguacggguaccaccaccagaacgagcagggcagcggguacgccgccgaccucaaguccacccagaacgccaucgacgagaucaccaacaaggucaacagcgugaucgagaagaugaacacccaguucacggcggucggcaaggaguucaaccaccuggagaagcggaucgagaaccugaacaagaagguggacgacggcuuccucgacaucuggaccuacaacgccgagcugcuggugcuccuggagaacgagcgcacccuggacuaccacgacuccaacgucaagaaccucuacgagaaggugcggagccagcugaagaacaacgccaaggagaucgggaacggcugcuucgaguucuaccacaagugcgacaacacgugcauggaguccgugaagaacgggaccuacgacuaccccaaguacagcgaggaggccaagcugaaccgcgaggagaucgacggcgucaagcucgaguccacccggaucuaccagauccuggccaucuacagcaccguggcguccagccuggugcucgucgugagccugggggccaucuccuucuggaugugcagcaacggcucccugcagugccgcaucugcaucuga

SEQ ID NO: 70172 - RNA, 1701 nt, Artificial Sequence; identical to SEQ ID NO: 67491
  derived and/or modified CDS sequence (opt1) from hemagglutinin__InfluenzaA__ADO29893

SEQ ID NO: 70173 - RNA, 1701 nt, Artificial Sequence
  derived and/or modified CDS sequence (opt1) from hemagglutinin__InfluenzaA__ADO29894
augaaggccauccuggugguccuccuguacaccuucgccaccgcgaacgccgacacgcugugcaucggcuaccacgccaacaacagcaccgacaccguggacaccgugcucgagaugaacgucacggugacccacuccgugaaccugcuggaggacaagcacaacgggaagcucugcaagcugcgcggcgucgcgccccugcaccucgggaagugcaacaucgccggcuggauccuggggaacccggagugcgagagcuucuccaccagcuccagcugguccuacaucguggagaccagcuccagcgacaacggcacgugcuaccccggcgacuucaucgacuacgaggagcugcgggagcagcucuccagcguguccagcuucgagcgcuucgagaucuuccccaagaccuccagcuggcccaaccacgacuccaacaagggggucaccgccgccugcccgcacgccggcgccaagagcuucuacaagaaccugaucuggcuggugaagaagggguccagcuaccccaagcucagcaaguccuacaucaacgacaagggcaaggaggugcugguccugugggggauccaccaccccagcaccuccgcggaccagcagagccucuaccagaacgccgacgccuacguguucgugggcacgucccgguacagcaagaaguucaagcccgagaucgccauccgcccgaagguccgggaccaggagggccgcaugaacuacuacuggacccugguggagcccggggacaagaucaccuucgaggccaccggcaaccugguggucccccgguacgcguucgccauggagcgcaacgccggguccggcaucaucaucagcgacacgcccgugcacgacugcaacacgaccugccagaccccgaagggcgccaucaacaccucccuccccuuccagaacauccaccccaucaccaucgggaagugccccaaguacgucaagagcaccaagcugcggcuggccaccggccuccgcaacgugccguccauccagagccgggggcuguucggcgcgaucgccggguucaucgagggcggcuggacggggaugguggacggcugguacggguaccaccaccagaacgagcagggcuccggguacgccgccgaccucaagagcacccagaacgccaucgacgagaucaccaacaaggugaacuccgucaucgagaagaugaacacccaguucacggcggugggcaaggaguucaaccaccuggagaagcgcaucgagaaccugaacaagaaggucgacgacggcuuccuggacaucuggaccuacaacgccgagcuccuggugcugcucgagaacgagcggacccuggacuaccacgacagcaacgugaagaaccuguacgagaagguccgcucccagcucaagaacaacgccaaggagaucgggaacggcugcuucgaguucuaccacaagugcgacaacacgugcauggagagcgugaagaacgggaccuacgacuaccccaaguacuccgaggaggccaagcugaaccgggaggagaucgacggcgugaagcuggagagcacccgcaucuaccagauccucgccaucuacagcaccgucgcguccagccuggugcugguggucucccucggggccaucagcuucuggaugugcuccaacggcagccugcagugccggaucugcaucuga

SEQ ID NO: 70174 - RNA, 1701 nt, Artificial Sequence
  derived and/or modified CDS sequence (opt1) from hemagglutinin__InfluenzaA__ADO29895
augaaggccauccugguggcccuccuguacaccuucgcgaccgccaacgccgacacgcugugcaucggcuaccacgccaacaacagcaccgacaccgucgacaccgugcucgagaagaacgugacggucacccacuccgugaaccugcuggaggacaagcacaacgggaagcucugcaagcugcgcggcguggcgccccugcaccucgggaagugcaacaucgcgggcuggauccuggggaacccggagugcgagagcuucuccaccagcuccagcugguccuacaucgucgagaccagcuccagcgacaacggcacgugcuaccccggcgacuucaucgacuacgaggagcugcgggagcagcucuccagcguguccagcuucgagcgcuucgagaucuuccccaagaccuccagcuggcccaaccacgacuccaacaagggggugaccgccgccugcccgcacgccggcgccaagagcuucuacaagaaccugaucuggcuggucaagaagggguccagcuaccccaagcucagcaaguccuacaucaacgacaagggcaaggaggugcuggugcugugggggauccaccaccccagcaccuccgccgaccagcagagccucuaccagaacgccgacgccuacgucuucgugggcacgucccgguacagcaagaaguucaagcccgagaucgccauccgcccgaaggugcgggaccaggagggccgcaugaacuacuacuggacccuggucgagcccggggacaagaucaccuucgaggcgaccggcaaccugguggugccccgguacgccuucgccauggagcgcaacgccggguccggcaucaucaucagcgacacgcccguccacgacugcaacacgaccugccagaccccgaagggcgccaucaacaccucccuccccuuccagaacauccaccccaucaccaucgggaagugccccaaguacgugaagggcaccaagcugcggcuggcgaccgggcuccgcaacgugccgagcauccagucccggggccuguucggggccaucgccggcuucaucgagggcggguggacgggcauggucgacgggugguacggcuaccaccaccagaacgagcaggggagcggcuacgccgccgaccugaaguccacccagaacgcgaucgacgagaucaccaacaaggugaacagcgugaucgagaagaugaacacccaguucacggccgucggcaaggaguucaaccaccucgagaagcgcaucgagaaccugaacaagaagguggacgacggguuccuggacaucuggaccuacaacgccgagcuccugguccugcucgagaacgagcggacccuggacuaccacgacuccaacgugaagaaccuguacgagaaggugcgcagccagcucaagaacaacgccaaggagaucggcaacgggugcuucgaguucuaccacaagugcgacaacacgugcauggagcgggucaagaacggcaccuacgacuaccccaaguacuccgaggaggccaagcugaaccgcgaggagaucgacggggugaagcuggagagcacccggaucuaccagauccucgcgaucuacuccaccguggccagcagccugguccugguggugucccucggcgccaucagcuucuggaugugcuccaacggcagccugcagugccgcaucugcaucuga

SEQ ID NO: 70175 - RNA, 1701 nt, Artificial Sequence
  derived and/or modified CDS sequence (opt1) from hemagglutinin__InfluenzaA__ADO29897
augaaggccauccuggugguccuccuguacaccuucgccaccgcgaacgccgacauccugugcaucggcuaccacgccaacaacagcacggacaccguggacaccgugcucgagaagaacgucaccgugacgcacuccgugaaccugcuggaggacaagcacaacgggaagcucugcaagcugcgcggcgucgcgccccugcaccucgggaagugcaacaucgccggcuggauccuggggaacccggagugcgagagcuucuccaccagcuccagcugguccuacaucguggagaccagcuccagcgacaacggcaagugcuaccccggcgacuucaucgacuacgaggagcugcgggagcagcucuccagcguguccagcuucgagcgcuucgagaucuuccccaagaccuccagcuggcccaaccacgacuccaacaagggggucacgaccgccugcccgcacgccggcgccaagagcuucuacaagaaccugaucuggcuggugaagaaggggaacuccuacccccggcucagcaagagcuacaucaacgacaagggcaaggaggugcugguccugugggggauccaccaccccuccaccagcgccgaccagcagucccucuaccagaacgcggacgccuacguguucgugggcaccagccgcuacuccaagaaguucaagcccgagaucgccauccggccgaagguccgcgaccaggagggccggaugaacuacuacuggacgcugguggagcccggggacaagaucaccuucgaggccaccggcaaccugguggucccccgcuacgccuucgcgauggagcggaacgccgggagcggcaucaucaucuccgacacccccgugcacggcugcaacacgaccugccagaccccgaagggggccaucaacaccagccuccccuuccagaacauccaccccaucacgaucggcaagugccccaaguacgugaaguccaccaagcugcgccuggccaccgggcuccggaacgucccgagcauccagucccgcggccuguucggggccguggcgggcuucaucgagggcggguggaccggcaugguggacgggugguacggcuaccaccaccagaacgagcaggggagcggcuacgccgccgaccugaaguccacgcagaacgccaucgacgagaucaccaacaaggucaacagcgugaucgagaagaugaacacccaguucaccgccgucggcaaggaguucaaccaccucgagaagcggaucgagaaccugaacaagaagguggacgacggguuccuggacaucuggacguacaacgcggagcuccuggugcugcucgagaacgagcgcacccuggacuaccacgacuccaacgucaagaaccuguacgagaaggugcggagccagcucaagaacaacgccaaggagaucggcaacgggugcuucgaguucuaccacaagugcgacaacacgugcauggaguccgugaagaacggcaccuacgacuaccccaaguacagcgaggaggccaagcugaaccgcgaggagaucgacggggucaagcuggaguccacccggaucuaccagauccucgccaucuacagcaccguggccagcucccuggugcuggucgugagccucggcgcgaucuccuucuggaugugcagcaacggcucccugcagugccgcaucugcaucuga

SEQ ID NO: 70176 - RNA, 1701 nt, Artificial Sequence; identical to SEQ ID NO: 67491
  derived and/or modified CDS sequence (opt1) from hemagglutinin__InfluenzaA__ADO29898

SEQ ID NO: 70177 - RNA, 1701 nt, Artificial Sequence
  derived and/or modified CDS sequence (opt1) from hemagglutinin__InfluenzaA__ADO29899
augaaggccauccuggugguccuccuguacaccuucgccaccgcgaacgccgacacgcugugcaucggcuaccacgccaacaacagcaccgacaccguggacaccgugcucgagaagaacgucacggugacccacuccgugaaccugcuggaggacaagcacaacgggaagcucugcaagcugcgcggcgucgcgccccugcaccucgggaagugcaacaucgccggcuggauccuggggaacccggagugcgagagccuguccaccgccagcuccuggagcuacaucguggagaccuccagcuccgacaacggcacgugcuaccccggcgacuucaucgacuacgaggagcuccgggagcagcugagcuccgugagcuccuucgagcgcuucgagaucuuccccaagaccagcuccuggcccaaccacgacagcaacaagggggucaccgccgccugcccgcacgccggcgcgaaguccuucuacaagaaccugaucuggcucgugaagaaggggaacagcuaccccaagcuguccaagagcuacaucaacgacaagggcaaggaggugcugguccucugggggauccaccaccccagcaccuccgccgaccagcagagccuguaccagaacgccgacgccuacguguucgugggcacgucccgguacagcaagaaguucaagcccgagaucgccauccgcccgaagguccgggaccaggagggccgcaugaacuacuacuggacccugguggagcccggggacaagaucaccuucgaggcgaccggcaaccucguggucccccgguacgccuucgccauggagcgcaacgccggguccggcaucaucaucagcgacacgcccgugcacgacugcaacacgaccugccagaccccgaagggcgccaucaacaccucccugcccuuccagaacauccaccccaucaccaucgggaagugccccaaguacgucaagagcaccaagcugcggcucgcgaccggccugcgcaacgugccguccauccagagccgggggcuguucggcgccaucgccggguucaucgagggcggcuggacggggaugguggacggcugguacggguaccaccaccagaacgagcagggcuccggguacgccgccgaccucaagagcacccagaacgcgaucgacaagaucaccaacaaggugaacuccgucaucgagaagaugaacacccaguucacggccgugggcaaggaguucaaccaccuggagaagcgcaucgagaaccugaacaagaaggucgacgacggcuuccucgacaucuggaccuacaacgccgagcugcuggugcuccuggagaacgagcggacccuggacuaccacgacagcaacgugaagaaccucuacgagaagguccgcucccagcugaagaacaacgccaaggagaucgggaacggcugcuucgaguucuaccacaagugcgacaacacgugcauggagagcgugaagaacgggaccuacgacuaccccaaguacuccgaggaggccaagcugaaccgggaggagaucgacggcgugaagcucgagagcacccgcaucuaccagauccuggcgaucuacuccaccgucgccagcagccuggugcucguggucucccugggggccaucagcuucuggaugugcuccaacggcagccugcagugccggaccugcaucuga

SEQ ID NO: 70178 - RNA, 1701 nt, Artificial Sequence
  derived and/or modified CDS sequence (opt1) from hemagglutinin__InfluenzaA__ADO29900
augaaggccauccuggugguccuccuguacaccuucgccaccgcgaacgccgacacgcugugcaucggcuaccacgccaacaacagcaccgacaccguggacaccgugcucgagaagaacgucacggugacccacuccgugaaccugcuggaggacaagcacaacgggaagcucugcaagcugcgcggcgucgcgccccugcaccucgggaagugcaacaucgccggcuggauccuggggaacccggagugcgagagccuguccaccgcgagcuccuggagcuacaucguggagaccuccagcuccgacaacggcacgugcuaccccggcgaccucaucgacuacgaggagcugcgggagcagcugagcuccgugagcuccuucgagcgcuucgagaucuuccccaagaccagcuccuggcccaaccacgaccucaacaagggggucaccgccgccugcccgcacgccggcgccaagagcuucuacaagaaccugaucuggcuggugaagaaggggaacuccuaccccaagcucagcaaguccuacaucaacgacaagggcaaggaggugcugguccugugggggauccaccaccccagcaccagcgccgaccagcagucccucuaccagaacgccgacgccuacguguucgugggcacgagccgguacuccaagaaguccaagcccgagaucgccauccgcccgaagguccgggaccaggagggccgcaugaacuacuacuggacccugguggagcccggggacaagaucaccuucgaggcgaccggcaaccugguggucccccgguacgccuucgccauggagcgcaacgccgggagcggcaucaucaucagcgacacgcccgugcacgacugcaacacgaccugccagaccccgaagggcgccaucaacaccucccuccccuuccagaacauccaccccaucaccaucgggaagugccccaaguacgugcggagcaccaagcugcgccuggcgaccggccuccggaacgucccguccauccagagccgcgggcuguucggcgccaucgccggguucaucgagggcggcuggacggggaugguggacggcugguacggguaccaccaccagaacgagcagggcuccggguacgccgccgaccucaagagcacccagaacgcgaucgacgagaucaccaacaaggugaacuccgucaucgagaagaugaacacccaguucacggccgugggcaaggaguucaaccaccuggagaagcggaucgagaaccugaacaagaaggucgacgacggcuuccuggacaucugggccuacaacgccgagcuccuggugcugcucgagaacgagcgcacccuggacuaccacgacagcaacgugaagaaccuguacgagaagguccggucccagcucaagaacaacgccaaggagaucgggaacggcugcuucgaguucuaccacaagugcgacaacacgugcauggagagcgugaagaacgggaccuacgacuaccccaaguacuccgaggaggcgaagcugaaccgcgaggagaucgacggcgugaagcuggagagcacccggaucuaccagauccucgccaucuacuccaccgucgccagcagccuggugcugguggucucccucggggccaucagcuucuggaugugcuccaacggcagccugcagugccgcaucugcaucuga

SEQ ID NO: 70179 - RNA, 1701 nt, Artificial Sequence
  derived and/or modified CDS sequence (opt1) from hemagglutinin__InfluenzaA__ADO29901
augaaggccauccuggugguccuccuguacaccuucgccaccgcgaacgccgacacgcugugcaucggcuaccacgccaacaacagcaccgacaccguggacaccgugcucgagaagaacgucacggugacccacuccgugaaccugcuggaggacaagcacaacgagaagcucugcaagcugcgcggggucgcgccccugcaccucggcaagugcaacaucgccggguggauccugggcaacccggagugcgagagccuguccaccgccagcuccuggagcuacaucguggagaccuccagcuccgacaacgggacgugcuaccccggcgacuucaucgacuacgaggagcuccgggagcagcugagcuccgugagcuccuucgagcgcuucgagaucuuccccaagaccagcuccuggcccaaccacgacagcaacaagggcgucaccgccgccugcccgcacgccggggcgaaguccuucuacaagaaccugaucuggcucgccaagaagggcaacagcuaccccaagguguccaagagcuacaucaacgacaaggggaaggaggugcugguccuguggggcauccaccaccccagcaccuccgccgaccagcagagccucuaccagaacgccgacgccuacguguucguggggacgucccgguacagcaagaaguucaagcccgagaucgcgauccgcccgaagguccgggaccaggagggccgcaugaacuacuacuggacccugguggagcccggcgacaagaucaccuucgaggccaccgggaaccugguggucccccgguacgccuucgccauggagcgcaacgccggcuccgggaucaucaucagcgacacgcccgugcacgacugcaacacgaccugccagaccccgaagggcgcgaucaacaccucccuccccuuccagaacauccaccccaucaccaucggcaagugccccaaguacgucaagagcaccaagcugcggcuggccaccgggcuccgcaacgugccguccauccagagccggggccuguucggggccaucgccggcuucaucgagggcggguggacgggcaugguggacgggugguacggcuaccaccaccagaacgagcagggguccggcuacgccgcggaccucaagagcacccagaacgccaucgacgagaucaccaacaaggugaacuccgucaucgagaagaugaacacccaguucacggccguggggaaggaguucaaccaccuggagaagcgcaucgagaaccugaacaagaaggucgacgacggcuuccuggacaucuggaccuacaacgccgagcuccuggugcugcucgagaacgagcggacccuggacuaccacgacagcaacgugaagaaccuguacgagaagguccgcucccagcucaagaacaacgccaaggagaucggcaacgggugcuucgaguucuaccacaagugcgacaacacgugcauggagagcgugaagaacggcaccuacgacuaccccaaguacuccgaggaggcgaagcugaaccgggaggagaucgacggggugaagcuggagagcacccgcaucuaccagauccucgccaucuacuccaccgucgccagcagccuggugcugguggucucccucggcgccaucagcuucuggaugugcuucaacgggucccugcagugccggaucugcaucuga

SEQ ID NO: 70180 - RNA, 1701 nt, Artificial Sequence
  derived and/or modified CDS sequence (opt1) from hemagglutinin__InfluenzaA__ADO29902
augaaggccauccuggugguccuccuguacaccuucgccaccgcgaacgccgacacgcugugcaucggcuaccacgccaacaacagcaccgacaccguggacaccgugcucgagaagaacgucacggugacccacuccgugaaccugcuggaggacaagcacaacgggaagcucugcaagcugcgcggcgucgcgccccugcaccucgggaagugcaacaucgccggcuggauccuggggaacccggagugcgagagccuguccaccgccagcuccuggagcuacaucguggagaccuccagcuccgacaacggcacgugcuaccccggcgacuucaucgacuacgaggagcuccgggagcagcugagcuccgugagcuccuucgagcgcuucgagaucuuccccaagaccagcuccuggcccaaccacgacagcaacaagggggucaccgccgccugcccgcacgccggcgcgaaguccuucuacaagaaccugaucuggcucgugaagaaggggaacagcuaccccaagcuguccaagagcuacaucaacgacaagggcaaggaggugcugguccucugggggauccaccaccccagcaccuccgccgaccagcagagccuguaccagaacgccgacgccuacguguucgugggcacgucccgguacagcaagaaguucaagcccgagaucgccauccgcccgaagguccgggaccaggagggccgcaugaacuacuacuggacccugguggagcccggggacaagaucaccuucgaggcgaccggcaaccucguggucccccgguacgccuucgccauggagcgcaacgccggguccggcaucaucaucagcgacacgcccgugcacgacugcaacacgaccugccagaccccgaagggcgccaucaacaccucccugcccuuccagaacauccaccccaucaccaucgggaagugccccaaguacgucaagagcaccaagcugcggcucgcgaccggccugcgcaacgugccguccauccagagccgggggcuguucggcgccaucgccggguucaucgagggcggcuggacggggaugguggacggcugguacggguaccaccaccagaacgagcagggcuccggguacgccgccgaccucaagagcacccagaacgcgaucgacaagaucaccaacaaggugaacuccgucaucgagaagaugaacacccaguucacggccgugggcaaggaguucaaccaccuggagaagcgcaucgagaaccugaacaagaaggucgacgacggcuuccucgacaucuggaccuacaacgccgagcugcuggugcuccuggagaacgagcggacccuggacuaccacgacagcaacgugaagaaccucuacgagaagguccgcucccagcugaagaacaacgccaaggagaucgggaacggcugcuucgaguucuaccacaagugcgacaacacgugcauggagggggugaagaacggcaccuacgacuaccccaaguacagcgaggaggccaagcugaaccgggaggagaucgacggggugaagcucgaguccacccgcaucuaccagauccuggcgaucuacagcaccgucgccuccagccuggugcucguggucagccugggcgccaucuccuucuggaugugcagcaacggcucccugcagugccggaucugcaucuga

SEQ ID NO: 70181 - RNA, 1701 nt, Artificial Sequence
  derived and/or modified CDS sequence (opt1) from hemagglutinin__InfluenzaA__ADO29903
augaaggccauccuggugguccuccuguacaccuucgccaccgcgaacgccgacacgcugugcaucggcuaccacgccaacaacagcaccgacaccguggacaccgugcucgagaagaacgucacggugacccacuccgugaaccugcuggaggacaagcacaacgggaagcucugcaagcugcgcggcgucgcgccccugcaccucgggaagugcaacaccgccggcuggauccuggggaacccggagugcgagagccuguccaccgcgagcuccuggagcuacaucguggagacguccagcuccgacaacgggaccugcuaccccggcgacuucaucgacuacgaggagcuccgggagcagcugagcuccgugagcuccuucgagcgcuucgagaucuuccccaagaccagcuccuggcccaaccacgacccgaacaagggcgucaccgccgccugcccccacgccggcgccaagagcuucuacaagaaccugaucuggcucgugaagaaggggaacuccuaccccaagcugagcaaguccuacaucaacgacaagggcaaggaggugcugguccucugggggauccaccaccccagcacgagcgccgaccagcagucccuguaccagaacgccgacgccuacguguucgugggcaccagccgguacuccaagaaguucaagccggagaucgccauccgccccaagguccgggaccaggagggccgcaugaacuacuacuggacccugguggagcccggggacaagaucaccuucgaggcgacgggcaaccucguggucccccgguacgccuucgccauggagcgcaacgccgggagcggcaucaucaucuccgacaccccggugcacgacugcaacacgaccugccagacccccaagggcgccaucaacaccagccugcccuuccagaacauccaccccaucaccaucgggaagugcccgaaguacgugaaguccaccaagcugcggcucgcgacgggccugcgcaacguccccagcauccagucccgggggcuguucggcgccaucgccggguucaucgagggcggcuggaccgggaugguggacggcugguacggguaccaccaccagaacgagcagggcagcggguacgccgccgaccucaaguccacccagaacgcgaucgacgagaucaccaacaaggugaacagcgucaucgagaagaugaacacgcaguucaccgccgugggcaaggaguucaaccaccuggagaagcgcaucgagaaccugaacaagaaggucgacgacggcuuccucgacaucuggaccuacaacgccgagcugcuggugcuccuggagaacgagcggacccuggacuaccacgacuccaacgugaagaaccucuacgagaagguccgcagccagcugaagaacaacgccaaggagaucgggaacggcugcuucgaguucuaccacaagugcgacaacacgugcauggaguccgugaagaacgggaccuacgacuaccccaaguacagcgaggaggccaagcugaaccgggaggagaucgacggcgugaagcucgaguccacccgcaucuaccagauccuggcgaucuacagcaccgucgccuccagccuggugcucguggucagccugggggccaucuccuucuggaugugcagcaacggcucccugcagugccggaucugcaucuga

SEQ ID NO: 70182 - RNA, 1701 nt, Artificial Sequence
  derived and/or modified CDS sequence (opt1) from hemagglutinin__InfluenzaA__ADO29904
augaaggccauccuggugguccuccuguacaccuucgccaccgcgaacgccgacacgcugugcaucggcuaccacgccaacaacagcaccgacaccguggacaccgugcucgagaagaacgucacggugacccacuccgugaaccugcuggaggacaagcacaacgggaagcucugcaagcugcgcggcgucgcgccccugcaccucgggcggugcaacaucgccggcuggauccuggggaacccggagugcgagagccuguccaccgcgagcuccuggagcuacaucguggagaccuccagcuccgacaacggcacgugcuaccccggcgacuucaucgacuacgaggagcuccgcgagcagcugagcuccgugagcuccuucgagcgguucgagaucuuccccaagaccagcuccuggcccaaccacgacccgaacaagggggucaccgccgccugcccccacgccggcgccaagagcuucuacaagaaccugaucuggcucgugaagaaggggaacuccuaccccaagcugagcaaguccuacaucaacgacaagggcaaggaggugcugguccucugggggauccaccgccccagcaccagcgccgaccagcagucccuguaccagaacgccgacgccuacguguucgugggcacgagccgguacuccaagaaguucaagccggagaucgccauccgccccaaggucggcgaccaggaggggcggaugaacuacuacuggacccugguggagcccggcgacaagaucaccuucgaggcgaccgggaaccucguggucccccgcuacgccuucgccauggagcggaacgccggcagcggcaucaucaucuccaacacgccggugcacgacugcaacacgaccugccagacccccaagggggccaucaacaccagccugcccuuccagaacauccaccccaucaccaucggcaagugcccgaaguacgugaaguccaccaagcugcgccucgcgaccgggcugcggaacguccccagcauccagucccgcggccuguucggggccaucgccggcuucaucgagggcggguggacgggcaugguggacgggugguacggcuaccaccaccagaacgagcaggggagcggcuacgccgccgaccucaaguccacccagaacgcgaucgacgagaucaccaacaaggugaacagcgucaucgagaagaugaacacccaguucacggccgugggcaaggaguucaaccaccuggagaagcggaucgagaaccugaacaagaaggucgacgacggguuccucgacaucuggaccuacaacgccgagcugcuggugcuccuggagaacgagcgcacccuggacuaccacgacuccaacgugaagaaccucuacgagaagguccggagccagcugaagaacaacgccaaggagaucggcaacgggugcuucgaguucuaccacaagugcgacaacacgugcauggaguccgugaagaacggcaccuacgacuaccccaaguacagcgaggaggccaagcugaaccgcgaggagaucgacggggugaagcucgaguccacccggaucuaccagauccuggcgaucuacagcaccgucgccuccagccuggugcucguggucagccugggcgccaucuccuucuggaugugcagcaacggcucccugcagugccgcaucugcaucuga

SEQ ID NO: 70183 - RNA, 1701 nt, Artificial Sequence
  derived and/or modified CDS sequence (opt1) from hemagglutinin__InfluenzaA__ADO29905
augaaggccauccuggugguccuccuguacaccuucgccaccgcgaacgccgacacgcugugcaucggcuaccacgccaacaacagcaccgacaccguggacaccgugcucgagaagaacgucacggugacccgcuccgugaaccugcuggaggacaagcacaacgggaagcucugcaagcugcggggcgucgcgccccugcaccucgggaagugcaacaucgccggcuggauccuggggaacccggagugcgagagccuguccaccgcgagcuccuggagcuacaucguggagaccuccagcuccgacaacggcacgugcuaccccggcgacuucaucgacuacgaggagcuccgcgagcagcugagcuccgugagcuccuucgagcgguucgagaucuuccccaagaccagcuccuggcccaaccacgacccgaacaagggggucaccgccgccugcccccacgccggcgccaagagcuucuacaagaaccugaucuggcucgugaagaaggggaacuccuaccccaagcugagcaaguccuacaucaacgacaagggcaaggaggugcugguccucugggggauccaccaccccagcaccagcgccgaccagcagucccuguaccagaacgccgacgccuacguguucgugggcacgagccgcuacuccaagaaguucaagccggagaucgccauccggcccaagguccgcgaccaggagggccggaugaacuacuacuggacccugguggagcccggggacaagaucaccuucgaggcgaccggcaaccucguggucccccgcuacgccuucgccauggagcggaacgccgggagcggcaucaucaucuccaacacgccggugcacgacugcaacacgaccugccagacccccaagggcgccaucaacaccagccugcccuuccagaacauccaccccaucaccaucgggaagugcccgaaguacgugaaguccaccaagcugcgccucgcgaccggccugcggaacguccccagcauccagucccgcgggcuguucggcgccaucgccggguucaucgagggcggcuggacggggaugguggacggcugguacggguaccaccaccagaacgagcagggcagcggguacgccgccgaccucaaguccacccagaacgcgaucgacgagaucaccaacaaggugaacagcgucaucgagaagaugaacacccaguucacggccgugggcaaggaguucaaccaccuggagaagcggaucgagaaccugaacaagaaggucgacgacggcuuccucgacaucuggaccuacaacgccgagcugcuggugcuccuggagaacgagcgcacccuggacuaccacgacuccaacgugaagaaccucuacgagaagguccggagccagcugaagaacaacgccaaggagaucgggaacggcugcuucgaguucuaccacaagugcgacaacacgugcauggaguccgugaagaacgggaccuacgacuaccccaaguacagcgaggaggccaagcugaaccgcgaggagaucgacggcgugaagcucgaguccacccggaucuaccagauccuggcgaucuacagcaccgucgccuccagccuggugcucguggucagccugggggccaucuccuucuggaugugcagcaacggcucccugcagugccgcaucugcaucuga

SEQ ID NO: 70184 - RNA, 1701 nt, Artificial Sequence
  derived and/or modified CDS sequence (opt1) from hemagglutinin__InfluenzaA__ADO29906
augaaggccauccuggugguccuccuguacaccuucgccaccgcgaacgccgacacgcugugcaucggcuaccacgccaacaacagcaccgacaccguggacaccgugcucgagaagaacgucacggugacccacuccgugaaccugcuggaggacaagcacaaccgcaagcucugcaagcugcgcggggucgcgccccugcaccucggcaagugcaacaucgccggguggauccugggcaacccggagugcgagagccuguccaccgcgagcuccuggagcuacaucguggagaccuccagcuccgacaacgggacgugcuaccccggcgacuucaucgacuacgaggagcuccgggagcagcugagcuccgugagcuccuucgagcgguucgagaucuuccccaagaccagcuccuggcccaaccacgacccgaacaagggcgucaccgccgccugcccccacgccggggccaagagcuucuacaagaaccugaucuggcucgugaagaagggcaacuccuaccccaagcugagcaaguccuacaucaacgacaaggggaaggaggugcugguccucuggggcauccaccaccccagcaccagcgccgaccagcagucccuguaccagaacgccgacgccuacguguucguggggacgagccgcuacuccaagaaguucaagccggagaucgccauccggcccaagguccgcgaccaggagggccggaugaacuacuacuggacccugguggagcccggcgacaagaucaccuucgaggcgaccgggaaccucguggucccccgcuacgccuucgccauggagcggaacgccggcagcgggaucaucaucuccgacacgccggugcacgacugcaacacgaccugccagacccccaagggcgccaucaacaccagccugcccuuccagaacauccaccccaucaccaucggcaagugcccgaaguacgugaaguccaccaagcugcgccucgcgaccgggcugcggaacguccccagcauccagucccgcggccuguucggggccaucgccggcuucaucgagggcggguggacgggcaugguggacgggugguacggcuaccaccaccagaacgagcaggggagcggcuacgccgccgaccucaaguccacccagaacgcgaucgacgagaucaccaacaaggugaacagcgucaucgagaagaugaacacccaguucacggccguggggaaggaguucaaccaccuggagaagcggaucgagaaccugaacaagaaggucgacgacggcuuccucgacaucuggaccuacaacgccgagcugcuggugcuccuggagaacgagcgcacccuggacuaccacgacuccaacgugaagaaccucuacgagaagguccggagccagcugaagaacaacgccaaggagaucggcaacgggugcuucgaguucuaccacaagugcgacaacacgugcauggaguccgugaagaacggcaccuacgacuaccccaaguacagcgaggaggccaagcugaaccgcgaggagaucgacggggugaagcucgaguccacccggaucuaccagauccuggcgaucuacagcaccgucgccuccagccuggugcucguggucagccugggcgccaucuccuucuggaugugcagcaacgggucccugcagugccgcaucugcaucuga

SEQ ID NO: 70185 - RNA, 1701 nt, Artificial Sequence
  derived and/or modified CDS sequence (opt1) from hemagglutinin__InfluenzaA__ADO29907
augaaggccauccuggugguccuccuguacaccuucgccaccgcgaacgccgacacgcugugcaucggcuaccacgccaacaacagcaccgacaccguggacaccgugcucgagaagaacgucacggugacccacuccgugaaccugcuggaggacaagcacaacgggaagcucugcaagcugcgcggcgucgcgccccugcaccucgggaagugcaacaucgccggcuggauccuggggaacccggagugcgagagccuguccaccgcgagcuccuggagcuacaucguggagaccuccagcuccgacaacggcacgugcuaccccggcgacuucaucgacuacgaggagcuccgggagcagcugagcuccgugagcuccuucgagcgcuucgagaucuuccccaagaccagcuccuggcccaaccacgacccgaacaagggggucaccgccgccugcccccacgccggcgccaagagcuucuacaagaaccugaucuggcucgugaagaaggggaacuccuaccccaagcugagcaaguccuacaucaacgacaagggcaaggaggugcugguccucugggggauccaccaccccagcaccagcgccgaccagcagucccuguaccagaacgccgacgccuacguguucgugggcacgagccgguacuccaagaagcugaagccggagaucgccauccgccccaagguccgggaccaggagggccgcaugaacuaccacuggacccucguggagcccggggacaagaucaccuucgaggcgaccggcaaccugguggucccccgguacgccuucgccauggagcgcaacgccgggagcggcaucaucaucuccgacacgccggugcacgacugcaacacgaccugccagacccccaagggcgccaucaacaccagccugcccuuccagaacauccaccccaucaccaucgggaagugcccgaaguacgugaaguccaccaagcuccggcuggcgaccggccugcgcaacguccccagcauccagucccggggccucuucggggccaucgccggguucaucgagggcggcuggacggggaugguggacggcugguacggguaccaccaccagaacgagcagggcagcggguacgccgccgaccugaaguccacccagaacgcgaucgacgagaucaccaacaaggugaacagcgucaucgagaagaugaacacccaguucacggccgugggcaaggaguucaaccaccuggagaagcgcaucgagaaccucaacaagaaggucgacgacggcuuccuggacaucuggaccuacaacgccgagcugcucgugcugcuggagaacgagcggacccucgacuaccacgacuccaacgugaagaaccuguacgagaagguccgcagccagcugaagaacaacgccaaggagaucgggaacggcugcuucgaguucuaccacaagugcgacaacacgugcauggaguccgugaagaacgggaccuacgacuaccccaaguacagcgaggaggccaagcucaaccgggaggagaucgacggcgugaagcuggaguccacccgcaucuaccagauccuggcgaucuacagcaccgucgccuccagccucgugcugguggucagccugggggccaucuccuucuggaugugcagcaacggcucccuccagugccggaucugcaucuga

SEQ ID NO: 70186 - RNA, 1701 nt, Artificial Sequence
  derived and/or modified CDS sequence (opt1) from hemagglutinin__InfluenzaA__ADO29908
augaaggccauccuggugguccuccuguacaccuucgccaccgcgaacgccgacacgcugugcaucggcuaccacgccaacaacagcaccgacaccguggacaccgugcucgagaagaacgucacggugacccacuccgugaaccugcuggaggacaagcacaacgggaagcucugcaagcugcgcggcgucgcgccccugcaccucgggaagugcaacaucgccggcuggauccuggggaacccggagugcgagagccuguccaccgcgagcuccuggagcuacaucguggagaccuccagcuccgacaacggcacgugcuaccccggcgacuucaucgacuacgaggagcuccgggagcagcugagcuccgugagcuccuucgagcgcuucgagaucuuccccaagaccagcuccuggcccaaccacgacccgaacaagggggucaccgccgccugcccccacgccggcgccaagagcuucuacaagaaccugaucuggcucgugaagaaggggaacuccuaccccaagcugagcaaguccuacaucaacgacaagggcaaggaggugcugguccucugggggauccaccaccccagcaccagcgccgaccagcagucccuguaccagaacgccgacgccuacguguucgugggcacgagccgguacuccaagaaguucaagccggagaucgccauccgccccaagguccgggaccaggaguggcgcaugaacuacuacuggacccugguggagcccggcgacaagaucaccuucgaggcgaccgggaaccucguggucccccgguacgccuucgccauggagcgcaacgccggcagcgggaucaucaucuccgacacgccggugcacgacugcaacacgaccugccagacccccaagggcgccaucaacaccagccugcccuuccagaacauccaccccaucaccaucggcaagugcccgaaguacgugaaguccaccaagcugcggcucgcgaccgggcugcgcaacguccccagcauccagucccggggccuguucggggccaucgccggcuucaucgagggcggguggacgggcaugguggacgggugguacggcuaccaccaccagaacgagcaggggagcggcuacgccgccgaccucaaguccacccagaacgcgaucgacgagaucaccaacaaggugaacagcgucaucgagaagaugaacacccaguucacggccguggggaaggaguucaaccaccuggagaagcgcaucgagaaccugaacaagaaggucgacgacggcuuccucgacaucuggaccuacaacgccgagcugcuggugcuccuggagaacgagcggacccuggacuaccacgacuccaacgugaagaaccucuacgagaagguccgcagccagcugaagaacaacgccaaggagaucggcaacgggugcuucgaguucuaccacaagugcgacaacacgugcauggaguccgugaagaacggcaccuacgacuaccccaaguacagcgaggaggccaagcugaaccgggaggagaucgacggggugaagcucgaguccacccgcgucuaccagauccuggcgaccuacagcaccguggccuccagccuggugcucgucgugagccugggcgccaucuccuucuggaugugcagcaacgggucccugcagugccggaucugcaucuga

SEQ ID NO: 70187 - RNA, 1701 nt, Artificial Sequence
  derived and/or modified CDS sequence (opt1) from hemagglutinin__InfluenzaA__ADO29909
augaaggccauccuggugguccuccuguacaccuucgccaccgcgaacgccgacacgcugcgcaucggcuaccacgccaacaacagcaccgacaccguggacaccgugcucgagaagaacgucacggugacccacuccgugaaccugcuggaggacaagcacaacgggaagcucugcaagcugcggggcgucgcgccccugcaccucgggaagugcaacaucgccggcuggauccuggggaacccggagugcgagagccuguccaccgcgagcuccuggagcuacaucguggagaccuccagcuccgacaacggcacgugcuaccccggcgacuucaucgacuacgaggagcuccgcgagcagcugagcuccgugagcuccuucgagcgguucgagaucuuccccaagaccagcuccuggcccaaccacgacccgaacaagggggucaccgccgccugcccccacgccggcgccaagagcuucuacaagaaccugaucuggcucgugaagaaggggaacuccuaccccaagcugagcaaguccuacaucaacgacaagggcaaggaggugcugguccucugggggauccaccaccccagcaccagcgccgaccagcagucccuguaccagaacgccgacgccuacguguucgugggcacgagccgcuacuccaagaaguucaagccggagaucgccauccggcccaagguccgcgaccaggagggccggaugaacuacuacuggacccugguggagcccggggacaagaucaccuucgaggcgaccggcaaccucguggucccccgcuacgccuucgccauggagcggaacgccgggagcggcaucaucaucuccgacacgccggugcacgacugcaacacgaccugccagacccccaagggcgccaucaacaccagccugcccuuccagaacauccaccccaucaccaucgggaagugcccgaaguacgugaaguccaccaagcugcgccucgcgaccggccugcggaacguccccagcauccagucccgcgggcuguucggcgccaucgccggguucaucgagggcggcuggacggggaugguggacggcugguacggguaccaccaccagaacgagcagggcagcggguacgccgccgaccucaaguccauccagaacgcgaucgacgagaucaccaacaaggugaacagcgucaucgagaagaugaacacccaguucaccgccgugggcaaggaguucaaccaccuggagaagcggaucgagaaccugaacaagaaggucgacgacggcuuccucgacaucuggacguacaacgccgagcugcuggugcuccuggagaacgagcgcacccuggacuaccacgacuccaacgugaagaaccucuacgagaagguccggagccagcugaagaacaacgccaaggagaucgggaacggcugcuucgaguucuaccacaagugcgacaacacgugcauggaguccgugaagaacgggaccuacgacuaccccaaguacagcgaggaggccaagcugaaccgcgaggagaucgacggcgugaagcucgaguccacccggaucuaccagauccuggcgaucuacagcaccgucgccuccagccugauccucguggugagccugggggccaucuccuucuggaugugcagcaacggcucccugcagugccgcaucugcaucuga

SEQ ID NO: 70188 - RNA, 1701 nt, Artificial Sequence
  derived and/or modified CDS sequence (opt1) from hemagglutinin__InfluenzaA__ADO29910
augaaggccauccuggugguccuccuguacaccuucgccaccgcgaacgccgacacgcugugcaucggcuaccacgccaacaacagcaccgacaccguggacaccgugcucgagaagaacgucacggugacccacuccgugaaccugcuggaggacaagcacaacgggaagcucugcaagccccgcggcgucgccccgcugcaccuggggaagugcaacaucgccggcuggauccucgggaaccccgagugcgagagccuguccaccgcgagcuccuggagcuacaucguggagaccuccagcuccgacaacggcacgugcuaccccggcgacuucaucgacuacgaggagcugcgggagcagcucagcuccgugagcuccuucgagcgcuucgagaucuuccccaagaccagcuccuggccgaaccacgaccccaacaagggggucaccgccgccugcccccacgccggcgccaagagcuucuacaagaaccugaucuggcuggugaagaaggggaacuccuaccccaagcucagcaaguccuacaucaacgacaagggcaaggaggugcugguccugugggggauccaccacccgagcaccagcgcggaccagcagucccucuaccagaacgccgacgccuacguguucgugggcacgagccgguacuccaagaaguucaagcccgagaucgccauccgccccaagguccgggaccaggagggccgcaugaacuacuacuggacccugguggagcccggggacaagaucaccuucgaggcgaucggcaaccugguggucccgcgguacgccuucgccauggagcgcaacgccgggagcggcaucaucaucuccgacacccccgugcacgacugcaacacgaccugccagacccccaagggcgccaucaacaccagccuccccuuccagaacauccacccgaucacgaucgggaagugccccaaguacgugaaguccaccaagcugcggcuggcgaccggccuccgcaacguccccagcauccagucccgggggcuguucggcgccaucgccggguucaucgagggcggcuggaccgggaugguggacggcugguacggguaccaccaccagaacgagcagggcagcggguacgccgccgaccugaaguccacgcagaacgcgaucgacgagaucaccaacaaggugaacagcgucaucgagaagaugaacacccaguucaccgccgugggcaaggaguucaaccaccucgagaagcgcaucgagaaccugaacaagaaggucgacgacggcuuccuggacaucuggacguacaacgccgagcuccuggugcugcucgagaacgagcggacccuggacuaccacgacuccaacgugaagaaccuguacgagaagguccgcagccagcucaagaacaacgccaaggagaucgggaacggcugcuucgaguucuaccacaagugcgacaacacgugcauggaguccgugaagaacgggaccuacgacuaccccaaguacagcgaggaggccaagcugaaccggggcgagaucgacggggugaagcuggaguccacccgcaucuaccagauccucgcgaucuacagcaccgucgccuccagccuggugcugguggucagccucggcgccaucuccuucuggaugugcagcaacggcucccugcagugccggaucugcaucuga

SEQ ID NO: 70189 - RNA, 1701 nt, Artificial Sequence; identical to SEQ ID NO: 68415
  derived and/or modified CDS sequence (opt1) from hemagglutinin__InfluenzaA__ADO30407

SEQ ID NO: 70190 - RNA, 1701 nt, Artificial Sequence; identical to SEQ ID NO: 68306
  derived and/or modified CDS sequence (opt1) from hemagglutinin__InfluenzaA__ADO30417

SEQ ID NO: 70191 - RNA, 1701 nt, Artificial Sequence; identical to SEQ ID NO: 68028
  derived and/or modified CDS sequence (opt1) from hemagglutinin__InfluenzaA__ADO33202

SEQ ID NO: 70192 - RNA, 1701 nt, Artificial Sequence; identical to SEQ ID NO: 67536
  derived and/or modified CDS sequence (opt1) from hemagglutinin__InfluenzaA__ADO33240

SEQ ID NO: 70193 - RNA, 1701 nt, Artificial Sequence; identical to SEQ ID NO: 66693
  derived and/or modified CDS sequence (opt1) from hemagglutinin__InfluenzaA__ADO33247

SEQ ID NO: 70194 - RNA, 1701 nt, Artificial Sequence; identical to SEQ ID NO: 67536
  derived and/or modified CDS sequence (opt1) from hemagglutinin__InfluenzaA__ADO33254

SEQ ID NO: 70195 - RNA, 1701 nt, Artificial Sequence; identical to SEQ ID NO: 67536
  derived and/or modified CDS sequence (opt1) from hemagglutinin__InfluenzaA__ADO33261

SEQ ID NO: 70196 - RNA, 1701 nt, Artificial Sequence; identical to SEQ ID NO: 67536
  derived and/or modified CDS sequence (opt1) from hemagglutinin__InfluenzaA__ADO33269

SEQ ID NO: 70197 - RNA, 1701 nt, Artificial Sequence; identical to SEQ ID NO: 68028
  derived and/or modified CDS sequence (opt1) from hemagglutinin__InfluenzaA__ADO33277

SEQ ID NO: 70198 - RNA, 1701 nt, Artificial Sequence; identical to SEQ ID NO: 67536
  derived and/or modified CDS sequence (opt1) from hemagglutinin__InfluenzaA__ADO33285

SEQ ID NO: 70199 - RNA, 1701 nt, Artificial Sequence; identical to SEQ ID NO: 68028
  derived and/or modified CDS sequence (opt1) from hemagglutinin__InfluenzaA__ADO33293

SEQ ID NO: 70200 - RNA, 1701 nt, Artificial Sequence; identical to SEQ ID NO: 68028
  derived and/or modified CDS sequence (opt1) from hemagglutinin__InfluenzaA__ADO33307

SEQ ID NO: 70201 - RNA, 1701 nt, Artificial Sequence; identical to SEQ ID NO: 67536
  derived and/or modified CDS sequence (opt1) from hemagglutinin__InfluenzaA__ADO33313

SEQ ID NO: 70202 - RNA, 1701 nt, Artificial Sequence; identical to SEQ ID NO: 69786
  derived and/or modified CDS sequence (opt1) from hemagglutinin__InfluenzaA__ADO33329

SEQ ID NO: 70203 - RNA, 1701 nt, Artificial Sequence; identical to SEQ ID NO: 67536
  derived and/or modified CDS sequence (opt1) from hemagglutinin__InfluenzaA__ADO33337

SEQ ID NO: 70204 - RNA, 1701 nt, Artificial Sequence; identical to SEQ ID NO: 67536
  derived and/or modified CDS sequence (opt1) from hemagglutinin__InfluenzaA__ADO33345

SEQ ID NO: 70205 - RNA, 1701 nt, Artificial Sequence; identical to SEQ ID NO: 68028
  derived and/or modified CDS sequence (opt1) from hemagglutinin__InfluenzaA__ADO33352

SEQ ID NO: 70206 - RNA, 1701 nt, Artificial Sequence; identical to SEQ ID NO: 66693
  derived and/or modified CDS sequence (opt1) from hemagglutinin__InfluenzaA__ADO33360

SEQ ID NO: 70207 - RNA, 1701 nt, Artificial Sequence; identical to SEQ ID NO: 67536
  derived and/or modified CDS sequence (opt1) from hemagglutinin__InfluenzaA__ADO33368

SEQ ID NO: 70208 - RNA, 1701 nt, Artificial Sequence; identical to SEQ ID NO: 67536
  derived and/or modified CDS sequence (opt1) from hemagglutinin__InfluenzaA__ADO33376

SEQ ID NO: 70209 - RNA, 1701 nt, Artificial Sequence; identical to SEQ ID NO: 66680
  derived and/or modified CDS sequence (opt1) from hemagglutinin__InfluenzaA__ADO33384

SEQ ID NO: 70210 - RNA, 1701 nt, Artificial Sequence; identical to SEQ ID NO: 66693
  derived and/or modified CDS sequence (opt1) from hemagglutinin__InfluenzaA__ADO33391

SEQ ID NO: 70211 - RNA, 1701 nt, Artificial Sequence
  derived and/or modified CDS sequence (opt1) from hemagglutinin__InfluenzaA__ADO79917
augaaggccauccuggugguccuccuguacaccuucgccaccgcgaacgccgacacgcugugcaucggcuaccacgccaacaacagcaccgacaccguggacaccgugcucgagaagaacgucacggugacccacuccgugaaccugcuggaggacaagcacaacgggaagcucugcaagcugcgcggcgucgcgccccugcaccucgggaagugcaacaucgccggcuggauccuggggaacccggagugcgagagccuguccaccgccagcuccuggagcuacaucguggagaccuccagcuccgacaacggcacgugcuaccccggcgacuucaucgacuacgaggagcuccgggagcagcugagcuccgugagcuccuucgagcgcuucgagaucuuccccaagaccagcuccuggcccaaccacgacagcaacaagggggucaccgccgccugcccgcacgccggcgcgaaguccuucuacaagaaccugaucuggcucgugaagaaggggaacagcuaccccaagcuguccaagagcuacaucaacgacaagggcaaggaggugcugguccucugggggauccaccaccccagcaccuccgccgaccagcagagccuguaccagaacgccgacgccuacguguucgugggcacgucccgguacagcaagaaguucaagcccgagaucgccauccgcccgaagguccgggaccgcgagggccggaugaacuacuacuggacccugguggagcccggggacaagaucaccuucgaggcgaccggcaaccucguggucccccgcuacgccuucgccauggagcggaacgccggguccggcaucaucaucagcgacacgcccgugcacaacugcaacacgaccugccagaccccgaagggcgccaucaacaccucccugcccuuccagaacauccaccccaucaccaucgggaagugccccaaguacgucaagagcaccaagcugcgccucgcgaccggccugcggaacgugccguccauccagagccgcgggcuguucggcgccaucgccggguucaucgagggcggcuggacggggaugguggacggcugguacggguaccaccaccagaacgagcagggcuccggguacgccgccgaccucaagagcacccagaacgcgaucgacgagaucaccaacaaggugaacuccgucaucgagaagaugaacacccaguucacggccgugggcaaggaguucaaccaccuggagaagcggaucgagaaccugaacaagaaggucgacgacggcuuccucgacaucuggaccuacaacgccgagcugcuggugcuccuggagaacgagcgcacccuggacuaccacgacagcaacgugaagaaccucuacgagaagguccggucccagcugaagaacaacgccaaggagaucgggaacggcugcuucgaguucuaccacaagugcgacaacacgugcauggagagcgugaagaacgggaccuacgacuaccccaaguacuccgaggaggccaagcugaaccgcgaggagaucgacggcgugaagcucgagagcacccggaucuaccagauccuggcgaucuacuccaccgucgccagcagccuggugcucguggucucccugggggccaucagcuucuggaugugcuccaacggcagccugcagugccgcaucugcaucuga

SEQ ID NO: 70212 - RNA, 1701 nt, Artificial Sequence
  derived and/or modified CDS sequence (opt1) from hemagglutinin__InfluenzaA__ADO79923
augaaggccauccuggugguccuccuguacaccuucgccaccgcgaacgccgacacgcugugcaucggcuaccacgccaacaacagcaccgacaccguggacaccgugcucgagaagaacgucacggugacccacuccgugaaccugcuggaggacaagcacaacgggaagcucugcaagcugcgcggcgucgcgccccugcaccucgggaagugcaacaucgccggcuggauccuggggaacccggagugcgagagccuguccaccgcgagcuccuggagcuacaucguggagaccuccagcacggacaaguggaccugcuaccccggcgacuucaucgacuacgaggagcuccgggagcagcuguccagcguguccagcuucgagcgcuucgagaucuuccccaagaccuccagcuggcccaaccacgacuccaacaagggcgucaccgccgccugcccgcacgccggggccaagagcuucuacaagaaccugaucuggcucgugaagaagggcaacuccuaccccaagcugagcaaguccuacaucaacgacaaggggaaggaggugcugguccucuggggcauccaccaccccagcacgagcgccgaccagcagucccuguaccagaacgccgacgccuacguguucguggggaccagccgguacuccaagaaguucaagcccgagaucgccauccgcccgaagguccgggaccaggagcgccggaugaacuacuacuggacccuggugcagcccggcgacaagaucaccuuccaggcgacgggcaaccucguggucccccgcuacgccuucgccauggagcggaacgccgggagcggcaucaucaucuccgacacccccgugcacaacugcaacacgaccugccagaccccgaagggggccaucaacaccagccugcccuuccagaacauccaccccaucaccaucggcaagugccccaaguacgugaaguccaccaagcugcgccucgcgacgggccugcggaacgucccgagcauccagucccgcgggcuguucggcgccaucgccggguucaucgagggcggguggaccggcaugguggacggcugguacggguaccaccaccagaacgagcagggcagcggguacgccgccgaccucaaguccacccagaacgcgaucgacgagaucaccaacaaggugaacagcgucaucgagaagaugaacacgcaguucaccgccgugggcaaggaguucaaccaccuggagaagcggaucgagaaccugaacaagaaggucgacgacggguuccucgacaucuggaccuacaacgccgagcugcuggugcuccuggagaacgagcgcacccuggacuaccacgacuccaacgugaagaaccucuacgagaagguccggagccagcugaagaacaacgccaaggagaucggcaacggcugcuucgaguucuaccacaagugcgacaacacgugcauggaguccgugaagaacgggaccuacgacuaccccaaguacagcgaggaggccaagcugaaccgcgaggagaucgacggcgugaagcucgaguccacccggaucuaccagauccuggcgaucuacagcaccgucgccuccagccuggugcucguggucagccugggggccaucuccuucuggaugugcagcaacggcucccugcagugccgcaucugcaucuga

SEQ ID NO: 70213 - RNA, 1701 nt, Artificial Sequence
  derived and/or modified CDS sequence (opt1) from hemagglutinin__InfluenzaA__ADO79924
augaaggccauccuggugguccuccuguacaccuucgccaccgcgaacgccgacacgcugugcaucggcuaccacgccaacaacagcaccgacaccguggacaccgugcucgagaagaacgucacggugacccacuccgugaaccugcuggaggacaagcacaacgggaagcucugcaagcugcgcggcgucgcgccccugcaccucgggaagugcaacaucgccggcuggauccuggggaacccggagugcgagagccuguccaccgcgagcuccuggagcuacaucguggagaccuccagcacggacaaguggaccugcuaccccggcgacuucaucgacuacgaggagcuccgggagcagcuguccagcguguccagcuucgagcgcuucgagaucuuccccaagaccuccagcuggcccaaccacgacuccaacaagggcgucaccgccgccugcccgcacgccggggccaagagcuucuacaagaaccugaucuggcucgugaagaagggcaacuccuaccccaagcugagcaaguccuacaucaacgacaaggggaaggaggugcugguccucuggggcauccaccaccccagcacgagcgccgaccagcagucccuguaccagaacgccgacgccuacguguucguggggaccagccgguacuccaagaaguucaagcccgagaucgccauccgcccgaagguccgggaccgcgagggccggaugaacuacuacuggacccugaucgagcccggcgacaagaucaccuucgagcccacggggaaccucguggugccccgcuacgcguucgccauggagcggaacgccggcagcgggaucaucaucuccgacaccccgguccacaacugcaacacgaccugccagacccccaagggcgccaucaacaccagccugcccuuccagaacauccaccccaucaccaucggcaagugcccgaaguacgugaaguccaccaagcugcgccucgccacggggcugcggaacgugcccagcauccagucccgcggccuguucggggcgaucgccggcuucaucgagggcggguggaccggcauggucgacgggugguacggcuaccaccaccagaacgagcaggggagcggcuacgccgccgaccucaaguccacccagaacgccaucgacgagaucaccaacaaggugaacagcgugaucgagaagaugaacacgcaguucaccgcggucgggaaggaguucaaccaccuggagaagcggaucgagaaccugaacaagaagguggacgacggcuuccucgacaucuggaccuacaacgccgagcugcugguccuccuggagaacgagcgcacccuggacuaccacgacuccaacgugaagaaccucuacgagaaggugcggagccagcugaagaacaacgccaaggagaucggcaacgggugcuucgaguucuaccacaagugcgacaacacgugcauggaguccgucaagaacggcaccuacgacuaccccaaguacagcgaggaggccaagcugaaccgcgaggagaucgacggggugaagcucgaguccacccggaucuaccagauccuggccaucuacagcaccguggcguccagccugguccucguggugagccugggcgccaucuccuucuggaugugcagcaacgggucccugcagugccgcaucugcaucuga

SEQ ID NO: 70214 - RNA, 1701 nt, Artificial Sequence
  derived and/or modified CDS sequence (opt1) from hemagglutinin__InfluenzaA__ADO79925
augaaggccauccuggugguccuccuguacaccuucgccaccgcgaacgccgacacgcugugcaucggcuaccacgccaacaacagcaccgacaccguggacaccgugcucgagaagaacgucacggugacccacuccgugaaccugcuggaggacaagcacaacgggaagcucugcaagcugcgcggcgucgcgccccugcaccucgggaagugcaacaucgccggcuggauccuggggaacccggagugcgagagccuguccaccgcgagcuccuggagcuacaucguggagaccuccagcacgcacgaguggaccugcuaccccggcgacuucaucgacuacgaggagcuccgggagcagcuguccagcguguccagcuucgagcgcuucgagaucuuccccaagaccuccagcuggcccaaccacgacuccaacaagggcgucaccgccgccugcccgcacgccggggccaagagcuucuacaagaaccugaucuggcucgugaagaagggcaacuccuaccccaagcugagcaaguccuacaucaacgacaaggggaaggaggugcugguccucuggggcauccaccaccccagcacgagcgccgaccagcagucccuguaccagaacgccgacgccuacguguucguggggaccagccgguacuccaagaaguucaagcccgagaucgccauccgcccgaagguccgggaccgcgagggccggaugaacuacuacuggacccugguggagcccggcgacaagaucaccuucgaggcgcccgggaaccucguggucccccgcuacgccuucgccauggagcggaacgccggcagcgggaucaucaucuccgacacgccggugcacaacugcaacacgaccugccagacccccaagggcgccaucaacaccagccugcccuuccagaacauccaccccaucaagaucggcaagugcuccaaguacgucaagagcaccaagcugcgccucgcgaccgggcugcggaacgugccguccauccagagccgcggccuguucggggccaucgccggcuucaucgagggcggguggaccggcaugguggacgggugguacggcuaccaccaccagaacgagcagggguccggcuacgccgccgaccucaagagcacgcagaacgcgaucgacgagaucaccaacaaggugaacuccgucaucgagaagaugaacacccaguucaccgccguggggaaggaguucaaccaccuggagaagcggaucgagaaccugaacaagaaggucgacgacggcuuccucgacaucuggacguacaacgccgagcugcuggugcuccuggagaacgagcgcacccuggacuaccacgacagcaacgugaagaaccucuacgagaagguccggucccagcugaagaacaacgccaaggagaucggcaacgggugcuucgaguucuaccacaagugcgacaacacgugcauggagagcgugaagaacggcaccuacgacuaccccaaguacuccgaggaggccaagcugaaccgcgaggagaucgacggggugaagcucgagagcacccggaucuaccagauccuggcgaucuacuccaccgucgccagcagccuggugcucguggucucccugggcgccaucagcuucuggaugugcuccaacgggagccugcagugccgcaucugcaucuga

SEQ ID NO: 70215 - RNA, 1701 nt, Artificial Sequence
  derived and/or modified CDS sequence (opt1) from hemagglutinin__InfluenzaA__ADO79926
augaaggccauccuggugguccuccuguacaccuucgccaccgcgaacgccgacacgcugugcaucggcuaccacgccaacaacagcaccgacaccguggacaccgugcucgagaagaacgucacggugacccacuccgugaaccugcuggaggacaagcacaacgggaagcucugcaagcugcgcggcgucgcgccccugcaccucgggaagugcaacaucgccggcuggauccuggggaacccggagugcgagagccuguccaccgcgagcuccuggagcuacaucguggagaccuccagcacggacaaguggaccugcuaccccggcgacuucaucgacuacgaggagcuccgggagcagcuguccagcguguccagcuucgagcgcuucgagaucuuccccaagaccuccagcuggcccaaccacgacuccaacaagggcgucaccgccgccugcccgcacgccggggccaagagcuucuacaagaaccugaucuggcucgugaagaagggcaacuccuucagcaagcuguccaagacguaccugaacgacaaggggaaggaggugcucguccuguggggcauccaccaccccagcaccagcgccgaccagcagucccuguaccagaacgccgacgccuacguguucguggggaccagccgguacuccaagaaguucaagcccgagaucgccauccgccccaagguccgggaccaggagggccgcaugaacuacuacuggacccucguggagccgggcgacaagaucacguucgaggcgaccgggaaccugguggucccccgguacgccuucgccauggagcgcaacgugggcagcgggaucaucaucuccgacacccccgugcacgacugcaacaccacgugccagacccccaagggcgccaucaacaccagccugccguuccagaacauccaccccaucaccaucggcaagugccccaaguacgucaaguccacgaagcuccggcuggccaccgggcugcgcaacgugcccagcauccagucccggggccucuucggggcgaucgccggcuucaucgagggcggguggaccggcaugguggacgggugguacggcuaccaccaccagaacgagcaggggagcggcuacgccgccgaccugaaguccacccagaacgccaucgacaagaucacgaacaaggucaacagcgugaucgagaagaugaacacccaguucaccgcggucgggaaggaguucaaccaccuggagaagcgcaucgagaaccucaacaagaagguggacgacggcuuccuggacaucuggaccuacaacgccgagcugcucgugcugcuggagaacgagcggacgcucgacuaccacgacuccaacgucaagaaccuguacgagaaggugcgcagccagcugaagaacaacgccaaggagaugaagaacggcugcuucgaguucuaccacaagugcgacaacacgugcauggaguccgugaagaacgggaccuacgacuacccgaaguacagcgaggaggccaagcucaaccgggaggagaucgacggcgucaagcuggaguccacccgcaucuaccagauccuggccaucuacagcaccguggcguccagccucgugcuggucgugagccugggggccaucuccuucuggaugugcagcaacggcucccuccagugccggaucugcaucuga

SEQ ID NO: 70216 - RNA, 1701 nt, Artificial Sequence
  derived and/or modified CDS sequence (opt1) from hemagglutinin__InfluenzaA__ADO79927
augaaggccauccuggugguccuccuguacaccuucgccaccgcgaacgccgacacgcugugcaucggcuaccacgccaacaacagcaccgacaccguggacaccgugcucgagaagaacgucacggugacccacuccgugaaccugcuggaggacaagcacaacgggaagcucugcaagcugcgcggcgucgcgccccugcaccucgggaagugcaacaucgccggcuggauccuggggaacccggagugcgagagccuguccaccgccagcuccuggagcuacaucguggagaccuccagcacggacaaguggaccugcuaccccggcgacuucaucgacuacgaggagcuccgggagcagcuguccagcguguccagcuucgagcgcuucgagaucuuccccaagaccuccagcuggcccaaccacgacuccaacaagggcgucaccgccgccugcccgcacgccgcggccaagagcuucuacaagaaccugaucuggcucgugaagaaggggaacuccuaccccaagcugagcaaguccuacaucaacgacaagggcaaggaggugcugguccucugggggauccaccaccccagcacgagcgccgaccagcagucccuguaccagaacgccgacgccuacguguucgugggcaccagccgguacuccaagaaguucaagcccgagaucgcgauccgcccgaagguccgggaccaggaggggcgcaugaacuacuacuggacccugguggagcccggcgacaagaucaccuucgaggccacgggcaaccucguggucccccgguacgccuucgccauggagcgcaacgccgggagcggcaucaucaucuccgacacccccgugcacgacugcaacacgaccugccagaccccgaagggggcgaucaacaccagccugcccuuccagaacauccaccccaucaccaucggcaagugccccaaguacgugaaguccaccaagcugcggcucgccacgggccugcgcaacaucccgagcguccagucccgggggcuguucggcgccaucgccggguucaucgagggcggguggaccggcaugguggacggcugguacggguaccaccaccagaacgagcagggcagcggguacgccgcggaccucaaguccacccagaacgccaucgacaagaucaccaacaaggugaacagcgucaucgagaagaugaacacgcaguucaccgccgugggcaaggaguucaaccaccuggagaagcgcaucgagaaccugaacaagaaggucgacgacggguuccucgacaucuggaccuacaacgccgagcugcuggugcuccuggagaacgagcggacccuggacuaccacgacuccaacgugaagaaccucuacgagaagguccgcagccagcugaagaacaacgccaaggagaugaagaacggcugcuucgaguucuaccacaagugcgacaacacgugcauggaguccgugaagaacggcaccuacgacuaccccaaguacagcgaggaggcgaagcugaaccgggaggagaucgacggggugaagcucgaguccacccgcaucuaccagauccuggccaucuacagcaccgucgccuccagccuggugcucguggucagccugggcgccaucuccuucuggaugugcagcaacgggucccugcagugccggaucugcaucuga

SEQ ID NO: 70217 - RNA, 1701 nt, Artificial Sequence
  derived and/or modified CDS sequence (opt1) from hemagglutinin__InfluenzaA__ADO79928
augaaggccauccuggugguccuccuguacaccuucgccaccgcgaacgccgacacgcugugcaucggcuaccacgccaacaacagcaccgacaccguggacaccgugcucgagaagaacgucacggugacccacuccgugaaccugcuggaggacaagcacaacgggaagcucugcaagcugcgcggcgucgcgccccugcaccucgggaagugcaacaucgccggcuggauccuggggaacccggagugcgagagccuguccaccgccagcuccuggagcuacaucguggagaccuccagcacggacaaguggaccugcuaccccggcgacuucaucgacuacgaggagcuccgggagcagcuguccagcguguccagcuucgagcgcuucgagaucuuccccaagaccaacuccuggcccaaccacgacagcaacaagggcgucaccgccgccugcccgcacgccggggcgaaguccuucuacaagaaccugaucuggcucgugaagaagggcaacagcuaccccaagcuguccaagagcuacaucaacgacaaggggaaggaggugcugguccucuggggcauccaccaccccuccacgagcgccgaccagcagagccuguaccagaacgccgacgccuacguguucguggggaccuccaaguacagcaagaaguucaagcccgagaucgccauccggccgaagguccgcgaccaggagggccggaugaacuacuacuggacccugguggagcccggcgacaagaucaccuucgaggcgacggggaaccucguggucccccgcuacgccuucgccauggagcggaacgccggcuccgggaucaucaucagcgacacccccgugcacgacugcaacacgaccugccagaccccgaagggcgccaucaacaccucccugcccuuccagaacauccaccccaucaccaucggcaagugccccaaguacgucaagagcaccaagcugcgccucgcgacggggcugcggaacgugccguccauccagagccgcggccuguucggggccaucgccggcuucaucgagggcggguggaccggcaugguggacgggugguacggcuaccaccaccagaacgagcagggguccggcuacgccgccgaccucaagagcacccagaacgcgaucgacgagaucaccaacaaggugaacuccgucaucgagaagaugaacacgcaguucaccgccguggggaaggaguucaaccaccuggagaagcggaucgagaaccugaacaagaaggucgacgacggcuuccucgacaucuggaccuacaacgccgagcugcuggugcuccuggagaacgagcgcacccuggacuaccacgacagcaacgugaagaaccucuacgagaagguccggucccagcugaagaacaacgccaaggagaucggcaacgggugcuucgaguucuaccacaagugcgacaacacgugcauggagagcgugaagaacggcaccuacgacuaccccaaguacuccgaggaggccaagcugaaccgcgaggagaucgacggggugaagcucgagagcacccggaucuaccagauccuggcgaucuacuccaccgucgccagcucccuggugcucguggucagccugggcgccaucagcuucuggaugugcuccaacgggagccugcagugccgcaucugcaucuga

SEQ ID NO: 70218 - RNA, 1701 nt, Artificial Sequence
  derived and/or modified CDS sequence (opt1) from hemagglutinin__InfluenzaA__ADO79929
augaaggccauccuggugguccuccuguacaccuucgccaccgcgaacgccgacacgcugugcaucggcuaccacgccaacaacagcaccgacaccguggacaccgugcucgagaagaacgucacggugacccacuccgugaaccugcuggaggacaagcacaacgggaagcucugcaagcugcgcggcgucgcgccccugcaccucgggaagugcaacaucgccggcuggauccuggggaacccggagugcgagagccuguccaccgcgagcuccuggagcuacaucguggagaccuccagcacggacaaguggaccugcuaccccggcgacuucaucgacuacgaggagcuccgggagcagcuguccagcguguccagcuucgagcgcuucgagaucuuccccaagaccuccagcuggcccaaccacgacuccaacaagggcgucaccgccgccugcccgcacgccggggccaagagcuucuacaagaaccugaucuggcucgugaagaagggcaacuccuaccccaagcugagcaaguccuacaucaacgacaaggggaaggaggugcugguccucuggggcauccaccaccccagcacgagcgccgaccagcagucccuguaccagaacgccgacgccuacguguucguggggaccagccgguacuccaagaaguucaagcccgagaucgccauccgcccgaagguccggggccaggagggccgcaugaacuacuacuggacccugguggagcccggggacaagaucaccuucgaggcgacgggcaaccucguggucccccgguacgccuucgccauggagcgcaacgccgggagcggcaucaucaucuccgacacccccgugcacgacugcaacacgaccugccagaccccgaagggcgccaucaacaccagccugcccuuccagaacauccaccccaucaccaucgggaagugccccaaguacgugaaguccaccaagcugcggcucgcgacgggccugcgcaacaucccgagcauccagucccgggggcuguucggcgccaucgccggguucaucgagggcggcuggaccgggauggucgacggcugguacggguaccaccaccagaacgagcagggcagcggguacgccgccgaccucaaguccacccagaacgcgaucgacgagaucaccaacaaggugaacagcgugaucgagaagaugaacacgcaguucaccgccgucggcaaggaguucaaccaccuggagaagcgcaucgagaaccugaacaagaagguggacgacggcuuccucgacaucuggaccuacaacgccgagcugcugguccuccuggagaacgagcggacccuggacuaccacgacuccaacgugaagaaccucuacgagaaggugcgcagccagcugaagaacaacgccaaggagaucgggaacggcugcuucgaguucuaccacaagugcgacaacacgugcauggaguccgucaagaacgggaccuacgacuaccccaaguacagcgaggaggccaagcugaaccgggaggagaucgacggcgugaagcucgaguccacccgcaucuaccagauccuggcgaucuacagcaccguggccuccagccugguccucguggugagccugggggccaucuccuucuggaugugcagcaacggcucccugcagugccggaucugcaucuga

SEQ ID NO: 70219 - RNA, 1701 nt, Artificial Sequence
  derived and/or modified CDS sequence (opt1) from hemagglutinin__InfluenzaA__ADO79930
augaaggccauccuggugguccuccuguacaccuucgccaccgcgaacgccgacacgcugugcaucggcuaccacgccaacaacagcaccgacaccguggacaccgugcucgagaagaacgucacggugacccacuccgugaaccugcuggaggacaagcacaacgggaagcucugcaagcugcgcggcgucgcgccccugcaccucgggaagugcaacaucgccggcuggauccuggggaacccggagugcgagagccuguccaccgcgagcuccuggagcuacaucguggagaccuccagcacggacaaguggaccugcuaccccggcgacuucaucgacuacgaggagcuccgggagcagcuguccagcguguccagcuucgagcgcuucgagaucuuccccaagaccuccagcuggcccaaccacgacuccaacaagggcgucaccgccgccugcccgcacgccggggccaagagcuucuacaagaaccugaucuggcucgugaagaagggcaacuccuaccccaagcugagcaaguccuacaucaacgacaaggggaaggaggugcugguccucuggggcauccaccaccccagcacgagcgccgaccagcagucccuguaccagaacgccgacgccuacguguucguggggaccagccgguacuccaagaaguucaagcccgagaucgccauccgcccgaagguccgggaccgcgagggccggaugaacuacuacuggacccugguggagcccggcgacaagaucaccuucgaggcgacggggaaccucguggucccccgcuacgccuucgccauggagcggaacgccggcagcgggaucaucaucuccgacacccccgugcacaacugcaacacgaccugccagaccccgaagggcgccaucaacaccagccugcccuuccagaacauccaccccaucaccaucggcaagugccccaaguacgugaaguccaccaagcugcgccucgcgacggggcugcggaacgucccgagcauccagucccgcggccuguucggggccaucgccggcuucaucgagggcggguggaccggcaugguggacgggugguacggcuaccaccaccagaacgagcaggggagcggcuacgccgccgaccucaaguccacccagaacgcgaucgacgagaucaccaacaaggugaacagcgucaucgagaagaugaacacgcaguucaccgccguggggaaggaguucaaccaccuggagaagcggaucgagaaccugaacaagaaggucgacgacggcuuccucgacaucuggaccuacaacgccgagcugcuggugcuccuggagaacgagcgcacccuggacuaccacgacuccaacgugaagaaccucuacgagaagguccggagccagcugaagaacaacgccaaggagaucggcaacgggugcuucgaguucuaccacaagugcgacaacacgugcauggaguccgugaagaacggcaccuacgacuaccccaaguacagcgaggaggccaagcugaaccgcgaggagaucgacggggugaagcucgaguccacccggaucuaccagauccuggcgaucuacagcaccgucgccuccagccuggugcucguggucagccugggcgccaucuccuucuggaugugcagcaacgggucccugcagugccgcaucugcaucuga

SEQ ID NO: 70220 - RNA, 1701 nt, Artificial Sequence
  derived and/or modified CDS sequence (opt1) from hemagglutinin__InfluenzaA__ADO84715
augaaggccauccuggugguccuccuguacaccuucgccaccgcgaacgccggcacgcugugcaucggguaccacgccaacaacagcaccgacaccguggacaccgugcucgagaagaacgucacggugacccacuccgugaaccugcuggaggacaagcacaacggcaagcucugcaagcugcgcggggucgcgccccugcaccucggcaagugcaacaucgccggguggauccugggcaacccggagugcgagagccuguccaccgcgagcuccuggagcuacaucguggagaccuucuccagcgacaacggcacgugcuaccccggggacuucaucgacuacgaggagcuccgggagcagcuguccagcguguccagcuucgagcgcuucgagaucuuccccaagaccuccagcuggcccaaccacgacuccaacaagggcgucaccgccgccugcccgcacgccggggccaagagcuucuacaagaaccugaucuggcucgugaagaagggcaacuccuaccccaagcugagcaaguccuacaucaacgacaaggggaaggaggugcugguccucuggggcauccaccaccccagcaccagcgccgaccagcagucccuguaccagaacgccgacgccuacguguucgugggcacgagccgguacuccaagaaguucaagcccgagaucgccauccgcccgaagguccgggaccaggaggggcgcaugaacuacuacuggacccugguggagcccggcgacaagaucaccuucgaggcgaccgggaaccucguggucccccgguacgccuucgccauggagcgcaacgccggcagcggcaucaucaucuccgacacgcccgugcacgacugcaacacgaccugccagaccccgaagggggccaucaacaccagccugcccuuccagaacauccaccccaucaccaucggcaagugccccaaguacgugaaguccaccaagcugcggcucgcgaccgggcugcgcaacgucccgagcauccagucccggggccuguucggggccaucgccggcuucaucgagggcggguggacgggcaugguggacgggugguacggcuaccaccaccagaacgagcaggggagcggcuacgccgccgaccucaaguccacccagaacgcgaucgacgagaucaccaacaaggugaacagcgucaucgagaagaugaacacccaguucacggccgugggcaaggaguucaaccaccuggagaagcgcaucgagaaccugaacaagaaggucgacgacggguuccucgacaucuggaccuacaacgccgagcugcuggugcuccuggagaacgagcggacccuggacuaccacgacuccaacgugaagaaccucuacgagaagguccgcagccagcugaagaacaacgccaaggagaucggcaacgggugcuucgaguucuaccacaagugcgacaacacgugcauggaguccgugaagaacggcaccuacgacuaccccaaguacagcgaggaggccaagcugaaccgggaggagaucgacggggugaagcucgaguccacccgcaucuaccagauccuggcgaucuacagcaccgucgccuccagccuggugcucguggucagccugggcgccaucuccuucuggaugugcagcaacggcucccugcagugccggaucugcaucuga

SEQ ID NO: 70221 - RNA, 1701 nt, Artificial Sequence; identical to SEQ ID NO: 66873
  derived and/or modified CDS sequence (opt1) from hemagglutinin__InfluenzaA__ADP95341

SEQ ID NO: 70222 - RNA, 1701 nt, Artificial Sequence; identical to SEQ ID NO: 66680
  derived and/or modified CDS sequence (opt1) from hemagglutinin__InfluenzaA__ADP95351

SEQ ID NO: 70223 - RNA, 1701 nt, Artificial Sequence; identical to SEQ ID NO: 66680
  derived and/or modified CDS sequence (opt1) from hemagglutinin__InfluenzaA__ADP95361

SEQ ID NO: 70224 - RNA, 1701 nt, Artificial Sequence; identical to SEQ ID NO: 66680
  derived and/or modified CDS sequence (opt1) from hemagglutinin__InfluenzaA__ADP95371

SEQ ID NO: 70225 - RNA, 1701 nt, Artificial Sequence; identical to SEQ ID NO: 66680
  derived and/or modified CDS sequence (opt1) from hemagglutinin__InfluenzaA__ADP95381

SEQ ID NO: 70226 - RNA, 1701 nt, Artificial Sequence; identical to SEQ ID NO: 66680
  derived and/or modified CDS sequence (opt1) from hemagglutinin__InfluenzaA__ADP95391

SEQ ID NO: 70227 - RNA, 1701 nt, Artificial Sequence; identical to SEQ ID NO: 66935
  derived and/or modified CDS sequence (opt1) from hemagglutinin__InfluenzaA__ADQ28007

SEQ ID NO: 70228 - RNA, 1701 nt, Artificial Sequence; identical to SEQ ID NO: 66693
  derived and/or modified CDS sequence (opt1) from hemagglutinin__InfluenzaA__ADQ28008

SEQ ID NO: 70229 - RNA, 1701 nt, Artificial Sequence; identical to SEQ ID NO: 68544
  derived and/or modified CDS sequence (opt1) from hemagglutinin__InfluenzaA__ADQ28009

SEQ ID NO: 70230 - RNA, 1701 nt, Artificial Sequence
  derived and/or modified CDS sequence (opt1) from hemagglutinin__InfluenzaA__ADQ28010
augaaggccauccuggugguccuccuguacaccuucgccaccgcgaacgccgacacgcugugcaucggcuaccacgccaacaacagcaccgacaccguggacaccgugcucgagaagaacgucacggugacccacuccgugaaccugcuggaggacaagcacaacgggaagcucugcaagcugcgcggcgucgcgccccugcaccucgggaagugcaacaucgccggcuggauccuggggaacccggagugcgagagccuguccaccgccagcuccuggagcuacaucguggagaccuccagcuccgacaacggcacgugcuaccccggcgacuucaucaacuacgaggagcuccgggagcagcugagcuccgugagcuccuucgagcgcuucgagaucuuccccaagaccagcuccuggcccaaccacgacagcaacaagggggucaccgccgccugcccgcacgccggcgcgaaguccuucuacaagagccugaucuggcucgugaagaaggggaacuccuaccccaagcugagcaagagcuacaucaacgacaagggcaaggaggugcugguccucugggggauccaccaccccuccaccagcgccgaccagcagucccuguaccagaacgccgacgccuacguguucgugggcacgagccgguacuccaagaaguucaagcccgagaucgccauccgcccgaagguccgggaccaggagggccgcaugaacuacuacuggacccugguggagcccggggacaagaucaccuucgaggcgaccggcaaccucguggucccccgguacgccuucgccauggagcgcaacgccgggagcggcaucaucaucuccgacacgcccgugcacgacugcaacacgaccugccagaccccgaagggcgccaucaacaccagccugcccuuccagaacauccaccccaucaccaucgggaagugccccaaguacgugaaguccaccaagcugcggcucgcgaccggccugcgcaacgucccgagcauccagucccgggggcuguucggcgccaucgccggguucaucgagggcggcuggacggggaugguggacggcugguacggguaccaccaccagaacgagcagggcagcggguacgccgccgaccucaaguccacccagaacgcgaucgacgagaucaccaacaaggugaacagcgucaucgagaagaugaacacccaguucacggccgugggcaaggaguucaaccaccuggagaagcgcaucgagaaccugaacaagaaggucgacgacggcuuccucgacaucuggaccuacaacgccgagcugcuggugcuccuggagaacgagcggacccuggacuaccacgacuccaacgugaagaaccucuacgagaagguccgcagccagcugaagaacaacgccaaggagaucgggaacggcugcuucgaguucuaccacaagugcgacaacacgugcauggaguccgugaagaacgggaccuacgacuaccccaaguacagcgaggaggccaagcugaaccgggaggagaucgacggcgugaagcucgaguccacccgcaucuaccagauccuggcgaucuacagcaccgucgccagcucccuggugcucguggucagccugggggccaucuccuucuggaugugcagcaacggcucccugcagugccggaucugcaucuga

SEQ ID NO: 70231 - RNA, 1701 nt, Artificial Sequence; identical to SEQ ID NO: 66693
  derived and/or modified CDS sequence (opt1) from hemagglutinin__InfluenzaA__ADQ28011

SEQ ID NO: 70232 - RNA, 1701 nt, Artificial Sequence; identical to SEQ ID NO: 66693
  derived and/or modified CDS sequence (opt1) from hemagglutinin__InfluenzaA__ADQ28012

SEQ ID NO: 70233 - RNA, 1701 nt, Artificial Sequence; identical to SEQ ID NO: 66693
  derived and/or modified CDS sequence (opt1) from hemagglutinin__InfluenzaA__ADQ28013

SEQ ID NO: 70234 - RNA, 1701 nt, Artificial Sequence; identical to SEQ ID NO: 66935
  derived and/or modified CDS sequence (opt1) from hemagglutinin__InfluenzaA__ADQ28014

SEQ ID NO: 70235 - RNA, 1701 nt, Artificial Sequence; identical to SEQ ID NO: 66935
  derived and/or modified CDS sequence (opt1) from hemagglutinin__InfluenzaA__ADQ28015

SEQ ID NO: 70236 - RNA, 1701 nt, Artificial Sequence; identical to SEQ ID NO: 66693
  derived and/or modified CDS sequence (opt1) from hemagglutinin__InfluenzaA__ADQ28016

SEQ ID NO: 70237 - RNA, 1701 nt, Artificial Sequence; identical to SEQ ID NO: 66693
  derived and/or modified CDS sequence (opt1) from hemagglutinin__InfluenzaA__ADQ28017

SEQ ID NO: 70238 - RNA, 1701 nt, Artificial Sequence; identical to SEQ ID NO: 68939
  derived and/or modified CDS sequence (opt1) from hemagglutinin__InfluenzaA__ADQ28018

SEQ ID NO: 70239 - RNA, 1701 nt, Artificial Sequence; identical to SEQ ID NO: 66935
  derived and/or modified CDS sequence (opt1) from hemagglutinin__InfluenzaA__ADQ28019

SEQ ID NO: 70240 - RNA, 1701 nt, Artificial Sequence
  derived and/or modified CDS sequence (opt1) from hemagglutinin__InfluenzaA__ADQ28020
auggaggccauccuggugguccuccuguacaccuucgccaccgcgaacgccgacacgcugugcaucggcuaccacgccaacaacagcaccgacaccguggacaccgugcucgagaagaacgucacggugacccacuccgugaaccugcuggaggacaagcacaacgggaagcucugcaagcugcgcggcgucgcgccccugcaccucgggaagugcaacaucgccggcuggauccuggggaacccggagugcgagagccuguccaccgccagcuccuggagcuacaucguggagaccuccagcuccgacaacggcacgugcuaccccggcgacuucaucgacuacgaggagcuccgggagcagcugagcuccgugagcuccuucgagcgcuucgagaucuuccccaagaccagcuccuggcccaaccacgacagcaacaagggggucaccgccgccugcccgcaggccggcgcgaaguccuucuacaagaaccugaucuggcucgugaagaaggggaacagcuaccccaagcuguccaagagcuacaucaacgacaagggcaaggaggugcugguccucugggggauccaccaccccagcaccuccgccgaccagcagagccuguaccagaacgccgacgccuacguguucgugggcuccagccgguacuccaagaaguucaagcccgagaucgccauccgcccgaagguccgggaccaggagggccgcaugaacuacuacuggacgcugguggagcccggggacaagaucaccuucgaggcgaccggcaaccucguggucccccgguacgccuucgccauggagcgcaacgccgggagcggcaucaucaucuccgacacccccgugcacgacugcaacacgaccugccagaccccgaagggcgccaucaacaccagccugcccuuccacaacauccaccccaucacgaucgggaagugccccaaguacgugaaguccaccaagcugcggcucgcgaccggccugcgcaacgucccgagcauccagucccgggggcuguucggcgccaucgccggguucaucgagggcggcuggaccgggaugguggacggcugguacggguaccaccaccagaacgagcagggcagcggguacgccgccgaccucaaguccacgcagaacgcgaucgacgagaucaccaacaaggugaacagcgucaucgagaagaugaacacccaguucaccgccgugggcaaggaguucaaccaccuggagaagcgcaucgagaaccugaacaagaaggucgacgacggcuuccucgacaucuggacguacaacgccgagcugcuggugcuccuggagaacgagcggacccuggacuaccacgacuccaacgugaagaaccucuacgagaagguccgcagccagcugaagaacaacgccaaggagaucgggaacggcugcuucgaguucuaccacaagugcgacaacacgugcauggaguccgugaagaacgggaccuacgacuaccccaaguacagcgaggaggccaagcugaaccgggaggagaucgacggcgugaagcucgaguccacccgcaucuaccagauccuggcgaucuacagcaccgucgccagcucccuggugcucguggucagccugggggccaucuccuucuggaugugcagcaacggcucccugcagugccggaucugcaucuga

SEQ ID NO: 70241 - RNA, 1701 nt, Artificial Sequence; identical to SEQ ID NO: 67887
  derived and/or modified CDS sequence (opt1) from hemagglutinin__InfluenzaA__ADQ28021

SEQ ID NO: 70242 - RNA, 1701 nt, Artificial Sequence
  derived and/or modified CDS sequence (opt1) from hemagglutinin__InfluenzaA__ADQ28022
augaaggccauccuggugguccuccuguacaccuucgccaccgcgaacgccgacacgcugugcaucggcuaccacgccaacaacagcaccgacaccguggacaccgugcucgagaagaacgucacggugacccacuccgugaaccugcuggaggacaagcacaacgggaagcucugcaagcugcgcggcgucgcgccccugcaccucgggaagugcaacaucgccggcuggauccuggggaacccggagugcgagagccuguccaccgccagcuccuggagcuacaucguggagaccuccagcuccgacaacggcacgugcuaccccggcaacuucaucgacuacgaggagcuccgggagcagcugagcuccgugagcuccuucgagcgcuucgagaucuuccccaagaccagcuccuggcccaaccacgacagcaacaagggggucaccgccgccugcccgcacgccggcgcgaaguccuucuacaagaaccugaucuggcucgugaagaaggggaacagcuaccccaagcuguccaagagcuacaucaacgacaagggcaaggaggugcugguccucugggggauccaccaccccagcaccuccgccgaccagcagagccuguaccagaacgccgacgccuacguguucgugggcacgucccgguacagcaagaaguucaagcccgagaucgccauccgcccgaagguccggggccaggaggggcgcaugaacuacuacuggacccugguggagcccggcgacaagaucaccuucgaggcgaccgggaaccucguggucccccgguacgccuucgccauggagcgcaacgccggcuccggcaucaucaucagcgacacgcccgugcacgacugcaacacgaccugccagaccccgaagggggccaucaacaccucccugcccuuccagaacauccaccccaucaccaucggcaagugccccaaguacgucaagagcaccaagcugcggcucgcgaccgggcugcgcaacgugccguccauccagagccggggccuguucggggccaucgccggcuucaucgagggcggguggacgggcaugguggacgggugguacggcuaccaccaccagaacgagcagggguccggcuacgccgccgaccucaagagcacccagaacgcgaucgacgagaucaccaacaaggugaacuccgucaucgagaagaugaacacccaguucacggccgugggcaaggaguucaaccaccuggagaagcgcaucgagaaccugaacaagaaggucgacgacggguuccucgacaucuggaccuacaacgccgagcugcuggugcuccuggagaacgagcggacccuggacuaccacgacagcaacgugaagaaccucuacgagaagguccgcucccagcugaagaacaacgccaaggagaucggcaacgggugcuucgaguucuaccacaagugcgacaacacgugcauggagagcgugaagaacggcaccuacgacuaccccaaguacuccgaggaggccaagcugaaccgggaggagaucgacggggugaagcucgagagcacccgcaucuaccagauccuggcgaucuacuccaccgucgccagcagccuggugcucguggucucccugggcgccaucagcuucuggaugugcuccaacggcagccugcagugccggaucugcaucuga

SEQ ID NO: 70243 - RNA, 1701 nt, Artificial Sequence; identical to SEQ ID NO: 66693
  derived and/or modified CDS sequence (opt1) from hemagglutinin__InfluenzaA__ADQ28023

SEQ ID NO: 70244 - RNA, 1701 nt, Artificial Sequence; identical to SEQ ID NO: 66935
  derived and/or modified CDS sequence (opt1) from hemagglutinin__InfluenzaA__ADQ28024

SEQ ID NO: 70245 - RNA, 1701 nt, Artificial Sequence; identical to SEQ ID NO: 66935
  derived and/or modified CDS sequence (opt1) from hemagglutinin__InfluenzaA__ADQ28025

SEQ ID NO: 70246 - RNA, 1701 nt, Artificial Sequence; identical to SEQ ID NO: 67438
  derived and/or modified CDS sequence (opt1) from hemagglutinin__InfluenzaA__ADQ28028

SEQ ID NO: 70247 - RNA, 1701 nt, Artificial Sequence; identical to SEQ ID NO: 68918
  derived and/or modified CDS sequence (opt1) from hemagglutinin__InfluenzaA__ADQ28029

SEQ ID NO: 70248 - RNA, 1701 nt, Artificial Sequence
  derived and/or modified CDS sequence (opt1) from hemagglutinin__InfluenzaA__ADQ28030
augaaggccauccuggugguccuccuguacaccuucgccaccgcgaacgccgacacgcugugcaucggcuaccacgccaacaacagcaccgacaccguggacaccgugcucgagaagaacgucacggugacccacuccgugaaccugcuggaggacaagcacaacgggaagcucugcaagcugcgcggcgucgcgccccugcaccucgggaagugcaacaucgccggcuggauccuggggaacccggagugcgagagccuguccaccgccagcuccuggagcuacaucguggagaccuccagcuccgacaacggcacgugcuaccccggcgacuucaucaacuacgaggagcuccgggagcagcugagcuccgugagcuccuucgagcgcuucgagaucuuccccaagaccagcuccuggcccaaccacgacagcaacaaggggaucaccgccgccugcccgcacgccggcgcgaaguccuucuacaagaaccugaucuggcucgucaagaaggggaacagcuaccccaagcuguccaagagcuacaucaacgacaagggcaaggaggugcuggugcucugggggauccaccaccccagcaccuccgccgaccagcagagccuguaccagaacgccgacgccuacgucuucgugggcacgucccgguacagcaagaaguucaagcccgagaucgccauccgcccgaaggugcgggaccaggagggccgcaugaacuacuacuggacccuggucgagcccggggacaagaucaccuucgaggcgaccggcaaccucguggugccccgguacgccuucgccauggagcgcaacgccggguccggcaucaucaucagcgacacgcccguccacgacugcaacacgaccugccagaccccgaagggcgccaucaacaccucccugcccuuccagaacauccaccccaucaccaucgggaagugccccaaguacgucaagagcaccaagcugcggcucgcgaccggccugcgcaacgugccguccauccagagccgggggcuguucggcgccaucgccggguucaucgagggcggcuggacggggaugguggacggcugguacggguaccaccaccagaacgagcagggcuccggguacgccgccgaccucaagagcacccagaacgcgaucgacgagaucaccaacaaggugaacuccgugaucgagaagaugaacacccaguucacggccgucggcaaggaguucaaccaccuggagaagcgcaucgagaaccugaacaagaagguggacgacggcuuccucgacaucuggaccuacaacgccgagcugcugguccuccuggagaacgagcggacccuggacuaccacgacagcaacgugaagaaccucuacgagaaggugcgcucccagcugaagaacaacgccaaggagaucgggaacggcugcuucgaguucuaccacaagugcgacaacacgugcauggagagcgucaagaacgggaccuacgacuaccccaaguacuccgaggaggccaagcugaaccgggaggagaucgacggcgugaagcucgagagcacccgcaucuaccagauccuggcgaucuacuccaccguggccagcagccugguccucguggugucccugggggccaucagcuucuggaugugcuccaacggcagccugcagugccggaucugcaucuga

SEQ ID NO: 70249 - RNA, 1701 nt, Artificial Sequence; identical to SEQ ID NO: 67887
  derived and/or modified CDS sequence (opt1) from hemagglutinin__InfluenzaA__ADQ28031

SEQ ID NO: 70250 - RNA, 1701 nt, Artificial Sequence; identical to SEQ ID NO: 66935
  derived and/or modified CDS sequence (opt1) from hemagglutinin__InfluenzaA__ADQ28032

SEQ ID NO: 70251 - RNA, 1701 nt, Artificial Sequence
  derived and/or modified CDS sequence (opt1) from hemagglutinin__InfluenzaA__ADQ28034
augaaggccauccuggugguccuccuguacaccuucgccaccgcgaacgccgacacgcugugcaucggcuaccacgccaacaacagcaccgacaccguggacaccgugcucgagaagaacgucacggugacccacuccgugaaccugcuggaggacaagcacaacgggaagcucugcaagcugcgcggcgucgcgccccugcaccucgggaagugcaacaucgccggcuggauccuggggaacccggagugcgagagccuguccaccgccagcuccuggagcuacaucguggagaccuccagcuccgacaacggcacgugcuaccccggcgacuucaucaacuacgaggagcuccgggagcagcugagcuccgugagcuccuucgagcgcuucgagaucuuccccaagaccagcuccuggcccaaccacgacagcaacaagggggucaccgccgccugcccgcacgccggcgcgaaguccuucuacaagaaccugaucuggcucgugaagaaggggaacagcuaccccaagcuguccaagagcuacaucaacgacaagggcaaggaggugcugguccucugggggauccaccaccccagcaccuccgccgaccagcagagccuguaccagaacgccgacgccuacguguucgugggcacgucccgguacagcaagaaguucaagcccgagaucgccauccgcccgaagguccggggccaggaggggcgcaugaacuacuacuggaccaucguggagcccggcgacaagaucaccuucgaggcgaccgggaaccugguggucccccgguacgccuucgccauggagcgcaacgccggcuccggcaucaucaucagcgacacgcccgugcacgacugcaacacgaccugccagaccccgaagggggccaucaacaccucccuccccuuccagaacauccaccccaucaccaucggcaagugccccaaguacgucaagagcaccaagcugcggcuggcgaccgggcuccgcaacgugccguccauccagagccggggccuguucggggccaucgccggcuucaucgagggcggguggacgggcaugguggacgggugguacggcuaccaccaccagaacgagcagggguccggcuacgccgccgaccucaagagcacccagaacgcgaucgacgagaucaccaacaaggugaacuccgucaucgagaagaugaacacccaguucacggccgugggcaaggaguucaaccaccuggagaagcgcaucgagaaccugaaccggaaggucgacgacggguuccuggacaucuggaccuacaacgccgagcuccuggugcugcucgagaacgagcgcacccuggacuaccacgacagcaacgugaagaaccuguacgagaagguccggucccagcucaagaacaacgccaaggagaucggcaacgggugcuucgaguucuaccacaagugcgacaacacgugcauggagagcgugaagaacggcaccuacgacuaccccaaguacuccgaggaggccaagcugaaccgcgaggagaucgacggggugaagcuggagagcacccggaucuaccagauccucgcgaucuacuccaccgucgccagcagccuggugcugguggucucccucggcgccaucagcuucuggaugugcuccaacggcagccugcagugccgcaucugcaucuga

SEQ ID NO: 70252 - RNA, 1701 nt, Artificial Sequence
  derived and/or modified CDS sequence (opt1) from hemagglutinin__InfluenzaA__ADQ28035
augaaggccauccuggugguccuccuguacaccuucgccaccgcgaacgccgacacgcugugcaucggcuaccacgccaacaacagcaccgacaccguggacaccgugcucgagaagaacgucacggugacccacuccgugaaccugcuggaggacaagcacaacgggaagcucugccgccugcggggcgucgcgccccugcaccucgggaagugcaacaucgccggcuggauccuggggaacccggagugcgagagccuguccaccgccagcuccuggagcuacaucguggagaccuccagcuccgacaacggcacgugcuaccccggcgacuucaucgacuacgaggagcuccgcgagcagcugagcuccgugagcuccuucgagcgguucgagaucuuccccaagaccagcuccuggcccaaccacgacagcaacaagggggucaccgccgccugcccgcacgccggcgcgaaguccuucuacaagaaccugaucuggcucgugaagaaggggaacagcuaccccaagcuguccaagagcuacaucaacgacaagggcaaggaggugcugguccucugggggauccaccaccccagcaccuccgccgaccagcagagccuguaccagaacgccgacgccuacguguucgugggcacgucccgcuacagcaagaaguucaagcccgagaucgccauccggccgaagguccgcggccaggaggggcggaugaacuacuacuggacccugguggagcccggcgacaagaucaccuucgaggcgaccgggaaccucguggucccccgcuacgccuucgccauggagcggaacgccggcuccggcaucaucaucagcgacacgcccgugcacgacugcaacacgaccugccagaccccgaagggggccaucaacaccucccugcccuuccagaacauccaccccaucaccaucggcaagugccccaaguacgucaagagcaccaagcugcgccucgcgaccgggcugcggaacgugccguccauccagagccgcggccuguucggggccaucgccggcuucaucgagggcggguggacgggcaugguggacgggugguacggcuaccaccaccagaacgagcagggguccggcuacgccgccgaccucaagagcacccagaacgcgaucgacgagaucaccaacaaggugaacuccgucaucgagaagaugaacacccaguucacggccgugggcaaggaguucaaccaccuggagaagcggaucgagaaccugaacaagaaggucgacgacggguuccucgacaucuggaccuacaacgccgagcugcuggugcuccuggagaacgagcgcacccuggacuaccacgacagcaacgugaagaaccucuacgagaagguccggucccagcugaagaacaacgccaaggagaucggcaacgggugcuucgaguucuaccacaagugcgacaacacgugcauggagagcgugaagaacggcaccuacgacuaccccaaguacuccgaggaggccaagcugaaccgcgaggagaucgacggggugaagcucgagagcacccggaucuaccagauccuggcgaucuacuccaccgucgccagcagccuggugcucguggucucccugggcgccaucagcuucuggaugugcuccaacggcagccugcagugccgcaucugcaucuga

SEQ ID NO: 70253 - RNA, 1701 nt, Artificial Sequence; identical to SEQ ID NO: 66693
  derived and/or modified CDS sequence (opt1) from hemagglutinin__InfluenzaA__ADQ28036

SEQ ID NO: 70254 - RNA, 1701 nt, Artificial Sequence; identical to SEQ ID NO: 66693
  derived and/or modified CDS sequence (opt1) from hemagglutinin__InfluenzaA__ADQ28037

SEQ ID NO: 70255 - RNA, 1701 nt, Artificial Sequence; identical to SEQ ID NO: 66935
  derived and/or modified CDS sequence (opt1) from hemagglutinin__InfluenzaA__ADQ28038

SEQ ID NO: 70256 - RNA, 1701 nt, Artificial Sequence; identical to SEQ ID NO: 66693
  derived and/or modified CDS sequence (opt1) from hemagglutinin__InfluenzaA__ADQ28039

SEQ ID NO: 70257 - RNA, 1701 nt, Artificial Sequence; identical to SEQ ID NO: 66935
  derived and/or modified CDS sequence (opt1) from hemagglutinin__InfluenzaA__ADQ28040

SEQ ID NO: 70258 - RNA, 1701 nt, Artificial Sequence; identical to SEQ ID NO: 66935
  derived and/or modified CDS sequence (opt1) from hemagglutinin__InfluenzaA__ADQ28041

SEQ ID NO: 70259 - RNA, 1701 nt, Artificial Sequence
  derived and/or modified CDS sequence (opt1) from hemagglutinin__InfluenzaA__ADQ28043
auggaggccauccuggugguccuccuguacaccuucgccaccgcgaacgccgacacgcugugcaucggcuaccacgccaacaacagcaccgacaccguggacaccgugcucgagaagaacgucacggugacccacuccgugaaccugcuggaggacaagcacaacgggaagcucugcaagcugcgcggcgucgcgccccugcaccucgggaagugcaacaucgccggcuggauccuggggaacccggagugcgagagccuguccaccgccagcuccuggagcuacaucguggagaccuccagcuccgacaacggcacgugcuaccccggcgacuucaucgacuacgaggagcuccgggagcagcugagcuccgugagcuccuucgagcgcuucgagaucuuccccaagaccagcuccuggcccaaccacgacagcaacaagggggucaccgccgccugcccgcacgacggcgccaaguccuucuacaagaaccugaucuggcucgugaagaaggggaacagcuaccccaagcuguccaagagcuacaucaacgacaagggcaaggaggugcugguccucugggggauccaccaccccagcaccuccgcggaccagcagagccuguaccagaacgccgacgccuacguguucgugggcuccagccgguacuccaagaaguucaagcccgagaucgccauccgcccgaagguccgggaccaggagggccgcaugaacuacuacuggacgcugguggagcccggggacaagaucaccuucgaggccaccggcaaccucguggucccccgguacgcguucgccauggagcgcaacgccgggagcggcaucaucaucuccgacacccccgugcacgacugcaacacgaccugccagaccccgaagggcgccaucaacaccagccugcccuuccacaacauccaccccaucacgaucgggaagugccccaaguacgugaaguccaccaagcugcggcucgccaccggccugcgcaacgucccgagcauccagucccgggggcuguucggcgcgaucgccggguucaucgagggcggcuggaccgggaugguggacggcugguacggguaccaccaccagaacgagcagggcagcggguacgccgccgaccucaaguccacgcagaacgccaucgacgagaucaccaacaaggugaacagcgucaucgagaagaugaacacccaguucaccgcggugggcaaggaguucaaccaccuggagaagcgcaucgagaaccugaacaagaaggucgacgacggcuuccucgacaucuggacguacaacgccgagcugcuggugcuccuggagaacgagcggacccuggacuaccacgacuccaacgugaagaaccucuacgagaagguccgcagccagcugaagaacaacgccaaggagaucgggaacggcugcuucgaguucuaccacaagugcgacaacacgugcauggaguccgugaagaacgggaccuacgacuaccccaaguacagcgaggaggccaagcugaaccgggaggagaucgacggcgugaagcucgaguccacccgcaucuaccagauccuggccaucuacagcaccgucgcgagcucccuggugcucguggucagccugggggccaucuccuucuggaugugcagcaacggcucccugcagugccggaucugcaucuga

SEQ ID NO: 70260 - RNA, 1701 nt, Artificial Sequence; identical to SEQ ID NO: 66935
  derived and/or modified CDS sequence (opt1) from hemagglutinin__InfluenzaA__ADQ28044

SEQ ID NO: 70261 - RNA, 1701 nt, Artificial Sequence
  derived and/or modified CDS sequence (opt1) from hemagglutinin__InfluenzaA__ADQ28045
augaaggccauccuggugguccuccuguacaccuucgccaccgcgaacgccgacacgcugugcaucggcuaccacgccaacaacagcaccgacaccguggacaccgugcucgagaagaacgucacggugacccacuccgugaaccugcuggaggacaagcacaacgggaagcucugcaagcugcgcggcgucgcgccccugcaccucgggaagugcaacaucgccggcuggauccuggggaacccggagugcgagagccuguccaccgcgagcuccuggagcuacaucguggagaccuccagcuccgacaacggcacgugcuaccccggcgacuucaucgacuacgaggagcuccgggagcagcugagcuccgugagcuccuucgagcgcuucgagaucuuccccaagaccagcuccuggcccaaccacgacagcaacaagggggucaccgccgccugcucccacgccggcgccaagagcuucuacaagaaccugaucuggcucgugaagaaggggaacuccuacccgaagcugagcaagagcuacaucaacgacaagggcaaggaggugcugguccucugggggauccaccaccccuccaccagcgccgaccagcagucccuguaccagaacgccgacgccuacguguucgugggcacgagccgguacuccaagaaguucaagcccgagaucgccauccgccccaagguccgggaccaggagggccgcaugaacuacuacuggacccugguggagccgggggacaagaucaccuucgaggcgaccggcaaccucguggucccccgguacgccuucgccauggagcgcaacgccgggagcggcaucaucaucuccgacacgcccgugcacgacugcaacacgaccugccagacccccaagggcgccaucaacaccagccugccguuccagaacauccaccccaucaccaucgggaagugccccaaguacgugaaguccaccaagcugcggcucgcgaccggccugcgcaacguccccagcauccagucccgggggcuguucggcgccaucgccggguucaucgagggcggcuggacggggaugguggacggcugguacggguaccaccaccagaacgagcagggcagcggguacgccgccgaccucaaguccacccagaacgcgaucgacgagaucaccaacaaggugaacagcgucaucgagaagaugaacacccaguucacggccgugggcaaggaguucaaccaccuggagaagcgcaucgagaaccugaacaagaaggucgacgacggcuuccucgacaucuggaccuacaacgccgagcugcuggugcuccuggagaacgagcggacccuggacuaccacgacuccaacgugaagaaccucuacgagaagguccgcaaccagcugaagaacaacgccaaggagaucgggaacggcugcuucgaguucuaccacaagugcgacaacacgugcauggagagcgugaagaacgggaccuacgacuacccgaaguacuccgaggaggccaagcugaaccgggaggagaucgacggcgugaagcucgagagcacccgcaucuaccagauccuggcgaucuacuccaccgucgccagcagccuggugcucguggucucccugggggccaucagcuucuggaugugcuccaacggcagccugcagugccggaucugcaucuga

SEQ ID NO: 70262 - RNA, 1701 nt, Artificial Sequence; identical to SEQ ID NO: 67163
  derived and/or modified CDS sequence (opt1) from hemagglutinin__InfluenzaA__ADQ28047

SEQ ID NO: 70263 - RNA, 1701 nt, Artificial Sequence; identical to SEQ ID NO: 66693
  derived and/or modified CDS sequence (opt1) from hemagglutinin__InfluenzaA__ADQ28048

SEQ ID NO: 70264 - RNA, 1701 nt, Artificial Sequence; identical to SEQ ID NO: 66935
  derived and/or modified CDS sequence (opt1) from hemagglutinin__InfluenzaA__ADQ28049

SEQ ID NO: 70265 - RNA, 1701 nt, Artificial Sequence; identical to SEQ ID NO: 66693
  derived and/or modified CDS sequence (opt1) from hemagglutinin__InfluenzaA__ADQ28050

SEQ ID NO: 70266 - RNA, 1701 nt, Artificial Sequence
  derived and/or modified CDS sequence (opt1) from hemagglutinin__InfluenzaA__ADQ28051
augaaggccauccuggugguccuccuguacaccuucgccaccgcgaacgccgacacgcugugcaucggcuaccacgccaacaacagcaccgacaccguggacaccgugcucgagaagaacgucacggugacccacuccgugaaccugcuggaggacaagcacgacgggaagcucugcaagcugcgcggcgucgcgccccugcaccucgggaagugcaacaucgccggcuggauccuggggaacccggagugcgagagccuguccaccgccagcuccuggagcuacaucguggagaccuccagcuccgacaacggcacgugcuaccccggcgacuucaucaacuacgaggagcuccgggagcagcugagcuccgugagcuccuucgagcgcuucgagaucuuccccaagaccagcuccuggcccaaccacgacagcaacaagggggucaccgccgccugcccgcacgccggcgcgaaguccuucuacaagaaccugaucuggcucgugaagaaggggaacagcuaccccaagcuguccaagagcuacaucaacgacaagggcaaggaggugcugguccucugggggauccaccaccccagcaccuccgccgaccagcagagccuguaccagaacgccgacgccuacguguucgugggcacgucccgguacagcaagaaguucaagcccgagaucgccauccgcccgaagguccgggaccaggagggccgcaugaacuacuacuggacccugguggagcccggggacaagaucaccuucgaggcgaccggcaaccucguggucccccgguacgccuucgccauggagcgcaacgccggguccggcaucaucaucagcgacacgcccgugcacgacugcaacacgaccugccagaccccgaagggcgccaucaacaccucccugcccuuccagaacauccaccccaucaccaucgggaagugccccaaguacgucaagagcaccaagcugcggcucgcgaccggccugcgcaacgugccguccauccagagccgggggcuguucggcgccaucgccggguucaucgagggcggcuggacggggaugguggacggcugguacggguaccaccaccagaacgagcagggcuccggguacgccgccgaccucaagagcacccagaacgcgaucgacgagaucaccaacaaggugaacuccgucaucgagaagaugaacacccaguucacggccgugggcaaggaguucaaccaccuggagaagcgcaucgagaaccugaacaagaaggucgacgacggcuuccucgacaucuggaccuacaacgccgagcugcuggugcuccuggagaacgagcggacccuggacuaccacgacagcaacgugaagaaccucuacgagaagguccgcucccagcugaagaacaacgccaaggagaucgggaacggcugcuucgaguucuaccacaagugcgacaacacgugcauggagagcgugaagaacgggaccuacgacuaccccaaguacuccgaggaggccaagcugaaccgggaggagaucgacggcgugaagcucgagagcacccgcaucuaccagauccuggcgaucuacuccaccgucgccagcagccuggugcucguggucucccugggggccaucagcuucuggaugugcuccaacggcagccugcagugccggaucugcaucuga

SEQ ID NO: 70267 - RNA, 1701 nt, Artificial Sequence; identical to SEQ ID NO: 66693
  derived and/or modified CDS sequence (opt1) from hemagglutinin__InfluenzaA__ADQ28053

SEQ ID NO: 70268 - RNA, 1701 nt, Artificial Sequence; identical to SEQ ID NO: 66935
  derived and/or modified CDS sequence (opt1) from hemagglutinin__InfluenzaA__ADQ28055

SEQ ID NO: 70269 - RNA, 1701 nt, Artificial Sequence
  derived and/or modified CDS sequence (opt1) from hemagglutinin__InfluenzaA__ADQ28056
auggaggccauccuggugguccuccuguacaccuucgccaccgcggacgccgacacgcugugcaucggcuaccacgccaacaacagcaccgacaccguggacaccgugcucgagaagaacgucacggugacccacuccgugaaccugcuggaggacaagcacaacgggaagcucugcaagcugcgcggcgucgcgccccugcaccucgggaagugcaacaucgccggcuggauccuggggaacccggagugcgagagccuguccaccgccagcuccuggagcuacaucguggagaccuccagcuccgacaacggcacgugcuaccccggcgacuucaucgacuacgaggagcuccgggagcagcugagcuccgugagcuccuucgagcgcuucgagaucuuccccaagaccagcuccuggcccaaccacgacagcaacaagggggucaccgccgccugcccgcacgccggcgcgaaguccuucuacaagaaccugaucuggcucgugaagaaggggaacagcuaccccaagcuguccaagagcuacaucaacgacaagggcaaggaggugcugguccucugggggauccaccaccccagcaccuccgccgaccagcagagccuguaccagaacgccgacgccuacguguucgugggcuccagccgguacuccaagaaguucaagcccgagaucgccauccgcccgaagguccgggaccaggagggccgcaugaacuacuacuggacgcugguggagcccggggacaagaucaccuucgaggcgaccggcaaccucguggucccccgguacgccuucgccauggagcgcaacgccgggagcggcaucaucaucuccgacacccccgugcacgacugcaacacgaccugccagaccccgaagggcgccaucaacaccagccugcccuuccacaacauccaccccaucacgaucgggaagugccccaaguacgugaaguccaccaagcugcggcucgcgaccggccugcgcaacgucccgagcauccagucccgggggcuguucggcgccaucgccggguucaucgagggcggcuggaccgggaugguggacggcugguacggguaccaccaccagaacgagcagggcagcggguacgccgccgaccucaaguccacgcagaacgcgaucgacgagaucaccaacaaggugaacagcgucaucgagaagaugaacacccaguucaccgccgugggcaaggaguucaaccaccuggagaagcgcaucgagaaccugaacaagaaggucgacgacggcuuccucgacaucuggacguacaacgccgagcugcuggugcuccuggagaacgagcggacccuggacuaccacgacuccaacgugaagaaccucuacgagaagguccgcagccagcugaagaacaacgccaaggagaucgggaacggcugcuucgaguucuaccacaagugcgacaacacgugcauggaguccgugaagaacgggaccuacgacuaccccaaguacagcgaggaggccaagcugaaccgggaggagaucgacggcgugaagcucgaguccacccgcaucuaccagauccuggcgaucuacagcaccgucgccagcucccuggugcucguggucagccugggggccaucuccuucuggaugugcagcaacggcucccugcagugccggaucugcaucuga

SEQ ID NO: 70270 - RNA, 1701 nt, Artificial Sequence; identical to SEQ ID NO: 66693
  derived and/or modified CDS sequence (opt1) from hemagglutinin__InfluenzaA__ADQ28057

SEQ ID NO: 70271 - RNA, 1701 nt, Artificial Sequence; identical to SEQ ID NO: 66693
  derived and/or modified CDS sequence (opt1) from hemagglutinin__InfluenzaA__ADQ28058

SEQ ID NO: 70272 - RNA, 1701 nt, Artificial Sequence
  derived and/or modified CDS sequence (opt1) from hemagglutinin__InfluenzaA__ADQ28059
augaaggccauccuggugguccuccuguacacccuggccaccgcgaacgccgacacgcucugcaucggcuaccacgccaacaacagcaccgacaccguggacaccgugcuggagaagaacgucacggugacccacuccgugaaccugcucgaggacaagcacaacgggaagcugugcaagcugcgcggcgucgcgccccuccaccuggggaagugcaacaucgccggcuggauccuggggaacccggagugcgagagccucuccaccgccagcuccuggagcuacaucguggagaccuccagcuccgacaacggcacgugcuaccccggcgacuucaucgacuacgaggagcugcgggagcagcugagcuccgugagcuccuucgagcgcuucgagaucuuccccaagaccagcuccuggcccaaccacgacagcaacaagggggucaccgccgccugcccgcacgccggcgcgaaguccuucuacaagaaccucaucuggcuggugaagaaggggaacagcuaccccaagcuguccaagagcuacaucaacgacaagggcaaggaggugcucguccugugggggauccaccaccccagcaccuccgccgaccagcagagccuguaccagaacgccgacgccuacguguucgugggcacguccaaguacagcaagaaguucaagcccgagaucgccauccggccgaagguccgcgaccaggagggccggaugaacuacuacuggacccucguggagcccggggacaagaucaccuucgaggcgaccggcaaccugguggucccccgcuacgccuucgccauggagcggaacgccggguccggcaucaucaucagcgacacgcccgugcacgacugcaacacgaccugccagaccccgaagggcgccaucaacaccucccugcccuuccagaacauccaccccaucaccaucgggaagugccccaaguacgucaagagcaccaagcuccgccuggcgaccggccugcggaacgugccguccauccagagccgcgggcuguucggcgccaucgccggguucaucgagggcggcuggacggggaugguggacggcugguacggguaccaccaccagaacgagcagggcuccggguacgccgccgaccucaagagcacccagaacgcgaucgacgagaucaccaacaaggugaacuccgucaucgagaagaugaacacccaguucacggccgugggcaaggaguucaaccaccuggagaagcggaucgagaaccucaacaagaaggucgacgacggcuuccuggacaucuggaccuacaacgccgagcugcucgugcugcuggagaacgagcgcacccucgacuaccacgacagcaacgugaagaaccuguacgagaagguccggucccagcugaagaacaacgccaaggagaucgggaacggcugcuucgaguucuaccacaagugcgacaacacgugcauggagagcgugaagaacgggaccuacgacuaccccaaguacuccgaggaggccaagcucaaccgcgaggagaucgacggcgugaagcuggagagcacccggaucuaccagauccuggcgaucuacuccaccgucgccagcagccucgugcugguggucucccugggggccaucagcuucuggaugugcuccaacggcagccuccagugccgcaucugcaucuga

SEQ ID NO: 70273 - RNA, 1701 nt, Artificial Sequence; identical to SEQ ID NO: 66693
  derived and/or modified CDS sequence (opt1) from hemagglutinin__InfluenzaA__ADQ28060

SEQ ID NO: 70274 - RNA, 1701 nt, Artificial Sequence
  derived and/or modified CDS sequence (opt1) from hemagglutinin__InfluenzaA__ADQ28061
augaaggccauccuggugguccuccuguacaccuucgccaccgcgaacgccgacacgcugugcaucggcuaccacgccaacaacagcaccgacaccguggacaccgugcucgagaagaacgucacggugacccacuccgugaaccugcuggaggacaagcacaacgggaagcucugcaagcugcgcggcgucgcgccccugcaccucgggcggugcaacaucgccggcuggauccuggggaacccggagugcgagagccuguccaccgccagcuccuggagcuacaucguggagaccuccagcuccgacaacggcacgugcuaccccggcgacuucaucgacuacgaggagcuccgcgagcagcugagcuccgugagcuccuucgagcgguucgagaucuuccccaagaccagcuccuggcccaaccacgacagcaacaagggggucaccgccgccugcccgcacgccggcgcgaaguccuucuacaagaaccugaucuggcucgugaagaaggggaacagcuaccccaagcuguccaagagcuacaucaacgacaagggcaaggaggugcugguccucugggggauccaccaccccagcaccuccgccgaccagcagagccuguaccagaacgccgacgccaacguguucgugggcacgucccgcuacagcaagaaguucaagcccgagaucgccauccggccgaagguccgcgaccaggagggccggaugaacuacuacuggacccugguggagcccggggacaagaucaccuucgaggcgaccggcaaccucguggucccccgcuacgccuucgccauggagcggaacgccggguccggcaucaucaucagcgacacgcccgugcacgacugcaacacgaccugccagaccccgaagggcgccaucaacaccucccugcccuuccagaacauccaccccaucaccaucgggaagugccccaaguacgucaagagcaccaagcugcgccucgcgaccggccugcggaacgugccguccauccagagccgcgggcuguucggcgccaucgccggguucaucgagggcggcuggacggggaugguggacggcugguacggguaccaccaccagaacgagcagggcuccggguacgccgccgaccucaagagcacccagaacgcgaucgacgagaucaccaacaaggugaacuccgucaucgagaagaugaacacccaguucacggccgugggcaaggaguucaaccaccuggagaagcggaucgagaaccugaacaagaaggucgacgacggcuuccucgacaucuggaccuacaacgccgagcugcuggugcuccuggagaacgagcgcacccuggacuaccacgacagcaacgugaagaaccucuacgagaagguccggucccagcugaagaacaacgccaaggagaucgggaacggcugcuucgaguucuaccacaagugcgacaacacgugcauggagagcgugaagaacgggaccuacgacuaccccaaguacuccgaggaggccaagcugaaccgcgaggagaucgacggcgugaagcucgagagcacccggaucuaccagauccuggcgaucuacuccaccgucgccagcagccuggugcucguggucucccugggggccaucagcuucuggaugugcuccaacggcagccugcagugccgcaucugcaucuga

SEQ ID NO: 70275 - RNA, 1701 nt, Artificial Sequence
  derived and/or modified CDS sequence (opt1) from hemagglutinin__InfluenzaA__ADQ28063
augaaggccauccuggugguccuccuguacaccuucgccaccgcgaacgccgacacgcugugcaucggcuaccacgccaacaacagcaccgacaccguggacaccgugcucgagaagaacgucacggugacccacuccgugaaccugcuggaggacaagcacaacgggaagcucugcaagcugcgcggcgucgcgccccugcaccucgggaagugcaacaucgccggcuggauccuggggaacccggagugcgagagccuguccaccgccagcuccuggagcuacaucguggagaccuccagcuccgacaacggcacgugcuaccccggcgacuucaucaacuacgaggagcuccgggagcagcugagcuccgugagcuccuucgagcgcuucgagaucuuccccaagaccagcuccuggcccaaccacgacagcaacaagggggucaccgccgccugcccgcacgccggcgcgaaguccuucuacaagaaccugaucuggcucgugaagaaggggaacagcuaccccaagcuguccaagagcuacaucaacgacaagggcaaggaggugcugguccucugggggauccaccaccccagcaccuccgccgaccagcagagccuguaccagaacgccgacgccuacguguucgugggcacgucccgguacagcaagaaguucaagcccgagaucgccauccgcccgaagguccggaaccaggagggccgcaugaacuaccacuggacccuggugaagcccggggacaagaucaccuucgaggcgaccggcaaccucguggucccccgguacgccuucgccguggagcgcaacgccggguccggcaucaucaucagcgacacgcccgugcacgacugcaacacgaccugccagaccccgaagggcgccaucaacaccucccugcccuuccagaacauccaccccaucaccaucgggaagugccccaaguacgucaagagcaccaagcugcggcucgcgaccggccugcgcaacgugccguccauccagagccgggggcuguucggcgccaucgccggguucaucgagggcggcuggacggggaugguggacggcugguacggguaccaccaccagaacgagcagggcuccggguacgccgccgaccucaagagcacccagaacgcgaucgacgagaucaccaacaaggucaacuccgugaucgagaagaugaacacccaguucacggccgucggcaaggaguucaaccaccuggagaagcgcaucgagaaccugaacaagaagguggacgacggcuuccucgacaucuggaccuacaacgccgagcugcuggugcuccuggagaacgagcggacccuggacuaccacgacagcaacgucaagaaccucuacgagaaggugcgcucccagcugaagaacaacgccaaggagaucgggaacggcugcuucgaguucuaccacaagugcgacaacacgugcauggagagcgugaagaacgggaccuacgacuaccccaaguacuccgaggaggccaagcugaaccgggaggagaucgacggcgucaagcucgagagcacccgcaucuaccagauccuggcgaucuacuccaccguggccagcagccuggugcucgucgugucccugggggccaucagcuucuggaugugcuccaacggcagccugcagugccggaucugcaucuga

SEQ ID NO: 70276 - RNA, 1701 nt, Artificial Sequence; identical to SEQ ID NO: 67441
  derived and/or modified CDS sequence (opt1) from hemagglutinin__InfluenzaA__ADQ28064

SEQ ID NO: 70277 - RNA, 1701 nt, Artificial Sequence
  derived and/or modified CDS sequence (opt1) from hemagglutinin__InfluenzaA__ADQ28065
augaaggccauccuggugguccuccuguacaccuucgccaccgcgaacgccgacacgcugugcaucggcuaccacgccaacaacagcaccgacaccguggacaccgugcucgagaagaacgucacggugacccacuccgugaaccugcuggaggacaagcacaacgggaagcucugcaagcugcgcggcgucgcgccccugcaccucgggaagugcaacaucgccggcuggauccuggggaacccggagugcgagagccuguccaccgccagcuccuggagcuacaucguggagaccuccagcuccgacaacggcacgugcuaccccggcgacuucaucgacuacgaggagcuccgggagcagcugagcuccgugagcuccuucgagcgcuucgagaucuuccccaagaccagcuccuggcccaaccacgacagcaacaagggggucaccgccgccugcccgcacgccggcgcgaaguccuucuacaagaaccugaucuggcucgugaagaaggggaacagcuaccccaagcuguccaagagcuacaucaacgacaagggcaaggaggugcugguccucugggggauccaccaccccagcaccuccgccggccagcagagccuguaccagaacgccgacgccuacguguucgugggcacgucccgguacagcaagaaguucaagcccgagaucgccauccgcccgaagguccgggaccaggaggggcgcaugaacuacuacuggacccugguggagcccggcgacaagaucaccuucgaggcgaccgggaaccucguggucccccgguacgccuucgccauggagcgcaacgccggcuccggcaucaucaucagcgacacccaggugcacgacugcaacacgaccugccagacccccaagggggccaucaacacgucccugccguuccagaacauccaccccaucaccaucggcaagugccccaaguacgucaagagcaccaagcugcggcucgcgaccgggcugcgcaacgugcccuccauccagagccggggccuguucggggccaucgccggcuucaucgagggcggguggacgggcaugguggacgggugguacggcuaccaccaccagaacgagcagggguccggcuacgccgccgaccucaagagcacccagaacgcgaucgacaagaucaccaacaaggugaacuccgucaucgagaagaugaacacccaguucacggccgugggcaaggaguucaaccaccuggagaagcgcaucgagaaccugaacaagaaggucgacgacggguuccucgacaucuggaccuacaacgccgagcugcuggugcuccuggagaacgagcggacccuggacuaccacgacagcaacgugaagaaccucuacgagaagguccgcucccagcugaagaacaacgccaaggagaucggcaacgggugcuucgaguucuaccacaagugcgacaacacgugcauggagagcgugaagaacggcaccuacgacuacccgaaguacuccgaggaggccaagcugaaccgggaggagaucgacggggugaagcucgagagcacccgcaucuaccagauccuggcgaucuacuccaccgucgccagcagccuggugcucguggucucccugggcgccaucagcuucuggaugugcuccaacggcagccugcagugccggaucugcaucuga

SEQ ID NO: 70278 - RNA, 1701 nt, Artificial Sequence
  derived and/or modified CDS sequence (opt1) from hemagglutinin__InfluenzaA__ADQ28066
augaaggccauccuggugguccuccuguacaccuucgccaccgcgaacgccgacacgcugugcaucggcuaccacgccaacaacagcaccgacaccguggacaccgugcucgagaagaacgucacggugacccacuccgugaaccugcuggaggacaagcacaacgggaagcucugcaagcugcgcggcgucgcgccccugcaccucgggaagugcaacaucgccggcuggauccuggggaacccggagugcgagagccuguccaccgccagcuccuggagcuacaucguggagaccuccagcuccgacaacggcacgugcuaccccggcgacuucaucgacuacgaggagcuccgggagcagcugagcuccgugagcuccuucgagcgcuucgagaucuuccccaagaccagcuccuggcccaaccacgacagcaacaagggggucaccgccgccugcccgcacgccggcgcgaaguccuucuacaagaaccugaucuggcucgugaagaaggggaacagcuaccccaagcuguccaagagcuacaucaacgacaagggcaaggaggugcugguccucugggggauccaccaccccagcaccuccgccgaccagcagagccuguaccagaacgccgacgccuacguguucgugggcacgucccgguacagcaagaaguucaagcccgagaucgccauccgcccgcggguccgcgaccaggagggccggaugaacuacuacuggacccugguggagcccggggacaagaucaccuucgaggcgaccggcaaccucguggucccccgcuacgccuucgccauggagcggaacgccggguccggcaucaucaucagcgacacgcccgugcacgacugcaacacgaccugccagaccccgaagggcgccaucaacaccucccugcccuuccagaacauccaccccaucaccaucgggaagugccccaaguacgucaagagcaccaagcugcgccucgcgaccggccugcggaacgugccguccauccagagccgcgggcuguucggcgccaucgccggguucaucgagggcggcuggacggggaugguggacggcugguacggguaccaccaccagaacgagcagggcuccggguacgccgccgaccucaagagcacccagaacgcgaucgacaagaucaccaacaaggugaacuccgucaucgagaagaugaacacccaguucacggccgugggcaaggaguucaaccaccuggagaagcggaucgagaaccugaacaagaaggucgacgacggcuuccucgacaucuggaccuacaacgccgagcugcuggugcuccuggagaacgagcgcacccuggacuaccacgacagcaacgugaagaaccucuacgagaagguccggucccagcugaagaacaacgccaaggagaucgggaacggcugcuucgaguucuaccacaagugcgacaacacgugcauggagagcgugaagaacgggaccuacgacuaccccaaguacuccgaggaggccaagcugaaccgcgaggagaucgacggcgugaagcucgagagcacccggaucuaccagauccuggcgaucuacuccaccgucgccagcagccuggugcucguggucucccugggggccaucagcuucuggaugugcuccaacggcagccugcagugccgcaucugcaucuga

SEQ ID NO: 70279 - RNA, 1701 nt, Artificial Sequence
  derived and/or modified CDS sequence (opt1) from hemagglutinin__InfluenzaA__ADQ28067
augaaggccauccuggugguccuccuguacaccuucgccaccgcgaacgccgacacgcugugcaucggcuaccacgccaacaacagcaccgacaccguggacaccgugcucgagaagaacgucacggugacccacuccgugaaccugcuggaggacaagcacaacgggaagcucugcaagcugcgcggcgucgcgccccugcaccucgggaagugcaacaucgccggcuggauccuggggaacccggagugcgagagccuguccaccgccagcuccuggagcuacaucguggagaccuccagcuccgacaacggcacgugcuaccccggcgacuucaucgacuacgaggagcuccgggagcagcugagcuccgugagcuccuucgagcgcuucgagaucuuccccaagaccagcuccuggcccaaccacgacagcaacaagggggucaccgccgccugcccgcacgccggcgcgaaguccuucuacaagaaccugaucuggcucgugaagaaggggaacagcuaccccaagcuguccaagagcuacaucaacgacaagggcaaggaggugcugguccucugggggauccaccaccccagcaccuccgccgaccagcagagccuguaccagaacgccgacgccuacguguucgugggcacgucccgguacagcaagaaguucaagcccgagaucgccauccgcccgaagguccgggaccaggagggccgcaugaacuacuacuggacccugguggagcccggggacaagaucaccuucgaggcgaccggcaaccucguggucccccgguacgccuucgccauggagcgcaacgccggguccggcaucaucaucagcgacacgcccgugcacgacugcaacacgaccugccagaccccgaagggcgccaucaacaccucccugcccuuccagaacauccaccccaucaccaucgggaagugccccaaguacgucaagagcaccaagcugcggcucgcgaccggccugcgcaacgugccguccauccagagccgggggcuguucggcgccaucgccggguucaucgagggcggcuggacggggaugguggacggcugguacggguaccaccaccagaacgagcagggcuccggguacgccgccgaccucaagagcacccagaacgcgaucgacaagaucaccaacaaggugaacuccgucaucgagaagaugaacacccaguucacggccgugggcaaggaguucaaccaccuggagaagcgcaucgagaaccugaacaagaaggucgacgacggcuuccucgacaucuggaccuacaacgccgagcugcuggugcuccuggagaacgagcggacccuggacuaccacgacagcaacgugaagaaccucuacgagaagguccgcucccagcugaagaacaacgccaaggagaucgggaacggcugcuucgaguucuaccacaagugcgacaacacgugcauggagagcgugaagaacgggaccuacgacuaccccaaguacuccgaggaggccaagcugaaccgggaggagaucaacggcgugaagcucgagagcacccgcaucuaccagauccuggcgaucuacuccaccgucgccagcagccuggugcucguggucucccugggggccaucagcuucuggaugugcuccaacggcagccugcagugccggaucugcaucuga

SEQ ID NO: 70280 - RNA, 1701 nt, Artificial Sequence
  derived and/or modified CDS sequence (opt1) from hemagglutinin__InfluenzaA__ADQ28068
augaaggccauccuggugguccuccuguacaccuucaccacggccaacgcggacacccugugcaucggcuaccacgccaacaacagcaccgacaccguggacacggugcucgagaagaacgucaccgugacccacuccgugaaccugcuggaggacaagcacaacgggaagcucugcaagcugcgcggcgucgcgccccugcaccucgggaagugcaacaucgccggcuggauccuggggaacccggagugcgagagccuguccaccgccagcuccuggagcuacaucguggagacguccagcuccgacaacgggaccugcuaccccggcgacuucaucaacuacgaggagcuccgggagcagcugagcuccgugagcuccuucgagcgcuucgagaucuuccccaagaccagcuccuggcccaaccacgacagcaacaagggcgucaccgccgccugcccgcacgccggcgagaaguccuucuacaagaaccugaucuggcucgugaagaaggggaacagcuaccccaagcuguccaagagcuacaucaacgacaagggcaaggaggugcugguccucugggggauccaccaccccagcacguccgccgaccagcagagccuguaccagaacgcggacgccuacguguucgugggcaccucccgguacagcaagaaguucaagcccgagaucgccauccgcccgaagguccgggaccaggagggccgcaugaacuaccacuggacccuggugaagcccggggacaagaucaccuucgaggccacgggcaaccucguggucccccgguacgccuucgcgauggagcgcaacgccggguccggcaucaucaucagcgacacccccgugcacgacugcaacacgaccugccagaccccgaagggcgccaucaacaccucccugcccuuccagaacauccaccccaucaccaucgggaagugccccaaguacgucaagagcaccaagcugcggcucgccacgggccugcgcaacgugccguccauccagagccgggggcuguucggcgccaucgcgggguucaucgagggcggcuggaccgggaugguggacggcugguacggguaccaccaccagaacgagcagggcuccggguacgccgccgaccucaagagcacccagaacgccaucgacgagaucaccaacaaggugaacuccgucaucgagaagaugaacacgcaguucaccgccgugggcaaggaguucaaccaccuggagaagcgcaucgagaaccugaacaagaaggucgacgacggcuuccucgacaucuggaccuacaacgcggagcugcuggugcuccuggagaacgagcggacccuggacuaccacgacagcaacgugaagaaccucuacgagaagguccgcucccagcugaagaacaacgccaaggagaucgggaacggcugcuucgaguucuaccacaagugcgacaacacgugcauggagagcgugaagaacgggaccuacgacuaccccaaguacuccgaggaggccaagcugaaccgggaggagaucgacggcgugaagcucgagagcacccgcaucuaccagauccuggccaucuacuccaccgucgccagcagccuggugcucguggucucccugggggcgaucagcuucuggaugugcuccaacggcagccugcagugccggaucugcaucuga

SEQ ID NO: 70281 - RNA, 1701 nt, Artificial Sequence; identical to SEQ ID NO: 70279
  derived and/or modified CDS sequence (opt1) from hemagglutinin__InfluenzaA__ADQ28069

SEQ ID NO: 70282 - RNA, 1701 nt, Artificial Sequence
  derived and/or modified CDS sequence (opt1) from hemagglutinin__InfluenzaA__ADQ28070
augaaggccauccuggugguccuccuguacaccuucgccaccgcgaacgccgacacgcugugcaucggcuaccacgccaacaacagcaccgacaccguggacaccgugcucgagaagaacgucacggugacccacuccgugaaccugcuggaggacaagcacaacgggaagcucugcaagcugcgcggcgucgcgccccugcaccucgggaagugcaacaucgccggcuggauccuggggaacccggagugcgagagccuguccaccgccagcuccuggagcuacaucguggagaccuccagcuccgacaacggcacgugcuaccccggcgacuucaucgacuacgaggagcuccgggagcagcugagcuccgugagcuccuucgagcgcuucgagaucuuccccaagaccagcuccuggcccaaccacgacagcaacaagggggucaccgccgccugcccgcacgccggcgcgaaguccuucuacaagaaccugaucuggcucgugaagaaggggaacagcuaccccaagcuguccaagagcuacaucaacgacaagggcaaggaggugcugguccucugggggauccaccaccccagcaccuccgccgaccagcagagccuguaccagaacgccgacgccuacguguucgugggcacgucccgguacagcaagaaguucaagcccgagaucgccauccgcccgaagguccgggaccaggagggccgcaugaacuacuacuggacccugguggagcccggggacaagaucaccuucgaggcgaccggcaaccucguggucccccgguacgccuucgccauggagcgcaacgccggguccggcaucaucaucagcgacacgcccgugcacgacugcaacacgaccugccagaccccgaagggcgccaucaacaccucccugcccuuccagaacauccaccccaucaccaucgggaagugccccaaguacgucaagagcaccaagcugcggcucgcgaccggccugcgcaacgugccguccauccagagccgggggcuguucggcgccaucgccggguucaucgagggcggcuggacggggaugguggacggcugguacggguaccaccaccagaacgagcagggcuccggguacgccgccgaccucaagagcacccagaacgcgaucgacaagaucaccaacaaggugaacuccgucaucgagaagaugaacacccaguucacggccgugggcaaggaguucaaccaccuggagaagcgcaucgagaaccugaacaagaaggucgacgacggcuuccucgacaucuggaccuacaacgccgagcugcuggugcuccuggagaacgagcggacccuggacuaccacgacagcaacgugaagaaccucuacgagaagguccgccggcagcugaagaacaacgccaaggagaucgggaacggcugcuucgaguucuaccacaagugcgacaacacgugcauggaguccgugaagaacgggaccuacgacuaccccaaguacagcgaggaggccaagcugaaccgcgaggagaucgacggcgugaagcucgaguccacccggaucuaccagauccuggcgaucuacagcaccgucgccuccagccuggugcucguggucagccugggggccaucuccuucuggaugugcagcaacggcucccugcagugccgcaucugcaucuga

SEQ ID NO: 70283 - RNA, 1701 nt, Artificial Sequence
  derived and/or modified CDS sequence (opt1) from hemagglutinin__InfluenzaA__ADQ28071
augaaggccauccuggugguccuccuguacacccuggccaccgcgaacgccgacacgcucugcaucggcuaccacgccaacaacagcaccgacaccguggacaccgugcuggagaagaacgucacggugacccacuccgugaaccugcucgaggacaagcacaacgggaagcugugcaagcugcgcggcgucgcgccccuccaccuggggaagugcaacaucgccggcuggauccuggggaacccggagugcgagagccucuccaccgccagcuccuggagcuacaucguggagaccuccagcuccgacaacggcacgugcuaccccggcgacuucaucgacuacgaggagcugcgggagcagcugagcuccgugagcuccuucgagcgcuucgagaucuuccccaagaccagcuccuggcccaaccacgacagcaacaagggggucaccgccgccugcccgcacgccggcgcgaaguccuucuacaagaaccucaucuggcuggugaagaaggggaacagcuaccccaagcuguccaagagcuacaucaacgacaagggcaaggaggugcucguccugugggggauccaccaccccagcaccuccgccgaccagcagagccuguaccagaacgccgacgccuacguguucgugggcacgucccgguacagcaagaaguucaagcccgagaucgccauccgcccgaagguccgggaccaggagggccgcaugaacuacuacuggacccucguggagcccggggacaagaucaccuucgaggcgaccggcaaccugguggucccccgguacgccuucgccauggagcgcaacgccggguccggcaucaucaucagcgacacgcccgugcacgacugcaacacgaccugccagaccccgaagggcgccaucaacaccucccugcccuuccagaacauccaccccaucaccaucgggaagugccccaaguacgucaagagcaccaagcuccggcuggcgaccggccugcgcaacgugccguccauccagagccgggggcuguucggcgccaucgccggguucaucgagggcggcuggacggggaugguggacggcugguacggguaccaccaccagaacgagcagggcuccggguacgccgccgaccucaagagcacccagaacgcgaucgacaagaucaccaacaaggugaacuccgucaucgagaagaugaacacccaguucacggccgugggcaaggaguucaaccaccuggagaagcgcaucgagaaccucaacaagaaggucgacgacggcuuccuggacaucuggaccuacaacgccgagcugcucgugcugcuggagaacgagcggacccucgacuaccacgacagcaacgugaagaaccuguacgagaagguccgcucccagcugaagaacaacgccaaggagaucgggaacggcugcuucgaguucuaccacaagugcgacaacacgugcauggagagcgugaagaacgggaccuacgacuaccccaaguacuccgaggaggccaagcucaaccgggaggagaucgacggcgugaagcuggagagcacccgcaucuaccagauccuggcgaucuacuccaccgucgccagcagccucgugcugguggucucccugggggccaucagcuucuggaugugcuccaacggcagccuccagugccggaucugcaucuga

SEQ ID NO: 70284 - RNA, 1701 nt, Artificial Sequence; identical to SEQ ID NO: 67637
  derived and/or modified CDS sequence (opt1) from hemagglutinin__InfluenzaA__ADR32361

SEQ ID NO: 70285 - RNA, 1689 nt, Artificial Sequence
  derived and/or modified CDS sequence (opt1) from hemagglutinin__InfluenzaA__ADT78887
auggcccugaucuaccucauccugcuguucaccagcgugcgcggcgaccagaucugcaucggguaccacgccaacaacuccaccgagaaggucgacacgauccucgagcggaacgugaccgugacccacgcgaaggacauccuggagaagacccacaacggcaagcugugcaagcucaacgggaucccgccccuggagcugggcgacugcagcaucgccggguggcuccugggcaaccccgagugcgaccgccugcuccggguccccgagugguccuacaucauggagaaggagaaccccaaguacagccugugcuacccgggcuccuucaacgacuacgaggagcugaagcaccucaucagcuccgugaagcacuucgagaaggugaagauccugcccaaggacggguggacgcagcacaccaccaccggcgggagccgcgccugcgccgucuccggcaaccccagcuucuuccggaacaugguguggcugacgaagaaggggcccaacuacccgguggccaagggcuccuacaacaacaccagcggcgagcagaugcucaucaucuggggcguccaccaccccaacgacgaggcggagcagcgcgcccuguaccagaagguggggaccuacguguccgccagcaccuccacgcugaacaagcggagcacccccgagaucgccgcgcgccccgaggucaacgggcucggcucccggauggaguucagcuggacccugcuggacaugugggacaccaucaacuucgaguccacgggcaaccucguggccccggaguacggguucaagaucagcaagcgcggcagcuccggggugaugaagaccgagggcacccuggagaacugcgagaccaagugccagacgccccugggggccaucaacaccacccuccccuuccacaacguccacccccugaccaucggcgagugcccgaaguacgucaagagcgagaagcuggugcucgccacgggccugcggaacgugccccagaucgagucccgcgggcuguucggcgccaucgcgggguucaucgagggcggguggcagggcaugguggacggcugguacggguaccaccacagcaacgaccagggcuccggguacgccgccgacaaggagagcacccagaaggccuucgacggcaucaccaacaaggugaacuccgucaucgagaagaugaacacccaguucgaggccguggggaaggaguucagcaaccucgagaagcggcuggagaaccugaacaagaagauggaggacggcuuccucgacguguggacguacaacgcggagcugcugguccucauggagaacgagcgcacccuggacuuccacgacuccaacgugaagaaccuguacgacaagguccggaugcagcuccgcgacaacgugaaggagcugggcaacgggugcuucgaguucuaccacaagugcgacgacgagugcauggacagcgugaagaacggcaccuacgacuaccccaaguacgaggaggaguccaagcugaaccggaacgagaucaagggggucaagcucagcuccaugggcguguaccagauccuggccaucuacgccaccguggccggcagccugucccucgccaucaugauggcggggaucagcuucuggaugugcuccaacggcagccugcagugccgcaucugcaucuga

SEQ ID NO: 70286 - RNA, 1701 nt, Artificial Sequence
  derived and/or modified CDS sequence (opt1) from hemagglutinin__InfluenzaA__ADT78908
augaaggccaagcugcucauccugcugugcgcccucagcgcgaccgacgccgacaccaucugcaucggcuaccacgccaacaacuccacggacaccguggacaccguccuggagaagaacgugaccgugacgcacagcgucaaccugcucgaggacucccacaacgggaagcugugccgccugaagggcaaggcgccccuccagcuggggaagugcaacaucgccggcugggugcuggggaacccggagugcgagagccuccuguccaaccggagcugguccuacaucgccgagacccccaacagcgagaacgggaccugcuaccccggcgacuucgccgacuacgaggagcugcgcgagcagcucuccagcguguccagcuucgagcgguucgagaucuuccccaaggagcgcuccuggccgaagcacaacaccacgcgcggggucaccgccgccugcagccacgcgcggaaguccagcuucuacaagaaccugguguggcugaccgaggccaacggcuccuaccccaaccucagcaaguccuacgugaacaaccaggagaaggagguccuggugcuguggggcgugcaccaccccagcaacaucgaggaccagcggacccucuaccgcaaggacaacgccuacgucagcgugguguccagcaacuacaaccggcgcuucacgcccgagaucgccaagcggccgaagguccgcgaccagcccggccggaugaacuacuacuggacccugcuggagcccggggacaccaucaucuucgaggccaccggcaaccucaucgcgcccugguacgccuucgcccugucccgcggcccggggagcggcaucaucacguccaacgcccccauggacgagugcgacaccaagugccagacgccccagggggccaucaacagcucccugcccuuccagaacauccacccggugaccaucggcgagugccccaaguacgugcggagcaccaagcuccgcauggucaccggccugcggaacauccccuccauccagagccgcgggcuguucggcgcgaucgccggguucaucgagggcggguggaccggcaugauggacggcugguacggguaccaccaccagaacgagcagggcuccggguacgccgccgaccagaaguccacccagaacgccaucaacggcaucacgaacaaggugaacagcgugaucgagaagaugaacacccaguucaccgcggucgggaaggaguucaacaagcucgagaagcggauggagaaccugaacaagaagguggacgacggcuuccuggacaucuggaccuacaacgccgagcuccuggugcugcucgagaacgagcgcacgcuggacuuccacgacagcaacgucaagaaccuguacgagaaggugaagaaccagcuccggaacaacgccaaggagcugggcaacgggugcuucgaguucuaccacaagugcgacaacgagugcauggaguccgucaagaacggcaccuacgacuaccccaaguacagcgaggaguccaagcugaaccgcgagaagaucgacggggugaagcucgagagcaugggcguguaccgcauccuggccaucuacuccaccgucgccagcagccuggugcuccuggugucccugggggcgaucagcuucuggaugugcuccaacggcagccuccagugccggaucugcaucuga

SEQ ID NO: 70287 - RNA, 1701 nt, Artificial Sequence
  derived and/or modified CDS sequence (opt1) from hemagglutinin__InfluenzaA__ADT78929
augaaggccaagcugcucauccugcugugcgcccucagcgcgaccgacgccgacaccaucugcaucggcuaccacgccaacaacuccacggacaccguggacaccguccuggagaagaacgugaccgugacgcacagcgucaaccugcucgaggacucccacaacgggaagcugugccgccugaagggcaucgcgccccuccagcuggggaagugcaacaucgccggcuggauccuggggaacccggagugcgagagccuccuguccaagcggagcugguccuacaucgccgagacccccaacagcgagaacgggaccugcuaccccggcgacuucgccgacuacgaggagcugcgcgagcagcucuccagcguguccagcuucgagcgguucgagaucuuccccaaggagcgcuccuggccgaagcacaacaucacccggggcgugacggccgccugcagccacgcgggcaaguccagcuucuacaagaaccugcuguggcucaccgagaccaagggguccuaccccaaccugagcaaguccuacgucaacaacaaggagaaggaggugcuggugcucuggggcguccaccaccccagcaacaucgaggaccagaagacccuguaccgcaaggagaacgccuacgugagcguggucuccagcaacuacaaccggcgcuucacgcccgagaucgccgagcggccgaaggugcgcgggcaggccggccggaugaacuacuacuggacccugcucgagcccggcgacaccaucaucuucgaggccaacgggaaccugaucgcgcccugguacgccuucgcccugucccgcggccucgggagcggcaucaucaccuccaacgccagcauggacgagugcgacacgaagugccagacgccccagggcgccaucaacuccagccugccguuccagaacauccaccccgugaccaucggggagugccccaaguacgucaaguccaccaagcugcggauggugaccggccuccgcaacauccccagcauccagucccgggggcuguucggcgcgaucgccggguucaucgagggcggcuggaccgggaugaucgacggcugguacggguaccaccaccagaacgagcagggcagcggguacgccgccgaccagaaguccacccagaacgccaucaacggcaucaccaacaaggugaacagcgucaucgagaagaugaacacgcaguucaccgcggugggcaaggaguucaacaagcuggagaagcgcauggagaaccucaacaagaagguggacgacggguuccuggacaucuggaccuacaacgccgagcugcucguccugcuggagaacgagcggacccucgacuuccacgacuccaacgugaagaaccuguacgagaaggugaagaaccagcugcgcaacaacgccaaggagaucggcaacgggugcuucgaguucuaccacaagugcaacaacgagugcauggagagcgucaagaacggcacguacgacuacccgaaguacuccgaggagagcaagcucaaccgggagaagaucgacggggugaagcuggaguccaugggcgucuaccagauccuggccaucuacagcaccguggccagcucccucgugcugcuggucagccucggcgcgaucuccuucuggaugugcagcaacgggucccugcagugccgcaucugcaucuga

SEQ ID NO: 70288 - RNA, 1701 nt, Artificial Sequence
  derived and/or modified CDS sequence (opt1) from hemagglutinin__InfluenzaA__ADT78936
augaaggccaagcugcucgugcugcugugcgcccucagcgcgaccuacgccgacaccaucugcaucggcuaccacgccaacaacuccacggacaccgucgacaccgugcuggagaagaacgugaccgucacgcacagcgugaaccugcucgaggacucccacaacgggaagcugugccgccugaagggcaaggcgccccuccagcuggggaagugcaacaucgccggcuggauccuggggaacccggagugcgagagccuccuguccaagcggagcugguccuacaucgccgagacccccaacagcgagaacgggaccugcuaccccggcgacuucgccgacuacgaggagcugcgcgagcagcucuccagcguguccagcuucgagcgguucgagaucuuccccaaggaguccagcuggccgaagcacaacaccacgcgcggggucaccgccgccugcucccacgcgcgcaagagcuccuucuacaagaaccugcuguggcucaccgaggccaacggcagcuaccccaaccuguccaagagcuacgugaacaaccaggagaaggaggugcugguccucuggggcgugcaccaccccagcaacaucgaggaccagcggacccuguaccggaaggagaacgccuacguguccgucgugagcuccaacuacaaccgccgguucacgcccgagaucgccgagcgcccgaaggugcggaaccaggccggccgcaugaacuacuacuggacccugcucgagcccggggacaccaucaucuucgaggcgaacggcaaccugaucgcccccugguacgccuucgcccugagccggggccucggguccggcaucaucaccagcaacgccuccauggacgagugcgacacgaagugccagacgccccagggggcgaucaacagcucccugccguuccagaacauccaccccgucaccaucggcgagugccccaaguacgucaagagcaccaagcugcgcauggugaccggccuccggaacauccccuccauccagagccgcgggcuguucggcgccaucgccggguucaucgagggcggguggaccggcaugauggacggcugguacggguaccaccaccagaacgagcagggcuccggguacgccgccgaccagaaguccacccagaacgcgaucaacggcaucaccaacaaggugaacagcgugaucgagaagaugaacacgcaguucaccgccguggggaaggaguucaacaagcuggagaagcggauggagaaccucaacaagaaggucgacgacggcuuccuggacaucuggaccuacaacgccgagcugcucgugcugcuggagaacgagcgcacccucgacuuccacgacagcaacgugaagaaccuguacgagaaggucaagaaccagcugcggaacaacgccaaggagcucggcaacgggugcuucgaguucuaccacaagugcgacaacgagugcauggaguccgugaagaacggcacguacgacuacccgaaguacagcgaggaguccaagcugaaccgcgagaagaucgacggggucaagcuggagagcaugggcguguaccggauccucgccaucuacagcaccguggcguccagccugguccugcucgugucccugggggccaucagcuucuggaugugcuccaacggcagccugcagugccgcaucugcaucuga

SEQ ID NO: 70289 - RNA, 1689 nt, Artificial Sequence
  derived and/or modified CDS sequence (opt1) from hemagglutinin__InfluenzaA__ADT78961
auggccaucaucugccugauccuccuguucaccgccgugcgcggcgaccagaucugcaucggguaccacgcgaacaacagcaccgagaaggucgacacgauccuggagcggaacgugaccgugacccacgccaaggacauccucgagaagacccacaacggcaagcugugcaagcugaacgggaucccgccccucgagcugggcgacugcuccaucgccggguggcugcucggcaaccccgagugcgaccgccugcugagcguccccgagugguccuacaucauggagaaggagaacccccgggacggccucugcuacccggggagcuucaacgacuacgaggagcugaagcaccuccuguccagcgugaagcacuucgagaaggugaagauccugcccaagaaccgcuggacgcagcacaccaccaccggcgggucccgggccugcgccgucagcggcaaccccuccuucuuccgcaacaugguguggcugacgaagaaggggagcaacuaccccguggcgaagggcuccuacaacaacaccagcggcgagcagaugcucaucaucuggggcguccaccacccgaacgacgagaccgagcagcggacccuguaccagaacguggagacguacguguccgucagcaccuccacccugaacaagcgcagcacccccaagaucgccacgcggcccgaggugaacgggcucgggucccgcauggaguucagcuggacccugcuggacaugugggacaccaucaacuucgaguccaccggcaaccucaucgcccccgaguacggcuucaagaucagcaagcgggggagcuccggcaucaugaagacggaggggacccuggagaacugcgagaccaagugccagaccccgcugggcgccaucaacacgacccuccccuuccacaacgugcacccccugaccaucggggagugccccaaguacgucaagagcgagaagcuggugcucgcgaccggcccgcgcaacgugccccagaucgagucccggggccuguucggggccaucgccggcuucaucgagggcggguggcaggggauggucgacggcugguacggcuaccaccacagcaacgaccagggguccggcuacgccgccgacaaggagagcacgcagaaggcguucgacgggaucaccaacaaggugaacuccgugaucgagaagaugaacacccaguucgaggccgucggcaaggaguucagcaaccuggagcgccggcucgagaaccugaacaagaagauggaggacggguuccuggacguguggaccuacaacgccgagcuccuggugcugauggagaacgagcgcacgcucgacuuccacgacuccaacgucaagaaccuguacgacaaggugcggaugcagcugcgcgacaacgucaaggagcucggcaacggcugcuucgaguucuaccacaagugcgacgacgagugcaugaacagcgugaagaacgggaccuacgacuaccccaaguacgaggaggaguccaagcugaaccggaacgagaucaagggcgugaagcugagcuccaugggggucuaccagauccucgugaucuacgccaccguggccggcagccugucccuggcgaucaugauggccggcaucagcuucuggaugugcuccaacgggagccuccagugccgcaucugcaucuga

SEQ ID NO: 70290 - RNA, 1701 nt, Artificial Sequence; identical to SEQ ID NO: 64788
  derived and/or modified CDS sequence (opt1) from hemagglutinin__InfluenzaA__ADT78971

SEQ ID NO: 70291 - RNA, 1701 nt, Artificial Sequence; identical to SEQ ID NO: 64329
  derived and/or modified CDS sequence (opt1) from hemagglutinin__InfluenzaA__ADT79010

SEQ ID NO: 70292 - RNA, 1701 nt, Artificial Sequence; identical to SEQ ID NO: 64788
  derived and/or modified CDS sequence (opt1) from hemagglutinin__InfluenzaA__ADT79030

SEQ ID NO: 70293 - RNA, 1701 nt, Artificial Sequence; identical to SEQ ID NO: 65366
  derived and/or modified CDS sequence (opt1) from hemagglutinin__InfluenzaA__ADT79050

SEQ ID NO: 70294 - RNA, 1701 nt, Artificial Sequence
  derived and/or modified CDS sequence (opt1) from hemagglutinin__InfluenzaA__ADT79108
augaaggcccgccugcucauccugcugugcgcccucagcgcgaccgacgccgacaccaucugcaucggcuaccacgccaacaacuccacggacaccguggacaccguccuggagaagaacgugaccgugacgcacagcgucaaccugcucgaggacucccacaacgggaagcugugccggcugaagggcaucgcgccccuccagcuggggaagugcaacaucgccggcuggauccuggggaacccggagugcgagagccuccuguccaaccgcagcugguccuacaucgccgagacccccaacagcgagaacgggaccugcuaccccggcgacuucgccgacuacgaggagcugcgggagcagcucuccagcguguccagcuucgagcgcuucgagaucuuccccaaggagcgguccuggccgaagcacaacaucacccgcggggugacggccgccugcagccacgcgaagaaguccagcuucuacaagaaccugcuguggcucaccgaggccaacggcuccuaccccaaccugaucaagagcuacgucaacaacaaggagaaggaggugcuggugcucuggggcguccaccaccccuccaacaucgaggaccagcggacccuguaccgcaaggagaacgccuacgugagcguggucagcuccaacuacaaccggcgcuucacccccgagaucgccgagcggccgaaggugcgcggccaggccgggcggaugaacuacuacuggacgcugcucgagcccggcgacaagaucaucuucgaggcgaacggcaaccugaucgcccccugguacgccuucgcccugagccgcgggcucggcuccgggaucaucaccagcaacgccuccauggacgagugcgacaccaagugccagacgccccagggcgcgaucaacagcucccugccguuccagaacauccaccccgugaccaucggcgagugccccaaguacguccggagcaccaagcugcgcauggugaccgggcuccggaacauccccuccauccagagccgcggccuguucggggccaucgccggcuucaucgagggcggguggaccggcaugguggacgggugguacggcuaccaccaccagaacgagcagggguccggcuacgccgccgaccagaaguccacgcagaacgcgaucaacgggaucaccaacaaggucaacagcgugaucgagaagaugaacacccaguucaccgccgugggcaaggaguucaacaagcuggagaagcggauggagaaccucaacaagaaggucgacgacggcuuccuggacaucuggacguacaacgccgagcugcucgugcugcuggagaacgagcgcacccucgacuuccacgacagcaacgugaagaaccuguacgagaaggucaagaaccagcugcggaacaacgccaaggagaucgggaacggcugcuucgaguucuaccacaagugcgacaacgagugcauggaguccgugaagaacgggaccuacgacuacccgaaguacagcgaggaguccaagcucaaccgcgagaagaucgacggcgucaagcuggagagcauggggguguaccagauccuggccaucuacuccaccguggcgagcagccucguccugcuggugucccucggcgccaucagcuucuggaugugcuccaacggcagccugcagugccgcaucugcaucuga

SEQ ID NO: 70295 - RNA, 1689 nt, Artificial Sequence
  derived and/or modified CDS sequence (opt1) from hemagglutinin__InfluenzaA__ADT79119
auggccaucaucuaccugauccuccuguucaccgccgugcgcggcgaccagaucugcaucggguaccacgcgaacaacagcaccgagaaggucgacacgauccuggagcggaacgugaccgugacccacgccaaggacauccucgagaagacccacaacggcaagcugugcaagcugaacgggaucccgccccucgagcugggcgacugcuccaucgccggguggcugcucggcaaccccgagugcgaccgccugcugagcguccccgagugguccuacaucauggagaaggagaacccccgggacggccucugcuacccggggagcuucaacgacuacgaggagcugaagcaccuccuguccagcgugaagcacuucgagaaggugaagauccugcccaaggaccgcuggacgcagcacaccaccaccggcgggucccgggccugcgccgucagcggcaaccccuccuucuuccgcaacaugguguggcugacgaagaaggggagcaacuaccccguggcgaagggcuccuacaacaacaccagcggcgagcagaugcucaucaucuggggcguccaccacccgaacgacgagaccgagcagcggacccuguaccagaacguggggacguacguguccgucgggaccagcacccugaacaagcgcuccacccccgacaucgccacgcggcccaaggugaacggccucggcgggcgcauggaguucagcuggacccugcuggacaugugggacaccaucaacuucgaguccaccggcaaccucaucgcccccgaguacggguucaagaucagcaagcggggcuccagcgggaucaugaagacggagggcacccugggcaacugcgagaccaagugccagaccccgcugggggccaucaacacgacccuccccuuccacaacgugcacccccugaccaucggcgagugccccaaguacgucaagagcgagaagcuggugcucgcgaccgggcugcgcaacgugccgcagaucgagucccggggccuguucggggccaucgccggcuucaucgagggcggguggcagggcauggucgacgggugguacggcuaccaccacagcaacgaccagggguccggcuacgccgccgacaaggagagcacgcagaaggcguucgacggcaucaccaacaaggugaacuccgugaucgagaagaugaacacccaguucgaggccgucgggaaggaguucagcaaccucgagcgccggcuggagaaccugaacaagaagauggaggacggcuuccucgacguguggaccuacaacgccgagcugcuggugcucauggagaacgagcgcacgcuggacuuccacgacuccaacgucaagaaccuguacgacaaggugcggaugcagcuccgcgacaacgucaaggagcuggggaacggcugcuucgaguucuaccacaagugcgacgacgagugcaugaacagcgugaagaacggcaccuacgacuaccccaaguacgaggaggaguccaagcugaaccggaacgagaucaagggggugaagcucagcuccaugggcgucuaccagauccuggccaucuacgccaccguggcggggagccugucccucgccaucaugauggccggcaucagcuucuggaugugcuccaacgggagccugcagugccgcaucugcaucuga

SEQ ID NO: 70296 - RNA, 1689 nt, Artificial Sequence
  derived and/or modified CDS sequence (opt1) from hemagglutinin__InfluenzaA__ADT79129
auggccaucaucuaccugauccuccuguucaccgccgugcgcggcgaccagaucugcaucggguaccacgcgaacaacagcaccgagaaggucgacacgauccuggagcggaacgugaccgugacccacgccaaggacauccucgagaagacccacaacggcaagcugugcaagcugaacgggaucccgccccucgagcugggcgacugcuccaucgccggguggcugcucggcaaccccgagugcgaccgccugcugcggguccccgaguggagcuacaucauggagaaggagaacccccgcgacggccucugcuacccgggguccuucaacgacuacgaggagcugaagcaccuccugagcuccgugaagcacuucgagaaggugaagauccugcccaaggaccgguggacgcagcacaccaccaccggcgggagccgcgccugcgccgucuccggcaaccccagcuucuuccggaacaugaucuggcugacgaagaagggguccaacuaccccguggcgaagggcagcuacaacaacaccuccggcgagcagaugcucaucaucuggggcgugcaccacccgaacgacgagaccgagcagcgcacccuguaccagaacgucgggacguacgugagcguggucaccuccacccugaacaagcggagcacccccaagaucgccacgcgccccaaggugaacgggcucggcggccggauggaguucuccuggacccugcuggacaugugggacaccaucaacuucgagagcaccgggaaccucaucgcccccgaguacggcuucaagaucuccaagcgcgggagcuccggcaucaugaagacggaggggacccuggagaacugcgagaccaagugccagaccccgcugggcgccaucaacacgacccuccccuuccacaacgugcacccccuggcgaucggcgagugccccaaguacgucaagagcgagaagcuggugcucgccaccgggcugcggaacgugccgcagaucgagagccgcggccuguucggggccaucgccggcuucaucgagggcggguggcagggcauggucgacgggugguacggcuaccaccacuccaacgaccaggggagcggcuacgccgcggacaaggaguccacccagcgggccuucgacgggaucacgaacaaggugaacagcgugaucgagaagaugaacacccaguucgaggccgucggcaaggaguucuccaaccucgagcgccggcuggagaaccugaacaagaagauggaggacggcuuccucgacguguggaccuacaacgccgagcugcuggugcucauggagaacgagcgcacccuggacuuccacgacagcaacgucaagaaccuguacgacaaggugcggaugcagcuccgcgacaacgucaaggagcuggggaacggcugcuucgaguucuaccacaagugcgacgacgagugcaugaacuccgugaagaacgggacguacgacuaccccaaguacgaggaggagagcaagcugaaccggaacgagaucaagggcgugaagcucuccagcaugggcgucuaccagauccuggccaucuacgcgaccguggccgggucccugagccucgccaucaugauggccggcaucuccuucuggaugugcagcaacgggucccugcagugccgcaucugcaucuga

SEQ ID NO: 70297 - RNA, 1701 nt, Artificial Sequence
  derived and/or modified CDS sequence (opt1) from hemagglutinin__InfluenzaA__ADT79232
augaaggccauccuggugguccuccuguacaccuucgccaccgcgaacgccgacacgcugugcaucggcuaccacgccaacaacagcaccgacaccguggacaccgugcucgagaagaacgucacggugacccacuccgugaaccugcuggaggacaagcacaacgggaagcucugcaagcugcgcggcgucgcgccccugcaccucgggaagugcaacaucgccggcuggauccuggggaacccggagugcgagagccuguccaccgccagcuccuggagcuacaucguggagaccuccagcuccgacaacggcacgugcuaccccggcgacuucaucgacuacgaggagcuccgggagcagcugagcuccgugagcuccuucgagcgcuucgagaucuuccccaagaccagcuccuggcccaaccacgacagcaacaagggggucaccgccgccugcccgcacgccggcgcgaaguccuucuacaagaaccugaucuggcucgugaagaaggggaacagcuaccccaagcuguccaagagcuacaucaacgacaagggcaaggaggugcugguccucugggggauccaccaccccagcaccuccgccgaccagcagagccuguaccagaacgccgacgccuacguguucgugggcuccagccgguacuccaagaaguucaagcccgagaucgccauccgcccgaagguccgggaccaggagggccgcaugaacuacuacuggacgcugguggagcccggggacaagaucaccuucgaggcgaccggcaaccucguggucccccgguacgccuucgccauggagcgcaacgccgggagcggcaucaucaucuccgacacccccgugcacgacugcaacacgaccugccagaccccgaagggcgccaucaacaccagccugcccuuccagaacaagcaccccaucacgaucgggaagugccccaaguacgugaaguccaccaagcugcggcucgcgaccggccugcgcaacgucccgagcauccagucccgggggcuguucggcgccaucgccggguucaucgagggcggcuggaccgggaugguggacggcugguacggguaccaccaccagaacgagcagggcagcggguacgccgccgacgugaaguccacgcagaacgcgaucgacgagaucaccaacaaggucaacagcgugaucgagaagaugaacacccaguucaccgccgucggcaaggaguucaaccaccucgagaagcgcaucgagaaccugaacaagaagguggacgacggcuuccuggacaucuggacguacaacgccgagcuccuggugcugcucgagaacgagcggacccuggacuaccacgacuccaacgucaagaaccuguacgagaaggugcgcagccagcucaagaacaacgccaaggagaucgggaacggcugcuucgaguucuaccacaagugcgacaacacgugcauggaguccgugaagaacgggaccuacgacuaccccaaguacagcgaggaggccaagcugaaccgggaggagaucgacggcgucaagcuggaguccacccgcaucuaccagauccucgcgaucuacagcaccguggccagcucccuggugcuggucgugagccucggggccaucuccuucuggaugugcagcaacggcucccugcagugccggaucugcaucuga

SEQ ID NO: 70298 - RNA, 1701 nt, Artificial Sequence
  derived and/or modified CDS sequence (opt1) from hemagglutinin__InfluenzaA__ADT79242
augaaggccauccuggugguccuccuguacaccuucgccaccgcgaacgccgacacgcugugcaucggcuaccacgccaacaacagcaccgacaccguggacaccgugcucgagaagaacgucacggugacccacuccgugaaccugcuggaggacaagcacaacgggaagcucugcaagcugcgcggcgucgcgccccugcaccucgggaagugcaacaucgccggcuggauccuggggaacccggagugcgagagccuguccaccgcgagcuccuggagcuacaucguggagacccccuccagcgacaacggcacgugcuaccccggcgacuucaucgacuacgaggagcuccgggagcagcuguccagcguguccagcuucgagcgcuucgagaucuuccccaagaccuccagcuggccgaaccacgacuccaacaagggggucaccgccgccugcccccacgccggcgccaagagcuucuacaagaaccugaucuggcucgugaagaaggggaacuccuaccccaagcugagcaaguccuacaucaacgacaagggcaaggaggugcugguccucugggggauccaccaccccagcaccagcgccgaccagcagucccuguaccagaacgccgacgccuacguguucgugggcagcucccgguacagcaagaaguucaagccggagaucgccauccgccccaagguccgggaccaggagggccgcaugaacuacuacuggacgcugguggagcccggggacaagaucaccuucgaggcgaccggcaaccucguggucccccgguacgccuucgccauggagcgcaacgccggguccggcaucaucaucagcgacaccccggugcacgacugcaacacgaccugccagacccccaagggcgccaucaacaccucccugcccuuccagaacauccaccccaucacgaucgggaagugcccgaaguacgucaagagcaccaagcugcggcucgcgaccggccugcgcaacgugcccuccauccagagccgggggcuguucggcgccaucgccggguucaucgagggcggcuggaccgggaugguggacggcugguacggguaccaccaccagaacgagcagggcuccggguacgccgccgaccucaagagcacgcagaacgcgaucgacgagaucaccaacaaggugaacuccgucaucgagaagaugaacacccaguucaccgccgugggcaaggaguucaaccaccuggagaagcgcaucgagaaccugaacaagaaggucgacgacggcuuccucgacaucuggacguacaacgccgagcugcuggugcuccuggagaacgagcggacccuggacuaccacgacagcaacgugaagaaccucuacgagaagguccgcucccagcugaagaacaacgccaaggagaucgggaacggcugcuucgaguucuaccacaagugcgacaacacgugcauggagagcgugaagaacgggaccuacgacuaccccaaguacuccgaggaggccaagcugaaccgggaggagaucgacggcgugaagcucgagagcacccgcaucuaccagauccuggcgaucuacuccaccgucgccagcagccuggugcucguggucucccugggggccaucagcuucuggaugugcuccaacggcagccugcagugccggaucugcaucuga

SEQ ID NO: 70299 - RNA, 1701 nt, Artificial Sequence
  derived and/or modified CDS sequence (opt1) from hemagglutinin__InfluenzaA__ADT91182
augaaggccauccuggugguccuccuguacaccuucgccaccgcgaacgccgacacgcugugcaucggcuaccacgccaacaacagcaccgacaccguggacaccgugcucgagaagaacgucacggugacccacuccgugaaccugcuggaggacaagcacaacgggaagcucugcaagcugcgcggcgucgcgccccugcaccucgggaagugcaacaucgccggcuggauccuggggaacccggagugcgagccccugagcaccgccuccagcugguccuacaucguggagaccagcuccagcgacaacggcacgugcuaccccggcgacuucaucgacuacgaggagcuccgggagcagcuguccagcguguccagcuucgagcgcuucgagaucuuccccaagaccuccagcuggccgaaccacgacuccaacaagggggucaccaccgccugcccccacgccggcgccaagagcuucuacaagaaccugaucuggcucgugaagaaggggaacuccuaccccaagcugagcaaguccuacaucaacgacaagggcaaggaggugcugguccucugggggauccaccacccgcccacgagcgcggaccagcagagccuguaccagaacgccgacgccuacguguucgugggcaccucccgguacagcaagaaguucaagcccgagaucgccauccgccccaagguccgggaccaggagggccgcaugaacuacuacuggacccugguggagcccggggacaagaucaccuucgaggccacgggcaaccucguggucccgcgguacgcguucgccauggagcgcaacgccggguccggcaucaucaucagcgacacccccgugcacgacugcaacacgaccugccagacccccaagggcgccaucaacaccucccugcccuuccagaacauccacccgaucaccaucgggaagugccccaaguacgucaagagcaccaagcugcggcucgccacgggccugcgcaacgugcccuccauccagagccgggggcuguucggcgcgaucgccggguucaucgagggcggcuggaccgggaugguggacggcugguacggguaccaccaccagaacgagcagggcuccggguacgccgccgaccucaagagcacccagaacgccaucgacggcaucaccaacaaggugaacuccgucaucgagaagaugaacacgcaguucaccgcggugggcaaggaguucaaccaccuggagaagcgcaucgagaaccugaacaagaaggucgacgacggguuccucgacaucuggaccuacaacgccgagcugcuggugcuccuggagaacgagcggacccuggacuaccacgacagcaacgugaagaaccucuacgagaagguccgcucccagcugaagaacaacgccaaggagaucggcaacgggugcuucgaguucuaccacaagugcgacaacacgugcauggagagcgugaagaacggcaccuacgacuaccccaaguacuccgaggaggccaagcugaaccgggaggagaucgacggggugaagcucgagagcacccgcaucuaccagauccuggccaucuacuccaccgucgcgagcucccuggugcucguggucagccugggcgccaucagcuucuggaugugcuccaacggcagccugcagugccggaucugcaucuga

SEQ ID NO: 70300 - RNA, 1701 nt, Artificial Sequence
  derived and/or modified CDS sequence (opt1) from hemagglutinin__InfluenzaA__ADU20561
augaaggccauccuggugguccuccuguacaccuucgccaccgcgaacgccgacacgcugugcaucggcuaccacgccaacaacagcaccgacaccguggacaccgugcucgagaagaacgucacggugacccacuccgugaaccugcuggaggacaagcacaacgggaagcucugcaagcugggcggggucgcgccccugcaccucggcaagugcaacaucgccggguggauccugggcaacccggagugcgagagccuguccaccgccagcuccuggagcuacaucguggagaccuccagcuccgacaacggcacgugcuaccccggggacuucaucgacuacgaggagcuccgcgagcagcugagcuccgugagcuccuucgagcgguucgagaucuuccccaagaccagcuccuggcccaaccacgacagcaacaagggcgucaccgccgccugcccgcacgccggggcgaaguccuucuacaagaaccugaucuggcucgugaagaagggcaacagcuaccccaagcuguccaagagcuacaucaacgacaaggggaaggaggugcugguccucuggggcauccaccaccccagcaccuccgccgaccagcagagccuguaccagaacgccgacgccuacguguucgugggcacgucccgcuacagcaagaaguucaagcccgagaucgccauccggccgaagguccgcgaccaggaggggcggaugaacuacuacuggacccugguggagcccggcgacaagaucaccuucgaggcgaccgggaaccucguggucccccgcuacgccuucgccauggagcggaacgccggcuccggcaucaucaucagcgacacgcccgugcacgacugcaacacgaccugccagaccccgaagggggccaucaacaccucccugcccuuccagaacauccaccccaucaccaucggcaagugccccaaguacgucaagagcaccaagcugcgccucgcgaccgggcugcggaacgugccguccauccagagccgcggccuguucggggccaucgccggcuucaucgagggcggguggacgggcaugguggacgggugguacggcuaccaccaccagaacgagcagggguccggcuacgccgccgaccucaagagcacccagaacgcgaucgacaagaucaccaacaaggugaacuccgucaucgagaagaugaacacccaguucacggccgugggcaaggaguucaaccaccuggagaagcggaucgagaaccugaacaagaaggucgacgacggguuccucgacaucuggaccuacaacgccgagcugcuggugcuccuggagaacgagcgcacccuggacuaccacgacagcaacgugaagaaccucuacgagaagguccggucccagcugaagaacaacgccaaggagaucggcaacgggugcuucgaguucuaccacaagugcgacaacacgugcauggagagcgugaagaacggcaccuacgacuaccccaaguacuccgaggaggccaagcugaaccgcgaggagaucgacggggugaagcucgagagcacccggaucuaccagauccuggcgaucuacuccaccgucgccagcagccuggugcucguggucucccugggcgccaucagcuucuggaugugcuccaacggcagccugcagugccgcaucugcaucuga

SEQ ID NO: 70301 - RNA, 1701 nt, Artificial Sequence
  derived and/or modified CDS sequence (opt1) from hemagglutinin__InfluenzaA__ADU20562
augaaggccauccuggugguccuccuguacaccuucgccaccgcgaacgccgacacgcugugcaucggcuaccacgccaacaacagcaccgacaccguggacaccgugcucgagaagaacgucacggugacccacuccgugaaccugcuggaggacaagcacaacgggaagcucugcaagcugcgcggcgucgcgccccugcaccucgggaagugcaagaucgccggcuggauccuggggaacccggagugcgagagccuguccaccgccagcuccuggagcuacaucguggagaccuccagcuccgacaacggcacgugcuaccccggcgacuucaucgacuacgaggagcuccgggagcagcugagcuccgugagcuccuucgagcgcuucgagaucuuccccaagaccagcuccuggcccaaccacgacagcaacaagggggucaccgccgccugcccgcacgccggcgcgaaguccuucuacaagaaccugaucuggcucgugaagaaggggaacagcuaccccaagcuguccaagagcuacaucaacgacaagggcaaggaggugcugguccucugggggauccaccaccccagcaccuccgccgaccagcagagccuguaccagaacgccgacgccuacguguucgugggcacgucccgguacagcaagaaguucaagcccgagaucgccauccgcccgaagguccgggaccaggagggccgcaugaacuacuacuggacccugguggagcccggggacaagaucaccuucgaggcgaccggcaaccucguggucccccgguacgccuucgccauggagcgcaacgccggguccggcaucaucaucagcgacacgcccgugcacgacugcaacacgaccugccagaccccgaagggcgccaucaacaccucccugcccuuccagaacauccaccccaucaccaucgggaagugccccaaguacgucaagagcaccaagcugcggcucgcgaccggccugcgcaacgugccguccauccagagccgggggcuguucggcgccaucgccggguucaucgagggcggcuggacggggaugguggacggcugguacggguaccaccaccagaacgagcagggcuccggguacgccgccgaccucaagagcacccagaacgcgaucgacaagaucaccaacaaggugaacuccgucaucgagaagaugaacacccaguucacggccgugggcaaggaguucaaccaccuggagaagcgcaucgagaaccugaacaagaaggucgacgacggcuuccucgacaucuggaccuacaacgccgagcugcuggugcuccuggagaacgagcggacccuggacuaccacgacagcaacgugaagaaccucuacgagaagguccgcucccagcugaagaacaacgccaaggagaucgggaacggcugcuucgaguucuaccacaagugcgacaacacgugcauggagagcgugaagaacgggaccuacgacuaccccaaguacuccgaggaggccaagcugaaccgggaggagaucgacggcgugaagcucgagagcacccgcaucuaccagauccuggcgaucuacuccaccgucgccagcagccuggugcucguggucucccugggggccaucagcuucuggaugugcuccaacggcagccugcagugccggaucugcaucuga

SEQ ID NO: 70302 - RNA, 1701 nt, Artificial Sequence
  derived and/or modified CDS sequence (opt1) from hemagglutinin__InfluenzaA__ADU25478
auggaggccaagcuguucguccucuucugcgccuucaccgcgcugaaggccgacaccaucugcgugggcuaccacgccaacaacagcacggacaccguggacaccauccuggagcgcaacgugaccgucacgcacuccgugaaccuccuggagagcucccacaacgggaagcugugcagccucaacggcaaggcgccccugcagcuggggaacugcaacguggccggcuggauccucgggaacccggagugcgaccugcugcucaccgucaacuccuggagcuacaucaucgagaccuccaccagcaagaacggcgccugcuaccccggcgaguucgccgacuacgaggagcugcgggagcagcuguccacggugagcuccuucgagcgcuucgagaucuuccccaaggccaccagcuggcccaaccacgagaccaccaaggggacgaccguggccugcucccacagcggcgcgaacuccuucuaccggaaccuccuguggaucgucaagaaggggaacagcuacccgaagcuguccaagagcuacaccaacaacaagggcaaggaggugcucgugaucuggggcguccaccacccgcccaccgacuccgaccagcagacgcuguaccagaacaaccacaccuacgugagcguggggagcuccaaguacuaccagcgcuucacccccgagaucgucacccggcccaaggugcgcgagcaggccggccggaugaacuacuacuggacgcugcucgaccagggggacaccaucaccuucgaggccaccggcaaccugaucgcccccuggcacgccuucgcgcugaacaaggggagcuccagcggcaucaugauguccgacgcccacgugcacaacugcacgaccaagugccagacgccccacggcgcccucaagagcaaccugcccuuccagaacguccacccgaucaccaucggggagugccccaaguacgugaaguccacccagcugcgcauggccaccggccuccggaacauccccagcauccagucccgcgggcuguucggcgccaucgcgggguucaucgagggcggcuggaccgggaugaucgacggcugguacggguaccaccaccagaacgagcagggcagcggguacgccgccgaccagaaguccacccagaucgccaucgacggcaucagcaacaaggugaacuccgucaucgagaagaugaacgugcaguucacgagcgugggcaaggaguucaacaaccuggagaagcggaucgagaaccucaacaagaaggucgacgacggguuccuggacaucuggaccuacaacgccgagcugcucauccugcuggagaacgagcgcacccucgacuuccacgacuucaacgugaagaaccuguacgagcgggucaagucccagcugcgcaacaacgcgaaggagaucggcaacgggugcuucgaguucuaccacaagugcaacaacgagugcauggagagcgugaagaacggcaccuacaacuacccccgguacuccgaggagagcaagcucaaccgcgaggagaucgacggggugaagcuggaguccgucggcgugcaccagauccuggccaucuacagcacgguggccagcucccucguccugcuggugagccucggcgccaucuccuucuggaugugcagcaacgggucccugcagugccggaucugcaucuga

SEQ ID NO: 70303 - RNA, 1701 nt, Artificial Sequence
  derived and/or modified CDS sequence (opt1) from hemagglutinin__InfluenzaA__ADU59558
augaaggccauccuggugguccuccuguacaccuucgccaccgcgaacgccgacacgcugugcaucggcuaccacgccaacaacagcaccgacaccguggacaccgugcucgagaagaacgucacggugacccacuccgugaaccugcuggaggacaagcacaacgggaagcucugcaagcugcgcggcgucgcgccccugcaccucgggaagugcaacaucgccggcuggauccuggggaacccggagugcgagagccuguccaccgccagcuccuggagcuacaucguggagaccuccagcuccgacaacggcacgugcuaccccggcgacuucaucgacuacgaggagcuccgggagcagcugagcuccgugagcuccuucgagcgcuucgagaucuuccccaagaccagcuccuggcccaaccacgacagcaacaagggggucaccgccgccugcccgcacgccggcgcgaaguccuucuacaagaaccugaucuggcucgugaagaaggggaacagcuaccccaagcuguccaagagcuacaucaacgacaagggcaaggaggugcugguccucugggggauccaccaccccagcaccuccgccgaccagcagagccuguaccagaacgccgacgccuacguguucgugggcacgucccgguacagcaagaaguucaagcccgagaucgccauccgcccgaagguccggggccaggaggggcgcaugaacuacuacuggacccugguggagcccggcgacaagaucaccuucgaggcgaccgggaaccucguggucccccgguacgccuucgccauggagcgcaacgccggcuccggcaucaucaucagcgacacgcccgugcacgacugcaacacgaccugccagaccccgaagggggccaucaacaccucccugcccuuccagaacauccaccccaucaccaucggcaagugccccaaguacgucaagagcaccaagcugcggcucgcgaccgggcugcgcaacgugccguccauccagagccggggccuguucggggccaucgccggcuucaucgagggcggguggacgggcaugguggacgggugguacggcuaccaccaccagaacgagcagggguccggcuacgccgccgaccucaagagcacccagaacgcgaucgacaagaucaccaacaaggugaacuccgucaucgagaagaugaacacccaguucacggccgugggcaaggaguucaaccaccuggagaagcgcaucgagaaccugaacaagaaggucgacgacggguuccucgacaucuggaccuacaacgccgagcugcuggugcuccuggagaacgagcggacccuggacuaccacgacagcaacgugaagaaccucuacgagaagguccgcucccagcugaagaacaacgccaaggagaucggcaacgggugcuucgaguucuaccacaagugcgacaacacgugcauggagagcgugaagaacggcaccuacgacuaccccaaguacuccgaggaggccaagcugaaccgggaggagaucgacggggugaagcucgagagcacccgcaucuaccagauccuggcgaucuacuccaccgucgccagcagccuggugcucguggucucccugggcgccaucagcuucuggaugugcuccaacggcagccugcagugccggaucugcaucuga

SEQ ID NO: 70304 - RNA, 1701 nt, Artificial Sequence; identical to SEQ ID NO: 66693
  derived and/or modified CDS sequence (opt1) from hemagglutinin__InfluenzaA__ADU59579

SEQ ID NO: 70305 - RNA, 1701 nt, Artificial Sequence; identical to SEQ ID NO: 66693
  derived and/or modified CDS sequence (opt1) from hemagglutinin__InfluenzaA__ADU59590

SEQ ID NO: 70306 - RNA, 1701 nt, Artificial Sequence; identical to SEQ ID NO: 66693
  derived and/or modified CDS sequence (opt1) from hemagglutinin__InfluenzaA__ADU59601

SEQ ID NO: 70307 - RNA, 1701 nt, Artificial Sequence; identical to SEQ ID NO: 66693
  derived and/or modified CDS sequence (opt1) from hemagglutinin__InfluenzaA__ADU59612

SEQ ID NO: 70308 - RNA, 1701 nt, Artificial Sequence; identical to SEQ ID NO: 66693
  derived and/or modified CDS sequence (opt1) from hemagglutinin__InfluenzaA__ADU59768

SEQ ID NO: 70309 - RNA, 1701 nt, Artificial Sequence; identical to SEQ ID NO: 66693
  derived and/or modified CDS sequence (opt1) from hemagglutinin__InfluenzaA__ADU59769

SEQ ID NO: 70310 - RNA, 1701 nt, Artificial Sequence; identical to SEQ ID NO: 66693
  derived and/or modified CDS sequence (opt1) from hemagglutinin__InfluenzaA__ADU59771

SEQ ID NO: 70311 - RNA, 1701 nt, Artificial Sequence; identical to SEQ ID NO: 66693
  derived and/or modified CDS sequence (opt1) from hemagglutinin__InfluenzaA__ADU59772

SEQ ID NO: 70312 - RNA, 1701 nt, Artificial Sequence; identical to SEQ ID NO: 66693
  derived and/or modified CDS sequence (opt1) from hemagglutinin__InfluenzaA__ADU59774

SEQ ID NO: 70313 - RNA, 1701 nt, Artificial Sequence; identical to SEQ ID NO: 66693
  derived and/or modified CDS sequence (opt1) from hemagglutinin__InfluenzaA__ADU59906

SEQ ID NO: 70314 - RNA, 1701 nt, Artificial Sequence; identical to SEQ ID NO: 66693
  derived and/or modified CDS sequence (opt1) from hemagglutinin__InfluenzaA__ADU59916

SEQ ID NO: 70315 - RNA, 1701 nt, Artificial Sequence; identical to SEQ ID NO: 66693
  derived and/or modified CDS sequence (opt1) from hemagglutinin__InfluenzaA__ADU76756

SEQ ID NO: 70316 - RNA, 1701 nt, Artificial Sequence; identical to SEQ ID NO: 66693
  derived and/or modified CDS sequence (opt1) from hemagglutinin__InfluenzaA__ADU76757

SEQ ID NO: 70317 - RNA, 1701 nt, Artificial Sequence; identical to SEQ ID NO: 66693
  derived and/or modified CDS sequence (opt1) from hemagglutinin__InfluenzaA__ADU76758

SEQ ID NO: 70318 - RNA, 1701 nt, Artificial Sequence; identical to SEQ ID NO: 66693
  derived and/or modified CDS sequence (opt1) from hemagglutinin__InfluenzaA__ADU76759

SEQ ID NO: 70319 - RNA, 1701 nt, Artificial Sequence; identical to SEQ ID NO: 67053
  derived and/or modified CDS sequence (opt1) from hemagglutinin__InfluenzaA__ADU76761

SEQ ID NO: 70320 - RNA, 1701 nt, Artificial Sequence; identical to SEQ ID NO: 66693
  derived and/or modified CDS sequence (opt1) from hemagglutinin__InfluenzaA__ADU76762

SEQ ID NO: 70321 - RNA, 1701 nt, Artificial Sequence
  derived and/or modified CDS sequence (opt1) from hemagglutinin__InfluenzaA__ADU76764
augaaggccauccuggugguccuccuguacaccuucgccaccgcgaacgccgacacgcugugcaucggcuaccacgccaacaacagcaccgacaccguggacaccgugcucgagaagaacgucacggugacccacuccgugaaccugcuggaggacaagcacaacgggaagcucugcaagcugcgcggcgucgcgccccugcaccucgggaagugcaacaucgccggcuggauccuggggaacccggagugcgagagccuguccaccgccagcuccuggagcuacaucguggaggccuccagcuccaacaacgggaccugcuaccccggcgacuucaucgacuacgaggagcuccgggagcagcugagcuccgugagcuccuucgagcgcuucgagaucuuccccaagacgagcuccuggcccaaccacgacagcaacaagggcgucaccgccgccugcccgcacgcgggcgccaaguccuucuacaagaaccugaucuggcucgugaagaaggggaacagcuaccccaagcuguccaagagcuacaucaacgacaagggcaaggaggugcugguccucugggggauccaccaccccagcaccuccgccgaccagcagagccuguaccagaacgccgacgccuacguguucgugggcaccucccgguacagcaagaaguucaagcccgagaucgcgauccgcccgaagguccgggaccaggagggccgcaugaacuacuacuggacgcugguggagcccggggacaagaucaccuucgaggccaccggcaaccucguggucccccgguacgccuucgccauggagcgcaacgccggguccggcaucaucaucagcgacacccccgugcacgacugcaacacgaccugccagaccccgaagggcgcgaucaacaccucccugcccuuccagaacauccaccccaucacgaucgggaagugccccaaguacgucaagagcaccaagcugcggcucgccaccggccugcgcaacgugccguccauccagagccgggggcuguucggcgccaucgccggguucaucgagggcggcuggaccgggaugguggacggcugguacggguaccaccaccagaacgagcagggcuccggguacgccgcggaccucaagagcacgcagaacgccaucgacgagaucaccaacaaggugaacuccgucaucgagaagaugaacacccaguucaucgccgugggcaaggaguucaaccaccuggagaagcgcaucgagaaccugaacaagaaggucgacgacggcuuccucgacaucuggaccuacaacgccgagcugcuggugcuccuggagaacgagcggacgcuggacuaccacgacagcaacgugaagaaccucuacgagaagguccgcucccagcugaagaacaacgccaaggagaucgggaacggcugcuucgaguucuaccacaagugcgacaacacgugcauggagagcgugaagaacgggaccuacgacuaccccaaguacuccgaggaggcgaagcugaaccgggaggagaucgacggcgugaagcucgagagcacccgcaucuaccagauccuggccaucuacuccaccgucgccagcagccuggugcucguggucucccugggggccaucagcuucuggaugugcuccaacggcagccugcagugccggaucugcaucuga

SEQ ID NO: 70322 - RNA, 1701 nt, Artificial Sequence
  derived and/or modified CDS sequence (opt1) from hemagglutinin__InfluenzaA__ADU76765
augaaggccauccugaucgugcuccuguacaccuucgccaccgcgaacgccgacacgcugugcaucggcuaccacgccaacaacagcaccgacaccgucgacaccgugcucgagaagaacgugacggucacccacuccgugaaccugcuggaggacaagcacaacgggaagcucugcaagcugcgcggcguggcgccccugcaccucgggaagugcaacaucgccggcuggauccuggggaacccggagugcgagagccuguccaccgccagcuccuggagcuacaucgucgagaccuccagcuccgacaacggcacgugcuaccccggcgacuucaucgacuacgaggagcuccgggagcagcugagcuccgugagcuccuucgagcgcuucgagaucuuccccaagaccagcuccuggcccaaccacgacagcaacaagggggugaccgccgccugcccgcacgccggcgcgaaguccuucuacaagaaccugaucuggcucgucaagaaggggaacagcuaccccaagcuguccaagagcuacaucaacgacaagggcaaggaggugcuggugcucugggggauccaccaccccagcaccuccgccgaccagcagagccuguaccagaacgccgacgccuacgucuucgugggcacgucccgguacagcaagaaguucaagcccgagaucgccauccgcccgaaggugcgggaccaggagggccgcaugaacuacuacuggacccuggucgagcccggggacaagaucaccuucgaggcgaccggcaaccucguggugccccgguacgccuucgccauggagcgcaacgccggguccggcaucaucaucagcgacacgcccguccacgacugcaacacgaccugccagaccccgaagggcgccaucaacaccucccugcccuuccagaacauccaccccaucaccaucgggaagugccccaaguacgucaagagcaccaagcugcggcucgcgaccggccugcgcaacgugccguccauccagagccgggggcuguucggcgccaucgccggguucaucgagggcggcuggacggggaugguggacggcugguacggguaccaccaccagaacgagcagggcuccggguacgccgccgaccucaagagcacccagaacgcgaucgacgagaucaccaacaaggugaacuccgugaucgagaagaugaacacccaguucacggccgucggcaaggaguucaaccaccuggagaagcgcaucgagaaccugaacaagaagguggacgacggcuuccucgacaucuggaccuacaacgccgagcugcugguccuccuggagaacgagcggacccuggacuaccacgacagcaacgugaagaaccucuacgagaaggugcgcucccagcugaagaacaacgccaaggagaucgggaacggcugcuucgaguucuaccacaagugcgacaacacgugcauggagagcgucaagaacgggaccuacgacuaccccaaguacuccgaggaggccaagcugaaccgggaggagaucgacggcgugaagcucgagagcacccgcaucuaccagauccuggcgaucuacuccagcguggccagcucccugguccucguggugagccugggggccaucuccuucuggaugugcagcaacggcucccugcagugccggaucugcaucuga

SEQ ID NO: 70323 - RNA, 1701 nt, Artificial Sequence; identical to SEQ ID NO: 68290
  derived and/or modified CDS sequence (opt1) from hemagglutinin__InfluenzaA__ADU76766

SEQ ID NO: 70324 - RNA, 1701 nt, Artificial Sequence
  derived and/or modified CDS sequence (opt1) from hemagglutinin__InfluenzaA__ADU76767
augaaggccauccuggugguccuccuguacaccuucgccaccgcgaacgccgacacgcugugcaucggcuaccacgccaacaacagcaccgacaccguggacaccgugcucgagaagaacgucacggugacccacuccgugaaccugcuggaggacaagcacaacgggaagcucugcaagcugcgcggcgucgcgccccugcaccucgggaagugcaacaucgccggcuggauccuggggaacccggagugcgagagccuguccaccgccagcuccuggagcuacaucguggagaccuccagcuccgacaacggcacgugcuaccccggcgacuucaucgacuacgaggagcuccgggagcagcugagcuccgugagcuccuucgagcgcuucgagaucuuccccaagaccagcuccuggcccaaccacgacagcaacaagggggucaccgccgccugcccgcacgccggcgcgaaguccuucuacaagaaccugaucuggcucgugaagaaggggaacagcuaccccaagcuguccaagagcuacaucaacgacaagggcaaggaggugcugguccucugggggauccaccaccccagcaccuccgccgaccagcagagccuguaccagaacgccgacgccuacguguucgugggcacgucccgguacagcaagaaguucaagcccgagaucgccauccgcccgaagguccgggagcaggagggccgcaugaacuacuacuggacccugguggagcccggggacaagaucaccuucgaggcgaccggcaaccucguggucccccgguacgccuucgccauggagcgcaacgccggguccggcaucaucaucagcgacacgcccgugcacgacugcaacacgaccugccagaccccgaagggcgccaucaacaccucccugcccuuccagaacauccaccccaucaccaucgggaagugccccaaguacgucaagagcaccaagcugcggcucgcgaccggccugcgcaacgugccguccauccagagccgggggcuguucggcgccaucgccggguucaucgagggcggcuggacggggaugguggacggcugguacggguaccaccaccagaacgagcagggcuccggguacgccgccgaccucaagagcacccagaacgcgaucgacaagaucaccaacaaggugaacuccgucaucgagaagaugaacacccaguucacggccgugggcaaggaguucaaccaccuggagaagcgcaucgagaaccugaacaagaaggucgacgacggcuuccucgacaucuggaccuacaacgccgagcugcuggugcuccuggagaacgagcggacccuggacuaccacgacagcaacgugaagaaccucuacgagaagguccgcucccagcugaagaacaacgccaaggagaucgggaacggcugcuucgaguucuaccacaagugcgacaacacgugcauggagagcgugaagaacgggaccuacgacuaccccaaguacuccgaggaggccaagcugaaccgggaggagaucgacggcgugaagcucgagagcacccgcaucuaccagauccuggcgaucuacuccaccgucgccagcagccuggugcucguggucucccugggggccaucagcuucuggaugugcuccaacggcagccugcagugccggaucugcaucuga

SEQ ID NO: 70325 - RNA, 1701 nt, Artificial Sequence
  derived and/or modified CDS sequence (opt1) from hemagglutinin__InfluenzaA__ADU76768
augaaggccauccuggugguccuccuguacaccuucgccaucgcgaacgccgacacccugugcaucggcuaccacgccaacaacagcacggacaccguggacaccgugcucgagaagaacgucaccgugacgcacuccgugaaccugcuggaggacaagcacaacgggaagcucugcaagcugcgcggcgucgcgccccugcaccucgggaagugcaacaucgccggcuggauccuggggaacccggagugcgagagccuguccaccgccagcuccuggagcuacaucguggagaccuccagcuccgacaacgggaccugcuaccccggcgacuucaucgacuacgaggagcuccgggagcagcugagcuccgugagcuccuucgagcgcuucgagaucuuccccaagacgagcuccuggcccaaccacgacagcaacaagggcgucaccgccgccugcccgcacgccggcgcgaaguccuucuacaagaaccugaucuggcucgugaagaaggggaacagcuaccccaagcuguccaagagcuacaucaacgacaagggcaaggaggugcugguccucugggggauccaccaccccagcaccuccgccgaccagcagagccuguaccagaacgccgacgccuacguguucgugggcaccuccaaguacagcaagaaguucaagcccgagaucgccauccggccgaagguccgcgaccaggagggccggaugaacuacuacuggacgcugguggagcccggggacaagaucaccuucgaggcgaccggcaaccucguggucccccgcuacgccuucgccauggagcggaacgccggguccggcaucaucaucagcgacacccccgugcacgacugcaacacgaccugccagaccccgaagggcgccaucaacaccucccugcccuuccagaacauccaccccaucacgaucgggaagugccccaaguacgucaagagcaccaagcugcgccucgcgaccggccugcggaacgugccguccauccagagccgcgggcuguucggcgccaucgccggguucaucgagggcggcuggaccgggaugguggacggcugguacggguaccaccaccagaacgagcagggcuccggguacgccgccgaccucaagagcacgcagcacgcgaucgacgagaucaccaacaaggugaacuccgucaucgagaagaugaacacccaguucaccgccgugggcaaggaguucaaccaccuggagaagcggaucgagaaccugaacaagaaggucgacgacggcuuccucgacaucuggacguacaacgccgagcugcuggugcuccuggagaacgagcgcacccuggacuaccacgacagcaacgugaagaaccucuacgagaagguccggucccagcugaagaacaacgccaaggagaucgggaacggcugcuucgaguucuaccacaagugcgacaacacgugcauggagagcgugaagaacgggaccuacgacuaccccaaguacuccgaggaggccaagcugaaccgcgaggagaucaacggcgugaagcucgagagcacccggaucuaccagauccuggcgaucuacuccaccgucgccagcagccuggugcucguggucucccugggggccaucagcuucuggaugugcuccaacggcagccugcagugccgcaucugcaucuga

SEQ ID NO: 70326 - RNA, 1701 nt, Artificial Sequence; identical to SEQ ID NO: 66693
  derived and/or modified CDS sequence (opt1) from hemagglutinin__InfluenzaA__ADU76769

SEQ ID NO: 70327 - RNA, 1701 nt, Artificial Sequence; identical to SEQ ID NO: 66693
  derived and/or modified CDS sequence (opt1) from hemagglutinin__InfluenzaA__ADU76770

SEQ ID NO: 70328 - RNA, 1701 nt, Artificial Sequence; identical to SEQ ID NO: 66693
  derived and/or modified CDS sequence (opt1) from hemagglutinin__InfluenzaA__ADU76771

SEQ ID NO: 70329 - RNA, 1701 nt, Artificial Sequence; identical to SEQ ID NO: 67438
  derived and/or modified CDS sequence (opt1) from hemagglutinin__InfluenzaA__ADU76772

SEQ ID NO: 70330 - RNA, 1701 nt, Artificial Sequence; identical to SEQ ID NO: 66693
  derived and/or modified CDS sequence (opt1) from hemagglutinin__InfluenzaA__ADU76774

SEQ ID NO: 70331 - RNA, 1701 nt, Artificial Sequence; identical to SEQ ID NO: 66693
  derived and/or modified CDS sequence (opt1) from hemagglutinin__InfluenzaA__ADU76775

SEQ ID NO: 70332 - RNA, 1701 nt, Artificial Sequence; identical to SEQ ID NO: 66693
  derived and/or modified CDS sequence (opt1) from hemagglutinin__InfluenzaA__ADU76776

SEQ ID NO: 70333 - RNA, 1701 nt, Artificial Sequence; identical to SEQ ID NO: 66693
  derived and/or modified CDS sequence (opt1) from hemagglutinin__InfluenzaA__ADU76777

SEQ ID NO: 70334 - RNA, 1701 nt, Artificial Sequence; identical to SEQ ID NO: 66693
  derived and/or modified CDS sequence (opt1) from hemagglutinin__InfluenzaA__ADU76778

SEQ ID NO: 70335 - RNA, 1701 nt, Artificial Sequence; identical to SEQ ID NO: 69551
  derived and/or modified CDS sequence (opt1) from hemagglutinin__InfluenzaA__ADU76779

SEQ ID NO: 70336 - RNA, 1701 nt, Artificial Sequence; identical to SEQ ID NO: 66693
  derived and/or modified CDS sequence (opt1) from hemagglutinin__InfluenzaA__ADU76780

SEQ ID NO: 70337 - RNA, 1701 nt, Artificial Sequence; identical to SEQ ID NO: 68290
  derived and/or modified CDS sequence (opt1) from hemagglutinin__InfluenzaA__ADU76781

SEQ ID NO: 70338 - RNA, 1701 nt, Artificial Sequence; identical to SEQ ID NO: 67053
  derived and/or modified CDS sequence (opt1) from hemagglutinin__InfluenzaA__ADU76782

SEQ ID NO: 70339 - RNA, 1701 nt, Artificial Sequence
  derived and/or modified CDS sequence (opt1) from hemagglutinin__InfluenzaA__ADU76784
augaaggccauccuggugguccuccuguacaccuucgccaccgcgaacgccgacacgcugugcaucggcuaccacgccaacaacagcaccgacaccguggacaccgugcucgagaagaacgucacggugacccacuccgugaaccugcuggaggacaagcacaacgggaagcucugcaagcugcgcggcgucgcgccccugcaccucgggaagugcaacaucgccggcuggauccuggggaacccggagugcgagagccuguccaccgccagcuccuggagcuacaucguggagaccuccagcuccaacaacggcacgugcuaccccggcgacuucaucgacuacgaggagcuccgggagcagcugagcuccgugagcuccuucgagcgcuucgagaucuuccccaagaccagcuccuggcccaaccacgacagcaacaagggggucaccgccgccugcccgcacgccggcgcgaaguccuucuacaagaaccugaucuggcucgugaagaaggggaacagcuaccccaagcuguccaagagcuacaucaacgacaagggcaaggaggugcugguccucugggggauccaccaccccagcaccuccgccgaccagcagagccuguaccagaacgccgacgccuacguguucgugggcacgucccgguacagcaagaaguucaagcccgagaucgccauccgcccgaagguccgggaccaggagggccgcaugaacuacuacuggacccugguggagcccggggacaagaucaccuucgaggcgaccggcaaccucguggucccccgguacgccuucgccauggagcgcaacgccggguccggcaucaucaucagcgacacgcccgugcacgacugcaacacgaccugccagaccccgaagggcgccaucaacaccucccugcccuuccagaacauccaccccaucaccaucgggaagugccccaaguacgucaagagcaccaagcugcggcucgcgaccggccugcgcaacgugccguccauccagagccgggggcuguucggcgccaucgccggguucaucgagggcggcuggacggggaugguggacggcugguacggguaccaccaccagaacgagcagggcuccggguacgccgccgaccucaagagcacccagaacgcgaucgacgagaucaccaacaaggugaacuccgucaucgagaagaugaacacccaguucacggccgugggcaaggaguucaaccaccuggagaagcgcaucgagaaccugaacaagaaggucgacgacggcuuccucgacaucuggaccuacaacgccgagcugcuggugcuccuggagaacgagcggacccuggacuaccacgacagcaacgugaagaaccucuacgagaagguccgcucccagcugaagaacaacgccaaggagaucgggaacggcugcuucgaguucuaccacaagugcgacaacacgugcauggagagcgugaagaacgggaccuacgacuaccccaaguacuccgaggaggccaagcugaaccgggaggagaucgacggcgugaagcucgagagcacccgcaucuaccagauccuggcgaucuacuccaccgucgccagcagccuggugcucguggucucccugggggccaucagcuucuggaugugcuccaacggcagccugcagugccggaucugcaucuga

SEQ ID NO: 70340 - RNA, 1701 nt, Artificial Sequence; identical to SEQ ID NO: 66693
  derived and/or modified CDS sequence (opt1) from hemagglutinin__InfluenzaA__ADU76785

SEQ ID NO: 70341 - RNA, 1701 nt, Artificial Sequence; identical to SEQ ID NO: 66693
  derived and/or modified CDS sequence (opt1) from hemagglutinin__InfluenzaA__ADU76786

SEQ ID NO: 70342 - RNA, 1701 nt, Artificial Sequence
  derived and/or modified CDS sequence (opt1) from hemagglutinin__InfluenzaA__ADU76787
augaaggccauccuggugguccuccuguacaccuucgccaccgcgaacgccgacacgcugugcaucggcuaccacgccaacaacagcaccgacaccguggacaccgugcucgagaagaacgucacggugacccacuccgugaaccugcuggaggacaagcacaacgggaagcucugcaagcugcgcggcgucgcgccccugcaccucgggaagugcaacaucgccggcuggauccuggggaacccggagugcgagagccuguccaccgccagcuccuggagcuacaucguggagaccuccagcuccgacaacggcacgugcuaccccggcgacuucaucgacuacgaggagcuccgggagcagcugagcuccgugagcuccuucgagcgcuucgagaucuuccccaagaccagcuccuggcccaaccacgacagcaacaagggggucaccgccgccugcccgcacgccggcgcgaaguccuucuacaagaaccugaucuggcucgugaagaaggggaacagcuaccccaagcuguccaagagcuacaucaacgacaagggcaaggaggugcugguccucugggggauccaccaccccagcaccuccgccgaccagcagagccuguaccagaacgccgacgccuacguguucgugggcacgucccgguacagcaagaaguucaagcccgagaucgccauccgcccgaagguccgggagcaggagggccgcaugaacuacuacuggacccugguggagcccggggacaagaucaccuucgaggcgaccggcaaccucguggucccccgguacgccuucgccauggagcgcaacgccggguccggcaucaucaucagcgacacgcccgugcacgacugcaacacgaccugccagaccccgaagggcgccaucaacaccucccugcccuuccacaacauccacagcaucaccaucgggaagugccccaaguacgugaaguccaccaagcugcggcucgcgaccggccugcgcaacguccccagcauccagucccgggggcuguucggcgccaucgccggguucaucgagggcggcuggacggggaugguggacggcugguacggguaccaccaccagaacgagcagggcagcggguacgccgccgaccucaaguccacccagaacgcgaucgacgagaucaccaacaaggugaacagcgucaucgagaagaugaacacccaguucacggccgugggcaaggaguucaaccaccuggagaagcgcaucgagaaccugaacaagaaggucgacgacggcuuccucgacaucuggaccuacaacgccgagcugcuggugcuccuggagaacgagcggacccuggacuaccacgacuccaacgugaagaaccucuacgagaagguccgcagccagcugaagaacaacgccaaggagaucgggaacggcugcuucgaguucuaccacaagugcgacaacacgugcauggaguccgugaagaacgggaccuacgacuacccgaaguacagcgaggaggccaagcugaaccgggaggagaucgacggcgugaagcucgaguccacccgcaucuaccagauccuggcgaucuacagcaccgucgccagcucccuggugcucguggucagccugggggccaucuccuucuggaugugcagcaacggcucccugcagugccggaucugcaucuga

SEQ ID NO: 70343 - RNA, 1701 nt, Artificial Sequence; identical to SEQ ID NO: 70324
  derived and/or modified CDS sequence (opt1) from hemagglutinin__InfluenzaA__ADU76788

SEQ ID NO: 70344 - RNA, 1701 nt, Artificial Sequence; identical to SEQ ID NO: 70324
  derived and/or modified CDS sequence (opt1) from hemagglutinin__InfluenzaA__ADU76789

SEQ ID NO: 70345 - RNA, 1701 nt, Artificial Sequence; identical to SEQ ID NO: 66693
  derived and/or modified CDS sequence (opt1) from hemagglutinin__InfluenzaA__ADU76790

SEQ ID NO: 70346 - RNA, 1701 nt, Artificial Sequence; identical to SEQ ID NO: 66693
  derived and/or modified CDS sequence (opt1) from hemagglutinin__InfluenzaA__ADU76791

SEQ ID NO: 70347 - RNA, 1701 nt, Artificial Sequence; identical to SEQ ID NO: 70324
  derived and/or modified CDS sequence (opt1) from hemagglutinin__InfluenzaA__ADU76792

SEQ ID NO: 70348 - RNA, 1701 nt, Artificial Sequence
  derived and/or modified CDS sequence (opt1) from hemagglutinin__InfluenzaA__ADU76793
augaaggccauccuggugguccuccuguacaccuucgccaccgcgaacgccgacacgcugugcaucggcuaccacgccaacaacagcaccgacaccguggacaccgugcucgagaagaacgucacggugacccacuccgugaaccugcuggaggacaagcacaacgggaagcucugcaagcugcgcggcgucgcgccccugcaccucgggaagugcaacaucgccggcuggauccuggggaacccggagugcgagagccuguccaccgccagcuccuggagcuacaucguggagaccuccagcuccgacaacggcacgugcuaccccggcgacuucaucgacuacgaggagcuccgggagcagcugagcuccgugagcuccuucgagaaguucgagaucuuccccaagaccagcuccuggcccaaccacgacagcaacaagggggucaccgccgccugcccgcacgccggcaccaaguccuucuacaagaaccugaucuggcucgugaagaaggggaacagcuaccccaagcuguccaagagcuacaucaacgacaagggcaaggaggugcugguccucugggggauccaccaccccagcacguccgcggaccagcagagccuguaccagaacgccgacgccuacguguucgugggcaccucccgcuacagcaagaaguucaagcccgagaucgccauccggccgaagguccgcgaccaggagggccggaugaacuacuacuggacccugguggagcccggggacaagaucaccuucgaggccacgggcaaccucguggucccccgcuacgcguucgccauggagcggaacgccggguccggcaucaucaucagcgacacccccgugcacgacugcaacacgaccugccagaccccgaagggcgccaucaacaccucccugcccuuccagaacauccaccccaucaccaucgggaagugccccaaguacgucaagagcaccaagcugcgccucgccacgggccugcggaacgugccguccauccagagccgcgggcuguucggcgcgaucgccggguucaucgagggcggcuggaccgggaugguggacggcugguacggguaccaccaccagaacgagcagggcuccggguacgccgccgaccucaagagcacccagaacgccaucgacaagaucaccaacaaggugaacuccgucaucgagaagaugaacacgcaguucaccgcggugggcaaggaguucaaccaccuggagaagcggaucgagaaccugaacaagaaggucgacgacggcuuccucgacaucuggaccuacaacgccgagcugcuggugcuccuggagaacgagcgcacccuggacuaccacgacagcaacgugaagaaccucuacgagaagguccggucccagcugaagaacaacgccaaggagaucgggaacggcugcuucgaguucuaccacaagugcgacaacacgugcauggagagcgugaagaacgggaccuacgacuaccccaaguacuccgaggaggccaagcugaaccgcgaggagaucgacggcgugaagcucgagagcacccggaucuaccagauccuggccaucuacuccaccgucgcgagcagccuggugcucguggucucccugggggccaucagcuucuggaugugcuccaacggcagccugcagugccgcaucugcaucuga

SEQ ID NO: 70349 - RNA, 1701 nt, Artificial Sequence
  derived and/or modified CDS sequence (opt1) from hemagglutinin__InfluenzaA__ADU85911
augaaggccaucaucgugguccugcucuacaccuucgccaccgcggacgccgacacgcugugcaucggcuaccacgccaacaacagcaccgacaccguggacaccgugcuggagaagaacgucacggugacccacuccgugaaccuccuggagaacaagcacaacgggaagcugugcaagcucggcgggaucgcgccccugcaccugggcaagugcgacaucgccggguggcuccugggcaacccggagugcgagagccuguucaccgccuccagcugguccuacaucgucgagacccccaacagcgacaacggcacgugcuaccccggggacuucaucaacuacgaggagcuccgcgagcaccuguccagcguguccagcuucgagcgguucgagaucuuccccaaggccaacuccuggccgaaccacgacaccaacaagggcgugaccgccgccugccccuacgcgggggccaacagcuucuaccgcaaccugaucuggcucgucaagaagggcaacuccuaccccaagcugagcaaguccuacaucaacaacaagaagaaggaggugcuggugaucugggggauccaccacccgcccaccagcacggaccagcagacccucuaccagaacgccgacgccuacgucuucgugggcuccagcaaguacuccaagcgguucaagcccgagaucgccgcgcgccccaaggugcgggaccaggccggccgcauggacuacuacuggacccugaucgagcccggggacaccaucacguucgaggccaccggcaaccuggucgugccgcgguacgccuucgccaugaagcgcgggagcggcagcggcaucaucguguccgacgcgcccguccacgacugcaacacgaccugccagacccccaagggggccaucaacaccagccuccccuuccagaacauccacccggugaccaucggcgagugccccaaguacgugaaguccaccaagcugcggauggccacggggcugcgcaacauccccagcauccagucccggggccucuucggggccaucgccggcuuccuggagggcggguggaccggcaugaucgacgggugguacggcuaccaccaccagaacgagcaggggagcggcuacgcggccgaccagaaguccacccagaacgccaucgacggcaucaccaacaaggucaacagcaucaucgagaagaugaacacgcaguucaccgccguggggaaggaguucucccagcuggagaagcgcaucgagagccucaacaacaagguggacgacggcuuccuggacaucuggaccuacaacgccgagcugcucguccugcuggagaacgagcggacccucgacuaccacgacuccaacgugaagaaccuguacgagaagguccgcagccagcugaagaacaacgcgaaggagaucgggaacggcugcuucgaguucuaccacaagugcgacaacacgugcauggaguccgugaagaacgggaccuacgacuaccccaaguacagcgaggaggccaagcucaaccgggaggagaucgacggcgugaagcuggaguccgcccgcaucuaccagauccuggccaucuacagcaccgucgcguccagccucgugcugcuggugucccucggcgccaucagcuucuggaugugcagcaacgggucccugcagugccggaucugcaucuga

SEQ ID NO: 70350 - RNA, 1701 nt, Artificial Sequence; identical to SEQ ID NO: 67857
  derived and/or modified CDS sequence (opt1) from hemagglutinin__InfluenzaA__ADV17283

SEQ ID NO: 70351 - RNA, 1701 nt, Artificial Sequence; identical to SEQ ID NO: 67857
  derived and/or modified CDS sequence (opt1) from hemagglutinin__InfluenzaA__ADV17293

SEQ ID NO: 70352 - RNA, 1701 nt, Artificial Sequence
  derived and/or modified CDS sequence (opt1) from hemagglutinin__InfluenzaA__ADV17303
augaaggccauccuggugguccuccuguacaccuucgccaccgcgaacgccgacacgcugugcaucggcuaccacgccaacaacagcaccgacaccguggacaccgugcucgagaagaacgucacggugacccacuccgugaaccugcuggaggacaagcacaacgggaagcucugcaagcugcgcggcgucgcgccccugcaccucgggaagugcaacaucgccggcuggauccuggggaacccggagugcgagagccuguccaccgccagcuccuggagcuacaucguggagaccuccagcuccgacaacggcacgugcuaccccggcgacuucaucgacuacgaggagcuccgggagcagcugagcuccgugagcuccuucgagcgcuucgagaucuuccccaagaccagcuccuggcccaaccacgacagcaacaagggggucaccgccgccugcccgcacgccggcgcgaaguccuucuacaagaaccugaucuggcucgugaagaaggggaacagcuaccccaagcuguccaagagcuacaucaacgacaagggcaaggaggugcugguccucugggggauccaccaccccagcaccuccgccgaccagcagagccuguaccagaacgccgacgccuacguguucgugggcacgucccgguacagcaagaaguucaagcccgagaucgccauccgcccgaagguccgggaccaggagggccgcaugaacuacuacuggacccugguggagcccggggacaagaucaccuucgaggcgaccggcaaccucguggucccccgguacgccuucgccauggagcgcaacgccggguccggcaucaucaucagcgacacgcccgugcacgacugcaacacgaccugccagaccccgaagggcgccaucaacaccucccugcccuuccagaacauccaccccaucaccaucgggaagugccccaaguacgucaagagcaccaagcugcggcucgcgaagggccugcgcaacgugccguccauccagagccgggggcuguucggcgccaucgccggguucaucgagggcggcuggaccgggaugguggacggcugguacggguaccaccaccagaacgagcagggcuccggguacgccgccgaccucaagagcacgcagaacgcgaucgacgagaucaccaacaaggugaacuccgucaucgagaagaugaacacccaguucaccgccgugggcaaggaguucaaccaccuggagaagcgcaucgagaaccugaacaagaaggucgacgacggcuuccucgacaucuggacguacaacgccgagcugcuggugcuccuggagaacgagcggacccuggacuaccacgacagcaacgugaagaaccucuacgagaagguccgcucccagcugaagaacaacgccaaggagaucgggaacggcugcuucgaguucuaccacaagugcgacaacacgugcauggagagcgugaagaacgggaccuacgacuaccccaaguacuccgaggaggccaagcugaaccgggaggagaucgacggcgugaagcucgagagcacccgcaucuaccagauccuggcgaucuacuccaccgucgccagcagccuggugcucguggucucccugggggccaucagcuucuggaugugcuccaacggcagccugcagugccggaucugcaucuga

SEQ ID NO: 70353 - RNA, 1701 nt, Artificial Sequence; identical to SEQ ID NO: 67857
  derived and/or modified CDS sequence (opt1) from hemagglutinin__InfluenzaA__ADV17313

SEQ ID NO: 70354 - RNA, 1701 nt, Artificial Sequence
  derived and/or modified CDS sequence (opt1) from hemagglutinin__InfluenzaA__ADV17323
augaaggccauccuggugguccuccuguacaccuucgccaccacgaacgcggacacccugugcaucggcuaccacgccaacaacagcaccgacaccguggacacggugcucgagaagaacgucaccgugacccacuccgugaaccugcuggaggacaagcacaacgggaagcucugcaagcugcgcggcgucgcgccccugcaccucgggaagugcaacaucgccggcuggauccuggggaacccggagugcgagagccuguccaccgccagcuccuggagcuacaucguggagacguccagcuccgacaacgggaccugcuaccccggcgacuucaucgacuacgaggagcuccgggagcagcugagcuccgugagcuccuucgagcgcuucgagaucuuccccaagaccaacagcuggcccaaccacgacuccaacaagggcgucaccgccgccugcccgcacgccggcgccaagagcuucuacaagaaccugaucuggcucgugaagaaggggaacuccuaccccaagcugagcaaguccuacaucaacgacaagggcaaggaggugcugguccucugggggauccaccaccccagcacgagcgcggaccagcagggccuguaccagaacgccgacgccuacguguucgugggcaccucccgguacagcaagaaguucaagcccgagaucgccauccgcccgaagguccgggaccaggaggggcgcaugaacuacuacuggacccugguggagcccggcgacaagaucaccuucgaggccacggggaaccucguggucccccgguacgcguucgccauggagcgcaacgccggcuccggcaucaucaucagcgacacccccgugcacgacugcaacacgaccugccagaccccggagggggccaucaacaccucccugcccuuccagaacauccaccccaucaccaucggcaagugccccaaguacgucaagagcaccaagcugcggcucgccacggggcugcgcaacgugccguccauccagagccggggccuguucggggcgaucgccggcuucaucgagggcggguggaccggcaugguggacgggugguacggcuaccaccaccagaacgagcagggguccggcuacgccgccgaccucaagagcacccagaacgccaucgacaagaucaccaacaaggugaacuacgucaucgagaagaugaacacgcaguucaccgcggugggcaaggaguucaaccaccuggagaagcgcaucgagaaccugaacaagaaggucgacgacggguuccucgacaucuggaccuacaacgccgagcugcuggugcuccuggagaacgagcggacccuggacuaccacgacuccaacgugaagaaccucuacgagaagguccgcagccagcugaagaacaacgccaaggagaucggcaacgggugcuucgaguucuaccacaagugcgacaacacgugcauggaguccgugaagaacggcaccuacgacuaccccaaguacagcgaggaggccaagcugaaccgggaggagaucgacggggugaagcucgaguccacccgcaucuaccagauccuggccaucuacagcaccgucgcguccagccuggugcucguggucucccugggcgccaucagcuucuggaugugcagcaacggcucccugcagugccggaucugcaucuga

SEQ ID NO: 70355 - RNA, 1701 nt, Artificial Sequence
  derived and/or modified CDS sequence (opt1) from hemagglutinin__InfluenzaA__ADV17333
augaaggccauccuggugguccuccuguacaccuucgccaccgcgaacgccgacacgcugugcaucggcuaccacgccaacaacagcaccgacaccguggacaccgugcucgagaagaacgucacggugacccacuccgugaaccugcuggaggacaagcacaacgggaagcucugcaagcugcgcggcgucgcgccccugcaccucgggaagugcaacaucgccggcuggauccuggggaacccggagugcgagagccuguccaccgccagcuccuggagcuacaucguggagaccuccagcuccgacaacggcacgugcuaccccggcgacuucaucgacuacgaggagcuccgggagcagcugagcuccgugagcuccuucgagcgcuucgagaucuuccccaagaccagcuccuggcccaaccacgacagcaacaagggggucaccgccgccugcccgcacgccggcgcgaaguccuucuacaagaaccugaucuggcucgugaagaaggggaacagcuaccccaagcuguccaagagcuacaucaacgacaagggcaaggaggugcugguccucugggggauccaccaccccagcaccuccgccgaccagcagaaccuguaccagaacgccgacgccuacguguucgugggcacgagccgguacuccaagaaguucaagcccgagaucgccauccgcccgaagguccgggaccaggagggccgcaugaacuacuacuggacccugguggagcccggggacaagaucaccuucgaggcgaccggcaaccucgugguccugcgguacgccuucgccauggagcgcaacgccgggagcggcaucaucaucuccgacacgcccgugcacgacugcaacacgaccugccagacccccaagggcgccaucaacaccagccugccguuccagaacauccaccccaucaccaucgggaagugccccaaguacgugaaguccaccaagcuccggcuggcgaccggccugcgcaacguccccagcauccagucccggggccucuucggggccaucgccggguucaucgagggcggcuggacggggaugguggacggcugguacggguaccaccaccagaacgagcagggcagcggguacgccgccgaccugaaguccacccagaacgcgaucgacaagaucaccaacaaggugaacagcgucaucgagaagaugaacacccaguucacggccgugggcaaggaguucaaccaccuggagaagcgcaucgagaaccucaacaagaaggucgacgacggcuuccuggacaucuggaccuacaacgccgagcugcucgugcugcuggagaacgagcggacccucgacuacuacgacuccaacgugaagaaccuguacgagaagguccgcagccagcugaagaacaacgccaaggagaucgggaacggcugcuucgaguucuaccacaagugcgacaacacgugcauggaguccgugaagaacgggaccuacgacuacccgaaguacagcgaggaggccaagcucaaccgggaggagaucgacggcgugaagcuggaguccacccgcaucuaccagauccuggucaucuacagcaccguggcguccagccucgugcuggucgugagccugggggccaucuccuucuggaugugcagcaacggcucccuccagugccggaucugcaucuga

SEQ ID NO: 70356 - RNA, 1701 nt, Artificial Sequence; identical to SEQ ID NO: 66693
  derived and/or modified CDS sequence (opt1) from hemagglutinin__InfluenzaA__ADV19019

SEQ ID NO: 70357 - RNA, 1701 nt, Artificial Sequence; identical to SEQ ID NO: 67178
  derived and/or modified CDS sequence (opt1) from hemagglutinin__InfluenzaA__ADV41677

SEQ ID NO: 70358 - RNA, 1701 nt, Artificial Sequence
  derived and/or modified CDS sequence (opt1) from hemagglutinin__InfluenzaA__ADV58939
augaaggccauccuggugguccuccuguacaccuucgccaccgcgaacgccgacacgcugugcaucggcuaccacgccaacaacagcaccgacaccguggacaccgugcucgagaagaacgucacggugacccacuccgugaaccugcuggaggacaagcacaacgggaagcucugcaagcugcgcggcgucgcgccccugcaccucgggaagugcaacaucgccggcuggauccuggggaacccggagugcgagagccuguccaccgccagcuccuggagcuacaucguggagaccuccagcuccgacaacggcacgugcuaccccggcgacuucaucgacuacgaggagcuccgggagcagcugagcuccgugagcuccuucgagcgcuucgagaucuuccccaagaccagcuccuggcccaaccacgacagcaacaagggggucaccgccgccugcccgcacgccggcgcgaagggguucuacaagaaccugaucuggcucgugaagaagggcaacuccuaccccaagcugagcaaguccuacaucaacgacaaggggaaggaggugcugguccucuggggcauccaccaccccagcaccacggccgaccagcagagccuguaccagaacgccgacaccuacguguucgugggcaccucccgguacagcaagaaguucaagcccgagaucgccauccgcccgaagguccgggaccaggaggggcgcaugaacuacuacuggacccugguggagcccggcgacaagaucacguucgaggccaccgggaaccucguggucccccgguacgcguucgccauggagcgcaacgccggcuccggcaucaucaucagcgacacccccgugcacgacugcaacaccacgugccagaccccgaagggggccaucaacaccucccugcccuuccagaacauccaccccaucaccaucggcaagugccccaaguacgucaagagcacgaagcugcggcucgccaccgggcugcgcaacgugccguccauccagagccggggccuguucggggcgaucgccggcuucaucgagggcggguggaccggcaugguggacgggugguacggcuaccaccaccagaacgagcagggguccggcuacgccgccgaccucaagagcacccagaacgccaucgacaagaucacgaacaaggugaacuccgucaucgagaagaugaacacccaguucaccgcggugggcaaggaguucaaccaccuggagaagcgcaucgagaaccugaacaagaaggucgacgacggguuccucgacaucuggaccuacaacgccgagcugcuggugcuccuggagaacgagcggacgcuggacuaccacgacagcaacgugaagaaccucuacgagaagguccgcaaccagcugaagaacaacgccaaggagaucggcaacgggugcuucgaguucuaccacaagugcgacaacacgugcauggaguccgugaagaacgagaccuacgacuaccccaaguacagcgaggaggccaagcugaaccgggaggagaucgacggcgugaagcucgaguccacccgcaucuaccagauccuggccaucuacagcaccgucgcguccagccuggugcucguggucucccugggggccaucagcuucuggaugugcagcaacggcucccugcagugccggaucugcaucuga

SEQ ID NO: 70359 - RNA, 1698 nt, Artificial Sequence
  derived and/or modified CDS sequence (opt1) from hemagglutinin__InfluenzaA__ADV69074
augaaggugaagcugcucguccugcugugcaccuucaccgccacguacgccgacaccaucugcaucggcuaccacgcgaacaacagcaccgacaccguggacacggugcucgagaagaacgucaccgugacccacuccgugaaccugcuggaggacagccacaacgggaagcucugccugcugaagggcaucgcgccccuccagcuggggaacugcaacgucgccggcuggauccuggggaacccggagugcgagcuccugaucuccaaggagagcugguccuacaucguggagacccccgaccccgagaacggcacgugcuaccccggcuacuucaccgacuacgaggagcugcgcgagcagcucagcuccgugagcuccuucaagcgguucgagaucuucccgaaggagagcuccuggcccaaccacaccgucaccggggugagcgccuccugcagccacaacggcaaguccagcuucuaccgcaaccugcuguggcucacggugaagaacgggcuguaccccaaccuguccaagagcuacaccaacgacaaggagaaggagguccucgugcuguggggcgugcaccacccgcccuccaucggggaccagcggacccuguaccacaccgagaacgccuacgucagcguggugagcucccacuacagccgccgguucacgcccgagaucgucaagcgccccaaggugcgggaccaggagggccgcaucaacuacuacuggacccuccuggagcccggcgacaccaucaucugcgaggccaacgggaaccugaucgccccgcgguacgccuucgcccucucccgcggccuggggagcggcaucaucaccuccaacgcgcccaugggcgagugcaacgccaagugccagacgccccagggggccaucaacagcucccugcccuuccagaacgugcacccggucaccaucggcgagugccccaaguacgucaagagcgccaagcuccggauggugaccgggcugcgcaacacccccuccauccagagccggggccuguucggggccaucgcgggcuucaucgagggcggguggacgggcaugguggacgggugguacggcuaccaccaccagaacgagcagggguccggcuacgccgccgaccagaaguccacccagaacgccaucaacggcaucaccaacaaggugaacagcgucaucgagaagaugaacacccaguucacggccguggggaaggaguucaacaagcucgagcgccggauggagaaccugaacaagaagguggacgacggcuuccuggacaucuggaccuacaacgcggagcuccugguccugcucgagaacgagcgcacccuggacuuccacgacagcaacgugaagaaccuguacgagaaggugaagucccagcucaagaacaacgccaaggagaucgggaacggcugcuucgaguucuaccacaagugcaacgacgagugcauggagagcgucaagaacgggaccuacgacuaccccaaguacuccgaggagagcaagcugaaccgggagaagaucgacggcgugaagcuggaguccauggagguguaccagauccucgccaucuacagcacggucgccagcucccugguguuccugguggcccucggcgcgaucugcuucuggaugugcagcaacgggucccugcagugcaagaucugcaucuga

SEQ ID NO: 70360 - RNA, 1698 nt, Artificial Sequence
  derived and/or modified CDS sequence (opt1) from hemagglutinin__InfluenzaA__ADV69075
augaaggugaagcugcucguccugcugugcaccuucaccgccacguacgccgacaccaucugcaucggcuaccacgcgaacaacagcaccgacaccguggacacggugcucgagaagaacgucaccgugacccacuccgugaaccugcuggaggacagccacaacgggaagcucugccugcugaagggcaucgcgccccuccagcuggggaacugcaacgucgccggcuggauccuggggaacccggagugcgagcuccugaucuccaaggagagcugguccuacaucguggagacccccgaccccgagaacggcacgugcuaccccggcuacgugaccgacuacgaggagcugcgcgagcagcucagcuccgucagcuccuucaagcgguucgagaucuucccgaaggagagcuccuggcccaaccacaccgugaccggggugagcgccuccugcagccacaacggcaaguccagcuucuaccgcaaccugcuguggcucacggucaagaacgggcuguaccccaaccuguccaagagcuacaccaacgacaaggagaaggaggugcucgugcuguggggcguccaccacccgcccuccaucggggaccagcggacccuguaccacaccgagaacgccuacgugagcguggucagcucccacuacagccgccgguucacgcccgagaucgugaagcgccccaaggugcgggaccaggagggccgcaucaacuacuacuggacccuccuggagcccggcgacaccaucaucugcgaggccaacgggaaccugaucgccccgcgguacgccuucgcccucucccgcggcuucgggagcggcaucaucaccuccaacgcgcccaugggcgagugcaacgccaagugccagacgccccagggggccaucaacagcucccugcccuuccagaacguccacccggugaccaucggcgagugccccaaguacgucaagagcgccaagcugcggauggugaccgggcuccgcaacacccccuccauccagagccggggccuguucggggccaucgcgggcuucaucgagggcggguggacgggcaugguggacgggugguacggcuaccaccaccccaacgagcagggguccggcuacgccgccgaccagaaguccacccagaacgccaucaacggcaucaccaacaaggucaacagcgugaucgagaagaugaacacccaguucacggccguggggaaggaguucaacaagcuggagcgccggauggagaaccucaacaagaaggucgacgacggcuuccuggacaucuggaccuacaacgcggagcugcucgugcugcuggagaacgagcgcacccucgacuuccacgacagcaacgugaagaaccuguacgagaaggucaagucccagcugaagaacaaggugaaggagaucgggaacggcugcuucgaguucuaccacaagugcaacgacgagugcauggagagcgugaagaacgggaccuacgacuacccgaaguacuccgaggagagcaagcucaaccgggagaagaucgacggcgucaagcuggaguccauggagguguaccagauccuggccaucuacagcacgguggccagcucccucgucuuccugguggcccugggcgccaucugcuucuggaugugcagcaacgggucccuccagugcaagaucugcaucuga

SEQ ID NO: 70361 - RNA, 1698 nt, Artificial Sequence
  derived and/or modified CDS sequence (opt1) from hemagglutinin__InfluenzaA__ADV69077
augaaggugaagcugcucguccugcugugcaccuucaccgccacguacgccgacaccaucugcaucggcuaccacgcgaacaacagcaccgacaccguggacacggugcucgagaagaacgucaccgugacccacuccgugaaccugcuggaggacagccacaacgggaagcucugccugcugaagggcaucgcgccccuccagcuggggaacugcaacgucgccggcuggauccuggggaacccggagugcgagcuccugaucuccaaggagagcugguccuacaucguggagacccccgaccccgagaacggcacgugcuaccccggcuacuucaccgacuacgaggagcugcgcgagcagcucagcuccgugagcuccuucaagcgguucgagaucuucccgaaggagagcuccuggcccaaccacaccgucaccggggugagcgccuccugcagccacaacggcaaguccagcuucuaccgcaaccugcuguggcucacggugaagaacgggcuguaccccaaccuguccaagagcuacaccaacgacaaggagaaggagguccucgugcuguggggcgugcaccacccgcccuccaucggggaccagcggacccuguaccacaccgagaacgccuacgucagcguggugagcucccacuacagccgccgguucacgcccgagaucgucaagcgccccaaggugcgggaccaggagggccgcaucaacuacuacuggacccuccuggagcccggcgacaccaucaucuucgaggccaacgggaaccugaucgccccgcgguacgccuucgcccucucccgcggcuucgggagcggcaucaucaccuccaacgcgcccaugggcgagugcaacgccaagugccagacgccccagggggccaucaacagcucccugcccuuccagaacgugcacccggucaccaucggcgagugccccaaguacgucaagagcgccaagcugcggauggugaccgggcuccgcaacacccccuccauccagagccggggccuguucggggccaucgcgggcuucaucgagggcggguggacgggcaugguggacgggugguacggcuaccaccaccagaacgagcagggguccggcuacgccgccgaccagaaguccacccagaacgccaucaacggcaucaccaacaaggugaacagcgucaucgagaagaugaacacccaguucacggccguggggaaggaguucaacaagcuggagcgccggauggagaaccucaacaagaagguggacgacggcuuccuggacaucuggaccuacaacgcggagcugcucguccugcuggagaacgagcgcacccucgacuuccacgacagcaacgugaagaaccuguacgagaaggugaagucccagcugaagaacaacgccaaggagaucgggaacggcugcuucgaguucuaccacaagugcaacgacgagugcauggagagcgucaagaacgggaccuacgacuaccccaaguacuccgaggagagcaagcucaaccgggagaagaucgacggcgugaagcuggaguccauggagguguaccagauccuggccaucuacagcacggucgccagcucccucguguuccugguggcccugggcgcgaucugcuucuggaugugcagcaacgggucccuccagugcaagaucugcaucuga

SEQ ID NO: 70362 - RNA, 1698 nt, Artificial Sequence
  derived and/or modified CDS sequence (opt1) from hemagglutinin__InfluenzaA__ADV69078
augaaggugaagcugcucauccugcugugcaccuucaccgccacguacgccgacaccaucugcaucggcuaccacgcgaacaacagcaccgacaccgucgacacggugcucgagaagaacgugaccgucacccacuccgugaaccugcuggaggacagccacaacgggaagcucugccugcugaagggcaucgcgccccuccagcuggggaacugcuccguggccggcuggauccuggggaacccggagugcgagagccucaucuccaagaaguccuggagcuacaucgucgagacccccaaccccgagaacggcgccugcuaccccggcgaguucgccgacuacgaggagcugcgcgagcagcugagcuccgugagcuccuucgagcgguucgagaucuucccgaaggagagcuccuggcccaaccacacggccgccggggugagcgccuccugcagccacaacggcgagaaguccuucuaccgcaaccucaucuggcugaccaagaagaacgggcuguaccccaaccucagcaaguccuacgagaacgacaaggagaaggagguccugauccuguggggcgugcaccacccgcccaacaucgagaaccagcggacccucuaccgcaccgagaacgccuacgugagcgucgugagcucccacuacagcgggcgguucacgcccgagaucaccaagcgccccaaggugcggaaccaggagggccgcaucaacuacuacuggacccugcuggagcccggcgacaccaucaucuucgaggcgaacgggaaccucaucgccccgugguacgccuucacgcugucccggggccuggggagcggcaucaucaccuccaacgcccccauggacgagugcgacgccaagugccagacgccccagggcgcgaucaacagcucccuccccuuccagaacguccacccggugaccaucggggagugccccaaguacgugcgcagcuccaagcugcggauggucaccggccugcgcaacauccccagcauccagucccggggccucuucggggccaucgccggguucaucgagggcggcuggaccgggaugguggacggcugguacggguaccaccaccagaacgagcagggcagcggguacgccgccgaccaggaguccacccagaacgcgaucaacggcaucaccaacaaggugaacagcgucaucgagaagaugaacacgcaguucaccgccgugggcaaggaguucaacaagcuggagcgccggauggagaaccugaacaagaagguggacgacggguuccucgacaucuggaccuacaacgccgagcugcugguccuccuggagaacgagcgcacccuggacuuccacgacuccaacgucaagagccucuacgagaaggugaagucccagcugaagaacaacgccaaggagaucggcaacgggugcuucgaguucuaccacaagugcaacaacgagugcauggagagcgugaagaacggcacguacgacuaccccaaguacuccgaggagagcaagcugaaccgggagaagaucgacggggugaagcucgacagcaugggcgucuaccgcauccuggccaucuacuccaccguggcgagcucccuggugcuccuggucagccugggcgccaucuccuucuggaugugcagcaacgggucccuccagugccggaucugcaucuga

SEQ ID NO: 70363 - RNA, 1698 nt, Artificial Sequence
  derived and/or modified CDS sequence (opt1) from hemagglutinin__InfluenzaA__ADV69079
augaaggugaagcugcucauccugcugugcaccuucaccgccacguacgccgacaccaucugcaucggcuaccacgcgaacaacagcaccgacaccgucgacacggugcucgagaagaacgugaccgucacccacuccgugaaccugcuggaggacagccacaacgggaagcucugccugcugaagggcaucgcgccccuccagcuggggaacugcuccguggccggcuggauccuggggaacccggagugcgagcuccugaucagcaagaaguccuggagcuacaucgucaagacccccaaccccgagaacggcuccugcuaccccggcuacuucgccgacuacgaggagcugcgcgagcagcucagcuccgugagcuccuucgagcgguucgagauguucccgaaggagagcuccuggcccaaccacaacgugaacggggucagcgccuccugcagccacaacggcaagcgcuccuucuaccggaaccugcuguggcucacggggaagaacggccuguaccccaaccugaccaagagcuacgagaacaacaacgagaaggaggugcucauccuguggggcgugcaccaccccuccaacaucggggaccagcgcacccuguaccacaccgagaacgccuacgucagcgugaugagcucccacuacagccggcgcuucacgccggagaucaacaagcggcccaaggugcgcgaccaggagggccggaucaacuacuacuggacccuccuggagcccggggacaccaucaucuucgaggccaacggcaaccugaucgcccccugguacgccuucgcgcucucccgcggguucggcagcggcaucaucaccuccagcgccccgauggacgagugcgacgccaagugccagacgccccgcggggccaucaacuccagccugcccuuccagaacguccaccccgugaccaucggcgagugcccgaaguacgugcgguccgccaagcugcggauggucaccgggcuccgcaacauccccagcauccagucccggggccuguucggggcgaucgccggcuucaucgagggcggguggaccggcaugguggacgggugguacggcuaccaccaccagaacgagcaggggagcggcuacgccgccgaccaggaguccacgcagaacgccaucaacggcaucaccaacaaggugaacagcgucaucgagaagaugaacacccaguucaccgcgguggggaaggaguucaacaagcuggagcgccggauggagaaccucaacaagaagguggacgacggcuuccuggacaucuggacguacaacgccgagcugcucguccugcuggagaacgagcgcacccucgacuuccacgacuccaacgucaagagccuguacgagaaggugaagucccagcugaagaacaacgccaaggagaucgggaacggcugcuucgaguucuaccacaagugcaacaacgagugcauggagagcgugaagaacgggaccuacgacuaccccaaguacuccgaggagagcaagcucaaccgggagaagaucgacggcgugaagcuggacagcaugggcgucuaccagauccuggccaucuacuccaccguggccagcucccucgugcugcuggucagccucggggcgaucuccuucuggaugugcagcaacggcucccugcagugccgcaucugcaucuga

SEQ ID NO: 70364 - RNA, 1698 nt, Artificial Sequence
  derived and/or modified CDS sequence (opt1) from hemagglutinin__InfluenzaA__ADV69080
augaaggugaagcugcucauccugcugugcaccuucaccgccacguacgccgacaccaucugcaucggcuaccacgcgaacaacagcaccgacaccgucgacacggugcucgagaagaacgugaccgucacccacuccgugaaccugcuggaggacagccacaacgggaagcucugccugcugaagggcaucgcgccccuccagcuggggaacugcuccguggccggcuggauccuggggaacccggagugcgagagccucaucuccaagaaguccuggagcuacaucgucgagacccccaaccccgagaacggcgccugcuaccccggcgaguucgccgacuacgaggagcugcgcgagcagcugagcuccgugagcuccuucgagcgguucgagaucuucccgaaggagagcuccuggcccaaccacacggccgccggggugagcgccuccugcagccacaacggcgagcgcuccuucuaccggaaccucaucuggcugaccaugaagaacgggcuguaccccaaccuccgcaagagcuacgagaacgacaaggagaaggagguccugauccuguggggcgugcaccacccgcccaacaucgagaaccagcggacccucuaccacaccgagaacgccuacguguccgucgugagcagccacuacuccgggcgcuucacgcccgagaucaccaagcggcccaaggugcgcgaccaggagggccggaucaacuacuacuggacccugcuggagcccggcgacaccaucaucuucgaggcgaacgggaaccucaucgccccgugguacgccuucacgcugagccgcggccugggguccggcaucaucaccagcaacgcccccauggacgccugcgacgcgaagugccagacgccccagggcgccaucaacuccagccuccccuuccagaacguccacccggugaccaucggggagugccccaaguacgugcgguccgccaagcugcgcauggucaccggccugcggaacauccccagcauccagucccgcggccucuucggggccaucgccggguucaucgagggcggcuggaccgggaugguggacggcugguacggguaccaccaccagaacgagcagggcagcggguacgcggccgaccaggaguccacccagaacgccaucaacggcaucaccaacaaggugaacagcgucaucgagaagaugaacacgcaguucaccgccgugggcaaggaguucaacaagcuggagcggcgcaucgagaaccugaacaagaagguggacgacggguucaucgacaucuggaccuacaacgccgagcuccugguccugcucgagaacgagcggacccuggacuuccacgacuccaacgucaagagccuguacgagaaggugaagucccagcucaagaacaacgcgaaggagaucggcaacgggugcuucgaguucuaccacaagugcaacaacgagugcauggagagcgugaagaacggcacguacgacuaccccaaguacuccgaggagagcaagcugaaccgcgagaagaucgacggggugaagcuggacuccaugggcgucuaccggauccucgccaucuacagcaccguggccagcucccuggugcugcucgucagccugggcgccaucuccuucuggaugugcagcaacgggucccugcagugccgcaucugcaucuga

SEQ ID NO: 70365 - RNA, 1698 nt, Artificial Sequence
  derived and/or modified CDS sequence (opt1) from hemagglutinin__InfluenzaA__ADV69081
augaaggugaagcugcucguccugcugugcaccuucaccgccacguacgccgacaccaucugcaucggcuaccacgcgaacaacagcaccgacaccguggacacggugcucgagaagaacgucaccgugacccacuccgugaaccugcuggaggacagccacaacgggaagcucugccugcugaagggcaucgcgccccuccagcuggggaacugcaacgucgccggcuggauccuggggaacccggagugcgagcuccugaucuccaaggagagcugguccuacaucguggagacccccaaccccgagaacggcacgugcuaccccggcuacuucaccgacuacgaggagcugcgcgagcagcucagcuccgugagcuccuucaagcgguucgagaucuucccgaaggagagcuccuggcccaaccacaccgucaccggggugagcgccuccugcagccacaacggcgaguccagcuucuaccgcaaccugcuguggcucacggugaagaacgggcuguaccccaagcuguccaagagcuacaccaacgacaaggagaaggagguccucgugcuguggggcgugcaccacccgcccaacauccgggaccagcgcacccuguaccacaccgagaacgccuacgucuccguggugagcagccacuacucccggcgcuucacgcccgagaucgucaagcggcccaaggugcgcgaccaggaggggcggaucaacuacuacuggacccuccuggagcccggcgacaccaucaucuucgaggccaacggcaaccugaucgccccgcgcuacgccuucgcccucagccggggguucggcuccgggaucaucaccagcaacgcgcccaugggcgagugcaacgccaagugccagacgccccagggcgccaucaucuccagccugcccuuccagaacgugcacccggucaccaucggggagugccccaaguacgugaaguccgccaagcugcgcauggugaccggccuccggaacacccccagcauccagucccgcgggcuguucggcgccaucgcgggguucaucgagggcggcuggacggggauggucgacggcugguacggguaccaccaccagaacgagcagggcagcggguacgccgccgaccagaaguccacccagaacgccaucaacggcaucaccaacaaggugaacagcgucaucgagaagaugaacacccaguucacggccgugggcaaggaguucaacaagcuggagcggcgcauggagaaccucaacaagaagguggacgacggguuccuggacaucuggaccuacaacgcggagcugcucguccugcuggagaacgagcggacccucgacuuccacgacuccaacgugaagaaccuguacgagaaggucaagagccagcugaagaacaacgccaaggagaucggcaacgggugcuucgaguucuaccacaagugcaacgacgagugcauggaguccgugaagaacggcaccuacgacuaccccaaguacagcgaggaguccaagcucaaccgcgagaagaucgacggggugaagcuggagagcauggagguguaccagauccuggccaucuacuccacggucgccagcagccucguguuccugguggcccugggcgcgaucugcuucuggaugugcuccaacggcagccuccagugcaagaucugcaucuga

SEQ ID NO: 70366 - RNA, 1698 nt, Artificial Sequence
  derived and/or modified CDS sequence (opt1) from hemagglutinin__InfluenzaA__ADV69083
augaaggugaagcugaugguccuccugugcaccuucaccgccacguacgccgacaccaucugcgugggcuaccacgcgaacaacagcaccgacaccguggacacgguccuggagaagaacgugaccgugacccacuccgucaaccuccuggaggacagccacaacgggaagcugugccuccugaagggcaucgcgccccugcagcucggguccugcagcguggccggcuggauccuggggaacccggagugcgagcugcucaucuccaaggagagcugguccuacaucguggagacccccaaccccgagaacggcacgugcuaccccggcuacuucaccgacuacgaggagcugcgcgagcagcugagcuccgucagcuccuucaagcgguucgagaucuucccgaaggagagcuccuggcccaaccacaacgugaccggggugagcuccagcugcucccacaacggcaagagcuccuucuaccgcaaccuccuguggcugaccgucaagaacgggcucuaccccaaccugagcaagagcuacacgaacaagaaggagaaggaggugcuggugcucuggggcguccaccaccccuccaacaucggggaccagcgggcccuguaccacaccgagaacgccuacgugagcguggucuccagccacuacucccgccgguucaccccggagaucgccaagcgccccaaggugcggaaccaggagggccgcaucaacuacuacuggacccugcucgagcccggcgacacgaucauccuggaggccaacgggaaccugaucgcgccccgguacgccuucgagcucagcaagggccugggguccggcaucaucaccagcaacgccccgaugggcgagugcaacgccaagugccagacgccccagggggccaucaacuccagccugcccuuccagaacgugcaccccgucaccaucggcgagugcccgaaguacgugaaguccgccaagcuccgcauggugaccgggcugcggaacacccccagcauccagucccgcggccuguucggggccaucgcgggcuucaucgagggcggguggaccggcauggucgacgggugguacggcuaccaccaccagaacgagcaggggagcggcuacgccgccgaccagcaguccacccagaacgccaucaacggcaucacgaacaaggugaacagcgucaucgagaagaugaacacccaguucaccgccguggggaaggaguucaacaagcucgagcggcgcauggagaaccugaacaagaagguggacgacggcuuccuggacaucuggaccuacaacgcggagcuccugguccugcucgagaacgagcggacgcuggacuuccacgacuccaacgugaagaaccuguacgagaaggucaagagccagcucaagaacaacgccaaggagaucgggaacggcugcuucgaguucuaccacaagugcaacgacgagugcauggaguccgugaagaacgggaccuacgacuaccccaaguacagcgaggagagcaagcugaaccgcgagaagaucgacggcgugaagcuggaguccaugggcguguacaacauccucgccaucuacagcaccgucgccuccagccuggugcugcucgugucccugggggccaucagcuucuggaugugcuccaacggcagccugcagugccggaucugcaucuga

SEQ ID NO: 70367 - RNA, 1698 nt, Artificial Sequence
  derived and/or modified CDS sequence (opt1) from hemagglutinin__InfluenzaA__ADV69084
augaaggugaagcugaugguccuccugugcaccuucaccgccacguacgccgacaccaucugcgugggcuaccacgcgaacaacagcaccgacaccguggacacgguccuggagaagaacgugaccgugacccacuccgucaaccuccuggaggacagccacaacgggaagcugugccuccugaagggcaucgcgccccugcagcucggguccugcagcguggccggcuggauccuggggaacccggagugcgagcugcucaucuccaaggagagcugguccuacaucguggagacccccaaccccgagaacggcacgugcuaccccggcuacuucaccgacuacgaggagcugcgcgagcagcugagcuccgucagcuccuucaagcgguucgagaucuucccgaaggagagcuccuggcccaaccacaacgugaccggggugagcuccagcugcucccacaacggcaagagcuccuucuaccgcaaccuccuguggcugaccgucaagaacgggcucuaccccaaccugagcaagagcuacacgaacaagaaggagaaggaggugcugauccucuggggcgugcaccaccccuccaacauccgggaccagcgcgcccuguacuacaccgagaacgccuacgucagcgugguguccagccacuacucccggcgcuucaccccggagaucgccaagcggcccaagguccgcaaccaggaggggcggaucaacuacuacuggacccugcucgagcccggcgacacgaucaucuucgaggccaacggcaaccugaucgcgccccgcuacgccuucgagcugagcaagggguucggcuccgggaucaucaccagcgacgccccgaugggcgagugcaacgccaagugccagacgccccagggcgccaucaacuccagccuccccuuccagaacgugcaccccgugaccaucggggagugcccgaaguacguccgguccgccaagcugcgcauggugaccggccugcggaacacccccagcauccagucccgcggccucuucggggccaucgcgggguucaucgagggcggcuggaccgggaugguggacggcugguacggguaccaccaccagaacgagcagggcagcggguacgccgccgaccagcaguccacccagaacgccaucaacggcaucacgaacaaggucaacagcgugaucgagaagaugaacacccaguucaccgccgucggcaaggaguucaacaagcuggagcggcgcauggagaaccugaacaagaagaucgacgacggguuccucgacaucuggaccuacaacgcggagcugcuggugcuccuggagaacgagcggacgcuggacuuccacgacuccaacgugaagaaccucuacgagaaggucaagagccagcugaagaacaacgccaaggagaucggcaacgggugcuucgaguucuaccacaagugcaacgacgagugcauggaguccgugaagaacggcaccuacgacuaccccaaguacagcgaggagagcaagcugaaccgcgagaagaucgacggggugaagcucgaguccaugggcgucuacaacauccuggccaucuacagcaccguggccuccagccuggugcuccuggucucccugggcgccaucagcuucuggaugugcuccaacgggagccuccagugccggaucugcaucuga

SEQ ID NO: 70368 - RNA, 1698 nt, Artificial Sequence
  derived and/or modified CDS sequence (opt1) from hemagglutinin__InfluenzaA__ADV69085
augaaggugaagcugaugguccuccugugcaccuucaccgccacguacgccgacaccaucugcgugggcuaccacgcgaacaacagcaccgacaccguggacacgguccuggagaagaacgugaccgugacccacuccgucaaccuccuggaggacagccacaacgggaagcugugccuccugaagggcaucgcgccccugcagcucggguccugcagcguggccggcuggauccuggggaacccggagugcgagcugcucaucuccaaggagagcugguccuacaucguggagacccccaaccccgagaacggcacgugcuaccccggcuacuucaccgacuacgaggagcugcgcgagcagcugagcuccgucagcuccuucaagcgguucgagaucuucccgaaggagagcuccuggcccaaccacaccgugaccggggugagcuccagcugcucccacaacggcaagagcuccuucuaccgcaaccuccuguggcugacgaugaagaacgggcucuaccccaaccugagcaagagcuacaccaacaagaaggagaaggagguccuggugcucuggggcgugcaccaccccuccaacaucggggaccagcgggcccuguaccacaccgagaacgccuacgucagcgugguguccagccacuacucccgccgguucaccccggagaucgccaagcgccccaagguccggaaccaggagggccgcaucaacuacuacuggacgcugcucgagcccggcgacaccaucaucuucgaggccaacgggaaccugaucgcgccccgguacgccuucgagcugagcaagggcuucggguccggcaucaucaccagcaacgccccgaugggcgagugcaacgccaagugccagacgccccagggggccaucaacuccagccuccccuuccagaacgugcaccccgugaccaucggcgagugcccgaaguacguccgcuccagcaagcugcggauggugaccgggcugcgcaacacccccuccauccagagccggggccucuucggggccaucgccggcuucaucgagggcggguggaccggcaugguggacgggugguacggcuaccaccaccagaacgagcagggguccggcuacgcggccgaccagcagagcacgcagaacgccaucaacggcaucaccaacaaggucaacuccgugaucgagaagaugaacacccaguucaccgccgucgggaaggaguucaacaagcuggagcgccggauggagaaccugaacaagaagaucgacgacggcuuccucgacaucuggacguacaacgccgagcugcuggugcuccuggagaacgagcgcacccuggacuuccacgacagcaacgugaagaaccucuacgagaaggucaagucccagcugaagaacaacgcgaaggagaucgggaacggcugcuucgaguucuaccacaagugcaacgacgagugcauggagagcgugaagaacgggaccuacgacuaccccaaguacagcgaggaguccaagcugaaccgggagaagaucgacggcgugaagcucgagagcaugggcgucuacaacauccuggccaucuacuccaccguggccagcucccuggugcuccuggucagccugggggccaucuccuucuggaugugcagcaacggcucccuccagugccgcaucugcaucuga

SEQ ID NO: 70369 - RNA, 1698 nt, Artificial Sequence
  derived and/or modified CDS sequence (opt1) from hemagglutinin__InfluenzaA__ADV69086
augaaggugaagcugcucguccugcugugcaccuucaccgccacguacgccgacaccaucugcaucggcuaccacgcgaacaacagcaccgacaccguggacacggugcucgagaagaacgucaccgugacccacuccgugaaccugcuggaggacagccacaacgggaagcucugccugcugaagggcaucgcgccccuccagcuggggaacugcaacgucgccggcuggauccuggggaacccggagugcgagcuccugaucuccaaggagagcugguccuacaucguggagacccccaaccccgagaacggcacgugcuaccccggcuacuucaccgacuacgaggagcugcgcgagcagcucagcuccgugagcuccuucaagcgguucgagaucuucccgaaggagagcuccuggcccaagcacaccgucaccggggugagcgccuccugcagccacaacggcaaguccagcuucuaccgcaaccugcuguggcucacggggaagaacggccuguaccccaaccuguccaagagcuacaccaacgacaaggagaaggaggugcucguccuguggggcgugcaccaccccuccaacaucggggaccagcgggcccuguaccacaaggagaacgccuacgugagcgucgugagcucccacuacagccgccgguucaccccggagaucgugaagcgccccaagguccgggaccaggagggccgcaucaacuacuacuggacccuccuggagcccggggacacgaucaucuucgaggccaacggcaaccugaucgcgccccgguacgccuucgcccucucccgcggguucggcagcggcaucaucaccuccaacgccccgauggacgagugcaacaccaagugccagacgccccagggggccaucaacagcucccugcccuuccagaacgugcaccccgugaccaucggcgagugcccgaaguacgucaagagcgccaagcugcggauggugaccgggcuccgcaacacccccuccauccagagccggggccuguucggggccaucgcgggcuucaucgagggcggguggaccggcaugguggacgggugguacggcuaccaccaccagaacgagcagggguccggcuacgccgccgaccagaaguccacgcagaacgccaucaacggcaucaccaacaaggucaacagcgugaucgagaagaugaacacccaguucaccgccgucgggaaggaguucaacaagcuggagcgccggauggagaaccucaacaagaagguggacgacggcuuccuggacaucuggacguacaacgcggagcugcucgugcugcuggagaacgagcgcacccucgacuuccacgacagcaacgucaagaaccuguacgagaaggugaagucccagcugaagaacaacgccaaggagaucgggaacggcugcuucgaguucuaccacaagugcaacgacgagugcauggagagcgugaagaacgggaccuacgacuaccccaaguacuccgaggagagcaagcucaaccgggagaagaucgacggcgucaagcuggaguccauggagguguaccagauccuggccaucuacagcaccguggccagcucccucgucuuccuggugagccugggcgccaucugcuucuggaugugcuccaacgggagccuccagugccgcaucugcaucuga

SEQ ID NO: 70370 - RNA, 1698 nt, Artificial Sequence
  derived and/or modified CDS sequence (opt1) from hemagglutinin__InfluenzaA__ADV69087
augaaggugaagcugaugguccuccugugcaccuucaccgccacguacgccgacaccaucugcgugggcuaccacgcgaacaacagcaccgacaccguggacacgguccuggagaagaacgugaccgugacccacuccgucaaccuccuggaggacagccacaacgggaagcugugccuccugaagggcaucgcgccccugcagcucggguccugcagcguggccggcuggauccuggggaacccggagugcgagcugcucaucuccaaggagagcugguccuacaucguggagacccccaaccccgagaacggcacgugcuaccccggcuacuucaccgacuacgaggagcugcgcgagcagcugagcuccgucagcuccuucaagcgguucgagaucuucccgaaggagagcuccuggcccaaccacaccgugaacggggugagcuccagcugcucccacaacggcgagagcuccuucuaccgcaaccuccuguggcugaccgucaaggacgggcucuaccccaaccugagcaagagcuacacgaacaagaaggagaaggaggugcuggugcucuggggcguccaccaccccuccaacaucggggaccagcgggcccuguaccacaccgagaacgccuacgugagcguggucuccagccacuacucccgccgguucaccccggagaucgccaagcgccccaaggugcggaaccaggagggccgcaucaacuacuacuggacccugcucgagcccggcgacacgaucaucuucgaggccaacgggaaccugaucgcgccccgguacgccuucgagcugagcaagggcuucggguccggcaucaucaccagcaacgccccgaugggcgagugcaacgccaagugccagacgccccagggggccaucaacuccagccuccccuuccagaacgugcaccccgucaccaucggcgagugcccgaaguacgugcgcuccaccaagcugcggauggugaccgggcugcgcaacacccccagcauccagucccggggccucuucggggccaucgccggcuucaucgagggcggguggaccggcauggucgacgggugguacggcuaccaccaccagaacgagcaggggagcggcuacgcggccgaccagcaguccacgcagaacgccaucaacggcaucaccaacaaggugaacagcgucaucgagaagaugaacacccaguucaccgccguggggaaggaguucaacaagcuggagcgccggauggagaaccugaacaagaagaucgacgacggcuuccucgacaucuggacguacaacgccgagcugcuggugcuccuggagaacgagcgcacccuggacuuccacgacuccaacgucaagaaccucuacgagaaggucaagagccagcugaagaacaacgcgaaggagaucgggaacggcugcuucgaguucuaccacaagugcaacgacgagugcauggaguccgugaagaacgggaccuacgacuaccccaaguacagcgaggagagcaagcugaaccgggagaagaucgacggcgugaagcucgaguccaugggcguguacaacauccuggccaucuacagcaccguggccuccagccugguccuccuggugucccugggggccaucagcuucuggaugugcuccaacggcagccuccagugccgcaucugcaucuga

SEQ ID NO: 70371 - RNA, 1698 nt, Artificial Sequence
  derived and/or modified CDS sequence (opt1) from hemagglutinin__InfluenzaA__ADV69088
augaaggugaagcugcucauccugcugugcaccuucaccgccacguacgccgacaccaucugcaucggcuaccacgcgaacaacagcaccgacaccgucgacacggugcucgagaagaacgugaccgucacccacuccgugaaccugcuggaggacagccacaacgggaagcucugccugcugaagggcaucgcgccccuccagcuggggaacugcuccgugaccggcuggauccuggggaacccggagugcgagcuccugaucagcaagaaguccuggagcuacaucgucgagacgcccaaccccgagaacggcgccugcuaccccggcuacuucgccgacuacgaggagcugcgcgagcagcucuccagcguguccagcuucgagcgguucgagaucuucccgaaggaguccagcuggcccaaccacaacgugaacggggucuccgccagcugcucccacaacggcaagagcuccuucuaccgcaaccugcuguggcucaccgggaagaacggccuguaccccagccugaccaaguccuacgccaacgacaaggagaaggaggugcucauccuguggggcgugcaccaccccagcaacaucggggaccagcggacccuguaccacacggagaacgccuacgucagcgugauguccagccacuacucccgccgguucaccccggagaucagcaagcgccccaaggugcgggaccaggagggccgcaucaacuacuacuggacccuccuggagcccggggacaccaucaucuucgaggccaacggcaaccugaucgcccccugguacgcguucgcccucucccggggguucggcagcggcaucaucacguccagcgccccgauggacgccugcgacgccaagugccagacgccccagggggcgaucaacuccagccugcccuuccagaacguccaccccgugaccaucggcgagugcccgaaguacgugcgcuccaccaagcugcggauggucaccgggcuccgcaacauccccagcauccagucccggggccuguucggggccaucgccggcuucaucgagggcggguggaccggcaugguggacgggugguacggcuaccaccaccagaacgagcaggggagcggcuacgccgccgaccaggaguccacccagaacgcgcugcacggcaucaccaacaaggugaacagcgucaucgagaagaugaacacgcaguucaccgccguggggaaggaguucaacaagcucgagcgccggauggagaaccugaacaagaagguggacgacggcuuccuggacaucuggaccuacaacgccgagcuccugguccugcucgagaacgagcgcacccuggacuuccacgacuccaacgucaagagccuguacgagaaggugaagauccagcucaagaacaacgccaaggagaucgggaacggcugcuucgaguucuaccacaagugcaacaacgagugcauggaguccgugcggaacgggacguacgacuaccccaaguacagcgaggagagcaagcugaaccgcgagaagaucgacggcgugaagcuggacuccaugggcgucuaccagauccucgccaucuacagcaccguggcguccagccuggugcugcucgucucccugggggccaucagcuucuggaugugcuccaacggcagccugcagugccggaucugcaucuga

SEQ ID NO: 70372 - RNA, 1698 nt, Artificial Sequence
  derived and/or modified CDS sequence (opt1) from hemagglutinin__InfluenzaA__ADV69089
augaaggugaagcugcucauccugcugugcaccuucaccgccacguacgccgacaccaucugcaucggcuaccacgcgaacaacagcaccgacaccgucgacacggugcucgagaagaacgugaccgucacccacuccgugaaccugcuggaggacagccacaacgggaagcucugccugcugaagggcaucgcgccccuccagcuggggaacugcuccguggccggcuggauccuggggaacccggagugcgagcuccugaucagcaagaaguccuggagcuacaucgucgagacccccaaccccgagaacggcgccugcuaccccggcuacuucgccgacuacgaggagcugcgcgagcagcucuccagcguguccagcuucgagcgguucgagaucuucccgaaggaguccagcuggcccaaccacaacgugaacggggucuccgccagcugcucccacaacggcaagagcuccuucuaccgcaaccugcuguggcucacggggaagaacggccuguaccccaaccugaccaagagcuacgccaacaacaaggagaaggaggugcucauccuguggggcgugcaccaccccuccaacaucggggaccagcggacccuguaccacaccgagaacgccuacgucagcgugaugagcucccacuacagccgccgguucacgccggagaucaccaagcgccccaagauccgggaccaggagggccgcaucaacuacuacuggacccuccuggagcccggggacaccaucaucuacgaggccaacggcaaccugaucgcgcccugguacgccuucgcccucucccggggguucggcagcggcaucaucacguccagcgccccgauggacgagugcgacgccaagugccagacgccccagggggcgaucaacuccagccugcccuuccagaacgugcaccccgucaccaucggcgagugcccgaaguacgugcgcuccgccaagcugcggauggugaccgggcuccgcaacauccccagcauccagucccggggccuguucggggccaucgccggcuucaucgagggcggguggaccggcauggucaacgggugguacggcuaccgccugcacaacgaccaggggagcggcuacgccgcggaccagaaguccacccagaacgcccucaacggcaucaccaacaaggugaacagcgugaucgagaagaugaacacccaguucacggccgucgggaaggaguucaacaagcuggagcggcgcauggagaaccugaacaagaagguggacgacggcuuccucgacaucuggaccuacaacgccgagaugcuggugcugcucgagaacgagcggacccuggacuuccacgacuccaacgucaagagccuguacgagcgcgugaagauccagcucaagaacaacgccaaggagaucgggaacggcugcuucgaguucuaccacaagugcaacaacgagugcauggaguccguccggaacgggaccuacgacuaccccaaguacagcgaggaguccaagcugaaccgcgagaagaucgacggcgugaagcuggacagcaugggcguguaccagauccucgcgaucuacagcacggucgccuccagccuggugcugcucgugucccugggggccaucagcuucuggaugugcuccaacggcagccugcagugccggaucugcaucuga

SEQ ID NO: 70373 - RNA, 1698 nt, Artificial Sequence
  derived and/or modified CDS sequence (opt1) from hemagglutinin__InfluenzaA__ADV69090
augaaggugaagcugcucguccugcugugcaccuucaccgccacguacgccgacaccaucugcaucggcuaccacgcgaacaacagcaccgacaccguggacacggugcucgagaagaacgucaccgugacccacuccgugaaccugcuggaggacagccacaacgggaagcucugccugcugaagggcaucgcgccccuccagcuggggaacugcuccgucgccggcuggauccuggggaacccggagugcgagagccucaucuccaaggagagcugguccuacaucguggagacccccaaccccgagaacggcacgugcuaccccggcuacuucgccgacuacgaggagcugcgcgagcagcugagcuccgugagcuccuucgagcgguucgagaucuucccgaaggagagcuccuggcccaaccacaccgucaccggggugagcgccuccugcagccacaacggcaaguccagcuucuaccgcaaccuccuguggcugacccggaagaacgggcucuaccccaaccuguccaagagcuacgccaacaacaaggagaaggaggugcugguccucuggggcgugcaccacccgcccaaccugggggaccagcgcgcccuguaccacacggagaacgccuacgugagcgucguguccagccacuacucccggcgcuucacccccgagaucgccaagcggcccaaggugcgcgaccaggagggccggaucaacuacuacuggacccuccuggagcccggcgacaccaucaucuucgaggcgaacgggaaccugaucgccccgcgcuucgccuucgcccucagccggggcuucggguccggcaucaucacgagcaacgcccccauggacgagugcgacgcgaagugccagacgccccagggcgccaucaacuccagccugcccuuccagaacguccacccggugaccaucggggagugccccaaguacgugcgcuccaccaagcugcggauggucaccggccuccgcaacauccccagcauccagucccgggggcuguucggcgccaucgccggguucaucgagggcggcuggaccgggaugguggacggcugguacggguaccaccaccagaacgagcagggcagcggguacgccgcggaccagaaguccacccagaacgccaucaacggcaucaccaacaaggugaacagcgucaucgagaagaugaacacgcaguucaccgccgugggcaaggaguucaacaagcuggagcgccggauggagaaccucaacaagaaggucgacgacggguuccuggacaucuggaccuacaacgccgagcugcucgugcugcuggagaacgagcgcacccucgacuuccacgacuccaacgugaagaaccuguacgagaaggucaagagccagcugaagaacaacgccaaggagaucggcaacgggugcuucgaguucuaccacaagugcaacgacgagugcauggaguccgugaagaacggcacguacgacuaccccaaguacagcgaggaguccaagcucaaccgggagaagaucgacggggugaagcuggagagcaugggcgucuaccagauccuggcgaucuacagcaccguggccuccagccucgugcugcuggucucccucggcgccaucagcuucuggaugugcuccaacgggagccugcagugccgcaucugcaucuga

SEQ ID NO: 70374 - RNA, 1698 nt, Artificial Sequence
  derived and/or modified CDS sequence (opt1) from hemagglutinin__InfluenzaA__ADV69091
augaaggugaagcugcucguccugcugugcaccuucaccgccacguacgccgacaccaucugcaucggcuaccacgcgaacaacagcaccgacaccguggacacggugcucgagaagaacgucaccgugacccacuccgugaaccugcuggaggacagccacaacgggaagcucugccugcugaagggcaucgcgccccuccagcuggggaacugcaacgucgccggcuggauccuggggaacccggagugcgagcuccugaucuccaaggagagcugguccuacaucguggagacccccaaccccgagaacggcacgugcuaccccggcuacuucaccgacuacgaggagcugcgcgagcagcucagcuccgugagcuccuucaagcgguucgagaucuucccgaaggagagcuccuggcccaaccacaccgucaccggggugagcgccuccugcagccacaacggcaaguccagcuucuaccgcaaccugcuguggcucacgcggaagaacgggcuguaccccaaccuguccaagagcuacaccaacgacaaggagaaggaggugcucguccuguggggcgugcaccaccccuccaacaucggggaccagcgcgcccuguaccacaaggagaacgccuacgugagcgucgugagcucccacuacagccggcgcuucaccccggagaucgugaagcggcccaagguccgcgaccaggagggccggaucaacuacuacuggacccuccuggagcccggcgacacgaucaucuucgaggccaacgggaaccugaucgcgccccgcuacgccuucgcccucucccggggcuucgggagcggcaucaucaccuccaacgccccgauggacgagugcaacaccaagugccagacgccccagggcgccaucaacagcucccugcccuuccagaacgugcaccccgugaccaucggggagugcccgaaguacgucaagagcgccaagcugcgcauggugaccggccuccggaacacccccuccauccagagccgcgggcuguucggcgccaucgcgggguucaucgagggcggcuggaccgggaugguggacggcugguacggguaccaccaccagaacgagcagggcuccggguacgccgccgaccagaaguccacgcagaacgccaucaacggcaucaccaacaaggucaacagcgugaucgagaagaugaacacccaguucaccgccgucggcaaggaguucaacaagcuggagcggcgcauggagaaccucaacaagaagguggacgacggguuccuggacaucuggacguacaacgcggagcugcucgugcugcuggagaacgagcggacccucgacuuccacgacagcaacgucaagaaccuguacgagaaggugaagaaccagcugaagaacaacgccaaggagaucggcaacgggugcuucgaguucuaccacaagugcaacgacgagugcauggaguccgugaagaacggcaccuacgacuaccccaaguacagcgaggaguccaagcucaaccgcgagaagaucgacggggucaagcuggagagcauggagguguaccagauccuggccaucuacuccaccguggccagcagccucgucuuccuggugucccugggcgccaucugcuucuggaugugcagcaacggcucccuccagugccggaucugcaucuga

SEQ ID NO: 70375 - RNA, 1698 nt, Artificial Sequence
  derived and/or modified CDS sequence (opt1) from hemagglutinin__InfluenzaA__ADV69092
augaaggugaagcugcucguccugcugugcaccuucaccgccacguacgccgacaccaucugcaucggcuaccacgcgaacaacagcaccgacaccguggacacggugcucgagaagaacgucaccgugacccacuccgugaaccugcuggaggacagccacaacgggaagcucugccugcugaagggcaucgcgccccuccagcuggggaacugcaacgucgccggcuggauccuggggaacccggagugcgagcuccugaucuccaaggagagcugguccuacaucguggagacccccaaccccgagaacggcacgugcuaccccggcuacuucaccgacuacgaggagcugcgcgagcagcucagcuccgugagcuccuucaagcgguucgagaucuucccgaaggagagcuccuggcccaaccacaccgucaccggggugagcgccuccugcagccacaacggcaaguccagcuucuaccgcaaccugcuguggcucacggggaagaacggccuguaccccaaccuguccaagagcuacaccaacgacaaggagaaggaggugcucguccuguggggcgugcaccaccccuccaacaucggggaccagcgggcccuguaccacaaggagaacgccuacgugagcgucgugagcucccacuacagccgccgguucaccccggagaucgugaagcgccccaagguccgggaccaggagggccgcaucaacuacuacuggacccuccuggagcccggggacacgaucaucuucgaggccaacggcaaccugaucgcgccccgguacgccuucgcccucucccgcggguucggcagcggcaucaucaccuccaacgccccgauggacgagugcaacaccaagugccagacgccccagggggccaucaacagcucccugcccuuccagaacgugcaccccgugaccaucggcgagugcccgaaguacgucaagagcgccaagcugcggauggugaccgggcuccgcaacacccuguccauccagagcaagggccuguucggggccaucgcgggcuucaucgagggcggguggaccggcaugguggacgggugguacggcuaccaccaccagaacgagcagggguccggcuacgccgccgaccagaaguccacgcagaacgccaucaacggcaucaccaacaaggucaacagcgugaucgagaagaugaacacccaguucaccgccgucgggaaggaguucaacaagcucgagcggcgcauggagaaccugaacaagaagguggacgacggcuuccuggacaucuggacguacaacgcggagcuccuggugcugcucgagaacgagcggacccuggacuuccacgacagcaacgucaagaaccuguacgagaaggugaagucccagcucaagaacaacgccaaggagaucgggaacggcugcuucgaguucuaccacaagugcaacgacgagugcauggagagcgugaagaacgggaccuacgacuaccccaaguacuccgaggagagcaagcugaaccgcgagaagaucgacggcgucaagcuggaguccauggagguguaccagauccucgccaucuacagcaccguggccagcucccuggucuuccuggugagccucggcgccaucugcuucuggaugugcuccaacgggagccugcagugccggaucugcaucuga

SEQ ID NO: 70376 - RNA, 1698 nt, Artificial Sequence
  derived and/or modified CDS sequence (opt1) from hemagglutinin__InfluenzaA__ADV69093
augaaggugaagcugaugguccuccugugcaccuucaccgccacguacgccgacaccaucugcgugggcuaccacgcgaacaacagcaccgacaccguggacacgguccuggagaagaacgugaccgugacccacuccgucaaccuccuggaggacagccacaacgggaagcugugccuccugaagggcaucgcgccccugcagcucggguccugcagcguggccggcuggauccuggggaacccggagugcgagcugcucaucuccaaggagagcugguccuacaucguggagacccccaaccccgagaacggcacgugcuaccccggcuacgucaccgacuacgaggagcugcgcgagcagcugagcuccgugagcuccuucaagcgguucgagaucuucccgaaggagagcuccuggcccaaccacaccgugaccggggucagcuccagcugcucccacaacggcaagagcuccuucuaccgcaaccuccuguggcugacggugaagaacgggcucuaccccaaccugagcaagagcuacaccaacaagaaggagaaggaggugcugguccucuggggcgugcaccaccccuccaacaucggggaccagcgggcccuguaccacaccgagaacgccuacgugagcgucguguccagccacuacucccgccgguucaccccggagaucgccaagcgccccaaggugcggaaccaggagggccgcaucaacuacuacuggacgcugcucgagcccggcgacaccaucaucuucgaggccaacgggaaccugaucgcgccccgguacgccuucgagcugagcaagggcuucggguccggcaucaucaccagcaacgccccgaugggcgagugcaacgccaagugccagacgccccagggggccaucaacuccagccuccccuuccagaacguccaccccgugaccaucggcgagugcccgaaguacgugaaguccgccaagcugcgcauggucaccgggcugcggaacacccccagcauccagucccgcggccucuucggggccaucgcgggcuucaucgagggcggguggaccggcaugguggacgggugguacggcuaccaccaccagaacgagcaggggagcggcuacgccgccgaccagcaguccacgcagaacgccaucaacggcaucaccaacaaggucaacagcgugaucgagaagaugaacacccaguucaccgccguggggaaggaguucaacaagcuggagcggcgcauggagaaccugaacaagcgggucgacgacggcuuccucgacaucuggacguacaacgcggagcugcuggugcuccuggagaacgagcgcacccuggacuuccacgacuccaacgugaagaaccucuacgagaaggucaagagccagcugaagaacaacgccaaggagaucgggaacggcugcuucgaguucuaccacaagugcaacgacgagugcauggaguccgugaagaacgggaccuacgacuaccccaaguacagcgaggagagcaagcugaaccgggagaagaucgacggcgugaagcucgaguccaugggcgucuacaacauccuggccaucuacagcaccguggccuccagccuggugcuccuggucucccugggggccaucagcuucuggaugugcuccaacggcagccuccagugccgcaucugcaucuga

SEQ ID NO: 70377 - RNA, 1698 nt, Artificial Sequence
  derived and/or modified CDS sequence (opt1) from hemagglutinin__InfluenzaA__ADV69094
augaaggugaagcugaugguccuccugugcaccuucaccgccacguacgccgacaccaucugcgugggcuaccacgcgaacaacagcaccgacaccguggacacgguccuggagaagaacgugaccgugacccacuccgucaaccuccuggaggacagccacaacgggaagcugugccuccugaagggcaucgcgccccugcagcucggguccugcagcguggccggcuggauccuggggaacccggagugcgagcugcucaucuccaaggagagcugguccuacaucguggagacccccaaccccgagaacggcacgugcuaccccggcuacuucaccgacuacgaggagcugcgcgagcagcugagcuccgucagcuccuucaagcgguucgagaucuucccgaaggagagcuccuggcccaaccacaccgugaccggggugagcuccagcugcucccacaacggcaagagcuccuucuaccgcaaccuccuguggcugacggucaagaacgggcucuaccccaaccugagcaagagcuacaccaacaagaaggagaaggaggugcuggugcucuggggcguccaccaccccuccaacaucggggaccagcgggcccuguaccacaccgagaacgccuacgugagcguggucuccagccacuacucccgccgguucaccccggagaucgccaagcgccccaaggugcggaaccaggagggccgcaucaacuacuacuggacgcugcucgagcccggcgacaccaucaucuucgaggccaacgggaaccugaucgcgccccgguacgccuucgagcugagcaagggcuucggguccggcaucaucaccagcaacgccccgaugggcgagugcaacgccaagugccagacgccccagggggccaucaacuccagccuccccuuccagaacgugcaccccgucaccaucggcgagugcccgaaguacgugaaguccgccaagcugcgcauggugaccgggcugcggaacacccccagcauccagucccgcggccucuucggggccaucgcgggcuucaucgagggcggguggaccggcaugguccacgggugguacggcuaccaccaccagaacgagcaggggagcggcuacgccgccgagcagcaguccacgcaguacgccaucaacggcaucaccaacaaggugaacagcgucaucgagaagaugaacacccaguucaccgccguggggaaggaguucaacaagcuggagcggcgcauggagaaccugaacaagcggguggacgacggcuuccucgacaucuggacguacaacgcggagcugcugguccuccuggagaacgagcgcacccuggacuuccacgacuccaacgugaagaaccucuacgagaaggucaagagccagcugaagaacaacgccaaggagaucgggaacggcugcuucgaguucuaccacaagugcaacgacgagugcauggaguccgugaagaacgggaccuacgacuaccccaaguacagcgaggagagcaagcugaaccgggagaagaucgacggcgugaagcucgaguccaugggcguguacaacauccuggccaucuacagcaccgucgccuccagccuggugcuccuggugucccugggggccaucagcuucuggaugugcuccaacggcagccuccagugccgcaucugcaucuga

SEQ ID NO: 70378 - RNA, 1698 nt, Artificial Sequence
  derived and/or modified CDS sequence (opt1) from hemagglutinin__InfluenzaA__ADV69095
augaaggugaagcugaugguccuccugugcaccuucaccgccacguacgccgacaccaucugcgugggcuaccacgcgaacaacagcaccgacaccguggacacgguccuggagaagaacgugaccgugacccacuccgucaaccuccuggaggacagccacaacgggaagcugugccuccugaagggcaucgcgccccugcagcucggguccugcagcguggccggcuggauccuggggaacccggagugcgagcugcucaucuccaaggagagcugguccuacaucguggagccgcccaaccccgagaacgggaccugcuaccccggcuacuucacggacuacgaggagcugcgcgagcagcugagcuccgucagcuccuucaagcgguucgagaucuuccccaaggagagcuccuggcccaaccacaccgugaacggcgugagcuccagcugcucccacaacggcgagagcuccuucuaccgcaaccuccuguggcugaccgucaaggacgggcucuaccccaaccugagcaagagcuacaccaacaagaaggagaaggaggugcuggugcucuggggcguccaccacccguccaacaucggggaccagcgggcccuguaccacacggagaacgccuacgugagcguggucuccagccacuacucccgccgguucacccccgagaucgccaagcgccccaaggugcggaaccaggagggccgcaucaacuacuacuggacccugcucgagcccggcgacaccaucaucuucgaggccaacgggaaccugaucgccccgcgguacgccuucgagcugagcaagggcuucggguccggcaucaucacgagcaacgcgcccaugggcgagugcaacgccaagugccagacgccccagggggccaucaacuccagccuccccuuccagaacgugcacccggucaccaucggcgagugccccaaguacgugcgcuccaccaagcugcggauggugaccgggcugcgcaacacccccagcauccagucccggggccucuucggggccaucgccggcuucaucgagggcggguggaccggcauggucgacgggugguacggcuaccaccaccagaacgagcaggggagcggcuacgcggccgaccagcaguccacccagaacgccaucaacggcaucacgaacaaggugaacagcgucaucgagaagaugaacacccaguucaccgccguggggaaggaguucaacaagcuggagcgccggauggagaaccugaacaagaagaucgacgacggcuuccucgacaucuggaccuacaacgccgagcugcuggugcuccuggagaacgagcgcacgcuggacuuccacgacuccaacgucaagaaccucuacgagaaggucaagagccagcugaagaacaacgcgaaggagaucgggaacggcugcuucgaguucuaccacaagugcaacgacgagugcauggaguccgugaagaacgggaccuacgacuaccccaaguacagcgaggagagcaagcugaaccgggagaagaucgacggcgugaagcucgaguccaugggcguguacaacauccuggccaucuacagcaccguggccuccagccugguccuccuggugucccugggggccaucagcuucuggaugugcuccaacggcagccuccagugccgcaucugcaucuga

SEQ ID NO: 70379 - RNA, 1698 nt, Artificial Sequence
  derived and/or modified CDS sequence (opt1) from hemagglutinin__InfluenzaA__ADV69096
augaaggugaagcugaugguccuccugugcaccuucaccgccacguacgccgacaccaucugcgugggcuaccacgcgaacaacagcaccgacaccguggacacgguccuggagaagaacgugaccgugacccacuccgucaaccuccuggaggacagccacaacgggaagcugugccuccugaagggcaucgcgccccugcagcucggguccugcagcguggccggcuggauccuggggaacccggagugcgagcugcucaucuccaaggagagcugguccuacaucguggagacccccaaccccgagaacggcacgugcuaccccggcuacgucaccgacuacgaggagcugcgcgagcagcugagcuccgugagcuccuucaagcgguucgagaucuucccgaaggagagcuccuggcccaaccacaccgugaccggggucagcuccagcugcucccacaacggcaagagcuccuucuaccgcaaccuccuguggcugacggugaagaacgggcucuaccccaaccugagcaagagcuacaccaacaagaaggagaaggaggugcugguccucuggggcgugcaccaccccuccaacaucggggaccagcgggcccuguaccacaccgagaacgccuacgugagcgucguguccagccacuacucccgccgguucaccccggagaucgccaagcgccccaaggugcggaaccaggagggccgcaucaacuacuacuggacgcugcucgagcccggcgacaccaucaucuucgaggccaacgggaaccugaucgcgccccgguacgccuucgagcugagcaagggcuucggguccggcaucaucaccagcaacgccccgaugggcgagugcaacgccaagugccagacccccaagggggccaucaacuccagccuccccuuccagaacguccaccccgugacgaucggcgagugcccgaaguacgugaaguccgccaagcugcgcauggucaccgggcugcggaacacccccagcauccagucccgcggccucuucggggccaucgcgggcuucaucgagggcggguggaccggcaugguggacgggugguacggcuaccaccaccagaacgagcaggggagcggcuacgccgccgaccagcaguccacgcagaacgccaucaacggcaucaccaacaaggucaacagcgugaucgagaagaugaacacccaguucaccgccguggggaaggaguucaacaagcuggagcggcgcauggagaaccugaacaagaaggucgacgacggcuuccucgacaucuggacguacaacgcggagcugcuggugcuccuggagaacgagcggacccuggacuuccacgaguccaacgugaagaaccucuacgagaaggucaagagccagcugaagaacaacgccaaggagaucgggaacggcugcuucgaguucuaccacaagugcaacgacgagugcauggaguccgugaagaacgggaccuacgacuaccccaaguacagcgaggagagcaagcugaaccgcgagaagaucgacggcgugaagcucgaguccaugggcgucuacaacauccuggccaucuacagcaccguggccuccagccuggugcuccuggucucccugggggccaucagcuucuggaugugcuccaacggcagccuccagugccggaucugcaucuga

SEQ ID NO: 70380 - RNA, 1698 nt, Artificial Sequence
  derived and/or modified CDS sequence (opt1) from hemagglutinin__InfluenzaA__ADV69097
augaaggugaagcugcucauccugcugugcaccuucaccgccacguacgccgacaccaucugcaucggcuaccacgcgaacaacagcaccgacaccgucgacacggugcucgagaagaacgugaccgucacccacuccgugaaccugcuggaggacagccacaacgggaagcucugccugcugaagggcaucgcgccccuccagcuggggaacugcuccguggccggcuggauccuggggaacccggagugcgagcuccugaucagcaagaaguccuggagcuacaucgucgagacccccaaccccggcaacggcgccugcuaccccggguacuucgccgacuacgaggagcugcgcgagcagcucuccagcguguccagcuucgagcgguucgagaucuucccgaaggaguccagcugguccaaccacaacgugaacggcgucagcgccuccugcagccacaacgggaaguccagcuucuaccgcaaccugcuguggcucacgggcaagaacgggcuguaccccacccugaccaaguccuacgccaacgacaaggagaaggaggugcucauccuguggggcgugcaccaccccagcaacaucggcgaccagcggacccuguaccacacggagaacgccuacgucagcgugauguccagccacuacucccgccgguucacccccgagaucagcaagcgcccgaaggugcgggaccaggaggggcgcaucaacuacuacuggacccuccuggagcccggcgacaccaucaucuucgaggccaacgggaaccugaucgcgcccugguacgccuucgcccucucccggggcuucggcagcgggaucaucacguccaacgcccccauggacgagugcgacgccaagugccagaccccgcagggcgcgaucaacagcucccugcccuuccagaacauccaccccgucaccaucggggagugccccaaguacgugcgcagcgccaagcugcggauggugaccggccuccgcaacacgccguccauccagagccgggggcuguucggcgccaucgccggcuucaucgagggcggguggaccgggauggucgacggcugguacggguaccaccaccagaacgagcagggcuccggcuacgccgcggaccaggagagcacccagaacgccaucaacgagaucaccaacaaggagaacuccgugaucgagaagaugaacacgcaguucaccagcguggggaaggaguucaacaagcuggagcgccggauggagaaccucaacaagaaggucgacgacggcuuccuggacaucuggaccuacaacgccgagcugcucgugcugcuggagaacgagcgcacccucgacuuccacgacuccaacgucaagagccuguacgagaaggugaagauccagcugaagaacaacgccaaggagaucgggaacggcugcuucgaguucuaccacaagugcaacaacgagugcauggaguccgugcggaacgggacguacgacuaccccaaguacagcgaggagagcaagcucaaccgcgagaagaucgacggcgucaagcuggacuccaugggcguguaccagauccuggccaucuacagcaccguggcguccagccucguccugcuggugucccucggggccaucagcuucuggaugugcuccaacggcagccugcagugccggaucugcaucuga

SEQ ID NO: 70381 - RNA, 1698 nt, Artificial Sequence
  derived and/or modified CDS sequence (opt1) from hemagglutinin__InfluenzaA__ADV69098
augaaggugaagcugaucguccuccugugcaccuucaccgccacguacgccgacaccaucugcgugggcuaccacgcgaacaacagcaccgacaccguggacacgguccuggagaagaacgugaccgugacccacuccgucaaccuccuggaggacagccacaacgggaagcugugccuccugaagggcaucgcgccccugcagcucggguccugcagcguggccggcuggauccuggggaacccggagugcgagcugcucaucuccaaggagagcugguccuacaucguggagacccccaaccccgagaacggcacgugcuaccccggcuacuucaccgacuacgaggagcugcgcgagcagcugagcuccgucagcuccuucaagcgguucgagaucuucccgaaggagagcuccuggcccaaccacaccgugaccggggugagcuccagcugcucccacaacggcaacagcuccuucuaccgcaaccuccuguggcugacggucaagaacgggcucuaccccaaccugagcaagagcuacaccaacaagaaggagaaggaggugcuggugcucuggggcguccaccaccccuccaacaucgaggaccagcgggcccuguaccacaccgagaacgccuacgugagcguggucuccagccacuacucccgccgguucaacccggagaucgccaagcgccccaaggugcggaaccaggaggggcgcaucaacuacuacuggacccugcucgagcccggcgacacgaucaucuucgaggccaacggcaaccugaucgcgccccgguacgccuucgagcugagcaagggguucggcuccgggaucaucaccagcaacgccccgaugggcgagugcaacgccaagugccagacgccccagggcgccaucaacuccaaccuccccuuccagaacgugcaccccgucaccaucggggagugcccgaaguacgugcgcagcgccaagcugcggauggugaccggccugcgcaacacccccuccauccagagccggggccucuucggggccaucgcgggguucaucgagggcggcuggaccgggauggucgacggcugguacggguaccaccaccacaacgagcagggcuccggguacgccgccaaccagaaguccacccccaacgccaucaacggcaucacgaacaaggugaacagcgucaucgagaagaugaacacccaguucaccgccgugggcaaggaguucaacaagcuggagcgccggauggagaaccugaacaagaagguggacgacggguuccucgacaucuggaccuacaacgcggagcugcugguccuccuggagaacgagcgcacgcuggacuuccacgacagcaacgugaagaaccucuacgagaaggugcggucccagcugaagaacaacgccaaggagaucggcaacgggugcuucgaguucuaccacaagugcaacgacgagugcauggagagcgucaagaacggcaccuacgacuaccccaaguacuccgaggagagcaagcugaaccgcgagaagaucgacggggugaagcucgagagcaugggcguguacaacauccuggccaucuacuccaccgucgccagcucccuggugcuccuggugagccugggcgccaucuccuucuggaugugcagcaacgggucccuccagugccggaucugcaucuga

SEQ ID NO: 70382 - RNA, 1698 nt, Artificial Sequence
  derived and/or modified CDS sequence (opt1) from hemagglutinin__InfluenzaA__ADV69099
augaaggugaagcugaucguccuccugugcaccuucaccgccacguacgccgacaccaucugcgugggcuaccacgcgaacaacagcaccgacaccguggacacgguccuggagaagaacgugaccgugacccacuccgucaaccuccuggaggacagccacaacgggaagcugugccuccugaagggcaucgcgccccugcagcucggguccugcagcguggccggcuggauccuggggaacccggagugcgagcugcucaucuccaaggagagcugguccuacaucguggagacccccaaccccgagaacggcacgugcuaccccggcuacuucaccgacuacgaggagcugcgcgagcagcugagcuccgucagcuccuucaagcgguucgagaucuucccgaaggagagcuccuggcccaaccacaccgugaccggggugagcuccagcugcucccacaacggcaacagcuccuucuaccgcaaccuccuguggcugacggucaagaacgggcucuaccccaaccugagcaagagcuacaccaacaagaaggagaaggaggugcuggugcucuggggcguccaccaccccuccaacaucgaggaccagcgggcccuguaccacaccgagaacgccuacgugagcguggucuccagccacuacucccgccgguucaacccggagaucgccaagcgccccaaggugcggaaccaggaggggcgcaucaacuacuacuggacccugcucgagcccggcgacacgaucaucuucgaggccaacggcaaccugaucgcgccccgguacgccuucgagcugagcaagggguucggcuccgggaucaucaccagcaacgccccgaugggcgagugcaacgccaagugccagacgccccagggcgccaucaacuccaaccuccccuuccagaacgugcaccccgucaccaucggggagugcccgaaguacgugcgcagcgccaagcugcggauggugaccggccugcgcaacacccccuccauccagagccggggccucuucggggccaucgcgggguucaucgagggcggcuggaccgggauggucaacggcugguacggguaccaccaccacaacgagcagggcuccggguacgccgccaaccagcagagcccgcccaacgccaucaacggcaucaccaacaaggugaacuccgucaucgagaagaugaacacgcaguucaccgccgugggcaaggaguucaacaagcuggagcgccggauggagaaccugaacaagaagguggacgacggguuccucgacaucuggaccuacaacgcggagcugcugguccuccuggagaacgagcgcacccuggacuuccacgacagcaacgugaagaaccucuacgagaaggugcggucccagcugaagaacaacgccaaggagaucggcaacgggugcuucgaguucuaccacaagugcaacgacgagugcauggagagcgucaagaacggcacguacgacuaccccaaguacuccgaggagagcaagcugaaccgcgagaagaucgacggggugaagcucgagagcaugggcguguacaacauccuggccaucuacuccaccgucgccagcucccuggugcuccuggugagccugggcgccaucuccuucuggaugugcagcaacgggucccuccagugccggaucugcaucuga

SEQ ID NO: 70383 - RNA, 1698 nt, Artificial Sequence
  derived and/or modified CDS sequence (opt1) from hemagglutinin__InfluenzaA__ADV69100
augaaggugaagcugcucauccugcugugcaccuucaccgccacguacgccgacaccaucugcaucggcuaccacgcgaacaacagcaccgacaccgucgacacggugcucgagaagaacgugaccgucacccacuccgugaaccugcuggaggacagccacaacgggaagcucugccugcugaagggcaucgcgccccuccagcuggggaacugcuccguggccggcuggauccuggggaacccggagugcgagagccucaucuccaagaaguccuggagcuacaucgucgagacccccaagcccgagaacggcacgugcuaccccggcgaguucgccgacuacgaggagcugcgcgagcagcugagcuccgugagcuccuucgagcgguucgagaucuucccgaaggagagcuccuggcccaaccacaccgccgccggggugagcgccuccugcagccacaacggcgagcgcuccuucuacaagaaccucaucuggcugaccgucaagaacgggcuguaccccaaccucagcaaguccuacaagaacgacaaggagaaggaggugcugauccuguggggcgugcaccacccgcccaacaucgagaaccagcggacccucuaccacacggagaacaccuacgucagcguggugagcucccacuacagcgggcgcuucacccccgagaucaccaagcggcccaagguccgcgaccaggagggccggaucaacuacuacuggacgcugcuggagcccggcgacaccaucaucuucgaggccaacgggaaccucaucgccccgugguacgcguucacccugucccgcggccuggggagcggcaucgugaccuccaacgcccccauggacaagugcgacgccaagugccagacgccccacggcgccaucaacagcucccuccccuuccagaacgugcacccggucaccaucggggagugccccaaguacgugcggagcgccaagcugcgcauggugaccggccugcggaacauccccuccauccagagccgcggccucuucggggcgaucgccggguucaucgagggcggcuggaccgggauggucgacggcugguacggguaccaccaccagaacgagcagggcuccggguacgccgccgaccaggagagcacgcagaacgccaucaacggcaucaccaacaaggugaacuccgugaucgagaagaugaacacccaguucaccgcggucggcaaggaguucaacaagcuggagcggcgcauggagaaccugaacaagaagguggacgacggguuccucgacaucuggacguacaacgccgagcugcugguccuccuggagaacgagcggacccuggacuuccacgacagcaacgugaagucccucuacgagaaggucaagagccagcugaagaacaacgccaaggagaucggcaacgggugcuucgaguucuaccacaagugcaacaacgagugcauggaguccgugaagaacggcaccuacgacuaccccaaguacagcgaggaguccaagcugaaccgcgagaagaucgacggggugaagcucgacagcaugggcguguaccggauccuggccaucuacagcaccgucgccuccagccuggugcuccuggugucccugggcgcgaucagcuucuggaugugcuccaacgggagccuccagugccgcaucugcaucuga

SEQ ID NO: 70384 - RNA, 1698 nt, Artificial Sequence
  derived and/or modified CDS sequence (opt1) from hemagglutinin__InfluenzaA__ADV69101
augaaggugaagcugcucauccuguucugcaccuucaccgccacguacgccgacaccaucugcaucggcuaccacgcgaacaacagcaccgacaccgucgacacggugcuggagaagaacgugaccgucacccacuccgugaaccuccuggaggacagccacaacgggaagcugugccuccugaagggcaucgcgccccugcagcucgggaacugcuccguggccggcuggauccuggggaacccggagugcgagagccugaucuccaagaaguccuggagcuacaucgucgagacccccaaccccgagaacggcgccugcuaccccggcgaguucgccgacuacgaggagcuccgcgagcagcugagcuccgugagcuccuucgagcgguucgagaucuucccgaaggagagcuccuggcccaaccacacggccaccggggugagcgccuccugcagccacaacggcgagcgcuccuucuaccggaaccugaucuggcucaccgucaagaacgggcuguaccccaaccugagcaaguccuacgagaacgacaaggagaaggaggugcucauccuguggggcgugcaccacccgcccaacaucgagaaccagcgcacccuguaccacacggagaacgccuacgucagcguggugagcucccacuacagcgggcgguucacccccgagaucaccaagcgccccaagguccgggaccaggagggccgcaucaacuacuacuggacccuccuggagcccggcgacacgaucaucuucgaggccaacgggaaccugaucgcgccgugguacgccuucacccucucccggggccuggggagcggcaucaucaccuccaacgcccccauggacgagugcgacagcaagugccagacgccccagggcgccaucaacuccagccugcccuuccagaacgugcacccggugaccaucggggagugccccaaguacguccgcuccgccaagcuccggauggugaccggccugcgcaacauccccagcauccagucccgggggcuguucggcgcgaucgccggguucaucgagggcggcuggaccgggaugguggacggcugguacggguaccaccaccagaacgagcagggcagcggguacgccgccgaccaggaguccacccagaacgccaucaacggcaucacgaacaaggucaacagcgugaucgagaagaugaacccccaguucaccgcggugggcaaggaguucaacaagcucgagcgccggauggagaaccugaacaagaaggucgacgacggguuccuggacaucuggaccuacaacgccgagcuccuggugcugcucgagaacgagcgcacccuggacuuccacgacuccaacgucaagagccuguacgagaaggugaagucccagcucaagaacaacgccaaggagaucggcaacgggugcuucgaguucuaccacaagugcaacaacgagugcauggagagcgugaagaacggcacguacgacuacccgaaguacuccgaggagagcaagcugaaccgggagaagaucgacggggucaagcuggacagcaugggcguguaccgcauccucgccaucuacuccaccguggccagcucccugguccugcucgugagccugggcgcgaucuccuucuggaugugcagcaacgggucccugcagugccggaucugcaucuga

SEQ ID NO: 70385 - RNA, 1698 nt, Artificial Sequence
  derived and/or modified CDS sequence (opt1) from hemagglutinin__InfluenzaA__ADV69102
augaaggugaagcugcucauccuguucugcaccuucaccgccacguacgccgacaccaucugcaucggcuaccacgcgaacaacagcaccgacaccgucgacacggugcuggagaagaacgugaccgucacccacuccgugaaccuccuggaggacagccacaacgggaagcugugccuccugaagggcaucgcgccccugcagcucgggaacugcuccguggccggcuggauccuggggaacccggagugcgagagccugaucuccaagaaguccuggagcuacaucgucgagacccccaaccccgagaacggcgccugcuaccccggcgaguucgccgacuacgaggagcuccgcgagcagcugagcuccgugagcuccuucgagcgguucgagaucuucccgaaggagagcuccuggcccaaccacacggccaccggggugagcgccuccugcagccacaacggcgagcgcuccuucuaccggaaccugaucuggcucaccgucaagaacgggcuguaccccaaccugagcaaguccuacgagaacgacaaggagaaggaggugcucauccuguggggcgugcaccacccgcccaacaucgagaaccagcgcacccuguaccacacggagaacgccuacgucagcguggugagcucccacuacagcgggcgguucacccccgagaucaccaagcgccccaagguccgggaccaggagggccgcaucaacuacuacuggacccuccuggagcccggcgacacgaucaucuucgaggccaacgggaaccugaucgcgccgugguacgccuucacccucuccaccggccuggggagcggcaucaucaccuccaacgcccccauggacgagugcgacagcaagugccagacgccccagggcgccaucaacuccagccugcccuuccagaacgugcacccggugaccaucggggagugccccaaguacguccgguccgccaagcuccgcauggugaccggccugcggaacauccccagcauccagucccgcgggcuguucggcgcgaucgccggguucaucgagggcggcuggaccgggaugguggacggcugguacggguaccaccaccagaacgagcagggcagcggguacgccgccgaccaggaguccacgcagaacgccaucaacggcaucaccaacaaggucaacagcgugaucgagaagaugaacacccaguucaccgcggugggcaaggaguucaacaagcucgagcggcgcauggagaaccugaacaagaaggucgacgacggguuccuggacaucuggacguacaacgccgagcuccuggugcugcucgagaacgagcggacccuggacuuccacgacuccaacgucaagagccuguacgagaaggugaagucccagcucaagaacaacgccaaggagaucggcaacgggugcuucgaguucuaccacaagugcaacaacgagugcauggagagcgugaagaacggcaccuacgacuaccccaaguacuccgaggagagcaagcugaaccgcgagaagaucgacggggucaagcuggacagcaugggcguguaccggauccucgccaucuacuccaccguggccagcucccugguccugcucgugagccugggcgcgaucuccuucuggaugugcagcaacgggucccugcagugccgcaucugcaucuga

SEQ ID NO: 70386 - RNA, 1698 nt, Artificial Sequence
  derived and/or modified CDS sequence (opt1) from hemagglutinin__InfluenzaA__ADV69103
augaaggugaagcugaugguccuccugugcaccuucaccgccacguacgccgacaccaucugcgugggcuaccacgcgaacaacagcaccgacaccguggacacgguccuggagaagaacgugaccgugacccacuccgucaaccuccuggaggacagccacaacgggaagcugugccuccugaagggcaucgcgccccugcagcucggguccugcagcguggccggcuggauccuggggaacccggagugcgagcugcucaucuccaaggagagcugguccuacaucguggagacccccaaccccgagaacggcacgugcuaccccggcuacuucaccgacuacgaggagcugcgcgagcagcugagcuccgucagcuccuucaagcgguucgagaucuucccgaaggagagcuccuggcccaaccacaacgugaccggggugagcuccagcugcucccacaacggcaagagcuccuucuaccgcaaccuccuguggcugaccgucaagaacgggcucuaccccaaccugagcaagagcuacacgaacaagaaggagaaggaggugcuggugcucuggggcguccaccaccccuccaacaucggggaccagcgggcccuguaccacaccgagaacgccuacgugagcguggucuccagccacuacucccgccgguucaccccggagaucgccaagcgccccaaggugcggaaccaggagggccgcaucaacuacuacuggacccugcucgagcccggcgacacgaucaucuucgaggccaacgggaaccugaucgcgccccgguacgccuucgagcugagcaagggcuucggguccggcaucaucaccagcaacgccccgaucggcgagugcaacgccaagugccagacgccccagggggccaucaacuccagccuccccuuccagaacgugaaccccgucaccaucggcgagugcccgaaguacgugaaguccgccaagcugcgcauggugaccgggcugcggaacacccccagcauccagucccgcggccucuucggggccaucgcgggcuucaucgagggcggguggaccggcauggucgacgggugguacggcuaccaccaccagaacgagcaggggagcggcuacgccgccgaccagcaguccacccagaacgccaucaacggcaucacgaacaaggugaacagcgucaucgagaagaugaacacccaguucaccgccguggggaaggaguucaacaagcuggagcggcgcauggagaaccugaacaagaagguggacgacggcuuccucgacaucuggaccuacaacgcggagcugcugguccuccuggagaacgagcggacgcuggacuuccacgacuccaacgugaagaaccucuacgagaaggucaagagccagcugaagaacaacgccaaggagaucgggaacggcugcuucgaguucuaccacaagugcaacgacgagugcauggaguccgugaagaacgggaccuacgacuaccccaaguacagcgaggagagcaagcugaaccgcgagaagaucgacggcgugaagcucgaguccaugggcguguacaacauccuggccaucuacagcaccgucgccuccagccuggugcuccuggugucccugggggccaucagcuucuggaugugcuccaacggcagccuccagugccggaucugcaucuga

SEQ ID NO: 70387 - RNA, 1698 nt, Artificial Sequence
  derived and/or modified CDS sequence (opt1) from hemagglutinin__InfluenzaA__ADV69104
augaaggugaagcugcucauccuguucugcaccuucaccgccacguacgccgacaccaucugcaucggcuaccacgcgaacaacagcaccgacaccgucgacacggugcuggagaagaacgugaccgucacccacuccgugaaccuccuggaggacagccacaacgggaagcugugccuccugaagggcaucgcgccccugcagcucgggaacugcuccguggccggcuggauccuggggaacccggagugcgagagccugaucuccaagaaguccuggagcuacaucgucgagacccccaaccccgagaacggcgccugcuaccccggcgaguucgccgacuacgaggagcuccgcgagcagcugagcuccgugagcuccuucgagcgguucgagaucuucccgaaggagagcuccuggcccaaccacacggccaccggggugagcgccuccugcagccacaacggcgagcgcuccuucuaccggaaccugaucuggcucaccgucaagaacgggcuguaccccaaccugagcaaguccuacgagaacgacaaggagaaggaggugcucauccuguggggcgugcaccacccgcccaacaucgagaaccagcgcacccuguaccacacggagaacgccuacgucagcguggugagcucccacuacagcgggcgguucacccccgagaucaccaagcgccccaagguccgggaccaggagggccgcaucaacuacuacuggacccuccuggagcccggcgacacgaucaucuucgaggccaacgggaaccugaucgcgccgugguacgccuucacccucucccggggccuggggagcggcaucaucaccuccaacgcccccauggacgagugcgacagcaagugccagacgccccagggcgccaucaacuccagccugcccuuccagaacgugcacccggugaccaucggggagugccccaaguacguccgcuccgccaagcuccggauggugaccggccugcgcaacauccccagcauccagucccgggggcuguucggcgcgaucgccggguucaucgagggcggcuggaccgggaugguggacggcugguacggguaccaccaccagaacgagcagggcagcggguacgccgccgaccaggaguccacccagaacgccaucaacggcaucacgaacaaggucaacagcgugaucgagaagaugaacacccaguucaccgcggugggcaaggaguucaacaagcucgagcgccggauggagaaccugaacaagaaggucgacgacggguuccuggacaucuggaccuacaacgccgagcuccuggugcugcucgagaacgagcgcacgcuggacuuccacgacuccaacgucaagagccuguacgagaaggugaagucccagcucaagaacaacgccaaggagaucggcaacgggugcuucgaguucuaccacaagugcaacaacgagugcauggagagcgugaagaacggcaccuacgacuaccccaaguacuccgaggagagcaagcugaaccgggagaagaucgacggggucaagcuggacagcaugggcguguaccgcauccucgccaucuacuccaccguggccagcucccugguccugcucgugagccugggcgcgaucuccuucuggaugugcagcaacgggucccugcagugccggaucugcaucuga

SEQ ID NO: 70388 - RNA, 1698 nt, Artificial Sequence
  derived and/or modified CDS sequence (opt1) from hemagglutinin__InfluenzaA__ADV69105
augaaggugaagcugcucauccugcugugcaccuucaccgccacguacgccgacaccaucugcaucggcuaccacgcgaacaacagcaccgacaccgucgacacggugcucgagaagaacgugaccgucacccacuccgugaaccugcuggaggacagccacaacgggaagcucugccugcugaagggcaucgcgccccuccagcuggggaacugcuccguggccggcuggauccuggggaacccggagugcgagagccucaucuccaagaaguccuggagcuacaucgucgagacccccaaccccgagaacggcgccugcuaccccggcgaguucgccgacuacgaggagcugcgcgagcagcugagcuccgugagcuccuucgagcgguucgagaucuucccgaaggagagcuccuggcccaaccacacggccgccggggugagcgccuccugcagccacaacggcgagcgcuccuucuaccggaaccucaucuggcugaccgucaagaacgggcuguaccccaaccucagcaaguccuacaagaacgacaaggagaaggaggugcugaucaucuggggcgugcaccacccgcccaacaucgagaaccagcgcacccuguaccacaccgagaacgccuacgucagcguggugagcucccacuacagcgggcgguucacgcccgagaucaccaagcgccccaagguccgggaccaggagggccgcaucaacuacuacuggacccuccuggagcccggcgacaccaucaucuucgaggcgaacgggaaccugaucgccccgugguacgccuucacgcucucccggggccuggggagcggcaucaucaccuccaacgcccccauggacgagugcgacgccaagugccagacgccccagggcgcgaucaacagcucccugcccuuccagaacgugcacccggugaccaucggggagugccccaaguacguccgcagcgccaagcuccggauggugaccggccugcgcaacauccccuccauccagagccgggggcuguucggcgccaucgccggguucaucgagggcggcuggaccgggaugguggacggcugguacggguaccaccaccagaacgagcagggcuccggguacgccgcggaccaggagagcacccagaacgccaucaacggcaucaccaacaaggucaacuccgugaucgagaagaugaacacgcaguucaccgccgugggcaaggaguucaacaagcucgagcgccggauggagaaccugaacaagaaggucgacgacggguuccuggacaucuggaccuacaacgccgagcuccuggugcugcucgagaacgagcgcacccuggacuuccacgacagcaacgucaagucccuguacgagaaggucaagagccagcucaagaacaacgccaaggagaucggcaacgggugcuucgaguucuaccacaagugcaacaacgagugcauggaguccgugaagaacggcacguacgacuaccccaaguacagcgaggaguccaagcugaaccgggagaagaucgacggggugaagcuggacagcaugggcguguaccgcauccucgcgaucuacagcaccguggccuccagccugguccugcucgugucccugggcgccaucagcuucuggaugugcuccaacgggagccugcagugccggaucugcaucuga

SEQ ID NO: 70389 - RNA, 1698 nt, Artificial Sequence
  derived and/or modified CDS sequence (opt1) from hemagglutinin__InfluenzaA__ADV69106
augaaggugaagcugcucauccugcugugcaccuucaccgccacguacgccgacaccaucugcaucggcuaccacgcgaacaacagcaccgacaccgucgacacggugcucgagaagaacgugaccgucacccacuccgugaaccugcuggaggacagccacaacgggaagcucugccugcugaagggcaucgcgccccuccagcuggggaacugcuccguggccggcuggauccuggggaacccggagugcgagagccucaucuccaagaaguccuggagcuacaucgucgagacccccaaccccggcaacggcgccugcuaccccggguacuucgccgacuacgaggagcugcgcgagcagcugagcuccgugagcuccuucgagcgguucgagauguucccgaaggagagcuccuggcccaaccacaacgugaacggcgucagcgccuccugcagccacaacgggaaguccagcuucuaccgcaaccuccuguggcugacgcggaagaacggccucuaccccaaccugaccaaguccuacgccaacaacaacgacaaggaggugcugauccucuggggcgugcaccaccccagcaacaucggggaccagcgcacccuguaccacaccgagaacgccuacgucagcgugauguccagccacuacucccggcgcuucacgccggagaucaccaagcggcccaaggugcgcgaccaggagggccggaucaacuacuacuggacccugcucgagcccggggacaccaucaucuucgaggccaacggcaaccugaucgcgcccugguacgccuucgcccugagccgcuccuucgggagcggcaucaucacguccagcgccccgauggacgagugcgacgccaagugccagacgccccagggcgcgaucaacuccagccuccccuuccagaacguccaccccgugaccaucggggagugcccgaaguacgugcgguccgccaagcugaagauggucaccggccugcgcaacauccccagcauccagucccggggccucuucggggccaucgccggguucaucgagggcggcuggaccgggaugguggacggcugguacggguaccaccaccagaacgagcagggcagcggguacgccgcggaccaggaguccacccagaacgccaucaacggcaucaccaacaaggugaacagcgucaucgagaagaugaacacccaguucacggccgugggcaaggaguucaacaagcuggagaagcgcauggagaaccugaacaagaagguggacgacggguuccucgacaucuggaccuacaacgccgagcugcugguccuccuggagaacgagcggacccuggacuuccacgacuccaacgucaagagccucuacgagaaggugaagauccagcugaagaacaacgccaaggagaucggcaacgggugcuucgaguucuaccacaagugcaacaacgagugcauggaguccgugcgcaacggcaccuacgacuaccccaaguacagcgaggagagcaagcugaaccgggagaagaucgacggggugaagcucgacuccaugggcgucuaccagauccuggcgaucuacagcacgguggccuccagccuggugcuccuggucucccugggcgccaucagcuucuggaugugcuccaacgggagccuccagugccgcaucugcaucuga

SEQ ID NO: 70390 - RNA, 1698 nt, Artificial Sequence
  derived and/or modified CDS sequence (opt1) from hemagglutinin__InfluenzaA__ADV69107
augaaggugaagcugcucauccugcugugcaccuucaccgccacguacgccgacaccaucugcaucggcuaccacgcgaacaacagcaccgacaccgucgacacggugcucgagaagaacgugaccgucacccacuccgugaaccugcuggaggacagccacaacgggaagcucugccugcugaagggcaucgcgccccuccagcuggggaacugcuccguggccggcuggauccuggggaacccggagugcgagagccucaucuccaaggagagcugguccuacaucgucgagacccccaacagcgacaacggcgccugcuaccccggccaguucacggacuacgaggagcugcgcgagcagcuguccagcguguccagcuucgagcgguucgagaucuuccccaaggaguccagcuggccgaaccacaccgugaccggggucuccgccagcugcucccacaacggcgagcgcagcuucuaccggaaccucaucuggcugaccgugaagaacgggcuguaccccaaccucuccaagagcuacgagaacgacaaggagaaggaggugcugauccuguggggcguccaccacccgcccaacaucggggaccagcgcacgcucuaccacaccgagaacgccuacaucagcgugguguccagccacuacuccggccgguucacccccgagaucaccaagcgccccaagguccgggaccaggagggccgcaucaacuacuacuggacgcugcuggagcccggggacaccaucaucuucgaggccaacggcaaccucaucgcccccugguacgccuucgcgcugagccgggggcugggcuccggcaucaucaccagcaacgccccgauggacaagugcgacgccaagugccagacgccccagggggccaucaacuccagccuccccuuccagaacgugcaccccgugaccaucggcgagugcccgaaguacguccgcuccaccaagcugcggauggugaccgggcugcgcaacauccccagcauccagucccggggccucuucggggccaucgcgggcuucaucgagggcggguggaccggcaugguggacgggugguacggcuaccaccaccagaacgagcaggggagcggcuacgccgccgaccaggaguccacgcagaacgccaucaacggcaucaccaacaaggucaacagcgugaucgagaagaugaacacccaguucaccgccguggggaaggaguucaacaagcuggagcgccggauggagaaccugaacaagaaggucgacgacggcuuccucgacaucuggacguacaacgcggagcugcuggugcuccuggagaacgagcgcacccuggacuuccacgacuccaacgucaagagccucuacgagaaggugaagucccagcugaagaacaacgccaaggagaucgggaacggcugcuucgaguucuaccacaagugcaacaacgagugcauggagagcgugcggaacgggaccuacgacuaccccaaguacuccgaggagagcaagcugaaccgcgagaagaucgacggcgucaagcucgacagcaugggcguguaccggauccuggccaucuacuccaccgccgccagcucccuggugcuccuggucagccugggggcgaucuccuucuggaugugcagcaacggcucccuccagugccgcaucugcaucuga

SEQ ID NO: 70391 - RNA, 1698 nt, Artificial Sequence
  derived and/or modified CDS sequence (opt1) from hemagglutinin__InfluenzaA__ADV69108
augaaggugaagcugcucguccugcugugcaccuucaccgccacguacgccgacaccaucugcgugggcuaccacgcgaacaacagcaccgacaccguggacacgguccucgagaagaacgugaccgugacccacuccgucaaccugcuggaggacagccacaacgggaagcucugccugcugaagggcaucgcgccccuccagcugggguccugcagcguggccggcuggauccuggggaacccggagugcgagcuccugaucuccaaggagagcugguccuacaucguggagacccccaaccccgagaacggcacgugcuaccccggcuacuucaccgacuacgaggagcugcgcgagcagcucagcuccgucagcuccuucaagcgguucgagaucuucccgaaggagagcuccuggcccaaccacaccgugaccggggugagcuccagcugcucccacaacggcaagagcuccuucuaccgcaaccugcuguggcucacgaugaagaacgggcuguaccccaaccugagcaagagcuacaccaacaagaaggagaaggagguccucgugcuguggggcgugcaccaccccuccaacaucggggaccagcgggcccuguaccacaccgagaacgccuacgucagcgugguguccagccacuacucccgccgguucaccccggagaucgccaagcgccccaagguccggaaccaggagggccgcaucaacuacuacuggacgcuccuggagcccgaggacaccaucaucuucgaggccaacggcaaccugaucgcgccccgguacgccuucgagcucagcaagggguucggcuccgggaucaucaccagcaacgccccgaugggcgagugcaacgccaagugccagacgccccagggcgccaucaacuccagccugcccuuccagaacgugcaccccgugaccaucggggagugcccgaaguacguccgcuccagcaagcugcggauggugaccggccuccgcaacacccccuccauccagagccgggggcuguucggcgccaucgccggguucaucgagggcggcuggaccgggaugguggacggcugguacggguaccaccaccagaacgagcagggcuccggguacgcggccgaccagcagagcacgcagaacgccaucaacggcaucaccaacaaggucaacuccgugaucgagaagaugaacacccaguucaccgccgucggcaaggaguucaacaagcuggagcgccggauggagaaccucaacaagaagaucgacgacggguuccuggacaucuggacguacaacgccgagcugcucgugcugcuggagaacgagcgcacccucgacuuccacgacagcaacgugaagaaccuguacgagaaggucaagucccagcugaagaacaacgcgaaggagaucggcaacgggugcuucgaguucuaccacaagugcaacgacgagugcauggagagcgugaagaacggcaccuacgacuaccccaaguacagcgaggaguccaagcucaaccgggagaagaucgacggggugaagcuggagagcaugggcgucuacaacauccuggccaucuacuccaccguggccagcucccucgugcugcuggucagccucggcgccaucuccuucuggaugugcagcaacgggucccugcagugccgcaucugcaucuga

SEQ ID NO: 70392 - RNA, 1698 nt, Artificial Sequence
  derived and/or modified CDS sequence (opt1) from hemagglutinin__InfluenzaA__ADV69109
augaaggugaagcugcucauccugcugugcaccuucaaggccaccuacgccgacacgaucugcaucggcuaccacgcgaacaacagcaccgagaccgucgacaccgugcucgagaagaacgugacggucacccacuccgugaaccugcuggaggacagccacaacgggaagcucugccugcugaagggcaucgcgccccuccagcuggggaacugcuccguggccggcuggauccuggggaacccggagugcgagagccucaucuccaagaaguccuggagcuacaucgucgagacccccaaccccgagaacggcgccugcuaccccggcgaguucgccgacuacgaggagcugcgcgagcagcugagcuccgugagcuccuucgagcgguucgagaucuucccgaaggagagcuccuggcccaaccacaccgccacgggggugagcgccuccugcagccacaacggcgagcgcuccuucuaccggaaccucaucuggcugaccgucaagaacgggcuguaccccaaccucagcaaguccuacgagaacgacaagaagaaggaggugcugauccuguggggcgugcaccacccgcccaacaucgagaaccagcgcacccucuaccacaccgagaacgccuacgucagcguggugagcucccacuacagcgggcgguucacgcccgagaucaccaagcgccccaagguccgggaccaggagggccgcaucaacuacuacuggacccugcuggagcccggcgacaccaucaucuucgaggccaacgggaaccucaucgcgccgugguacgccuucacgcugucccggggccuggggagcggcaucaucaccuccaacgcccccauggacgagugcgacgccaagugccagacccccaagggcgccaucaacagcucccuccccuuccagaacgugcacccggugaccaucggggagugccccaaguacguccgcagcgcgaagcugcggauggugacgggccugcgcaacauccccuccauccagagccggggccucuucggggccaucgccggguucaucgagggcggcuggaccgggaugguggacggcugguacggguaccaccaccagaacgagcagggcuccggguacgccgccgaccaggagagcacccagaacgcgaucaacggcaucaccaacaaggucaacuccgugaucgagaagaugaacacgcaguucaccgccgugggcaaggaguucaacaagcuggagcgccggauggagaaccugaacaagaaggucgacgacggguuccucgacaucuggaccuacaacgccgagcugcuggugcuccuggagaacgagcgcacccuggacuuccacgacagcaacgucaagucccucuacgagaaggucaagagccagcugaagaacaacgccaaggagaucggcaacgggugcuucgaguucuaccacaagugcaacaacgagugcauggaguccgugaagaacggcacguacgacuaccccaaguacagcgaggaguccaagcugaaccgggagaagaucgacggggugaagcucgacagcaugggcguguaccgcauccuggccaucuacagcaccguggcguccagccugguccuccuggugucccugggcgccaucagcuucuggaugugcuccaacgggagccuccagugccggaucugcaucuga

SEQ ID NO: 70393 - RNA, 1701 nt, Artificial Sequence
  derived and/or modified CDS sequence (opt1) from hemagglutinin__InfluenzaA__ADV76579
augaagaccaucaucgcccugagcuacauccucugccugguguucgcccagaagcugcccggcaacgacgacuccaccgcgacgcucugccuggggcaccacgccgucccgaacggcaccaucgugaagaccaucaccaacgaccagaucgaggugacgaacgccaccgagcugguccagagcuccagcaccggggagaucugcgacagcccccaccagauccucgacggcgagaacugcacccugaucgacgcccugcucggggacccccagugcgacggcuuccagaacaagaagugggaccuguucguggagcgcagcaaggccuacuccaacugcuaccccuacgacgugccggacuacgcgagccugcggucccucgucgccagcuccggcacgcuggaguucaacaacgagagcuucaacuggaccggggugacccagaacggcaccuccagcgccugcauccgccgguccaacaacagcuucuucucccgccugaacuggcucacgcaccuccgguucaaguaccccgcccugaacgugaccaugcccaacaacgagcaguucgacaagcuguacaucuggggcguccaccaccccgggaccgacaacgaccagaucuuccuguacgcgcaggccagcgggcgcaucaccguguccacgaagcggagccagcagaccgugaucccgaacaucggcagccgcccccggguccgcaacauccccucccggaucagcaucuacuggaccaucgugaagcccggcgacauccugcucaucaacuccaccgggaaccugaucgccccgcgcggcuacuucaagauccggagcgggaaguccagcaucaugcgcuccgacgcccccaucggcaagugcaacagcgagugcaucacgcccaacggcuccauccccaacgacaagccguuccagaacgugaaccggaucaccuacggggccugcccccgcuacgucaagcagaacacccugaagcucgcgaccggcaugcggaacgugcccgagaagcagacgcgcgggaucuucggcgccaucgccggguucaucgagaacggcugggagggcaugguggacgggugguacggcuuccggcaccagaacagcgaggggcgcggccaggccgccgaccugaaguccacccaggcggccaucgaccagaucaacgggaagcugaaccggcucaucggcaagaccaacgagaaguuccaccagaucgagaaggaguucagcgaggucgagggccgcauccaggaccuggagaaguacguggaggacaccaagaucgaccugugguccuacaacgccgagcuccugguggcccuggagaaccagcacacgaucgaccucaccgacagcgagaugaacaagcuguucgagaagaccaagaagcagcugcgcgagaacgccgaggacauggggaacggcugcuucaagaucuaccacaagugcgacaacgcgugcaucggguccauccggaacggcaccuacgaccacgacgucuaccgcgacgaggcccucaacaaccgguuccagaucaaggggguggagcugaaguccggcuacaaggacuggauccuguggaucuccuucgccaucagcugcuuccuccugugcguggcccugcucggcuucaucaugugggccugccagaaggggaacauccgcugcaacaucugcaucuga

SEQ ID NO: 70394 - RNA, 1701 nt, Artificial Sequence; identical to SEQ ID NO: 67612
  derived and/or modified CDS sequence (opt1) from hemagglutinin__InfluenzaA__ADV76587

SEQ ID NO: 70395 - RNA, 1701 nt, Artificial Sequence; identical to SEQ ID NO: 67612
  derived and/or modified CDS sequence (opt1) from hemagglutinin__InfluenzaA__ADV76598

SEQ ID NO: 70396 - RNA, 1701 nt, Artificial Sequence; identical to SEQ ID NO: 67435
  derived and/or modified CDS sequence (opt1) from hemagglutinin__InfluenzaA__ADV76609

SEQ ID NO: 70397 - RNA, 1701 nt, Artificial Sequence; identical to SEQ ID NO: 67612
  derived and/or modified CDS sequence (opt1) from hemagglutinin__InfluenzaA__ADV76620

SEQ ID NO: 70398 - RNA, 1701 nt, Artificial Sequence
  derived and/or modified CDS sequence (opt1) from hemagglutinin__InfluenzaA__ADV76631
augaagaccaucaucgcccugagcuacauccucugccugguguucgcccagaagcugcccggcaacgacaacuccaccgcgacgcucugccuggggcaccacgccgucccgaacggcaccaucgugaagaccaucaccaacgaccagaucgaggugacgaacgccaccgagcugguccagagcuccagcaccggggagaucugcgacagcccccaccagauccucgacggcaagaacugcacccugaucgacgcccugcucggggacccccagugcgacggcuuccagaacaagaagugggaccuguucguggagcgcagcaaggccuacuccaacugcuaccccuacgacgugccggacuacgcgagccugcggucccucgucgccagcuccggcacgcuggaguucaacaacgagagcuucaacuggaccggggugacccagaacggcaccuccagcgccugcauccgccgguccaagaacagcuucuucucccgccugaacuggcucacgcaccugaacuucaaguaccccgcccugaacgugaccaugcccaacaacgagcaguucgacaagcucuacaucuggggcguccaccaccccgggaccgacaaggaccagaucuuccuguacgcgcaggccagcgggcggaucaccguguccacgaagcgcagccagcagaccgugaucccgaacaucggcagccggccccgcguccggaacauccccucccgcaucagcaucuacuggaccauggugaagcccggcgacauccugcucaucaacuccaccgggaaccugaucgccccgcggggcuacuucaagauccgcagcgggaaguccagcaucaugcgguccgacacgcccaucggcaagugcaacagcgagugcaucacccccaacggcuccauccccaacgacaagccguuccagaacgugaaccgcaucaccuacggggccugcccccgguacgucaagcagaacacccugaagcucgccacgggcaugcgcaacgugcccgagaagcagacccgggggaucuucggcgcgaucgccggguucaucgagaacggcugggagggcaugguggacgggugguacggcuuccgccaccagaacagcgaggggcggggccaggccgccgaccugaaguccacccaggccgcgaucgaccagaucaacgggaagcugaaccgccucaucggcaaggccaacgagaaguuccaccagaucgagaaggaguucagcgaggucgagggccggauccaggaccuggagaaguacguggaggacaccaagaucgaccugugguccuacaacgccgagcuccugguggcccuggagaaccagcacacgaucgaccucaccgacagcgagaugaacaagcuguucgagaagaccaagaagcagcugcgcgagaacgccgaggacauggggaacggcugcuucaagaucuaccacaagugcgacaacgcgugcaucggguccauccgcaacggcaccuacgaccacgacgucuaccgggacgaggcccucaacaaccgcuuccagaucaaggggguggagcugaaguccggcuacaaggacuggauccuguggaucuccuucgccaucagcugcuuccuccugugcguggcccugcucggcuucaucaugugggccugccagaaggggaacauccggugcaacaucugcaucuga

SEQ ID NO: 70399 - RNA, 1701 nt, Artificial Sequence; identical to SEQ ID NO: 69616
  derived and/or modified CDS sequence (opt1) from hemagglutinin__InfluenzaA__ADV76642

SEQ ID NO: 70400 - RNA, 1701 nt, Artificial Sequence; identical to SEQ ID NO: 69620
  derived and/or modified CDS sequence (opt1) from hemagglutinin__InfluenzaA__ADV76664

SEQ ID NO: 70401 - RNA, 1701 nt, Artificial Sequence
  derived and/or modified CDS sequence (opt1) from hemagglutinin__InfluenzaA__ADV76673
augaagaccaucaucgcccugagcuacaucuucugccucgcccugggccaggaccugcccgggaacgacaacuccaccgcgacgcucugccugggccaccacgccgugccgaacgggacccuggucaagaccaucaccgacgaccagaucgaggugacgaacgccaccgagcucgugcagagcuccagcaccggcaagaucugcaacaacccccaccgcauccuggacgggaucgacugcacccugaucgacgcccuccugggcgacccccacugcgacgucuuccagaacgagacgugggaccuguucguggagcgguccaaggccuucagcaacugcuaccccuacgacgugccggacuacgcgucccuccgcagccuggucgccuccagcggcacccuggaguucaucaccgagggguucaccuggacgggcgugacccagaacgggggcuccaacgccugcaagcgggggcccggcagcggcuucuucucccgccucaacuggcugaccaagagcggguccaccuaccccgugcugaacgucacgaugcccaacaacgacaacuucgacaagcucuacaucuggggcgugcaccacccgagcaccaaccaggagcagaccucccuguacgugcaggccagcgggcgggucaccguguccacgcgccggagccagcagaccaucauccccaacaucgagagccgccccugggugcggggccuguccagccgcaucuccaucuacuggaccaucgucaaccccggcgacgugcucgugaucaacagcaacgggaaccugaucgcgccgcggggcuacuucaagaugcgcaccgggaaguccagcaucaugcgguccgacgcccccaucgacacgugcaucagcgagugcaucacccccaacggcuccauccccaacgacaagccguuccagaacgucaacaagaucaccuacggggccugccccaaguacgugaagcagaacacccugaagcucgccacgggcaugcgcaacgugcccgagaagcagacccggggccuguucggggccaaggcgggcuucaucgagaacgggugggagggcaugaucgacgggugguacggcuuccgccaccagaacagcgagggcaccgggcaggccgccgaccugaaguccacccaggccgccaucgaccagaucaacggcaagcucaaccgggucaucgagaagacgaacgagaaguuccaccagaucgagaaggaguucagcgagguggaggggcgcauccaggaccuggagaaguacguggaggacaccaagaucgaccugugguccuacaacgcggagcuccuggucgcccuggagaaccagcacaccaucgaccucaccgacagcgagaugaacaagcuguucgagaagacgcggcgccagcugcgggagaacgccgaggacaugggcaacgggugcuucaagaucuaccacaagugcgacaacgccugcaucgaguccauccgcaacggcaccuacgaccacgacguguaccgcgacgaggcccucaacaaccgguuccagaucaagggcgucgagcucaagagcggguacaaggacuggauccuguggaucuccuucgcgaucagcugcuuccugcugugcguggugcugcucggcuucaucaugugggccugccagcgcgggaacauccggugcaacaucugcaucuga

SEQ ID NO: 70402 - RNA, 1701 nt, Artificial Sequence
  derived and/or modified CDS sequence (opt1) from hemagglutinin__InfluenzaA__ADV76682
augaagaccaucaucgcccugagcuacauccucugccugguguucgcccagaagcugcccggcaacgacaacuccaccgcgacgcucugccuggggcaccacgccgucccgaacggcaccaucgugaagaccaucaccaacgaccagaucgaggugacgaacgccaccgagcugguccagagcuccagcaccggggagaucugcgacagcccccaccagauccucgacggcgagaacugcacccugaucgacgcccugcucggggacccccagugcgacggcuuccagaacaagaagugggaccuguucguggagcgcagcaaggccuacuccaacugcuaccccuacgacgugccggacuacgcgagccugcggucccucgucgccagcuccggcacgcuggaguucaacaacgagagcuucaacuggaccggggugacccagaacggcaccuccagcgccugcauccgccgguccaacaacagcuucuucucccgccugaacuggcucacgcaccugaacuucaaguaccccgcccugaacgugaccaugcccaacaacgagcaguucgacaagcucuacaucuggggcguccaccaccccgggaccgacaaggaccagaucuuccuguacgcgcaggccagcgggcggaucaccguguccacgaagcgcagccagcaggccgugaucccgaacaucggcagccggccccgcguccggaacauccccucccgcaucagcaucuacuggaccaucgugaagcccggcgacauccugcucaucaacuccaccgggaaccugaucgccccgcggggcuacuucaagauccgcagcggggaguccagcaucaugcgguccgacgcccccaucggcaagugcaacagcgagugcaucacccccaacggcuccauccccaacgacaagccguuccagaacgugaaccgcaucacguacggggcgugcccccgguacgucaagcagaacacccugaagcucgccaccggcaugcgcaacgugcccgagaagcagacccgggggaucuucggcgccaucgccggguucaucgagaacggcugggagggcaugguggacgggugguacggcuuccgccaccagaacagcgaggggcggggccaggccgcggaccugaaguccacgcaggccgccaucgaccagaucaacgggaagcugaaccgccucaucggcaagaccaacgagaaguuccaccagaucgagaaggaguucagcgaggucgagggccggauccaggaccuggagaaguacguggaggacaccaagaucgaccugugguccuacaacgccgagcuccugguggcccuggagaaccagcacaccaucgaccucacggacagcgagaugaacaagcuguucgagaagaccaagaagcagcugcgcgagaacgcggaggacauggggaacggcugcuucaagaucuaccacaagugcgacaacgccugcaucggguccauccgcaacggcaccuacgaccacgacgucuaccgggacgaggcccucaacaaccgcuuccagaucaaggggguggagcugaaguccggcuacaaggacuggauccuguggaucuccuucgccaucagcugcuuccuccugugcguggcccugcucggcuucaucaugugggcgugccagaaggggaacauccggugcaacaucugcaucuga

SEQ ID NO: 70403 - RNA, 1701 nt, Artificial Sequence; identical to SEQ ID NO: 67637
  derived and/or modified CDS sequence (opt1) from hemagglutinin__InfluenzaA__ADV76694

SEQ ID NO: 70404 - RNA, 1701 nt, Artificial Sequence; identical to SEQ ID NO: 67435
  derived and/or modified CDS sequence (opt1) from hemagglutinin__InfluenzaA__ADV76705

SEQ ID NO: 70405 - RNA, 1701 nt, Artificial Sequence; identical to SEQ ID NO: 67637
  derived and/or modified CDS sequence (opt1) from hemagglutinin__InfluenzaA__ADV76716

SEQ ID NO: 70406 - RNA, 1701 nt, Artificial Sequence
  derived and/or modified CDS sequence (opt1) from hemagglutinin__InfluenzaA__ADV76727
augaagaccaucaucgcccugagcuacauccucugccugguguucgcccagaagcugcccggcaacgacaacuccaccgcgacgcucugccuggggcaccacgccgucccgaacggcaccaucgugaagaccaucaccaacgaccagaucgaggugacgaacgccaccgagcugguccagagcuccagcaccggggagaucugcgacagcccccaccagauccucgacggcaagaacugcacccugaucgacgcccugcucggggacccccagugcgacggcuuccagaacaagaagugggaccuguucguggagcgcagcaaggccuacuccaacugcuaccccuacgacgugccggacuacgcgagccugcggucccucgucgccagcuccggcacgcuggaguucaacaacgagagcuucaacuggaccggggugacccagaacggcaaguccagcgccugcauccgccgguccaagaacagcuucuucucccgccugaacuggcucacccaccugaacuucaaguaccccgcccugaacgugacgaugcccaacaacgagcaguucgacaagcucuacaucuggggcguccaccaccccgggaccgacaaggaccagaucuuccuguacgcgcaggccagcgggcggaucaccguguccaccaagcgcagccagcagacggugaucccgaacaucggcagccggccccgcguccggaacauccccucccgcaucagcaucuacuggaccaucgugaagcccggcgacauccugcucaucaacuccaccgggaaccugaucgccccgcggggcuacuucaagauccgcagcgggaaguccagcaucaugcgguccgacgcccccaucggcaagugcaacagcgagugcaucacccccaacggcuccauccccaacgacaagccguuccagaacgugaaccgcaucacguacggggccugcccccgguacgucaagcagaacacccugaagcucgcgaccggcaugcgcaacgugcccgagaagcagacccgggggaucuucggcgccaucgccggguucaucgagaacggcugggagggcaugguggacgggugguacggcuuccgccaccagaacagcgaggggcggggccaggccgccgaccugaaguccacgcaggcggccaucgaccagaucaacgggaagcugaaccgccucaucggcaagaccaacgagaaguuccaccagaucgagaaggaguucagcgaggucgagggccggauccaggaccuggagaaguacguggaggacaccaagaucgaccugugguccuacaacgccgagcuccugguggcccuggagaaccagcacaccaucgaccucacggacagcgagaugaacaagcuguucgagaagaccaagaagcagcugcgcgagaacgccgaggacauggggaacggcugcuucaagaucuaccacaagugcgacaacgcgugcaucggguccauccgcaacggcaccuacgaccacgacgucuaccgggacgaggcccucaacaaccgcuuccagaucaaggggguggagcugaaguccggcuacaaggacuggauccuguggaucuccuucgccaucagcugcuuccuccugugcguggcccugcucggcuucaucaugugggccugccagaaggggaacauccggugcaacaucugcaucuga

SEQ ID NO: 70407 - RNA, 1701 nt, Artificial Sequence
  derived and/or modified CDS sequence (opt1) from hemagglutinin__InfluenzaA__ADV91009
augaaggccauccuggccgugcuccuguacaccuucgcgaccgccaacgccgacacgcugugcaucggcuaccacgccaacaacagcaccgacaccgucgacaccgugcucgagaagaacgugacggucacccacuccgugaaccugcuggaggacaagcacaacgggaagcucugcaagcugcgcggcaucgcgccccugcaccucgggaagugcaacaucgccggcuggauccuggggaacccggagugcgagagccuguccaccgccagcuccuggagcuacaucguggagacccccuccagcgacaacggcacgugcuaccccggcgacuucaucgacuacgaggagcuccgggagcagcuguccagcgucuccagcuucgagcgcuucgagaucuuccccaagaccuccagcuggccgaaccacgacuccaacaagggggugaccgccgccugcccccacgcgggcgccaagagcuucuacaagaaccugaucuggcucgugaagaaggggaacuccuaccccaagcugagcaaguccuacaucaacgacaagggcaagaagguccuggugcucugggggauccaccaccccagcaccagcgccgaccagcagucccuguaccagaacgccgacgccuacguguucgucggcacgagccgguacuccaagaaguucaagccggagaucgcgauccgccccaaggugcgggaccaggagggccgcaugaacuacuacuggacccugguggagcccggggacaagaucaccuucgaggccaccggcaaccucgucgugccccgguacgccuucgccauggagcgcaacgccgggagcggcaucaucaucuccgacacgccggugcacgacugcaacacgaccugccagacccccaagggcgcgaucaacaccagccugcccuuccagaacauccaccccaucaccaucgggaagugcccgaaguacgucgaguccaccaagcugcggcucgccaccggccugcgcaacgugcccagcauccagucccgggggcuguucggcgccaucgccggguucaucgagggcggcuggacggggaugguggacggcugguacggguaccaccaccagaacgagcagggcagcggguacgccgcggaccucaaguccacccagaacgccaucgacaagaucaccaacaaggucaacagcgugaucgagaagaugaacacccaguucacggccgugggcaaggaguucaaccaccuggagaagcgcaucgagaaccugaacaagaaggucgacgacggcuuccucgacaucuggaccuacaacgccgagcugcuggugcuccuggagaacgagcggacccuggacuaccacgacuccaacgucaagaaccucuacgagaaggugcgcagccagcugaagaacaacgccaaggagaucgggaacggcugcuucgaguucuaccacaagugcgacaacacgugcauggaguccgugaagaacgggaccuacgacuaccccaaguacagcgaggaggcgaagcugaaccgggaggagaucgacggcgucaagcucgaguccacccgcaucuaccagauccuggccaucuacagcaccguggccuccagccuggugcucgucgugagccugggggccaucuccuucuggaugugcagcaacggcucccugcagugccggaucugcaucuga

SEQ ID NO: 70408 - RNA, 1701 nt, Artificial Sequence
  derived and/or modified CDS sequence (opt1) from hemagglutinin__InfluenzaA__ADV91010
augaaggccauccuggugguccuccuguacaccuucgccaccgcgaacgccgacacgcugugcaucggcuaccacgccaacaacagcaccgacaccguggacaccgugcucgagaagaacgucacggugacccacuccgugaaccugcuggaggacaagcacaacgggaagcucugcaagcugcgcggcgucgcgccccugcaccucgggaagugcaacaucgccggcuggauccuggggaacccggagugcgagagccuguccaccgccagcuccuggagcuacaucguggagaccuccagcuccgacaacggcacgugcuaccccggcgacuucaccgacuacgaggagcuccgggagcagcugagcuccgugagcuccuucgagcgcuucgagaucuuccccaagaccagcuccuggcccaaccacgacagcaacaagggggucaccacggccugcccgcacgccggcgccaaguccuucuacaagaaccugaucuggcucgugaagaaggggaacagcuaccccaagcuguccaagagcuacaucaacgacaagggcaaggaggugcugguccucugggggauccaccacccgcccaccagcgcggaccagcagucccuguaccagaacgccgacgccuacguguucgugggcaccagccgguacuccaagaaguucaagcccgagaucgccauccgccccaagguccgggaccaggagggccgcaugaacuacuacuggacccugguggagcccggggacaagaucacguucgaggccaccggcaaccucguggucccccgguacgcguucgccauggagcgcaacgccgggagcggcaucaucaucuccgacaccccggugcacgacugcaacaccacgugccagacccccaagggcgccaucaacaccagccugcccuuccagaacauccaccccaucaccaucgggaagugcccgaaguacgugaaguccacgaagcugcggcucgccaccggccugcgcaacguccccagcauccagucccgggggcuguucggcgcgaucgccggguucaucgagggcggcuggaccgggaugguggacggcugguacggguaccaccaccagaacgagcagggcagcggguacgccgccgaccucaaguccacccagaacgccaucgacgagaucacgaacaaggugaacagcgucaucgagaagaugaacacccaguucaccgcggugggcaaggaguucaaccaccuggagaagcgcaucgagaaccugaacaagaaggucgacgacggcuuccucgacaucuggaccuacaacgccgagcugcuggugcuccuggagaacgagcggacgcuggacuaccacgacuccaacgugaagaaccucuacgagaagguccgcagccagcugaagaacaacgccaaggagaucgggaacggcugcuucgaguucuaccacaagugcgacaacacgugcauggaguccgugaagaacgggaccuacgacuaccccaaguacagcgaggaggccaagcugaaccgggaggagaucgacggcgugaagcucgaguccacccgcaucuaccagauccuggccaucuacagcaccgucgcguccagccuggugcucguggucagccugggggccaucuccuucuggaugugcagcaacggcucccugcagugccggaucugcaucuga

SEQ ID NO: 70409 - RNA, 1701 nt, Artificial Sequence
  derived and/or modified CDS sequence (opt1) from hemagglutinin__InfluenzaA__ADW01407
auggaggccaagcuguucguccucuucugcgccuucaccgcgcugaaggccgacaccaucugcgugggcuaccacgccaacaacagcacggacaccguggacaccauccuggagaagaacgugaccgucacgcacuccgugaaccuccuggagaacagccacaacgggaagcugugcucccucaacggcaagaucccccugcagcuggggaacugcaacguggccggcuggauccucgggaacccgaagugcgaccugcugcucaccgccaacagcugguccuacaucaucgagaccagcaacuccaagaacggcgcgugcuaccccggcgaguucgccgacuacgaggagcugaaggagcagcugagcaccgucuccagcuucgagcgcuucgagaucuuccccaaggccacguccuggcccaaccacgacaccacccgggggaccacgguggccugcagccacuccggcgcgaacagcuucuaccgcaaccuccuguggaucgugaagaaggggaacuccuacccgaagcugagcaaguccuacaccaacaacaagggcaaggagguccucgugaucuggggcgugcaccacccgcccaccgacagcgaccagcagacccuguaccagaacaaccacacguacgucuccguggggagcagcaaguacuacaagcggcugacccccgagaucguggcccgccccaagguccgggagcaggccggccgcaugaacuacuacuggacccuccuggaccagggggacaccaucacguucgaggccaccggcaaccugaucgcccccuggcacgcguucgcccucaagaagggguccagcuccggcaucaugcggagcgacgcccaggugcacaacugcaccaccaagugccagacgccccacggcgcccugaaggggaaccugcccuuccagaacgugcacccggucaccaucggcgagugccccaaguacgugaaguccacccagcuccgcauggccaccgggcugcggaacauccccagcauccagucccgcggccuguucggggcgaucgccggcuucaucgagggcggguggacgggcaugguggacgggugguacggcuaccaccaccggaacgagcaggggagcggcuacgccgccgaccagaaguccacccagaucgccaucgacggcaucagcaacaaggucaacuccgugaucgagaagaugaacauccaguucaccagcguggggaaggaguucaacucccucgagaagcgcauggagaaccugaacaagaaggucgacgacggcuuccuggacguguggaccuacaacgcggagcuccugauccugcucgagaacgagcggacgcuggacuuccacgaccugaacgucaagaaccucuacgagaaggucaagagccagcugcgcaacaacgccaaggagaucgggaacggcugcuucgaguucuaccacaagugcgacaacgagugcauggaguccgugaagaacgggaccuacaacuaccccaaguacagcgaggaguccaagcugaaccgggaggagaucgacggcgugaagcucgagagcaugggcauccaccagauccuggccaucuacuccaccguggccagcagccuggugcuccuggucucccugggggccaucagcuucuggaugugcuccaacggcagccuccagugccgcgugugcaucuga

SEQ ID NO: 70410 - RNA, 1698 nt, Artificial Sequence; identical to SEQ ID NO: 67155
  derived and/or modified CDS sequence (opt1) from hemagglutinin__InfluenzaA__ADW09101

SEQ ID NO: 70411 - RNA, 1698 nt, Artificial Sequence
  derived and/or modified CDS sequence (opt1) from hemagglutinin__InfluenzaA__ADW09111
augaaggugaagcugcucguccugcugugcaccuucaccgccacguacgccgacaccaucugcaucggcuaccacgcgaacaacagcaccgacaccguggacacggugcucgagaagaacgucaccgugacccacuccgugaaccugcuggagaacagccacaacgggaagcucugccugcugaagggcaucgcgccccuccagcuggggaacugcuccgucgccggcuggauccuggggaacccggagugcgagcuccugaucagcaaggaguccuggagcuacaucguggagaagcccaaccccgagaacgggaccugcuaccccggccacuucgccgacuacgaggagcugcgcgagcagcucuccagcguguccagcuucgagcgguucgagaucuucccgaaggaguccagcuggcccaaccacacggucaccgggguguccgccagcugcucccacaacggcgagagcuccuucuaccgcaaccugcuguggcucaccgggaagaacggccuguaccccaaccugagcaaguccuacgccaacaacaaggagaaggaggugcucguccuguggggcgugcaccacccgcccaacaucguggaccagaagacccuguaccggacggagaacgccuacgucagcguggugagcucccacuacagccgcaaguucacccccgagaucgccaagcggcccaagguccgcgaccaggagggccggaucaacuacuacuggacccuccuggagcccggcgacaccaucaucuucgaggccaacgggaaccugaucgcgccgcgcuacgccuucgcccucucccggggcuucgggagcggcaucaucaacuccaacgcccccauggacaagugcgacgccaagugccagacgccccgcggcgcgaucaacagcucccugcccuuccagaacgugcacccggugaccaucggggagugccccaaguacguccggagcgccaagcugcgcauggugaccggccuccggaacauccccuccauccagagccgcgggcuguucggcgccaucgccggguucaucgagggcggcuggaccgggaugguggacggcugguacggguaccaccaccagaacgaccagggcuccggguacgccgcggaccagaaguccacgcagaacgccaucaacggcaucaccaacaaggucaacagcgugaucgagaagaugaacacccaguucaccgccgucggcaaggaguucaacaagcuggagcggcgcauggagaaccucaacaagaagguggacgacggguucaucgacaucuggacguacaacgccgagcugcuggugcuccuggagaacgagcggacccuggacuuccacgacagcaacgucaagaaccucuacgagaaggugaagucccagcugaagaacaacgccaaggagaucggcaacgggugcuucgaguucuaccacaagugcaacgacgagugcauggagagcgugaagaacggcaccuacgacuaccccaaguacuccgaggagagcaagcugaaccgcgagaagaucgacggggucaagcucgaguccaugggcguguaccagauccuggcgaucuacagcaccguggccagcucccugguccuccuggugagccugggcgccaucuccuucuggaugugcagcaacgggucccuccagugccggaucugcaucuga

SEQ ID NO: 70412 - RNA, 1698 nt, Artificial Sequence
  derived and/or modified CDS sequence (opt1) from hemagglutinin__InfluenzaA__ADW09120
augaaggugaagcugcucguccugcugugcaccuucaccgccacguacgccgacaccaucugcaucggcuaccacgcgaacaacagcaccgacaccguggacacggugcucgagaagaacgucaccgugacccacuccgugaaccugcuggagaacagccacaacgggaagcucugccugcugaagggcaucgcgccccuccagcuggggaacugcuccgucgccggcuggauccuggggaacccggagugcgagcuccugaucagcaaggaguccuggagcuacaucguggagaagcccaaccccgagaacgggaccugcuaccccggccacuucgccgacuacgaggagcugcgcgagcagcucuccagcguguccagcuucgagcgguucgagaucuucccgaaggaguccagcuggcccaaccacacggucaccgggguguccgccagcugcucccacaacggcgagagcuccuucuaccgcaaccugcuguggcucaccgugaagaacgggcuguaccccaaccugagcaaguccuacgccaacaacaaggagaaggagguccucgugcuguggggcgugcaccacccgcccaacaucgucgaccagaagacccuguaccacacggagaacgccuacgugagcguggucagcucccacuacagccggaaguucacccccgagaucgccaagcgccccaaggugcgggaccaggaggggcgcaucaacuacuacuggacccuccuggagcccggcgacaccaucaucuucgaggccaacggcaaccugaucgcgccgcgguacgccuucgcccucuccaagggguucggcagcgggaucaucaacuccaacgcccccauggacaagugcgacgccaagugccagacgccccgcggcgcgaucaacagcucccugcccuuccagaacgugcacccggucaccaucggcgagugccccaaguacgugcggagcgccaagcugcgcauggugaccgggcuccggaacauccccuccauccagagccgcggccuguucggggccaucgccggcuucaucgagggcggcuggaccggcauggucgacgggugguacggcuaccaccaccagaacgagcagggguccggcuacgccgcggaccagaaguccacgcagaacgccaucaacgggaucaccaacaaggugaacagcgucaucgagaagaugaacacccaguucaccgccgugggcaaggaguucaacaagcuggagcggcgcauggagaaccucaacaagaagguggacgacggcuucaucgacaucuggacguacaacgccgagcugcugguccuccuggagaacgagcggacccuggacuuccacgacagcaacgugaagaaccucuacgagaaggugaagucccagcugaagaacaacgccaaggagaucgggaacggcugcuucgaguucuaccacaagugcaacgacgagugcauggagagcgucaagaacgggaccuacgacuaccccaaguacuccgaggagagcaagcugaaccgcgagaagaucgacggcgugaagcucgaguccauggggguguaccagauccuggcgaucuacagcaccgucgccagcucccuggugcuccuggugagccugggcgccaucuccuucuggaugugcagcaacggcucccuccagugccggaucugcaucuga

SEQ ID NO: 70413 - RNA, 1698 nt, Artificial Sequence; identical to SEQ ID NO: 67640
  derived and/or modified CDS sequence (opt1) from hemagglutinin__InfluenzaA__ADW09131

SEQ ID NO: 70414 - RNA, 1698 nt, Artificial Sequence
  derived and/or modified CDS sequence (opt1) from hemagglutinin__InfluenzaA__ADW09153
augaaggugaagcugcucguccugcugugcaccuucaccgccacguacgccgacaccaucugcaucggcuaccacgcgaacaacagcaccgacaccguggacacggugcucgagaagaacgucaccgugacccacuccgugaaccugcuggagaacagccacaacgggaagcucugccugcugaagggcaucgcgccccuccagcuggggaacugcuccgucgccggcuggauccuggggaacccggagugcgagcuccugaucagcaaggaguccuggagcuacaucguggagaagcccaaccccgagaacgggaccugcuaccccggccacuucgccgacuacgaggagcugcgcgagcagcucuccagcguguccagcuucgagcgguucgagaucuucccgaaggaguccagcuggcccaaccacacggucaccgggguguccgccagcugcucccacaacggcgagagcuccuucuaccgcaaccugcuguggcucaccgugaagaacgggcuguaccccaaccugagcaaguccuacgccaacaacaaggagaaggagguccucgugcuguggggcgugcaccacccgcccaacaucgucgaccagaagacccuguaccggacggagaacgccuacgugagcguggucagcucccacuacagccgcaaguucacccccgagaucgccaagcggcccaaggugcgcgaccaggaggggcggaucaacuacuacuggacccuccuggagcccggcgacaccaucaucuucgaggccaacggcaaccugaucgcgccgcgcuacgccuucgcccucucccggggguucggcagcgggaucaucaacuccaacgcccccauggacaagugcgacgccaagugccagacgccccgcggcgcgaucaacagcucccugcccuuccagaacgugcacccggucaccaucggcgagugccccaaguacgugcggagcgccaagcugcgcauggugaccgggcuccggaacauccccuccauccagagccgcggccuguucggggccaucgccggcuucaucgagggcggcuggaccggcauggucgacgggugguacggcuaccaccaccagaacgagcagggguccggcuacgccgcggaccagaaguccacgcaggacgccaucaacgggaucaccaacaaggugaacagcgucaucgagaagaugaacacccaguucaccgccgugggcaaggaguucaacaagcuggagcggcgcauggagaaccucaacaagaagguggacgacggcuucaucgacaucuggacguacaacgccgagcugcugguccuccuggagaacgagcggacccuggacuuccacgacagcaacgugaagaaccucuacgagaaggugaagucccagcugaagaacaacgccaaggagaucgggaacggcugcuucgaguucuaccacaagugcaacgacgagugcauggagagcgucaagaacgggaccuacgacuaccccaaguacuccgaggagagcaagcugaaccgcgagaagaucgacggcgugaagcucgaguccauggggguguaccagauccuggcgaucuacagcaccgucgccagcucccuggugcuccuggugagccugggcgccaucuccuucuggaugugcagcaacggcucccuccagugccggaucugcaucuga

SEQ ID NO: 70415 - RNA, 1698 nt, Artificial Sequence; identical to SEQ ID NO: 67640
  derived and/or modified CDS sequence (opt1) from hemagglutinin__InfluenzaA__ADW09164

SEQ ID NO: 70416 - RNA, 1698 nt, Artificial Sequence
  derived and/or modified CDS sequence (opt1) from hemagglutinin__InfluenzaA__ADW09186
augaaggugaagcugcucguccugcugugcaccuucaccgccacguacgccgacaccaucugcaucggcuaccacgcgaacaacagcaccgacaccguggacacggugcucgagaagaacgucaccgugacccacuccgugaaccugcuggagaacagccacaacgggaagcucugccugcugaagggcaucgcgccccuccagcuggggaacugcuccgucgccggcuggauccuggggaacccggagugcgagcuccugaucagcaaggaguccuggagcuacaucguggagaagcccaaccccgagaacgggaccugcuaccccggccacuucgccgacuacgaggagcugcgcgagcagcucuccagcguguccagcuucgagcgguucgagaucuucccgaaggaguccagcuggcccaaccacacggucaccgggguguccgccagcugcucccacaacggcgagagcuccuucuaccgcaaccugcuguggcucaccgggaagaacggccuguaccccaaccugagcaaguccuacgccaacaacaaggagaaggaggugcucguccuguggggcgugcaccacccgcccaacaucguggaccagaagacccuguaccggacggagaacgccuacgucagcguggugagcucccacuacagccgcaaguucacccccgagaucgccaagcggcccaagguccgcgaccaggagggccggaucaacuacuacuggacccuccuggagcccggcgacaccaucaucuucgaggccaacgggaaccugaucgcgccgcgcuacgccuucgcccucucccggggcuucgggagcggcaucaucaacuccaacgcccccauggacaagugcgacgccaagugccagacgccccagggcgcgaucaacagcucccugcccuuccagaacgugcacccggugaccaucggggagugccccaaguacguccgcagcgccaagcugcggauggugaccggccuccgcaacacccccuccauccagagccgggggcuguucggcgccaucgccggguucaucgagggcggcuggacggggaugguggacggcugguacggguaccaccaccagaacgagcagggcuccggguacgccgcggaccagaaguccacccagaacgccaucaacggcaucaccaacaaggucaacagcgugaucgagaagaugaacacccaguucacggccgucggcaaggaguucaacaagcuggagcgccggauggagaaccucaacaagaagguggacgacggguucaucgacaucuggaccuacaacgccgagcugcuggugcuccuggagaacgagcgcacccuggacuuccacgacagcaacgucaagaaccucuacgagaaggugaagucccagcugaagaacaacgccaaggagaucggcaacgggugcuucgaguucuaccacaagugcaacgacgagugcauggagagcgugaagaacggcaccuacgacuaccccaaguacuccgaggagagcaagcugaaccgggagaagaucgacggggucaagcucgaguccaugggcguguaccagauccuggcgaucuacagcacgguggccagcucccugguccuccuggugagccugggcgccaucuccuucuggaugugcagcaacgggucccuccagugccgcaucugcaucuga

SEQ ID NO: 70417 - RNA, 1698 nt, Artificial Sequence; identical to SEQ ID NO: 67155
  derived and/or modified CDS sequence (opt1) from hemagglutinin__InfluenzaA__ADW09197

SEQ ID NO: 70418 - RNA, 1698 nt, Artificial Sequence; identical to SEQ ID NO: 67640
  derived and/or modified CDS sequence (opt1) from hemagglutinin__InfluenzaA__ADW09208

SEQ ID NO: 70419 - RNA, 1698 nt, Artificial Sequence; identical to SEQ ID NO: 67640
  derived and/or modified CDS sequence (opt1) from hemagglutinin__InfluenzaA__ADW09219

SEQ ID NO: 70420 - RNA, 1698 nt, Artificial Sequence; identical to SEQ ID NO: 67155
  derived and/or modified CDS sequence (opt1) from hemagglutinin__InfluenzaA__ADW09230

SEQ ID NO: 70421 - RNA, 1698 nt, Artificial Sequence
  derived and/or modified CDS sequence (opt1) from hemagglutinin__InfluenzaA__ADW09241
augaaggugaagcugcucguccugcugugcaccuucaccgccacguacgccgacaccaucugcaucggcuaccacgcgaacaacagcaccgacaccguggacacggugcucgagaagaacgucaccgugacccacuccgugaaccugcuggagaacagccacaacgggaagcucugccugcugaagggcaucgcgccccuccagcuggggaacugcuccgucgccggcuggauccuggggaacccggagugcgagcuccugaucagcaaggaguccuggagcuacaucguggagaagcccaaccccgagaacgggaccugcuaccccggccacuucgccgacuacgaggagaugcgcgagcagcuguccagcguguccagcuucgagcgguucgagaucuucccgaaggaguccagcuggcccaaccacacggucaccgggguguccgccagcugcucccacaacggcgagagcuccuucuaccgcaaccuccuguggcugaccgugaagaacgggcucuaccccaaccugagcaaguccuacgccaacaacaaggagaaggagguccuggugcucuggggcgugcaccacccgcccaacaucgucgaccagaagacccuguaccggacggagaacgccuacgugagcguggucagcucccacuacagccgcaaguucacccccgagaucgccaagcggcccaaggugcgcgaccaggaggggcggaucaacuacuacuggacccugcucgagcccggcgacaccaucaucuucgaggccaacggcaaccugaucgcgccgcgcuacgccuucgcccugucccggggguucggcagcgggaucaucaacuccaacgcccccauggacaagugcgacgccaagugccagacgccccgcggcgcgaucaacagcucccuccccuuccagaacgugcacccggucaccaucggcgagugccccaaguacgugcggagcgccaagcugcgcauggugaccgggcugcggaacauccccuccauccagagccgcggccucuucggggccaucgccggcuucaucgagggcggcuggaccggcauggucgacgggugguacggcuaccaccaccagaacgagcagggguccggcuacgccgcggaccagaaguccacgcagaacgccaucaacgggaucaccaacaaggugaacagcgucaucgagaagaugaacacccaguucaccgccgugggcaaggaguucaacaagcuggagcggcgcauggagaaccugaacaagaagguggacgacggcuucaucgacaucuggacguacaacgccgagcuccugguccugcucgagaacgagcggacccuggacuuccacgacagcaacgugaagaaccuguacgagaaggugaagucccagcucaagaacaacgccaaggagaucgggaacggcugcuucgaguucuaccacaagugcaacgacgagugcauggagagcgucaagaacgggaccuacgacuaccccaaguacuccgaggagagcaagcugaaccgcgagaagaucgacggcgugaagcuggaguccauggggguguaccagauccucgcgaucuacagcaccgucgccagcucccuggugcugcucgugagccugggcgccaucuccuucuggaugugcagcaacggcucccugcagugccggaucugcaucuga

SEQ ID NO: 70422 - RNA, 1698 nt, Artificial Sequence; identical to SEQ ID NO: 67640
  derived and/or modified CDS sequence (opt1) from hemagglutinin__InfluenzaA__ADW09252

SEQ ID NO: 70423 - RNA, 1698 nt, Artificial Sequence
  derived and/or modified CDS sequence (opt1) from hemagglutinin__InfluenzaA__ADW09274
augaaggugaagcugcucguccugcugugcaccuucaccgccacguacgccgacaccaucugcaucggcuaccacgcgaacaacagcaccgacaccguggacacggugcucgagaagaacgucaccgugacccacuccgugaaccugcuggagaacagccacaacgggaagcucugccugcugaagggcaucgcgccccuccagcuggggaacugcuccgucgccggcuggauccuggggaacccggagugcgagcuccugaucagcaaggaguccuggagcuacaucguggagaagcccaaccccgagaacgggaccugcuaccccggccacuucgccgacuacgaggagcugcgcgagcagcucuccagcguguccagcuucgagcgguucgagaucuucccgaaggaguccagcuggcccaaccacacggucaccgggguguccgccagcugcucccacaacggcgagagcuccuucuaccgcaaccugcuguggcucaccgugaagaacgggcuguaccccaaccugagcaagcccuacgccaacaacaaggagaaggagguccucgugcuguggggcgugcaccacccgcccaacaucgucgaccagaagacccuguaccggacggagaacgccuacguguccguggucagcagccacuacucccgcaaguucacccccgagaucgccaagcggcccaaggugcgcgaccaggaggggcggaucaacuacuacuggacccuccuggagccgggcgacaccaucaucuucgaggccaacggcaaccugaucgcgccccgcuacgccuucgcccucagccggggguucggcuccgggaucaucaacagcaacgcccccauggacaagugcgacgccaagugccagacgccccgcggcgcgaucaacuccagccugccguuccagaacgugcaccccgucaccaucggcgagugccccaaguacgugcgguccgccaagcugcgcauggugaccgggcuccggaacauccccagcauccagucccgcggccuguucggggccaucgccggcuucaucgagggcggcuggaccggcauggucgacgggugguacggcuaccaccaccagaacgagcaggggagcggcuacgccgcggaccagaaguccacgcagaacgccaucaacgggaucaccaacaaggugaacagcgucaucgagaagaugaacacccaguucaccgccgugggcaaggaguucaacaagcuggagcggcgcauggagaaccucaacaagaagguggacgacggcuucaucgacaucuggacguacaacgccgagcugcugguccuccuggagaacgagcggacccuggacuuccacgacuccaacgugaagaaccucuacgagaaggucaagagccagcugaagaacaacgccaaggagaucgggaacggcugcuucgaguucuaccacaagugcaacgacgagugcauggaguccgugaagaacgggaccuacgacuacccgaaguacagcgaggaguccaagcugaaccgcgagaagaucgacggcgugaagcucgagagcauggggguguaccagauccuggcgaucuacuccaccgucgccagcagccuggugcuccuggugucccugggcgccaucagcuucuggaugugcuccaacggcagccuccagugccggaucugcaucuga

SEQ ID NO: 70424 - RNA, 1698 nt, Artificial Sequence
  derived and/or modified CDS sequence (opt1) from hemagglutinin__InfluenzaA__ADW09285
augaaggugaagcugcucguccugcugugcaccuucaccgccacguacgccgacaccaucugcaucggcuaccacgcgaacaacagcaccgacaccguggacacggugcucgagaagaacgucaccgugacccacuccgugaaccugcuggagaacagccacaacgggaagcucugccugcugaagggcaucgcgccccuccagcuggggaacugcuccgucgccggcuggauccuggggaacccggagugcgagcuccugaucagcaaggaguccuggagcuacaucguggagaagcccaaccccgagaacgggaccugcuaccccggccacuucgccgacuacgaggagcugcgcgagcagcucuccagcguguccagcuucgagcgguucgagaucuucccgaaggaguccagcuggcccaaccacacggucaccgggguguccgccagcugcucccacaacggcgagagcuccuucuaccgcaaccugcuguggcucaccgggaagaacggccuguaccccaaccugagcaaguccuacgccaacaacaaggagaaggaggugcucguccuguggggcgugcaccacccgcccaacaucguggaccagaagacccuguaccggacggagaacgccuacgucagcguggugagcucccacuacagccgcaaguucacccccgagaucgccaagcggcccaagguccgcgaccaggagggccggaucaacuacuacuggacccuccuggagcccggcgacaccaucacguucgaggccaacgggaaccugaucgcgccgcgcuacgccuucgcccucucccggggcuucgggagcggcaucaucaacuccaacgcccccauggacaagugcgacgccaagugccagacgccccagggcgcgaucaacagcucccugcccuuccagaacgugcacccggugaccaucggggagugccccaaguacguccgcagcgccaagcugcggauggugaccggccuccgcaacauccccuccauccagagccgggggcuguucggcgccaucgccggguucaucgagggcggcuggaccgggaugguggacggcugguacggguaccaccaccagaacgagcagggcuccggguacgccgcggaccagaaguccacccagaacgccaucaacggcaucaccaacaaggucaacagcgugaucgagaagaugaacacccaguucacggccgucggcaaggaguucaacaagcuggagcgccggauggagaaccucaacaagaagguggacgacggguucaucgacaucuggaccuacaacgccgagcugcuggugcuccuggagaacgagcgcacccuggacuuccacgacagcaacgucaagaaccucuacgagaaggugaagucccagcugaagaacaacgccaaggagaucggcaacgggugcuucgaguucuaccacaagugcaacgacgagugcauggagagcgugaagaacggcaccuacgacuaccccaaguacuccgaggagagcaagcugaaccgggagaagaucgacggggucaagcucgaguccaugggcguguaccagauccuggcgaucuacagcacgguggccagcucccugguccuccuggugagccugggcgccaucuccuucuggaugugcagcaacgggucccuccagugccgcaucugcaucuga

SEQ ID NO: 70425 - RNA, 1698 nt, Artificial Sequence; identical to SEQ ID NO: 67640
  derived and/or modified CDS sequence (opt1) from hemagglutinin__InfluenzaA__ADW09296

SEQ ID NO: 70426 - RNA, 1698 nt, Artificial Sequence; identical to SEQ ID NO: 67155
  derived and/or modified CDS sequence (opt1) from hemagglutinin__InfluenzaA__ADW09307

SEQ ID NO: 70427 - RNA, 1698 nt, Artificial Sequence
  derived and/or modified CDS sequence (opt1) from hemagglutinin__InfluenzaA__ADW09327
augaaggugaagcugcucguccugcugugcaccuucaccgccacguacgccgacaccaucugcaucggcuaccacgcgaacaacagcaccgacaccguggacacggugcucgagaagaacgucaccgugacccacuccgugaaccugcuggagaacagccacaacgggaagcucugccugcugaagggcaucgcgccccuccagcuggggaacugcuccgucgccggcuggauccuggggaacccggagugcgagcuccugaucagcaaggaguccuggagcuacaucguggagaagcccaaccccgagaacgggaccugcuaccccggccacuucgccgacuacgaggagcugcgcgagcagcucuccagcguguccagcuucgagcgguucgagaucuucccgaaggaguccagcuggcccaaccacacggucaccgggguguccgccagcugcucccacaacggcgagagcuccuucuaccgcaaccugcuguggcucaccgggaagaacggccuguaccccaaccugagcaaguccuacgccaacaacaaggagaaggaggugcucguccuguggggcgugcaccacccgcccaacaucguggaccagaagacccuguaccggacggagaacgccuacgucagcguggugagcucccacuacagccgcaaguucacccccgagaucgccaagcggcccaagguccgcgaccaggagggccggaucaacuacuacuggacccuccuggagcccggcgacaccaucaucuucgaggccaacgggaaccugaucgcgccgcgcuacgccuucgcccucucccggggcuucgggagcggcaucaucaacuccaacgcccccauggacaagugcgacgccaagugccagacgccccagggcgcgaucaacagcucccugcccuuccagaacgugcacccggugaccaucggggagugccccaaguacguccgcagcgccaagcugcggauggugaccggccuccgcaacauccccuccauccagagccgggggcuguucggcgccaucgccggguucaucgagggcggcuggaccgggaugguggacggcugguacggguaccaccaccagaacgagcagggcuccggguacgccgcggaccagaaguccacgcagaacgccaucaacggcaucaccaacaaggucaacagcgugaucgagaagaugaacacccaguucaccgccgucggcaaggaguucaacaagcuggagcgccggauggagaaccucaacaagaagguggacgacggguucaucgacaucuggacguacaacgccgagcugcuggugcuccuggagaacgagcgcacccuggacuuccacgacagcaacgucaagaaccucuacgagaaggugaagucccagcugaagaacaacgccaaggagaucggcaacgggugcuucgaguucuaccacaagugcaacaacgagugcauggagagcgugaagaacggcaccuacgacuaccccaaguacuccgaggagagcaagcugaaccgggagaagaucgacggggucaagcucgaguccaugggcguguaccagauccuggcgaucuacagcaccguggccagcucccugguccuccuggugagccugggcgccaucuccuucuggaugugcagcaacgggucccuccagugccgcaucugcaucuga

SEQ ID NO: 70428 - RNA, 1698 nt, Artificial Sequence; identical to SEQ ID NO: 67640
  derived and/or modified CDS sequence (opt1) from hemagglutinin__InfluenzaA__ADW10483

SEQ ID NO: 70429 - RNA, 1698 nt, Artificial Sequence
  derived and/or modified CDS sequence (opt1) from hemagglutinin__InfluenzaA__ADW10494
augaaggugaagcugcucguccugcugugcaccuucaccgccacguacgccgacaccaucugcaucggcuaccacgcgaacaacagcaccgacaccguggacacggugcucgagaagaacgucaccgugacccacuccgugaaccugcuggagaacagccacaacgggaagcucugccugcugaagggcaucgcgccccuccagcuggggaacugcuccgucgccggcuggauccuggggaacccggagugcgagcuccugaucagcaaggaguccuggagcuacaucguggagaagcccaaccccgagaacgggaccugcuaccccggccacuucgccgacuacgaggagcugcgcgagcagcucuccagcguguccagcuucgagcgguucgagaucuucccgaaggaguccagcuggcccaaccacacggucaccgggguguccgccagcugcucccacaacggcgagagcuccuucuaccgcaaccugcuguggcucaccgggaagaacggccuguaccccaaccugagcaaguccuacgccaacaacaaggagaaggaggugcucguccuguggggcgugcaccacccgcccaacaucguggaccagaagacccuguaccggacggagaacgccuacgucagcguggugagcucccacuacagccgcaaguucacccccgagaucgccaagcggcccaagguccgcgaccaggagggccggaucaacuacuacuggacccuccuggagcccggcgacaccaucaucuucgaggccaacgggaaccugaucgcgccgcgcuacgccuucgcccucucccggggcuucgggagcggcaucaucaacuccaacgcccccauggacaagugcgacgccaagugccagacgccccagggcgcgaucaacagcucccugcccuuccagaacgugcacccggugaccaucggggagugccccaaguacguccgcagcgccaagcugcggauggugaccggccuccgcaacauccccuccauccagagccgggggcuguucggcgccaucgccggguucaucgagggcggcuggaccgggaugguggacggcugguacggguaccaccaccagaacgagcagggcuccggguacgccgcggaccagaaguccacgcagaacgccaucaacggcaucaccaacaaggucaacagcgugaucgagaagaugaacacccaguucaccgccgucggcaaggaguucaacaagcuggagcgccggauggagaaccucaacaagaagguggacgacggguucaucgacaucuggacguacaacgccgagcugcuggugcuccuggagaacgagcgcacccuggacuuccacgacagcaacgucaagaaccucuacgagaaggugaagaaccagcugaagaacaacgccaaggagaucggcaacgggugcuucgaguucuaccacaagugcaacgacgagugcauggaguccgugaagaacggcaccuacgacuaccccaaguacagcgaggaguccaagcugaaccgggagaagaucgacggggucaagcucgagagcaugggcguguaccagauccuggcgaucuacuccaccguggccagcagccugguccuccuggugucccugggcgccaucagcuucuggaugugcuccaacgggagccuccagugccgcaucugcaucuga

SEQ ID NO: 70430 - RNA, 1698 nt, Artificial Sequence; identical to SEQ ID NO: 67640
  derived and/or modified CDS sequence (opt1) from hemagglutinin__InfluenzaA__ADW10505

SEQ ID NO: 70431 - RNA, 1698 nt, Artificial Sequence; identical to SEQ ID NO: 67640
  derived and/or modified CDS sequence (opt1) from hemagglutinin__InfluenzaA__ADW10516

SEQ ID NO: 70432 - RNA, 1698 nt, Artificial Sequence
  derived and/or modified CDS sequence (opt1) from hemagglutinin__InfluenzaA__ADW10527
augaaggugaagcugcucguccugcugugcaccuucaccgccacguacgccgacaccaucugcaucggcuaccacgcgaacaacagcaccgacaccguggacacggugcucgagaagaacgucaccgugacccacuccgugaaccugcuggagaacagccacaacgggaagcucugccugcugaagggcaucgcgccccuccagcuggggaacugcuccgucgccggcuggauccuggggaacccggagugcgagcuccugaucagcaaggaguccuggagcuacaucguggagaagcccaaccccgagaacgggaccugcuaccccggccacuucgccgacuacgaggagcugcgcgagcagcucuccagcguguccagcuucgagcgguucgagaucuucccgaaggaguccagcuggcccaaccacacggucaccgggguguccgccagcugcucccacaacggcgagagcuccuucuaccgcaaccugcuguggcucaccgggaagaacggccuguaccccaaccugagcaaguccuacgccaacaacaaggagaaggaggugcucguccuguggggcgugcaccacccgcccaacaucguggaccagaagacccuguaccggacggagaacgccuacgucagcguggugagcucccacuacagccgcaaguucacccccgagaucgccaagcggcccaagguccgcgaccaggagggccggaucaacuacuacuggacccuccuggagcccggcgacaccaucaucuucgaggccaacgggaaccugaucgcgccgcgcuacgccuucgcccucucccggggcuucgggcugggcaucaucaacagcaacgcccccauggacaagugcgacgccaagugccagacgccccagggcgcgaucaacuccagccugcccuuccagaacgugcacccggugaccaucggggagugccccaaguacguccgcuccgccaagcuccggauggugaccggccugcgcaacauccccagcauccagucccgggggcuguucggcgccaucgccggguucaucgagggcggcuggaccgggaugguggacggcugguacggguaccaccaccagaacgagcagggcagcggguacgccgcggaccagaaguccacgcagaacgccaucaacggcaucaccaacaaggucaacagcgugaucgagaagaugaacacccaguucaccgccgucggcaaggaguucaacaagcucgagcgccggauggagaaccugaacaagaagguggacgacggguucaucgacaucuggacguacaacgccgagcugcucgugcugcuggagaacgagcgcacccucgacuuccacgacuccaacgucaagaaccuguacgagaaggucaagagccagcugaagaacaacgccaaggagaucggcaacgggugcuucgaguucuaccacaagugcaacgacgagugcauggaguccgugaagaacggcaccuacgacuaccccaaguacagcgaggaguccaagcucaaccgggagaagaucgacggggugaagcuggagagcaugggcguguaccagauccuggcgaucuacuccaccguggccagcagccucguccugcuggugucccucggcgccaucagcuucuggaugugcuccaacgggagccugcagugccgcaucugcaucuga

SEQ ID NO: 70433 - RNA, 1698 nt, Artificial Sequence
  derived and/or modified CDS sequence (opt1) from hemagglutinin__InfluenzaA__ADW10538
augaaggugaagcugcucguccugcugugcaccuucaccgccacguacgccgacaccaucugcaucggcuaccacgcgaacaacagcaccgacaccguggacacggugcucgagaagaacgucaccgugacccacuccgugaaccugcuggagaacagccacaacgggaagcucugccugcugaagggcaucgcgccccuccagcuggggaacugcuccgucgccggcuggauccuggggaacccggagugcgagcuccugaucagcaaggaguccuggagcuacaucguggagaagcccaaccccgagaacgggaccugcuaccccggccacuucgccgacuacgaggagcugcgcgagcagcucuccagcguguccagcuucgagcgguucgagaucuucccgaaggaguccagcuggcccaaccacacggucaccgggguguccgccagcugcucccacaacggcgagagcuccuucuaccgcaaccugcuguggcucaccgggaagaacggccuguaccccaaccugagcaaguccuacgccaacaacaaggagaaggaggugcucguccuguggggcgugcaccacccgcccaacaucguggaccagaagacccuguaccggacggagaacgccuacgucagcgugaugagcucccacuacagccgcaaguucacccccgagaucgccaagcggcccaaggugcgcgaccaggagggccggaucaacuacuacuggacccuccuggagcccggcgacaccaucaucuucgaggccaacgggaaccugaucgcgccgcgcuacgccuucgcccucucccggggcuucgggagcggcaucaucaacuccaacgcccccauggacaagugcgacgccaagugccagacgccccagggcgcgaucaacagcucccugcccuuccagaacguccacccggugaccaucggggagugccccaaguacgugcgcagcgccaagcugcggauggucaccggccuccgcaacauccccuccauccagagccgggggcuguucggcgccaucgccggguucaucgagggcggcuggaccgggaugguggacggcugguacggguaccaccaccagaacgagcagggcuccggguacgccgcggaccagaaguccacgcagaacgccaucaacggcaucaccaacaaggugaacagcgucaucgagaagaugaacacccaguucaccgccgugggcaaggaguucaacaagcuggagcgccggauggagaaccucaacaagaaggucgacgacggguucaucgacaucuggacguacaacgccgagcugcuggugcuccuggagaacgagcgcacccuggacuuccacgacagcaacgugaagaaccucuacgagaaggucaagucccagcugaagaacaacgccaaggagaucggcaacgggugcuucgaguucuaccacaagugcaacgacgagugcauggagagcgugaagaacggcaccuacgacuaccccaaguacuccgaggagagcaagcugaaccgggagaagaucgacggggugaagcucgaguccaugggcgucuaccagauccuggcgaucuacagcaccguggccagcucccuggugcuccuggucagccugggcgccaucuccuucuggaugugcagcaacgggucccuccagugccgcaucugcaucuga

SEQ ID NO: 70434 - RNA, 1698 nt, Artificial Sequence; identical to SEQ ID NO: 67640
  derived and/or modified CDS sequence (opt1) from hemagglutinin__InfluenzaA__ADW10549

SEQ ID NO: 70435 - RNA, 1698 nt, Artificial Sequence
  derived and/or modified CDS sequence (opt1) from hemagglutinin__InfluenzaA__ADW10560
augaaggugaagcugcucguccugcugugcaccuucaccgccacguacgccgacaccaucugcaucggcuaccacgcgaacaacagcaccgacaccguggacacgguguucgagaagaacgucaccgugacccacuccgugaaccuccuggagaacagccacaacgggaagcugugccuccugaagggcaucgcgccccugcagcucgggaacugcuccgucgccggcuggauccuggggaacccggagugcgagcugcucaucagcaaggaguccuggagcuacaucguggagaagcccaaccccgagaacgggaccugcuaccccggccacuucgccgacuacgaggagcugcgcgagcagcuguccagcguguccagcuucgagcgguucgagaucuucccgaaggaguccagcuggcccaaccacacggucaccgggguguccgccagcugcucccacaacggcgagcgcagcuucuaccggaaccuccuguggcugaccgggaagaacggccucuaccccaaccuguccaagagcuacgccaacaacaaggagaaggaggugcugguccucuggggcgugcaccacccgcccgacaucggcgaccagaagacccuguaccacacggagaacgccuacguguccgucgugagcagccacuacucccgcaaguucacccccgagaucgccaagcggcccaaggugcgcgaccaggagggccggaucaacuacuacuggacccugcucgagcccggggacaccaucaucuucgaggccaacggcaaccugaucgcgccgcgcuacgccuucgcccugagccggggguucggcuccggcaucaucaacagcaacgcccccauggacaagugcgacgccaagugccagacgccccagggggcgaucaacuccagccuccccuuccagaacguccacccggugaccaucggcgagugccccaaguacgugcgcuccgccaagcugcggauggucaccgggcugcgcaacauccccagcauccagucccggggccucuucggggccaucgccggcuucaucgagggcggguggaccggcaugguggacgggugguacggcuaccaccaccagaacgagcaggggagcggcuacgccgcggaccagaaguccacgcagaacgccaucaacggcaucaccaacaaggugaacagcgucaucgagaagaugaacacccaguucaccgccguggggaaggaguucaacaagcuggagcgccggauggagaaccugaacaagaaggucgacgacggcuucaucgacaucuggacguacaacgccgagcuccuggugcugcucgagaacgagcgcacccuggacuuccacgacuccaacgugaagaaccuguacgagaaggucaagagccagcucaagaacaacgccaaggagaucgggaacggcugcuucgaguucuaccacaagugcaacgacgagugcauggaguccgugaagaacgggaccuacgacuaccccaaguacagcgaggaguccaagcugaaccgggagaagaucgacggcgugaagcuggagagcaugggcgucuaccagauccucgcgaucuacuccaccguggccagcagccuggugcugcucgucucccugggggccaucagcuucuggaugugcuccaacggcagccugcagugccgcaucugcaucuga

SEQ ID NO: 70436 - RNA, 1698 nt, Artificial Sequence; identical to SEQ ID NO: 69977
  derived and/or modified CDS sequence (opt1) from hemagglutinin__InfluenzaA__ADW10571

SEQ ID NO: 70437 - RNA, 1698 nt, Artificial Sequence; identical to SEQ ID NO: 67155
  derived and/or modified CDS sequence (opt1) from hemagglutinin__InfluenzaA__ADW10582

SEQ ID NO: 70438 - RNA, 1698 nt, Artificial Sequence; identical to SEQ ID NO: 67640
  derived and/or modified CDS sequence (opt1) from hemagglutinin__InfluenzaA__ADW10593

SEQ ID NO: 70439 - RNA, 1698 nt, Artificial Sequence; identical to SEQ ID NO: 67640
  derived and/or modified CDS sequence (opt1) from hemagglutinin__InfluenzaA__ADW10604

SEQ ID NO: 70440 - RNA, 1698 nt, Artificial Sequence; identical to SEQ ID NO: 67640
  derived and/or modified CDS sequence (opt1) from hemagglutinin__InfluenzaA__ADW10615

SEQ ID NO: 70441 - RNA, 1698 nt, Artificial Sequence
  derived and/or modified CDS sequence (opt1) from hemagglutinin__InfluenzaA__ADW10626
augaaggugaagcugcucguccugcugugcaccuucaccgccacguacgccgacaccaucugcaucggcuaccacgcgaacaacagcaccgacaccguggacacggugcucgagaagaacgucaccgugacccacuccgugaaccugcuggagaacagccacaacgggaagcucugccugcugaagggcaucgcgccccuccagcuggggaacugcuccgucgccggcuggauccuggggaacccggagugcgagcuccugaucagcaaggaguccuggagcuacaucguggagaagcccaaccccgagaacgggaccugcuaccccggccacuucgccgacuacgaggagcugcgcgagcagcucuccagcguguccagcuucgagcgguucgagaucuucccgaaggaguccagcuggcccaaccacacggucaccgggguguccgccagcugcucccacaacggcgagagcuccuucuaccgcaaccugcuguggcucaccgugaagaacgggcuguaccccaaccugagcaaguccuacgccaacaacaaggagaaggagguccucgugcuguggggcgugcaccacccgcccagcaucgucgaccagaagacccuguaccggacggagaacgccuacgugagcguggucuccagccacuacucccgcaaguucacccccgagaucgccaagcggcccaaggugcgcgaccaggaggggcggaucaacuacuacuggacccuccuggagcccggcgacaccaucaucuucgaggccaacggcaaccugaucgcgccgcgcuacgccuucgcccucagccggggguucggcuccgggaucaucaacagcaacgcccccauggacaagugcgacgccaagugccagacgccccgcggcgcgaucaacuccagccugcccuuccagaacgugcacccggucaccaucggcgagugccccaaguacgugcgguccgccaagcugcgcauggugaccgggcuccggaacauccccagcauccagucccgcggccuguucggggccaucgccggcuucaucgagggcggcuggaccggcauggucgacgggugguacggcuaccaccaccagaacgagcaggggagcggcuacgccgcggaccagaaguccacgcagaacgccaucaacgggaucaccaacaaggugaacagcgucaucgagaagaugaacacccaguucaccgccgugggcaaggaguucaacaagcuggagcggcgcauggagaaccucaacaagaagguggacgacggcuucaucgacaucuggacguacaacgccgagcugcugguccuccuggagaacgagcggacccuggacuuccacgacuccaacgugaagaaccucuacgagaaggucaagagccagcugaagaacaacgccaaggagaucgggaacggcugcuucgaguucuaccacaagugcaacgacgagugcauggaguccgugaagaacgggaccuacgacuaccccaaguacagcgaggaguccaagcugaaccgcgagaagaucgacggcgugaagcucgagagcauggggguguaccagauccuggcgaucuacagcaccgucgccuccagccuggugcuccuggugucccugggcgccaucagcuucuggaugugcuccaacggcagccuccagugccggaucugcaucuga

SEQ ID NO: 70442 - RNA, 1698 nt, Artificial Sequence
  derived and/or modified CDS sequence (opt1) from hemagglutinin__InfluenzaA__ADW10721
augaaggugaagcugcucguccugcugugcaccuucaccgccacguacgccgacaccaucugcaucggcuaccacgcgaacaacagcaccgacaccguggacacggugcucgagaagaacgucaccgugacccacuccgugaaccugcuggagaacagccacaacgggaagcucugccugcugaagggcaucgcgccccuccagcuggggaacugcuccgucgccggcuggauccuggggaacccggagugcgagcuccugaucagcaaggaguccuggagcuacaucguggagaagcccaaccccgagaacgggaccugcuaccccggccacuucgccgacuacgaggagcugcgcgagcagcucuccagcguguccagcuucaagcgguucgagaucuucccgaaggaguccagcuggcccaaccacacggucaccgggguguccgccagcugcucccacaacggcgagagcuccuucuaccgcaaccugcuguggcucaccgugaagaacgggcuguaccccaaccugagcaaguccuacgccaacaacaaggagaaggagguccucgugcuguggggcgugcaccacccgcccaacaucgucgaccagcggacccuguaccacacggagaacgccuacgugagcguggucagcucccacuacagccgcaaguucacccccgagaucgccaagcggcccaaggugcgcaaccaggaggggcggaucaacuacuacuggacccuccuggagcccggcgacaccaucaucuucgaggccaacggcaaccugaucgcgccgcgcuacgccuucgcccucucccggggguucggcagcgggaucaucaacuccaacgcccccauggacaagugcgacgccaagugccagacgccccgcggcgcgaucaacagcucccugcccuuccagaacgugcacccggucaccaucggcgagugccccaaguacgugcggagcgccaagcugcgcauggugaccgggcuccggaacauccccuccauccagagccgcggccuguucggggccaucgccggcuucaucgagggcggcuggaccggcauggucgacgggugguacggcuaccaccaccagaacgagcagggguccggcuacgccgcggaccagaaguccacgcagaacgccaucaacgggaucaccaacaaggugaacagcgucaucgagaagaugaacacccaguucaccgccgugggcaaggaguucaacaagcuggagcggcgcauggagaaccucaacaagaagguggacgacggcuucaucgacaucuggacguacaacgccgagcugcugguccuccuggagaacgagcggacccuggacuuccacgacagcaacgugaagaaccucuacgagaaggugaagucccagcugaagaacaacgccaaggagaucgggaacggcugcuucgaguucuaccacaagugcaacgacgagugcauggagagcgucaagaacgggaccuacgacuaccccaaguacuccgaggagagcaagcugaaccgcgagaagaucgacggcgugaagcucgaguccauggggguguaccagauccuggcgaucuacagcaccgucgccagcucccuggugcuccuggugagccugggcgccaucuccuucuggaugugcagcaacggcucccuccagugccggaucugcaucuga

SEQ ID NO: 70443 - RNA, 1698 nt, Artificial Sequence
  derived and/or modified CDS sequence (opt1) from hemagglutinin__InfluenzaA__ADW10743
augaaggugaagcugcucguccugcugugcaccuucaccgccacguacgccgacaccaucugcaucggcuaccacgcgaacaacagcaccgacaccguggacacggugcucgagaagaacgucaccgugacccacuccgugaaccugcuggagaacagccacaacgggaagcucugccugcugaagggcaucgcgccccuccagcuggggaacugcuccgucgccggcuggauccuggggaacccggagugcgagcuccugaucagcaaggaguccuggagcuacaucguggagaagcccaaccccgagaacgggaccugcuaccccggccacuucgccgacuacgaggagcugcgcgagcagcucuccagcguguccagcuucgagcgguucgagaucuucccgaaggaguccagcuggcccaaccacacggucaccgggguguccgccagcugcucccacaacggcgagagcuccuucuaccgcaaccugcuguggcucaccgugaagaacgggcuguaccccaaccugagcaaguccuacgccaacaacaaggagaaggagguccucgugcuguggggcgugcaccacccgcccaacaucgucgaccagaagacccuguaccggacggagaacaccuacgugagcguggucagcucccacuacagccgcaaguucacccccgagaucgccaagcggcccaagauccgcgaccaggaggggcggaucaacuacuacuggacccuccuggagcccggcgacacgaucaucuucgaggccaacggcaaccugaucgccccgcgcuacgcguucgcccucucccggggguucggcagcgggaucaucaacuccaacgcccccauggacaagugcgacgccaagugccagacgccccgcggcgccaucaacagcucccugcccuuccagaacgugcacccggugaccaucggcgagugccccaaguacguccggagcgugaagcugcgcauggugaccgggcuccggaacauccccuccauccagagccgcggccuguucggggcgaucgccggcuucaucgagggcggcuggaccggcauggucgacgggugguacggcuaccaccaccagaacgagcagggguccggcuacgccgccgaccagaaguccacccagaacgccaucaacgggaucaccaacaaggugaacagcgucaucgagaagaugaacacccaguucacggcggugggcaaggaguucaacaagcuggagcggcgcauggagaaccucaacaagaagguggacgacggcuucaucgacaucuggaccuacaacgccgagcugcugguccuccuggagaacgagcggacccuggacuuccacgacagcaacgugaagaaccucuacgagaaggugaagucccagcugaagaacaacgccaaggagaucgggaacggcugcuucgaguucuaccacaagugcaacgacgagugcauggagagcgucaagaacgggaccuacgacuaccccaaguacuccgaggagagcaagcugaaccgcgagaagaucgacggcgugaagcucgaguccauggggguguaccagauccuggccaucuacagcacggucgccagcucccuggugcuccuggugagccugggcgcgaucuccuucuggaugugcagcaacggcucccuccagugccggaucugcaucuga

SEQ ID NO: 70444 - RNA, 1698 nt, Artificial Sequence
  derived and/or modified CDS sequence (opt1) from hemagglutinin__InfluenzaA__ADW10754
augaaggugaagcugcucguccugcugugcaccuucaccgccacguacgccgacaccaucugcaucggcuaccacgcgaacaacagcaccgacaccguggacacggugcucgagaagaacgucaccgugacccacuccgugaaccugcuggagaacagccacaacgggaagcucugccugcugaagggcaucgcgccccuccagcuggggaacugcuccgucgccggcuggauccuggggaacccggagugcgagcuccugaucagcaaggaguccuggagcuacaucguggagaagcccaaccccgagaacgggaccugcuaccccggccacuucgccgacuacgaggagcugcgcgagcagcucuccagcguguccagcuucgagcgguucgagaucuucccgaaggaguccagcuggcccaaccacacggucaccgggguguccgccagcugcucccacaacggcgagaacagcuucuaccgcaaccugcuguggcucaccgggaagaacggccuguaccccaaccuguccaagagcuacgccaacaacaaggagaaggaggugcucguccuguggggcgugcaccacccgcccaacaucgccgaccagaagacccuguaccacacggagaacgccuacguguccgucgugagcagccacuacucccggaaguucacccccgagaucgccaagcgccccaaggugcgggaccaggagggccgcaucaacuacuacuggacccuccuggagcccggcgacaccaucaucuucgaggcgaacgggaaccugaucgccccgcgguacgccuucgcccucagccgcggcuucggguccggcaucaucaacagcaacgcccccauggacaagugcgacgcgaagugccagacgccccagggcgccaucaacuccagccugcccuuccagaacguccacccggugaccaucggggagugccccaaguacgugcgguccgccaagcugcgcauggucaccggccuccggaacauccccagcgugcagucccgcgggcuguucggcgccaucgccggguucaucgagggcggcuggaccgggaugguggacggcugguacggguaccaccaccagaacgagcagggcagcggguacgcggccgaccagaaguccacgcagaacgccaucaacggcaucaccaacaaggucaacagcgugaucgagaagaugaacacccaguucaccgccgucggcaaggaguucaacaagcuggagcggcgcauggagaaccucaacaagaagguggacgacggguucaucgacaucuggacguacaacgccgagcugcuggugcuccuggagaacgagcggacccuggacuuccacgacuccaacgucaagaaccucuacgagaaggucaagagccagcugaagaacaacgcgaaggagaucggcaacgggugcuucgaguucuaccacaagugcaacgacgagugcauggaguccgugaagaacggcaccuacgacuaccccaaguacagcgaggaguccaagcugaaccgcgagaagaucgacggggugaagcucgagagcaugggcguguaccagauccuggccaucuacuccaccguggccagcagccugguccuccuggugucccugggcgccaucagcuucuggaugugcuccaacgggagccuccagugccggaucugcaucuga

SEQ ID NO: 70445 - RNA, 1698 nt, Artificial Sequence
  derived and/or modified CDS sequence (opt1) from hemagglutinin__InfluenzaA__ADW10765
augaaggugaagcugcucguccugcugugcaccuucaccgccacguacgccgacaccaucugcaucggcuaccacgcgaacaacagcaccgacaccguggacacggugcucgagaagaacgucaccgugacccacuccgugaaccugcuggagaacagccacaacgggaagcucugccugcugaagggcaucgcgccccuccagcuggggaacugcuccgucgccggcuggauccuggggaacccggagugcgagcuccugaucagcaaggaguccuggagcuacaucguggagaagcccaaccccgagaacgggaccugcuaccccggccacuucgccgacuacgaggagcugcgcgagcagcucuccagcguguccagcuucgagcgguucgagaucuucccgaaggaguccagcuggcccaaccacacggucaccgggguguccgccagcugcucccacaacggcgagagcuccuucuaccgcaaccugcuguggcucaccgugaagaacgggcuguaccccaaccugagcaaguccuacgccaacaacaaggagaaggagguccucgugcuguggggcgugcaccacccgcccaacaucgucgaccagaagacccuguaccacacggagaacgccuacgugagcguggucagcucccacuacagccggaaguucacccccgagaucgccaagcgccccaaggugcggaaccaggaggggcgcaucaacuacuacuggacccuccuggagcccggcgacaccaucaucuucgaggccaacggcaaccugaucgcgccgcgguacgccuucgcccucucccgcggguucggcagcgggaucaucaacuccaacgcccccauggacaagugcgacgccaagugccagacgccccggggcgcgaucaacagcucccugcccuuccagaacgugcacccggucaccaucggcgagugccccaaguacgugcgcagcgccaagcugcggauggugaccgggcuccgcaacauccccuccauccagagccggggccuguucggggccaucgccggcuucaucgagggcggcuggaccggcauggucgacgggugguacggcuaccaccaccagaacgagcagggguccggcuacgccgcggaccagaaguccacgcagaacgccaucaacgggaucaccaacaaggugaacagcgucaucgagaagaugaacacccaguucaccgccgugggcaaggaguucaacaagcuggagcgccggauggagaaccucaacaagaagguggacgacggcuucaucgacaucuggacguacaacgccgagcugcugguccuccuggagaacgagcgcacccuggacuuccacgacagcaacgugaagaaccucuacgagaaggugaagucccagcugaagaacaacgccaaggagaucgggaacggcugcuucgaguucuaccacaagugcaacgacgagugcauggagagcgucaagaacgggaccuacgacuaccccaaguacuccgaggagagcaagcugaaccgggagaagaucgacggcgugaagcucgaguccauggggguguaccagauccuggcgaucuacagcaccgucgccagcucccuggugcuccuggugagccugggcgccaucuccuucuggaugugcagcaacggcucccuccagugccgcaucugcaucuga

SEQ ID NO: 70446 - RNA, 1698 nt, Artificial Sequence
  derived and/or modified CDS sequence (opt1) from hemagglutinin__InfluenzaA__ADW10776
augaaggugaagcugcucguccugcugugcaccuucaccgccacguacgccgacaccaucugcaucggcuaccacgcgaacaacagcaccgacaccguggacacggugcucgagaagaacgucaccgugacccacuccgugaaccugcuggagaacagccacaacgggaagcucugccugcugaagggcaucgcgccccuccagcuggggaacugcuccgucgccggcuggauccuggggaacccggagugcgagcuccugaucagcaaggaguccuggagcuacaucguggagaagcccaaccccgagaacgggaccugcuaccccggccacuucgccgacuacgaggagcugcgcgagcagcucuccagcguguccagcuucgagcgguucgagaucuucccgaaggaguccagcuggcccaaccacacggucaccgggguguccgccagcugcucccacaacggcgagagcuccuucuaccgcaaccugcuguggcucaccgggaagaacggccuguaccccaaccugagcaaguccuacgccaacgacaaggagaaggaggugcucguccuguggggcgugcaccacccgcccaacaucguggaccagaagacccuguaccggacggagaacgccuacgucagcguggugagcucccacuacagccgcaaguucacccccgagaucgccaagcggcccaagguccgcgaccaggagggccggaucaacuacuacuggacccuccuggagcccggcgacaccaucaucuucgaggccaacgggaaccugaucgcgccgcgcuacgccuucgcccucucccggggcuucgggagcggcaucaucaacuccaacgcccccauggacaagugcgacgccaagugccagacgccccagggcgcgaucaacagcucccugcccuuccagaacgugcacccggugaccaucggggagugccccaaguacguccgcagcgccaagcugcggauggugaccggccuccgcaacauccccuccauccagagccgggggcuguucggcgccaucgccggguucaucgagggcggcuggaccgggaugguggacggcugguacggguaccaccaccagaacgagcagggcuccggguacgccgcggaccagaaguccacgcagaacgccaucaacggcaucaccaacaaggucaacagcgugaucgagaagaugaacacccaguucaccgccgucggcaaggaguucaacaagcuggagcgccggauggagaaccucaacaagaagguggacgacggguucaucgacaucuggacguacaacgccgagcugcuggugcuccuggagaacgagcgcacccuggacuuccacgacagcaacgucaagaaccucuacgagaaggugaagucccagcugaagaacaacgccaaggagaucggcaacgggugcuucgaguucuaccacaagugcaacgacgagugcauggagagcgugaagaacggcaccuacgacuaccccaaguacuccgaggagagcaagcugaaccgggagaagaucgacggggucaagcucgaguccaugggcguguaccagauccuggcgaucuacagcaccguggccagcucccugguccuccuggugagccugggcgccaucuccuucuggaugugcagcaacgggucccuccagugccgcaucugcaucuga

SEQ ID NO: 70447 - RNA, 1698 nt, Artificial Sequence
  derived and/or modified CDS sequence (opt1) from hemagglutinin__InfluenzaA__ADW10787
augaaggugaagauccugguccuccugugcaccuucaccgccacguacgccgacaccaucugcaucggcuaccacgcgaacaacagcaccgacaccguggacacggugcuggagaagaacgucaccgugacccacuccgugaaccuccuggagaacagccacaacgggaagcugugccuccugaagggcaucgcgccccugcagcucgggaacugcuccgucgccggcuggauccuggggaacccggagugcgagcugcucaucagcaaggaguccuggagcuacaucguggagaagcccaaccccgagaacgggaccugcuaccccggccacuucgccgacuacgaggagcugcgcgagcagcuguccagcguguccagcuucgagcgguucgagaucuucccgaaggaguccagcuggcccaaccacacggucaccgggguguccgccagcugcucccacaacggcgagagcuccuucuaccgcaaccuccuguggcugaccgugaagaacgggcucuaccccaaccugagcaaguccuacgccaacaacaaggagaaggagguccuggugcucuggggcgugcaccacccgcccaacaucgucgaccagaagacccuguaccggacggagaacgccuacgugagcguggucagcucccacuacagccgcaaguucacccccgagaucgccaagcggcccaaggugcgcgaccaggaggggcggaucaacuacuacuggacccugcucgagcccggcgacaccaucaucuucgaggccaacggcaaccugaucgcgccgcgcuacgccuucgcccugucccggggguucggcagcgggaucaucaacuccaacgcccccauggacaagugcgacgccaagugccagacgccccgcggcgcgaucaacagcucccuccccuuccagaacgugcacccggucaccaucggcgagugccccaaguacgugcggagcgccaagcugcgcauggugaccgggcugcggaacauccccuccauccagagccgcggccucuucggggccaucgccggcuucaucgagggcggcuggaccggcauggucgacgggugguacggcuaccaccaccagaacgagcagggguccggcuacgccgcggaccagaaguccacgcagaacgccaucaacgggaucaccaacaaggugaacagcgucaucgagaagaugaacacccaguucaccgccgugggcaaggaguucaacaagcuggagcggcgcauggagaaccugaacaagaagguggacgacggcuucaucgacaucuggacguacaacgccgagcuccugguccugcucgagaacgagcggacccuggacuuccacgacagcaacgugaagaaccuguacgagaaggugaagucccagcucaagaacaacgccaaggagaucgggaacggcugcuucgaguucuaccacaagugcaacgacgagugcauggagagcgucaagaacgggaccuacgacuaccccaaguacuccgaggagagcaagcugaaccgcgagaagaucgacggcgugaagcuggaguccauggggguguaccagauccucgcgaucuacagcaccgucgccagcucccuggugcugcucgugagccugggcgccaucuccuucuggaugugcagcaacggcucccugcagugccggaucugcaucuga

SEQ ID NO: 70448 - RNA, 1698 nt, Artificial Sequence
  derived and/or modified CDS sequence (opt1) from hemagglutinin__InfluenzaA__ADW10798
augaaggugaagcugcucguccugcugugcaccuucaccgccacguacgccgacaccaucugcaucggcuaccacgcgaacaacagcaccgacaccguggacacggugcucgagaagaacgucaccgugacccacuccgugaaccugcuggagaacagccacaacgggaagcucugccugcugaagggcaucgcgccccuccagcuggggaacugcuccgucgccggcuggauccuggggaacccggagugcgagcuccugaucagcaaggaguccuggagcuacaucguggagaagcccaaccccgagaacgggaccugcuaccccggccacuucgccgacuacgaggagcugcgcgagcagcucuccagcguguccagcuucgagcgguucgagaucuucccgaaggaguccagcuggcccaaccacacggucaccgggguguccgccagcugcucccacaacggcgagagcuccuucuaccgcaaccugcuguggcucaccgggaagaacggccuguaccccaaccugagcaaguccuacgccaacaacaaggagaaggaggugcucguccuguggggcgugcaccacccgcccaacaucguggaccagaagacccuguaccggacggagaacgccuacgucagcguggugagcucccacuacagccgcaaguucacccccgagaucgccaagcggcccaagguccgcgaccaggagggccggaucaacuacuacuggacccuccuggagcccggcgacaccaucaucuucgaggccaacgggaaccugaucgcgccgcgcuacgccuucgcccucucccggggcuucgggagcggcaucaucaacuccaacgcccccaugggcaagugcgacgccaagugccagacgccccagggggcgaucaacagcucccugcccuuccagaacgugcacccggugaccaucggcgagugccccaaguacguccgcagcgccaagcugcggauggugaccgggcuccgcaacauccccuccauccagagccggggccuguucggggccaucgccggcuucaucgagggcggguggaccggcaugguggacgggugguacggcuaccaccaccagaacgagcagggguccggcuacgccgcggaccagaaguccacgcagaacgccaucaacggcaucaccaacaaggucaacagcgugaucgagaagaugaacacccaguucaccgccgucgggaaggaguucaacaagcuggagcgccggguggagaaccucaacaagaagguggacgacggcuucaucgacaucuggacguacaacgccgagcugcugguccuccuggagaacgagcgcacccuggacuuccacgacagcaacgugaagaaccucuacgagaaggugaagucccagcugaagaacaacgccaaggagaucgggaacggcugcuucgaguucuaccacaagugcaacgacgagugcauggagagcgucaagaacgggaccuacgacuaccccaaguacuccgaggagagcaagcugaaccgggagaagaucgacggcgugaagcucgaguccaugggcguguaccagauccuggcgaucuacagcaccgucgccagcucccuggugcuccuggugagccugggggccaucuccuucuggaugugcagcaacggcucccuccagugccgcaucugcaucuga

SEQ ID NO: 70449 - RNA, 1698 nt, Artificial Sequence; identical to SEQ ID NO: 70445
  derived and/or modified CDS sequence (opt1) from hemagglutinin__InfluenzaA__ADW10809

SEQ ID NO: 70450 - RNA, 1698 nt, Artificial Sequence; identical to SEQ ID NO: 67640
  derived and/or modified CDS sequence (opt1) from hemagglutinin__InfluenzaA__ADW10820

SEQ ID NO: 70451 - RNA, 1698 nt, Artificial Sequence; identical to SEQ ID NO: 67155
  derived and/or modified CDS sequence (opt1) from hemagglutinin__InfluenzaA__ADW10831

SEQ ID NO: 70452 - RNA, 1698 nt, Artificial Sequence
  derived and/or modified CDS sequence (opt1) from hemagglutinin__InfluenzaA__ADW10842
augaaggugaagcugcucguccugcugugcaccuucaccgccacguacgccgacaccaucugcaucggcuaccacgcgaacaacagcaccgacaccguggacacggugcucgagaagaacgucaccgugacccacuccgugaaccugcuggagaacagccacaacgggaagcucugccugcugaagggcaucgcgccccuccagcuggggaacugcuccgucgccggcuggauccuggggaacccggagugcgagcuccugaucagcaaggaguccuggagcuacaucguggagaagcccaaccccgagaacgggaccugcuaccccggccacuucgccgacuacgaggagcugcgcgagcagcucuccagcguguccagcuucgagcgguucgagaucuucccgaaggaguccagcuggcccaaccacacggucaccgggguguccgccagcugcucccacaacggcgagagcuccuucuaccgcaaccugcuguggcucaccgugaagaacgggcuguaccccaaccugagcaaguccuacgccaacaacaaggagaaggagguccucgugcuguggggcgugcaccacccgcccaacaucgucgaccagaagacccuguaccggacggagaacgccuacgugagcguggucagcucccacuacagccgcaaguucgcccccgagaucgccaagcggcccaaggugcgcgaccaggaggggcggaucaacuacuacuggacccuccuggagcccggcgacaccaucaucuucgaggcgaacggcaaccugaucgccccgcgcuacgccuucgcccucucccggggguucggcagcgggaucaucaacuccaacgcccccauggacaagugcgacgcgaagugccagacgccccgcggcgccaucaacagcucccugcccuuccagaacgugcacccggucaccaucggcgagugccccaaguacgugcggagcgccaagcugcgcauggugaccgggcuccggaacauccccuccauccagagccgcggccuguucggggccaucgccggcuucaucgagggcggcuggaccggcauggucgacgggugguacggcuaccaccaccagaacgagcagggguccggcuacgcggccgaccagaaguccacccagaacgccaucaacgggaucacgaacaaggugaacagcgucaucgagaagaugaacacccaguucaccgccgugggcaaggaguucaacaagcuggagcggcgcauggagaaccucaacaagaagguggacgacggcuucaucgacaucuggaccuacaacgccgagcugcugguccuccuggagaacgagcggacgcuggacuuccacgacagcaacgugaagaaccucuacgagaaggugaagucccagcugaagaacaacgcgaaggagaucgggaacggcugcuucgaguucuaccacaagugcaacgacgagugcauggagagcgucaagaacgggaccuacgacuaccccaaguacuccgaggagagcaagcugaaccgcgagaagaucgacggcgugaagcucgaguccauggggguguaccagauccuggccaucuacagcaccgucgccagcucccuggugcuccuggugagccugggcgccaucuccuucuggaugugcagcaacggcucccuccagugccggaucugcaucuga

SEQ ID NO: 70453 - RNA, 1698 nt, Artificial Sequence; identical to SEQ ID NO: 69996
  derived and/or modified CDS sequence (opt1) from hemagglutinin__InfluenzaA__ADW10853

SEQ ID NO: 70454 - RNA, 1698 nt, Artificial Sequence; identical to SEQ ID NO: 70445
  derived and/or modified CDS sequence (opt1) from hemagglutinin__InfluenzaA__ADW10864

SEQ ID NO: 70455 - RNA, 1698 nt, Artificial Sequence; identical to SEQ ID NO: 70445
  derived and/or modified CDS sequence (opt1) from hemagglutinin__InfluenzaA__ADW10875

SEQ ID NO: 70456 - RNA, 1698 nt, Artificial Sequence; identical to SEQ ID NO: 67640
  derived and/or modified CDS sequence (opt1) from hemagglutinin__InfluenzaA__ADW10886

SEQ ID NO: 70457 - RNA, 1698 nt, Artificial Sequence
  derived and/or modified CDS sequence (opt1) from hemagglutinin__InfluenzaA__ADW10897
augaaggugaagcugcucguccugcugugcaccuucaccgccacguacgccgacaccaucugcaucggcuaccacgcgaacaacagcaccgacaccguggacacggugcucgagaagaacgucaccgugacccacuccgugaaccugcuggagaacagccacaacgggaagcucugccugcugaagggcaucgcgccccuccagcuggggaacugcuccgucgccggcuggauccuggggaacccggagugcgagcuccugaucagcaaggaguccuggagcuacaucguggagaagcccaaccccgagaacgggaccugcuaccccggccacuucgccgacuacgaggagcugcgcgagcagcucuccagcguguccagcuucgagcgguucgagaucuucccgaaggaguccagcuggcccaaccacacggucaccgggguguccgccagcugcucccacaacggcgagagcuccuucuaccgcaaccugcuguggcucaccgggaagaacggccuguaccccaaccugagcaaguccuacgccaacaacaaggagaaggaggugcucguccuguggggcgugcaccacccgcccagcaucagcgaccagaagacccuguaccacacggagaacgccuacguguccgucgugagcucccacuacagccggaaguucacccccgagaucgccaagcgccccaaggugcgggaccaggagggccgcaucaacuacuacuggacccuccuggagcccggcgacaccaucaucuucgaggccaacgggaaccugaucgcgccgcgguacgccuucgcccucucccgcggcuucgggagcggcaucaucaacuccaacgcccccauggacaagugcgacacgaagugccagacgccccagggcgccaucaacagcucccugcccuuccagaacguccacccggugaccaucggggagugccccaaguacgugcggagcgcgaagcugcgcauggucaccggccuccggaacauccccuccauccagagccgcgggcuguucggcgccaucgccggguucaucgagggcggcuggaccgggaugguggacggcugguacggguaccaccaccagaacgagcagggcuccggguacgccgccgaccagaaguccacccagaacgcgaucaacggcaucaccaacaaggugaacagcgucaucgagaagaugaacacccaguucacggccgugggcaaggaguucaacaagcuggagcggcgcauggagaaccucaacaagaaggucgacgacggguucaucgacaucuggaccuacaacgccgagcugcuggugcuccuggagaacgagcggacccuggacuuccacgacagcaacgugaagaaccucuacgagaaggucaagucccagcugaagaacaacgccaaggaggugggcaacgggugcuucgaguucuaccacaagugcaacgacgagugcauggagagcgugaagaacggcaccuacgacuaccccaaguacuccgaggagagcaagcugaaccgcgagaagaucgacggggucaagcucgagagcaugggcguguaccagauccuggccaucuacuccacgguggcgagcucccugguccuccuggugagccugggcgccaucuccuucuggaugugcagcaacgggucccuccagugccggaucugcaucuga

SEQ ID NO: 70458 - RNA, 1701 nt, Artificial Sequence
  derived and/or modified CDS sequence (opt1) from hemagglutinin__InfluenzaA__ADW23115
augaagaccaucaucgcccugagcuacauccucugccugguguucgcccagaagcugcccggcaacgggaacuccaccgcgacgcucugccugggccaccacgccgucccgaacgggaccaucgugaagaccaucaccaacgaccagaucgaggugacgaacgccaccgagcugguccagagcuccagcaccggcgagaucugcgacagcccccaccagauccucgacggggagaacugcacccugaucgacgcccugcucggcgacccccagugcgacggcuuccagaacaagaagugggaccuguucguggagcgcuccaaggccuacuccaacugcuaccccuacgacgugccggacuacgcgagccugcggucccucgucgccagcuccgggacgcuggaguucaacaacgagagcuucaacuggaccggcgugacccagaacgggaccuccagcgccugcauccgccgguccaacaacagcuucuucucccgccugaacuggcucacgcacagcaaguucaaguaccccgcccugaacgugaccaugcccaacaacgagcaguucgacaagcuguacaucuggggcguccaccaccccgggaccgacaacgaccagaucuuccucuacgcgcaggccuccggccggaucaccgugagcacgaagcgcagccagcagaccgugaucccgaacaucggcucccggccccgcguccggaacauccccagccgcaucuccaucuacuggaccaucgugaagcccggggacauccugcugaucaacagcaccggcaaccucaucgccccgcggggguacuucaagauccgcuccggcaagagcuccaucaugcggagcgacgcccccaucggcaagugcaacuccgagugcaucacgcccaacgggagcauccccaacgacaagccguuccagaacgugaaccgcaucaccuacggcgccugcccccgguacgucaagcagaacacccugaagcuggcgaccgggaugcgcaacgugcccgagaagcagacgcggggcaucuucggggccaucgccggcuucaucgagaacggcugggaggggaugguggacggcugguacggguuccgccaccagaacuccgagggccgggggcaggccgccgaccucaagagcacccaggcggccaucgaccagaucaacggcaagcugaaccgccugaucggcaagaccaacgagaaguuccaccagaucgagaaggaguucuccgaggucgaggggcggauccaggaccucgagaaguacguggaggacaccaagaucgaccuguggagcuacaacgccgagcugcucguggcccuggagaaccagcacacgaucgaccugaccgacuccgagaugaacaagcuguucgagaagaccaagaagcagcuccgcgagaacgccgaggacaugggcaacgggugcuucaagaucuaccacaagugcgacaacgcgugcaucggcagcauccgcaacgggaccuacgaccacgacgucuaccgggacgaggcccugaacaaccgcuuccagaucaagggcguggagcucaaguccggcuacaaggacuggauccuguggaucagcuucgccaucuccugcuuccugcucugcguggcccugcugggguucaucaugugggccugccagaagggcaacauccggugcaacaucugcaucuga

SEQ ID NO: 70459 - RNA, 1701 nt, Artificial Sequence
  derived and/or modified CDS sequence (opt1) from hemagglutinin__InfluenzaA__ADW54481
augaaggccauccuggugguccuccuguacaccuucgccaccgcgaacgccgacacgcugugcaucggcuaccacgccaacaacagcaccgacaccguggacaccgugcucgagaagaacgucacggugacccacuccgugaaccugcuggaggacaagcacaacgggaagcucugcaagcugcgcggcgucgcgccccugcaccucgggaagugcaacaucgccggcuggauccuggggaacccggagugcgagagccuguccaccgccagcuccuggagcuacaucguggagaccuccagcuccgacaacggcacgugcuaccccggcgacuucaucgacuacgaggagcuccgggagcagcugagcuccgugagcuccuucgagcgcuucgagaucuuccccaagaccagcuccuggcccaaccacgacagcaacaagggggucaccgccgccugcccgcacgccggcgcgaaguccuucuacaagaaccugaucuggcucgugaagaaggggaacagcuaccccaagcuguccaagagcuacaucaacgacaagggcaaggaggugcugguccucugggggauccaccaccccagcaccacggccgaccagcagucccuguaccagaacgccgacaccuacguguucgugggcaccagccgguacuccaagaaguucaagcccgagaucgccauccgcccgaagguccgggaccaggagggccgcaugaacuacuacuggacccugguggagcccggggacaagaucacguucgaggccaccggcaaccucguggucccccgguacgcguucgccauggagcgcaacgccgggagcggcaucaucaucuccgacacccccgugcacgacugcaacaccacgugccagaccccgaagggcgccaucaacaccagccugcccuuccagaacauccaccccaucaccaucgggaagugccccaaguacgugaaguccacgaagcugcggcucgccaccggccugcgcaacgucccgagcauccagucccgggggcuguucggcgcgaucgccggguucaucgagggcggcuggaccgggaugguggacggcugguacggguaccaccaccagaacgagcagggcagcggguacgccgccgaccucaaguccacccagaacgccaucgacaagaucacgaacaaggugaacagcgucaucgagaagaugaacacccaguucaccgcggugggcaaggaguucaaccaccuggagaagcgcaucgagaaccugaacaagaaggucgacgacggcuuccucgacaucuggaccuacaacgccgagcugcuggugcuccuggagaacgagcggacgcuggacuaccacgacuccaacgugaagaaccucuacgagaagguccgcaaccagcugaagaacaacgccaaggagaucgggaacggcugcuucgaguucuaccacaagugcgacaacacgugcauggagagcgugaagaacgggaccuacgacuaccccaaguacuccgaggaggccaagcugaaccgggaggagaucgacggcgugaagcucgagagcacccgcaucuaccagauccuggccaucuacuccaccgucgcgagcucccuggugcucguggucagccugggggccaucagcuucuggaugugcuccaacggcagccugcagugccggaucugcaucuga

SEQ ID NO: 70460 - RNA, 1701 nt, Artificial Sequence
  derived and/or modified CDS sequence (opt1) from hemagglutinin__InfluenzaA__ADW54512
augaaggccauccuggugguccuccuguacaccuucgccaccgcgaacgccgacacgcugugcaucggcuaccacgccaacaacagcaccgacaccguggacaccgugcucgagaagaacgucacggugacccacuccgugaaccugcuggaggacaagcacaacgggaagcucugcaagcugcgcggcgucgcgccccugcaccucgggaagugcaacaucgccggcuggauccuggggaacccggagugcgagagccuguccaccgccagcuccuggagcuacaucguggagaccuccagcuccgacaacggcacgugcuaccccggcgacuucaucgacuacgaggagcuccgggagcagcugagcuccgugagcuccuucaagcgcuucgagaucuuccccaagaccagcuccuggcccaaccacgacagcaacaagggggucaccaccgccugcccgcacgccggcgccaaguccuucuacaagaaccugaucuggcucgugaagaaggggaacagcuaccccaagcuguccaagagcuacaucaacgacaagggcaaggaggugcugguccucugggggauccaccacccgcccacgagcgcggaccagcagucccuguaccagaacgccgacgccuacguguucgugggcaccagccgguacuccaagaaguucaagcccgagaucgccauccgccccaagguccgggaccaggagggccgcaugaacuacuacuggacccugguggagcccggggacaagaucaccuucgaggccacgggcaaccucguggucccccgguacgcguucgccauggagcgcaacgccgggagcggcaucaucaucuccgacaccccggugcacgacugcaacacgaccugccagacccccaagggcgccaucaacaccagccugcccuuccagaacauccaccccaucaccaucgggaagugcccgaaguacgugaaguccaccaagcugcggcucgccacgggccugcgcaacguccccagcauccagucccgggggcuguucggcgcgaucgccggguucaucgagggcggcuggaccgggaugguggacggcugguacggguaccaccaccagaacgagcagggcagcggguacgccgccgaccucaaguccacccagaacgccaucgacgagaucaccaacaaggugaacagcgucaucgagaagaugaacacgcaguucaccgcggugggcaaggaguucaaccaccuggagaagcgcaucgagaaccugaacaagaaggucgacgacggcuuccucgacaucuggaccuacaacgccgagcugcuggugcuccuggagaacgagcggacccuggacuaccacgacuccaacgugaagaaccucuacgagaagguccgcagccagcugaagaacaacgccaaggagaucgggaacggcugcuucgaguucuaccacaagugcgacaacacgugcauggaguccgugaagaacgggaccuacgacuaccccaaguacagcgaggaggccaagcugaaccgggaggagaucgacggcgugaagcucgaguccacccgcaucuaccagauccuggccaucuacagcaccgucgcguccagccuggugcucguggucagccugggggccaucuccuucuggaugugcagcaacggcucccugcagugccggaucugcaucuga

SEQ ID NO: 70461 - RNA, 1701 nt, Artificial Sequence
  derived and/or modified CDS sequence (opt1) from hemagglutinin__InfluenzaA__ADW54527
augaaggccauccuggugguccuccuguacaccuucgccaccgcgagcgccgacacgcugugcaucggcuaccacgccaacaacuccaccgacaccguggacaccgugcucgagaagaacgucacggugacccacagcgugaaccugcuggaggacaagcacaacgggaagcucugcaagcugcgcggcgucgcgccccugcaccucgggaagugcaacaucgccggcuggauccuggggaacccggagugcgagucccugagcaccgccuccagcugguccuacaucguggagaccagcuccagcgacaacggcacgugcuaccccggcgacuucaucgacuacgaggagcuccgggagcagcuguccagcguguccagcuucgagcgcuucgagaucuuccccaagaccuccagcuggcccaaccacgacuccaacaagggggucaccaccgccugcccgcacgccggcgccaagagcuucuacaagaaccugaucuggcucgugaagaaggggaacuccuaccccaagcugagcaagagcuacaucaacgacaagggcaaggaggugcugguccucugggggauccaccacccgcccacguccgcggaccagcagagccuguaccagaacgccgacgccuacguguucgugggcaccucccgguacagcaagaaguucaagcccgagaucgccauccgccccaagguccgggaccaggagggccgcaugaacuacuacuggacccugguggagcccggggacaagaucaccuucgaggccacgggcaaccucguggucccccgguacgcguucgccauggagcgcaacgccggguccggcaucaucaucagcgacaccccggugcacgacugcaacacgaccugccagacccccaacggcgccaucaacaccucccugcccuuccagaacauccaccccaucaccaucgggaagugcccgaaguacgucaagagcaccaagcugcggcucgccacgggccugcgcaacgugcccuccauccagagccgggggcuguucggcgcgaucgccggguucaucgagggcggcuggaccgggaugguggacggcugguacggguaccaccaccagaacgagcagggcuccggguacgccgccgaccucaagagcacccagaacgccaucgacgagaucaccaacaaggugaacuccgucaucgagaagaugaacacgcaguucaccgcggugggcaaggaguucaaccaccuggagaagcgcaucgagaaccugaacaagaaggucgacgacggcuuccucgacaucuggaccuacaacgccgagcugcuggugcuccuggagaacgagcggacccuggacuaccacgacagcaacgugaagaaccucuacgagaagguccgcucccagcugaagaacaacgccaaggagaucgggaacggcugcuucgaguucuaccacaagugcgacaacacgugcauggagagcgugaagaacgggaccuacgacuaccccaaguacuccgaggaggccaagcugaaccgggaggagaucgacggcgugaagcucgagagcacccgcaucuaccagauccuggccaucuacuccaccgucgcgagcagccuggugcucguggucucccugggggccaucagcuucuggaugugcuccaacggcagccugcagugccggaucugcaucuga

SEQ ID NO: 70462 - RNA, 1701 nt, Artificial Sequence; identical to SEQ ID NO: 70459
  derived and/or modified CDS sequence (opt1) from hemagglutinin__InfluenzaA__ADW65825

SEQ ID NO: 70463 - RNA, 1701 nt, Artificial Sequence
  derived and/or modified CDS sequence (opt1) from hemagglutinin__InfluenzaA__ADW82135
augaagaccaucaucgcccugagcuacauccucugccugguguucgcccagaagcugcccggcaacgacaacuccaccgcgacgcucugccuggggcaccacgccgucccgaacggcaccguggugaagaccaucaccaacgaccagaucgaggucacgaacgccaccgagcuggugcagagcuccagcaccggggagaucugcgacagcccccaccagauccucgacggcaagaacugcacccugaucgacgcccugcucggggacccccagugcgacggcuuccagaacaagaagugggaccuguucguggagcgcagcaaggccuacuccaacugcuaccccuacgacgucccggacuacgcgagccugcggucccucguggccagcuccggcacgcuggaguucaacaacgagagcuucaacuggaccggggugacccagaacggcaccuccagcgccugcauccgccgguccaagaacagcuucuucucccgccugaacuggcucacgcaccugaacuucaaguacaccgcccugaacgucaccaugcccaacaacgagcaguucgacaagcucuacaucuggggcgugcaccaccccgggaccgacaaggaccagaucuuccuguacgcgcaggccagcgggcggaucacgguguccaccaagcgcagccagcagaccgucauccccaacaucggcagccggccgcgcgugcggaacauccccucccgcaucagcaucuacuggaccaucgugaagcccggcgacauccugcucaucaacuccacggggaaccugaucgcgccccggggcuacuucaagauccgcagcgggaaguccagcaucaugcgguccgacgccccgaucggcaagugcaacagcgagugcaucacccccaacggcuccauccccaacgacaagcccuuccagaacgucaaccgcaucaccuacggggccugcccgcgguacgugaagcagaacacccugaagcucgccacgggcaugcgcaacgugcccgagaagcagacccgggggaucuucggcgccaucgccggguucaucgagaacggcugggagggcauggucgacgggugguacggcuuccgccaccagaacagcgaggggcggggccaggccgccgaccugaaguccacccaggcggccaucgaccagaucaacgggaagcugaaccgccucaucggcaagaccaacgagaaguuccaccagaucgagaaggaguucagcgagguggagggccggauccaggaccuggagaaguacguggaggacacgaagaucgaccugugguccuacaacgccgagcuccuggucgcccuggagaaccagcacaccaucgaccucaccgacagcgagaugaacaagcuguucgagaagaccaagaagcagcugcgcgagaacgccgaggacauggggaacggcugcuucaagaucuaccacaagugcgacaacgcgugcaucggguccauccgcaacggcacguacgaccacgacguguaccgggacgaggcccucaacaaccgcuuccagaucaaggggguggagcugaaguccggcuacaaggacuggauccuguggaucuccuucgccaucagcugcuuccuccugugcgucgcccugcucggcuucaucaugugggccugccagaaggggaacauccggugcaacaucugcaucuga

SEQ ID NO: 70464 - RNA, 1701 nt, Artificial Sequence; identical to SEQ ID NO: 70463
  derived and/or modified CDS sequence (opt1) from hemagglutinin__InfluenzaA__ADW82155

SEQ ID NO: 70465 - RNA, 1701 nt, Artificial Sequence; identical to SEQ ID NO: 70463
  derived and/or modified CDS sequence (opt1) from hemagglutinin__InfluenzaA__ADW82166

SEQ ID NO: 70466 - RNA, 1701 nt, Artificial Sequence; identical to SEQ ID NO: 70463
  derived and/or modified CDS sequence (opt1) from hemagglutinin__InfluenzaA__ADW82177

SEQ ID NO: 70467 - RNA, 1701 nt, Artificial Sequence; identical to SEQ ID NO: 66693
  derived and/or modified CDS sequence (opt1) from hemagglutinin__InfluenzaA__ADW82188

SEQ ID NO: 70468 - RNA, 1701 nt, Artificial Sequence; identical to SEQ ID NO: 66693
  derived and/or modified CDS sequence (opt1) from hemagglutinin__InfluenzaA__ADW82198

SEQ ID NO: 70469 - RNA, 1701 nt, Artificial Sequence; identical to SEQ ID NO: 66693
  derived and/or modified CDS sequence (opt1) from hemagglutinin__InfluenzaA__ADW82208

SEQ ID NO: 70470 - RNA, 1701 nt, Artificial Sequence; identical to SEQ ID NO: 66693
  derived and/or modified CDS sequence (opt1) from hemagglutinin__InfluenzaA__ADW82218

SEQ ID NO: 70471 - RNA, 1701 nt, Artificial Sequence; identical to SEQ ID NO: 66693
  derived and/or modified CDS sequence (opt1) from hemagglutinin__InfluenzaA__ADW82228

SEQ ID NO: 70472 - RNA, 1701 nt, Artificial Sequence; identical to SEQ ID NO: 66693
  derived and/or modified CDS sequence (opt1) from hemagglutinin__InfluenzaA__ADW82238

SEQ ID NO: 70473 - RNA, 1701 nt, Artificial Sequence; identical to SEQ ID NO: 66693
  derived and/or modified CDS sequence (opt1) from hemagglutinin__InfluenzaA__ADW82248

SEQ ID NO: 70474 - RNA, 1701 nt, Artificial Sequence; identical to SEQ ID NO: 66693
  derived and/or modified CDS sequence (opt1) from hemagglutinin__InfluenzaA__ADW82258

SEQ ID NO: 70475 - RNA, 1701 nt, Artificial Sequence
  derived and/or modified CDS sequence (opt1) from hemagglutinin__InfluenzaA__ADW82268
augaaggccauccuggugguccuccuguacaccuucgccaccgcgaacgccgacacgcugugcaucggcuaccacgccaacaacagcaccgacaccguggacaccgugcucgagaagaacgucacggugacccacuccgugaaccugcuggaggacaagcacaacgggaagcucugcaagcugcgcggcgucgcgccccugcaccucgggaagugcaacaucgccggcuggauccuggggaacccggagugcgagagccuguccaccgccagcuccuggagcuacaucguggagaccuccagcuccgacaacggcacgugcuaccccggcgacuucaucgacuacgaggagcuccgggagcagcugagcuccgugagcuccuucgagcgcuucgagaucuuccccaagaccagcuccuggcccaaccacgacagcaacaagggggucaccgccgccugcccgcacgccggcgcgaaguccuucuacaagaaccugaucuggcucgugaagaaggggaacagcuaccccaagcuguccaagagcuacaucaacgacaagggcaaggaggugcugguccucugggggauccaccaccccagcaccuccgccgaccagcagagccuguaccagaacgccgacgccuacguguucgugggcacgucccgguacagcaagaaguucaagcccgagaucgccauccgcccgaagguccgggaccaggagggccgcaugaacuacuacuggacccugguggagcccggggacaagaucaccuucgaggcgaccggcaaccucguggucccccgguacgccuucgccauggagcgcaacgccggguccggcaucaucaucagcgacacgcccgugcacgacugcaacacgaccugccagaccccgaagggcgccaucaacaccucccugcccuuccagaacauccaccccaucaccaucgggaagugccccaaguacgucaagagcaccaagcugcggcucgcgaccggccugcgcaacgugccguccauccagagccgggggcuguucggcgccaucgccggguucaucgagggcggcuggacggggaugguggacggcugguacggguaccaccaccagaacgagcagggcuccggguacgccgccgaccucaagagcacccagaacgcgaucgacgagaucaccaacaaggugaacuccgucaucgagaagaugaacacccaguucacggccgugggcaaggaguucaaccaccuggagaagcgcaucgagaaccugaacaagaaggucgacgacggcuuccucgacaucuggaccuacaacgccgagcugcuggugcuccuggagaacgagcggacccuggacuaccacgacagcaacgugaagaaccucuacgagaagguccgcucccagcugaagaacaacgccaaggagaucgggaacggcugcuucgaguucuaccacaagugcgacaacacgugcauggagagcgugaagaacgggaccuacgacuaccccaaguacuccgaggaggccaagcugaaccgggaggagaucgacggcgugaagcucgagagcacccgcauccaccagauccuggcgaucuacuccaccgucgccagcagccuggugcucguggucucccugggggccaucagcuucuggaugugcuccaacggcagccugcagugccggaucugcaucuga

SEQ ID NO: 70476 - RNA, 1701 nt, Artificial Sequence; identical to SEQ ID NO: 70463
  derived and/or modified CDS sequence (opt1) from hemagglutinin__InfluenzaA__ADW93760

SEQ ID NO: 70477 - RNA, 1701 nt, Artificial Sequence
  derived and/or modified CDS sequence (opt1) from hemagglutinin__InfluenzaA__ADW95319
augaaggccauccuggugguccuccuguacaccuucgccaccgcgaacgccgacacgcugugcaucggcuaccacgccaacaacagcaccgacaccguggacaccgugcucgagaagaacgucacggugacccacuccgugaaccugcuggaggacaagcacaacgggaagcucugcaagcugcgcggcgucgcgccccugcaccucgggaagugcaacaucgccggcuggauccuggggaacccggagugcgagagccuguccaccgccagcuccuggagcuacaucguggagaccuccagcuccgacaacggcacgugcuaccccggcgacuucaucgacuacgaggagcuccgggagcagcugagcuccgugagcuccuucgagcgcuucgagaucuuccccaagaccagcuccuggcccaaccacgacagcaacaagggggucaccgccgccugcccgcacgccggcgcgaagggguucuacaagaaccugaucuggcucgugaagaagggcaacuccuaccccaagcugagcaaguccuacaucaacgacaaggggaaggaggugcugguccucuggggcauccaccaccccagcaccacggccgaccagcagagccuguaccagaacgccgacaccuacguguucgugggcaccucccgguacagcaagaaguucaagcccgagaucgccauccgcccgaagguccgggaccaggaggggcgcaugaacuacuacuggacccugguggagcccggcgacaagaucacguucgaggccaccgggaaccucguggucccccgguacgcguucgccauggagcgcaacgccggcuccggcaucaucaucagcgacacccccgugcacgacugcaacaccacgugccagaccccgaagggggccaucaacaccucccugcccuuccagaacauccaccccaucaccaucggcaagugccccaaguacgucaagagcacgaagcugcggcucgccaccgggcugcgcaacgugccguccauccagagccggggccuguucggggcgaucgccggcuucaucgagggcggguggaccggcaugguggacgggugguacggcuaccaccaccagaacgagcagggguccggcuacgccgccgaccucaagagcacccagaacgccaucgacgagaucacgaacaaggugaacuccgucaucgagaagaugaacacccaguucaccgcggugggcaaggaguucaaccaccuggagaagcgcaucgagaaccugaacaagaaggucgacgacggguuccucgacaucuggaccuacaacgccgagcugcuggugcuccuggagaacgagcggacgcuggacuaccacgacagcaacgugaagaaccucuacgagaagguccgcaaccagcugaagaacaacgccaaggagaucggcaacgggugcuucgaguucuaccacaagugcgacaacacgugcauggaguccgugaagaacggcaccuacgacuaccccaaguacagcgaggaggccaagcugaaccgggaggagaucgacggggugaagcucgaguccacccgcaucuaccagauccuggccaucuacagcaccgucgcguccagccuggugcucguggucucccugggcgccaucagcuucuggaugugcagcaacggcucccugcagugccggaucugcaucuga

SEQ ID NO: 70478 - RNA, 1701 nt, Artificial Sequence
  derived and/or modified CDS sequence (opt1) from hemagglutinin__InfluenzaA__ADW95332
augaaggccauccuggugguccuccuguacaccuucgccaccgcgaacgccgacacgcugugcaucggcuaccacgccaacaacagcaccgacaccguggacaccgugcucgagaagaacgucacggugacccacuccgugaaccugcuggaggacaagcacaacgggaagcucugcaagcugcgcggcgucgcgccccugcaccucgggaagugcaacaucgccggcuggauccuggggaacccggagugcgagagccuguccaccgccagcuccuggagcuacaucguggagaccuccagcuccgacaacggcacgugcuaccccggcgacuucaucgacuacgaggagcuccgggagcagcugagcuccgugagcuccuucgagcgcuucgagaucuuccccaagaccagcuccuggcccaaccacgacagcaacaagggggucaccgccgccugcccgcacgccggcgcgaagggguucuacaagaaccugaucuggcucgugaagaagggcaacuccuaccccaagcugagcaaguccuacaucaacgacaaggggaaggaggugcugguccucuggggcauccaccaccccagcaccacggccgaccagcagagccuguaccagaacgccgacaccuacguguucgugggcaccucccgguacagcaagaaguucaagcccgagaucgccauccgcccgaagguccgggaccaggaggggcgcaugaacuacuacuggacccugguggagcccggcgacaagaucacguucgaggccaccgggaaccucguggucccccgguacgcguucgccauggagcgcaacgccggcuccggcaucaucaucagcgacacccccgugcacgacugcaacaccacgugccagaccccgaagggggccaucaacaccucccugcccuuccagaacauccaccccaucaccaucggcaagugccccaaguacgucaagagcacgaagcugcggcucgccaccgggcugcgcaacgugccguccauccagagccggggccuguucggggcgaucgccggcuucaucgagggcggguggaccggcaugguggacgggugguacggcuaccaccaccagaacgagcagggguccggcuacgccgccgaccucaagagcacccagaacgccaucgacaagaucacgaacaaggugaacuccgucaucgagaagaugaacacccaguucaccgcggugggcaaggaguucaaccaccuggagaagcgcaucgagaaccugaacaagaaggucgacgacggguuccucgacaucuggaccuacaacgccgagcugcuggugcuccuggagaacgagcggacgcuggacuaccacgacagcaacgugaagaaccucuacgagaagguccgcaaccagcugaagaacaacgccaaggagaucggcaacgggugcuucgaguucuaccacaagugcgacaacacgugcauggaguccgugaagaacggcaccuacgacuaccccaaguacagcgaggaggccaagcugaaccgggaggagaucgacggggugaagcucgaguccacccgcaucuaccagauccuggccaucuacagcaccgucgcguccagccuggugcucguggucucccugggcgccaucagcuucuggaugugcagcaacggcucccugcagugccggaucugcaucuga

SEQ ID NO: 70479 - RNA, 1701 nt, Artificial Sequence
  derived and/or modified CDS sequence (opt1) from hemagglutinin__InfluenzaA__ADX21078
augaagaccaucaucgcccugagcuacauccucugccugguguucgcccagaagcugcccggcaacgacaacuccaccgcgacgcucugccuggggcaccacgccgucccgaacggcaccguggugaagaccaucaccaacgaccagaucgaggucacgaacgccaccgagcuggugcagagcuccagcaccggggagaucugcgacagcccccaccagauccucgacggcaagaacugcacccugaucgacgcccugcucggggacccccagugcgacggcuuccagaacaagaagugggaccuguucguggagcgcagcaaggccuacuccaacugcuaccccuacgacgucccggacuacgcgagccugcggucccucguggccagcuccggcacgcuggaguucaacaacgagagcuucaacuggaccggggugacccagaacggcaccuccagcgccugcauccgccgguccaagaacagcuucuucucccgccugaacuggcucacgcaccugaacuucaaguacaccgcccugaacgucaccaugcccaacaacgagcaguucgacaagcucuacaucuggggcgugcaccaccccgggaccgacaaggaccagaucuuccuguacgcgcaggccagcgggcggaucacgguguccaccaagcgcagccagcagaccgucauccccaacaucggcagccggccgcgcgugcggaacauccccucccgcaucagcaucuacuggaccaucgugaagcccggcgacauccugcucaucaacuccacggggaaccugaucgcgccccggggcuacuucaagauccgcagcgggaaguccagcaucaugcgguccgacgccccgaucggcaagugcaacagcgagugcaucacccccaacggcuccauccccaacgacaagcccuuccagaacgucaaccgcaucaccuacggggccugcccgcgguacgugaagcagaacacccugaagcucgccacgggcaugcgcaacgugcccgagaagcagacccgggggaucuucggcgccaucgccggguucaucgagaacggcugggagggcauggucgacgggugguacggcuuccgccaccagaacagcgaggggcggggccaggccgccgaccugaaguccacccaggcggccaucgaccagaucaacgggaagcugaaccgccucauccggaagaccaacgagaaguuccaccagaucgagaaggaguucagcgagguggagggccgcauccaggaccuggagaaguacguggaggacacgaagaucgaccugugguccuacaacgccgagcuccuggucgcccuggagaaccagcacaccaucgaccucaccgacagcgagaugaacaagcuguucgagaagaccaagaagcagcugcgcgagaacgccgaggacaugggcaacgggugcuucaagaucuaccacaagugcgacaacgcgugcaucggcuccauccggaacgggacguacgaccacgacguguaccgcgacgaggcccucaacaaccgguuccagaucaagggcguggagcugaaguccggguacaaggacuggauccuguggaucuccuucgccaucagcugcuuccuccugugcgucgcccugcucggcuucaucaugugggccugccagaagggcaacauccgcugcaacaucugcaucuga

SEQ ID NO: 70480 - RNA, 1701 nt, Artificial Sequence; identical to SEQ ID NO: 70479
  derived and/or modified CDS sequence (opt1) from hemagglutinin__InfluenzaA__ADX21088

SEQ ID NO: 70481 - RNA, 1701 nt, Artificial Sequence
  derived and/or modified CDS sequence (opt1) from hemagglutinin__InfluenzaA__ADX21098
augaaggccauccuggugguccuccuguacaccuucgccaccgcgaacgccgacacgcugugcaucggcuaccacgccaacaacagcaccgacaccguggacaccgugcucgagaagaacgucacggugacccacuccgugaaccugcuggaggacaagcacaacgggaagcucugcaagcugcgcggcgucgcgccccugcaccucgggaagugcaacaucgccggcuggauccuggggaacccggagugcgagagccuguccaccgccagcuccuggagcuacaucguggagaccuccagcuccgacaacggcacgugcuaccccggcgacuucaucgacuacgaggagcuccgggagcagcugagcuccgugagcuccuucgagcgcuucgagaucuuccccaagaccagcuccuggcccaaccacgacagcaacaagggggucaccgccgccugcccgcacgccggcgcgaaguccuucuacaagaaccugaucuggcucgugaagaaggggaacagcuaccccaagcuguccaagagcuacaucaacgacaagggcaaggaggugcugguccucugggggauccaccaccccagcaccuccgccgaccagcagagccuguaccagaacgccgacgccuacguguucgugggcacgucccgguacagcaagaaguucaagcccgagaucgccauccgcccgaagguccgggaccaggagggccgcaugaacuacuacuggacccugguggagcccggggacaagaucaccuucgaggcgaccggcaaccucguggucccccgguacgccuucgccauggagcgcaacgccggguccggcaucaucaucagcgacacgcccgugcacgacugcuccacgaccugccagaccccgaagggcgccaucaacaccagccugcccuuccagaacauccaccccaucaccaucgggaagugccccaaguacgugaaguccaccaagcugcggcucgcgaccggccugcgcaacgucccgagcauccagucccgggggcuguucggcgccaucgccggguucaucgagggcggcuggacggggaugguggacggcugguacggguaccaccaccagaacgagcagggcagcggguacgccgccgaccucaaguccacccagaacgcgaucgacgagaucaccaacaaggugaacagcgucaucgagaagaugaacacccaguucacggccgugggcaaggaguucaaccaccuggagaagcgcaucgagaaccugaacaagaaggucgacgacggcuuccucgacaucuggaccuacaacgccgagcugcuggugcuccuggagaacgagcggacccuggacuaccacgacuccaacgugaagaaccucuacgagaagguccgcagccagcugaagaacaacgccaaggagaucgggaacggcugcuucgaguucuaccacaagugcgacaacacgugcauggaguccgugaagaacgggaccuacgacuaccccaaguacagcgaggaggccaagcugaaccgggaggagaucgacggcgugaagcucgaguccacccgcauccaccagauccuggcgaucuacagcaccgucgccagcucccuggugcucguggucagccugggggccaucuccuucuggaugugcagcaacggcucccugcagugccggaucugcaucuga

SEQ ID NO: 70482 - RNA, 1701 nt, Artificial Sequence; identical to SEQ ID NO: 67612
  derived and/or modified CDS sequence (opt1) from hemagglutinin__InfluenzaA__ADX36109

SEQ ID NO: 70483 - RNA, 1701 nt, Artificial Sequence
  derived and/or modified CDS sequence (opt1) from hemagglutinin__InfluenzaA__ADX96278
augaaggccauccuggugguccuccuguacaccuucgccaccgcgaacgccgacacgcugugcaucggcuaccacgccaacaacagcaccgacaccguggacaccgugcucgagaagaacgucacggugacccacuccgugaacauccuggaggacaagcacaacgggaagcugugcaagcuccgcggcgucgcgccccugcaccuggggaagugcaacaucgccggcuggauccucgggaacccggagugcgagagccuguccaccgccagcuccuggagcuacaucguggagaccuccagcuccgacaacggcacgugcuaccccggcgacuucaucgacuacgaggagcugcgggagcagcucagcuccgugagcuccuucgagcgcuucgagaucuuccccaagaccagcuccuggcccaaccacgacagcaacaagggggucaccgccgccugcccgcacgccggcgcgaagggguucuacaagaaccugaucuggcuggugaagaagggcaacuccuaccccaagcucagcaaguccuacaucaacgacaaggggaaggaggugcugguccuguggggcauccaccaccccagcaccagcgccgaccagcagucccucuaccagaacgccgacgccuacguguucgugggcagcucccgguacagcaagaaguucaagcccgagaucgccauccgcccgaagguccgggaccaggaggggcgcaugaacuacuacuggacgcugguggagcccggcgacaagaucaccuucgaggcgaccgggaaccugguggucccccgguacgccuucgccauggagcgcaacgccggcuccggcaucaucaucagcgacacccccgugcacgacugcaacacgaccugccagaccccgaagggggccgugaacaccucccuccccuuccagaacauccaccccaucacgaucggcaagugccccaaguacgucaagagcaccaagcugcggcuggcgaccgggcuccgcaacgugccguccauccagagccggggccuguucggggccaucgccggcuucaucgagggcggguggaccggcaugguggacgggugguacggcuaccaccaccagaacgagcagggguccggcuacgccgccgaccucaagagcacgcagaacgcgaucgacgagaucaccaacaaggucaacuccgugaucgagaagaugaacacccaguucaccgccgucggcaaggaguucaaccaccuggagaagcgcaucgagaaccugaacaagaagguggacgacggguuccuggacaucuggacguacaacgccgagcuccuggugcugcucgagaacgagcggacccuggacuaccacgacagcaacgucaagaaccuguacgagaaggugcgcucccagcucaagaacaacgccaaggaggugggcaacgggugcuucgaguucuaccacaagugcgacaacacgugcauggagagcgucaagaacggcaccuacgacuaccccaaguacuccgaggaggccaagcugaaccgggaggagaucgacggggugaagcuggagagcacccgcaucuaccagauccucgcgaucuacuccaccgccgccagcagccuggugcuggucgugucccucggcgccaucagcuucuggaugugcuccaacggcagccugcagugccggaucugcaucuga

SEQ ID NO: 70484 - RNA, 1701 nt, Artificial Sequence
  derived and/or modified CDS sequence (opt1) from hemagglutinin__InfluenzaA__ADX96288
augaaggccauccuggugguccuccuguacaccuucgccaccgcgaacgccgacacgcugugcaucggcuaccacgccaacaacagcaccgacaccguggacaccgugcucgagaagaacgucacggugacccacuccgugaacauccuggaggacaagcacaacgggaagcugugcaagcuccgcggcgucgcgccccugcaccuggggaagugcaacaucgccggcuggauccucgggaacccggagugcgagagccuguccaccgccagcuccuggagcuacaucguggagaccuccagcuccgacaacggcacgugcuaccccggcgacuucaucgacuacgaggagcugcgggagcagcucagcuccgugagcuccuucgagcgcuucgagaucuuccccaagaccagcuccuggcccaaccacgacagcaacaagggggucaccgccgccugcccgcacgccggcgcgaaguccuucuacaagaaccugaucuggcuggugaagcaggggaacagcuaccccaagcucuccaagagcuacaucaacgacaagggcaaggaggugcugguccugugggggauccaccaccccagcaccuccgccgaccagcagagccucuaccagaacgccgacgccuacguguucgugggcuccagccgguacuccaagaaguucaagcccgagaucgccauccgcccgaagguccgggaccaggagggccgcaugaacuacuacuggacgcugguggagcccggggacaagaucaccuucgaggcgaccggcaaccugguggucccccgguacgccuucgccauggagcgcaacgccgggagcggcaucaucaucuccgacacccccgugcacgacugcaacacgaccugccagaccccgaagggcgccaucaacaccagccuccccuuccagaacauccaccccaucacgaucgggaagugccccaaguacgugaaguccaccaagcugcggcuggcgaccggccuccgcaacgucccgagcauccagucccgggggcuguucggcgccaucgccggguucaucgagggcggcuggaccgggaugguggacggcugguacggguaccaccaccagaacgagcagggcagcggguacgccgccgaccugaaguccacgcagaacgcgaucgacgagaucaccaacaaggugaacagcgucaucgagaagaugaacacccaguucaccgccgugggcaaggaguucaaccaccucgagaagcgcaucgagaaccugaacaagaaggucgacgacggcuuccuggacaucuggacguacaacgccgagcuccuggugcugcucgagaacgagcggacccuggacuaccacgacuccaacgugaagaaccuguacgagaagguccgcagccagcucaagaacaacgccaaggagguggggaacggcugcuucgaguucuaccacaagugcgacaacacgugcauggaguccgugaagaacgggaccuacgacuaccccaaguacagcgaggaggccaagcugaaccgggaggagaucgacggcgucaagcuggaguccacccgcaucuaccagauccucgcgaucuacagcaccgccgccagcucccuggugcugguggucagccucggggccaucuccuucuggaugugcagcaacggcucccugcagugccggaucugcaucuga

SEQ ID NO: 70485 - RNA, 1701 nt, Artificial Sequence
  derived and/or modified CDS sequence (opt1) from hemagglutinin__InfluenzaA__ADX96298
augaaggccauccuggugguccuccuguacaccuucgccaccgcgaacgccgacacgcugugcaucggcuaccacgccaacaacagcaccgacaccguggacaccgugcucgagaagaacgucacggugacccacuccgugaacauccuggaggacaagcacaacgggaagcugugcaagcuccgcggcgucgcgccccugcaccuggggaagugcaacaucgccggcuggauccucgggaacccggagugcgagagccuguccaccgccagcuccuggagcuacaucguggagaccuccagcuccgacaacggcacgugcuaccccggcgacuucaucgacuacgaggagcugcgggagcagcucagcuccgugagcuccuucgagcgcuucgagaucuuccccaagaccagcuccuggcccaaccacgacagcaacaagggggucaccgccgccugcccgcacgccggcgcgaaguccuucuacaagaaccugaucuggcuggugaagaaggggaacagcuaccccaagcucuccaagagcuacaucaacgacaagggcaaggaggugcugguccugugggggauccaccaccccagcaccuccgccgaccagcagagccucuaccagaacgccgacgccuacguguucgugggcacgucccgguacagcaagaaguucaagcccgagaucgucauccgcccgaaggugcgggaccaggagggccgcaugaacuacuacuggacccugguggagcccggggacaagaucaccuucgaggccaccggcaaccuggucgugccccgguacgcguucgccauggagcgcaacgccggguccggcaucaucaucagcgacacgcccgugcacgacugcaacacgaccugccagaccccgaagggcgccaucaacaccucccuccccuuccagaacauccaccccaucaccaucgggaagugccccaaguacgucaagagcaccaagcugcggcuggccaccggccuccgcaacgugccguccauccagagccgggggcuguucggcgcgaucgccggguucaucgagggcggcuggacggggaugguggacggcugguacggguaccaccaccagaacgagcagggcuccggguacgccgccgaccucaagagcacccagaacgccaucgacgagaucaccaacaaggucaacuccgugaucgagaagaugaacacccaguucacggcggucggcaaggaguucaaccaccuggagaagcgcaucgagaaccugaacaagaagguggacgacggcuuccuggacaucuggaccuacaacgccgagcuccuggugcugcucgagaacgagcggacccuggacuaccacgacagcaacgucaagaaccuguacgagaaggugcgcucccagcucaagaacaacgccaaggagaucgggaacggcugcuucgaguucuaccacaagugcgacaacacgugcauggagagcgugaagaacgggaccuacgacuaccccaaguacuccgaggaggccaagcugaaccgggaggagaucgacggcgucaagcuggagagcacccgcaucuaccagauccucgccaucuacuccaccguggcgagcagccuggugcuggucgugucccucggggccaucagcuucuggaugugcuccaccggcagccugcagugccggaucugcaucuga

SEQ ID NO: 70486 - RNA, 1701 nt, Artificial Sequence; identical to SEQ ID NO: 68290
  derived and/or modified CDS sequence (opt1) from hemagglutinin__InfluenzaA__ADX96308

SEQ ID NO: 70487 - RNA, 1701 nt, Artificial Sequence
  derived and/or modified CDS sequence (opt1) from hemagglutinin__InfluenzaA__ADX96318
augaaggccauccuggugguccuccuguacaccuucgccaccgcgaacgccgacacgcugugcaucggcuaccacgccaacaacagcaccgacaccguggacaccgugcucgagaagaacgucacggugacccacuccgugaaccugcuggaggacaagcacaacgggaagcucugcaagcugcgcggcgucgcgccccugcaccucgggaagugcaacaucgccggcuggauccuggggaacccggagugcgagagccuguccaccgccagcuccuggagcuacaucguggagaccuccagcuccgacaacggcacgugcuaccccggcgacuucaucgacuacgaggagcuccgggagcagcugagcuccgugagcuccuucgagcgcuucgagaucuuccccaagaccagcuccuggcccaaccacgacagcaacaagggggucaccgccgccugcccgcacgccggcgcgaaguccuucuacaagaaccugaucuggcucgugaagaaggggaacagcuaccccaagcuguccaagagcuacaucaacgacaagggcaaggaggugcugguccucugggggauccaccaccccagcaccuccgccgaccagcagagccuguaccagaacgccgacuccuacguguucgugggcacgagccgguacuccaagaaguucaagcccgagaucgccauccgcccgaagguccgggaccaggagggccgcaugaacuacuacuggacccugguggagcccggggacaagaucaccuucgaggccaccggcaaccucguggucccccgguacgcguucgccauggagcgcaacgccgggagcggcaucaucaucuccgacacgcccgugcacgacugcaacacgaccugccagaccccgaagggcgccaucaacaccagccugcccuuccagaacauccaccccaucaccaucgggaagugccccaaguacgugaaguccaccaagcugcggcucgccaccggccugcgcaacgucccgagcauccagucccgggggcuguucggcgcgaucgccggguucaucgagggcggcuggacggggaugguggacggcugguacggguaccaccaccagaacgagcagggcagcggguacgccgccgaccucaaguccacccagaacgccaucgacaagaucaccaacaaggugaacagcgucaucgagaagaugaacacccaguucacggcggugggcaaggaguucaaccaccuggagaagcgcaucgagaaccugaacaagaaggucgacgacggcuuccucgacaucuggaccuacaacgccgagcugcuggugcuccuggagaacgagcggacccuggacuaccacgacuccaacgugaagaaccucuacgagaagguccgcagccagcugaagaacaacgccaaggagaucgggaacggcugcuucgaguucuaccacaagugcgacaacacgugcauggaguccgugaagaacgggaccuacgacuaccccaaguacagcgaggaggccaagcugaaccgggaggagaucgacggcgugaagcucgaguccacccgcaucuaccagauccuggccaucuacagcaccgucgcgagcucccuggugcucguggucagccugggggccaucuccuucuggaugugcagcaacggcucccugcagugccggaucugcaucuga

SEQ ID NO: 70488 - RNA, 1701 nt, Artificial Sequence
  derived and/or modified CDS sequence (opt1) from hemagglutinin__InfluenzaA__ADX96328
augaaggccauccuggugguccuccuguacaccuucgccaccgcgaacgccgacacgcugugcaucggcuaccacgccaacaacagcaccgacaccguggacaccgugcucgagaagaacgucacggugacccacuccgugaaccugcuggaggacaagcacaacgggaagcucugcaagcugcgcggcgucgcgccccugcaccucgggaagugcaacaucgccggcuggauccuggggaacccggagugcgagagccuguccaccgccagcuccuggagcuacaucguggagaccuccagcuccgacaacggcacgugcuaccccggcgacuucaucgacuacgaggagcuccgggagcagcugagcuccgugagcuccuucgagcgcuucgagaucuuccccaagaccagcuccuggcccaaccacgacagcaacaagggggucaccgccgccugcccgcacgccggcgcgaaguccuucuacaagaaccugaucuggcucgugaagaaggggaacagcuaccccaagcuguccaagagcuacaucaacgacaagggcaaggaggugcugguccucugggggauccaccaccccagcaccuccgccgaccagcagagccuguaccagaacgccgacgccuacguguucgugggcacgucccgguacagcaagaaguucaagcccgagaucgccauccgcccgaagguccgggaccaggagggccgcaugaacuacuacuggacccugguggagcccggggacaagaucaccuucgaggcgaccggcaaccucguggcgccccgguacgccuucgccauggagcgcaacgccggguccggcaucaucaucagcgacacgcccguccacgacugcaacacgaccugccagaccccgaagggcgccaucaacaccucccugcccuuccagaacauccaccccaucaccaucgggaagugccccaaguacgucaagagcaccaagcugcggcucgccaccggccugcgcaacgugccguccauccagagccgggggcuguucggcgccaucgccggguucaucgagggcggcuggacggggaugguggacggcugguacggguaccaccaccagaacgagcagggcuccggguacgccgcggaccucaagagcacccagaacgccaucgacaagaucaccaacaaggugaacuccgugaucgagaagaugaacacccaguucacggccgucggcaaggaguucaaccaccuggagaagcgcaucgagaaccugaacaagaagguggacgacggcuuccucgacaucuggaccuacaacgccgagcugcugguccuccuggagaacgagcggacccuggacuaccacgacagcaacgugaagaaccucuacgagaaggugcgcucccagcugaagaacaacgccaaggagaucgggaacggcugcuucgaguucuaccacaagugcgacaacacgugcauggagagcgucaagaacgggaccuacgacuaccccaaguacuccgaggaggcgaagcugaaccgggaggagaucgacggcgugaagcucgagagcacccgcaucuaccagauccuggccaucuacuccaccguggccagcagccugguccucguggugucccugggggccaucagcuucuggaugugcuccaacggcagccugcagugccggaucugcaucuga

SEQ ID NO: 70489 - RNA, 1701 nt, Artificial Sequence
  derived and/or modified CDS sequence (opt1) from hemagglutinin__InfluenzaA__ADX96347
augaaggccauccuggugguccuccuguacaccuucgccaccgcgaacgccgacacgcugugcaucggcuaccacgccaacaacagcaccgacaccguggacaccgugcucgagaagaacgucacggugacccacuccgugaaccugcuggaggacaagcacaacgggaagcucugcaagcugcgcggcgucgcgccccugcaccucgggaagugcaacaucgccggcuggauccuggggaacccggagugcgagagccuguccaccgccagcuccuggagcuacaucguggagaccuccagcuccgacaacggcacgugcuaccccggcgacuucaucgacuacgaggagcuccgggagcagcugagcuccgugagcuccuucgagcgcuucgagaucuuccccaagaccagcuccuggcccaaccacgacagcaacaagggggucaccgccgccugcccgcacgccggcgcgaaguccuucuacaagaaccugaucuggcucgugaagaaggggaacagcuaccccaagcuguccaagagcuacaucaacgacaagggcaaggaggugcugguccucugggggauccaccaccccagcaccuccgccgaccagcagagccuguaccagaacgccgacgccuacguguucgugggcacgucccgguacagcaagaaguucaagcccgagaucgccauccgcccgaagguccgggaccaggagggccgcaugaacuacuacuggacccugguggagcccggggacaagaucaccuucgaggcgaccggcaaccucguggucccccgguacgccuucgccauggagcgcaacgccggguccggcaucaucaucagcgacacgcccgugcacaacugcaacacgaccugccagaccccgaagggcgccaucaacaccucccugcccuuccagaacauccaccccaucaccaucgggaagugccccaaguacgucaagagcaccaagcugcggcucgcgaccggccugcgcaacgugccguccauccagagccgggggcuguucggcgccaucgccggguucaucgagggcggcuggacggggaugguggacggcugguacggguaccaccaccagaacgagcagggcuccggguacgccgccgaccucaagagcacccagaacgcgaucgacaagaucaccaacaaggugaacuccgucaucgagaagaugaacacccaguucacggccgugggcaaggaguucaaccaccuggagaagcgcaucgagaaccugaacaagaaggucgacgacggcuuccucgacaucuggaccuacaacgccgagcugcuggugcuccuggagaacgagcggacccuggacuaccacgacagcaacgugaagaaccucuacgagaagguccgcucccagcugaagaacaacgccaaggagaucgggaacggcugcuucgaguucuaccacaagugcgacaacacgugcauggagagcgugaagaacgggaccuacgacuaccccaaguacuccgaggaggccaagcugaaccgggaggagaucgacggcgugaagcucgagagcacccgcaucuaccagauccuggcgaucuacuccaccgucgccagcagccuggugcucguggucucccugggggccaucagcuucuggaugugcuccaacggcagccugcagugccggaucugcaucuga

SEQ ID NO: 70490 - RNA, 1701 nt, Artificial Sequence
  derived and/or modified CDS sequence (opt1) from hemagglutinin__InfluenzaA__ADX96357
augaaggccauccuggugguccuccuguacaccuucgccaccgcgaacgccgacacgcugugcaucggcuaccacgccaacaacagcaccgacaccguggacaccgugcucgagaagaacgucacggugacccacuccgugaacauccuggaggacaagcacaacgggaagcugugcaagcuccgcggcgucgcgccccugcaccuggggaagugcaacaucgccggcuggauccucgggaacccggagugcgagagccuguccaccgccagcuccuggagcuacaucguggagaccuccagcuccgacaacggcacgugcuaccccggcgacuucaucgacuacgaggagcugcgggagcagcucagcuccgugagcuccuucgagcgcuucgagaucuuccccaagaccagcuccuggcccaaccacgacagcaacaagggggucaccgccgccugcccgcacgccggcgcgaaguccuucuacaagaaccugaucuggcuggugaagaaggggaacagcuaccccaagcucuccaagagcuacaucaacgacaagggcaaggaggugcugguccugugggggauccaccaccccagcaccuccgccgaccagcagagccucuaccagaacgccgacgccuacguguucgugggcacgucccgguacagcaagaaguucaagcccgagaucgucauccgcccgaaggugcgggaccaggagggccgcaugaacuacuacuggacccugguggagcccggggacaagaucaccuucgaggccaccggcaaccuggucgugccccgguacgcguucgccauggagcgcaacgccggguccggcaucaucaucagcgacacgcccgugcacgacugcaacacgaccugccagaccccgaagggcgccaucaacaccucccuccccuuccagaacauccaccccaucaccaucgggaagugccccaaguacgucaagagcaccaagcugcggcuggccaccggccuccgcaacgugccguccauccagagccgggggcuguucggcgcgaucgccggguucaucgagggcggcuggacggggaugguggacggcugguacggguaccaccaccagaacgagcagggcuccggguacgccgccgaccucaagagcacccagaacgccaucgacgagaucaccaacaaggucaacuccgugaucgagaagaugaacacccaguucacggcggucggcaaggaguucaaccaccuggagaagcgcaucgagaaccugaacaagaagguggacgacggcuuccuggacaucuggaccuacaacgccgagcuccuggugcugcucgagaacgagcggacccuggacuaccacgacagcaacgucaagaaccuguacgagaaggugcgcucccagcucaagaacaacgccaaggagaucgggaacggcugcuucgaguucuaccacaagugcgacaacacgugcauggagagcgugaagaacgggaccuacgacuaccccaaguacuccgaggaggccaagcugaaccgggaggagaucgacggcgucaagcuggagagcacccgcaucuaccagauccucgccaucuacuccaccguggcgagcagccuggugcuggucgugucccucggggccaucagcuucuggaugugcuccaacggcagccugcagugccggaucugcaucuga

SEQ ID NO: 70491 - RNA, 1701 nt, Artificial Sequence; identical to SEQ ID NO: 69630
  derived and/or modified CDS sequence (opt1) from hemagglutinin__InfluenzaA__ADX96367

SEQ ID NO: 70492 - RNA, 1701 nt, Artificial Sequence
  derived and/or modified CDS sequence (opt1) from hemagglutinin__InfluenzaA__ADX96378
augaaggccauccuggugguccuccuguacaccuucgccaccgcgaacgccgacacgcugugcaucggcuaccacgccaacaacagcaccgacaccguggacaccgugcucgagaagaacgucacggugacccacuccgugaaccugcuggaggacaagcacaacgggaagcucugcaagcugcgcggcgucgcgccccugcaccucgggaagugcaacaucgccggcuggauccuggggaacccggagugcgagagccuguccaccgccagcuccuggagcuacaucguggagaccuccagcuccgacaacggcacgugcuaccccggcgacuucaucgacuacgaggagcuccgggagcagcugagcuccgugagcuccuucgagcgcuucgagaucuuccccaagaccagcuccuggcccaaccacgacagcaacaagggggucaccgccgccugcccgcacgccggcgcgaaguccuucuacaagaaccugaucuggcucgugaagaaggggaacagcuaccccaagcuguccaagagcuacaucaacgacaagggcaaggaggugcugguccucugggggauccaccaccccagcaccuccgccgaccagcagagccuguaccagaacgccgacgccuacguguucgugggcacgucccgguacagcaagaaguucaagcccgagaucgccauccgcccgaagguccgggaccaggagggccgcaugaacuacuacuggacccugguggagcccggggacaagaucaccuucgaggcgaccggcaaccucguggucccccgguacgccuucgccauggagcgcaacgccggguccggcaucaucaucagcgacacgcccauccacgacugcaacacgaccugccagaccccgaagggcgccaucaacaccucccugcccuuccagaacauccaccccaucaccaucgggaagugccccaaguacgucaagagcaccaagcugcggcucgcgaccggccugcgcaacgugccguccauccagagccgggggcuguucggcgccaucgccggguucaucgagggcggcuggacggggaugguggacggcugguacggguaccaccaccagaacgagcagggcuccggguacgccgccgaccucaagagcacccagaacgcgaucgacgagaucaccaacaaggugaacuccgugaucgagaagaugaacacccaguucacggccgucggcaaggaguucaaccaccuggagaagcgcaucgagaaccugaacaagaagguggacgacggcuuccucgacaucuggaccuacaacgccgagcugcugguccuccuggagaacgagcggacccuggacuaccacgacagcaacgugaagaaccucuacgagaaggugcgcucccagcugaagaacaacgccaaggagaucgggaacggcugcuucgaguucuaccacaagugcgacaacacgugcauggagagcgucaagaacgggaccuacgacuaccccaaguacuccgaggaggccaagcugaaccgggaggagaucgacggcgugaagcucgagagcacccgcaucuaccagauccuggcgaucuacuccaccguggccagcagccugguccucguggugucccugggggccaucagcuucuggaugugcuccaacggcagccugcagugccggaucugcaucuga

SEQ ID NO: 70493 - RNA, 1701 nt, Artificial Sequence; identical to SEQ ID NO: 70492
  derived and/or modified CDS sequence (opt1) from hemagglutinin__InfluenzaA__ADX96398

SEQ ID NO: 70494 - RNA, 1701 nt, Artificial Sequence
  derived and/or modified CDS sequence (opt1) from hemagglutinin__InfluenzaA__ADX96408
augaaggccauccuggugguccuccuguacaccuucgccaccgcgaacgccgacacgcugugcaucggcuaccacgccaacaacagcaccgacaccguggacaccgugcucgagaagaacgucacggugacccacuccgugaacauccuggaggacaagcacaacgggaagcugugcaagcuccgcggcgucgcgccccugcaccuggggaagugcaacaucgccggcuggauccucgggaacccggagugcgagagccuguccaccgccagcuccuggagcuacaucguggagaccuccagcuccgacaacggcacgugcuaccccggcgacuucaucgacuacgaggagcugcgggagcagcucagcuccgugagcuccuucgagcgcuucgagaucuuccccaagaccagcuccuggcccaaccacgacagcaacaagggggucaccgccgccugcccgcacgccggcgcgaaguccuucuacaagaaccugaucuggcuggugaagaaggggaacagcuaccccaagcucuccaagagcuacaucaacgacaagggcaaggaggugcugguccugugggggauccaccaccccagcaccuccgccgaccagcagagccucuaccagaacgccgacgccuacguguucgugggcacgucccgguacagcaagaaguucaagcccgagaucgccauccgcccgaagguccgggaccaggagggccgcaugaacuacuacuggacccugguggagcccggggacaagaucaccuucgaggcgaccggcaaccugguggucccccgguacgccuucgccauggagcgcaacgccggguccggcaucaucaucagcgacacgcccauccacgacugcaacacgaccugccagaccccgaagggcgccaucaacaccucccuccccuuccagaacauccaccccaucaccaucgggaagugccccaaguacgucaagagcaccaagcugcggcuggcgaccggccuccgcaacgugccguccauccagagccgggggcuguucggcgccaucgccggguucaucgagggcggcuggacggggaugguggacggcugguacggguaccaccaccagaacgagcagggcuccggguacgccgccgaccucaagagcacccagaacgcgaucgacgagaucaccaacaaggugaacuccgugaucgagaagaugaacacccaguucacggccgucggcaaggaguucaaccaccuggagaagcgcaucgagaaccugaacaagaagguggacgacggcuuccuggacaucuggaccuacaacgccgagcuccugguccugcucgagaacgagcggacccuggacuaccacgacagcaacgugaagaaccuguacgagaaggugcgcucccagcucaagaacaacgccaaggagaucgggaacggcugcuucgaguucuaccacaagugcgacaacacgugcauggagagcgucaagaacgggaccuacgacuaccccaaguacuccgaggaggccaagcugaaccgggaggagaucgacggcgugaagcuggagagcacccgcaucuaccagauccucgcgaucuacuccaccguggccagcagccugguccugguggugucccucggggccaucagcuucuggaugugcuccaacggcagccugcagugccggaucugcaucuga

SEQ ID NO: 70495 - RNA, 1701 nt, Artificial Sequence; identical to SEQ ID NO: 67006
  derived and/or modified CDS sequence (opt1) from hemagglutinin__InfluenzaA__ADX96427

SEQ ID NO: 70496 - RNA, 1701 nt, Artificial Sequence
  derived and/or modified CDS sequence (opt1) from hemagglutinin__InfluenzaA__ADX96437
augaaggccauccuggugguccuccuguacaccuucgccaccgcgaacgccgacacgcugugcaucggcuaccacgccaacaacagcaccgacaccguggacaccgugcucgagaagaacgucacggugacccacuccgugaacauccuggaggacaagcacaacgggaagcugugcaagcuccgcggcgucgcgccccugcaccuggggaagugcaacaucgccggcuggauccucgggaacccggagugcgagagccuguccaccgccagcuccuggagcuacaucguggagaccuccagcuccgacaacggcacgugcuaccccggcgacuucaucgacuacgaggagcugcgggagcagcucagcuccgugagcuccuucgagcgcuucgagaucuuccccaagaccagcuccuggcccaaccacgacagcaacaagggggucaccgccgccugcccgcacgccggcgcgaaguccuucuacaagaaccugaucuggcuggugaagaaggggaacagcuaccccaagcucuccaagagcuacaucaacgacaagggcaaggaggugcugguccugugggggauccaccaccccagcaccuccgccgaccagcagagccucuaccagaacgccgacgccuacguguucgugggcuccagccgguacuccaagaaguucaagcccgagaucgccauccgcccgaagguccgggaccaggagggccgcaugaacuacuacuggacgcugguggagcccggggacaagaucaccuucgaggcgaccggcaaccugguggucccccgguacgccuucgccauggagcgcaacgccgggagcggcaucaucaucuccgacacccccgugcacgacugcaacacgaccugccagaccccgaagggcgccaucaacaccagccuccccuuccagaacauccaccccaucacgaucgggaagugccccaaguacgugaaguccaccaagcugcggcuggcgaccggccuccgcaacgucccgagcauccagucccgggggcuguucggcgccaucgccggguucaucgagggcggcuggaccgggaugguggacggcugguacggguaccaccaccagaacgagcagggcagcggguacgccgccgaccugaaguccacgcagaacgcgaucgacgagaucaccaacaaggugaacagcgucaucgagaagaugaacacccaguucaccgccgugggcaaggaguucaaccaccucgagaagcgccuggagaaccugaacaagaaggucgacgacggcuuccucgacaucuggacguacaacgccgagcugcuggugcuccuggagaacgagcggacccuggacuaccacgacuccaacgugaagaaccucuacgagaagguccgcagccagcugaagaacaacgccaaggagguggggaacggcugcuucgaguucuaccacaagugcgacaacacgugcauggaguccgugaagaacgggaccuacgacuaccccaaguacagcgaggaggccaagcugaaccgggaggagaucgacggcgucaagcucgaguccacccgcaucuaccagauccuggcgaucuacagcaccgccgccagcucccuggugcucguggucagccugggggccaucuccuucuggaugugcagcaacggcucccugcagugccggaucugcaucuga

SEQ ID NO: 70497 - RNA, 1701 nt, Artificial Sequence; identical to SEQ ID NO: 66680
  derived and/or modified CDS sequence (opt1) from hemagglutinin__InfluenzaA__ADX96447

SEQ ID NO: 70498 - RNA, 1701 nt, Artificial Sequence; identical to SEQ ID NO: 66693
  derived and/or modified CDS sequence (opt1) from hemagglutinin__InfluenzaA__ADX96497

SEQ ID NO: 70499 - RNA, 1701 nt, Artificial Sequence
  derived and/or modified CDS sequence (opt1) from hemagglutinin__InfluenzaA__ADX96507
augaaggccauccuggugguccuccuguacaccuucgccaccgcgaacgccgacacgcugugcaucggcuaccacgccaacaacagcaccgacaccguggacaccgugcucgagaagaacgucacggugacccacuccgugaaccugcuggaggacaagcacaacgggaagcucugcaagcugcgcggcgucgcgccccugcaccucgggaagugcaacaucgccggcuggauccuggggaacccggagugcgagagccuguccaccgccagcuccuggagcuacaucguggagaccuccagcuccgacaacggcacgugcuaccccggcgacuucaucgacuacgaggagcuccgggagcagcugagcuccgugagcuccuucgagcgcuucgagaucuuccccaagaccagcuccuggcccaaccacgacagcaacaagggggucaccgccgccugcccgcacgccggcgcgaaguccuucuacaagaaccugaucuggcucgugaagaaggggaacagcuaccccaagcuguccaagagcuacaucaacgacaagggcaaggaggugcugguccucugggggauccaccaccccagcaccuccgccgaccagcagagccuguaccagaacgccgacgccuacguguucgugggcacgucccgguacagcaagaaguucaagcccgagaucgccauccgcccgaagguccgggaccaggagggccgcaugaacuacuacuggacccugguggagcccggggacaagaucaccuucgaggcgaccggcaaccucguggucccccgguacgccuucgccauggagcgcaacgccggguccggcaucaucaucagcgacacgcccgugcacgacugcaacacgaccugccagaccccgaagggcgccaucaacaccucccugcccuuccagaacauccaccccaucaccaucgggaagugccccaaguacgucaagagcaccaagcugcggcucgcgaccggccugcgcaacgugccguccauccagagccgggggcuguucggcgccaucgccggguucaucgagggcggcuggacggggaugguggacggcugguacggguaccaccaccagaacgagcagggcuccggguacgccgccgaccucaagagcacccagaacgcgaucgacgagaucaccaacaaggugaacuccgucaucgagaagaugaacacccaguucacggccgugggcaaggaguucaaccaccuggagaagcgcaucgagaaccugaacaagaaggucgacgacggcuuccucgacaucuggaccuacaacgccgagcugcuggugcuccuggagaacgagcggacccuggacuaccacgacagcaacgugaagaaccucuacgagaagguccgcucccagcugaagaacaacgccaaggagaucgggaacggcugcuucgaguucuaccacaagugcgacaacacgugcauggagagcgugaagaacgggaccuacgacuaccccaaguacuccgaggaggccaagcugaaccgggaggagaucgacggcgugaagcucgagagcacccgcaucuaccagauccuggcgaucuacuccaccgucgccagcagccuggugcucguggucucccugggggccaucagcuucuggaugugcuccaccggcagccugcagugccggaucugcaucuga

SEQ ID NO: 70500 - RNA, 1701 nt, Artificial Sequence; identical to SEQ ID NO: 70499
  derived and/or modified CDS sequence (opt1) from hemagglutinin__InfluenzaA__ADX96517

SEQ ID NO: 70501 - RNA, 1701 nt, Artificial Sequence
  derived and/or modified CDS sequence (opt1) from hemagglutinin__InfluenzaA__ADX96527
augaaggccauccuggugguccuccuguacaccuucgccaccgcgaacgccgacacgcugugcaucggcuaccacgccaacaacagcaccgacaccguggacaccgugcucgagaagaacgucacggugacccacuccgugaaccugcuggaggacaagcacaacgggaagcucugcaagcugcgcggcgucgcgccccugcaccucgggaagugcaacaucgccggcuggauccuggggaacccggagugcgagagccuguccaccgccagcuccuggagcuacaucguggagaccuccagcuccgacaacggcacgugcuaccccggcgacuucaucgacuacgaggagcuccgggagcagcugagcuccgugagcuccuucgagcgcuucgagaucuuccccaagaccagcuccuggcccaaccacgacagcaacaagggggucaccgccgccugcccgcacgccggcgcgaaguccuucuacaagaaccugaucuggcucgugaagaaggggaacagcuaccccaagcuguccaagagcuacaucaacgacaagggcaaggaggugcugguccucugggggauccaccaccccagcaccuccgccgaccagcagagccuguaccagaacgccgacgccuacguguucgugggcacgucccgguacagcaagaaguucaagcccgagaucgccauccgcccgaagguccgggaccaggagggccgcaugaacuacuacuggacccugguggagcccggggacaagaucaccuucgaggcgaccggcaaccucguggucccccgguacgccuucgccauggagcgcaacgccggguccggcaucaucaucagcgacacgcccgugcacgacugcaacacgaccugccagaccccgaagggcgccaucaacaccucccugcccuuccagaacauccaccccaucaccaucgggaagugccccaaguacgucaagagcaccaagcugcggcucgcgaccggccugcgcaacgugccguccauccagagccgggggcuguucggcgccaucgccggguucaucgagggcggcuggacggggaugguggacggcugguacggguaccaccaccagaacgagcagggcuccggguacgccgccgaccucaagagcacccagaacgcgaucgacgagaucaccaacaaggugaacuccgucaucgagaagaugaacacccaguucacggccgugggcaaggaguucaaccaccuggagaagcgcaucgagaaccugaacaagaaggucgacgacggcuuccucgacaucuggaccuacaacgccgagcugcuggugcuccuggagaacgagcggacccuggacuaccacgacagcaacgugaagaaccucuacgagaagguccgcucccagcugaagaacaacgccaaggagaucgggaacggcugcuucgaguucuuccacaagugcgacaacacgugcauggagagcgugaagaacgggaccuacgacuaccccaaguacuccgaggaggccaagcugaaccgggaggagaucgacggcgugaagcucgagagcacccgcaucuaccagauccuggcgaucuacuccaccgucgccagcagccuggugcucguggucucccugggggccaucagcuucuggaugugcuccaacggcagccugcagugccggaucugcaucuga

SEQ ID NO: 70502 - RNA, 1701 nt, Artificial Sequence; identical to SEQ ID NO: 66693
  derived and/or modified CDS sequence (opt1) from hemagglutinin__InfluenzaA__ADX96537

SEQ ID NO: 70503 - RNA, 1701 nt, Artificial Sequence; identical to SEQ ID NO: 66693
  derived and/or modified CDS sequence (opt1) from hemagglutinin__InfluenzaA__ADX96547

SEQ ID NO: 70504 - RNA, 1701 nt, Artificial Sequence; identical to SEQ ID NO: 67794
  derived and/or modified CDS sequence (opt1) from hemagglutinin__InfluenzaA__ADX96557

SEQ ID NO: 70505 - RNA, 1701 nt, Artificial Sequence; identical to SEQ ID NO: 66693
  derived and/or modified CDS sequence (opt1) from hemagglutinin__InfluenzaA__ADX96587

SEQ ID NO: 70506 - RNA, 1701 nt, Artificial Sequence; identical to SEQ ID NO: 66680
  derived and/or modified CDS sequence (opt1) from hemagglutinin__InfluenzaA__ADX96597

SEQ ID NO: 70507 - RNA, 1701 nt, Artificial Sequence; identical to SEQ ID NO: 66680
  derived and/or modified CDS sequence (opt1) from hemagglutinin__InfluenzaA__ADX96607

SEQ ID NO: 70508 - RNA, 1701 nt, Artificial Sequence
  derived and/or modified CDS sequence (opt1) from hemagglutinin__InfluenzaA__ADX96627
augaaggccauccuggugguccuccuguacaccuucgccaccgcgaacgccgacacgcugugcaucggcuaccacgccaacaacagcaccgacaccguggacaccgugcucgagaagaacgucacggugacccacuccgugaaccugcuggaggacaagcacaacgggaagcucugcaagcugcgcggcgucgcgccccugcaccucgggaagugcaacaucgccggcuggauccuggggaacccggagugcgagagccuguccaccgccagcuccuggagcuacaucguggagaccuccagcuccgacaacggcacgugcuaccccggcgacuucaucgacuacgaggagcuccgggagcagcugagcuccgugagcuccuucgagcgcuucgagaucuuccccaagaccagcuccuggcccaaccacgacagcaacaagggggucaccgccgccugcccgcacgccggcgcgaaguccuucuacaagaaccugaucuggcucgugaagaaggggaacagcuaccccaagcuguccaagagcuacaucaacgacaagggcaaggaggugcugguccucugggggauccaccaccccagcaccuccgccgaccagcagagccuguaccagaacgccgacgccuacguguucgugggcacgucccgguacagcaagaaguucaagcccgagaucgccauccgcccgaagguccgggaccaggagggccgcaugaacuacuacuggacccugguggagcccggggacaagaucaccuucgaggcgaccggcaaccucguggucccccgguacgccuucgccauggagaagaacgccggguccggcaucaucaucagcgacacgcccgugcacgacugcaacacgaccugccagaccccgaagggcgccaucaacaccucccugcccuuccagaacauccaccccaucaccaucgggaagugccccaaguacgucaagagcaccaagcugcgccucgcgaccggccugcggaacgugccguccauccagagccgcgggcuguucggcgccaucgccggguucaucgagggcggcuggacggggaugguggacggcugguacggguaccaccaccagaacgagcagggcuccggguacgccgccgaccucaagagcacccagaacgcgaucgacgagaucaccaacaaggugaacuccgucaucgagaagaugaacacccaguucacggccgugggcaaggaguucaaccaccuggagaagcggaucgagaaccugaacaagaaggucgacgacggcuuccucgacaucuggaccuacaacgccgagcugcuggugcuccuggagaacgagcgcacccuggacuaccacgacagcaacgugaagaaccucuacgagaagguccggucccagcugaagaacaacgccaaggagaucgggaacggcugcuucgaguucuaccacaagugcgacaacacgugcauggagagcgugaagaacgggaccuacgacuaccccaaguacuccgaggaggccaagcugaaccgcgaggagaucgacggcgugaagcucgagagcacccggaucuaccagauccuggcgaucuacuccaccgucgccagcagccuggugcucguggucucccugggggccaucagcuucuggaugugcuccaccggcagccugcagugccgcaucugcaucuga

SEQ ID NO: 70509 - RNA, 1701 nt, Artificial Sequence; identical to SEQ ID NO: 67140
  derived and/or modified CDS sequence (opt1) from hemagglutinin__InfluenzaA__ADX96637

SEQ ID NO: 70510 - RNA, 1701 nt, Artificial Sequence; identical to SEQ ID NO: 66693
  derived and/or modified CDS sequence (opt1) from hemagglutinin__InfluenzaA__ADX96647

SEQ ID NO: 70511 - RNA, 1701 nt, Artificial Sequence; identical to SEQ ID NO: 66680
  derived and/or modified CDS sequence (opt1) from hemagglutinin__InfluenzaA__ADX96657

SEQ ID NO: 70512 - RNA, 1701 nt, Artificial Sequence; identical to SEQ ID NO: 66693
  derived and/or modified CDS sequence (opt1) from hemagglutinin__InfluenzaA__ADX96667

SEQ ID NO: 70513 - RNA, 1701 nt, Artificial Sequence
  derived and/or modified CDS sequence (opt1) from hemagglutinin__InfluenzaA__ADX96677
augaaggccauccuggugguccuccuguacaccuucgccaccgcgaacgccgacacgcugugcaucggcuaccacgccaacaacagcaccgacaccguggacaccgugcucgagaagaacgucacggugacccacuccgugaaccugcuggaggacaagcacaacgggaagcucugcaagcugcgcggcgucgcgccccugcaccucgggaagugcaacaucgccggcuggauccuggggaacccggagugcgagagccuguccaccgccagcuccuggagcuacaucguggagaccuccagcuccgacaacggcacgugcuaccccggcgacuucaucgacuacgaggagcuccgggagcagcugagcuccgugagcuccuucgagcgcuucgagaucuuccccaagaccagcuccuggcccaaccacgacagcaacaagggggucaccgccgccugcccgcacgccggcgcgaaguccuucuacaagaaccugaucuggcucgugaagaaggggaacagcuaccccaagcuguccaagagcuacaucaacgacaagggcaaggaggugcugguccucugggggauccaccaccccagcaccuccgccgaccagcagagccuguaccagaacgccgacgccuacguguucgugggcuccagccgguacuccaagaaguucaagcccgagaucgccauccgcccgaagguccgggaccaggagggccgcaugaacuacuacuggacggugguggagcccggggacaagaucaccuucgaggcgaccggcaaccuggucgugccccgguacgccuucgccauggagcgcaacgccgggagcggcaucaucaucuccgacacccccgugcacgacugcaacacgaccugccagaccccgaagggcgccaucaacaccagccuccccuuccacaacauccaccccaucacgaucgggaagugccccaaguacgucaaguccaccaagcugcggcuggcgaccggccuccgcaacgugccgagcauccagucccgggggcuguucggcgccaucgccggguucaucgagggcggcuggaccgggaugguggacggcugguacggguaccaccaccagaacgagcagggcagcggguacgccgccgaccugaaguccacgcagaacgcgaucgacgagaucaccaacaaggucaacagcgugaucgagaagaugaacacccaguucaccgccgucggcaaggaguucaaccaccucgagaagcgcaucgagaaccugaacaagaagguggacgacggcuuccuggacaucuggacguacaacgccgagcuccuggugcugcucgagaacgagcggacccuggacuaccacgacuccaacgucaagaaccuguacgagaaggugcgcagccagcucaagaacaacgccaaggagaucgggaacggcugcuucgaguucuaccacaagugcgacaacacgugcauggaguccgugaagaacgggaccuacgacuaccccaaguacagcgaggaggccaagcugaaccgggaggagaucgacggcgucaagcuggaguccacccgcaucuaccagauccucgcgaucuacagcaccguggccagcucccuggugcuggucgugagccucggggccaucuccuucuggaugugcagcaacggcucccugcagugccggaucugcaucuga

SEQ ID NO: 70514 - RNA, 1701 nt, Artificial Sequence
  derived and/or modified CDS sequence (opt1) from hemagglutinin__InfluenzaA__ADX96687
augaaggccauccuggugguccuccuguacaccuucgccaccgcgaacgccgacacgcugugcaucggcuaccacgccaacaacagcaccgacaccguggacaccgugcucgagaagaacgucacggugacccacuccgugaaccugcuggaggacaagcacaacgggaagcucugcaagcugcgcggcgucgcgccccugcaccucgggaagugcaacaucgccggcuggauccuggggaacccggagugcgagagccuguccaccgccagcuccuggagcuacaucguggagaccuccagcuccgacaacggcacgugcuaccccggcgacuucaucgacuacgaggagcuccgggagcagcugagcuccgugagcuccuucaagcgcuucgagaucuuccccaagaccagcuccuggcccaaccacgacagcaacaagggggucaccgccgccugcccgcacgccggcgcgaaguccuucuacaagaaccugaucuggcucgugaagaaggggaacagcuaccccaagcuguccaagagcuacaucaacgacaagggcaaggaggugcugguccucugggggauccaccaccccagcaccuccgccgaccagcagagccuguaccagaacgccgacgccuacguguucgugggcacgucccgguacagcaagaaguucaagcccgagaucgccauccgcccgaagguccgggaccaggagggccgcaugaacuacuacuggacccugguggagcccggggacaagaucaccuucgaggcgaccggcaaccucguggucccccgguacgccuucgccauggagcgcaacgccggguccggcaucaucaucagcgacacgcccguguacgacugcaacacgaccugccagaccccgaagggcgccaucaacaccucccugcccuuccagaacauccaccccaucaccaucgggaagugccccaaguacgucaagagcaccaagcugcggcucgcgaccggccugcgcaacgugccguccauccagagccgggggcuguucggcgccaucgccggguucaucgagggcggcuggacggggaugguggacggcugguacggguaccaccaccagaacgagcagggcuccggguacgccgccgaccucaagagcacccagaacgcgaucgacgagaucaccaacaaggugaacuccgucaucgagaagaugaacacccaguucacggccgugggcaaggaguucaaccaccuggagaagcgcaucgagaaccugaacaagaaggucgacgacggcuuccucgacaucuggaccuacaacgccgagcugcuggugcuccuggagaacgagcggacccuggacuaccacgacagcaacgugaagaaccucuacgagaagguccgcucccagcugaagaacaacgccaaggagaucgggaacggcugcuucgaguucuaccacaagugcgacaacacgugcauggagagcgugaagaacgggaccuacgacuaccccaaguacuccgaggaggccaagcugaaccgggaggagaucgacggcgugaagcucgagagcacccgcaucuaccagauccuggcgaucuacuccaccgucgccagcagccuggugcucguggucucccugggggccaucagcuucuggaugugcuccaacggcagccugcagugccggaucugcaucuga

SEQ ID NO: 70515 - RNA, 1701 nt, Artificial Sequence; identical to SEQ ID NO: 66693
  derived and/or modified CDS sequence (opt1) from hemagglutinin__InfluenzaA__ADX96697

SEQ ID NO: 70516 - RNA, 1701 nt, Artificial Sequence
  derived and/or modified CDS sequence (opt1) from hemagglutinin__InfluenzaA__ADX96707
augaaggccauccuggugguccuccuguacaccuucgccaccgcgaacgccgacacgcugugcaucggcuaccacgccaacaacagcaccgacaccguggacaccgugcucgagaagaacgucacggugacccacuccgugaaccugcuggaggacaagcacaacgggaagcucugcaagcugcgcggcgucgcgccccugcaccucgggaagugcaacaucgccggcuggauccuggggaacccggagugcgagagccuguccaccgccagcuccuggagcuacaucguggagaccuccagcuccgacaacggcacgugcuaccccggcgacuucaucgacuacgaggagcuccgggagcagcugagcuccgugagcuccuucgagcgcuucgagaucuuccccaagaccagcuccuggcccaaccacgacagcaacaagggggucaccgccgccugcccgcacgccggcgcgaaguccuucuacaagaaccugaucuggcucgugaagaaggggaacagcuaccccaagcuguccaagagcuacaucaacgacaagggcaaggaggugcugguccucugggggauccaccaccccagcaccuccgccgaccagcagagccuguaccagaacgccgacgccuacguguucgugggcacgucccgguacagcaagaaguucaagcccgagaucgccauccgcccgaagguccgggaccaggagggccgcaugaacuacuacuggacccugguggagcccggggacaagaucaccuucgaggcgaccggcaaccucguggucccccgguacgccuucgccauggagcgcaacgccggguccggcaucaucaucagcgacacgcccgugcacgacugcgacacgaccugccagaccccgaagggcgccaucaacaccucccugcccuuccagaacauccaccccaucaccaucgggaagugccccaaguacgucaagagcaccaagcugcggcucgcgaccggccugcgcaacgugccguccauccagagccgggggcuguucggcgccaucgccggguucaucgagggcggcuggacggggaugguggacggcugguacggguaccaccaccagaacgagcagggcuccggguacgccgccgaccucaagagcacccagaacgcgaucgacaagaucaccaacaaggugaacuccgucaucgagaagaugaacacccaguucacggccgugggcaaggaguucaaccaccuggagaagcgcaucgagaaccugaacaagaaggucgacgacggcuuccucgacaucuggaccuacaacgccgagcugcuggugcuccuggagaacgagcggacccuggacuaccacgacagcaacgugaagaaccucuacgagaagguccgcucccagcugaagaacaacgccaaggagaucgggaacggcugcuucgaguucuaccacaagugcgacaacacgugcauggagagcgugaagaacgggaccuacgacuaccccaaguacuccgaggaggccaagcugaaccgggaggagaucgacggcgugaagcucgagagcacccgcaucuaccagauccuggcgaucuacuccaccgucgccagcagccuggugcucguggucucccugggggccaucagcuucuggaugugcuccaccggcagccugcagugccggaucugcaucuga

SEQ ID NO: 70517 - RNA, 1701 nt, Artificial Sequence; identical to SEQ ID NO: 67853
  derived and/or modified CDS sequence (opt1) from hemagglutinin__InfluenzaA__ADX96727

SEQ ID NO: 70518 - RNA, 1701 nt, Artificial Sequence
  derived and/or modified CDS sequence (opt1) from hemagglutinin__InfluenzaA__ADX96737
augaaggccauccuggugguccuccuguacaccuucgccaccgcgaacgccgacacgcugugcaucggcuaccacgccaacaacagcaccgacaccguggacaccgugcucgagaagaacgucacggugacccacuccgugaaccugcuggaggacaagcacaacgggaagcucugcaagcugcgcggcgucgcgccccugcaccucgggaagugcaacaucgccggcuggauccuggggaacccggagugcgagagccuguccaccgccagcuccuggagcuacaucguggagaccuccagcuccgacaacggcacgugcuaccccggcgacuucaucgacuacgaggagcuccgggagcagcugagcuccgugagcuccuucgagcgcuucgagaucuuccccaagaccagcuccuggcccaaccacgacagcaacaagggggucaccgccgccugcccgcacgccggcgcgaaguccuucuacaagaaccugaucuggcucgugaagaaggggaacagcuaccccaagcuguccaagagcuacaucaacgacaagggcaaggaggugcugguccucugggggauccaccaccccagcaccuccgccgaccagcagagccuguaccagaacgccgacgccuacguguucgugggcacgucccgguacagcaagaaguucaagcccgagaucgccauccgcccgaaggucaaggagcaggagggccggaugaacuacuacuggacccugguggagcccggggacaagaucaccuucgaggcgaccggcaaccucguggucccccgcuacgccuucgccauggagcggaaggccggguccggcaucaucaucagcgacacgcccgugcacgacugcaacacgaccugccagaccccgaagggcgccaucaacaccucccugcccuuccagaacauccacagcaucaccaucgggaagugccccaaguacgugaaguccaccaagcugcgccucgcgaccggccugcggaacguccccagcauccagucccgcgggcuguucggcgccaucgccggguucaucgagggcggcuggacggggaugguggacggcugguacggguaccaccaccagaacgagcagggcagcggguacgccgccgaccucaaguccacccagaacgcgaucgacgagaucaccaacaaggugaacagcgucaucgagaagaugaacacccaguucacggccgugggcaaggaguucaaccaccuggagaagcggaucgagaaccugaacaagaaggucgacgacggcuuccucgacaucuggaccuacaacgccgagcugcuggugcuccuggagaacgagcgcacccuggacuaccacgacuccaacgugaagaaccucuacgagaagguccggagccagcugaagaacaacgccaaggagaucgggaacggcugcuucgaguucuaccacaagugcgacaacacgugcauggaguccgugaagaacgggaccuacgacuacccgaaguacagcgaggaggccaagcugaaccgcgaggagaucgacggcgugaagcucgaguccacccggaucuaccagauccuggcgaucuacagcaccgucgccagcucccuggugcucgugaucagccugggggccaucuccuucuggaugugcagcaccggcucccugcagugccgcaucugcaucuga

SEQ ID NO: 70519 - RNA, 1701 nt, Artificial Sequence; identical to SEQ ID NO: 66693
  derived and/or modified CDS sequence (opt1) from hemagglutinin__InfluenzaA__ADX96747

SEQ ID NO: 70520 - RNA, 1701 nt, Artificial Sequence
  derived and/or modified CDS sequence (opt1) from hemagglutinin__InfluenzaA__ADX96757
augaaggccauccuggugguccuccuguacaccuucgccaccgcgaacgccgacacgcugugcaucggcuaccacgccaacaacagcaccgacaccguggacaccgugcucgagaagaacgucacggugacccacuccgugaaccugcuggaggacaagcacaacgggaagcucugcaagcugcgcggcgucgcgccccugcaccucgggaagugcaacaucgccggcuggauccuggggaacccggagugcgagagccuguccaccgccagcuccuggagcuacaucguggagaccuccagcuccggcaacggcacgugcuaccccggggacuucaucgacuacgaggagcuccgggagcagcugagcuccgugagcuccuucgagcgcuucgagaucuuccccaagaccagcuccuggcccaaccacgacagcaacaagggcgucaccgccgccugcccgcacgccggggcgaaguccuucuacaagaaccugaucuggcucgugaagaagggcaacagcuaccccaagcuguccaagagcuacaucaacgacaaggggaaggaggugcugguccucuggggcauccaccaccccagcaccuccgccgaccagcagagccuguaccagaacgccgacgccuacguguucgugggcacgucccgguacagcaagaaguucaagcccgagaucgccauccgcccgaagguccgggaccaggaggggcgcaugaacuacuacuggacccugguggugcccggcgacaagaucaccuucgaggcgaccgggaaccucgucgugccccgguacgccuucgccauggagcgcaacgccggcuccggcaucaucaucagcgacacgcccgugcacgacugcaacacgaccugccagaccccgaagggggccaucaacaccucccugcccuuccagaacauccaccccaucaccaucggcaagugccccaaguacgucaagagcaccaagcugcggcucgcgaccgggcugcgcaacgugccguccauccagagccggggccuguucggggccaucgccggcuucaucgagggcggguggacgggcaugguggacgggugguacggcuaccaccaccagaacgagcagggguccggcuacgccgccgaccucaagagcacccagaacgcgaucgacgagaucaccaacaaggucaacuccgugaucgagaagaugaacacccaguucacggccgucggcaaggaguucaaccaccuggagaagcgcaucgagaaccugaacaagaagguggacgacggguuccucgacaucuggaccuacaacgccgagcugcuggugcuccuggagaacgagcggacccuggacuaccacgacagcaacgucaagaaccucuacgagaaggugcgcucccagcugaagaacaacgccaaggagaucggcaacgggugcuucgaguucuaccacaagugcgacaacacgugcauggagagcgugaagaacggcaccuacgacuaccccaaguacuccgaggaggccaagcugaaccgggaggagaucgacggggucaagcucgagagcacccgcaucuaccagauccuggcgaucuacuccaccguggccagcagccuggugcucgucgugucccugggcgccaucagcuucuggaugugcuccaccggcagccugcagugccggaucugcaucuga

SEQ ID NO: 70521 - RNA, 1701 nt, Artificial Sequence
  derived and/or modified CDS sequence (opt1) from hemagglutinin__InfluenzaA__ADX96767
augaaggccauccuggugguccuccuguacaccuucgccaccgcgaacgccgacacgcugugcaucggcuaccacgccaacaacagcaccgacaccguggacaccgugcucgagaagaacgucacggugacccacuccgugaaccugcuggaggacaagcacaacgggaagcucugcaagcugcgcggcgucgcgccccugcaccucgggaagugcaacaucgccggcuggauccuggggaacccggagugcgagagccuguccaccgccagcuccuggagcuacaucguggagaccuccagcuccgacaacggcacgugcuaccccggcgacuucaucgacuacgaggagcuccgggagcagcugagcuccgugagcuccuucgagcgcuucgagaucuuccccaagaccagcuccuggcccaaccacgacagcaacaagggggucaccgccgccugcccgcacgccggcgcgaaguccuucuacaagaaccugaucuggcucgugaagaaggggaacagcuaccccaagcuguccaagagcuacaucaacgacaagggcaaggaggugcugguccucugggggauccaccaccccagcaccuccgccgaccagcagagccuguaccagaacgccgacgccuacguguucgugggcacgucccgguacagcaagaaguucaagcccgagaucgccauccgcccgaagguccgggaccaggagggccgcaugaacuacuacuggacccugguggaguccggggacaagaucaccuucgaggcgaccggcaaccucguggucccccgguacgccuucgccauggagcgcaacgccgggagcggcaucaucaucuccgacacgcccgugcacgacugcaacacgaccugccagacccccaagggcgccaucaacaccagccugccguuccagaacauccaccccaucaccaucgggaagugccccaaguacgugaaguccaccaagcugcggcucgcgaccggccugcgcaacguccccagcauccagucccgggggcuguucggcgccaucgccggguucaucgagggcggcuggacggggaugguggacggcugguacggguaccaccaccagaacgagcagggcagcggguacgccgccgaccucaaguccacccagaacgcgaucgacgagaucaccaacaaggugaacagcgucaucgagaagaugaacacccaguucacggccgugggcaaggaguucaaccaccuggagaagcgcaucgagaaccugaacaagaaggucgacgacggcuuccucgacaucuggaccuacaacgccgagcugcuggugcuccuggagaacgagcggacccuggacuaccacgacuccaacgugaagaagcucuacgagaagguccgcagccagcugaagaacaacgccaaggagaucgggaacggcugcuucgaguucuaccacaagugcgacaacacgugcauggaguccgugaagaacgggaccuacgacuacccgaaguacagcgaggaggccaagcugaaccgggaggagaucgacggcgugaagcucgaguccacccgcaucuaccagauccuggcgaucuacagcaccgucgccagcucccuggugcucguggucagccugggggccaucuccuucuggaugugcagcaccggcucccugcagugccggaucugcaucuga

SEQ ID NO: 70522 - RNA, 1701 nt, Artificial Sequence
  derived and/or modified CDS sequence (opt1) from hemagglutinin__InfluenzaA__ADX96777
augaaggccauccuggugguccuccuguacaccuucgccaccgcgaacgccgacacgcugugcaucggcuaccacgccaacaacagcaccgacaccguggacaccgugcucgagaagaacgucacggugacccacuccgugaaccugcuggaggacaagcacaacgggaagcucugcaagcugcgcggcgucgcgccccugcaccucgggaagugcaacaucgccggcuggauccuggggaacccggagugcgagagccuguccaccgccagcuccuggagcuacaucguggagaccuccagcuccgacaacggcacgugcuaccccggcgacuucaucgacuacgaggagcuccgggagcagcugagcuccgugagcuccuucgagcgcuucgagaucuuccccaagaccagcuccuggcccaaccacgacagcaacaagggggucaccgccgccugcccgcacgccggcgcgaaguccuucuacaagaaccugaucuggcucgugaagaaggggaacagcuaccccaagcuguccaagagcuacaucaacgacaagggcaaggaggugcugguccucugggggauccaccaccccagcaccuccgccgaccagcagagccuguaccagaacgccgacgccuacguguucgugggcacgucccgguacagcaagaaguucaagcccgagaucgccauccgcccgaagguccgggaccaggagggccgcaugaacuacuacuggacccugguggugcccggggacaagaucaccuucgaggcgaccggcaaccucgucgugccccgguacgccuucgccauggagcgcaacgccggguccggcaucaucaucagcgacacgcccgugcacgacugcaacacgaccugccagaccccgaagggcgccaucaacaccucccugcccuuccagaacauccacagcaucaccaucgggaagugccccaaguacgucaaguccaccaagcugcggcucgcgaccggccugcgcaacgugcccagcauccagucccgggggcuguucggcgccaucgccggguucaucgagggcggcuggacggggaugguggacggcugguacggguaccaccaccagaacgagcagggcagcggguacgccgccgaccucaaguccacccagaacgcgaucgacgagaucaccaacaaggucaacagcgugaucgagaagaugaacacccaguucacggccgucggcaaggaguucaaccaccuggagaagcgcaucgagaaccugaacaagaagguggacgacggcuuccucgacaucuggaccuacaacgccgagcugcuggugcuccuggagaacgagcggacccuggacuaccacgacuccaacgucaagaaccucuacgagaaggugcgcagccagcugaagaacaacgccaaggagaucgggaacggcugcuucgaguucuaccacaagugcgacaacacgugcauggaguccgugaagaacgggaccuacgacuacccgaaguacagcgaggaggccaagcugaaccgggaggagaucgacggcgucaagcucgaguccacccgcaucuaccagauccuggcgaucuacagcaccguggccagcucccuggugcucgucgugagccugggggccaucuccuucuggaugugcagcaacggcucccugcagugccggaucugcaucuga

SEQ ID NO: 70523 - RNA, 1701 nt, Artificial Sequence; identical to SEQ ID NO: 66693
  derived and/or modified CDS sequence (opt1) from hemagglutinin__InfluenzaA__ADX96787

SEQ ID NO: 70524 - RNA, 1701 nt, Artificial Sequence; identical to SEQ ID NO: 69920
  derived and/or modified CDS sequence (opt1) from hemagglutinin__InfluenzaA__ADX96797

SEQ ID NO: 70525 - RNA, 1701 nt, Artificial Sequence
  derived and/or modified CDS sequence (opt1) from hemagglutinin__InfluenzaA__ADX96807
augaaggccauccuggugguccuccuguacaccuucgccaccgcgaacgccgacacgcugugcaucggcuaccacgccaacaacagcaccgacaccguggacaccgugcucgagaagaacgucacggugacccacuccgugaacauccuggaggacaagcacaacgggaagcugugcaagcuccgcggcgucgcgccccugcaccuggggaagugcaacaucgccggcuggauccucgggaacccggagugcgagagccuguccaccgccagcuccuggagcuacaucguggagaccuccagcuccgacaacggcacgugcuaccccggcgacuucaucgacuacgaggagcugcgggagcagcucagcuccgugagcuccuucgagcgcuucgagaucuuccccaagaccagcuccuggcccaaccacgacagcaacaagggggucaccgccgccugcccgcacgccggcgcgaaguccuucuacaagaaccugaucuggcuggugaagaaggggaacagcuaccccaagcucuccaagagcuacaucaacgacaagggcaaggaggugcugguccugugggggauccaccaccccagcaccuccgccgaccagcagagccucuaccagaacgccgacgccuacguguucgugggcuccagccgguucuccaagaaguucaagcccgagaucgccauccgcccgaagguccgggaccaggagggccgcaugaacuacuacuggacgcugguggagcccggggacaagaucaccuucgaggcgaccggcaaccugguggucccccgguacgccuucgccauggagcgcaacgccgggagcggcaucaucaucuccgacacccccgugcacgacugcaacacgaccugccagaccccgaagggcgccaucaacaccagccuccccuuccagaacauccaccccaucacgaucgggaagugccccaaguacgugaaguccaccaagcugcggcuggcgaccggccuccgcaacgucccgagcauccagucccgggggcuguucggcgccaucgccggguucaucgagggcggcuggaccgggaugguggacggcugguacggguaccaccaccagaacgagcagggcagcggguacgccgccgaccugaaguccacgcagaacgcgaucgacgagaucaccaacaaggugaacagcgucaucgagaagaugaacacccaguucaccgccgugggcaaggaguucaaccaccucgagaagcgcaucgagaaccugaacaagaaggucgacgacggcuuccuggacaucuggacguacaacgccgagcuccuggugcugcucgagaacgagcggacccuggacuaccacgacuccaacgugaagaaccuguacgagaagguccgcagccagcucaagaacaacgccaaggagguggggaacggcugcuucgaguucuaccacaagugcgacaacacgugcauggaguccgugaagaacgggaccuacgacuaccccaaguacagcgaggaggccaagcugaaccgggaggagaucgacggcgucaagcuggaguccacccgcaucuaccagauccucgcgaucuacagcaccguggccagcucccuggugcuggucgugagccucggggccaucuccuucuggaugugcagcaacggcucccugcagugccggaucugcaucuga

SEQ ID NO: 70526 - RNA, 1701 nt, Artificial Sequence; identical to SEQ ID NO: 66680
  derived and/or modified CDS sequence (opt1) from hemagglutinin__InfluenzaA__ADX96817

SEQ ID NO: 70527 - RNA, 1701 nt, Artificial Sequence
  derived and/or modified CDS sequence (opt1) from hemagglutinin__InfluenzaA__ADX96837
augaaggccauccuggugguccuccuguacaccuucgccaccgcgaacgccgacacgcugugcaucggcuaccacgccaacaacagcaccgacaccguggacaccgugcucgagaagaacgucacggugacccacuccgugaacauccuggaggacaagcacaacgggaagcugugcaagcuccgcggcgucgcgccccugcaccuggggaagugcaacaucgccggcuggauccucgggaacccggagugcgagagccuguccaccgccagcuccuggagcuacaucguggagaccuccagcuccgacaacggcacgugcuaccccggcgacuucaucgacuacgaggagcugcgggagcagcucagcuccgugagcuccuucgagcgcuucgagaucuuccccaagaccagcuccuggcccaaccacgacagcaacaagggggucaccgccgccugcccguacgccggcgcgaaguccuucuacaagaaccugaucuggcuggugaagaaggggaacagcuaccccaagcucuccaagagcuacaucaacgacaagggcaaggaggugcugguccugugggggauccaccaccccagcaccuccgccgaccagcagagccucuaccagaacgccgacgccuacguguucgugggcuccagccgguacuccaagaaguucaagcccgagaucgccauccgcccgaagguccgggaccaggagggccgcaugaacuacuacuggacgcugguggagcccggggacaagaucaccuucgaggcgaccggcaaccugguggucccccgguacgccuucgccauggagcgcaacgccgggagcggcaucaucaucuccgacacccccgugcacgacugcaacacgaccugccagaccccgaagggcgccaucaacaccagccuccccuuccagaacauccaccccaucacgaucgggaagugccccaaguacgugaaguccaccaagcugcggcuggcgaccggccuccgcaacgucccgagcauccagucccgggggcuguucggcgccaucgccggguucaucgagggcggcuggaccgggaugguggacggcugguacggguaccaccaccagaacgagcagggcagcggguacgccgccgaccugaaguccacgcagaacgcgaucgacgagaucaccaacaaggugaacagcgucaucgagaagaugaacacccaguucaccgccgugggcaaggaguucaaccaccucgagaagcgcaucgagaaccugaacaagaaggucgacgacggcuuccuggacaucuggacguacaacgccgagcuccuggugcugcucgagaacgagcggacccuggacuaccacgacuccaacgugaagaaccuguacgagaagguccgcagccagcucaagaacaacgccaaggagguggggaacggcugcuucgaguucuaccacaagugcgacaacacgugcauggaguccgugaagaacgggaccuacgacuaccccaaguacagcgaggaggccaagcugaaccgggaggagaucgacggcgucaagcuggaguccacccgcaucuaccagauccucgcgaucuacagcaccguggccagcucccuggugcuggucgugagccucggggccaucuccuucuggaugugcagcaccggcucccugcagugccggaucugcaucuga

SEQ ID NO: 70528 - RNA, 1701 nt, Artificial Sequence; identical to SEQ ID NO: 66693
  derived and/or modified CDS sequence (opt1) from hemagglutinin__InfluenzaA__ADX96847

SEQ ID NO: 70529 - RNA, 1701 nt, Artificial Sequence; identical to SEQ ID NO: 66693
  derived and/or modified CDS sequence (opt1) from hemagglutinin__InfluenzaA__ADX96857

SEQ ID NO: 70530 - RNA, 1701 nt, Artificial Sequence; identical to SEQ ID NO: 66873
  derived and/or modified CDS sequence (opt1) from hemagglutinin__InfluenzaA__ADX96867

SEQ ID NO: 70531 - RNA, 1701 nt, Artificial Sequence; identical to SEQ ID NO: 69630
  derived and/or modified CDS sequence (opt1) from hemagglutinin__InfluenzaA__ADX96877

SEQ ID NO: 70532 - RNA, 1701 nt, Artificial Sequence
  derived and/or modified CDS sequence (opt1) from hemagglutinin__InfluenzaA__ADX96897
augaaggccauccuggugguccuccuguacaccuucgccaccgcgaacgccgacacgcugugcaucggcuaccacgccaacaacagcaccgacaccguggacaccgugcucgagaagaacgucacggugacccacuccgugaaccugcuggaggacaagcacaacgggaagcucugcaagcugcgcggcgucgcgccccugcaccucgggaagugcaacaucgccggcuggauccuggggaacccggagugcgagagccuguccaccgccagcuccuggagcuacaucguggagaccuccagcuccgacaacggcacgugcuaccccggcgacuucaucgacuacgaggagcuccgggagcagcugagcuccgugagcuccuucgagcgcuucgagaucuuccccaagaccagcuccuggcccaaccacgacagcaacaagggggucaccgccgccugcccgcacgccggcgcgaaguccuucuacaagaaccugaucuggcucgugaagaaggggaacagcuaccccaagcuguccaagagcuacaucaacgacaagggcaaggaggugcugguccucugggggauccaccaccccagcaccuccgccgaccagcagagccuguaccagaacgccgacgccuacguguucgugggcacgucccgguacagcaagaaguucaagcccgagaucgccauccgcccgaagguccgggaccaggagggccgcaugaacuacuacuggacccugguggagcccggggacaagaucaccuucgaggcgaccggcaaccucguggucccccgguacgccuucgccauggagcgcaacgccggguccggcaucaucaucagcgacacgcccauccacgacugcaacacgaccugccagaccccgaagggcgccaucaacaccucccugcccuuccagaacauccaccccaucaccaucgggaagugccccaaguacgucaagagcaccaagcugcggcucgcgaccggccugcgcaacgugccguccauccagagccgggggcuguucggcgccaucgccggguucaucgagggcggcuggacggggaugguggacggcugguacggguaccaccaccagaacgagcagggcuccggguacgccgccgaccucaagagcacccagaacgcgaucgacaagaucaccaacaaggugaacuccgugaucgagaagaugaacacccaguucacggccgucggcaaggaguucaaccaccuggagaagcgcaucgagaaccugaacaagaagguggacgacggcuuccucgacaucuggaccuacaacgccgagcugcugguccuccuggagaacgagcggacccuggacuaccacgacagcaacgugaagaaccucuacgagaaggugcgcucccagcugaagaacaacgccaaggagaucgggaacggcugcuucgaguucuaccacaagugcgacaacacgugcauggagagcgucaagaacgggaccuacgacuaccccaaguacuccgaggaggccaagcugaaccgggaggagaucgacggcgugaagcucgagagcacccgcaucuaccagauccuggcgaucuacuccaccguggccagcagccugguccucguggugucccugggggccaucagcuucuggaugugcuccaacggcagccugcagugccggaucugcaucuga

SEQ ID NO: 70533 - RNA, 1701 nt, Artificial Sequence
  derived and/or modified CDS sequence (opt1) from hemagglutinin__InfluenzaA__ADX96907
augaaggccauccuggugguccuccuguacaccuucgccaccgcgaacgccgacacgcugugcaucggcuaccacgccaacaacagcaccgacaccguggacaccgugcucgagaagaacgucacggugacccacuccgugaaccugcuggaggacaagcacagcgggaagcucugcaagcugcgcggcgucgcgccccugcaccucgggaagugcaacaucgccggcuggauccuggggaacccggagugcgagucccugagcaccgccuccagcugguccuacaucguggagaccagcuccagcgacaacggcacgugcuaccccggcgacuucaucgacuacgaggagcuccgggagcagcuguccagcguguccagcuucgagcgcuucgagaucuuccccaagaccuccagcuggcccaaccacgacuccagcaagggggucaccgccgccugcccgcacgccggcgcgaaguccuucuacaagaaccugaucuggcucgugaagaaggggaacagcuaccccaagcugagcaaguccuacaucaacgacaagggcaaggaggugcugguccucugggggauccaccaccccagcaccuccgccgaccagcagagccuguaccagaacgccgacgccuacguguucgugggcacgucccgguacagcaagaaguucaagcccgagaucgccauccgcccgaagguccgggaccaggagggccgcaugaacuacuacuggacccugguggagcccggggacaagaucaccuucgaggcgaccggcaaccucguggucccccgguacgccuucgccauggagcgcaacgccggguccggcaucaucaucagcgacacgcccgugcacgacugcaacacgaccugccagaccccgaagggcgccaucaacaccucccugcccuuccagaacauccaccccaucaccaucgggaagugccccaaguacgucaagagcaccaagcugcggcucgcgaccggccugcgcaacgugccguccauccagagccgggggcuguucggcgccaucgccggguucaucgagggcggcuggacggggaugguggacggcugguacggguaccaccaccagaacgagcagggcuccggguacgccgccgaccucaagagcacccagaacgcgaucgacaagaucaccaacaaggugaacuccgucaucgagaagaugaacacccaguucacggccgugggcaaggaguucaaccaccuggagaagcgcaucgagaaccugaacaagaaggucgacgacggcuuccucgacaucuggaccuacaacgccgagcugcuggugcuccuggagaacgagcggacccuggacuaccacgacagcaacgugaagaaccucuacgagaagguccgcucccagcugaagaacaacgccaaggagaucgggaacggcugcuucgaguucuaccacaagugcgacaacacgugcauggagagcgugaagaacgggaccuacgacuaccccaaguacuccgaggaggccaagcugaaccgggaggagaucgacggcgugaagcucgagagcacccgcaucuaccagauccuggcgaucuacagcaccgucgccuccagccuggugcucguggucucccugggggccaucagcuucuggaugugcuccaacggcagccugcagugccggaucugcaucuga

SEQ ID NO: 70534 - RNA, 1701 nt, Artificial Sequence
  derived and/or modified CDS sequence (opt1) from hemagglutinin__InfluenzaA__ADX96927
augaaggccauccuggugguccuccuguacaccuucgccaccgcgaacgccgacacgcugugcaucggcuaccacgccaacaacagcaccgacaccguggacacccuccuggagaagaacgugacggucacccacuccgugaaccugcucgaggacaagcacaacgggaagcugugcaagcugcgcggcguggcgccccuccaccuggggaagugcaacaucgccggcuggauccuggggaacccggagugcgagagccucuccaccgccagcuccuggagcuacaucgucgagaccuccagcuccgacaacggcacgugcuaccccggcgacuucaucgacuacgaggagcugcgggagcagcugagcuccgugagcuccuucgagcgcuucgagaucuuccccaagaccagcuccuggcccaaccacgacagcaacaagggggugaccgccgccugcccgcacgccggcgcgaaguccuucuacaagaaccucaucuggcuggucaagaaggggaacagcuaccccaagcuguccaagagcuacaucaacgacaagggcaaggaggugcucgugcugugggggauccaccaccccagcaccuccgccgaccagcagagccuguaccagaacgccgacgccuacgucuucgugggcacgucccgguacagcaagaaguucaagcccgagaucgccauccgcccgaaggugcgggaccaggagggccgcaugaacuacuacuggacccucgucgagcccggggacaagaucaccuucgaggcgaccggcaaccugguggugccccgguacgccuucgccauggaccgcaacgccggguccggcaucaucaucagcgacacgcccguccacgacugcaacacgaccugccagaccccgaagggcgccaucaacaccucccugcccuuccagaacauccaccccaucaccaucgggaagugccccaaguacgucaagagcaccaagcuccggcuggcgaccggccugcgcaacgugccguccauccagagccgggggcuguucggcgccaucgccggguucaucgagggcggcuggacggggaugguggacggcugguacggguaccaccaccagaacgagcagggcuccggguacgccgccgaccucaagagcacccagaacgcgaucgacgagaucaccaacaaggugaacuccgugaucgagaagaugaacacccaguucacggccgucggcaaggaguucaaccaccuggagaagcgcaucgagaaccucaacaagaagguggacgacggcuuccuggacaucuggaccuacaacgccgagcugcucguccugcuggagaacgagcggacccucgacuaccacgacagcaacgugaagaaccuguacgagaaggugcgcucccagcugaagaacaacgccaaggagaucgggaacggcugcuucgaguucuaccacaagugcgacaacacgugcauggagagcgucaagaacgggaccuacgacuaccccaaguacuccgaggaggccaagcucaaccgggaggagaucgacggcgugaagcuggagagcacccgcaucuaccagauccuggcgaucuacuccaccguggccagcagccucguccugguggugucccugggggccaucagcuucuggaugugcuccaacggcagccuccagugccggaucugcaucuga

SEQ ID NO: 70535 - RNA, 1701 nt, Artificial Sequence; identical to SEQ ID NO: 68113
  derived and/or modified CDS sequence (opt1) from hemagglutinin__InfluenzaA__ADX96937

SEQ ID NO: 70536 - RNA, 1701 nt, Artificial Sequence; identical to SEQ ID NO: 66680
  derived and/or modified CDS sequence (opt1) from hemagglutinin__InfluenzaA__ADX96947

SEQ ID NO: 70537 - RNA, 1701 nt, Artificial Sequence; identical to SEQ ID NO: 67857
  derived and/or modified CDS sequence (opt1) from hemagglutinin__InfluenzaA__ADX96957

SEQ ID NO: 70538 - RNA, 1701 nt, Artificial Sequence; identical to SEQ ID NO: 67006
  derived and/or modified CDS sequence (opt1) from hemagglutinin__InfluenzaA__ADX96967

SEQ ID NO: 70539 - RNA, 1701 nt, Artificial Sequence; identical to SEQ ID NO: 66873
  derived and/or modified CDS sequence (opt1) from hemagglutinin__InfluenzaA__ADX96977

SEQ ID NO: 70540 - RNA, 1701 nt, Artificial Sequence
  derived and/or modified CDS sequence (opt1) from hemagglutinin__InfluenzaA__ADX96987
augaaggccauccuggugguccuccuguacaccuucgccaccgcgaacgccgacacgcugugcaucggcuaccacgccaacaacagcaccgacaccguggacaccgugcucgagaagaacgucacggugacccacuccgugaacauccuggaggacaagcacaacgggaagcugugcaagcuccgcggcgucgcgccccugcaccuggggaagugcaacaucgccggcuggauccucgggaacccggagugcgagagccuguccaccgccagcuccuggagcuacaucguggagaccuccagcuccgacaacggcacgugcuaccccggcgacuucaucgacuacgaggagcugcgggagcagcucagcuccgugagcuccuucgagcgcuucgagaucuuccccaagaccagcuccuggcccaaccacgacagcaacaagggggucaccgccgccugcccgcacgccggcgcgaaguccuucuacaagaaccugaucuggcuggugaagaaggggaacagcuaccccaagcucuccaagagcuacaucaacgacaagggcaaggaggugcugguccugugggggauccaccaccccagcaccuccgccgaccagcagagccucuaccagaacgccgacgccuacguguucgugggcuccagccgguacuccaagaaguucaagcccgagaucgccauccgcccgaagguccgggaccaggagggccgcaugaacuacuacuggacgcugguggagcccggggacaagaucaccuucgaggcgaccggcaaccugguggucccccgguacgccuucgccauggagcgcaacgccgggagcggcaucaucaucuccgacacccccgugcacgacugcaacacgaccugccagaccccgaagggcgccaucaacaccagccuccccuuccagaacauccaccccaucacgaucgggaagugccccaaguacgugaaguccaccaagcugcggcuggcgaccggccuccgcaacgucccgagcauccagucccgggggcuguucggcgccaucgccggguucaucgagggcggcuggaccgggaugguggacggcugguacggguaccaccaccagaacgagcagggcagcggguacgccgccgaccugaaguccacgcagaacgcgaucgacgagaucaccaacaaggugaacagcgucaucgagaagaugaacacccaguucaccgccgugggcaaggaguucaaccaccucgagaagcgcaucgagaaccugaacaagaaggucgacgacggcuuccuggacaucuggacguacaacgccgagcuccuggugcugcucgagaacgagcggacccuggacuaccacgacuccaacgugaagaaccuguacgagaagguccgcagccagcucaagaacaacgccaaggagaucgggaacggcugcuucgaguucuaccacaagugcgacaacacgugcauggaguccgugaagaacgggaccuacgacuaccccaaguacagcgaggaggccaagcugaaccgggaggagaucgacggcaucaagcuggaguccacccgcaucuaccagauccucgcgaucuacagcaccguggccagcucccugguccugguggugagccucggggccaucuccuucuggaugugcagcaacggcucccugcagugccggaucugcaucuga

SEQ ID NO: 70541 - RNA, 1701 nt, Artificial Sequence; identical to SEQ ID NO: 66873
  derived and/or modified CDS sequence (opt1) from hemagglutinin__InfluenzaA__ADX96997

SEQ ID NO: 70542 - RNA, 1701 nt, Artificial Sequence
  derived and/or modified CDS sequence (opt1) from hemagglutinin__InfluenzaA__ADX97007
augaaggccauccuggugguccuccuguacaccuucgccaccgcgaacgccgacacgcugugcaucggcuaccacgccaacaacagcaccgacaccguggacaccgugcucgagaagaacgucacggugacccacuccgugaaccugcuggaggacaagcacaacgggaagcucugcaagcugcgcggcgucgcgccccugcaccucgggaagugcaacaucgccggcuggauccuggggaacccggagugcgagagccuguccaccgccagcuccuggagcuacaucguggagaccuccagcuccgacaacggcacgugcuaccccggcgacuucaucgacuacgaggagcuccgggagcagcugagcuccgugagcuccuucgagcgcuucgagaucuuccccaagaccagcuccuggcccaaccacgacagcaacaagggggucaccgccgccugcccgcacgccggcgcgaaguccuucuacaagaaccugaucuggcucgugaagaaggggaacagcuaccccaagcuguccaagagcuacaucaacgacaagggcaaggaggugcugguccucugggggauccaccaccccagcaccuccgccgaccagcagagccuguaccagaacgccgacgccuacguguucgugggcacgucccgguacagcaagaaguucaagcccgagaucgccauccgcccgaagguccgggaccaggagggccgcaugaacuacuacuggacccugguggagcccggggacaagaucaccuucgaggcgaccggcaaccucguggucccccgguacgccuucgccauggagcgcaacgccggguccggcaucaucaucagcgacgcccccgugcacgacugcaacacgaccugccagaccccgaagggcgcgaucaacaccucccugcccuuccagaacauccaccccaucacgaucgggaagugccccaaguacgucaagagcaccaagcugcggcucgccaccggccugcgcaacgugccguccauccagagccgggggcuguucggcgccaucgccggguucaucgagggcggcuggaccgggaugguggacggcugguacggguaccaccaccagaacgagcagggcuccggguacgccgcggaccucaagagcacgcagaacgccaucgacgagaucaccaacaaggugaacuccgucaucgagaagaugaacacccaguucaccgccgugggcaaggaguucaaccaccuggagaagcgcaucgagaaccugaacaagaaggucgacgacggcuuccucgacaucuggacguacaacgccgagcugcuggugcuccuggagaacgagcggacccuggacuaccacgacagcaacgugaagaaccucuacgagaagguccgcucccagcugaagaacaacgccaaggagaucgggaacggcugcuucgaguucuaccacaagugcgacaacacgugcauggagagcgugaagaacgggaccuacgacuaccccaaguacuccgaggaggcgaagcugaaccgggaggagaucgacggcgugaagcucgagagcacccgcaucuaccagauccuggccaucuacuccaccgucgccagcagccuggugcucguggucucccugggggccaucagcuucuggaugugcuccaacggcagccugcagugccggaucugcaucuga

SEQ ID NO: 70543 - RNA, 1701 nt, Artificial Sequence; identical to SEQ ID NO: 70492
  derived and/or modified CDS sequence (opt1) from hemagglutinin__InfluenzaA__ADX97018

SEQ ID NO: 70544 - RNA, 1701 nt, Artificial Sequence
  derived and/or modified CDS sequence (opt1) from hemagglutinin__InfluenzaA__ADX97028
augaaggccauccuggugguccuccuguacaccuucgccaccgcgaacgccgacacgcugugcaucggcuaccacgccaacaacagcaccgacaccguggacaccgugcucgagaagaacgucacggugacccacuccgugaacauccuggaggacaagcacaacgggaagcugugcaagcuccgcggcgucgcgccccugcaccuggggaagugcaacaucgccggcuggauccucgggaacccggagugcgagagccuguccaccgccagcuccuggagcuacaucguggagaccuccagcuccgacaacggcacgugcuaccccggcgacuucaucgacuacgaggagcugcgggagcagcucagcuccgugagcuccuucgagcgcuucgagaucuuccccaagaccagcuccuggcccaaccacgacagcaacaagggggucaccgccgccugcccgcacgccggcgcgaaguccuucuacaagaaccugaucuggcuggugaagcaggggaacagcuaccccaagcucuccaagagcuacaucaacgacaagggcaaggaggugcugguccugugggggauccaccaccccagcaccacggccgaccagcagucccucuaccagaacgccgacgccuacguguucgugggcagcucccgguacagcaagaaguucaagcccgagaucgccauccgcccgaagguccgggaccaggagggccgcaugaacuacuacuggacccugguggagcccggggacaagaucaccuucgaggcgaccggcaaccugguggucccccgguacgccuucgccauggagcgcaacgccggguccggcaucaucaucagcgacacgcccgugcacgacugcaacacgaccugccagaccccgaagggcgccaucaacaccucccuccccuuccagaacauccaccccaucaccaucgggaagugccccaaguacgucaagagcaccaagcugcggcuggcgaccggccuccgcaacgugccguccauccagagccgggggcuguucggcgccaucgccggguucaucgagggcggcuggacggggaugguggacggcugguacggguaccaccaccagaacgagcagggcuccggguacgccgccgaccucaagagcacccagaacgcgaucgacgagaucaccaacaaggugaacuccgucaucgagaagaugaacacccaguucacggccgugggcaaggaguucaaccaccuggagaagcgcaucgagaaccugaacaagaaggucgacgacggcuuccuggacaucuggaccuacaacgccgagcuccuggugcugcucgagaacgagcggacccuggacuaccacgacagcaacgugaagaaccuguacgagaagguccgcucccagcucaagaacaacgccaaggagguggggaacggcugcuucgaguucuaccacaagugcgacaacacgugcauggagagcgugaagaacgggaccuacgacuaccccaaguacuccgaggaggccaagcugaaccgggaggagaucgacggcgucaagcuggagagcacccgcaucuaccagauccucgcgaucuacuccaccgccgccagcagccuggugcugguggucucccucggggccaucagcuucuggaugugcuccaacggcagccugcagugccggaucugcaucuga

SEQ ID NO: 70545 - RNA, 1701 nt, Artificial Sequence; identical to SEQ ID NO: 69246
  derived and/or modified CDS sequence (opt1) from hemagglutinin__InfluenzaA__ADX98640

SEQ ID NO: 70546 - RNA, 1701 nt, Artificial Sequence; identical to SEQ ID NO: 68245
  derived and/or modified CDS sequence (opt1) from hemagglutinin__InfluenzaA__ADX98650

SEQ ID NO: 70547 - RNA, 1701 nt, Artificial Sequence
  derived and/or modified CDS sequence (opt1) from hemagglutinin__InfluenzaA__ADX98665
augaaggccauccuggugguccuccuguacaccuucgccaccgcgaacgccgacacgcugugcaucggcuaccacgccaacaacagcaccgacaccguggacaccgugcucgagaagaacgucacggugacccacuccgugaaccugcuggaggacaagcacaacgggaagcucugcaagcugcgcggcgucgcgccccugcaccucgggaagugcaacaucgccggcuggauccuggggaacccggagugcgagagccuguccaccgccagcuccuggagcuacaucguggagaccuccagcuccggcaacggcacgugcuaccccggggacuucaucgacuacgaggagcuccgggagcagcugagcuccgugagcuccuucgagcgcuucgagaucuuccccaagaccagcuccuggcccaaccacgacagcaacaagggcgucaccgccgccugcccgcacgccggggcgaaguccuucuacaagaaccugaucuggcucgugaagaagggcaacagcuaccccaagcuguccaagagcuacaucaacgacaaggggaaggaggugcugguccucuggggcauccaccaccccagcaccuccgccgaccagcagagccuguaccagaacgccgacgccuacguguucgugggcacgucccgguacagcaagaaguucaagcccgagaucgccauccgcccgaagguccgggaccaggaggggcgcaugaacuacuacuggacccugguggagcccggcgacaagaucaccuucgaggcgaccgggaaccucguggucccccgguacgccuucgccauggagcgcaacgccggcuccggcaucaucaucagcgacacgcccgugcacgacugcaacacgaccugccagaccccgaagggggccaucaacaccucccugcccuuccagaacauccaccccaucaccaucggcaagugccccaaguacgucaagagcaccaagcugcggcucgcgaccgggcugcgcaacgugccguccauccagagccggggccuguucggggccaucgccggcuucaucgagggcggguggacgggcaugguggacgggugguacggcuaccaccaccagaacgagcagggguccggcuacgccgccgaccucaagagcacccagaacgcgaucgacgagaucaccaacaaggugaacuccgucaucgagaagaugaacacccaguucacggccgugggcaaggaguucaaccaccuggagaagcgcaucgagaaccugaacaagaaggucgacgacggguuccucgacaucuggaccuacaacgccgagcugcuggugcuccuggagaacgagcggacccuggacuaccacgacagcaacgugaagaaccucuacgagaagguccgcucccagcugaagaacaacgccaaggagaucggcaacgggugcuucgaguucuaccacaagugcgacaacacgugcauggagagcgugaagaacggcaccuacgacuaccccaaguacuccgaggaggccaagcugaaccgggaggagaucgacggggugaagcucgagagcacccgcaucuaccagauccuggcgaucuacuccaccgccgccagcagccugguccucguggugucccugggcgccaucagcuucuggaugugcuccaacggcagccugcagugccggaucugcaucuga

SEQ ID NO: 70548 - RNA, 1701 nt, Artificial Sequence; identical to SEQ ID NO: 67857
  derived and/or modified CDS sequence (opt1) from hemagglutinin__InfluenzaA__ADX98675

SEQ ID NO: 70549 - RNA, 1701 nt, Artificial Sequence; identical to SEQ ID NO: 67857
  derived and/or modified CDS sequence (opt1) from hemagglutinin__InfluenzaA__ADX98695

SEQ ID NO: 70550 - RNA, 1701 nt, Artificial Sequence; identical to SEQ ID NO: 68245
  derived and/or modified CDS sequence (opt1) from hemagglutinin__InfluenzaA__ADX98729

SEQ ID NO: 70551 - RNA, 1701 nt, Artificial Sequence; identical to SEQ ID NO: 69576
  derived and/or modified CDS sequence (opt1) from hemagglutinin__InfluenzaA__ADX98739

SEQ ID NO: 70552 - RNA, 1701 nt, Artificial Sequence; identical to SEQ ID NO: 69325
  derived and/or modified CDS sequence (opt1) from hemagglutinin__InfluenzaA__ADX98748

SEQ ID NO: 70553 - RNA, 1701 nt, Artificial Sequence; identical to SEQ ID NO: 66693
  derived and/or modified CDS sequence (opt1) from hemagglutinin__InfluenzaA__ADX98758

SEQ ID NO: 70554 - RNA, 1701 nt, Artificial Sequence; identical to SEQ ID NO: 67046
  derived and/or modified CDS sequence (opt1) from hemagglutinin__InfluenzaA__ADX98767

SEQ ID NO: 70555 - RNA, 1701 nt, Artificial Sequence; identical to SEQ ID NO: 68290
  derived and/or modified CDS sequence (opt1) from hemagglutinin__InfluenzaA__ADX98777

SEQ ID NO: 70556 - RNA, 1701 nt, Artificial Sequence
  derived and/or modified CDS sequence (opt1) from hemagglutinin__InfluenzaA__ADX98785
augaaggccauccuggugguccuccuguacacccuggccaccgcgaacgccgacacgcucugcaucggcuaccacgccaacaacagcaccgacaccguggacaccgugcuggagaagaacgucacggugacccacuccgugaaccugcucgaggacaagcacaacgggaagcugugcaagcugcgcggcaucgcgccccuccaccuggggaagugcaacaucgccggcuggauccuggggaacccggagugcgagagccucuccaccgccagcuccuggagcuacaucgucgagaccuccagcuccgacaacggcacgugcuaccccggcgacuucaucgacuacgaggagcugcgggagcagcugagcuccgugagcuccuucgagcgcuucgagaucuuccccaagaccagcuccuggcccaaccacgacagcaacaagggggugaccgccgccugcccgcacgccggcgcgaaguccuucuacaagaaccucaucuggcuggucaagaaggggaacagcuaccccaagcuguccaagagcuacaucaacgacaagggcaaggaggugcucgugcugugggggauccaccaccccagcaccuccgccgaccagcagagccuguaccagaacgccgacgccuacgucuucgugggcacgucccgguacagcaagaaguucaagcccgagaucgccauccgcccgaaggugcgggaccaggagggccgcaugaacuacuacuggacccucgucgagcccggggacaagaucaccuucgaggcgaccggcaaccugguggugccccgguacgccuucgccauggagcgcaacgccggguccggcaucaucaucagcgacacgcccguccacgacugcaacacgaccugccagaccccgaagggcgccaucaacaccucccugcccuuccagaacauccaccccaucaccaucgggaagugccccaaguacgucaagagcaccaagcuccggcuggcgaccggccugcgcaacgugccguccauccagagccgggggcuguucggcgccaucgccggguucaucgagggcggcuggacggggaugguggacggcugguacggguaccaccaccagaacgagcagggcuccggguacgccgccgaccucaagagcacccagaacgcgaucgacgagaucaccaacaaggugaacuccgugaucgagaagaugaacacccaguucacggccgucggcaaggaguucaaccaccuggagaagcgcaucgagaaccucaacaagaagguggacgacggcuuccuggacaucuggaccuacaacgccgagcugcucguccugcuggagaacgagcggacccucgacuaccacgacagcaacgugaagaaccuguacgagaaggugcgcucccagcugaagaacaacgccaaggagaucgggaacggcugcuucgaguucuaccacaagugcgacaacacgugcauggagagcgucaagaacgggaccuacgacuaccccaaguacuccgaggaggccaagcucaaccgggaggagaucggcggggugaagcuggagagcacccgcaucuaccagauccuggcgaucuacuccaccguggccagcagccucguccugguggugucccugggcgccaucagcuucuggaugugcuccaacggcagccuccagugccggaucugcaucuga

SEQ ID NO: 70557 - RNA, 1701 nt, Artificial Sequence; identical to SEQ ID NO: 67794
  derived and/or modified CDS sequence (opt1) from hemagglutinin__InfluenzaA__ADX98792

SEQ ID NO: 70558 - RNA, 1701 nt, Artificial Sequence; identical to SEQ ID NO: 67794
  derived and/or modified CDS sequence (opt1) from hemagglutinin__InfluenzaA__ADX98806

SEQ ID NO: 70559 - RNA, 1701 nt, Artificial Sequence; identical to SEQ ID NO: 69734
  derived and/or modified CDS sequence (opt1) from hemagglutinin__InfluenzaA__ADX98818

SEQ ID NO: 70560 - RNA, 1701 nt, Artificial Sequence; identical to SEQ ID NO: 66693
  derived and/or modified CDS sequence (opt1) from hemagglutinin__InfluenzaA__ADX98828

SEQ ID NO: 70561 - RNA, 1701 nt, Artificial Sequence; identical to SEQ ID NO: 70084
  derived and/or modified CDS sequence (opt1) from hemagglutinin__InfluenzaA__ADX98843

SEQ ID NO: 70562 - RNA, 1701 nt, Artificial Sequence
  derived and/or modified CDS sequence (opt1) from hemagglutinin__InfluenzaA__ADX98853
augaaggccauccuggugguccuccuguacaccuucgccaccgcgaacgccgacacgcugugcaucggcuaccacgccaacaacagcaccgacaccguggacaccgugcucgagaagaacgucacggugacccacuccgugaaccugcuggaggacaagcacaacgggaagcucugcaagcugcgcggcgucgcgccccugcaccucgggaagugcaacaucgccggcuggauccuggggaacccggagugcgagagccuguccaucgccagcuccuggagcuacaucguggagaccuccagcuccgacaacgggaccugcuaccccggcgacuucaucgacuacgaggagcuccgggagcagcugagcuccgugagcuccuucgagcgcuucgagaucuuccccaagacgagcuccuggcccaaccacgacagcaacaagggcgucaccgccgccugcccgcacgccggcgcgaaguccuucuacaagaaccugaucuggcucgugaagaaggggaacagcuaccccaagcuguccaagagcuacaucaacgacaagggcaaggaggugcugguccucugggggauccaccaccccagcaccuccgccgaccagcagagccuguaccagaacgccgacgccuacguguucgugggcaccucccgguacagcaagaaguucaagcccgagaucgccauccgcccgaagguccgggaccaggagggccgcaugaacuaccacuggacgcugguggagcccggggacaagaucaccuucgaggcgaccggcaaccucguggucccccgguacgccuucgccauggagcgcaacgccggguccggcaucaucaucagcgacacccccgugcacgacugcaacacgaccugccagaccccgaagggcgccaucaacaccucccugcccuuccagaacauccaccccaucacgaucgggaagugccccaaguacgucaagagcaccaagcugcggcucgcgaccggccugcgcaacgugccguccauccagagccgggggcuguucggcgccaucgccggguucaucgagggcggcuggaccgggaugguggacggcugguacggguaccaccaccagaacgagcagggcuccggguacgccgccgaccucaagagcacgcagaacgcgaucgacaagaucaccaacaaggugaacuccgucaucgagaagaugaacacccaguucaccgccgugggcaaggaguucaaccaccuggagaagcgcaucgagaaccugaacaagaaggucgacgacggcuuccucgacaucuggacguacaacgccgagcugcuggugcuccuggagaacgagcggacccuggacuaccacgacagcaacgugaagaaccucuacgagaagguccgcucccagcugaagaacaacgccaaggagaucgggaacggcugcuucgaguucuaccacaagugcgacaacacgugcauggagagcgugaagaacgggaccuacgacuaccccaaguacuccgaggaggccaagcugaaccgggaggagaucgacggcgugaagcucgagagcacccgcaucuaccagauccuggcgaucuacuccaccgucgccagcagccuggugcucguggucucccugggggccaucagcuucuggaugugcuccaacggcagccugcagugccggaucugcaucuga

SEQ ID NO: 70563 - RNA, 1701 nt, Artificial Sequence; identical to SEQ ID NO: 67857
  derived and/or modified CDS sequence (opt1) from hemagglutinin__InfluenzaA__ADX98860

SEQ ID NO: 70564 - RNA, 1701 nt, Artificial Sequence; identical to SEQ ID NO: 69245
  derived and/or modified CDS sequence (opt1) from hemagglutinin__InfluenzaA__ADX98870

SEQ ID NO: 70565 - RNA, 1701 nt, Artificial Sequence
  derived and/or modified CDS sequence (opt1) from hemagglutinin__InfluenzaA__ADX98880
augaaggccauccuggugguccuccuguacaccuucgccaccgcgaacgccgacacgcugugcaucggcuaccacgccaacaacagcaccgacaccguggacaccgugcucgagaagaacgucacggugacccacuccgugaaccugcuggaggacaagcacaacgggaagcucugcaagcugcgcggcgucgcgccccugcaccucgggaagugcaacaucgccggcuggauccuggggaacccggagugcgagagccuguccaccgccagcuccuggagcuacaucguggagaccuccagcuccgacaacggcacgugcuaccccggcgacuucaucgacuacgaggagcuccgggagcagcugagcuccgugagcuccuucgagcgcuucgagaucuuccccaagaccagcuccuggcccaaccacgacagcaacaagggggucaccgccgccugcccgcacgccggcgcgaaguccuucuacaagaaccugaucuggcucgugaagaaggggaacagcuaccccaagcuguccaagagcuacaucaacgacaagggcaaggaggugcugguccucugggggauccaccaccccagcaccuccgccgaccagcagagccuguaccagaacgccgacgccuacguguucgugggcacgucccgguacagcaagaaguucaagcccgagaucgccauccgcccgaagguccgggaccaggagggccgcaugaacuacuacuggacccugguggagcccggggacaagaucaccuucgaggcgaccggcaaccucguggucccccgguacgccuucgccauggagcgcaacgccggguccggcaucaucaucagcgacacgcccgugcacgacugcaacacgaccugccagaccccgaagggcgccaucaacaccucccugcccuuccagaacauccaccccaucaccaucgggaagugccccaaguacgucaagagcaccaagcugcggcucgcgaccggccugcgcaacgugccguccauccagagccgggggcuguucggcgccaucgccggguucaucgagggcggcuggacggggaugguggacggcugguacggguaccaccaccagaacgagcagggcuccggguacgccgccgaccucaagagcacccagaacgcgaucgacgagaucaccaacaaggugaacuccaucaucgagaagaugaacacccaguucacggccgucggcaaggaguucaaccaccuggagaagcgcaucgagaaccugaacaagaagguggacgacggcuuccucgacaucuggaccuacaacgccgagcugcugguccuccuggagaacgagcggacccuggacuaccacgacagcaacgugaagaaccucuacgagaaggugcgcucccagcugaagaacaacgccaaggagaucgggaacggcugcuucgaguucuaccacaagugcgacaacacgugcauggagagcgucaagaacgggaccuacgacuaccccaaguacuccgaggaggccaagcugaaccgggaggagaucgacggcgugaagcucgagagcacccgcaucuaccagauccuggcgaucuacuccaccguggccagcagccugguccucguggugucccugggggccaucagcuucuggaugugcuccaacggcagccugcagugccggaucugcaucuga

SEQ ID NO: 70566 - RNA, 1701 nt, Artificial Sequence
  derived and/or modified CDS sequence (opt1) from hemagglutinin__InfluenzaA__ADX98890
augaaggccauccuggugguccuccuguacaccuucgccaccgcgaacgccgacacgcugugcaucggcuaccacgccaacaacagcaccgacaccguggacaccgugcucgagaagaacgucacggugacccacuccgugaaccugcuggaggacaagcacaacgggaagcucugcaagcugcgcggcgucgcgccccugcaccucgggaagugcaacaucgccggcuggauccuggggaacccggagugcgagagccuguccaccgccagcuccuggagcuacaucguggagaccuccagcuccgacaacggcacgugcuaccccggcgacuucaucgacuacgaggagcuccgggagcagcugagcuccgugagcuccuucgagcgcuucgagaucuuccccaagaccagcuccuggcccaaccacgacagcaacaagggggucaccgccgccugcccgcacgccggcgcgaaguccuucuacaagaaccugaucuggcucgugaagaaggggaacagcuaccccaagcuguccaagagcuacaucaacgacaagggcaaggaggugcugguccucugggggauccaccaccccagcaccuccgccgaccagcagagccuguaccagaacgccgacgccuacguguucgugggcacgucccgguacagcaagaaguucaagcccgagaucgccauccgcccgaagguccgggaccaggagggccgcaugaacuacuacuggacccugguggagcccggggacaagaucaccuucgaggcgaccggcaaccucguggucccccgguacgccuucgccauggagcgcaacgccgaguccgggaucaucaucagcgacacgcccgugcacgacugcaacacgaccugccagaccccgaagggcgccaucaacaccucccugcccuuccagaacauccaccccaucaccaucggcaagugccccaaguacgucaagagcaccaagcugcggcucgcgaccgggcugcgcaacgugccguccauccagagccggggccuguucggggccaucgccggcuucaucgagggcggguggacgggcaugguggacgggugguacggcuaccaccaccagaacgagcagggguccggcuacgccgccgaccucaagagcacccagaacgcgaucgacaagaucaccaacaaggugaacuccgucaucgagaagaugaacacccaguucacggccguggggaaggaguucaaccaccuggagaagcgcaucgagaaccugaacaagaaggucgacgacggcuuccucgacaucuggaccuacaacgccgagcugcuggugcuccuggagaacgagcggacccuggacuaccacgacagcaacgugaagaaccucuacgagaagguccgcucccagcugaagaacaacgccaaggagaucggcaacgggugcuucgaguucuaccacaagugcgacaacacgugcauggagagcgugaagaacggcaccuacgacuaccccaaguacuccgaggaggccaagcugaaccgggaggagaucgacggggugaagcucgagagcacccgcaucuaccagauccuggcgaucuacuccaccgucgccagcagccuggugcucguggucucccugggcgccaucagcuucuggaugugcuccaacgggagccugcagugccggaucugcaucuga

SEQ ID NO: 70567 - RNA, 1701 nt, Artificial Sequence; identical to SEQ ID NO: 68245
  derived and/or modified CDS sequence (opt1) from hemagglutinin__InfluenzaA__ADX98900

SEQ ID NO: 70568 - RNA, 1701 nt, Artificial Sequence
  derived and/or modified CDS sequence (opt1) from hemagglutinin__InfluenzaA__ADX98910
augaaggccauccuggugguccuccuguacaccuucgccaccgcgaacgccgacacgcugugcaucggcuaccacgccaacaacagcaccgacaccguggacaccgugcucgagaagaacgucacggugacccacuccgugaaccugcuggaggacaagcacaacgggaagcucugcaagcugcgcggcgucgcgccccugcaccucgggaagugcaacaucgccggcuggauccuggggaacccggagugcgagagccuguccaccgcgaucagcugguccuacaucguggagaccagcuccagcgacaacggcacgugcuaccccggcgacuucaucgacuacgaggagcuccgggagcagcuguccagcguguccagcuucgagcgcuucgagaucuuccccaagaccuccagcuggcccaaccacgacuccaacaagggggucaccgccgccugcccgcacgccggcgccaagagcuucuacaagaaccugaucuggcucgugaagaaggggaacuccuaccccaagcugagcaaguccuacaucaacgacaagggcaaggaggugcugguccucugggggauccaccaccccagcaccagcgccgaccagcagucccuguaccagaacgccgacgccuacguguucgugggcacgagccgguacuccaagaaguucaagcccgagaucgccauccgcccgaagguccgggaccaggagggccgcaugaacuacuacuggacccugguggagcccggggacaagaucaccuucgaggcgaccggcaaccucguggucccccgguacgccuucgccauggagcgcaacgccgggagcggcaucaucaucuccgacacgcccgugcacgacugcaacacgaccugccagaccccgaagggcgccaucaacaccagccugcccuuccagaacauccaccccaucaccaucgggaagugccccaaguacgugaaguccaccaagcugcggcucgcgaccggccugcgcaacgucccgagcauccagucccgggggcuguucggcgccaucgccggguucaucgagggcggcuggacggggaugguggacggcugguacggguaccaccaccagaacgagcagggcagcggguacgccgccgaccucaaguccacccagaacgcgaucgacaagaucaccaacaaggugaacagcgucaucgagaagaugaacacccaguucacggccgugggcaaggaguucaaccaccuggagaagcgcaucgagaaccugaacaagaaggucgacgacggcuuccucgacaucuggaccuacaacgccgagcugcuggugcuccuggagaacgagcggacccuggacuaccacgacuccaacgugaagaaccucuacgagaagguccgcagccagcugaagaacaacgccaaggagaucgggaacggcugcuucgaguucuaccacaagugcgacaacacgugcauggaguccgugaagaacgggaccuacgacuaccccaaguacagcgaggaggccaagcugaaccgggaggagaucgacggcgugaagcucgaguccacccgcaucuaccagauccuggcgaucuacagcaccgucgccuccagccuggugcucguggucagccugggggccaucuccuucuggaugugcagcaacggcucccugcagugccggaucugcaucuga

SEQ ID NO: 70569 - RNA, 1701 nt, Artificial Sequence; identical to SEQ ID NO: 68245
  derived and/or modified CDS sequence (opt1) from hemagglutinin__InfluenzaA__ADX98920

SEQ ID NO: 70570 - RNA, 1701 nt, Artificial Sequence; identical to SEQ ID NO: 67857
  derived and/or modified CDS sequence (opt1) from hemagglutinin__InfluenzaA__ADX98930

SEQ ID NO: 70571 - RNA, 1701 nt, Artificial Sequence; identical to SEQ ID NO: 67484
  derived and/or modified CDS sequence (opt1) from hemagglutinin__InfluenzaA__ADX98940

SEQ ID NO: 70572 - RNA, 1701 nt, Artificial Sequence; identical to SEQ ID NO: 69313
  derived and/or modified CDS sequence (opt1) from hemagglutinin__InfluenzaA__ADX98950

SEQ ID NO: 70573 - RNA, 1701 nt, Artificial Sequence; identical to SEQ ID NO: 69294
  derived and/or modified CDS sequence (opt1) from hemagglutinin__InfluenzaA__ADX98960

SEQ ID NO: 70574 - RNA, 1701 nt, Artificial Sequence
  derived and/or modified CDS sequence (opt1) from hemagglutinin__InfluenzaA__ADX98970
augaaggccauccuggugguccuccuguacaccuucgccaccgcgaacgccgacacgcugugcaucggcuaccacgccaacaacagcaccgacaccguggacaccgugcucgagaagaacgucacggugacccacuccgugaaccugcuggaggacaagcacaacgggaagcucugcaagcugcgcggcgucgcgccccugcaccucgggaagugcaacaucgccggcuggauccuggggaacccggagugcgagagccuguccaccgccagcuccuggagcuacaucguggagaccuccagcuccgacaacggcacgugcuaccccggcgacuucaucgacuacgaggagcuccgggagcagcugagcuccgugagcuccuucgagcgcuucgagaucuuccccaagaccagcuccuggcccaaccacgacagcaacaagggggucaccgccgccugcccgcacgccggcgcgaaguccuucuacaagaaccugaucuggcucgugaagaaggggaacagcuaccccaagcuguccaagagcuacaucaacgacaagggcaaggaggugcugguccucugggggauccaccaccccagcaccuccgccgaccagcagggccuguaccagaacgccgacgccuacguguucgugggcacgagccgguacuccaagaaguucaagcccgagaucgccauccgcccgaagguccgggaccaggaggggcgcaugaacuacuacuggacccugguggagcccggcgacaagaucaccuucgaggcgaccgggaaccucguggucccccgguacgccuucgccauggagcgcaacgccggcagcggcaucaucaucuccgacacgcccgugcacgacugcaacacgaccugccagaccccgaagggggccaucaacaccagccugcccuuccagaacauccaccccaucaccaucggcaagugccccaaguacgugaaguccaccaagcugcggcucgcgaccgggcugcgcaacaucccgagcauccagucccggggccuguucggggccaucgccggcuucaucgagggcggguggacgggcauggucgacgggugguacggcuaccaccaccagaacgagcaggggagcggcuacgccgccgaccucaaguccacccagaacgcgaucgacaagaucaccaacaaggugaacagcgugaucgagaagaugaacacccaguucacggccgucggcaaggaguucaaccaccuggagaagcgcaucgagaaccugaacaagaagguggacgacggguuccucgacaucuggaccuacaacgccgagcugcugguccuccuggagaacgagcggacccuggacuaccacgacuccaacgugaagaaccucuacgagaaggugcgcagccagcugaagaacaacgccaaggagaucggcaacgggugcuucgaguucuaccacaagugcgacaacacgugcauggaguccgucaagaacggcaccuacgacuaccccaaguacagcgaggaggccaagcugaaccgggaggagaucgacggggugaagcucgaguccacccgcaucuaccagauccuggcgaucuacagcaccguggccuccagccugguccucguggugagccugggcgccaucuccuucuggaugugcagcaacggcucccugcagugccggaucugcaucuga

SEQ ID NO: 70575 - RNA, 1701 nt, Artificial Sequence; identical to SEQ ID NO: 67794
  derived and/or modified CDS sequence (opt1) from hemagglutinin__InfluenzaA__ADX98980

SEQ ID NO: 70576 - RNA, 1701 nt, Artificial Sequence; identical to SEQ ID NO: 66693
  derived and/or modified CDS sequence (opt1) from hemagglutinin__InfluenzaA__ADX98990

SEQ ID NO: 70577 - RNA, 1701 nt, Artificial Sequence; identical to SEQ ID NO: 67857
  derived and/or modified CDS sequence (opt1) from hemagglutinin__InfluenzaA__ADX99000

SEQ ID NO: 70578 - RNA, 1698 nt, Artificial Sequence
  derived and/or modified CDS sequence (opt1) from hemagglutinin__InfluenzaA__ADX99581
augaaggccaaccugcucgugcugcugagcgcccucgcggccgccgacgccgacaccaucugcaucggcuaccacgccaacaacuccaccgacacggucgacaccgugcuggagaagaacgugaccgucacccacagcgugaaccugcucgaggacucccacaacgggaagcugugccgccugaagggcaucgcgccccuccagcuggggaagugcaacaucgccggcuggcugcucgggaacccggagugcgacccccugcugcccgugcggagcugguccuacaucgucgagacgcccaacagcgagaacggcaucugcuacccgggcgacuucaucgacuacgaggagcuccgcgagcagcuguccagcguguccagcuucgagcgguucgagaucuuccccaaggaguccagcuggcccaaccacaacaccaacggggugaccgccgccugcucccacgagggcaagagcuccuucuaccgcaaccugcucuggcugaccgagaaggaggggagcuaccccaagcugaagaacuccuacgucaacaagaagggcaaggaggugcucgugcugugggggauccaccacccgcccaacagcaaggagcagcagaaccuguaccagaacgagaacgcguacgucuccguggugacgagcaacuacaaccggcgcuucacccccgagaucgccgagcggcccaagguccgcgaccaggccggccggaugaacuacuacuggacccuccugaagccgggcgacaccaucaucuucgaggccaacgggaaccugaucgcccccauguacgcguucgcccucagccgcggcuucggguccggcaucaucacgagcaacgccuccaugcacgagugcaacaccaagugccagacgccccugggcgccaucaacagcucccugcccuaccagaacauccacccggugaccaucggggagugccccaaguacgugcggagcgccaagcuccgcauggucaccggccugcggaacacccccuccauccagagccgcgggcuguucggcgcgaucgccggguucaucgagggcggcuggaccgggaugaucgacggcugguacggguaccaccaccagaacgagcagggcuccggguacgccgccgaccagaaguccacccagaacgccaucaacggcaucacgaacaaggugaacaccgugaucgagaagaugaacauccaguucaccgcggucggcaaggaguucaacaagcucgagaagcggauggagaaccugaacaagaagguggacgacggguuccuggacaucuggaccuacaacgccgagcuccuggugcugcucgagaacgagcgcacgcuggacuuccacgacagcaacgucaagaaccuguacgagaaggucaagagccagcucaagaacaacgccaaggagaucggcaacgggugcuucgaguucuaccacaagugcgacaacgagugcauggaguccgugcggaacggcaccuacgacuaccccaaguacagcgaggaguccaagcugaaccgcgagaagguggacggggugaagcuggagagcaugggcaucuaccagauccucgccaucuacuccaccgucgccagcucccuggugcugcucgugagccugggcgcgaucagcuucuggaugugcuccaacgggagccugcagugccggaucugcaucuga

SEQ ID NO: 70579 - RNA, 1698 nt, Artificial Sequence; identical to SEQ ID NO: 70578
  derived and/or modified CDS sequence (opt1) from hemagglutinin__InfluenzaA__ADX99592

SEQ ID NO: 70580 - RNA, 1698 nt, Artificial Sequence; identical to SEQ ID NO: 70578
  derived and/or modified CDS sequence (opt1) from hemagglutinin__InfluenzaA__ADX99603

SEQ ID NO: 70581 - RNA, 1698 nt, Artificial Sequence
  derived and/or modified CDS sequence (opt1) from hemagglutinin__InfluenzaA__ADX99614
augaaggccaaccugcucgugcugcugagcgcccucgcggccgccgacgccgacaccaucugcaucggcuaccacgccaacaacuccaccgacacggucgacaccgugcuggagaagaacgugaccgucacccacagcgugaaccugcucgaggacucccacaacgggaagcugugccgccugaagggcaucgcgccccuccagcuggggaagugcaacaucgccggcuggcugcucgggaacccggagugcgacccccugcugcccgugcggagcugguccuacaucgucgagacgcccaacagcgagaacggcaucugcuacccgggcgacuucaucgacuacgaggagcuccgcgagcagcuguccagcguguccagcuucgagcgguucgagaucuuccccaaggaguccagcuggcccaaccacaacaccaacggggugaccgccgccugcucccacgagggcaagagcuccuucuaccgcaaccugcucuggcugaccgagaagaaggggagcuaccccaagcugaagaacuccuacgucaacaagaagggcaaggaggugcucgugcugugggggauccaccacccgcccaacagcaaggagcagcagaaccuguaccagaacgagaacgcguacgucuccguggugacgagcaacuacaaccggcgcuucacccccgagaucgccgagcggcccaagguccgcgaccaggccggccggaugaacuacuacuggacccuccugaagccgggcgacaccaucaucuucgaggccaacgggaaccugaucgcccccauguacgcguucgcccucagccgcggcuucggguccggcaucaucacgagcaacgccuccaugcacgagugcaacaccaagugccagacgccccugggcgccaucaacagcucccugcccuaccagaacauccacccggugaccaucggggagugccccaaguacgugcggagcgccaagcuccgcauggucaccggccugcggaacacccccuccauccagagccgcgggcuguucggcgcgaucgccggguucaucgagggcggcuggaccgggaugaucgacggcugguacggguaccaccaccagaacgagcagggcuccggguacgccgccgaccagaaguccacccagaacgccaucaacggcaucacgaacaaggugaacaccgugaucgagaagaugaacauccaguucaccgcggucggcaaggaguucaacaagcucgagaagcggauggagaaccugaacaagaagguggacgacggguuccuggacaucuggaccuacaacgccgagcuccuggugcugcucgagaacgagcgcacgcuggacuuccacgacagcaacgucaagaaccuguacgagaaggucaagagccagcucaagaacaacgccaaggagaucggcaacgggugcuucgaguucuaccacaagugcgacaacgagugcauggaguccgugcggaacggcaccuacgacuaccccaaguacagcgaggaguccaagcugaaccgcgagaagguggacggggugaagcuggagagcaugggcaucuaccagauccucgccaucuacuccaccgucgccagcucccuggugcugcucgugagccugggcgcgaucagcuucuggaugugcuccaacgggagccugcagugccggaucugcaucuga

SEQ ID NO: 70582 - RNA, 1698 nt, Artificial Sequence
  derived and/or modified CDS sequence (opt1) from hemagglutinin__InfluenzaA__ADX99625
augaaggccaaccugcucgugcugcugagcgcccucgcggccgccgacgccgacaccaucugcaucggcuaccacgccaacaacuccaccgacacggucgacaccgugcuggagaagaacgugaccgucacccacagcgugaaccugcucgaggacucccacaacgggaagcugugccgccugaagggcaucgcgccccuccagcuggggaagugcaacaucgccggcuggcugcucgggaacccggagugcgacccccugcugcccgugcggagcugguccuacaucgucgagacgcccaacagcgagaacggcaucugcuacccgggcgacuucaucgacuacgaggagcuccgcgagcagcuguccagcguguccagcuucgagcgguucgagaucuuccccaaggaguccagcuggcccaaccacaacaccaacggggugaccgccgccugcucccacgagggcaagagcuccuucuaccgcaaccugcucuggcugaccgagaaggaggggagcuaccccaagcugaagaacuccuacgucaacaagaagggcaaggaggugcucgugcugugggggauccaccacccgcccaacagcaaggagcagcagaaccuguaccagaacgagaacgcguacgucuccguggugacgagcaacuacaaccggcgcuucacccccgagaucgccgagcggcccaagguccgcgaccaggccggccggaugaacuacuacuggacccuccugaagccgggcgacaccaucaucuucggggccaacggcaaccugaucgcccccauguacgcguucgcccucagccgcggguucggcuccggcaucaucacgagcaacgccuccaugcacgagugcaacaccaagugccagacgccccugggggccaucaacagcucccugcccuaccagaacauccacccggugaccaucggcgagugccccaaguacgugcggagcgccaagcuccgcauggucaccgggcugcggaacacccccuccauccagagccgcggccuguucggggcgaucgccggcuucaucgagggcggguggaccggcaugaucgacgggugguacggcuaccaccaccagaacgagcagggguccggcuacgccgccgaccagaaguccacccagaacgccaucaacggcaucacgaacaaggugaacaccgugaucgagaagaugaacauccaguucaccgcggucgggaaggaguucaacaagcucgagaagcggauggagaaccugaacaagaagguggacgacggcuuccuggacaucuggaccuacaacgccgagcuccuggugcugcucgagaacgagcgcacgcuggacuuccacgacagcaacgucaagaaccuguacgagaaggucaagagccagcucaagaacaacgccaaggagaucgggaacggcugcuucgaguucuaccacaagugcgacaacgagugcauggaguccgugcggaacgggaccuacgacuaccccaaguacagcgaggaguccaagcugaaccgcgagaagguggacggcgugaagcuggagagcaugggcaucuaccagauccucgccaucuacuccaccgucgccagcucccuggugcugcucgugagccugggggcgaucagcuucuggaugugcuccaacggcagccugcagugccggaucugcaucuga

SEQ ID NO: 70583 - RNA, 1698 nt, Artificial Sequence
  derived and/or modified CDS sequence (opt1) from hemagglutinin__InfluenzaA__ADX99636
augaaggccaaccugcucgugcugcugagcgcccucgcggccgccgacgccgacaccaucugcaucggcuaccacgccaacaacuccaccgacacggucgacaccgugcuggagaagaacgugaccgucacccacagcgugaaccugcucgaggacucccacaacgggaagcugugccgccugaagggcaucgcgccccuccagcuggggaagugcaacaucgccggcuggcugcucgggaacccggagugcgacccccugcugcccgugcggagcugguccuacaucgucgagacgcccaacagcgagaacggcaucugcuacccgggcgacuucaucgacuacgaggagcuccgcgagcagcuguccagcguguccagcuucgagcgguucgagaucuuccccaaggaguccagcuggcccaaccacaacaccaacggggugaccgccgccugcucccacgagggcaagagcuccuucuaccgcaaccugcucuggcugaccaagaaggaggggagcuaccccaagcugaagaacuccuacgucaacaagaagggcaaggaggugcucgugcugugggggauccaccacccgcccaacagcaaggagcagcagaaccuguaccagaacgagaacgcguacgucuccguggugacgagcaacuacaaccggcgcuucacccccgagaucgccgagcggcccaagguccgcgaccaggccggccggaugaacuacuacuggacccuccugaagccgggcgacaccaucaucuucgaggccaacgggaaccugaucgcccccauguacgcguucgcccucagccgcggcuucggguccggcaucaucacgagcaacgccuccaugcacgagugcaacaccaagugccagacgccccugggcgccaucaacagcucccugcccuaccagaacauccacccggugaccaucggggagugccccaaguacgugcggagcgccaagcuccgcauggucaccggccugcggaacacccccuccauccagagccgcgggcuguucggcgcgaucgccggguucaucgagggcggcuggaccgggaugaucgacggcugguacggguaccaccaccagaacgagcagggcuccggguacgccgccgaccagaaguccacccagaacgccaucaacggcaucacgaacaaggugaacaccgugaucgagaagaugaacauccaguucaccgcggucggcaaggaguucaacaagcucgagaagcggauggagaaccugaacaagaagguggacgacggguuccuggacaucuggaccuacaacgccgagcuccuggugcugcucgagaacgagcgcacgcuggacuuccacgacagcaacgucaagaaccuguacgagaaggucaagagccagcucaagaacaacgccaaggagaucggcaacgggugcuucgaguucuaccacaagugcgacaacgagugcauggaguccgugcggaacggcaccuacgacuaccccaaguacagcgaggaguccaagcugaaccgcgagaagguggacggggugaagcuggagagcaugggcaucuaccagauccucgccaucuacuccaccgucgccagcucccuggugcugcucgugagccugggcgcgaucagcuucuggaugugcuccaacgggagccugcagugccggaucugcaucuga

SEQ ID NO: 70584 - RNA, 1698 nt, Artificial Sequence; identical to SEQ ID NO: 67302
  derived and/or modified CDS sequence (opt1) from hemagglutinin__InfluenzaA__ADX99647

SEQ ID NO: 70585 - RNA, 1698 nt, Artificial Sequence
  derived and/or modified CDS sequence (opt1) from hemagglutinin__InfluenzaA__ADX99680
augaaggccaaccugcucgugcugcugugcgcccucgcggccgccgacgccgacaccaucugcaucggcuaccacgccaacaacagcaccgacacggucgacaccgugcuggagaagaacgugaccgucacccacuccgugaaccugcucgaggacagccacaacgggaagcugugccgccugaagggcaucgcgccccuccagcuggggaagugcaacaucgccggcuggcugcucgggaacccggagugcgacccccugcugcccgugcgguccuggagcuacaucgucgagacgcccaacuccgagaacggcaucugcuacccgggcgacuucaucgacuacgaggagcuccgcgagcagcugagcuccgugagcuccuucgagcgguucgagaucuuccccaaggagagcuccuggagcaaccacaacaccaacggggugaccgccgccugcucccacgagggcaagagcuccuucuaccgcaaccugcucuggcugaccgagaaggaggggagcuaccccaagcugaagaacuccuacgucaacaagaagggcaaggaggugcucgugcugugggggauccaccacccgcccaacagcaaggagcagcagaaccuguaccagaacgagaacgcguacgucuccguggugacgagcaacuacaaccggcgcuucacccccgagaucgccgagcggcccaagguccgcgaccaggccggccggaugaacuacuacuggacccuccugaagcccggcgacaccaucaucuucgaggccaacgggaaccugaucgccccgauguacgcguucgcccucagccgcggcuucggguccggcaucaucacgagcaacgccuccaugcacgagugcaacaccaagugccagacgccccugggcgccaucaacagcucccugcccuaccagaacauccaccccgugaccaucggggagugcccgaaguacgugcggagcgccaagcuccgcauggucaccggccugcggaacauccccuccauccagagccgcgggcuguucggcgcgaucgccggguucaucgagggcggcuggaccgggaugaucgacggcugguacggguaccaccaccagaacgagcagggcuccggguacgccgccgaccagaaguccacccagaacgccaucaacggcaucaccaacaaggugaacacggugaucgagaagaugaacauccaguucaccgcggucggcaaggaguucaacaagcucgagaagcggauggagaaccugaacaagaagguggacgacggguuccuggacaucuggaccuacaacgccgagcuccuggugcugcucgagaacgagcgcacccuggacuuccacgacagcaacgucaagaaccuguacgagaaggucaagagccagcucaagaacaacgccaaggagaucggcaacgggugcuucgaguucuaccacaagugcgacaacgagugcauggaguccgugcggaacggcacguacgacuaccccaaguacagcgaggaguccaagcugaaccgcgagaagguggacggggugaagcuggagagcaugggcaucuaccagauccucgccaucuacuccaccgucgccagcucccuggugcugcucgugagccugggcgcgaucagcuucuggaugugcuccaacgggagccugcagugccggaucugcaucuga

SEQ ID NO: 70586 - RNA, 1698 nt, Artificial Sequence
  derived and/or modified CDS sequence (opt1) from hemagglutinin__InfluenzaA__ADX99702
augaaggccaaccugcucgugcugcugugcgcccucgcggccgccgacgccgacaccaucugcaucggcuaccacgccaacaacagcaccgacacggucgacaccgugcuggagaagaacgugaccgucacccacuccgugaaccugcucgaggacagccacaacgggaagcugugccgccugaagggcaucgcgccccuccagcuggggaagugcaacaucgccggcuggcugcucgggaacccggagugcgacccccugcugcccgugcgguccuggagcuacaucgucgagacgcccaacuccgagaacggcaucugcuacccgggcgacuucaucgacuacgaggagcuccgcgagcagcugagcuccgugagcuccuucgagcgguucgagaucuuccccaaggagagcuccuggcccaaccacaacaccaacggggugaccgccgccugcagccacgagggcaaguccagcuucuaccgcaaccugcucuggcugaccgagaaggagggguccuaccccaagcugaagaaguccuacgucaacaagaagggcaaggaggugcucgugcugugggggauccaccacccgcccaacagcaaggagcagcagaaccuguaccagaacgagaacgcguacgucagcguggugacguccaacuacaaccggcgcuucacccccgagaucgccgagcggcccaagguccgcgaccaggccggccggaugaacuacuacuggacccuccugaagccgggcgacaccaucaucuucgaggccaacgggaaccugaucgcccccauguacgcguucgcccucagccgcggcuucgggagcggcaucaucacguccaacgccagcaugcacgagugcaacaccaagugccagacgccccugggcgccaucaacuccagccugcccuaccagaacauccacccggugaccaucggggagugccccaaguacgugcgguccgccaagcuccgcauggucaccggccugcggaacauccccagcauccagucccgcgggcuguucggcgcgaucgccggguucaucgagggcggcuggaccgggaugaucgacggcugguacggguaccaccaccagaacgagcagggcagcggguacgccgccgaccagaaguccacccagaacgccaucaacggcaucaccaacaaggugaacacggugaucgagaagaugaacauccaguucaccgcggucggcaaggaguucaacaagcucgagaagcggauggagaaccugaacaagaagguggacgacggguuccuggacaucuggaccuacaacgccgagcuccuggugcugcucgagaacgagcgcacccuggacuuccacgacagcaacgucaagaaccuguacgagaaggugaagucccagcucaagaacaacgccaaggagaucggcaacgggugcuucgaguucuaccacaagugcgacaacgagugcauggagagcguccggaacggcacguacgacuaccccaaguacuccgaggagagcaagcugaaccgcgagaagguggacggggugaagcuggaguccaugggcaucuaccagauccucgccaucuacagcaccgucgccuccagccuggugcugcucgugucccugggcgcgaucagcuucuggaugugcagcaacgggucccugcagugccggaucugcaucuga

SEQ ID NO: 70587 - RNA, 1698 nt, Artificial Sequence; identical to SEQ ID NO: 70586
  derived and/or modified CDS sequence (opt1) from hemagglutinin__InfluenzaA__ADX99843

SEQ ID NO: 70588 - RNA, 1698 nt, Artificial Sequence
  derived and/or modified CDS sequence (opt1) from hemagglutinin__InfluenzaA__ADX99854
augaaggccaaccugcucgugcugcugugcgcccucgcggccgccgacgccgacaccaucugcaucggcuaccacgccaacaacagcaccgacacggucgacaccgugcuggagaagaacgugaccgucacccacuccgugaaccugcucgaggacagccacaacgggaagcugugccgccugaagggcaucgcgccccuccagcuggggaagugcaacaucgccggcuggcugcucgggaacccggagugcgacccccugcugcccgugcgguccuggagcuacaucgucgagacgcccaacuccgagaacggcaucugcuacccgggcgacuucaucgacuacgaggagcuccgcgagcagcugagcuccgugagcuccuucgagcgguucgagaucuuccccaaggagagcuccuggcccaaccacaacaccaacggggugaccgccgccugcagccacgagggcaaguccagcuucuaccgcaaccugcucuggcugaccgagaaggagggguccuaccugaagcucaagaacagcuacgucaacaagaagggcaaggaggugcuggugcugugggggauccaccacccgcccaacuccaaggagcagcagaaccucuaccagaacgagaacgcguacgucagcguggugacguccaacuacaaccggcgcuucacccccgagaucgccgagcggcccaagguccgcgaccaggccggccggaugaacuacuacuggacccugcugaagcccggcgacaccaucaucuucgaggccaacgggaaccucaucgccccgauguacgcguucgcccugagccgcggcuucgggagcggcaucaucacguccaacgccagcaugcacgagugcaacaccaagugccagacgccccugggcgccaucaacuccagccuccccuaccagaacauccaccccgugaccaucggggagugcccgaaguacgugcgguccgccaagcugcgcauggucaccggccugcggaacauccccagcauccagucccgcggccucuucggggcgaucgccggguucaucgagggcggcuggaccgggaugaucgacggcugguacggguaccaccaccagaacgagcagggcagcggguacgccgccgaccagaaguccacccagaacgccaucaacggcaucaccaacaaggugaacacggugaucgagaagaugaacauccaguucaccgcggucggcaaggaguucaacaagcuggagaagcggauggagaaccugaacaagaagguggacgacggguuccucgacaucuggaccuacaacgccgagcugcuggugcuccuggagaacgagcgcacccuggacuuccacgacagcaacgucaagaaccucuacgagaaggugaagucccagcugaagaacaacgccaaggagaucggcaacgggugcuucgaguucuaccacaagugcgacaacgagugcauggagagcguccggaacggcacguacgacuaccccaaguacuccgaggagagcaagcugaaccgcgagaagguggacggggugaagcucgaguccaugggcaucuaccagauccuggccaucuacagcaccgucgccuccagccuggugcuccuggugucccugggcgcgaucagcuucuggaugugcagcaacgggucccugcagugccggaucugcaucuga

SEQ ID NO: 70589 - RNA, 1698 nt, Artificial Sequence
  derived and/or modified CDS sequence (opt1) from hemagglutinin__InfluenzaA__ADX99865
augaaggccaaccugcucgugcugcugugcgcccucgcggccgccgacgccgacaccaucugcaucggcuaccacgccaacaacagcaccgacacggucgacaccgugcuggagaagaacgugaccgucacccacuccgugaaccugcucgaggacagccacaacgggaagcugugccgccugaagggcaucgcgccccuccagcuggggaagugcaacaucgccggcuggcugcucgggaacccggagugcgacccccugcugcccgugcgguccuggagcuacaucgucgagacgcccaacuccgagaacggcaucugcuacccgggcgacuucaucgacuacgaggagcuccgcgagcagcugagcuccgugagcuccuucgagcgguucgagaucuuccccaaggagagcuccuggcccaaccacaacaccaacggggugaccgccgccugcagccacgagggcaaguccagcuucuaccgcaaccugcucuggcugaccgagaaggagggguccuaccccaagcagaagaacagcuacgucaacaagaagggcaaggaggugcuggugcucugggggauccaccacccgcccaacuccaaggagcagcagaaccuguaccagaacgagaacgcguacgucagcguggugacguccaacuacaaccggcgcuucacccccgagaucgccgagcggcccaagguccgcgaccaggccggccggaugaacuacuacuggacccugcucaagccgggcgacaccaucaucuucgaggccaacgggaaccugaucgcccccauguacgcguucgcccugagccgcggcuucgggagcggcaucaucacguccaacgccagcaugcacgagugcaacaccaagugccagacgccccucggcgccaucaacuccagccugcccuaccagaacauccacccggugaccaucggggagugccccaaguacgugcgguccgccaagcugcgcauggucaccggccuccggaacauccccagcauccagucccgcgggcuguucggcgcgaucgccggguucaucgagggcggcuggaccgggaugaucgacggcugguacggguaccaccaccagaacgagcagggcagcggguacgccgccgaccagaaguccacccagaacgccaucaacggcaucaccaacaaggugaacacggugaucgagaagaugaacauccaguucaccgcggucggcaaggaguucaacaagcuggagaagcggauggagaaccucaacaagaagguggacgacggguuccuggacaucuggaccuacaacgccgagcugcucgugcugcuggagaacgagcgcacccucgacuuccacgacagcaacgucaagaaccuguacgagaaggugaagucccagcugaagaacaacgccaaggagaucggcaacgggugcuucgaguucuaccacaagugcgacaacgagugcauggagagcguccggaacggcacguacgacuaccccaaguacuccgaggagagcaagcucaaccgcgagaagguggacggggugaagcuggaguccaugggcaucuaccagauccuggccaucuacagcaccgucgccuccagccucgugcugcuggugucccucggcgcgaucagcuucuggaugugcagcaacgggucccugcagugccggaucugcaucuga

SEQ ID NO: 70590 - RNA, 1698 nt, Artificial Sequence
  derived and/or modified CDS sequence (opt1) from hemagglutinin__InfluenzaA__ADX99887
augaaggccaaccugcucgugcugcugugcgcccucgcggccgccgacgccgacaccaucugcaucggcuaccacgccaacaacagcaccgacacggucgacaccgugcuggagaagaacgugaccgucacccacuccgugaaccugcucgaggacagccacaacgggaagcugugccgccugaagggcaucgcgccccuccagcuggggaagugcaacaucgccggcuggcugcucgggaacccggagugcgacccccugcugcccgugcgguccuggagcuacaucgucgagacgcccaacuccgagaacggcaucugcuacccgggcgacuucaucgacuacgaggagcuccgcgagcagcugagcuccgugagcuccuucgagcgguucgagaucuuccccaaggagagcuccuggcccaaccacaacaccaacggggugaccgccgccugcagccacgagggcaaguccagcuucuaccgcaaccugcucuggcugaccgagaaggagggguccuaccccaagcuggagaacagcuacgucaacaagaagggcaaggaggugcucgugcugugggggauccaccacccgcccaacuccaaggagcagcagaaccuguaccagaacgagaacgcguacgucagcguggugacguccaacuacaaccggcgcuucacccccgagaucgccgagcggagcaagguccgcgaccaggccggccggaugaacuacuacuggacccuccugaagcccggcgacaccaucaucuucgaggccaacgggaaccugaucgccccgauguacgcguucgcccucagccgcggcuucggguccggcaucaucacgagcaacgccuccaugcacgagugcaacaccaagugccagacgccccugggcgccaucaacagcucccugcccuaccagaacauccaccccgugaccaucggggagugcccgaaguacgugcggagcgccaagcuccgcauggucaccggccugcggaacauccccuccauccagagccgcgggcuguucggcgcgaucgccggguucaucgagggcggcuggaccgggaugaucgacggcugguacggguaccaccaccagaacgagcagggcuccggguacgccgccgaccagaaguccacccagaacgccaucaacggcaucaccaacaaggugaacacggugaucgagaagaugaacauccaguucaccgcggucggcaaggaguucaacaagcucgagaagcggauggagaaccugaacaagaagguggacgacggguuccuggacaucuggaccuacaacgccgagcuccuggugcugcucgagaacgagcgcacccuggacuuccacgacagcaacgucaagaaccuguacgagaaggucaagagccagcucaagaacaacgccaaggagaucggcaacgggugcuucgaguucuaccacaagugcgacaacgagugcauggaguccgugcggaacggcacguacgacuaccccaaguacagcgaggaguccaagcugaaccgcgagaagguggacggggugaagcuggagagcaugggcaucuaccagauccucgccaucuacuccaccgucgccagcucccuggugcugcucgugagccugggcgcgaucagcuucuggaugugcuccaacgggagccugcagugccggaucugcaucuga

SEQ ID NO: 70591 - RNA, 1698 nt, Artificial Sequence
  derived and/or modified CDS sequence (opt1) from hemagglutinin__InfluenzaA__ADX99898
augaaggccaaccugcucgugcugcugugcgcccucgcggccgccgacgccgacaccaucugcaucggcuaccacgccaacaacagcaccgacacggucgacaccgugcuggagaagaacgugaccgucacccacuccgugaaccugcucgaggacagccacaacgggaagcugugccgccugaagggcaucgcgccccuccagcuggggaagugcaacaucgccggcuggcugcucgggaacccggagugcgacccccugcugcccgugcgguccuggagcuacaucgucgagacgcccaacuccgagaacggcaucugcuacccgggcgacuucaucgacuacgaggagcuccgcgagcagcugagcuccgugagcuccuucgagcgguucgagaucuuccccaaggagagcuccuggcccaaccacaacaccaacggggugaccgccgccugcagccacgagggcaaguccagcuucuaccgcaaccugcucuggcugaccgagaaggagggguccuaccccaagcugaagaacuacuacgucaacaagaagggcaaggaggugcucgugcugugggggauccaccacccgcccaacagcaaggagcagcagaaccuguaccagaacgagaacgcguacgucuccguggugacgagcaacuacaaccggcgcuucacccccgagaucgccgagcggcccaagguccgcgaccaggccggccggaugaacuacuacuggacccuccugaagccgggcgacaccaucaucuucgaggccaacgggaaccugaucgcccccauguacgcguucgcccucucccgcggcuucgggagcggcaucaucacgagcaacgccuccaugcacgagugcaacaccaagugccagacgccccugggcgccaucaacagcucccugcccuaccagaacauccacccggugaccaucggggagugccccaaguacgugcggagcgccaagcuccgcauggucaccggccugcggaacauccccuccauccagagccgcgggcuguucggcgcgaucgccggguucaucgagggcggcuggaccgggaugaucgacggcugguacggguaccaccaccagaacgagcagggcuccggguacgccgccgaccagaaguccacccagaacgccaucaacggcaucaccaacaaggugaacacggugaucgagaagaugaacauccaguucaccgcggucggcaaggaguucaacaagcucgagaagcggauggagaaccugaacaagaagguggacgacggguuccuggacaucuggaccuacaacgccgagcuccuggugcugcucgagaacgagcgcacccuggacuuccacgacagcaacgucaagaaccuguacgagaaggucaagagccagcucaagaacaacgccaaggagaucggcaacgggugcuucgaguucuaccacaagugcgacaacgagugcauggaguccgugcggaacggcacguacgacuaccccaaguacagcgaggaguccaagcugaaccgcgagaagguggacggggugaagcuggagagcaugggcaucuaccagauccucgccaucuacuccaccgucgccagcucccuggugcugcucgugagccugggcgcgaucuccuucuggaugugcagcaacgggagccugcagugccggaucugcaucuga

SEQ ID NO: 70592 - RNA, 1698 nt, Artificial Sequence
  derived and/or modified CDS sequence (opt1) from hemagglutinin__InfluenzaA__ADX99909
augaaggccaaccugcucgugcugcugugcgcccucgcggccgccgacgccgacaccaucugcaucggcuaccacgccaacaacagcaccgacacggucgacaccgugcuggagaagaacgugaccgucacccacuccgugaaccugcucgaggacagccacaacgggaagcugugccgccugaagggcaucgcgccccuccagcuggggaagugcaacaucgccggcuggcugcucgggaacccggagugcgacccccugcugcccgugcgguccuggagcuacaucgucgagacgcccaacuccgagaacggcaucugcuacccgggcgacuucaucgacuacgaggagcuccgcgagcagcugagcuccgugagcuccuucgagcgguucgagaucuuccccaaggagagcuccuggcccaaccacaacaccaacggggugaccgccgccugcagccacgagggcaaguccagcuucuaccgcaaccugcucuggcugaccgagaaggagggguccuaccccaagcugaagaacuucuacgucaacaagaagggcaaggaggugcucgugcugugggggauccaccacccgcccaacagcaaggagcagcagaaccuguaccagaacgagaacgcguacgucuccguggugacgagcaacuacaaccggcgcuucacccccgagaucgccgagcggcccaagguccgcgaccaggccggccggaugaacuacuacuggacccuccugaagccgggcgacaccaucaucuucgaggccaacgggaaccugaucgcccccauguacgcguucgcccucucccgcggcuucgggagcggcaucaucacgagcaacgccuccaugcacgagugcaacaccaagugccagacgccccugggcgccaucaacagcucccugcccuaccagaacauccacccggugaccaucggggagugccccaaguacgugcggagcgccaagcuccgcauggucaccggccugcggaacauccccuccauccagagccgcgggcuguucggcgcgaucgccggguucaucgagggcggcuggaccgggaugaucgacggcugguacggguaccaccaccagaacgagcagggcuccggguacgccgccgaccagaaguccacccagaacgccaucaacggcaucaccaacaaggugaacacggugaucgagaagaugaacauccaguucaccgcggucggcaaggaguucaacaagcucgagaagcggauggagaaccugaacaagaagguggacgacggguuccuggacaucuggaccuacaacgccgagcuccuggugcugcucgagaacgagcgcacccuggacuuccacgacagcaacgucaagaaccuguacgagaaggucaagagccagcucaagaacaacgccaaggagaucggcaacgggugcuucgaguucuaccacaagugcgacaacgagugcauggaguccgugcggaacggcacguacgacuaccccaaguacagcgaggaguccaagcugaaccgcgagaagguggacggggugaagcuggagagcaugggcaucuaccagauccucgccaucuacuccaccgucgccagcucccuggugcugcucgugagccugggcgcgaucuccuucuggaugugcagcaacgggagccugcagugccggaucugcaucuga

SEQ ID NO: 70593 - RNA, 1698 nt, Artificial Sequence; identical to SEQ ID NO: 70592
  derived and/or modified CDS sequence (opt1) from hemagglutinin__InfluenzaA__ADX99920

SEQ ID NO: 70594 - RNA, 1698 nt, Artificial Sequence
  derived and/or modified CDS sequence (opt1) from hemagglutinin__InfluenzaA__ADX99931
augaaggccaaccugcucgugcugcugugcgcccucgcggccgccgacgccgacaccaucugcaucggcuaccacgccaacaacagcaccgacacggucgacaccgugcuggagaagaacgugaccgucacccacuccgugaaccugcucgaggacagccacaacgggaagcugugccgccugaagggcaucgcgccccuccagcuggggaagugcaacaucgccggcuggcugcucgggaacccggagugcgacccccugcugcccgugcgguccuggagcuacaucgucgagacgcccaacuccgagaacggcaucugcuacccgggcgacuucaucgacuacgaggagcuccgcgagcagcugagcuccgugagcuccuucgagcgguucgagaucuuccccaaggagagcuccuggcccaaccacaacaccaacggggugaccgccgccugcagccacgagggcaaguccagcuucuaccgcaaccugcucuggcugaccgagaaggagggguccuaccccaagcuggagaacagcuacgucaacaagaagggcaaggaggugcucgugcugugggggauccaccacccgcccaacuccaaggagcagcagaaccuguaccagaacgagaacgcguacgucagcguggugacguccaacuacaaccggcgcuucacccccgagaucgccggccggcccaagguccgcgaccaggccggccggaugaacuacuacuggacccuccugaagccgggggacaccaucaucuucgaggccaacggcaaccugaucgcccccauguacgcguucgcccucagccgcggguucggcagcggcaucaucacguccaacgccagcaugcacgagugcaacaccaagugccagacgccccugggggccaucaacuccagccugcccuaccagaacauccacccggugaccaucggcgagugccccaaguacgugcgguccgccaagcuccgcauggucaccgggcugcggaacauccccagcauccagucccgcggccuguucggggcgaucgccggcuucaucgagggcggguggaccggcaugaucgacgggugguacggcuaccaccaccagaacgagcaggggagcggcuacgccgccgaccagaaguccacccagaacgccaucaacggcaucaccaacaaggugaacacggugaucgagaagaugaacauccaguucaccgcggucgggaaggaguucaacaagcucgagaagcggauggagaaccugaacaagaagguggacgacggcuuccuggacaucuggaccuacaacgccgagcuccuggugcugcucgagaacgagcgcacccuggacuuccacgacagcaacgucaagaaccuguacgagaaggugaagucccagcucaagaacaacgccaaggagaucgggaaccggugcuucgaguucuaccacaagugcgacaacgagugcauggagagcguccgcaacggcacguacgacuaccccaaguacuccgaggagagcaagcugaaccgggagaagguggacggggugaagcuggaguccaugggcaucuaccagauccucgccaucuacagcaccgucgccuccagccuggugcugcucgugucccugggcgcgaucagcuucuggaugugcagcaacgggucccugcagugccgcaucugcaucuga

SEQ ID NO: 70595 - RNA, 1698 nt, Artificial Sequence
  derived and/or modified CDS sequence (opt1) from hemagglutinin__InfluenzaA__ADX99964
augaaggccaaccugcucgugcugcugugcgcccucgcggccgccgacgccgacaccaucugcaucggcuaccacgccaacaacagcaccgacacggucgacaccgugcuggagaagaacgugaccgucacccacuccgugaaccugcucgaggacagccacaacgggaagcugugccgccugaagggcaucgcgccccuccagcuggggaagugcaacaucgccggcuggcugcucgggaacccggagugcgacccccugcugcccgugcgguccuggagcuacaucgucgagacgcccaacuccgagaacggcaucugcuacccgggcgacuucaucgacuacgaggagcuccgcgagcagcugagcuccgugagcuccuucgagcgguucgagaucuuccccaaggagagcuccuggcccaagcacaacaccaacggggugaccgccgccugcagccacgagggcaaguccagcuucuaccgcaaccugcucuggcugaccgagaaggagggguccuaccccaagcugaagaacagcuacgucaacaagaagggcaaggaggugcucgugcugugggggauccaccacccgcccaacuccaaggagcagcagaaccuguaccagaacgagaacgcguacgucagcguggugacguccaacuacaaccggcgcuucacccccgagaucgccgagcggcccaagguccgcgaccaggccggccggaugaacuacuacuggacccuccugaagccgggcgacaccaucaucuucgaggccaacgggaaccugaucgcccccauguacgcguucgcccucagccgcggcuucgggagcggcaucaucacguccaacgccagcaugcacgagugcaacaccaagugccagacgccccugggcgccaucaacuccagccugcccuaccagaacauccacccggugaccaucggggagugccccaaguacgugcgguccgccaagcuccgcauggucaccggccugcggaacauccccagcauccagucccgcgggcuguucggcgcgaucgccggguucaucgagggcggcuggaccgggaugaucgacggcugguacggguaccaccaccagaacgagcagggcagcggguacgccgccgaccagaaguccacccagaacgccaucaacggcaucaccaacaaggugaacacggugaucgagaagaugaacauccaguucaccgcggucggcaaggaguucaacaagcucgagaagcggauggagaaccugaacaagaagguggacgacggguuccuggacaucuggaccuacaacgccgagcuccuggugcugcucgagaacgagcgcacccuggacuuccacgacagcaacgucaagaaccuguacgagaaggugaagucccagcucaagaacaacgccaaggagaucggcaacgggugcuucgaguucuaccacaagugcgacaacgagugcauggagagcguccggaacggcacguacgacuaccccaaguacuccgaggagagcaagcugaaccgcgagaagguggacggggugaagcuggaguccaugggcaucuaccagauccucgccaucuacagcaccgucgccuccagccuggugcugcucgugucccugggcgcgaucagcuucuggaugugcagcaacgggucccugcagugccggaucugcaucuga

SEQ ID NO: 70596 - RNA, 1698 nt, Artificial Sequence
  derived and/or modified CDS sequence (opt1) from hemagglutinin__InfluenzaA__ADX99975
augaaggccaaccugcucgugcugcugugcgcccucgcggccgccgacgccgacaccaucugcaucggcuaccacgccaacaacagcaccgacacggucgacaccgugcuggagaagaacgugaccgucacccacuccgugaaccugcucgaggacagccacaacgggaagcugugccgccugaagggcaucgcgccccuccagcuggggaagugcaacaucgccggcuggcugcucgggaacccggagugcgacccccugcugcccgugcgguccuggagcuacaucgucgagacgcccaacuccgagaacggcaucugcuacccgggcgacuucaucgacuacgaggagcuccgcgagcagcugagcuccgugagcuccuucgagcgguucgagaucuuccccaaggagagcuccuggcccaaccacaacaccaacggggugaccgcgaccugcagccacgagggcaaguccagcuucuaccgcaaccugcucuggcugacggagaaggagggguccuaccccgagcugaagaacagcuacgucaacaagaagggcaaggaggugcucgugcugugggggauccaccacccgcccaacuccaaggagcagcagaaccuguaccagaacgagaacgccuacgucagcguggugaccuccaacuacaaccggcgcuucacccccgagaucgccgagcggcccaagguccgcgaccaggccggccggaugaacuacuacuggacccuccugaagccgggcgacacgaucaucuucgaggccaacgggaaccugaucgcccccauguacgccuucgcgcucagccgcggcuucgggagcggcaucaucaccuccaacgccagcaugcacgagugcaacaccaagugccagacgccccugggcgccaucaacuccagccugcccuaccagaacauccacccggugaccaucggggagugccccaaguacgugcgguccgccaagcuccgcauggucaccggccugcggaacauccccagcauccagucccgcgggcuguucggcgccaucgcgggguucaucgagggcggcuggaccgggaugaucgacggcugguacggguaccaccaccagaacgagcagggcagcggguacgccgccgaccagaaguccacccagaacgccaucaacggcaucacgaacaaggugaacaccgugaucgagaagaugaacauccaguucaccgccgucggcaaggaguucaacaagcucgagaagcggauggagaaccugaacaagaagguggacgacggguuccuggacaucuggaccuacaacgcggagcuccuggugcugcucgagaacgagcgcacgcuggacuuccacgacagcaacgucaagaaccuguacgagaaggugaagucccagcucaagaacaacgccaaggagaucggcaacgggugcuucgaguucuaccacaagugcgacaacgagugcauggagagcguccggaacggcaccuacgacuaccccaaguacuccgaggagagcaagcugaaccgcgagaagguggacggggugaagcuggaguccaugggcaucuaccagauccucgccaucuacagcaccgucgccuccagccuggugcugcucgugucccugggcgccaucagcuucuggaugugcagcaacgggucccugcagugccggaucugcaucuga

SEQ ID NO: 70597 - RNA, 1698 nt, Artificial Sequence
  derived and/or modified CDS sequence (opt1) from hemagglutinin__InfluenzaA__ADX99986
augaaggccaaccugcucgugcugcugugcgcccucgcggccgccgacgccgacaccaucugcaucggcuaccacgccaacaacagcaccgacacggucgacaccgugcuggagaagaacgugaccgucacccacuccgugaaccugcucgaggacagccacaacgggaagcugugccgccugaagggcaucgcgccccuccagcuggggaagugcaacaucgccggcuggcugcucgggaacccgaagugcgacccccugcugcccgugcgguccuggagcuacaucgucgagacgcccaacuccgagaacggcaucugcuacccgggcgacuucaucgacuacgaggagcuccgcgagcagcugagcuccgugagcuccuucgagcgguucgagaucuuccccaaggagagcuccuggcccaaccacaacaccaacggggugaccgccgccugcagccacgagggcaaguccagcuucuaccgcaaccugcucuggcugaccgagaaggagggguccuaccccaagcuggagaacagcuacgucaacaagaagggcaaggaggugcucgugcugugggggauccaccacccgcccaacuccaaggagcagcagaaccuguaccagaacgagaacgcguacgucagcguggugacguccaacuacaaccggcgcuucacccccgagaucgccgagcggcccaagguccgcgaccaggccggccggaugaacuacuacuggacccuccugaagccgggcgacaccaucaucuucgaggccaacgggaaccugaucgcccccauguacgcguucgcccucagccgcggcuucgggagcggcaucaucacguccaacgccagcaugcacgagugcaacaccaagugccagacgccccugggcgccaucaacuccagccugcccuaccagaacauccacccggugaccaucggggagugccccaaguacgugcgguccgccaagcuccgcauggucaccggccugcggaacauccccagcauccagucccgcgggcuguucggcgcgaucgccggguucaucgagggcggcuggaccgggaugaucgacggcugguacggguaccaccaccagaacgagcagggcagcggguacgccgccgaccagaaguccacccagaacgccaucaacggcaucaccaacaaggugaacacggugaucgagaagaugaacauccaguucaccgcggucggcaaggaguucaacaagcucgagaagcggauggagaaccugaacaagaagguggacgacggguuccuggacaucuggaccuacaacgccgagcuccuggugcugcucgagaacgagcgcacccuggacuuccacgacagcaacgucaagaaccuguacgagaaggugaagucccagcucaagaacaacgccaaggagaucggcaacgggugcuucgaguucuaccacaagugcgacaacgagugcauggagagcguccggaacggcacguacgacuaccccaaguacuccgaggagagcaagcugaaccgcgagaagguggacggggugaagcuggaguccaugggcaucuaccagauccucgccaucuacagcaccgucgccuccagccuggugcugcucgugucccugggcgcgaucagcuucuggaugugcagcaacgggucccugcagugccggaucugcaucuga

SEQ ID NO: 70598 - RNA, 1698 nt, Artificial Sequence
  derived and/or modified CDS sequence (opt1) from hemagglutinin__InfluenzaA__ADX99997
augaaggccaaccugcucgugcugcugugcgcccucgcggccgccgacgccgacaccaucugcaucggcuaccacgccaacaacagcaccgacacggucgacaccgugcuggagaagaacgugaccgucacccacuccgugaaccugcucgaggacagccacaacgggaagcugugccgccugaagggcaucgcgccccuccagcuggggaagugcaacaucgccggcuggcugcucgggaacccggagugcgacccccugcugcccgugcgguccuggagcuacaucgucgagacgcccaacuccgagaacggcaucugcuacccgggcgacuucaucgacuacgaggagcuccgcgagcagcugagcuccgugagcuccuucgagcgguucgagaucuuccccaaggagagcuccuggcccaaccacaacaccaacggggugaccgccgccugcagccacgagggcaaguccagcuucuaccgcaaccugcucuggcugaccgagaaggagggguccuaccccaagcuggagaacagcuacgucaacaagaagggcaaggaggugcucgugcugugggggauccaccacccgcccaacuccaaggagcagcagaaccuguaccagaacgagaacgcguacgucagcguggugacguccaacuacaaccggcgcuucacccccgagaucgccgagcggcccaagguccgcgaccaggccggccggaugaaguacuacuggacccuccugaagccgggcgacaccaucaucuucgaggccaacgggaaccugaucgcccccauguacgcguucgcccucagccgcggcuucgggagcggcaucaucacguccaacgccagcaugcacgagugcaacaccaagugccagacgccccugggcgccaucaacuccagccugcccuaccagaacauccacccggugaccaucggggagugccccaaguacgugcgguccgccaagcuccgcauggucaccggccugcggaacauccccagcauccagucccgcgggcuguucggcgcgaucgccggguucaucgagggcggcuggaccgggaugaucgacggcugguacggguaccaccaccagaacgagcagggcagcggguacgccgccgaccagaaguccacccagaacgccaucaacggcaucaccaacaaggugaacacggugaucgagaagaugaacauccaguucaccgcggucggcaaggaguucaacaagcucgagaagcggauggagaaccugaacaagaagguggacgacggguuccuggacaucuggaccuacaacgccgagcuccuggugcugcucgagaacgagcgcacccuggacuuccacgacagcaacgucaagaaccuguacgagaaggugaagucccagcucaagaacaacgccaaggagaucggcaacgggugcuucgaguucuaccacaagugcgacaacgagugcauggagagcguccggaacggcacguacgacuaccccaaguacuccgaggagagcaagcugaaccgcgagaagguggacggggugaagcuggaguccaugggcaucuaccagauccucgccaucuacagcaccgucgccuccagccuggugcugcucgugucccugggcgcgaucagcuucuggaugugcagcaacgggucccugcagugccggaucugcaucuga

SEQ ID NO: 70599 - RNA, 1698 nt, Artificial Sequence
  derived and/or modified CDS sequence (opt1) from hemagglutinin__InfluenzaA__ADY00009
augaaggccaaccugcucgugcugcugugcgcccucgcggccgccgacgccgacaccaucugcaucggcuaccacgccaacaacagcaccgacacggucgacaccgugcuggagaagaacgugaccgucacccacuccgugaaccugcucgaggacagccacaacgggaagcugugccgccugaagggcaucgcgccccuccagcuggggaagugcaacaucgccggcuggcugcucgggaacccggagugcgacccccugcugcccgugcgguccuggagcuacaucgucgagacgcccaacuccgagaacggcaucugcuacccgggcgacuucaucgacuacgaggagcuccgcgagcagcugagcuccgugagcuccuucgagcgguucgagaucuuccccaaggagagcuccuggcccaaccacaacaccaacggggugaccgccgccugcagccacgagggcaaguccagcuucuaccgcaaccugcucuggcugaccgagaagaagggguccuaccccaagcuggagaacagcuacgucaacaagaagggcaaggaggugcucgugcugugggggauccaccacccgcccaacuccaaggagcagcagaaccuguaccagaacgagaacgcguacgucagcguggugacguccaacuacaaccggcgcuucacccccgagaucgccgagcggcccaagguccgcgaccaggccggccggaugaacuacuacuggacccuccugaagccgggcgacaccaucaucuucgaggccaacgggaaccugaucgcccccauguacgcguucgcccucagccgcggcuucgggagcggcaucaucacguccaacgccagcaugcacgagugcaacaccaagugccagacgccccugggcgccaucaacuccagccugcccuaccagaacauccacccggugaccaucggggagugccccaaguacgugcgguccgccaagcuccgcauggucaccggccugcggaacauccccagcauccagucccgcgggcuguucggcgcgaucgccggguucaucgagggcggcuggaccgggaugaucgacggcugguacggguaccaccaccagaacgagcagggcagcggguacgccgccgaccagaaguccacccagaacgccaucaacggcaucaccaacaaggugaacacggugaucgagaagaugaacauccaguucaccgcggucggcaaggaguucaacaagcucgagaagcggauggagaaccugaacaagaagguggacgacggguuccuggacaucuggaccuacaacgccgagcuccuggugcugcucgagaacgagcgcacccuggacuuccacgacagcaacgucaagaaccuguacgagaaggugaagucccagcucaagaacaacgccaaggagaucggcaacgggugcuucgaguucuaccacaagugcgacaacgagugcauggagagcguccggaacggcacguacgacuaccccaaguacuccgaggagagcaagcugaaccgcgagaagguggacggggugaagcuggaguccaugggcaucuaccagauccucgccaucuacagcaccgucgccuccagccuggugcugcucgugucccugggcgcgaucagcuucuggaugugcagcaacgggucccugcagugccggaucugcaucuga

SEQ ID NO: 70600 - RNA, 1698 nt, Artificial Sequence; identical to SEQ ID NO: 67302
  derived and/or modified CDS sequence (opt1) from hemagglutinin__InfluenzaA__ADY00020

SEQ ID NO: 70601 - RNA, 1698 nt, Artificial Sequence
  derived and/or modified CDS sequence (opt1) from hemagglutinin__InfluenzaA__ADY04727
augaaggccaagcugcucgugcugcugugcaccuucaccgccacguacgcggacaccaucugcaucggcuaccacgccaacaacagcaccgacaccgucgacacggugcucgagaagaacgugaccgucacccacuccgugaaccugcuggaggacagccacaacgggaagcucugccugcugaagggcaucgcgccccuccagcuggggaacugcuccguggccggcuggauccuggggaacccggagugcgagcuccugaucagcaaggaguccuggagcuacaucgucgagacccccaaccccgagaacggcacgugcuaccccggcuacuucgccgacuacgaggagcugcgcgagcagcucuccagcguguccagcuucgagcgguucgagaucuucccgaagggguccagcuggcccaaccacaccgugaccggcgucuccgccagcugcucccacaacggcaagagcuccuucuaccgcaaccugcuguggcucaccgggaagaacgggcuguaccccaaccugagcauguccuacgugaacaacaaggagaaggaggugcucguccuguggggcgugcaccacccgcccaacaucggcaaccagcgggcccuguaccacacggagaacgccuacgugagcgucgugagcucccacuacagccgccgguucacccccgagaucgccaagcgccccaaggugcgggaccaggaggggcgcaucaacuacuacuggacccuccuggagcccggcgacaccaucaucuucgaggcgaacgggaaccugaucgccccgugguacgccuucgcccucucccggggcuucggcagcgggaucaucacguccaacgcccccaugggcgagugcgacgcgaagugccagacgccccagggggccaucaacagcucccugcccuuccagaacguccacccggugaccaucggcgagugccccaaguacgugcgcagcgccaagcugcggauggucaccgggcuccgcaacauccccuccauccagagccggggccuguucggcgccaucgccggguucaucgagggcggguggaccggcaugguggacgggugguacggcuaccaccaccagaacgagcagggcuccggguacgcggccgaccagaaguccacccagaacgccaucaacggcaucaccaacaaggugaacagcgucaucgagaagaugaacacccaguucacggccguggggaaggaguucaacaagcuggagcgccggauggagaaccucaacaagaaggucgacgacggcuuccuggacaucuggaccuacaacgccgagcugcucgugcugcuggagaacgagcgcacccucgacuuccacgacagcaaccugaagaaccuguacgagaaggugaagucccagcucaagaacaacgcgaaggagaucgggaacggcugcuucgaguucuaccacaagugcaacaacgagugcauggagagcgucaagaacggcaccuacgacuaccccaaguacuccgaggagagcaagcugaaccgggagaagaucgacggggugaagcuggaguccaugggcguguaccagauccucgccaucuacagcacggucgccagcucccuggugcugcucgugagccugggggccaucuccuucuggaugugcagcaacggcucccugcagugccgcaucugcaucuga

SEQ ID NO: 70602 - RNA, 1701 nt, Artificial Sequence; identical to SEQ ID NO: 67637
  derived and/or modified CDS sequence (opt1) from hemagglutinin__InfluenzaA__ADY11836

SEQ ID NO: 70603 - RNA, 1701 nt, Artificial Sequence; identical to SEQ ID NO: 67612
  derived and/or modified CDS sequence (opt1) from hemagglutinin__InfluenzaA__ADY17654

SEQ ID NO: 70604 - RNA, 1701 nt, Artificial Sequence
  derived and/or modified CDS sequence (opt1) from hemagglutinin__InfluenzaA__ADY17665
augaagaccaucaucgcccugagcuacauccucugccugaucuucgcccagaagcugcccggcaacgacaacuccaccgcgacgcucugccuggggcaccacgccgugccgaacggcaccaucgucaagaccaucaccaacgaccagaucgaggugacgaacgccaccgagcuggugcagagcuccagcaccggggagaucugcgacagcccccaccagauccucgacggcaagaacugcacccugaucgacgcccugcucggggacccccagugcgacggcuuccagaacaagaagugggaccuguucgucgagcgcagcaaggccuacuccaacugcuaccccuacgacgugccggacuacgcgagccugcggucccucguggccagcuccggcacgcuggaguucaacaacgagagcuucaacuggaccggggucacccaggacggcaccuccagcgccugcauccgccgguccaagaacagcuucuucucccgccugaacuggcucacgcaccugaacuucaaguaccccgcccugaacgugaccaugcccaacaacgagcaguucgacaagcucuacaucuggggcgugcaccaccccgggaccgacaaggaccagaucuuccuguacgcgcaggccagcgggcggaucaccgucuccacgaagcgcagccagcagaccgccaucccgaacaucggcagccggccccgcgugcggaacauccccucccgcaucagcaucuacuggaccaucgugaagcccggcgacauccugcucaucaacuccaccgggaaccugaucgccccgcggggcuacuucaagauccgcagcgggaaguccagcaucaugcgguccgacgcccccaucggcaagugcaacagcgagugcaucacgcccaacggcuccauccccaacgacaagccguuccagaacgucaaccgcaucaccuacggggcgugcccccgguacgugaagcagaacacccugaagcucgccaccggcaugcgcaacgugcccgagaagcagacgcgggggaucuucggcgccaucgccggguucaucgagaacggcugggagggcauggucgacgggugguacggcuuccgccaccagaacagcgaggggcggggccaggccgcggaccugaaguccacccaggccgccaucgaccagaucaacgggaagcugaaccgccucaucggcaagaccaacgagaaguuccaccagaucgagaaggaguucagcgagguggagggccggauccaggaccuggagaaguacguggaggacaccaagaucgaccugugguccuacaacgccgagcuccuggucgcccuggagaaccagcacacgaucgaccucaccgacagcgagaugaacaagcuguucgagaagaccaagaagcagcugcgcgagaacgcggaggacauggggaacggcugcuucaagaucuaccacaagugcgacaacgccugcaucggguccauccgcaacggcaccuacgaccacgacguguaccgggacgaggcccucaacaaccgcuuccagaucaaggggguggagcugaaguccggcuacaaggacuggauccuguggaucuccuucgccaucagcugcuuccuccugugcgucgcccugcucggcuucaucaugugggcgugccagaaggggaacauccggugcaacaucugcaucuga

SEQ ID NO: 70605 - RNA, 1701 nt, Artificial Sequence; identical to SEQ ID NO: 67637
  derived and/or modified CDS sequence (opt1) from hemagglutinin__InfluenzaA__ADY17676

SEQ ID NO: 70606 - RNA, 1701 nt, Artificial Sequence
  derived and/or modified CDS sequence (opt1) from hemagglutinin__InfluenzaA__ADY17687
augaagaccaucaucgcccugagcuacauccucugccugguguucgcccagaagcugcccggcaacgacaacuccaccgcgacgcucugccuggggcaccacgccgucccgaacggcaccaucgugaagaccaucaccaacgaccagaucgaggugacgaacgccaccgagcugguccagagcuccagcaccggggagaucugcgacagcccccaccagauccucgacggcaagaacugcacccugaucgacgcccugcucggggacccccagugcgacggcuuccagaacaagaagugggaccuguucguggagcgcagcaaggccuacuccaacugcuaccccuacgacgugccggacuacgcgagccugcggucccucgucgccagcuccggcacgcuggaguucaacaacgagagcuucaacuggaccggggugacccaggacggcaccuccagcgccugcauccgccgguccaagaacagcuucuucucccgccugaacuggcucacgcaccugaacuucaaguaccccgcccugaacgugaccaugcccaacaacgagcaguucgacaagcucuacaucuggggcguccaccaccccgggaccgacaaggaccagaucuuccuguacgcgcaggccagcgggcggaucaccguguccacgaagcgcagccagcagaccgccaucccgaacaucggcagccggccccgcgugcggaacauccccucccgcaucagcaucuacuggaccaucgucaagcccggcgacauccugcucaucaacuccaccgggaaccugaucgccccgcggggcuacuucaagauccgcagcgggaaguccagcaucaugcgguccgacgcccccaucggcaagugcaacagcgagugcaucacgcccaacggcuccauccccaacgacaagccguuccagaacgugaaccgcaucaccuacggggcgugcccccgguacgugaagcagaacacccugaagcucgccaccggcaugcgcaacguccccgagaagcagacgcgggggaucuucggcgccaucgccggguucaucgagaacggcugggagggcaugguggacgggugguacggcuuccgccaccagaacagcgaggggcggggccaggccgcggaccugaaguccacccaggccgccaucgaccagaucaacgggaagcugaaccgccucaucggcaagaccaacgagaaguuccaccagaucgagaaggaguucagcgagguggagggccggauccaggaccuggagaaguacgucgaggacaccaagaucgaccugugguccuacaacgccgagcuccugguggcccuggagaaccagcacacgaucgaccucaccgacagcgagaugaacaagcuguucgagaagaccaagaagcagcugcgcgagaacgcggaggacauggggaacggcugcuucaagaucuaccacaagugcgacaacgccugcaucggguccauccgcaacggcaccuacgaccacgacguguaccgggacgaggcccucaacaaccgcuuccagaucaagggggucgagcugaaguccggcuacaaggacuggauccuguggaucuccuucgccaucagcugcuuccuccugugcgccgcgcugcucggcuucaucaugugggccugccagaaggggaacauccggugcaacaucugcaucuga

SEQ ID NO: 70607 - RNA, 1701 nt, Artificial Sequence; identical to SEQ ID NO: 67612
  derived and/or modified CDS sequence (opt1) from hemagglutinin__InfluenzaA__ADY17698

SEQ ID NO: 70608 - RNA, 1701 nt, Artificial Sequence
  derived and/or modified CDS sequence (opt1) from hemagglutinin__InfluenzaA__ADY38719
augaagaccaucaucgcccugagcuacauccucugccugguguucacccagaagcugcccggcaacgacaacuccacggccacccucugccuggggcaccacgcggucccgaacggcaccaucgugaagaccaucacgaacgaccagaucgaggugaccaacgccaccgagcugguccagagcuccagcaccggggagaucugcgacagcccccaccagauccucgacggcaagaacugcacgcugaucgacgcccugcucggggacccccagugcgacggcuuccagaacaagaagugggaccuguucguggagcgcagcaaggccuacuccaacugcuaccccuacgacgugccggacuacgccagccugcggucccucgucgcgagcuccggcacccuggaguucaacaacgagagcuucaacuggaccggggugacccagaacggcacguccagcgccugcauccgccgguccaagaacagcuucuucucccgccugaacuggcucacccaccugaacuucaaguaccccgcccugaacgugaccaugcccaacaacgagcaguucgacaagcucuacaucuggggcguccaccaccccgggaccgacaaggaccagaucuuccuguacgcccaggcgagcgggcggaucacgguguccaccaagcgcagccagcagaccgccaucccgaacaucggcagccggccccgcgugcggaacauccccucccgcaucagcaucuacuggaccaucgucaagcccggcgacauccugcucaucaacuccacggggaaccugaucgccccgcggggcuacuucaagauccgcagcgggaaguccagcaucaugcgguccgacgcccccaucggcaagugcaacagcgagugcaucacccccaacggcuccauccccaacgacaagccguuccagaacgugaaccgcaucaccuacggggccugcccccgguacgugaagcagaacacccugaagcucgcgacgggcaugcgcaacguccccgagaagcagacccgggggaucuucggcgccaucgccggguucaucgagaacggcugggagggcaugguggacgggugguacggcuuccgccaccagaacagcgaggggcggggccaggccgccgaccugaaguccacccaggcggccaucgaccagaucaacgggaagcugaaccgccucaucggcaagaccaacgagaaguuccaccagaucgagaaggaguucagcgagguggagggccggauccaggaccuggagaaguacgucgaggacacgaagaucgaccugugguccuacaacgccgagcuccugguggcccuggagaaccagcacaccaucgaccucaccgacagcgagaugaacaagcuguucgagaagaccaagaagcagcugcgcgagaacgccgaggacauggggaacggcugcuucaagaucuaccacaagugcgacaacgcgugcaucggguccauccgcaacggcacguacgaccacgacguguaccgggacgaggcccucaacaaccgcuuccagaucaagggggucgagcugaaguccggcuacaaggacuggauccuguggaucuccuucgccaucagcugcuuccuccugugcguggcccugcucggcuucaucaugugggccugccagaaggggaacauccggugcaacaucugcaucuga

SEQ ID NO: 70609 - RNA, 1701 nt, Artificial Sequence; identical to SEQ ID NO: 66693
  derived and/or modified CDS sequence (opt1) from hemagglutinin__InfluenzaA__ADY38750

SEQ ID NO: 70610 - RNA, 1701 nt, Artificial Sequence; identical to SEQ ID NO: 67857
  derived and/or modified CDS sequence (opt1) from hemagglutinin__InfluenzaA__ADY38760

SEQ ID NO: 70611 - RNA, 1701 nt, Artificial Sequence
  derived and/or modified CDS sequence (opt1) from hemagglutinin__InfluenzaA__ADZ04607
augaaggccauccuggugguccuccuguacaccuucgccaccgcgaacgccgacacgcugugcaucggcuaccacgccaacaacagcaccgacaccguggacaccgugcucgagaagaacgucacggugacccacuccgugaaccugcuggaggacaagcacaacgggaagcucugcaagcugcgcggcgucgcgccccugcaccucgggaagugcaacaucgccggcuggauccuggggaacccggagugcgagagccuguccaccgccagcuccuggagcuacaucguggagaccuccagcuccgacaacggcacgugcuaccccggcgacuucaucgacuacgaggagcuccgggagcagcugagcuccgugagcuccuucgagcgcuucgagaucuuccccaagaccagcuccuggcccaaccacgacagcaacaagggggucaccgccgccugcccgcacgccggcgcgaaguccuucuacaagaaccugaucuggcucgugaagaaggggaacagcuaccccaagcuguccaagagcuacaucaacgacaagggcaaggaggugcugguccucugggggauccaccaccccagcaccuccgccgaccagcagagccuguaccagaacgccgacgccuacguguucgugggcacgucccgguacagcaagaaguucaagcccgagaucgccauccgcccgaagguccgggaccaggagggccgcaugaacuacuacuggacccugguggagcccggggacaagaucaccuucgaggcgaccggcaaccucguggucccccgguacgccuucgccauggagcgcaacgccggguccggcaucaucaucagcgacacgcccgugcacgacugcaacacgaccugccagaccccgaagggcgccaucaacaccucccugcccuuccagaacauccaccccaucaccaucgggaagugccccaaguacgucaagagcaccaagcugcggcucgcgaccggccugcgcaacgugccguccauccagagccgggggcuguucggcgccaucgccggguucaucgagggcggcuggacggggaugguggacggcugguacggguaccaccaccagaacgagcagggcuccggguacgccgccgaccucaagagcacccagaacgcgaucgacgagaucaccaacaaggugaacuccgucaucgagaagaugaacacccaguucacggccgugggcaaggaguucaaccaccuggagaagcgcaucgagaaccugaacaagaaggucgacgacggcuuccucgacaucuggaccuacaacgccgagcugcuggugcuccuggagaacgagcggacccuggacuaccacgacagcaacgugaagaaccucuacgagaagguccgcucccagcugaagaacaacgccaaggagaucgggaacggcugcuucgaguucuaccacaagugcgacaacacgugcauggagagcgugaagaacgggaccuacgacuaccccaaguacuccgaggaggccaagcugaaccgggaggagaucgacggcgugaagcucgagagcacccgcgucuaccagauccuggcgaucuacuccaccguggccagcagccuggugcucgucgugucccugggggccaucagcuucuggaugugcuccaacggcagccugcagugccggaucugcaucuga

SEQ ID NO: 70612 - RNA, 1698 nt, Artificial Sequence; identical to SEQ ID NO: 69987
  derived and/or modified CDS sequence (opt1) from hemagglutinin__InfluenzaA__ADZ05834

SEQ ID NO: 70613 - RNA, 1698 nt, Artificial Sequence
  derived and/or modified CDS sequence (opt1) from hemagglutinin__InfluenzaA__ADZ05845
augaaggugaagcugcucguccugcugugcaccuucaccgccacguacgccgacaccaucugcaucggcuaccacgcgaacaacagcaccgacaccguggacacggugcucgagaagaacgucaccgugacccacuccgugaaccugcuggaggacagccacaacgggaagcucugccugcugaagggcaucgcgccccuccagcuggggaacugcuccgucgccggcuggauccuggggaacccggagugcgagcuccugaucagcaaggaguccuggagcuacaucguggagaagcccaaccccgagaacgggaccugcuaccccggccacuucgccgacuacgaggagcugcgcgagcagcucuccagcguguccagcuucgagcgguucgagaucuucccgaaggaguccagcuggcccaaccacacggucaccgggguguccgccagcugcucccacaacggcgagaacagcuucuaccgcaaccugcuguggcucaccgggaagaacggccuguaccccaaccuguccaagagcuacgccaacaacaaggagaaggaggugcucguccuguggggcgugcaccacccgcccaacauggccgaccagaagacccuguaccacacggagaacgccuacguguccgucgugagcagccacuacucccggaaguucacccccgagaucgccaagcgccccaaggugcgggaccaggagggccgcaucaacuacuacuggacccuccuggagcccggcgacaccaucaucuucgaggcgaacgggaaccugaucgccccgcgguacgccuucgcccucagccgcggcuucggguccggcaucaucaacagcaacgcccccauggacaagugcgacgcgaagugccagacgccccagggcgccaucaacuccagccugcccuuccagaacguccacccggugaccaucggggagugccccaaguacgugcgguccgccaagcugcgcauggucaccggccuccggaacauccccagcauccagucccgcgggcuguucggcgccaucgccggguucaucgagggcggcuggaccgggaugguggacggcugguacggguaccaccaccagaacgagcagggcagcggguacgcggccgaccagaaguccacgcagaacgccaucaacggcaucaccaacaaggugaacagcgucaucgagaagaugaacacccaguucaccgccgugggcaaggaguucaacaagcuggagcggcgcauggagaaccucaacaagaaggucgacgacggguucaucgacaucuggacguacaacgccgagcugcuggugcuccuggagaacgagcggacccuggacuuccacgacuccaacgugaagaaccucuacgagaaggucaagagccagcugaagaacaacgcgaaggagaucggcaacgggugcuucgaguucuaccacaagugcaacgacgagugcauggaguccgugaagaacggcaccuacgacuaccccaaguacagcgaggaguccaagcugaaccgcgagaagaucgacggggugaagcucgagagcaugggcgucuaccagauccuggccaucuacuccaccguggccagcagccuggugcuccuggucucccugggcgccaucagcuucuggaugugcuccaacgggagccuccagugccggaucugcaucuga

SEQ ID NO: 70614 - RNA, 1701 nt, Artificial Sequence; identical to SEQ ID NO: 66458
  derived and/or modified CDS sequence (opt1) from hemagglutinin__InfluenzaA__ADZ05855

SEQ ID NO: 70615 - RNA, 1701 nt, Artificial Sequence
  derived and/or modified CDS sequence (opt1) from hemagglutinin__InfluenzaA__ADZ47838
augaaggccauccuggugguccuccuguacacccuggccaccgcgaacgccgacacgcucugcaucggcuaccacgccaacaacagcaccgacaccguggacaccgugcuggagaagaacgucacggugacccacuccgugaaccugcucgaggacaagcacaacgggaagcugugcaagcugcgcggcgucgcgccccuccaccuggggaagugcaacaucgccggcuggauccuggggaacccggagugcgagagccucuccaccgccagcuccuggagcuacaucguggagaccuccagcuccgacaacggcacgugcuaccccggcgacuucaucgacuacgaggagcugcgggagcagcugagcuccgugagcuccuucgagcgcuucgagaucuuccccaagaccagcuccuggcccaaccacgacagcaacaagggggucaccgccgccugcccgcacgccggcgcgaaguccuucuacaagaaccucaucuggcuggugaagaaggggaacagcuaccccaagcuguccaagagcuacaucaacgacaagggcaaggaggugcucguccugugggggauccaccaccccagcaccuccgccgaccagcagagccuguaccagaacgccgacgccuacguguucgugggcacgucccgguacagcaagaaguucaagcccgagaucgccauccgcccgaagguccgggagcaggagggccgcaugaacuacuacuggacccucguggagcccggggacaagaucaccuucgaggcgaccggcaaccugguggucccccgguacgccuucgccauggagcgcaacgccggguccggcaucaucaucagcgacacgcccgugcacgacugcaacacgaccugccagaccccgaagggcgccaucaacaccucccugcccuuccagaacauccacagcaucaccaucgggaagugccccaaguacgugaaguccaccaagcuccggcuggcgaccggccugcgcaacguccccagcauccagucccggggccucuucggggccaucgccggguucaucgagggcggcuggacggggaugguggacggcugguacggguaccaccaccagaacgagcagggcagcggguacgccgccgaccugaaguccacccagaacgcgaucgacgagaucaccaacaaggugaacagcgucaucgagaagaugaacacccaguucacggccgugggcaaggaguucaaccaccuggagaagcgcaucgagaaccucaacaagaaggucgacgacggcuuccuggacaucuggaccuacaacgccgagcugcucgugcugcuggagaacgagcggacccucgacuaccacgacuccaacgugaagaaccuguacgagaagguccgcagccagcugaagaacaacgccaaggagaucgggaacggcugcuucgaguucuaccacaagugcgacaacacgugcauggaguccgugaagaacgggaccuacgacuacccgaaguacagcgaggaggccaagcucaaccgggaggagaucgacggcgugaagcuggaguccacccgcaucuaccagauccuggcgaucuacagcaccgucgccagcuccuucgugcucaucgugagccugggggccaucuccuucuggaugugcagcaacggcucccugcagugccggaucugcaucuga

SEQ ID NO: 70616 - RNA, 1701 nt, Artificial Sequence; identical to SEQ ID NO: 67865
  derived and/or modified CDS sequence (opt1) from hemagglutinin__InfluenzaA__ADZ47858

SEQ ID NO: 70617 - RNA, 1698 nt, Artificial Sequence
  derived and/or modified CDS sequence (opt1) from hemagglutinin__InfluenzaA__ADZ53100
augaaggugaagcugcucguccugcugugcaccuucaccgccacguacgccgacaccaucugcaucggcuaccacgcgaacaacagcaccgacaccguggacacggugcucgagaagaacgucaccgugacccacuccgugaaccugcuggagaacagccacaacgggaagcucugccugcugaagggcaucgcgccccuccagcuggggaacugcuccgucgccggcuggauccuggggaacccggagugcgagcuccugaucagcaaggagaccugguccuacaucguggagaagcccaaccccgagaacggcacgugcuaccccggccacuucgccgacuacgaggagcugcgcgagcagcucagcuccgugagcuccuucgagcgguucgagaucuucccgaaggagagcuccuggcccaaccacaccgucaccggggugagcgccuccugcagccacaacggcgaguccagcuucuaccgcaaccugcuguggcucaccgggaagaacggccuguaccccaaccuguccaagagcuacgccaacaacaaggagaaggaggugcucguccuguggggcgugcaccacccgcccuccaucaacgaccagaagacgcuguaccacaccgagaacgccuacgugagcgucgugagcucccacuacagccggaaguucacccccgagaucgccaagcgccccaaggugcgggaccaggaggggcgcaucaacuacuacuggacccuccuggagccccgggacacgaucaucuucgaggccaacggcaaccugaucgcgccgcgcuacgccuucgcccucucccggggguucggcagcgggaucaucaacuccaacgcccccauggacaagugcgacgccaagugccagacgccccagggcgcgaucaacagcucccugcccuuccagaacguccacccggugaccaucggcgagugccccaaguacgugcgcagcgccaagcugcggauggucaccgggcuccgcaacauccccuccauccagagccggggccuguucggggccaucgccggcuucaucgagggcggguggaccggcaugguggacgggugguacggcuaccaccaccagaacgagcagggguccggcuacgccgcggaccagaaguccacccagaacgccaucaacgggaucaccaacaaggugaacagcgucaucgagaagaugaacacccaguucacggccgugggcaaggaguucaacaagcuggagcgccggauggagaaccucaacaagaaggucgacgacggcuucaucgacaucuggaccuacaacgccgagcugcuggugcuccuggagaacgagcgcacccuggacuuccacgacagcaacgugaagaaccucuacgagaaggucaagucccagcugaagaacaacgccaaggagaucgggaacggcugcuucgaguucuaccacaagugcaacgacgagugcauggagagcgugaagaacgggaccuacgacuaccccaaguacuccgaggagagcaagcugaaccgggagaagaucgacggcgugaagcucgaguccaugggggucuaccagauccuggcgaucuacagcacgguggccagcucccuggugcuccuggucagccugggcgccaucuccuucuggaugugcagcaacggcucccuccagugccgcaucugcaucuga

SEQ ID NO: 70618 - RNA, 1701 nt, Artificial Sequence; identical to SEQ ID NO: 67140
  derived and/or modified CDS sequence (opt1) from hemagglutinin__InfluenzaA__ADZ53123

SEQ ID NO: 70619 - RNA, 1701 nt, Artificial Sequence; identical to SEQ ID NO: 66935
  derived and/or modified CDS sequence (opt1) from hemagglutinin__InfluenzaA__ADZ53125

SEQ ID NO: 70620 - RNA, 1701 nt, Artificial Sequence; identical to SEQ ID NO: 67317
  derived and/or modified CDS sequence (opt1) from hemagglutinin__InfluenzaA__ADZ53127

SEQ ID NO: 70621 - RNA, 1701 nt, Artificial Sequence; identical to SEQ ID NO: 66680
  derived and/or modified CDS sequence (opt1) from hemagglutinin__InfluenzaA__ADZ53131

SEQ ID NO: 70622 - RNA, 1701 nt, Artificial Sequence; identical to SEQ ID NO: 66693
  derived and/or modified CDS sequence (opt1) from hemagglutinin__InfluenzaA__ADZ53133

SEQ ID NO: 70623 - RNA, 1701 nt, Artificial Sequence; identical to SEQ ID NO: 66935
  derived and/or modified CDS sequence (opt1) from hemagglutinin__InfluenzaA__ADZ53135

SEQ ID NO: 70624 - RNA, 1701 nt, Artificial Sequence; identical to SEQ ID NO: 67857
  derived and/or modified CDS sequence (opt1) from hemagglutinin__InfluenzaA__ADZ53138

SEQ ID NO: 70625 - RNA, 1701 nt, Artificial Sequence; identical to SEQ ID NO: 66693
  derived and/or modified CDS sequence (opt1) from hemagglutinin__InfluenzaA__ADZ53140

SEQ ID NO: 70626 - RNA, 1701 nt, Artificial Sequence; identical to SEQ ID NO: 67140
  derived and/or modified CDS sequence (opt1) from hemagglutinin__InfluenzaA__ADZ93496

SEQ ID NO: 70627 - RNA, 1689 nt, Artificial Sequence; identical to SEQ ID NO: 66374
  derived and/or modified CDS sequence (opt1) from hemagglutinin__InfluenzaA__AEA04365

SEQ ID NO: 70628 - RNA, 1689 nt, Artificial Sequence
  derived and/or modified CDS sequence (opt1) from hemagglutinin__InfluenzaA__AEA04376
auggccaucaucuaccugauccuccuguucaccgccgugcgcggcgaccagaucugcaucggguaccacgcgaacaacagcaccgagaaggucgacacgauccuggagcggaacgugaccgugacccacgccaaggacauccucgagaagacccacaacggcaagcugugcaagcugaacgggaucccgccccucgagcugggcgacugcuccaucgccggguggcugcucggcaaccccgagugcgaccgccugcugagcguccccgagugguccuacaucauggagaaggagaacccccgggacggccucugcuacccggggagcuucaacgacuacgaggagcugaagcaccuccuguccagcgugaagcacuucgagaaggugaagauccugcccaaggaccgcuggacgcagcacaccaccaccggcgggucccgggccugcgccgucagcggcaaccccuccuucuuccgcaacaugguguggcugacggagaaggggagcaacuaccccguggcgaagggcuccuacaacaacaccagcggcgagcagaugcucaucaucuggggcguccaccacccgaacgacgagaccgagcagcggacccuguaccagaacguggggacguacguguccgucgggaccagcacccugaacaagcgcuccacccccgagaucgccacgcggcccaaggugaacggccagggcgggcgcauggaguucagcuggacccuccuggacaugugggacaccaucaacuucgaguccaccggcaaccugaucgcccccgaguacggguucaagaucagcaagcggggcuccagcgggaucaugaagacggagggcacccucgagaacugcgagaccaagugccagaccccgcugggcgccaucaacacgacccugcccuuccacaacgugcacccccucaccaucggggagugccccaaguacgucaagagcgagaagcuggugcuggcgaccggccuccgcaacgugccgcagaucgagucccgggggcuguucggcgccaucgccggguucaucgagggcggcuggcaggggauggucgacggcugguacggguaccaccacagcaacgaccagggcuccggguacgccgccgacaaggagagcacgcagaaggcguucgacggcaucaccaacaaggugaacuccgugaucgagaagaugaacacccaguucgaggccgucggcaaggaguucagcaaccuggagcgccggcucgagaaccugaacaagaagguggaggacggguuccuggacguguggaccuacaacgccgagcuccugguccugauggagaacgagcgcacgcucgacuuccacgacuccaacgugaagaaccuguacgacaagguccggaugcagcugcgcgacaacgugaaggagcucggcaacgggugcuucgaguucuaccacaagugcgacgacgagugcaugaacagcgugaagaacggcaccuacgacuaccccaaguacgaggaggaguccaagcugaaccggaacgagaucaagggcgucaagcugagcuccauggggguguaccagauccucgccaucuacgccaccguggcgggcagccugucccuggccaucaugauggccgggaucagcuucuggaugugcuccaacggcagccuccagugccgcaucugcaucuga

SEQ ID NO: 70629 - RNA, 1698 nt, Artificial Sequence
  derived and/or modified CDS sequence (opt1) from hemagglutinin__InfluenzaA__AEA10292
augaaggugaagcugcucguccugcugugcaccuucaccgccacguacgccgacaccaucugcaucggcuaccacgcgaacaacagcaccgacaccguggacacggugcucgagaagaacgucaccgugacccacuccgugaaccugcuggagaacagccacaacgggaagcucugcucccugaagggcaucgcgccccugcagcucgggaacugcagcgucgccggcuggauccuggggaacccggagugcgagcugcucaucuccaaggagagcugguccuacaucguggagaagcccaaccccgagaacgggaccugcuaccccggccacuucgccgacuacgaggagcugcgcgagcagcugagcuccgugagcuccuucgagcgguucgagaucuucccgaaggagagcuccuggcccaaccacacggucaccggggugagcgccuccugcagccacaacggcgaguccagcuucuaccgcaaccuccuguggcugaccgugaagaacgggcucuaccccaaccuguccaagagcuacgccaacaacaaggagaaggagguccuggugcucuggggcgugcaccacccgcccaacaucgucgaccagaagacccuguaccggacggagaacgccuacgugagcguggucuccagccacuacucccgcaaguucacccccgagaucgccaagcggcccaaggugcgcgaccaggaggggcggaucaacuacuacuggacccugcucgagcccggcgacaccaucaucuucgaggccaacggcaaccugaucgcgccgcgcuacgccuucgcccugagccggggguucggcuccgggaucaucaacagcaacgcccccauggacaagugcgacgccaagugccagacgccccgcggcgcgaucaacuccagccuccccuuccagaacgugcacccggucaccaucggcgagugccccaaguacgugcgguccgccaagcugcgcauggugaccgggcugcggaacauccccagcauccagucccgcggccucuucggggccaucgccggcuucaucgagggcggcuggaccggcauggucgacgggugguacggcuaccaccaccagaacgagcaggggagcggcuacgccgcggaccagaaguccacgcagaacgccaucaacgggaucaccaacaaggugaacagcgucaucgagaagaugaacacccaguucaccgccgugggcaaggaguucaacaagcuggagcggcgcauggagaaccugaacaagaagguggacgacggcuucaucgacaucuggacguacaacgccgagcuccugguccugcucgagaacgagcggacccuggacuuccacgacuccaacgugaagaaccuguacgagaaggucaagagccagcucaagaacaacgccaaggagaucgggaacggcugcuucgaguucuaccacaagugcaacgacgagugcauggaguccgugaagaacgggaccuacgacuaccccaaguacagcgaggaguccaagcugaaccgcgagaagaucgacggcgugaagcuggagagcauggggguguaccagauccucgcgaucuacagcaccgucgccuccagccuggugcugcucgugucccugggcgccaucagcuucuggaugugcuccaacggcagccugcagugccggaucugcaucuga

SEQ ID NO: 70630 - RNA, 1701 nt, Artificial Sequence; identical to SEQ ID NO: 69292
  derived and/or modified CDS sequence (opt1) from hemagglutinin__InfluenzaA__AEA10303

SEQ ID NO: 70631 - RNA, 1701 nt, Artificial Sequence; identical to SEQ ID NO: 70146
  derived and/or modified CDS sequence (opt1) from hemagglutinin__InfluenzaA__AEA10313

SEQ ID NO: 70632 - RNA, 1701 nt, Artificial Sequence; identical to SEQ ID NO: 67857
  derived and/or modified CDS sequence (opt1) from hemagglutinin__InfluenzaA__AEA10323

SEQ ID NO: 70633 - RNA, 1701 nt, Artificial Sequence; identical to SEQ ID NO: 68245
  derived and/or modified CDS sequence (opt1) from hemagglutinin__InfluenzaA__AEA10339

SEQ ID NO: 70634 - RNA, 1701 nt, Artificial Sequence
  derived and/or modified CDS sequence (opt1) from hemagglutinin__InfluenzaA__AEA10349
augaaggccauccugaucgugcuccuguacaccuucgccaccgcgaacgccgacacgcugugcaucggcuaccacgccaacaacagcaccgacaccgucgacaccgugcucgagaagaacgugacggucacccacuccgugaaccugcuggaggacaagcacaacgggaagcucugcaagcugcgcggcguggcgccccugcaccucgggaagugcaacaucgccggcuggauccuggggaacccggagugcgagagccuguccaccgccagcuccuggagcuacaucgucgagaccuccagcuccgacaacggcacgugcuaccccggcgacuucaucgacuacgaggagcuccgggagcagcugagcuccgugagcuccuucgagcgcuucgagaucuuccccaagaccagcuccuggcccaaccacgacagcaacaagggggugaccgccgccugcccgcacgccggcgcgaaguccuucuacaagaaccugaucuggcucgucaagaaggggaacagcuaccccaagcuguccaagagcuacaucaacgacaagggcaaggaggugcuggugcucugggggauccaccaccccagcaccuccgccgaccagcagagccuguaccagaacgccgacgccuacgucuucgugggcacgucccgguacagcaagaaguucaagcccgagaucgccauccgcccgaaggugcgggaccaggagggccgcaugaacuacuacuggacccuggucgagcccggggacaagaucaccuucgaggcgaccggcaaccucguggugccccgguacgccuucgccauggagcgcaacgccggguccggcaucaucaucagcgacacgcccguccacgacugcaacacgaccugccagaccccgaagggcgccaucaacaccucccugcccuuccagaacauccaccccaucaccaucgggaagugccccaaguacgucaagagcaccaagcugcggcucgcgaccggccugcgcaacgugccguccauccagagccgggggcuguucggcgccaucgccggguucaucgagggcggcuggacggggaugguggacggcugguacggguaccaccaccagaacgagcagggcuccggguacgccgccgaccucaagagcacccagaacgcgaucgacaagaucaccaacaaggugaacuccgugaucgagaagaugaacacccaguucacggccgucggcaaggaguucaaccaccuggagaagcgcaucgagaaccugaacaagaagguggacgacggcuuccucgacaucuggaccuacaacgccgagcugcugguccuccuggagaacgagcggacccuggacuaccacgacagcaacgugaagaaccucuacgagaaggugcgcucccagcugaagaacaacgccaaggagaucgggaacggcugcuucgaguucuaccacaagugcgacaacacgugcauggagagcgucaagaacgggaccuacgacuaccccaaguacuccgaggaggccaagcugaaccgggaggagaucgacggcgugaagcucgagagcacccgcaucuaccagauccuggcgaucuacuccaccguggccagcagccugguccucguggugucccugggggccaucagcuucuggaugugcuccaacggcagccugcagugccggaucugcaucuga

SEQ ID NO: 70635 - RNA, 1701 nt, Artificial Sequence; identical to SEQ ID NO: 68290
  derived and/or modified CDS sequence (opt1) from hemagglutinin__InfluenzaA__AEA30293

SEQ ID NO: 70636 - RNA, 1701 nt, Artificial Sequence
  derived and/or modified CDS sequence (opt1) from hemagglutinin__InfluenzaA__AEA48989
augaaggccauccuggugguccuccuguacaccuucgccaccgcgaacgccgacacgcugugcaucggcuaccacgccaacaacagcaccgacaccguggacaccgugcucgagaagaacgucacggugacccacuccgugaaccugcuggaggacaagcacaacgggaagcucugcaagcugcgcggcgucgcgccccugcaccucgggaagugcaacaucgccggcuggauccuggggaacccggagugcgagagccuguccaccgccagcuccuggagcuacaucguggagaccuccagcuccgacaacggcacgugcuaccccggcgacuucaucgacuacgaggagcuccgggagcagcugagcuccgugagcuccuucgagcgcuucgagaucuuccccaagaccagcuccuggcccaaccacgagagcaacaagggggucaccgccgccugcccgcacgccggcgcgcgguccuucuacaagaaccugaucuggcucgugaagaaggggaacagcuaccccaagcuguccaagagcuacaucaacgacaagggcaaggaggugcugguccucugggggauccaccaccccagcaccuccgccgaccagcagagccuguaccagaacgccgacgccuacguguucgugggcacgucccgcuacagcaagaaguucaagcccgagaucgccauccggccgaagguccgcgaccaggagggccggaugaacuacuacuggacccugguggagcccggggacaagaucaccuucgaggcgaccggcaaccucguggucccccgcuacgccuucgccauggagcggaacgccggguccggcaucaucaucagcgacacgcccgugcacgacugcaacacgaccugccagaccccgaagggcgccaucaacaccucccugcccuuccagaacauccaccccaucaccaucgggaagugccccaaguacgucaagagcaccaagcugcgccucgcgaccggccugcggaacgugccguccauccagagccgcgggcuguucggcgccaucgccggguucaucgagggcggcuggacggggaugguggacggcugguacggguaccaccaccagaacgagcagggcuccggguacgccgccgaccucaagagcacccagaacgcgaucgacgagaucaccaacaaggugaacuccgucaucgagaagaugaacacccaguucacggccgugggcaaggaguucaaccaccuggagaagcggaucgagaaccugaacaagaaggucgacgacggcuuccucgacaucuggaccuacaacgccgagcugcuggugcuccuggagaacgagcgcacccuggacuaccacgacagcaacgugaagaaccucuacgagaagguccggucccagcugaagaacaacgccaaggagaucgggaacggcugcuucgaguucuaccacaagugcgacaacacgugcauggagagcgugaagaacgggaccuacgacuaccccaaguacuccgaggaggccaagcugaaccgcgaggagaucgacggcgugaagcucgagagcacccggaucuaccagauccuggcgaucuacuccaccgucgccagcagccuggugcucguggucucccugggggccaucagcuucuggaugugcuccaacggcagccugcagugccgcaucugcaucuga

SEQ ID NO: 70637 - RNA, 1707 nt, Artificial Sequence
  derived and/or modified CDS sequence (opt1) from hemagglutinin__InfluenzaA__AEA50985
auggagaagaucgugcugcuccuggccaucaucaaccuggucaagagcgaccagaucugcaucggcuaccacgccaacaacuccaccgagcaggucgacaccaucauggagaagaacgugacggugacccacgcgcaggacauccucgagaagacccacaacgggaagcugugcgaccuggacggcgugaagccccucauccugcgcgacugcagcguggccggguggcugcucggcaacccgaugugcgacgaguuccugaacguccccgagugguccuacaucguggagaagaucaaccccgccaacgaccugugcuaccccgggaacuucaacgacuacgaggagcucaagcaccuccugagccggaucaaccacuucgagaagauccagaucaucccgaaguccagcugguccgaccacgaggccagcuccggcgugagcuccgccugccccuaccagggccgcagcuccuucuuccggaacgucguguggcugaucaagaagaacgacgcguaccccaccaucaagaucagcuacaacaacacgaaccaggaggaccugcuggugcucugggggauccaccaccccaacgacgccgccgagcagaccaagcuguaccagaacccgaccaccuacaucuccgucggcacgagcacccugaaccuccgccuggugcccaagaucgccacccgguccaaggugaacgggcagagcggccgcauggaguucuucuggaccauccugaagcccaacgacgcgaucaacuucgaguccaacgggaacuucaucgcccccgagaacgccuacaagaucgucaagaagggcgacagcacgaucaugaaguccgagcucgaguacggcaacugcaacaccaagugccagaccccggugggggccaucaacagcagcaugcccuuccacaacauccacccccugaccaucggcgagugccccaaguacgugaaguccaaccggcugguccucgccacggggcugcgcaacagcccgcagggcgagcggcgccggaagaagcgcggccuguucggggcgaucgccggcuucaucgagggcggguggcaggggaugguggacggcugguacggcuaccaccacuccaacgagcaggggagcggcuacgccgccgacaaggaguccacccagaaggccaucaacggggugaccaacaaggucaacagcaucaucgacaagaugaacacccaguucgaggcggugggccgggaguucaacaaccucgagcgccggaucgagaaccugaacaagaagauggaggacggguuccuggacguguggacguacaacgccgagcuccugguccugauggagaacgagcgcacccucgacuuccacgacuccaacgugaagaaccuguacgacaagguccggcugcagcuccgcgacaacgccaaggagcugggcaacggcugcuucgaguucuaccaccggugcgacaacgagugcauggagagcgugcgcaacgggaccuacgacuacccccaguacuccgaggagagccggcugaagcgcgaggagaucuccggcgugaagcucgagagcaucgggaucuaccagauccuguccaucuacagcaccgccgccuccagccuggcgcucgccaucauggucgccggccugucccuguggaugugcagcaacgggagccuccagugccgcaucugcaucuga

SEQ ID NO: 70638 - RNA, 1701 nt, Artificial Sequence; identical to SEQ ID NO: 69557
  derived and/or modified CDS sequence (opt1) from hemagglutinin__InfluenzaA__AEA72704

SEQ ID NO: 70639 - RNA, 1701 nt, Artificial Sequence; identical to SEQ ID NO: 69557
  derived and/or modified CDS sequence (opt1) from hemagglutinin__InfluenzaA__AEA72715

SEQ ID NO: 70640 - RNA, 1701 nt, Artificial Sequence; identical to SEQ ID NO: 69557
  derived and/or modified CDS sequence (opt1) from hemagglutinin__InfluenzaA__AEA72726

SEQ ID NO: 70641 - RNA, 1701 nt, Artificial Sequence
  derived and/or modified CDS sequence (opt1) from hemagglutinin__InfluenzaA__AEA72740
augaaggccauccuggugguccuccuguacaccuucgccaccgcgaacgccgacacgcugugcaucggcuaccacgccaacaacagcaccgacaccguggacaccgugcucgagaagaacgucacggugacccacuccgugaaccugcuggaggacaagcacaacgggaagcucugcaagcugcgcggcgucgcgccccugcaccucgggaagugcaacaucgccggcuggauccuggggaacccggagugcgagagccuguccaccgccagcuccuggagcuacaucguggagaccuccagcuccgacaacggcacgugcuaccccggcgacuucaucgacuacgaggagcuccgggagcagcugagcuccgugagcuccuucgagcgcuucgagaucuuccccaagaccagcuccuggcccaaccacgacagcaacaagggggucaccgccgccugcccgcacgccggcgcgaaguccuucuacaagaaccugaucuggcucgugaagaaggggaacagcuaccccaagcuguccaagagcuacaucaacgacaagggcaaggaggugcugguccucugggggauccaccaccccagcaccuccgccgaccagcagagccuguaccagaacgccgacgccuacguguucgugggcacgucccgguacagcaagaaguucaagcccgagaucgccacccgcccgaagguccgggaccaggagggccgcaugaacuacuacuggacccugguggagcccggggacaagaucaccuucgaggcgacgggcaaccucguggucccccgguacgccuucgccauggagcgcaacgccggguccggcaucaucaucagcgacacccccgugcacgacugcaacacgaccugccagaccccgaagggcgccaucaacaccucccugcccuuccagaacauccaccccaucaccaucgggaagugccccaaguacgucaagagcaccaagcugcggcucgcgacgggccugcgcaacgugccguccauccagagccgggggcuguucggcgccaucgccggguucaucgagggcggcuggaccgggaugguggacggcugguacggguaccaccaccagaacgagcagggcuccggguacgccgccgaccucaagagcacccagaacgcgaucgacgagaucaccaacaaggugaacuccgucaucgagaagaugaacacgcaguucaccgccgugggcaaggaguucaaccaccuggagaagcgcaucgagaaccugaacaagaaggucgacgacggcuuccucgacaucuggaccuacaacgccgagcugcuggugcuccuggagaacgagcggacccuggacuaccacgacagcaacgugaagaaccucuacgagaagguccgcaaccagcugaagaacaacgccaaggagaucgggaacggcugcuucgaguucuaccacaagugcgacaacacgugcauggaguccgugaagaacgggaccuacgacuaccccaaguacagcgaggaggccaagcugaaccgggaggagaucgacggcgugaagcucgaguccacccgcaucuaccagauccuggcgaucuacagcaccgucgccuccagccuggugcucguggucagccugggggccaucuccuucuggaugugcagcaacggcucccugcagugccggaucugcaucuga

SEQ ID NO: 70642 - RNA, 1701 nt, Artificial Sequence
  derived and/or modified CDS sequence (opt1) from hemagglutinin__InfluenzaA__AEA72750
augaaggccauccuggugguccuccuguacaccuucgccaccgcgaacgccgacacgcugugcaucggcuaccacgccaacaacagcaccgacaccguggacaccgugcucgagaagaacgucacggugacccacuccgugaaccugcuggaggacaagcacaacgggaagcucugcaagcugcgcggcgucgcgccccugcaccucgggaagugcaacaucgccggcuggauccuggggaacccggagugcgagagccuguccaccgccagcuccuggagcuacaucguggagaccuccagcuccgacaacggcacgugcuaccccggcguguucaucgacuacgaggagcuccgggagcagcugagcuccgucagcuccuucgagcgcuucgagaucuuccccaagaccagcuccuggcccaaccacgacagcaacaagggggugaccgccgccugcccgcacgccggcgcgaaguccuucuacaagaaccugaucuggcucgugaagaaggggaacagcuaccccaagcuguccaagagcuacaucaacgacaagggcaaggagguccuggugcucugggggauccaccaccccagcaccacggccgaccagcagucccuguaccagaacgccgacaccuacguguucgucggcaccagccgguacuccaagaaguucaagcccgagaucgccauccgcccgaaggugcgggaccaggagggccgcaugaacuacuacuggacccugguggagcccggggacaagaucacguucgaggccaccggcaaccucgucgugccccgguacgcguucgccauggagcgcaacgccgggagcggcaucaucaucuccgacacccccgugcacgacugcaacaccacgugccagaccccgaagggcgccaucaacaccagccugcccuuccagaacauccaccccaucaccaucgggaagugccccaaguacgucaaguccacgaagcugcggcucgccaccggccugcgcaacgugccgagcauccagucccgggggcuguucggcgcgaucgccggguucaucgagggcggcuggaccgggaugguggacggcugguacggguaccaccaccagaacgagcagggcagcggguacgccgccgaccucaaguccacccagaacgccaucgacaagaucacgaacaaggucaacagcgugaucgagaagaugaacacccaguucaccgcggucggcaaggaguucaaccaccuggagaagcgcaucgagaaccugaacaagaagguggacgacggcuuccucgacaucuggaccuacaacgccgagcugcuggugcuccuggagaacgagcggacgcuggacuaccacgacuccaacgucaagaaccucuacgagaaggugcgcaaccagcugaagaacaacgccaaggagaucgggaacggcugcuucgaguucuaccacaagugcgacaacacgugcauggagagcgugaagaacgggaccuacgacuaccccaaguacuccgaggaggccaagcugaaccgggaggagaucgacggcgucaagcucgagagcacccgcaucuaccagauccuggccaucuacuccaccguggcgagcucccuggugcucgucgugagccugggggccaucagcuucuggaugugcuccaacggcagccugcagugccggaucugcaucuga

SEQ ID NO: 70643 - RNA, 1701 nt, Artificial Sequence; identical to SEQ ID NO: 70459
  derived and/or modified CDS sequence (opt1) from hemagglutinin__InfluenzaA__AEA72759

SEQ ID NO: 70644 - RNA, 1701 nt, Artificial Sequence
  derived and/or modified CDS sequence (opt1) from hemagglutinin__InfluenzaA__AEA72777
augaaggccauccuggugguccuccuguacacccuggccaccgcgaacgccgacacgcucugcaucggcuaccacgccaacaacagcaccgacaccguggacaccgugcuggagaagaacgucacggugacccacuccgugaaccugcucgaggacaagcacgacgggaagcugugcaagcugcgcggcgucgcgccccuccaccuggggaagugcaacaucgccggcuggauccuggggaacccggagugcgagagccucuccaccgccagcuccuggagcuacaucguggagaccuccagcuccgacaacggcacgugcuaccccggcgacuucaucgacuacgaggagcugcgggagcagcugagcuccgugagcuccuucgagcgcuucgagaucuuccccaagaccagcuccuggcccaaccacgacagcaacaagggggucaccgccgccugcccgcacgccggcgcgaaguccuucuacaagaaccucaucuggcuggugaagaaggggaacagcuaccccaagcuguccaagagcuacaucaacgacaagggcaaggagauccucgugcugugggggauccaccaccccagcaccuccgccgaccagcagagccuguaccagaacgccgacgccuacgucuucgugggcacgucccgguacagcaagaaguucaagcccgagaucgccauccgcccgaaggugcgggaccaggagggccgcaugaacuacuacuggacccucgucgagcccggggacaagaucaccuucgaggcgaccggcaaccugguggugccccgguacgccuucgccauggagcgcaacgccggguccggcaucaucaucagcgacacgcccguccacgacugcaacgcgaccugccagaccccgaagggcgccaucaacaccucccugcccuuccagaacauccaccccaucacgaucgggaagugccccaaguacgucaagagcaccaagcuccggcuggccaccggccugcgcaacgugccguccauccagagccgggggcuguucggcgccaucgccggguucaucgagggcggcuggaccgggaugguggacggcugguacggguaccaccaccagaacgagcagggcuccggguacgccgcggaccucaagagcacgcagaacgccaucgacaagaucaccaacaaggugaacuccgugaucgagaagaugaacacccaguucaccgccgucggcaaggaguucaaccaccuggagaagcgcaucgagaaccucaacaagaagguggacgacggcuuccuggacaucuggacguacaacgccgagcugcucguccugcuggagaacgagcggacccucgacuaccacgacagcaacgugaagaaccuguacgagaaggugcgcucccagcugaagaacaacgccaaggagaucgggaacggcugcuucgaguucuaccacaagugcgacaacacgugcauggagagcgucaagaacgggaccuacgacuaccccaaguacuccgaggaggcgaagcucaaccgggaggagaucgacggcgugaagcuggagagcacccgcaucuaccagauccuggccaucuacuccaccguggccagcagccucguccugguggugucccugggggccaucagcuucuggaugugcuccaacggcagccuccagugccggaucugcaucuga

SEQ ID NO: 70645 - RNA, 1701 nt, Artificial Sequence; identical to SEQ ID NO: 70459
  derived and/or modified CDS sequence (opt1) from hemagglutinin__InfluenzaA__AEA72787

SEQ ID NO: 70646 - RNA, 1701 nt, Artificial Sequence; identical to SEQ ID NO: 69557
  derived and/or modified CDS sequence (opt1) from hemagglutinin__InfluenzaA__AEA73288

SEQ ID NO: 70647 - RNA, 1701 nt, Artificial Sequence; identical to SEQ ID NO: 69557
  derived and/or modified CDS sequence (opt1) from hemagglutinin__InfluenzaA__AEA73299

SEQ ID NO: 70648 - RNA, 1701 nt, Artificial Sequence; identical to SEQ ID NO: 69557
  derived and/or modified CDS sequence (opt1) from hemagglutinin__InfluenzaA__AEA73310

SEQ ID NO: 70649 - RNA, 1701 nt, Artificial Sequence
  derived and/or modified CDS sequence (opt1) from hemagglutinin__InfluenzaA__AEA73321
augaagaccaucaucgcccugagcuacauccucugccugguguucgcccagaagcugcccggcaacgacaacuccaccgcgacgcucugccuggggcaccacgccgucccgaacggcaccaucgugaagaccaucaccaacgaccagaucgaggugacgaacgccaccgagcugguccagagcuccagcaccggggagaucugcgacagcccccaccagauccucgacggcgagaacugcacccugaucgacgcccugcucggggacccccagugcgacggcuuccagaacaagaagugggaccuguucguggagcgcagcaaggccuacuccaacugcuaccccuacgacgugccggacuacgcgagccugcggucccucgucgccagcuccggcacgcuggaguucaacaacgagagcuucaacuggaccggggugacccagaacggcaccuccagcgccugcauccgccgguccaacaacagcuucuucucccgccugaacuggcucacgcaccugaacuucaaguaccccgcccugaacgugaccaugcccaacaacgagcaguucgacaagcucuacaucuggggcguccaccaccccgggaccgacaaggaccagaucuuccuguacgcgcaggccagcgggcggaucaccguguccacgaagcgcagccagcaggccgugaucccgaacaucggcagccggccccgcguccggaacauccccucccgcaucagcaucuacuggaccaucgugaagcccggcgacauccugcucaucaacuccaccgggaaccugaucgccccgcggggcuacuucaagauccgcagcgggaaguccagcaucaugcgguccgacgcccccaucggcaagugcaacagcgagugcaucacccccaacggcuccauccccaacgacaagccguuccagaacgugaaccgcaucacguacggggcgugcccccgguacgucaagcagagcacccugaagcucgccaccggcaugcgcaacgugcccgagaagcagacccgggggaucuucggcgccaucgccggguucaucgagaacggcugggagggcaugguggacgggugguacggcuuccgccaccagaacuccgaggggcggggccaggccgcggaccugaaguccacgcaggccgccaucgaccagaucaacgggaagcugaaccgccucaucggcaagaccaacgagaaguuccaccagaucgagaaggaguucuccgaggucgagggccggauccaggaccuggagaaguacguggaggacaccaagaucgaccuguggagcuacaacgccgagcuccuggugacccuggagaaccagcacacgaucgaccucaccgacuccgagaugaacaagcuguucgagaagaccaagaagcagcugcgcgagaacgccgaggacauggggaacggcugcuucaccaucuaccacaagugcgacaacgcgugcaucgggagcauccgcaacggcacguacgaccacaacgucuaccgggacgaggcccucaacaaccgcuuccagaucaaggggguggagcugaaguccggcuacaaggacuggauccuguggaucagcuucgccaucuccugcuuccuccugugcguggcccugcucggcuucaucaugugggccugccagaaggggaacauccggugcaacaucugcaucuga

SEQ ID NO: 70650 - RNA, 1701 nt, Artificial Sequence; identical to SEQ ID NO: 69557
  derived and/or modified CDS sequence (opt1) from hemagglutinin__InfluenzaA__AEA73332

SEQ ID NO: 70651 - RNA, 1701 nt, Artificial Sequence; identical to SEQ ID NO: 69557
  derived and/or modified CDS sequence (opt1) from hemagglutinin__InfluenzaA__AEA73343

SEQ ID NO: 70652 - RNA, 1701 nt, Artificial Sequence; identical to SEQ ID NO: 69557
  derived and/or modified CDS sequence (opt1) from hemagglutinin__InfluenzaA__AEA73354

SEQ ID NO: 70653 - RNA, 1701 nt, Artificial Sequence
  derived and/or modified CDS sequence (opt1) from hemagglutinin__InfluenzaA__AEA73365
augaagaccaucaucgcccugagcuacacccucugccugguguucgcccagaagcugcccggcaacgacaacuccacggcgacccucugccuggggcaccacgccgucccgaacggcaccaucgugaagaccaucacgaacgaccagaucgaggugaccaacgccaccgagcugguccagagcuccagcaccggggagaucugcgacagcccccaccagauccucgacggcgagaacugcacgcugaucgacgcccugcucggggacccccagugcgacggcuuccagaacaagaagugggaccuguucguggagcgcagcaaggccuacuccaacugcuaccccuacgacgugccggacuacgcgagccugcggucccucgucgccagcuccggcacccuggaguucaacaacgagagcuucaacuggaccggggugacccagaacggcacguccagcgccugcauccgccgguccaacaacagcuucuucucccgccugaacuggcucacccaccugaacuucaaguaccccgcccugaacgugaccaugcccaacaacgagcaguucgacaagcucuacaucuggggcguccaccaccccgggaccgacaaggaccagaucuuccuguacgcgcaggccagcgggcggaucacgguguccaccaagcgcagccagcaggccgugaucccgaacaucggcagccggccccgcguccggaacauccccucccgcaucagcaucuacuggaccaucgugaagcccggcgacauccugcucaucaacuccaccgggaaccugaucgccccgcggggcuacuucaagauccgcagcgggaaguccagcaucaugcgguccgacgcccccaucggcaagugcaacagcgagugcaucacgcccaacggcuccauccccaacgacaagccguuccagaacgugaaccgcaucaccuacggggcgugcccccgguacgucaagcagagcacccugaagcucgccaccggcaugcgcaacgugcccgagaagcagacgcgggggaucuucggcgccaucgccggguucaucgagaacggcugggagggcaugguggacgggugguacggcuuccgccaccagaacuccgaggggcggggccaggccgcggaccugaaguccacccaggccgccaucgaccagaucaacgggaagcugaaccgccucaucggcaagaccaacgagaaguuccaccagaucgagaaggaguucuccgaggucgagggccggauccaggaccuggagaaguacguggaggacaccaagaucgaccuguggagcuacaacgccgagcuccugguggcccuggagaaccagcacacgaucgaccucaccgacuccgagaugaacaagcuguucgagaagaccaagaagcagcugcgcgagaacgcggaggacauggggaacggcugcuucaccaucuaccacaagugcgacaacgccugcaucgggagcauccgcaacggcacguacgaccacaacgucuaccgggacgaggcccucaacaaccgcuuccagaucaaggggguggagcugaaguccggcuacaaggacuggauccuguggaucagcuucgccaucuccugcuuccuccugugcguggcccugcucggcuucaucaugugggcgugccagaaggggaacauccggugcaacaucugcaucuga

SEQ ID NO: 70654 - RNA, 1701 nt, Artificial Sequence; identical to SEQ ID NO: 69557
  derived and/or modified CDS sequence (opt1) from hemagglutinin__InfluenzaA__AEA73376

SEQ ID NO: 70655 - RNA, 1701 nt, Artificial Sequence; identical to SEQ ID NO: 69557
  derived and/or modified CDS sequence (opt1) from hemagglutinin__InfluenzaA__AEA73387

SEQ ID NO: 70656 - RNA, 1701 nt, Artificial Sequence; identical to SEQ ID NO: 69557
  derived and/or modified CDS sequence (opt1) from hemagglutinin__InfluenzaA__AEA73398

SEQ ID NO: 70657 - RNA, 1701 nt, Artificial Sequence; identical to SEQ ID NO: 69557
  derived and/or modified CDS sequence (opt1) from hemagglutinin__InfluenzaA__AEA73409

SEQ ID NO: 70658 - RNA, 1701 nt, Artificial Sequence; identical to SEQ ID NO: 69557
  derived and/or modified CDS sequence (opt1) from hemagglutinin__InfluenzaA__AEA73420

SEQ ID NO: 70659 - RNA, 1701 nt, Artificial Sequence; identical to SEQ ID NO: 69557
  derived and/or modified CDS sequence (opt1) from hemagglutinin__InfluenzaA__AEA73452

SEQ ID NO: 70660 - RNA, 1701 nt, Artificial Sequence; identical to SEQ ID NO: 69557
  derived and/or modified CDS sequence (opt1) from hemagglutinin__InfluenzaA__AEA73463

SEQ ID NO: 70661 - RNA, 1701 nt, Artificial Sequence; identical to SEQ ID NO: 69557
  derived and/or modified CDS sequence (opt1) from hemagglutinin__InfluenzaA__AEA73474

SEQ ID NO: 70662 - RNA, 1701 nt, Artificial Sequence
  derived and/or modified CDS sequence (opt1) from hemagglutinin__InfluenzaA__AEA73485
augaagaccaucaucgcccugagcuacauccucugccugguguucgcccagaagcugcccggcaacgacaacuccaccgcgacgcucugccuggggcaccacgccgucccgaacggcaccaucgugaagaccaucaccaacgaccagaucgaggugacgaacgccaccgagcugguccagagcuccagcaccggggagaucugcgacagcccccaccagauccucgacggcgagaacugcacccugaucgacgcccugcucggggacccccagugcgacggcuuccagaacaagaagugggaccuguucguggagcgcagcaaggcccacuccaacugcuaccccuacgacgugccggacuacgcgagccugcggucccucgucgccagcuccggcacgcuggaguucaacaacgagagcuucaacuggaccggggugacccagaacggcaccuccagcgccugcauccgccgguccaacaacagcuucuucucccgccugaacuggcucacgcaccugaacuucaaguaccccgcccugaacgugaccaugcccaacaacgagcaguucgacaagcucuacaucuggggcguccaccaccccgggaccgacaaggaccagaucuuccuguacgcgcaggccagcgggcggaucaccguguccacgaagcgcagccagcaggccgugaucccgaacaucggcagccggccccgcguccggaacauccccucccgcaucagcaucuacuggaccaucgugaagcccggcgacauccugcucaucaacuccaccgggaaccugaucgccccgcggggcuacuucaagauccgcagcgggaaguccagcaucaugcgguccgacgcccccaucggcaagugcaacagcgagugcaucacccccaacggcuccauccccaacgacaagccguuccagaacgugaaccgcaucacguacggggcgugcccccgguacgucaagcagagcacccugaagcucgccaccggcaugcgcaacgugcccgagaagcagacccgggggaucuucggcgccaucgccggguucaucgagaacggcugggagggcaugguggacgggugguacggcuuccgccaccagaacuccgaggggcggggccaggccgcggaccugaaguccacgcaggccgccaucgaccagaucaacgggaagcugaaccgccucaucggcaagaccaacgagaaguuccaccagaucgagaaggaguucuccgaggucgagggccggauccaggaccuggagaaguacguggaggacaccaagaucgaccuguggagcuacaacgccgagcuccugguggcccuggagaaccagcacaccaucgaccucacggacuccgagaugaacaagcuguucgagaagaccaagaagcagcugcgcgagaacgcggaggacauggggaacggcugcuucaccaucuaccacaagugcgacaacgccugcaucgggagcauccgcaacggcaccuacgaccacaacgucuaccgggacgaggcccucaacaaccgcuuccagaucaaggggguggagcugaaguccggcuacaaggacuggauccuguggaucagcuucgccaucuccugcuuccuccugugcguggcccugcucggcuucaucaugugggcgugccagaaggggaacauccggugcaacaucugcaucuga

SEQ ID NO: 70663 - RNA, 1701 nt, Artificial Sequence; identical to SEQ ID NO: 69557
  derived and/or modified CDS sequence (opt1) from hemagglutinin__InfluenzaA__AEA73496

SEQ ID NO: 70664 - RNA, 1701 nt, Artificial Sequence; identical to SEQ ID NO: 69557
  derived and/or modified CDS sequence (opt1) from hemagglutinin__InfluenzaA__AEA73507

SEQ ID NO: 70665 - RNA, 1701 nt, Artificial Sequence; identical to SEQ ID NO: 69557
  derived and/or modified CDS sequence (opt1) from hemagglutinin__InfluenzaA__AEA73518

SEQ ID NO: 70666 - RNA, 1701 nt, Artificial Sequence; identical to SEQ ID NO: 69557
  derived and/or modified CDS sequence (opt1) from hemagglutinin__InfluenzaA__AEA73529

SEQ ID NO: 70667 - RNA, 1701 nt, Artificial Sequence; identical to SEQ ID NO: 69557
  derived and/or modified CDS sequence (opt1) from hemagglutinin__InfluenzaA__AEA73540

SEQ ID NO: 70668 - RNA, 1701 nt, Artificial Sequence; identical to SEQ ID NO: 69557
  derived and/or modified CDS sequence (opt1) from hemagglutinin__InfluenzaA__AEA73551

SEQ ID NO: 70669 - RNA, 1701 nt, Artificial Sequence; identical to SEQ ID NO: 69557
  derived and/or modified CDS sequence (opt1) from hemagglutinin__InfluenzaA__AEA73562

SEQ ID NO: 70670 - RNA, 1698 nt, Artificial Sequence
  derived and/or modified CDS sequence (opt1) from hemagglutinin__InfluenzaA__AEA73573
augaaggugaagcugcucguccugcugugcaccuucaccgccacguacgccgacaccaucugcaucggcuaccacgcgaacaacagcaccgacaccguggacacggugcucgagaagaacgucaccgugacccacuccgugaaccugcuggagaacagccacaacgggaagcucugccugcugaagggcaucgcgccccuccagcuggggaacugcuccgucgccggcuggauccuggggaacccggagugcgagcuccugaucagcaaggaguccuggagcuacaucguggagaagcccaaccccgagaacgggaccugcuaccccggccacuucgccgacuacgaggagcugcgcgagcagcucuccagcguguccagcuucgagcgguucgagaucuucccgaaggaguccagcuggcccaaccacacggucaccggcguguccgccagcugcucccacaacggcgagagcuccuucuaccgcaaccugcuguggcucaccgagaagaacgggcuguaccccaaccugagcaaguccuacgccaacaacaaggagaaggaggugcucguccuguggggcgugcaccacccgcccaacaucggggaccagaagacccuguaccacacggagaacgccuacgugagcgucgugagcucccacuacagccggaaguucacccccgagaucgccaagcgccccaaggugcgggaccaggagggccgcaucaacuacuacuggacccuccuggagcccggcgacaccaucaucuucgaggccaacgggaaccugaucgcgccgcgguacgccuucgcccucucccgcggcuucgggagcggcaucaucaacuccaacgcccccauggacaagugcgacgccaagugccagacgccccagggcgcgaucaacagcucccugcccuuccagaacguccacccggugaccaucggggagugccccaaguacgugcggagcgccaagcugcgcauggucaccggccuccggaacauccccuccauccagagccgcgggcuguucggcgccaucgccggguucaucgagggcggcuggaccgggaugguggacggcugguacggguaccaccaccagaacgagcagggcuccggguacgccgcggaccagaaguccacgcagaacgccaucaacggcaucaccaacaaggugaacagcgucaucgagaagaugaacacccaguucaccgccgugggcaaggaguucaacaagcuggagcggcgcauggagaaccucaacaagaaggucgacgacggguucaucgacaucuggacguacaacgccgagcugcuggugcuccuggagaacgagcggacccuggacuuccacgacagcaacgugaagaaccucuacgagaaggucaagucccagcugaagaacaacgccaaggagaucggcaacgggugcuucgaguucuaccacaagugcaacgacgagugcauggagagcgugaagaacggcaccuacgacuaccccaaguacuccgaggagagcaagcugaaccgcgagaagaucgacggggugaagcucgaguccaugggcgucuaccagauccuggcgaucuacagcaccguggccagcucccuggugcuccuggucagccugggcgccaucuccuucuggaugugcagcaacgggucccuccagugccggaucugcaucuga

SEQ ID NO: 70671 - RNA, 1698 nt, Artificial Sequence
  derived and/or modified CDS sequence (opt1) from hemagglutinin__InfluenzaA__AEA73584
augaaggugaagcugcucguccugcugugcaccuucaccgccacguacgccgacaccaucugcaucggcuaccacgcgaacaacagcaccgacaccguggacacggugcucgagaagaacgucaccgugacccacuccgugaaccugcuggagaacagccacaacgggaagcucugccugcugaagggcaucgcgccccuccagcuggggaacugcuccgucgccggcuggauccuggggaacccggagugcgagcuccugaucagcaaggaguccuggagcuacaucguggagaagcccaaccccgagaacgggaccugcuaccccggccacuucgccgacuacgaggagcugcgcgagcagcucuccagcguguccagcuucgagcgguucgagaucuucccgaaggaguccagcuggcccaaccacacggucaccgggguguccgccagcugcucccacaacggcgagagcuccuucuaccgcaaccugcuguggcucaccgggaagaacggccuguaccccaaccugagcaaguccuacgccaacaacaaggagaaggaggugcucguccuguggggcgugcaccacccgcccaacaucguggaccagaagacccuguaccggacggagaacgccuacgucagcguggugagcucccacuacagccgcaaguucacccccgagaucgccaagcggcccaagguccgcaaccaggagggccggaucaacuacuacuggacccuccuggagcccggcgacaccaucaucuucgaggccaacgggaaccugaucgcgccgcgcuacgccuucgcccucucccggggcuucgggagcggcaucaucaacuccaacgcccccauggacaagugcgacgccaagugccagacgccccagggcgcgaucaacagcucccugcccuuccagaacgugcacccggugaccaucggggagugccccaaguacguccgcagcgccaagcugcggauggugaccggccuccgcaacauccccuccauccagagccgggggcuguucggcgccaucgccggguucaucgagggcggcuggaccgggaugguggacggcugguacggguaccaccaccagaacgagcagggcuccggguacgccgcggaccagaaguccacgcagaacgccaucaacggcaucaccaacaaggucaacagcgugaucgagaagaugaacacccaguucaccgccgucggcaaggaguucaacaagcuggagcgccggauggagaaccucaacaagaagguggacgacggguucaucgacaucuggacguacaacgccgagcugcuggugcuccuggagaacgagcgcacccuggacuuccacgacagcaacgucaagaaccucuacgagaaggugaagucccagcugaagaacaacgccaaggagaucggcaacgggugcuucgaguucuaccacaagugcaacgacgagugcauggagagcgugaagaacggcaccuacgacuaccccaaguacuccgaggagagcaagcugaaccgggagaagaucgacggggucaagcucgaguccaugggcguguaccagauccuggcgaucuacagcaccguggccagcucccugguccuccuggugagccugggcgccaucuccuucuggaugugcagcaacgggucccuccagugccgcaucugcaucuga

SEQ ID NO: 70672 - RNA, 1698 nt, Artificial Sequence
  derived and/or modified CDS sequence (opt1) from hemagglutinin__InfluenzaA__AEA73595
augaaggugaagcugcucguccugcugugcaccuucaccgccacguacgccgacaccaucugcaucggcuaccacgcgaacaacagcaccgacaccguggacacggugcucgagaagaacgucaccgugacccacuccgugaaccugcuggagaacagccacaacgggaagcucugccugcugaagggcaucgcgccccuccagcuggggaacugcuccgucgccggcuggauccuggggaacccggagugcgagcuccugaucagcaaggaguccuggagcuacaucguggagaagcccaaccccgagaacgggaccugcuaccccggccacuucgccgacuacgaggagcugcgcgagcagcucuccagcguguccagcuucgagcgguucgagaucuucccgaaggaguccagcuggcccaaccacacggucaccgggguguccgccagcugcucccacaacggcgagagcuccuucuaccgcaaccugcuguggcucaccgugaagaacgggcuguaccccaaccugagcaaguccuacgccaacaacaaggagaaggagguccucgugcuguggggcgugcaccacccgcccaacaucgucgaccagaagacccuguaccacacggagaacgccuacgugagcguggucagcucccacuacagccggaaguucacccccgagaucgccaagcgccccaaggugcgggaccaggaggggcgcaucaacuacuacuggacccuccuggagcccggcgacaccaucaucuucgaggccaacggcaaccugaucgcgccgcgguacgccuucgcccucucccgcggguucggcagcgggaucaucaacuccaacgcccccauggacaagugcgacgccaagugccagacgccccggggcgcgaucaacagcucccugcccuuccagaacgugcacccggucaccaucggcgagugccccaaguacgugcgcagcgccaagcugcggauggugaccgggcuccgcaacauccccuccauccagagccggggccuguucggggccaucgccggcuucaucgagggcggcuggaccggcauggucgacgggugguacggcuaccaccaccagaacgagcagggguccggcuacgccgcggaccagaaguccacgcagaacgccaucaacgggaucaccaacaaggugaacagcgucaucgagaagaugaacacccaguucaccgccgugggcaaggaguucaacaagcuggagcgccggauggagaaccucaacaagaagguggacgacggcuucaucgacaucuggacguacaacgccgagcugcugguccuccuggagaacgagcgcacccuggacuuccacgacagcaacgugaagaaccucuacgagaaggugaagucccagcugaagaacaacgccaaggagaucgggaacggcugcuucgaguucuaccacaagugcaacgacgagugcauggagagcgucaagaacgggaccuacgacuaccccaaguacuccgaggagagcaagcugaaccgggagaagaucgacggcgugaagcucgaguccauggggguguaccagauccuggcgaucuacagcaccgucgccagcucccuggugcuccuggugagccugggcgccaucuccuucuggaugugcagcaacggcucccuccagugccgcaucugcaucuga

SEQ ID NO: 70673 - RNA, 1698 nt, Artificial Sequence; identical to SEQ ID NO: 69977
  derived and/or modified CDS sequence (opt1) from hemagglutinin__InfluenzaA__AEA73606

SEQ ID NO: 70674 - RNA, 1698 nt, Artificial Sequence; identical to SEQ ID NO: 67155
  derived and/or modified CDS sequence (opt1) from hemagglutinin__InfluenzaA__AEA73617

SEQ ID NO: 70675 - RNA, 1698 nt, Artificial Sequence; identical to SEQ ID NO: 67640
  derived and/or modified CDS sequence (opt1) from hemagglutinin__InfluenzaA__AEA73628

SEQ ID NO: 70676 - RNA, 1698 nt, Artificial Sequence; identical to SEQ ID NO: 69996
  derived and/or modified CDS sequence (opt1) from hemagglutinin__InfluenzaA__AEA73639

SEQ ID NO: 70677 - RNA, 1698 nt, Artificial Sequence; identical to SEQ ID NO: 67155
  derived and/or modified CDS sequence (opt1) from hemagglutinin__InfluenzaA__AEA73650

SEQ ID NO: 70678 - RNA, 1698 nt, Artificial Sequence; identical to SEQ ID NO: 67640
  derived and/or modified CDS sequence (opt1) from hemagglutinin__InfluenzaA__AEA73661

SEQ ID NO: 70679 - RNA, 1698 nt, Artificial Sequence
  derived and/or modified CDS sequence (opt1) from hemagglutinin__InfluenzaA__AEA73672
augaaggugaagcugcucguccugcugugcaccuucaccgccacguucgccgacaccaucugcaucggcuaccacgcgaacaacagcaccgacaccguggacacggugcucgagaagaacgucaccgugacccacuccgugaaccugcuggagaacagccacaacgggaagcucugccugcugaagggcaucgcgccccuccagcuggggaacugcuccgucgccggcuggauccuggggaacccggagugcgagcuccugaucagcaaggaguccuggagcuacaucguggagaagcccaaccccgagaacgggaccugcuaccccggccacuucgccgacuacgaggagcugcgcgagcagcucuccagcguguccagcuucgagcgguucgagaucuucccgaaggaguccagcuggcccaaccacacggucaccgggguguccgccagcugcucccacaacggcgagagcuccuucuaccgcaaccugcuguggcucaccgugaagaacgggcuguaccccaaccugagcaaguccuacgccaacaacaaggagaaggagguccucgugcuguggggcgugcaccacccgcccaacaucgucgaccagaagacccuguaccggacggagaacgccuacgugagcguggucagcucccacuacagccgcaaguucacccccgagaucgccaagcggcccaaggugcgcgaccaggaggggcggaucaacuacuacuggacccuccuggagcccggcgacaccaucaucuucgaggccaacggcaaccugaucgcgccgcgcuacgccuucgcccucucccggggguucggcagcgggaucaucaacuccaacgcccccauggacaagugcgacgccaagugccagacgccccgcggcgcgaucaacagcucccugcccuuccagaacgugcacccggucaccaucggcgagugccccaaguacgugcggagcgccaagcugcgcauggugaccgggcuccggaacauccccuccauccagagccgcggccuguucggggccaucgccggcuucaucgagggcggcuggaccggcauggucgacgggugguacggcuaccaccaccagaacgagcagggguccggcuacgccgcggaccagaaguccacgcagaacgccaucaacgggaucaccaacaaggugaacagcgucaucgagaagaugaacacccaguucaccgccgugggcaaggaguucaacaagcuggagcggcgcauggagaaccucaacaagaagguggacgacggcuucaucgacaucuggacguacaacgccgagcugcugguccuccuggagaacgagcggacccuggacuuccacgacagcaacgugaagaaccucuacgagaaggugaagucccagcugaagaacaacgccaaggagaucgggaacggcugcuucgaguucuaccacaagugcaacgacgagugcauggagagcgucaagaacgggaccuacgacuaccccaaguacuccgaggagagcaagcugaaccgcgagaagaucgacggcgugaagcucgaguccauggggguguaccagauccuggcgaucuacagcaccgucgccagcucccuggugcuccuggugagccugggcgccaucuccuucuggaugugcagcaacggcucccuccagugccggaucugcaucuga

SEQ ID NO: 70680 - RNA, 1698 nt, Artificial Sequence; identical to SEQ ID NO: 67640
  derived and/or modified CDS sequence (opt1) from hemagglutinin__InfluenzaA__AEA73683

SEQ ID NO: 70681 - RNA, 1698 nt, Artificial Sequence
  derived and/or modified CDS sequence (opt1) from hemagglutinin__InfluenzaA__AEA73694
augaaggugaagcugcucguccugcugugcaccuucaccgccacguacgccgacaccaucugcaucggcuaccacgcgaacaacagcaccgacaccguggacacggugcucgagaagaacgucaccgugacccacuccgugaaccugcuggagaacagccacaacgggaagcucugccugcugaagggcaucgcgccccuccagcuggggaacugcuccgucgccggcuggauccuggggaacccggagugcgagcuccugaucagcaaggaguccuggagcuacaucguggagaagcccaaccccgagaacgggaccugcuaccccggccacuucgccgacuacgaggagcugcgcgagcagcucuccagcguguccagcuucgagcgguucgagaucuucccgaaggaguccagcuggcccaaccacacggucaccgggguguccgccagcugcucccacaacggcgagagcuccuucuaccgcaaccugcuguggcucaccgugaagaacgggcuguaccccaaccugagcaaguccuacgccaacaacaaggagaaggagguccucgugcuguggggcgugcaccacccgcccaacaucgucgaccagaagacccuguaccggacggagaacgccuacgugagcguggucagcucccacuacagccgcaaguucacccccgagaucgccaagcggcccaaggugcgcgaccaggaggggcggaucaacuacuacuggacccuccuggagcccggcgacaccaucaucuucgaggccaacggcaaccugaucgcgccgcgcuacgccuucgcccucucccggggguucggcagcgggaucaucaacuccaacgcccccauggacaagugcgacgccaagugccagacgccccgcggcgcgaucaacagcucccugcccuuccagaacgugcacccggucaccaucggcgagugccccaaguacgugcggagcgccaagcugcgcauggugaccgggcuccggaacauccccuccauccagagccgcggccuguucggggccaucgccggcuucaucgagggcggcuggaccggcauggucgacgggugguacggcuaccaccaccagaacgagcagggguccggcuacgccgcggaccagaaguccacgcagaacgccaucaacgggaucaccaacaaggugaacagcgucaucgagaagaugaacacccaguucaccgccgugggcaaggaguucaacaagcuggagcggcgcauggagaaccucaacaagaagguggacgacggcuucaucgacaucuggacguacaacgccgagcugcugguccuccuggagaacgagcggacccuggacuuccacgacagcaacgugaagaaccucuacgagaaggugaagucccagcugaagaacaacgccaaggagaucgggaacggcugcuucgaguucuaccacaagugcaacgacgagugcauggagagcgucaagaacgggaccuacgacuaccccaaguacuccgaggagagcaagcugaaccgcgagaagaucgacggcguggagcucgaguccauggggguguaccagauccuggcgaucuacagcaccgucgccagcucccuggugcuccuggugagccugggcgccaucuccuucuggaugugcagcaacggcucccuccagugccggaucugcaucuga

SEQ ID NO: 70682 - RNA, 1698 nt, Artificial Sequence; identical to SEQ ID NO: 67640
  derived and/or modified CDS sequence (opt1) from hemagglutinin__InfluenzaA__AEA73705

SEQ ID NO: 70683 - RNA, 1698 nt, Artificial Sequence; identical to SEQ ID NO: 67155
  derived and/or modified CDS sequence (opt1) from hemagglutinin__InfluenzaA__AEA73716

SEQ ID NO: 70684 - RNA, 1698 nt, Artificial Sequence; identical to SEQ ID NO: 67155
  derived and/or modified CDS sequence (opt1) from hemagglutinin__InfluenzaA__AEA73727

SEQ ID NO: 70685 - RNA, 1698 nt, Artificial Sequence; identical to SEQ ID NO: 67155
  derived and/or modified CDS sequence (opt1) from hemagglutinin__InfluenzaA__AEA73738

SEQ ID NO: 70686 - RNA, 1698 nt, Artificial Sequence; identical to SEQ ID NO: 67155
  derived and/or modified CDS sequence (opt1) from hemagglutinin__InfluenzaA__AEA73749

SEQ ID NO: 70687 - RNA, 1698 nt, Artificial Sequence
  derived and/or modified CDS sequence (opt1) from hemagglutinin__InfluenzaA__AEA73760
augaaggugaagcugcucguccugcugugcaccuucaccgccacguacgccgacaccaucugcaucggcuaccacgcgaacaacagcaccgacaccguggacacggugcucgagaagaacgucaccgugacccacuccgugaaccugcuggagaacagccacaacgggaagcucugccugcugaagggcaucgcgccccuccagcuggggaacugcuccgucgccggcuggauccuggggaacccggagugcgagcuccugaucagcaaggaguccuggagcuacaucguggagaagcccaaccccgagaacgggaccugcuaccccggccacuucgccgacuacgaggagcugcgcgagcagcucuccagcguguccagcuucgagcgguucgagaucuucccgaaggaguccagcuggcccaaccacacggucaccgggguguccgccagcugcucccacaacggcgagagcuccuucuaccgcaaccugcuguggcucaccgugaagaacgggcuguaccccaaccugagcaaguccuacgccaacaacaaggagaaggagguccucgugcuguggggcgugcaccacccgcccaacaucgucgaccagaagacccuguaccggacggagaacgccuacgugagcguggucagcucccacuacagccgcaaguucacccccgagaucgccaagcggcccaagauccgcgaccaggaggggcggaucaacuacuacuggacccuccuggagcccggcgacaccaucaucuucgaggccaacggcaaccugaucgcgccgcgcuacgccuucgcccucucccggggguucggcagcgggaucaucaacuccaacgcccccauggacaagugcgacgccaagugccagacgccccgcggcgcgaucaacagcucccugcccuuccagaacgugcacccggugaccaucggcgagugccccaaguacguccggagcgccaagcugcgcauggugaccgggcuccggaacauccccuccauccagagccgcggccuguucggggccaucgccggcuucaucgagggcggcuggaccggcaugguggacgggugguacggcuaccaccaccagaacgagcagggguccggcuacgccgcggaccagaaguccacgcagaacgccaucaacgggaucaccaacaaggucaacagcgugaucgagaagaugaacacccaguucaccgccgucggcaaggaguucaacaagcuggagcggcgcauggagaaccucaacaagaagguggacgacggcuucaucgacaucuggacguacaacgccgagcugcuggugcuccuggagaacgagcggacccuggacuuccacgacagcaacgucaagaaccucuacgagaaggugaagucccagcugaagaacaacgccaaggagaucgggaacggcugcuucgaguucuaccacaagugcaacgacgagugcauggagagcgugaagaacgggaccuacgacuaccccaaguacuccgaggagagcaagcugaaccgcgagaagaucgacggcgucaagcucgaguccauggggguguaccagauccuggcgaucuacagcaccguggccagcucccugguccuccuggugagccugggcgccaucuccuucuggaugugcagcaacggcucccuccagugccggaucugcaucuga

SEQ ID NO: 70688 - RNA, 1701 nt, Artificial Sequence; identical to SEQ ID NO: 66693
  derived and/or modified CDS sequence (opt1) from hemagglutinin__InfluenzaA__AEA73771

SEQ ID NO: 70689 - RNA, 1701 nt, Artificial Sequence; identical to SEQ ID NO: 68323
  derived and/or modified CDS sequence (opt1) from hemagglutinin__InfluenzaA__AEA73781

SEQ ID NO: 70690 - RNA, 1701 nt, Artificial Sequence; identical to SEQ ID NO: 68245
  derived and/or modified CDS sequence (opt1) from hemagglutinin__InfluenzaA__AEA73791

SEQ ID NO: 70691 - RNA, 1701 nt, Artificial Sequence; identical to SEQ ID NO: 66873
  derived and/or modified CDS sequence (opt1) from hemagglutinin__InfluenzaA__AEA73801

SEQ ID NO: 70692 - RNA, 1701 nt, Artificial Sequence; identical to SEQ ID NO: 67857
  derived and/or modified CDS sequence (opt1) from hemagglutinin__InfluenzaA__AEA73811

SEQ ID NO: 70693 - RNA, 1701 nt, Artificial Sequence; identical to SEQ ID NO: 68415
  derived and/or modified CDS sequence (opt1) from hemagglutinin__InfluenzaA__AEA73821

SEQ ID NO: 70694 - RNA, 1701 nt, Artificial Sequence
  derived and/or modified CDS sequence (opt1) from hemagglutinin__InfluenzaA__AEA73831
augaaggccauccuggugguccuccuguacaccuucgccaccgcgaacgccgacacgcugugcaucggcuaccacgccaacaacagcaccgacaccguggacaccgugcucgagaagaacgucacggugacccacuccgugaaccugcuggaggacaagcacaacgggaagcucugcaagcugcgcggcgucacgccccugcaccucgggaagugcaacaucgccggcuggauccuggggaacccggagugcgagagccuguccaccgccagcuccuggagcuacaucguggagaccuccagcuccgacaacgggaccugcuaccccggcgacuucaucgacuacgaggagcuccgggagcagcugagcuccgugagcuccuucgagcgcuucgagaucuuccccaagaccagcuccuggcccaaccacgacagcaacaagggcgucaccgcggccugcccgcacgccggcgccaaguccuucuacaagaaccugaucuggcucgugaagaaggggaacagcuaccccaagcuguccaagagcuacaucaacgacaagggcaaggaggugcugguccucugggggauccaccaccccagcacguccaccgaccagcagagccuguaccagaacgcggacgccuacguguucgugggcaccucccgguacagcaagaaguucaagcccgagaucgccauccgcccgaagguccgggaccaggagggccgcaugaacuacuacuggacccugguggagcccggggacaagaucacguucgaggccaccggcaaccucguggucccccgguacgccuucgcgauggagcgcaacgccggguccggcaucaucaucagcgacacccccgugcacgacugcaacaccacgugccagaccccgaagggcgccaucaacaccucccugcccuuccagaacauccaccccaucaccaucgggaagugccccaaguacgucaagagcacgaagcugcggcucgccaccggccugcgcaacgugccguccauccagagccgggggcuguucggcgccaucgcgggguucaucgagggcggcuggaccgggaugguggacggcugguacggguaccaccaccagaacgagcagggcuccggguacgccgccgaccucaagagcacccagaacgccaucgacaagaucacgaacaaggugaacuccgucaucgagaagaugaacacccaguucaccgccgugggcaaggaguucaaccaccuggagaagcgcaucgagaaccugaacaagaaggucgacgacggcuuccucgacaucuggaccuacaacgcggagcugcuggugcuccuggagaacgagcggacgcuggacuaccacgacagcaacgugaagaaccucuacgagaagguccgcucccagcugaagaacaacgccaaggagaucgggaacggcugcuucgaguucuaccacaagugcgacaacacgugcauggagagcgugaagaacgggaccuacgacuaccccaaguacuccgaggaggccaagcugaaccgggaggagaucgacggcgugaagcucgagagcacccgcaucuaccagauccuggccaucuacuccaccgucgccagcagccuggugcucguggucucccugggggcgaucagcuucuggaugugcuccaacggcagccugcagugccggaucugcaucuga

SEQ ID NO: 70695 - RNA, 1701 nt, Artificial Sequence
  derived and/or modified CDS sequence (opt1) from hemagglutinin__InfluenzaA__AEA73841
augaaggccauccuggugguccuccuguacaccuucgccaccgcgaacgccgacacgcugugcaucggcuaccacgccaacaacagcaccgacaccguggacaccgugcucgagaagaacgucacggugacccacuccgugaaccugcuggaggacaagcacaacgggaagcucugcaagcugcgcggcgucgcgccccugcaccucgggaagugcaacaucgccggcuggauccuggggaacccggagugcgagagccuguccaccgccagcuccuggagcuacaucguggagaccuccagcuccgacaacggcacgugcuaccccggcgacuucaucaacuacgaggagcuccgggagcagcugagcuccgugagcuccuucgagcgcuucgagaucuuccccaagaccagcuccuggcccaaccacgacagcaacaagggggucaccgccgccugcccgcacgccggcgcgaaguccuucuacaagaaccugaucuggcucgugaagaaggggaacagcuaccccaagcuguccaagagcuacaucaacgacaagggcaaggaggugcugguccucugggggauccaccaccccagcaccuccgccgaccagcagagccuguaccagaacgccgacgccuacguguucgugggcacgucccgguacagcaagaaguucaagcccgagaucgccauccgcccgaagguccgggaccaggagggccgcaugaacuacuacuggacccugguggagcccggggacaagaucaccuucgaggcgaccggcaaccucguggucccccgguacgccuucgccauggagcgcaacgccgaguccgggaucaucaucagcgacacgcccgugcacgacugcaacacgaccugccagaccccgaagggcgccaucaacaccucccugcccuuccagaacauccaccccaucaccaucggcaagugccccaaguacgucaagagcaccaagcugcggcucgcgaccgggcugcgcaacgugccguccauccagagccggggccuguucggggccaucgccggcuucaucgagggcggguggacgggcaugguggacgggugguacggcuaccaccaccagaacgagcagggguccggcuacgccgccgaccucaagagcacccagaacgcgaucgacaagaucaccaacaaggugaacuccgucguggagaagaugaacacccaguucacggccgucgggaaggaguucaaccaccuggagaagcgcaucgagaaccugaacaagaagguggacgacggcuuccucgacaucuggaccuacaacgccgagcugcuggugcuccuggagaacgagcggacccuggacuaccacgacagcaacgucaagaaccucuacgagaaggugcgcucccagcugaagaacaacgccaaggagaucggcaacgggugcuucgaguucuaccacaagugcgacaacacgugcauggagagcgugaagaacggcaccuacgacuaccccaaguacuccgaggaggccaagcugaaccgggaggagaucgacggggucaagcucgagagcacccgcaucuaccagauccuggcgaucuacuccaccguggccagcagccuggugcucgucgugucccugggcgccaucagcuucuggaugugcuccaacgggagccugcagugccggaucugcaucuga

SEQ ID NO: 70696 - RNA, 1701 nt, Artificial Sequence; identical to SEQ ID NO: 68323
  derived and/or modified CDS sequence (opt1) from hemagglutinin__InfluenzaA__AEA73851

SEQ ID NO: 70697 - RNA, 1701 nt, Artificial Sequence
  derived and/or modified CDS sequence (opt1) from hemagglutinin__InfluenzaA__AEA73861
augaaggccauccuggugguccuccuguacaccuucgccaccgcgaacgccgacacgcugugcaucggcuaccacgccaacaacagcaccgacaccguggacaccgugcucgagaagaacgucacggugacccacuccgugaaccugcuggaggacaagcacaacgggaagcucugcaagcugcgcggcgucgcgccccugcaccucggggagugcaacaucgccggcuggauccuggggaacccggagugcgagagccuguccaccgccagcuccuggagcuacaucguggagaccuccagcuccgacaacggcacgugcuaccccggcgacuucaucgacuacgaggagcuccgggagcagcugagcuccgugagcuccuucgagcgcuucgagaucuuccccaagaccagcuccuggcccaaccacgacagcaacaagggggucaccgccgccugcccgcacgccggcgcgaaguccuucuacaagaaccugaucuggcucgugaagaaggggaacagcuaccccaagcuguccaagagcuacaucaacgacaagggcaaggaggugcugguccucugggggauccaccaccccagcaccuccgccgaccagcagagccuguaccagaacgccgacgccuacguguucgugggcacgucccgguacagcaagaaguucaagcccgagaucgccauccgcccgaagguccgggaccaggagggccgcaugaacuacuacuggacccugguggagcccggggacaagaucaccuucgaggcgaccggcaaccucguggucccccgguacgccuucgccauggagcgcaacgccggguccggcaucaucaucagcgacacgcccgugcacgacugcaacacgaccugccagaccccgaagggcgccaucaacaccucccugcccuuccagaacgugcaccccaucaccaucgggaagugccccaaguacgucaagagcaccaagcugcggcucgcgaccggccugcgcaacgugccguccauccagagccgggggcuguucggcgccaucgccggguucaucgagggcggcuggacggggaugguggacggcugguacggguaccaccaccagaacgagcagggcuccggguacgccgccgaccucaagagcacccagaacgcgaucgacgagaucaccaacaaggucaacuccgugaucgagaagaugaacacccaguucacggccgucggcaaggaguucaaccaccuggagaagcgcaucgagaaccugaacaagaagaucgacgacggcuuccucgacaucuggaccuacaacgccgagcugcuggugcuccuggagaacgagcggacccuggacuaccacgacagcaacgugaagaaccucuacgagaagguccgcucccagcugaagaacaacgccaaggagaucgggaacggcugcuucgaguucuaccacaagugcgacaacacgugcauggagagcgugaagaacgggaccuacgacuaccccaaguacuccgaggaggccaagcugaaccgggaggagaucgacggcgugaagcucgagagcacccgcaucuaccagauccuggcgaucuacuccaccgucgccagcagccuggugcucguggucucccugggggccaucagcuucuggaugugcuccaacggcagccugcagugccggaucugcaucuga

SEQ ID NO: 70698 - RNA, 1701 nt, Artificial Sequence; identical to SEQ ID NO: 68565
  derived and/or modified CDS sequence (opt1) from hemagglutinin__InfluenzaA__AEA73871

SEQ ID NO: 70699 - RNA, 1701 nt, Artificial Sequence; identical to SEQ ID NO: 68565
  derived and/or modified CDS sequence (opt1) from hemagglutinin__InfluenzaA__AEA73881

SEQ ID NO: 70700 - RNA, 1701 nt, Artificial Sequence; identical to SEQ ID NO: 68245
  derived and/or modified CDS sequence (opt1) from hemagglutinin__InfluenzaA__AEA73891

SEQ ID NO: 70701 - RNA, 1701 nt, Artificial Sequence
  derived and/or modified CDS sequence (opt1) from hemagglutinin__InfluenzaA__AEA73901
augaacgccauccuggugguccuccuguacaccuucgccaccgcgaacgccgacacgcugugcaucggcuaccacgccaacaacagcaccgacaccguggacacccuccuggagaagaacgugacggucacccacuccgugaaccugcucgaggacaagcacaacgggaagcugugcaagcugcgcggcguggcgccccuccaccuggggaagugcaacaucgccggcuggauccuggggaacccggagugcgagagccucuccaccgccagcuccuggagcuacaucgucgagaccuccagcuccgacaacggcacgugcuaccccggcgacuucaucgacuacgaggagcugcgggagcagcugagcuccgugagcuccuucgagcgcuucgagaucuuccccaagaccagcuccuggcccaaccacgacagcaacaagggggugaccgccgccugcccgcacgccggcgcgaaguccuucuacaagaaccucaucuggcuggucaagaaggggaacagcuaccccaagcuguccaagagcuacaucaacgacaagggcaaggaggugcucgugcugugggggauccaccaccccagcaccuccgccgaccagcagagccuguaccagaacgccgacgccuacgucuucgugggcacgucccgguacagcaagaaguucaagcccgagaucgccauccgcccgaaggugcgggaccaggagggccgcaugaacuacuacuggacccucgucgagcccggggacaagaucaccuucgaggcgaccggcaaccugguggugccccgguacgccuucgccauggagcgcaacgccggguccggcaucaucaucagcgacacgcccguccacgacugcaacacgaccugccagaccccgaagggcgccaucaacaccucccugcccuuccagaacauccaccccaucaccaucgggaagugccccaaguacgucaagagcaccaagcuccggcuggcgaccggccugcgcaacgugccguccauccagagccgggggcuguucggcgccaucgccggguucaucgagggcggcuggacggggaugguggacggcugguacggguaccaccaccagaacgagcagggcuccggguacgccgccgaccucaagagcacccagaacgcgaucgacgagaucaccaacaagaucaacuccgugaucgagaagaugaacacccaguucacggccgugggcaaggaguucaaccaccuggagaagcgcaucgagaaccucaacaagaaggucgacgacggcuuccuggacaucuggaccuacaacgccgagcugcucgugcugcuggagaacgagcggacccucgacuaccacgacagcaacgucaagaaccuguacgagaaggugcgcucccagcugaagaacaacgccaaggagaucgggaacggcugcuucgaguucuaccacaagugcgacaacacgugcauggagagcgugaagaacgggaccuacgacuaccccaaguacuccgaggaggccaagcucaaccgggaggagaucgacggcgucaagcuggagagcacccgcaucuaccagauccuggcgaucuacuccaccguggccagcagccucgugcuggucgugucccugggggccaucagcuucuggaugugcuccaacggcagccuccagugccggaucugcaucuga

SEQ ID NO: 70702 - RNA, 1701 nt, Artificial Sequence; identical to SEQ ID NO: 67857
  derived and/or modified CDS sequence (opt1) from hemagglutinin__InfluenzaA__AEA73911

SEQ ID NO: 70703 - RNA, 1701 nt, Artificial Sequence; identical to SEQ ID NO: 68565
  derived and/or modified CDS sequence (opt1) from hemagglutinin__InfluenzaA__AEA73921

SEQ ID NO: 70704 - RNA, 1701 nt, Artificial Sequence; identical to SEQ ID NO: 68323
  derived and/or modified CDS sequence (opt1) from hemagglutinin__InfluenzaA__AEA73931

SEQ ID NO: 70705 - RNA, 1701 nt, Artificial Sequence; identical to SEQ ID NO: 68323
  derived and/or modified CDS sequence (opt1) from hemagglutinin__InfluenzaA__AEA73961

SEQ ID NO: 70706 - RNA, 1701 nt, Artificial Sequence
  derived and/or modified CDS sequence (opt1) from hemagglutinin__InfluenzaA__AEA73971
augaaggccauccuggugguccuccuguacaccuucgccaccgcgaacgccgacacgcugugcaucggcuaccacgccaacaacagcaccgacaccguggacaccgugcucgagaagaacgucacggugacccacuccgugaaccugcuggaggacaagcacaacgggaagcucugcaagcugcgcggcgucgcgccccugcaccucgggaagugcaacaucgccggcuggauccuggggaacccggagugcgagagccuguccaccgccagcuccuggagcuacaucguggagaccuccagcuccgacaacggcacgugcuaccccggcgacuucaucgacuacgaggagcuccgggagcagcugagcuccgugagcuccuucgagcgcuucgagaucuuccccaagaccagcuccuggcccaaccacgacagcaacaagggggucaccgccgccugcccgcacgccggcgcgaaguccuucuacaagaaccugaucuggcucgugaagaaggggaacagcuaccccaagcuguccaagagcuacaucaacgacaagggcaaggaggugcugguccucugggggauccaccaccccagcaccuccgccgaccagcagagccuguaccagaacgccgacgccuacguguucgugggcacgucccgguacagcaagaaguucaagcccgagaucgccauccgcccgaagguccgggagcaggagggccgcaugaacuacuacuggacccugguggagcccggggacaagaucaccuucgaggcgaccggcaaccucguggucccccgguacgccuucgccauggagcgcaacgccggguccggcaucaucaucagcgacacgcccgugcacgacugcaacacgaccugccagaccccgaagggcgccaucaacaccucccugcccuuccagaacauccacagcaucaccaucgggaagugccccaaguacgugaaguccaccaagcugcggcucgcgaccggccugcgcaacguccccagcauccagucccgggggcuguucggcgccaucgccggguucaucgagggcggcuggacggggaugguggacggcugguacggguaccaccaccagaacgagcagggcagcggguacgccgccgaccagaaguccacccagaacgcgaucgacgagaucaccaacaaggugaacagcgucaucgagaagaugaacacccaguucacggccgugggcaaggaguucaaccaccucgagaagcgcaucgagaaccugaacaagaaggucgacgacggcuuccuggacaucuggaccuacaacgccgagcuccuggugcugcucgagaacgagcggacccuggacuaccacgacuccaacgugaagaaccuguacgagaagguccgcagccagcucaagaacaacgccaaggagaucgggaacggcugcuucgaguucuaccacaagugcaacaacacgugcauggaguccgugaagaacgggaccuacgacuacccgaaguacagcgaggaggccaagcugaaccgggaggagaucgacggcgugaagcuggaguccacccgcaucuaccagauccucgcgaucuacagcaccgucgccagcucccuggugcugguggucagccucggggccaucuccuucuggaugugcagcaacggcucccugcagugccggaucugcaucuga

SEQ ID NO: 70707 - RNA, 1701 nt, Artificial Sequence; identical to SEQ ID NO: 68323
  derived and/or modified CDS sequence (opt1) from hemagglutinin__InfluenzaA__AEA73981

SEQ ID NO: 70708 - RNA, 1701 nt, Artificial Sequence
  derived and/or modified CDS sequence (opt1) from hemagglutinin__InfluenzaA__AEA73991
augaaggccauccuggugguccuccuguacaccuucgccaccgcgaacgccgacacgcugugcaucggcuaccacgccaacaacagcaccgacaccguggacaccgugcucgagaagaacgucacggugacccacuccgugaaccugcuggaggacaagcacaacgggaagcucugcaagcugcgcggcgucgcgccccugcaccucgggaagugcaacaucgccggcuggauccuggggaacccggagugcgagagccuguccaccgccagcuccuggagcuacaucguggagaccuccagcuccgacaacggcacgugcuaccccggcgacuucaucgacuacgaggagcuccgggagcagcugagcuccgugagcuccuucgagaaguucgagaucuuccccaagaccagcuccuggcccaaccacgacagcaacaagggggucaccgccgccugcccgcacgccggcgcgaaguccuucuacaagaaccugaucuggcucgugaagaaggggaacagcuaccccaagcuguccaagagcuacaucaacgacaagggcaaggaggugcugguccucugggggauccaccaccccagcaccuccgccgaccagcagagccuguaccagaacgccgacuccuacguguucgugggcacgagccgcuacuccaagaaguucaagcccgagaucgccauccggccgaagguccgcgaccaggagggccggaugaacuacuacuggacccugguggagcccggggacaagaucaccuucgaggccaccggcaaccucguggucccccgcuacgcguucgccauggagcggaacgccgggagcggcaucaucaucuccgacacgcccgugcacgacugcaacacgaccugccagaccccggagggcgccaucaacaccagccugcccuuccagaacauccaccccaucaccaucgggaagugccccaaguacgugaaguccaccaagcugcgccucgccaccggccugcggaacgucccgagcauccagucccgcgggcuguucggcgcgaucgccggguucaucgagggcggcuggacggggaugguggacggcugguacggguaccaccaccagaacgagcagggcagcggguacgccgccgaccucaaguccacccagaacgccaucgacgagaucaccaacaaggugaacagcgucaucgagaagaugaacacccaguucacggcggugggcaaggaguucaaccaccuggagaagcggaucgagaaccugaacaagaaggucgacgacggcuuccucgacaucuggaccuacaacgccgagcugcuggugcuccuggagaacgagcgcacccuggacuaccacgacuccaacgugaagaaccucuacgagaagguccggagccagcugaagaacaacgccaaggagaucgggaacggcugcuucgaguucuaccacaagugcgacaacacgugcauggaguccgugaagaacgggaccuacgacuaccccaaguacagcgaggaggccaagcugaaccgcgaggagaucgacggcgugaagcucgaguccacccggaucuaccagauccuggccaucuacagcaccgucgcgagcucccuggugcucguggucagccugggggccaucuccuucuggaugugcagcaacggcucccugcagugccgcaucugcaucuga

SEQ ID NO: 70709 - RNA, 1701 nt, Artificial Sequence; identical to SEQ ID NO: 68306
  derived and/or modified CDS sequence (opt1) from hemagglutinin__InfluenzaA__AEA74001

SEQ ID NO: 70710 - RNA, 1701 nt, Artificial Sequence
  derived and/or modified CDS sequence (opt1) from hemagglutinin__InfluenzaA__AEA74011
augaaggccauccuggugguccuccuguacaccuucgccaccgcgaacgccgacacgcugugcaucggcuaccacgccaacaacagcaccgacaccguggacaccgugcucgagaagaacgucacggugacccacuccgugaaccugcuggaggacaagcacaacgggaagcucugcaagcugcgcggcgucgcgccccugcaccucgggaagugcaacaucgccggcuggauccuggggaacccggagugcgagagccuguccaccgccagcuccuggagcuacaucguggagaccuccagcuccgacaacggcacgugcuaccccggcgacuucaucgacuacgaggagcuccgggagcagcugagcuccgugagcuccuucgagcgcuucgagaucuuccccaagaccagcuccuggcccaaccacgacagcaacaagggggucaccgccgccugcccgcacgccggcgcgaaguccuucuacaagaaccugaucuggcucgugaagaagcggaacagcuaccccaagcugucccagagcuacaucaacgacaaggggaaggaggugcugguccucuggggcauccaccaccccagcaccuccgccgaccagcagagccuguaccagaacgccgacgccuacguguucguggggacgucccgcuacagcaagaaguucaagcccgagaucgccauccggccgaagguccgcgaccaggagggccggaugaacuacuacuggacccugguggagcccggcgacaagaucaccuucgaggcgaccgggaaccucguggucccccgcuacgccuucgccauggagcggaacgccggcuccgggaucaucaucagcgacacgcccgugcacgacugcaacacgaccugccagaccccgaagggcgccaucaacaccucccugcccuuccagaacauccaccccaucaccaucggcaagugccccaaguacgucaagagcaccaagcugcgccucgcgaccgggcugcggaacgugccguccauccagagccgcggccuguucggggccaucgccggcuucaucgagggcggguggacgggcaugguggacgggugguacggcuaccaccaccagaacgagcagggguccggcuacgccgccgaccucaagagcacccagaacgcgaucgacaagaucaccaacaaggugaacuccgucaucgagaagaugaacacccaguucacggccguggggaaggaguucaaccaccuggagaagcggaucgagaaccugaacaagaaggucgacgacggcuuccucgacaucuggaccuacaacgccgagcugcuggugcuccuggagaacgagcgcacccuggacuaccacgacagcaacgugaagaaccucuacgagaagguccggucccagcugaagaacaacgccaaggagaucggcaacgggugcuucgaguucuaccacaagugcgacaacacgugcauggagagcaucaagaacggcaccuacgacuaccccaaguacuccgaggaggccaagcugaaccgcgaggagaucgacggggugaagcucgagagcacccggaucuaccagauccuggcgaucuacuccaccguggccagcagccugguccucguggugucccugggcgccaucagcuucuggaugugcuccaacgggagccugcagugccgcaucugcaucuga

SEQ ID NO: 70711 - RNA, 1701 nt, Artificial Sequence
  derived and/or modified CDS sequence (opt1) from hemagglutinin__InfluenzaA__AEA74021
augaaggccauccuggugguccuccuguacaccuucgccaccgcgaacgccgacacgcugugcaucggcuaccacgccaacaacagcaccgacaccguggacaccgugcucgagaagaacgucacggugacccacuccgugaaccugcuggaggacaagcacaacgggaagcucugcaagcugcgcggcgucgcgccccugcaccucgggaagugcaacaucgccggcuggauccuggggaacccggagugcgagagccuguccaccgccagcuccuggagcuacaucguggagaccuccagcuccgacaacggcacgugcuaccccggcgacuucaucgacuacgaggagcuccgggagcagcugagcuccgugagcuccuucgagcgcuucgagaucuuccccaagaccagcuccuggcccaaccacgacagcaacaagggggucaccgccgccugcccgcacgccggcgcgaaguccuucuacaagaaccugaucuggcucgugaagaaggggaacagcuaccccaagcugucccagagcuacaucaacgacaagggcaaggaggugcugguccucugggggauccaccaccccagcaccuccgccgaccagcagagccuguaccagaacgccgacgccuacguguucgugggcacgucccgguacagcaagaaguucaagcccgagaucgccauccgcccgaagguccgggaccaggagggccgcaugaacuacuacuggacccugguggagcccggggacaagaucaccuucgaggcgaccggcaaccucguggucccccgguacgccuucgccauggagcgcaacgccggguccggcaucaucaucagcgacacgcccgugcacgacugcaacacgaccugccagaccccgaagggcgccaucaacaccucccugcccuuccagaacauccaccccaucaccaucgggaagugccccaaguacgucaagagcaccaagcugcggcucgcgaccggccugcgcaacgugccguccauccagagccgggggcuguucggcgccaucgccggguucaucgagggcggcuggacggggaugguggacggcugguacggguaccaccaccagaacgagcagggcuccggguacgccgccgaccucaagagcacccagaacgcgaucgacaagaucaccaacaaggugaacuccgucaucgagaagaugaacacccaguucacggccgugggcaaggaguucaaccaccuggagaagcgcaucgagaaccugaacaagaaggucgacgacggcuuccucgacaucuggaccuacaacgccgagcugcuggugcuccuggagaacgagcggacccuggacuaccacgacagcaacgugaagaaccucuacgagaagguccgcucccagcugaagaacaacgccaaggagaucgggaacggcugcuucgaguucuaccacaagugcgacaacacgugcauggagagcaucaagaacgggaccuacgacuaccccaaguacuccgaggaggccaagcugaaccgggaggagaucgacggcgugaagcucgagagcacccgcaucuaccagauccuggcgaucuacuccaccguggccagcagccugguccucguggugucccugggggccaucagcuucuggaugugcuccaacggcagccugcagugccggaucugcaucuga

SEQ ID NO: 70712 - RNA, 1701 nt, Artificial Sequence
  derived and/or modified CDS sequence (opt1) from hemagglutinin__InfluenzaA__AEA74031
augaaggccauccuggugguccuccuguacaccuucgccaccgcgaacgccgacacgcugugcaucggcuaccacgccaacaacagcaccgacaccguggacaccgugcucgagaagaacgucacggugacccacuccguggaccugcuggaggacaagcacaacgggaagcucugcaagcugcgcggcgucgcgccccugcaccucgggaagugcaacaucgccggcuggauccuggggaacccggagugcgagagccuguccaccgccagcuccuggagcuacaucguggagaccuccagcuccgacaacggcacgugcuaccccggcgacuucaucgacuacgaggagcuccgggagcagcugagcuccgugagcuccuucgagcgcuucgagaucuuccccaagaccagcuccuggcccaaccacgacagcaacaagggggucaccgccgccugcccgcacgccggcgcgaaguccuucuacaacaaccugaucuggcucgugaagaaggggaacagcuaccccaagcugaacaaguccuacaucaacgacaagggcaaggaggugcugguccucugggggauccaccaccccagcaccagcacggaccagcagucccuguaccagaacgccgacgccuacguguucgugggcaccagccgguacuccaagaaguucaagcccgagaucgccauccgcccgaagguccggaaccaggagggccgcaugaacuacuacuggacccugguggagcccggggacaagaucaccuucgaggccacgggcaaccucguggucccccgguacgcguucgccauggagcgcaacgccgggagcggcaucaucaucuccgacacccccauccacgacugcaacacgaccugccagaccccgaagggcgccaucaacaccagccugcccuuccagaacauccaccccaucaccaucgggaagugccccaaguacgugaaguccaccaagcugcggcucgccacgggccugcgcaacgugccgagcauccagucccgggggcuguucggcgcgaucgccggguucaucgagggcggcuggaccgggauggucgacggcugguacggguaccaccaccagaacgagcagggcagcggguacgccgccgaccucaaguccacccagaacgccaucgacgagaucaccaacaaggugaacagcgugaucgagaagaugaacacgcaguucaccgcggucggcaaggaguucaaccaccuggagaagcgcaucgagaaccugaacaagaagguggacgacggcuuccucgacaucuggaccuacaacgccgagcugcugguccuccuggagaacgagcggacccuggacuaccacgacuccaacgugaagaaccucuacgagaaggugcgcagccagcugaagaacaacgccaaggagaucgggaacggcugcuucgaguucuaccacaagugcgacaacacgugcauggaguccgucaagaacgggaccuacgacuaccccaaguacagcgaggaggccaagcugaaccgggaggagaucgacggcgugaagcucgaguccacccgcaucuaccagauccuggccaucuacagcaccguggcguccagccugguccucguggugagccugggggccaucuccuucuggaugugcagcaacggcucccugcagugccggaucugcaucuga

SEQ ID NO: 70713 - RNA, 1701 nt, Artificial Sequence
  derived and/or modified CDS sequence (opt1) from hemagglutinin__InfluenzaA__AEA74035
augaaggccauccuggugguccuccuguacaccuucgccaccgcgaacgccgacacgcugugcaucggcuaccacgccaacaacagcaccgacaccguggacaccgugcucgagaagaacgucacggugacccacuccguggaccugcuggaggacaagcacaacgggaagcucugcaagcugcgcggcgucgcgccccugcaccucgggaagugcaacaucgccggcuggauccuggggaacccggagugcgagagccuguccaccgccagcuccuggagcuacaucguggagaccuccagcuccgacaacggcacgugcuaccccggcgacuucaucgacuacgaggagcuccgggagcagcugagcuccgugagcuccuucgagcgcuucgagaucuuccccaagaccagcuccuggcccaaccacgacagcaacaagggggucaccgccgccugcccgcacgccggcgcgaaguccuucuacaacaaccugaucuggcucgugaagaaggggaacagcuaccccaagcugaacaaguccuacaucaacgacaagggcaaggaggugcugguccucugggggauccaccaccccagcaccagcacggaccagcagucccuguaccagaacgccgacgccuacguguucgugggcaccagccgguacuccaagaaguucaagcccgagaucgccauccgcccgaagguccgggaccaggagggccgcaugaacuacuacuggacccugguggagcccggggacaagaucaccuucgaggccacgggcaaccucguggucccccgguacgcguucgccauggagcgcaacgccgggagcggcaucaucaucuccgacacccccauccacgacugcaacacgaccugccagaccccgaagggcgccaucaacaccagccugcccuuccagaacauccaccccaucaccaucgggaagugccccaaguacgugaaguccaccaagcugcggcucgccacgggccugcgcaacgugccgagcauccagucccgggggcuguucggcgcgaucgccggguucaucgagggcggcuggaccgggauggucgacggcugguacggguaccaccaccagaacgagcagggcagcggguacgccgccgaccucaaguccacccagaacgccaucgacgagaucaccaacaaggugaacagcgugaucgagaagaugaacacgcaguucaccgcggucggcaaggaguucaaccaccuggagaagcgcaucgagaaccugaacaagaagguggacgacggcuuccucgacaucuggaccuacaacgccgagcugcugguccuccuggagaacgagcggacccuggacuaccacgacuccaacgugaagaaccucuacgagaaggugcgcagccagcugaagaacaacgccaaggagaucgggaacggcugcuucgaguucuaccacaagugcgacaacacgugcauggaguccgucaagaacgggaccuacgacuaccccaaguacagcgaggaggccaagcugaaccgggaggagaucgacggcgugaagcucgaguccacccgcaucuaccagauccuggccaucuacagcaccguggcguccagccugguccucguggugagccugggggccaucuccuucuggaugugcagcaacggcucccugcagugccggaucugcaucuga

SEQ ID NO: 70714 - RNA, 1701 nt, Artificial Sequence; identical to SEQ ID NO: 66458
  derived and/or modified CDS sequence (opt1) from hemagglutinin__InfluenzaA__AEA77299

SEQ ID NO: 70715 - RNA, 1701 nt, Artificial Sequence; identical to SEQ ID NO: 70459
  derived and/or modified CDS sequence (opt1) from hemagglutinin__InfluenzaA__AEB21316

SEQ ID NO: 70716 - RNA, 1701 nt, Artificial Sequence; identical to SEQ ID NO: 70478
  derived and/or modified CDS sequence (opt1) from hemagglutinin__InfluenzaA__AEB21326

SEQ ID NO: 70717 - RNA, 1701 nt, Artificial Sequence; identical to SEQ ID NO: 70459
  derived and/or modified CDS sequence (opt1) from hemagglutinin__InfluenzaA__AEB21338

SEQ ID NO: 70718 - RNA, 1701 nt, Artificial Sequence; identical to SEQ ID NO: 70478
  derived and/or modified CDS sequence (opt1) from hemagglutinin__InfluenzaA__AEB21348

SEQ ID NO: 70719 - RNA, 1701 nt, Artificial Sequence; identical to SEQ ID NO: 67612
  derived and/or modified CDS sequence (opt1) from hemagglutinin__InfluenzaA__AEB40206

SEQ ID NO: 70720 - RNA, 1701 nt, Artificial Sequence; identical to SEQ ID NO: 67612
  derived and/or modified CDS sequence (opt1) from hemagglutinin__InfluenzaA__AEB66895

SEQ ID NO: 70721 - RNA, 1698 nt, Artificial Sequence
  derived and/or modified CDS sequence (opt1) from hemagglutinin__InfluenzaA__AEB71102
auggacgugcccgucuucgugcugcucaugcugaccagcaucugcgugcaggccgaccgcaucugcgucggcuaccuguccaccaacagcuccgagcggguggacacgcuccuggagaacaacgugccggucaccagcuccguggaccugguggagaccaaccacaccgggacguacugcagccucggcgggaucucccccguccaccugggcgacugcagcuucgagggguggaucgugggcaaccccgccugcgcguccaaccugggcauccgcgaguggagcuaccucaucgaggaccccuccgccccgcacgggcugugcuaccccggcgagcuggacaacaacggggagcuccggcaccuguucagcggcauccgcuccuucagccggaccgagcugaucgcccccaccuccuggggcgaggugaacgacggggucaccgccgccugccaggacaagggcgcgagcuccuucuaccgcaaccucgugugguucguggagcgggggaacaaguaccccgucauccgccggacguacaacaacaccaccggccgcgacgugcuggugaucugggggauccaccacccggucagcaccgacgaggcccggaagcuguacgccaaggacaaccccuacacgcucguguccaccagcagcuggucccgcaaguacaaccuggagaccggcacccggcccggcuacaacgggcagaaguccuggacgaagaucuacugguaccugaugcaccccggcgacagcaucagcuucgaguccaacgggggccuccuggccccgaaguacggguacaucaucgaggaguacggcaagggccgcaucuuccagagccggauccgcaucgcgaagugcaacaccaagugccagaccuccgucgggggcaucaacaccaacaagacguuccagaacaucgagcggaacgcccugggggacugccccaaguacaucaagagcggccagcucaagcuggccaccgggcugcgcaacgugcccgccaucuccaaccggggccucuucggcgccaucgcgggguucaucgagggcggguggcccggccugaucaacgggugguacggcuuccagcaccagaacgagcagggcauggggauggccgccgacaaggagagcacccagaaggccaucgaccagaucaccacgaagaucaacaacaucaucgagaagaugaacggcaacuacgacuccauccgcggggaguucagccagguggagcagcggaucaacaugcuggccgaccgcaucgacgacgcggugaccgacgucugguccuacaacgccaagcuccuggugcugcucgagaacgacaagacccuggacaugcacgacgccaacguccgcaaccugcacgaccaggugcggcgcgugcuccggaccaacgccaucgacgagggcaacggcugcuucgagcugcugcacaagugcaacgacagcugcauggagacgauccgcaacgggaccuacaaccacaucgaguacgaggaggaguccaagcucaagcggcaggagaucgagggcaucaagcucaagagcgacgacaacgucuacaaggcccuguccaucuacagcugcaucgcguccagcaucgugcugguggggcugauccuggccuucaucaugugggccugcagcuccggcaacugccgcuucaacaucugcaucuga

SEQ ID NO: 70722 - RNA, 1698 nt, Artificial Sequence
  derived and/or modified CDS sequence (opt1) from hemagglutinin__InfluenzaA__AEB71896
augaaggugaagcugcucguccugcugugcaccuucaccgccacguacgccgacaccaucugcaucggcuaccacgcgaacaacagcaccgacaccguggacacggugcucgagaagaacgucaccgugacccacuccgugaaccugcuggagaacagccacaacgggaagcucugccugcugaagggcaucgcgccccuccagcuggggaacugcuccgucgccggcuggauccuggggaacccggagugcgagcuccugaucagcaaggaguccuggagcuacaucguggagaagcccaaccccgagaacgggaccugcuaccccggccacuucgccgacuacgaggagcugcgcgagcagcucuccagcguguccagcuucgagcgguucgagaucuucccgaaggaguccagcuggcccaaccacacggucaccgggguguccgccagcugcucccacaacggcgagagcuccuucuaccgcaaccugcuguggcucaccgggaagaacggccuguaccccaaccugagcaaguccuacgccaacaacaaggagaaggaggugcucguccuguggggcgugcaccacccgcccaacaucguggaccagaagacccuguaccggacggagaacgccuacgucagcguggugagcucccacuacagccgcaaguucacccccgagaucgccaagcggcccaagguccgcgaccaggagggccggaucaacuacuacuggacccuccuggagcccggcgacaccaucaucuucgaggccaacgggaaccugaucgcgccgcgcuacgccuucgcccucucccggggcuucgggagcggcaucaucaacuccaacgcccccaugggcaagugcgacgccaagugccagacgccccagggggcgaucaacagcucccugcccuuccagaacgugcacccggugaccaucggcgagugccccaaguacguccgcagcgccaagcugcggauggugaccgggcuccgcaacauccccuccauccagagccggggccuguucggggccaucgccggcuucaucgagggcggguggaccggcaugguggacgggugguacggcuaccaccaccagaacgagcagggguccggcuacgccgcggaccagaaguccacgcagaacgccaucaacggcaucaccaacaaggucaacagcgugaucgagaagaugaacacccaguucaccgccgucgggaaggaguucaacaagcuggagcgccggauggagaaccucaacaagaagguggacgacggcuucaucgacaucuggacguacaacgccgagcugcuggugcuccuggagaacgagcgcacccuggacuuccacgacagcaacgucaagaaccucuacgagaaggugaagucccagcugaagaacaacgccaaggagaucgggaacggcugcuucgaguucuaccacaagugcaacgacgagugcauggagagcgugaagaacgggaccuacgacuaccccaaguacuccgaggagagcaagcugaacaaggagaagaucgacggcgucaagcucgaguccaugggcguguaccagauccuggcgaucuacagcaccguggccagcucccugguccuccuggugagccugggggccaucuccuucuggaugugcagcaacggcucccuccagugccggaucugcaucuga

SEQ ID NO: 70723 - RNA, 1701 nt, Artificial Sequence; identical to SEQ ID NO: 66935
  derived and/or modified CDS sequence (opt1) from hemagglutinin__InfluenzaA__AEB71916

SEQ ID NO: 70724 - RNA, 1701 nt, Artificial Sequence; identical to SEQ ID NO: 66458
  derived and/or modified CDS sequence (opt1) from hemagglutinin__InfluenzaA__AEB71925

SEQ ID NO: 70725 - RNA, 1701 nt, Artificial Sequence; identical to SEQ ID NO: 66458
  derived and/or modified CDS sequence (opt1) from hemagglutinin__InfluenzaA__AEB71936

SEQ ID NO: 70726 - RNA, 1701 nt, Artificial Sequence; identical to SEQ ID NO: 66458
  derived and/or modified CDS sequence (opt1) from hemagglutinin__InfluenzaA__AEB71947

SEQ ID NO: 70727 - RNA, 1698 nt, Artificial Sequence; identical to SEQ ID NO: 69996
  derived and/or modified CDS sequence (opt1) from hemagglutinin__InfluenzaA__AEB71958

SEQ ID NO: 70728 - RNA, 1701 nt, Artificial Sequence; identical to SEQ ID NO: 69443
  derived and/or modified CDS sequence (opt1) from hemagglutinin__InfluenzaA__AEB71969

SEQ ID NO: 70729 - RNA, 1701 nt, Artificial Sequence
  derived and/or modified CDS sequence (opt1) from hemagglutinin__InfluenzaA__AEB71980
augaagaccaucaucgcccugagcugcauccucugccugguguucgcccagaagcugcccggcaacgacaacuccaccgcgacgcucugccuggggcaccacgccgucccgaacggcaccaucgugaagaccaucaccaacgaccagaucgaggugacgaacgccaccgagcugguccagagcuccagcaccggggagaucugcgacagcccccaccagauccucgacggcgagaacugcacccugaucgacgcccugcucggggacccccagugcgacggcuuccagaacaagaagugggaccuguucguggagcgcagcaaggccuacuccaacugcuaccccuacgacgugccggacuacgcgagccugcggucccucgucgccagcuccggcacgcuggaguucaacaacgagagcuucaacuggaccggggugacccagaacggcaccuccagcgccugcauccgccgguccaacaacagcuucuucucccgccugaacuggcucacgcaccugaaguucaaguaccccgcccugaacgugaccaugcccaacaacgagcaguucgacaagcucuacaucuggggcguccaccaccccgggaccgacaacgaccagaucuuccuguacgcgcaggccagcgggcggaucaccguguccacgaagcgcagccagcagaccgugaucccgaacaucggcagccggccccgcguccggaacauccccucccgcaucagcaucuacuggaccaucgugaagcccggcgacauccugcucaucaacuccaccgggaaccugaucgccccgcggggcuacuucaagauccgcagcgggaaguccagcaucaugcgguccgacgcccccaucggcaagugcaacagcgagugcaucacgcccaacggcuccauccccaacgacaagccguuccagaacgugaaccgcaucaccuacggggccugcccccgguacgucaagcagaacacccugaagcucgcgaccggcaugcgcaacgugcccgagaagcagacgcgggggaucuucggcgccaucgccggguucaucgagaacggcugggagggcaugguggacgggugguacggcuuccgccaccagaacagcgaggggcggggccaggccgccgaccugaaguccacccaggcggccaucgaccagaucaacgggaagcugaaccgccucaucggcaagaccaacgagaaguuccaccagaucgagaaggaguucagcgaggucgagggccggauccaggaccuggagaaguacguggaggacaccaagaucgaccugugguccuacaacgccgagcuccugguggcccuggagaaccagcacacgaucgaccucaccgacagcgagaugaacaagcuguucgagaagaccaagaagcagcugcgcgagaacgccgaggacauggggaacggcugcuucaagaucuaccacaagugcgacaacgcgugcaucggguccauccgcaacggcaccuacgaccacgacgucuaccgggacgaggcccucaacaaccgcuuccagaucaaggggguggagcugaaguccggcuacaaggacuggauccuguggaucuccuucgccaucagcugcuuccuccugugcguggcccugcucggcuucaucaugugggccugccagaaggggaacauccggugcaacaucugcaucuga

SEQ ID NO: 70730 - RNA, 1698 nt, Artificial Sequence; identical to SEQ ID NO: 67640
  derived and/or modified CDS sequence (opt1) from hemagglutinin__InfluenzaA__AEB71992

SEQ ID NO: 70731 - RNA, 1698 nt, Artificial Sequence; identical to SEQ ID NO: 67640
  derived and/or modified CDS sequence (opt1) from hemagglutinin__InfluenzaA__AEC13313

SEQ ID NO: 70732 - RNA, 1701 nt, Artificial Sequence
  derived and/or modified CDS sequence (opt1) from hemagglutinin__InfluenzaA__AEC46553
augaaggccauccuggugguccuccuguacaccuucgccaccgcgaacgccgacacgcugugcaucggcuaccacgccaacaacagcaccgacaccguggacaccgugcucgagaagaacgucacggugacccacuccgugaaccugcuggaggacaagcacaacgggaagcucugcaagcugcgcggcgucgcgccccugcaccucgggaagugcaacaucgccggcuggauccuggggaacccggagugcgagagccuguccaccgcgagcuccuggagcuacaucguggagaccuccagcuccgacaacggcacgugcuaccccggcgacuucaucgacuacgaggagcuccgggagcagcugagcuccgugagcuccuucgagcgcuucgagaucuuccccaagaccagcuccuggcccaaccacgacccgaacaagggggucaccgccgccugcccccacgccggcgccaagagcuucuacaagaaccugaucuggcucgugaagaaggggaacuccuaccccaagcugagcaccuccuacaucaacgacaagggcaaggaggugcugguccucugggggauccaccaccccagcacgagcgccgaccagcagucccuguaccagaacgccgacgccuacgccuucgugggcaccagccgguacuccaagaaguucaagccggagaucgcgauccgccccaaggugcgggaccaggagggccgcaugaacuacuacuggacccuggucgagcccggggacaagaucaccuucgaggccacgggcaaccucguggugccccgguacgccuucgccauggagcgcaacgccgggagcggcaucaucaucuccgacaccagcguccacgacugcaacacgaccugccagaccccgaagggcgcgaucaacaccucccugcccuuccagaacgugcaccccaucaccaucgggaagugccccaaguacgucaagagcaccaagcugcggcucgccacgggccugcgcaacgugccguccauccagagccgggggcuguucggcgccaucgccggguucaucgagggcggcuggaccgggaugguggacggcugguacggguaccaccaccagaacgagcagggcuccggguacgccgcggaccucaagagcacccagaacgccuucgacaagaucaccaacaaggugaacuccgucaucgagaagaugaacacgcaguucaccgccgugggcaaggaguucaaccaccuggagaagcgcaucgagaaccugaacaagaaggucgacgacggcuuccucgacaucuggaccuacaacgccgagcugcuggugcuccuggagaacgagcggacccuggacuaccacgacagcaacgugaagaaccucuacgagaagguccgcucccagcugaagaacaacgccaaggagaucgggaacggcugcuucgaguucuaccacaagugcgacaacacgugcauggagagcgugaagaacgggaccuacgacuaccccaaguacuccgaggaggcgaagcugaaccgggaggagaucgacggcgugaagcucgagagcacccgcaucuaccagauccuggccaucuacuccaccgucgccagcagccuggugcucguggucucccugggggccaucagcuucuggaugugcuccaacggcagccugcagugccggaucugcaucuga

SEQ ID NO: 70733 - RNA, 1701 nt, Artificial Sequence
  derived and/or modified CDS sequence (opt1) from hemagglutinin__InfluenzaA__AEC46555
augaaggccauccuggugguccuccuguacaccuucgccaccgcgaacgccgacacgcugugcaucggcuaccacgccaacaacagcaccgacaccguggacaccgugcucgagaagaacgucacggugacccacuccgugaaccugcuggaggacaagcacaacgggaagcucugcaagcugcgcggcgucgcgccccugcaccucgggaagugcaacaucgccggcuggauccuggggaacccggagugcgagagccuguccaccgcgagcuccuggagcuacaucguggagaccuccagcuccgacaacggcacgugcuaccccggcgacuucaucgacuacgaggagcuccgggagcagcugagcuccgugagcuccuucgagcgcuucgagaucuuccccaagaccagcuccuggcccaaccacgacccgaacaagggggucaccgccgccugcccccacgccggcgccaagagcuucuacaagaaccugaucuggcucgugaagaaggggaacuccuaccccaagcugagcaccuccuacaucaacgacaagggcaagaaggugcugguccucugggggauccaccaccccagcacgagcgccgaccagcagucccuguaccagaacgccgacgccuacgccuucgugggcaccagccgguacuccaagaaguucaagccggagaucgcgauccgccccaaggugcgggaccaggagggccgcaugaacuacuacuggacccuggucgagcccggggacaagaucaccuucgaggccacgggcaaccucguggugccccgguacgccuucgccauggagcgcaacgaggggagcggcaucaucaucuccgacaccagcguccacgacugcaacacgaccugccagaccccgaagggcgccaucaacaccucccugcccuuccagaacgugcaccccaucaccaucgggaagugccccaaguacgucaagagcaccaagcugcggcucgcgacgggccugcgcaacgugccguccauccagagccgggggcuguucggcgccaucgccggguucaucgagggcggcuggaccgggaugguggacggcugguacggguaccaccaccagaacgagcagggcuccggguacgccgccgaccucaagagcacccagaacgcguucgacaagaucaccaacaaggugaacuccgucaucgagaagaugaacacgcaguucaccgccgugggcaaggaguucaaccaccuggagaagcgcaucgagaaccugaacaagaaggucgacgacggcuuccucgacaucuggaccuacaacgccgagcugcuggugcuccuggagaacgagcggacccuggacuaccacgacagcaacgugaagaaccucuacgagaagguccgcucccagcugaagaacaacgccaaggagaucgggaacggcugcuucgaguucuaccacaagugcgacaacacgugcauggagagcgugaagaacgggaccuacgacuaccccaaguacuccgaggaggccaagcugaaccgggaggagaucgacggcgugaagcucgagagcacccgcaucuaccagauccuggcgaucuacuccaccgucgccagcagccuggugcucguggucucccugggggccaucagcuucuggaugugcuccaacggcagccugcagugccggaucugcaucuga

SEQ ID NO: 70734 - RNA, 1701 nt, Artificial Sequence; identical to SEQ ID NO: 70732
  derived and/or modified CDS sequence (opt1) from hemagglutinin__InfluenzaA__AEC46557

SEQ ID NO: 70735 - RNA, 1701 nt, Artificial Sequence; identical to SEQ ID NO: 66680
  derived and/or modified CDS sequence (opt1) from hemagglutinin__InfluenzaA__AEC53259

SEQ ID NO: 70736 - RNA, 1701 nt, Artificial Sequence
  derived and/or modified CDS sequence (opt1) from hemagglutinin__InfluenzaA__AEC53269
augaaggccauccuggugguccuccuguacaccuucgccaccgcgaacgccgacacgcugugcaucggcuaccacgccaacaacagcaccgacaccguggacaccgugcucgagaagaacgucacggugacccacuccgugaaccugcuggaggacaagcacaacgggaagcucugcaagcugcgcggcgucgcgccccugcaccucgggaagugcaacaucgccggcuggauccuggggaacccggagugcgagagccuguccaccgccagcuccuggagcuacaucguggagaccuccagcuccgacaacggcacgugcuaccccggcgacuucaucgacuacgaggagcuccgggagcugcugagcuccgugagcuccuucgagcgcuucgagaucuuccccaagaccagcuccuggcccaaccacgacagcaacaagggggucaccgccgccugcccgcacgccggcgcgaaguccuucuacaagaaccucaucuggcuggugaagaaggggaacagcuaccccaagcuguccaagagcuacaucaacgacaagggcaaggaggugcucguccugugggggauccaccaccccagcaccuccgccgaccagcagagccuguaccagaacgccgacgccuacguguucgugggcuccagccgguacuccaagaaguucaagcccgagaucgccauccgcccgaagguccgggaccaggagggccgcaugaacuacuacuggacgcucguggagcccggggacaagaucaccuucgaggcgaccggcaaccugguggucccccgguacgccuucgccauggagcgcaacgccgggagcggcaucaucaucuccgacacccccgugcacgacugcaacacgaccugccagaccccgaagggcgccaucaacaccagccugcccuuccagaacauccaccccaucacgaucgggaagugccccaaguacgugaaguccaccaagcuccggcuggcgaccggccugcgcaacaucccgagcauccagucccggggccucuucggggccaucgccggguucaucgagggcggcuggaccgggauggucgacggcugguacggguaccaccaccagaacgagcagggcagcggguacgccgccgaccugaaguccacgcagaacgcgaucgacgagaucaccaacaaggugaacagcgugaucgagaagaugaacacccaguucaccgccgucggcaaggaguucaaccaccuggagaagcgcaucgagaaccucaacaagaagguggacgacggcuuccuggacaucuggacguacaacgccgagcugcucguccugcuggagaacgagcggacccucgacuaccacgacuccaacgugaagaaccuguacgagaaggugcgcagccagcugaagaacaacgccaaggagaucgggaacggcugcuucgaguucuaccacaagugcgacaacacgugcauggaguccgucaagaacgggaccuacgacuaccccaaguacagcgaggaggccaagcucaaccgggaggagaucgacggcgugaagcuggaguccacccgcaucuaccagauccuggcgaucuacagcaccguggccagcucccucguccugguggugagccugggggccaucuccuucuggaugugcagcaacggcucccuccagugccggaucugcaucuga

SEQ ID NO: 70737 - RNA, 1701 nt, Artificial Sequence; identical to SEQ ID NO: 67423
  derived and/or modified CDS sequence (opt1) from hemagglutinin__InfluenzaA__AEC53279

SEQ ID NO: 70738 - RNA, 1701 nt, Artificial Sequence; identical to SEQ ID NO: 66680
  derived and/or modified CDS sequence (opt1) from hemagglutinin__InfluenzaA__AEC53289

SEQ ID NO: 70739 - RNA, 1701 nt, Artificial Sequence; identical to SEQ ID NO: 66680
  derived and/or modified CDS sequence (opt1) from hemagglutinin__InfluenzaA__AEC53299

SEQ ID NO: 70740 - RNA, 1701 nt, Artificial Sequence; identical to SEQ ID NO: 66873
  derived and/or modified CDS sequence (opt1) from hemagglutinin__InfluenzaA__AEC53327

SEQ ID NO: 70741 - RNA, 1701 nt, Artificial Sequence
  derived and/or modified CDS sequence (opt1) from hemagglutinin__InfluenzaA__AEC53347
augaaggccauccuggugguccuccuguacaccuucgccaccgcgaacgccgacacgcugugcaucggcuaccacgccaacaacagcaccgacaccguggacaccgugcucgagaagaacgucacggugacccacuccgugaaccugcuggaggacaagcacaacgggaagcucugcaagcugcgcggcgucgcgccccugcaccucgggaagugcaacaucgccggcuggauccuggggaacccggagugcgagagccuguccaccgccagcuccuggagcuacaucguggagaccuccagcuccgacaacggcacgugcuaccccggcgacuucaucgacuacgaggagcuccgggagcagcugagcuccgugagcuccuucgagcgcuucgagaucuuccccaagaccagcuccuggcccaaccacgacagcaacaagggggucaccgccgccugcccgcacgccggcgcgaaguccuucuacaagaaccugaucuggcucgugaagaaggggaacagcuaccccaagcuguccaagagcuacaucaacgacaagggcaaggaggugcugguccucugggggauccaccaccccagcaccuccgccgaccagcagagccuguaccagaacgccgacgccuacguguucgugggcuccagccgguacuccaagaaguucaagcccgagaucgccauccgcccgaagguccgggaccaggagggccgcaugaacuacuacuggacgcugaucgagcccggggacaagaucaccuucgaggcgaccggcaaccucguggugccccgguacgccuucgccauggagcgcaacgccgggagcggcaucaucaucuccgacacccccguccacgacugcaacacgaccugccagaccccgaagggcgccaucaacaccagccugcccuuccagaacauccaccccaucacgaucgggaagugccccaaguacgugaaguccaccaagcugcggcucgcgaccggccugcgcaacgugccgagcauccagucccgggggcuguucggcgccaucgccggguucaucgagggcggcuggaccgggauggucgacggcugguacggguaccaccaccagaacgagcagggcagcggguacgccgccgaccucaaguccacgcagaacgcgaucgacgagaucaccaacaaggugaacagcgugaucgagaagaugaacacccaguucaccgccgucggcaaggaguucaaccaccuggagaagcgcaucgagaaccugaacaagaagguggacgacggcuuccucgacaucuggacguacaacgccgagcugcugguccuccuggagaacgagcggacccuggacuaccacgacuccaacgugaagaaccucuacgagaaggugcgcagccagcugaagaacaacgccaaggagaucgggaacggcugcuucgaguucuaccacaagugcgacaacacgugcauggaguccgucaagaacgggaccuacgacuaccccaaguacagcgaggaggccaagcugaaccgggaggagaucgacggcgugaagcucgaguccacccgcaucuaccagauccuggcgaucuacagcaccguggccagcucccugguccucguggugagccugggggccaucuccuucuggaugugcagcaacggcucccugcagugccggaucugcaucuga

SEQ ID NO: 70742 - RNA, 1701 nt, Artificial Sequence
  derived and/or modified CDS sequence (opt1) from hemagglutinin__InfluenzaA__AEC53404
augaaggccauccuggugguccuccuguacaccuucgccaccgcgaacgccgacacgcugugcaucggcuaccacgccaacaacagcaccgacaccguggacaccgugcucgagaagaacgucacggugacccacuccgugaacauccuggaggacaagcacaacgggaagcugugcaagcuccgcggcgucgcgccccugcaccuggggaagugcaacaucgccggcuggauccucgggaacccggagugcgagagccuguccaccgccagcuccuggagcuacaucguggagaccuccagcuccgacaacggcacgugcuaccccggcgacuucaucgacuacgaggagcugcgggagcagcucagcuccgugagcuccuucgagcgcuucgagaucuuccccaagaccagcuccuggcccaaccacgacagcaacaaggggaucaccgccgccugcccgcacgccggcgcgaaguccuucuacaagaaccugaucuggcuggucaagaaggggaacagcuaccccaagcucuccaagagcuacaucaacgacaagggcaaggaggugcuggugcugugggggauccaccaccccagcaccuccgccgaccagcagagccucuaccagaacgccgacgccuacgucuucgugggcuccagccgguacuccaagaaguucaagcccgagaucgccauccgcccgaaggugcgggaccaggagggccgcaugaacuacuacuggacgcuggucgagcccggggacaagaucaccuucgaggcgaccggcaaccugguggugccccgguacgccuucgccauggagcgcaacgccgggagcggcaucaucaucuccgacacccccguccacgacugcaacacgaccugccagaccccgaagggcgccaucaacaccagccuccccuuccagaacauccaccccaucacgaucgggaagugccccaaguacgugaaguccaccaagcugcggcuggcgaccggccuccgcaacgugccgagcauccagucccgggggcuguucggcgccaucgccggguucaucgagggcggcuggaccgggauggucgacggcugguacggguaccaccaccagaacgagcagggcagcggguacgccgccgaccugaaguccacgcagaacgcgaucgacgagaucaccaacaaggugaacagcgugaucgagaagaugaacacccaguucaccgccgucggcaaggaguucaaccaccucgagaagcgcaucgagaaccugaacaagaagguggacgacggcuuccuggacaucuggacguacaacgccgagcuccugguccugcucgagaacgagcggacccuggacuaccacgacuccaacgugaagaaccuguacgagaaggugcgcagccagcucaagaacaacgccaaggagaucgggaacggcugcuucgaguucuaccacaagugcgacaacacgugcauggaguccgucaagaacgggaccuacgacuaccccaaguacagcgaggaggccaagcugaaccgggaggagaucgacggcgugaagcuggaguccacccgcaucuaccagauccucgcgaucuacagcaccguggccagcucccugguccugguggugagccucggggccaucuccuucuggaugugcagcaacggcucccugcagugccggaucugcaucuga

SEQ ID NO: 70743 - RNA, 1701 nt, Artificial Sequence; identical to SEQ ID NO: 66680
  derived and/or modified CDS sequence (opt1) from hemagglutinin__InfluenzaA__AEC53414

SEQ ID NO: 70744 - RNA, 1701 nt, Artificial Sequence
  derived and/or modified CDS sequence (opt1) from hemagglutinin__InfluenzaA__AEE27177
augaagaccauccuggugguccuccuguacaccuucgccacggccaacgcggacacccugugcaucggcuaccacgccaacaacagcaccgacaccguggacacggugcucgagaagaacgucaccgugacccacuccgugaacauccuggaggacaagcacaacgggaagcugugcaagcuccgcggcgucgcgccccugcaccuggggaagugcaacaucgccggcuggauccucgggaacccggagugcgagagccuguccaccgccagcuccuggagcuacaucguggagacguccagcuccgacaacgggaccugcuaccccggcgacuucaucgacuacgaggagcugcgggagcagcucagcuccgugagcuccuucgagcgcuucgagaucuuccccaagaccagcuccuggcccaaccacgacagcaacaagggggucaccgccgccugcccgcacgccggcgccaaguccuucuacaagaaccugaucuggcuggugaagaaggggaacagcuaccccaagcucuccaagagcuacaucaacgacaagcggaaggaggugcugguccuguggggcauccaccaccccagcacguccgcggaccagcagagccucuaccagaacgccgacgccuacguguucgugggguccagccgcuacuccaagaaguucaagcccgagaucgccauccggccgaagguccgcgaccaggagggccggaugaacuacuacuggacccugguggagcccggcgacaagaucaccuucgaggccaccgggaaccugguggucccccgcuacgcguucgccauggagcggaacgccggcagcgggaucaucaucuccgacacgcccgugcacgacugcaacacgaccugccagaccccgaagggcgccaucaacaccagccuccccuuccagaacauccaccccaucaccaucggcaagugccccaaguacgugaaguccaccaagcugcgccuggccaccgggcuccggaacgucccgagcauccagucccgcggccuguucggggcgaucgccggcuucaucgagggcggcuggacgggcaugguggacgggugguacggcuaccaccaccagaacgagcaggggagcggcuacgccgccgaccugaaguccacccagaacgccaucgacgagaucaccaacaaggugaacagcgucaucgagaagaugaacacccaguucacggcgguggggaaggaguucaaccaccucgagaagcggaucgagaaccugaacaagaaggucgacgacggcuuccuggacaucuggaccuacaacgccgagcuccuggugcugcucgagaacgagcgcacccuggacuaccacgacuccaacgugaagaaccuguacgagaagguccggagccagcucaagaacaacgccaaggagaucggcaacgggugcuucgaguucuaccacaagugcgacaacacgugcauggaguccgugaagaacggcaccuacgacuaccccaaguacagcgaggaggccaagcugaaccgcgaggagaucgacggggugaagcuggaguccacccggaucuaccagauccucgccaucuacagcaccgucgcgagcucccuggugcugguggucagccucggcgccaucuccuucuggaugugcagcaacgggucccugcagugccgcaucugcaucuga

SEQ ID NO: 70745 - RNA, 1701 nt, Artificial Sequence; identical to SEQ ID NO: 68465
  derived and/or modified CDS sequence (opt1) from hemagglutinin__InfluenzaA__AEE27187

SEQ ID NO: 70746 - RNA, 1701 nt, Artificial Sequence
  derived and/or modified CDS sequence (opt1) from hemagglutinin__InfluenzaA__AEE27207
augaaggccauccuggugguccuccuguacaccuucgccaccgcgaacgccgacacgcugugcaucggcuaccacgccaacaacagcaccgacaccguggacaccgugcucgagaagaacgucacggugacccacuccgugaaccugcuggaggacaagcacaacgggaagcucugcaagcugcgcggcgucgcgccccugcaccucgggaagugcaacaucgccggcuggauccuggggaacccggagugcgagagccuguccaccgccagcuccuggagcuacaucguggagaccuccagcuccgacaacggcacgugcuaccccggcgacuucaucgacuacgaggagcuccgggagcagcugagcuccgugagcuccuucgagcgcuucgagaucuuccccaagaccagcuccuggcccaaccacgacagcaacaagggggucaccgccgccugcccgcacgccggcgcgaaguccuucuacaagaaccugaucuggcucgugaagaaggggaacagcuaccccaagcuguccaagagcuacaucaacgacaagggcaaggaggugcugguccucugggggauccaccaccccagcaccuccgccgaccagcagagccuguaccagaacgccgacgccuacguguucgugggcacgucccgguacagcaagaaguucaagcccgagaucgccauccgcccgaagguccgggaccaggagggccgcaugaacuacuacuggacccugguggagcccggggacaagaucaccuucgaggcgaccggcaaccucguggucccccgguacgccuucgccauggagcgcaacgccggguccggcaucaucaucagcgacacgcccgugcacgacugcaacacgaccugccagaccccgaagggcgccaucaacaccucccugcccuuccagaacauccaccccaucaccaucgggaagugccccaaguacgucaagagcaccaagcugcggcucgcgaccggccugcgcaacgugccguccauccagagccgggggcuguucggcgccaucgccggguucaucgagggcggcuggacggggaugguggacggcugguacggguaccaccaccagaacgagcagggcuccggguacgccgccgaccucaagagcacccagaacgcgaucgacgagaucaccaacaaggugaacuccgucaucgagaagaugaacacccaguucacggccgugggcaaggaguucaaccaccuggagaagcgcaucgagaaccugaacaagaaggucgacgacggcuuccucgacaucuggaccuacaacgccgagcugcuggugcuccuggagaacgagcggacccuggacuaccacgacagcaaggugaagaaccucuacgagaagguccgcucccagcugaagaacaacgccaaggagaucgggaacggcugcuucgaguucuaccacaagugcgacaacacgugcauggagagcgugaagaacgggaccuacgacuaccccaaguacuccgaggaggccaagcugaaccgggaggagaucgacggcgugaagcucgagagcacccgcaucuaccagauccuggcgaucuacuccaccgucgccagcagccuggugcucguggucucccugggggccaucagcuucuggaugugcuccaacggcagccugcagugccggaucugcaucuga

SEQ ID NO: 70747 - RNA, 1701 nt, Artificial Sequence
  derived and/or modified CDS sequence (opt1) from hemagglutinin__InfluenzaA__AEG64752
augaaggccauccuggugguccuccuguacaccuucgccaccgcgaacgccgacacgcugugcaucggcuaccacgccaacaacagcaccgacaccguggacaccgugcucgagaagaacgucacggugacccacuccgugaaccugcuggaggacaagcacaacgggaagcucugcaagcugcgcggcgucgcgccccugcaccucgggaagugcaacaucgccggcuggauccuggggaacccggagugcgagagccuguccaccgccagcuccuggagcuacaucguggagaccuccagcuccgacaacggcacgugcuaccccggcgacuucaucgacuacgaggagcuccgggagcagcugagcuccgugagcuccuucgagcgcuucgagaucuuccccaagaccagcuccuggcccaaccacgacagcaacaagggggucaccgccgccugcccgcacgccggcgcgaaguccuucuacaagaaccugaucuggcucgugaagaaggggaacagcuaccccaagcuguccaagagcuacaucaacgacaagggcaaggaggugcugguccucugggggauccaccaccccagcaccuccgccgaccagcagagccuguaccagaacgccgacgccuacguguucgugggcuccagccgguacuccaagaaguucaagcccgagaucgccauccgcccgaagguccgggaccaggagggccgcaugaacuacuacuggacgcugguggagcccggggacaagaucaccuucgaggcgaccggcaaccucguggucccccgguacgccuucgccauggagcgcaacgccgggagcggcaucaucaucuccgacacccccgugcacgacugcaacacgaccugccagaccccgaagggcgccaucaacaccagccugcccuuccagaacauccaccccaucacgaucgggaagugccccaaguacgugcgguccaccaagcugcgccucgcgaccggccugcggaacgucccgagcauccagucccgcgggcuguucggcgccaucgccggguucaucgagggcggcuggaccgggaugguggacggcugguacggguaccaccaccagaacgagcagggcagcggguacgccgccgaccucaaguccacgcagaacgcgaucgacgagaucaccaacaaggugaacagcgucaucgagaagaugaacacccaguucaccgccgugggcaaggaguucaaccaccuggagaagcggaucgagaaccugaacaagaaggucgacgacggcuuccucgacaucuggacguacaacgccgagcugcuggugcuccuggagaacgagcgcacccuggacuaccacgacuccaacgugaagaaccucuacgagaagguccggcgccagcugaagaacaacgccaaggagaucgggaacggcugcuucgaguucuaccacaagugcgacaacacgugcauggagagcgugaagaacgggaccuacgacuaccccaaguacuccgaggaggccaagcugaaccgggaggagaucgacggcgugaagcucgagagcacccgcaucuaccagauccuggcgaucuacuccaccgucgccagcagccuggugcucguggucucccugggggccaucagcuucuggaugugcuccaacggcagccugcagugccggaucugcaucuga

SEQ ID NO: 70748 - RNA, 1701 nt, Artificial Sequence
  derived and/or modified CDS sequence (opt1) from hemagglutinin__InfluenzaA__AEG64762
augaaggcccgccugcucgugcugcugugcgcccucgcggccaccgacgccgacaccaucugcaucggcuaccacgccaacaacagcacggacaccgucgacacccugcuggagaagaacgugaccgugacgcacuccgucaaccuccuggaggacagccacaacgggaagcugugcaagcucaagggcaucgcgccccugcagcuggggaagugcaacaucgccggcuggcuccuggggaacccggagugcgacucccugcuccccgcccggagcugguccuacaucguggagacccccaacagcgagaacggcgccugcuaccccggcgacuucaucgacuacgaggagcugcgcgagcagcuguccaccgugagcucccucgagcgguucgagaucuucccgaaggagagcuccuggcccaaccacaacacccugaagggggucacggugagcugcucccacggcggcaagagcuccuucuaccgcaaccugcucuggcugaccaagaccggggacagcuaccccaagcugaacaacuccuacgugaacaacaaggggaaggagguccucgugcuguggggcgugcaccaccccagcuccagcaacgagcagcagagccuguaccacaacgucaacgccuacguguccguggucagcuccaacuacaaccggcgcuucaccccggagaucgcggcccggcccaaggugcgcgaccagcccggccggaugaacuacuacuggacgcuccuggagcccggggacaccauccuguucgaggccaccggcaaccucaucgccccgugguacgccuucgcgcugagccgcggguucggcuccggcaucaucaccagcaacgccuccaugcacgagugcaacacgaagugccagacgccccagggggccaucaacagcucccugcccuuccagaacauccaccccgugaccaucggcgagugcccgaaguacguccggagcaccaagcuccgcauggugaccgggcugcggaacauccccuccauccagagccgcggccuguucggggccaucgccggcuucaucgagggcggguggaccggcaugaucgacgggugguacggcuaccaccaccagaacgagcagggguccggcuacgcggccgaccagaaguccacccagaacgccaucaacggcaucaccaacaaggugaacagcgucaucgagaagaugaacacgcaguucaccgccguggggaaggaguucaacaaccucgagaagcggauggagaaccugaacaagaagguggacgacggcuuccuggacaucuggaccuacaacgccgagcuccugguccugcucgagaacgagcgcacccuggacuuccacgaccugaacgugaagaaccucuacgagaaggucaagagccagcugaagaacaacgcgaaggagaucgggaacggcugcuucgaguucuaccacaagugcgacaacgagugcauggaguccgugcgggacgggacguacgacuaccccaaguacagcgaggaguccaagcugaaccgcgagaagaucgacggcgugaagcucgagagcaugggcgucuaccagauccuggccaucuacagcaccguggccuccagccuggugcugcucgucucccugggggccaucagcuucuggaugugcuccaacggcagccugcagugccggaucugcaucuga

SEQ ID NO: 70749 - RNA, 1701 nt, Artificial Sequence; identical to SEQ ID NO: 66693
  derived and/or modified CDS sequence (opt1) from hemagglutinin__InfluenzaA__AEG64784

SEQ ID NO: 70750 - RNA, 1701 nt, Artificial Sequence
  derived and/or modified CDS sequence (opt1) from hemagglutinin__InfluenzaA__AEG64834
augaagaccaucaucgcccugagcuacauccucugccugguguucgcccagaagcugcccggcaacgacaacuccaccgcgacgcucugccuggggcaccacgccgucccgaacggcaccaucgugaagaccaucaccaacgaccagaucgaggugacgaacgccaccgagcugguccagaacagcuccgccggggagaucugcgacagcccccaccagauccucgacggcgagaacugcacccugaucgacgcccugcucggggacccccagugcgacggcuuccagaacaagaagugggaccuguucguggagcgcucccgggcguacagcaacugcuaccccuacgacgugccggacuacgccucccugcgcagccucgucgccuccagcggcacccuggaguucaacaacgaguccuucaacuggacgggggugacccagaacggcaccagcuccgccugcauccggcgcagcaacaacuccuucuucagccggcugaacuggcucacccaccugaacuucaaguaccccgcgcugaacgugacgaugcccaacaacgagcaguucgacaagcucuacaucuggggcguccaccaccccgggaccgacaaggaccagaucuuccuguacgcccaggccuccgggcgcaucaccgugagcaccaagcggucccagcaggccgugaucccgaacaucggcagccgcccccggguccgcaacauccccagccggaucuccaucuacuggacgaucgugaagcccggcgacauccugcucaucaacagcaccgggaaccugaucgccccgcgcggcuacuucaagauccgguccggcaagagcuccaucaugcgcagcgacgcgcccaucgggaagugcaacuccgagugcaucacccccaacggcagcauccccaacgacaagccguuccagaacgugaaccggaucaccuacggggccugcccccgcuacgucaagcaguccacgcugaagcucgccaccggcaugcggaacgugcccgagaagcagacccgcgggaucuucggcgccaucgccggguucaucgagaacggcugggagggcaugguggacgggugguacggcuuccggcaccagaacagcgaggggcgcggccaggcggccgaccugaaguccacccaggccgccaucgaccagaucaacgggaagcugaaccggcucaucggcaagacgaacgagaaguuccaccagaucgagaaggaguucagcgaggucgagggccgcauccaggaccuggagaaguacguggaggacaccaagaucgaccugugguccuacaacgccgagcuccugguggcgcuggagaaccagcacaccaucgaccucaccgacagcgagaugaacaagcuguucgagaagacgaagaagcagcugcgcgagaacgccgaggacauggggaacggcugcuucaagaucuaccacaagugcgacaacgccugcaucggguccauccggaacggcaccuacgaccacgacgucuaccgcgacgaggcccucaacaaccgguuccagaucaaggggguggagcucaagagcggcuacaaggacuggauccuguggaucuccuucgccaucagcugcuuccugcugugcguggcgcugcucggcuucaucaugugggccugccagaaggggaacauccgcugcaacaucugcaucuga

SEQ ID NO: 70751 - RNA, 1701 nt, Artificial Sequence
  derived and/or modified CDS sequence (opt1) from hemagglutinin__InfluenzaA__AEG64845
augaagaccaucaucgcccugagcuacauccucugccugguguucgcccagaagcugcccggcaacgacaacuccaccgcgacgcucugccuggggcaccacgccgucccgaacggcaccaucgugaagaccaucaccaacgaccagaucgaggugacgaacgccaccgagcugguccagaacagcuccaccggggagaucugcgacagcccccaccagauccucgacggcgagaacugcacccugaucgacgcccugcucggggacccccagugcgacggcuuccagaacaagaagugggaccuguucguggagcgcuccaaggccuacagcaacugcuaccccuacgacgugccggacuacgcgucccugcggagccucgucgccuccagcggcacgcuggaguucaacaacgaguccuucaacuggaccggggugacccagaacggcaccagcuccgccugcauccgccggagcaacaacuccuucuucagccgccugaacuggcucacgcaccugaacuucaaguaccccgcccugaacgugaccaugcccaacaacgagcaguucgacaagcucuacaucuggggcguccaccaccccgggaccgacaaggaccagaucuuccuguacgcgcaggccuccgggcggaucaccgugagcacgaagcgcucccagcagaccgugaucccgaacaucggcagccggccccgcguccggaacauccccagccgcaucuccaucuacuggaccaucgugaagcccggcgacauccugcucaucaacagcaccgggaaccugaucgccccgcggggcuacuucaagauccgcuccggcaagagcuccaucaugcggagcgacgcccccaucgggaagugcaacuccgagugcaucacgcccaacggcagcauccccaacgacaagccguuccagaacgugaaccgcaucaccuacggggccugcccccgguacgucaagcagaacacccugaagcucgcgaccggcaugcgcaacgugcccgagaagcagacgcgggggaucuucggcgccaucgccggguucaucgagaacggcugggagggcaugguggacgggugguacggcuuccgccaccagaacuccgaggggcggggccaggccgccgaccucaagagcacccaggcggccaucgaccagaucaacgggaagcugaaccgccugaucggcaagaccaacgagaaguuccaccagaucgagaaggaguucuccgaggucgagggccggauccaggaccuggagaaguacguggaggacaccaagaucgaccuguggagcuacaacgccgagcuccugguggcccuggagaaccagcacacgaucgaccucaccgacuccgagaugaacaagcuguucgagaagaccaagaagcagcugcgcgagaacgccgaggacauggggaacggcugcuucaagaucuaccacaagugcgacaacgcgugcaucgggagcauccgcaacggcaccuacgaccacgacgucuaccgggacgaggcccucaacaaccgcuuccagaucaaggggguggagcugaaguccggcuacaaggacuggauccuguggaucagcuucgccaucuccugcuuccuccugugcguggcccugcucggcuucaucaugugggccugccagaaggggaacauccggugcaacaucugcaucuga

SEQ ID NO: 70752 - RNA, 1701 nt, Artificial Sequence
  derived and/or modified CDS sequence (opt1) from hemagglutinin__InfluenzaA__AEG64856
augaagaccaucaucgcccugagcuacauccucugccugguguucgcccagaagcugcccggcaacgacaacuccaccgcgacgcucugccuggggcaccacgccgucccgaacggcacccuggugaagaccaucaccaacgaccagaucgaggugacgaacgccaccgagcucguccagagcuccagcaccgggcgcaucugcgacagcccccaccagauccuggacggcgagaacugcacccugaucgacgcccuccugggggacccccacugcgacggcuuccagaacaaggagugggaccuguucguggagcggagcaaggccuacuccaacugcuaccccuacgacgugccggacuacgcgagccuccgcucccuggucgccagcuccggcacgcuggaguucaacaacgagagcuucaacuggaccgggguggcccagaacggcaccuccagcgccugcaagcggcgcuccaacaagagcuucuucucccggcucaacuggcugcaccagcugaaguacaaguaccccgcgcucaacgugaccaugcccaacaacgagaaguucgacaagcuguacaucuggggcguccaccaccccagcacggacuccgaccagaucagccuguacgcccaggccagcgggcgcgugaccguguccaccaagcggagccagcagaccgucaucccgaacaucgggucccgccccugggugcggggcgugagcucccgcaucagcaucuacuggacgaucgucaagcccggcgacauccuccugaucaacuccaccgggaaccugaucgcgccccggggcuacuucaagauccgcagcgggaaguccagcgugaugcgguccgacgccagcaucggcaagugcaacuccgagugcaucaccccgaacggcagcauccccaacgacaagcccuuccagaacgugaaccgcaucaccuacggggccugcccccgguacgucaagcagaacacgcucaagcuggccaccggcaugcgcaacgugccggagaagcagacccgggggaucuucggcgccaucgccggguucaucgagaacggcugggagggcaugguggacgggugguacggcuuccgccaccagaacuccgaggggaccggccaggccgcggaccugaaguccacgcaggccgccaucaaccagaucaacgggaagcucaaccggcugaucgagaagaccaacgagaaguuccaccagaucgagaaggaguucuccgaggucgagggccgcauccaggaccuggagaaguacguggaggacaccaagaucgaccucuggagcuacaacgccgagcugcugguggcccucgagaaccagcacaccaucgaccugacggacuccgagaugaacaagcuguucgagcggaccaagaagcagcuccgcgagaacgcggaggacaugggcaacgggugcuucaagaucuaccacaagugcgacaacgccugcaucgagagcauccgcaacggcaccuacgaccacgacgucuaccgggacgaggcccugaacaaccgcuuccagaucaaggggguggagcucaagagcggcuacaaggacuggauccuguggaucuccuucgccaucagcugcuuccugcugugcgucgugcuccugggguucaucaugugggccugccagaagggcaacauccggugcaacaucugcaucuga

SEQ ID NO: 70753 - RNA, 1701 nt, Artificial Sequence; identical to SEQ ID NO: 64096
  derived and/or modified CDS sequence (opt1) from hemagglutinin__InfluenzaA__AEG64867

SEQ ID NO: 70754 - RNA, 1701 nt, Artificial Sequence
  derived and/or modified CDS sequence (opt1) from hemagglutinin__InfluenzaA__AEG64878
augaagaccaucaucgcccugagcuacauccucugccugguguucgcccagaagcugcccgucaacgacaacuccaccgcgacgcucugccugggccaccacgccgugccgaacgggacccuggugaagaccaucaccaacgaccacaucgaggucacgaacgccaccgagcucgugcagagcuccagcaccggccgcaucugcgacagcccccaccagauccuggacggggagaacugcacccugaucgacgcccuccugggcgacccccacugcgacggguuccagaacaaggagugggaccuguucguggagcggagcacggccuacuccaacugcuaccccuacgacgucccggacuacgcgagccuccgcucccugguggccagcuccggcacccuggaguucaacaacgagagcuucaacuggaccggcguggcccagaacgggaccuccagcgccugcaagcggcgcuccaucaagagcuucuucucccggcucaacuggcugcaccagcugaaguacaaguaccccgcgcucaacgucacgaugcccaacaacgagaaguucgacaagcuguacaucuggggcgugcaccaccccagcaccgacuccgaccagaucagccuguacgcccaggccagcgggcgcgugaccgucuccaccaagcggagccagcagacggugaucccgaacaucggcucccgccccugggugcgcggggucagcucccggaucagcaucuacuggaccaucgugaagcccggcgacauccuccugaucaacuccaccggcaaccugaucgcgccccggggguacuucaagauccgcagcggcaaguccagcaucaugcgguccaacgccccgaucgggaagugcaacagcgagugcaucacccccaacggcuccauccccaacgacaagcccuuccagaacgugaaccgcaucacguacggcgccugcccgcgguacgucaagcagaacacccucaagcuggccaccgggaugcgcaacgugcccgagaagcagacccggggcaucuucggggccaucgccggcuucaucgagaacgggugggagggcaugguggacggcugguacggguuccgccaccagaacagcgagggcaucgggcaggccgcggaccugaaguccacgcaggccgccaucaaccagaucaacggcaagcucaaccggcugaucgagaagaccaacgagaaguuccaccagaucgagaaggaguucagcgaggucgaggggcgcauccaggaccuggagaaguacguggaggacaccaagaucgaccucugguccuacaacgccgagcugcugguggcccucgagaaccagcacaccaucgaccugacggacagcgagaugaacaagcuguucgagcggacccgcaagcagcuccgcgagaacgcggaggacaugggcaacggcugcuucaagaucuaccacaagugcgacaacgccugcaucggguccauccggaacggcaccuacgaccacgacgucuaccgcgacgaggcccugaacaaccgguuccagaucaaggggguggagcugaaguccggcuacaaggacuggauccucuggaucagcuucgccaucuccugcuuccugcugugcgucgugcuccugggguucaucaugugggccugccagaagggcaacauccgcugcaacaucugcaucuga

SEQ ID NO: 70755 - RNA, 1701 nt, Artificial Sequence
  derived and/or modified CDS sequence (opt1) from hemagglutinin__InfluenzaA__AEG64889
augaagaccaucaucgcccugagcuacauccucugccugguguucgcccagaagcugcccgucaacgacaacuccaccgcgacgcucugccugggccaccacgccgugccgaacgggacccuggugaagaccaucaccaacgaccacaucgaggucacgaacgccaccgagcucgugcagagcuccagcaccggccgcaucugcgacagcccccaccagauccuggacggggagaacugcacccugaucgacgcccuccugggcgacccccacugcgacggguuccagaacaaggagugggaccuguucguggagcggagcacggccuacuccaacugcuaccccuacgacgucccggacuacgcgagccuccgcucccuguucgccagcuccggcacccuggaguucaacaacgagagcuucaacuggaccggcguggcccagaacgggaccuccagcgccugcaagcggcgcuccaucaagagcuucuucucccggcucaacuggcugcaccagcugaaguacaaguaccccgcgcucaacgugacgaugcccaacaacgagaaguucgacaagcuguacaucuggggcguccaccaccccagcaccgacuccgaccagaucagccuguacgcccaggccagcgggcgcgugaccguguccaccaagcggagccagcagacggucaucccgaacaucggcucccgccccugggugcgcggggugagcucccggaucagcaucuacuggaccaucgucaagcccggcgacauccuccugaucaacuccaccggcaaccugaucgcgccccggggguacuucaagauccgcagcggcaaguccagcaucaugcgguccaacgccccgaucgggaagugcaacagcgagugcaucacccccaacggcuccauccccaacgacaagcccuuccagaacgugaaccgcaucacguacggcgccugcccgcgguacgugaagcagaacacccucaagcuggccaccgggaugcgcaacguccccgagaagcagacccggggcaucuucggggccaucgccggcuucaucgagaacgggugggagggcaugguggacggcugguacggguuccgccaccagaacagcgagggcacggggcaggccgcggaccugaaguccacccaggccgccaucaaccagaucaacggcaagcucaaccggcugaucgagaagaccaacgagaaguuccaccagaucgagaaggaguucagcgagguggaggggcgcauccaggaccuggagaaguacgucgaggacaccaagaucgaccucugguccuacaacgccgagcugcugguggcccucgagaaccagcacacgaucgaccugaccgacagcgagaugaacaagcuguucgagaagacccggaagcagcuccgcgagaacgcggaggacaugggcaacggcugcuucaagaucuaccacaagugcgacaacgccugcaucggguccauccgcaacggcaccuacgaccacgacguguaccgggacgaggcccugaacaaccgcuuccagaucaagggggucgagcugaaguccggcuacaaggacuggauccucuggaucagcuucgccaucuccugcuuccugcugugcgugguccuccugggguucaucaugugggccugccagaagggcaacauccggugcaacaucugcaucuga

SEQ ID NO: 70756 - RNA, 1701 nt, Artificial Sequence; identical to SEQ ID NO: 64056
  derived and/or modified CDS sequence (opt1) from hemagglutinin__InfluenzaA__AEG64911

SEQ ID NO: 70757 - RNA, 1701 nt, Artificial Sequence; identical to SEQ ID NO: 64056
  derived and/or modified CDS sequence (opt1) from hemagglutinin__InfluenzaA__AEG64922

SEQ ID NO: 70758 - RNA, 1701 nt, Artificial Sequence; identical to SEQ ID NO: 64056
  derived and/or modified CDS sequence (opt1) from hemagglutinin__InfluenzaA__AEG64933

SEQ ID NO: 70759 - RNA, 1701 nt, Artificial Sequence; identical to SEQ ID NO: 64142
  derived and/or modified CDS sequence (opt1) from hemagglutinin__InfluenzaA__AEG64944

SEQ ID NO: 70760 - RNA, 1701 nt, Artificial Sequence; identical to SEQ ID NO: 64056
  derived and/or modified CDS sequence (opt1) from hemagglutinin__InfluenzaA__AEG64955

SEQ ID NO: 70761 - RNA, 1701 nt, Artificial Sequence; identical to SEQ ID NO: 64056
  derived and/or modified CDS sequence (opt1) from hemagglutinin__InfluenzaA__AEG64966

SEQ ID NO: 70762 - RNA, 1701 nt, Artificial Sequence
  derived and/or modified CDS sequence (opt1) from hemagglutinin__InfluenzaA__AEG64977
augaagaccaucaucgcccugagcuacauccucugccugguguucgcccagaagcugcccgagaacgacaacuccaccgcgacgcucugccugggccaccacgccgucccgaacgggaccaucgugaagaccaucaccaacgaccagaucgaggugacgaacgccaccgagcugguccagagcuccagcaccggcgggaucugcgacagcccccaccagauccucgacggcgagaacugcacccugaucgacgcccugcucggggacccccagugcgacggcuuccagaacaagaagugggaccuguucguggagcgcagcaaggccuacuccaacugcuaccccuacgacgugccggacuacgcgagccugcggucccucgucgccagcuccggcacgcuggaguucaacaacgagagcuucgacuggaccggggugacccagaacggcaccuccagcgccugcaagcgccgguccaacaagagcuucuucucccgccugaacuggcucacgcaccugaaguacaaguaccccgcccugaacgugaccaugcccaacaacgagaaguucgacaagcucuacaucuggggcguccaccaccccgggaccgacagcgaccagaucucccuguacgcgcaggccagcgggcggaucaccgugagcacgaagcgcucccagcagaccgugaucccgaacaucggcagccggccccgcguccgggacguguccagccgcaucuccaucuacuggaccaucgugaagcccggcgacauccugcucaucaacagcaccgggaaccugaucgcgccccggggcuacuucaagauccgcuccgggaaguccuccaucaugcggagcgacgccccgaucgacaagugcaacuccgagugcaucacgcccaacggcagcauccccaacgacaagcccuuccagaacgucaaccgcaucaccuacggcgccugcccgcgguacgugaagcagaacacccugaagcucgccaccgggaugcgcaacgugcccgagaagcagacgcggggcaucuucggggccaucgccggcuucaucgagaacgggugggagggcauggucgacggcugguacggguuccgccaccagaacuccgagggcaccgggcaggccgccgaccucaagagcacccaggcggccaucaaccagaucaacggcaagcugaaccggcugaucgggaagaccaacgagaaguuccaccagaucgagaaggaguucuccgagguggagggccgcauccaggaccuggagaaguacguggaggacacgaagaucgaccuguggagcuacaacgccgagcuccuggucgcccuggagaaccagcacaccaucgaccucaccgacuccgagaugaacaagcuguucgagcggaccaagaagcagcugcgcgagaacgccgaggacaugggcaacgggugcuucaagaucuaccacaagugcgacaacgcgugcaucggcagcauccgcaacgggacguacgaccacgacguguaccgggacgaggcccucaacaaccgcuuccagaucaagggcguggagcugaaguccggguacaaggacuggauccuguggaucagcuucgccaucagcugcuuccuccugugcgucgcccugcucggcuucaucaugugggccugccagaagggcaacauccggugcaacaucugcaucuga

SEQ ID NO: 70763 - RNA, 1701 nt, Artificial Sequence
  derived and/or modified CDS sequence (opt1) from hemagglutinin__InfluenzaA__AEG64988
augaagaccaucaucgcccugagcuacauccucugccugguguucgcccagaagcugcccggcaacgacaacuccaccgcgacgcucugccuggggcaccacgccgucccgaacggcaccaucgugaagaccaucaccaacgaccagaucgaggugacgaacgccaccgagcugguccagagcuccagcaccggggagaucugcgacaugccccaccagauccucgacggcgagaacugcacccugaucgacgcccugcucggggacccccagugcgacggcuuccagaacaagaagugggaccuguucguggagcgcuccaaggccuacagcaacugcuaccccuacgacgugccggacuacgcgucccugcggagccucgucgccuccagcggcacgcuggaguucaacaacgaguccuucaacuggaccggggugacccagaacggcaccagcuccgccugcaagcgccggagcaacaacuccuucuucagccgccugaacuggcucacgcaccugaaguucaaguaccccgcccugaacgugaccaugcccaacaacgagaaguucgacaagcucuacaucuggggcguccaccaccccgggaccgacaacgaccagaucuuccuguacgcgcaggccuccgggcggaucaccgugagcacgaagcgcucccagcagaccgugaucccgaacaucggcagccggccccgcguccggaacauccccagccgcaucuccaucuacuggaccaucgugaagcccggcgacauccugcucaucaacagcaccgggaaccugaucgccccgcggggcuacuucaagauccgcuccggcaagagcuccaucaugcggagcgacgcccccaucgggaagugcaacuccgagugcaucacgcccaacggcagcauccccaacgacaagccguuccagaacgugaaccgcaucaccuacggggccugcccccgguacgucaagcagaacacccugaagcucgcgaccggcaugcgcaacgugcccgagaagcagacgcgggggaucuucggcgccaucgccggguucaucgagaacggcugggagggcaugguggacgggugguacggcuuccgccaccagaacuccgaggggaucggccaggccgccgaccucaagagcacccaggcggccaucaaccagaucaacgggaagcugaaccggcugaucggcaagaccaacgagaaguuccaccagaucgagaaggaguucuccgaggucgagggccgcauccaggaccuggagaaguacguggaggacaccaagaucgaccuguggagcuacaacgccgagcuccugguggcccuggagaaccagcacacgaucgaccucaccgacuccgagaugaacaagcuguucgagcggaccaagaagcagcugcgcgagaacgccgaggacauggggaacggcugcuucaagaucuaccacaagugcgacaacgcgugcaucgggagcauccgcaacggcaccuacgaccacgacgucuaccgggacgaggcccucaacaaccgcuuccagaucaaggggguggagcugaaguccggcuacaaggacuggauccuguggaucagcuucgccaucuccugcuuccuccugugcgugguccugcucggcuucaucaugugggccugccagaaggggaacauccggugcaacaucugcaucuga

SEQ ID NO: 70764 - RNA, 1701 nt, Artificial Sequence
  derived and/or modified CDS sequence (opt1) from hemagglutinin__InfluenzaA__AEG64999
augaagaccaucaucgcccugagcuacauccucugccugguguucgcccagaagcugcccggcaacgacaacuccaccgcgacgcucugccuggggcaccacgccgucccgaacggcaccaucgugaagaccaucaccaacgaccagaucgaggugacgaacgccaccgagcugguccagaacagcuccaccgggggcaucugcgacagcccccaccagauccucgacggggagaacugcacccugaucgacgcccugcucggcgacccccagugcgacggcuuccagaacaagaagugggaccuguucguggagcgcuccaaggccuacagcaacugcuaccccuacgacgugccggacuacgucucccugcggagccucguggcguccagcgggacgcuggaguucaacaacgaguccuucaacuggaccggcgugacccagaacgggaccagcuccgccugcaagcgccggagcaacaacuccuucuucagccgccugaacuggcucacgcaccugaaguucaaguaccccgcccugaacgucaccaugcccaacaacgagaaguucgacaagcucuacaucuggggcgugcaccaccccgggaccgacaacgaccagaucucccuguacgcccaggcgagcggccggaucaccguguccacgaagcgcagccagcagaccgucaucccgaacaucggcagccggccccgcgugcgggacauccccucccgcaucagcaucuacuggaccaucgugaagcccggggacauccugcucaucaacuccaccggcaaccugaucgccccgcggggguacuucaagauccgcagcggcaaguccagcaucaugcgguccgacgcccccaucggcaagugcaacagcgagugcaucacgcccaacggguccauccccaacgacaagccguuccagaacgucaaccgcaucaccuacggcgccugcccccgguacgugaagcagaacacccugaagcucgccaccgggaugcgcaacgugcccgagaagcagacgcggggcaucuucggggcgaucgccggcuucaucgagaacggcugggaggggauggucgacggcugguacggguuccgccaccagaacagcgagggcaucgggcaggccgccgaccugaaguccacccaggccgcgaucaaccagaucaacggcaagcugaaccggcucaucggcaagaccaacgagaaguuccaccagaucgagaaggaguucagcgagguggaggggcgcauccaggaccuggagaaguacguggaggacaccaagaucgaccugugguccuacaacgccgagcuccuggucgcccuggagaaccagcacacgaucgaccucaccgacagcgagaugaacaagcuguucgagcggaccaagaagcagcugcgcgagaacgccgaggacaugggcaacgggugcuucaagaucuaccacaagugcgacaacgccugcaucggcuccauccgcaacgggaccuacgaccacgacguguaccgggacgaggcgcucaacaaccgcuuccagaucaagggcguggagcucaagagcggcuacaaggacuggauccuguggaucuccuucgccaucagcugcuuccugcugugcgucgcccugcucggguucaucaugugggccugccagaagggcaacauccggugcaacaucugcaucuga

SEQ ID NO: 70765 - RNA, 1701 nt, Artificial Sequence; identical to SEQ ID NO: 64279
  derived and/or modified CDS sequence (opt1) from hemagglutinin__InfluenzaA__AEG65010

SEQ ID NO: 70766 - RNA, 1701 nt, Artificial Sequence
  derived and/or modified CDS sequence (opt1) from hemagglutinin__InfluenzaA__AEG65021
augaagaccaucaucgcccugagcuacauccucugccugguguucgcccagaagcugcccggcaacgacaacuccaccgcgacgcucugccuggggcaccacgccgucccgaacggcaccaucgugaagaccaucaccaacgaccagaucgaggugacgaacgccaccgagcugguccagagcuccagcaccgggggcaucugcgacagcccccaccagauccucgacggggagaacugcacccugaucgacgcccugcucggcgacccccagugcgacggcuuccagaacaagaagugggaccuguucguggagcgcagcaaggccuacuccaacugcuaccccuacgacgugccggacuacgucagccugcggucccucguggcgagcuccgggacgcuggaguucaacaacgagagcuucaacuggaccggcgugacccagaacgggaccuccagcgccugcaagcgccgguccaacaacagcuucuucucccgccugaacuggcucacgcaccugaaguucaaguaccccgcccugaacgucaccaugcccaacaccgagaaguucgacaagcucuacaucuggggcgugcaccaccccgggaccgacaacgaccagaucagccuguacgcccaggcguccggccggaucacggugagcaccaagcgcagccagcagaccgucaucccgaacaucggcucccggccccgcgugcgggacauccccagccgcaucuccaucuacuggaccaucgugaagcccggggacauccugcucaucaacagcacgggcaaccugaucgccccgcggggguacuucaagauccgcuccggcaagagcuccaucaugcggagcgacgcccccaucggcaagugcaacuccgagugcaucacccccaacgggagcauccccaacgacaagccguuccagaacgucaaccgcaucaccuacggcgccugcccccgguacgugaagcagaacacccugaagcucgccacggggaugcgcaacgugcccgagaagcagacccggggcaucuucggggcgaucgccggcuucaucgagaacggcugggaggggauggucgacggcugguacggguuccgccaccagaacuccgagggcaucgggcaggccgccgaccugaaguccacccaggccgcgaucaaccagaucaacggcaagcugaaccggcucaucggcaagaccaacgagaaguuccaccagaucgagaaggaguucuccgagguggaggggcgcauccaggaccuggagaaguacguggaggacacgaagaucgaccuguggagcuacaacgccgagcuccuggucgcccuggagaaccagcacaccaucgaccucaccgacuccgagaugaacaagcuguucgagcggaccaagaagcagcugcgcgagaacgccgaggacaugggcaacgggugcuucaagaucuaccacaagugcgacaacgccugcaucggcagcauccgcaacgggacguacgaccacgacguguaccgggacgaggcgcucaacaaccgcuuccagaucaagggcguggagcugaaguccggcuacaaggacuggauccuguggaucagcuucgccaucuccugcuuccuccugugcgucgcccugcucggguucaucaugugggccugccagaagggcaacauccggugcaacaucugcaucuga

SEQ ID NO: 70767 - RNA, 1701 nt, Artificial Sequence
  derived and/or modified CDS sequence (opt1) from hemagglutinin__InfluenzaA__AEG65032
augaagaccaucaucgcccugagcuacauccucugccugguguucgcccagaagcugcccggcaacgacaacuccaccgcgacgcucugccuggggcaccacgccgucccgaacggcaccaucgugaagaccaucaccaacgaccagaucgaggugacgaacgccaccgagcugguccagagcuccagcaccgggggcaucugcgacagcccccaccagauccucgacggggagaacugcacccugaucgacgcccugcucggcgacccccagugcgacggcuuccagaacaagaagugggaccuguucguggagcgcagcaaggccuacuccaacugcuaccccuacgacgugccggacuacgcgagccugcggucccucgucgccagcuccgggacgcuggaguucaacaacgagagcuucaacuggaccggcgugacccagaacgggaccuccagcgccugcaagcgccgguccaacaacagcuucuucucccgccugaacuggcucacgcaccugaaguucaaguaccccgcccugaacgugaccaugcccaacaacgagaaguucgacaagcucuacaucuggggcguccaccaccccgggaccgacaacgaccagaucuuccuguacgcgcaggccagcggccggaucaccguguccacgaagcgcagccagcagaccgugaucccgaacaucggcagccggccccgcguccggaacauccccucccgcaucagcaucuacuggaccaucgugaagcccggggacauccugcucaucaacuccaccggcaaccugaucgccccgcggggguacuucaagauccgcagcggcaaguccagcaucaugcgguccgacgcccccaucggcaagugcaacagcgagugcaucacgcccaacggguccauccccaacgacaagccguuccagaacgugaaccgcaucaccuacggcgccugcccccgguacgucaagcagaacacccugaagcucgcgaccgggaugcgcaacgugcccgagaagcagacgcggggcaucuucggggccaucgccggcuucaucgagaacggcugggaggggaugguggacggcugguacggguuccgccaccagaacagcgagggcaucgggcaggccgccgaccugaaguccacccaggcggccaucaaccagaucaacggcaagcugaacaagcucaucggcaagaccaacgagaaguuccaccagaucgagaaggaguucagcgaggucgaggggcggauccaggaccuggagaaguacguggaggacaccaagaucgaccugugguccuacaacgccgagcuccugguggcccuggagaaccagcacacgaucgaccucaccgacagcgagaugaacaagcuguucgagcgcaccaagaagcagcugcgggagaacgccgaggacaugggcaacgggugcuucaagaucuaccacaagugcgacaacgcgugcaucggcuccauccgcaacgggaccuacgaccacgacgucuaccgcgacgaggcccucaacaaccgguuccagaucaagggcguggagcugaaguccggcuacaaggacuggauccuguggaucuccuucgccaucagcugcuuccuccugugcguggcccugcucggguucaucaugugggccugccagaagggcaacauccgcugcaacaucugcaucuga

SEQ ID NO: 70768 - RNA, 1701 nt, Artificial Sequence; identical to SEQ ID NO: 64654
  derived and/or modified CDS sequence (opt1) from hemagglutinin__InfluenzaA__AEG65043

SEQ ID NO: 70769 - RNA, 1701 nt, Artificial Sequence; identical to SEQ ID NO: 64654
  derived and/or modified CDS sequence (opt1) from hemagglutinin__InfluenzaA__AEG65054

SEQ ID NO: 70770 - RNA, 1701 nt, Artificial Sequence
  derived and/or modified CDS sequence (opt1) from hemagglutinin__InfluenzaA__AEG65065
augaagaccaucaucgcccugagcuacauccucugccugguguucgcccagaagcugcccggcaacgacaacuccaccgcgacgcucugccuggggcaccacgccgucccgaacggcaccaucgugaagaccaucaccaacgaccagaucgaggugacgaacgccaccgagcugguccagagcuccagcaccggggagaucugcgacagcccccaccagauccucgacggcgagaacugcacccugaucgacgcccugcucggggacccccagugcgacggcuuccagaacaagaagugggaccuguucguggagcgcagcaaggccuacuccaacugcuaccccuacgacgugccggacuacgcgagccugcggucccucgucgccagcuccggcacgcuggaguucaacaacgagagcuucaacuggaccggggugacccagaacggcaccuccagcgccugcaagcgccgguccaacaacagcuucuucucccgccugaacuggcucacgcaccugaaguucaaguaccccgcccugaacgugaccaugcccaacaacgagaaguucgacaagcucuacaucuggggcguccaccaccccgggaccgacaacgaccagaucuuccuguacgcgcaggccagcgggcggaucaccguguccacgaagcgcagccagcagaccgugaucccgaacaucggcagccggccccgcguccggaacauccccucccgcaucagcaucuacuggaccaucgugaagcccggcgacauccugcucaucaacuccaccgggaaccugaucgccccgcggggcuacuucaagauccgcagcgggaaguccagcaucaugcgguccgacgcccccaucggcaagugcaacagcgagugcaucacgcccaacggcuccauccccaacgacaagccguuccagaacgugaaccgcaucaccuacggggccugcccccgguacgucaagcagaacacccugaagcucgcgaccggcaugcgcaacgugcccgagaagcagacgcgggggaucuucggcgccaucgccggguucaucgagaacggcugggagggcaugguggacgggugguacggcuuccgccaccagaacagcgaggggaucggccaggccgccgaccugaaguccacccaggcggccaucaaccagaucaacgggaagcugaaccggcucaucggcaagaccaacgagaaguuccaccagaucgagaaggaguucagcgaggucgagggccgcauccaggaccuggagaaguacguggaggacaccaagaucgaccugugguccuacaacgccgagcuccugguggcccuggagaaccagcacacgaucgaccucaccgacagcgagaugaacaagcuguucgagcggaccaagaagcagcugcgcgagaacgccgaggacauggggaacggcugcuucaagaucuaccacaagugcgacaacgcgugcaucggguccauccgcaacggcaccuacgaccacgacgucuaccgggacgaggcccucaacaaccgcuuccagaucaaggggguggagcugaaguccggcuacaaggacugggugcuguggaucuccuucgccaucagcugcuuccuccugugcgucgugcugcucggcuucaucaugugggccugccagaaggggaacauccggugcaacaucugcaucuga

SEQ ID NO: 70771 - RNA, 1701 nt, Artificial Sequence
  derived and/or modified CDS sequence (opt1) from hemagglutinin__InfluenzaA__AEG65076
augaagaccaucaucgcccugagcuacauccucugccugguguucgcccagaagcugcccggcaacgacaacuccaccgcgacgcucugccuggggcaccacgccgucccgaacggcaccaucgugaagaccaucaccaacgaccagaucgaggugacgaacgccaccgagcugguccagagcuccagcaccgggggcaucugcgacagcccccaccagauccucgacggggagaacugcacccugaucgacgcccugcucggcgacccccagugcgacggcuuccagaacaagaagugggaccuguucguggagcgcagcaaggccuacuccaacugcuaccccuacgacgugccggacuacgcgagccugcggucccucgucgccagcuccgggacgcuggaguucaacaacgagagcuucaacuggaccggcgugacccagaacgggaccuccagcgccugcaagcgccgguccaacaacagcuucuucucccgccugaacuggcucacgcaccuccgguucaaguaccccgcccugaacgugaccaugcccaacaacgagaaguucgacaagcuguacaucuggggcguccaccaccccgggaccgacaacgaccagaucuuccuguacgcgcaggccagcggccgcaucaccguguccacgaagcggagccagcagaccgugaucccgaacgucggcagccgcccccgggugcgcaacauccccucccggaucagcaucuacuggaccaucgugaagcccggggacauccugcucaucaacuccaccggcaaccugaucgccccgcgcggguacuucaagauccggagcggcaaguccagcaucaugcgcuccgacgcccccaucggcaagugcaacagcgagugcaucacgcccaacggguccauccccaacgacaagccguuccagaacgucaaccggaucaccuacggcgccugcccccgcuacgugaagcagaacacccugaagcucgcgaccgggaugcggaacgugcccgagaagcagacgcgcggcaucuucggggccaucgccggcuucaucgagaacggcugggaggggauggucgacggcugguacggguuccggcaccagaacagcgagggcaccgggcaggccgccgaccugaaguccacccaggcggccaucaaccagaucaacggcaagcugaaccgccucaucggcaagaccaacgagaaguuccaccagaucgagaaggaguucagcgagguggaggggcggauccaggaccuggagaaguacguggaggacacgaagaucgaccugugguccuacaacgccgagcuccuggucgcccuggagaaccagcacaccaucgaccucaccgacagcgagaugaacaagcuguucgagcgcaccaagaagcagcugcgcgagaacgccgaggacaugggcaacgggugcuucaagaucuaccacaagugcgacaacgcgugcaucggcuccauccggaacgggacguacgaccacgacguguaccgcgacgaggcccucaacaaccgguuccagaucaagggcguggagcugaaguccggcuacaaggacuggauccuguggaucuccuucgccaucagcugcuuccuccugugcgucgcccugcucggguucaucaugugggccugccagaagggcaacauccgcugcaacaucugcaucuga

SEQ ID NO: 70772 - RNA, 1701 nt, Artificial Sequence
  derived and/or modified CDS sequence (opt1) from hemagglutinin__InfluenzaA__AEG65087
augaagaccaucaucgcccugagcuacauccucugccugguguucgcccagaagcugcccggcaacgacaacuccaccgcgacgcucugccuggggcaccacgccgucccgaacggcaccaucgugaagaccaucaccaacgaccagaucgaggugacgaacgccaccgagcugguccagagcuccagcaccgggggcaucugcgacagcccccaccagauccucgacggggagaacugcacccugaucgacgcccugcucggcgacccccagugcgacggcuuccagaacaagaagugggaccuguucguggagcgcagcaaggccuacuccaacugcuaccccuacgacgugccggacuacgcgagccugcggucccucgucgccagcuccgggacgcuggaguucaacaacgagagcuucaacuggaccggcgugacccagaacgggaccuccagcgccugcaagcgccgguccaacaacagcuucuucucccgccugaacuggcucacgcaccugaaguucaaguaccccgcccugaacgugaccaugcccaacaacgagaaguucgacaagcucuacaucuggggcguccaccaccccgggaccaacaacgaccagaucuuccuguacgcgcaggccagcggccggaucaccguguccacgaagcgcagccagcagaccgugaucccgaacaucggcagccggccccgcguccggaacauccccucccgcaucagcaucuacuggaccaucgugaagcccggggacauccugcucaucaacuccaccggcaaccugaucgccccgcggggguacuucaagauccgcagcggcaaguccagcaucaugcgguccgacgcccccaucggcaagugcaacagcgagugcaucacgcccaacggguccauccccaacgacaagccguuccagaacgugaaccgcaucaccuacggcgccugcccccgguacgucaagcagaacacccugaagcucgcgaccgggaugcgcaacgugcccgagaagcagacgcggggcaucuucggggccaucgccggcuucaucgagaacggcugggaggggaugguggacggcugguacggguuccgccaccagaacagcgagggcaucgggcaggccgccgaccugaaguccacccaggcggccaucaaccagaucaacggcaagcugaaccggcucaucggcaagaccaacgagaaguuccaccagaucgagaaggaguucagcgaggucgaggggcgcauccaggaccuggagaaguacguggaggacaccaagaucgaccugugguccuacaacgccgagcuccugguggcccuggagaaccagcacacgaucgaccucaccgacagcgagaugaacaagcuguucgagcggaccaagaagcagcugcgcgagaacgccgaggacaugggcaacgggugcuucaagaucuaccacaagugcgacaacgcgugcaucggcuccauccgcaacgggaccuacgaccacgacgucuaccgggacgaggcccucaacaaccgcuuccagaucaagggcguggagcugaaguccggcuacaaggacuggauccuguggaucuccuucgccaucagcugcuuccuccugugcguggcccugcucggguucaucaugugggccugccagaagggcaacauccggugcaacaucugcaucuga

SEQ ID NO: 70773 - RNA, 1701 nt, Artificial Sequence
  derived and/or modified CDS sequence (opt1) from hemagglutinin__InfluenzaA__AEG65098
augaagaccaucaucgcccugagcuacauccucugccugguguucgcccagaagcugcccggcaacgacaacuccaccgcgacgcucugccuggggcaccacgccgucccgaacggcaccaucgugaagaccaucaccaacgaccagaucgaggugacgaacgccaccgagcugguccagagcuccagcaccggggagaucugcgacagcccccaccagauccucgacggcgagaacugcacccugaucgacgcccugcucggggacccccagugcgacgacuuccagaacaagaagugggaccuguucguggagcgcuccaaggccuacuccaacugcuaccccuacgacgugccggacuacgcgagccugcggucccucgucgccagcuccggcacgcuggaguucaacaacgagagcuucaacuggaccggcgugacccagaacgggaccuccagcgccugcaagcgccgguccaacaacagcuucuucucccgccugaacuggcucacgcacagcaaguucaaguaccccgcccugaacgugaccaugcccaacaacgagaaguucgacaagcuguacaucuggggcguccaccaccccgggaccgacaacgaccagaucuuccucuacgcgcaggccuccggccggaucaccgugagcacgaagcgcagccagcagaccgugaucccgaacaucgggucccggccccgcguccggaacauccccagccgcaucuccaucuacuggaccaucgugaagcccggcgacauccugcugaucaacagcaccggcaaccucaucgccccgcggggguacuucaagauccgcuccggcaagagcuccaucaugcggagcgacgcccccaucgggaagugcaacuccgagugcaucacgcccaacggcagcauccccaacgacaagccguuccagaacgugaaccgcaucaccuacggcgccugcccccgguacgucaagcagaacacccugaagcuggcgaccgggaugcgcaacgugcccgagaagcagacgcggggcaucuucggggccaucgccggcuucaucgagaacgggugggagggcaugguggacggcugguacggguuccgccaccagaacuccgagggcaucgggcaggccgccgaccucaagagcacccaggcggccaucaaccagaucaacggcaaccugaaccggcugaucgggaagaccaacgagaaguuccaccagaucgagaaggaguucuccgaggucgagggccgcauccaggaccucgagaaguacguggaggacaccaagaucgaccuguggagcuacaacgccgagcugcucguggcccuggagaaccagcacacgaucgaccugaccgacuccgagaugaacaagcuguucgagcggaccaagaagcagcuccgcgagaacgccgaggacaugggcaacgggugcuucaagaucuaccacaagugcgacaacgcgugcaucggcagcauccgcaacgggaccuacgaccacgacgucuaccgggacgaggcccugaacaaccgcuuccagaucaagggcguggagcucaaguccggguacaaggacuggauccuguggaucagcuucgccaucuccugcuuccugcucugcgugguccugcugggcuucaucaugugggccugccagaagggcaacauccggugcaacaucugcaucuga

SEQ ID NO: 70774 - RNA, 1701 nt, Artificial Sequence
  derived and/or modified CDS sequence (opt1) from hemagglutinin__InfluenzaA__AEG65109
augaagaccaucaucgcccugagcuacauccucugccugguguucgcccagaagcugcccggcaacgacaacuccaccgcgacgcucugccuggggcaccacgccgucccgaacggcaccaucgugaagaccaucaccaacgaccagaucgaggugacgaacgccaccgagcugguccagagcuccagcaccggggagaucugcgacagcccccaccagauccucgacggcgagaacugcaagcugaucgacgcccugcucggggacccccagugcgacggcuuccagaacaagaagugggaccuguucguggagcgcagcaaggccuacuccaacugcuaccccuacgacgugccggacuacgcgagccugcggucccucgucgccagcuccggcacccuggaguucaacaacgagagcuucaacuggacgggggugacccagaacggcaccuccagcgccugcaagcgccgguccaacaacagcuucuucucccgccugaacuggcucacccaccugaaguucaaguaccccgcccugaacgugacgaugcccaacaacgagaaguucgacaagcucuacaucuggggcguccaccaccccgggaccgacaacgaccagaucuuccuguacgcgcagagcuccgggcggaucaccgugagcaccaagcgcagccagcagacggugaucccgaacaucggcucccggccccgcguccggaacauccccagccgcaucuccaucuacuggaccaucgugaagcccggcgacauccugcucaucaacagcaccgggaaccugaucgccccgcggggcuacuucaagauccgcuccgggaaguccuccaucaugcggagcgacgcccccaucggcaagugcaacuccgagugcaucacccccaacggcagcauccccaacgacaagccguuccagaacgugaaccgcaucacguacggggccugcccccgguacgucaagcagaacacccugaagcucgccaccggcaugcgcaacgugcccgagaagcagacccgggggaucuucggcgcgaucgccggguucaucgagaacggcugggagggcaugguggacgggugguacggcuuccgccaccagaacuccgaggggaucggccaggccgccgaccucaagagcacgcaggccgcgaucaaccagaucaacgggaagcugaaccggcugaucggcaagaccaacgagaaguuccaccagaucgagaaggaguucuccgaggucgagggccgcauccaggaccuggagaaguacguggaggacaccaagaucgaccuguggagcuacaacgccgagcuccugguggcccuggagaaccagcacaccaucgaccucacggacuccgagaugaacaagcuguucgagcggaccaagaagcagcugcgcgagaacgccgaggacauggggaacggcugcuucaagaucuaccacaagugcgacaacgccugcaucgggagcauccgcaacggcaccuacgaccacgacgucuaccgggacgaggcgcucaacaaccgcuuccagaucaaggggguggagcugaaguccggcuacaaggacuggauccuguggaucagcuucgccaucuccugcuuccuccugugcguggcccugcucggcuucaucaugugggccugccagaaggggaacauccggugcaacaucugcaucuga

SEQ ID NO: 70775 - RNA, 1701 nt, Artificial Sequence
  derived and/or modified CDS sequence (opt1) from hemagglutinin__InfluenzaA__AEG65120
augaagaccaucaucgcccugagcuacauccucugccugguguucgcccagaagcugcccggcaacgacaacuccaccgcgacgcucugccuggggcaccacgccgucccgaacggcaccaucgugaagaccaucaccaacgaccagaucgaggugacgaacgccaccgagcugguccagagcuccagcaccggggagaucugcgacagcccccaccagauccucgacggcgagaacugcacccugaucgacgcccugcucggggacccccagugcgacggcuuccagaacaagaagugggaccuguucguggagcgcagcaaggccuacuccaacugcuaccccuacgacgugccggacuacgcgagccugcggucccucgucgccagcuccggcacgcuggaguucaacaacgagagcuucaacuggaccggggugacccagaacggcaccuccagcgccugcaagcgccgguccaacaacagcuucuucucccgccugaacuggcucacgcaccugaaguucaaguaccccgcccugaacgugaccaugcccaacaacgagaaguucgacaagcucuacaucuggggcguccaccaccccgggaccgacaacgaccagaucuuccuguacgcgcaggccagcgggcggaucaccguguccacgaagcgcagccagcagaccgugaucccgaacaucggcagccggccccgcguccggaacauccccucccgcaucagcaucuacuggaccaucgugaagcccggcgacauccugcucaucaacuccaccgggaaccugaucgccccgcggggcuacuucaagauccgcagcgggaaguccagcaucaugcgguccgacgcccccaucggcaagugcaacagcgagugcaucacgcccaacggcuccauccccaacgacaagccguuccagaacgugaaccgcaucgccuacggggcgugcccccgguacgucaagcagaacacccugaagcucgccaccggcaugcgcaacgugcccgagaagcagacccgggggaucuucggcgccaucgccggguucaucgagaacggcugggagggcaugguggacgggugguacggcuuccgccaccagaacagcgaggggaucggccaggccgcggaccugaaguccacgcaggccgccaucaaccagaucaacgggaagcugaaccggcucaucggcaagaccaacgagaaguuccaccagaucgagaaggaguucagcgaggucgagggccgcauccaggaccuggagaaguacguggaggacaccaagaucgaccugugguccuacaacgccgagcuccugguggcccuggagaaccagcacaccaucgaccucacggacagcgagaugaacaagcuguucgagcggaccaagaagcagcugcgcgagaacgcggaggacauggggaacggcugcuucaagaucuaccacaagugcgacaacgccugcaucggguccauccgcaacggcaccuacgaccacgacgucuaccgggacgaggcccucaacaaccgcuuccagaucaaggggguggagcugaaguccggcuacaaggacuggauccuguggaucuccuucgccaucagcugcuuccuccugugcgugguccugcucggcuucaucaugugggccugccagaaggggaacauccggugcaacaucugcaucuga

SEQ ID NO: 70776 - RNA, 1701 nt, Artificial Sequence
  derived and/or modified CDS sequence (opt1) from hemagglutinin__InfluenzaA__AEG65131
augaagaccaucaucgcccugagcuacauccucugccugguguucgcccagaagcugcccggcaacgacaacuccaccgcgacgcucugccuggggcaccacgccgucccgaacggcaccaucgugaagaccaucaccaacgaccagaucgaggugacgaacgccaccgagcugguccagagcuccagcaccggggagaucugcgacagcccccaccagauccucgacggcgagaacugcacccugaucgacgcccugcucggggacccccagugcgacggcuuccagaacaagaagugggaccuguucguggagcgcagcaaggccuacuccaacugcuaccccuacgacgugccggacuacgcgagccugcggucccucgucgccagcuccggcacgcuggaguucaacaacgagagcuucaacuggaccggggugacccagaacggcaccuccagcgccugcaagcgccgguccaacaacagcuucuucucccgccugaacuggcucacgcacagcaaguucaaguaccccgcccugaacgugaccaugcccaacaacgagaaguucgacaagcuguacaucuggggcguccaccaccccgggaccgacaacgaccagaucuuccucuacgcgcaggccuccgggcggaucaccgugagcacgaagcgcagccagcagaccgugaucccgaacaucggcucccggccccgcguccggaacauccccagccgcaucuccaucuacuggaccaucgugaagcccggcgacauccugcugaucaacagcaccgggaaccucaucgccccgcggggcuacuucaagauccgcuccgggaaguccuccaucaugcggagcgacgcccccaucggcaagugcaacuccgagugcaucacgcccaacggcagcauccccaacgacaagccguuccagaacgugaaccgcaucaccuacggggccugcccccgguacgucaagcagaacacccugaagcuggcgaccggcaugcgcaacgugcccgagaagcagacgcgggggaucuucggcgccaucgccggguucaucgagaacggcugggagggcaugguggacgggugguacggcuuccgccaccagaacuccgaggggaucggccaggccgccgaccucaagagcacccaggcggccaucaaccagaucaacgggaagcugaaccggcugaucggcaagaccaacgagaaguuccaccagaucgagaaggaguucuccgaggucgagggccgcauccaggaccucgagaaguacguggaggacaccaagaucgaccuguggagcuacaacgccgagcugcucguggcccuggagaaccagcacacgaucgaccugaccgacuccgagaugaacaagcuguucgagcggaccaagaagcagcuccgcgagaacgccgaggacauggggaacggcugcuucaagaucuaccacaagugcgacaacgcgugcaucgggagcauccgcaacggcaccuacgaccacgacgucuaccgggacgaggcccugaacaaccgcuuccagaucaaggggguggagcucaaguccggcuacaaggacuggauccuguggaucagcuucgccaucuccugcuuccugcucugcgugguccugcugggcuucaucaugugggccugccagaaggggaacauccggugcaacaucugcaucuga

SEQ ID NO: 70777 - RNA, 1701 nt, Artificial Sequence; identical to SEQ ID NO: 64075
  derived and/or modified CDS sequence (opt1) from hemagglutinin__InfluenzaA__AEG65142

SEQ ID NO: 70778 - RNA, 1701 nt, Artificial Sequence; identical to SEQ ID NO: 64075
  derived and/or modified CDS sequence (opt1) from hemagglutinin__InfluenzaA__AEG65153

SEQ ID NO: 70779 - RNA, 1701 nt, Artificial Sequence
  derived and/or modified CDS sequence (opt1) from hemagglutinin__InfluenzaA__AEG65164
augaagaccaucaucgcccugagcuacauccucugccugguguucgcccagaagcugcccggcaacgacaacuccaccgcgacgcucugccuggggcaccacgccgucccgaacggcacccuggugaagaccaucaccaacgaccagaucgaggugacgaacgccaccgagcucguccagagcuccagcaccgggcgcaucugcgacagcccccaccagauccuggacggcgagaacugcacccugaucgacgcccuccugggggacccccacugcgacggcuuccagaacaaggagugggaccuguucguggagcggagcaaggccuacuccaacugcuaccccuacgacgugccggacuacgucagccuccgcucccugguggcgagcuccggcacgcuggaguucaacaacgagagcuucaacuggaccgggguggcccagaacggcaccuccagcgccugcaagcggcgcuccgacaagagcuucuucucccggcucaacuggcugcaccagcugaaguacaaguaccccgcccucaacgucaccaugcccaacaacgagaaguucgacaagcuguacaucuggggcgugcaccaccccgggacggacagcgaccagaucucccuguacgcgcaggccagcgggcgcgugaccgucagcaccaagcggucccagcagaccgugaucccgaacaucggcagccgccccugggugcggggcgucuccagccgcaucuccaucuacuggacgaucgugaagcccggggacauccuccugaucaacagcaccggcaaccugaucgcgccccggggguacuucaagauccgcuccggcaagagcuccaucaugcggagcgacgccccgaucggcaagugcaacuccgagugcaucacccccaacgggagcauccccaacgacaagcccuuccagaacgugaaccgcaucaccuacggcccgugcccccgguacgucaagcagaacacgcucaagcuggccaccgggaugcgcaacgugcccgagaagcagacccggggcaucuucggggccaucgccggcuucaucgagaacggcugggaggggaugauggacggcugguacggguuccgccaccagaacuccgagggcaccgggcaggccgccgaccugaaguccacgcaggccgcgaucaaccagaucaacggcaagcucaaccggcugaucgagaagaccaacgagaaguuccaccagaucgagaaggaguucuccgagguggagggccgcauccaggaccuggagaaguacgucgaggacaccaagaucgaccucuggagcuacaacgccgaguuccugguggcccuggagaaccagcacaccaucgaccucacggacuccgagaugaacaagcuguucgagcggaccaagaagcagcugcgcgagaacgccgaggacauggggaacggcugcuucaagaucuaccacaagugcgacaacgccugcaucgggagcauccgcaacggcaccuacgaccacgacguguaccgggacgaggcgcucaacaaccgcuuccagaucaagggggucgagcugaaguccggcuacaaggacuggauccuguggaucagcuucgccaucagcugcuuccuccugugcaucgugcugcucggcuucaucaugugggccugccagaaggggaacauccggugcaacaucugcaucuga

SEQ ID NO: 70780 - RNA, 1701 nt, Artificial Sequence
  derived and/or modified CDS sequence (opt1) from hemagglutinin__InfluenzaA__AEG65175
augaagaccaucaucgcccugagcuacauccucugccugguguucgcccagaagcugcccggcaacgacaacuccaccgcgacgcucugccuggggcaccacgccgucccgaacggcaccaucgugaagaccaucaccaacgaccagaucgaggugacgaacgccaccgagcugguccagagcuccagcaccgggggcaucugcgacagcccccaccagauccucgacggggagaacugcacccugaucgacgcccugcucggcgacccccagugcgacggcuuccagaacaagaagugggaccuguucguggagcgcagcaaggccuacuccaacugcuaccccuacgacgugccggacuacgcgagccugcggucccucgucgccagcuccgggacgcuggaguucaacaacgagagcuucaacuggaccggcgugacccagaacgggaccuccagcgccugcgagcgccgguccaacaagagcuucuucucccgccugaacuggcucacgcaccugaaguacaaguaccccgcccugaacgugaccaugcccaacaacgagaaguucgacaagcucuacaucuggggcguccaccaccccgggaccgacagcgaccagaucucccuguacgcgcaggccagcggccggaucaccgugagcacgaagcgcucccagcagaccgugaucccgaacaucggcagccggccccgcguccgggacguguccagccgcaucuccaucuacuggaccaucgugaagcccggggacauccugcucaucaacagcaccggcaaccugaucgcgccccggggguacuucaagauccgcaacggcaaguccagcaucaugcgguccgacgccccgaucggcaagugcaacagcgagugcaucacgcccaacggguccauccccaacgacaagcccuuccagaacgucaaccgcaucaccuacggcgccugcccgcgguacgugaagcagaacacccugaagcucgccaccgggaugcgcaacgugcccgagaagcagacgcggggcaucuucggggccaucgccggcuucaucgagaacggcugggaggggauggucgacggcugguacggguuccgccaccagaacagcgagggcaccgggcaggccgccgaccugaaguccacccaggcggccaucaaccagaucaacggcaagcugaaccggcucaucggcaagaccaacgagaaguuccaccagaucgagaaggaguucagcgagguggaggggcgcauccaggaccuggagaaguacguggaggacacgaagaucgaccugugguccuacaacgccgagcuccuggucgcccuggagaaccagcacaccaucgaccucaccgacagcgagaugaacaagcuguucgagcggaccaagaagcagcugcgcgagaacgccgaggacaugggcaacgggugcuucaagaucuaccacaagugcgacaacgcgugcaucggcuccauccgcaacgggacguacgaccacgacguguaccgggacgaggcccucaacaaccgcuuccagaucaagggcguggagcugaaguccggcuacaaggacuggauccuguggaucuccuucgccaucagcugcuuccuccugugcgucgcccugcucggguucaucaugugggccugccagaagggcaacauccggugcgacaucugcaucuga

SEQ ID NO: 70781 - RNA, 1701 nt, Artificial Sequence; identical to SEQ ID NO: 64443
  derived and/or modified CDS sequence (opt1) from hemagglutinin__InfluenzaA__AEG65186

SEQ ID NO: 70782 - RNA, 1701 nt, Artificial Sequence
  derived and/or modified CDS sequence (opt1) from hemagglutinin__InfluenzaA__AEG65197
augaagaccaucaucgcccugagcuacauccucugccugguguucgcccagaagcugcccggcaacgacaacuccaccgcgacgcucugccuggggcaccacgccgucccgaacggcaccaucgugaagaccaucaccaacgaccagaucgaggugacgaacgccaccgagcugguccagagcucccccaccgggggcaucugcgacagcccccaccagauccucgacggggagaacugcacccugaucgacgcccugcucggcgacccccagugcgacggcuuccagaacaagaagugggaccuguucguggagcgcuccaaggccuacagcaacugcuacccguacgacgugcccgacuacgcgucccugcggagccucgucgccuccagcgggacgcuggaguucaacaacgaguccuucaacuggaccggcgugacccagaacgggaccagcuccgccugcaagcgccggagcaacaacuccuucuucagccgccugaacuggcucacgcaccugaaguucaaguaccccgcccugaacgugaccaugcccaacaacgagaaguucgacaagcucuacaucuggggcguccaccacccggggaccgacaacgaccagaucucccuguacgcgcaggccagcggccggaucaccguguccacgaagcgcagccagcagaccgugauccccaacaucggcagccggccccgcguccgggacauccccucccgcaucagcaucuacuggaccaucgugaagccgggggacaucauccugaucaacuccaccggcaaccucaucgcgccccggggguacuucaagauccgcagcggcaaguccagcaucaugcgguccgacacgcccaucggcaagugcaacagcgagugcaucacccccaacggguccaucccgaacgacaagcccuuccagaacgugaaccgcaucaccuacggcgccugcccccgguacgucaagcagaacacccugaagcuggccacggggaugcgcaacgugcccgagaagcagacccggggcaucuucggggccaucgccggcuucaucgagaacggcugggaggggaugguggacggcugguacggguuccgccaccagaacagcgagggcaucgggcaggccgccgaccucaaguccacccaggccgcgaucaaccagaucaacggcaagcugaaccggcugaucggcaagaccaacgagaaguuccaccagaucgagaaggaguucagcgaggucgaggggcgcauccaggaccucgagaaguacguggaggacacgaagaucgaccugugguccuacaacgccgagcugcucguggcccuggagaaccagcacaccaucgaccugaccgacagcgagaugaacaagcuguucgagcggaccaagaagcagcuccgcgagaacgccgaggacaugggcaacgggugcuucaagaucuaccacaagugcgacaacgccugcaucggcuccauccgcaacgggacguacgaccacgacgucuaccgggacgaggcgcugaacaaccgcuuccagaucaagggcguggagcucaagagcggcuacaaggacuggauccuguggaucuccuucgccaucagcugcuuccugcucugcguggcccugcugggguucaucaugugggccugccagaagggcaacauccggugcaacaucugcaucuga

SEQ ID NO: 70783 - RNA, 1701 nt, Artificial Sequence; identical to SEQ ID NO: 64654
  derived and/or modified CDS sequence (opt1) from hemagglutinin__InfluenzaA__AEG65208

SEQ ID NO: 70784 - RNA, 1701 nt, Artificial Sequence
  derived and/or modified CDS sequence (opt1) from hemagglutinin__InfluenzaA__AEG65219
augaagaccaucaucgcccugagcuacauccucugccugguguucgcccagaagcugcccggcaacgacaacuccaccgcgacgcucugccuggggcaccacgccgucccgaacggcaccaucgugaagaccaucaccaacgaccagaucgaggugacgaacgccaccgagcugguccagagcuccagcaccgggggcaucugcgacagcccccaccagauccucgacggggagaacugcacccugaucgacgcccugcucggcgacccccagugcgacggcuuccagaacaagaagugggaccuguucguggagcgcagcaaggccuacuccaacugcuaccccuacgacgugccggacuacgcgagccugcggucccucgucgccagcuccgggacgcuggaguucaacaacgagagcuucaacuggaccggcgugacccagaacgggaccuccagcgccugcaagcgccgguccaacaagagcuucuucucccgccugaacuggcucacgcaccugaaguucaaguaccccgcccugaacgugaccaugcccaacaacgagaaguucgacaagcucuacaucuggggcguccaccaccccgggaccgacaacgaccagaucagccuguacgcgcaggccuccggccggaucaccgugagcacgaagcgcagccagcagaccgugaucccgaacaucggcucccggccccgcguccgggacgugcccagccgcaucuccaucuacuggaccaucgugaagcccggggacauccugcucaucaacagcaccggcaaccugaucgccccgcggggguacuucaagauccgcuccggcaagagcuccaucaugcggagcgacgcccccaucggcaagugcaacuccgagugcaucacgcccaacgggagcauccccaacgacaagccguuccagaacgucaaccgcaucaccuacggcgccugcccccgguacgugaagcagaacacccugaagcucgcgaccgggaugcgcaacgugcccgagaagcagacgcggggcaucuucggggccaucgccggcuucaucgagaacggcugggaggggauggucgacggcugguacggguuccgccaccagaacuccgagggcaccgggcaggccgccgaccugaaguccacccaggcggccaucaaccagaucaacggcaagcugaaccggcucaucggcaagaccaacgagaaguuccaccagaucgagaaggaguucuccgagguggaggggcgcauccaggaccuggagaaguacguggaggacacgaagaucgaccuguggagcuacaacgccgagcuccuggucgcccuggagaaccagcacaccaucgaccucaccgacuccgagaugaacaagcuguucgagcggaccaagaagcagcugcgcgagaacgccgaggacaugggcaacgggugcuucaagaucuaccacaagugcgacaacgcgugcaucggcagcauccgcaacgggacguacgaccacgacguguaccgggacgaggcccucaacaaccgcuuccagaucaagggcguggagcugaaguccggcuacaaggacuggauccuguggaucagcuucgccaucuccugcuuccuccugugcgucgcccugcucggguucaucaugugggccugccagaagggcaacaucaagugcaacaucugcaucuga

SEQ ID NO: 70785 - RNA, 1701 nt, Artificial Sequence; identical to SEQ ID NO: 65819
  derived and/or modified CDS sequence (opt1) from hemagglutinin__InfluenzaA__AEG65230

SEQ ID NO: 70786 - RNA, 1701 nt, Artificial Sequence; identical to SEQ ID NO: 65819
  derived and/or modified CDS sequence (opt1) from hemagglutinin__InfluenzaA__AEG65252

SEQ ID NO: 70787 - RNA, 1701 nt, Artificial Sequence; identical to SEQ ID NO: 64540
  derived and/or modified CDS sequence (opt1) from hemagglutinin__InfluenzaA__AEG65263

SEQ ID NO: 70788 - RNA, 1701 nt, Artificial Sequence; identical to SEQ ID NO: 64540
  derived and/or modified CDS sequence (opt1) from hemagglutinin__InfluenzaA__AEG65274

SEQ ID NO: 70789 - RNA, 1701 nt, Artificial Sequence; identical to SEQ ID NO: 64540
  derived and/or modified CDS sequence (opt1) from hemagglutinin__InfluenzaA__AEG65285

SEQ ID NO: 70790 - RNA, 1701 nt, Artificial Sequence
  derived and/or modified CDS sequence (opt1) from hemagglutinin__InfluenzaA__AEG65296
augaagaccgugaucgcccugagcuacauccucugccuggucuucgcccagaagcugcccggcaacgacaacuccaccgcgacgcucugccuggggcaccacgccgugccgaacggcaccaucgugaagaccaucaccaacgaccagaucgaggucacgaacgccaccgagcuggugcagagcuccagcaccgggggcaucugcgacagcccccaccagauccucgacggggagaacugcacccugaucgacgcccugcucggcgacccccagugcgacggcuuccagaacaagaagugggaccuguucguggagcgcagcaaggccuacuccaacugcuaccccuacgacgucccggaccacgcgagccugcggucccucguggccagcuccgggacgcuggaguucaacaacgagagcuucgacuggaccggcgugacccagaacgggaccuccagcgccugcaagcgccgguccaacaagagcuucuucucccgccugaacuggcucacgcaccugaaguacaaguaccccgcccugaacgucaccaugcccaacaacgagaaguucgacaagcucuacaucuggggcgugcaccaccccgggaccgacagcgaccagaucucccuguacgcgcaggccagcggccggaucaccgugagcacgaagcgcucccagcagaccgucaucccgaacaucggcagccggccccgcgugcgggacguguccagccgcaucuccaucuacuggaccaucgucaagcccggggacauccugcucaucaacagcaccggcaaccugaucgcgccccggggguacuucaagauccgcuccggcaagagcuccaucaugcggagcgacgccccgaucggcaagugcaacuccgagugcaucacgcccaacgggagcauccccaacgacaagcccuuccagaacgugaaccgcaucaccuacggcgccugcccgcgguacgugaagcagaacacccugaagcucgccaccgggaugcgcaacguccccgagaagcagacgcggggcaucuucggggccaucgccggcuucaucgagaacggcugggaggggaugguggacggcugguacggguuccgccaccagaacuccgagggcaccgggcaggccgccgaccugaaguccacccaggcggccaucaaccagaucaacggcaagcugaaccggcucaucggcaagaccaacgagaaguuccaccagaucgagaaggaguucuccgagguggaggggcgcauccaggaccuggagaaguacgucgaggacacgaagaucgaccuguggagcuacaacgccgagcuccugguggcccuggagaaccagcacaccaucgaccucaccgacuccgagaugaacaagcuguucgagcggaccaagaagcagcugcgcgagaacgccgaggacaugggcaacgggugcuucaagaucuaccacaagugcgacaacgcgugcaucggcagcauccgcaacgggacguacgaccacgacguguaccgggacgaggcccucaacaaccgcuuccagaucaagggcgucgagcugaaguccggcuacaaggacuggauccuguggaucagcuucgccaucagcugcuuccuccugugcguggcccugcucggguucaucaugugggccugccagaagggcaacauccggugcaacaucugcaucuga

SEQ ID NO: 70791 - RNA, 1701 nt, Artificial Sequence; identical to SEQ ID NO: 65819
  derived and/or modified CDS sequence (opt1) from hemagglutinin__InfluenzaA__AEG65307

SEQ ID NO: 70792 - RNA, 1701 nt, Artificial Sequence
  derived and/or modified CDS sequence (opt1) from hemagglutinin__InfluenzaA__AEG65318
augaagaccaucaucgcccugagcuacauccucugccugguguucgcccagaagcugcccggcaacgacaacuccaccgcgacgcucugccuggggcaccacgccgucccgaacggcaccaucgugaagaccaucaccaacgaccagaucgaggugacgaacgccaccgagcugguccagagcuccagcaccgggggcaucugcgacagcccccaccagauccucgacggggagaacugcacccugaucgacgcccugcucggcgacccccagugcgacggcuuccagaacaagaagugggaccuguucguggagcgcagcaaggccuacuccaacugcuaccccuacgacgugccggacuacgcgagccugcggucccucgucgccagcuccgggacgcuggaguucaacaacgagagcuucaacuggaccggcgugacccagaacgggaccuccagcgccugcaagcgccgguccaacaagagcuucuucucccgccugaacuggcucacgcaccugaaguucaaguaccccgcccugaacgugaccaugcccaacaacgagaaguucgacaagcucuacaucuggggcguccaccaccccgggaccgacaacgaccagaucagccuguacgcgcaggccuccggccggaucaccgugagcacgaagcgcagccagcagaccgugaucccgaacaucggcucccggccccgcguccgggacgugcccagccgcaucuccaucuacuggaccaucgugaagcccggggacauccugcucaucaacagcaccggcaaccugaucgccccgcggggguacuucaagauccgcuccggcaagagcuccaucaugcggagcgacgcccccaucggcaagugcaacuccgagugcaucacgcccaacgggagcauccccaacgacaagccguuccagaacgucaaccgcaucaccuacggcgccugcccccgguacgugcgccagaacacccugaagcucgcgaccgggaugcggaacgugcccgagaagcagacgcgcggcaucuucggggccaucgccggcuucaucgagaacggcugggaggggauggucgacggcugguacggguuccggcaccagaacuccgagggcaccgggcaggccgccgaccugaaguccacccaggcggccaucaaccagaucaacggcaagcugaaccgccucaucggcaagaccaacgagaaguuccaccagaucgagaaggaguucuccgagguggaggggcggauccaggaccuggagaaguacguggaggacacgaagaucgaccuguggagcuacaacgccgagcuccuggucgcccuggagaaccagcacaccaucgaccucaccgacuccgagaugaacaagcuguucgagcgcaccaagaagcagcugcgcgagaacgccgaggacaugggcaacgggugcuucaagaucuaccacaagugcgacaacgcgugcaucggcagcauccggaacgggacguacgaccacgacguguaccgcgacgaggcccucaacaaccgguuccagaucaagggcguggagcugaaguccggcuacaaggacuggauccuguggaucagcuucgccaucuccugcuuccuccugugcgucgcccugcucggguucaucaugugggccugccagaagggcaacauccgcugcaacaucugcaucuga

SEQ ID NO: 70793 - RNA, 1701 nt, Artificial Sequence; identical to SEQ ID NO: 65819
  derived and/or modified CDS sequence (opt1) from hemagglutinin__InfluenzaA__AEG65329

SEQ ID NO: 70794 - RNA, 1701 nt, Artificial Sequence
  derived and/or modified CDS sequence (opt1) from hemagglutinin__InfluenzaA__AEG65340
augaagaccaucaucgcccugagcuacauccucugccugguguucgcccagaagcugcccggcaacgacaacuccaccgcgacgcucugccuggggcaccacgccgucccgaacggcaccaucgugaagaccaucaccaacgaccagaucgaggugacgaacgccaccgagcugguccagagcuccagcaccgggggcaucugcgacagcccccaccagauccucgacggggagaacugcacccugaucgacgcccugcucggcgacccccagugcgacggcuuccagaacaagaagugggaccuguucguggagcgcagcaaggccuacuccaacugcuaccccuacgacgugccggacuacgcgagccugcggucccucgucgccagcuccgggacgcuggaguucaacaacgagagcuucaacuggaccggcgugacccagaacgggaccuccagcgccugcgagcgccgguccaacaagagcuucuucucccgccugaacuggcucacgcaccugaaguacaaguaccccgcccugaacgugaccaugcccaacaacgagaaguucgacaagcucuacaucuggggcguccaccaccccgggaccgacagcgaccagaucucccuguacgcgcaggccagcggccggaucaccgugagcacgaagcgcucccagcagaccgugaucccgaacaucggcagccggccccgcguccgggacguguccagccgcaucuccaucuacuggaccaucgugaagcccggggacauccugcucaucaacagcaccggcaaccugaucgcgccccggggguacuucaagauccgcuccggcaagagcuccaucaugcggagcgacgccccgaucggcaagugcaacuccgagugcaucacgcccaacgggagcauccccaacgacaagcccuuccagaacgucaaccgcaucaccuacggcgccugcccgcgguacgugaagcagaacacccugaagcucgccaccgggaugcgcaacgugcccgagaagcagacgcggggcaucuucggggccaucgccggcuucaucgagaacggcugggaggggauggucgacggcugguacggguuccgccaccagaacuccgagggcaccgggcaggccgccgaccugaaguccacccaggcggccaucaaccagaucaacggcaagcugaaccggcucaucggcaagaccaacgagaaguuccaccagaucgagaaggaguucuccgagguggaggggcgcauccaggaccuggagaaguacguggaggacacgaagaucgaccuguggagcuacaacgccgagcuccuggucgcccuggagaaccagcacaccaucgaccucaccgacuccgagaugaacaagcuguucgagcggaccaagaagcagcugcgcgagaacgccgaggacaugggcaacgggugcuucaagaucuaccacaagugcgacaacgcgugcaucgagagcauccgcaacggcacguacgaccacgacguguaccgggacgaggcccucaacaaccgcuuccagaucaaggggguggagcugaaguccggcuacaaggacuggauccuguggaucagcuucgccaucagcugcuuccuccugugcgucgcccugcucggcuucaucaugugggccugccagaaggggaacauccggugcaacaucugcaucuga

SEQ ID NO: 70795 - RNA, 1701 nt, Artificial Sequence; identical to SEQ ID NO: 65819
  derived and/or modified CDS sequence (opt1) from hemagglutinin__InfluenzaA__AEG65351

SEQ ID NO: 70796 - RNA, 1701 nt, Artificial Sequence; identical to SEQ ID NO: 65819
  derived and/or modified CDS sequence (opt1) from hemagglutinin__InfluenzaA__AEG65362

SEQ ID NO: 70797 - RNA, 1701 nt, Artificial Sequence; identical to SEQ ID NO: 70794
  derived and/or modified CDS sequence (opt1) from hemagglutinin__InfluenzaA__AEG65373

SEQ ID NO: 70798 - RNA, 1701 nt, Artificial Sequence; identical to SEQ ID NO: 64540
  derived and/or modified CDS sequence (opt1) from hemagglutinin__InfluenzaA__AEG65384

SEQ ID NO: 70799 - RNA, 1701 nt, Artificial Sequence; identical to SEQ ID NO: 64540
  derived and/or modified CDS sequence (opt1) from hemagglutinin__InfluenzaA__AEG65406

SEQ ID NO: 70800 - RNA, 1701 nt, Artificial Sequence; identical to SEQ ID NO: 64540
  derived and/or modified CDS sequence (opt1) from hemagglutinin__InfluenzaA__AEG65417

SEQ ID NO: 70801 - RNA, 1701 nt, Artificial Sequence; identical to SEQ ID NO: 64540
  derived and/or modified CDS sequence (opt1) from hemagglutinin__InfluenzaA__AEG65428

SEQ ID NO: 70802 - RNA, 1701 nt, Artificial Sequence
  derived and/or modified CDS sequence (opt1) from hemagglutinin__InfluenzaA__AEG65439
augaagaccaucaucgcccugagcuacauccucugccugguguucgcccagaagcugcccggcaacgacaacuccaccgcgacgcucugccuggggcaccacgccgucccgaacggcaccaucgugaagaccaucaccaacgaccagaucgaggugacgaacgccaccgagcugguccagagcuccagcaccgggggcaucugcgacagcccccaccagauccucgacggggagaacugcacccugaucgacgcccugcucggcgacccccagugcgacggcuuccagaacaagaagugggaccuguucguggagcgcagcaaggccuacuccaacugcuaccccuacgacgugccggacuacgcgagccugcggucccucgucgccagcuccgggacgcuggaguucaacaacgagagcuucaacuggaccggcgugacccagaacgggaccuccagcgccugcaagcgccgguccaacaacagcuucuucucccgccugaacuggcucacgcaccugaaguucaaguaccccgcccugaacgugaccaugcccaacaacgagaaguucgacaagcucuacaucuggggcguccaccaccccgggaccgacaacgaccagaucuuccuguacgcgcaggccagcggccggaucaccguguccacgaagcgcagccagcagaccgugaucccgaacaucggcagccggccccgcguccggaacauccccucccgcaucagcaucuacuggaccaucgugaagcccggggacauccugcucaucaacuccaccggcaaccugaucgccccgcggggguacuucaagauccgcagcggcaaguccagcaucaugcgguccgacgcccccaucggcaagugcaacagcgagugcaucacgcccaacggguccauccccaacgacaagccguuccagaacgugaaccgcaucaccuacggcgccugcccccgguacgucaagcagaacacccugaagcucgcgaccgggaugcgcaacgugcccgagaagcagacgcggggcaucuucggggccaucgccggcuucaucgagaacggcugggaggggaugguggacggcugguacggguuccgccaccagaacagcgagggcgucgggcaggccgccgaccugaaguccacccaggcggccaucaaccagaucaacggcaagcugaaccggcucaucggcaagaccaacgagaaguuccaccagaucgagaaggaguucagcgagguggaggggcgcauccaggaccuggagaaguacguggaggacaccaagaucgaccugugguccuacaacgccgagcuccuggucgcccuggagaaccagcacacgaucgaccucaccgacagcgagaugaacaagcuguucgagcggaccaagaagcagcugcgcgagaacgccgaggacaugggcaacgggugcuucaagaucuaccacaagugcgacaacgcgugcaucggcuccauccgcaacgggaccuacgaccacgacguguaccgggacgaggcccucaacaaccgcuuccagaucaagggcguggagcugaaguccggcuacaaggacuggauccuguggaucuccuucgccaucagcugcuuccuccugugcgucgcccugcucggguucaucaugugggccugccagaagggcaacauccggugcaacaucugcaucuga

SEQ ID NO: 70803 - RNA, 1701 nt, Artificial Sequence
  derived and/or modified CDS sequence (opt1) from hemagglutinin__InfluenzaA__AEG65450
augaagaccaucaucgccuggagcuacauccugugccucguguucgcccagaagcugcccggcaacgacaacuccaccgcgacgcugugccucgggcaccacgccgucccgaacggcaccaucgugaagaccaucaccaacgaccagaucgaggugacgaacgccaccgagcugguccagagcuccagcaccgggggcaucugcgacagcccccaccagauccuggacggggagaacugcacccucaucgacgcccugcugggcgacccccagugcgacggcuuccagaacaagaagugggaccucuucguggagcgcuccaaggccuacuccaacugcuaccccuacgacgugccggacuacgcgagccugcggucccugaucgccagcuccgggacgcucgaguucaacaacgagagcuucaacuggaccggcgucacccagaacgggaccuccagcgccugcaagcgccgguccaacagcuccuucuucagccgccugaacuggcugacgcaccucaaguucaaguaccccgcccugaacgugaccaugcccaacaacgaggaguucgacaagcuguacaucuggggcgugcaccaccccgggaccuacaacgaccagaucucccucuacgcgcaggccagcggccggaucaccgucagcacgaagcgcucccagcagaccgugaucccgaacaucggcagccggccccgcgugcgggacauccccucccgcaucagcaucuacuggaccaucgucaagcccggggacauccugcugaucaacuccaccggcaaccucaucgccccgcggggguacuucaagauccgcagcggcaaguccagcaucaugcgguccgacgcccccaucggcaagugcaacagcgagugcaucacgcccaacggguccauccccaacgacaagccguuccagaacgugaaccgcaucaccuacggcgccugcccccgguacgugaagcagaacacccugaagcuggcgaccgggaugcgcaacguccccgagaagcagacgcggggcaucuucggggccaucgccggcuucaucgagaacggcugggaggggaugguggacggcugguacggguuccgccaccagaacagcgagggcaucgggcaggccgccgaccucaaguccacccaggcggccaucgaccagaucaacggcaagcugaaccggcugaucggcaagaccaacgagaaguuccaccagaucgagaaggaguucagcgagguggaggggcgcauccaggaccucgagaaguacgucgaggacaccaagaucgaccugugguccuacaacgccgagcugcucguggcccuggagaaccagcacacgaucgaccugaccgacagcgagaugaacaagcuguucgagcggaccaagaagcagcuccgcgagaacgccgaggacaugggcaacgggugcuucaagaucuaccacaagugcgacaacgcgugcaucggcuccauccgcaacgggaccuacgaccacgacguguaccgggacgaggcccugaacaaccgcuuccagaucaagggcgucgagcucaagagcggcuacaaggacuggauccuguggaucuccuucgccaucagcugcuuccugcucugcguggcccugcugggguucaucaugugggccugccagaagggcaacauccggugcaacaucugcaucuga

SEQ ID NO: 70804 - RNA, 1701 nt, Artificial Sequence; identical to SEQ ID NO: 70803
  derived and/or modified CDS sequence (opt1) from hemagglutinin__InfluenzaA__AEG65461

SEQ ID NO: 70805 - RNA, 1701 nt, Artificial Sequence
  derived and/or modified CDS sequence (opt1) from hemagglutinin__InfluenzaA__AEG65472
augaagaccaucaucgccuggagcuacauccugugccucguguucgcccagaagcugcccggcaacgacaacuccaccgcgacgcugugccucgggcaccacgccgucccgaacggcaccaucgugaagaccaucaccaacgaccagaucgaggugacgaacgccaccgagcugguccagagcuccagcaccgggggcaucugcgacagcccccaccagauccuggacggggagaacugcacccucaucgacgcccugcugggcgacccccagugcgacggcuuccagaacaagaagugggaccucuucguggagcgcuccaaggccuacuccaacugcuaccccuacgacgugccggacuacgcgagccugcggucccugaucgccagcuccgggacgcucgaguucaacaacgagagcuucaacuggaccggcgucacccagaacgggaccuccagcgccugcaagcgccgguccaacagcuccuucuucagccgccugaacuggcugacgcaccucaaguucaaguaccccgcccugaacgugaccaugcccaacaacgaggaguucgacaagcuguacaucuggggcgugcaccaccccgggaccuacaacgaccagaucucccucuacgcgcaggccagcggccggaucaccgucagcacgaagcgcucccagcagaccgugaucccgaacaucggcagccggccccgcgugcgggacauccccucccgcaucagcaucuacuggaccaucgucaagcccggggacauccugcugaucaacuccaccggcaaccucaucgccccgcggggguacuucaagauccgcagcggcaaguccagcaucaugcgguccgacgcccccaucggcaagugcaacagcgagugcaucacgcccaacggguccauccccaacgacaagccguuccagaacgugaaccgcaucaccuacggcgccugcccccgguacgugaagcagaacacccugaagcuggcgaccgggaugcgcaacguccccgagaagcagacgcggggcaucuucggggccaucgccggcuucaucgagaacggcugggaggggaugguggacggcugguacggguuccgccaccagaacagcgagggcaucgggcaggccgccgaccucaaguccacccaggcggccaucgaccagaucaacggcaagcugaaccggcugaucggcaagaccaacgagaaguuccaccagaucgagaaggaguucagcgagguggaggggcgcauccaggaccucgagaaguacgucgaggacaccaagaucgaccugugguccuacaacgccgagcugcucguggcccuggagaaccagcacacgaucgaccugaccgacagcgagaugaacaagcuguucgagaucaccaagaagcagcuccgggagaacgccgaggacaugggcaacgggugcuucaagaucuaccacaagugcgacaacgcgugcaucggcuccauccgcaacgggaccuacgaccacgacguguaccgcgacgaggcccugaacaaccgguuccagaucaagggcgucgagcucaagagcggcuacaaggacuggauccuguggaucuccuucgccaucagcugcuuccugcucugcguggcccugcugggguucaucaugugggccugccagaagggcaacauccgcugcaacaucugcaucuga

SEQ ID NO: 70806 - RNA, 1701 nt, Artificial Sequence; identical to SEQ ID NO: 70803
  derived and/or modified CDS sequence (opt1) from hemagglutinin__InfluenzaA__AEG65483

SEQ ID NO: 70807 - RNA, 1701 nt, Artificial Sequence; identical to SEQ ID NO: 70803
  derived and/or modified CDS sequence (opt1) from hemagglutinin__InfluenzaA__AEG65494

SEQ ID NO: 70808 - RNA, 1701 nt, Artificial Sequence; identical to SEQ ID NO: 70803
  derived and/or modified CDS sequence (opt1) from hemagglutinin__InfluenzaA__AEG65505

SEQ ID NO: 70809 - RNA, 1701 nt, Artificial Sequence; identical to SEQ ID NO: 70803
  derived and/or modified CDS sequence (opt1) from hemagglutinin__InfluenzaA__AEG65516

SEQ ID NO: 70810 - RNA, 1701 nt, Artificial Sequence; identical to SEQ ID NO: 70803
  derived and/or modified CDS sequence (opt1) from hemagglutinin__InfluenzaA__AEG65527

SEQ ID NO: 70811 - RNA, 1701 nt, Artificial Sequence; identical to SEQ ID NO: 70803
  derived and/or modified CDS sequence (opt1) from hemagglutinin__InfluenzaA__AEG65538

SEQ ID NO: 70812 - RNA, 1701 nt, Artificial Sequence
  derived and/or modified CDS sequence (opt1) from hemagglutinin__InfluenzaA__AEG65560
augaagaccaucaucgcccugagcuacauccucugccugguguucgcccagaagcugcccggcaacgacaacuccaccgcgacgcucugccuggggcaccacgccgucccgaacggcaccaucgugaagaccaucaccaacgaccagaucgaggugacgaacgccaccgagcugguccagagcuccagcaccgggggcaucugcgacagcccccaccagauccucgacggggagaacugcacccugaucgacgcccugcucggcgacccccagugcgacggcuuccagaacaagaagugggaccuguucguggagcgcagcaaggccuacuccaacugcuaccccuacgacgugccggacuacgcgagccugcggucccucaucgccagcuccgggacgcuggaguucaacaacgagagcuucaacuggaccggcgucacccagaacgggaccuccagcgccugcaagcgccgguccaacagcuccuucuucagccgccugaacuggcucacgcaccugaaguucaaguaccccgcccugaacgugaccaugcccaacaacgaggaguucgacaagcucuacaucuggggcgugcaccaccccgggaccuacaacgaccagaucucccuguacgcgcaggccagcggccggaucaccgucagcacgaagcgcucccagcagaccgugaucccgaacaucggcagccggccccgcgugcgggacauccccucccgcaucagcaucuacuggaccaucgucaagcccggggacauccugcucaucaacuccaccggcaaccugaucgccccgcggggguacuucaagauccgcagcggcaaguccagcaucaugaaguccgacgcccccaucggcaagugcaacagcgagugcaucacgcccaacggguccauccccaacgacaagccguuccagaacgugaaccggaucaccuacggcgccugcccccgcuacgugaagcagaacacccugaagcucgcgaccgggaugcggaacguccccgagaagcagacgcgcggcaucuucggggccaucgccggcuucaucgagaacggcugggaggggaugguggacggcugguacggguuccggcaccagaacagcgagggcaucgggcaggccgccgaccugaaguccacccaggcggccaucgaccagaucaacggcaagcugaaccgccucaucggcaagaccaacgagaaguuccaccagaucgagaaggaguucagcgagguggaggggcggauccaggaccuggagaaguacgucgaggacaccaagaucgaccugugguccuacaacgccgagcuccugguggcccuggagaaccagcacacgaucgaccucaccgacagcgagaugaacaagcuguucgagcgcaccaagaagcagcugcgggagaacgccgaggacaugggcaacgggugcuucaagaucuaccacaagugcgacaacgcgugcaucggcuccauccgcaacgggaccuacgaccacgacguguaccgcgacgaggcccucaacaaccgguuccagaucaagggcgucgagcugaaguccggcuacaaggacuggauccuguggaucuccuucgccaucagcugcuuccuccugugcguggcccugcucggguucaucaugugggccugccagaagggcaacauccgcugcaacaucugcaucuga

SEQ ID NO: 70813 - RNA, 1701 nt, Artificial Sequence; identical to SEQ ID NO: 70812
  derived and/or modified CDS sequence (opt1) from hemagglutinin__InfluenzaA__AEG65571

SEQ ID NO: 70814 - RNA, 1701 nt, Artificial Sequence; identical to SEQ ID NO: 70812
  derived and/or modified CDS sequence (opt1) from hemagglutinin__InfluenzaA__AEG65582

SEQ ID NO: 70815 - RNA, 1701 nt, Artificial Sequence; identical to SEQ ID NO: 70812
  derived and/or modified CDS sequence (opt1) from hemagglutinin__InfluenzaA__AEG65593

SEQ ID NO: 70816 - RNA, 1701 nt, Artificial Sequence
  derived and/or modified CDS sequence (opt1) from hemagglutinin__InfluenzaA__AEG65604
augaagaccaucaucgcccugagcuacauccucugccugguguucgcccagaagcugcccggcaacgacaacuccaccgcgacgcucugccuggggcaccacgccgucccgaacggcaccaucgugaagaccaucaccaacgaccagaucgaggugacgaacgccaccgagcugguccagagcuccagcaccgggggcaucugcgacagcccccaccagauccucgacggggagaacugcacccugaucgacgcccugcucggcgacccccagugcgacggcuuccagaacaagaagugggaccuguucguggagcgcagcaaggccuacuccaacugcuaccccuacgacgugccggacuacgcgagccugcggucccucaucgccagcuccgggacgcuggaguucaacaacgagagcuucaacuggaccggcgucacccagaacgggaccuccagcgccugcaagcgccgguccaacaacagcuucuucucccgccugaacuggcucacgcaccugaaguucaaguaccccgcccugaacgugaccaugcccaacaacgaggaguucgacaagcucuacaucuggggcgugcaccaccccgggaccgacaacgaccagaucagccuguacgcgcaggccuccggcaagaucaccgucagcacgaagcggagccagcagaccgugaucccgaacaucggcucccgcccccgggugcgcgacauccccagccggaucuccaucuacuggaccaucgucaagcccggggacauccugcucaucaacagcaccggcaaccugaucgccccgcgcggguacuucaagauccgguccggcaagagcuccaucaugcgcagcgacgcccccaucggcaagugcaacuccgagugcaucacgcccaacgggagcauccccaacgacaagccguuccagaacgugaaccggaucaccuacggcgccugcccccgcuacgugaagcagaacacccugaagcucgcgaccgggaugcggaacguccccgagaagcagacgcgcggcaucuucggggccaucgccggcuucaucgagaacggcugggaggggaugguggacggcugguacggguuccggcaccagaacuccgagggcaucgggcaggccgccgaccugaaguccacccaggcggccaucgaccagaucaacggcaagcugaaccgccucaucggcaagaccaacgagaaguuccaccagaucgagaaggaguucuccgagguggaggggcggauccaggaccuggagaaguacgucgaggacaccaagaucgaccuguggagcuacaacgccgagcuccugguggcccuggagaaccagcacacgaucgaccucaccgacuccgagaugaacaagcuguucgagcgcaccaagaagcagcugcgggagaacgccgaggacaugggcaacgggugcuucaagaucuaccacaagugcgacaacgcgugcaucggcagcauccgcaacgggaccuacgaccacgacguguaccgcgacgaggcccucaacaaccgguuccagaucaagggcgucgagcugaaguccggcuacaaggacuggauccuguggaucagcuucgccaucuccugcuuccuccugugcguggcccugcucggguucaucaugugggccugccagaagggcaacauccgcugcaacaucugcaucuga

SEQ ID NO: 70817 - RNA, 1701 nt, Artificial Sequence
  derived and/or modified CDS sequence (opt1) from hemagglutinin__InfluenzaA__AEG65626
augaagaccaucaucgcccugagcuacauccucugccugguguucgcccagaagcugcccggcaacgacaacuccaccgcgacgcucugccuggggcaccacgccgucccgaacggcaccaucgugaagaccaucaccaacgaccagaucgaggugacgaacgccaccgagcugguccagagcuccagcaccgggggcaucugcgacagcccccaccagauccucgacggggagaacugcacccugaucgacgcccugcucggcgacccccagugcgacggcuuccagaacaagaagugggaccuguucguggagcgcagcaaggccuacuccaacugcuaccccuacgacgugccggacuacgcgagccugcggucccucgucgccagcuccgggacgcuggaguucaacaacgagagcuucaacuggaccggcgugacccagaacgggaccuccagcgccugcaagcgcaaguccaacaacagcuucuucucccggcugaacuggcucacgcaccugaaguucaaguaccccgcccugaacgugaccaugcccaacaacaagaaguucgacaagcucuacaucuggggcguccaccaccccgggaccgacaacgaccagaucagccuguacgcgcaggccuccggccgcaucaccgugagcacgaagcggagccagcagaccgugaucccgaacaucggcucccgcccccggguccgcgacauccccagccggaucuccaucuacuggaccaucgugaagcccggggacaugcugcucaucaacagcaccggcaaccugaucgccccgcgcggguacuucaagauccgguccggcaagagcuccaucaugcgcagcgacgcccccaucggcaagugcaacuccgagugcaucacgcccaacgggagcauccccaacgacaagccguuccagaacgugaaccggaucaccuacggcgccugcccccgcuacgucaagcagaacacccugaagcucgcgaccgggaugcggaacgugcccgagaagcagacgcgcggcaucuucggggccaucgccggcuucaucgagaacggcugggaggggaugguggacggcugguacggguuccggcaccagaacuccgagggcaccgggcaggccgccgaccugaaguccacccaggcggccaucaaccagaucaacggcaagcugaaccgccucaucggcaagaccaacgagaaguuccaccagaucgagaaggaguucuccgaggucgaggggcggauccaggaccuggagaaguacguggaggacacgaagaucgaccuguggagcuacaacgccgagcuccugguggcccuggagaaccagcacaccaucgaccucaccgacuccgagaugaacaagcuguucgagcgcaccaagaagcagcugcgggagaacgccgaggacaugggcaacgggugcuucaagaucuaccacaagugcgacaacgcgugcaucggcagcauccgcaacgggacguacgaccacgacgucuaccgcgacgaggcccucaacaaccgguuccagaucaagggcguggagcugaaguccggcuacaaggacuggauccuguggaucagcuucgccaucuccugcuuccuccugugcguggcccugcucggguucaucaugugggccugccagaagggcaacauccgcugcaacaucugcaucuga

SEQ ID NO: 70818 - RNA, 1701 nt, Artificial Sequence
  derived and/or modified CDS sequence (opt1) from hemagglutinin__InfluenzaA__AEG65637
augaagaccaucaucgcccugagcuacauccucugccugguguucgcccagaagcugcccggcaacgacaacuccaccgcgacgcucugccuggggcaccacgccgucccgaacggcaccaucgugaagaccaucaccaacgaccagaucgaggugacgaacgccaccgagcugguccagagcuccagcaccgggggcaucugcgacagcccccaccagauccucgacggggagaacugcacccugaucgacgcccugcucggcgacccccagugcgacggcuuccagaacaagaagugggaccuguucguggagcgcagcaaggccuacuccaacugcuaccccuacgacgugccggacuacgcgagccugcggucccucgucgccagcuccgggacgcuggaguucaacaacgagagcuucaacuggaccggcgugacccagaacgggaccuccagcgccugcaagcgcaaguccaacaacagcuucuucucccggcugaacuggcucacgcaccugaaguucaaguaccccgcccugaacgugaccaugcccaacaacaagaaguucgacaagcucuacaucuggggcguccaccaccccgggaccgacaacgaccagaucagccuguacgcgcaggccuccggccgcaucaccgugagcacgaagcggagccagcagaccgugaucccgaacaucggcucccgcccccggguccgcgacauccccagccggaucuccaucuacuggaccaucgugaagcccggggacaugcugcucaucaacagcaccggcaaccugaucgccccgcgcggguacuucaagauccgguccggccgcagcuccaucaugcggagcgacgcccccaucggcaagugcaacuccgagugcaucacgcccaacgggagcauccccaacgacaagccguuccagaacgugaaccgcaucaccuacggcgccugcccccgguacgucaagcagaacacccugaagcucgcgaccgggaugcgcaacgugcccgagaagcagacgcggggcaucuucggggccaucgccggcuucaucgagaacggcugggaggggaugguggacggcugguacggguuccgccaccagaacuccgagggcaccgggcaggccgccgaccugaaguccacccaggcggccaucaaccagaucaacggcaagcugaaccggcucaucggcaagaccaacgagaaguuccaccagaucgagaaggaguucuccgaggucgaggggcgcauccaggaccuggagaaguacguggaggacacgaagaucgaccuguggagcuacaacgccgagcuccugguggcccuggagaaccagcacaccaucgaccucaccgacuccgagaugaacaagcuguucgagcggaccaagaagcagcugcgcgagaacgccgaggacaugggcaacgggugcuucaagaucuaccacaagugcgacaacgcgugcaucggcagcauccgcaacgggacguacgaccacgacgucuaccgggacgaggcccucaacaaccgcuuccagaucaagggcguggagcugaaguccggcuacaaggacuggauccuguggaucagcuucgccaucuccugcuuccuccugugcguggcccugcucggguucaucaugugggccugccagaagggcaacauccggugcaacaucugcaucuga

SEQ ID NO: 70819 - RNA, 1701 nt, Artificial Sequence; identical to SEQ ID NO: 64055
  derived and/or modified CDS sequence (opt1) from hemagglutinin__InfluenzaA__AEG65648

SEQ ID NO: 70820 - RNA, 1701 nt, Artificial Sequence; identical to SEQ ID NO: 65819
  derived and/or modified CDS sequence (opt1) from hemagglutinin__InfluenzaA__AEG65659

SEQ ID NO: 70821 - RNA, 1701 nt, Artificial Sequence; identical to SEQ ID NO: 65819
  derived and/or modified CDS sequence (opt1) from hemagglutinin__InfluenzaA__AEG65670

SEQ ID NO: 70822 - RNA, 1701 nt, Artificial Sequence; identical to SEQ ID NO: 65819
  derived and/or modified CDS sequence (opt1) from hemagglutinin__InfluenzaA__AEG65681

SEQ ID NO: 70823 - RNA, 1701 nt, Artificial Sequence; identical to SEQ ID NO: 70794
  derived and/or modified CDS sequence (opt1) from hemagglutinin__InfluenzaA__AEG65692

SEQ ID NO: 70824 - RNA, 1701 nt, Artificial Sequence; identical to SEQ ID NO: 64654
  derived and/or modified CDS sequence (opt1) from hemagglutinin__InfluenzaA__AEG65703

SEQ ID NO: 70825 - RNA, 1701 nt, Artificial Sequence
  derived and/or modified CDS sequence (opt1) from hemagglutinin__InfluenzaA__AEG65747
augaagaccaucaucgcccugagcuacauccucugccugguguucgcccagaagcugcccggcaacgacaacuccaccgcgacgcucugccuggggcaccacaccgucccgaacggcaccaucgugaagaccaucacgaacgaccagaucgaggugaccaacgccaccgagcugguccagagcuccagcaccggggagaucugcgacagcccccaccagauccucgacggcgagaacugcacgcugaucgacgcccugcucggggacccccagugcgacggcuuccagaacaagaagugggaccuguucguggagcgcagcaaggccuacuccaacugcuaccccuacgacgugccggacuacgccagccugcggucccucgucgcgagcuccggcacccuggaguucaacaacgagagcuucaacuggaccggggugacccagaacggcacguccagcgccugcaagcgccgguccaacaacagcuucuucucccgccugaacuggcucacccaccugaaguucaaguaccccgcccugaacgugaccaugcccaacaacgagaaguucgacaagcucuacaucuggggcguccaccaccccgggaccgacaacgaccagaucuuccuguacgcccaggcgagcgggcggaucacgguguccaccaagcgcagccagcagaccgugaucccgaacaucggcagccggccccgcguccggaacauccccucccgcaucagcaucuacuggaccaucgugaagcccggcgacauccugcucaucaacuccacggggaaccugaucgccccgcggggcuacuucaagauccgcagcgggaaguccagcaucaugcgguccgacgcccccaucggcaagugcaacagcgagugcaucacccccaacggcuccauccccaacgacaagccguuccagaacgugaaccgcaucaccuacggggccugcccccgguacgucaagcagaacacccugaagcucgccacgggcaugcgcaacgugcccgagaagcagacccgggggaucuucggcgcgaucgccggguucaucgagaacggcugggagggcaugguggacgggugguacggcuuccgccaccagaacagcgaggggaccggccaggccgccgaccugaaguccacccaggccgcgaucaaccagaucaacgggaagcugaaccggcucaucggcaagacgaacgagaaguuccaccagaucgagaaggaguucagcgaggucgagggccgcauccaggaccuggagaaguacguggaggacaccaagaucgaccugugguccuacaacgccgagcuccugguggcccuggagaaccagcacaccaucgaccucaccgacagcgagaugaacaagcuguucgagcggacgaagaagcagcugcgcgagaacgccgaggacauggggaacggcugcuucaagaucuaccacaagugcgacaacgccugcaucggguccauccgcaacggcaccuacgaccacgacgucuaccgggacgaggcgcucaacaaccgcuuccagaucaaggggguggagcugaaguccggcuacaaggacuggauccuguggaucuccuucgccaucagcugcuuccuccugugcguggcccugcucggcuucaucaugugggccugccagaaggggaacauccggugcaacaucugcaucuga

SEQ ID NO: 70826 - RNA, 1701 nt, Artificial Sequence
  derived and/or modified CDS sequence (opt1) from hemagglutinin__InfluenzaA__AEG65758
augaagaccaucaucgcccugagcuacauccucugccugguguccgcccagaagcugcccggcaacgacaacagcaccgcgacgcucugccuggggcaccacgccgucccgaacggcaccaucgugaagaccaucaccaacgaccagaucgaggugacgaacgccaccgagcugguccaguccagcuccaccgggggcaucugcgacagcccccaccagauccucgacggggagaacugcacccugaucgacgcccugcucggcgacccccagugcgacggcuuccagaacaagaagugggaccuguucguggagcgcuccaaggccuacagcaacugcuaccccuacgacgugccggacuacgcgucccugcggagccucgucgccuccagcgggacgcuggaguucaacaacgaguccuucaacuggaccggcgugacccagaacgggaccagcuccgccugcaagcgccggagcaacaacuccuucuucagccgccugaacuggcucacgcaccugaaguucaaguaccccgcccugaacgugaccaugcccaacaacgagaaguucgacaagcucuacaucuggggcguccaccaccccgggaccgacaacgaccagaucuuccuguacgcgcaggccuccggccggaucaccgugagcacgaagcgcagccagcagaccgugaucccgaacaucggcucccggccccgcguccggaacauccccagccgcaucuccaucuacuggaccaucgugaagcccggggacauccugcucaucaacagcaccggcaaccugaucgccccgcggggguacuucaagauccgcuccggcaagagcuccaucaugcggagcgacgcccccaucggcaagugcaacuccgagugcaucacgcccaacgggagcauccccaacgacaagccguuccagaacgugaaccgcaucaccuacggcgccugcccccgguacgucaagcagaacacccugaagcucgcgaccgggaugcgcaacgugcccgagaagcagacgcggggcaucuucggggccaucgccggcuucaucgagaacggcugggaggggaugguggacggcugguacggguuccgccaccagaacuccgagggcaucgggcaggccgccgaccucaagagcacccaggcggccaucaaccagaucaacggcaagcugaaccggcugaucggcaagaccaacgagaaguuccaccagaucgagaaggaguucuccgaggucgaggggcgcauccaggaccuggagaaguacguggaggacaccaagaucgaccuguggagcuacaacgccgagcuccugguggcccuggagaaccagcacacgaucgaccucaccgacuccgagaugaacaagcuguucgagcggaccaagaagcagcugcgcgagaacgccgaggacaugggcaacgggugcuucaagaucuaccacaagugcgacaacgcgugcaucggcagcauccgcaacgggaccuacgaccacgacgucuaccgggacgaggcccucaacaaccgcuuccagaucaagggcguggagcugaaguccggcuacaaggacuggauccuguggaucagcuucgccaucuccugcuuccuccugugcguggcccugcucggguucaucaugugggccugccagaagggcaacauccggugcaacaucugcaucuga

SEQ ID NO: 70827 - RNA, 1701 nt, Artificial Sequence; identical to SEQ ID NO: 64305
  derived and/or modified CDS sequence (opt1) from hemagglutinin__InfluenzaA__AEG65769

SEQ ID NO: 70828 - RNA, 1701 nt, Artificial Sequence
  derived and/or modified CDS sequence (opt1) from hemagglutinin__InfluenzaA__AEG65780
augaagaccaucaucgcccugagcuacauccucugccugguguucgcccagaagcugcccggcaacgacaacuccaccgcgacgcucugccuggggcaccacgccgucccgaacggcaccaucgugaagaccaucaccaacgacaagaucgaggugacgaacgccaccgagcugguccagagcuccagcaccggggagaucugcaacagcccccaccagauccucgacggcgagaacugcacccugaucgacgcccugcucggggacccccagugcgacggcuuccagaacaagaagugggaccuguucguggagcgcagcaaggcccacuccaacugcuaccccuacgacgugccggacuacgcgagccugcggucccucgucgccgccagcggcacgcuggaguucaacaacgaguccuucaacuggaccggggugacccagaacggcaccagcuccgccugcauccgccggagcaacaacuccuucuucagccgccugaacuggcucacgcaccugaacuucaaguaccccgcgcugaacgugaccaugcccaacaacgagcaguucgacaagcucuacaucuggggcguccaccaccccgggaccgacaaggaccagaucuuccuguacgcccaggccgccgggcggaucaccguguccacgaagcgcagccagcaggccgugaucccgaacaucggcucccggccccgcguccggaacauccccagccgcgugagcaucuacuggaccaucgugaagcccggcgacauccugcucaucaacuccaccgggaaccugaucgcgccgcggggcuacuucaagauccgcagcgggaaguccagcaucaugcgguccgacgcccccaucggcaagugcaacagcgccugcaucacccccaacggcuccauccccaacgacaagccguuccagaacgucaaccgcaucacguacggggccugcccccgguacgugaagcagaacacccugaagcucgccaccggcaugcgcaacgugcccgagaagcagacccgggggaucuucggcgcgaucgccggguucaucgagaacggcugggagggcauggucgacgggugguacggcuuccgccaccagaacagcgaggggcggggccaggccgccgaccugaaguccacgcaggccgcgaucgaccagaucaacgggaagcugaaccgccucaucggcaagaccaacgagaaguuccaccagaucgagaaggaguucagcgagguggagggccggauccaggaccuggagaaguacguggaggacaccaagaucgaccugugguccuacaacgccgagcuccuggucgcccuggagaaccagcacaccaucgaccucacggacagcgagaugaacaagcuguucgagaagaccaagaagcagcugcgcgagaacgccgaggacauggggaacggcugcuucaagaucuaccacaagugcgacaacgccugcaucggguccauccgcaacggcaccuacgaccacgacguguaccgggacgaggcgcucaacaaccgcuuccagaucaaggggguggagcugaaguccggcuacaaggacuggauccuguggaucuccuucgccaucagcugcuuccuccugugcgucgcccugcucggcuucaucaugugggccugccagaaggggaacauccggugcaacaucugcaucuga

SEQ ID NO: 70829 - RNA, 1701 nt, Artificial Sequence
  derived and/or modified CDS sequence (opt1) from hemagglutinin__InfluenzaA__AEG65813
augaagaccaucaucgcccugagcuacauccucugccugguguucgcccagaagcugcccggcaacgacaacuccaccgcgacgcucugccuggggcaccacgccgucccgaacggcaccaucgugaagaccaucaccaacgaccagaucgaggugacgaacgccaccgagcugguccagagcuccagcaccggggagaucugcaacagcccccaccagauccucgacggcgagaacugcacccugaucgacgcccugcucggggacccccagugcgacggcuuccagaacaagaagugggaccuguucguggagcgcagcaaggcccacuccaacugcuaccccuacgacgugccggacuacgcgagccugcggucccucgucgccagcuccggcacgcuggaguucaacaacgagagcuucaacuggaccggggugacccagaacggcaccuccagcgccugcauccgccgguccaacaacagcuucuucucccgccugaacuggcucacgcaccugaacuucaaguaccccgcccugaacgugaccaugcccaacaacgagcaguucgacaagcucuacaucuggggcguccaccaccccgggaccgacaaggaccagaucuuccuguacgcgcaggccgccgggcggaucaccgugagcacgaagcgcucccagcaggccgugaucccgaacaucggcagccggccccgcguccggaacauccccagccgcguguccaucuacuggaccaucgugaagcccggcgacauccugcucaucaacagcaccgggaaccugaucgccccgcggggcuacuucaagauccgcuccgggaaguccuccaucaugcggagcgacgcgcccaucggcaagugcaacuccgccugcaucacccccaacggcagcauccccaacgacaagccguuccagaacgucaaccgcaucacguacggggccugcccccgguacgugaagcagaacacccugaagcucgccaccggcaugcgcaacgugcccgagaagcagacccgggggaucuucggcgccaucgcgggguucaucgagaacggcugggagggcauggucgacgggugguacggcuuccgccaccagaacuccgaggggcggggccaggccgccgaccucaagagcacgcaggccgccaucgaccagaucaacgggaagcugaaccgccugaucggcaagaccaacgagaaguuccaccagaucgagaaggaguucuccgagguggagggccggauccaggaccuggagaaguacguggaggacaccaagaccgaccuguggagcuacaacgcggagcuccuggucgcccuggagaaccagcacacgaucgaccucaccgacuccgagaugaacaagcuguucgagaagaccaagaagcagcugcgcgagaacgccgaggacauggggaacggcugcuucaagaucuaccacaagugcgacaacgccugcaucgggagcauccgcaacggcaccuacgaccacgacguguaccgggacgaggcccucaacaaccgcuuccagaucaaggggguggagcugaaguccggcuacaaggacuggauccuguggaucagcuucgcgaucuccugcuuccuccugugcgucgcccugcucggcuucaucaugugggccugccagaaggggaacauccggugcaacaucugcaucuga

SEQ ID NO: 70830 - RNA, 1701 nt, Artificial Sequence
  derived and/or modified CDS sequence (opt1) from hemagglutinin__InfluenzaA__AEG79801
augaaggccauccuggugguccuccuguacaccuucgccaccgcgaacgccgacacgcugugcaucggcuaccacgccaacaacagcaccgacaccguggacaccgugcucgagaagaacgucacggugacccacuccgugaaccugcuggaggacaagcacaacgggaagcucugcaagcugcgcggcgucgcgccccugcaccucgggaagugcaacaucgccggcuggauccuggggaacccggagugcgagagccuguccaccgccagcuccuggagcuacaucguggagaccuccagcuccgacaacggcacgugcuaccccggcgacuucaucaacuacgaggagcuccgggagcagcugagcuccgugagcuccuucgagcgcuucgagaucuuccccaagaccagcuccuggcccaaccacgacagcaacaagggggucaccgccgccugcccgcacgccggcgcgaaguccuucuacaagaaccugaucuggcucgugaagaaggggaacagcuaccccaagcuguccaagagcuacaucaacgacaagggcaaggaggugcugguccucugggggauccaccaccccagcaccacggccgaccagcagucccuguaccagaacgccgacgccuacguguucgugggcaccagccgguacuccaagaaguucaagcccgagaucgccauccgcccgaagguccgggaccgcgagggccggaugaacuacuacuggacccugguggagcccggggacaagaucaccuucgaggcgacgggcaaccucguggucccccgcuacgccuucgccauggagcggaacgccgggagcggcaucaucaucuccgacacccccgugcacgacugcaacacgaccugccagaccccgaagggcgccaucaacaccagccugcccuuccagaacauccaccccaucaccaucgggaagugccccaaguacgugaaguccaccaagcugcgccucgcgacgggccugcggaacgucccgagcauccagucccgcgggcuguucggcgccaucgccggguucaucgagggcggcuggaccgggaugguggacggcugguacggguaccaccaccagaacgagcagggcagcggguacgccgccgaccucaaguccacccagaacgcgaucgacaagaucaccaacaaggugaacagcgucaucgagaagaugaacacgcaguucaccgccgugggcaaggaguucaaccaccuggagaagcggaucgagaaccugaacaagaaggucgacgacggcuuccucgacaucuggaccuacaacgccgagcugcuggugcuccuggagaacgagcgcacccuggacuaccacgacuccaacgugaagaaccucuacgagaagguccggaaccagcugaagaacaacgccaaggagaucgggaacggcugcuucgaguucuaccacaagugcgacaacacgugcauggagagcgugaagaacgggaccuacgacuaccccaaguacuccgaggaggccaagcugaaccgcgaggagaucgacggcgugaagcucgagagcacccggaucuaccagauccuggcgaucuacuccaccgucgccagcucccuggugcucguggucagccugggggccaucagcuucuggaugugcuccaacggcagccugcagugccgcaucugcaucuga

SEQ ID NO: 70831 - RNA, 1701 nt, Artificial Sequence
  derived and/or modified CDS sequence (opt1) from hemagglutinin__InfluenzaA__AEG79807
augaaggccauccuggugguccuccuguacaccuucgccaccgcgaacgccgacacgcugugcaucggcuaccacgccaacaacagcaccgacaccguggacaccgugcucgagaagaacgucacggugacccacuccgugaaccugcuggaggacaagcacaacgggaagcucugcaagcugcgcggcgucgcgccccugcaccucgggaagugcaacaucgccggcuggauccuggggaacccggagugcgagagccuguccaccgccagcuccuggagcuacaucguggagaccuccagcuccgacaacggcacgugcuaccccggcgacuucaucaacuacgaggagcuccgggagcagcugagcuccgugagcuccuucgagcgcuucgagaucuuccccaagaccagcuccuggcccaaccacgacagcaacaagggggucaccgccgccugcccgcacgccggcgcgaaguccuucuacaagaaccugaucuggcucgugaagaaggagaacagcuaccccaagcuguccaagagcuacaucaacgacaaggggaaggaggugcugguccucuggggcauccaccaccccagcaccacggccgaccagcaguccaucuaccagaacgccgacgccuacguguucguggggaccagccgguacuccaagaaguucaagcccgagaucgccauccgcccgaagguccgggaccaggagggccgcaugaacuacuacuggacccugguggagcccggcgacaagaucaccuucgaggcgacggggaaccugguggucccccgguacgccuucgccauggagcgcaacgccggcagcgggaucaucaucuccgacacccccgugcacgacugcaacacgaccugccagaccccgaagggcgccaucaacaccagccuccccuuccagaacauccaccccaucaccaucggcaagugccccaaguacgugaaguccaccaagcugcggcuggcgacggggcuccgcaacgucccgagcauccagucccggggccuguucggggccaucgccggcuucaucgagggcggguggaccggcaugguggacgggugguacggcuaccaccaccagaacgagcaggggagcggcuacgccgccgaccugaaguccacccagaacgcgaucgacaagaucaccaacaaggugaacagcgucaucgagaagaugaacacgcaguucaccgccguggggaaggaguucaaccaccucgagaagcgcaucgagaaccugaacaagaaggucgacgacggcuuccuggacaucuggaccuacaacgccgagcuccuggugcugcucgagaacgagcggacccuggacuaccacgacuccaacgugaagaaccuguacgagaagguccgcaaccagcucaagaacaacgccaaggagaucggcaacgggugcuucgaguucuaccacaagugcgacaacacgugcauggagagcgugaagaacggcaccuacgacuaccccaaguacuccgaggaggccaagcugaaccgggaggagaucgacggggugaagcuggagagcacccgcaucuaccagauccucgcgaucuacuccaccgucgccagcucccuggugcugguggucagccucggcgccaucagcuucuggaugugcuccaacgggagccugcagugccggaucugcaucuga

SEQ ID NO: 70832 - RNA, 1701 nt, Artificial Sequence
  derived and/or modified CDS sequence (opt1) from hemagglutinin__InfluenzaA__AEG79835
augaaggccauccuggugguccuccuguacaccuucgccaccgcgaacgccgacacgcugugcaucggcuaccacgccaacaacagcaccgacaccguggacaccgugcucgagaagaacgucacggugacccacuccgugaaccugcuggaggacaagcacaacgggaagcucugcaagcugcgcggcgucgcgccccugcaccucgggaagugcaacaucgccggcuggauccuggggaacccggagugcgagagccuguccaccgccagcuccuggagcuacaucguggagaccuccagcuccgacaacggcacgugcuaccccggcgacuucaucgacuacgaggagcuccgggagcagcugagcuccgugagcuccuucgagcgcuucgagaucuuccccaagaccagcuccuggcccaaccacgacagcaacaagggggucaccgccgccugcccgcacgccggcgcgaagggguucuacaagaaccugaucuggcucgugaagaagggcaacuccuaccccaagcugagcaaguccuacaucaacgacaaggggaaggaggugcugguccucuggggcauccaccaccccagcaccacggccgaccagcagagcaucuaccagaacgccgacaccuacguguucgugggcaccucccgguacagcaagaaguucaagcccgagaucgccauccgcccgaagguccgggaccaggaggggcgcaugaacuacuacuggacccugguggagcccggcgacaagaucacguucgaggccaccgggaaccugguggucccccgguacgcguucgccauggagcgcaacgccggcuccggcaucaucaucagcgacacccccgugcacgacugcaacaccacgugccagaccccgaagggggccaucaacaccucccuccccuuccagaacauccaccccaucaccaucggcaagugccccaaguacgucaagagcacgaagcugcggcuggccaccgggcuccgcaacgugccguccauccagagccggggccuguucggggcgaucgccggcuucaucgagggcggguggaccggcaugguggacgggugguacggcuaccaccaccagaacgagcagggguccggcuacgccgccgaccucaagagcacccagaacgccaucgacaagaucacgaacaaggugaacuccgucaucgagaagaugaacacccaguucaccgcggugggcaaggaguucaaccaccuggagaagcgcaucgagaaccugaacaagaaggucgacgacggguuccuggacaucuggaccuacaacgccgagcuccuggugcugcucgagaacgagcggacgcuggacuaccacgacagcaacgugaagaaccuguacgagaagguccgcaaccagcucaagaacaacgccaaggagaucggcaacgggugcuucgaguucuaccacaagugcgacaacacgugcauggaguccgugaagaacggcaccuacgacuaccccaaguacagcgaggaggccaagcugaaccgggaggagaucgacggggugaagcuggaguccacccgcaucuaccagauccucgccaucuacagcaccgucgcguccagccuggugcugguggucucccucggcgccaucagcuucuggaugugcagcaacggcucccugcagugccggaucugcaucuga

SEQ ID NO: 70833 - RNA, 1701 nt, Artificial Sequence
  derived and/or modified CDS sequence (opt1) from hemagglutinin__InfluenzaA__AEH59363
augaaggccauccuggugguccuccuguacaccuucgccaccgcgaacgccgacacgcugugcaucggcuaccacgccaacaacagcaccgacaccguggacaccgugcucgagaagaacgucacggugacccacuccgugaaccugcuggaggacaagcacaacgggaagcucugcaagcugcgcggcgucgcgccccugcaccucgggaagugcaacaucgccggcuggauccuggggaacccggagugcgagagccuguccaccgccagcuccuggagcuacaucguggagaccuccagcuccgacaacggcacgugcuaccccggcgacuucaucaacuacgaggagcuccgggagcagcugagcuccgugagcuccuucgagcgcuucgagaucuuccccaagaccagcuccuggcccaaccacgacagcaacaagggggucaccgccgccugcccgcaggccggcgcgaaguccuucuacaagaaccugaucuggcucgugaagaaggggaacagcuaccccaagcuguccaagagcuacaucaacgacaagggcaaggaggugcugguccucugggggauccaccaccccagcaccuccgccgaccagcagagccuguaccagaacgccgacgccuacguguucgugggcacguccaaguacagcaagaaguucaagcccgagaucgccguccggccgaaggugcgcgaccaggagggccggaugaacuacuacuggacccugguggagcccggggacaagaucaccuucgaggcgaccggcaaccuccuggucccccgcuacgccuucgccauggagcggaacgccggguccggcaucaucaucagcgacacgcccgugcacgacugcaacacgaccugccagaccccgaagggcgccaucaacaccucccugcccuuccagaacauccaccccaucaccaucgggaagugccccaaguacgucaagagcaccaagcuccgccuggcgaccggccugcggaacgugccguccauccagagccgcgggcuguucggcgccaucgccggguucaucgagggcggcuggacggggaugguggacggcugguacggguaccaccaccagaacgcccagggcuccggguacgccgcggaccucaagagcacccagaacgccaucgacaagaucaccaacaaggugaacuccgucaucgagaagaugaacacccaguucacggccgugggcaaggaguucaaccaccuggagaagcggaucgagaaccucaacaagaaggucgacgacggcuuccuggacaucuggaccuacaacgccgagcugcucgugcugcuggagaacgagcgcacccucgacuaccacgacagcaacgugaagaaccuguacgagaagguccggucccagcugaagaacaacgccaaggagaucgggaacggcugcuucgaguucuaccacaagugcgacaacacgugcauggagagcgugaagaacgggaccuacgacuaccccaaguacuccgaggaggcgaagcucaaccgcgaggagaucgacggcgugaagcuggagagcacccggaucuaccagauccuggccaucuacuccaccgucgccagcagccucgugcugguggucucccugggggccaucagcuucuggaugugcuccaacggcagccuccagugccgcaucugcaucuga

SEQ ID NO: 70834 - RNA, 1701 nt, Artificial Sequence
  derived and/or modified CDS sequence (opt1) from hemagglutinin__InfluenzaA__AEH59367
augaaggccauccuggugguccuccuguacaccuucgccaccgcgaacgccgacacgcugugcaucggcuaccacgccaacaacagcaccgacaccguggacaccgugcucgagaagaacgucacggugacccacuccgugaaccugcuggaggacaagcacaacgggaagcucugcaagcugcgcggcgucgcgccccugcaccucgggaagugcaacaucgccggcuggauccuggggaacccggagugcgagagccuguccaccgccagcuccuggagcuacaucguggagaccuccagcuccgacaacggcacgugcuaccccggcgacuucaucaacuacgaggagcuccgggagcagcugagcuccgugagcuccuucgagcgcuucgagaucuuccccaagaccagcuccuggcccaaccacgacagcaacaagggggucaccgccgccugcccgcacgccggcgcgaaguccuucuacaagaaccugaucuggcucgugaagaaggggaacagcuaccccaagcuguccaagagcuacaucaacgacaagggcaaggaggugcugguccucugggggauccaccaccccagcaccacggccgaccagcagucccuguaccagaacgccgacgccuacguguucgugggcaccagccgguacuccaagaaguucaagcccgagaucgccauccgcccgaagguccgggaccaggagggccgcaugaacuacuacugggcgcugguggagcccggggacaagaucaccuucgaggccaccggcaaccucguggucccccgguacgccuucgccauggagcgcaacgccgggagcggcaucaucaucuccgacacgcccgugcacgacugcaacacgaccugccagaccccgaagggcgcgaucaacaccagccugcccuuccagaacauccaccccaucaccaucgggaagugccccaaguacgugaaguccaccaagcugcggcucgccaccggccugcgcaacgucccgagcauccagucccgggggcuguucggcgccaucgccggguucaucgagggcggcuggacggggaugguggacggcugguacggguaccaccaccagaacgagcagggcagcggguacgccgcggaccucaaguccacccagaacgccaucgacaagaucaccaacaaggugaacagcgucaucgagaagaugaacacccaguucacggccgugggcaaggaguucaaccaccuggagaagcgcaucgagaaccugaacaagaaggucgacgacggcuuccucgacaucuggaccuacaacgccgagcugcuggugcuccuggagaacgagcggacccuggacuaccacgacuccaacgugaagaaccucuacgagaagguccgcaaccagcugaagaacaacgccaaggagaucgggaacggcugcuucgaguucuaccacaagugcgacaacacgugcauggagagcgugaagaacgggaccuacgacuaccccaaguacuccgaggaggcgaagcugaaccgggaggagaucgacggcgugaagcucgagagcacccgcaucuaccagauccuggccaucuacuccaccgucgccagcucccuggugcucguggucagccugggggccaucagcuucuggaugugcuccaacggcagccugcagugccggaucugcaucuga

SEQ ID NO: 70835 - RNA, 1701 nt, Artificial Sequence
  derived and/or modified CDS sequence (opt1) from hemagglutinin__InfluenzaA__AEH59369
augaaggccauccuggugguccuccuguacaccuucgccaccgcgaacgccgacacgcugugcaucggcuaccacgccaacaacagcaccgacaccguggacaccgugcucgagaagaacgucacggugacccacuccgugaaccugcuggaggacaagcacaacgggaagcucugcaagcugcgcggcgucgcgccccugcaccucgggaagugcaacaucgccggcuggauccuggggaacccggagugcgagagccuguccaccgccagcuccuggagcuacaucguggagaccuccagcuccgacaacggcacgugcuaccccggcgacuucaucgacuacgaggagcuccgggagcagcugagcuccgugagcuccuucgagcgcuucgagaucuuccccaaggccagcuccuggcccaaccacgacagcaacaagggggucaccgccgccugcccgcacgcgggcgccaagggguucuacaagaaccugaucuggcucgugaagaagggcaacuccuaccccaagcugagcaaguccuacaucaacgacaaggggaaggaggugcugguccucuggggcauccaccaccccagcaccaccgccgaccagcagagccuguaccagaacgccgacacguacguguucgugggcaccucccgguacagcaagaaguucaagcccgagaucgccauccgcccgaagguccgggaccaggaggggcgcaugaacuacuacuggacccugguggagcccggcgacaagaucaccuucgaggcgacggggaaccucguggucccccgguacgccuucgccauggagcgcaacgccggcuccggcaucaucaucagcgacacccccgugcacgacugcaacacgaccugccagaccccgaagggggccaucaacaccucccugcccuuccagaacauccaccccaucaccaucggcaagugccccaaguacgucaagagcaccaagcugcggcucgcgacggggcugcgcaacgugccguccauccagagccggggccuguucggggccaucgccggcuucaucgagggcggguggaccggcaugguggacgggugguacggcuaccaccaccagaacgagcagggguccggcuacgccgccgaccucaagagcacccagaacgcgaucgacaagaucaccaacaaggugaacuccgucaucgagaagaugaacacgcaguucaccgccgugggcaaggaguucaaccaccuggagaagcgcaucgagaaccugaacaagaaggucgacgacggguuccucgacaucuggaccuacaacgccgagcugcuggugcuccuggagaacgagcggacccuggacuaccacgacagcaacgugaagaaccucuacgagaagguccgcaaccagcugaagaacaacgccaaggagaucggcaacgggugcuucgaguucuaccacaagugcgacaacacgugcauggaguccgugaagaacggcaccuacgacuaccccaaguacagcgaggaggccaagcugaaccgggaggagaucgacggggugaagcucgaguccacccgcaucuaccagauccuggcgaucuacagcaccgucgccuccagccuggugcucguggucucccugggcgccaucagcuucuggaugugcagcaacggcucccugcagugccggaucugcaucuga

SEQ ID NO: 70836 - RNA, 1701 nt, Artificial Sequence; identical to SEQ ID NO: 70833
  derived and/or modified CDS sequence (opt1) from hemagglutinin__InfluenzaA__AEH59371

SEQ ID NO: 70837 - RNA, 1701 nt, Artificial Sequence
  derived and/or modified CDS sequence (opt1) from hemagglutinin__InfluenzaA__AEH59373
augaaggccauccuggugguccuccuguacaccuucgccaccgcgaacgccgacacgcugugcaucggcuaccacgccaacaacagcaccgacaccguggacaccgugcucgagaagaacgucacggugacccacuccgugaaccugcuggaggacaagcacaacgggaagcucugcaagcugcgcgaggucgcgccccugcaccucggcaagugcaacaucgccggguggauccugggcaacccggagugcgagagccuguccaccgccagcuccuggagcuacaucguggagaccuccagcuccgacaacgggacgugcuaccccggcgacuucaucgacuacgaggagcuccgggagcagcugagcuccgugagcuccuucgagcgcuucgagaucuuccccaagaccagcuccuggcccaaccacgacagcaacaagggcgucaccgccgccugcccgcacgccggggcgaagggcuucuacaagaaccugaucuggcucgugaagaaggggaacuccuaccccaagcugagcaaguccuacaucaacgacaagggcaaggaggugcugguccucugggggauccaccaccccagcaccacggccgaccagcagagccuguaccagaacgccgacaccuacguguucgugggcaccucccgguacagcaagaaguucaagcccgagaucgccauccgcccgaagguccgggaccaggagggccgcaugaacuacuacuggacccugguggagcccggggacaagaucacguucgaggccaccggcaaccucguggucccccgguacgcguucgccauggagcgcaacgccggguccggcaucaucaucagcgacacccccgugcacgacugcaacaccacgugccagaccccgaagggcgccaucaacaccucccugcccuuccagaacauccaccccaucaccaucgggaagugccccaaguacgucaagagcacgaagcugcggcucgccaccggccugcgcaacgugccguccauccagagccgggggcuguucggcgcgaucgccggguucaucgagggcggcuggaccgggaugguggacggcugguacggguaccgccaccagaacgagcagggcuccggguacgccgccgaccucaagagcacccagaacgccaucgacaagaucacgaacaaggugaacuccgucaucgagaagaugaacacccaguucaccgcggugggcaaggaguucaaccaccuggagcggcgcaucgagaaccugaacaagaaggucgacgacggcuuccucgacaucuggaccuacaacgccgagcugcuggugcuccuggagaacgagcggacgcuggacuaccacgacagcaacgugaagaaccucuacgagaagguccgcaaccagcugaagaacaacgccaaggagaucgggaacggcugcuucgaguucuaccacaagugcgacaacacgugcauggaguccgugaagaacgggaccuacgacuaccccaaguacagcgaggaggccaagcugaaccgggaggagaucgacggcgugaagcucgaguccacccgcaucuaccagauccuggccaucuacagcaccgucgcguccagccuggugcucguggucucccugggggccaucagcuucuggaugugcagcaacggcucccugcagugccggaucugcaucuga

SEQ ID NO: 70838 - RNA, 1701 nt, Artificial Sequence; identical to SEQ ID NO: 70833
  derived and/or modified CDS sequence (opt1) from hemagglutinin__InfluenzaA__AEH59375

SEQ ID NO: 70839 - RNA, 1701 nt, Artificial Sequence
  derived and/or modified CDS sequence (opt1) from hemagglutinin__InfluenzaA__AEH59379
augaaggccauccuggugguccuccuguacaccuucgccaccgcgaacgccgacacgcugugcaucggcuaccacgccaacaacagcaccgacaccguggacaccgugcucgagaagaacgucacggugacccacuccgugaaccugcuggaggacaagcacaacgggaagcucugcaagcugcgcggcgucgcgccccugcaccucgggaagugcaacaucgccggcuggauccuggggaacccggagugcgagagccuguccaccgccagcuccuggagcuacaucguggagaccuccagcuccgacaacggcacgugcuaccccggcgacuucaucgacuacgaggagcuccgggagcagcugagcuccgugagcuccuucgagcgcuucgagaucuuccccaagaccagcuccuggcccaaccacgacagcaacaagggggucaccgccgccugcccgcacgccggcgcgaaguccuucuacaagaaccugaucuggcucgugaagaaggggaacagcuaccccaagcuguccaagagcuacaucaacgacaagggcaaggaggugcugguccucugggggauccaccaccccagcaccacggccgaccagcagucccuguaccagaacgccgacaccuacguguucgugggcaccagccgguacuccaagaaguucaagcccgagaucgccauccgcccgaagguccgggaccaggagggccgcaugaacuacuacuggacccugguggagcccggggacaagaucacguucgaggccaccggcaaccucguggucccccgguacgcguucgccauggagcgcaacgccgggagcggcaucaucaucuccgacacccccgugcacgacugcaacaccacgugccagaccccgaagggcgccaucaacaccagccugcccuuccagaacauccaccccaucaccaucgggaagugccccaaguacgugaaguccacgaagcugcggcucgccaccggccugcgcaacgucccgagcauccagucccgggggcuguucggcgcgaucgccggguucaucgagggcggcuggaccgggaugguggacggcugguacggguaccaccaccagaacgagcagggcagcggguacgccgccgaccucaaguccacccagaacgccaucgacaagaucacgaacaaggugaacagcgucaucgagaagaugaacacccaguucaccgcggugggcaaggaguucaaccaccuggagaagcgcaucgagaaccugaacaagaaggucgacgacggcuuccucgacaucuggaccuacaacgccgagcugcuggugcuccuggagaacgagcggacgcuggacuaccacgacuccaacgugaagaaccucuacgagaagguccgcaaccagcugaagaacaacgccaaggagaccgggaacggcugcuucgaguucuaccacaagugcgacaacacgugcauggagagcgugaagaacgggaccuacgacuaccccaaguacuccgaggaggccaagcugaaccgggaggagaucgacggcgugaagcucgagagcacccgcaucuaccagauccuggccaucuacuccaccgucgcgagcucccuggugcucguggucagccugggggccaucagcuucuggaugugcuccaacggcagccugcagugccggaucugcaucuga

SEQ ID NO: 70840 - RNA, 1701 nt, Artificial Sequence; identical to SEQ ID NO: 70833
  derived and/or modified CDS sequence (opt1) from hemagglutinin__InfluenzaA__AEH59381

SEQ ID NO: 70841 - RNA, 1701 nt, Artificial Sequence
  derived and/or modified CDS sequence (opt1) from hemagglutinin__InfluenzaA__AEH59383
augaaggccauccuggugguccuccuguacaccuucgccaccgcgaacgccgacacgcugugcaucggcuaccacgccaacaacagcaccgacaccguggacaccgugcucgagaagaacgucacggugacccacuccgugaaccugcuggaggacaagcacaacgggaagcucugcaagcugcgcggcgucgcgccccugcaccucgggaagugcaacaucgccggcuggauccuggggaacccggagugcgagagccuguccaccgccagcuccuggagcuacaucguggagaccuccagcuccgacaacggcacgugcuaccccggcgacuucaucgacuacgaggagcuccgggagcagcugagcuccgugagcuccuucgagcgcuucgagaucuuccccaagaccagcuccuggcccaaccacgacagcaacaagggggucaccgccgccugcccgcacgccggcgcgaagggguucuacaagaaccugaucuggcucgugaagaagggcaacuccuaccccaagcugagcaucuccuacaucaacgacaaggggaaggaggugcugguccucuggggcauccaccaccccagcaccacggccgaccagcagagccuguaccagaacgccgacaccuacguguucgugggcaccucccgguacagcaagaaguucaagcccgagaucgccauccgcccgaagguccgggaccaggaggggcgcaugaacuacuacuggacccugguggagcccggcgacaagaucacguucgaggccaccgggaaccucguggucccccgguacgcguucgccauggagcgcaacgccggcuccggcaucaucaucagcgacacccccgugcacgacugcaacaccacgugccagaccccgaagggggccaucaacaccucccugcccuuccagaacauccaccccaucaccaucggcaagugccccaaguacgucaagagcacgaagcugcggcucgccaccgggcugcgcaacgugccguccauccagagccggggccuguucggggcgaucgccggcuucaucgagggcggguggaccggcaugguggacgggugguacggcuaccaccaccagaacgagcagggguccggcuacgccgccgaccucaagagcacccagaacgccaucgacaagaucacgaacaaggugaacuccgucaucgagaagaugaacacccaguucaccgcggugggcaaggaguucaaccaccuggagaagcgcaucgagaaccugaacaagaaggucgacgacggguuccucgacaucuggaccuacaacgccgagcugcuggugcuccuggagaacgagcggacgcuggacuaccacgacagcaacgugaagaaccucuacgagaagguccgcaaccagcugaagaacaacgccaaggagaucggcaacgggugcuucgaguucuaccacaagugcgacaacacgugcauggaguccgugaagaacggcaccuacgacuaccccaaguacagcgaggaggccaagcugaaccgggaggagaucgacggggugaagcucgaguccacccgcaucuaccagauccuggccaucuacagcaccgucgcguccagccuggugcucguggucucccugggcgccaucagcuucuggaugugcagcaacggcucccugcagugccggaucugcaucuga

SEQ ID NO: 70842 - RNA, 1701 nt, Artificial Sequence
  derived and/or modified CDS sequence (opt1) from hemagglutinin__InfluenzaA__AEH59385
augaaggccauccuggugguccuccuguacaccuucgccaccgcgaacgccgacacgcugugcaucggcuaccacgccaacaacagcaccgacaccguggacaccgugcucgagaagaacgucacggugacccacuccgugaaccugcuggaggacaagcacaacgggaagcucugcaagcugcgcggcgucgcgccccugcaccucgggaagugcaacaucgccggcuggauccuggggaacccggagugcgagagccuguccaccgccagcuccuggagcuacaucguggagaccuccagcuccgacaacggcacgugcuaccccggcgacuucaucgacuacgaggagcuccgggagcagcugagcuccgugagcuccuucgagcgcuucgagaucuuccccaagaccagcuccuggcccaaccacgacagcaacaagggggucaccgccgccugcccgcacgccggcgcgaaguccuucuacaagaaccugaucuggcucgugaagaaggggaacagcuaccccaagcuguccaagagcuacaucaacgacaagggcaaggaggugcugguccucugggggauccaccaccccagcaccacggccgaccagcagucccuguaccagaacgccgacgccuacaucuucgugggcaccagccgguacuccaagaaguucaagcccgagaucgccauccgcccgaaggugcgggaccaggagggccgcaugaacuacuacuggacccuggucgagcccggggacaagaucaccuucgaggcgacgggcaaccucguggugccccgguacgccuucgccauggagcgcaacgccgggagcggcaucaucaucuccgacacccccguccacgacugcaacacgaccugccagaccccgaagggcgccaucaacaccagccugcccuuccagaacauccaccccaucaccaucgggaagugccccaaguacgugaaguccaccaagcugcggcucgcgacgggccugcgcaacgugccgagcauccagucccgggggcuguucggcgccaucgccggguucaucgagggcggcuggaccgggauggucgacggcugguacggguaccaccaccagaacgagcagggcagcggguacgccgccgaccucaaguccacccagaacgcgaucgacaagaucaccaacaaggugaacagcgugaucgagaagaugaacacgcaguucaccgccgucggcaaggaguucaaccaccuggagaagcgcaucgagaaccugaacaagaagguggacgacggcuuccucgacaucuggaccuacaacgccgagcugcugguccuccuggagaacgagcggacccuggacuaccacgacuccaacgugaagaaccucuacgagaaggugcgcaaccagcugaagaacaacgccaaggagaucgggaacggcugcuucgaguucuaccacaagugcgacaacacgugcauggagagcgucaagaacgggaccuacgacuaccccaaguacuccgaggaggccaagcugaaccgggaggagaucgacggcgugaagcucgagagcacccgcaucuaccagauccuggcgaucuacuccaccguggccagcucccugguccucguggugagccugggggccaucagcuucuggaugugcuccaacggcagccugcagugccggaucugcaucuga

SEQ ID NO: 70843 - RNA, 1701 nt, Artificial Sequence; identical to SEQ ID NO: 70833
  derived and/or modified CDS sequence (opt1) from hemagglutinin__InfluenzaA__AEH59387

SEQ ID NO: 70844 - RNA, 1701 nt, Artificial Sequence
  derived and/or modified CDS sequence (opt1) from hemagglutinin__InfluenzaA__AEH59393
augaaggccauccugguggucauccucuacaccuucgccaccgcgaacgccgacacgcugugcaucggcuaccacgccaacaacagcaccgacaccguggacaccgugcuggagaagaacgucacggugacccacuccgugaaccuccuggaggacaagcacaacgggaagcugugcaagcuccgcggcgucgcgccccugcaccuggggaagugcaacaucgccggcuggauccucgggaacccggagugcgagagccuguccaccgccagcuccuggagcuacaucguggagaccuccagcuccgacaacggcacgugcuaccccggcgacuucaucgacuacgaggagcugcgggagcagcucagcuccgugagcuccuucgagcgcuucgagaucuuccccaagaccagcuccuggcccaaccacgacagcaacaagggggucaccgccgccugcccgcacgccggcgcgaagggguucuacaagaaccugaucuggcuggugaagaagggcaacuccuaccccaagcucagcaaguccuacaucaacgacaaggggaaggaggugcugguccuguggggcauccaccaccccagcaccacggccgaccagcagagccucuaccagaacgccgacaccuacguguucgugggcaccucccgguacagcaagaaguucaagcccgagaucgccauccgcccgaagguccgggaccaggaggggcgcaugaacuacuacuggacccugguggagcccggcgacaagaucacguucgaggccaccgggaaccugguggucccccgguacgcguucgccauggagcgcaacgccggcuccggcaucaucaucagcgacacccccgugcacgacugcaacaccacgugccagaccccgaagggggccaucaacaccucccuccccuuccagaacauccaccccaucaccaucggcaagugccccaaguacgucaagagcacgaagcugcggcuggccaccgggcuccgcaacgugccguccauccagagccggggccuguucggggcgaucgccggcuucaucgagggcggguggaccggcaugguggacgggugguacggcuaccaccaccagaacgagcagggguccggcuacgccgccgaccucaagagcacccagaacgccaucgacaagaucacgaacaaggugaacuccgucaucgagaagaugaacacccaguucaccgcggugggcaaggaguucaaccaccuggagaagcgcaucgagaaccugaacaagaaggucgacgacggguuccuggacaucuggaccuacaacgccgagcuccuggugcugcucgagaacgagcggacgcuggacuaccacgacagcaacgugaagaaccuguacgagaagguccgcaaccagcucaagaacaacgccaaggagaucggcaacgggugcuucgaguucuaccacaagugcgacaacacgugcauggaguccgugaagaacggcaccuacgacuaccccaaguacagcgaggaggccaagcugaaccgggaggagaucgacggggugaagcuggaguccacccgcaucuaccagauccucgccaucuacagcaccgucgcguccagccuggugcugguggucucccucggcgccaucagcuucuggaugugcagcaacggcucccugcagugccggaucugcaucuga

SEQ ID NO: 70845 - RNA, 1701 nt, Artificial Sequence
  derived and/or modified CDS sequence (opt1) from hemagglutinin__InfluenzaA__AEH59397
augaaggccauccuggugguccuccuguacaccuucgccaccgcgaacgccgacacgcugugcaucggcuaccacgccaacaacagcaccgacaccguggacaccgugcucgagaagaacgucacggugacccacuccgugaaccugcuggaggacaagcacaacgggaagcucugcaagcugcgcggcgucgcgccccugcaccucgggaagugcaacaucgccggcuggauccuggggaacccggagugcgagagccuguccaccgcgagcuccuggagcuacaucguggagaccuccagcuccgacaacggcacgugcuaccccggcgacuucaucaacuacgaggagcuccgggagcagcugagcuccgugagcuccuucgagcgcuucgagaucuuccccaagaccagcuccuggcccagccacgacuccaacaagggggucaccgccgccugcccgcacgccggcgccaagagcuucuacaagaaccugaucuggcucgugaagaaggggaacuccuaccccaagcugagcaagagcuacaucaacgacaagggcaaggaggugcugguccucugggggauccaccaccccuccaccagcgccgaccagcagucccuguaccagaacgccgacgccuacguguucgugggcacgagcaaguacuccaagaaguucaagcccgagaucgccguccggccgaaggugcgcgaccaggagggccggaugaacuacuacuggacccugguggagcccggggacaagaucaccuucgaggcgaccggcaaccuccuggucccccgcuacgccuucgccauggagcggaacgccgggagcggcaucaucaucuccgacacgcccgugcacgacugcaacacgaccugccagaccccgaagggcgccaucaacaccagccugcccuuccagaacauccaccccaucaccaucgggaagugccccaaguacgugaaguccaccaagcuccgccuggcgaccggccugcggaacgucccgagcauccagucccgcggccucuucggggccaucgccggguucaucgagggcggcuggacggggaugguggacggcugguacggguaccaccaccagaacgagcagggcagcggguacgccgccgaccugaaguccacccagaacgcgaucgacaagaucaccaacaaggugaacagcgucaucgagaagaugaacacccaguucacggccgugggcaaggaguucaaccaccuggagaagcggaucgagaaccucaacaagaaggucgacgacggcuuccuggacaucuggaccuacaacgccgagcugcucgugcugcuggagaacgagcgcacccucgacuaccacgacuccaacgugaagaaccuguacgagaagguccggagccagcugaagaacaacgccaaggagaucgagaacgggugcuucgaguucuaccacaagugcgacaacacgugcauggaguccgugaagaacggcaccuacgacuaccccaaguacagcgaggaggccaagcucaaccgcgaggagaucgacggggugaagcuggaguccacccggaucuaccagauccuggcgaucuacagcaccgucgccagcucccucgugcugguggucagccugggcgccaucuccuucuggaugugcagcaacgggucccuccagugccgcaucugcaucuga

SEQ ID NO: 70846 - RNA, 1701 nt, Artificial Sequence
  derived and/or modified CDS sequence (opt1) from hemagglutinin__InfluenzaA__AEH59399
augaaggccauccuggugguccuccuguacaccuucgccaccgcgaacgccgacacgcugugcaucggcuaccacgccaacaacagcaccgacaccguggacaccgugcucgagaagaacgucacggugacccacuccgugaaccugcuggaggacaagcacaacgggaagcucugcaagcugcgcggcgucgcgccccugcaccucgggaagugcaacaucgccggcuggauccuggggaacccggagugcgagagccuguccaccgccagcuccuggagcuacaucguggagaccuccagcuccgacaacggcacgugcuaccccggcgacuucaucgacuacgaggagcuccgggagcagcugagcuccgugagcuccuucgagcgcuucgagaucuuccccaagaccagcuccuggcccaaccacgacagcaacaagggggucaccgccgccugcccgcacgccggcgcgaagggguucuacaagaaccugaucuggcucgugaagaagggcaacuccuaccccaagcugagcaaguccuacaucaacgacaaggggaaggaggugcugguccucuggggcauccaccaccccagcaccacggccgaccagcagagccuguaccagaacgccgacaccuacguguucgugggcaccucccgguacagcaagaaguucaagcccgagaucgccauccgcccgaagguccgggaccaggaggggcgcaugaacuacuacuggaccaucguggagcccggcgacaagaucacguucgaggccaccgggaaccugguggucccccgguacgcguucgccauggagcgcaacgccggcuccggcaucaucaucagcgacacccccgugcacgacugcaacaccacgugccagaccccgaagggggccaucaacaccucccuccccuuccagaacauccaccccaucaccaucggcaagugccccaaguacgucaagagcacgaagcugcggcuggccaccgggcuccgcaacgugccguccauccagagccggggccuguucggggcgaucgccggcuucaucgagggcggguggaccggcaugguggacgggugguacggcuaccaccaccagaacgagcagggguccggcuacgccgccgaccucaagagcacccagaacgccaucgacaagaucacgaacaaggugaacuccgucaucgagaagaugaacacccaguucaccgcggugggcaaggaguucaaccaccuggagaagcgcaucgagaaccugaacaagaaggucgacgacggguuccuggacaucuggaccuacaacgccgagcuccuggugcugcucgagaacgagcggacgcuggacuaccacgacagcaacgugaagaaccuguacgagaagguccgcaaccagcucaagaacaacgccaaggagaucggcaacgggugcuucgaguucuaccacaagugcgacaacacgugcauggaguccgugaagaacggcaccuacgacuaccccaaguacagcgaggaggccaagcugaaccgggaggagaucgacggggugaagcuggaguccacccgcaucuaccagauccucgccaucuacagcaccgucgcguccagccuggugcugguggucucccucggcgccaucagcuucuggaugugcagcaacggcucccugcagugccggaucugcaucuga

SEQ ID NO: 70847 - RNA, 1701 nt, Artificial Sequence
  derived and/or modified CDS sequence (opt1) from hemagglutinin__InfluenzaA__AEH59403
augaaggccauccuggugguccuccuguacaccuucgccaccgcgaacgccgacacgcugugcaucggcuaccacgccaacaacagcaccgacaccguggacaccgugcucgagaagaacgucacggugacccacuccgugaaccugcuggaggacaagcacaacgggaagcucugcaagcugcgcggcgucgcgccccugcaccucgggaagugcaacaucgccggcuggauccuggggaacccggagugcgagagccuguccaccgccagcuccuggagcuacaucguggagaccuccagcuccgacaacggcacgugcuaccccggcgacuucaucgacuacgaggagcuccgggagcagcugagcuccgugagcuccuucgagcgcuucgagaucuuccccaagaccagcuccuggcccaaccacgacagcaacaagggggucaccgccgccugcccgcacgccggcgcgaagggguucuacaagaaccugaucuggcucgugaagaagggcaacuccuaccccaagcugagcaaguccuacaucaacgacaaggggaaggaggugcugguccucuggggcauccaccaccccagcaccacggccgaccagcagagccuguaccagaacgccgacaccuacguguucgugggcaccucccgguacagcaagaaguucaagcccgagaucgccauccgcccgaagguccgggaccaggaggggcgcaugaacuacuacuggacccugguggcccccggcgacaagaucacguucgaggcgaccgggaaccucguggucccccgguacgccuucgccauggagcgcaacgccggcuccggcaucaucaucagcgacacccccgugcacgacugcaacaccacgugccagaccccgaagggggccaucaacaccucccugcccuuccagaacauccaccccaucaccaucggcaagugccccaaguacgucaagagcacgaagcugcggcucgcgaccgggcugcgcaacgugccguccauccagagccggggccuguucggggccaucgccggcuucaucgagggcggguggaccggcaugguggacgggugguacggcuaccaccaccagaacgagcagggguccggcuacgccgccgaccucaagagcacccagaacgcgaucgacaagaucacgaacaaggugaacuccgucaucgagaagaugaacacccaguucaccgccgugggcaaggaguucaaccaccuggagaagcgcaucgagaaccugaacaagaaggucgacgacggguuccucgacaucuggaccuacaacgccgagcugcuggugcuccuggagaacgagcggacgcuggacuaccacgacagcaacgugaagaaccucuacgagaagguccgcaaccagcugaagaacaacgccaaggagaucggcaacgggugcuucgaguucuaccacaagugcgacaacacgugcauggaguccgugaagaacggcaccuacgacuaccccaaguacagcgaggaggccaagcugaaccgggaggagaucgacggggugaagcucgaguccacccgcaucuaccagauccuggcgaucuacagcaccgucgccuccagccuggugcucguggucucccugggcgccaucagcuucuggaugugcagcaacggcucccugcagugccggaucugcaucuga

SEQ ID NO: 70848 - RNA, 1701 nt, Artificial Sequence
  derived and/or modified CDS sequence (opt1) from hemagglutinin__InfluenzaA__AEH59407
augaaggccauccugguggucaugcucuacaccuucgccaccgcgaacgccgacacgcugugcaucggcuaccacgccaacaacagcaccgacaccguggacaccgugcuggagaagaacgucacggugacccacuccgugaaccuccuggaggacaagcacaacgggaagcugugcaagcuccgcggcgucgcgccccugcaccuggggaagugcaacaucgccggcuggauccucgggaacccggagugcgagagccuguccaccgccagcuccuggagcuacaucguggagaccuccagcuccgacaacggcacgugcuaccccggcgacuucaucgacuacgaggagcugcgggagcagcucagcuccgugagcuccuucgagcgcuucgagaucuuccccaagaccagcuccuggcccaaccacgacagcaacaagggggucaccgccgccugcccgcacgccggcgcgaagggguucuacaagaaccugaucuggcuggugaagaagggcaacuccuaccccaagcucagcaaguccuacaucaacgacaaggggaaggaggugcugguccuguggggcauccaccaccccagcaccacggccgaccagcagagccucuaccagaacgccgacaccuacguguucgugggcaccucccgguacagcaagaaguucaagcccgagaucgccauccgcccgaagguccgggaccaggaggggcgcaugaacuacuacuggacccugguggagcccggcgacaagaucacguucgaggccaccgggaaccugguggucccccgguacgcguucgccauggagcgcaacgccggcuccggcaucaucaucagcgacacccccgugcacgacugcaacaccacgugccagaccccgaagggggccaucaacaccucccuccccuuccagaacauccaccccaucaccaucggcaagugccccaaguacgucaagagcacgaagcugcggcuggccaccgggcuccgcaacgugccguccauccagagccggggccuguucggggcgaucgccggcuucaucgagggcggguggaccggcaugguggacgggugguacggcuaccaccaccagaacgagcagggguccggcuacgccgccgaccucaagagcacccagaacgccaucgacaagaucacgaacaaggugaacuccgucaucgagaagaugaacacccaguucaccgcggugggcaaggaguucaaccaccuggagaagcgcaucgagaaccugaacaagaaggucgacgacggguuccuggacaucuggaccuacaacgccgagcuccuggugcugcucgagaacgagcggacgcuggacuaccacgacagcaacgugaagaaccuguacgagaagguccgcaaccagcucaagaacaacgccaaggagaucggcaacgggugcuucgaguucuaccacaagugcgacaacacgugcauggaguccgugaagaacggcaccuacgacuaccccaaguacagcgaggaggccaagcugaaccgggaggagaucgacggggugaagcuggaguccacccgcaucuaccagauccucgccaucuacagcaccgucgcguccagccuggugcugguggucucccucggcgccaucagcuucuggaugugcagcaacggcucccugcagugccggaucugcaucuga

SEQ ID NO: 70849 - RNA, 1701 nt, Artificial Sequence; identical to SEQ ID NO: 70848
  derived and/or modified CDS sequence (opt1) from hemagglutinin__InfluenzaA__AEH59409

SEQ ID NO: 70850 - RNA, 1701 nt, Artificial Sequence
  derived and/or modified CDS sequence (opt1) from hemagglutinin__InfluenzaA__AEH59411
augaaggccauccuggugguccuccuguacaccuucgccaccgcgaacgccgacacgcugugcaucggcuaccacgccaacaacagcaccgacaccguggacaccgugcucgagaagaacgucacggugacccacuccgugaaccugcuggaggacaagcacaacgggaagcucugcaagcugcgcggcgucgcgccccugcaccucgggaagugcaacaucgccggcuggauccuggggaacccggagugcgagagccuguccaccgccagcuccuggagcuacaucguggagaccuccagcuccgacaacggcacgugcuaccccggcgacuucaucgacuacgaggagcuccgggagcagcugagcuccgugagcuccuucgagcgcuucgagaucuuccccaagaccagcuccuggcccaaccacgacagcaacaagggggucaccgccgccugcccgcacgccggcgcgaagggguucuacaagaaccugaucuggcucgugaagaagggcaacuccuaccccaagcugagcaaguccuacaucaacgacaaggggaaggaggugcugguccucuggggcauccaccaccccagcaccacggccgaccagcagagccuguaccagaacgccgacaccuacguguucgugggcaccucccgguacagcaagaaguucaagcccgagaucgccauccgcccgaagguccgggaccaggaggggcgcaugaacuacuacuggacccugguggagcccggcgacaagaucacguucgaggccaccgggaaccucguggucccccgguacgcguucgccauggaccgcaacgccggcuccggcaucaucaucagcgacacccccgugcacgacugcaacaccacgugccagaccccgaagggggccaucaacaccucccugcccuuccagaacauccaccccaucaccaucggcaagugccccaaguacgucaagagcacgaagcugcggcucgccaccgggcugcgcaacgugccguccauccagagccggggccuguucggggcgaucgccggcuucaucgagggcggguggaccggcaugguggacgggugguacggcuaccaccaccagaacgagcagggguccggcuacgccgccgaccucaagagcacccagaacgccaucgacaagaucacgaacaaggugaacuccgucaucgagaagaugaacacccaguucaccgcggugggcaaggaguucaaccaccuggagaagcgcaucgagaaccugaacaagaaggucgacgacggguuccucgacaucuggaccuacaacgccgagcugcuggugcuccuggagaacgagcggacgcuggacuaccacgacagcaacgugaagaaccucuacgagaagguccgcaaccagcugaagaacaacgccaaggagaucggcaacgggugcuucgaguucuaccacaagugcgacaacacgugcauggaguccgugaagaacggcaccuacgacuaccccaaguacagcgaggaggccaagcugaaccgggaggagaucgacggggugaagcucgaguccacccgcaucuaccagauccuggccaucuacagcaccgucgcguccagccuggugcucguggucucccugggcgccaucagcuucuggaugugcagcaacggcucccugcagugccggaucugcaucuga

SEQ ID NO: 70851 - RNA, 1701 nt, Artificial Sequence
  derived and/or modified CDS sequence (opt1) from hemagglutinin__InfluenzaA__AEH59413
augaaggccauccuggugguccuccuguacaccuucgccaucgcgaacgccgacacccugugcaucggcuaccacgccaacaacagcacggacaccguggacaccgugcucgagaagaacgucaccgugacgcacuccgugaaccugcuggaggacaagcacaacgggaagcucugcaagcugcgcggcgucgcgccccugcaccucgggaagugcaacaucgccggcuggauccuggggaacccggagugcgagagccuguccaccgccagcuccuggagcuacaucguggagaccuccagcuccgacaacgggaccugcuaccccggcgacuucaucaacuacgaggagcuccgggagcagcugagcuccgugagcuccuucgagcgcuucgagaucuuccccaagacgagcuccuggcccaaccacgacagcaacaagggggucaccgccgccugcccgcacgccggcgcgaaguccuucuacaagaaccugaucuggcucgugaagaaggggaacagcuaccccaagcuguccaagagcuacaucaacgacaagggcaaggaggugcugguccucugggggauccaccaccccagcaccuccgccgaccagcagagccuguaccagaacgccgacgccuacguguucgugggcaccuccaaguacagcaagaaguucaagcccgagaucgccguccggccgaaggugcgcgaccaggagggccggaugaacuacuacuggacgcugguggagcccggggacaagaucaccuucgaggcgaccggcaaccuccuggucccccgcuacgccuucgccauggagcggaacgccggguccggcaucaucaucagcgacacccccgugcacgacugcaacacgaccugccagaccccggagggcgccaucaacaccucccugcccuuccagaacauccaccccaucacgaucgggaagugccccaaguacgucaagagcaccaagcuccgccuggcgaccggccugcggaacgugccguccauccagagccgcggccucuucggcgccaucgccggguucaucgagggcggcuggaccgggaugguggacggcugguacggguaccaccaccagaacgagcagggcuccggguacgccgccgaccucaagagcacgcagaacgcgaucgacaagaucaccaacaaggugaacuccgucaucgagaagaugaacacccaguucaccgccgugggcaaggaguucaaccaccuggagaagcggaucgagaaccugaacaagaaggucgacgacggcuuccuggacaucuggacguacaacgccgagcugcucgugcugcuggagaacgagcgcacccucgacuaccacgacagcaacgugaagaaccuguacgagaagguccggucccagcugaagaacaacgccaaggagaucgggaacggcugcuucgaguucuaccacaagugcgacaacacgugcauggagagcgugaagaacgggaccuacgacuaccccaaguacuccgaggaggccaagcucaaccgcgaggagaucgacggcgugaagcuggagagcacccggaucuaccagauccuggcgaucuacuccaccgucgccagcagccucgugcugguggucucccugggggccaucagcuucuggaugugcuccaacggcagccuccagugccgcaucugcaucuga

SEQ ID NO: 70852 - RNA, 1701 nt, Artificial Sequence
  derived and/or modified CDS sequence (opt1) from hemagglutinin__InfluenzaA__AEH59585
augaaggccauccuggugguccuccuguacaccuucgccaccgcgaacgccgacacgcugugcaucggcuaccacgccaacaacagcaccgacaccguggacaccgugcucgagaagaacgucacggugacccacuccgugaaccugcuggaggacaagcacaacgggaagcucugcaagcugcgcggcgucgcgccccugcaccucgggaagugcaacaucgccggcuggauccuggggaacccggagugcgagagccuguccaccgcgagcuccuggagcuacaucguggagaccuccagcuccgacaacggcacgugcuaccccggcgacuucaucgacuacgaggagcuccgggagcagcugagcuccgugagcuccuucgagcgcuucgagaucuuccccaagaccagcuccuggcccaaccacgacccgaacaagggggucaccgccgccugcccccacgccggcgccaagagcuucuacaagaaccugaucuggcucgugaagaaggggaacuccuaccccaagcugagcaaguccuacaucaacgacaagggcaaggaggugcugguccucugggggauccaccaccccagcaccagcgccgaccagcagucccuguaccagaacgccgacgccuacguguucgugggcacgagccgguacuccaagaaguucaagccggagaucgccauccgccccaagguccgggaccaggagggccgcaugaacuacuacuggacccugguggagcccggggacaagaucaccuucgaggcgaccggcaaccucguggucccccgguacgccuucgccauggagcgcaacgccgggagcggcaucaucaucuccgacacgccggugcacgacugcaacacgaccugccagacccccaagggcgccaucaacaccagccugcccuuccagaacauccaccccaucaccaucgggaagugcccgaaguacgugaaguccaccaagcugcggcucgcgaccggccugcgcaacguccccagcauccagucccgggggcuguucggcgccaucgccggguucaucgagggcggcuggacggggaugguggacggcugguacggguaccaccaccagaacgagcagggcagcggguacgccgccgaccucaaguccacccagaacgcgaucgacgagaucaccaacaaggugaacagcgucaucgagaagaugaacacccaguucacgguggucggcaaggaguucaaccaccuggagaagcgcaucgagaaccugaacaagaagguggacgacggcuuccucgacaucuggaccuacaacgccgagcugcuggugcuccuggagaacgagcggacccuggacuaccacgacuccaacgucaagaaccucuacgagaaggugcgcagccagcugaagaacaacgccaaggagaucgggaacggcugcuucgaguucuaccacaagugcgacaacacgugcauggaguccgugaagaacgggaccuacgacuaccccaaguacagcgaggaggccaagcugaaccgggaggagaucgacggcgucaagcucgaguccacccgcaucuaccagauccuggccaucuacagcaccguggcguccagccuggugcucgucgugagccugggggccaucuccuucuggaugugcagcaacggcucccugcagugccggaucugcaucuga

SEQ ID NO: 70853 - RNA, 1701 nt, Artificial Sequence
  derived and/or modified CDS sequence (opt1) from hemagglutinin__InfluenzaA__AEH59587
augaaggccauccuggugguccuccuguacaccuucgccaccgcgaacgccgacacgcugugcaucggcuaccacgccaacaacagcaccgacaccguggacaccgugcucgagaagaacgucacggugacccacuccgugaaccugcuggaggacaagcacaacgggaagcucugcaagcugcgcggcgucgcgccccugcaccucgggaagugcaacaucgccggcuggauccuggggaacccggagugcgagagccuguccaccgccagcuccuggagcuacaucguggagaccuccagcuccgacaacggcacgugcuaccccggcgacuucaucgacuacgaggagcuccgggagcagcugagcuccgugagcuccuucgagcgcuucgagaucuuccccaagaccagcuccuggcccaaccacgagagcaacaagggggucaccgccgccugcccgcacgccggcgcgaaguccuucuacaagaaccugaucuggcucgugaagaaggggaacagcuaccccaagcuguccaagagcuacaucaacgacaagggcaaggaggugcugguccucugggggauccaccaccccagcaccuccgccgaccagcagagccuguaccagaacgccgacgccuacguguucgugggcacgucccgguacagcaagaaguucaagcccgagaucgccauccgcccgaagguccgggaccaggagggccgcaugaacuacuacuggacccugguggagcccggggacaagaucaccuucgaggcgaccggcaaccucguggucccccgguacgccuucgccauggagcgcaacgccggguccggcaucaucaucagcgacacgcccgugcacgacugcaacacgaccugccagaccccgaagggcgccaucaacaccucccugcccuuccagaacauccaccccaucaccaucgggaagugccccaaguacgucaagagcaccaagcugcggcucgcgaccggccugcgcaacgugccguucauccagucccgggggcuguucggcgccaucgccggguucaucgagggcggcuggacggggaugguggacggcugguacggguaccaccaccagaacgagcagggcagcggguacgccgccgaccucaaguccacccagaacgcgaucgacaagaucaccaacaaggugaacagcgucaucgagaagaugaacacccaguucacgguggucggcaaggaguucaacccccuggagaagcgcaucgagaaccugaacaagaagguggacgacggcuuccucgacaucuggaccuacaacgccgagcugcuggugcuccuggagaacgagcggacccuggacuaccacgacuccaacgucaagaaccucuacgagaaggugcgcagccagcugaagaacaacgccaaggagaucgggaacggcugcuucgaguucuaccacaagugcgacaacacgugcauggaguccgugaagaacgggaccuacgacuaccccaaguacagcgaggaggccaagcugaaccgggaggagaucgacggcgucaagcucgaguccacccgcaucuaccagauccuggccaucuacagcaccguggcguccagccuggugcucgucgugagccugggggccaucuccuucuggaugugcagcaacggcucccugcagugccggaucugcaucuga

SEQ ID NO: 70854 - RNA, 1701 nt, Artificial Sequence; identical to SEQ ID NO: 67857
  derived and/or modified CDS sequence (opt1) from hemagglutinin__InfluenzaA__AEH59589

SEQ ID NO: 70855 - RNA, 1701 nt, Artificial Sequence
  derived and/or modified CDS sequence (opt1) from hemagglutinin__InfluenzaA__AEH59591
augaaggccauccuggugguccuccuguacaccuucgccaccgcgaacgccgacacgcugugcaucggcuaccacgccaacaacagcaccgacaccguggacaccgugcucgagaagaacgucacggugacccacuccgugaaccugcuggaggacaagcacaacgggaagcucugcaagcugcgcggcgucgcgccccugcaccucgggaagugcaacaucgccggcuggauccuggggaacccggagugcgagagccuguccaccgccagcuccuggagcuacaucguggagaccuccagcuccgacaacggcacgugcuaccccggcgacuucaucgacuacgaggagcuccgggagcagcugagcuccgugagcuccuucgagcgcuucgagaucuuccccaagaccagcuccuggcccaaccacgacagcaacaagggggucaccgccgccugcccgcacgccggcgcgaaguccuucuacaagaaccugaucuggcucgugaagaaggggaacagcuaccccaagcuguccaagagcuacaucaacgacaagggcaaggaggugcugguccucugggggauccaccaccccagcaccuccgccgaccagcagagccuguaccagaacgccgacgccuacguguucgugggcacgucccgguacagcaagaaguucaagcccgagaucgccauccgcccgaagguccgggaccaggagggccgcaugaacuacuacuggacccugguggagcccggggacaagaucaccuucgaggcgaccggcaaccucguggucccccgguacgccuucgccauggagcgcaacgccggguccggcaucaucaucagcgacacgcccgugcacgacugcaacacgaccugccagaccccgaagggcgccaucaacaccucccugcccuuccagaacauccaccccaucaccaucgggaagugccccaaguacgucaagagcaccaagcugcggcucgcgaccggccugcgcaacgugccguccauccagagccgggggcuguucggcgccaucgccggguucaucgagggcggcuggacggggaugguggacggcugguacggguaccaccaccagaacgagcagggcuccggguacgccgccgaccucaagagcacccagaacgcgaucgacaagaucaccaacaaggugaacuccgucaucgagaagaugaacacccaguucacgguggucggcaaggaguucaaccaccuggagaagcgcaucgagaaccugaacaagaagguggacgacggcuuccucgacaucuggaccuacaacgccgagcugcuggugcuccuggagaacgagcggacccuggacuaccacgacagcaacgucaagaaccucuacgagaaggugcgcucccagcugaagaacaacgccaaggagaucgggaacggcugcuucgaguucuaccacaagugcgacaacacgugcauggagagcgugaagaacgggaccuacgacuaccccaaguacuccgaggaggccaagcugaaccgggaggagaucgacggcgucaagcucgagagcacccgcaucuaccagauccuggccaucuacuccaccguggcgagcagccuggugcucgucgugucccugggggccaucagcuucuggaugugcuccaacggcagccugcagugccggaucugcaucuga

SEQ ID NO: 70856 - RNA, 1701 nt, Artificial Sequence
  derived and/or modified CDS sequence (opt1) from hemagglutinin__InfluenzaA__AEH59593
augaaggccauccuggugguccuccuguacaccuucgccaccgcgaacgccgacacgcugugcaucggcuaccacgccaacaacagcaccgacaccguggacaccgugcucgagaagaacgucacggugacccacuccgugaaccugcuggaggacaagcacaacgggaagcucugcaagcugcgcggcgucgcgccccugcaccucgggaagugcaacaucgccggcuggauccuggggaacccggagugcgagagccuguccaccgccagcuccuggagcuacaucguggagaccuccagcuccgacaacggcacgugcuaccccggcgacuucaucgacuacgaggagcuccgggagcagcugagcuccgugagcuccuucgagcgcuucgagaucuuccccaagaccagcuccuggcccaaccacgagagcaacaagggggucaccgccgccugcccgcacgccggcgcgaaguccuucuacaagaaccugaucuggcucgugaagaaggggaacagcuaccccaagcuguccaagagcuacaucaacgacaagggcaaggaggugcugguccucugggggauccaccaccccagcaccuccgccgaccagcagagcaucuaccagaacgccgacgccuacguguucgugggcacgucccgguacagcaagaaguucaagcccgagaucgccauccgcccgaagguccgggaccaggagggccgcaugaacuacuacuggacccugguggagcccggggacaagaucaccuucgaggcgaccggcaaccugguggucccccgguacgccuucgccauggagcgcaacgccggguccggcaucaucaucagcgacacgcccgugcacgacugcaacacgaccugccagaccccgaagggcgccaucaacaccucccuccccuuccagaacauccaccccaucaccaucgggaagugccccaaguacgucaagagcaccaagcugcggcuggcgaccggccuccgcaacgugccguccauccagagccgggggcuguucggcgccaucgccggguucaucgagggcggcuggacggggaugguggacggcugguacggguaccaccaccagaacgagcagggcuccggguacgccgccgaccucaagagcacccagaacgcgaucgacaagaucaccaacaaggugaacuccgucaucgagaagaugaacacccaguucacggccgugggcaaggaguucaaccaccuggagaagcgcaucgagaaccugaacaagaaggucgacgacggcuuccuggacaucuggaccuacaacgccgagcuccuggugcugcucgagaacgagcggacccuggacuaccacgacagcaacgugaagaaccuguacgagaagguccgcucccagcucaagaacaacgccaaggagaucgggaacggcugcuucgaguucuaccacaagugcgacaacacgugcauggagagcgugaagaacgggaccuacgacuaccccaaguacuccgaggaggccaagcugaaccgggaggagaucgacggcgugaagcuggagagcacccgcaucuaccagauccucgcgaucuacuccaccgucgccagcagccuggugcugguggucucccucggggccaucagcuucuggaugugcuccaacggcagccugcagugccggaucugcaucuga

SEQ ID NO: 70857 - RNA, 1701 nt, Artificial Sequence; identical to SEQ ID NO: 67491
  derived and/or modified CDS sequence (opt1) from hemagglutinin__InfluenzaA__AEH59595

SEQ ID NO: 70858 - RNA, 1701 nt, Artificial Sequence; identical to SEQ ID NO: 67857
  derived and/or modified CDS sequence (opt1) from hemagglutinin__InfluenzaA__AEH59597

SEQ ID NO: 70859 - RNA, 1701 nt, Artificial Sequence; identical to SEQ ID NO: 70852
  derived and/or modified CDS sequence (opt1) from hemagglutinin__InfluenzaA__AEH59599

SEQ ID NO: 70860 - RNA, 1701 nt, Artificial Sequence
  derived and/or modified CDS sequence (opt1) from hemagglutinin__InfluenzaA__AEH59601
augaaggccauccuggugguccuccuguacaccuucgccaccgcgaacgccgacacgcugugcaucggcuaccacgccaacaacagcaccgacaccguggacaccgugcucgagaagaacgucacggugacccacuccgugaaccugcuggaggacaagcacaacgggaagcucugcaagcugcgcggcgucgcgccccugcaccucgggaacugcaacaucgccggcuggauccuggggaacccggagugcgagagccuguccaccgccagcuccuggagcuacaucguggagaccuccagcuccgacaacggcacgugcuaccccggcgacuucaucgacuacgaggagcuccgggagcagcugagcuccgugagcuccuucgagcgcuucgagaucuuccccaagaccagcuccuggcccaaccacgacagcaacaagggggucaccgccgccugcccgcacgccggcgcgaaguccuucuacaagaaccugaucuggcucgugaagaaggggaacagcuaccccaagcuguccaagagcuacaucaacgacaagggcaaggaggugcugguccucugggggauccaccaccccagcaccuccgccgaccagcagagccuguaccagaacgccgacgccuacguguucgugggcacgucccgguacagcaagaaguucaagcccgagaucgccauccgcccgaagguccgggaccaggagggccgcaugaacuacuacuggacccugguggagcccggggacaagaucaccuucgaggcgaccggcaaccucguggucccccgguacgccuucgccauggagcgcaacgccggguccggcaucaucaucagcgacacgcccgugcacgacugcaacacgaccugccagaccccgaagggcgccaucaacaccucccugcccuuccagaacauccaccccaucaccaucgggaagugccccaaguacgucaagagcaccaagcugcggcucgcgaccggccugcgcaacgugccguccauccagagccgggggcuguucggcgccaucgccggguucaucgagggcggcuggacggggaugguggacggcugguacggguaccaccaccagaacgagcagggcuccggguacgccgccgaccucaagagcacccagaacgcgaucgacaagaucaccaacaaggugaacuccgucaucgagaagaugaacacccaguucacgguggucggcaaggaguucaaccaccuggagaagcgcaucgagaaccugaacaagaagguggacgacggcuuccucgacaucuggaccuacaacgccgagcugcuggugcuccuggagaacgagcggacccuggacuaccacgacagcaacgucaagaaccucuacgagaaggugcgcucccagcugaagaacaacgccaaggagaucgggaacggcugcuucgaguucuaccacaagugcgacaacacgugcauggagagcgugaagaacgggaccuacgacuaccccaaguacuccgaggaggccaagcugaaccgggaggagaucgacggcgucaagcucgagagcacccgcaucuaccagauccuggccaucuacuccaccguggcgagcagccuggugcucgucgugucccugggggccaucagcuucuggaugugcuccaacggcagccugcagugccggaucugcaucuga

SEQ ID NO: 70861 - RNA, 1701 nt, Artificial Sequence; identical to SEQ ID NO: 67491
  derived and/or modified CDS sequence (opt1) from hemagglutinin__InfluenzaA__AEH59604

SEQ ID NO: 70862 - RNA, 1701 nt, Artificial Sequence; identical to SEQ ID NO: 67491
  derived and/or modified CDS sequence (opt1) from hemagglutinin__InfluenzaA__AEH59614

SEQ ID NO: 70863 - RNA, 1701 nt, Artificial Sequence
  derived and/or modified CDS sequence (opt1) from hemagglutinin__InfluenzaA__AEH59624
augaaggccauccuggugguccuccuguacaccuucgccaccgcgaacgccgacacgcugugcaucggcuaccacgccaacaacagcaccgacaccguggacaccgugcucgagaagaacgucacggugacccacuccgugaaccugcuggaggacaagcacaacgggaagcucugcaagcugcgcggcgucgcgccccugcaccucgggaagugcaacaucgccggcuggauccuggggaacccggagugcgagagccuguccaccgcgagcuccuggagcuacaucguggagaccuccagcuccgacaacggcacgugcuaccccggcgacuucaucgacuacgaggagcuccgggagcagcugagcuccgugagcuccuucgagcgcuucgagaucuuccccaagaccagcuccuggcccaaccacgacccgaacaagggggucaccgccgccugcccccacgccggcgccaagagcuucuacaagaaccugaucuggcucgugaagaaggggaacuccuaccccaagcugagcaaguccuacaucaacgacaagggcaaggaggugcugguccucugggggauccaccaccccagcaccagcgccgaccagcaguccuucuaccagaacgccgacgccuacguguucgugggcacgagccgguacuccaagaaguucaagccggagaucgccauccgccccaagguccgggaccaggagggccgcaugaacuacuacuggacccugguggagcccggggacaagaucaccuucgaggcgaccggcaaccugguggucccccgguacgccuucgccauggagcgcaacgccgggagcggcaucaucaucuccgacacgccggugcacgacugcaacacgaccugccagacccccaagggcgccaucaacaccagccuccccuuccagaacauccaccccaucaccaucgggaagugcccgaaguacgugaaguccaccaagcugcggcuggcgaccggccuccgcaacguccccagcauccagucccgggggcuguucggcgccaucgccggguucaucgagggcggcuggacggggaugguggacggcugguacggguaccaccaccagaacgagcagggcagcggguacgccgccgaccugaaguccacccagaacgcgaucgacgagaucaccaacaaggugaacagcgucaucgagaagaugaacacccaguucacggccgugggcaaggaguucaaccaccucgagaagcgcaucgagaaccugaacaagaaggucgacgacggcuuccuggacaucuggaccuacaacgccgagcuccuggugcugcucgagaacgagcggacccuggacuaccacgacuccaacgugaagaaccuguacgagaagguccgcagccagcucaagaacaacgccaaggagaucgggaacggcugcuucgaguucuaccacaagugcgacaacacgugcauggaguccgugaagaacgggaccuacgacuaccccaaguacagcgaggaggccaagcugaaccgggaggagaucgacggcgugaagcuggaguccacccgcaucuaccagauccucgcgaucuacagcaccgucgccuccagccuggugcugguggucagccucggggccaucuccuucuggaugugcagcaacggcucccugcagugccggaucugcaucuga

SEQ ID NO: 70864 - RNA, 1698 nt, Artificial Sequence
  derived and/or modified CDS sequence (opt1) from hemagglutinin__InfluenzaA__AEH77259
augaaggugaagcugcucguccugcugugcaccuucaccgccacguacgccgacaccaucugcaucggcuaccacgcgaacaacagcaccgacaccguggacacggugcucgagaagaacgucaccgugacccacuccgugaaccugcuggagaacagccacaacgggaagcucugccugcugaagggcaucgcgccccuccagcuggggaacugcuccgucgccggcuggauccuggggaacccggagugcgagcuccugaucagcaaggaguccuggagcuacaucguggagaagcccaaccccgagaacgggaccugcuaccccggccacuucgccgacuacgaggagcugcgcgagcagcucuccagcguguccagcuucgagcgguucgagauguucccgaaggaguccagcuggcccaaccacacggucaccgggguguccgccagcugcucccacaacggcgagagcuccuucuaccgcaaccugcuguggcucaccgagaagaacgggcuguaccccaaccugagcaaguccuacgccaacaacaaggagaaggaggugcucguccuguggggcgugcaccacccgcccagcaucagcgaccagaagacccuguaccacacggagaacgccuacguguccgucgugagcucccacuacagccggaaguucacccccgagaucgccaagcgccccaaggugcgggaccaggaggggcgcaucaacuacuacuggacccuccuggagcccggcgacaccaucaucuucgaggccaacggcaaccugaucgcgccgcgguacgccuucgcccucucccgcggguucggcagcgggaucaucaacuccaacgcccccauggacaagugcgacgccaagugccagacgccccagggcgcgaucaacagcucccugcccuuccagaacguccacccggugaccaucggcgagugccccaaguacgugcggagcgccaagcugcgcauggucaccgggcuccggaacauccccuccauccagagccgcggccuguucggggccaucgccggcuucaucgagggcggcuggaccggcaugguggacgggugguacggcuaccaccaccagaacgagcagggguccggcuacgccgcggaccagaaguccacgcagaacgccaucaacgggaucaccaacaaggugaacagcgucaucgagaagaugaacacccaguucaccgccgugggcaaggaguucaacaagcuggagcggcgcauggagaaccucaacaagaaggucgacgacggcuucaucgacaucuggacguacaacgccgagcugcuggugcuccuggagaacgagcggacccuggacuuccacgacagcaacgugaagaaccucuacgagaaggucaagaaccagcugaagaacaacgccaaggagaucgggaacggcugcuucgaguucuaccacaagugcaacgacgagugcauggaguccgugaagaacgggaccuacgacuaccccaaguacagcgaggaguccaagcugaaccgcgagaagaucgacggcgugaagcucgagagcaugggggucuaccagauccuggcgaucuacagcaccguggccuccagccugguguuccucgucucccugggcgccaucagcuucuggaugugcuccaacggcagccugcagugccggaucugcaucuga

SEQ ID NO: 70865 - RNA, 1701 nt, Artificial Sequence; identical to SEQ ID NO: 66680
  derived and/or modified CDS sequence (opt1) from hemagglutinin__InfluenzaA__AEH77270

SEQ ID NO: 70866 - RNA, 1701 nt, Artificial Sequence; identical to SEQ ID NO: 64056
  derived and/or modified CDS sequence (opt1) from hemagglutinin__InfluenzaA__AEH77279

SEQ ID NO: 70867 - RNA, 1701 nt, Artificial Sequence; identical to SEQ ID NO: 67795
  derived and/or modified CDS sequence (opt1) from hemagglutinin__InfluenzaA__AEI29215

SEQ ID NO: 70868 - RNA, 1701 nt, Artificial Sequence; identical to SEQ ID NO: 66693
  derived and/or modified CDS sequence (opt1) from hemagglutinin__InfluenzaA__AEI29225

SEQ ID NO: 70869 - RNA, 1701 nt, Artificial Sequence
  derived and/or modified CDS sequence (opt1) from hemagglutinin__InfluenzaA__AEI29591
augaagaccaucaucgcccugagcuacaucuucugccucguguucgcccaggaccugcccggcaacgacaacuccaccgcgacgcugugccucgggcaccacgccgucccgaacggcacccuggugaagaccaucaccaacgaccagaucgaggugacgaacgccaccgagcugguccagagcuccagcaccgggaagaucugcgacaacccccaccgcauccucgacggcaucaacugcacccugaucgacgcccugcucggggacccccacugcgacggcuuccagaacgagaagugggaccuguucguggagcgguccaaggccuucagcaacugcuaccccuacgacgugccggacuacgcgucccugcgcagccucgucgccuccagcggcacgcuggaguucaucaacgagggguucaacuggaccggcgugacccagaacgggggcuccagcgccugcaagcgggggcccgacaacggcuucuucucccgccugaacuggcucuacaagagcggcuccaccuaccccgugcagaacgucacgaugcccaacaacgacaacagcgacaagcuguacaucuggggcgugcaccacccguccaccgacaaggagcagaccaaccuguacgugcaggccagcgggaaggucaccguguccacgaagcggagccagcagaccgugauccccaacgucgggagccgccccugggugcggggccucuccagccgcguguccaucuacuggaccaucgucaagcccggcgacauccuggugaucaacagcaacgggaaccugaucgcgccgcggggcuacuacaagaugcgcaccgggaaguccagcaucaugcgguccgacgcccccaucggcacgugcagcuccgagugcaucacccccaacgggagcauccccaacgacaagccguuccagaacgugaacaagaucaccuacggcgccugccccaaguacgucaagcagaacacccucaagcuggccacgggcaugcgcaacgugcccgagaagcagacccgggggaucuucggcgccaucgcgggguucaucgagaacggcugggaggggaugaucgacggcugguacggcuuccgccaccagaacuccgaggggaccggccaggccgccgaccucaagagcacccaggccgccaucgaccagaucaacgggaagcugaaccgggugaucgagaagacgaacgagaaguuccaccagaucgagaaggaguucuccgaggucgagggccgcauccaggaccuggagaaguacguggaggacaccaagaucgaccuguggagcuacaacgcggagcuccuggucgcccuggagaaccagcacaccaucgaccucaccgacuccgagaugaacaagcuguucgagaagacgcggcgccagcugcgggagaacgccgaggacauggggaacggcugcuucaagaucuaccacaagugcgacaacgccugcaucggcagcauccgcaacgggaccuacgaccacgacguguaccgggacgaggcccucaacaaccgcuuccagaucaagggcguggagcugaaguccggguacaaggacuggauccuguggaucagcuucgcgaucuccugcuuccuccugugcgucgugcugcucggcuucaucaugugggccugccagaagggcaacauccgcugcaacaucugcaucuga

SEQ ID NO: 70870 - RNA, 1701 nt, Artificial Sequence; identical to SEQ ID NO: 64056
  derived and/or modified CDS sequence (opt1) from hemagglutinin__InfluenzaA__AEI54347

SEQ ID NO: 70871 - RNA, 1701 nt, Artificial Sequence; identical to SEQ ID NO: 64142
  derived and/or modified CDS sequence (opt1) from hemagglutinin__InfluenzaA__AEI54358

SEQ ID NO: 70872 - RNA, 1701 nt, Artificial Sequence; identical to SEQ ID NO: 64657
  derived and/or modified CDS sequence (opt1) from hemagglutinin__InfluenzaA__AEI54369

SEQ ID NO: 70873 - RNA, 1701 nt, Artificial Sequence; identical to SEQ ID NO: 64540
  derived and/or modified CDS sequence (opt1) from hemagglutinin__InfluenzaA__AEI54380

SEQ ID NO: 70874 - RNA, 1701 nt, Artificial Sequence; identical to SEQ ID NO: 70803
  derived and/or modified CDS sequence (opt1) from hemagglutinin__InfluenzaA__AEI54391

SEQ ID NO: 70875 - RNA, 1701 nt, Artificial Sequence
  derived and/or modified CDS sequence (opt1) from hemagglutinin__InfluenzaA__AEI54402
augaagaccaucaucgcccugagcuacauccucugccugguguucgcccagaagcugcccggcaacgacaacuccaccgcgacgcucugccuggggcaccacgccgucccgaacggcaccaucgugaagaccaucaccaacgaccagaucgaggugacgaacgccaccgagcugguccagagcuccagcaccggggagaucugcuacagcccccaccagauccucgacggcgagaacugcacccugaucgacgcccugcucggggacccccagugcgacggcuuccagaacaagaagugggaccuguucguggagcgcagcaaggccuacuccaacugcuaccccuacgacgugccggacuacgcgagccugcggucccucgucgccagcuccggcacgcuggaguucaacaacgagagcuucaacuggaccggggugacccagaacggcaccuccagcgccugcauccgccgguccaacaacagcuucuucucccgccugaacuggcucacgcaccugaaguucaaguaccccgcccugaacgugaccaugcccaacaacgagaaguucgacaagcucuacaucuggggcguccaccaccccgggaccgacaacgaccagaucuuccuguacgcgcaggccagcgggcggaucaccguguccacgaagcgcagccagcagaccgugaucccgaacaucggcagccggccccgcguccggaacauccccucccgcaucagcaucuacuggaccaucgugaagcccggcgacauccugcucaucaacuccaccgggaaccugaucgccccgcggggcuacuucaagauccgcagcgggaaguccagcaucaugcgguccgacgcccccaucggcaagugcaacagcgagugcaucacgcccaacggcuccauccccaacgacaagccguuccagaacgugaaccgcaucaccuacggggccugcccccgguacgucaagcagaacacccugaagcucgcgaccggcaugcgcaacgugcccgagaagcagacgcgggggaucuucggcgccaucgccggguucaucgagaacggcugggagggcaugguggacgggugguacggcuuccgccaccagaacagcgaggggaucggccaggccgccgaccugaaguccacccaggcggccaucgaccagaucaacgggaagcugaaccggcucaucggcaagaccaacgagaaguuccaccagaucgagaaggaguucagcgaggucgagggccgcauccaggaccuggagaaguacguggaggacaccaagaucgaccugugguccuacaacgccgagcuccugguggcccuggagaaccagcacacgaucgaccucaccgacagcgagaugaacaagcuguucgagaagaccaagaagcagcugcgggagaacgccgaggacauggggaacggcugcuucaagaucuaccacaagugcgacaacgcgugcaucggguccauccgcaacggcaccuacgaccacgacgucuaccgcgacgaggcccucaacaaccgguuccagaucaaggggguggagcugaaguccggcuacaaggacuggauccuguggaucuccuucgccaucagcugcuuccuccugugcguggcccugcucggcuucaucaugugggccugccagaaggggaacauccgcugcaacaucugcaucuga

SEQ ID NO: 70876 - RNA, 1701 nt, Artificial Sequence; identical to SEQ ID NO: 65952
  derived and/or modified CDS sequence (opt1) from hemagglutinin__InfluenzaA__AEI54413

SEQ ID NO: 70877 - RNA, 1701 nt, Artificial Sequence; identical to SEQ ID NO: 64305
  derived and/or modified CDS sequence (opt1) from hemagglutinin__InfluenzaA__AEI54424

SEQ ID NO: 70878 - RNA, 1701 nt, Artificial Sequence
  derived and/or modified CDS sequence (opt1) from hemagglutinin__InfluenzaA__AEI54446
augaagaccaucaucgcccugagcuacauccucugccugguguucgcccagaagcugcccgagaacgacaacuccaccgcgacgcucugccugggccaccacgccgucccgaacgggaccaucgugaagaccaucaccaacgaccagaucgaggugacgaacgccaccgagcugguccagagcuccagcaccggcgagaucugcaacagcccccaccagauccucgacggggagaacugcacccugaucgacgcccugcucggcgacccccagugcgacggguuccagaacaagaagugggaccuguucguggagcgcagcaaggcccacuccaacugcuaccccuacgacgugccggacuacgcgagccugcggucccucgucgccagcuccggcacgcuggaguucaacaacgagagcuucaacuggaccggcgugacccagaacgggaccuccagcgccugcauccgccgguccaacaacagcuucuucucccgccugaacuggcucacgcaccugaacuucaaguaccccgcccugaacgugaccaugcccaacaacgagcaguucgacaagcucuacaucuggggcguccaccaccccgggaccgacaaggaccagaucuuccuguacgcgcaggccgccggccggaucaccgugagcacgaagcgcucccagcaggccgugaucccgaacaucgggagccggccccgcguccggaacauccccagccgcguguccaucuacuggaccaucgugaagcccggcgacauccugcucaucaacagcaccggcaaccugaucgccccgcggggguacuucaagauccgcuccggcaagagcuccaucaugcggagcgacgcgcccaucgggaagugcaacuccgccugcaucacccccaacggcagcauccccaacgacaagccguuccagaacgucaaccgcaucacguacggcgccugcccccgguacgugaagcagaacacccugaagcucgccaccgggaugcgcaacgugcccgagaagcagacccggggcaucuucggggccaucgcgggcuucaucgagaacgggugggagggcauggucgacggcugguacggguuccgccaccagaacuccgagggccgggggcaggccgccgaccugaaguccacgcaggccgccaucgaccagaucaacggcaagcugaaccgccucaucgggaagaccaacgagaaguuccaccagaucgagaaggaguucuccgagguggagggccggauccaggaccuggagaaguacguggaggacaccaagaucgaccuguggagcuacaacgcggagcuccuggucgcccuggagaaccagcacaccaucgaccucacggacuccgagaugaacaagcuguucgagaagaccaagaagcagcugcgcgagaacgccgaggacaugggcaacgggugcuucaagaucuaccacaagugcgacaacgccugcaucggcagcauccgcaacgggaccuacgaccacgacguguaccgggacgaggcccucaacaaccgcuuccagaucaagggcguggagcugaaguccggguacaaggacuggauccuguggaucagcuucgcgaucuccugcuuccuccugugcgucgcccugcucggcuucaucaugugggccugccagaagggcaacauccggugcaacaucugcaucuga

SEQ ID NO: 70879 - RNA, 1701 nt, Artificial Sequence
  derived and/or modified CDS sequence (opt1) from hemagglutinin__InfluenzaA__AEI54457
augaagaccaucaucgcccugagcuacauccucugccugguguucgcccagaagcugcccggcaacgacaacuccaccgcgacgcucugccuggggcaccacgccgucccgaacggcaccaucgugaagaccaucaccaacgaccagaucgaggugacgaacgccaccgagcugguccagagcuccagcaccggggagaucugcaacagcccccaccagauccucgacggcgagaacugcacccugaucgacgcccugcucggggacccccagugcgacggcuuccagaacaagaagugggaccuguucguggagcgcagcaaggcccacuccaacugcuaccccuacgacgugccggacuacgcgagccugcggucccucgucgccagcuccggcacgcuggaguucaacaacgagagcuucaacuggaccggggugacccagaacggcaccuccagcgccugcauccgccgguccaacaacagcuucuucucccgccugaacuggcucacgcaccugaacuucaaguaccccgcccugaacgugaccaugcccaacaacgagcaguucgacaagcucuacaucuggggcguccaccaccccgggaccgacaaggaccagaucuuccuguacgcgcaggccgccgggcggaucaccgugagcacgaagcgcucccagcaggccgugaucccgaacaucggcagccggccccgcguccggaacauccccagccgcguguccaucuacuggaccaucgugaagcccggcgacauccugcucaucaacagcaccgggaaccugaucgccccgcggggcuacuucaagauccgcuccgggaaguccuccaucaugcggagcgacgcgcccaucggcaagugcaacuccgccugcaucacccccaacggcagcauccccaacgacaagccguuccagaacgucaaccgcaucacguacggggccugcccccgguacgugaagcagaacacccugaagcucgccaccggcaugcgcaacgugcccgagaagcagacccgggggaucuucggcgccaucgcgggguucaucgagaacggcugggagggcauggucgacgggugguacggcuuccgccaccagaacuccgaggggcggggccaggccgccgaccucaagagcacgcaggccgccaucgaccagaucaacgggaagcugaaccgccugaucggcaagaccaacgagaaguuccaccagaucgagaaggaguucuccgagguggagggccggauccaggaccuggagaaguacguggaggacaccaagaucgaccuguggagcuacaacgcggagcuccuggucgcccuggagaaccagcacaccaucgaccucacggacuccgagaugaacaagcuguucgagaagaccaagaagcagcugcgcgagaacgccgaggacauggggaacggcugcuucaagaucuaccacaagugcgacaacgccugcaucgggagcauccgcaacggcaccuacgaccacgacguguaccgggacgaggcccucaacaaccgcuuccagaucaaggggguggagcugaaguccggcuacaaggacuggauccuguggaucagcuucgcgaucuccugcuuccuccugugcgucgcccugcucggcuucaucaugugggccugccagaaggggaacauccggugcaacaucugcaucuga

SEQ ID NO: 70880 - RNA, 1701 nt, Artificial Sequence; identical to SEQ ID NO: 69557
  derived and/or modified CDS sequence (opt1) from hemagglutinin__InfluenzaA__AEI54468

SEQ ID NO: 70881 - RNA, 1701 nt, Artificial Sequence; identical to SEQ ID NO: 69557
  derived and/or modified CDS sequence (opt1) from hemagglutinin__InfluenzaA__AEI54479

SEQ ID NO: 70882 - RNA, 1701 nt, Artificial Sequence; identical to SEQ ID NO: 70879
  derived and/or modified CDS sequence (opt1) from hemagglutinin__InfluenzaA__AEI54490

SEQ ID NO: 70883 - RNA, 1701 nt, Artificial Sequence; identical to SEQ ID NO: 70878
  derived and/or modified CDS sequence (opt1) from hemagglutinin__InfluenzaA__AEI54501

SEQ ID NO: 70884 - RNA, 1701 nt, Artificial Sequence
  derived and/or modified CDS sequence (opt1) from hemagglutinin__InfluenzaA__AEI59979
augaagaccaucaucgcccugagcuacauccucugccugguguucgcccagaagcugcccggcaacgacaacuccaccgcgacgcucugccuggggcaccacgccgucccgaacggcaccaucgugaagaccaucaccaacgaccagaucgaggugacgaacgccaccgagcugguccagaucagcuccaccggggagaucugcgacagcccccaccagauccucgacggcgagaacugcacccugaucgacgcccugcucggggacccccagugcgacggcuuccagaacaagaagugggaccuguucguggagcgcuccaaggccuacagcaacugcuaccccuacgacgugccggacuacgcgucccugcggagccucgucgccuccagcggcacgcuggaguucaacaacgaguccuucaacuggaccggggugacccagaacggcaccagcuccgccugcauccgccggagcaacaacuccuucuucagccgccugaacuggcucacgcaccugaaguucaaguaccccgcccugaacgugaccaugcccaacaacgagcaguucgacaagcucuacaucuggggcguccaccaccccgggaccgacaacgaccagaucuuccuguacgcgcaggccuccgggcggaucaccgugagcacgaagcgcucccagcagaccgugaucccgaacaucggcagccggccccgcguccggaacauccccagccgcaucuccaucuacuggaccaucgugaagcccggcgacauccugcucaucaacagcaccgggaaccugaucgccccgcggggcuacuucaagauccgcuccggcaagagcuccaucaugcggagcgacgcccccaucgggaagugcaacuccgagugcaucacgcccaacggcagcauccccaacgacaagccguuccagaacgugaaccgcaucaccuacggggccugcccccgguacgucaagcagaacacccugaagcucgcgaccggcaugcgcaacgugcccgagaagcagacgcgggggaucuucggcgccaucgccggguucaucgagaacggcugggagggcaugguggacgggugguacggcuuccgccaccagaacuccgaggggcggggccaggccgccgaccucaagagcacccaggcggccaucgaccagaucaacgggaagcugaaccgccugaucgagaagaccaacgagaaguuccaccagaucgagaaggaguucuccgaggucgagggccggauccaggaccuggagaaguacguggaggacaccaagaucgaccuguggagcuacaacgccgagcuccugguggcccuggagaaccagcacacgaucgaccucaccgacuccgagaugaacaagcuguucgagaagaccaagaagcagcugcgcgagaacgccgaggacaugggcaacgggugcuucaagaucuaccacaagugcgacaacgcgugcaucggcagcauccgcaacgggaccuacgaccacgacgucuaccgggacgaggcccucaacaaccgcuuccagaucaagggcguggagcugaaguccggguacaaggacuggauccuguggaucagcuucgccaucuccugcuuccuccugugcguggcccugcucggcuucaucaugugggccugccagaagggcaacauccggugcaacaucugcaucuga

SEQ ID NO: 70885 - RNA, 1698 nt, Artificial Sequence; identical to SEQ ID NO: 69981
  derived and/or modified CDS sequence (opt1) from hemagglutinin__InfluenzaA__AEI59990

SEQ ID NO: 70886 - RNA, 1698 nt, Artificial Sequence; identical to SEQ ID NO: 69983
  derived and/or modified CDS sequence (opt1) from hemagglutinin__InfluenzaA__AEI60001

SEQ ID NO: 70887 - RNA, 1701 nt, Artificial Sequence
  derived and/or modified CDS sequence (opt1) from hemagglutinin__InfluenzaA__AEI60012
augaagaccaucaucgcccugagcuacauccucugccugguguucgcccagaagcugcccggcaacgacaacuccaccgcgacgcucugccuggggcaccacgccgucccgaacggcaccaucgugaagaccaucaccaacgaccagaucgaggugacgaacgccaccgagcugguccagagcuccagcaccggggagaucugcgacagcccccaccagauccucgacggcgagaacugcacccugaucgacgcccugcucggggacccccagugcgacggcuuccagaacaagaagugggaccuguucguggagcgcagcaaggccuacuccaacugcuaccccuacgacgugccggacuacgcgagccugcggucccucgucgccagcuccggcacgcuggaguucaacaacgagagcuucaacuggaccggggugacccagaacggcaccuccagcgccugcauccgcuccagcaacaacuccuucuucagccggcugaacuggcucacgcaccugaaguucaaguaccccgcccugaacgugaccaugcccaacaacgagcaguucgacaagcucuacaucuggggcguccaccaccccgggaccgacaacgaccagaucuuccuguacgcgcaggccuccgggcgcaucaccgugagcacgaagcggagccagcagaccgugaucccgaacaucggcucccgcccccggguccgcaacauccccagccggaucuccaucuacuggaccaucgugaagcccggcgacauccugcucaucaacagcaccgggaaccugaucgccccgcgcggcuacuucaagauccgguccgggaaguccuccaucaugcgcagcgacgcccccaucggcaagugcaacuccgagugcaucacgcccaacggcagcauccccaacgacaagccguuccagaacgugaaccggaucaccuacggggccugcccccgcuacgucaagcagaacacccugaagcucgcgaccggcaugcggaacgugcccgagaagcagacgcgcgggaucuucggcgccaucgccggguucaucgagaacggcugggagggcaugguggacgggugguacggcuuccggcaccagaacuccgaggggcgcggccaggccgccgaccucaagagcacccaggcggccaucgaccagaucaacgggaagcugaaccggcugaucggcaagaccaacgagaaguuccaccagaucgagaaggaguucuccgaggucgagggcaagauccaggaccuggagaaguacguggaggacaccaagaucgaccuguggagcuacaacgccgagcuccugguggcccuggagaaccagcacacgaucgaccucaccgacuccgagaugaacaagcuguucgagaagaccaagaagcagcugcgcgagaacgccgaggacauggggaacggcugcuucaagaucuaccacaagugcgacaacgcgugcaucgggagcauccggaacggcaccuacaaccacgacgucuaccgcgacgaggcccucaacaaccgcuuccagaucaaggggguggagcugaaguccggcuacaaggacuggauccuguggaucagcuucgccaucuccugcuuccuccugugcguggcccugcucggcuucaucaugugggccugccagaaggggaacauccggugcaacaucugcaucuga

SEQ ID NO: 70888 - RNA, 1701 nt, Artificial Sequence; identical to SEQ ID NO: 66458
  derived and/or modified CDS sequence (opt1) from hemagglutinin__InfluenzaA__AEI60023

SEQ ID NO: 70889 - RNA, 1701 nt, Artificial Sequence
  derived and/or modified CDS sequence (opt1) from hemagglutinin__InfluenzaA__AEI60034
augaagaccaucaucgcccugagcuacauccucugccugguguucgcccagaagcugcccggcaacgacaacuccaccgcgacgcucugccuggggcaccacgccgucccgaacggcaccaucgugaagaccaucaccaacgaccagaucgaggugacgaacgccaccgagcugguccagagcuccagcaccggggagaucugcgacagcccccaccagauccucgacggcaagaacugcacccugaucgacgcccugcucggggacccccagugcgacggcuuccagaacaagaagugggaccuguucguggagcgcagcaaggccuacuccaacugcuaccccuacgacgugccggacuacgcgagccugcggucccucgucgccagcuccggcacgcuggaguucaacaacgagagcuucaacuggaccggggugacccagaacggcaccuccagcgccugcauccgccgguccaacaacagcuucuucucccgccugaacuggcucacgcaccugaaguucaaguaccccgcccugaacgugaccaugcccaacaacgagcaguucgacaagcucuacaucuggggcguccaccaccccgggaccgacaaggaccagaucuuccuguacgcgcaggccagcgggcggaucaccguguccacgaagcgcagccagcagaccgugaucccgaacaucggcagccggccccgcguccggaacauccccucccgcaucagcaucuacuggaccaucgugaagcccggcgacauccugcucaucaacuccaccgggaaccugaucgccccgcggggcuacuucaagauccgcagcgggaaguccagcaucaugcgguccgacgcccccaucggcaagugcaacagcgagugcaucacgcccaacggcuccauccccaacgacaagccguuccagaacgugaaccgcaucaccuacggggccugcccccgguacgucaagcagaacacccugaagcucgcgaccggcaugcgcaacgugcccgagaagcagacgcgggggaucuucggcgccaucgccggguucaucgagaacggcugggagggcaugguggacgggugguacggcuuccgccaccagaacagcgaggggcggggccaggccgccgaccugaaguccacccaggcggccaucgaccagaucaacgggaagcugaaccgccucaucggcaagaccaacgagaaguuccaccagaucgagaaggaguucagcgaggucgagggccggauccaggaccuggagaaguacguggaggacaccaagaucgaccugugguccuacaacgccgagcuccugguggcccuggagaaccagcacacgaucgaccucaccgacagcgagaugaacaagcuguucgagaagaccaagaagcagcugcgcgagaacgccgaggacauggggaacggcugcuucaagaucuaccacaagugcgacaacgcgugcaucggguccauccgcaacggcaccuacgaccacgacgucuaccgggacgaggcccucaacaaccgcuuccagaucaaggggguggagcugaaguccggcuacaaggacuggauccuguggaucuccuucgccaucagcugcuuccuccugugcguggcccugcucggcuucaucaugugggccugccagaaggggaacauccggugcaacaucugcaucuga

SEQ ID NO: 70890 - RNA, 1701 nt, Artificial Sequence
  derived and/or modified CDS sequence (opt1) from hemagglutinin__InfluenzaA__AEI60045
augaagaccaucaucgcccugagcuacauccucugccugguguucgcccagaagcugcccggcaacgacaacuccaccgcgacgcucugccuggggcaccacgccgucccgaacggcaccaucgugaagaccaucaugaacgaccagaucgaggugaccaacgccacggagcugguccagagcuccagcaccggggagaucugcgacagcccccaccagauccucgacggcaagaacugcacccugaucgacgcccugcucggggacccccagugcgacggcuuccagaacaagaagugggaccuguucguggagcgcagcaaggccuacuccaacugcuaccccuacgacgugccggacuacgcgagccugcggucccucgucgccagcuccggcacccuggaguucaacaacgagagcuucaacuggacgggggugacccagaacggcaccuccagcgccugcauccgccgguccaagaacagcuucuucucccgccugaacuggcucacccaccugaacuucaaguaccccgcccugaacgugacgaugcccaacaacgagcaguucgacaagcucuacaucuggggcguccaccaccccgggaccgacaaggaccagaucuuccuguacgcgcaggccagcgggcggaucaccguguccaccaagcgcagccagcagacggccaucccgaacaucggcuaccggccccgcgugcggaacauccccagccgcaucuccaucuacuggaccaucgucaagcccggcgacauccugcucaucaacagcaccgggaaccugaucgccccgcggggcuacuucaagauccgcuccgggaaguccuccaucaugcggagcgacgcccccaucggcaagugcaacuccgagugcaucacccccaacggcagcauccccaacgacaagccguuccagaacgugaaccgcaucacguacggggcgugcccccgguacgugaagcagaacacccugaagcucgccaccggcaugcgcaacguccccgagaagcagacccgggggaucuucggcgccaucgccggguucaucgagaacggcugggagggcaugguggacgggugguacggcuuccgccaccagaacuccgaggggcggggccaggccgcggaccucaagagcacgcaggccgccaucgaccagaucaacgggaagcugaaccgccugaucggcaagaccaacgagaaguuccaccagaucgagaaggaguucuccgagguggagggccggauccaggaccuggagaaguacgucgaggacaccaagaucgaccuguggagcuacaacgccgagcuccugguggcccuggagaaccagcacaccaucgaccucacggacuccgagaugaacaagcuguucgagaagaccaagaagcagcugcgcgagaacgcggaggacauggggaacggcugcuucaagaucuaccacaagugcgacaacgccugcaucgggagcauccgcaacggcaccuacgaccacgacguguaccgggacgaggcccucaacaaccgcuuccagaucaagggggucgagcugaaguccggcuacaaggacuggauccuguggaucagcuucgccaucuccugcuuccuccugugcguggcccugcucggcuucaucaugugggcgugccagaaggggaacauccggugcaacaucugcaucuga

SEQ ID NO: 70891 - RNA, 1701 nt, Artificial Sequence
  derived and/or modified CDS sequence (opt1) from hemagglutinin__InfluenzaA__AEI60086
augaaggccauccuggugguccuccuguacaccuucgccaccgcgaacgccgacacgcugugcaucggcuaccacgccaacaacagcaccgacaccguggacaccgugcucgagaagaacgucacggugacccacuccgugaaccugcuggaggacaagcacaacgggaagcucugcaagcugcgcggcgucgcgccccugcaccucgggaagugcaacaucgccggcuggauccuggggaacccggagugcgagagccuguccaccgccagcuccuggagcuacaucguggagaccuccagcuccgacaacggcacgugcuaccccggcgacuucaucaacuacgaggagcuccgggagcagcugagcuccgugagcuccuucgagcgcuucgagaucuuccccaagaccagcuccuggcccaaccacgacagcaacaagggggucaccgccgccugcccgcacgccggcgcgaaguccuucuacaagaaccugaucuggcucgugaagaaggggaacagcuaccccaagcuguccaagagcuacaucaacgacaagggcaaggaggugcugguccucugggggauccaccaccccagcaccacggccgaccagcagucccuguaccagaacgccgacgccuacguguucgugggcaccagccgguacuccaagaaguucaagcccgagaucgccauccgcccgaagguccgggaccaggagggccgcaugaacuacuacuggacccugguggagcccggggacaagaucaccuucgaggcgacgggcaaccucguggucccccgguacgccuucgccauggagcgcaacgccgggagcggcaucaucaucuccgacacccccgugcacgacugcaacacgaccugccagaccccgaagggcgccaucaacaccagccugcccuuccagaacauccaccccaucaccaucgggaagugccccaaguacgugaaguccaccaagcugcggcucgcgacgggccugcgcaacgucccgagcauccagucccgggggcuguucggcgccaucgccggguucaucgagggcggcuggaccgggaugguggacggcugguacggguaccaccaccagaacgagcagggcagcggguacgccgccgaccucaaguccacccagaacgcgaucgacaagaucaccaacaaggugaacagcgucaucgagaagaugaacacgcaguucaccgccgugggcaaggaguucaaccaccuggagaagcgcaucgagaaccugaacaagaaggucgacgacggcuuccucgacaucuggaccuacaacgccgagcugcuggugcuccuggagaacgagcggacccuggacuaccacgacuccaacgugaagaaccucuacgagaagguccgcaaccagcugaagaacaacgccaaggagaucgggaacggcugcuucgaguucuaccacaagugcgacaacacgugcauggagagcgugaagaacgggaccuacgacuaccccaaguacuccgaggaggccaagcugaaccgggaggagaucgacggcgugaagcucgagagcacccgcaucuaccagauccuggcgaucuacuccaccgucgccagcucccuggugcucguggucagccugggggccaucagcuucuggaugugcuccaacggcagccugcagugccggaucugcaucuga

SEQ ID NO: 70892 - RNA, 1701 nt, Artificial Sequence
  derived and/or modified CDS sequence (opt1) from hemagglutinin__InfluenzaA__AEI60109
augaagaccaccaucgcccugagcuacauccucugccugguguucgcccagaagcugcccggcaacgacaacuccacggcgacccucugccuggggcaccacgccgucccgaacggcacccuggugaagaccaucacgaacgaccagaucgaggugaccaacgccaccgagcucguccagaacagcuccaccgggcgcaucugcgacagcccccaccagauccuggacggcgagaacugcacgcugaucgacgcccuccugggggacccccacugcgacggcuuccagaacaaggagugggaccuguucguggagcgguccaaggccuacagcaacugcuaccccuacaacgugccggacuacgucucccuccgcagccugguggcguccagcggcacccuggaguucaacaacgaguccuucaacuggaccgggguggcccaggacggcagcuccuacgccugcaagcggcgcagcaacaaguccuucuucagccggcucaacuggcugcaccagcugaacuacaaguaccccgcccucaacgucaccaugcccaacaacgagaacuucgacaagcuguacaucuggggcgugcaccaccccgggacggacuccgaccagaucagccuguacgcgcaggccuccgggcgcgugaccgucagcaccaagcggagccagcagaccgugaucccgaacaucggcuaccgccccugggugcggggcgucuccagcaucaucuccaucuacuggacgaucgugaagcccggggacauccuccugaucaacagcaccggcaaccugaucgcgccccgcggguacuucaagauccgguccggcaagagcuccaucaugcgcagcgacgccccgaucggcaagugcaacuccgagugcaucacccccaacgggagcauccccaacgacaagcccuuccagaacgugaaccggaucaccuacggcccgugcccccgcuacgucaagcagaacacgcucaagcuggccaccgggaugcggaacgugcccgagaagcagacccgcggcaucuucggggccaucgccggcuucaucgagaacggcugggaggggaugaaggacggcugguacggguuccggcaccagaacuccgagggcaccgggcaggccgccgacaucaagagcacgcaggccgcgaucaaccagaucaacggcaagcugaaccgccucaucgagaagaccaacgagaaguuccaccagaucgagaaggaguucuccgagguggagggccggauccaggaccuggagaaguacgucgaggacaccaagaucgaccuguggagcuacaacgccgagcuccugguggcccuggagaaccagcacaccaucgaccucacggacuccgagaugaacaagcuguucgagcgcaccaagaagcagcugcgggagaacgccgaggacauggggaacggcugcuucaagaucuaccacaagugcgacaacacgugcaucgggagcauccgcaacggcaccuacgaccacgacguguaccgcgacgaggcccucaacaaccgguuccacaucaagggggucgagcugaaguccggcuacaaggacuggauccuguggaucagcuucgcgaccuccugcuuccuccugugcaucgugcugcucggcuucaucaugugggccugccagaaggggaacauccgcugcaacaucugcaucuga

SEQ ID NO: 70893 - RNA, 1701 nt, Artificial Sequence
  derived and/or modified CDS sequence (opt1) from hemagglutinin__InfluenzaA__AEI86734
augaaggccauccuggugguccuccuguacaccuucgccaccgcgaacgccgacacgcugugcgugggcuaccacgccaacaacagcaccgacaccguggacaccguccucgagaagaacgugacggugacccacuccgucaaccugcuggaggacaagcacaacgggaagcucugcaagcugcgcggcguggcgccccugcaccucgggaagugcaacaucgccggcuggauccuggggaacccggagugcgagagccuguccaccgcgagcuccuggagcuacaucguggagaccuccaacagcgacaacggcacgugcuaccccggcgacuucaucgacuacgaggagcuccgggagcagcuguccagcgucuccagcuucgagcgcuucgagaucuuccccaagaccuccagcuggcccaaccacgacuccaacaagggggugaccgccgccugcccgcacgccggcgccaagagcuucuaccggaaccugaucuggcucgugaagaaggggaacuccuaccccaagcugagcaaguccuacaucaacgacaagggcaaggagguccuggugcucugggggauccaccaccccagcaccagcgccgaccagcagucccuguaccagaacgccgacacguacguguucgucggcaccagccgcuacuccaagaaguucaagcccgagaucgccauccggccgaaggugcgcgaccaggagggccggaugaacuacuacuggacccugguggagcccggggacaagaucaccuucgaggccacgggcaaccucgucgugccccgcuacgcguucgccauggagcggaacgccgggagcggcaucaucaucuccgacacccccgugcacgacugcaacacgaccugccagaccccgaagggcgccaucaacaccagccugcccuuccagaacauccaccccaucaccaucgggaagugccccaaguacgucaaguccaccaagcugcgccucgccacgggccugcggaacgugccgagcauccagucccgcgggcuguucggcgcgaucgccggguucaucgagggcggcuggaccgggaugguggacggcugguacggguaccaccaccagaacgagcagggcagcggguacgccgccgaccucaaguccacccagaacgccaucgacgagaucaccaacaaggucaacagcgugaucgagaagaugaacacgcaguucaccgcggucggcaaggaguucaaccaccuggagaagcggaucgagaaccugaacaagaagguggacgacggcuuccucgacaucuggaccuacaacgccgagcugcuggugcuccuggagaacgagcgcacccuggacuaccacgacuccaacgucaagaaccucuacgagaaggugcggagccagcugaagaacaacgccaaggagaucgggaacggcugcuucgaguucuaccacaagugcgacaacacgugcauggaguccgugaagaacgggaccuacgacuaccccaaguacagcgaggaggccaagcugaaccgcgaggagaucgacggcgucaagcucgaguccacccggaucuaccagauccuggccaucuacagcaccguggcguccagccuggugcucgucgugagccugggggccaucuccuucuggaugugcagcaacggcucccugcagugccgcaucugcaucuga

SEQ ID NO: 70894 - RNA, 1701 nt, Artificial Sequence
  derived and/or modified CDS sequence (opt1) from hemagglutinin__InfluenzaA__AEI86764
augaaggccauccuggugguccuccuguacaccuucgccaccgcgaacgccgacacgcugugcaucggcuaccacgccaacaacagcaccgacaccguggacaccgugcucgagaagaacgucacggugacccacuccgugaaccugcuggaggacaagcacaacgggaagcucugcaagcugcgcggcgucgcgccccugcaccucgggaagugcaacaucgccggcuggauccuggggaacccggagugcgagagccuguccaccgccagcuccuggagcuacaucguggagaccuccagcuccgacaacggcacgugcuaccccggcgacuucaucgacuacgaggagcuccgggagcagcugagcuccgugagcuccuucgagcgcuucgagaucuuccccaagaccagcuccuggcccgaccacgacagcaacaagggggucaccgccgccugcccgcacgccggcgcgaaguccuucuacaagaaccugaucuggcucgugaagaaggggaacagcuaccccaagcuguccaagagcuacaucaacgacaagggcaaggaggugcugguccucugggggauccaccaccccagcaccuccgccgaccagcagagccuguaccagaacgccgacgccuacguguucgugggcacgucccgguacagcaagaaguucaagcccgagaucgccauccgcccgaagguccgggaccaggagggccgcaugaacuacuacuggacccugguggagcccggggacaagaucaccuucgaggcgaccggcaaccucguggucccccgguacgccuucgccauggagcgcaacgccggguccggcaucaucaucagcgacacgcccgugcacgacugcaacacgaccugccagaccccgaagggcgccaucaacaccucccugcccuuccagaacauccaccccaucaccaucgggaagugccccaaguacgucaagagcaccaagcugcggcucgcgaccggccugcgcaacgugccguccauccagagccgggggcuguucggcgccaucgccggguucaucgagggcggcuggacggggaugguggacggcugguacggguaccaccaccagaacgagcagggcuccggguacgccgccgaccucaagagcacccagaacgcgaucgacaagaucaccaacaaggugaacuccgucaucgagaagaugaacacccaguucacggccgugggcaaggaguucaaccaccuggagaagcgcaucgagaaccugaacaagaaggucgacgacggcuuccucgacaucuggaccuacaacgccgagcugcuggugcuccuggagaacgagcggacccuggacuaccacgacagcaacgugaagaaccucuacgagaagguccgcucccagcugaagaacaacgccaaggagaucgggaacggcugcuucgaguucuaccacaagugcgacaacacgugcauggagagcgugaagaacgggaccuacgacuaccccaaguacuccgaggaggccaagcugaaccgggagaagaucgacggcgugaagcucgagagcacccgcaucuaccagauccuggcgaucuacuccaccgucgccagcagccuggugcucguggucucccugggggccaucagcuucuggaugugcuccaacggcagccugcagugccggaucugcaucuga

SEQ ID NO: 70895 - RNA, 1701 nt, Artificial Sequence; identical to SEQ ID NO: 70894
  derived and/or modified CDS sequence (opt1) from hemagglutinin__InfluenzaA__AEI86774

SEQ ID NO: 70896 - RNA, 1701 nt, Artificial Sequence
  derived and/or modified CDS sequence (opt1) from hemagglutinin__InfluenzaA__AEI86784
augaaggugauccuggucgugcuccuguacaccuucgccaccgccaacgcggacacgcugugcaucggcuaccacgccaacaacagcaccgacaccguggacaccguccucgagaagaacgugacggugacccacuccgucaaccugcuggaggacaagcacaacgggaagcucugcaagcugcgcggcguggcgccccugcaccucgggaagugcaacaucgccggcuggauccuggggaacccggagugcgagagccuguccaccgccagcuccuggagcuacaucguggagaccuccagcuccgacaacggcacgugcuaccccggcgacuucaucgacuacgaggagcuccgggagcagcugagcuccgucagcuccuucaagcgcuucgagaucuuccccaagaccagcuccuggcccaaccacgacagcaacaagggggugaccgccgccugcccgcacgccggcgccaaguccuucuacaagaaccugaucuggcucgugaagaaggggaacagcuaccccaagcuguccaagagcuacaucaacgacaagggcaaggagguccuggugcucugggggauccaccaccccagcaccuccgcggaccagcagagccuguaccagaacgccgacgccuacguguucgucggcacgucccgguacagcaagaaguucaagcccgagaucgccauccgcccgaaggugcgggaccaggagggccgcaugaacuacuacuggacccugguggagcccggggacaagaucaccuucgaggccaccggcaaccucgucgugccccgguacgcguucgccauggagcgcaacgccggguccggcaucaucaucagcgacacgcccgugcacgacugcaacacgaccugccagaccccgaagggcgccaucaacaccucccugcccuuccagaacauccaccccaucaccaucgggaagugccccaaguacgucaagagcaccaagcugcggcucgccaccggccugcgcaacgugccguccauccagagccgggggcuguucggcgcgaucgccggguucaucgagggcggcuggacggggaugguggacggcugguacggguaccaccaccagaacgagcagggcuccggguacgccgccgaccucaagagcacccagaacgccaucgacaagaucaccaacaaggucaacuccgugaucgagaagaugaacacccaguucacggcggucggcaaggaguucaaccaccuggagaagcgcaucgagaaccugaacaagaagguggacgacggcuuccucgacaucuggaccuacaacgccgagcugcuggugcuccuggagaacgagcggacccuggacuaccacgacagcaacgucaagaaccucuacgagaaggugcgcucccagcugaagaacaacgccaaggagaucgggaacggcugcuucgaguucuaccacaagugcgacaacacgugcauggagagcgugaagaacgggaccuacgacuaccccaaguacuccgaggaggccaagcugaaccgggaggagaucgacggcgucaagcucgagagcacccgcaucuaccagauccuggccaucuacuccaccguggcgagcagccuggugcucgucgugucccugggggccaucagcuucuggaugugcuccaacggcagccugcagugccggaucugcaucuga

SEQ ID NO: 70897 - RNA, 1701 nt, Artificial Sequence
  derived and/or modified CDS sequence (opt1) from hemagglutinin__InfluenzaA__AEI86794
augaagaccauccuggugguccuccuguacaccuucgccacggccaacgcggacacccugugcaucggcuaccacgccaacaacagcaccgacaccguggacacggugcucgagaagaacgucaccgugacccacuccgugaaccugcuggaggacaagcacaacgggaagcucugcaagcugcgcggcgucgcgccccugcaccucgggaagugcaacaucgccggcuggauccuggggaacccggagugcgagagccuguccaccgccagcuccuggagcuacaucguggagacguccagcuccgacaacgggaccugcuaccccggcaacuucaucgacuacgaggagcuccgggagcagcugagcuccgugagcuccuucgagcgcuucgagaucuuccccaagaccagcuccuggcccgaccacgacagcaacaagggcgucaccgccgccugcccgcacgccggcgccaaguccuucuacaagaaccugaucuggcucgugaagaaggggaacagcuaccccaagcuguccaagagcuacaucaacgacaagggcaaggaggugcugguccucugggggauccaccaccccagcacguccgcggaccagcagagccuguaccagaacgccgacgccuacguguucgugggcaccuccaaguacagcaagaaguucaagcccgagaucgccauccggccgaagguccgcgaccaggagggccggaugaacuacuacuggacccugguggagcccggggacaagaucaccuucgaggccacgggcaaccucguggcgccccgcuacgccuucgccauggagcggaacgccggguccggcaucaucaucagcgacacccccguccacgacugcaacacgaccugccagaccccgaagggcgccaucaacaccucccugcccuuccagaacauccaccccaucaccaucgggaagugccccaaguacgucaagagcaccaagcugcgccucgcgacgggccugcggaacgugccguccauccagagccgcgggcuguucggcgccaucgccggguucaucgagggcggcuggaccgggaugguggacggcugguacggguaccaccaccagaacgagcagggcuccggguacgccgccgaccucaagagcacccagaacgcgaucgacaagaucaccaacaaggugaacuccgugaucgagaagaugaacacgcaguucaccgccgucggcaaggaguucaaccaccuggagaagcggaucgagaaccugaacaagaagguggacgacggcuuccucgacaucuggaccuacaacgccgagcugcugguccuccuggagaacgagcgcacccuggacuaccacgacagcaacgugaagaaccucuacgagaaggugcggucccagcugaagaacaacgccaaggagaucgggaacggcugcuucgaguucuaccacaagugcgacaacacgugcauggagagcgucaagaacgggaccuacgacuaccccaaguacuccgaggaggccaagcugaaccgcgaggagaucgacggcgugaagcucgagagcacccggaucuaccagauccuggcgaucuacuccaccguggccagcagccugguccucguggugucccugggggccaucagcuucuggaugugcuccaacggcagccugcagugccgcaucugcaucuga

SEQ ID NO: 70898 - RNA, 1701 nt, Artificial Sequence
  derived and/or modified CDS sequence (opt1) from hemagglutinin__InfluenzaA__AEI86804
augaaggccauccuggugguccuccuguacaccuucgccaccgcgaacgccgacacgcugugcaucggcuaccacgccaacaacagcaccgacaccguggacaccgugcucgagaagaacgucacggugacccacuccgugaaccugcuggaggacaagcacaacgggaagcucugcaagcugcgcggcgucgcgccccugcaccucgggaagugcaacaucgccggcuggauccuggggaacccggagugcgagagccuguccaccgccagcuccuggagcuacaucguggagaccuccagcuccgacaacggcacgugcuaccccggcgacuucaucaacuacgaggagcuccgggagcagcugagcuccgugagcuccuucgagcgcuucgagaucuuccccaagaccagcuccuggcccgaccacgacagcaacaagggggucaccgccgccugcccgcacgccggcgcgaaguccuucuacaagaaccugauguggcucgugaagaaggggaacagcuaccccaagcuguccaagagcuacaucaacgacaagggcaaggaggugcugguccucugggggauccaccaccccagcaccuccgccgaccagcagagccuguaccagaacgccgacgccuacguguucgugggcacgucccgguacagcaagaaguucaagcccgagaucgccauccgcccgaagguccgggaccaggagggccgcaugaacuacuacuggacccugguggagcccggggacaagaucaccuucgaggcgaccggcaaccucguggucccccgguacgccuucgccauggagcgcaacgccggguccggcaucaucaucagcgacacgcccgugcacgacugcaacacgaccugccagaccccgaagggcgccaucaacaccucccugcccuuccagaacauccaccccaucaccaucgggaagugccccaaguacgucaagagcaccaagcugcggcucgcgaccggccugcgcaacgugccguccauccagagccgggggcuguucggcgccaucgccggguucaucgagggcggcuggacggggaugguggacggcugguacggguaccaccaccagaacgagcagggcuccggguacgccgccgaccucaagagcacccagaacgcgaucgacaagaucaccaacaaggugaacuccgucaucgagaagaugaacacccaguucacggccgugggcaaggaguucaaccaccuggagaagcgcaucgagaaccugaacaagaaggucgacgacggcuuccucgacaucuggaccuacaacgccgagcugcuggugcuccuggagaacgagcggacccuggacuaccacgacagcaacgugaagaaccucuacgagaagguccgcucccagcugaagaacaacgccaaggagaucgggaacggcugcuucgaguucuaccacaagugcgacaacacgugcauggagagcgugaagaacgggaccuacgacuaccccaaguacuccgaggaggccaagcugaaccgggaggagaucgacggcgugaagcucgagagcacccgcaucuaccagauccuggcgaucuacuccgccgucgccagcagccuggugcucguggucucccugggggccaucagcuucuggaugugcuccaacggcagccugcagugccggaucugcaucuga

SEQ ID NO: 70899 - RNA, 1701 nt, Artificial Sequence; identical to SEQ ID NO: 70894
  derived and/or modified CDS sequence (opt1) from hemagglutinin__InfluenzaA__AEI86814

SEQ ID NO: 70900 - RNA, 1701 nt, Artificial Sequence
  derived and/or modified CDS sequence (opt1) from hemagglutinin__InfluenzaA__AEI86824
augaaggccauccuggugguccuccuguacaccuucgccaccgcgaacgccgacacgcugugcaucggcuaccacgccaacaacagcaccgacaccguggacaccgugcucgagaagaacgucacggugacccacuccgugaaccugcuggaggacaagcacaacgggaagcucugcaagcugcgcggcgucgcgccccugcaccucgggaagugcaacaucgccggcuggauccuggggaacccggagugcgagagccuguccaccgccagcuccuggagcuacaucguggagaccuccagcuccgacaacggcacgugcuaccccggcgacuucaucgacuacgaggagcuccgggagcagcugagcuccgugagcuccuucgagcgcuucgagaucuuccccaagaccagcuccuggcccgaccacgacagcaacaagggggucaccgccgccugcccgcacgccggcgcgaaguccuucuacaagaaccugaucuggcucgugaagaaggggaacagcuaccccaagcuguccaagagcuacaucaacgacaagggcaaggaggugcugguccucugggggauccaccaccccagcaccuccgccgaccagcagagccuguaccagaacgccgacgccuacguguucgugggcacgucccgguacagcaagaaguucaagcccgagaucgccauccgcccgaagguccgggaccaggagggccgcaugaacuacuacuggacccugguggagcccggggacaagaucaccuucgaggcgaccggcaaccucguggucccccgguacgccuucgccauggagcgcaacgccggguccggcaucaucaucagcgacacgcccgugcacgacugcaacacgaccugccagaccccgaagggcgccaucaacaccucccugcccuuccagaacauccaccccaucaccaucgggaagugccccaaguacgucaagagcaccaagcugcggcucgcgaccggccugcgcaacgugccguccauccagagccgggggcuguucggcgccaucgccggguucaucgagggcggcuggacggggaugguggacggcugguacggguaccaccaccagaacgagcagggcuccggguacgccgccgaccucaagagcacccaggacgcgaucgacaagaucaccaacaaggugaacuccgucaucgagaagaugaacacccaguucacggccgugggcaaggaguucaaccaccuggagaagcgcaucgagaaccugaacaagaaggucgacgacggcuuccucgacaucuggaccuacaacgccgagcugcuggugcuccuggagaacgagcggacccuggacuaccacgacagcaacgugaagaaccucuacgagaagguccgcucccagcugaagaacaacgccaaggagaucgggaacggcugcuucgaguucuaccacaagugcgacaacacgugcauggagagcgugaagaacgggaccuacgacuaccccaaguacuccgaggaggccaagcugaaccgggagaagaucgacggcgugaagcucgagagcacccgcaucuaccagauccuggcgaucuacuccaccgucgccagcagccuggugcucguggucucccugggggccaucagcuucuggaugugcuccaacggcagccugcagugccggaucugcaucuga

SEQ ID NO: 70901 - RNA, 1701 nt, Artificial Sequence
  derived and/or modified CDS sequence (opt1) from hemagglutinin__InfluenzaA__AEI86834
augaaggccauccuggugguccuccuguacaccuucgccaccgcgaacgccgacacgcugugcaucggcuaccacgccaacaacagcaccgacaccguggacaccgugcucgagaagaacgucacggugacccacuccgugaaccugcuggaggacaagcacaacgggaagcucugcaagcugcgcggcgucgcgccccugcaccucgggaagugcaacaucgccggcuggauccuggggaacccggagugcgagagccuguccaccgccagcuccuggagcuacaucguggagaccuccagcuccgacaacggcacgugcuaccccggcaacuucaucgacuacgaggagcuccgggagcagcugagcuccgugagcuccuucgagcgcuucgagaucuuccccaagaccagcuccuggcccgaccacgacagcaacaagggggucaccgccgccugcccgcacgccggcgcgaaguccuucuacaagaaccugaucuggcucgugaagaaggggaacagcuaccccaagcuguccaagagcuacaucaacgacaagggcaaggaggugcugguccucugggggauccaccaccccagcaccuccgccgaccagcagagccuguaccagaacgccgacgccuacguguucgugggcacgucccgguacagccgcaaguucaagcccgagaucgccauccggccgaagguccgcgaccaggagggccggaugaacuacuacuggacccugguggagcccggggacaagaucaccuucgaggcgaccggcaaccucguggcgccccgcuacgccuucgccauggagcggaacgccggguccggcaucaucaucagcgacacgcccguccacgacugcaacacgaccugccagaccccgaagggcgccaucaacaccucccugcccuuccagaacauccaccccaucaccaucgggaagugccccaaguacgucaagagcaccaagcugcgccucgccaccggccugcggaacgugccguccauccagagccgcgggcuguucggcgccaucgccggguucaucgagggcggcuggacggggaugguggacggcugguacggguaccaccaccagaacgagcagggcuccggguacgccgcggaccucaagagcacccagaacgccaucgacaagaucaccaacaaggugaacuccgugaucgagaagaugaacacccaguucacggccgucggcaaggaguucaaccaccuggagaagcggaucgagaaccugaacaagaagguggacgacggcuuccucgacaucuggaccuacaacgccgagcugcugguccuccuggagaacgagcgcacccuggacuaccacgacagcaacgugaagaaccucuacgagaaggugcggucccagcugaagaacaacgccaaggagaucgggaacggcugcuucgaguucuaccacaagugcgacaacacgugcauggagagcgucaagaacgggaccuacgacuaccccaaguacuccgaggaggcgaagcugaaccgcgaggagaucgacggcgugaagcucgagagcacccggaucuaccagauccuggccaucuacuccaccguggccagcagccugguccucguggugucccugggggccaucagcuucuggaugugcuccaacggcagccugcagugccgcaucugcaucuga

SEQ ID NO: 70902 - RNA, 1701 nt, Artificial Sequence; identical to SEQ ID NO: 69608
  derived and/or modified CDS sequence (opt1) from hemagglutinin__InfluenzaA__AEI86854

SEQ ID NO: 70903 - RNA, 1701 nt, Artificial Sequence
  derived and/or modified CDS sequence (opt1) from hemagglutinin__InfluenzaA__AEI86864
augaaggccauccugguggcccuccuguacaccuucgcgaccgccaacgccgacacgcugugcaucggcuaccacgccaacaacagcaccgacaccgucgacaccgugcucgagaagaacgugacggucacccacuccgugaaccugcuggaggacaagcacaacgggaagcucugcaagcugcgcggcguggcgccccugcaccucgggaagugcaacaucgccggcuggauccuggggaacccggagugcgagagccuguccaccgccagcuccuggagcuacaucgucgagaccuccagcuccgacaacggcacgugcuaccccggcgacuucaucaacuacgaggagcuccgggagcagcugagcuccgugagcuccuucgagcgcuucgagaucuuccccaagaccagcuccuggcccaaccacgacagcaacaagggggugaccgccgccugcccgcacgcgggcgccaaguccuucuacaagaaccugaucuggcucgucaagaaggggaacagcuaccccaagcuguccaagagcuacaucaacgacaagggcaaggaggugcuggugcucugggggauccaccaccccagcaccacggccgaccagcagucccuguaccagaacgccgacgccuacgucuucgugggcaccagccgguacuccaagaaguucaagcccgagaucgcgauccgcccgaaggugcgggaccaggagggccgcaugaacuacuacuggacccuggucgagcccggggacaagaucaccuucgaggccacgggcaaccucguggugccccgguacgccuucgccauggagcgcaacgccgggagcggcaucaucaucuccgacacccccguccacgacugcaacacgaccugccagaccccgaagggcgcgaucaacaccagccugcccuuccagaacauccaccccaucaccaucgggaagugccccaaguacgugaaguccaccaagcugcggcucgccacgggccugcgcaacgugccgagcauccagucccgggggcuguucggcgccaucgccggguucaucgagggcggcuggaccgggauggucgacggcugguacggguaccaccaccagaacgagcagggcagcggguacgccgcggaccucaaguccacccagaacgccaucgacaagaucaccaacaaggugaacagcgugaucgagaagaugaacacgcaguucaccgccgucggcaaggaguucaaccaccuggagaagcgcaucgagaaccugaacaagaagguggacgacggcuuccucgacaucuggaccuacaacgccgagcugcugguccuccuggagaacgagcggacccuggacuaccacgacuccaacgugaagaaccucuacgagaaggugcgcaaccagcugaagaacaacgccaaggagaucgggaacggcugcuucgaguucuaccacaagugcgacaacacgugcauggagagcgucaagaacgggaccuacgacuaccccaaguacuccgaggaggcgaagcugaaccgggaggagaucgacggcgugaagcucgagagcacccgcaucuaccagauccuggccaucuacuccaccguggccagcucccugguccucguggugagccugggggccaucagcuucuggaugugcuccaacggcagccugcagugccggaucugcaucuga

SEQ ID NO: 70904 - RNA, 1701 nt, Artificial Sequence; identical to SEQ ID NO: 70894
  derived and/or modified CDS sequence (opt1) from hemagglutinin__InfluenzaA__AEI86874

SEQ ID NO: 70905 - RNA, 1701 nt, Artificial Sequence
  derived and/or modified CDS sequence (opt1) from hemagglutinin__InfluenzaA__AEI86894
augaaggccauccuggugguccuccuguacaccuucgccaccgcgaacgccgacacgcugugcaucggcuaccacgccaacaacagcaccgacaccguggacaccgugcucgagaagaacgucacggugacccacuccgugaaccugcuggaggacaagcacaacgggaagcucugcaagcugcgcggcgucgcgccccugcaccucgggaagugcaacaucgccggcuggauccuggggaacccggagugcgagagccuguccaccgccagcuccuggagcuacaucguggagaccuccagcuccgacaacggcacgugcuaccccggcaacuucaucgacuacgaggagcuccgggagcagcugagcuccgugagcuccuucgagcgcuucgagaucuuccccaagaccagcuccuggcccgaccacgacagcaacaagggggucaccgccgccugcccgcacgccggcgcgaaguccuucuacaagaaccugaucuggcucgugaagaaggggaacagcuaccccaagcuguccaagagcuacaucaacgacaagggcaaggaggugcugguccucugggggauccaccaccccagcaccuccgccgaccagcagagccuguaccagaacgccgacgccuacguguucgugggcacgucccgguacagcaagaaguucaagcccgagaucgccauccgcccgaagguccgggaccaggagggccgcaugaacuacuacuggacccugguggagcccggggacaagaucaccuucgaggcgaccggcaaccucguggcgccccgguacgccuucgccauggagcgcaacgccggguccggcaucaucaucagcgacacgcccguccacgacugcaacacgaccugccagaccccgaagggcgccaucaacaccucccugcccuuccagaacauccaccccaucaccaucgggaagugccccaaguacgucaagagcaccaagcugcggcucgccaccggccugcgcaacgugccguccauccagagccgggggcuguucggcgccaucgccggguucaucgagggcggcuggacggggaugguggacggcugguacggguaccaccaccagaacgagcagggcuccggguacgccgcggaccucaagagcacccagaacgccaucgacaagaucaccaacaaggugaacuccgugaucgagaagaugaacacccaguucacggccgucggcaaggaguucaaccaccuggagaagcgcaucgagaaccugaacaagaagguggacgacggcuuccucgacaucuggaccuacaacgccgagcugcugguccuccuggagaacgagcggacccuggacuaccacgacagcaacgugaagaaccucuacgagaaggugcgcucccagcugaagaacaacgccaaggagaucgggaacggcugcuucgaguucuaccacaagugcgacaacacgugcauggagagcgucaagaacgggaccuacgacuaccccaaguacuccgaggaggcgaagcugaaccgggaggagaucgacggcgugaagcucgagagcacccgcaucuaccagauccuggccaucuacuccaccguggccagcagccugguccucguggugucccugggggccaucagcuucuggaugugcuccaacggcagccugcagugccggaucugcaucuga

SEQ ID NO: 70906 - RNA, 1701 nt, Artificial Sequence
  derived and/or modified CDS sequence (opt1) from hemagglutinin__InfluenzaA__AEI86904
augaaggccauccuggugguccuccuguacaccuucaccacggccaacgcggacacccugugcaucggcuaccacgccaacaacagcaccgacaccguggacacggugcucgagaagaacgucaccgugacccacuccgugaaccugcuggaggacaagcacaacgggaagcucugcaagcugcgcggcgucgcgccccugcaccucgggaagugcaacaucgccggcuggauccuggggaacccggagugcgagagccuguccaccgccagcuccuggagcuacaucguggagacguccagcuccgacaacgggaccugcuaccccggcgacuucaucgacuacgaggagcuccgggagcagcugagcuccgugagcuccuucgagcgcuucgagaucuuccccaagaccagcuccuggcccaaccacgacagcaacaagggcgucaccgccgccugcccgcacgccggcgccaaguccuucuacaagaaccugaucuggcucgugaagaaggggaacagcuaccccaagcuguccaagagcuacaucaacgacaagggcaaggaggugcugguccucugggggauccaccaccccagcacgaccgcggaccagcagucccuguaccagaacgccgacgccuacguguucgugggcaccagccgguacuccaagaaguucaagcccgagaucgccauccgcccgaagguccgggaccaggagggccgcaugaacuacuacuggacccugguggagcccggggacaagaucacguucgaggccaccggcaaccucguggucccccgguacgcguucgccauggagcgcaacgccgggagcggcaucaucaucuccgacacccccgugcacgacugcaacaccacgugccagaccccgaagggcgccaucaacaccagccugcccuuccagaacauccaccccaucaccaucgggaagugccccaaguacgugaaguccacgaagcugcggcucgccaccggccugcgcaacgucccgagcauccagucccgggggcuguucggcgcgaucgccggguucaucgagggcggcuggaccgggaugguggacggcugguacggguaccaccaccagaacgagcagggcagcggguacgccgccgaccucaaguccacccagaacgccaucgacaagaucacgaacaaggugaacagcgucaucgagaagaugaacacccaguucaccgcggugggcaaggaguucaaccaccuggagaagcgcaucgagaaccugaacaagaaggucgacgacggcuuccucgacaucuggaccuacaacgccgagcugcuggugcuccuggagaacgagcggacgcuggacuaccacgacuccaacgugaagaaccucuacgagaagguccgcaaccagcugaagaacaacgccaaggagaucgggaacggcugcuucgaguucuaccacaagugcgacaacacgugcauggagagcgugaagaacgggaccuacgacuaccccaaguacuccgaggaggccaagcugaaccgggaggagaucgacggcgugaagcucgagagcacccgcaucuaccagauccuggccaucuacuccaccgucgcgagcucccuggugcucguggucagccugggggccaucagcuucuggaugugcuccaacggcagccugcagugccggaucugcaucuga

SEQ ID NO: 70907 - RNA, 1701 nt, Artificial Sequence
  derived and/or modified CDS sequence (opt1) from hemagglutinin__InfluenzaA__AEI86914
augaaggccauccuggugguccuccuguacaccuucgccaccgcgaacgccgacacgcugugcaucggcuaccacgccaacaacagcaccgacaccguggacaccgugcucgagaagaacgucacggugacccacuccgugaaccugcuggaggacaagcacaacgggaagcucugcaagcugcgcggcgucgcgccccugcaccucgggaagugcaacaucgccggcuggauccuggggaacccggagugcgagagccuguccaccgccagcuccuggagcuacaucguggagaccuccagcuccgacaacggcacgugcuaccccggcgacuucaucaacuacgaggagcuccgggagcagcugagcuccgugagcuccuucgagcgcuucgagaucuuccccaagaccagcuccuggcccaaccacgacagcaacaagggggucaccgccgccugcccgcacgccggcgcgaaguccuucuacaagaaccugaucuggcucgugaagaaggggaacagcuacccccggcuguccaagagcuacaucaacgacaagggcaaggaggugcugguccucugggggauccaccaccccagcaccacggccgaccagcagucccuguaccagaacgccgacgccuacguguucgugggcaccagccgcuacuccaagaaguucaagcccgagaucgccauccggccgaagguccgcgaccaggagggccggaugaacuacuacuggacccugguggagcccggggacaagaucaccuucgaggcgacgggcaaccucguggucccccgcuacgccuucgccauggagcggaacgccgggagcggcaucaucaucuccgacacccccgugcacgacugcaacacgaccugccagaccccgaagggcgccaucaacaccagccugcccuuccagaacauccaccccaucaccaucgggaagugccccaaguacgugaaguccaccaagcugcgccucgcgacgggccugcggaacgucccgagcauccagucccgcgggcuguucggcgccaucgccggguucaucgagggcggcuggaccgggaugguggacggcugguacggguaccaccaccagaacgagcagggcagcggguacgccgccgaccucaaguccacccagaacgcgaucgacaagaucaccaacaaggugaacagcgucaucgagaagaugaacacgcaguucaccgccgugggcaaggaguucaaccaccuggagaagcggaucgagaaccugaacaagaaggucgacgacggcuuccucgacaucuggaccuacaacgccgagcugcuggugcuccuggagaacgagcgcacccuggacuaccacgacuccaacgugaagaaccucuacgagaagguccggaaccagcugaagaacaacgccaaggagaucgggaacggcugcuucgaguucuaccacaagugcgacaacacgugcauggagagcgugaagaacgggaccuacgacuaccccaaguacuccgaggaggccaagcugaaccgcgaggagaucgacggcgugaagcucgagagcacccggaucuaccagauccuggcgaucuacuccaccgucgccagcucccuggugcucguggucagccugggggccaucagcuucuggaugugcuccaacggcagccugcagugccgcaucugcaucuga

SEQ ID NO: 70908 - RNA, 1701 nt, Artificial Sequence
  derived and/or modified CDS sequence (opt1) from hemagglutinin__InfluenzaA__AEI86924
augaaggccauccuggugguccuccuguacaccuucgccaccgcgaacgccgacacgcugugcaucggcuaccacgccaacaacagcaccgacaccguggacaccgugcucgagaagaacgucacggugacccacuccgugaaccugcuggaggacaagcacaacgggaagcucugcaagcugcgcggcgucgcgccccugcaccucgggaagugcaacaucgccggcuggauccuggggaacccggagugcgagagccuguccaccgccagcuccuggagcuacaucguggagaccuccagcuccgacaacggcacgugcuaccccggcguguucaucgacuacgaggagcuccgggagcagcugagcuccgucagcuccuucgagcgcuucgagaucuuccccaagaccagcuccuggcccaaccacgacagcaacaagggggugaccgccgccugcccgcacgccggcgcgaaguccuucuacaagaaccugaucuggcucaucaagaaggggaacagcuaccccaagcuguccaagagcuacaucaacgacaagggcaaggaggugcugguccucugggggauccaccaccccagcaccacggccgaccagcagucccuguaccagaacgccgacgccuacguguucgugggcaccagccgguacuccaagaaguucaagcccgagaucgccguccgcccgaaggugcgggaccaggagggccgcaugaacuacuacuggacccugguggagcccggggacaagaucaccuucgaggcgacgggcaaccucgucgugccccgguacgccuucgccauggagcgcaacgccgggagcggcaucaucaucuccgacacccccgugcacgacugcaacacgaccugccagaccccgaagggcgccaucaacaccagccugcccuuccagaacauccaccccaucaccaucgggaagugccccaaguacgucaaguccaccaagcugcggcucgcgacgggccugcgcaacgugccgagcauccagucccgggggcuguucggcgccaucgccggguucaucgagggcggcuggaccgggaugguggacggcugguacggguaccaccaccagaacgagcagggcagcggguacgccgccgaccucaaguccacccagaacgcgaucgacaagaucaccaacaaggucaacagcgugaucgagaagaugaacacgcaguucaccgccgucggcaaggaguucaaccaccuggagaagcgcaucgagaaccugaacaagaagguggacgacggcuuccucgacaucuggaccuacaacgccgagcugcuggugcuccuggagaacgagcggacccuggacuaccacgacuccaacgucaagaaccucuacgagaaggugcgcaaccagcugaagaacaacgccaaggagaucgggaacggcugcuucgaguucuaccacaagugcgacaacacgugcauggagagcgugaagaacgggaccuacgacuaccccaaguacuccgaggaggccaagcugaaccgggaggagaucgacggcgucaagcucgagagcacccgcaucuaccagauccuggcgaucuacuccaccguggccagcucccuggugcucgucgugagccugggggccaucagcuucuggaugugcuccaacggcagccugcagugccggaucugcaucuga

SEQ ID NO: 70909 - RNA, 1701 nt, Artificial Sequence; identical to SEQ ID NO: 70894
  derived and/or modified CDS sequence (opt1) from hemagglutinin__InfluenzaA__AEI86934

SEQ ID NO: 70910 - RNA, 1701 nt, Artificial Sequence; identical to SEQ ID NO: 69608
  derived and/or modified CDS sequence (opt1) from hemagglutinin__InfluenzaA__AEI86944

SEQ ID NO: 70911 - RNA, 1701 nt, Artificial Sequence
  derived and/or modified CDS sequence (opt1) from hemagglutinin__InfluenzaA__AEI86964
augaaggccauccuggugguccuccuguacaccuucgccaccgcgaacgccgacacgcugugcaucggcuaccacgccaacaacagcaccgacaccguggacaccgugcucgagaagaacgucacggugacccacuccgugaaccugcuggaggacaagcacaacgggaagcucugcaagcugcgcggcgucgcgccccugcaccucgggaagugcaacaucgccggcuggauccuggggaacccggagugcgagagccuguccaccgccagcuccuggagcuacaucguggagaccuccagcuccgacaacggcacgugcuaccccggcguguucaucgacuacgaggagcuccgggagcagcugagcuccgucagcuccuucgagcgcuucgagaucuuccccaagaccagcuccuggcccaaccacgacagcaacaagggggugaccgccgccugcccgcacgccggcgcgaaguccuucuacaagaaccugaucuggcucgugaagaaggggaacagcuaccccaagcuguccaagagcuacaucaacgacaagggcaaggagguccuggugcucugggggauccaccaccccagcaccacggccgaccagcagucccuguaccagaacgccgacgccuacguguucgucggcaccagccgguacuccaagaaguucaagcccgagaucgccgugcgcccgaaggugcgggaccaggagggccgcaugaacuacuacuggacccuggucgagcccggggacaagaucaccuucgaggcgacgggcaaccucguggugccccgguacgccuucgccauggagcgcaacgccgggagcggcaucaucaucuccgacacccccguccacgacugcaacacgaccugccagaccccgaagggcgccaucaacaccagccugcccuuccagaacauccaccccaucaccaucgggaagugccccaaguacgugaaguccaccaagcugcggcucgcgacgggccugcgcaacgugccgagcauccagucccgggggcuguucggcgccaucgccggguucaucgagggcggcuggaccgggauggucgacggcugguacggguaccaccaccagaacgagcagggcagcggguacgccgccgaccucaaguccacccagaacgcgaucgacaagaucaccaacaaggugaacagcgucaucgagaagaugaacacgcaguucaccgccgugggcaaggaguucaaccaccuggagaagcgcaucgagaaccugaacaagaagguggacgacggcuuccucgacaucuggaccuacaacgccgagcugcugguccuccuggagaacgagcggacccuggacuaccacgacuccaacgugaagaaccucuacgagaaggugcgcaaccagcugaagaacaacgccaaggagaucgggaacggcugcuucgaguucuaccacaagugcgacaacaugugcauggagagcgucaagaacgggacguacgacuaccccaaguacuccgaggaggccaagcugaaccgggaggagaucgacggcgugaagcucgagagcacccgcaucuaccagauccuggcgaucuacuccaccguggccagcucccugguccucguggugagccugggggccaucagcuucuggaugugcuccaacggcagccugcagugccggaucugcaucuga

SEQ ID NO: 70912 - RNA, 1701 nt, Artificial Sequence; identical to SEQ ID NO: 69850
  derived and/or modified CDS sequence (opt1) from hemagglutinin__InfluenzaA__AEI86974

SEQ ID NO: 70913 - RNA, 1701 nt, Artificial Sequence; identical to SEQ ID NO: 69608
  derived and/or modified CDS sequence (opt1) from hemagglutinin__InfluenzaA__AEI86984

SEQ ID NO: 70914 - RNA, 1701 nt, Artificial Sequence; identical to SEQ ID NO: 69608
  derived and/or modified CDS sequence (opt1) from hemagglutinin__InfluenzaA__AEI86994

SEQ ID NO: 70915 - RNA, 1701 nt, Artificial Sequence
  derived and/or modified CDS sequence (opt1) from hemagglutinin__InfluenzaA__AEI87004
augaaggccauccuggugguccuccuguacaccuucgccaccgcgaacgccgacacgcugugcaucggcuaccacgccaacaacagcaccgacaccguggacaccgugcucgagaagaacgucacggugacccacuccgugaaccugcuggaggacaagcacaacgggaagcucugcaagcugaagggcgucgcgccccugcaccucgggaagugcaacaucgccggcuggauccuggggaacccggagugcgagagccuguccaccgccagcuccuggagcuacaucguggagaccuccagcuccgacaacggcacgugcuaccccggcaacuucaucgacuacgaggagcuccgcgagcagcugagcuccgugagcuccuucgagcgguucgagaucuuccccaagaccagcuccuggcccgaccacgacagcaacaagggggucaccgccgccugcccgcacgccggcgcgaaguccuucuacaagaaccugaucuggcucgugaagaaggggaacagcuaccccaagcuguccaagagcuacaucaacgacaagggcaaggaggugcugguccucugggggauccaccaccccagcaccuccgccgaccagcagggccuguaccagaacgccgacgccuacguguucgugggcacgagccgcuacuccaagaaguucaagcccgagaucgccauccggccgaagguccgcgaccaggaggggcggaugaacuacuacuggacccugguggagcccggcgacaagaucaccuucgaggcgaccgggaaccucguggcgccccgcuacgccuucgccauggagcggaacgccggcagcggcaucaucaucuccgacacgcccguccacgacugcaacacgaccugccagaccccgaagggggccaucaacaccagccugcccuuccagaacauccaccccaucaccaucggcaagugccccaaguacgugaaguccaccaagcugcgccucgccaccgggcugcggaacgugccgagcauccagucccgcggccuguucggggccaucgccggcuucaucgagggcggguggacgggcauggucgacgggugguacggcuaccaccaccagaacgagcaggggagcggcuacgccgcggaccucaaguccacccagaacgccaucgacaagaucaccaacaaggugaacagcgugaucgagaagaugaacacccaguucacggccgucggcaaggaguucaaccaccuggagaagcggaucgagaaccugaacaagaagguggacgacggguuccucgacaucuggaccuacaacgccgagcugcugguccuccuggagaacgagcgcacccuggacuaccacgacuccaacgugaagaaccucuacgagaaggugcggagccagcugaagaacaacgccaaggagaucggcaacgggugcuucgaguucuaccacaagugcgacaacacgugcauggaguccgucaagaacggcaccuacgacuaccccaaguacagcgaggaggcgaagcugaaccgcgaggagaucgacggggugaagcucgaguccacccggaucuaccagauccuggccaucuacagcaccguggccuccagccugguccucguggugagccugggcgccaucuccuucuggaugugcagcaacggcucccugcagugccgcaucugcaucuga

SEQ ID NO: 70916 - RNA, 1701 nt, Artificial Sequence
  derived and/or modified CDS sequence (opt1) from hemagglutinin__InfluenzaA__AEI87014
augaaggccauccuggugguccuccuguacaccuucgccaccgcgaacgccgacacgcugugcaucggcuaccacgccaacaacagcaccgacaccguggacaccgugcucgagaagaacgucacggugacccacuccgugaaccugcuggaggacaagcacaacgggaagcucugcaagcugcgcggcgucgcgccccugcaccucgggaagugcaacaucgccggcuggauccuggggaacccggagugcgagagccuguccaccgccagcuccuggagcuacaucguggagaccuccagcuccgacaacggcacgugcuaccccggcgacuucaucgacuacgaggagcuccgggagcagcugagcuccgugagcuccuucgagcgcuucgagaucuuccccaagaccagcuccuggcccaaccacgacagcaacaagggggucaccgccgccugcccgcacgccggcgcgaaguccuucuacaagaaccugaucuggcucgugaagaaggggaacagcuaccccaagcuguccaagagcuacaucaacgacaagggcaaggaggugcugguccucugggggauccaccaccccagcaccuccgccgaccagcagagccuguaccagaacgccgacgccuacguguucgugggcacgucccgguacagcaagaaguucaagcccgagaucgccauccgcccgaagguccgggaccaggagggccgcaugaacuacuacuggacccugguggagcccggggacaagaucaccuucgaggcgaccggcaaccucguggucccccgguacgccuucgccauggagcgcaacgccggguccggcaucaucaucagcgacacgcccgugcacgacugcaacacgaccugccagaccccgaagggcgccaucaacaccucccugcccuuccagaacauccaccccaucaccaucgggaagugccccaaguacgucaagagcaccaagcugcggcucgcgaccggccugcgcaacgugccguccauccagagccgggggcuguucggcgccaucgccggguucaucgagggcggcuggacggggaugguggacggcugguacggguaccaccaccagaacgagcagggcuccggguacgccgccgaccucaagagcacccagaacgcgaucgacaagaucaccaacaaggugaacuccgucaucgagaagaugaacacccaguucacggccgugggcaaggaguucaaccaccuggagaagcgcaucgagaaccugaacaagaaggucgacgacggcuuccucgacaucuggaccuacaacgccgagcugcuggugcuccuggagaacgagcggacccuggacuaccacgacagcaacgugaagaaccucuacgagaagguccgcucccagcugaagaacaacgccaaggagaucgggaacggcugcuucgaguucuaccacaagugcgacaacacgugcauggagagcgugaagaacgggaccuacgacuaccccaaguacuccggcgaggccaagcugaaccgggaggagaucgacggggugaagcucgagagcacccgcaucuaccagauccuggcgaucuacuccaccgucgccagcagccuggugcucguggucucccugggcgccaucagcuucuggaugugcuccaacggcagccugcagugccggaucugcaucuga

SEQ ID NO: 70917 - RNA, 1701 nt, Artificial Sequence
  derived and/or modified CDS sequence (opt1) from hemagglutinin__InfluenzaA__AEI87034
augaaggccauccuggugguccuccuguacaccuucgccaccgcgaacgccgacacgcugugcaucggcuaccacgccaacaacagcaccgacaccguggacaccgugcucgagaagaacgucacggugacccacuccgugaaccugcuggaggacaagcacaacgggaagcucugcaagcugcgcggcgucgcgccccugcaccucgggaagugcaacaucgccggcuggauccuggggaacccggagugcgagagccuguccaccgccagcuccuggagcuacaucguggagaccuccagcuccgacaacggcacgugcuaccccggcgacuucaucgacuacgaggagcuccgggagcagcugagcuccgugagcuccuucgagcgcuucgagaucuuccccaagaccagcuccuggcccgaccacgacagcaacaagggggucaccgccgccugcccgcacgccggcgcgaaguccuucuacaagaaccugaucuggcucgugaagaaggggaacagcuaccccaagcuguccaagagcuacaucaacgacaagggcaaggaggugcugguccucugggggauccaccaccccagcaccuccgccgaccagcagagccuguaccagaacgccgacgccuacguguucgugggcacgucccgguacagcaagaaguucaagcccgagaucgccauccgcccgaagguccgggaccaggagggccgcaugaacuacuacuggacccugguggagcccggggacaagaucaccuucgaggcgaccggcaaccucguggucccccgguacgccuucgccauggagcgcaacgccggguccggcaucaucaucagcgacacgcccgugcacgacugcaacacgaccugccagaccccgaagggcgccaucaacaccucccugcccuuccagaacauccaccccaucaccaucgggaagugccccaaguacgucaagagcaccaagcugcggcucgcgaccggccugcgcaacgugccguccauccagagccgggggcuguucggcgccaucgccggguucaucgagggcggcuggacggggaugguggacggcugguacggguaccaccaccagaacgagcagggcuccggguacgccgccgaccucaagagcacccagaacgcgaucgacaagaucaccaacaaggugaacuccgucaucgagaagaugaacacccaguucacggccaucggcaaggaguucaaccaccuggagaagcgcaucgagaaccugaacaagaagguggacgacggcuuccucgacaucuggaccuacaacgccgagcugcugguccuccuggagaacgagcggacccuggacuaccacgacagcaacgugaagaaccucuacgagaaggugcgcucccagcugaagaacaacgccaaggagaucgggaacggcugcuucgaguucuaccacaagugcgacaacacgugcauggagagcgucaagaacgggaccuacgacuaccccaaguacuccgaggaggccaagcugaaccgggaggagaucgacggcgugaagcucgagagcacccgcaucuaccagauccuggcgaucuacuccaccguggccagcagccugguccucguggugucccugggggccaucagcuucuggaugugcuccaacggcagccugcagugccggaucugcaucuga

SEQ ID NO: 70918 - RNA, 1701 nt, Artificial Sequence; identical to SEQ ID NO: 69608
  derived and/or modified CDS sequence (opt1) from hemagglutinin__InfluenzaA__AEI87044

SEQ ID NO: 70919 - RNA, 1701 nt, Artificial Sequence; identical to SEQ ID NO: 67857
  derived and/or modified CDS sequence (opt1) from hemagglutinin__InfluenzaA__AEI87054

SEQ ID NO: 70920 - RNA, 1701 nt, Artificial Sequence
  derived and/or modified CDS sequence (opt1) from hemagglutinin__InfluenzaA__AEI87064
augaaggccauccuggugguccuccuguacaccuucgccaccgcgaacgccgacacgcugugcaucggcuaccacgccaacaacagcaccgacaccguggacaccgugcucgagaagaacgucacggugacccacuccgugaaccugcuggaggacaagcacaacgggaagcucugcaagcugcgcggcgucgcgccccugcaccucgggaagugcaacaucgccggcuggauccuggggaacccggagugcgagagccuguccaccgccagcuccuggagcuacaucguggagaccuccagcuccgacaacggcacgugcuaccccggcgacuucaucgacuacgaggagcuccgggagcagcugagcuccgugagcuccuucgagcgcuucgagaucuuccccaagaccagcuccuggcccaaccacgacagcaacaagggggucaccgccgccugcccgcacgccggcgcgaaguccuucuacaagaaccugaucuggcucgugaagaaggggaacagcuaccccaagcuguccaagagcuacaucaacgacaagggcaaggaggugcugguccucugggggauccaccaccccagcaccacggccgaccagcagucccuguaccagaacgccgacaccuacguguucgugggcaccagccgguacuccaagaaguucaagcccgagaucgccauccgcccgaagguccgggaccaggagggccgcaugaacuacuacuggacccugguggagcccggggacaagaucacguucgaggccaccggcaaccucguggucccccgguacgcguucgccauggagcgcaacgccgggagcggcaucaucaucuccgacacccccgugcacgacugcaacaccacgugccagaccccgaagggcgccaucaacaccagccugcccuuccagaacauccaccccaucaccaucgggaagugccccaaguacgugaaguccacgaagcugcggcucgccaccggccugcgcaacgucccgagcauccagucccgggggcuguucggcgcgaucgccggguucaucgagggcggcuggaccgggaugguggacggcugguacggguaccaccaccagaacgagcagggcagcggguacgccgccgaccucaaguccacccagaacgccaucgacaagaucacgaacaaggugaacagcgucaucgagaagaugaacacccaguucaccgcggugggcaaggaguucaaccaccuggagaagcgcaucgagaaccugaacaagaaggucgacgacggcuuccucgacaucuggaccuacaacgccgagcugcuggugcuccuggagaacgagcggacgcuggacuaccacgacuccaacgugaagaaccucuacgagaagguccgcaaccagcugaagaacaacgccaaggagaucgggaacggcugcuucgaguucuaccacaagugcgacaacacgugcauggagagcgugaagaacgggaccuacgacuaccccaaguacuccgaggaggccaagcugaaccgggaggagaucgacggcgugaagcucgagagcacccgcaucuaccagauccuggccaucuacuccaccgcggccagcucccugguccucguggugagccugggggccaucagcuucuggaugugcuccaacggcagccugcagugccggaucugcaucuga

SEQ ID NO: 70921 - RNA, 1701 nt, Artificial Sequence
  derived and/or modified CDS sequence (opt1) from hemagglutinin__InfluenzaA__AEI87074
augaaggccacccuggugguccuccuguacaccuucgccacggcgaacgccgacacccugugcaucggcuaccacgccaacaacagcaccgacaccguggacacggugcucgagaagaacgucaccgugacccacuccgugaaccugcuggaggacaagcacaacgggaagcucugcaagcugcgcggcgucgcgccccugcaccucgggaagugcaacaucgccggcuggauccuggggaacccggagugcgagagccuguccaccgccagcuccuggagcuacaucguggagacguccagcuccgacaacgggaccugcuaccccggcgacuucaucaacuacgaggagcuccgggagcagcugagcuccgugagcuccuucgagcgcuucgagaucuuccccaagaccagcuccuggcccaaccacgacagcaacaagggcgucaccgccgccugcccgcacgccggcgcgaaguccuucuacaagaaccugaucuggcucgugaagaaggggaacagcuaccccaagcuguccaagagcuacaucaacgacaagggcaaggaggugcugguccucugggggauccaccaccccagcacgaccgccgaccagcagucccuguaccagaacgccgacgccuacguguucgugggcaccagccgguacuccaagaaguucaagcccgagaucgccauccgcccgaagguccgggaccaggagggccgcaugaacuacuacuggacccugguggagcccggggacaagaucacguucgaggcgaccggcaaccucguggucccccgguacgccuucgccauggagcgcaacgccgggagcggcaucaucaucuccgacacccccgugcacgacugcaacaccacgugccagaccccgaagggcgccaucaacaccagccugcccuuccagaacauccaccccaucaccaucgggaagugccccaaguacgugaaguccacgaagcugcggcucgcgaccggccugcgcaacgucccgagcauccagucccgggggcuguucggcgccaucgccggguucaucgagggcggcuggaccgggaugguggacggcugguacggguaccaccaccagaacgagcagggcagcggguacgccgccgaccucaaguccacccagaacgcgaucgacaagaucacgaacaaggugaacagcgucaucgagaagaugaacacccaguucaccgccgugggcaaggaguucaaccaccuggagaagcgcaucgagaaccugaacaagaaggucgacgacggcuuccucgacaucuggaccuacaacgccgagcugcuggugcuccuggagaacgagcggacgcuggacuaccacgacuccaacgugaagaaccucuacgagaagguccgcaaccagcugaagaacaacgccaaggagaucgggaacggcugcuucgaguucuaccacaagugcgacaacacgugcauggagagcgugaagaacgggaccuacgacuaccccaaguacuccgaggaggccaagcugaaccgggaggagaucgacggcgugaagcucgagagcacccgcaucuaccagauccuggcgaucuacuccaccgucgccagcucccuggugcucguggucagccugggggccaucagcuucuggaugugcuccaacggcagccugcagugccggaucugcaucuga

SEQ ID NO: 70922 - RNA, 1701 nt, Artificial Sequence
  derived and/or modified CDS sequence (opt1) from hemagglutinin__InfluenzaA__AEI87094
augaaggccauccuggugguccuccuguacaccuucgccaccgcgaacgccgacacgcugugcaucggcuaccacgccaacaacagcaccgacaccguggacaccgugcucgagaagaacgucacggugacccacuccgugaaccugcuggaggacaagcacaacgggaagcucugcaagcugcgcggcgucgcgccccugcaccucgggaagugcaacaucgccggcuggauccuggggaacccggagugcgagagccuguccaccgccagcuccuggagcuacaucguggagaccuccagcuccgacaacggcacgugcuaccccggcgacuucaucgacuacgaggagcuccgggagcagcugagcuccgugagcuccuucgagcgcuucgagaucuuccccaagaccagcuccuggcccgaccacgacagcaacaagggggucaccgccgccugcccgcacgccggcgcgaaguccuucuacaagaaccugaucuggcucgugaagaaggggaacagcuaccccaagcuguccaagagcuacaucaacgacaagggcaaggaggugcugguccucugggggauccaccaccccagcaccuccgccgaccagcagagccuguaccagaacgccgacgccuacguguucgugggcacgucccgguacagcaagaaguucaagcccgagaucgccauccgcccgaagguccgggaccaggagggccgcaugaacuacuacuggacccugguggagcccggggacaagaucaccuucgaggcgaccggcaaccucguggucccccgguacgccuucgccauggagcgcaacacgggguccggcaucaucaucagcgacacccccgugcacgacugcaacacgaccugccagaccccgaagggcgccaucaacaccucccugcccuuccagaacauccaccccaucaccaucgggaagugccccaaguacgucaagagcaccaagcugcggcucgccacgggccugcgcaacgugccguccauccagagccgggggcuguucggcgcgaucgccggguucaucgagggcggcuggaccgggaugguggacggcugguacggguaccaccaccagaacgagcagggcuccggguacgccgccgaccucaagagcacccagaacgccaucgacaagaucaccaacaaggugaacuccgucaucgagaagaugaacacgcaguucaccgcggugggcaaggaguucaaccaccuggagaagcgcaucgagaaccugaacaagaaggucgacgacggcuuccucgacaucuggaccuacaacgccgagcugcuggugcuccuggagaacgagcggacccuggacuaccacgacagcaacgugaagaaccucuacgagaagguccgcucccagcugaagaacaacgccaaggagaucgggaacggcugcuucgaguucuaccacaagugcgacaacacgugcauggagagcgugaagaacgggaccuacgacuaccccaaguacuccgaggaggccaagcugaaccgggagaagaucgacggcaucaagcucgagagcacccgcaucuaccagauccuggccaucuacuccaccguggcgagcagccugguccucguggugucccugggggccaucagcuucuggaugugcuccaacggcagccugcagugccggaucugcaucuga

SEQ ID NO: 70923 - RNA, 1701 nt, Artificial Sequence; identical to SEQ ID NO: 70922
  derived and/or modified CDS sequence (opt1) from hemagglutinin__InfluenzaA__AEI87104

SEQ ID NO: 70924 - RNA, 1698 nt, Artificial Sequence; identical to SEQ ID NO: 67650
  derived and/or modified CDS sequence (opt1) from hemagglutinin__InfluenzaA__AEI91963

SEQ ID NO: 70925 - RNA, 1701 nt, Artificial Sequence; identical to SEQ ID NO: 67857
  derived and/or modified CDS sequence (opt1) from hemagglutinin__InfluenzaA__AEI91977

SEQ ID NO: 70926 - RNA, 1701 nt, Artificial Sequence; identical to SEQ ID NO: 69381
  derived and/or modified CDS sequence (opt1) from hemagglutinin__InfluenzaA__AEI91978

SEQ ID NO: 70927 - RNA, 1701 nt, Artificial Sequence; identical to SEQ ID NO: 68323
  derived and/or modified CDS sequence (opt1) from hemagglutinin__InfluenzaA__AEI91998

SEQ ID NO: 70928 - RNA, 1701 nt, Artificial Sequence
  derived and/or modified CDS sequence (opt1) from hemagglutinin__InfluenzaA__AEI91999
augaagaccaucaucgcccugagcuacauccucugccugguguucgcccagaagcugcccggcaacgacaacuccaccgcgacgcucugccuggggcaccacgccgucccgaacggcaccaucgugaagaccaucaccaacgaccagaucgaggugacgaacgccaccgagcugguccagagcuccagcaccggggagaucugcaacagcccccaccagauccucgacggcgagaacugcacccugaucgacgcccugcucggggacccccagugcgacggcuuccagaacaagaagugggaccuguucguggagcgcagcaaggccuacuccaacugcuaccccuacgacgugccggacuacgcgagccugcggucccucgucgccagcuccggcacgcuggaguucaacaacgagagcuucaacuggaccggggugacccagaacggcaccuccagcgccugcauccgccgguccaacaacagcuucuucucccgccugaacuggcucacgcaccugaacuucaaguaccccgcccugaacgugaccaugcccaacaacgagcaguucgacaagcucuacaucuggggcguccaccaccccgggaccgacaaggaccagaucuuccuguacgcgcaggccagcgggcggaucaccguguccacgaagcgcagccagcaggccgugaucccgaacaucggcagccggccccgcguccggaacauccccucccgcaucagcaucuacuggaccaucgugaagcccggcgacauccugcucaucaacuccaccgggaaccugaucgccccgcggggcuacuucaagauccgcagcgggaaguccagcaucaugcgguccgacgcccccaucggcaagugcaacagcgagugcaucacccccaacggcuccauccugaacgacaagcccuuccagaacgugaaccgcaucacguacggggcgugcccgcgguacgucaagcagaacacccucaagcuggccaccggcaugcgcaacgugcccgagaagcagacccgggggaucuucggcgccaucgccggguucaucgagaacggcugggagggcaugguggacgggugguacggcuuccgccaccagaacagcgaggggcggggccaggccgcggaccugaaguccacgcaggccgccaucgaccagaucaacgggaagcucaaccgccugaucggcaagaccaacgagaaguuccaccagaucgagaaggaguucagcgaggucgagggccggauccaggaccuggagaaguacguggaggacaccaagaucgaccucugguccuacaacgccgagcugcugguggcccucgagaaccagcacaccaucgaccugacggacagcgagaugaacaagcuguucgagaagaccaagaagcagcuccgcgagaacgcggaggacauggggaacggcugcuucaagaucuaccacaagugcgacaacgccugcaucggguccauccgcaacggcaccuacgaccacgacgucuaccgggacgaggcccugaacaaccgcuuccagaucaaggggguggagcugaaguccggcuacaaggacuggauccucuggaucuccuucgccaucagcugcuuccugcugugcguggcccuccugggcuucaucaugugggcgugccagaaggggaacauccggugcaacaucugcaucuga

SEQ ID NO: 70929 - RNA, 1698 nt, Artificial Sequence
  derived and/or modified CDS sequence (opt1) from hemagglutinin__InfluenzaA__AEI92018
augaaggugaagcugcucguccugcugugcaccuucaccgccacguacgccgacaccaucugcaucggcuaccacgcgaacaacagcaccgacaccguggacacggugcucgagaagaacgucaccgugacccacuccgugaaccugcuggagaacagccacaacgggaagcucugccugcugaagggcaucgcgccccuccagcuggggaacugcuccgucgccggcuggauccuggggaacccggagugcgagcuccugaucagcaaggaguccuggagcuacaucguggagaagcccaaccccgagaacgggaccugcuaccccggccacuucgccgacuacgaggagcugcgcgagcagcucuccagcguguccagcuucgagcgguucgagaucuucccgaaggaguccagcuggcccaaccacacggucaccgggguguccgccagcugcucccacaacggcgagagcuccuucuaccgcaaccugcuguggcucaccgggaagaacggccuguaccccaaccugagcaaguccuacgccaacaacaaggagaaggaggugcucguccuguggggcgugcaccacccgcccaacaucgccgaccagaagacccuguaccacacggagaacgccuacgugagcgucgugagcucccacuacagccggaaguucacccccgagaucgccaagcgccccaaggugcgggaccaggagggccgcaucaacuacuacuggacccuccuggagcccggcgacaccaucaucuucgaggcgaacgggaaccugaucgccccgcgguacgccuucgcccucucccgcggcuucgggagcggcaucaucaacuccaacgcccccauggacaagugcgacgcgaagugccagacgccccagggcgccaucaacagcucccugcccuuccagaacguccacccggugaccaucggggagugccccaaguacgugcggagcgccaagcugcgcauggucaccggccuccggaacauccccuccauccagagccgcgggcuguucggcgccaucgccggguucaucgagggcggcuggaccgggaugguggacggcugguacggguaccaccaccagaacgagcagggcuccggguacgcggccgaccagaaguccacgcagaacgccaucaacggcaucaccaacaaggugaacagcgucaucgagaagaugaacacccaguucaccgccgugggcaaggaguucaacaagcuggagcggcgcauggagaaccucaacaagaaggucgacgacggguucaucgacaucuggacguacaacgccgagcugcuggugcuccuggagaacgagcggacccuggacuuccacgacagcaacgugaagaaccucuacgagaaggucaagucccagcugaagaacaacgcgaaggagaucggcaacgggugcuucgaguucuaccacaagugcaacgacgagugcauggagagcgugaagaacggcaccuacgacuaccccaaguacuccgaggagagcaagcugaaccgcgagaagaucgacggggugaagcucgaguccaugggcgucuaccagauccuggccaucuacagcaccguggccagcucccuggugcuccuggucagccugggcgccaucuccuucuggaugugcagcaacgggucccuccagugccggaucugcaucuga

SEQ ID NO: 70930 - RNA, 1701 nt, Artificial Sequence; identical to SEQ ID NO: 70905
  derived and/or modified CDS sequence (opt1) from hemagglutinin__InfluenzaA__AEJ10400

SEQ ID NO: 70931 - RNA, 1701 nt, Artificial Sequence
  derived and/or modified CDS sequence (opt1) from hemagglutinin__InfluenzaA__AEJ10410
augaagaccauccuggugguccuccuguacaccuucgccacggccaacgcggacacccugugcaucggcuaccacgccaacaacagcaccgacaccaucgacacggugcucgagaagaacgugaccgucacccacuccgugaaccugcuggaggacaagcacaacgggaagcucugcaagcugcgcggcguggcgccccugcaccucgggaagugcaacaucgccggcuggauccuggggaacccggagugcgagagccuguccaccgccagcuccuggagcuacaucgucgagacguccagcuccgacaacgggaccugcuaccccggcaacuucaucgacuacgaggagcuccgggagcagcugagcuccgugagcuccuucgagcgcuucgagaucuuccccaagaccagcuccuggagcgaccacgacuccaacaagggcgugaccgccgccugcccccacgccggcgccaagagcuucuacaagaaccugaucuggcucgucaagaaggggaacuccuacccgaagcugagcaagagcuacaucaacgacaagggcaaggaggugcuggugcucugggggauccaccaccccuccacgagcgcggaccagcagucccuguaccagaacgccgacgccuacgucuucgugggcaccagccgguacuccaagaaguucaagcccgagaucgccauccgccccaaggugcgggaccaggagggccgcaugaacuacuacuggacccuggucgagccgggggacaagaucaccuucgaggccacgggcaaccucguggcgccccgguacgccuucgccauggagcgcaacgccgggagcggcaucaucaucuccgacacccccgugcacgacugcaacacgaccugccagacccccaagggcgccaucaacaccagccugccguuccagaacauccaccccaucaccaucgggaagugccccaaguacgucaaguccaccaagcugcggcucgcgacgggccugcgcaacgugcccagcauccagucccgggggcuguucggcgccaucgccggguucaucgagggcggcuggaccgggaugguggacggcugguacggguaccaccaccagaacgagcagggcagcggguacgccgccgaccucaaguccacccagaacgcgaucgacaagaucaccaacaaggucaacagcgugaucgagaagaugaacacgcaguucaccgccgugggcaaggaguucaaccaccuggagaagcgcaucgagaaccugaacaagaaggucgacgacggcuuccucgacaucuggaccuacaacgccgagcugcuggugcuccuggagaacgagcggacccuggacuaccacgacuccaacgucaagaaccucuacgagaaggugcgcagccagcugaagaacaacgccaaggagaucgggaacggcugcuucgaguucuaccacaagugcgacaacacgugcauggaguccgugaagaacgggaccuacgacuacccgaaguacagcgaggaggccaagcugaaccgggaggagaucgacggcgucaagcucgaguccacccgcaucuaccagauccuggcgaucuacagcaccguggccagcucccuggugcucgucgugagccugggggccaucuccuucuggaugugcagcaacggcucccugcagugccggaucugcaucuga

SEQ ID NO: 70932 - RNA, 1701 nt, Artificial Sequence
  derived and/or modified CDS sequence (opt1) from hemagglutinin__InfluenzaA__AEJ10420
augaaggccauccuggugguccuccuguacaccuucgccaccgcgaacgccgacacgcugugcaucggcuaccacgccaacaacagcaccgacaccguggacaccgugcucgagaagaacgucacggugacccacuccgugaaccugcuggaggaccgccacaacgggaagcucugcaagcugcggggcgucgcgccccugcaccucgggaagugcaacaucgccggcuggauccuggggaacccggagugcgagagccuguccaccgccagcuccuggagcuacaucguggagaccuccagcuccgacaacggcacgugcuaccccggcgacuucaucgacuacgaggagcuccgcgagcagcugagcuccgugagcuccuucgagcgguucgagaucuuccccaagaccagcuccuggcccgaccacgacagcaacaagggggucaccgccgccugcccgcacgccggcgcgaaguccuucuacaagaaccugaucuggcucgugaagaaggggaacagcuaccccaagcuguccaagagcuacaucaacgacaagggcaaggaggugcugguccucugggggauccaccaccccagcaccuccgccgaccagcagagccuguaccagaacgccgacgccuacguguucgugggcacgucccgcuacagcaagaaguucaagcccgagaucgccauccggccgaagguccgcgaccaggagggccggaugaacuacuacuggacccugguggagcccggggacaagaucaccuucgaggcgaccggcaaccucguggucccccgcuacgccuucgccauggagcggaacgccggguccggcaucaucaucagcgacacgcccgugcacgacugcaacacgaccugccagaccccgaagggcgccaucaacaccucccugcccuuccagaacauccaccccaucaccaucgggaagugccccaaguacgucaagagcaccaagcugcgccucgcgaccggccugcggaacgugccguccauccagagccgcgggcuguucggcgccaucgccggguucaucgagggcggcuggacggggaugguggacggcugguacggguaccaccaccagaacgagcagggcuccggguacgccgccgaccucaagagcacccagaacgcgaucgacaagaucaccaacaaggugaacuccgucaucgagaagaugaacacccaguucacggccgugggcaaggaguucaaccaccuggagaagcggaucgagaaccugaacaagaaggucgacgacggcuuccucgacaucuggaccuacaacgccgagcugcuggugcuccuggagaacgagcgcacccuggacuaccacgacagcaacgugaagaaccucuacgagaagguccggucccagcugaagaacaacgccaaggagaucgggaacggcugcuucgaguucuaccacaagugcgacaacacgugcauggagagcgugaagaacgggaccuacgacuaccccaaguacuccgaggaggccaagcugaaccgcgaggagaucgacggcgugaagcucgagagcacccggaucuaccagauccuggcgaucuacuccaccgucgccagcagccuggugcucguggucucccugggggccaucagcuucuggaugugcuccaacggcagccugcagugccgcaucugcaucuga

SEQ ID NO: 70933 - RNA, 1701 nt, Artificial Sequence
  derived and/or modified CDS sequence (opt1) from hemagglutinin__InfluenzaA__AEJ10430
augaaggccauccuggugguccuccuguacaccuucgccaccgcgaacgccgacacgcugugcaucggcuaccacgccaacaacagcaccgacaccguggacaccgugcucgagaagaacgucacggugacccacuccgugaaccugcuggaggacaagcacaacgggaagcucugcaagcugcgcggcgucgcgccccugcaccucgggaagugcaacaucgccggcuggauccuggggaacccggagugcgagagccuguccaccgccagcuccuggagcuacaucguggagaccuccagcuccgacaacggcacgugcuaccccggcgacuucaucgacuacgaggagcuccgggagcagcugagcuccgugagcuccuucgagcgcuucgagaucuuccccaagaccagcuccuggcccaaccacgacagcaacaagggggucaccaccgccugcccgcacgccggcgccaaguccuucuacaagaaccugaucuggcucgugaagaaggggaacagcuaccccaagcuguccaagagcuacaucaacgacaagggcaaggaggugcugguccucugggggauccaccacccgcccacgagcgcggaccagcagucccuguaccagaacgccgacgccuacguguucgugggcaccagccgguacuccaagaaguucaagcccgagaucgccauccgccccaagguccgggaccaggagggccgcaugaacuacuacuggacccugguggagcccggggacaagaucaccuucgaggccacgggcaaccucguggucccccgguacgcguucgccauggagcgcaacgccgggagcggcaucaucaucuccgacaccccggugcacgacugcaacacgaccugccagacccccaagggcgccaucaacaccagccugcccuuccagaacauccaccccaucaccaucgggaagugcccgaaguacgugaaguccaccaagcugcggcucgccacgggccugcgcaacguccccagcauccagucccgggggcuguucggcgcgaucgccggguucaucgagggcggcuggaccgggaugguggacggcugguacggguaccaccaccagaacgagcagggcagcggguacgccgccgaccucaaguccacccagaacgccaucgacgagaucaccaacaaggugaacagcgucaucgagaagaugaacacgcaguucaccgcggugggcaaggaguucaaccaccuggagaagcgcaucgagaaccugaacaagaaggucgacgacggcuuccucgacaucuggaccuacaacgccgagcugcuggugcuccuggagaacgagcggacccuggacuaccacgacuccaacgugaagaaccucuacgagaagguccgcagccagcugaagaacaacgccaaggagaucgggaacggcugcuucgaguucuaccacaagugcgacaacacgugcauggaguccgugaagaacgggaccuacgacuaccccaaguacagcgaggaggccaagcugaaccgggaggagaucgacggcgugaagcucgaguccacccgcaucuaccagauccuggccaucuacagcaccgucgcguccagccuggugcucguggucagccugggggccaucuccuucuggaugugcagcaacggcucccugcagugccggaucugcaucuga

SEQ ID NO: 70934 - RNA, 1701 nt, Artificial Sequence
  derived and/or modified CDS sequence (opt1) from hemagglutinin__InfluenzaA__AEJ10440
augaaggccauccuggugguccuccuguacaccuucgccaccgcgaacgccgacacgcugugcaucggcuaccacgccaacaacagcaccgacaccguggacaccgugcucgagaagaacgucacggugacccacuccgugaaccugcuggaggacaagcacaacgggaagcucugcaagcugcgcggcgucgcgccccugcaccucgggaagugcaacaucgccggcuggauccuggggaacccggagugcgagagccuguccaccgccagcuccuggagcuacaucguggagaccuccagcuccgacaacggcacgugcuaccccggcgacuucaucgacuacgaggagcuccgggagcagcugagcuccgugagcuccuucgagcgcuucgagaucuuccccaagaccagcuccuggcccaaccacgacagcaacaagggggucaccgccgccugcccgcacgccggcgcgaaguccuucuacaagaaccugaucuggcucgugaagaaggggaacagcuaccccaagcuguccaagagcuacaucaacgacaagggcaaggaggugcugguccucugggggauccaccaccccagcaccacggccgaccagcagauccuguaccagaacgccgacaccuacguguucgugggcaccucccgguacagcaagaaguucaagcccgagaucgccauccgcccgaagguccgggaccaggagggccgcaugaacuacuacuggacccugguggagcccggggacaagaucacguucgaggccaccggcaaccucguggucccccgguacgcguucgccauggagcgcaacgccggguccggcaucaucaucagcgacacccccgugcacgacugcaacaccacgugccagaccccgaagggcgccaucaacaccucccugcccuuccagaacauccaccccaucaccaucgggaagugccccaaguacgucaagagcacgaagcugcggcucgccaccggccugcgcaacgugccguccauccagagccgggggcuguucggcgcgaucgccggguucaucgagggcggcuggaccgggaugguggacggcugguacggguaccaccaccagaacgagcagggcuccggguacgccgccgaccucaagagcacccagaacgccaucgacaagaucacgaacaaggugaacuccgucaucgagaagaugaacacccaguucaccgcggugggcaaggaguucaaccaccuggagaagcgcaucgagaaccugaacaagaaggucgacgacggcuuccucgacaucuggaccuacaacgccgagcugcuggugcuccuggagaacgagcggacgcuggacuaccacgacagcaacgugaagaaccucuacgagaagguccgcaaccagcugaagaacaacgccaaggagaucgggaacggcugcuucgaguucuaccacaagugcgacaacacgugcauggaguccgugaagaacgggaccuacgacuaccccaaguacagcgaggaggccaagcugaaccgggaggagaucgacggcgugaagcucgaguccacccgcaucuaccagauccuggccaucuacagcaccgucgcguccagccuggugcucguggucucccugggggccaucagcuucuggaugugcagcaacggcucccugcagugccggaucugcaucuga

SEQ ID NO: 70935 - RNA, 1701 nt, Artificial Sequence; identical to SEQ ID NO: 70848
  derived and/or modified CDS sequence (opt1) from hemagglutinin__InfluenzaA__AEJ10450

SEQ ID NO: 70936 - RNA, 1701 nt, Artificial Sequence
  derived and/or modified CDS sequence (opt1) from hemagglutinin__InfluenzaA__AEJ10480
augaaggccauccuggugguccuccuguacaccuucgccaccgcgaacgccgacacgcugugcaucggcuaccacgccaacaacagcaccgacaccguggacaccgugcucgagaagaacgucacggugacccacuccgugaaccugcuggaggacaagcacaacgggaagcucugcaagcugcgcggcgucgcgccccugcaccucgggaagugcaacaucgccggcuggauccuggggaacccggagugcgagagccuguccaccgccagcuccuggagcuacaucguggagaccuccagcuccgacaacggcacgugcuaccccggcgacuucaucaacuacgaggagcuccgggagcagcugagcuccgugagcuccuucgagcgcuucgagaucuuccccaagaccagcuccuggcccaaccacgacagcaacaagggggucaccgccgccugcccgcaggccggcgcgaaguccuucuacaagaaccugaucuggcucgugaagaaggggaacagcuaccccaagcuguccaagagcuacaucaacgacaagggcaaggaggugcugguccucugggggauccaccaccccagcaccuccgccgaccagcagagccuguaccaguccgccgacgccuacguguucgugggcacgagcaaguacuccaagaaguucaagcccgagaucgccguccggccgaaggugcgcgaccaggagggccggaugaacuacuacuggacccugguggagcccggggacaagaucaccuucgaggcgaccggcaaccuccuggucccccgcuacgccuucgccauggagcggaacgccgggagcggcaucaucaucuccgacacgcccgugcacgacugcaacacgaccugccagaccccgaagggcgccaucaacaccagccugcccuuccagaacauccaccccaucaccaucgggaagugccccaaguacgugaaguccaccaagcuccgccuggcgaccggccugcggaacgucccgagcauccagucccgcggccucuucggggccaucgccggguucaucgagggcggcuggacggggaugguggacggcugguacggguaccaccaccagaacgcccagggcagcggguacgccgcggaccugaaguccacccagaacgccaucgacaagaucaccaacaaggugaacagcgucaucgagaagaugaacacccaguucacggccgugggcaaggaguucaaccaccuggagaagcggaucgagaaccucaacaagaaggucgacgacggcuuccuggacaucuggaccuacaacgccgagcugcucgugcugcuggagaacgagcgcacccucgacuaccacgacuccaacgugaagaaccuguacgagaagguccggagccagcugaagaacaacgccaaggagaucgggaacggcugcuucgaguucuaccacaagugcgacaacacgugcauggaguccgugaagaacgggaccuacgacuaccccaaguacagcgaggaggcgaagcucaaccgcgaggagaucgacggcgugaagcuggaguccacccggaucuaccagauccuggccaucuacagcaccgucgccagcucccucgugcugguggucagccugggggccaucuccuucuggaugugcagcaacggcucccuccagugccgcaucugcaucuga

SEQ ID NO: 70937 - RNA, 1701 nt, Artificial Sequence
  derived and/or modified CDS sequence (opt1) from hemagglutinin__InfluenzaA__AEJ10490
augaaggccauccuggugguccuccuguacaccuucgccaccgcgaacgccgacacgcugugcaucggcuaccacgccaacaacagcaccgacaccguggacaccgugcucgagaagaacgucacggugacccacuccgugaaccugcuggaggacaagcacaacgggaagcucugcaagcugcgcggcgucgcgccccugcaccucgggaagugcaacaucgccggcuggauccuggggaacccggagugcgagagccuguccaccgccagcuccuggagcuacaucguggagaccuccagcuccgacaacggcacgugcuaccccggcgacuucaucgacuacgaggagcuccgggagcagcugagcuccgugagcuccuucgagcgcuucgagaucuuccccaagaccagcuccuggcccaaccacgacagcaacaagggggucaccaccgccugcccgcacgccggcgccaaguccuucuacaagaaccugaucuggcucgugaagaaggggaacagcuaccccaagcuguccaagagcuacaucaacgacaagggcaaggaggugcugguccucugggggauccaccacccgcccacgagcgcggaccagcagucccuguaccagaacgccgacgccuacguguucgugggcaccagccgguacuccaagaaguucaagcccgagaucgccauccgccccaagguccgggaccaggagggccgcaugaacuacuacuggacccugguggagcccggggacaagaucaccuucgaggccacgggcaaccucguggucccccgguacgcguucgccauggagcgcaacgccgggagcggcaucaucaucuccgacaccccggugcacgacugcaacacgaccugccagacccccaagggcgccaucaacaccagccugcccuuccagaacauccaccccaucaccaucgggcggugcccgaaguacgugaaguccaccaagcugcgccucgccacgggccugcggaacguccccagcauccagucccgcgggcuguucggcgcgaucgccggguucaucgagggcggcuggaccgggaugguggacggcugguacggguaccaccaccagaacgagcagggcagcggguacgccgccgaccucaaguccacccagaacgccaucgacggcaucaccaacaaggugaacagcgucaucgagaagaugaacacgcaguucaccgcggugggcaaggaguucaaccaccuggagaagcggaucgagaaccugaacaagaaggucgacgacggguuccucgacaucuggaccuacaacgccgagcugcuggugcuccuggagaacgagcgcacccuggacuaccacgacuccaacgugaagaaccucuacgagaagguccggagccagcugaagaacaacgccaaggagaucggcaacgggugcuucgaguucuaccacaagugcgacaacacgugcauggaguccgugaagaacggcaccuacgacuaccccaaguacagcgaggaggccaagcugaaccgcgaggagaucgacggggugaagcucgaguccaccaugaucuaccagauccuggccaucuacagcaccgucgcguccagccuggugcucaucgugagccugggcgccaucuccuucuggaugugcagcaacggcucccugcagugccggaucugcaucuga

SEQ ID NO: 70938 - RNA, 1701 nt, Artificial Sequence
  derived and/or modified CDS sequence (opt1) from hemagglutinin__InfluenzaA__AEJ10500
augaaggccauccuggugguccuccuguacaccuucgccaccgcgaacgccgacacgcugugcaucggcuaccacgccaacaacagcaccgacaccguggacaccgugcucgagaagaacgucacggugacccacuccgugaaccugcuggaggggaagcacaacggcaagcucugcaagcugcgcggggucgcgccccugcaccucggcaagugcaacaucgccggguggauccugggcaacccggagugcgagagccuguccaccgccagcuccuggagcuacaucguggagaccuccagcuccgacaacggcacgugcuaccccggggacuucaucgacuacgaggagcuccgggagcagcugagcuccgugagcuccuucgagcgcuucgagaucuuccccaagaccagcuccuggcccaaccacgacagcaacaagggcgucaccgccgccugcccgcacgccggggcgaagggcuucuacaagaaccugaucuggcucgugaagaaggggaacuccuaccccaagcugaacaagagcuacaucaacgacaagggcaaggaggugcugguccucuggggcauccaccaccccuccaccacggccgaccagcagagccuguaccagaacgccgacaccuacguguucguggggaccagccgguacuccaagaaguucaagcccgagaucgccauccgcccgaagguccgggaccaggagggccgcaugaacuacuacuggacccugguggagcccggggacaagaucacguucgaggccaccggcaaccucguggucccccgguacgcguucgccauggagcgcaacgccggcagcgggaucaucaucuccgacacccccgugcacgacugcaacaccacgugccagaccccgaagggcgccaucaacaccagccugcccuuccagaacauccaccccaucaccaucgggaagugccccaaguacgugaaguccacgaagcugcggcucgccaccggccugcgcaacgucccgagcauccagucccgggggcuguucggcgcgaucgccggcuucaucgagggcggguggaccgggaugguggacggcugguacggguaccaccaccagaacgagcagggcagcggcuacgccgccgaccucaaguccacccagaacgccaucgacaagaucacgaacaaggugaacagcgucaucgagaagaugaacacccaguucaccgcgguggggaaggaguucaaccaccuggagaagcgcaucgagaaccugaacaagaaggucgacgacggcuuccucgacaucuggaccuacaacgccgagcugcuggugcuccuggagaacgagcggacgcuggacuaccacgacuccaacgugaagaaccucuacgagaagguccgcaaccagcugaagaacaacgccaaggagaucgggaacggcugcuucgaguucuaccacaagugcgacaacacgugcauggagagcgugaagaacgggaccuacgacuaccccaaguacuccgaggaggccaagcugaaccgggaggagaucgacggcgugaagcucgagagcacccgcaucuaccagauccuggccaucuacuccaccgucgcgagcucccuggugcucguggucagccugggcgccaucuccuucuggaugugcagcaacgggagccugcagugccggaucugcaucuga

SEQ ID NO: 70939 - RNA, 1701 nt, Artificial Sequence; identical to SEQ ID NO: 70891
  derived and/or modified CDS sequence (opt1) from hemagglutinin__InfluenzaA__AEJ10510

SEQ ID NO: 70940 - RNA, 1701 nt, Artificial Sequence
  derived and/or modified CDS sequence (opt1) from hemagglutinin__InfluenzaA__AEJ10520
augaaggccauccuggugguccuccuguacaccuucgccaccgcgaacgccgacacgcugugcaucggcuaccacgccaacaacagcaccgacaccguggacaccgugcucgagaagaacgucacggugacccacuccgugaaccugcuggaggacaagcacaacgggaagcucugcaagcugcgcggcgucgcgccccugcaccucgggaagugcaacaucgccggcuggauccuggggaacccggagugcgagagccuguccaccgccagcuccuggagcuacaucguggagaccuccagcuccgacaacggcacgugcuaccccggcgacuucaucgacuacgaggagcuccgggagcagcugagcuccgugagcuccuucgagcgcuucgagaucuuccccaagaccagcuccuggcccaacuacgacagcaacaagggggucaccgccgccugcccgcacgccggcgcgaaguccuucuacaagaaccugaucuggcucgugaagaaggggaacagcuaccccaagcuguccaagagcuacaucaacgacaagggcaaggaggugcugguccucugggggauccaccaccccagcaccuccgccgaccagcagagccuguaccagaacgccgacgccuacguguucgugggcacgucccgguacagcaagaaguucaagcccgagaucgccauccgcccgaagguccgggaccaggagggccgcaugaacuacuacuggacccugguggagcccggggacaagaucaccuucgaggcgaccggcaaccucguggucccccgguacgccuucgccauggagcgcaacgccggguccggcaucaucaucagcgacacgcccgugcacgacugcaacacgaccugccagaccccgaagggcgccaucaacaccucccugcccuuccagaacauccaccccaucaccaucgggaagugcagcaaguacgugaaguccaccaagcugcggcucgcgaccggccugcgcaacguccccagcauccagucccgggggcuguucggcgccaucgccggguucaucgagggcggcuggacggggaugguggacggcugguacggguaccaccaccagaacgagcagggcagcggguacgccgccgaccucaaguccacccagaacgcgaucgacgagaucaccaacaaggugaacagcgucaucgagaagaugaacacccaguucacggccgugggcaaggaguucaaccaccuggagaagcgcaucgagaaccugaacaagaaggucgacgacggcuuccucgacaucuggaccuacaacgccgagcugcuggugcuccuggagaacgagcggacccuggacuaccacgacuccaacgugaagaaccucuacgagaagguccgcagccagcugaagaacaacgccaaggagaucgggaacggcugcuucgaguucuaccacaagugcgacaacacgugcauggaguccgugaagaacgggaccuacgacuacccgaaguacagcgaggaggccaagcugaaccgggaggagaucgacggcgugaagcucgaguccacccgcaucuaccagauccuggcgaucuacagcaccgucgccagcucccuggugcucguggucagccugggggccaucuccuucuggaugugcagcaacggcucccugcagugccggaucugcaucuga

SEQ ID NO: 70941 - RNA, 1701 nt, Artificial Sequence; identical to SEQ ID NO: 66693
  derived and/or modified CDS sequence (opt1) from hemagglutinin__InfluenzaA__AEJ10530

SEQ ID NO: 70942 - RNA, 1701 nt, Artificial Sequence; identical to SEQ ID NO: 66693
  derived and/or modified CDS sequence (opt1) from hemagglutinin__InfluenzaA__AEJ10540

SEQ ID NO: 70943 - RNA, 1701 nt, Artificial Sequence; identical to SEQ ID NO: 66693
  derived and/or modified CDS sequence (opt1) from hemagglutinin__InfluenzaA__AEJ10550

SEQ ID NO: 70944 - RNA, 1701 nt, Artificial Sequence
  derived and/or modified CDS sequence (opt1) from hemagglutinin__InfluenzaA__AEJ10570
augaaggccauccuggugguccuccuguacacccuggccaccgcgaacgccgacacgcucugcaucggcuaccacgccaacaacagcaccgacaccguggacaccgugcuggagaagaacgucacggugacccacuccgugaaccugcucgaggacaagcacgacgggaagcugugcaagcugcgcggcgucgcgccccuccaccuggggaagugcaacaucgccggcuggauccuggggaacccggagugcgagagccucuccaccgccagcuccuggagcuacaucguggagaccuccagcuccgacaacggcacgugcuaccccggcgacuucaucgacuacgaggagcugcgggagcagcugagcuccgugagcuccuucgagcgcuucgagaucuuccccaagaccagcuccuggcccaaccacgacagcaacaagggggucaccgccgccugcccgcacgccggcgcgaaguccuucuacaagaaccucaucuggcuggugaagaaggggaacagcuaccccaagcuguccaagagcuacaucaacgacaagggcaaggaggugcucguccugugggggauccaccaccccagcaccuccgccgaccagcagagccuguaccagaacgccgacgccuacguguucgugggcacgucccgguacagcaagaaguucaagcccgagaucgccauccgcccgaagguccgggaccaggagggccgcaugaacuacuacuggacccucguggagcccggggacaagaucaccuucgaggcgaccggcaaccugguggucccccgguacgccuucgccauggagcgcaacgccggguccggcaucaucaucagcgacacgcccgugcacgacugcaacgcgaccugccagaccccgaagggcgccaucaacaccucccugcccuuccagaacauccaccccaucacgaucgggaagugccccaaguacgucaagagcaccaagcuccggcuggccaccggccugcgcaacgugccguccauccagagccgggggcuguucggcgccaucgccggguucaucgagggcggcuggaccgggaugguggacggcugguacggguaccaccaccagaacgagcagggcuccggguacgccgcggaccucaagagcacgcagaacgccaucgacaagaucaccaacaaggugaacuccgucaucgagaagaugaacacccaguucaccgccgugggcaaggaguucaaccaccuggagaagcgcaucgagaaccucaacaagaaggucgacgacggcuuccuggacaucuggacguacaacgccgagcugcucgugcugcuggagaacgagcggacccucgacuaccacgacagcaacgugaagaaccuguacgagaagguccgcucccagcugaagaacaacgccaaggagaucgggaacggcugcuucgaguucuaccacaagugcgacaacacgugcauggagagcgugaagaacgggaccuacgacuaccccaaguacuccgaggaggcgaagcucaaccgggaggagaucgacggcgugaagcuggagagcacccgcaucuaccagauccuggccaucuacuccaccgucgccagcagccucgugcugguggucucccugggggccaucagcuucuggaugugcuccaacggcagccuccagugccggaucugcaucuga

SEQ ID NO: 70945 - RNA, 1701 nt, Artificial Sequence; identical to SEQ ID NO: 70944
  derived and/or modified CDS sequence (opt1) from hemagglutinin__InfluenzaA__AEJ10580

SEQ ID NO: 70946 - RNA, 1701 nt, Artificial Sequence
  derived and/or modified CDS sequence (opt1) from hemagglutinin__InfluenzaA__AEJ36302
augaaggccauccuggugguccuccuguacaccuucgccaccgcgaacgccgacacgcugugcaucggcuaccacgccaacaacagcaccgacaccguggacaccgugcucgagaagaacgucacggugacccacuccgugaaccugcuggaggacaagcacaacgggaagcucugcaagcugcgcggcgucgcgccccugcaccucgggaagugcaacaucgccggcuggauccuggggaacccggagugcgagagccuguccaccgcgagcuccuggagcuacaucguggagaccuccagcuccuacaacggcacgugcuaccccggcgacuucaucgacuacgaggagcuccgggagcagcugagcuccgugagcuccuucgagcgcuucgagaucuuccccaagaccagcuccuggcccaaccacgacccgaacaagggggucaccgccgccugcccccacgccggcgccaagagcuucuacaagaaccugaucuggcucgugaagaaggggaacuccuaccccaagcugagcaaguccuacaucaacgacaagggcaaggaggugcugguccucugggggauccaccaccccagcaccagcgccgaccagcagcggcuguaccagaacgccgacgccuacgccuucgugggcacgucccgcuacagcaagaaguucaagccggagaucgcgauccggcccaaggugcgcgaccaggagggccggaugaacuacuacuggacccuggucgagcccggggacaagaucaccuucgaggccaccggcaaccucguggugccccgcuacgccuucgccauggagcggaacgccggguccggcaucaucaucagcgacacgccggcgcacgacugcaacacgaccugccagacccccaagggcgccaucaacaccucccugcccuuccagaacguccaccccaucaccaucgggaagugcccgaaguacgucaagagcaccaagcugcgccucgccaccggccugcggaacgugcccuccauccagagccgcgggcuguucggcgccaucgccggguucaucgagggcggcuggacggggaugguggacggcugguacggguaccaccaccagaacgagcagggcuccggguacgcggccgaccucaagagcacccagaacgccuucgacgagaucaccaacaaggugaacuccgugaucgagaagaugaacacccaguucacggccgucggcaaggaguucaaccaccuggagaagcggaucgagaaccugaacaagaagguggacgacggcuuccucgacaucuggaccuacaacgccgagcugcugguccuccuggagaacgagcgcacccuggacuaccacgacagcaacgugaagaaccucuacgagaaggugcggucccagcugaagaacaacgcgaaggagaccgggaacggcugcuucgaguucuaccacaagugcgacaacacgugcauggagagcgucaagaacgggaccuacgacuaccccaaguacuccgaggaggccaagcugaaccgcgaggagaucgacggcgugaagcucgagagcacccggaucuaccagauccuggccaucuacuccaccguggccagcucccugguccucguggugagccugggggcgaucagcuucuggaugugcuccaacggcagccugcagugccgcaucugcaucuga

SEQ ID NO: 70947 - RNA, 1701 nt, Artificial Sequence
  derived and/or modified CDS sequence (opt1) from hemagglutinin__InfluenzaA__AEJ36312
augaaggccauccuggugguccuccuguacaccuucgccaccgcgaacgccgacacgcugugcaucggcuaccacgccaacaacagcaccgacaccguggacaccgugcucgagaagaacgucacggugacccacuccgugaaccugcuggaggacaagcacaacgggaagcucugcaagcugcgcggcgucgcgccccugcaccucgggaagugcaacaucgccggcuggauccuggggaacccggagugcgagagccuguccaccgccagcuccuggagcuacaucguggagaccuccagcuccgacaacggcacgugcuaccccggcgacuucaucgacuacgaggagcuccgggagcagcugagcuccgugagcuccuucgagcgcuucgagaucuuccccaagaccagcuccuggcccgaccacgacagcaacaagggggucaccgccgccugcccgcacgccggcgcgaaguccuucuacaagaaccugaucuggcucgugaagaaggggaacagcuaccccaagcuguccaagagcuacaucaacgacaagggcaaggaggugcugguccucugggggauccaccaccccagcaccuccgccgaccagcagagccuguaccagaacgccgacgccuacguguucgugggcacgucccgguacagcaagaaguucaagcccgagaucgccauccgcccgaagguccgggaccaggagggccgcaugaacuacuacuggacccugguggagcccggggacaagaucaccuucgaggcgaccggcaaccucguggucccccgguacgccuucgccauggagcgcaacgccggguccggcaucaucaucagcgacacgcccgugcacgacugcaacacgaccugccagaccccgaagggcgccaucaacaccucccugcccuuccagaacauccaccccaucaccaucgggaagugccccaaguacgucaagagcaccaagcugcggcucgcgaccggccugcgcaacgugccguccauccagagccgggggcuguucggcgccaucgccggguucaucgagggcggcuggacggggaugguggacggcugguacggguaccaccaccagaacgagcagggcuccggguacgccgccgaccucaagagcacccagaacgcgaucgacaagaucaccaacaaggugaacuccgucaucgagaagaugaacauccaguucaccgccgugggcaaggaguucaaccaccuggagaagcgcaucgagaaccugaacaagaaggucgacgacggcuuccucgacaucuggacguacaacgccgagcugcuggugcuccuggagaacgagcggacccuggacuaccacgacagcaacgugaagaaccucuacgagaagguccgcucccagcugaagaacaacgccaaggagaucgggaacggcugcuucgaguucuaccacaagugcgacaacacgugcauggagagcgugaagaacgggaccuacgacuaccccaaguacuccgaggaggccaagcugaaccgggaggagaucgacggcgugaagcucgagagcacccgcaucuaccagauccuggcgaucuacuccaccgucgccagcagccuggugcucguggucucccugggggccaucagcuucuggaugugcuccaacggcagccugcagugccggaucugcaucuga

SEQ ID NO: 70948 - RNA, 1701 nt, Artificial Sequence
  derived and/or modified CDS sequence (opt1) from hemagglutinin__InfluenzaA__AEJ37853
augaaggccauccuggugguccuccuguacaccuucgccaccgcgaacgccgacacgcugugcaucggcuaccacgccaacaacagcaccgacaccguggacaccgugcucgagaagaacgucacggugacccacuccgugaaccugcuggaggacaagcacaacgggaagcucugcaagcugcgcggcgucgcgccccugcaccucgggaagugcaacaucgccggcuggauccuggggaacccggagugcgagagccuguccaccgccagcuccuggagcuacaucguggaggccuccagcuccgacaacgggaccugcuaccccggcgacuucaucgacuacgaggagcuccgggagcagcugagcuccgugagcuccuucgagcgcuucgagaucuuccccaagacgagcuccuggcccaaccacgacagcaacaagggcgucaccgccgccugcccgcacgcgggcgccaaguccuucuacaagaaccugaucuggcucgugaagaaggggaacagcuaccccaagcuguccaagagcuacaucaacgacaagggcaaggaggugcugguccucugggggauccaccaccccagcaccuccgccgaccagcagagccuguaccagaacgccgacgccuacguguucgugggcaccucccgguacagcaagaaguucaagcccgagaucgcgauccgcccgaagguccgggaccaggagggccgcaugaacuacuacuggacgcugguggagcccggggacaagaucaccuucgaggccaccggcaaccucguggucccccgguacgccuucgccauggagcgcaacgccggguccggcaucaucaucagcgacacccccgugcacgacugcaacacgaccugccagaccccgaagggcgcgaucaacaccucccugcccuuccagaacauccaccccaucacgaucgggaagugccccaaguacgucaagagcaccaagcugcggcucgccaccggccugcgcaacgugccguccauccagagccgggggcuguucggcgccaucgccggguucaucgagggcggcuggaccgggaugguggacggcugguacggguaccaccaccagaacgagcagggcuccggguacgccgcggaccucaagagcacgcagaacgccaucgacaagaucaccaacaaggugaacuccgucaucgagaagaugaacacccaguucaccgccgugggcaaggaguucaaccaccuggagaagcgcaucgagaaccugaacaagaaggucgacgacggcuuccucgacaucuggacguacaacgccgagcugcuggugcuccuggagaacgagcggacccuggacuaccacgacagcaacgugaagaaccucuacgagaagguccgcucccagcugaagaacaacgccaaggagaucgggaacggcugcuucgaguucuaccacaagugcgacaacaugugcauggagagcgugaagaacgggaccuacgacuaccccaaguacuccgaggaggcgaagcugaaccgggaggagaucgacggcgugaagcucgagagcacccgcaucuaccagauccuggccaucuacuccacggucgccagcagccuggugcucguggucucccugggggccaucagcuucuggaugugcuccaacggcagccugcagugccggaucugcaucuga

SEQ ID NO: 70949 - RNA, 1701 nt, Artificial Sequence
  derived and/or modified CDS sequence (opt1) from hemagglutinin__InfluenzaA__AEJ37863
augaaggccauccuggugguccuccuguacaccuucgccaccgcgaacgccgacacgcugugcaucggcuaccacgccaacaacagcaccgacaccguggacaccgugcucgagaagaacgucacggugacccacuccgugaaccugcuggaggacaagcacaacgggaagcucugcaagcugcgcggcgucgcgccccugcaccucgggaagugcaacaucgccggcuggauccuggggaacccggagugcgagagccuguccaccgccagcuccuggagcuacaucguggagaccuccagcuccgacaacggcacgugcuaccccggcgacuucaucgacuacgaggagcuccgggagcagcugagcuccgugagcuccuucgagcgcuucgagaucuuccccaagaccagcuccuggcccaaccacgacagcaacaagggggucaccgccgccugcccgcacgccggcgcgaaguccuucuacaagaaccugaucuggcucgugaagaaggggaacagcuaccccaagcuguccaagagcuacaucaacgacaagggcaaggaggugcugguccucugggggauccaccaccccagcaccuccgccgaccagcagagccuguaccagaacgccgacgccuacguguucgugggcacgucccgguacagcaagaaguucaagcccgagaucgccauccgcccgaagcugcgggaccaggagggccgcaugaacuacuacuggacccucgucgagcccggggacaagaucaccuucgaggcgaccggcaaccugguggugccccgguacgccuucgccauggagcgcaacgccggguccggcaucaucaucagcgacacgcccguccacgacugcaacacgaccugccagaccccgaagggcgccaucaacaccucccugcccuuccagaacauccaccccaucaccaucgggaagugccccaaguacgucaagagcaccaagcuccggcuggcgaccggccugcgcaacgugccguccauccagagccgggggcuguucggcgccaucgccggguucaucgagggcggcuggacggggaugguggacggcugguacggguaccaccaccagaacgagcagggcuccggguacgccgccgaccucaagagcacccagaacgcgaucgacaagaucaccaacaaggugaacuccgugaucgagaagaugaacacccaguucacggccgucggcaaggaguucaaccaccuggagaagcgcaucgagaaccucaacaagaagguggacgacggcuuccuggacaucuggaccuacaacgccgagcugcucguccugcuggagaacgagcggacccucgacuaccacgacagcaacgugaagaaccuguacgagaaggugcgcucccagcugaagaacaacgccaaggagaucgggaacggcugcuucgaguucuaccacaagugcgacaacacgugcauggagagcgucaagaacgggaccuacgacuaccccaaguacuccgaggaggccaagcucaaccgggaggagaucgacggcgugaagcuggagagcacccgcaucuaccagauccuggcgaucuacuccaccguggccagcagccucguccugguggugucccugggggccaucagcuucuggaugugcuccaacggcagccuccagugccggaucugcaucuga

SEQ ID NO: 70950 - RNA, 1701 nt, Artificial Sequence; identical to SEQ ID NO: 67857
  derived and/or modified CDS sequence (opt1) from hemagglutinin__InfluenzaA__AEJ37873

SEQ ID NO: 70951 - RNA, 1701 nt, Artificial Sequence; identical to SEQ ID NO: 70905
  derived and/or modified CDS sequence (opt1) from hemagglutinin__InfluenzaA__AEJ37883

SEQ ID NO: 70952 - RNA, 1701 nt, Artificial Sequence
  derived and/or modified CDS sequence (opt1) from hemagglutinin__InfluenzaA__AEJ37893
augaaggccauccuggugguccuccuguacaccuucgccaccacgaacgcggacacccugugcaucggcuaccacgccaacaacagcaccgacaccguggacacggugcucgagaagaacgucaccgugacccacuccgugaaccugcuggaggacaagcacaacgggaagcucugcaagcugcgcggcgucgcgccccugcaccucgggaagugcaacaucgccggcuggauccuggggaacccggagugcgagagccuguccaccgccagcuccuggagcuacaucguggagacguccagcuccgacaacgggaccugcuaccccggcaacuucaucgacuacgaggagcuccgggagcagcugagcuccgugagcuccuucgagcgcuucgagaucuuccccaagaccagcuccuggcccgaccacgacagcaacaagggcgucaccgccgccugcccgcacgccggcgccaaguccuucuacaagaaccugaucuggcucgugaagaaggggaacagcuaccccaagcuguccaagagcuacaucaacgacaagggcaaggaggugcugguccucugggggauccaccaccccagcacguccgcggaccagcagagccuguaccagaacgccgacgccuacguguucgugggcaccucccgguacagcaagaaguucaagcccgagaucgccauccgcccgaagguccgggaccaggagggccgcaugaacuacuacuggacccugguggagcccggggacaagaucaccuucgaggccacgggcaaccucguggcgccccgguacgccuucgccauggagcgcaacgccggguccggcaucaucaucagcgacaagcccguccacgacugcaacacgaccugccagaccccgaagggcgccaucaacaccucccugcccuuccagaacauccaccccaucaccaucgggaagugccccaaguacgucaagagcaccaagcugcggcucgcgaccggccugcgcaacgugccguccauccagagccgggggcuguucggcgccaucgccggguucaucgagggcggcuggacggggaugguggacggcugguacggguaccaccaccagaacgagcagggcuccggguacgccgccgaccucaagagcacccagaacgcgaucgacaagaucaccaacaaggugaacuccgugaucgagaagaugaacacccaguucacggccgucggcaaggaguucaaccaccuggagaagcgcaucgagaaccugaacaagaagguggacgacggcuuccucgacaucuggaccuacaacgccgagcugcugguccuccuggagaacgagcggacccuggacuaccacgacagcaacgugaagaaccucuacgagaaggugcgcucccagcugaagaacaacgccaaggagaucgggaacggcugcuucgaguucuaccacaagugcgacaacacgugcauggagagcgucaagaacgggaccuacgacuaccccaaguacuccgaggaggccaagcugaaccgggaggagaucgacggcgugaagcucgagagcacccgcaucuaccagauccuggcgaucuacuccaccguggccagcagccugguccucguggugucccugggggccaucagcuucuggaugugcuccaacggcagccugcagugccggaucugcaucuga

SEQ ID NO: 70953 - RNA, 1701 nt, Artificial Sequence; identical to SEQ ID NO: 70905
  derived and/or modified CDS sequence (opt1) from hemagglutinin__InfluenzaA__AEJ37903

SEQ ID NO: 70954 - RNA, 1701 nt, Artificial Sequence
  derived and/or modified CDS sequence (opt1) from hemagglutinin__InfluenzaA__AEJ37923
augaaggccauccuggugguccuccuguacaccuucgccaccgcgaacgccgacacgcugugcaucggcuaccacgccaacaacagcaccgacaccguggacaccgugcucgagaagaacgucacggugacccacuccgugaaccugcuggaggacaagcacaacgggaagcucugcaagcugcgcggcgucgcgccccugcaccucgggaagugcaacaucgccggcuggauccuggggaacccggagugcgagagccuguccaccgccagcuccuggagcuacaucguggagaccuccagcuccgacaacggcacgugcuaccccggcaacuucaucgacuacgaggagcuccgggagcagcugagcuccgugagcuccuucgagcgcuucgagaucuuccccaagaccagcuccuggcccgaccacgacagcaacaagggggucaccgccgccugcccgcacgccggcgcgaaguccuucuacaagaaccugaucuggcucgugaagaaggggaacagcuaccccaagcuguccaagagcuacaucaacgacaagggcaaggaggugcugguccucugggggauccaccaccccagcaccuccgccgaccagcagagccuguaccagaacgccgacgccuacguguucgugggcacgucccgguacagcaagaaguucaagcccgagaucgccauccgcccgaagguccgggaccaggagggccgcaugaacuacuacuggacccugguggagcccggggacaagaucaccuucgaggcgaccggcaaccucguggcgccccgguacgccuucgccaucgagcgcauggccggguccggcaucaucaucagcgacacgcccguccacgacugcaacacgaccugccagaccccgaagggcgccaucaacaccucccugcccuuccagaacauccaccccaucaccaucgggaagugccccaaguacgucaagagcaccaagcugcggcucgccaccggccugcgcaacgugccguccauccagagccgggggcuguucggcgccaucgccggguucaucgagggcggcuggacggggaugguggacggcugguacggguaccaccaccagaacgagcagggcuccggguacgccgcggaccucaagagcacccagaacgccaucgacaagaucaccaacaaggugaacuccgugaucgagaagaugaacacccaguucacggccgucggcaaggaguucaaccaccuggagaagcgcaucgagaaccugaacaagaagguggacgacggcuuccucgacaucuggaccuacaacgccgagcugcugguccuccuggagaacgagcggacccuggacuaccacgacagcaacgugaagaaccucuacgagaaggugcgcucccagcugaagaacaacgccaaggagaucgggaacggcugcuucgaguucuaccacaagugcgacaacacgugcauggagagcgucaagaacgggaccuacgacuaccccaaguacuccgaggaggcgaagcugaaccgggaggagaucgacggcgugaagcucgagagcacccgcaucuaccagauccuggccaucuacuccaccguggccagcagccugguccucguggugucccugggggccaucagcuucuggaugugcuccaacggcagccugcagugccggaucugcaucuga

SEQ ID NO: 70955 - RNA, 1701 nt, Artificial Sequence
  derived and/or modified CDS sequence (opt1) from hemagglutinin__InfluenzaA__AEJ37943
augaaggccauccuggugguccuccuguacaccuucgccaccgcgaacgccgacacgcugugcaucggcuaccacgccaacaacagcaccgacaccguggacaccgugcucgagaagaacgucacggugacccacuccgugaaccugcuggaggacaagcacaacgggaagcucugcaagcugcgcggcgucgcgccccugcaccucgggaagugcaacaucgccggcuggauccuggggaacccggagugcgagagccuguccaccgccagcuccuggagcuacaucguggagaccuccagcuccgacaacggcacgugcuaccccggcgacuucaucgacuacgaggagcuccgggagcagcugagcuccgugagcuccuucgagcgcuucgagaucuuccccaagaccagcuccuggcccaaccacgacagcaacaagggggucaccgccgccugcccgcacgccggcgcgaaguccuucuacaagaaccugaucuggcucgugaagaaggggaacagcuaccccaagcuguccaagagcuacaucaacgacaagggcaaggaggugcugguccucugggggauccaccaccccagcaccuccgccgaccagcagagccuguaccagaacgccgacgccuacguguucgugggcacgucccgguacagcaagaaguucaagcccgagaucgccauccgcccgaagguccgggaccaggagggccgcaugaacuaccacuggacccugguggagcccggggacaagaucaccuucgaggcgaccggcaaccucguggucccccgguacgccuucgccauggagcgcaacgccggguccggcaucaucaucagcgacacgcccgugcacgacugcaacacgaccugccagaccccgaagggcgccaucaacaccucccugcccuuccagaacauccaccccaucaccaucgggaagugccccaaguacgucaagagcaccaagcugcggcucgcgaccggccugcgcaacgugccguccauccagagccgggggcuguucggcgccaucgccggguucaucgagggcggcuggacggggaugguggacggcugguacggguaccaccaccagaacgagcagggcuccggguacgccgccgaccucaagagcacccagaacgcgaucgacaagaucaccaacaaggugaacuccgucaucgagaagaugaacacccaguucacggccgugggcaaggaguucaaccaccuggagaagcgcaucgagaaccugaacaagaaggucgacgacggcuuccucgacaucuggaccuacaacgccgagcugcuggugcuccuggagaacgagcggacccuggacuaccacgacagcaacgugaagaaccucuacgagaagguccgcucccagcugaagaacaacgccaaggagaucgggaacggcugcuucgaguucuaccacaagugcgacaacacgugcauggagagcgugaagaacgggaccuacgacuaccccaaguacuccgaggaggccaagcugaaccgggaggagaucgacggcgugaagcucgagagcacccgcaucuaccagauccuggcgaucuacuccaccgucgccagcagccuggugcucguggucucccugggggccaucagcuucuggaugugcuccaacggcagccugcagugccggaucugcaucuga

SEQ ID NO: 70956 - RNA, 1701 nt, Artificial Sequence; identical to SEQ ID NO: 70905
  derived and/or modified CDS sequence (opt1) from hemagglutinin__InfluenzaA__AEJ37953

SEQ ID NO: 70957 - RNA, 1701 nt, Artificial Sequence
  derived and/or modified CDS sequence (opt1) from hemagglutinin__InfluenzaA__AEJ37963
augaaggccauccuggugguccuccuguacaccuucgccaccgcgaacgccgacacgcugugcaucggcuaccacgccaacaacagcaccgacaccguggacaccgugcucgagaagaacgucacggugacccacuccgugaaccugcuggaggacaagcacaacgggaagcucugcaagcugcgcggcgucgcgccccugcaccucgggaagugcaacaucgccggcuggauccuggggaacccggagugcgagagccuguccaccgccagcuccuggagcuacaucguggagaccuccagcuccgacaacggcacgugcuaccccggcaacuucaucgacuacgaggagcuccgggagcagcugagcuccgugagcuccuucgagcgcuucgagaucuuccccaagaccagcuccuggcccgaccacgacagcaacaagggggucaccgccgccugcccgcacgccggcgcgaaguccuucuacaagaaccugaucuggcucgugaagaaggggaacagcuaccccaagcuguccaagagcuacaucaacgacaagggcaaggaggugcugguccucugggggauccaccaccccagcaccuccgccgaccagcagagccuguaccagaacgccgacgccuacguguucgugggcacgucccgguacagcaagaaguucaagcccgagaucgccauccgcccgaagguccgggaccaggagggccgcaugaacuacuacuggacccugguggagcccggggacaagaucaccuucgaggcgaccggcaaccucguggcgccccgguacgccuucgccauggagcgcaacgccggguccggcaucaucaucagcgacacgcccguccacgacugcaacacgaccugccagaccccgaagggcgccaccaacaccucccugcccuuccagaacauccaccccaucaccaucgggaagugccccaaguacgucaagagcaccaagcugcggcucgccacgggccugcgcaacgugccguccauccagagccgggggcuguucggcgccaucgccggguucaucgagggcggcuggaccgggaugguggacggcugguacggguaccaccaccagaacgagcagggcuccggguacgccgcggaccucaagagcacccagaacgccaucgacaagaucaccaacaaggugaacuccgugaucgagaagaugaacacgcaguucaccgccgucggcaaggaguucaaccaccuggagaagcgcaucgagaaccugaacaagaagguggacgacggcuuccucgacaucuggaccuacaacgccgagcugcugguccuccuggagaacgagcggacccuggacuaccacgacagcaacgugaagaaccucuacgagaaggugcgcucccagcugaagaacaacgccaaggagaucgggaacggcugcuucgaguucuaccacaagugcgacaacacgugcauggagagcgucaagaacgggaccuacgacuaccccaaguacuccgaggaggcgaagcugaaccgggaggagaucgacggcgugaagcucgagagcacccgcaucuaccagauccuggccaucuacuccaccguggccagcagccugguccucguggugucccugggggccaucagcuucuggaugugcuccaacggcagccugcagugccggaucugcaucuga

SEQ ID NO: 70958 - RNA, 1701 nt, Artificial Sequence; identical to SEQ ID NO: 67857
  derived and/or modified CDS sequence (opt1) from hemagglutinin__InfluenzaA__AEJ37973

SEQ ID NO: 70959 - RNA, 1701 nt, Artificial Sequence; identical to SEQ ID NO: 70905
  derived and/or modified CDS sequence (opt1) from hemagglutinin__InfluenzaA__AEJ37983

SEQ ID NO: 70960 - RNA, 1701 nt, Artificial Sequence; identical to SEQ ID NO: 69557
  derived and/or modified CDS sequence (opt1) from hemagglutinin__InfluenzaA__AEK21369

SEQ ID NO: 70961 - RNA, 1698 nt, Artificial Sequence; identical to SEQ ID NO: 67640
  derived and/or modified CDS sequence (opt1) from hemagglutinin__InfluenzaA__AEK21380

SEQ ID NO: 70962 - RNA, 1701 nt, Artificial Sequence
  derived and/or modified CDS sequence (opt1) from hemagglutinin__InfluenzaA__AEK21396
augaaggccauccuggugguccuccuguacaccuucgccaccgcgaacgccgacacgcugugcaucggcuaccacgccaacaacagcaccgacaccguggacaccgugcucgagaagaacgucacggugacccacuccguggaccugcuggaggacaagcacaacgggaagcucugcaagcugcgcggcgucgcgccccugcaccucgggaagugcaacaucgccggcuggauccuggggaacccggagugcgagagccuguccaccgccagcuccuggagcuacaucguggagaccuccagcuccgacaacggcacgugcuaccccggcgacuucaucgacuacgaggagcuccgggagcagcugagcuccgugagcuccuucgagcgcuucgagaucuuccccaagaccagcuccuggcccaaccacgacagcaacaagggggucaccgccgccugcccgcacgccggcgcgaaguccuucuacaagaaccugaucuggcucgugaagaaggggaacagcuaccccaagcuguccaagagcuacaucaacgacaagggcaaggaggugcugguccucugggggauccaccaccccagcaccuccgccgaccagcagagccuguaccagaacgccgacgccuacguguucgugggcacguccaaguacagcaagaaguucaagcccgagaucgccauccggccgaagguccgcgaccaggagggccggaugaacuacuacuggacccugguggagcccggggacaagaucaccuucgaggcgaccggcaaccuccuggugccccgcuacgccuucgagauggagcggaaguccgggagcggcaucaucaucuccgacacgcccguccacgacugcaacacgaccugccagaccccgaagggcgccaucaacaccagccugcccuuccagaacauccaccccaucaccaucgggaagugccccaaguacgugaaguccaccaagcuccgccuggccaccggccugcggaacgugccgagcauccagucccgcggccucuucggggccaucgcgggguucaucgagggcggcuggacggggauggucgacggcugguacggguaccaccaccagaacgagcagggcagcggguacgccgccgaccugaaguccacccagaacgccaucgacgagaucaccaacaaggugaacagcgugaucgagaagaugaacacccaguucacggccgucggcaaggaguucaaccaccuggagaagcggaucgagaaccucaacaagaagguggacgacggcuuccuggacaucuggaccuacaacgcggagcugcucguccugcuggagaacgagcgcacccucgacuaccacgacuccaacgugaagaaccuguacgagaaggugcggagccagcugaagaacaacgccaaggagaucgggaacggcugcuucgaguucuaccacaagugcgacaacacgugcauggaguccgucaagaacgggaccuacgacuaccccaaguacagcgaggaggccaagcucaaccgcgagaagaucgacggcgugaagcuggaguccacccggaucuaccagauccuggccaucuacagcaccguggccagcucccucguccugguggugagccugggggcgaucuccuucuggaugugcagcaacggcucccuccagugccgcaucugcaucuga

SEQ ID NO: 70963 - RNA, 1701 nt, Artificial Sequence
  derived and/or modified CDS sequence (opt1) from hemagglutinin__InfluenzaA__AEK21406
augaaggccauccuggugguccuccuguacaccuucgccaccgcgaacgccgacacgcugugcaucggcuaccacgccaacaacagcaccgacaccguggacaccgugcucgagaagaacgucacggugacccacuccgugaaccugcuggaggacaagcacaacgggaagcucugcaagcugcgcggcgucgcgccccugcaccucgggaagugcaacaucgccggcuggauccuggggaacccggagugcgagagccuguccaccgccagcuccuggagcuacaucguggagaccuccagcuccgacaacggcacgugcuaccccggcgacuucaucgacuacgaggagcuccgggagcagcugagcuccaugagcuccuucgagcgcuucgagaucuuccccaagaccagcuccuggcccgaccacgacagcaacaagggggugaccgccgccugcccgcacgccggcgcgaaguccuucuacaagaaccugaucuggcucgucaagaaggggaacagcuaccccaagcuguccaagagcuacaucaacgacaagggcaaggaggugcuggugcucugggggauccaccaccccagcaccuccgccgaccagcagagccuguaccagaacgccgacgccuacgucuucgugggcacgucccgguacagcaagaaguucaagcccgagaucgccauccgcccgaaggugcgggaccaggagggccgcaugaacuacuacuggacccuggucgagcccggggacaagaucaccuucgaggcgaccggcaaccucguggugccccgguacgccuucgccauggagcgcaacgccggguccggcaucaucaucagcgacacgcccguccacgacugcaacacgaccugccagaccccgaagggcgccaucaacaccucccugcccuuccagaacauccaccccaucaccaucgggaagugccccaaguacgucaagagcaccaagcugcggcucgcgaccggccugcgcaacgugccguccauccagagccgggggcuguucggcgccaucgccggguucaucgagggcggcuggacggggaugguggacggcugguacggguaccaccaccagaacgagcagggcuccggguacgccgccgaccucaagagcacccagaacgcgaucgacaagaucaccaacaaggugaacuccgugaucgagaagaugaacacccaguucacggccgucggcaaggaguucaaccaccuggagaagcgcaucgagaaccugaacaagaagguggacgacggcuuccucgacaucuggaccuacaacgccgagcugcugguccuccuggagaacgagcggacccuggacuaccacgacagcaacgugaagaaccucuacgagaaggugcgcucccagcugaagaacaacgccaaggagaucgggaacggcugcuucgaguucuaccacaagugcgacaacacgugcauggagagcgucaagaacgggaccuacgacuaccccaaguacuccgaggaggccaagcugaaccgggaggagaucgacggcgugaagcucgagagcacccgcaucuaccagauccuggcgaucuacuccaccguggccagcagccugguccucguggugucccugggggccaucagcuucuggaugugcuccaacggcagccugcagugccggaucugcaucuga

SEQ ID NO: 70964 - RNA, 1701 nt, Artificial Sequence
  derived and/or modified CDS sequence (opt1) from hemagglutinin__InfluenzaA__AEK21416
augaaggccauccuggugguccuccuguacaccuucgccaccgcgaacgccgacacgcugugcaucggcuaccacgccaacaacagcaccgacaccguggacaccgugcucgagaagaacgucacggugacccacuccgugaaccugcuggaggacaagcacaacgggaagcucugcaagcugcgcggcgucgcgccccugcaccucgggaagugcaacaucgccggcuggauccuggggaacccggagugcgagagccuguccaccgccagcuccuggagcuacaucguggagaccuccagcuccgacaacggcacgugcuaccccggcguguucaucgacuacgaggagcuccgggagcagcugagcuccgucagcuccuucgagcgcuucgagaucuuccccaagaccagcuccuggcccaaccacgacagcaacaagggggugaccgccgccugcccgcacgccggcgcgaaguccuucuacaagaaccugaucuggcucgugaagaaggggaacagcuaccccaagcuguccaagagcuacaucaacgacaagggcaaggagguccuggugcucugggggauccaccaccccagcaccacggccgaccagcagucccuguaccagaacgccgacgccuacguguucgucggcaccagccgguacuccaagaaguucaagcccgagaucgccgugcgcccgaaggugcgggaccaggagggccgcaugaacuacuacuggacccuggucgagcccggggacaagaucaccuucgaggcgacgggcaaccucguggugccccgguacgccuucgccauggagcgcaacgccgggagcggcaucaucaucuccgacacccccguccacgacugcaacacgaccugccagaccccgaagggcgccaucaacaccagccugcccuuccagaacauccaccccaucaccaucgggaagugccccaaguacgugaaguccaccaagcugcggcucgcgacgggccugcgcaacgugccgagcauccagucccgggggcuguucggcgccaucgccggguucaucgagggcggcuggaccgggauggucgacggcugguacggguaccaccaccagaacgagcagggcagcggguacgccgccgaccucaaguccacccagaacgcgaucgacaagaucaccaacaaggugaacagcgucaucgagaagaugaacacgcaguucaccgccgugggcaaggaguucaaccaccuggagaagcgcaucgagaaccugaacaagaagguggacgacggcuuccucgacaucuggaccuacaacgccgagcugcugguccuccuggagaacgagcggacccuggacuaccacgacuccaacgugaagaaccucuacgagaaggugcgcaaccagcugaagaacaacgccaaggagaucgggaacggcugcuucgaguucuaccacaagugcgacaacacgugcauggagagcgucaagaacgggaccuacgacuaccccaaguacuccgaggaggccaagcugaaccgggaggagaucgacggcgugaagcucgagagcacccgcaucuaccagauccuggcgaucuacuccaccguggccagcucccugguccucguggugagccugggggccaucagcuucuggaugugcuccaacggcagccugcagugccggaucugcaucuga

SEQ ID NO: 70965 - RNA, 1701 nt, Artificial Sequence
  derived and/or modified CDS sequence (opt1) from hemagglutinin__InfluenzaA__AEK21426
augaaggccauccuggugguccuccuguacaccuucgccaccgcgaacgccgacacgcugugcaucggcuaccacgccaacaacagcaccgacaccguggacaccgugcucgagaagaacgucacggugacccacuccgugaaccugcuggaggacaagcacaacgggaagcucugcaagcugcgcggcgucgcgccccugcaccucgggaagugcaacaucgccggcuggauccuggggaacccggagugcgagagccuguccaccgccagcuccuggagcuacaucguggagaccuccagcuccgacaacggcacgugcuaccccggcaacuucaucgacuacgaggagcuccgggagcagcugagcuccgugagcuccuucgagcgcuucgagaucuuccccaagaccagcuccuggcccgaccacgacagcaacaagggggucaccgccgccugcccgcacgccggcgcgaaguccuucuacaagaaccugaucuggcucgugaagaaggggaacagcuaccccaagcuguccaagagcuacaucaacgacaagggcaaggaggugcugguccucugggggauccaccaccccagcaccuccgccgaccagcagagccuguaccagaacgccgacgccuacguguucgugggcacgucccgguacagcaagaaguucaagcccgagaucgccauccgcccgaagguccgggaccaggagggccgcaugaacuacuacuggacccugguggagcccggggacaagaucaccuucgaggcgaccggcaaccucguggcgccccgguacgccuucgccauggagcgcaacgccggguccggcaucaucaucagcgacacgcccguccacgacugcaacacgaccugccagaccccgaagggcgccaucaacaccucccugcccuuccagaacauccaccccaucaccaucgggaagugccccaaguacgugcggagcaccaagcugcgccucgccaccggccugcggaacgugccguccauccagagccgcgggcuguucggcgccaucgccggguucaucgagggcggcuggacggggauggucgacggcugguacggguaccaccaccagaacgagcagggcuccggguacgccgcggaccucaagagcacccagaacgccaucgacaagaucaccaacaaggugaacuccgugaucgagaagaugaacacccaguucacggccgucggcaaggaguucaaccaccuggagaagcggaucgagaaccugaacaagaagguggacgacggcuuccucgacaucuggaccuacaacgccgagcugcugguccuccuggagaacgagcgcacccuggacuaccacgacagcaacgugaagaaccucuacgagaaggugcggucccagcugaagaacaacgccaaggagaucgggaacggcugcuucgaguucuaccacaagugcgacaacacgugcauggagagcgucaagaacgggaccuacgacuaccccaaguacuccgaggaggcgaagcugaaccgcgaggagaucgacggcgugaagcucgagagcacccggaucuaccagauccuggccaucuacuccaccguggccagcagccugguccucguggugucccugggggccaucagcuucuggaugugcuccaacggcagccugcagugccgcaucugcaucuga

SEQ ID NO: 70966 - RNA, 1701 nt, Artificial Sequence; identical to SEQ ID NO: 67857
  derived and/or modified CDS sequence (opt1) from hemagglutinin__InfluenzaA__AEK21436

SEQ ID NO: 70967 - RNA, 1701 nt, Artificial Sequence
  derived and/or modified CDS sequence (opt1) from hemagglutinin__InfluenzaA__AEK21456
augaaggccauccuggugguccuccuguacaccuucgccaccgcgaacgccgacacgcugugcaucggcuaccacgccaacaacagcaccgacaccguggacaccgugcucgagaagaacgucacggugacccacuccgugaaccugcuggaggacaagcacaacgggaagcucugcaagcugcgcggcgucgcgccccugcaccucgggaagugcaacaucgccggcuggauccuggggaacccggagugcgagagccuguccaccgccagcuccuggagcuacaucguggagaccuccagcuccgacaacggcacgugcuaccccggcgacuucaucgacuacgaggagcuccgggagcagcugagcuccgugagcuccuucgagcgcuucgagaucuuccccaagaccagcuccuggcccaaccacgacagcaacaagggggucaccgccgccugcccgcacgccggcgcgaaguccuucuacaagaaccugaucuggcucgugaagaaggggaacagcuaccccaagcuguccaagagcuacaucaacgacaagggcaaggaggugcugguccucugggggauccaccaccccagcaccuccgccgaccagcagagccuguaccagaacgccgacgccuacguguucgugggcacgucccgguacagcaagaaguucaagcccgagaucgccauccgcccgaagguccgggaccaggagggccgcaugaacuacuacuggacccugguggagcccggggacaagaucaccuucgaggcgaccggcaaccucguggucccccgguacgccuucgccauggagcgcaacgccggguccggcaucaucaucagcgacacgcccgugcacgacugcaacacgaccugccagaccccgaagggcgccaucaacaccucccugcccuuccagaacauccaccccaucaccaucgggaagugccccaaguacgucaagagcaccaagcugcggcucgcgaccggccugcgcaacgugccguccauccagagccgggggcuguucggcgccaucgccggguucaucgagggcggcuggacggggaugguggacggcugguacggguaccaccaccagaacgagcagggcuccggguacgccgccgaccucaagagcacccagaacgcgaucgacaagaucaccaacaaggugaacuccgucaucgagaagaugaacacccaguucacggccgugggcaaggaguucaaccaccuggagaagcgcaucgagaaccugaacaagaaggucgacgacggcuuccucgacaucuggaccuacaacgccgagcugcuggugcuccuggagaacgagcggacccuggacuaccacgacagcaacgugaagaaccucuacgagaagguccgcucccagcugaagaacaacgccaaggagaucgggaacggcugcuucgaguucuaccacaagugcgacaacacgugcauggagaacgugaagaacgggaccuacgacuaccccaaguacagcgaggaggccaagcugaaccgggaggagaucgacggcgugaagcucgaguccacccgcaucuaccagauccuggcgaucuacagcaccgucgccuccagccuggugcucguggucagccugggggccaucuccuucuggaugugcagcaacggcucccugcagugccggaucugcaucuga

SEQ ID NO: 70968 - RNA, 1701 nt, Artificial Sequence; identical to SEQ ID NO: 70905
  derived and/or modified CDS sequence (opt1) from hemagglutinin__InfluenzaA__AEK21466

SEQ ID NO: 70969 - RNA, 1701 nt, Artificial Sequence; identical to SEQ ID NO: 70905
  derived and/or modified CDS sequence (opt1) from hemagglutinin__InfluenzaA__AEK21476

SEQ ID NO: 70970 - RNA, 1701 nt, Artificial Sequence; identical to SEQ ID NO: 67857
  derived and/or modified CDS sequence (opt1) from hemagglutinin__InfluenzaA__AEK21486

SEQ ID NO: 70971 - RNA, 1701 nt, Artificial Sequence
  derived and/or modified CDS sequence (opt1) from hemagglutinin__InfluenzaA__AEK28774
augaagaccaucaucgcccugagcuacauccucugccugguguucgcccagaagcugcccggcaacgacaacuccaccgcgacgcucugccuggggcaccacgccgucccgaacggcaccaucgugaagaccaucaccaacgaccagaucgaggugacgaacgccaccgagcugguccagagcuccagcaccggggagaucugcgacagcccccaccagauccucgacggcaagaacugcacccugaucgacgcccugcucggggacccccagugcgacggcuuccagaacaagaagugggaccuguucguggagcgcagcaaggccuacuccaacugcuaccccuacgacgugccggacuacgcgagccugcggucccucgucgccagcuccggcacgcuggaguucaacaacgagagcuucaacuggaccggggugacccagaacggcaccuccagcgccugcauccgccgguccaagaacagcuucuucucccgccugaacuggcucacgcaccugaacuucaaguaccccgcccugaacgugaccaugcccaacaacgagcaguucgacaagcucuacaucuggggcguccaccaccccgggaccgacaaggaccagaucuuccuguacgcgcaggccagcgggcggaucaccguguccacgaagcgcagccagcagaccgccaucccgaacaucggcagccggccccgcgugcggaacauccccucccgcaucagcaucuacuggaccaucgucaagcccggcgacauccugcucaucaacuccaccgggaaccugaucgccccgcggggcuacuucaagauccgcagcgggaaguccagcaucaugcgguccgacgcccccaucggcaagugcaacagcgagugcaucacgcccaacggcuccauccccaacgacaagccguuccagaacgugaaccgcaucaccuacggggcgugcccccgguacgugaagcagaacacccugaagcucgccaccggcaugcgcaacguccccgagaagcagacgcgggggaucuucggcgccaucgccggguucaucgagaacggcugggagggcaugguggacgggugguacggcuuccgccaccagaacagcgaggggcggggccaggccgcggaccugaaguccacccaggccgccaucgaccagaucaacgggaagcugaaccgccucaucggcaagaccaacgagaaguuccaccagaucgagaaggaguucagcgagguggagggccggauccaggaccuggagaaguacgucgaggacaccaagaucgaccugugguccuacaacgccgagcuccugguggcccuggagaaccagcacacgauccaccucaccgacagcgagaugaacaagcuguucgagaagaccaagaagcagcugcgcgagaacgcggaggacauggggaacggcugcuucaagaucuaccacaagugcgacaacgccugcaucggguccauccgcaacggcaccuacgaccacgacguguaccgggacgaggcccucaacaaccgcuuccagaucaagggggucgagcugaaguccggcuacaaggacuggauccuguggaucuccuucgccaucagcugcuuccuccugugcguggcccugcucggcuucaucaugugggcgugccagaaggggaacauccggugcaacaucugcaucuga

SEQ ID NO: 70972 - RNA, 1701 nt, Artificial Sequence
  derived and/or modified CDS sequence (opt1) from hemagglutinin__InfluenzaA__AEK28785
augaagaccaucaucgcccugagcuacauccucugccugguguucgcccagaaccugcccggcaacgacaacuccgcggccacccucugccuggggcaccacgccgucccgaacggcacgaucgugaagaccaucaccaacgaccagguggaggucaccaacgccacggagcuggugcagaacagcuccaccggggagaucugcgacagcccccaccagauccucgacggcgagaacugcacccugaucgacgcccugcucggggacccccagugcgacggcuuccagaacaagaagugggaccuguucguggagcgcuccaaggcguacagcaacugcuaccccuacgacgucccggacuacgccucccugcggagccucguggccuccagcggcacccuggaguucaacaacgaguccuucaacuggacgggggugacccagaacggcaccagcuccgccugcauccgccggagcaacaacuccuucuucagccgccugaacuggcucacccaccugaacuucaaguaccccgcgcugaacgucacgaugcccaacaacgagcaguucgacaagcucuacaucuggggcgugcaccaccccgggaccgacaaggaccagaucuuccuguacgcccaggccuccgggcggaucaccgugagcaccaagcgcucccagcaggccgucaucccgaacaucggcagccggccccgcgugcggaacauccccagccgcaucuccaucuacuggacgaucgugaagcccggcgacauccugcucaucaacagcaccgggaaccugaucgccccgcggggcuacuucaagauccgcuccggcaagagcuccaucaugcggagcgacgcgcccaucgggaagugcaacuccgagugcaucacccccaacggcagcauccccaacgacaagccguuccagaacgucaaccgcaucaccuacggggccugcccccgguacgugaagcagaacacgcugaagcucgccaccggcaugcgcaacgugcccgagaagcagacccgggggaucuucggcgccaucgccggguucaucgagaacggcugggagggcauggucgacgggugguacggcuuccgccaccagaacuccgaggggcggggccaggcggccgaccucaagagcacccaggccgccaucgaccagaucaacgggaagcugaaccgccugaucggcaagacgaacgagaaguuccaccagaucgagaaggaguucuccgagguggagggccggauccaggaccuggagaaguacguggaggacaccaagaucgaccuguggagcuacaacgccgagcuccuggucgcgcuggagaaccagcacaccauccaccucaccgacuccgagaugaacaagcuguucgagaagacgaagaagcagcugcgcgagaacgccgaggacauggggaacggcugcuucaagaucuaccacaagugcgacaacgccugcaucgggagcauccgcaacggcaccuacgaccacgacguguaccgggacgaggcccucaacaaccgcuuccagaucaaggggguggagcugaaguccggcuacaaggacuggauccuguggaucagcuucgccaucuccugcuuccuccugugcgucgcgcugcucggcuucaucaugugggccugccagaaggggaacauccggugcaacaucugcaucuga

SEQ ID NO: 70973 - RNA, 1701 nt, Artificial Sequence
  derived and/or modified CDS sequence (opt1) from hemagglutinin__InfluenzaA__AEK28796
augaagaccaucaucgcccugagcuacauccucugccugguguucgcccagaagcugcccggcaacgacaacuccaccgcgacgcucugccuggggcaccacgccgucccgaacggcaccaucgugaagaccaucaccaacgacaagaucgaggugacgaacgccaccgagcugguccagagcuccagcaccggggagaucugcgacagcccccaccagauccucgacggcaagaacugcacccugaucgacgcccugcucggggacccccagugcgacggcuuccagaacaagaagugggaccuguucguggagcgcagcaaggccuacuccaacugcuaccccuacgacgugccggacuacgcgagccugcggucccucgucgccagcuccggcacgcuggaguucaacaacgagagcuucaacuggaccggggugacccaggacggcaccuccagcgccugcauccgcggguccaagaacagcuucuucucccggcugaacuggcucacgcaccugaacuucaaguaccccgcccugaacgugaccaugcccaacaacgagcaguucgacaagcucuacaucuggggcguccaccaccccgggaccgacaaggaccagaucuuccuguacgcgcaggccagcggccgcaucaccguguccacgaagcggagccagcaggccgccaucccgaacaucggcagccgcccccgggugcgcaacauccccucccggaucagcaucuacuggaccaucgucaagcccggggacauccugcucaucaacuccaccggcaaccugaucgccccgcgcggguacuucaagauccggagcggcaaguccagcaucaugcgcuccgacgcgcccaucggcaagugcaacagcgagugcaucacccccaacggguccauccccaacgacaagccguuccagaacgugaaccggaucacguacggcgccugcccccgcuacgugaagcagaacacccugaagcucgccaccgggaugcggaacguccccgagaagcagacccgcggcaucuucggggccaucgccggcuucaucgagaacggcugggaggggaugguggacggcugguacggguuccggcaccagaacagcgagggccgcgggcaggcggccgaccugaaguccacgcaggccgccaucgaccagaucaacggcaagcugaaccggcucaucggcaagaccaacgagaaguuccaccagaucgagaaggaguucagcgagguggaggggcgcauccaggaccuggagaaguacgucgaggacaccaagaucgaccugugguccuacaacgccgagcuccugguggcgcuggagaaccagcacaccauccaccucacggacagcgagaugaacaagcuguucgagaagaccaagaagcagcugcgggagaacgccgaggacaugggcaacgggugcuucaagaucuaccacaagugcgacaacgccugcaucggcuccauccgcaacgggaccuacgaccacgacguguaccgcgacgaggcccucaacaaccgguuccagaucaagggcgucgagcugaaguccggcuacaaggacuggauccuguggaucuccuucgccaucagcugcuuccuccugugcguggcgcugcucggguucaucaugugggccugccagaagggcaacauccgcugcaacaucugcaucuga

SEQ ID NO: 70974 - RNA, 1701 nt, Artificial Sequence
  derived and/or modified CDS sequence (opt1) from hemagglutinin__InfluenzaA__AEK28807
augaagaccaucaucgcccugagcuacauccucugccugguguucgcccagaagcugcccggcaacgacaacuccaccgcgacgcucugccuggggcaccacgccgucccgaacggcaccaucgugaagaccaucaccaacgaccagaucgaggugacgaacgccaccgagcugguccagagcuccagcaccggggagaucugcgacagcccccaccagauccucgacggcgagaacugcacccugaucgacgcccugcucggggacccccagugcgacggcuuccagaacaagaagugggaccuguucguggagcgcagcaaggccuacggcaacugcuaccccuacgacgugccggacuacgcgucccugcggagccucgucgccuccagcgggacgcuggaguucaacaacgaguccuucaacuggaccggcgugacccagaacgggaccagcuccgccugcauccgcaagagcaacaacuccuucuucagccggcugaacuggcucacgcaccugaaguucaaguaccccgcccugaacgugaccaugcccaacaacgagcaguucgacaagcucuacaucuggggcguccaccaccccgggaccgacaacgaccagaucuuccuguacgcgcaggccuccggccgcaucaccgugagcacgaagcggucccagcagaccgugaucccgaacaucggcagccgcccccggguccgcaacauccccagccggaucuccaucuacuggaccaucgugaagcccggggacauccugcucaucaacagcaccggcaaccugaucgccccgcgcggguacuucaagauccgguccggcaagagcuccaucaugcgcagcgacgcccccaucggcaagugcaacuccgagugcaucacgcccaacgggagcauccccaacgacaagccguuccagaacgugaaccggaucaccuacggcgccugcccccgcuacgucaagcagaacacccugaagcucgcgaccgggaugcggaacgugcccgagaagcagacgcgcggcaucuucggggccaucgccggcuucaucgagaacggcugggaggggaugguggacggcugguacggguuccggcaccagaacuccgagggccgcgggcaggccgccgaccugaaguccacccaggcggccaucgaccagaucaacggcaagcugaaccggcucaucggcaagaccaacgagaaguuccaccagaucgagaaggaguucuccgaggucgaggggcgcauccaggaccuggagaaguacguggaggacaccaagaucgaccuguggagcuacaacgccgagcuccugguggcccuggagaaccagcacacgauccaccucaccgacuccgagaugaacaagcuguucgagaagaccaagaagcagcugcgggagaacgccgaggacaugggcaacgggugcuucaagaucuaccacaagugcgacaacgcgugcaucggcagcauccgcaacgggaccuacgaccacgacgucuaccgcgacgaggcccucaacaaccgguuccagaucaagggcguggagcugaaguccggcuacaaggacuggauccuguggaucagcuucgccaucuccugcuuccuccugugcguggcccugcucggguucaucaugugggccugccagaagggcaacauccgcugcaacaucugcaucuga

SEQ ID NO: 70975 - RNA, 1701 nt, Artificial Sequence
  derived and/or modified CDS sequence (opt1) from hemagglutinin__InfluenzaA__AEK28818
augaagaccaucaucgcccugagcuacauccucugccugguguucgcccagaagcugcccggcaacgacaacuccaccgcgacgcucugccuggggcaccacgccgucccgaacggcaccaucgugaagaccaucaccaacgaccagaucgaggugacgaacgccaccgagcugguccagagcuccagcaccggggagaucugcgacagcccccaccagauccucgacggcaagaacugcacccugaucgacgcccugcucggggacccccagugcgacggcuuccagaacaagaagugggaccuguucguggagcgcagcaaggccuacuccaacugcuaccccuacgacgugccggacuacgcgagccugcggucccucgucgccagcuccggcacgcuggaguucaacaacgagagcuucaacuggaccggggugacccagaacggcaccuccagcgccugcauccgccgguccaagaacagcuucuucucccgccugaacuggcucacgcaccugaacuucaaguaccccgcccugaacgugaccaugcccaacaacgagcaguucgacaagcucuacaucuggggcguccaccaccccgggaccgacaaggaccagaucuuccuguacgcgcaggccagcgggcggaucaccguguccacgaagcgcagccagcagaccgugaucccgaacaucggcagccggccccgcguccggaacauccccucccgcaucagcaucuacuggaccaucgugaagcccggcgacauccugcucaucaacaacaccgggaaccugaucgccccgcggggcuacuucaagauccgcuccgggaaguccuccaucaugcggagcgacgcccccaucggcaagugcaacuccgagugcaucacgcccaacggcagcauccccaacgacaagccguuccagaacgugaaccgcaucaccuacggggccugcccccgguacgucaagcagaacacccugaagcucgcgaccggcaugcgcaacgugcccgagaagcagacgcgggggaucuucggcgccaucgccggguucaucgagaacggcugggagggcaugguggacgggugguacggcuuccgccaccagaacuccgaggggcggggccaggccgccgaccucaagagcacccaggcggccaucgaccagaucaacgggaagcugaaccgccugaucggcaagaccaacgagaaguuccaccagaucgagaaggaguucuccgaggucgagggccggauccaggaccuggagaaguacguggaggacaccaagaucgaccuguggagcuacaacgccgagcuccugguggcccuggagaaccagcacacgauccaccucaccgacuccgagaugaacaagcuguucgagaagaccaagaagcagcugcgcgagaacgccgaggacauggggaacggcugcuucaagaucuaccacaagugcgacaacgcgugcaucgggagcauccgcaacggcaccuacgaccacgacgucuaccgggacgaggcccucaacaaccgcuuccagaucaaggggguggagcugaaguccggcuacaaggacuggauccuguggaucagcuucgccaucuccugcuuccuccugugcguggcccugcucggcuucaucaugugggccugccagaaggggaacauccggugcaacaucugcaucuga

SEQ ID NO: 70976 - RNA, 1701 nt, Artificial Sequence
  derived and/or modified CDS sequence (opt1) from hemagglutinin__InfluenzaA__AEK28828
augaagaccaucaucgcccugagcuacauccucugccugguguucgcccagaagcugcccggcaacgacaacuccaccgcgacgcucugccuggggcaccacgccgucccgaacggcaccaucgugaagaccaucaccaacgaccagaucgaggugacgaacgccaccgagcugguccagagcuccagcaccggggagaucugcgacagcccccaccagauccucgacggcaagaacugcacccugaucgacgcccugcucggggacccccagugcgacggcuuccagaacaagaagugggaccuguucguggagcgcagcaaggccuacuccaacugcuaccccuacgacgugccggacuacgcgagccugcggucccucgucgccagcuccggcacgcuggaguucaacaacgagagcuucaacuggaccggggugacccagaacggcaccuccagcgccugcauccgccgguccaagaacagcuucuucucccgccugaacuggcucacgcaccugaacuucaaguaccccgcccugaacgugaccaugcccaacaacgagcaguucgacaagcucuacaucuggggcguccaccaccccgggaccgacaaggaccagaucuuccuguacgcgcaggccagcgggcggaucaccguguccacgaagcgcagccagcagaccgugaucccgaacaucggcagccggccccgcguccgggacauccccucccgcaucagcaucuacuggaccaucgugaagcccggcgacauccugcucaucaacuccaccgggaaccugaucgccccgcggggcuacuucaagauccgcagcgggaaguccagcaucaugcgguccgacgcccccaucggcaagugcaacagcgagugcaucacgcccaacggcuccauccccaacgacaagccguuccagaacgugaaccgcaucaccuacggggccugcccccgguacgucaagcagaacacccugaagcucgcgaccggcaugcgcaacgugcccgagaagcagacgcgggggaucuucggcgccaucgccggguucaucgagaacggcugggagggcaugguggacgggugguacggcuuccgccaccagaacagcgaggggcggggccaggccgccgaccugaaguccacccaggcggccaucgaccagaucaacgggaagcugaaccgccucaucggcaagaccaacgagaaguuccaccagaucgagaaggaguucagcgaggucgagggccggauccaggaccuggagaaguacguggaggacaccaagaucgaccugugguccuacaacgccgagcuccugguggcccuggagaaccagcacacgauccaccucaccgacagcgagaugaacaagcuguucgagaagaccaagaagcagcugcgcgagaacgccgaggacauggggaacggcugcuucaagaucuaccacaagugcgacaacgcgugcaucggguccauccgcaacggcaccuacgaccacgacgucuaccgggacgaggcccucaacaaccgcuuccagaucaaggggguggagcugaaguccggcuacaaggacuggauccuguggaucuccuucgccaucagcugcuuccuccugugcguggcccugcucggcuucaucaugugggucugccagaaggggaacauccggugcaacaucugcaucuga

SEQ ID NO: 70977 - RNA, 1701 nt, Artificial Sequence; identical to SEQ ID NO: 66458
  derived and/or modified CDS sequence (opt1) from hemagglutinin__InfluenzaA__AEK28839

SEQ ID NO: 70978 - RNA, 1701 nt, Artificial Sequence
  derived and/or modified CDS sequence (opt1) from hemagglutinin__InfluenzaA__AEK28850
augaagaccaucaucgcccugagcuacauccucugccugguguucgcccagaagcugcccggcaacgacaacuccaccgcgacgcucugccuggggcaccacgccgucccgaacggcaccaucgugaagaccaucaccaacgaccagaucgaggugacgaacgccaccgagcugguccagagcuccagcaccggggagaucugcgacagcccccaccagauccucgacggcgagaacugcacccugaucgacgcccugcucggggacccccagugcgacggcuuccagaacaagaagugggaccuguucguggagcgcagcaaggccuacuccaacugcuaccccuacgacgugccggacuacgcgagccugcggucccucgucgccagcuccggcacgcuggaguucaacaacgagagcuucaacuggaccggggugacccagaacggcaccuccagcgccugcauccgccgguccaacaacagcuucuucucccgccugaacuggcucacgcaccugaaguucaaguaccccgcccugaacgugaccaugcccaacaacgagcaguucgacaagcucuacaucuggggcguccaccaccccgggaccgacaacgaccagaucuuccuguacgcgcaggccagcgggcggaucaccguguccacgaagcgcagccagcagaccgugaucccgaacaucggcagccggcugcgcguccggaacauccccucccgcaucagcaucuacuggaccaucgugaagcccggcgacauccuccugaucaacuccaccgggaaccugaucgcgccccggggcuacuucaagauccgcagcgggaaguccagcaucaugcgguccgacgccccgaucggcaagugcaacagcgagugcaucacgcccaacggcuccauccccaacgacaagcccuuccagaacgugaaccgcaucaccuacggggccugcccgcgguacgucaagcagaacacccucaagcuggccaccggcaugcgcaacgugcccgagaagcagacgcgggggaucuucggcgccaucgccggguucaucgagaacggcugggagggcaugguggacgggugguacggcuuccgccaccagaacagcgaggggcggggccaggccgccgaccugaaguccacccaggcggccaucgaccagaucaacgggaagcucaaccgccugaucggcaagaccaacgagaaguuccaccagaucgagaaggaguucagcgaggucgagggccggauccaggaccuggagaaguacguggaggacaccaagaucgaccucugguccuacaacgccgagcugcugguggcccucgagaaccagcacacgaucgaccugaccgacagcgagaugaacaagcuguucgagaagaccaagaagcagcuccgcgagaacgccgaggacauggggaacggcugcuucaagaucuaccacaagugcgacaacgcgugcaucggguccauccgcaacggcaccuacgaccacgacgucuaccgggacgaggcccugaacaaccgcuuccagaucaaggggguggagcugaaguccggcuacaaggacuggauccucuggaucuccuucgccaucagcugcuuccugcugugcguggcccuccugggcuucaucaugugggccugccagaaggggaacauccggugcaacaucugcaucuga

SEQ ID NO: 70979 - RNA, 1701 nt, Artificial Sequence
  derived and/or modified CDS sequence (opt1) from hemagglutinin__InfluenzaA__AEK28861
augaagaccaucaucgcccugagcuacauccucugccugguguucgcccagaagcugcccggcaacgacaacuccaccgcgacgcucugccuggggcaccacgccgucccgaacggcaccaucgugaagaccaucaccaacgaccagaucgaggugacgaacgccaccgagcugguccagagcuccagcaccggggagaucugcgacagcccccaccagauccucgacggcgagaacugcacccugaucgacgcccugcucggggacccccagugcgacggcuuccagaacaagaagugggaccuguucguggagcgcagcaaggccuacuccaacugcuaccccuacgacgugccggacuacgcgagccugcggucccucgucgccagcuccggcacgcuggaguucaacaacgagagcuucaacuggaccggggugacccagaacggcaccuccagcgccugcauccgccgguccaacaacagcuucuucucccgccugaacuggcucacgcaccugaaguucaaguaccccgcccugaacgugaccaugcccaacaacgagcaguucgacaagcucuacaucuggggcguccaccaccccgggaccgacaacgaccagaucuuccuguacgcgcaggccagcgggcggaucaccguguccacgaagcgcagccagcagaccgugaucccgaacaucggcagccggccccgcguccggaacauccccucccgcaucagcaucuacuggaccaucgugaagcccggcgacauccugcucaucaacuccaccgggaaccugaucgccccgcggggcuacuucaagauccgcagcgggaaguccagcaucaugcgguccgacgcccccaucggcaagugcaacagcgagugcaucacgcccaacggcuccauccccaacgacaagccguuccagaacgugaaccgcaucaccuacggggccugcccccgguacgucaagcagaacacccugaagcucgcgaccggcaugcgcaacgugcccgagaagcagacgcgggggaucuucggcgccaucgccggguucaucgagaacggcugggagggcaugguggacgggugguacggcuuccgccaccagaacagcgaggggcggggccaggccgccgaccugaaguccacccaggcggccaucgaccagaucaacgggaagcugaaccgccucaucggcaagaccaacgagaaguuccaccagaucgagaaggaguucagcgaggucgagggccggauccaggaccuggagaaguacguggaggacaccaagaucgaccugugguccuacaacgccgagcuccugguggcccuggagaaccagcacacgaucgaccucaccgacagcgagaugaacaagcuguucgagaagaccaagaagcagcugaaggagaacgccgaggacauggggaacggcugcuucaagaucuaccacaagugcgacaacgcgugcaucggguccauccgcaacggcaccuacgaccacgacgucuaccgcgacgaggcccucaacaaccgguuccacaucaaggggguggagcugaaguccggcuacaaggacuggauccuguggaucuccuucgccacgagcugcuuccuccugugcguggcccugcucggcuucaucaugugggccugccagaaggggaacauccgcugcaacaucugcaucuga

SEQ ID NO: 70980 - RNA, 1701 nt, Artificial Sequence
  derived and/or modified CDS sequence (opt1) from hemagglutinin__InfluenzaA__AEK28872
augaagaccaucaucgcccugagcuacauccucugccugguguucgcccagaagcugcccggcaacgacaacuccaccgcgacgcucugccuggggcaccacgccgucccgaacggcaccaucgugaagaccaucaccaacgaccagaucgaggugacgaacgccaccgagcugguccagagcuccagcaccggggagaucugcgacagcccccaccagauccucgacggcgagaacugcacccugaucgacgcccugcucggggacccccagugcgacggcuuccagaacaagaagugggaccuguucguggagcgcagcaaggccuacuccaacugcuaccccuacgacgugccggacuacgcgagccugcggucccucgucgccagcuccggcacgcuggaguucaacaacgagagcuucaacuggaccggggugacccagaacggcaccuccagcgccugcauccgccgguccaacaacagcuucuucucccgccugaacuggcucacgcaccugaaguucaaguaccccgcccugaacgugaccaugcccaacaacgagcaguucgacaagcucuacaucuggggcguccaccaccccgggaccgacaacgaccagaucuuccuguacgcgcaggccagcgggcggaucaccguguccacgaagcgcagccagcagaccgugaucccgaacaucggcagccggccccgcguccgggacauccccucccgcaucagcaucuacuggaccaucgugaagcccggcgacauccugcucaucaacuccaccgggaaccugaucgccccgcggggcuacuucaagauccgcagcgggaaguccagcaucaugcgguccgacgcccccaucggcaagugcaacagcgagugcaucacgcccaacggcuccauccccaacgacaagccguuccagaacgugaaccgcaucaccuacggggccugcccccgguacgucaagcagaacacccugaagcucgcgaccggcaugcgcaacgugcccgagaagcagacgcgggggaucuucggcgccaucgccggguucaucgagaacggcugggagggcaugguggacgggugguacggcuuccgccaccagaacagcgaggggcggggccaggccgccgaccugaaguccacccaggcggccaucgaccagaucaacgggaagcugaaccgccucaucggcaagaccaacgagaaguuccaccagaucgagaaggaguucagcgaggucgagggccggauccaggaccuggagaaguacguggaggacaccaagaucgaccugugguccuacaacgccgagcuccugguggcccuggagaaccagcacacgauccaccucaccgacagcgagaugaacaagcuguucgagaagaccaagaagcagcugcgcgagaacgccgaggacauggggaacggcugcuucaagaucuaccacaagugcgacaacgcgugcaucggguccauccgcaacggcaccuacgaccacgacgucuaccgggacgaggcccucaacaaccgcuuccagaucaaggggguggagcugaaguccggcuacaaggacuggauccuguggaucuccuucgccaucagcugcuuccuccugugcguggcccugcucggcuucaucaugugggccugccagaaggggaacauccggugcaacaucugcaucuga

SEQ ID NO: 70981 - RNA, 1701 nt, Artificial Sequence
  derived and/or modified CDS sequence (opt1) from hemagglutinin__InfluenzaA__AEK28883
augaagaccaucaucgcccugagcuacauccucugccugguguucgcccagaagcugcccggcaacgacaacuccaccgcgacgcucugccuggggcaccacgccgucccgaacggcaccaucgugaagaccaucaccaacgaccagaucgaggugacgaacgccaccgagcugguccagagcuccagcaccggggagaucugcgacagcccccaccagauccucgacggcgagaacugcacccugaucgacgcccugcucggggacccccagugcgacggcuuccagaacaagaagugggaccuguucguggagcgcagcaaggccuacuccaacugcuaccccuacgacgugccggacuacgcgagccugcggucccucaucgccagcuccggcacgcuggaguucaacaacgagagcuucaacuggaccggggucacccagaacggcaccuccagcgccugcauccgccgguccagcaacuccuucuucagccgccugaacuggcucacgcaccugaaguucaaguaccccgcccugaacgugaccaugcccaacaacgagcaguucgacaagcucuacaucuggggcgugcaccaccccgggaccgacaacgaccagaucuuccuguacgcgcaggccuccgggcggaucaccgucagcacgaagcgcagccagcagaccgugaucccgaacaucggcucccggccccgcgugcggaacauccccagccgcaucuccaucuacuggaccaucgucaagcccggcgacauccugcucaucaacagcaccgggaaccugaucgccccgcggggcuacuucaagauccgcuccgggaaguccuccaucaugcggagcgacgcccccaucggcaagugcaacuccgagugcaucacgcccaacggcagcauccccaacgacaagccguuccagaacgugaaccgcaucaccuacggggccugcccccgguacgugaagcagaacacccugaagcucgcgaccggcaugcgcaacguccccgagaagcagacgcgggggaucuucggcgccaucgccggguucaucgagaacggcugggagggcaugguggacgggugguacggcuuccgccaccagaacuccgaggggcggggccaggccgccgaccucaagagcacccaggcggccaucgaccagaucaacgggaagcugaaccgccugaucggcaagaccaacgagaaguuccaccagaucgagaaggaguucuccgagguggagggccggauccaggaccuggagaaguacgucgaggacaccaagaucgaccuguggagcuacaacgccgagcuccugguggcccuggagaaccagcacacgauccaccucaccgacuccgagaugaacaagcuguucgagaagaccaagaagcagcugcgcgagaacgccgaggacauggggaacggcugcuucaagaucuaccacaagugcgacaacgcgugcaucgggagcauccgcaacggcaccuacgaccacgacguguaccgggacgaggcccucaacaaccgcuuccagaucaagggggucgagcugaaguccggcuacaaggacuggauccuguggaucagcuucgccaucuccugcuuccuccugugcguggcccugcucggcuucaucaugugggccugccagaaggggaacauccggugcaacaucugcaucuga

SEQ ID NO: 70982 - RNA, 1701 nt, Artificial Sequence
  derived and/or modified CDS sequence (opt1) from hemagglutinin__InfluenzaA__AEK28894
augaagaccaucaucgcccugagcuacauccucugccugguguucgcccagaagcugcccggcaacgacaacuccaccgcgacgcucugccuggggcaccacgccgucccgaacggcaccaucgugaagaccaucaccaacgaccagaucgaggugacgaacgccaccgagcugguccagagcuccagcaccggggagaucugcgacagcccccaccagauccucgacggcgagaacugcacccugaucgacgcccugcucggggacccccagugcgacggcuuccagaacaagaagugggaccuguucguggagcgcagcaaggccuacuccaacugcuaccccuacgacgugccggacuacgcgagccugcggucccucgucgccagcuccggcacgcuggaguucaacaacgagagcuucaacuggaccggggugacccagaacggcaccuccagcgccugcauccgccgguccaacaacagcuucuucucccgccugaacuggcucacgcaccugaaguucaaguaccccgcccugaacgugaccaugcccaacaacgagcaguucgacaagcucuacaucuggggcguccaccaccccgggaccgacaacgaccagaucuuccuguacgcgcaggccagcgggcggaucaccguguccacgaagcgcagccagcagaccgugaucccgaacaucggcagccggccccgcguccggaacauccccucccgcaucagcaucuacuggaccaucgugaagcccggcgacauccugcucaucaacuccaccgggaaccugaucgccccgcggggcuacuucaagauccgcagcgggaaguccagcaucaugcgguccgacgcccccaucggcaagugcaacagcgagugcaucacgcccaacggcuccauccccaacgacaagccguuccagaacgugaaccgcaucaccuacggggccugcccccgguacgucaagcagaacacccugaagcucgcgaccggcaugcgcaacgugcccgagaagcagacgcgggggaucuucggcgccaucgccggguucaucgagaacggcugggagggcaugguggacgggugguacggcuuccgccaccagaacagcgaggggcggggccaggccgccgaccugaaguccacccaggcggccaucgaccagaucaacgggaagcugaaccgccucaucggcaagaccaacgagaaguuccaccagaucgagaaggaguucagcgaggucgagggccggauccaggaccuggagaaguacguggaggacaccaagaucgaccugugguccuacaacgccgagcuccugguggcccuggagaaccagcacacgauccaccucaccgacagcgagaugaacaagcuguucgagaagaccaagaagcagcugcgcgagaacgccgaggacauggggaacggcugcuucaagaucuaccacaagugcgacaacgcgugcaucggguccauccgcaacggcaccuacgaccacgacgucuaccgggacgaggcccucaacaaccgcuuccagaucaaggggguggagcugaaguccggcuacaaggacuggauccuguggaucuccuucgccaucagcugcuuccuccugugcguggcccugcucggcuucaucaugugggccugccagaaggggaacauccggugcaacaucugcaucuga

SEQ ID NO: 70983 - RNA, 1701 nt, Artificial Sequence
  derived and/or modified CDS sequence (opt1) from hemagglutinin__InfluenzaA__AEK28905
augaagaccaucaucgcccugagcuacauccucugccugguguucgcccagaagcugcccggcaacgacaacuccaccgcgacgcucugccuggggcaccacgccgucccgaacggcaccaucgugaagaccaucaccaacgaccagaucgaggugacgaacgccaccgagcugguccagagcuccagcaccggggagaucugcgacagcccccaccagauccucgacggcgagaacugcacccugaucgacgcccugcucggggacccccagugcgacggcuuccagaacaagaagugggaccuguucguggagcgcuccaaggccuacuccaacugcuaccccuacgacgugccggacuacgcgagccugcggucccucgucgccagcuccggcacgcuggaguucaacaacgagagcuucaacuggaccggggugacccagaacggcaccuccagcgccugcauccgccgguccaacaacagcuucuucucccgccugaacuggcucacgcaccuccgguucaaguaccccgcccugaacgugaccaugcccaacaacgagcaguucgacaagcucuacaucuggggcguccaccaccccgggaccgacaacgaccagaucuucccguacgcgcaggccagcgggcgcaucaccguguccacgaagcggagccagcagaccgugauccccaacaucggcagccgcccccggguccgcaacauccccucccggaucagcaucuacuggaccaucgugaagccgggcgacauccugcugaucaacuccaccgggaaccucaucgcgccccgcggcuacuucaagauccggagcgggaaguccagcaucaugcgcuccgacgcccccaucggcaagugcaacagcgagugcaucacgcccaacggcuccaucccgaacgacaagcccuuccagaacgugaaccggaucaccuacggggccugcccccgcuacgucaagcagaacacccugaagcuggccaccggcaugcggaacgugcccgagaagcagacgcgcgggaucuucggcgccaucgccggguucaucgagaacggcugggagggcaugguggacgggugguacggcuuccggcaccagaacagcgaggggcgcggccaggccgccgaccucaaguccacccaggcggccaucgaccagaucaacgggaagcugaaccggcugaucggcaagaccaacgagaaguuccaccagaucgagaaggaguucagcgaggucgagggccgcauccaggaccucgagaaguacguggaggacaccaagaucgaccugugguccuacaacgccgagcugcucguggcccuggagaaccagcacacgaucgaccugaccgacagcgagaugaacaagcuguucgagaagaccaagaagcagcugcgcgagaacgccgaggacauggggaacggcugcuucaagaucuaccacaagugcgacaacgcgugcaucggguccauccggaacggcaccuacgaccacgacgucuaccgcgacgaggcccugaacaaccgguuccagaucaaggggguggagcucaagagcggcuacaaggacuggauccuguggaucuccuucgccaucagcugcuuccugcucugcguggcccugcugggcuucaucaugugggccugccagaaggggaacauccgcugcaacaucugcaucuga

SEQ ID NO: 70984 - RNA, 1701 nt, Artificial Sequence
  derived and/or modified CDS sequence (opt1) from hemagglutinin__InfluenzaA__AEK28916
augaagaccaucaucgcccugagcuacauccucugccugguguucgcccagaagcugcccggcaacgacaacuccaccgcgacgcucugccuggggcaccacgccgucccgaacggcaccaucgugaagaccaucaccaacgaccagaucgaggugacgaacgccaccgagcugguccagagcuccagcaccggggagaucugcgacagcccccaccagauccucgacggcgagaacugcacccugaucgacgcccugcucggggacccccagugcgacggcuuccagaacaagaagugggaccuguucguggagcgcagcaaggccuacuccaacugcuaccccuacgacgugccggacuacgcgagccugcggucccucgucgccagcuccggcacgcuggaguucaacaacgagagcuucaacuggaccggggugacccagaacggcaccuccagcgccugcauccgccgguccaacaacagcuucuucucccgccugaacuggcucacgcaccugaaguucaaguaccccgcccugaacgugaccaugcccaacaacgagcaguucgacaagcucuacaucuggggcguccaccaccccgggaccgacaacgaccagaucuuccuguacgcgcaggccagcgggcggaucaccguguccacgaagcgcagccagcagaccgugaucccgaacaucggcagccggccccgcauccggaacauccccucccgcaucagcaucuacuggaccaucgucaagcccggcgacauccugcucaucaacuccaccgggaaccugaucgccccgcggggcuacuucaagauccgcagcgggaaguccagcgugaugcgguccgacgcccccaucggcaagugcaacagcgagugcaucacgcccaacggcuccauccccaacgacaagccguuccagaacgugaaccgcaucaccuacggggccugcccccgguacgucaagcagaacacccugaagcucgcgaccggcaugcgcaacgugcccgagaagcagacgcgggggaucuucggcgccaucgccggguucaucgagaacggcugggagggcaugguggacgggugguacggcuuccgccaccagaacagcgaggggcggggccaggccgccgaccugaaguccacccaggcggccaucgaccagaucaacgggaagcugaaccgccucaucggcaagaccaacgagaaguuccaccagaucgagaaggaguucagcgaggucgagggccggauccaggaccuggagaaguacguggaggacaccaagaucgaccugugguccuacaacgccgagcuccugguggcccuggagaaccagcacacgaucgaccucaccgacagcgagaugaacaagcuguucgagaagaccaagaagcagcugcgcgagaacgccgaggacauggggaacggcugcuucaagaucuaccacaagugcgacaacgcgugcaucggguccauccgcaacggcaccuacgaccacgacgucuaccgggacgaggcccucaacaaccgcuuccagaucaaggggguggagcugaaguccggcuacaaggacuggauccuguggaucuccuucgccaucagcugcuuccuccugugcguggcccugcucggcuucaucaugugggccugccagaaggggaacauccggugcaacaucugcaucuga

SEQ ID NO: 70985 - RNA, 1701 nt, Artificial Sequence
  derived and/or modified CDS sequence (opt1) from hemagglutinin__InfluenzaA__AEK28927
augaagaccaucaucgcccugagcuacauccucugccugguguucgcccagaagcugcccggcaacgacaacuccaccgcgacgcucugccuggggcaccacgccgucccgaacggcaccaucgugaagaccaucaccaacgaccagaucgaggugacgaacgccaccgagcugguccagagcuccagcaccggggagaucugcgacagcccccaccagauccucgacggcgagaacugcacccugaucgacgcccugcucggggacccccagugcgacggcuuccagaacaagaagugggaccuguucguggagcgcagcaaggccuacuccaacugcuaccccuacgacgugccggacuacgcgagccugcggucccucaucgccagcuccggcacgcuggaguucaacaacgagagcuucaacuggaccggggucacccagaacggcaccuccagcgccugcauccgccgguccaacaacagcuucuucucccgccugaacuggcucacgcaccugaaguucaaguaccccgcccugaacgugaccaugcccaacaacgagcaguucgacaagcucuacaucuggggcgugcaccaccccgggaccgacaacgaccagaucuuccuguacgcgcaggccagcgggcggaucaccgucuccacgaagcgcagccagcagaccgugaucccgaacaucggcagccggccccgcgugcggaacauccccucccgcaucagcaucuacuggaccaucgucaagcccggcgacauccugcucaucaacuccaccgggaaccugaucgccccgcggggcuacuucaagauccgcagcgggaaguccagcaucaugcgguccgacgcccccaucggcaagugcaacagcgagugcaucacgcccaacggcuccauccccaacgacaagccguuccagaacgugaaccgcaucaccuacggggccugcccccgguacgugaagcagaacacccugaagcucgcgaccggcaugcgcaacguccccgagaagcagacgcgggggaucuucggcgccaucgccggguucaucgagaacggcugggagggcaugguggacgggugguacggcuuccgccaccagaacagcgaggggcggggccaggccgccgaccugaaguccacccaggcggccaucgaccagaucaacgggaagcugaaccgccucaucggcaagaccaacgagaaguuccaccagaucgagaaggaguucagcgagguggagggccggauccaggaccuggagaaguacgucgaggacaccaagaucgaccugugguccuacaacgccgagcuccugguggcccuggagaaccagcacacgauccaccucaccgacagcgagaugaacaagcuguucgagaagaccaagaagcagcugcgcgagaacgccgaggacauggggaacggcugcuucaagaucuaccacaagugcgacaacgcgugcaucggguccauccgcaacggcaccuacgaccacgacguguaccgggacgaggcccucaacaaccgcuuccagaucaagggggucgagcugaaguccggcuacaaggacuggauccuguggaucuccuucgccaucagcugcuuccuccugugcguggcccugcucggcuucaucaugugggccugccagaaggggaacauccggugcaacaucugcaucuga

SEQ ID NO: 70986 - RNA, 1701 nt, Artificial Sequence
  derived and/or modified CDS sequence (opt1) from hemagglutinin__InfluenzaA__AEK28949
augaagaccaucaucgcccugagcuacauccucugccugguguucgcccagaagcugcccggcaacgacaacuccaccgcgacgcucugccuggggcaccacgccgucccgaacggcaccaucgugaagaccaucaccaacgaccagaucgaggugacgaacgccaccgagcugguccagagcuccagcaccggggagaucugcgacagcccccaccagauccucgacggcgagaacugcacccugaucgacgcccugcucggggacccccagugcgacggcuuccagaacaagaagugggaccuguucguggagcgcagcaaggccuacuccaacugcuaccccuacgacgugccggacuacgcgagccugcggucccucgucgccagcuccggcacgcuggaguucaacaacgagagcuucaacuggaccggggugacccagaacggcaccuccagcgccugcauccgccgguccaacaacagcuucuucucccgccugaacuggcucacgcaccugaaguucaaguaccccgcccugaacgugaccaugcccaacaacgagcaguucgacaagcucuacaucuggggcguccaccaccccgggaccgacaacgaccagaucuuccuguacgcgcaggccagcgggcggaucaccguguccacgaagcgcagccagcagaccgugaucccgaacaucggcagccggccccgcguccggaacauccccucccgcaucagcaucuacuggaccaucgugaagcccggcgacauccugcucaucaacuccaccgggaaccugaucgccccgcggggcuacuucaagauccgcagcgggaaguccagcaucaugcgguccgacgcccccaucggcaagugcaacagcgagugcaucacgcccaacggcuccauccccaacgacaagccguuccagaacgugaaccgcaucaccuacggggccugcccccgguacgucaagcagaacacccugaagcucgcgaccggcaugcgcaacgugcccgagaagcagacgcgggggaucuucggcgccaucgccggguucaucgagaacggcugggagggcaugguggacgggugguacggcuuccgccaccagaacagcgaggggcggggccaggccgccgaccugaaguccacccaggcggccaucgaccagaucaacgggaagcugaaccgccucaucggcaagaccaacgagaaguuccaccagaucgagaaggaguucagcgaggucgagggccggauccaggaccuggagaaguacguggaggacaccaagaucgaccugugguccuacaacgccgagcuccugguggcccuggagaaccagcacacgaucgaccucaccgacagcgagaugaacaagcuguucgagaagaccaagaagcagcugcgcgagaacgccgaggacauggggaacggcugccucaagaucuaccacaagugcgacaacgcgugcaucggguccauccgcaacggcaccuacgaccacgacgucuaccgggacgaggcccugaacaaccgcuuccagaucaaggggguggagcugaaguccggcuacaaggacuggauccucuggaucuccuucgccaucagcugcuuccugcugugcguggcccuccugggcuucaucaugugggccugccagaaggggaacauccggugcaacaucugcaucuga

SEQ ID NO: 70987 - RNA, 1701 nt, Artificial Sequence; identical to SEQ ID NO: 66458
  derived and/or modified CDS sequence (opt1) from hemagglutinin__InfluenzaA__AEK28960

SEQ ID NO: 70988 - RNA, 1701 nt, Artificial Sequence; identical to SEQ ID NO: 66458
  derived and/or modified CDS sequence (opt1) from hemagglutinin__InfluenzaA__AEK28971

SEQ ID NO: 70989 - RNA, 1701 nt, Artificial Sequence
  derived and/or modified CDS sequence (opt1) from hemagglutinin__InfluenzaA__AEK28982
augaagaccaucaucgcccugagcuacauccucugccugguguucgcccagaagcugcccggcaacuacaacuccaccgcgacgcucugccuggggcaccacgccgucccgaacggcaccaucgugaagaccaucaccaacgaccagaucgaggugacgaacgccaccgagcugguccagagcuccagcaccggggagaucugcgacagcccccaccagauccucgacggcgagaacugcacccugaucgacgcccugcucggggacccccagugcgacggcuuccagaacaagaagugggaccuguucguggagcgcagcaaggccuacuccaacugcuaccccuacgacgugccggacuacgcgagccugcggucccucgucgccagcuccggcacgcuggaguucaacaacgagagcuucaacuggaccggggugacccagaacggcaccuccagcgccugcauccgccgguccaacaacagcuucuucucccgccugaacuggcucacgcaccugaaguucaaguaccccgcccugaacgugaccaugcccaacaacgagcaguucgacaagcucuacaucuggggcguccaccaccccgggaccgacaacgaccagaucuuccuguacgcgcaggccagcgggcggaucaccguguccacgaagcgcagccagcagaccgugaucccgaacaucggcagccggccccgcguccggaacauccccucccgcaucagcaucuacuggaccaucgugaagcccggcgacauccugcucaucaacuccaccgggaaccugaucgccccgcggggcuacuucaagauccgcagcgggaaguccagcaucaugcgguccgacgcccccaucggcaagugcaacagcgagugcaucacgcccaacggcuccauccccaacgacaagccguuccagaacgugaaccgcaucaccuacggggccugcccccgguacgucaagcagaacacccugaagcucgcgaccggcaugcgcaacgugcccgagaagcagacgcgggggaucuucggcgccaucgccggguucaucgagaacggcugggagggcaugguggacgggugguacggcuuccgccaccagaacagcgaggggcggggccaggccgccgaccugaaguccacccaggcggccaucgaccagaucaacgggaagcugaaccgccucaucggcaagaccaacgagaaguuccaccagaucgagaaggaguucagcgaggucgagggccggauccaggaccuggagaaguacguggaggacaccaagaucgaccugugguccuacaacgccgagcuccugguggcccuggagaaccagcacacgauccaccucaccgacagcgagaugaacaagcuguucgagaagaccaagaagcagcugcgcgagaacgccgaggacauggggaacggcugcuucaagaucuaccacaagugcgacaacgcgugcaucggguccauccgcaacggcaccuacgaccacgacgucuaccgggacgaggcccucaacaaccgcuuccagaucaaggggguggagcugaaguccggcuacaaggacuggauccuguggaucuccuucgccaucagcugcuuccuccugugcguggcccugcucggcuucaucaugugggccugccagaaggggaacauccggugcaacaucugcaucuga

SEQ ID NO: 70990 - RNA, 1701 nt, Artificial Sequence
  derived and/or modified CDS sequence (opt1) from hemagglutinin__InfluenzaA__AEK28993
augaagaccaucaucgcccugagcuacauccucugccugguguucgcccagaagcugcccggcaacuacaacuccaccgcgacgcucugccuggggcaccacgccgucccgaacggcaccaucgugaagaccaucaccaacgaccagaucgaggugacgaacgccaccgagcugguccagagcuccagcaccggggagaucugcgacagcccccaccagauccucgacggcgagaacugcacccugaucgacgcccugcucggggacccccagugcgacggcuuccagaacaagaagugggaccuguucguggagcgcagcaaggccuacuccaacugcuaccccuacgacgugccggacuacgcgagccugcggucccucgucgccagcuccggcacgcuggaguucaacaacgagagcuucaacuggaccggggugacccagaacggcaccuccagcgccugcauccgccgguccaacaacagcuucuucucccgccugaacuggcucacgcaccugaaguucaaguaccccgcccugaacgugaccaugcccaacaacgagcaguucgacaagcucuacaucuggggcguccaccaccccgggaccgacaacgaccagaucuuccuguacgcgcaggccagcgggcggaucaccguguccacgaagcgcagccagcagaccgugaucccgaacaucggcagccggccccgcguccggaacauccccucccgcaucagcaucuacuggaccaucgugaagcccggcgacauccugcucaucaacuccaccgggaaccugaucgccccgcggggcuacuucaagauccgcagcgggaaguccagcaucaugcgguccgacgcccccaucggcaagugcaacagcgagugcaucacgcccaacggcuccauccccaacgacaagccguuccagaacgugaaccgcaucaccuacggggccugcccccgguacgucaagcagaacacccugaagcucgcgaccggcaugcgcaacgugcccgagaagcagacgcgggggaucuucggcgccaucgccggguucaucgagaacggcugggagggcaugguggacgggugguacggcuuccgccaccagaacagcgaggggcggggccaggccgccgaccugaaguccacccaggcggccaucgaccagaucaacgggaagcugaaccgccucaucggcaagaccaacgagaaguuccaccagaucgagaaggaguucagcgaggucgagggccggauccaggaccuggagaaguacguggaggacaccaagaucgaccugugguccuacaacgccgagcuccugguggcccuggagaaccagcacacgaucgaccucaccgacagcgagaugaacaagcuguucgagaagaccaagaagcagcugcgcgagaacgccgaggacauggggaacggcugcuucaagaucuaccacaagugcgacaacgcgugcaucggguccauccgcaacggcaccuacgaccacgacgucuaccgggacgaggcccucaacaaccgcuuccagaucaaggggguggagcugaaguccggcuacaaggacuggauccuguggaucuccuucgccaucagcugcuuccuccugugcguggcccugcucggcuucaucaugugggccugccagaaggggaacauccggugcaacaucugcaucuga

SEQ ID NO: 70991 - RNA, 1701 nt, Artificial Sequence
  derived and/or modified CDS sequence (opt1) from hemagglutinin__InfluenzaA__AEK29004
augaagaccaucaucgcccugagcuacauccucugccugguguucgcccagaagcugcccggcaacgacaacuccaccgcgacgcucugccuggggcaccacgccgucccgaacggcaccaucgugaagaccaucaccaacgaccagaucgaggugacgaacgccaccgagcugguccagagcuccagcaccggggagaucugcaacagcccccaccagauccucgacggcgagaacugcacccugaucgacgcccugcucggggacccccagugcgacggcuuccagaacaagaagugggaccuguucguggagcgcagcaaggcccacuccaacugcuaccccuacgacgugccggacuacgucagccugcggucccucguggcgagcuccggcacgcuggaguucaacaacgagagcuucaacuggaccggggugacccagaacggcaccuccagcgccugcauccgccgguccaacaacagcuucuucucccgccugaacuggcucacgcaccugaacuucaaguaccccgcccugaacgucaccaugcccaacaacgagcaguucgacaagcucuacaucuggggcgugcaccaccccgggaccgacaaggaccagaucuuccuguacgcccaggcgagcgggcggaucaccguguccacgaagcgcagccagcaggccgucaucccgaacaucggcagccggccccgcgugcggaacauccccucccgcgugagcaucuacuggaccaucgucaagcccggcgacauccugcucaucaacuccaccgggaaccugaucgccccgcggggcuacuucaagauccgcagcgggaaguccagcaucaugcgguccgacgcccccaucggcaagugcaacagcgccugcaucacccccaacggcuccauccccaacgacaagccguuccagaacgugaaccgcaucacguacggggcgugcccccgguacgugaagcagaacacccugaagcucgccaccggcaugcgcaacguccccgagaagcagacccgggggaucuucggcgccaucgccggguucaucgagaacggcugggagggcaugguggacgggugguacggcuuccgccaccagaacagcgaggggcggggccaggccgcggaccugaaguccacgcaggccgccaucgaccagaucaacgggaagcugaaccgccucaucggcaagaccaacgagaaguuccaccagaucgagaaggaguucagcgagguggagggccggauccaggaccuggagaaguacgucgaggacaccaagaucgaccugugguccuacaacgccgagcuccugguggcccuggagaaccagcacaccaucgaccucacggacagcgagaugaacaagcuguucgagaagaccaagaagcagcugcgcgagaacgcggaggacauggggaacggcugcuucaagaucuaccacaagugcgacaacgccugcaucggguccauccgcaacggcaccuacgaccacgacguguaccgggacgaggcccucaacaaccgcuuccagaucaagggggucgagcugaaguccggcuacaaggacuggauccuguggaucuccuucgccaucagcugcuuccuccugugcguggcccugcucggcuucaucaugugggcgugccagaaggggaacauccggugcaacaucugcaucuga

SEQ ID NO: 70992 - RNA, 1701 nt, Artificial Sequence
  derived and/or modified CDS sequence (opt1) from hemagglutinin__InfluenzaA__AEK29026
augaagaccaucaucgcccugagcuacauccucugccugguguucgcccagaagcugcccggcaacgacaacuccaccgcgacgcucugccuggggcaccacgccgucccgaacggcaccaucgugaagaccaucaccaacgaccagaucgaggugacgaacgccaccgagcugguccagagcuccagcaccggggagaucugcgacagcccccaccagauccucgacggcaagaacugcacccugaucgacgcccugcucggggacccccagugcgacggcuuccaggacaagaagugggaccuguucguggagcgcagcaaggccuacuccaacugcuaccccuacgacgugccggacuacgcgagccugcggucccucgucgccagcuccggcacgcuggaguucaacaacgagagcuucaacuggaccggggugacccagaacggcaccuccagcgccugcauccgccgguccaagaacagcuucuucucccgccugaacuggcucacgcaccugaacuucaaguacagcgcccugaacgugaccaugcccaacaacgagcaguucgacaagcucuacaucuggggcguccaccaccccgggaccgacaaggaccagaucuuccuguacgcgcaggccuccgggcggaucaccgugagcacgaagcgcagccagcagaccgugauccccaacaucggcucccggccgcgcguccggaacauccccagccgcaucuccaucuacuggaccaucgugaagcccggcgacauccugcucaucaacagcaccgggaaccugaucgcgccccggggcuacuucaagaugcaguccgggaaguccuccaucaugcgcagcgacgccccgaucggcaagugcaacuccgagugcaucacgcccaacggcagcauccccaacgacaagcccuuccagaacgugaaccggaucaccuacggggccugcccgcgcuacgucaagcagaacacccugaagcucgccaccggcaugcggaacgugcccgagaagcagacgcgcgggaucuucggcgccaucgccggguucaucgagaacggcugggagggcaugguggacgggugguacggcuuccggcaccagaacuccgaggggcgcggccaggccgccgaccucaagagcacccaggcggccaucgaccagaucaacgggaagcugaaccggcugaucggcaagaccaacgagaaguuccaccagaucgagaaggaguucuccgaggucgagggccgcauccaggaccuggagaaguacguggaggacaccaagaucgaccuguggagcuacaacgccgagcuccugguggcccuggagaaccagcacacgaucgaccucaccgacuccgagaugaacaagcuguucgagaagaccaagaagcagcugcgggagaacgccgaggacauggggaacggcugcuucaagaucuaccacaagugcgacaacgcgugcaucgggagcauccgcaacggcaccuacgaccacgacgucuaccgcgacgaggcccucaacaaccgguuccagaucaaggggguggagcugaaguccggcuacaaggacuggauccuguggaucagcuucgccaucuccugcuuccuccugugcguggcccugcucggcuucaucaugugggccugccagaaggggaacauccgcugcaacaucugcaucuga

SEQ ID NO: 70993 - RNA, 1701 nt, Artificial Sequence
  derived and/or modified CDS sequence (opt1) from hemagglutinin__InfluenzaA__AEK29048
augaagaccaucaucgcccugagcuacauccucugccugguguucgcccagaagcugcccggcaacgacaacuccaccgcgacgcucugccuggggcaccacgccgucccgaacggcaccaucgugaagaccaucaccaacgaccagaucgaggugacgaacgccaccgagcugguccagagcuccagcaccggggagaucugcaacagcccccaccagauccucgacggcgagaacugcacccugaucgacgcccugcucggggacccccagugcgacggcuuccagaacaagaagugggaccuguucguggagcgcagcaaggcccacuccaacugcuaccccuacgacgugccggacuacgcgagccugcggucccucgucgccagcuccggcacgcuggaguucaacaacgagagcuucaacuggaccgggguggcccagaacggcaccuccagcgccugcauccgccgguccaacaacagcuucuucucccgccugaacuggcucacccaccugaacuucaaguaccccgcgcugaacgugacgaugcccaacaacgagcaguucgacaagcucuacaucuggggcguccaccaccccgggaccgacaaggaccagaucuuccuguacgcccaggccgccgggcggaucaccgugagcaccaagcgcucccagcaggccgugaucccgaacaucggcagccggccccgcguccggaacauccccagccgcguguccaucuacuggacgaucgugaagcccggcgacauccugcucaucaacagcaccgggaaccugaucgcgccgcggggcuacuucaagauccgcuccgggaaguccuccaucaugcggagcgacgcccccaucggcaagugcaacuccgccugcaucacccccaacggcagcauccccaacgacaagccguuccagaacgucaaccgcaucaccuacggggccugcccccgguacgugaagcagaacacgcugaagcucgccaccggcaugcgcaacgugcccgagaagcagacccgggggaucuucggcgcgaucgccggguucaucgagaacggcugggagggcauggucgacgggugguacggcuuccgccaccagaacuccgaggggcggggccaggccgccgaccucaagagcacccaggccgcgaucgaccagaucaacgggaagcugaaccgccugaucggcaagacgaacgagaaguuccaccagaucgagaaggaguucuccgagguggagggccggauccaggaccuggagaaguacguggaggacaccaagaucgaccuguggagcuacaacgccgagcuccuggucgcccuggagaaccagcacaccaucgaccucaccgacuccgagaugaacaagcuguucgagaagacgaagaagcagcugcgcgagaacgccgaggacauggggaacggcugcuucaagaucuaccacaagugcgacaacgccugcaucgggagcauccgcaacggcaccuacgaccacgacguguaccgggacgaggcgcucaacaaccgcuuccagaucaaggggguggagcugaaguccggcuacaaggacuggauccuguggaucagcuucgccaucuccugcuuccuccugugcgucgcccugcucggcuucaucaugugggccugccagaaggggaacauccggugcaacaucugcaucuga

SEQ ID NO: 70994 - RNA, 1701 nt, Artificial Sequence
  derived and/or modified CDS sequence (opt1) from hemagglutinin__InfluenzaA__AEK29070
augaagaccaucaucgcccugagcuacauccucugccugguguucgcccagaagcugcccggcaacgacaacuccaccgcgacgcucugccuggggcaccacgccgucccgaacggcaccaucgugaagaccaucaccaacgaccagaucgaggugacgaacgccaccgagcugguccagagcuccagcaccggggagaucugcgacagcccccaccagauccucgacggcgagaacugcacccugaucgacgcccugcucggggacccccagugcgacggcuuccagaacaagaagugggaccuguucguggagcgcagcaaggccuacuccaacugcuaccccuacgacgugccggacuacgcgagccugcggucccucgucgccagcuccggcacgcuggaguucaacaacgagagcuucaacuggaccggggugacccagaacggcaccuccagcgccugcauccgccgguccaacaacagcuucuucucccgccugaacuggcucacgcaccugaacuucaaguaccccgcccugaacgugaccaugcccaacaacgagcaguucgacaagcucuacaucuggggcguccaccaccccgggaccgacaaggaccagaucuuccuguacgcgcaggccagcgggcggaucaccguguccacgaagcgcagccagcaggccgugaucccgaacaucggcagccggccccgcguccggaacauccccucccgcaucagcaucuacuggaccaucgugaagcccggcgacauccugcucaucaacuccaccgggaaccugaucgccccgcggggcuacuucaagauccgcagcgggaaguccagcaucaugcgguccgacgcccccaucggcaagugcaacagcgagugcaucacccccaacggcuccauccccaacgacaagccguuccagaacgugaaccgcaucacguacggggcgugcccccgguacgucaagcagaacacccugaagcucgccaccggcaugcgcaacgugcccgagaagcagacccgggggaucuucggcgccaucgccggguucaucgagaacggcugggagggcaugguggacgggugguacggcuuccgccaccagaacagcgaggggcggggccaggccgcggaccugaaguccacgcaggccgccaucgaccagaucaacgggaagcugaaccgccucaucggcaagaccaacgagaaguuccaccagaucgagaaggaguucagcgaggucgagggccggauccaggaccuggagaaguacguggaggacaccaagaucgaccugugguccuacaacgccgagcuccugguggcccuggagaaccagcacaccauccaccucacggacagcgagaugaacaagcuguucgagaagaccaagaagcagcugcgcgagaacgcggaggacauggggaacggcugcuucaagaucuaccacaagugcgacaacgccugcaucggguccauccgcaacggcaccuacgaccacgacgucuaccgggacgaggcccucaacaaccgcuuccagaucaaggggguggagcugaaguccggcuacaaggacuggauccuguggaucuccuucgccaucagcugcuuccuccugugcguggcccugcucggcuucaucaugugggcgugccagaaggggaacauccggugcaacaucugcaucuga

SEQ ID NO: 70995 - RNA, 1701 nt, Artificial Sequence
  derived and/or modified CDS sequence (opt1) from hemagglutinin__InfluenzaA__AEK29081
augaagaccaucaucgcccugagcuacauccucugccugguguucgcccagaagcugcccggcaacgacaacuccaccgcgacgcucugccuggggcaccacgccgucccgaacggcaccaucgugaagaccaucaccaacgaccagaucgaggugacgaacgccaccgagcugguccagagcuccagcaccggggagaucugcgacagcccccaccagauccucgacggcgagaacugcacccugaucgacgcccugcucggggacccccagugcgacggcuuccagaacaagaagugggaccuguucguggagcgcagcaaggccuacuccaacugcuaccccuacgacgugccggacuacgcgagccugcggucccucgucgccagcuccggcacgcuggaguucaacaacgagagcuucaacuggaccggggugacccagaacggcaccuccagcuccugcauccgccggagcaacaacuccuucuucagccgccugaacuggcucacgcaccugaacuucaaguaccccgcccugaacgugaccaugcccaacaacgagcaguucgacaagcucuacaucuggggcguccaccaccccgggaccgacaaggaccagaucuuccuguacgcccaggcguccgggcggaucaccgugagcacgaagcgcagccagcaggccgugaucccgaacaucggcucccggccccgcguccggaacauccccagccgcaucuccaucuacuggaccaucgugaagcccggcgacauccugcucaucaacagcaccgggaaccugaucgccccgcggggcuacuucaagauccgcuccgggaaguccuccaucaugcggagcgacgcccccaucggcaagugcaacuccgagugcaucacccccaacggcagcauccccaacgacaagccguuccagaacgugaaccgcaucacguacggggccugcccccgguacgucaagcagaacacccugaagcucgcgaccggcaugcgcaacgugcccgagaagcagacccgggggaucuucggcgccaucgccggguucaucgagaacggcugggagggcaugguggacgggugguacggcuuccgccaccagaacuccgaggggcggggccaggccgccgaccucaagagcacgcaggcggccaucgaccagaucaacgggaagcugaaccgccugaucggcaagaccaacgagaaguuccaccagaucgagaaggaguucuccgaggucgagggccggauccaggaccuggagaaguacguggaggacaccaagaucgaccuguggagcuacaacgccgagcuccugguggcccuggagaaccagcacaccauccaccucacggacuccgagaugaacaagcuguucgagaagaccaagaagcagcugcgcgagaacgccgaggacauggggaacggcugcuucaagaucuaccacaagugcgacaacgcgugcaucgggagcauccgcaacggcaccuacgaccacgacgucuaccgggacgaggcccucaacaaccgcuuccagaucaaggggguggagcugaaguccggcuacaaggacuggauccuguggaucagcuucgccaucuccugcuuccuccugugcguggcccugcucggcuucaucaugugggccugccagaaggggaacauccggugcaacaucugcaucuga

SEQ ID NO: 70996 - RNA, 1701 nt, Artificial Sequence; identical to SEQ ID NO: 69557
  derived and/or modified CDS sequence (opt1) from hemagglutinin__InfluenzaA__AEK29092

SEQ ID NO: 70997 - RNA, 1701 nt, Artificial Sequence; identical to SEQ ID NO: 70879
  derived and/or modified CDS sequence (opt1) from hemagglutinin__InfluenzaA__AEK29125

SEQ ID NO: 70998 - RNA, 1701 nt, Artificial Sequence; identical to SEQ ID NO: 70879
  derived and/or modified CDS sequence (opt1) from hemagglutinin__InfluenzaA__AEK29136

SEQ ID NO: 70999 - RNA, 1701 nt, Artificial Sequence; identical to SEQ ID NO: 70879
  derived and/or modified CDS sequence (opt1) from hemagglutinin__InfluenzaA__AEK29169

SEQ ID NO: 71000 - RNA, 1701 nt, Artificial Sequence; identical to SEQ ID NO: 70879
  derived and/or modified CDS sequence (opt1) from hemagglutinin__InfluenzaA__AEK29180

SEQ ID NO: 71001 - RNA, 1701 nt, Artificial Sequence; identical to SEQ ID NO: 70879
  derived and/or modified CDS sequence (opt1) from hemagglutinin__InfluenzaA__AEK29191

SEQ ID NO: 71002 - RNA, 1701 nt, Artificial Sequence; identical to SEQ ID NO: 70879
  derived and/or modified CDS sequence (opt1) from hemagglutinin__InfluenzaA__AEK29202

SEQ ID NO: 71003 - RNA, 1701 nt, Artificial Sequence; identical to SEQ ID NO: 70879
  derived and/or modified CDS sequence (opt1) from hemagglutinin__InfluenzaA__AEK29213

SEQ ID NO: 71004 - RNA, 1701 nt, Artificial Sequence; identical to SEQ ID NO: 70879
  derived and/or modified CDS sequence (opt1) from hemagglutinin__InfluenzaA__AEK29224

SEQ ID NO: 71005 - RNA, 1701 nt, Artificial Sequence; identical to SEQ ID NO: 70879
  derived and/or modified CDS sequence (opt1) from hemagglutinin__InfluenzaA__AEK29235

SEQ ID NO: 71006 - RNA, 1701 nt, Artificial Sequence
  derived and/or modified CDS sequence (opt1) from hemagglutinin__InfluenzaA__AEK29268
augaagaccaucaucgcccugagcuacauccucugccugguguucgcccagaagcugcccggcaacgacaacuccaccgcgacgcucugccuggggcaccacgccgucccgaacggcaccaucgugaagaccaucaccaacgaccagaucgaggugacgaacgccaccgagcugguccagagcuccagcaccggggagaucugcaacagcccccaccagauccucgacggcgagaacugcacccugaucgacgcccugcucggggacccccagugcgacggcuuccagaacaagaagugggaccuguucguggagcgcagcaaggcccacuccaacugcuaccccuacgacgugccggacuacgcgagccugcggucccucgucgccagcuccggcacgcuggaguucaacaacgagagcuucaacuggaccggggugacccagaacggcaccuccagcgccugcauccgccgguccaacaacagcuucuucucccgccugaacuggcucacgcaccugaacuucaaguaccccgcccugaacgugaccaugcccaacaacgagcaguucgacaagcucuacaucuggggcguccaccaccccgggaccgacaaggaccagaucuuccuguacgcgcaggccagcgggcggaucaccguguccacgaagcgcagccagcaggccgugaucccgaacaucggcagccggccccgcguccggaacauccccucccgcgugagcaucuacuggaccaucgugaagcccggcgacauccugcucaucaacuccaccgggaaccugaucgccccgcggggcuacuucaagauccgcagcgggaaguccagcaucaugcgguccgacgcccccaucggcaagugcaacagcgcgugcaucacccccaacggcuccauccccaacgacaagccguuccagaacgucaaccgcaucacguacggggccugcccccgguacgugaagcagaacacccugaagcucgccaccggcaugcgcaacgugcccgagaagcagacccgggggaucuucggcgccaucgccggguucaucgagaacggcugggagggcauggucgacgggugguacggcuuccgccaccagaacagcgaggggcggggccaggcggccgaccugaaguccacgcaggccgccaucgaccagaucaacgggaagcugaaccgccucaucggcaagaccaacgagaaguuccaccagaucgagaaggaguucagcgagguggagggccggauccaggaccuggagaaguacguggaggacaccaagaucgaccugugguccuacaacgccgagcuccuggucgcgcuggagaaccagcacaccaucgaccucacggacagcgagaugaacaagcuguucgagaagaccaagaagcagcugcgcgagaacgccgaggacauggggaacggcugcuucaagaucuaccacaagugcgacaacgccugcaucggguccauccgcaacggcaccuacgaccacgacguguaccgggacgaggcccucaacaaccgcuuccagaucaaggggguggagcugaaguccggcuacaaggacuggauccuguggaucuccuucgccaucagcugcuuccuccugugcgucgcgcugcucggcuucaucaugugggccugccagaaggggaacauccggugcaacaucugcaucuga

SEQ ID NO: 71007 - RNA, 1698 nt, Artificial Sequence
  derived and/or modified CDS sequence (opt1) from hemagglutinin__InfluenzaA__AEK59838
augaaggugaagcugcucguccugcugugcaccuucaccgccacguacgccgacaccaucugcaucggcuaccacgcgaacaacagcaccgacaccguggacacggugcucgagaagaacgucaccgugacccacuccgugaaccugcuggaggacagccacaacgggaagcucugccugcugaagggcaucgcgccccuccagcuggggaacugcuccgucgccggcuggauccuggggaacccggagugcgagcuccugaucagcaaggaguccuggagcuacaucguggagaagcccgaccccgagaacgggaccugcuaccccggccacuucgccgacuacgaggagcugcgcgagcagcucuccagcguguccagcuucgagcgguucgagaucuucccgaaggaguccagcuggcccaaccacacggucaccgggguguccgccagcugcucccacaacggcaagagcuccuucuacaagaaccugcuguggcucaccgggaagaacggccuguaccccaaccugagcaaguccuacgccaacaacaaggagaaggaggugcucguccuguggggcgugcaccacccgcccaacaucggcgaccagaaggcccuguaccacaccgagaacgccuacgugagcgucgugagcucccacuacagcaagaaguucacgcccgagaucgccaagcgccccaaggugcgggaccaggagggccgcaucaacuacuacuggacccuccuggagcccgggaacaccaucaucuucgaggcgaacggcaaccugaucgccccgcgguacgccuucgcccucucccgcggguucggcagcggcaucaucaacuccaacgcccccauggacaagugcgacgcgaagugccagacgccccagggggccaucaacagcucccugcccuuccagaacguccacccggugaccaucggcgagugccccaaguacgugcggagcgccaagcugcgcauggucaccgggcuccggaacauccccuccauccagagccgcggccuguucggggccaucgccggcuucaucgagggcggguggaccggcaugguggacgggugguacggcuaccaccaccagaacgagcagggguccggcuacgcggccgaccagaaguccacccagaacgccaucaacggcaucacgaacaaggugaacagcgucaucgagaagaugaacacccaguucaccgccguggggaaggaguucaacaagcuggagcggcgcauggagaaccucaacaagaaggucgacgacggcuucaucgacaucuggaccuacaacgccgagcugcuggugcuccuggagaacgagcggacgcuggacuuccacgacagcaacgugaagaaccucuacgagaaggucaagucccagcugaagaacaacgcgaaggagaucgggaacggcugcuucgaguucuaccacaagugcaacgacgagugcauggagagcgugaagaacgggaccuacgacuaccccaaguacuccgaggagagcaagcugaaccgcgagaagaucgacggcgugaagcucgaguccaugggcgucuaccagauccuggccaucuacagcaccguggccagcucccuggugcuccuggucagccugggggccaucuccuucuggaugugcagcaacggcucccuccagugccggaucugcaucuga

SEQ ID NO: 71008 - RNA, 1701 nt, Artificial Sequence
  derived and/or modified CDS sequence (opt1) from hemagglutinin__InfluenzaA__AEK98378
augaagaccaucaucgcccugagcuacauccucugccugguguucgcccagaagcugcccggcaacgacaacuccaccgcgacgcucugccuggggcaccacgccgucccgaacggcaccaucgugaagaccaucaccaacgaccagaucgaggugacgaacgccaccgagcugguccagagcuccagcaccggggagaucugcgacagcccccaccagauccucgacggcgagaacugcacccugaucgacgcccugcucggggacccccagugcgacggcuuccagaacaagaagugggaccuguucguggagcgcuccaaggccuacuccaacugcuaccccuacgacgugccggacuacgcgagccugcggucccucgucgccagcuccggcacgcuggaguucaacaacgagagcuucaacuggaccggggugacccagaacggcaccuccagcgccugcauccgccgguccaacaacagcuucuucucccgccugaacuggcucacgcaccugaaguucaaguaccccgcccugaacgugaccaugcccaacaacgagaaguucgacaagcucuacaucuggggcguccaccaccccgggaccgacaacgaccagaucuucccguacgcgcaggccagcgggcggaucaccguguccacgaagcgcagccagcagaccgugauccccaacaucggcagccggccccgcguccggaacauccccucccgcaucagcaucuacuggaccaucgugaagccgggcgacauccugcugaucaacuccaccgggaaccucaucgcgccccggggcuacuucaagauccagagcgggaaguccagcaucaugcgcuccgacgcccccaucggcaagugcaacagcgagugcaucacgcccaacggcuccaucccgaacgacaagcccuuccagaacgugaaccggaucaccuacggggccugcccccgcuacgucaagcagaacacccugaagcuggccaccggcaugcggaacgugcccgagaagcagacgcgcgggaucuucggcgccaucgccggguucaucgagaacggcugggagggcaugguggacgggugguacggcuuccggcaccagaacagcgaggggaucggccaggccgccgaccucaaguccacccaggcggccaucgaccagaucaacgggaagcugaaccgccugaucggcaagaccaacgagaaguuccaccagaucgagaaggaguucagcgaggucgagggccggauccaggaccucgagaaguacguggaggacaccaagaucgaccugugguccuacaacgccgagcugcucguggcccuggagaaccagcacacgaucgaccugaccgacagcgagaugaacaagcuguucgagaagaccaagaagcagcuccgcgagaacgccgaggacauggggaacggcugcuucaagaucuaccacaagugcgacaacgcgugcaucggguccauccggaacggcaccuacgaccacgacgucuaccgcgacgaggcccugaacaaccgcuuccagaucaaggggguggagcucaagagcggcuacaaggacuggauccuguggaucuccuucgccaucagcugcuuccugcucugcguggcccugcugggcuucaucaugugggccugccagaaggggaacauccggugcaacaucugcaucuga

SEQ ID NO: 71009 - RNA, 1701 nt, Artificial Sequence; identical to SEQ ID NO: 65939
  derived and/or modified CDS sequence (opt1) from hemagglutinin__InfluenzaA__AEK98380

SEQ ID NO: 71010 - RNA, 1701 nt, Artificial Sequence
  derived and/or modified CDS sequence (opt1) from hemagglutinin__InfluenzaA__AEK98382
augaagaccaucaucgcccugagcuacauccucugccugguguucgcccagaagcugcccggcaacgacaacuccaccgcgacgcucugccuggggcaccacgccgucccgaacggcaccaucgugaagaccaucaccaacgaccagaucgaggugacgaacgccaccgagcugguccagaacagcuccaccggggagaucugcgacagcccccaccagauccucgacggcgagaacugcacccugaucgacgcccugcucggggacccccagugcgacggcuuccagaacaagaagugggaccuguucguggagcgcuccaaggccuacagcaacugcuaccccuacgacgugccggacuacgcgucccugcggagccucgucgccuccagcggcacgcuggaguucaacaacgaguccuucaacuggaccggggugacccagaacggcaccagcuccgccugcauccgccggagcaacaacuccuucuucagccgccugaacuggcucacgcaccugaaguucaaguaccccgcccugaacgugaccaugcccaacaacgagaaguucgacaagcucuacaucuggggcguccaccaccccgggaccgacaacgaccagaucuuccuguacgcgcaggccuccgggcggaucaccgugagcacgaagcgcucccagcagaccgugaucccgaacaucggcagccggccccgcauccggaacauccccagccgcaucuccaucuacuggaccaucgucaagcccggcgacauccugcucaucaacagcaccgggaaccugaucgccccgcggggcuacuucaagauccagaucgggaaguccagcaucaugcgcuccgacgcccccaucggcaagugcaacagcgagugcaucacgcccaacggcuccauccccaacgacaagccguuccagaacgugaaccggaucaccuacggggccugcccccgcuacgugaagcagaacacccugaagcucgcgaccggcaugcggaacguccccgagaagcagacgcgcgggaucuucggcgccaucgccggguucaucgagaacggcugggagggcaugguggacgggugguacggcuuccggcaccagaacagcgaggggaucggccaggccgccgaccugaaguccacccaggcggccaucgaccagaucaacgggaagcugaaccgccucaucggcaagaccaacgagaaguuccaccagaucgagaaggaguucagcgagguggagggccggauccaggaccuggagaaguacgucgaggacaccaagaucgaccugugguccuacaacgccgagcuccugguggcccuggagaaccagcacacgaucgaccucaccgacagcgagaugaacaagcuguucgagaagaccaagaagcagcugcgcgagaacgccgaggacauggggaacggcugcuucaagaucuaccacaagugcgacaacgcgugcaucggguccauccggaacggcaccuacgaccacgacguguaccgcgacgaggcccucaacaaccgcuuccagaucaagggggucgagcucaagagcggcuacaaggacuggauccuguggaucuccuucgccaucagcugcuuccugcugugcguggcccugcucggcuucaucaugugggccugccagaaggggaacauccggugcaacaucugcaucuga

SEQ ID NO: 71011 - RNA, 1701 nt, Artificial Sequence
  derived and/or modified CDS sequence (opt1) from hemagglutinin__InfluenzaA__AEK98386
augaagaccaucaucgcccugagcuacauccucugccugguguucgcccagaagcugcccggcaacgacaacuccaccgcgacgcucugccuggggcaccacgccgucccgaacggcaccaucgugaagaccaucaccaacgaccagaucgaggugacgaacgccaccgagcugguccagagcuccagcaccggggagaucugcaacagcccccaccagauccucgacggcgagaacugcacccugaucgacgcccugcucggggacccccagugcgacggcuuccagaacaagaagugggaccuguucguggagcgcagcaaggcccacuccaacugcuaccccuacgacgugccggacuacgcgagccugcggucccucgucgccagcuccggcacgcuggaguucaacaacgagagcuucaacuggaccggggugacccagaacggcaccuccagcgccugcauccgccgguccaacaacagcuucuucucccgccugaacuggcucacgcaccugaacuucaaguaccccgcccugaacgugaccaugcccaacaacgagcaguucgacaagcucuacaucuggggcguccaccaccccgggaccgacaaggaccagaucuuccuguacgcgcaggccagcgggcggaucaccguguccacgaagcgcagccagcaggccgugaucccgaacaucggcagccggacccgcguccggaacauccccucccgcgugagcaucuacuggaccaucgugaagcccggcgacauccugcucaucaacuccaccgggaaccugaucgcgccccggggcuacuucaagauccgcagcgggaaguccagcaucaugcgguccgacgccccgaucggcaagugcaacagcgccugcaucacgcccaacggcuccauccccaacgacaagcccuuccagaacgucaaccgcaucaccuacggggccugcccgcgguacgugaagcagaacacccugaagcucgccaccggcaugcgcaacgugcccgagaagcagacgcgggggaucuucggcgccaucgccggguucaucgagaacggcugggagggcauggucgacgggugguacggcuuccgccaccagaacagcgaggggcggggccaggcggccgaccugaaguccacccaggccgccaucgaccagaucaacgggaagcugaaccgccucaucggcaagaccaacgagaaguuccaccagaucgagaaggaguucagcgagguggagggccggauccaggaccuggagaaguacguggaggacaccaagaucgaccugugguccuacaacgccgagcuccuggucgcgcuggagaaccagcacacgaucgaccucaccgacagcgagaugaacaagcuguucgagaagaccaagaagcagcugcgcgagaacgccgaggacauggggaacggcugcuucaagaucuaccacaagugcgacaacgccugcaucggguccauccgcaacggcaccuacgaccacgacguguaccgggacgaggcccucaacaaccgcuuccagaucaaggggguggagcugaaguccggcuacaaggacuggauccuguggaucuccuucgccaucagcugcuuccuccugugcgucgcgcugcucggcuucaucaugugggccugccagaaggggaacauccggugcaacaucugcaucuga

SEQ ID NO: 71012 - RNA, 1701 nt, Artificial Sequence
  derived and/or modified CDS sequence (opt1) from hemagglutinin__InfluenzaA__AEK98388
augaagaccaucaucgcccugagcuacauccucugccugguguucgcccagaagcugcccggcaacgacaacuccaccgcgacgcucugccuggggcaccacgccgucccgaacggcaccaucgugaagaccaucaccaacgaccagaucgaggugacgaacgccaccgagcugguccagagcuccagcaccggggagaucugcgacagcccccaccagauccucgacggcaagaacugcacccugaucgacgcccugcucggggacccccagugcgacggccugcagaacaagaagugggaccuguucguggagcgcagcaaggccuacuccaacugcuaccccuacgacgugccggacuacgcgagccuccggucccuggucgccagcuccggcacgcuggaguucaacaacgagagcuucaacuggaccggggugacccagaacggcaccuccagcgccugcauccgccgguccaagaacagcuucuucucccgccucaacuggcugacgcaccugaacuucaaguaccccgcccucaacgugaccaugcccaacaacgagcaguucgacaagcuguacaucuggggcguccaccaccccgggaccgacaaggaccagaucuuccuguacgcgcaggccagcgggcggaucaccguguccacgaagcgcagccagcagaccgccaucccgaacaucggcagccggccccgcgugcggaacauccccucccgcaucagcaucuacuggaccaucgucaagcccggcgacauccuccugaucaacuccaccgggaaccugaucgccccgcggggcuacuucaagauccgcagcgggaaguccagcaucaugcgguccgacgcccccaucggcaagugcaacagcgagugcaucacgcccaacggcuccauccccaacgacaagccguuccagaacgugaaccgcaucaccuacggggcgugcccccgguacgugaagcagaacacccucaagcuggccaccggcaugcgcaacguccccgagaagcagacgcgggggaucuucggcgccaucgccggguucaucgagaacggcugggagggcaugguggacgggugguacggcuuccgccaccagaacagcgaggggcggggccaggccgcggaccugaaguccacccaggccgccaucgaccagaucaacgggaagcucaaccgccugaucggcaagaccaacgagaaguuccaccagaucgagaaggaguucagcgagguggagggccggauccaggaccuggagaaguacgucgaggacaccaagaucgaccucugguccuacaacgccgagcugcugguggcccucgagaaccagcacacgaucgaccugaccgacagcgagaugaacaagcuguucgagaagaccaagaagcagcuccgcgagaacgcggaggacauggggaacggcugcuucaagaucuaccacaagugcgacaacgccugcaucggguccauccgcaacggcaccuacgaccacgacguguaccgggacgaggcccugaacaaccgcuuccagaucaagggggucgagcugaaguccggcuacaaggacuggauccucuggaucuccuucgccaucagcugcuuccugcugugcguggcccuccugggcuucaucaugugggcgugccagaaggggaacauccggugcaacaucugcaucuga

SEQ ID NO: 71013 - RNA, 1701 nt, Artificial Sequence
  derived and/or modified CDS sequence (opt1) from hemagglutinin__InfluenzaA__AEK98390
augaagaccaucaucgcccugagcuacauccucugccugguguucgcccaggagcugcccggcaacgacaacuccaccgcgacgcucugccuggggcaccacgccgucccgaacggcaccaucgugaagaccaucaccaacgaccagaucgaggugacgaacgccaccgagcugguccagagcuccagcaccggggagaucugcaacagcccccaccagauccucgacggcgagaacugcacccugaucgacgcccugcucggggacccccagugcgacggcuuccagaacaagaagugggaccuguucguggagcgcagcaaggcccacuccaacugcuaccccuacgacgugccggacuacgcgagccugcggucccucgucgccagcuccggcacgcuggaguucaacaacgagagcuucaacuggaccggggugacccagaacggcaccuccagcgccugcauccgccgguccaacaacagcuucuucucccgccugaacuggcucacgcaccugaacuucaaguaccccgcccugaacgugaccaugcccaacaacgagcaguucgacaagcucuacaucuggggcguccaccaccccgggaccgacaaggaccagaucuuccuguacgcgcaggccagcgggcggaucaccguguccacgaagcgcagccagcaggccgugaucccgaacaucggcagccggccccgcguccggaacauccccucccgcgugagcaucuacuggaccaucgugaagcccggcgacauccugcucaucaacuccaccgggaaccugaucgccccgcggggcuacuucaagauccgcagcgggaaguccagcaucaugcgguccgacgcccccaucggcaagugcaagagcgcgugcaucacccccaacggcuccauccccaacgacaagacguuccagaacgucaaccgcaucaccuacggggccugcccgcgguacgugaagcagaacacccugaagcucgccaccggcaugcgcaacgugcccgagaagcagacgcgggggaucuucggcgccaucgccggguucaucgagaacggcugggagggcauggucgacgggugguacggcuuccgccaccagaacagcgaggggcggggccaggcggccgaccugaaguccacccaggccgccaucgaccagaucaacgggaagcugaaccgccucaucggcaagaccaacgagaaguuccaccagaucgagaaggaguucagcgagguggagggccggauccaggaccuggagaaguacguggaggacaccaagaucgaccugugguccuacaacgccgagcuccuggucgcgcuggagaaccagcacacgaucgaccucaccgacagcgagaugaacaagcuguucgagaagaccaagaagcagcugcgcgagaacgccgaggacauggggaacggcugcuucaagaucuaccacaagugcgacaacgccugcaucggguccauccgcaacggcaccuacgaccacgacguguaccgggacgaggcccucaacaaccgcuuccagaucaaggggguggagcugaaguccggcuacaaggacuggauccuguggaucuccuucgccaucagcugcuuccuccugugcgucgcgcugcucggcuucaucaugugggccugccagaaggggaacauccggugcaacaucugcaucuga

SEQ ID NO: 71014 - RNA, 1701 nt, Artificial Sequence
  derived and/or modified CDS sequence (opt1) from hemagglutinin__InfluenzaA__AEK98392
augaagaccaucaucgcccugagcuacauccucugccugguguucgcccagaagcugcccggcaacgacaacuccaccgcgacgcucugccuggggcaccacgccgucccgaacggcaccaucgugaagaccaucaccgacgaccagaucgaggugacgaacgccaccgagcugguccagagcuccagcaccggggagaucugcaacagcccccaccagauccucgacggcgagaacugcacccugaucgacgcccugcucggggacccccagugcgacggcuuccagaacaagaagugggaccuguucguggagcgcagcaaggcccacuccaacugcuaccccuacgacgugccggacuacgcgagccugcggucccucgucgccagcuccggcacgcuggaguucaacaacgagaacuucaacuggaccggggugacccagaacggcaccagcuccgccugcauccgccggagcaacaacuccuucuucagccgccugaacuggcucacgcaccugaacuucaaguaccccgcccugaacgugaccaugcccaacaacgagcaguucgacaagcucuacaucuggggcguccaccaccccgggaccgacaaggaccagaucuuccuguacgcgcaggccuccgggcggaucaccgugagcacgaagcgcucccagcaggccgugaucccgaacaucggcagccggcugcgcguccggaacauccccagccgcguguccaucuacuggaccaucgugaagcccggcgacauccuccugaucaacagcaccgggaaccugaucgcgccccggggcuacuucaagauccgcuccgggaaguccuccaucaugcggagcgacgccccgaucggcaagugcaacuccgccugcaucacccccaacggcagcauccccaacgacaagcccuuccagaacgucaaccgcaucacguacggggccugcccgcgguacgugaagcagaacacccucaagcuggccaccggcaugcgcaacgugcccgagaagcagacccgggggaucuucggcgccaucgccggguucaucgagaacggcugggagggcauggucgacgggugguacggcuuccgccaccagaacuccgaggggcggggccaggcggccgaccucaagagcacgcaggccgccaucgaccagaucaacgggaagcugaaccgccugaucggcaagaccaacgagaaguuccaccagaucgagaaggaguucuccgagguggagggccggauccaggaccuggagaaguacguggaggacaccaagaucgaccucuggagcuacaacgccgagcugcuggucgcgcucgagaaccagcacaccaucgaccugacggacuccgagaugaacaagcuguucgagaagaccaagaagcagcuccgcgagaacgccgaggacauggggaacggcugcuucaagaucuaccacaagugcgacaacgccugcaucgggagcauccgcaacggcaccuacgaccacgacguguaccgggacgaggcccugaacaaccgcuuccagaucaaggggguggagcugaaguccggcuacaaggacuggauccucuggaucagcuucgccaucuccugcuuccugcugugcgucgcgcuccugggcuucaucaugugggccugccagaaggggaacauccggugcaacaucugcaucuga

SEQ ID NO: 71015 - RNA, 1701 nt, Artificial Sequence
  derived and/or modified CDS sequence (opt1) from hemagglutinin__InfluenzaA__AEK98394
augaagaccaucaucgcccugagcuacauccucugccugguguucgcccagaagcugcccggcaacgacaacuccaccgcgacgcucugccuggggcaccacgccgucccgaacggcaccaucgugaagaccaucaccaacgaccagaucgaggugacgaacgccaccgagcugguccagagcuccagcaccggggagaucugcaacagcccccaccagauccucgacggcgagaacugcacccugaucgacgcccugcucggggacccccagugcgacggcuuccagaacaagaagugggaccuguucguggagcgcagcaaggcccacuccaacugcuaccccuacgacgugccggacuacgcgagccugcggucccucgucgccagcuccggcacgcuggaguucaacaacgagagcuucaacuggaccggggugacccagaacggcaccuccagcgccugcauccgccgguccaacaacagcuucuucucccgccugaacuggcucacgcaccugaacuucaaguaccccgcccugaacgugaccaugcccaacaacgagcaguucgacaagcucuacaucuggggcguccaccaccccgggaccgacaaggaccagaucuuccuguacgcgcaggccagcgggcggaucaccguguccacgaagcgcagccagcaggccgugaucccgaacaucggcagccggcugcgcguccggaacauccccucccgcgugagcaucuacuggaccaucgugaagcccggcgacauccuccugaucaacuccaccgggaaccugaucgcgccccggggcuacuucaagauccgcagcgggaaguccagcaucaugcgguccgacgccccgaucggcaagugcaacagcgccugcaucacccccaacggcuccauccccaacgacaagcccuuccagaacgucaaccgcaucacguacggggccugcccgcgguacgugaagcagaacacccucaagcuggccaccggcaugcgcaacgugcccgagaagcagacccgggggaucuucggcgccaucgccggguucaucgagaacggcugggagggcauggucgacgggugguacggcuuccgccaccagaacagcgaggggcggggccaggcggccgaccugaaguccacgcaggccgccaucgaccagaucaacgggaagcucaaccgccugaucggcaagaccaacgagaaguuccaccagaucgagaaggaguucagcgagguggagggccggauccaggaccuggagaaguacguggaggacaccaagaucgaccucugguccuacaacgccgagcugcuggucgcgcucgagaaccagcacaccaucgaccugacggacagcgagaugaacaagcuguucgagaagaccaagaagcagcuccgcgagaacgccgaggacauggggaacggcugcuucaagaucuaccacaagugcgacaacgccugcaucggguccauccgcaacggcaccuacgaccacgacguguaccgggacgaggcccugaacaaccgcuuccagaucaaggggguggagcugaaguccggcuacaaggacuggauccucuggaucuccuucgccaucagcugcuuccugcugugcgucgcgcuccugggcuucaucaugugggccugccagaaggggaacauccggugcaacaucugcaucuga

SEQ ID NO: 71016 - RNA, 1701 nt, Artificial Sequence
  derived and/or modified CDS sequence (opt1) from hemagglutinin__InfluenzaA__AEK98396
augaagaccaucaucgcccugagcuacauccucugccugguguucgcccagaagcugcccggcaacgacaacuccaccgcgacgcucugccuggggcaccacgccgucccgaacggcaccaucgugaagaccaucaccaacgaccagaucgaggugacgaacgccaccgagcugguccagagcuccagcaccggggagaucugcgacagcccccaccagauccucgacggcgagaacugcacccugaucgacgcccugcucggggacccccagugcgacggcuuccagaacaagaagugggaccuguucguggagcgcagcaaggccuacuccaacugcuaccccuacgacgugccggacuacgcgagccugcggucccucgucgccagcuccggcacgcuggaguucaacaacgagagcuucaacuggaccggggugacccagaacggcaccuccagcgccugcauccgccgguccaacaagagcuucuucucccgccugaacuggcucacgcaccugaaguucaaguaccccgcccugaacgugaccaugcccaacaacgagcaguucgacaagcucuacaucuggggcguccaccaccccgggaccgacaacgaccagaucagccuguacgcgcaggccuccgggcggaucaccgugagcacgaagcgcagccagcagaccgugaucccgaacaucggcucccggccccgcguccggaacauccccagccgcaucuccaucuacuggaccaucgugaagcccggcgacauccugcucaucaacagcaccgggaaccugaucgccccgcggggcuacuucaagauccgcuccgggaaguccuccaucaugcggagcgacgcccccaucggcaagugcaacuccgagugcaucacgcccaacggcagcauccccaacgacaagccguuccagaacgugaaccgcaucaccuacggggccugcccccgguacgucaagcagaacacccugaagcucgcgaccggcaugcgcaacgugcccgagaagcagacgcgggggaucuucggcgccaucgccggguucaucgagaacggcugggagggcaugguggacgggugguacggcuuccgccaccagaacuccgaggggcggggccaggccgccgaccucaagagcacccaggcggccaucgaccagaucaacgggaagcugaaccgccugaucggcaagaccaacgagaaguuccaccagaucgagaaggaguucuccgaggucgagggccggauccaggaccuggagaaguacguggaggacaccaagaucgaccuguggagcuacaacgccgagcuccugguggcccuggagaaccagcacacgaucgaccucaccgacuccgagaugaacaagcuguucgagaagaccaagaagcagcugcgcgagaacgccgaggacauggggaacggcugcuucaagaucuaccacaagugcgacaacgcgugcaucgggagcauccgcaacggcaccuacgaccacgacgucuaccgggacgaggcccucaacaaccgcuuccagaucaaggggguggagcugaaguccggcuacaaggacuggauccuguggaucagcuucgccaucuccugcuuccuccugugcaucgcccugcucggcuucaucaugugggccugccagaaggggaacauccggugcaacaucugcaucuga

SEQ ID NO: 71017 - RNA, 1701 nt, Artificial Sequence
  derived and/or modified CDS sequence (opt1) from hemagglutinin__InfluenzaA__AEK98398
augaagaccaucaucgcccugagcuacauccucugccugguguucgcccagaagcugcccggcaacgacaacuccaccgcgacgcucugccuggggcaccacgccgucccgaacggcaccaucgugaagaccaucaccaacgaccagaucgaggugacgaacgccaccgagcugguccagagcuccagcaccggggagaucugcgacagcccccaccagauccucgacggcaagaacugcacccugaucgacgcccugcucggggacccccagugcgacggccugcagaacaagaagugggaccuguucguggagcgcagcaaggccuacuccaacugcuaccccuacgacgugccggacuacgcgagccuccggucccuggucgccagcuccggcacgcuggaguucaacaacgagagcuucaacuggaccggggugacccagaacggcaccuccagcgccugcauccgccgguccaagaacagcuucuucucccgccucaacuggcugacgcaccugaacuucaaguaccccgcccucaacgugaccaugcccaacaacgagcaguucgacaagcuguacaucuggggcguccaccaccccgggaccgacaaggaccagaucuuccuguacgcgcaggccagcgggcggaucaccguguccacgaagcgcagccagcagaccgccaucccgaacaucggcagccggccccgcgugcggaacauccccucccgcaucagcaucuacuggaccaucgucaagcccggcgacauccuccugaucaacuccaccgggaaccugaucgccccgcggggcuacuucaagauccgcagcgggaaguccagcaucaugcgguccgacgcccccaucggcaagugcaacagcgagugcaucacgcccaacggcuccauccccaacgacaagccguuccagaacgugaaccgcaucaccuacggggcgugcccccgguacgugaagcagaacacccucaagcuggccaccggcaugcgcaacauccccgagaagcagacgcgggggaucuucggcgccaucgccggguucaucgagaacggcugggagggcauggucgacgggugguacggcuuccgccaccagaacagcgaggggcggggccaggccgcggaccugaaguccacccaggccgccaucgaccagaucaacgggaagcucaaccgccugaucggcaagaccaacgagaaguuccaccagaucgagaaggaguucagcgagguggagggccggauccaggaccuggagaaguacguggaggacaccaagaucgaccucugguccuacaacgccgagcugcuggucgcccucgagaaccagcacacgaucgaccugaccgacagcgagaugaacaagcuguucgagaagaccaagaagcagcuccgcgagaacgcggaggacauggggaacggcugcuucaagaucuaccacaagugcgacaacgccugcaucggguccauccgcaacggcaccuacgaccacgacguguaccgggacgaggcccugaacaaccgcuuccagaucaaggggguggagcugaaguccggcuacaaggacuggaucaucuggaucuccuucgccaucagcugcuuccuccugugcgucgcccugcucggcuucaucaugugggcgugccagaaggggaacauccggugcaacaucugcaucuga

SEQ ID NO: 71018 - RNA, 1701 nt, Artificial Sequence
  derived and/or modified CDS sequence (opt1) from hemagglutinin__InfluenzaA__AEK98400
auggagaccaucaucgcccugagcuacauccucucccugguguucgcccagaagcugcccggcaacgacaacagcaccgcgacgcucugccuggggcaccacgccgucccgaacggcaccaucgugaagaccaucaccaacgaccagaucgaggugacgaacgccaccgagcugguccaguccagcuccaccggggagaucugcgacagcccccaccagauccucgacggcgagaacugcacccugaucgacgcccugcucggggacccccagugcgacggcuuccagaacaagaagugggaccuguucguggagcgcuccaaggccuacagcaacugcuaccccuacgacgugccggacuacgcgucccugcggagccucgucgccuccagcggcacgcuggaguucaacaacgagaacuucaacuggaccggggugacccagaacggcaccuccagcgccugcauccgccgguccaacaacagcuucuucucccgccugaacuggcucacgcaccuccgguucaaguaccccgcccugaacgugaccaugcccaacaacgaggaguucgacaagcuguacaucuggggcguccaccaccccgggaccgacaacgaccagaucuuccuguacgcgcaggccagcgggcgcaucaccguguccacgaagcggagccagcagaccgugaucccgaacaucggcagccgcccccggguccgcaacauccccucccggaucagcaucuacuggaccaucgugaagcccggcgacauccugcucaucaacuccaccgggaaccugaucgccccgcgcggcuacuucaagauccggagcgggaaguccagcaucaugcgcuccgacgcccccaucggcaagugcagcuccgagugcaucacgcccaacggcagcauccccaacgacaagccguuccagaacgugaaccggaucaccuacggggccugcccccgcuacgucaagcagaacacccugaagcucgcgaccggcaugcggaacgugcccgagaagcagacgcgcgggaucuucggcgccaucgccggguucaucgagaacggcugggagggcaugguggacgggugguacggcuuccggcaccagaacuccgaggggaucggccaggccgccgaccucaagagcacccaggcggccaucgaccagaucaacgggaagcugaaccgccugaucggcaagaccaacgagaaguuccaccagaucgagaaggaguucuccgagaucgagggccggauccaggaccuggagaaguacgucgaggacaccaagaucgaccuguggagcuacaacgccgagcuccugguggcccuggagaaccagcacacgaucgaccucaccgacuccgagaugaacaagcuguucgagaagaccaagaagcagcugcgcgagaacgccgaggacauggggaacggcugcuucaagaucuaccacaagugcgacaacgcgugcaucgggagcauccgcaacggcaccuacgaccacgacguguaccgggacgaggcccucaacaaccgcuuccagaucaagggggucgagcugaaguccggcuacaaggacuggauccuguggaucagcuucgccaucuccugcuuccuccugugcguggcccugcucggcuucaucaugugggccugccagaaggggaacauccggugcaacaucugcaucuga

SEQ ID NO: 71019 - RNA, 1701 nt, Artificial Sequence
  derived and/or modified CDS sequence (opt1) from hemagglutinin__InfluenzaA__AEK98402
augaagaccaucaucgcccugagcuacauccucugccugggcuucgcccagaagcugcccgggaacgacaacuccaccgcgacgcucugccugggccaccacgccgugccgaacgggaccaucgucaagaccaucaccaacgaccagaucgaggugacgaacgccaccgagcuggugcagagcuccagcaccggcgagaucugcgacagcccccaccagauccucgacgggaagaacugcacccugaucgacgcccugcucggcgacccccagugcgacggcuuccagaacaagaagugggaccuguucgucgagcgcagcaaggccuacuccaacugcuaccccuacgacgugccggacuacgcgagccugcggucccucguggccagcuccgggacgcuggaguucaacaacgagagcuucaacuggaccggcgucacccagaacgggaccuccagcgccugcauccgccgguccaagaacagcuucuucucccgccugaacuggcucacgcaccugaacuucaaguaccccgcccugaacgugaccaugcccaacaacgagcaguucgacaagcucuacaucuggggcgugcaccaccccgggaccgacaaggaccagaucuuccuguacgcgcaggccagcggccggaucaccgucuccacgaagcgcagccagcagaccgccaucccgaacaucggcagccggccccgcgugcggaacauccccucccgcaucagcaucuacuggaccaucgugaagcccggggacauccugcucaucaacuccaccggcaaccugaucgccccgcggggguacuucaagauccgcagcggcaaguccagcaucaugcgguccgacgcccccaucggcaagugcaacagcgagugcaucacgcccaacggguccauccccaacgacaagccguuccagaacgucaaccgcaucaccuacggcgcgugcccccgguacgugaagcagaacacccugaagcucgccaccgggaugcgcaacgugcccgagaagcagacgcggggcaucuucggggccaucgccggcuucaucgagaacggcugggaggggauggucgacggcugguacggguuccgccaccagaacagcgagggccgggggcaggccgcggaccugaaguccacccaggccgccaucaaccagaucaacggcaagcugaaccgccucaucggcaagaccaacgagaaguuccaccagaucgagaaggaguucagcgagguggaggggcggauccaggaccuggagaaguacguggaggacaccaagaucgaccugugguccuacaacgccgagcuccuggucgcccuggagaaccagcacacgaucgaccucaccgacagcgagaugaacaagcuguucgagaagaccaagaagcagcugcgcgagaacgcggaggacaugggcaacgggugcuucaagaucuaccacaagugcgacaacgccugcaucggcuccauccgcaacgggaccuacgaccacgacguguaccgggacgaggcccucaacaaccgcuuccagaucaagggcguggagcugaaguccggcuacaaggacuggauccuguggaucuccuucgccaucagcugcuuccuccugugcgucgcccugcucggguucaucaugugggcgugccagaagggcaacauccggugcaacaucugcaucuga

SEQ ID NO: 71020 - RNA, 1701 nt, Artificial Sequence
  derived and/or modified CDS sequence (opt1) from hemagglutinin__InfluenzaA__AEK98404
augaagaccaucaucgcccugagcuacauccucucccugguguucgcccagaagcugcccggcaacgacaacagcaccgcgacgcucugccuggggcaccacgccgucccgaacggcaccaucgugaagaccaucaccaacgaccagaucgaggugacgaacgccaccgagcugguccaguccagcuccaccggggagaucugcgacagcccccaccagauccucgacggcgagaacugcacccugaucgacgcccugcucggggacccccagugcgacggcuuccagaacaagaagugggaccuguucguggagcgcuccaaggccuacagcaacugcuaccccuacgacgugccggacuacgcgucccugcggagccucgucgccuccagcggcacgcuggaguucaacaacgagaacuucaacuggaccggggugacccagaacggcaccuccagcgccugcauccgccgguccaacaacagcuucuucucccgccugaacuggcucacgcaccuccgguucaaguaccccgcccugaacgugaccaugcccaacaacgaggaguucgacaagcuguacaucuggggcguccaccaccccgggaccgacaacgaccagaucuuccuguacgcgcaggccagcgggcgcaucaccguguccacgaagcggagccagcagaccgugaucccgaacaucggcagccgcccccggguccgcaacauccccucccggaucagcaucuacuggaccaucgugaagcccggcgacauccugcucaucaacuccaccgggaaccugaucgccccgcgcggcuacuucaagaugcggagcgggaaguccagcaucaugcgcuccgacgcccccaucggcaagugcaacagcgagugcaucacgcccaacggcuccauccccaacgacaagccguuccagaacgugaaccggaucaccuacggggccugcccccgcuacgucaagcagaacacccugaagcucgcgaccggcaugcggaacgugcccgagaagcagacgcgcgggaucuucggcgccaucgccggguucaucgagaacggcugggagggcaugguggacgggugguacggcuuccggcaccagaacagcgaggggaucggccaggccgccgaccugaaguccacccaggcggccaucgaccagaucaacgggaagcugaaccgccucaucggcaagaccaacgagaaguuccaccagaucgagaaggaguucagcgaggucgagggccggauccaggaccuggagaaguacguggaggacaccaagaucgaccugugguccuacaacgccgagcuccugguggcccuggagaaccagcacacgaucgaccucaccgacagcgagaugaacaagcuguucgagaagaccaagaagcagcugcgcgagaacgccgaggacauggggaacggcugcuucaagaucuaccacaagugcgacaacgcgugcaucggguccauccgcaacggcaccuacgaccacgacgucuaccgggacgaggcccucaacaaccgcuuccagaucaaggggguggagcucaagagcggcuacaaggacuggauccuguggaucuccuucgccaucagcugcuuccugcugugcguggcccugcucggcuucaucaugugggccugccagaaggggaacauccggugcaacaucugcaucuga

SEQ ID NO: 71021 - RNA, 1701 nt, Artificial Sequence
  derived and/or modified CDS sequence (opt1) from hemagglutinin__InfluenzaA__AEK98406
augaagaccaucaucgcccugagcuacauccucucccugguguucgcccagaagcugcccggcaacgacaacagcaccgcgacgcucugccuggggcaccacgccgucccgaacggcaccaucgugaagaccaucaccaacgaccagaucgaggugacgaacgccaccgagcugguccaguccagcuccaccggggagaucugcgacagcccccaccagauccucgacggcgagaacugcacccugaucgacgcccugcucggggacccccagugcgacggcuuccagaacaagaagugggaccuguucguggagcgcuccaaggccuacagcaacugcuaccccuacgacgugccggacuacgcgucccugcggagccucgucgccuccagcggcacgcuggaguucaacaacgagaacuucaacuggaccggggugacccagaacggcaccuccagcgccugcauccgccgguccaacaacagcuucuucucccgccugaacuggcucacgcaccuccgguucaaguaccccgcccugaacgugaccaugcccaacaacgaggagcuggacaagcuguacaucuggggcguccaccaccccgggaccgacaacgaccagaucuuccuguacgcgcaggccagcgggcgcaucaccguguccacgaagcggagccagcagaccgugaucccgaacaucggcagccgcccccggguccgcaacauccccucccggaucagcaucuacuggaccaucgugaagcccggcgacauccuccugaucaacuccaccgggaaccugaucgccccgcgcggcuacuucaagauccggagcgggaaguccagcaucaugcgcuccgacgcccccaucggcaagugcaacagcgagugcaucacgcccaacggcuccauccccaacgacaagccguuccagaacgugaaccggaucaccuacggggccugcccccgcuacgucaagcagaacacccucaagcuggcgaccggcaugcggaacgugcccgagaagcagacgcgcgggaucuucggcgccaucgccggguucaucgagaacggcugggagggcaugguggacgggugguacggcuuccggcaccagaacagcgaggggaucggccaggccgccgaccugaaguccacccaggcggccaucgaccagaucaacgggaagcucaaccgccugaucggcaagaccaacgagaaguuccaccagaucgagaaggaguucagcgaggucgagggccggauccaggaccuggagaaguacguggaggacaccaagaucgaccucugguccuacaacgccgagcugcugguggcccucgagaaccagcacacgaucgaccugaccgacagcgagaugaacaagcuguucgagaagaccaagaagcagcuccgcgagaacgccgaggacauggggaacggcugcuucaagaucuaccacaagugcgacaacgcgugcaucggguccauccgcaacggcaccuacgaccacgacgucuaccgggacgaggcccugaacaaccgcuuccagaucaaggggguggagcucaagagcggcuacaaggacuggauccuguggaucuccuucgccaucagcugcuuccugcugugcguggcccuccugggcuucgucaugugggccugccagaaggggaacauccggugcaacaucugcaucuga

SEQ ID NO: 71022 - RNA, 1701 nt, Artificial Sequence
  derived and/or modified CDS sequence (opt1) from hemagglutinin__InfluenzaA__AEL11687
augaagaccaucaucgcccugagcuacauccucugccugguguucgcccagaagcugcccggcaacgacaacuccaccgcgacgcucugccuggggcaccacgccgucccgaacggcaccaucgugaagaccaucaccaacgaccagaucgaggugacgaacgccaccgagcugguccagagcuccagcaccgggggcaucugcgacagcccccaccagauccucgacggggagaacugcacccugaucgacgcccugcucggcgacccccagugcgacggcuuccagaacaagaagugggaccuguucguggagcgcagcaaggccuacuccaacugcuaccccuacgacgugccggacuacgcgagccugcggucccucgucgccagcuccgggacgcuggaguucaacaacgagagcuucaacuggaccggcgugacccagaacgggaccuccagcuccugcaagcgccggagcaacaacuccuucuucagccgccugaacuggcucacgcaccugaaguucaaguaccccgcccugaacgugaccaugcccaacaacgagaaguucgacaagcucuacaucuggggcguccaccaccccgugaccgacaacgaccagauccggcuguacgcccaggcguccgggcgcaucaccgugagcacgaagcggagccagcagaccgucaucccgaacaucggcuaccgcccccgggugcgcgacauccccucccggaucagcaucuacuggaccaucgugaagcccggcgacauccugcucaucaacuccaccgggaaccugaucgccccgcgcggcuacuucaagauccggagcgggaaguccagcaucaugcgcuccgacgcccccaucggcaagugcaacagcgagugcaucacgcccaacggcuccauccccaacgacaagccguuccagaacgucaaccggaucaccuacggggccugcccccgcuacgugaagcagaacacccugaagcucgccaccggcaugcggaacgugcccgagaagcagacgcgcgggaucuucggcgcgaucgccggguucaucgagaacggcugggagggcauggucgacgggugguacggcuuccggcaccagaacagcgaggggaucggccaggccgccgaccugaaguccacccaggccgcgaucaaccagaucaacgggaagcugaaccgccucaucggcaagaccaacgagaaguuccaccagaucgagaaggaguucagcgagguggagggccggauccaggaccuggagaaguacguggaggacaccaagaucgaccugugguccuacaacgccgagcuccuggucgcccuggagaaccagcacacgaucgaccucaccgacagcgagaugaacaagcuguucgagcgcaccaagaagcagcugcgcgagaacgccgaggacauggggaacggcugcuucaagaucuaccacaagugcgacaacgccugcaucggguccauccggaacggcaccuacgaccacgacguguaccgcgacgaggcgcucaacaaccgguuccagaucaaggggguggagcugaaguccggcuacaaggacuggauccuguggaucuccuucgccaucagcugcuuccuccugugcgucgugcugcucggcuucaucaugugggccugccagaaggggaacauccgcugcaacaucugcaucuga

SEQ ID NO: 71023 - RNA, 1692 nt, Artificial Sequence
  derived and/or modified CDS sequence (opt1) from hemagglutinin__InfluenzaA__AEL31632
auggagaagaucgugcugcuccuggccaucgucagccuggugaaguccgaccagaucugcaucggcuaccacgccaacaacagcaccgagcaggucgacaccaucauggagaagaacgugacggugacccacgcgcaggacauccucgagaagacccacaacgggaagcugugcaaccuggacggcgugaagccccucauccugcgcgacugcuccgucgccggguggcugcucggcaacccgaugugcgacgaguuccugaacgugcccgaguggagcuacaucguggagaagaucaaccccgccaacgaccugugcuaccccgggaacuucaacgacuacgaggagcucaagcaccuccugucccggaucaaccacuucgagaagauccagaucauccccaagagcuccuggagcgaccacgaggccuccggcgucagcuccgugugccccuaccagggccgcagcuccuucuuccggaacguggucuggcugaccaagaaggacaacgccuaccccacgaucaagcgcagcuacaacaacaccaaccaggaggaccugcuggugcucugggggauccaccaccccaacgacgcggccgagcagacccggcuguaccagaacccgaccacguacaucuccgugggcaccagcacccugaaccagcgccucguccccaagaucgccacccgguccaaggugaacgggcagagcggccgcauggaguucuucuggacgauccugaaguccaacgacgccaucaacuucgagagcaacgggaacuucaucgcgcccgagaacgccuacaagaucgugaagaagggcgacagcaccaucaugaaguccgagcuggaguacggcaacugcaacaccaagugccagacccccaucggggccaucaacagcuccaugccguuccacaacauccacccccucacgaucggcgagugccccaaguacgucaagagcaaccggcuggugcuggccaccgggcuccgcaacuccccgcagggcgagacccggggccuguucggggccaucgcgggcuucaucgagggcggguggcaggggaugguggacggcugguacggcuaccaccacagcaacgagcagggguccggcuacgccgccgacaaggagagcacccagaaggccaucgacggggucacgaacaaggugaacuccaucaucgacaagaugaacacccaguucgaggccgugggccgcgaguucaacaaccuggagcggcgcaucgagaaccucaacaagaagauggaggacggguuccuggacgucuggaccuacaacgcggagcugcucgugcugauggagaacgagcggacccuggacuuccacgacagcaacgucaagaaccucuacgacaaggugcgccugcagcugcgggacaacgccaaggagcucggcaacggcugcuucgaguucuaccaccgcugcgacaacgagugcauggaguccgugcggaacgggacguacgacuacccgcaguacagcgaggaggcccgccugaagcgggaggagaucuccggcgucaagcuggagagcaucgggaccuaccagauccucuccaucuacagcaccguggccuccagccuggcccuggcgaucaugguggccggccucuuccuguggaugugcuccaacgggagccugcagugccgcaucugcaucuga

SEQ ID NO: 71024 - RNA, 1701 nt, Artificial Sequence; identical to SEQ ID NO: 70944
  derived and/or modified CDS sequence (opt1) from hemagglutinin__InfluenzaA__AEL89297

SEQ ID NO: 71025 - RNA, 1701 nt, Artificial Sequence; identical to SEQ ID NO: 70944
  derived and/or modified CDS sequence (opt1) from hemagglutinin__InfluenzaA__AEL89307

SEQ ID NO: 71026 - RNA, 1701 nt, Artificial Sequence; identical to SEQ ID NO: 70944
  derived and/or modified CDS sequence (opt1) from hemagglutinin__InfluenzaA__AEL89317

SEQ ID NO: 71027 - RNA, 1701 nt, Artificial Sequence; identical to SEQ ID NO: 70944
  derived and/or modified CDS sequence (opt1) from hemagglutinin__InfluenzaA__AEL89327

SEQ ID NO: 71028 - RNA, 1701 nt, Artificial Sequence; identical to SEQ ID NO: 70944
  derived and/or modified CDS sequence (opt1) from hemagglutinin__InfluenzaA__AEL89337

SEQ ID NO: 71029 - RNA, 1701 nt, Artificial Sequence; identical to SEQ ID NO: 70944
  derived and/or modified CDS sequence (opt1) from hemagglutinin__InfluenzaA__AEL89347

SEQ ID NO: 71030 - RNA, 1701 nt, Artificial Sequence; identical to SEQ ID NO: 70944
  derived and/or modified CDS sequence (opt1) from hemagglutinin__InfluenzaA__AEL89357

SEQ ID NO: 71031 - RNA, 1701 nt, Artificial Sequence; identical to SEQ ID NO: 70944
  derived and/or modified CDS sequence (opt1) from hemagglutinin__InfluenzaA__AEL89367

SEQ ID NO: 71032 - RNA, 1701 nt, Artificial Sequence; identical to SEQ ID NO: 70944
  derived and/or modified CDS sequence (opt1) from hemagglutinin__InfluenzaA__AEL89391

SEQ ID NO: 71033 - RNA, 1701 nt, Artificial Sequence; identical to SEQ ID NO: 70944
  derived and/or modified CDS sequence (opt1) from hemagglutinin__InfluenzaA__AEL89401

SEQ ID NO: 71034 - RNA, 1701 nt, Artificial Sequence; identical to SEQ ID NO: 70944
  derived and/or modified CDS sequence (opt1) from hemagglutinin__InfluenzaA__AEL89411

SEQ ID NO: 71035 - RNA, 1701 nt, Artificial Sequence; identical to SEQ ID NO: 70944
  derived and/or modified CDS sequence (opt1) from hemagglutinin__InfluenzaA__AEL89421

SEQ ID NO: 71036 - RNA, 1701 nt, Artificial Sequence; identical to SEQ ID NO: 70944
  derived and/or modified CDS sequence (opt1) from hemagglutinin__InfluenzaA__AEL89441

SEQ ID NO: 71037 - RNA, 1701 nt, Artificial Sequence; identical to SEQ ID NO: 70944
  derived and/or modified CDS sequence (opt1) from hemagglutinin__InfluenzaA__AEL89451

SEQ ID NO: 71038 - RNA, 1701 nt, Artificial Sequence; identical to SEQ ID NO: 70944
  derived and/or modified CDS sequence (opt1) from hemagglutinin__InfluenzaA__AEL89461

SEQ ID NO: 71039 - RNA, 1701 nt, Artificial Sequence; identical to SEQ ID NO: 70944
  derived and/or modified CDS sequence (opt1) from hemagglutinin__InfluenzaA__AEL89471

SEQ ID NO: 71040 - RNA, 1701 nt, Artificial Sequence
  derived and/or modified CDS sequence (opt1) from hemagglutinin__InfluenzaA__AEL89481
augaaggugauccuggucgugcuccuguacaccuucgccaccgccaacgcggacacgcugugcaucggcuaccacgccaacaacagcaccgacaccguggacaccguccucgagaagaacgugacggugacccacuccgucaaccugcuggaggacaagcacaacgggaagcucugcaagcugcgcggcguggcgccccugcaccucgggaagugcaacaucgccggcuggauccuggggaacccggagugcgagagccuguccaccgccagcuccuggagcuacaucguggagaccuccagcuccgacaacggcacgugcuaccccggcgacuucaucgacuacgaggagcuccgggagcagcugagcuccgucagcuccuucgagcgcuucgagaucuuccccaagaccagcuccuggcccaaccacgacagcaacaagggggugaccgccgccugcccgcacgccggcgccaaguccuucuacaagaaccugaucuggcucgugaagaaggggaacagcuaccccaagcuguccaagagcuacaucaacgacaagggcaaggagguccuggugcucugggggauccaccaccccagcaccuccgcggaccagcagagccuguaccagaacgccgacgccuacguguucgucggcacgucccgguacagcaagaaguucaagcccgagaucgccauccgcccgaaggugcgggaccaggagggccgcaugaacuacuacuggacccugguggagcccggggacaagaucaccuucgaggccaccggcaaccucgucgugccccgguacgcguucgccauggagcgcaacgccggguccggcaucaucaucagcgacacgcccgugcacgacugcaacacgaccugccagaccccgaagggcgccaucaacaccucccugcccuuccagaacauccaccccaucaccaucgggaagugccccaaguacgucaagagcaccaagcugcggcucgccaccggccugcgcaacgugccguccauccagagccgggggcuguucggcgcgaucgccggguucaucgagggcggcuggacggggaugguggacggcugguacggguaccaccaccagaacgagcagggcuccggguacgccgccgaccucaagagcacccagaacgccaucgacaagaucaccaacaaggucaacuccgugaucgagaagaugaacacccaguucacggcggucggcaaggaguucaaccaccuggagaagcgcaucgagaaccugaacaagaagguggacgacggcuuccucgacaucuggaccuacaacgccgagcugcuggugcuccuggagaacgagcggacccuggacuaccacgacagcaacgucaagaaccucuacgagaaggugcgcucccagcugaagaacaacgccaaggagaucgggaacggcugcuucgaguucuaccacaagugcgacaacacgugcauggagagcgugaagaacgggaccuacgacuaccccaaguacuccgaggaggccaagcugaaccgggaggagaucgacggcgucaagcucgagagcacccgcaucuaccagauccuggccaucuacuccaccguggcgagcagccuggugcucgucgugucccugggggccaucagcuucuggaugugcuccaacggcagccugcagugccggaucugcaucuga

SEQ ID NO: 71041 - RNA, 1701 nt, Artificial Sequence; identical to SEQ ID NO: 69608
  derived and/or modified CDS sequence (opt1) from hemagglutinin__InfluenzaA__AEL89491

SEQ ID NO: 71042 - RNA, 1701 nt, Artificial Sequence
  derived and/or modified CDS sequence (opt1) from hemagglutinin__InfluenzaA__AEL89501
augaaggccauccuggugguccuccuguacaccuucgccaccgcgaacgccgacacgcugugcaucggcuaccacgccaacaacagcaccgacaccguggacaccgugcucgagaagaacgucacggugacccacuccgugaaccugcuggaggacaagcacaacgggaagcucugcaagcugcgcggcgucgcgccccugcaccucgggaagugcaacaucgccggcuggauccuggggaacccggagugcgagagccuguccaccgccagcuccuggagcuacaucguggagaccuccagcuccgacaacggcacgugcuaccccggcgacuucaucgacuacgaggagcuccgggagcagcugagcuccgugagcuccuucgagcgcuucgagaucuuccccaagaccagcuccuggcccgaccacgacagcaacaagggggucaccgccgccugcccgcacgccggcgcgaaguccuucuacaagaaccugaucuggcucgugaagaaggggaacagcuaccccaagcuguccaagagcuacaucaacgacgagggcaaggaggugcugguccucugggggauccaccaccccagcaccuccgccgaccagcagagccuguaccagaacgccgacgccuacguguucgugggcacgucccgguacagcaagaaguucaagcccgagaucgccauccgcccgaagguccgggaccaggagggccgcaugaacuacuacuggacccugguggagcccggggacaagaucaccuucgaggcgaccggcaaccucguggucccccgguacgccuucgccauggagcgcaacgccggguccggcaucaucaucagcgacacgcccgugcacgacugcaacacgaccugccagaccccgaagggcgccaucaacaccucccugcccuuccagaacauccaccccaucaccaucgggaagugccccaaguacgucaagagcaccaagcugcggcucgcgaccggccugcgcaacgugccguccauccagagccgggggcuguucggcgccaucgccggguucaucgagggcggcuggacggggaugguggacggcugguacggguaccaccaccagaacgagcagggcuccggguacgccgccgaccucaagagcacccagaacgcgaucgacaagaucaccaacaaggugaacuccgucaucgagaagaugaacacccaguucacggccgugggcaaggaguucaaccaccuggagaagcgcaucgagaaccugaacaagaaggucgacgacggcuuccucgacaucuggaccuacaacgccgagcugcuggugcuccuggagaacgagcggacccuggacuaccacgacagcaacgugaagaaccucuacgagaagguccgcucccagcugaagaacaacgccaaggagaucgggaacggcugcuucgaguucuaccacaagugcgacaacacgugcauggagagcgugaagaacgggaccuacgacuaccccaaguacuccgaggaggccaagcugaaccgggaggagaucgacggcgugaagcucgagagcacccgcaucuaccagauccuggcgaucuacuccaccgucgccagcagccuggugcucguggucucccugggggccaucagcuucuggaugugcuccaacggcagccugcagugccggaucugcaucuga

SEQ ID NO: 71043 - RNA, 1701 nt, Artificial Sequence; identical to SEQ ID NO: 67857
  derived and/or modified CDS sequence (opt1) from hemagglutinin__InfluenzaA__AEL89511

SEQ ID NO: 71044 - RNA, 1701 nt, Artificial Sequence; identical to SEQ ID NO: 69608
  derived and/or modified CDS sequence (opt1) from hemagglutinin__InfluenzaA__AEL89521

SEQ ID NO: 71045 - RNA, 1701 nt, Artificial Sequence
  derived and/or modified CDS sequence (opt1) from hemagglutinin__InfluenzaA__AEL89531
augaaggccauccuggugguccuccuguacaccuucaccacggccaacgcggacacccugugcaucggcuaccacgccaacaacagcaccgacaccguggacacggugcucgagaagaacgucaccgugacccacuccgugaaccugcuggaggacaagcacaacgggaagcucugccagcugcgcggcgucgcgccccugcaccucgggaagugcaacaucgccggcuggauccuggggaacccggagugcgagagccuguccaccgccagcuccuggagcuacaucguggagacguccagcuccgacaacgggaccugcuaccccggcgacuucaucgacuacgaggagcuccgggagcagcugagcuccgugagcuccuucgagcgcuucgagauguuccccaagaccagcuccuggcccaaccacgacagcaacaagggcgucaccgccgccugcccgcacgccggcgccaaguccuucuacaagaaccugaucuggcucgugaagaaggggaacagcuaccccaagcuguccaagagcuacaucaacgacaagggcaaggaggugcugguccucugggggauccaccaccccagcacguccgcggaccagcagagccuguaccagaacgccgacgccuacguguucgugggcaccucccgguacagcaagaaguucaagcccgagaucgccauccgcccgaagguccgggaccaggagggccgcaugaacuacuacuggacccugguggagcccggggacaagaucaccuucgaggccacgggcaaccucguggucccccgguacgcguucgccauggagcgcaacgccggguccggcaucaucaucagcgacacccccgugcacgacugcaacacgaccugccagaccccgaagggcgccaucaacaccucccugcccuuccagaacauccaccccaucaccaucgggaagugccccaaguacgucaagagcaccaagcugcggcucgccacgggccugcgcaacgugccguccauccagagccgggggcuguucggcgcgaucgccggguucaucgagggcggcuggaccgggaugguggacggcugguacggguaccaccaccagaacgagcagggcuccggguacgccgccgaccucaagagcacccagaacgccaucgacaagaucaccaacaaggugaacuccgucaucgagaagaugaacacgcaguucaccgcggugggcaaggaguucaaccaccuggagaagcgcaucgagaaccugaacaagaaggucgacgacggcuuccucgacaucuggaccuacaacgccgagcugcuggugcuccuggagaacgagcggacccuggacuaccacgacagcaacgugaagaaccucuacgagaagguccgcucccagcugaagaacaacgccaaggagaucgggaacggcugcuucgaguucuaccacaagugcgacaacacgugcauggagagcgugaagaacgggaccuacgacuaccccaaguacuccgaggaggccaagcugaaccgggaggagaucgacggcgugaagcucgagagcacccgcaucuaccagauccuggccaucuacuccaccgucgcgagcagccuggugcucguggucucccugggggccaucagcuucuggaugugcuccaacggcagccugcagugccggaucugcaucuga

SEQ ID NO: 71046 - RNA, 1701 nt, Artificial Sequence; identical to SEQ ID NO: 69608
  derived and/or modified CDS sequence (opt1) from hemagglutinin__InfluenzaA__AEL89541

SEQ ID NO: 71047 - RNA, 1701 nt, Artificial Sequence
  derived and/or modified CDS sequence (opt1) from hemagglutinin__InfluenzaA__AEL89551
augaaggccauccuggugguccuccuguacaccuucgccaccgcgaacgccgacacgcugugcaucggcuaccacgccaacaacagcaccgacaccguggacaccgugcucgagaagaacgucacggugacccacuccgugaaccugcuggaggacaagcacaacgggaagcucugcaagcugcgcggcgucgcgccccugcaccucgggaagugcaacaucgccggcuggauccuggggaacccggagugcgagagccuguccaccgccagcuccuggagcuacaucguggagaccuccagcuccgacaacggcacgugcuaccccggcgacuucaucgacuacgaggagcuccgggagcagcugagcuccgugagcuccuucgagcgcuucgagaucuuccccaagaccagcuccuggcccgaccacgacagcaacaagggggucaccgccgccugcccgcacgccggcgcgaaguccuucuacaagaaccugaucuggcucgugaagaaggggaacagcuaccccaagcuguccaagagcuacaucaacgacaagggcaaggaggugcugguccucugggggauccaccaccccagcaccuccgccgaccagcagagccuguaccagaacgccgacgccuacguguucgugggcacgucccgguacagcaagaaguucaagcccgagaucgccauccgcccgaagguccgggaccaggagggccgcaugaacuacuacuggacccugguggagcccggggacaagaucaccuucgaggcgaccggcaaccucguggucccccgguacgccuucgccauggagcgcaacgccggguccggcaucaucaucagcgacacgcccgcccacgacugcaacacgaccugccagaccccgaagggcgcgaucaacaccucccugcccuuccagaacauccaccccaucaccaucgggaagugccccaaguacgucaagagcaccaagcugcggcucgccaccggccugcgcaacgugccguccauccagagccgggggcuguucggcgccaucgccggguucaucgagggcggcuggacggggaugguggacggcugguacggguaccaccaccagaacgagcagggcuccggguacgccgcggaccucaagagcacccagaacgccaucgacaagaucaccaacaaggugaacuccgugaucgagaagaugaacacccaguucacggccgucggcaaggaguucaaccaccuggagaagcgcaucgagaaccugaacaagaagguggacgacggcuuccucgacaucuggaccuacaacgccgagcugcugguccuccuggagaacgagcggacccuggacuaccacgacagcaacgugaagaaccucuacgagaaggugcgcucccagcugaagaacaacgccaaggagaucgggaacggcugcuucgaguucuaccacaagugcgacaacacgugcauggagagcgucaagaacgggaccuacgacuaccccaaguacuccgaggaggcgaagcugaaccgggaggagaucgacggcgugaagcucgagagcacccgcaucuaccagauccuggccaucuacuccaccguggccagcagccugguccucguggugucccugggggccaucagcuucuggaugugcuccaacggcagccugcagugccggaucugcaucuga

SEQ ID NO: 71048 - RNA, 1701 nt, Artificial Sequence
  derived and/or modified CDS sequence (opt1) from hemagglutinin__InfluenzaA__AEL89561
augaaggccauccuggugguccuccuguacaccuucgccaccgcgaacgccgacacgcugugcaucggcuaccacgccaacaacagcaccgacaccguggacaccgugcucgagaagaacgucacggugacccacuccgugaaccugcuggaggacaagcacaacgggaagcucugcaagcugcgcggcgucgcgccccugcaccucgggaagugcaacaucgccggcuggauccuggggaacccggagugcgagagccuguccaccgccagcuccuggagcuacaucguggagaccuccagcuccggcaacggcacgugcuaccccggggacuucaucgacuacgaggagcuccgggagcagcugagcuccgugagcuccuucgagcgcuucgagaucuuccccaagaccagcuccuggcccgaccacgacagcaacaagggcgucaccgccgccugcccgcacgccggggcgaaguccuucuacaagaaccugaucuggcucgugaagaagggcaacagcuaccccaagcuguccaagagcuacaucaacgacaaggggaaggaggugcugguccucuggggcauccaccaccccagcaccuccgccgaccagcagagccuguaccagaacgccgacgccuacguguucgugggcacgucccgguacagcaagaaguucaagcccgagaucgccauccgcccgaagguccgggaccaggaggggcgcaugaacuacuacuggacccugguggagcccggcgacaagaucaccuucgaggcgaccgggaaccucguggucccccgguacgccuucgccauggagcgcaacgccggcuccggcaucaucaucagcgacacgcccgugcacgacugcaacacgaccugccagaccccgaagggggccaucaacaccucccugcccuuccagaacauccaccccaucaccaucggcaagugccccaaguacgucaagagcaccaagcugcggcucgcgaccgggcugcgcaacgugccguccauccagagccggggccuguucggggccaucgccggcuucaucgagggcggguggacgggcaugguggacgggugguacggcuaccaccaccagaacgagcagggguccggcuacgccgccgaccucaagagcacccagaacgcgaucgacaagaucaccaacaaggugaacuccgucaucgagaagaugaacacccaguucacggccgugggcaaggaguucaaccaccuggagaagcgcaucgagaaccugaacaagaaggucgacgacggguuccucgacaucuggaccuacaacgccgagcugcuggugcuccuggagaacgagcggacccuggacuaccacgacagcaacgugaagaaccucuacgagaagguccgcucccagcugaagaacaacgccaaggagaucggcaacgggugcuucgaguucuaccacaagugcgacaacacgugcauggagagcgugaagaacggcaccuacgacuaccccaaguacuccgaggaggccaagcugaaccgggaggagaucgacggggugaagcucgagagcaccgagaucuaccagauccuggcgaucuacuccaccgucgccagcagccuggugcucguggucucccugggcgccaucagcuucuggaugugcuccaacggcagccugcagugccgcaucugcaucuga

SEQ ID NO: 71049 - RNA, 1701 nt, Artificial Sequence; identical to SEQ ID NO: 69608
  derived and/or modified CDS sequence (opt1) from hemagglutinin__InfluenzaA__AEL89571

SEQ ID NO: 71050 - RNA, 1701 nt, Artificial Sequence
  derived and/or modified CDS sequence (opt1) from hemagglutinin__InfluenzaA__AEL89581
augaaggccauccuggugguccuccuguacaccuucgccaccgcgaacgccgacacgcugugcaucggcuaccacgccaacaacagcaccgacaccguggacaccgugcucgagaagaacgucacggugacccacuccgugaaccugcuggaggacaagcacaacgggaagcucugcaagcugcgcggcgucgcgccccugcaccucgggaagugcaacaucgccggcuggauccuggggaacccggagugcgagagccuguccaccgccagcuccuggagcuacaucguggagaccuccagcuccgacaacggcacgugcuaccccggcgacuucaucgacuacgaggagcuccgggagcagcugagcuccgugagcuccuucgagcgcuucgagauguuccccaagaccagcuccuggcccgaccacgacagcaacaagggggucaccgccgccugcccgcacgccggcgcgaaguccuucuacaagaaccugaucuggcucgugaagaaggggaacagcuaccccaagcuguccaagagcuacaucaacgacaagggcaaggaggugcugguccucugggggauccaccaccccagcaccuccgccgaccagcagagccuguaccagaacgccgacgccuacguguucgugggcacgucccgguacagcaagaaguucaagcccgagaucgccauccgcccgaagguccgggaccaggagggccgcaugaacuacuacuggacccugguggagcccggggacaagaucaccuucgaggcgaccggcaaccucguggucccccgguacgccuucgccauggagcgcaacgccggguccggcaucaucaucagcgacacgcccgugcacgacugcaacacgaccugccagaccccgaagggcgccaucaacaccucccugcccuuccagaacauccaccccaucaccaucgggaagugccccaaguacgucaagagcaccaagcugcggcucgcgaccggccugcgcaacgugccguccauccagagccgggggcuguucggcgccaucgccggguucaucgagggcggcuggacggggaugguggacggcugguacggguaccaccaccagaacgagcagggcuccggguacgccgccgaccucaagagcacccagaacgcgaucgacaagaucaccaacaaggugaacuccgucaucgagaagaugaacacccaguucacggccgugggcaaggaguucaaccaccuggagaagcgcaucgagaaccugaacaagaaggucgacgacggcuuccucgacaucuggaccuacaacgccgagcugcuggugcuccuggagaacgagcggacccuggacuaccacgacagcaacgugaagaaccucuacgagaagguccgcucccagcugaagaacaacgccaaggagaucgggaacggcugcuucgaguucuaccacaagugcgacaacacgugcauggagagcgugaagaacgggaccuacgacuaccccaaguacuccgaggaggccaagcugaaccgggaggagaucgacggcgugaagcucgagagcacccgcaucuaccagauccuggcgaucuacuccaccgucgccagcagccuggugcucguggucucccugggggccaucagcuucuggaugugcuccaacggcagccugcagugccggaucugcaucuga

SEQ ID NO: 71051 - RNA, 1701 nt, Artificial Sequence; identical to SEQ ID NO: 70478
  derived and/or modified CDS sequence (opt1) from hemagglutinin__InfluenzaA__AEL89591

SEQ ID NO: 71052 - RNA, 1701 nt, Artificial Sequence
  derived and/or modified CDS sequence (opt1) from hemagglutinin__InfluenzaA__AEL89601
augaaggccauccuggugguccuccuguacaccuucgccaccgcgaacgccgacacgcugugcaucggcuaccacgccaacaacagcaccgacaccguggacaccgugcucgagaagaacgucacggugacccacuccgugaaccugcuggaggacaagcacaacgggaagcucugcaagcugcgcggcgucgcgccccugcaccucgggaagugcaacaucgccggcuggauccuggggaacccggagugcgagagccuguccaccgccagcuccuggagcuacaucguggagaccuccagcuccgacaacggcacgugcuaccccggcgacuucaucgacuacgaggagcuccgggagcagcugagcuccgugagcuccuucgagcgcuucgagaucuuccccaagaccagcuccuggcccaaccacgacagcaacaagggggucaccaccgccugcccgcacgccggcgccaaguccuucuacaagaaccugaucuggcucgugaagaaggggaacagcuaccccaagcuguccaagagcuacaucaacgacaagggcaaggaggugcugguccucugggggauccaccacccgcccacgagcgcggaccagcagucccuguaccagaacgccgacgccuacguguucgugggcaccagccgguacuccaagaaguucaagcccgagaucgccauccgccccaagguccgggaccaggagggccgcaugaacuacuacuggacccugguggagcccggggacaagaucaccuucgaggccacgggcaaccucguggucccccgguacgcguucgccauggagcgcaacgccgggagcggcaucaucaucuccgacaccccggugcacgacugcaacacgaccugccagacccccaagggcgccaucaacaccagccugcccuuccagaacauccaccccaucaccaucgggaagugcccgaaguacgugaaguccaccaagcugcggcucgccacgggccugcgcaacguccccagcauccagucccgggggcuguucggcgcgaucgccggguucaucgagggcggcuggaccgggaugguggacggcugguacggguaccaccaccagaacgagcagggcagcggguacgccgccgaccucaaguccacccagaacgccaucgacgagaucaccaacaaggugaacagcgucaucgagaagaugaacacgcaguucaccgcggugggcaaggaguucaaccaccuggagaagcgcaucgagaaccugaacaagaaggucgacgacggcuuccucgacaucuggaccuacaacgccgagcugcuggugcuccuggagaacgagcggacccuggacuaccacgacuccaaggugaagaaccucuacgagaagguccgcagccagcugaagaacaacgccaaggagaucgggaacggcugcuucgaguucuaccacaagugcgacaacacgugcauggaguccgugaagaacgggaccuacgacuaccccaaguacagcgaggaggccaagcugaaccgggaggagaucgacggcgugaagcucgaguccacccgcaucuaccagauccuggccaucuacagcaccgucgcguccagccuggugcucguggucagccugggggccaucuccuucuggaugugcagcaacggcucccugcagugccggaucugcaucuga

SEQ ID NO: 71053 - RNA, 1701 nt, Artificial Sequence; identical to SEQ ID NO: 70478
  derived and/or modified CDS sequence (opt1) from hemagglutinin__InfluenzaA__AEL89611

SEQ ID NO: 71054 - RNA, 1701 nt, Artificial Sequence; identical to SEQ ID NO: 70920
  derived and/or modified CDS sequence (opt1) from hemagglutinin__InfluenzaA__AEL89621

SEQ ID NO: 71055 - RNA, 1701 nt, Artificial Sequence; identical to SEQ ID NO: 69608
  derived and/or modified CDS sequence (opt1) from hemagglutinin__InfluenzaA__AEL89631

SEQ ID NO: 71056 - RNA, 1701 nt, Artificial Sequence; identical to SEQ ID NO: 70944
  derived and/or modified CDS sequence (opt1) from hemagglutinin__InfluenzaA__AEL89641

SEQ ID NO: 71057 - RNA, 1701 nt, Artificial Sequence
  derived and/or modified CDS sequence (opt1) from hemagglutinin__InfluenzaA__AEL89651
augaaggccauccuggugguccuccuguacaccuucgccaccgcgaacgccgacacgcugugcaucggcuaccacgccaacaacagcaccgacaccguggacaccgugcucgagaagaacgucacggugacccacuccgugaaccugcuggaggacaagcacaacgggaagcucugcaagcugcgcggcgucgcgccccugcaccucgggaagugcaacaucgccggcuggauccuggggaacccggagugcgagagccuguccaccgccagcuccuggagcuacaucguggagaccuccagcuccgacaacggcacgugcuaccccggcguguucaucgacuacgaggagcuccgggagcagcugagcuccgucagcuccuucgagcgcuucgagaucuuccccaagaccagcuccuggcccaaccacgacagcaacaagggggugaccgccgccugcccgcacgccggcgcgaaguccuucuacaagaaccugaucuggcucgugaagaaggggaacagcuaccccaagcuguccaagagcuacaucaacgacaagggcaaggagguccuggugcucugggggauccaccaccccagcaccacggccgaccagcagucccuguaccagaacgccgacgccuacguguucgucggcaccagccgguacuccaagaaguucaagcccgagaucgccauccgcccgaaggugcgggaccaggagggccgcaugaacuacuacuggacccugguggagcccggggacaagaucaccuucgaggcgacgggcaaccucgucgugccccgguacgccuucgccauggagcgcaacgccgggagcggcaucaucaucuccgacacccccgugcacgacugcaacacgaccugccagaccccgaagggcgccaucaacaccagccugcccuuccagaacauccaccccaucaccaucgggaagugccccaaguucgucaaguccaccaagcugcggcucgcgacgggccugcgcaacgugccgagcauccagucccgggggcuguucggcgccaucgccggguucaucgagggcggcuggaccgggaugguggacggcugguacggguaccaccaccagaacgagcagggcagcggguacgccgccgaccucaaguccacccagaacgcgaucgacaagaucaccaacaaggucaacagcgugaucgagaagaugaacacgcaguucaccgccgucggcaaggaguucaaccaccuggagaagcgcaucgagaaccugaacaagaagguggacgacggcuuccucgacaucuggaccuacaacgccgagcugcuggugcuccuggagaacgagcggacccuggacuaccacgacuccaacgucaagaaccucuacgagaaggugcgcaaccagcugaagaacaacgccaaggagaucgggaacggcugcuucgaguucuaccacaagugcgacaacacgugcauggagagcgugaagaacgggaccuacgacuaccccaaguacuccgaggaggccaagcugaaccgggaggagaucgacggcgucaagcucgagagcacccgcaucuaccagauccuggcgaucuacuccaccguggccagcucccuggugcucgucgugagccugggggccaucagcuucuggaugugcuccaacggcagccugcagugccggaucugcaucuga

SEQ ID NO: 71058 - RNA, 1701 nt, Artificial Sequence; identical to SEQ ID NO: 70459
  derived and/or modified CDS sequence (opt1) from hemagglutinin__InfluenzaA__AEL89661

SEQ ID NO: 71059 - RNA, 1701 nt, Artificial Sequence
  derived and/or modified CDS sequence (opt1) from hemagglutinin__InfluenzaA__AEL89671
augaaggccauccuggugguccuccuguacaccuucgccaccgcgaacgccgacacgcugugcaucggcuaccacgccaacaacagcaccgacaccguggacaccgugcucgagaagaacgucacggugacccacuccgugaaccugcuggaggacaagcacaacgggaagcucugcaagcugcgcggcgucgcgccccugcaccucgggaagugcaacaucgccggcuggauccuggggaacccggagugcgagagccuguccaccgccagcuccuggagcuacaucguggagaccuccagcuccgacaacggcacgugcuaccccggcgacuucaucgacuacgaggagcuccgggagcagcugagcuccgugagcuccuucgagcgcuucgagaucuuccccaagaccagcuccuggcccaaccacgacagcaacaagggggucaccgccgccugcccgcacgccggcgcgaaguccuucuacaagaaccugaucuggcucgugaagaaggggaacagcuaccccaagcuguccaagagcuacaucaacgacaagggcaaggaggugcugguccucugggggauccaccaccccagcaccacggccgaccagcagucccuguaccagagcgccgacaccuacguguucgugggcaccucccgguacagcaagaaguucaagcccgagaucgccauccgcccgaagguccgggaccaggagggccgcaugaacuacuacuggacccugguggagcccggggacaagaucacguucgaggccaccggcaaccucguggucccccgguacgcguucgccauggagcgcaacgccggguccggcaucaucaucagcgacacccccgugcacgacugcaacaccacgugccagaccccgaagggcgccaucaacaccucccugcccuuccagaacauccaccccaucaccaucgggaagugccccaaguacgucaagagcacgaagcugcggcucgccaccggccugcgcaacgugccguccauccagagccgggggcuguucggcgcgaucgccggguucaucgagggcggcuggaccgggaugguggacggcugguacggguaccaccaccagaacgagcagggcuccggguacgccgccgaccucaagagcacccagaacgccaucgacaagaucacgaacaaggugaacuccgucaucgagaagaugaacacccaguucaccgcggugggcaaggaguucaaccaccuggagaagcgcaucgagaaccugaacaagaaggucgacgacggcuuccucgacaucuggaccuacaacgccgagcugcuggugcuccuggagaacgagcggacgcuggacuaccacgacagcaacgugaagaaccucuacgagaagguccgcaaccagcugaagaacaacgccaaggagaucgggaacggcugcuucgaguucuaccacaagugcgacaacacgugcauggaguccgugaagaacgggaccuacgacuaccccaaguacagcgaggaggccaagcugaaccgggaggagaucgacggcgugaagcucgaguccacccgcaucuaccagauccuggccaucuacagcaccgucgcguccagccuggugcucguggucagccugggggccaucuccuucuggaugugcagcaacggcucccugcagugccggaucugcaucuga

SEQ ID NO: 71060 - RNA, 1701 nt, Artificial Sequence; identical to SEQ ID NO: 70459
  derived and/or modified CDS sequence (opt1) from hemagglutinin__InfluenzaA__AEL89691

SEQ ID NO: 71061 - RNA, 1701 nt, Artificial Sequence
  derived and/or modified CDS sequence (opt1) from hemagglutinin__InfluenzaA__AEL89701
augaaggccauccuggugguccuccuguacaccuucgccaccgcgaacgccgacacgcugugcaucggcuaccacgccaacaacagcaccgacaccguggacaccgugcucgagaagaacgucacggugacccacuccgugaaccugcuggaggacaagcacaacgggaagcucugcaagcugcgcggcgucgcgccccugcaccucgggaagugcaacaucgccggcuggauccuggggaacccggagugcgagagccuguccaccgccagcuccuggagcuacaucguggagaccuccagcuccgacaacggcacgugcuaccccggcgacuucaucgacuacgaggagcuccgggagcagcugagcuccgugagcuccuucgagcgcuucgagaucuuccccaagaccagcuccuggcccaaccacgacagcaacaagggggucaccaccgccugcccgcacgccggcgccaaguccuucuacaagaaccugaucuggcucgugaagaaggggaacagcuaccccaagcuguccaagagcuacaucaacgacaagggcaaggaggugcugguccucugggggauccaccacccgcccacgagcgcggaccagcagaaccuguaccagaacgccgacgccuacguguucgugggcaccucccgguacagcaagaaguucaagcccgagaucgccauccgccccaagguccgggaccaggagggccgcaugaacuacuacuggacccugguggagcccggggacaagaucaccuucgaggccacgggcaaccucguggucccccgguacgcguucgccauggagcgcaacgccggguccggcaucaucaucagcgacaccccggugcacgacugcaacacgaccugccagacccccaagggcgccaucaacaccucccugcccuuccagaacauccaccccaucaccaucgggaagugcccgaaguacgucaagagcaccaagcugcggcucgccacgggccugcgcaacgugcccuccauccagagccgggggcuguucggcgcgaucgccggguucaucgagggcggcuggaccgggaugguggacggcugguacggguaccaccaccagaacgagcagggcuccggguacgccgccgaccucaagagcacccagaacgccaucgacggcaucaccaacaaggugaacuccgucaucgagaagaugaacacgcaguucaccgcggugggcaaggaguucaaccaccuggagaagcgcaucgagaaccugaacaagaaggucgacgacggguuccucgacaucuggaccuacaacgccgagcugcuggugcuccuggagaacgagcggacccuggacuaccacgacagcaacgugaagaaccucuacgagaagguccgcucccagcugaagaacaacgccaaggagaucggcaacgggugcuucgaguucuaccacaagugcgacaacacgugcauggagagcgugaagaacggcaccuacgacuaccccaaguacuccgaggaggccaagcugaaccgggaggagaucgacggggugaagcucgagagcaccaugaucuaccagauccuggccaucuacuccaccgucgcgagcucccuggugcucguggucagccugggcgccaucagcuucuggaugugcuccaacggcagccugcagugccgcaucugcaucuga

SEQ ID NO: 71062 - RNA, 1701 nt, Artificial Sequence; identical to SEQ ID NO: 71061
  derived and/or modified CDS sequence (opt1) from hemagglutinin__InfluenzaA__AEL89711

SEQ ID NO: 71063 - RNA, 1701 nt, Artificial Sequence; identical to SEQ ID NO: 70459
  derived and/or modified CDS sequence (opt1) from hemagglutinin__InfluenzaA__AEL89721

SEQ ID NO: 71064 - RNA, 1701 nt, Artificial Sequence
  derived and/or modified CDS sequence (opt1) from hemagglutinin__InfluenzaA__AEL89741
augaaggccauccuggugguccuccuguacaccuucgccaccacgaacgcggacacccugugcaucggcuaccacgccaacaacagcaccgacaccguggacacggugcucgagaagaacgucaccgugacccacuccgugaaccugcuggaggacaagcacaacgggaagcucugcaagcugcgcggcgucgcgccccugcaccucgggaagugcaacaucgccggcuggauccuggggaacccggagugcgagagccuguccaccgccagcuccuggagcuacaucguggagacguccagcuccgacaacgggaccugcuaccccggcgacuucaucgacuacgaggagcuccgggagcagcugagcuccgugagcuccuucgagcgcuucgagaucuuccccaagaccagcuccuggcccaaccacgacagcaacaagggcgucaccgccgccugcccgcacgccggcgccaaguccuucuacaagaaccugaucuggcucgugaagaaggggaacagcuaccccaagcuguccaagagcuacaucaacgacaagggcaaggaggugcugguccucugggggauccaccaccccagcacgaccgcggaccagcagucccuguaccagaacgccgacaccuacguguucgugggcaccagccgguacuccaagaaguucaagcccgagaucgccauccgcccgaagguccgggaccaggagggccgcaugaacuacuacuggacgcugguggagcccggggacaagaucaccuucgaggccaccggcaaccucguggucccccgguacgccuucgcgauggagcgcaacgccgggagcggcaucaucaucuccgacacccccgugcacgacugcaacacgaccugccagaccccgaagggcgccaucaacaccagccugcccuuccagaacauccaccccaucacgaucgggaagugccccaaguacgugaaguccaccaagcugcggcucgccaccggccugcgcaacgucccgagcauccagucccgggggcuguucggcgccaucgcgggguucaucgagggcggcuggaccgggaugguggacggcugguacggguaccaccaccagaacgagcagggcagcggguacgccgccgaccucaaguccacgcagaacgccaucgacaagaucaccaacaaggugaacagcgucaucgagaagaugaacacccaguucaccgccgugggcaaggaguucaaccaccuggagaagcgcaucgagaaccugaacaagaaggucgacgacggcuuccucgacaucuggacguacaacgcggagcugcuggugcuccuggagaacgagcggacccuggacuaccacgacuccaacgugaagaaccucuacgagaagguccgcaaccagcugaagaacaacgccaaggagaucgggaacggcugcuucgaguucuaccacaagugcgacaacacgugcauggagagcgugaagaacgggaccuacgacuaccccaaguacuccgaggaggccaagcugaaccgggaggagaucgacggcgugaagcucgagagcacccgcaucuaccagauccuggccaucuacuccaccgucgccagcucccuggugcucguggucagccugggggcgaucagcuucuggaugugcuccaacggcagccugcagugccggaucugcaucuga

SEQ ID NO: 71065 - RNA, 1701 nt, Artificial Sequence; identical to SEQ ID NO: 69608
  derived and/or modified CDS sequence (opt1) from hemagglutinin__InfluenzaA__AEL89751

SEQ ID NO: 71066 - RNA, 1701 nt, Artificial Sequence
  derived and/or modified CDS sequence (opt1) from hemagglutinin__InfluenzaA__AEL89761
augaaggccauccuggugguccuccuguacaccuucgccaccgcgaacgccgacacgcugugcaucggcuaccacgccaacaacagcaccgacaccguggacaccgugcucgagaagaacgucacggugacccacuccgugaaccugcuggaggacaagcacaacgggaagcucugcaagcugcgcggcgucgcgccccugcaccucgggaagugcaacaucgccggcuggauccuggggaacccggagugcgagagccuguccaccgccagcuccuggagcuacaucguggagaccuccagcuccgacaacggcacgugcuaccccggcgacuucaucgacuacgaggagcuccgggagcagcugagcuccgugagcuccuucgagcgcuucgagaucuuccccaagaccagcuccuggcccaaccacgacagcaacaagggggucaccaccgccugcccgcacgccggcgccaaguccuucuacaagaaccugaucuggcucgugaagaaggggaacagcuaccccaagcuguccaagagcuacaucaacgacaagggcaaggaggugcugguccucugggggauccaccacccgcccacgagcgcggaccagcagucccuguaccagaacgccgacgccuacguguucgugggcaccagccgguacuccaagaaguucaagcccgagaucgccauccgccccaagguccgggaccaggagggccgcaugaacuacuacuggacccugguggagcccggggacaagaucaccuucgaggccacgggcaaccucguggucccccgguacgcguucgccauggagcgcaacgccgggagcggcaucaucaucuccgacaccccggugcacgacugcaacacgaccugccagacccccaagggcgccaucaacaccagccugcccuuccagaacauccaccccaucaccaucgggaagugcccgaaguacgugaaguccaccaagcugcggcucgccacgggccugcgcaacguccccagcauccagucccgggggcuguucggcgcgaucgccggguucaucgagggcggcuggaccgggaugguggacggcugguacggguaccaccaccagaacgagcagggcagcggguacgccgccgaccucaaguccacccagaacgccaucgacggcaucaccaacaaggugaacagcgucaucgagaagaugaacacgcaguucaccgcggugggcaaggaguucaaccaccuggagaagcgcaucgagaaccugaacaagaaggucgacgacggguuccucgacaucuggaccuacaacgccgagcugcuggugcuccuggagaacgagcggacccuggacuaccacgacuccaacgugaagaaccucuacgagaagguccgcagccagcugaagaacaacgccaaggagaucggcaacgggugcuucgaguucuaccacaagugcgacaacacgugcauggaguccgugaagaacggcaccuacgacuaccccaaguacagcgaggaggccaagcugaaccgggaggagaucgacggggugaagcucgaguccaccaugaucuaccagauccuggccaucuacagcaccgucgcguccagccuggugcucguggucagccugggcgccaucuccuucuggaugugcagcaacggcucccugcagugccgcaucugcaucuga

SEQ ID NO: 71067 - RNA, 1701 nt, Artificial Sequence; identical to SEQ ID NO: 70944
  derived and/or modified CDS sequence (opt1) from hemagglutinin__InfluenzaA__AEL89771

SEQ ID NO: 71068 - RNA, 1701 nt, Artificial Sequence; identical to SEQ ID NO: 71066
  derived and/or modified CDS sequence (opt1) from hemagglutinin__InfluenzaA__AEL89781

SEQ ID NO: 71069 - RNA, 1701 nt, Artificial Sequence; identical to SEQ ID NO: 70459
  derived and/or modified CDS sequence (opt1) from hemagglutinin__InfluenzaA__AEL89791

SEQ ID NO: 71070 - RNA, 1701 nt, Artificial Sequence
  derived and/or modified CDS sequence (opt1) from hemagglutinin__InfluenzaA__AEL89801
augaaggccauccuggugguccuccuguacaccuucgccaccgcgaacgccgacacgcugugcaucggcuaccacgccaacaacagcaccgacaccguggacaccgugcucgagaagaacgucacggugacccacuccgugaaccugcuggaggacaagcacaacgggaagcucugcaagcugcgcggcgucgcgccccugcaccucgggaagugcaacaucgccggcuggauccuggggaacccggagugcgagagccuguccaccgccagcuccuggagcuacaucguggagaccuccagcuccgacaacggcacgugcuaccccggcguguucaucgacuacgaggagcuccgggagcagcugagcuccgucagcuccuucgagcgcuucgagaucuuccccaagaccagcuccuggcccaaccacgacagcaacaagggggugaccgccgccugcccgcacgccggcgcgaaguccuucuacaagaaccugaucuggcucgugaagaaggggaacagcuaccccaagcuguccaagagcuacaucaacgacaagggcaaggagguccuggugcucugggggauccaccaccccagcaccacggccgaccagcagucccuguaccagaacgccgacgccuacguguucgucggcaccagccgguacuccaagaaguucaagcccgagaucgccgugcgcccgaaggugcgggaccaggagggccgcaugaacuacuacuggacccuggucgagcccggggacaagaucaccuucgaggcgacgggcaaccucguggugccccgguacgccuucgccauggagcgcaacgccgggagcggcaucaucaucuccgacacccccguccacgacugcaacacgaccugccagaccccgaagggcgccaucaacaccagccugcccuuccagaacauccaccccaucaccaucgggaagugccccaaguacgugaaguccaccaagcugcggcucgcgacgggccugcgcaacgugccgagcauccagucccgggggcuguucggcgccaucgccggguucaucgagggcggcuggaccgggauggucgacggcugguacggguaccaccaccagaacgagcagggcagcggguacgccgccgaccucaaguccacccagaacgcgaucgacaagaucaccaacaaggugaacagcgucaucgagaagaugaacacgcaguucaccgccgugggcaaggaguucaaccaccuggagaagcgcaucgagaaccugaacaagaagguggacgacggcuuccucgacaucuggaccuacaacgccgagcugcugguccuccuggagaacgagcggacccuggacuaccacgacuccaacgugaagaaccucuacgagaaggugcgcaaccagcugaagaacaacgccaaggagaucgggaacggcugcuucgaguucuaccacaagugcgacaacacgugcauggagagcgucaagaacgggaccuacgacuaccccaaguacuccgaggaggccaagcugaaccgggaggagaucgacggcgugaagcucgagagcacccgcaucuaccagauccuggcgaucuacuccaccguggccagcucccugauccucgucgugagccugggggccaucagcuucuggaugugcuccaacggcagccugcagugccggaucugcaucuga

SEQ ID NO: 71071 - RNA, 1701 nt, Artificial Sequence
  derived and/or modified CDS sequence (opt1) from hemagglutinin__InfluenzaA__AEL89812
augaaggccauccuggugguccuccuguacaccuucgccaccgcgaacgccgacacgcugugcaucggcuaccacgccaacaacagcaccgacaccguggacaccgugcucgagaagaacgucacggugacccacuccgugaaccugcuggaggacaagcacaacgggaagcucugcaagcugcgcggcgucgcgccccugcaccucgggaagugcaacaucgccggcuggauccuggggaacccggagugcgagagccuguccaccgccagcuccuggagcuacaucguggagaccuccagcuccgacaacggcacgugcuaccccggcgacuucaucgacuacgaggagcuccgggagcagcugagcuccgugagcuccuucgagcgcuucgagaucuuccccaagaccagcuccuggcccaaccacgacagcaacaagggggucaccaccgccugcccgcacgccggcgccaaguccuucuacaagaaccugaucuggcucgugaagaaggggaacagcuaccccaagcuguccaagagcuacaucaacgacaagggcaaggaggugcugguccucugggggauccaccacccgcccacgagcgcggaccagcagucccuguaccagaacgccgacgccuacguguucgugggcaccagccgguacuccaagaaguucaagcccgagaucgccauccgccccaagguccgggaccaggagggccgcaugaacuacuacuggacccugguggagcccggggacaagaucaccuucgaggccacgggcaaccucguggucccccgguacgcguucgccauggagcgcaacgccgggagcggcaucaucaucuccgacaccccggugcacgacugcaacgcgaccugccagacccccaagggcgugaucaacacgagccugcccuuccagaacauccaccccaucaccaucgggaagugcccgaaguacgucaaguccaccaagcugcggcucgccaccggccugcgcaacgugcccagcauccagucccgggggcuguucggcgccaucgccggguucaucgagggcggcuggacggggaugguggacggcugguacggguaccaccaccagaacgagcagggcagcggguacgccgccgaccucaaguccacccagaacgccaucgacggcaucaccaacaaggucaacagcgugaucgagaagaugaacacccaguucacggcggucggcaaggaguucaaccaccuggagaagcgcaucgagaaccugaacaagaagguggacgacggguuccucgacaucuggaccuacaacgccgagcugcuggugcuccuggagaacgagcggacccuggacuaccacgacuccaacgucaagaaccucuacgagaaggugcgcagccagcugaagaacaacgccaaggagaucggcaacgggugcuucgaguucuaccacaagugcgacaacacgugcauggaguccgugaagaacggcaccuacgacuaccccaaguacagcgaggaggccaagcugaaccgggaggagaucgacggggucaagcucgaguccaccaugaucuaccagauccuggccaucuacagcaccguggcguccagccuggugcucgucgugagccugggcgccaucuccuucuggaugugcagcaacggcucccugcagugccgcaucugcaucuga

SEQ ID NO: 71072 - RNA, 1701 nt, Artificial Sequence; identical to SEQ ID NO: 70459
  derived and/or modified CDS sequence (opt1) from hemagglutinin__InfluenzaA__AEL89832

SEQ ID NO: 71073 - RNA, 1701 nt, Artificial Sequence
  derived and/or modified CDS sequence (opt1) from hemagglutinin__InfluenzaA__AEL89842
augaaggccauccuggugguccuccuguacacccuggccaccgcgaacgccgacacgcucugcaucggcuaccacgccaacaacagcaccgacaccguggacaccgugcuggagaagaacgucacggugacccacuccgugaaccugcucgaggacaagcacgacgggaagcugugcaagcugcgcggcgucgcgccccuccaccuggggaagugcaacaucgccggcuggauccuggggaacccggagugcgagagccucuccaccgccagcuccuggagcuacaucguggagaccuccagcuccgacaacggcacgugcuaccccggcgacuucaucgacuacgaggagcugcgggagcagcugagcuccgugagcuccuucgagcgcuucgagaucuuccccaagaccagcuccuggcccaaccacgacagcaacaagggggucaccgccgccugcccgcacgccggcgcgaaguccuucuacaagaaccucaucuggcuggugaagaaggggaacagcuaccccaagcuguccaagagcuacaucaacgacaagggcaaggaggugcucguccugugggggauccaccaccccagcaccuccgccgaccagcagagccuguaccagaacgccgacgccuacguguucgugggcacgucccgguacagcaagaaguucaagcccgagaucgccauccgcccgaagguccgggaccaggagggccgcaugaacuacuacuggacccucguggagcccggggacaagaucaccuucgaggcgaccggcaaccugguggucccccgguacgccuucgccauggagcgcaacgccggguccggcaucaucaucagcgacacgcccgugcacgacugcaacgcgaccugccagaccccgaagggcgccaucaacaccucccugcccuuccagaacgugcaccccaucacgaucgggaagugccccaaguacgucaagagcaccaagcuccggcuggccaccggccugcgcaacgugccguccauccagagccgggggcuguucggcgccaucgccggguucaucgagggcggcuggaccgggaugguggacggcugguacggguaccaccaccagaacgagcagggcuccggguacgccgcggaccucaagagcacgcagaacgccaucgacaagaucaccaacaaggucaacuccgugaucgagaagaugaacacccaguucaccgccgucggcaaggaguucaaccaccuggagaagcgcaucgagaaccucaacaagaagguggacgacggcuuccuggacaucuggacguacaacgccgagcugcucgugcugcuggagaacgagcggacccucgacuaccacgacagcaacgucaagaaccuguacgagaaggugcgcucccagcugaagaacaacgccaaggagaucgggaacggcugcuucgaguucuaccacaagugcgacaacacgugcauggagagcgugaagaacgggaccuacgacuaccccaaguacuccgaggaggcgaagcucaaccgggaggagaucgacggcgucaagcuggagagcacccgcaucuaccagauccuggccaucuacuccaccguggccagcagccucgugcuggucgugucccugggggccaucagcuucuggaugugcuccaacggcagccuccagugccggaucugcaucuga

SEQ ID NO: 71074 - RNA, 1701 nt, Artificial Sequence
  derived and/or modified CDS sequence (opt1) from hemagglutinin__InfluenzaA__AEL89852
augaaggccauccuggugguccuccuguacaccuucgccaccgcgaacgccgacacgcugugcaucggcuaccacgccaacaacagcaccgacaccguggacaccgugcucgagaagaacgucacggugacccacuccgugaaccugcuggaggacaagcacaacgggaagcucugcaagcugcgcggcgucgcgccccugcaccucgggaagugcaacaucgccggcuggauccuggggaacccggagugcgagagccuguccaccgccagcuccuggagcuacaucguggagaccuccagcuccgacaacggcacgugcuaccccggcgacuucaucaacuacgaggagcuccgggagcagcugagcuccgugagcuccuucgagcgcuucgagaucuuccccaagaccagcuccuggcccaaccacgacagcaacaagggggucaccgccgccugcccgcacgccggcgcgaaguccuucuacaagaaccugaucuggcucgugaagaaggggaacagcuaccccaagcuguccaagagcuacaucaacgacaagggcaaggaggugcugguccucugggggauccaccaccccagcaccuccgccgaccagcagagccuguaccagaacgccgacgccuacguguucgugggcacguccaaguacagcaagaaguucaagcccgagaucgccguccggccgaaggugcgcgaccaggagggccggaugaacuacuacuggacccugguggagcccggggacaagaucaccuucgaggcgaccggcaaccuccuggucccccgcuacgccuucgccauggagcggaacgccggguccggcaucaucaucagcgacacgcccgugcacgacugcaacacgaccugccagaccccgaagggcgccaucaacaccucccugcccuuccagaacauccaccccaucaccaucgggaagugccccaaguacgucaagagcaccaagcuccgccuggcgaccggccugcggaacgugccguccauccagagccgcgggcuguucggcgccaucgccggguucaucgagggcggcuggacggggaugguggacggcugguacggguaccaccaccagaacgagcagggcuccggguacgccgccgaccucaagagcacccagaacgcgaucgacaagaucaccaacaaggugaacuccgucaucgagaagaugaacacccaguucacggccgugggcaaggaguucaaccaccuggagaagcggaucgagaaccucaacaagaaggucgacgacggcuuccuggacaucuggaccuacaacgccgagcugcucgugcugcuggagaacgagcgcacccucgacuaccacgacagcaacgugaagaaccuguacgagaagguccggucccagcugaagaacaacgccaaggagaucgggaacggcugcuucgaguucuaccacaagugcgacaacacgugcauggagagcgugaagaacgggaccuacgacuaccccaaguacuccgaggaggccaagcucaaccgcgaggagaucgacggcgugaagcuggagagcacccggaucuaccagauccuggcgaucuacuccaccgucgccagcagccucgugcugguggucucccugggggccaucagcuucuggaugugcuccaacggcagccuccagugccgcaucugcaucuga

SEQ ID NO: 71075 - RNA, 1701 nt, Artificial Sequence; identical to SEQ ID NO: 70478
  derived and/or modified CDS sequence (opt1) from hemagglutinin__InfluenzaA__AEL93568

SEQ ID NO: 71076 - RNA, 1701 nt, Artificial Sequence; identical to SEQ ID NO: 70459
  derived and/or modified CDS sequence (opt1) from hemagglutinin__InfluenzaA__AEL93578

SEQ ID NO: 71077 - RNA, 1701 nt, Artificial Sequence
  derived and/or modified CDS sequence (opt1) from hemagglutinin__InfluenzaA__AEL93598
augaaggccauccuggugguccuccuguacaccuucgccaccgcgaacgccgacacgcugugcaucggcuaccacgccaacaacagcaccgacaccguggacaccgugcucgagaagaacgucacggugacccacuccgugaaccugcuggaggacaagcacaacgggaagcucugcaagcugcgcggcgucgcgccccugcaccucgggaagugcaacaucgccggcuggauccuggggaacccggagugcgagagccuguccaccgccagcuccuggagcuacaucguggagaccuccagcuccgacaacggcacgugcuaccccggcguguucaucgacuacgaggagcuccgggagcagcugagcuccgucagcuccuucgagcgcuucgagaucuuccccaagaccagcuccuggcccaaccacgacagcaacaagggggugaccgccgccugcccgcacgccggcgcgaaguccuucuacaagaaccugaucuggcucgugaagaaggggaacagcuaccccaagcuguccaagagcuacaucaacgacaagggcaaggagguccuggugcucugggggauccaccaccccagcaccacggccgaccagcagucccuguaccagaacgccgacgccuacguguucgucggcaccagccgguacuccaagaaguucaagcccgagaucgccauccgcccgaaggugcgggaccaggagggccgcaugaacuacuacuggacccugguggagcccggggacaagaucaccuucgaggcgacgggcaaccucgucgugccccgguacgccuucgccauggagcgcaacgccgggagcggcaucaucaucuccgacacccccgugcacgacugcaacacgaccugccagaccccgaagggcgccaucaacaccagccugcccuuccagaacauccaccccaucaccaucgggaagugccccaaguacgucaaguccaccaagcugcggcucgcgacgggccugcgcaacgugccgagcauccagucccgggggcuguucggcgccaucgccggguucaucgagggcggcuggaccgggaugguggacggcugguacggguaccaccaccagaacgagcagggcagcggguacgccgccgaccucaaguccacccagaacgcgaucgacaagaucaccaacaaggucaacagcgugaucgagaagaugaacacgcaguucaccgccgucggcaaggaguucaaccaccuggagaagcgcaucgagaaccugaacaagaagguggacgacggcuuccucgacaucuggaccuacaacgccgagcugcuggugcuccuggagaacgagcggacccuggacuaccacgacuccaacgucaagaaccucuacgagaaggugcgcaaccagcugaagaacaacgccaaggagaucgggaacggcugcuucgaguucuaccacaagugcgacaacacgugcauggagagcgugaagaacgggaccuacgacuaccccaaguacuccgaggaggccaagcugaaccgggaggagaucgacggcgucaagcucgagagcacccgcaucuaccagauccuggcgaucuacuccaccguggccagcucccuggugcucgucgugagccugggggccaucagcuucuggaugugcuccaacggcagccugcagugccggaucugcaucuga

SEQ ID NO: 71078 - RNA, 1701 nt, Artificial Sequence
  derived and/or modified CDS sequence (opt1) from hemagglutinin__InfluenzaA__AEL93618
augaaggccauccugguggucaugcucuacaccuucgccaccgcgaacgccgacacgcugugcaucggcuaccacgccaacaacagcaccgacaccguggacaccgugcuggagaagaacgucacggugacccacuccgugaaccuccuggaggacaagcacaacgggaagcugugcaagcuccgcggcgucgcgccccugcaccuggggaagugcaacaucgccggcuggauccucgggaacccggagugcgagagccuguccaccgccagcuccuggagcuacaucguggagaccuccagcuccgacaacggcacgugcuaccccggcgacuucaucgacuacgaggagcugcgggagcagcucagcuccgugagcuccuucgagcgcuucgagaucuuccccaagaccagcuccuggcccaaccacgacagcaacaagggggucaccgccgccugcccgcacgccggcgcgaaguccuucuacaagaaccugaucuggcuggugaagaaggggaacagcuaccccaagcucuccaagagcuacaucaacgacaagggcaaggaggugcugguccugugggggauccaccaccccagcaccacggccgaccagcagucccucuaccagaacgccgacaccuacguguucgugggcaccagccgguacuccaagaaguucaagcccgagaucgccauccgcccgaagguccgggaccaggagggccgcaugaacuacuacuggacccugguggagcccggggacaagaucacguucgaggccaccggcaaccugguggucccccgguacgcguucgccauggagcgcaacgccgggagcggcaucaucaucuccgacacccccgugcacgacugcaacaccacgugccagaccccgaagggcgccaucaacaccagccuccccuuccagaacauccaccccaucaccaucgggaagugccccaaguacgugaaguccacgaagcugcggcuggccaccggccuccgcaacgucccgagcauccagucccgggggcuguucggcgcgaucgccggguucaucgagggcggcuggaccgggaugguggacggcugguacggguaccaccaccagaacgagcagggcagcggguacgccgccgaccugaaguccacccagaacgccaucgacaagaucacgaacaaggugaacagcgucaucgagaagaugaacacccaguucaccgcggugggcaaggaguucaaccaccucgagaagcgcaucgagaaccugaacaagaaggucgacgacggcuuccuggacaucuggaccuacaacgccgagcuccuggugcugcucgagaacgagcggacgcuggacuaccacgacuccaacgugaagaaccuguacgagaagguccgcaaccagcucaagaacaacgccaaggagaucgggaacggcugcuucgaguucuaccacaagugcgacaacacgugcauggagagcgugaagaacgggaccuacgacuaccccaaguacuccgaggaggccaagcugaaccgggaggagaucgacggcgugaagcuggagagcacccgcaucuaccagauccucgccaucuacuccaccgucgcgagcucccuggugcugguggucagccucggggccaucagcuucuggaugugcuccaacggcagccugcagugccggaucugcaucuga

SEQ ID NO: 71079 - RNA, 1701 nt, Artificial Sequence; identical to SEQ ID NO: 70459
  derived and/or modified CDS sequence (opt1) from hemagglutinin__InfluenzaA__AEL93628

SEQ ID NO: 71080 - RNA, 1701 nt, Artificial Sequence; identical to SEQ ID NO: 70894
  derived and/or modified CDS sequence (opt1) from hemagglutinin__InfluenzaA__AEL93638

SEQ ID NO: 71081 - RNA, 1701 nt, Artificial Sequence
  derived and/or modified CDS sequence (opt1) from hemagglutinin__InfluenzaA__AEL94870
augaaggccauccuggugguccuccuguacaccuucgccaccgcgaacgccgacacgcugugcaucggcuaccacgccaacaacagcaccgacaccguggacaccgugcucgagaagaacgucacggugacccacuccgugaaccugcuggaggacaagcacaacgggaagcucugcaagcugcgcggcgucgcgccccugcaccucgggaagugcaacaucgccggcuggauccuggggaacccggagugcgagagccuguccaccgccagcuccuggagcuacaucguggagaccuccagcuccgacaacggcacgugcuaccccggcgacuucaucgacuacgaggagcuccgggagcagcugagcuccgugagcuccuucgagcgcuucgagaucuuccccaagaccagcuccuggcccgaccacgacagcaacaagggggucaccgccgccugcccgcacgccggcgcgaaguccuucuacaagaaccugaucuggcucgugaagaaggggaacagcuaccccaagcuguccaagagcuacaucaacgacaagggcaaggaggugcugguccucugggggauccaccaccccagcaccuccgccgaccagcagagccuguaccagaacgccgacgccuacguguucgugggcacgucccgguacagcaagaaguucaagcccgagaucgccauccgcccgaagguccgggaccaggagggccgcaugaacuacuacuggacccugguggagcccggggacaagaucaccuucgaggcgaccggcaaccucguggucccccgguacgccuucgccauggagcgcaacgccggguccggcaucaucaucagcgacacgcccgcccacgacugcaacacgaccugccagaccccgaagggcgcgaucaacaccucccugcccuuccagaacauccaccccaucaccaucgggaagugccccaaguacgucaagagcaccaagcugcggcucgccaccggccugcgcaacgugccguccauccagagccgggggcuguucggcgccaucgccggguucaucgagggcggcuggacggggaugguggacggcugguacggguaccaccaccagaacgagcagggcuccggguacgccgcggaccucaagagcacccagaacgccaucgacaagaucaccaacaaggugaacuccgugaucaagaagaugaacacccaguucacggccgucggcaaggaguucaaccaccuggagaagcgcaucgagaaccugaacaagaagguggacgacggcuuccucgacaucuggaccuacaacgccgagcugcugguccuccuggagaacgagcggacccuggacuaccacgacagcaacgugaagaaccucuacgagaaggugcgcucccagcugaagaacaacgccaaggagaucgggaacggcugcuucgaguucuaccacaagugcgacaacacgugcauggagagcgucaagaacgggaccuacgacuaccccaaguacuccgaggaggcgaagcugaaccgggaggagaucgacggcgugaagcucgagagcacccgcaucuaccagauccuggccaucuacuccaccguggccagcagccugguccucguggugucccugggggccaucagcuucuggaugugcuccaacggcagccugcagugccggaucugcaucuga

SEQ ID NO: 71082 - RNA, 1701 nt, Artificial Sequence
  derived and/or modified CDS sequence (opt1) from hemagglutinin__InfluenzaA__AEL95426
augaaggccauccuggugguccuccuguacaccuucgccaccgcgaacgccgacacgcugugcaucggcuaccacgccaacaacagcaccgacaccguggacaccgugcucgagaagaacgucacggugacccacuccgugaaccugcuggaggacaagcacaacgggaagcucugcaagcugcgcggcgucgcgccccugcaccucgggaagugcaacaucgccggcuggauccuggggaacccggagugcgagagccuguccaccgccagcuccuggagcuacaucguggagaccuccagcuccgacaacggcacgugcuaccccggcgacuucaucgacuacgaggagcuccgggagcagcugagcuccgugagcuccuucgagcgcuucgagaucuuccccaagaccagcuccuggcccaaccacgacagcaacaagggggucaccgccgccugcccgcacgccggcgcgaaguccuucuacaagaaccugaucuggcucgugaagaaggggaacagcuaccccaagcuguccaagagcuacaucaacgacaagggcaaggaggugcugguccucugggggauccaccaccccagcaccacggccgaccagcagucccuguaccagaacgccgacaccuacguguucgugggcaccagccgguacuccaagaaguucaagcccgagaucgccacccgcccgaagguccgggaccaggagggccgcaugaacuacuacuggacgcugguggagcccggggacaagaucaccuucgaggccaccggcaaccucguggucccccgguacgcguucgccauggagcgcaacgccgggagcggcaucaucaucuccgacacccccgugcacgacugcaacacgaccugccagaccccgaagggcgccaucaacaccagccugcccuuccagaacauccaccccaucacgaucgggaagugccccaaguacgugaaguccaccaagcugcggcucgccaccggccugcgcaacgucccgagcauccagucccgggggcuguucggcgcgaucgccggguucaucgagggcggcuggaccgggaugguggacggcugguacggguaccaccaccagaacgagcagggcagcggguacgccgccgaccucaaguccacgcagaacgccaucgacaagaucaccaacaaggugaacagcgucaucgagaagaugaacacccaguucaccgcggugggcaaggaguucaaccaccuggagaagcgcaucgagaaccugaacaagaaggucgacgacggcuuccucgacaucuggacguacaacgccgagcugcuggugcuccuggagaacgagcggacccuggacuaccacgacuccaacgugaagaaccucuacgagaagguccgcaaccagcugaagaacaacgccaaggagaucgggaacggcugcuucgaguucuaccacaagugcgacaacacgugcauggagagcgugaagaacgggaccuacgacuaccccaaguacuccgaggaggccaagcugaaccgggaggagaucgacggcgugaagcucgagagcacccgcaucuaccagauccuggccaucuacuccaccgucgcgagcucccuggugcucguggucagccugggggccaucagcuucuggaugugcuccaacggcagccugcagugccggaucugcaucuga

SEQ ID NO: 71083 - RNA, 1701 nt, Artificial Sequence
  derived and/or modified CDS sequence (opt1) from hemagglutinin__InfluenzaA__AEL97631
augaaggccauccuggugguccuccuguacaccuucgccaccgcgaacgccgacacgcugugcaucggcuaccacgccaacaacagcaccgacaccguggacaccgugcucgagaagaacgucacggugacccacuccgugaacauccuggaggacaagcacaacgggaagcugugcaagcuccgcggcgucgcgccccugcaccuggggaagugcaacaucgccggcuggauccucgggaacccggagugcgagagccuguccaccgccagcuccuggagcuacaucguggagaccuccagcuccgacaacggcacgugcuaccccggcgacuucaucgacuacgaggagcugcgggagcagcucagcuccgugagcuccuucaagcgcuucgagaucuuccccaagaccagcuccuggcccaaccacgacagcaacaagggggucaccgccgccugcccgcacgccggcgcgaaguccuucuacaagaaccugaucuggcuggugaagaaggggaacagcuaccccaagcucuccaagagcuacaucaacgacaagggcaaggaggugcugguccugugggggauccaccaccccagcaccuccgccgaccagcagagccucuaccagaacgccgacgccuacguguucgugggcacgucccgguacagcaagaaguucaagcccgagaucgccauccgcccgaagguccgggaccaggagggccgcaugaacuacuacuggacccugguggagcccggggacaagaucaccuucgaggcgaccggcaaccugguggucccccgguacgccuucgccauggagcgcaacgccggguccggcaucaucaucagcgacacgcccgugcacgacugcaacacgaccugccagaccccgaagggcgccaucaacaccucccuccccuuccagaacauccaccccaccaccaucgggaagugccccaaguacgucaagagcaccaagcugcggcuggcgacgggccuccgcaacgugccguccauccagagccgggggcuguucggcgccaucgccggguucaucgagggcggcuggaccgggaugguggacggcugguacggguaccaccaccagaacgagcagggcuccggguacgccgccgaccucaagagcacccagaacgcgaucgacgagaucaccaacaaggugaacuccgucaucgagaagaugaacacgcaguucaccgccgugggcaaggaguucaaccaccuggagaagcgcaucgagaaccugaacaagaaggucgacgacggcuuccuggacaucuggaccuacaacgccgagcuccuggugcugcucgagaacgagcggacccuggacuaccacgacagcaacgugaagaaccuguacgagaagguccgcucccagcucaagaacaacgccaaggagaucgggaacggcugcuucgaguucuaccacaagugcgacaacacgugcauggagagcgugaagaacgggaccuacgacuaccccaaguacuccgaggaggccaagcugaaccgggaggagaucgacggcgugaagcuggagagcacccgcaucuaccagauccucgcgaucuacuccaccgucgccagcagccuggugcugguggucucccucggggccaucagcuucuggaugugcuccaacggcagccugcagugccggaucugcaucuga

SEQ ID NO: 71084 - RNA, 1701 nt, Artificial Sequence
  derived and/or modified CDS sequence (opt1) from hemagglutinin__InfluenzaA__AEL99664
augaaggccauccuggugguccuccuguacaccuucgccaccgcgaacgccgacacgcugugcaucggcuaccacgccaacaacagcaccgacaccguggacaccauccucgagaagaacgugacggucacccacuccgugaaccugcuggaggacaagcacaacgggaagcucugcaagcugcgcggcguggcgccccugcaccucgggaagugcaacaucgccggcuggauccuggggaacccggagugcgagagccuguccaccgccagcuccuggagcuacaucgucgagaccuccagcuccgacaacggcacgugcuaccccggcgacuucaucgacuacgaggagcuccgggagcagcugagcuccgugagcuccuucaagcgcuucgagaucuuccccaagaccagcuccuggcccaaccacgacagcaacaagggggugaccgccgccugcccgcacgccggcgcgaaguccuucuacaagaaccugaucuggcucgucaagaaggggaacagcuaccccaagcuguccaagagcuacaucaacgacaagggcaaggaggugcuggugcucugggggauccaccaccccagcaccuccgccgaccagcagagccuguaccagaacgccgacgccuacgucuucgugggcacgucccgguacagcaagaaguucaagcccgagaucgccauccgcccgaaggugcgggaccaggagggccgcaugaacuacuacuggacccuggucgagcccggggacaagaucaccuucgaggcgaccggcaaccucguggugccccgguacgccuucgccauggagcgcaacgccggguccggcaucaucaucagcgacacguccguccacgacugcaacacgaccugccagacccccaagggcgccaucaacaccagccugccguuccagaacauccaccccaucaccaucgggaagugccccaaguacgugaaguccaccaagcugcggcucgcgaccggccugcgcaacgugcccagcauccagucccgggggcuguucggcgccaucgccggguucaucgagggcggcuggacggggauggucgacggcugguacggguaccaccaccagaacgagcagggcagcggguacgccgccgaccucaaguccacccagaacgcgaucgacgagaucaccaacaaggugaacagcgugaucgagaagaugaacacccaguucacggccgucggcaaggaguucaaccaccuggagaagcgcaucgagaaccugaacaagaagguggacgacggcuuccucgacaucuggaccuacaacgccgagcugcugguccuccuggagaacgagcggacccuggacuaccacgacuccaacgugaagaaccucuacgagaaggugcgcagccagcugaagaacaacgccaaggagaucgggaacggcugcuucgaguucuaccacaagugcgacaacacgugcauggaguccgucaagaacgggaccuacgacuacccgaaguacagcgaggaggccaagcugaaccgggaggagaucgacggcgugaagcucgaguccacccgcaucuaccagauccuggcgaucuacagcaccguggccagcucccugguccucguggugagccugggggccaucuccuucuggaugugcagcaacggcucccugcagugccggaucugcaucuga

SEQ ID NO: 71085 - RNA, 1701 nt, Artificial Sequence
  derived and/or modified CDS sequence (opt1) from hemagglutinin__InfluenzaA__AEL99674
augaaggccauccuggugguccuccuguacaccuucgccaccgcgaacgccgacacgcugugcaucggcuaccacgccaacaacagcaccgacaccguggacaccgugcucgagaagaacgucacggugacccacuccgugaaccugcuggaggacaagcacaacgggaagcucugcaagcugcgcggcgucgcgccccugcaccucgggaagugcaacaucgccggcuggauccuggggaacccggagugcgagagccuguccaccgccagcuccuggagcuacaucguggagaccuccagcuccgacaacggcacgugcuaccccggcgacuucaucgacuacgaggagcuccgggagcagcugagcuccgugagcuccuucgagcgcuucgagaucuuccccaagaccagcuccuggcccaaccacgacagcaacaagggggucaccgccgccugcccgcacgccggcgcgaaguccuucuacaagaaccugaucuggcucgugaagaaggggaacagcuaccccaagcuguccaagagcuacaucaacgacaagggcaaggaggugcugguccucugggggauccaccaccccagcaccuccgccgaccagcagagccuguaccagaacgccgacgccuacguguucgugggcacgucccgguacagcaagaaguucaagcccgagaucgccauccgcccgaagguccgggaccaggagggccgcaugaacuacuacuggacccugguggagcccggggacaagaucaucuucgaggcgaccggcaaccucguggucccccgguacgccuucgccauggagcgcaacgccggguccggcaucaucaucagcgacacccccgugcacgacugcaacacgaccugccagaccccgaagggcgccaucaacaccucccugcccuuccagaacauccaccccaucacgaucgggaagugccccaaguacgucaagagcaccaagcugcggcucgcgaccggccugcgcaacgugccguccauccagagccgggggcuguucggcgccaucgccggguucaucgagggcggcuggaccgggaugguggacggcugguacggguaccaccaccagaacgagcagggcuccggguacgccgccgaccucaagagcacgcagaacgcgaucgacgagaucaccaacaaggugaacuccgucaucgagaagaugaacacccaguucaccgccgugggcaaggaguucaaccaccuggagaagcgcaucgagaaccugaacaagaaggucgacgacggcuuccucgacaucuggacguacaacgccgagcugcuggugcuccuggagaacgagcggacccuggacuaccacgacagcaacgugaagaaccucuacgagaagguccgcucccagcugaagaacaacgccaaggagaucgggaacggcugcuucgaguucuaccacaagugcgacaacacgugcauggagagcgugaagaacgggaccuacgacuaccccaaguacuccgaggaggccaagcugaaccgggaggagaucgacggcgugaagcucgagagcacccgcaucuaccagauccuggcgaucuacuccaccgucgccagcagccuggugcucguggucucccugggggccaucagcuucuggaugugcuccaacggcagccugcagugccggaucugcaucuga

SEQ ID NO: 71086 - RNA, 1689 nt, Artificial Sequence; identical to SEQ ID NO: 70295
  derived and/or modified CDS sequence (opt1) from hemagglutinin__InfluenzaA__AEM53455

SEQ ID NO: 71087 - RNA, 1689 nt, Artificial Sequence; identical to SEQ ID NO: 65644
  derived and/or modified CDS sequence (opt1) from hemagglutinin__InfluenzaA__AEM53468

SEQ ID NO: 71088 - RNA, 1698 nt, Artificial Sequence; identical to SEQ ID NO: 66139
  derived and/or modified CDS sequence (opt1) from hemagglutinin__InfluenzaA__AEM60037

SEQ ID NO: 71089 - RNA, 1698 nt, Artificial Sequence
  derived and/or modified CDS sequence (opt1) from hemagglutinin__InfluenzaA__AEM60058
augaaggugaagcugcucguccugcugugcaccuucaccgccacguacgccgacaccaucugcaucggcuaccacgcgaacaacagcaccgacaccguggacacggugcucgagaagaacgucaccgugacccacuccgugaaccugcuggaggagagccacaacgggaagcucugccugcugaagggcaucgcgccccuccagcuggggaacugcuccgucgccggcuggauccuggggaacccggagugcgagcuccugaucagcaaggaguccuggagcuacaucguggagacccccaaccccgagaacggcacgugcuaccccggcuacuucgccgacuacgaggagcugcgcgagcagcucuccagcguguccagcuucgagcgguucgagaucuucccgaaggaguccagcuggcccaaccacaccgucaccgggguguccgccagcugcucccacaacggcgagagcuccuucuaccgcaaccugcuguggcucaccgggaagaacggccuguaccccaaccugagcaaguccuacgccaacaacaaggagaaggacgugcucguccuguggggcgugcaccacccgcccaacaucggggaccagcgggcccuguaccacacggagaacgccuacgugagcgucgugagcucccacuacagccgccgguucacccccgagaucgccaagcgccccaaggugcgggaccaggagggccgcaucaacuacuacuggacccuccuggagcccggggacaccaucaucuucgaggcgaacggcaaccugaucgccccgcgguucgccuucgcccucgggcgcggcuucggcuccgggaucaucacgagcaacgcccccauggacaagugcgacgcgaagugccagacgccccagggcgccaucaacuccagccugcccuuccagaacguccacccggugaccaucggggagugccccaaguacgugcgguccaccaagcugcgcauggucaccggccuccggaacauccccagcauccagucccgcgggcuguucggcgccaucgccggcuucaucgagggcggguggaccgggaugguggacggcugguacggguaccaccaccagaacgagcagggcagcggcuacgccgcggaccagaaguccacccagaacgccaucaacgggaucaccaacaaggugaacagcgucaucgagaagaugaacacgcaguucaccgccgugggcaaggaguucaacaagcuggagcggcgcauggagaaccucaacaagaaggucgacgacggguuccuggacaucuggaccuacaacgccgagcugcucgugcugcuggagaacgagcggacccucgacuuccacgacuccaacgugaagaaccuguacgagaaggucaagagccagcugaagaacaacgccaaggagaucggcaacgggugcuucgaguucuaccacaagugcaacgacgagugcauggaguccgugaagaacggcacguacgacuaccccaaguacagcgaggaguccaagcucaaccgcgagaagaucgacggcgugaagcuggagagcaugggggucuaccagauccuggcgaucuacuccaccguggccagcagccucgugcugcuggucucccucggcgccaucagcuucuggaugugcuccaacgggagccugcagugccggaucugcaucuga

SEQ ID NO: 71090 - RNA, 1701 nt, Artificial Sequence
  derived and/or modified CDS sequence (opt1) from hemagglutinin__InfluenzaA__AEM60069
augaagaccaucaucgcccugagcuacaucuucugccucguguucgcccagaagcugcccggcaacgacaacuccaccgcgacgcugugccucgggcaccacgccgucccgaacggcacccuggugaagaccaucaccaacgaccagaucgaggugacgaacgccaccgagcugguccagagcuccagcaccgggcgcaucugcgacagcccccaccggauccucgacggcaagaacugcacccugaucgacgcccugcucggggacccccacugcgacggcuuccagaacgagaagugggaccuguucguggagcgcagcaaggccuacuccaacugcuaccccuacgacgugccggacuacgcgagccugcggucccucgucgccagcuccggcacgcuggaguucaucaacgaggacuucaacuggaccggggugacccagagcggcggguccuacgccugcaagcgcggcagcgugaaguccuucuucagccggcugaacuggcuccacgaguccgaguacaaguaccccgcccugaacgucaccaugcccaacaacgggaaguucgacaagcuguacaucuggggcgugcaccaccccagcacggaccgcgagcagaccaaccucuacgugcgggcguccggccgcgucaccgugagcaccaagcggagccagcagacggugaucccgaacaucgggucccgccccuggguccggggccugagcucccgcaucagcaucuacuggaccaucgugaagcccggggacauccugcucaucaacuccaccggcaaccugaucgcgccccggggcuacuucaagauccgcaccgggaaguccuccaucaugcggagcgacgccccgaucggcacgugcuccagcgagugcaucacccccaacggguccauccccaacgacaagcccuuccagaacgugaacaagaucaccuacggcgccugcccgcgcuacgucaagcagaacacccugaagcucgccacggggaugcggaacgugcccgagaagcagacccgcggcaucuucggcgccaucgccggguucaucgagaacggcugggaggggaugguggacggcugguacggguuccggcaccagaacagcgagggcaccggccaggccgccgaccugaaguccacccaggccgcgaucgaccagaucaacgggaagcugaaccgccucaucgagaagacgaacgagaaguuccaccagaucgagaaggaguucagcgaggucgagggccggauccaggaccuggagaaguacguggaggacaccaagaucgaccugugguccuacaacgccgagcuccugguggcccuggagaaccagcacaccaucgaccucaccgacagcgagaugaacaagcuguucgagaagacgcgcaagcagcugcgcgagaacgccgaggacauggggaacggcugcuucaagaucuaccacaagugcgacaacgccugcaucggguccauccggaacggcaccuacgaccacgacgucuaccgcgacgaggcgcucaacaaccgguuccagaucaagggcguggagcucaagagcggguacaaggacuggauccuguggaucuccuucgccaucagcugcuuccugcugugcgucgugcugcucggcuucaucaugugggccugccagaaggggaacauccgcugcaacaucugcaucuga

SEQ ID NO: 71091 - RNA, 1701 nt, Artificial Sequence
  derived and/or modified CDS sequence (opt1) from hemagglutinin__InfluenzaA__AEM92308
augaaggccauccuggugguccuccuguacaccuucgccaccgcgaacgccgacacgcugugcaucggcuaccacgccaacaacagcaccgacaccguggacaccgugcucgagaagaacgucacggugacccacuccgugaaccugcuggaggacaagcacaacgggaagcucugcaagcugcgcggcgucgcgccccugcaccucgggaagugcaacaucgccggcuggauccuggggaacccggagugcgagagccuguccaccgccagcuccuggagcuacaucguggagaccuccagcuccgacaacggcacgugcuaccccggcgacuucaucgacuacgaggagcuccgggagcagcugagcuccgugagcuccuucgagcgcuucgagaucuuccccaagaccagcuccuggcccaaccacgacagcaacaagggggucaccgccgccugcccgcacgccggcgcgaaguccuucuacaagaaccugaucuggcucgugaagaagcggaacagcuaccccaagcuguccaagagcuacaucaacgacaaggggaaggaggugcugguccucuggggcauccaccaccccagcaccuccgccgaccagcagagccuguaccagaacgccgacgccuacguguucgugggguccagccgcuacuccaagaaguucaagcccgagaucgccauccggccgaagguccgcgaccaggagggccggaugaacuacuacuggacgcugguggagcccggcgacaagaucaccuucgaggcgaccgagaaccucguggucccccgcuacgccuucgccauggagcggaacgccgggagcggcaucaucaucuccgacacccccgugcacgacugcaacacgaccugccagaccccgaagggggccaucaacaccagccugcccuuccagaacauccaccccaucacgaucggcaagugccccaaguacgugaaguccaccaagcugcgccucgcgaccggccugcggaacgucccgagcauccagucccgcgggcuguucggcgccaucgccggguucaucgagggcggguggaccggcaugguggacggcugguacggguaccaccaccagaacgagcagggcagcggguacgccgccgaccucaaguccacgcagaacgcgaucgacgagaucaccaacaaggugaacagcgucaucgagaagaugaacacccaguucaccgccgugggcaaggaguucaaccaccuggagaagcggaucgagaaccugaacaagaaggucgacgacggguuccucgacaucuggacguacaacgccgagcugcuggugcuccuggagaacgagcgcacccuggacuaccacgacuccaacgugaagaaccucuacgagaagguccggagccagcugaagaacaacgccaaggaggugggcaacggcugcuucgaguucuaccacaagugcgacaacacgugcauggaguccgugaagaacgggaccuacgacuaccccaaguacagcgaggaggccaagcugaaccgcgaggagaucgacggcgucaagcucgaguccacccggaucuaccagauccuggcgaucuacagcaccgccgccagcucccuggugcucguggucagccugggggccaucuccuucuggaugugcagcaacggcucccugcagugccgcaucugcaucuga

SEQ ID NO: 71092 - RNA, 1701 nt, Artificial Sequence
  derived and/or modified CDS sequence (opt1) from hemagglutinin__InfluenzaA__AEM92318
augaaggccauccuggugguccuccuguacaccuucgccaccgcgaacgccgacacgcugugcaucggcuaccacgccaacaacagcaccgacaccguggacaccgugcucgagaagaacgucacggugacccacuccguggaccugcuggaggacaagcacaacgggaagcucugcaagcugcgcggcgucgcgccccugcaccucgggaagugcaacaucgccggcuggauccuggggaacccggagugcgagagccuguccaccgccagcuccuggagcuacaucguggagaccuccagcuccgacaacggcacgugcuaccccggcgacuucaucgacuacgaggagcuccgggagcagcugagcuccgugagcuccuucgagcgcuucgagaucuuccccaagaccagcuccuggcccaaccacgacagcaacaagggggucaccgccgccugcccgcacgccggcgagaaguccuucuacaagaaccugaucuggcucgugaagaaggggaacagcuaccccaagcugaacaaguccuacaucaacgacaagggcaaggaggugcugguccucugggggauccaccaccccagcaccagcgcggaccagcagucccuguaccagaacgccgacgccuacguguucgugggcacgagccgguacuccaagaaguucaagcccgagaucgccauccgcccgaagguccgggaccaggagggccgcaugaacuacuacuggacccugguggagcccggggacaagaucaccuucgaggccaccggcaaccucguggucccccgguacgcguucgccauggagcgcaacgccgggagcggcaucaucaucuccgacacgcccauccacgacugcaacacgaccugccagaccccgaagggcgccaucaacaccagccugcccuuccagaacauccaccccaucaccaucgggaagugccccaaguacgugaaguccaccaagcugcggcucgccaccggccugcgcaacgugccgagcauccagucccgggggcuguucggcgcgaucgccggguucaucgagggcggcuggacggggauggucgacggcugguacggguaccaccaccagaacgagcagggcagcggguacgccgccgaccucaaguccacccagaacgccaucgacgagaucaccaacaaggugaacagcgugaucgagaagaugaacacccaguucacggcggucggcaaggaguucaaccaccuggagaagcgcaucgagaaccugaacaagaagguggacgacggcuuccucgacaucuggaccuacaacgccgagcugcugguccuccuggagaacgagcggacccuggacuaccacgacuccaacgugaagaaccucuacgagaaggugcgcaaccagcugaagaacaacgccaaggagaucgggaacggcugcuucgaguucuaccacaagugcgacaacacgugcauggagagcgucaagaacgggaccuacgacuaccccaaguacuccgaggaggccaagcugaaccgggaggagaucgacggcgugaagcucgagagcacccgcaucuaccagauccuggccaucuacuccaccguggcgagcucccugguccucguggugagccugggggccaucagcuucuggaugugcuccaacggcagccugcagugccggaucugcaucuga

SEQ ID NO: 71093 - RNA, 1701 nt, Artificial Sequence
  derived and/or modified CDS sequence (opt1) from hemagglutinin__InfluenzaA__AEM92328
augaaggccauccuggugguccuccuguacaccuucgccaccgcgaacgccgacacgcugugcaucggcuaccacgccaacaacagcaccgacaccguggacaccgugcucgagaagaacgucacggugacccacuccgugaaccugcuggaggacaagcacaacgggaagcucugcaagcugcgcggcgucgcgccccugcaccucgggaagugcaacaucgccggcuggauccuggggaacccggagugcgagagccuguccaccgccagcuccuggagcuacaucguggagaccuccagcuccgacaacggcacgugcuaccccggcgacuucaucgacuacgaggagcuccgggagcagcugagcuccgugagcuccuucgagcgcuucgagaucuuccccaagaccagcuccuggcccaaccacgacagcaacaagggggucaccgccgccugcccgcacgccggcgcgaaguccuucuacaagaaccugaucuggcucgugaagaaggggaacagcuaccccaagcugaacaucuccuacaucaacgacaagggcaaggaggugcugguccucugggggauccaccaccccagcaccacggccgaccagcagagccuguaccagaacgccgacgccuacguguucgugggcaccucccgguacagcaagaaguucaagcccgagaucgccauccgcccgaagguccgggaccaggagggccgcaugaacuacuacuggacccugguggagcccggggacaagaucaccuucgaggcgacgggcaaccucguggucccccgguacgccuucgccauggagcgcaacgccggguccggcaucaucaucagcgacacccccgugcacgacugcaacacgaccugccagaccccgaagggcgccaucaacaccucccugcccuuccagaacauccaccccaucaccaucgggaagugccccaaguacgucaagagcaccaagcugcggcucgcgacgggccugcgcaacgugccguccauccagagccgggggcuguucggcgccaucgccggguucaucgagggcggcuggaccgggaugguggacggcugguacggguaccaccaccagaacgagcagggcuccggguacgccgccgaccucaagagcacccagaacgcgaucgacaagaucaccaacaaggugaacuccgucaucgagaagaugaacacgcaguucaccgccgugggcaaggaguucaaccaccuggagaagcgcaucgagaaccugaacaagaaggucgacgacggcuuccucgacaucuggaccuacaacgccgagcugcuggugcuccuggagaacgagcggacccuggacuaccacgacagcaacgugaagaaccucuacgagaagguccgcaaccagcugaagaacaacgccaaggagaucgggaacggcugcuucgaguucuaccacaagugcgacaacacgugcauggaguccgugaagaacgggaccuacgacuaccccaaguacagcgaggaggccaagcugaaccgggaggagaucgacggcgugaagcucgaguccacccgcaucuaccagauccuggcgaucuacagcaccgucgccuccagccuggugcucguggucucccugggggccaucagcuucuggaugugcagcaacggcucccugcagugccggaucugcaucuga

SEQ ID NO: 71094 - RNA, 1701 nt, Artificial Sequence
  derived and/or modified CDS sequence (opt1) from hemagglutinin__InfluenzaA__AEM92348
augaaggccauccuggugguccuccuguacaccuucgccaccgcgaacgccgacacgcugugcaucggcuaccacgccaacaacagcaccgacaccguggacaccgugcucgagaagaacgucacggugacccacuccguggaccugcuggaggacaagcacaacgggaagcucugcaagcugcgcggcgucgcgccccugcaccucgggaagugcaacaucgccggcuggauccuggggaacccggagugcgagagccuguccaccgccagcuccuggagcuacaucguggagaccuccagcuccgacaacggcacgugcuaccccggcgacuucaucgacuacgaggagcuccgggagcagcugagcuccgugagcuccuucgagcgcuucgagaucuuccccaagaccagcuccuggcccaaccacgacagcaacaagggggucaccgccgccugcccgcacgccggcgagaaguccuucuacaagaaccugaucuggcucgugaagaaggggaacagcuaccccaagcugaacaaguccuacaucaacgacaagggcaaggaggugcugguccucugggggauccaccaccccagcaccagcgcggaccagcagucccuguaccagaacgccgacgccuacguguucgugggcacgagccgguacuccaagaaguucaagcccgagaucgccauccgcccgaagguccgggaccaggagggccgcaugaacuacuacuggacccugguggagcccggggacaagaucaccuucgaggccaccggcaaccucguggucccccgguacgcguucgccauggagcgcaacgccgggagcggcaucaucaucuccgacacgcccauccacgacugcaacacgaccugccagaccccgaagggcgccaucaacaccagccugcccuuccagaacauccaccccaucaccaucgggaagugccccaaguacgugaaguccaccaagcugcggcucgccaccggccugcgcaacgugccgagcauccagucccgggggcuguucggcgcgaucgccggguucaucgagggcggcuggacggggauggucgacggcugguacggguaccaccaccagaacgagcagggcagcggguacgccgccgaccucaaguccacccagaacgccaucgacgagaucaccaacaaggugaacagcgugaucgagaagaugaacacccaguucacggcggucggcaaggaguucaaccaccuggagaagcgcaucgagaaccugaacaagaagguggacgacggcuuccucgacaucuggaccuacaacgccgagcugcugguccuccuggagaacgagcggacccuggacuaccacgacuccaacgugaagaaccucuacgagaaggucaagagccagcugaagaacaacgccaaggagaucgggaacggcugcuucgaguucuaccacaagugcgacaacacgugcauggaguccgugaagaacgggaccuacgacuaccccaaguacagcgaggaggccaagcugaaccgcgagaagaucgacggcgugaagcucgaguccacccggaucuaccagauccuggccaucuacagcaccguggcguccagccugguccucguggugagccugggggccaucuccuucuggaugugcagcaacggcucccugcagugccgcaucugcaucuga

SEQ ID NO: 71095 - RNA, 1701 nt, Artificial Sequence
  derived and/or modified CDS sequence (opt1) from hemagglutinin__InfluenzaA__AEM92358
augaaggccauccuggugguccuccuguacaccuucgccaccgcgaacgccgacacgcugugcaucggcuaccacgccaacaacagcaccgacaccguggacaccgugcucgagaagaacgucacggugacccacuccgugaaccugcuggaggacaagcacaacgggaagcucugcaagcugcgcggcgucgcgccccugcaccucgggaagugcaacaucgccggcuggauccuggggaacccggagugcgagagccuguccaccgccagcuccuggagcuacaucguggagaccuccagcuccgacaacggcacgugcuaccccggcgacuucaucaacuacgaggagcuccgggagcagcugagcuccgugagcuccuucgagcgcuucgagaucuuccccaagaccagcuccuggcccaaccacgacagcaacaagggggucaccgccgccugcccgcacgccggcgcgaaguccuucuacaagaaccugaucuggcucgugaaggaggggaacagcuaccccaagcuguccaagagcuacaucaacgacaagggcaaggaggugcugguccucugggggauccaccaccccagcaccacgaccgaccagcagucccuguaccagaacgccgacgccuacguguucgugggcaccagccgguacuccaagaaguucaagcccgagaucgccauccgcccgaagaugcgggaccaggagggccgcaugaacuacuacuggacccuggucgagcccggggacaagaucacguucgaggccaccggcaaccucguggugccccgguacgcguucgccauggagcgcaacgccgggagcggcaucaucaucuccgacacccccguccacgacugcaacaccacgugccagaccccgaagggcgccaucaacaccagccugcccuuccagaacauccaccccaucaccaucgggaagugccccaaguacgugaaguccacgaagcugcggcucgccaccggccugcgcaacgugccgagcauccagucccgggggcuguucggcgcgaucgccggguucaucgagggcggcuggaccgggauggucgacggcugguacggguaccaccaccagaacgagcagggcagcggguacgccgccgaccucaaguccacccagaacgccaucgacaagaucacgaacaaggugaacagcgugaucgagaagaugaacacccaguucaccgcggucggcaaggaguucaaccaccuggagaagcgcaucgagaaccugaacaagaagguggacgacggcuuccucgacaucuggaccuacaacgccgagcugcugguccuccuggagaacgagcggacgcuggacuaccacgacuccaacgugaagaaccucuacgagaaggugcgcaaccagcugaagaacaacgccaaggagaucgggaacggcugcuucgaguucuaccacaagugcgacaacacgugcauggagagcgucaagaacgggaccuacgacuaccccaaguacuccgaggaggccaagcugaaccgggaggagaucgacggcgugaagcucgagagcacccgcaucuaccagauccuggccaucuacuccaccguggcgagcucccugguccucguggugagccugggggccaucagcuucuggaugugcuccaacggcagccugcagugccggaucugcaucuga

SEQ ID NO: 71096 - RNA, 1701 nt, Artificial Sequence
  derived and/or modified CDS sequence (opt1) from hemagglutinin__InfluenzaA__AEM92368
augaaggccauccuggugguccuccuguacaccuucgccaccgcgaacgccgacacgcugugcaucggcuaccacgccaacaacagcaccgacaccguggacaccgugcucgagaagaacgucacggugacccacuccgugaaccugcuggaggacaagcacaacgggaagcucugcaagcugcgcggcgucgcgccccugcaccucgggaagugcaacaucgccggcuggauccuggggaacccggagugcgagagccuguccaccgccagcuccuggagcuacaucguggagaccuccagcuccgacaacggcacgugcuaccccggcgacuucaucgacuacgaggagcuccgggagcagcugagcuccgugagcuccuucgagcgcuucgagaucuuccccaagaccagcuccuggcccaaccacgacagcaacaagggggucaccgccgccugcccgcacgccggcgcgaaguccuucuacaagaaccugaucuggcucgugaagaaggggaacagcuaccccaagcugaacaaguccuacaucaacgacaagggcaaggaggugcugguccucugggggauccaccaccccagcaccacggccgaccagcagagccuguaccagaacgccgacgccuacguguucgugggcaccucccgguacagcaagaaguucaagcccgagaucgccauccgcccgaagguccgggaccaggagggccgcaugaacuacuacuggacccugguggagcccggggacaagaucaccuucgaggcgacgggcaaccucguggucccccgguacgccuucgccauggagcgcaacgccggguccggcaucaucaucagcgacacccccgugcacgacugcaacacgaccugccagaccccgaagggcgccaucaacaccucccugcccuuccagaacauccaccccaucaccaucgggaagugccccaaguacgucaagagcaccaagcugcggcucgcgacgggccugcgcaacgugccguccauccagagccgggggcuguucggcgccaucgccggguucaucgagggcggcuggaccgggaugguggacggcugguacggguaccaccaccagaacgagcagggcuccggguacgccgccgaccucaagagcacccagaacgcgaucgacaagaucaccaacaaggugaacuccgucaucgagaagaugaacacgcaguucaccgccgugggcaaggaguucaaccaccuggagaagcgcaucgagaaccugaacaagaaggucgacgacggcuuccucgacaucuggaccuacaacgccgagcugcuggugcuccuggagaacgagcggacccuggacuaccacgacagcaacgugaagaaccucuacgagaagguccgcaaccagcugaagaacaacgccaaggagaucgggaacggcugcuucgaguucuaccacaagugcgacaacacgugcauggaguccgugaagaacgggaccuacgacuaccccaaguacagcgaggaggccaagcugaaccgggaggagaucgacggcgugaagcucgaguccacccgcaucuaccagauccuggcgaucuacagcaccgucgccuccagccuggugcucguggucucccugggggccaucagcuucuggaugugcagcaacggcucccugcagugccggaucugcaucuga

SEQ ID NO: 71097 - RNA, 1701 nt, Artificial Sequence
  derived and/or modified CDS sequence (opt1) from hemagglutinin__InfluenzaA__AEM92378
augaaggccauccuggugguccuccuguacaccuucgccaccgcgaacgccgacacgcugugcaucggcuaccacgccaacaacagcaccgacaccguggacaccgugcucgagaagaacgucacggugacccacuccgugaaccugcuggaggacaagcacaacgggaagcucugcaagcugcgcggcgucgcgccccugcaccucgggaagugcaacaucgccggcuggauccuggggaacccggagugcgagagccuguccaccgcgagcuccuggagcuacaucguggagaccuccagcuccgacaacggcacgugcuaccccggcgacuucaucgacuacgaggagcuccgggagcagcugaacagcguguccagcuucgagcgcuucgagaucuuccccaagaccuccagcuggcccaaccacgacuccaacaagggggucaccgccgccugcccgcacgccggcgccaagagcuucuacaagaaccugaucuggcucgugaagaaggggaacuccuaccccaagcugaacaagagcuacaucaacgacaagggcaaggaggugcugguccucugggggauccaccaccccuccaccacggccgaccagcagagccuguaccagaacgccgacgccuacguguucgugggcaccagccgguacuccaagaaguucaagcccgagaucgccauccgcccgaagguccgggaccaggagggccgcaugaacuacuacuggacccugguggagcccggggacaagaucaccuucgaggcgacgggcaaccucguggucccccgguacgccuucgccauggagcgcaacgccgggagcggcaucaucaucuccgacacccccgugcacgacugcaacacgaccugccagaccccgaagggcgccaucaacaccagccugcccuuccagaacauccaccccaucaccaucgggaagugccccaaguacgugaaguccaccaagcugcggcucgcgacgggccugcgcaacgucccgagcauccagucccgggggcuguucggcgccaucgccggguucaucgagggcggcuggaccgggaugguggacggcugguacggguaccaccaccagaacgagcagggcagcggguacgccgccgaccucaaguccacccagaacgcgaucgacaagaucaccaacaaggugaacagcgucaucgagaagaugaacacgcaguucaccgccgugggcaaggaguucaaccaccuggagaagcgcaucgagaaccugaacaagaaggucgacgacggcuuccucgacaucuggaccuacaacgccgagcugcuggugcuccuggagaacgagcggacccuggacuaccacgacuccaacgugaagaaccucuacgagaagguccgcaaccagcugaagaacaacgccaaggagaucgggaacggcugcuucgaguucuaccacaagugcgacaacacgugcauggagagcgugaagaacgggaccuacgacuaccccaaguacuccgaggaggccaagcugaaccgggaggagaucgacggcgugaagcucgagagcacccgcaucuaccagauccuggcgaucuacuccaccgucgccagcucccuggugcucguggucagccugggggccaucuccuucuggaugugcagcaacggcagccugcagugccggaucugcaucuga

SEQ ID NO: 71098 - RNA, 1701 nt, Artificial Sequence
  derived and/or modified CDS sequence (opt1) from hemagglutinin__InfluenzaA__AEM92407
augaaggccauccuggugguccuccuguacaccuucgccaccgcgaacgccgacacgcugugcaucggcuaccacgccaacaacagcaccgacaccguggacaccgugcucgagaagaacgucacggugacccacuccgugaaccugcuggaggacaagcacaacgggaagcucugcaagcugcgcggcgucgcgccccugcaccucgggaagugcaacaucgccggcuggauccuggggaacccggagugcgagagccuguccaccgccaacagcugguccuacaucguggagaccagcuccagcgacaacggcacgugcuaccccggcgacuucaucgacuacgaggagcuccgggagcagcuguccagcguguccagcuucgagcgcuucgagaucuuccccaagaccaacuccuggcccaaccacgacagcaacaagggggucaccgccgccugcccgcacgccggcgcgaaguccuucuacaagaaccugaucuggcucgugaagaaggggaacagcuaccccaagcuguccaagagcuacaucaacgacaagggcaaggaggugcugguccucugggggauccaccaccccuccaccagcacggaccagcagagccuguaccagaacgccgacgccuacguguucgugggcaccucccgguacagcaagaaguucaagcccgagaucgccauccgcccgaagguccggaaccaggagggccgcaugaacuacuacuggacccugguggagcccggggacaagaucaccuucgaggccacgggcaaccucguggucccccgguacgcguucaccaucgagcgcaacgccggguccggcaucaucaucagcgacacccccauccacgacugcaacaccacgugccagaccccgaagggcgccaucaacaccucccugcccuuccagaacauccaccccaucaccaucgggaagugccccaaguacgucaagagcacgaagcugcggcucgccaccggccugcgcaacgugccguccauccagagccgggggcuguucggcgccaucgcgggguucaucgagggcggcuggaccgggaugguggacggcugguacggguaccaccaccagaacgagcagggcuccggguacgccgccgaccucaagagcacccagaacgccaucgacgagaucacgaacaaggugaacuccgugaucgagaagaugaacacccaguucaccgccgucggcaaggaguucaaccaccuggagaagcgcaucgagaaccugaacaagaagguggacgacggcuuccucgacaucuggacccacaacgcggagcugcugguccuccuggagaacgagcggacgcuggacuaccacgacagcaacgugaagaaccucuacgagaaggugcgcucccagcugaagaacaacgccaaggagaucgggaacggcugcuucgaguucuaccacaagugcgacaacacgugcauggagagcgucaagaacgggaccuacgacuaccccaaguacuccgaggaggccaagcugaaccgggaggagaucgacggcgugaagcucgagagcacccgcaucuaccagauccuggccaucuacuccaccguggccagcucccugguccucguggugagccugggggcgaucagcuucuggaugugcuccaugggcagccugcagugccggaucugcaucuga

SEQ ID NO: 71099 - RNA, 1701 nt, Artificial Sequence
  derived and/or modified CDS sequence (opt1) from hemagglutinin__InfluenzaA__AEM92417
augaaggccauccuggugguccuccuguacaccuucgccaccgcgaacgccgacacgcugugcaucggcuaccacgccaacaacagcaccgacaccguggacaccgugcucgagaagaacgucacggugacccacuccgugaacauccuggaggacaagcacaacgggaagcugugcaagcuccgcggcgucgcgccccugcaccuggggaagugcaacaucgccggcuggauccucgggaacccggagugcgagagccuguccaccgccagcuccuggagcuacaucguggagaccuccagcuccgacaacggcacgugcuaccccggcgacuucaucgacuacgaggagcugcgggagcagcucagcuccgugagcuccuucgagcgcuucgagaucuuccccaaggccagcuccuggcccaaccacgacagcaacaagggggucaccgccgccugcccgcacgcgggcgccaaguccuucuacaagaaccugaucuggcuggugaagaaggagaacagcuaccccaagcucuccaagagcuacaucaacgacaaggggaaggaggugcugguccuguggggcauccaccaccccagcaccuccgccgaccagcagagccucuaccagaacgccgacgccuacguguucgugggguccagccgguacuccaagaaguucaagcccgagaucgcgauccgcccgaagguccgggaccaggagggccgcaugaacuacuacuggacccugguggagcccggcgacaagaucacguucgaggccaccgggaaccugguggucccccgguacgccuucgccauggagcgcaacgccggcagcgggaucaucaucuccgacacccccgugcacgacugcaacaccacgugccagaccccgaagggcgcgaucaacaccagccuccccuuccagaacauccaccccaucaccaucggcaagugccccaaguacgugaaguccacgaagcugcggcuggccaccgggcuccgcaacgucccgagcauccagucccggggccuguucggggccaucgccggcuucaucgagggcggguggaccggcaugguggacgggugguacggcuaccaccaccagaacgagcaggggagcggcuacgccgcggaccugaaguccacccagaacgccaucgacgagaucacgaacaaggugaacagcgucaucgagaagaugaacacccaguucaccgccguggggaaggaguucaaccaccucgagaagcgcaucgagaaccugaacaagaaggucgacgacggcuuccuggacaucuggaccuacaacgccgagcuccuggugcugcucgagaacgagcggacgcuggacuaccacgacuccaacgugaagaaccuguacgagaagguccgcagccagcucaagaacaacgccaaggagaucggcaacgggugcuucgaguucuaccacaagugcgacaacacgugcauggaguccgugaagaacggcaccuacgacuaccccaaguacagcgaggaggcgaagcugaaccgggaggagaucgacggggugaagcuggaguccacccgcaucuaccagauccucgccaucuacagcaccgucgccagcucccuggugcugguggucagccucggcgccaucuccuucuggaugugcagcaacgggucccugcagugccggaucugcaucuga

SEQ ID NO: 71100 - RNA, 1701 nt, Artificial Sequence
  derived and/or modified CDS sequence (opt1) from hemagglutinin__InfluenzaA__AEM92428
augaaggccauccuggugguccuccuguacaccuucgccaccgcgaacgccgacacgcugugcaucggcuaccacgccaacaacagcaccgacaccguggacaccgugcucgagaagaacgucacggugacccacuccgugaaccugcuggaggacaagcacaacgggaagcucugcaagcugcgcggcgucgcgccccugcaccucgggaagugcaacaucgccggcuggauccuggggaacccggagugcgagagccuguccaccgccagcuccuggagcuacaucguggagaccuccagcuccgacaacggcacgugcuaccccggcgacuucaucgacuacgaggagcuccgggagcagcugagcuccgugagcuccuucgagcgcuucgagaucuuccccaagaccagcuccuggcccaaccacgacagcaacaagggggucaccgccgccugcccgcacgccggcgcgaaguccuucuacaagaaccugaucuggcucgugaagaaggggaacagcuaccccaagcuguccaagagcuacaucaacgacaagggcaaggaggugcugguccucugggggauccaccaccccagcaccuccgccgaccagcagagccuguaccagaacgccgacgccuacguguucgugggcacgucccgguacagcaagaaguucaagcccgagaucgccauccgcccgaagguccgggaccaggagggccgcaugaacuacuacuggacccugguggagcccggggacaagaucaccuucgaggcgaccggcaaccucguggucccccgguacgccuucgccauggagcgcaacgccggguccggcaucaucaucagcgacacgcccgugcacgacugcaacacgaccugccagaccccgaagggcgccaucaacaccucccugcccuuccagaacauccaccccaucaccaucgggaagugccccaaguacgucaagagcaccaagcugcggcucgcgaccggccugcgcaacgugccguccauccagagccgggggcuguucggcgccaucgccggguucaucgagggcggcuggacggggaugguggacggcugguacggguaccaccaccagaacgagcagggcuccggguacgccgccgaccucaagagcacccagaacgcgaucgacgagaucaccaacaaggugaacuccgucaucgagaagaugaacacccaguucacggccgugggcaaggaguucaaccaccuggagaagcgcaucgagaaccugaacaagaaggucgacgacggcuuccucgacaucuggaccuacaacgccgagcugcuggugcuccuggagaacgagcggacccuggacuaccacgacagcaacgugaagaaccucuacgagaagguccgcucccagcugaagaacaacgccaaggagaucgggaacggcugcuucgaguucuaccacaagugcgacaacaugugcauggagagcgugaagaacgggaccuacgacuaccccaaguacuccgaggaggccaagcugaaccgggaggagaucgacggcgugaagcucgagagcacgcgcaucuaccagauccuggcgaucuacuccaccgucgccagcagccuggugcucguggucucccugggggccaucagcuucuggaugugcuccaacggcagccugcagugccggaucugcaucuga

SEQ ID NO: 71101 - RNA, 1701 nt, Artificial Sequence
  derived and/or modified CDS sequence (opt1) from hemagglutinin__InfluenzaA__AEM92438
augaaggccauccuggugguccuccuguacaccuucgccaccgcgaacgccgacacgcugugcaucggcuaccacgccaacaacagcaccgacaccguggacaccgugcucgagaagaacgucacggugacccacuccgugaaccugcuggaggacaagcacaacgggaagcucugcaagcugcgcggcgucgcgccccugcaccucgggaagugcaacaucgccggcuggauccuggggaacccggagugcgagagccuguccaccgccagcuccuggagcuacaucguggagaccuccagcuccgacaacggcacgugcuaccccggcgacuucaucgacuacgaggagcuccgggagcagcugagcuccgugagcuccuucgagcgcuucgagaucuuccccaagaccagcuccuggcccaaccacgacagcaacaagggggucaccgccgccugcccgcacgccggcgcgaagggguucuacaagaaccugaucuggcucgugaagaagggcaacuccuaccccaagcugagcaaguccuacaucaacgacaaggggaaggaggugcugguccucuggggcauccaccaccccagcaccacggccgaccagcagagccuguaccagaacgccgacaccuacguguucgugggcaccucccgguacagcaagaaguucaagcccgagaucgccauccgcccgaagguccgggaccaggaggggcgcaugaacuacuacuggacccugguggagcccggcgacaagaucacguucgaggccaccgggaaccucguggucccccgguacgcguucgccauggagcgcaacgccggcuccggcaucaucaucagcgacacccccgugcacgacugcaacaccacgugccagaccccgaagggggccaucaacaccucccugcccuuccagaacauccaccccaucaccaucggcaagugccccaaguacgucaagagcacgaagcugcggcucgccaccgggcugcgcaacgugccguccauccagagccggggccuguucggggcgaucgccggcuucaucgagggcggguggaccggcaugguggacgggugguacggcuaccaccaccagaacgagcagggguccggcuacgccgccgaccucaagagcacccagaacgccaucgacaagaucacgaacaaggugaacuccgucaucgagaagaugaacacccaguucaccgcggugggcaaggaguucaaccaccuggagaagcgcaucgagaaccugaacaagaaggucgacgacggguuccucgacaucuggaccuacaacgccgagcugcuggugcuccuggagaacgagcggacgcuggacuaccacgacagcaacgugaagaaccucuacgagaagauccgcaaccagcugaagaacaacgccaaggagaucggcaacgggugcuucgaguucuaccacaagugcgacaacacgugcauggaguccgucaagaacggcaccuacgacuaccccaaguacagcgaggaggccaagcugaaccgggaggagaucgacggggugaagcucgaguccacccgcaucuaccagauccuggccaucuacagcaccguggcguccagccugguccucguggugucccugggcgccaucagcuucuggaugugcagcaacggcucccugcagugccggaucugcaucuga

SEQ ID NO: 71102 - RNA, 1701 nt, Artificial Sequence; identical to SEQ ID NO: 70833
  derived and/or modified CDS sequence (opt1) from hemagglutinin__InfluenzaA__AEM92448

SEQ ID NO: 71103 - RNA, 1701 nt, Artificial Sequence; identical to SEQ ID NO: 70833
  derived and/or modified CDS sequence (opt1) from hemagglutinin__InfluenzaA__AEM92458

SEQ ID NO: 71104 - RNA, 1701 nt, Artificial Sequence
  derived and/or modified CDS sequence (opt1) from hemagglutinin__InfluenzaA__AEM92468
augaaggccauccuggugguccuccuguacaccuucgccaccgcgaacgccgacacgcugugcaucggcuaccacgccaacaacagcaccgacaccguggacaccgugcucgagaagaacgucacggugacccacuccgugaaccugcuggaggacaagcacaacgggaagcucugcaagcugcgcggcgucgcgccccugcaccucgggaagugcaacaucgccggcuggauccuggggaacccggagugcgagagccuguccaccgccagcuccuggagcuacaucguggagaccuccagcuccgacaacggcacgugcuaccccggcgacuucaucaacuacgaggagcuccgggagcagcugagcuccgugagcuccuucgagcgcuucgagaucuuccccaagaccagcuccuggcccaaccacgacagcaacaagggggucaccgccgccugcccgcacgccggcgcgaaguccuucuacaagaaccugaucuggcucgugaagaaggggaacagcuaccccaagcuguccaagagcuacaucaacgacaagggcaaggaggugcugguccucugggggauccaccaccccagcaccuccgccgaccagcagagccuguaccagaacgccgacgccuacguguucgugggcacguccaaguacagcaaggaguucaagcccgagaucgccguccggccgaaggugcgcgaccaggagggccggaugaacuacuacuggacccugguggagcccggggacaagaucaccuucgaggcgaccggcaaccuccuggucccccgcuacgccuucgccauggagcggaacgccggguccggcaucaucaucagcgacacgcccgugcacgacugcaacaccaucugccagaccccgaagggcgccaucaacaccucccugcccuuccagaacauccaccccaucacgaucgggaagugccccaaguacgucaagagcaccaagcuccgccuggcgaccggccugcggaacgugccguccauccagagccgcgggcuguucggcgccaucgccggguucaucgagggcggcuggaccgggaugguggacggcugguacggguaccaccaccagaacgagcagggcuccggguacgccgccgaccucaagagcacgcagaacgcgaucgacaagaucaccaacaaggugaacuccgucaucgagaagaugaacacccaguucaccgccgugggcaaggaguucaaccaccuggagaagcggaucgagaaccucaacaagaaggucgacgacggcuuccuggacaucuggacguacaacgccgagcugcucgugcugcuggagaacgagcgcacccucgacuaccacgacagcaacgugaagaaccuguacgagaagguccggucccagcugaagaacaacgccaaggagaucgggaacggcugcuucgaguucuaccacaagugcgacaacacgugcauggagagcgugaagaacgggaccuacgacuaccccaaguacuccgaggaggccaagcucaaccgcgaggagaucgacggcgugaagcuggagagcacccggaucuaccagauccuggcgaucuacuccaccgucgccagcagccucgugcugguggucucccugggggccaucagcuucuggaugugcuccaacggcagccuccagugccgcaucugcaucuga

SEQ ID NO: 71105 - RNA, 1701 nt, Artificial Sequence
  derived and/or modified CDS sequence (opt1) from hemagglutinin__InfluenzaA__AEM92478
augaaggccauccuggugguccuccuguacaccuucgccaccgcgaacgccgacacgcugugcaucggcuaccacgccaacaacagcaccgacaccguggacaccgugcucgagaagaacgucacggugacccacuccgugaaccugcuggaggacaagcacaacgggaagcucugcaagcugcgcggcgucgcgccccugcaccucgggaagugcaacaucgccggcuggauccuggggaacccggagugcgagagccuguccaccgccagcuccuggagcuacaucguggagaccuccagcuccgacaacggcacgugcuaccccggcgacuucaucaacuacgaggagcuccgggagcagcugagcuccgugagcuccuucgagcgcuucgagaucuuccccaagaccagcuccuggcccaaccacgacagcaacaagggggucaccgccgccugcccgcacgccggcgcgaaguccuucuacaagaaccugaucuggcucgugaagaaggggaacagcuaccccaagcuguccaagagcuacaucaacgacaagggcaaggaggugcugguccucugggggauccaccaccccagcaccuccgccgaccagcagagccuguaccagaacgccgacgccuacguguucgugggcacguccaaguacagcaagaaguucaagcccgagaucgccguccggccgaaggugcgcgaccaggagggccggaugaacuacuacuggacccugguggagcccggggacaagaucaccuucgaggcgaccggcaaccuccuggucccccgcuacgccuucgccauggagcggaacgccggguccggcaucaucaucagcgacacgcccgugcacgacugcaacaccaucugccagaccccgaagggcgccaucaacaccucccugcccuuccagaacauccaccccaucacgaucgggaagugccccaaguacgucaagagcaccaagcuccgccuggcgaccggccugcggaacgugccguccauccagagccgcgggcuguucggcgccaucgccggguucaucgagggcggcuggaccgggaugguggacggcugguacggguaccaccaccagaacgagcagggcuccggguacgccgccgaccucaagagcacgcagaacgcgaucgacaagaucaccaacaaggugaacuccgucaucgagaagaugaacacccaguucaccgccgugggcaaggaguucaaccaccuggagaagcggaucgagaaccucaacaagaaggucgacgacggcuuccuggacaucuggacguacaacgccgagcugcucgugcugcuggagaacgagcgcacccucgacuaccacgacagcaacgugaagaaccuguacgagaagguccggucccagcugaagaacaacgccaaggagaucgggaacggcugcuucgaguucuaccacaagugcgacaacacgugcauggagagcgugaagaacgggaccuacgacuaccccaaguacuccgaggaggccaagcucaaccgcgaggagaucgacggcgugaagcuggagagcacccggaucuaccagauccuggcgaucuacuccaccgucgccagcagccucgugcugguggucucccugggggccaucagcuucuggaugugcuccaacggcagccuccagugccgcaucugcaucuga

SEQ ID NO: 71106 - RNA, 1701 nt, Artificial Sequence
  derived and/or modified CDS sequence (opt1) from hemagglutinin__InfluenzaA__AEM92498
augaaggccauccuggugguccuccuguacaccuucgccaccgcgaacgccgacacgcugugcaucggcuaccacgccaacaacagcaccgacaccguggacaccgugcucgagaagaacgucacggugacccacuccgugaaccugcuggaggacaagcacaacgggaagcucugcaagcugcgcggcgucgcgccccugcaccucgggaagugcaacaucgccggcuggauccuggggaacccggagugcgagagccuguccaccgccaacagcugguccuacaucguggagaccagcuccagcgacaacggcacgugcuaccccggcgacuucaucgacuacgaggagcuccgggagcagcuguccagcguguccagcuucgagcgcuucgagaucuuccccaagaccaacuccuggcccaaccacgacagcaacaagggggucaccgccgccugcccgcacgccggcgcgaaguccuucuacaagaaccugaucuggcucgugaagaaggggaacagcuaccccaagcuguccaagagcuacaucaacgacaagggcaaggaggugcugguccucugggggauccaccaccccuccaccagcgccgaccagcagagccuguaccagaacgccgacgccuacguguucgugggcacgucccgguacagcaagaaguucaagcccgagaucgccauccgcccgaagguccgggaccaggagggccgcaugaacuacuacuggacccugguggagcccggggacaagaucaccuucgaggcgaccggcaaccucguggucccccgguacgccuucgccauggagcgcaacgccggguccggcaucaucaucagcgacacgcccgcccacgacugcaacacgaccugccagaccccgaagggcgcgaucaacaccucccugcccuuccagaacauccaccccaucaccaucgggaagugccccaaguacgucaagagcaccaagcugcggcucgccaccggccugcgcaacgugccguccauccagagccgggggcuguucggcgccaucgccggguucaucgagggcggcuggacggggaugguggacggcugguacggguaccaccaccagaacgagcagggcuccggguacgccgcggaccucaagagcacccagaacgccaucgacaagaucaccaacaaggugaacuccgugaucgagaagaugaacacccaguucacggccgucggcaaggaguucaaccaccuggagaagcgcaucgagaaccugaacaagaagguggacgacggcuuccucgacaucuggaccuacaacgccgagcugcugguccuccuggagaacgagcggacccuggacuaccacgacagcaacgugaagaaccucuacgagaaggugcgcucccagcugaagaacaacgccaaggagaucgggaacggcugcuucgaguucuaccacaagugcgacaacacgugcauggagagcgucaagaacgggaccuacgacuaccccaaguacuccgaggaggcgaagcugaaccgggaggagaucgacggcgugaagcucgagagcacccgcaucuaccagauccuggccaucuacuccaccguggccagcucccugguccucguggugagccugggggccaucagcuucuggaugugcuccaacggcagccugcagugccggaucugcaucuga

SEQ ID NO: 71107 - RNA, 1701 nt, Artificial Sequence
  derived and/or modified CDS sequence (opt1) from hemagglutinin__InfluenzaA__AEM92518
augaaggccauccuggugguccuccuguacaccuucgccaccgcgaacgccgacacgcugugcaucggcuaccacgccaacaacagcaccgacaccguggacaccgugcucgagaagaacgucacggugacccacuccgugaaccugcuggaggacaagcacaacgggaagcucugcaagcugcgcggcgucgcgccccugcaccucgggaagugcaacaucgccggcuggauccuggggaacccggagugcgagagccuguccaccgccagcuccuggagcuacaucguggagaccuccagcuccgacaacggcacgugcuaccccggcgacuucaucgacuacgaggagcuccgggagcagcugagcuccgugagcuccuucgagcgcuucgagaucuuccccaagaccagcuccuggcccaaccacgacagcaacaagggggucaccaccgccugcccgcacgccggcgccaaguccuucuacaagaaccugaucuggcucgugaagaaggggaacagcuaccccaagcuguccaagagcuacaucaacgacaagcggaaggaggugcugguccucuggggcauccaccacccgcccacgagcgcggaccagcagucccuguaccagaacgccgacgccuacguguucguggggaccagccgcuacuccaagaaguucaagcccgagaucgccauccggcccaagguccgcgaccaggagggccggaugaacuacuacuggacccugguggagcccggcgacaagaucaccuucgaggccacggggaaccucguggucccccgcuacgcguucgccauggagcggaacgccggcagcgggaucaucaucuccgacaccccggugcacgacugcaacgcgaccugccagacccccaagggcgccaucaacacgagccugcccuuccagaacauccaccccaucaccaucggcaagugcccgaaguacgugaaguccaccaagcugcgccucgccaccgggcugcggaacguccccagcauccagucccgcggccuguucggggccaucgccggcuucaucgagggcggguggacgggcaugguggacgggugguacggcuaccaccaccagaacgagcaggggagcggcuacgccgccgaccucaaguccacccagaacgcgaucgacgagaucaccaacaaggugaacagcgucaucgagaagaugaacacccaguucacggccguggggaaggaguucaaccaccuggagaagcggaucgagaaccugaacaagaaggucgacgacggcuuccucgacaucuggaccuacaacgccgagcugcuggugcuccuggagaacgagcgcacccuggacuaccacgacuccaaggugaagaaccucuacgagaagguccggagccagcugaagaacaacgccaaggagaucggcaacgggugcuucgaguucuaccacaagugcgacaacacgugcauggaguccgugaagaacggcaccuacgacuaccccaaguacagcgaggaggccaagcugaaccgcgaggagaucgacggggugaagcucgaguccacccggaucuaccagauccuggcgaucuacagcaccgucgccuccagccuggugcucguggucagccugggcgccaucuccuucuggaugugcagcaacgggucccugcagugccgcaucugcaucuga

SEQ ID NO: 71108 - RNA, 1701 nt, Artificial Sequence
  derived and/or modified CDS sequence (opt1) from hemagglutinin__InfluenzaA__AEM92528
augaaggccauccuggugguccuccuguacaccuucgccaccgcgaacgccgacacgcugugcaucggcuaccacgccaacaacagcaccgacaccguggacaccgugcucgagaagaacgucacggugacccacuccgugaaccugcuggaggacaagcacaacgggaagcucugcaagcugcgcggcgucgcgccccugcaccucgggaagugcaacaucgccggcuggauccuggggaacccggagugcgagagccuguccaccgccagcuccuggagcuacaucguggagaccuccagcuccgacaacggcacgugcuaccccggcgacuucaucgacuacgaggagcuccgggagcagcugagcuccgugagcuccuucgagcgcuucgagaucuuccccaagaccagcuccuggcccaaccacgacagcaacaagggggucaccgccgccugcccgcacgccggcgcgaaguccuucuacaagaaccugaucuggcucgugaagaaggggaacagcuaccccaagcugaacaaguccuacaucaacgacaagggcaaggaggugcugguccucugggggauccaccaccccagcaccagcgccgaccagcagucccuguaccagaacgccgacgccuacguguucgugggcacgagccgguacuccaagaaguucaagcccgagaucgccauccgcccgaagguccgggaccaggagggccgcaugaacuacuacuggacccugguggagcccggggacaagaucaccuucgaggcgaccggcaaccucguggucccccgguacgccuucgccauggagcgcaacgccgggagcggcaucaucaucuccgacacgcccgugcacgacugcaacacgaccugccagaccccgaagggcgccaucaacaccagccugcccuuccagaacauccaccccaucaccaucgggaagugccccaaguacgugaaguccaccaagcugcggcucgcgaccggccugcgcaacgucccgagcauccagucccgggggcuguucggcgccaucgccggguucaucgagggcggcuggacggggaugguggacggcugguacggguaccaccaccagaacgagcagggcagcggguacgccgccgaccucaaguccacccagaacgcgaucgacaagaucaccaacaaggugaacagcgucaucgagaagaugaacacccaguucacggccgugggcaaggccuucaaccaccuggagaagcgcaucgagaaccugaacaagaaggucgacgacggcuuccucgacaucuggaccuacaacgccgagcugcuggugcuccuggagaacgagcggacccuggacuaccacgacuccaacgugaagaaccucuacgagaagguccgcaaccagcugaagaacaacgccaaggagaucgggaacggcugcuucgaguucuaccacaagugcgacaacacgugcauggagagcgugaagaacgggaccuacgacuaccccaaguacuccgaggaggcgaagcugaaccgggaggagaucgacggcgugaagcucgagagcacccgcaucuaccagauccuggccaucuacuccaccgucgccagcucccuggugcucguggucagccugggggccaucagcuucuggaugugcuccaacggcagccugcagugccggaucugcaucuga

SEQ ID NO: 71109 - RNA, 1701 nt, Artificial Sequence
  derived and/or modified CDS sequence (opt1) from hemagglutinin__InfluenzaA__AEM92548
augaaggccauccuggugguccuccuguacaccuucgccaccgcgacggccgacacccugugcaucggcuaccacgccaacaacagcaccgacaccguggacacggugcucgagaagaacgucaccgugacccacuccgugaaccugcuggaggacaagcacaacgggaagcucugcaagcugcgcggcgucgcgccccugcaccucgggaagugcaacaucgccggcuggauccuggggaacccggagugcgagagccuguccaccgccagcuccuggagcuacaucguggagacguccagcuccgacaacgggaccugcuaccccggcgacuucaucaacuacgaggagcuccgggagcagcugagcuccgugagcuccuucgagcgcuucgagaucuuccccaagaccagcuccuggcccaaccacgacagcaacaagggcgucaccgccgccugcccgcacgccggcgcgaaguccuucuacaagaaccugaucuggcucgugaagaaggggaacagcuaccccaagcuguccaagagcuacaucaacgacaagggcaaggaggugcugguccucugggggauccaccaccccagcacguccgccgaccagcagagccuguaccagaacgccgacgccuacguguucgugggcaccucccgguacagcaagaaguucaagcccgagaucgccauccgcccgaagguccgggaccaggagggccgcaugaacuacuacuggacccugguggagcccggggacaagaucaccuucgaggcgacgggcaaccucguggucccccgguacgccuucgccauggagcgcaacgccggguccggcaucaucaucagcgacacccccgugcacgacugcaacacgaccugccagaccccgaagggcgccaucaacaccucccugcccuuccagaacauccaccccaucaccaucgggaagugccccaaguacgucaagagcaccaagcugcggcucgcgacgggccugcgcaacgugccguccauccagagccgggggcuguucggcgccaucgccggguucaucgagggcggcuggaccgggaugguggacggcugguacggguaccaccaccagaacgagcagggcuccggguacgccgccgaccucaagagcacccagaacgcgaucgacaagaucaccaacaaggugaacuccgucaucgagaagaugaacacgcaguucaccgccgugggcaaggaguucaaccaccuggagaagcgcaucgagaaccugaacaagaaggucgacgacggcuuccucgacaucuggaccuacaacgccgagcugcuggugcuccuggagaacgagcggacccuggacuaccacgacagcaacgugaagaaccucuacgagaagguccgcaaccagcugaagaacaacgccaaggagaucgggaacggcugcuucgaguucuaccacaagugcgacaacacgugcauggaguccgugaagaacgggaccuacgacuaccccaaguacagcgaggaggccaagcugaaccgggaggagaucgacggcgugaagcucgaguccacccgcaucuaccagauccuggcgaucuacagcaccgucgccuccagccuggugcucguggucagccugggggccaucuccuucuggaugugcagcaacggcucccugcagugccggaucugcaucuga

SEQ ID NO: 71110 - RNA, 1701 nt, Artificial Sequence
  derived and/or modified CDS sequence (opt1) from hemagglutinin__InfluenzaA__AEM92558
augaaggccauccuggugguccuccuguacaccuucgccaccgcgaacgccgacacgcugugcaucggcuaccacgccaacaacagcaccgacaccguggacaccgugcucgagaagaacgucacggugacccacuccgugaaccugcuggaggacaagcacaacgggaagcucugcaagcugcgcggcgucgcgccccugcaccucgggaagugcagcaucgccggcuggauccuggggaacccggagugcgagucccugagcaccgcguccagcugguccuacaucguggagaccagcuccagcgacaacggcacgugcuaccccggcgacuucaucaacuacgaggagcuccgggagcagcuguccagcguguccagcuucgagcgcuucgagaucuuccccaagaccuccagcuggcccaaccacgacuccaacaagggggucaccgccgccugcccgcacgccggcgccaagagcuucuacaagaaccugaucuggcucgugaagaaggggaacuccuaccccaagcugagcaagagcuacaucaacgacaagggcaaggaggugcugguccucugggggauccaccaccccuccaccacggccgaccagcagagccuguaccagaacgccgacgccuacguguucgugggcaccucccgguacagcaagaaguucaagcccgagaucgccauccgcccgaagguccgggaccaggagggccgcaugaacuacuacuggacccugguggagcccggggacaagaucaccuucgaggcgacgggcaaccucguggucccccgguacgccuucgccauggagcgcaacgccggguccggcaucaucaucagcgacacccccgugcacgacugcaacacgaccugccagaccccgaagggcgccaucaacaccucccugcccuuccagaacauccaccccaucaccaucgggaagugccccaaguacgucaagagcaccaagcugcggcucgcgacgggccugcgcaacgugccguccauccagagccgggggcuguucggcgccaucgccggguucaucgagggcggcuggaccgggaugguggacggcugguacggguaccaccaccagaacgagcagggcuccggguacgccgccgaccucaagagcacccagaacgcgaucgacaagaucaccaacaaggugaacuccgucaucgagaagaugaacacgcaguucaccgccgugggcaaggaguucaaccaccuggagaagcgcaucgagaaccugaacaagaaggucgacgacggcuuccucgacaucuggaccuacaacgccgagcugcuggugcuccuggagaacgagcggacccuggacuaccacgacagcaacgugaagaaccucuacgagaagguccgcaaccagcugaagaacaacgccaaggagaucgggaacggcugcuucgaguucuaccacaagugcgacaacacgugcauggaguccgugaagaacgggaccuacgacuaccccaaguacagcgaggaggccaagcugaaccgggaggagaucgacggcgugaagcucgaguccacccgcaucuaccagauccuggcgaucuacagcaccgucgccuccagccuggugcucguggucagccugggggccaucuccuucuggaugugcagcaacggcucccugcagugccggaucugcaucuga

SEQ ID NO: 71111 - RNA, 1701 nt, Artificial Sequence; identical to SEQ ID NO: 71110
  derived and/or modified CDS sequence (opt1) from hemagglutinin__InfluenzaA__AEM92568

SEQ ID NO: 71112 - RNA, 1701 nt, Artificial Sequence
  derived and/or modified CDS sequence (opt1) from hemagglutinin__InfluenzaA__AEM92578
augaaggccauccuggugguccuccuguacaccuucgccaccgcgaacgccgacacgcugugcaucggcuaccacgccaacaacagcaccgacaccguggacaccgugcucgagaagaacgucacggugacccacuccgugaaccugcuggaggacaagcacaacgggaagcucugcaagcugcgcggcgucgcgccccugcaccucgggaagugcaacaucgccggcuggauccuggggaacccggagugcgagagccuguccaccgcgagcuccuggagcuacaucguggagaccuccaucagcgacaacggcacgugcuaccccggcgacuucaucaacuacgaggagcuccgggagcagcuguccagcguguccagcuucgagcgcuucgagaucuuccccaagaccuccagcuggcccaaccacgacuccaacaagggggucaccgccgccugcccgcacgccggcgccaagagcuucuacaagaaccugaucuggcucgugaagaaggggaacuccuaccccaagcugagcaaguccuacaucaacgacaagggcaaggaggugcugguccucugggggauccaccaccccagcaccagcgccgaccagcagucccuguaccagaacgccgacgccuacguguucgugggcacgagccgguacuccaagaaguucaagcccgagaucgccauccgcccgaagguccgggaccaggagggccgcaugaacuacuacuggacccugguggagcccggggacaagaucaccuucgaggcgaccggcaaccucguggucccccgguacgccuucgccauggagcgcaacgccgggagcggcaucaucaucuccgacacgcccgugcacgacugcaacacgaccugccagaccccgaagggcgccaucaacaccagccugcccuuccagaacauccaccccaucaccaucgggaagugccccaaguacgugaaguccaccaagcugcggcucgcgaccggccugcgcaacgucccgagcauccagucccgggggcuguucggcgccaucgccggguucaucgagggcggcuggacggggaugguggacggcugguacggguaccaccaccagaacgagcagggcagcggguacgccgccgaccucaaguccacccagaacgcgaucgacaagaucaccaacaaggugaacagcgucaucgagaagaugaacacccaguucacggccgugggcaaggaguucaaccaccuggagaagcgcaucgagaaccugaacaagaaggucgacgacggcuuccucgacaucuggaccuacaacgccgagcugcuggugcuccuggagaacgagcggacccuggacuaccacgacuccaacgugaagaaccucuacgagaagguccgcaaccagcugaagaacaacgccaaggagaucgggaacggcugcuucgaguucuaccacaagugcgacaacacgugcauggagagcgugaagaacgggaccuacgacuaccccaaguacuccgaggaggccaagcugaaccgggaggagaucgacggcgugaagcucgagagcacccgcaucuaccagauccuggcgaucuacuccaccgucgccagcucccuggugcucguggucagccugggggccaucagcuucuggaugugcuccaacggcagccugcagugccggaucugcaucuga

SEQ ID NO: 71113 - RNA, 1701 nt, Artificial Sequence
  derived and/or modified CDS sequence (opt1) from hemagglutinin__InfluenzaA__AEM92608
augaaggccauccuggugguccuccuguacaccuucgccaccgcgaacgccgacacgcugugcaucggcuaccacgccaacaacagcaccgacaccguggacaccgugcucgagaagaacgucacggugacccacuccgugaaccugcuggaggacaagcacaacgggaagcucugcaagcugcgcggcgucgcgccccugcaccucgggaagugcaacaucgccggcuggauccuggggaacccggagugcgagagccuguccaccgccagcuccuggagcuacaucguggagaccuccagcuccgacaacggcacgugcuaccccggcgacuucaucgacuacgaggagcuccgggagcagcugagcuccgugagcuccuucgagcgcuucgagaucuuccccaagaccagcuccuggcccaaccacgacagcaacaagggggucaccgccgccugcccgcacgccggcgcgaaguccuucuacaagaaccugaucuggcucgugaagaaggggaacagcuaccccaagcuguccaagagcuacaucaacgacaagggcaaggaggugcugguccucugggggauccaccaccccagcaccacggccgaccagcagucccuguaccagaacgccgacgccuacguguucgugggcaccagccgguacuccaagaaguucaagcccgagaucgccauccgcccgaagguccgggaccaggagggccgcaugaacuacuacuggacccugguggagcccggggacaagaucaccuucgaggcgacgggcaaccucguggucccccgguacgccuucgccauggagcgcaacgccgggagcggcaucaucaucuccgacacccccgugcacgacugcaacacgaccugccagaccccgaagggcgccaucaacaccagccugcccuuccagaacauccaccccaucaccaucgggaagugccccaaguacgugaaguccaccaagcugcggcucgcgacgggccugcgcaacgucccgagcauccagucccgggggcuguucggcgccaucgccggguucaucgagggcggcuggaccgggaugguggacggcugguacggguaccaccaccagaacgagcagggcagcggguacgccgccgaccucaaguccacccagaacgcgaucgacaagaucaccaacaaggugaacagcgucaucgagaagaugaacacgcaguucaccgccgugggcaaggaguucaaccaccuggagaagcgcaucgagaaccugaacaagaaggucgacgacggcuuccucgacaucuggaccuacaacgccgagcugcuggugcuccuggagaacgagcggacccuggacuaccacgacuccaacgugaagaaccucuacgagaagguccgcaaccagcugaagaacaacgccaaggagaucgggaacggcugcuucgaguucuaccacaagugcgacaacacgugcauggagagcgugaagaacgggaccuacgacuaccccaaguacuccgaggaggccaagcugaaccgggaggagaucgacggcgugaagcucgagagcacccgcaucuaccagauccuggcgaucuacuccaccgucgccagcucccuggugcucguggucagccugggggccaucagcuucuggaugugcuccaacggcagccugcagugccggaucugcaucuga

SEQ ID NO: 71114 - RNA, 1701 nt, Artificial Sequence
  derived and/or modified CDS sequence (opt1) from hemagglutinin__InfluenzaA__AEM92618
augaaggccauccuggugguccuccuguacaccuucgccaccgcgaacgccgacacgcugugcaucggcuaccacgccaacaacagcaccgacaccguggacaccgugcucgagaagaacgucacggugacccacuccgugaaccugcuggaggacaagcacaacgggaagcucugcaagcugcgcggcgucgcgccccugcaccucgggaagugcaacaucgccggcuggauccuggggaacccggagugcgagagccuguccaccgccaacagcugguccuacaucguggagaccagcuccagcgacaacggcacgugcuaccccggcgacuucaucgacuacgaggagcuccgggagcagcuguccagcguguccagcuucgagcgcuucgagaucuuccccaagaccaacuccuggcccaaccacgacagcaacaagggggucaccgccgccugcccgcacgccggcgcgaaguccuucuacaagaaccugaucuggcucgugaagaccgggaacagcuaccccaagcuguccaagagcuacaucaacgacaagggcaaggaggugcugguccucugggggauccaccaccccuccacgagcgccgaccagcagagccuguaccagaacgccgacgccuacguguucgugggcaccucccgguacagccgcaaguucaagcccgagaucgccauccggccgaagguccgcgaccaggagggccggaugaacuacuacuggacccugguggagcccggggacaagaucaccuucgaggcgacgggcaaccucguggucccccgcuacgccuucgccauggagcggaacgccggguccggcaucaucaucagcgacacccccgcccacgacugcaacacgaccugccagaccccgaagggcgcgaucaacaccucccugcccuuccagaacauccaccccaucaccaucgggaagugccccaaguacgucaagagcaccaagcugcgccucgccacgggccugcggaacgugccguccauccagagccgcgggcuguucggcgccaucgccggguucaucgagggcggcuggaccgggaugguggacggcugguacggguaccaccaccagaacgagcagggcuccggguacgccgcggaccucaagagcacccagaacgccaucgacaagaucaccaacaaggugaacuccgugaucgagaagaugaacacgcaguucaccgccgucggcaaggaguucaaccaccuggagaagcggaucgagaaccugaacaagaagguggacgacggcuuccucgacaucuggaccuacaacgccgagcugcugguccuccuggagaacgagcgcacccuggacuaccacgacagcaacgugaagaaccucuacgagaaggugcggucccagcugaagaacaacgccaaggagaucgggaacggcugcuucgaguucuaccacaagugcgacaacacgugcauggagagcgucaagaacgggaccuacgacuaccccaaguacuccgaggaggcgaagcugaaccgcgaggagaucgacggcgugaagcucgagagcacccggaucuaccagauccuggccaucuacuccaccguggccagcucccugguccucguggugagccugggggccaucagcuucuggaugugcuccaacggcagccugcagugccgcaucugcaucuga

SEQ ID NO: 71115 - RNA, 1701 nt, Artificial Sequence
  derived and/or modified CDS sequence (opt1) from hemagglutinin__InfluenzaA__AEM92638
augaaggccauccuggugguccuccuguacaccuucgccaccgcgaacgccgacacgcugugcaucggcuaccacgccaacaacagcaccgacaccguggacaccgugcucgagaagaacgucacggugacccacuccgugaacauccuggaggacaagcacaacgggaagcugugcaagcuccgcggcgucgcgccccugcaccuggggaagugcaacaucgccggcuggauccucgggaacccggagugcgagagccuguccaccgcgagcuccuggagcuacaucguggagaccuccagcuccgacaacggcacgugcuaccccggcgacuucaucgacuacgaggagcugcgggagcagcucagcuccgugagcuccuucgagcgcuucgagaucuuccccaagaccagcuccuggcccaaccacgacaccaacaagggggucaccgccgccugcccgcacgccggcgccaagagcuucuacaagaaccugaucuggcuggugaagaaggggaacuccuaccccaagcucagcaaguccuacaucaacgacaagggcaaggaggugcugguccugugggggauccaccaccccagcacgagcgccgaccagcagucccucuaccagaacgccgacgccuacguguucgugggcagcucccgguacagcaagaaguucaagcccgagaucgccauccgcccgaagguccgggaccaggagggccgcaugaacuacuacuggacccugguggagcccggggacaagaucaccuucgaggcgaccggcaaccugguggucccccgguacgccuucgccauggagaagaacgccggguccggcaucaucaucagcgacacgcccgugcacgacugcaacacgaccugccagaccccgaagggcgccaucaacaccucccuccccuuccagaacauccaccccaucaccaucgggaagugccccaaguacgucaagagcaccaagcugcgccuggcgaccggccuccggaacgugccguccauccagagccgcgggcuguucggcgccaucgccggguucaucgagggcggcuggacggggaugguggacggcugguacggguaccaccaccagaacgagcagggcuccggguacgccgccgaccucaagagcacccagaacgcgaucgacgagaucaccaacaaggugaacuccgucaucgagaagaugaacacccaguucacggccgugggcaaggaguucaaccaccuggagaagcggaucgagaaccugaacaagaaggucgacgacggcuuccuggacaucuggaccuacaacgccgagcuccuggugcugcucgagaacgagcgcacccuggacuaccacgacagcaacgugaagaaccuguacgagaagguccggucccagcucaagaacaacgccaaggagguggggaacggcugcuucgaguucuaccacaagugcgacaacacgugcauggagagcgugaagaacgggaccuacgacuaccccaaguacuccgaggaggccaagcugaaccgcgaggagaucgacggcgucaagcuggagagcacccggaucuaccagauccucgcgaucuacuccaccgccgccagcagccuggugcugguggucucccucggggccaucagcuucuggaugugcuccaacggcagccugcagugccgcaucugcaucuga

SEQ ID NO: 71116 - RNA, 1701 nt, Artificial Sequence
  derived and/or modified CDS sequence (opt1) from hemagglutinin__InfluenzaA__AEM92648
augaaggccauccuggugguccuccuguacaccuucgccaccgcgaacgccgacacgcugugcaucggcuaccacgccaacaacagcaccgacaccguggacaccgugcucgagaagaacgucacggugacccacuccgugaacauccuggaggacaagcacaacgggaagcugugcaagcuccgcggcgucgcgccccugcaccuggggaagugcaacaucgccggcuggauccucgggaacccggagugcgagagccuguccaccgcgagcuccuggagcuacaucguggagaccuccagcuccgacaacggcacgugcuaccccggcgacuucaucgacuacgaggagcugcgggagcagcucagcuccgugagcuccuucgagcgcuucgagaucuuccccaagaccagcuccuggcccaaccacgacaccaacaagggggucaccgccgccugcccgcacgccggcgccaagagcuucuacaagaaccugaucuggcuggugaaggaggggaacuccuaccccaagcucagcaaguccuacaucaacgacaagggcaaggaggugcugguccugugggggauccaccaccccagcacgagcgccgaccagcagucccucuaccagaacgccgacgccuacguguucgugggcagcucccgguacagcaagaaguucaagcccgagaucgccauccgcccgaagguccgggaccaggagggccgcaugaacuacuacuggacccugguggagcccggggacaagaucaccuucgaggcgaccggcaaccugguggucccccgguacgccuucgccauggagaagaacgccggguccggcaucaucaucagcgacacgcccgugcacgacugcaacacgaccugccagaccccgaagggcgccaucaacaccucccuccccuuccagaacauccaccccaucaccaucgggaagugccccaaguacgucaagagcaccaagcugcgccuggcgaccggccuccggaacgugccguccauccagagccgcgggcuguucggcgccaucgccggguucaucgagggcggcuggacggggaugguggacggcugguacggguaccaccaccagaacgagcagggcuccggguacgccgccgaccucaagagcacccagaacgcgaucgacgagaucaccaacaaggugaacuccgucaucgagaagaugaacacccaguucacggccgugggcaaggaguucaaccaccuggagaagcggaucgagaaccugaacaagaaggucgacgacggcuuccuggacaucuggaccuacaacgccgagcuccuggugcugcucgagaacgagcgcacccuggacuaccacgacagcaacgugaagaaccuguacgagaagguccggucccagcucaagaacaacgccaaggagguggggaacggcugcuucgaguucuaccacaagugcgacaacacgugcauggagagcgugaagaacgggaccuacgacuaccccaaguacuccgaggaggccaagcugaaccgcgaggagaucgacggcgucaagcuggagagcacccggaucuaccagauccucgcgaucuacuccaccgccgccagcagccuggugcugguggucucccucggggccaucagcuucuggaugugcuccaacggcagccugcagugccgcaucugcaucuga

SEQ ID NO: 71117 - RNA, 1701 nt, Artificial Sequence; identical to SEQ ID NO: 69557
  derived and/or modified CDS sequence (opt1) from hemagglutinin__InfluenzaA__AEM98407

SEQ ID NO: 71118 - RNA, 1701 nt, Artificial Sequence; identical to SEQ ID NO: 69557
  derived and/or modified CDS sequence (opt1) from hemagglutinin__InfluenzaA__AEM98418

SEQ ID NO: 71119 - RNA, 1701 nt, Artificial Sequence; identical to SEQ ID NO: 69557
  derived and/or modified CDS sequence (opt1) from hemagglutinin__InfluenzaA__AEM98429

SEQ ID NO: 71120 - RNA, 1701 nt, Artificial Sequence
  derived and/or modified CDS sequence (opt1) from hemagglutinin__InfluenzaA__AEN55398
augaaggccauccuggugguccuccuguacaccuucgccaccgcgaacgccgacacgcugugcaucggcuaccacgccaacaacagcaccgacaccguggacaccgugcucgagaagaacgucacggugacccacuccgugaaccugcuggaggacaagcacaacgggaagcucugcaagcugcgcggcgucgcgccccugcaccucgggaagugcaacaucgccggcuggauccuggggaacccggagugcgagagccuguccaccgccagcuccuggagcuacaucguggagaccuccagcuccgacaacggcacgugcuaccccggcaacuucaucgacuacgaggagcuccgggagcagcugagcuccgugagcuccuucgagcgcuucgagaucuuccccaagaccagcuccuggcccgaccacgacagcaacaagggggucaccgccgccugcccgcacgccggcgcgaaguccuucuacaagaaccugaucuggcucgugaagaaggggaacagcuaccccaagcuguccaagagcuacaucaacgacaagggcaaggaggugcugguccucugggggauccaccaccccagcaccuccgccgaccagcagagccuguaccagaacgccgacgccuacguguucgugggcacgucccgguacagcaagaaguucaagcccgagaucgccauccgcccgaagguccgggaccaggagggccgcaugaacuacuacuggacccugguggagcccggggacaagaucaccuucgaggcgaccggcaaccucguggcgccccgguacgccuucgccauggagcgcaacgccggguccggcaucaucaucagcgacacgcccguccacgacugcaacacgaccugccagaccccgaagggcgccaucaacaccucccugcccuuccagaacauccaccccaucaccaucgggaagugccccaaguacgucaagagcaccaagcugcggcucgugaccggccugcgcaacgugccguccauccagagccgggggcuguucggcgccaucgccggguucaucgagggcggcuggacggggaugguggacggcugguacggguaccaccaccagaacgagcagggcuccggguacgccgccgaccucaagagcacccagaacgcgaucgacaagaucaccaacaaggugaacuccgucaucgagaagaugaacacccaguucacggccgugggcaaggaguucaaccaccuggagaagcgcaucgagaaccugaacaagaaggucgacgacggcuuccucgacaucuggaccuacaacgccgagcugcuggugcuccuggagaacgagcggacccuggacuaccacgacagcaacgugaagaaccucuacgagaagguccgcucccagcugaagaacaacgccaaggagaucgggaacggcugcuucgaguucuaccacaagugcgacaacacgugcauggagagcgugaagaacgggaccuacgacuaccccaaguacuccgaggaggccaagcugaaccgggaggagaucgacggcgugaagcucgagagcacccgcaucuaccagauccuggcgaucuacuccaccgucgccagcagccuggugcucguggucucccugggggccaucagcuucuggaugugcuccaacggcagccugcagugccggaucugcaucuga

SEQ ID NO: 71121 - RNA, 1701 nt, Artificial Sequence; identical to SEQ ID NO: 70944
  derived and/or modified CDS sequence (opt1) from hemagglutinin__InfluenzaA__AEN55408

SEQ ID NO: 71122 - RNA, 1701 nt, Artificial Sequence; identical to SEQ ID NO: 70459
  derived and/or modified CDS sequence (opt1) from hemagglutinin__InfluenzaA__AEN55418

SEQ ID NO: 71123 - RNA, 1701 nt, Artificial Sequence; identical to SEQ ID NO: 69608
  derived and/or modified CDS sequence (opt1) from hemagglutinin__InfluenzaA__AEN55463

SEQ ID NO: 71124 - RNA, 1701 nt, Artificial Sequence
  derived and/or modified CDS sequence (opt1) from hemagglutinin__InfluenzaA__AEN55473
augaaggccauccuggugguccuccuguacaccuucgccaccgcgaacgccgacacgcugugcaucggcuaccacgccaacaacagcaccgacaccguggacaccgugcucgagaagaacgucacggugacccacuccgugaaccugcuggaggacaagcacaacgggaagcucugcaagcugcgcggcgucgcgccccugcaccucgggaagugcaacaucgccggcuggauccuggggaacccggagugcgagagccuguccaccgccagcuccuggagcuacaucguggagaccuccagcuccgacaacggcacgugcuaccccggcgacuucaucgacuacgaggagcuccgggagcagcugagcuccgugagcuccuucgagcgcuucgagaucuuccccaagaccagcuccuggcccaaccacgacagcaacaagggggucaccgccgccugcccgcacgccggcgcgaaguccuucuacaagaaccugaucuggcucgugaagaaggggaacagcuaccccaagcuguccaagagcuacaucaacgacaagggcaaggaggugcugguccucugggggauccaccaccccagcaccacgaccgaccagcagucccuguaccagaccgccgacaccuacguguucgugggcacgagccgguacuccaagaaguucaagcccgagaucgccauccgcccgaagguccgggaccaggagggccgcaugaacuacuacuggacccugguggagcccggggacaagaucaccuucgaggccaccggcaaccucguggucccccgguacgccuucgcgauggagcgcaacgccgggagcggcaucaucaucuccgacacgcccgugcacgacugcaacacgaccugccagaccccgaagggcgccaucaacaccagccugcccuuccagaacauccaccccaucaccaucgggaagugccccaaguacgugaaguccaccaagcugcggcucgccaccggccugcgcaacgucccgagcauccagucccgggggcuguucggcgccaucgcgggguucaucgagggcggcuggacggggaugguggacggcugguacggguaccaccaccagaacgagcagggcagcggguacgccgccgaccucaaguccacccagaacgccaucgacaagaucaccaacaaggugaacagcgucaucgagaagaugaacacccaguucacggccgugggcaaggaguucaaccaccuggagaagcgcaucgagaaccugaacaagaaggucgacgacggcuuccucgacaucuggaccuacaacgcggagcugcuggugcuccuggagaacgagcggacccuggacuaccacgacuccaacgugaagaaccucuacgagaagguccgcaaccagcugaagaccaacgccaaggagaucgggaacggcugcuucgaguucuaccacaagugcgacaacacgugcauggagagcgugaagaacgggaccuacgacuaccccaaguacuccgaggaggccaagcugaaccgggaggagaucgacggcgugaagcucgagagcacccgcaucuaccagauccuggccaucuacuccaccgucgccagcucccuggugcucguggucagccugggggcgaucagcuucuggaugugcuccaacggcagccugcagugccggaucugcaucuga

SEQ ID NO: 71125 - RNA, 1701 nt, Artificial Sequence; identical to SEQ ID NO: 70459
  derived and/or modified CDS sequence (opt1) from hemagglutinin__InfluenzaA__AEN55483

SEQ ID NO: 71126 - RNA, 1701 nt, Artificial Sequence; identical to SEQ ID NO: 71066
  derived and/or modified CDS sequence (opt1) from hemagglutinin__InfluenzaA__AEN55493

SEQ ID NO: 71127 - RNA, 1701 nt, Artificial Sequence; identical to SEQ ID NO: 70459
  derived and/or modified CDS sequence (opt1) from hemagglutinin__InfluenzaA__AEN55503

SEQ ID NO: 71128 - RNA, 1701 nt, Artificial Sequence
  derived and/or modified CDS sequence (opt1) from hemagglutinin__InfluenzaA__AEN55513
augaaggccauccuggugguccuccuguacaccuucgccaccgcgaacgccgacacgcugugcaucggcuaccacgccaacaacagcaccgacaccguggacaccgugcucgagaagaacgucacggugacccacuccgugaaccugcuggaggacaagcacaacgggaagcucugcaagcugcgcggcgucgcgccccugcaccucgggaagugcaacaucgccggcuggauccuggggaacccggagugcgagagccuguccaccgccagcuccuggagcuacaucguggagaccuccagcuccgacaacggcacgugcuaccccggcgacuucaucgacuacgaggagcuccgggagcagcugagcuccgugagcuccuucgagcgcuucgagaucuuccccaagaccagcuccuggcccaaccacgacagcaacaagggggucaccgccgccugcccgcacgccggcgcgaaguccuucuacaagaaccugaucuggcucgugaagaaggggaacagcuaccccaagcuguccaagagcuacaucaacgacaagggcaaggaggugcugguccucugggggauccaccaccccagcaccacggccgaccagcagaaccuguaccagaacgccgacaccuacguguucgugggcaccucccgguacagcaagaaguucaagcccgagaucgccauccgcccgaagguccgggaccaggagggccgcaugaacuacuacuggacccugguggagcccggggacaagaucacguucgaggccaccggcaaccucguggucccccgguacgcguucgccauggagcgcaacgccggguccggcaucaucaucagcgacacccccgugcacgacugcaacaccacgugccagaccccgaagggcgccaucaacaccucccugcccuuccagaacauccaccccaucaccaucgggaagugccccaaguacgucaagagcacgaagcugcggcucgccaccggccugcgcaacgugccguccauccagagccgggggcuguucggcgcgaucgccggguucaucgagggcggcuggaccgggaugguggacggcugguacggguaccaccaccagaacgagcagggcuccggguacgccgccgaccucaagagcacccagaacgccaucgacaagaucacgaacaaggugaacuccgucaucgagaagaugaacacccaguucaccgcggugggcaaggaguucaaccaccuggagaagcgcaucgagaaccugaacaagaaggucgacgacggcuuccucgacaucuggaccuacaacgccgagcugcuggugcuccuggagaacgagcggacgcuggacuaccacgacagcaacgugaagaaccucuacgagaagguccgcaaccagcugaagaacaacgccaaggagaucgggaacggcugcuucgaguucuaccacaagugcgacaacacgugcauggaguccgugaagaacgggaccuacgacuaccccaaguacagcgaggaggccaagcugaaccgggaggagaucgacggcgugaagcucgaguccacccgcaucuaccagauccuggccaucuacagcaccgucgcguccagccuggugcucguggucucccugggggccaucagcuucuggaugugcagcaacggcucccugcagugccggaucugcaucuga

SEQ ID NO: 71129 - RNA, 1701 nt, Artificial Sequence; identical to SEQ ID NO: 70459
  derived and/or modified CDS sequence (opt1) from hemagglutinin__InfluenzaA__AEN55523

SEQ ID NO: 71130 - RNA, 1701 nt, Artificial Sequence; identical to SEQ ID NO: 69248
  derived and/or modified CDS sequence (opt1) from hemagglutinin__InfluenzaA__AEN68904

SEQ ID NO: 71131 - RNA, 1701 nt, Artificial Sequence; identical to SEQ ID NO: 66693
  derived and/or modified CDS sequence (opt1) from hemagglutinin__InfluenzaA__AEN68905

SEQ ID NO: 71132 - RNA, 1701 nt, Artificial Sequence; identical to SEQ ID NO: 66693
  derived and/or modified CDS sequence (opt1) from hemagglutinin__InfluenzaA__AEN68906

SEQ ID NO: 71133 - RNA, 1701 nt, Artificial Sequence; identical to SEQ ID NO: 67795
  derived and/or modified CDS sequence (opt1) from hemagglutinin__InfluenzaA__AEN68907

SEQ ID NO: 71134 - RNA, 1701 nt, Artificial Sequence; identical to SEQ ID NO: 66693
  derived and/or modified CDS sequence (opt1) from hemagglutinin__InfluenzaA__AEN68908

SEQ ID NO: 71135 - RNA, 1701 nt, Artificial Sequence
  derived and/or modified CDS sequence (opt1) from hemagglutinin__InfluenzaA__AEN68909
augaaggccauccuggugguccuccuguacaccuucgccaccgcgaacgccgacacgcugugcgugggcuaccacgccaacaacagcaccgacaccguggacaccguccucgagaagaacgugacggugacccacuccgucaaccugcuggaggacaagcacaacgggaagcucugcaagcugcgcggcguggcgccccugcaccucgggaagugcaacaucgccggcuggauccuggggaacccggagugcgagagccuguccaccgccagcuccuggagcuacaucguggagaccuccagcuccgacaacggcacgugcuaccccggcgacuucaucgacuacgaggagcuccgggagcagcugagcuccgucagcuccuucgagcgcuucgagaucuuccccaagaccagcuccuggcccaaccacgacagcaacaagggggugaccgccgccugcccgcacgccggcgcgaaguccuucuacaagaaccugaucuggcucgugaagaaggggaacagcuaccccaagcuguccaagagcuacaucaacgacaagggcaaggagguccuggugcucugggggauccaccaccccagcaccuccgccgaccagcagagccuguaccagaacgccgacgccuacguguucgucggcacgucccgguacagcaagaaguucaagcccgagaucgccauccgcccgaaggugcgggaccaggagggccgcaugaacuacuacuggacccugguggagcccggggacaagaucaccuucgaggcgaccggcaaccucgucgugccccgguacgccuucgccauggagcgcaacgccggguccggcaucaucaucagcgacacgcccgugcacgacugcaacacgaccugccagaccccgaagggcgccaucaacaccucccugcccuuccagaacauccaccccaucaccaucgggaagugccccaaguacgucaagagcaccaagcugcggcucgcgaccggccugcgcaacgugccguccauccagagccgggggcuguucggcgccaucgccggguucaucgagggcggcuggacggggaugguggacggcugguacggguaccaccaccagaacgagcagggcuccggguacgccgccgaccucaagagcacccagaacgcgaucgacgagaucaccaacaaggucaacuccgugaucgagaagaugaacacccaguucacggccgucggcaaggaguucaaccaccuggagaagcgcaucgagaaccugaacaagaagguggacgacggcuuccucgacaucuggaccuacaacgccgagcugcuggugcuccuggagaacgagcggacccuggacuaccacgacagcaacgucaagaaccucuacgagaaggugcgcucccagcugaagaacaacgccaaggagaucgggaacggcugcuucgaguucuaccacaagugcgacaacacgugcauggagagcgugaagaacgggaccuacgacuaccccaaguacuccgaggaggccaagcugaaccgggaggagaucgacggcgucaagcucgagagcacccgcaucuaccagauccuggcgaucuacuccaccguggccagcagccuggugcucgucgugucccugggggccaucagcuucuggaugugcuccaacggcagccugcagugccggaucugcaucuga

SEQ ID NO: 71136 - RNA, 1701 nt, Artificial Sequence
  derived and/or modified CDS sequence (opt1) from hemagglutinin__InfluenzaA__AEN68910
augaaggccauccuggugguccuccuguacaccuucgccaccgcgaacgccgacacgcugugcgugggcuaccacgccaacaacagcaccgacaccguggacaccguccucgagaagaacgugacggugacccacuccgucaaccugcuggaggacaagcacaacgggaagcucugcaagcugcgcggcguggcgccccugcaccucgggaagugcaacaucgccggcuggauccuggggaacccggagugcgagagccuguccaccgccagcuccuggagcuacaucguggagaccuccagcuccgacaacggcacgugcuaccccggcgacuucaucgacuacgaggagcuccgggagcagcugagcuccgucagcuccuucgagcgcuucgagaucuuccccaagaccagcuccuggcccaaccacgacagcaacaagggggugaccgccgccugcccgcacgccggcgcgaaguccuucuacaagaaccugaucuggcucgugaagaaggggaacagcuaccccaagcuguccaagagcuacaucaacgacaagggcaaggagguccuggugcucugggggauccaccaccccagcaccuccgccgaccagcagagccuguaccagaacgccgacgccuacguguucgucggcacgucccgguacagcaagaaguucaagcccgagaucgccauccgcccgaaggugcgggaccaggagggccgcaugaacuacuacuggacccugguggagcccggggacaagaucaccuucgaggcgaccggcaaccucgucgugccccgguacgccuucgccauggagcgcaacgccggguccggcaucaucaucagcgacacgcccgugcacgacugcaacacgaccugccagaccccgaagggcgccaucaacaccucccugcccuuccagaacauccaccccaucaccaucgggaagugccccaaguacgucaagggcaccaagcugcggcucgcgaccgggcugcgcaacgugccgagcauccagucccggggccuguucggggccaucgccggcuucaucgagggcggguggacgggcaugguggacgggugguacggcuaccaccaccagaacgagcaggggagcggcuacgccgccgaccucaaguccacccagaacgcgaucgacgagaucaccaacaaggucaacagcgugaucgagaagaugaacacccaguucacggccgucggcaaggaguucaaccaccuggagaagcgcaucgagaaccugaacaagaagguggacgacggguuccucgacaucuggaccuacaacgccgagcugcuggugcuccuggagaacgagcggacccuggacuaccacgacuccaacgucaagaaccucuacgagaaggugcgcagccagcugaagaacaacgccaaggagaucggcaacgggugcuucgaguucuaccacaagugcgacaacacgugcauggaguccgugaagaacggcaccuacgacuaccccaaguacagcgaggaggccaagcugaaccgggaggagaucgacggggucaagcucgaguccacccgcaucuaccagauccuggcgaucuacagcaccguggccuccagccuggugcucgucgugagccugggcgccaucuccuucuggaugugcagcaacggcucccugcagugccggaucugcaucuga

SEQ ID NO: 71137 - RNA, 1701 nt, Artificial Sequence; identical to SEQ ID NO: 68809
  derived and/or modified CDS sequence (opt1) from hemagglutinin__InfluenzaA__AEN68911

SEQ ID NO: 71138 - RNA, 1701 nt, Artificial Sequence; identical to SEQ ID NO: 66693
  derived and/or modified CDS sequence (opt1) from hemagglutinin__InfluenzaA__AEN68912

SEQ ID NO: 71139 - RNA, 1701 nt, Artificial Sequence; identical to SEQ ID NO: 66784
  derived and/or modified CDS sequence (opt1) from hemagglutinin__InfluenzaA__AEN68913

SEQ ID NO: 71140 - RNA, 1701 nt, Artificial Sequence; identical to SEQ ID NO: 69359
  derived and/or modified CDS sequence (opt1) from hemagglutinin__InfluenzaA__AEN68914

SEQ ID NO: 71141 - RNA, 1701 nt, Artificial Sequence; identical to SEQ ID NO: 66693
  derived and/or modified CDS sequence (opt1) from hemagglutinin__InfluenzaA__AEN68915

SEQ ID NO: 71142 - RNA, 1701 nt, Artificial Sequence; identical to SEQ ID NO: 66693
  derived and/or modified CDS sequence (opt1) from hemagglutinin__InfluenzaA__AEN68916

SEQ ID NO: 71143 - RNA, 1701 nt, Artificial Sequence
  derived and/or modified CDS sequence (opt1) from hemagglutinin__InfluenzaA__AEN68917
augaaggccauccugggcgugcuccuguacaccuucgccaccgcgaacgccgacacgcugugcaucggguaccacgccaacaacagcaccgacaccgucgacaccgugcucgagaagaacgugacggucacccacuccgugaaccugcuggaggacaagcacaacggcaagcucugcaagcugcgcgggguggcgccccugcaccucggcaagugcaacaucgccggguggauccugggcaacccggagugcgagagccuguccaccgccagcuccuggagcuacaucgucgagaccuccagcuccgacaacggcacgugcuaccccggggacuucaucgacuacgaggagcuccgggagcagcugagcuccgugagcuccuucgagcgcuucgagaucuuccccaagaccagcuccuggcccaaccacgacagcaacaagggcgugaccgccgccugcccgcacgccggggcgaaguccuucuacaagaaccugaucuggcucgucaagaagggcaacagcuaccccaagcuguccaagagcuacaucaacgacaaggggaaggaggugcuggugcucuggggcauccaccaccccagcaccuccgccgaccagcagagccuguaccagaacgccgacgccuacgucuucgugggcacgucccgguacagcaagaaguucaagcccgagaucgccauccgcccgaaggugcgggaccaggaggggcgcaugaacuacuacuggacccuggucgagcccggcgacaagaucaccuucgaggcgaccgggaaccucguggugccccgguacgccuucgccauggagcgcaacgccggcuccggcaucaucaucagcgacacgcccguccacgacugcaacacgaccugccagaccccgaagggggccaucaacaccucccugcccuuccagaacauccaccccgugaccaucggcaagugccccaaguacgucaagagcaccaagcugcggcucgcgaccgggcugcgcaacgugccguccauccagagccggggccuguucggggccaucgccggcuucaucgagggcggguggacgggcaugguggacgggugguacggcuaccaccaccagaacgagcagggguccggcuacgccgccgaccucaagagcacccagaacgcgaucgacaagaucaccaacaaggugaacuccgucaucgagaagaugaacacccaguucacggccgugggcaaggaguucaaccaccuggagaagcgcaucgagaaccugaacaagaaggucgacgacggguuccucgacaucuggaccuacaacgccgagcugcuggugcuccuggagaacgagcggacccuggacuaccacgacagcaacgugaagaaccucuacgagaagguccgcucccagcugaagaacaacgccaaggagaucggcaacgggugcuucgaguucuaccacaagugcgacaacacgugcauggagagcgugaagaacggcaccuacgacuaccccaaguacuccgaggaggccaagcugaaccgggaggagaucgacggggugaagcucgagagcacccgcaucuaccagauccuggcgaucuacuccaccgucgccagcagccuggugcucguggucucccugggcgccaucagcuucuggaugugcuccaacggcagccugcagugccggaucugcaucuga

SEQ ID NO: 71144 - RNA, 1701 nt, Artificial Sequence
  derived and/or modified CDS sequence (opt1) from hemagglutinin__InfluenzaA__AEN68918
augaaggccauccuggugguccuccuguacaccuucgccaccgcgaacgccgacacgcugugcaucggcuaccacgccaacaacagcaccgacaccguggacaccgugcucgagaagaacgucacggugacccacuccgugaaccugcuggaggacaagaacaacgggaagcucugcaagcugcgcggcgucgcgccccugcaccucgggaagugcaacaucgccggcuggauccuggggaacccggagugcgagagccuguccaccgccagcuccuggagcuacaucguggagaccuccagcuccgacaacggcacgugcuaccccggcgacuucaucgacuacgaggagcuccgggagcagcugagcuccgugagcuccuucgagcgcuucgagauguuccccaagaccagcuccuggcccaaccacgacagcaacaagggggucaccgccgccugcccgcacgccggcgcgaaguccuucuacaagaaccugaucuggcucgugaagaaggggaacagcuaccccaagcuguccaagagcuacaucaacgacaagggcaaggaggugcugguccucugggggauccaccaccccagcaccuccgccgaccagcagagccuguaccagaacgccgacgccuacguguucgugggcacgucccgguacagcaagaaguucaagcccgagaucgccauccgcccgaagguccgggaccaggagggccgcaugaacuacuacuggacccugguggagcccggggacaagaucaccuucgaggcgaccggcaaccucguggucccccgguacgccuucgccauggagcgcaacgccggguccggcaucaucaucagcgacacgcccgugcacgacugcaacacgaccugccagaccccgaagggcgccaucaacaccucccugcccuuccagaacauccaccccaucaccaucgggaagugccccaaguacgucaagagcaccaagcugcggcucgcgaccggccugcgcaacgugccguccauccagagccgggggcuguucggcgccaucgccggguucaucgagggcggcuggacggggaugguggacggcugguacggguaccaccaccagaacgagcagggcuccggguacgccgccgaccucaagagcacccagaacgcgaucgacgagaucaccaacaaggugaacuccgucaucgagaagaugaacacccaguucacggccgugggcaaggaguucaaccaccuggagaagcgcaucgagaaccugaacaagaaggucgacgacggcuuccucgacaucuggaccuacaacgccgagcugcuggugcuccuggagaacgagcggacccuggacuaccacgacagcaacgugaagaaccucuacgagaagguccgcucccagcugaagaacaacgccaaggagguggggaacggcugcuucgaguucuaccacaagugcgacaacacgugcauggagagcgugaagaacgggaccuacgacuaccccaaguacuccgaggaggccaagcugaaccgggaggagaucgacggcgucaagcucgagagcacccgcaucuaccagauccuggcgaucuacuccaccguggccagcagccuggugcucgucgugucccugggggccaucagcuucuggaugugcuccaacggcagccugcagugccggaucugcaucuga

SEQ ID NO: 71145 - RNA, 1701 nt, Artificial Sequence; identical to SEQ ID NO: 69608
  derived and/or modified CDS sequence (opt1) from hemagglutinin__InfluenzaA__AEN68919

SEQ ID NO: 71146 - RNA, 1701 nt, Artificial Sequence; identical to SEQ ID NO: 68857
  derived and/or modified CDS sequence (opt1) from hemagglutinin__InfluenzaA__AEN68920

SEQ ID NO: 71147 - RNA, 1701 nt, Artificial Sequence; identical to SEQ ID NO: 67857
  derived and/or modified CDS sequence (opt1) from hemagglutinin__InfluenzaA__AEN68921

SEQ ID NO: 71148 - RNA, 1701 nt, Artificial Sequence; identical to SEQ ID NO: 67853
  derived and/or modified CDS sequence (opt1) from hemagglutinin__InfluenzaA__AEN68922

SEQ ID NO: 71149 - RNA, 1701 nt, Artificial Sequence; identical to SEQ ID NO: 67857
  derived and/or modified CDS sequence (opt1) from hemagglutinin__InfluenzaA__AEN68923

SEQ ID NO: 71150 - RNA, 1701 nt, Artificial Sequence; identical to SEQ ID NO: 67857
  derived and/or modified CDS sequence (opt1) from hemagglutinin__InfluenzaA__AEN68924

SEQ ID NO: 71151 - RNA, 1701 nt, Artificial Sequence
  derived and/or modified CDS sequence (opt1) from hemagglutinin__InfluenzaA__AEN68925
augaaggccauccuggugguccuccuguacaccuucgccaccgcgaacgccgacacgcugugcaucggcuaccacgccaacaacagcaccgacaccguggacaccgugcucgagaagaacgucacggugacccacuccgugaaccugcuggaggacaagcacaacgggaagcucugcaagcugcgcggcgucgcgccccugcaccucgggaagugcaacaucgccggcuggauccuggggaacccggagugcgagagccuguccaccgccagcuccuggagcuacaucguggagaccuccagcuccgacaacggcacgugcuaccccggcgacuucaucgacuacgaggagcuccgggagcagcugagcuccgugagcuccuucgagcgcuucgagaucuuccccaagaccagcuccuggcccaaccacgacagcaacaagggggucaccgccgccugcccgcacgccggcgcgaaguccuucuacaagaaccugaucuggcucgugaagaaggggaacagcuaccccaagcuguccaagagcuacaucaacgacaagggcaaggaggugcugguccucugggggauccaccaccccagcaccuccgccgaccagcagagccuguaccagaacgccgacgccuacguguucguggagacgucccgguacagcaagaaguucaagcccgagaucgccauccgcccgaagguccgggaccaggagggccgcaugaacuacuacuggacccugguggagcccggcgacaagaucaccuucgaggcgaccgggaaccucguggucccccgguacgccuucgccauggagcgcaacgccggcuccgggaucaucaucagcgacacgcccgugcacgacugcaacacgaccugccagaccccgaagggcgccaucaacaccucccugcccuuccagaacauccaccccaucaccaucggcaagugccccaaguacgucaagagcaccaagcugcggcucgcgaccgggcugcgcaacgugccguccauccagagccggggccuguucggggccaucgccggcuucaucgagggcggguggacgggcaugguggacgggugguacggcuaccaccaccagaacgagcagggguccggcuacgccgccgaccucaagagcacccagaacgcgaucgacaagaucaccaacaaggugaacuccgucaucgagaagaugaacacccaguucacggccguggggaaggaguucaaccaccuggagaagcgcaucgagaaccugaacaagaaggucgacgacggcuuccucgacaucuggaccuacaacgccgagcugcuggugcuccuggagaacgagcggacccuggacuaccacgacagcaacgugaagaaccucuacgagaagguccgcucccagcugaagaacaacgccaaggagaucggcaacgggugcuucgaguucuaccacaagugcgacaacacgugcauggagagcgugaagaacggcaccuacgacuaccccaaguacuccgaggaggccaagcugaaccgggaggagaucgacggggugaagcucgagagcacccgcaucuaccagauccuggcgaucuacuccaccgucgccagcagccuggugcucguggucucccugggcgccaucagcuucuggaugugcuccaacgggagccugcagugccggaucugcaucuga

SEQ ID NO: 71152 - RNA, 1701 nt, Artificial Sequence
  derived and/or modified CDS sequence (opt1) from hemagglutinin__InfluenzaA__AEN68926
augaaggccauccuggugguccuccuguacaccuucgccaccgcgaacgccgacacgcugugcaucggcuaccacgccaacaacagcaccgacaccguggacaccgugcucgagaagaacgucacggugacccacuccgugaaccugcuggaggacaagcacaacgggaagcucugcaagcugcgcggcgucgcgccccugcaccucgggaagugcaacaucgccggcuggauccuggggaacccggagugcgagagccuggccaccgccuccagcugguccuacaucguggagaccagcaacuccgacaacggcacgugcuaccccggcgacuucaucgacuacgaggagcuccgggagcagcugagcuccgugagcuccuucgagcgcuucgagaucuuccccaagaccagcuccuggcccaaccacgacagcaacaagggggucaccgccgccugcccgcacgcgggcgccaaguccuucuacaagaaccugaucuggcucgugaagaaggggaacagcuaccccaagcuguccaagagcuacaucaacgacaagggccgggaggugcugguccucugggggauccaccaccccuccaccagcgccgaccagcagagccuguaccagaacgccgacacguacguguucgugggcaccucccgcuacagcaagaaguucaagcccgagaucgccauccggccgaagguccgcgaccaggagggccggaugaacuacuacuggacccugguggagcccggggacaagaucaccuucgaggcgacgggcaaccucguggucccccgcuacgccuucgccauggagcggaacgccggguccggcaucaucaucagcgacacccccgugcacgacugcaacacgaccugccagaccccgaagggcgccaucaacaccucccugcccuuccagaacauccaccccaucaccaucgggaagugccccaaguacgucaagagcaccaagcugcgccucgcgacgggccugcggaacgugccguccauccagagccgcgggcuguucggcgccaucgccggguucaucgagggcggcuggaccgggaugguggacggcugguacggguaccaccaccagaacgagcagggcuccggguacgccgccgaccucaagagcacccagaacgcgaucgacgagaucaccaacaaggugaacuccgucaucgagaagaugaacacgcaguucaccgccgugggcaaggaguucaaccaccuggagaagcggaucgagaaccugaacaagaaggucgacgacggcuuccucgacaucuggaccuacaacgccgagcugcuggugcuccuggagaacgagcgcacccuggacuaccacgacagcaacgugaagaaccucuacgagaagguccggucccagcugaagaacaacgccaaggagaucgggaacggcugcuucgaguucuaccacaagugcgacaacacgugcauggagagcgugaagaacgggaccuacgacuaccccaaguacuccgaggaggccaagcugaaccgcgaggagaucgacggcgugaagcucgagagcacccggaucuaccagauccuggcgaucuacuccaccgucgccagcucccuggugcucguggucagccugggggccaucagcuucuggaugugcuccaacggcagccugcagugccgcaucugcaucuga

SEQ ID NO: 71153 - RNA, 1701 nt, Artificial Sequence
  derived and/or modified CDS sequence (opt1) from hemagglutinin__InfluenzaA__AEN68927
augaaggccauccuggugguccuccuguacaccuucgccaccgcgaacgccgacacgcugugcaucggcuaccacgccaacaacagcaccgacaccguggacaccgugcucgagaagaacgucacggugacccacuccgugaaccugcuggaggacaagcacaacgggaagcucugcaagcugcgcggcgucgcgccccugcaccucgggaagugcaacaucgccggcuggauccuggggaacccggagugcgagagccuguccaccgccagcuccuggagcuacaucguggagaccuccagcuccgacaacggcacgugcuaccccggcgacuucaucgacuacgaggagcuccgggagcagcugagcuccgugagcuccuucgagcgcuucgagaucuuccccaagaccagcuccuggcccgaccacgacagcaacaagggggucaccgccgccugcccgcacgccggcgcgaaguccuucuacaagaaccugaucuggcucgugaagaaggggaacagcuaccccaagcuguccaagagcuacaucaacgacaagggcaaggaggugcugguccucugggggauccaccaccccagcaccuccgccgaccagcagagccuguaccagaacgccgacgccuacguguucgugggcacgucccgguacagcaagaaguucaagcccgagaucgccauccgcccgaagguccgggaccaggagggccgcaugaacuacuacuggacccugguggagcccggggacaagaucaccuucgaggcgaccggcaaccucguggucccccgguacgccuucgccauggagcgcaacgccggguccggcaucaucaucagcgacacgcccgugcacgacugcaacacgaccugccagaccccgaagggcgccaucaacaccucccugcccuuccagaacauccaccccaucaccaucgggaagugccccaaguacgucaagagcaccaagcugcggcucgcgaccggccugcgcaacgugccguccauccagagccgggggcuguucggcgccaucgccggguucaucgagggcggcuggacggggaugguggacggcugguacggguaccaccaccagaacgagcagggcuccggguacgccgccgaccucaagagcacccagaacgcgaucgacaagaucaccaacaaggugaacuccgucaucgagaagaugaacacccaguucacggccgugggcaaggaguucaaccaccuggagaagcgcaucgagaaccugaacaagaaggucgacgacggcuuccucgacaucuggaccuacaacgccgagcugcuggugcuccuggagaacgagcggacccuggacuaccacgacagcaacgugaagaaccucuacgagaagguccgcaaccagcugaagaacaacgccaaggagaucgggaacggcugcuucgaguucuaccacaagugcgacaacacgugcauggaguccgugaagaacgggaccuacgacuaccccaaguacagcgaggaggccaagcugaaccgggaggagaucgacggcgugaagcucgaguccacccgcaucuaccagauccuggcgaucuacagcaccgucgccuccagccuggugcucguggucagccugggggccaucuccuucuggaugugcagcaacggcucccugcagugccggaucugcaucuga

SEQ ID NO: 71154 - RNA, 1701 nt, Artificial Sequence; identical to SEQ ID NO: 70279
  derived and/or modified CDS sequence (opt1) from hemagglutinin__InfluenzaA__AEN68928

SEQ ID NO: 71155 - RNA, 1701 nt, Artificial Sequence
  derived and/or modified CDS sequence (opt1) from hemagglutinin__InfluenzaA__AEN68929
augaaggccauccuggugguccuccuguacaccuucgccaccgcgaacgccgacacgcugugcaucggcuaccacgccaacaacagcaccgacaccguggacaccgugcucgagaagaacgucacggugacccacuccgugaaccugcuggaggacaagcacaacgggaagcucugcaagcugcgcggcaucgcgccccugcaccucgggaagugcaacaucgccggcuggauccuggggaacccggagugcgagagccuguccaccgccagcuccuggagcuacaucgucgagaccuccagcuccgacaacggcacgugcuaccccggcgacuucaucgacuacgaggagcuccgggagcagcugagcuccgugagcuccuucgagcgcuucgagaucuuccccaagaccagcuccuggcccaaccacgacagcaacaagggggugaccgccgccugcccgcacgccggcgcgaaguccuucuacaagaaccugaucuggcucgucaagaaggggaacagcuaccccaagcuguccaagagcuacaucaacgacaagggcaaggaggugcuggugcucugggggauccaccaccccagcaccuccgccgaccagcagagccuguaccagaacgccgacgccuacgucuucgugggcacgucccgguacagcaagaaguucaagcccgagaucgccauccgcccgaaggugcgggaccaggagggccgcaugaacuacuacuggacccuggucgagcccggggacaagaucaccuucgaggcgaccggcaaccucguggugccccgguacgccuucgccauggagcgcaacgccggguccggcaucaucaucagcgacacgcccguccacgacugcaacacgaccugccagaccccgaagggcgccaucaacaccucccugcccuuccagaacauccaccccaucaccaucgggaagugccccaaguacgucaagagcaccaagcugcggcucgcgaccggccugcgcaacgugccguccauccagagccgggggcuguucggcgccaucgccggguucaucgagggcggcuggacggggaugguggacggcugguacggguaccaccaccagaacgagcagggcuccggguacgccgccgaccucaagagcacccagaacgcgaucgacaagaucaccaacaaggugaacuccgugaucgagaagaugaacacccaguucacggccgucggcaaggaguucaaccaccuggagaagcgcaucgagaaccugaacaagaagguggacgacggcuuccucgacaucuggaccuacaacgccgagcugcugguccuccuggagaacgagcggacccuggacuaccacgacagcaacgugaagaaccucuacgagaaggugcgcucccagcugaagaacaacgccaaggagaucgggaacggcugcuucgaguucuaccacaagugcgacaacacgugcauggagagcgucaagaacgggaccuacgacuaccccaaguacuccgaggaggccaagcugaaccgggaggagaucgacggcgugaagcucgagagcacccgcaucuaccagauccuggcgaucuacuccaccguggccagcagccugguccucguggugucccugggggccaucagcuucuggaugugcuccaacggcagccugcagugccggaucugcaucuga

SEQ ID NO: 71156 - RNA, 1701 nt, Artificial Sequence; identical to SEQ ID NO: 69608
  derived and/or modified CDS sequence (opt1) from hemagglutinin__InfluenzaA__AEN68930

SEQ ID NO: 71157 - RNA, 1701 nt, Artificial Sequence; identical to SEQ ID NO: 69608
  derived and/or modified CDS sequence (opt1) from hemagglutinin__InfluenzaA__AEN68931

SEQ ID NO: 71158 - RNA, 1701 nt, Artificial Sequence; identical to SEQ ID NO: 69608
  derived and/or modified CDS sequence (opt1) from hemagglutinin__InfluenzaA__AEN68932

SEQ ID NO: 71159 - RNA, 1701 nt, Artificial Sequence
  derived and/or modified CDS sequence (opt1) from hemagglutinin__InfluenzaA__AEN69426
augaaggccauccuggugguccuccuguacaccuucgccaccagcaacgcggacacgcugugcaucggcuaccacgccaacaacuccaccgacaccguggacaccgugcucgagaagaacgucacggugacccacagcgugaaccugcuggaggacaagcacaacgggaagcucugcaagcugcgcggcgucgcgccccugcaccucgggaagugcaacaucgccggcuggauccuggggaacccggagugcgagucccugagcaccgccuccagcugguccuacaucguggagaccagcuccagcgacaacggcacgugcuaccccggcaacuucaucgacuacgaggagcuccgggagcagcuguccagcguguccagcuucgagcgcuucgagaucuuccccaagaccuccagcuggcccgaccacgacuccaacaagggggucaccgccgccugcccgcacgccggcgccaagagcuucuacaagaaccugaucuggcucgugaagaaggggaacuccuaccccaagcugagcaagagcuacaucaacgacaagggcaaggaggugcugguccucugggggauccaccaccccuccaccagcgcggaccagcagucccuguaccagaacgccgacgccuacguguucgugggcacgagccgguacuccaagaaguucaagcccgagaucgccauccgcccgaagguccgggaccaggagggccgcaugaacuacuacuggacccugguggagcccggggacaagaucaccuucgaggccaccggcaaccucguggcgccccgguacgccuucgccauggagcgcaacgccgggagcggcaucaucaucuccgacacgcccguccacgacugcaacacgaccugccagaccccgaagggcgccaucaacaccagccugcccuuccagaacauccaccccaucaccaucgggaagugccccaaguacgugaaguccaccaagcugcggcucgcgaccggccugcgcaacgugccgagcauccagucccgggggcuguucggcgccaucgccggguucaucgagggcggcuggacggggauggucgacggcugguacggguaccaccaccagaacgagcagggcagcggguacgccgccgaccucaaguccacccagaacgcgaucgacaagaucaccaacaaggugaacagcgugaucgagaagaugaacacccaguucacggccgucggcaaggaguucaaccaccuggagaagcgcaucgagaaccugaacaagaagguggacgacggcuuccucgacaucuggaccuacaacgccgagcugcugguccuccuggagaacgagcggacccuggacuaccacgacuccaacgugaagaaccucuacgagaaggugcgcagccagcugaagaacaacgccaaggagaucgggaacggcugcuucgaguucuaccacaagugcgacaacacgugcauggaguccgucaagaacgggaccuacgacuaccccaaguacagcgaggaggccaagcugaaccgggaggagaucgacggcgugaagcucgaguccacccgcaucuaccagauccuggcgaucuacagcaccguggccagcucccugguccucguggugagccugggggccaucuccuucuggaugugcagcaacggcucccugcagugccggaucugcaucuga

SEQ ID NO: 71160 - RNA, 1701 nt, Artificial Sequence; identical to SEQ ID NO: 70944
  derived and/or modified CDS sequence (opt1) from hemagglutinin__InfluenzaA__AEN69475

SEQ ID NO: 71161 - RNA, 1701 nt, Artificial Sequence; identical to SEQ ID NO: 70944
  derived and/or modified CDS sequence (opt1) from hemagglutinin__InfluenzaA__AEN69481

SEQ ID NO: 71162 - RNA, 1701 nt, Artificial Sequence; identical to SEQ ID NO: 66946
  derived and/or modified CDS sequence (opt1) from hemagglutinin__InfluenzaA__AEO01032

SEQ ID NO: 71163 - RNA, 1701 nt, Artificial Sequence; identical to SEQ ID NO: 67046
  derived and/or modified CDS sequence (opt1) from hemagglutinin__InfluenzaA__AEO01033

SEQ ID NO: 71164 - RNA, 1701 nt, Artificial Sequence; identical to SEQ ID NO: 67046
  derived and/or modified CDS sequence (opt1) from hemagglutinin__InfluenzaA__AEO01034

SEQ ID NO: 71165 - RNA, 1701 nt, Artificial Sequence; identical to SEQ ID NO: 66680
  derived and/or modified CDS sequence (opt1) from hemagglutinin__InfluenzaA__AEO01035

SEQ ID NO: 71166 - RNA, 1701 nt, Artificial Sequence; identical to SEQ ID NO: 67046
  derived and/or modified CDS sequence (opt1) from hemagglutinin__InfluenzaA__AEO01036

SEQ ID NO: 71167 - RNA, 1701 nt, Artificial Sequence; identical to SEQ ID NO: 66935
  derived and/or modified CDS sequence (opt1) from hemagglutinin__InfluenzaA__AEO01037

SEQ ID NO: 71168 - RNA, 1701 nt, Artificial Sequence; identical to SEQ ID NO: 67046
  derived and/or modified CDS sequence (opt1) from hemagglutinin__InfluenzaA__AEO01038

SEQ ID NO: 71169 - RNA, 1701 nt, Artificial Sequence; identical to SEQ ID NO: 66873
  derived and/or modified CDS sequence (opt1) from hemagglutinin__InfluenzaA__AEO01039

SEQ ID NO: 71170 - RNA, 1701 nt, Artificial Sequence
  derived and/or modified CDS sequence (opt1) from hemagglutinin__InfluenzaA__AEO01040
augaaggccauccuggugguccuccuguacaccuucgccaccgcgaacgccgacacgcugugcaucggcuaccacgccaacaacagcaccgacaccguggacaccgugcucgagaagaacgucacggugacccacuccgugaaccugcuggaggacaagcacaacgggaagcucugcaagcugcgcggcgucgcgccccugcaccucgggaagugcaacaucgccggcuggauccuggggaacccggagugcgagagccuguccaccgccagcuccuggagcuacaucguggagaccuccagcuccgacaacggcacgugcuaccccggcgacuucaucgacuacgaggagcuccgggagcagcugagcuccgugagcuccuucgagcgcuucgagaucuuccccaagaccagcuccuggcccaaccacgacagcaacaagggggucaccgccgccugcccgcacgccggcgcgaaguccuucuacaagaaccugaucuggcucgugaagaaggggaacagcuaccccaagcuguccaagagcuacaucaacgacaagggcaagaaggugcugguccucugggggauccaccaccccagcaccuccgccgaccagcagagccuguaccagaacgccgacgccuacguguucgugggcacgucccgguacagcaagaaguucaagcccgagaucgccauccgcccgaagguccgggaccaggagggccgcaugaacuacuacuggacccugaucgagcccggggacaagaucaccuucgaggcgaccggcaaccucguggugccccgguacgccuucacgauggagcgcaacgccggguccggcaucaucaucagcgacacccccguccacgacugcaacacgaccugccagaccccgaagggcgccaucaacaccucccugcccuuccagaacauccaccccaucaccaucgggaagugccccaaguacgucaagagcaccaagcugcggcucgccacgggccugcgcaacgugccguccauccagagccgggggcuguucggcgcgaucgccggguucaucgagggcggcuggaccgggaugguggacggcugguacggguaccaccaccagaacgagcagggcuccggguacgccgccgaccucaagagcacccagaacgccaucgacgagaucaccaacaaggugaacuccgugaucgagaagaugaacacgcaguucaccgcggucggcaaggaguucaaccaccuggagaagcgcaucgagaaccugaacaagaagguggacgacggcuuccucgacaucuggaccuacaacgccgagcugcugguccuccuggagaacgagcggacccuggacuaccacgacagcaacgugaagaaccucuacgagaaggugcgcucccagcugaagaacaacgccaaggagaucgggaacggcugcuucgaguucuaccacaagugcgacaacacgugcauggagagcgucaagaacgggaccuacgacuaccccaaguacuccgaggaggccaagcugaaccgggaggagaucgacggcgugaagcucgagagcacccgcaucuaccagauccuggccaucuacuccaccguggcgagcagccugguccucguggugucccugggggccaucagcuucuggaugugcuccaacggcagccugcagugccggaucugcaucuga

SEQ ID NO: 71171 - RNA, 1701 nt, Artificial Sequence; identical to SEQ ID NO: 66693
  derived and/or modified CDS sequence (opt1) from hemagglutinin__InfluenzaA__AEO01041

SEQ ID NO: 71172 - RNA, 1701 nt, Artificial Sequence; identical to SEQ ID NO: 67046
  derived and/or modified CDS sequence (opt1) from hemagglutinin__InfluenzaA__AEO01042

SEQ ID NO: 71173 - RNA, 1701 nt, Artificial Sequence
  derived and/or modified CDS sequence (opt1) from hemagglutinin__InfluenzaA__AEO01043
augaaggccauccuggugguccuccuguacaccuucgccaccgcgaacgccgacacgcugugcaucggcuaccacgccaacaacagcaccgacaccguggacaccgugcucgagaagaacgucacggugacccacuccgugaaccugcuggaggacaagcacaacgggaagcucugcaagcugcgcggcgucgcgccccugcaccucgggaagugcaacaucgccggcuggauccuggggaacccggagugcgagagccuguccaccgccagcuccuggagcuacaucguggagaccuccagcuccaacaacggcacgugcuaccccggcgacuucaucgacuacgaggagcuccgggagcagcugagcuccgugagcuccuucgagcgcuucgagaucuuccccaagaccagcuccuggcccaaccacgacagcaacaagggggucaccgccgccugcccgcacgccggcgcgaaguccuucuacaagaaccugaucuggcucgugaagaaggggaacagcuaccccaagcuguccaagagcuacaucaacgacaagggcaaggaggugcugguccucugggggauccaccaccccagcaccuccgccgaccagcagagccuguaccagaacgccgacgccuacguguucgugggcacgucccgguacagcaagaaguucaagcccgagaucgccauccgcccgaagguccgggagcaggagggccgcaugaacuacuacuggacccugguggagcccggggacaagaucaccuucgaggcgaccggcaaccucguggucccccgguacgccuucgccauggagcgcaacgccggguccggcaucaucaucagcgacacgcccgugcacgacugcaacacgaccugccagaccccgaagggcgccaucaacaccucccugcccuuccagaacauccaccccaucaccaucgggaagugccccaaguacgucaagagcaccaagcugcggcucgcgaccggccugcgcaacgugccguccauccagagccgggggcuguucggcgccaucgccggguucaucgagggcggcuggacggggaugguggacggcugguacggguaccaccaccagaacgagcagggcuccggguacgccgccgaccucaagagcacccagaacgcgaucgacgagaucaccaacaaggugaacuccgucaucgagaagaugaacacccaguucacggccgugggcaaggaguucaaccaccuggagaagcgcaucgagaaccugaacaagaaggucgacgacggcuuccucgacaucuggaccuacaacgccgagcugcuggugcuccuggagaacgagcggacccuggacuaccacgacagcaacgugaagaaccucuacgagaagguccgcucccagcugaagaacaacgccaaggagaucgggaacggcugcuucgaguucuaccacaagugcgacaacacgugcauggagagcgugaagaacgggaccuacgacuaccccaaguacuccgaggaggccaagcugaaccgggaggagaucgacggcgugaagcucgagagcacccgcaucuaccagauccuggcgaucuacuccaccgucgccagcagccuggugcucguggucucccugggggccaucagcuucuggaugugcuccaacggcagccugcagugccggaucugcaucuga

SEQ ID NO: 71174 - RNA, 1701 nt, Artificial Sequence; identical to SEQ ID NO: 66693
  derived and/or modified CDS sequence (opt1) from hemagglutinin__InfluenzaA__AEO01044

SEQ ID NO: 71175 - RNA, 1701 nt, Artificial Sequence
  derived and/or modified CDS sequence (opt1) from hemagglutinin__InfluenzaA__AEO01045
augaaggccauccuggugguccuccuguacaccuucgccaccgcgaacgccgacacgcugugcaucggcuaccacgccaacaacagcaccgacaccguggacaccgugcucgagaagaacgucacggugacccacuccgugaaccugcuggaggacaagcacaacgggaagcucugcaagcugcgcggcgucgcgccccugcaccucgggaagugcaacaucgccggcuggauccuggggaaccuggagugcgagagccucuccaccgccagcuccuggagcuacaucguggagaccuccagcuccgacaacggcacgugcuacccgggcgacuucaucgacuacgaggagcugcgggagcagcugagcuccgugagcuccuucgagcgcuucgagaucuuccccaagaccagcuccuggcccaaccacgacagcaacaagggggucaccgccgccugcccccacgccggcgcgaaguccuucuacaagaaccucaucuggcuggugaagaaggggaacagcuacccgaagcuguccaagagcuacaucaacgacaagggcaaggaggugcucguccugugggggauccaccaccccagcaccuccgccgaccagcagagccuguaccagaacgccgacgccuacguguucgugggcacgucccgguacagcaagaaguucaagcccgagaucgccauccgccccaagguccgggaccaggagggccgcaugaacuacuacuggacccucguggagccgggggacaagaucaccuucgaggcgaccggcaaccugguggucccccgguacgccuucgccauggagcgcaacgccggguccggcaucaucaucagcgacacgcccgugcacgacugcaacacgaccugccagacccccaagggcgccaucaacaccucccugccguuccagaacauccaccccaucaccaucgggaagugccccaaguacgucaagagcaccaagcuccggcuggcgaccggccugcgcaacgugcccuccauccagagccgggggcuguucggcgccaucgccggguucaucgagggcggcuggacggggaugguggacggcugguacggguaccaccaccagaacgagcagggcuccggguacgccgccgaccucaagagcacccagaacgcgaucgacgagaucaccaacaaggugaacuccgucaucgagaagaugaacacccaguucacggccgugggcaaggaguucaaccaccuggagaagcgcaucgagaaccucaacaagaaggucgacgacggcuuccuggacaucuggaccuacaacgccgagcugcucgugcugcuggagaacgagcggacccucgacuaccacgacagcaacgugaagaaccuguacgagaagguccgcucccagcugaagaacaacgccaaggagaucgggaacggcugcuucgaguucuaccacaagugcgacaacacgugcauggagagcgugaagaacgggaccuacgacuacccgaaguacuccgaggaggccaagcucaaccgggaggagaucgacggcgugaagcuggagagcacccgcaucuaccagauccuggcgaucuacuccaccgucgccagcagccucgugcugguggucucccugggggccaucagcuucuggaugugcuccaacggcagccuccagugccggaucugcaucuga

SEQ ID NO: 71176 - RNA, 1701 nt, Artificial Sequence; identical to SEQ ID NO: 66693
  derived and/or modified CDS sequence (opt1) from hemagglutinin__InfluenzaA__AEO01046

SEQ ID NO: 71177 - RNA, 1701 nt, Artificial Sequence; identical to SEQ ID NO: 66693
  derived and/or modified CDS sequence (opt1) from hemagglutinin__InfluenzaA__AEO01047

SEQ ID NO: 71178 - RNA, 1701 nt, Artificial Sequence
  derived and/or modified CDS sequence (opt1) from hemagglutinin__InfluenzaA__AEO01048
augaaggccauccuggugguccuccuguacaccuucgccaccgcgaacgccgacacgcugugcaucggcuaccacgccaacaacagcaccgacaccguggacaccgugcucgagaagaacgucacggugacccacuccgugaaccugcuggaggacaagcacaacgggaagcucugcaagcugcgcggcgucgcgccccugcaccucgggaagugcaacaucgccggcuggauccuggggaacccggagugcgagagccuguccaccgccagcuccuggagcuacaucguggagaccuccagcuccgacaacggcacgugcuaccccggcgacuucaucgacuacgaggagcuccgggagcagcugagcuccgugagcuccuucgagcgcuucgagaucuuccccaagaccagcuccuggcccaaccacgacagcaacaagggggucaccgccgccugcccgcacgccggcgcgaaguccuucuacaagaaccugaucuggcucgugaagaaggggaacagcuaccccaagcuguccaagagcuacaucaacgacaagggcaaggaggugcugguccucugggggauccaccaccccagcaccuccgccgaccagcagagccuguaccagaacgccgacgccuacguguucgugggcacgucccgguacagcaagaaguucaagcccgagaucgccauccgcccgaagguccgggaccaggagggccgcaugaacuacuacuggacccugguggagcccggggacaagaucaccuucgaggcgaccggcaaccucguggucccccgguacgccuucgccauggagcgcaacgccggguccggcaucaucaucagcgacacgcccgugcacgacugcaacacgaccugccagaccccgaagggcgccaucaacaccucccugcccuuccagaacauccaccccaucaccaucgggaagugccccaaguacgucaagagcaccaagcugcggcucgcgaccggccugcgcaacgugccguccauccagagccgggggcuguucggcgccaucgccggguucaucgagggcggcuggacggggaugguggacggcugguacggguaccaccaccagaacgagcagggcuccggguacgccgccgaccucaagagcacccagaacgcgaucgacgagaucaccaacaaggugaacuccgucaucgagaagaugaacacccaguucacggccgugggcaaggaguucaaccaccuggagaagcgcaucgagaaccugaacaagaaggucgacgacggcuuccucgacaucuggaccuacaacgccgagcugcuggugcuccuggagaacgagcggacccuggacuaccacgacagcaacgugaagaaccucuacgagaagguccgcucccagcugaagaacaacgccaaggagaucgggaacggcugcuucgaguucuaccacaagugcgacaacacgugcauggagagcgugaagaacgggaccuacgacuaccccaaguacuccgaggaggccaagcugaaccgggaggagaucgacggcgugaagcucgagagcacccgcaucuaccagauccuggcgaucuacuccaccgucgccagcagccuggugcucguggucucccugggggccaucagcuucuggaugugcuccaacggcagccugcagugcaagaucugcaucuga

SEQ ID NO: 71179 - RNA, 1701 nt, Artificial Sequence; identical to SEQ ID NO: 67591
  derived and/or modified CDS sequence (opt1) from hemagglutinin__InfluenzaA__AEO01049

SEQ ID NO: 71180 - RNA, 1701 nt, Artificial Sequence; identical to SEQ ID NO: 66693
  derived and/or modified CDS sequence (opt1) from hemagglutinin__InfluenzaA__AEO01050

SEQ ID NO: 71181 - RNA, 1701 nt, Artificial Sequence; identical to SEQ ID NO: 67046
  derived and/or modified CDS sequence (opt1) from hemagglutinin__InfluenzaA__AEO01051

SEQ ID NO: 71182 - RNA, 1701 nt, Artificial Sequence
  derived and/or modified CDS sequence (opt1) from hemagglutinin__InfluenzaA__AEO01052
augaaggccaucaucgugguccugcucuacaccuucgccaccgcgaacgccgacacgcugugcaucggcuaccacgccaacaacagcaccgacaccguggacaccgugcuggagaagaacgucacggugacccacuccgugaaccuccuggaggacaagcacaacgggaagcugugcaagcuccgcggcgucgcgccccugcaccuggggaagugcaacaucgccggcuggauccucgggaacccggagugcgagagccuguccaccgccagcuccuggagcuacaucguggagaccuccagcuccgacaacggcacgugcuaccccggcgacuucaucgacuacgaggagcugcgggagcagcucagcuccgugagcuccuucgagcgcuucgagaucuuccccaagaccagcuccuggcccaaccacgacagcaacaagggggucaccgccgccugcccgcacgccggcgcgaaguccuucuacaagaaccugaucuggcuggugaagaaggggaacagcuaccccaagcucuccaagagcuacaucaacgacaagggcaaggaggugcugguccugugggggauccaccaccccagcaccuccgccgaccagcagagccucuaccagaacgccgacgccuacguguucgugggcacgucccgguacagcaagaaguucaagcccgagaucgccauccgcccgaagguccgggaccaggagggccgcaugaacuacuacuggacccugguggagcccggggacaagaucaccuucgaggcgaccggcaaccugguggucccccgguacgccuucgccauggagcgcaacgccggguccggcaucaucaucagcgacacgcccgugcacgacugcaacacgaccugccagaccccgaagggcgccaucaacaccucccuccccuuccagaacauccaccccaucaccaucgggaagugccccaaguacgucaagagcaccaagcugcggcuggcgaccggccuccgcaacgugccguccauccagagccgggggcuguucggcgccaucgccggguucaucgagggcggcuggacggggaugguggacggcugguacggguaccaccaccagaacgagcagggcuccggguacgccgccgaccucaagagcacccagaacgcgaucgacaagaucaccaacaaggugaacuccgucaucgagaagaugaacacccaguucacggccgugggcaaggaguucaaccaccuggagaagcgcaucgagaaccugaacaagaaggucgacgacggcuuccuggacaucuggaccuacaacgccgagcuccuggugcugcucgagaacgagcggacccuggacuaccacgacagcaacgugaagaaccuguacgagaagguccgcucccagcucaagaacaacgccaaggagaucgggaacggcugcuucgaguucuaccacaagugcgacaacacgugcauggagagcgugaagaacgggaccuacgacuaccccaaguacuccgaggaggccaagcugaaccgggaggagaucgacggcgugaagcuggagagcacccgcaucuaccagauccucgcgaucuacuccaccgucgccagcagccuggugcugguggucucccucggggccaucagcuucuggaugugcuccaacggcagccugcagugccggaucugcaucuga

SEQ ID NO: 71183 - RNA, 1701 nt, Artificial Sequence; identical to SEQ ID NO: 67046
  derived and/or modified CDS sequence (opt1) from hemagglutinin__InfluenzaA__AEO01053

SEQ ID NO: 71184 - RNA, 1701 nt, Artificial Sequence; identical to SEQ ID NO: 66693
  derived and/or modified CDS sequence (opt1) from hemagglutinin__InfluenzaA__AEO01054

SEQ ID NO: 71185 - RNA, 1701 nt, Artificial Sequence; identical to SEQ ID NO: 67505
  derived and/or modified CDS sequence (opt1) from hemagglutinin__InfluenzaA__AEO01055

SEQ ID NO: 71186 - RNA, 1701 nt, Artificial Sequence; identical to SEQ ID NO: 67046
  derived and/or modified CDS sequence (opt1) from hemagglutinin__InfluenzaA__AEO01056

SEQ ID NO: 71187 - RNA, 1701 nt, Artificial Sequence; identical to SEQ ID NO: 66693
  derived and/or modified CDS sequence (opt1) from hemagglutinin__InfluenzaA__AEO01057

SEQ ID NO: 71188 - RNA, 1701 nt, Artificial Sequence; identical to SEQ ID NO: 66693
  derived and/or modified CDS sequence (opt1) from hemagglutinin__InfluenzaA__AEO01058

SEQ ID NO: 71189 - RNA, 1701 nt, Artificial Sequence; identical to SEQ ID NO: 66693
  derived and/or modified CDS sequence (opt1) from hemagglutinin__InfluenzaA__AEO01059

SEQ ID NO: 71190 - RNA, 1701 nt, Artificial Sequence; identical to SEQ ID NO: 66693
  derived and/or modified CDS sequence (opt1) from hemagglutinin__InfluenzaA__AEO01060

SEQ ID NO: 71191 - RNA, 1701 nt, Artificial Sequence; identical to SEQ ID NO: 66693
  derived and/or modified CDS sequence (opt1) from hemagglutinin__InfluenzaA__AEO01061

SEQ ID NO: 71192 - RNA, 1701 nt, Artificial Sequence; identical to SEQ ID NO: 66693
  derived and/or modified CDS sequence (opt1) from hemagglutinin__InfluenzaA__AEO01062

SEQ ID NO: 71193 - RNA, 1701 nt, Artificial Sequence; identical to SEQ ID NO: 66693
  derived and/or modified CDS sequence (opt1) from hemagglutinin__InfluenzaA__AEO01063

SEQ ID NO: 71194 - RNA, 1701 nt, Artificial Sequence; identical to SEQ ID NO: 66693
  derived and/or modified CDS sequence (opt1) from hemagglutinin__InfluenzaA__AEO01064

SEQ ID NO: 71195 - RNA, 1701 nt, Artificial Sequence; identical to SEQ ID NO: 66935
  derived and/or modified CDS sequence (opt1) from hemagglutinin__InfluenzaA__AEO01065

SEQ ID NO: 71196 - RNA, 1701 nt, Artificial Sequence; identical to SEQ ID NO: 67046
  derived and/or modified CDS sequence (opt1) from hemagglutinin__InfluenzaA__AEO01066

SEQ ID NO: 71197 - RNA, 1701 nt, Artificial Sequence
  derived and/or modified CDS sequence (opt1) from hemagglutinin__InfluenzaA__AEO01067
augaaggccauccuggugguccuccuguacaccuucgccaccgcgaacgccgacacgcugugcaucggcuaccacgccaacaacagcaccgacaccguggacaccgugcucgagaagaacgucacggugacccacuccgugaaccugcuggaggacaagcacaacgggaagcucugcaagcugcgcggcgucgcgccccugcaccucgggaagugcaacaucgccggcuggauccuggggaacccggagugcgagagccuguccaccgccagcuccuggagcuacaucguggagaccuccagcuccgacaacggcacgugcuaccccggcgacuucaucgacuacgaggagcuccgggagcagcugagcuccgugagcuccuucgagcgcuucgagaucuuccccaagaccagcuccuggcccaaccacgacagcaacaagggggucaccgccgccugcccgcacgccggcgcgaaguccuucuacaagaaccugaucuggcucgugaagaaggggaacagcuaccccaagcuguccaagagcuacaucaacgacaagggcaaggaggugcugguccucugggggauccaccaccccagcaccuccgccgaccagcagagccuguaccagaacgccgacgccuacguguucgugggcacgucccgguacagcaagaaguucaagcccgagauggccauccgcccgaagguccgggaccaggagggccgcaugaacuacuacuggacccugguggagcccggggacaagaucaccuucgaggcgaccggcaaccucguggucccccgguacgccuucgccauggagcgcaacgccggguccggcaucaucaucagcgacacgcccgugcacgacugcaacacgaccugccagaccccgaagggcgccaucaacaccucccugcccuuccagaacauccaccccaucaccaucgggaagugccccaaguacgucaagagcaccaagcugcggcucgcgaccggccugcgcaacgugccguccauccagagccgggggcuguucggcgccaucgccggguucaucgagggcggcuggacggggaugguggacggcugguacggguaccaccaccagaacgagcagggcuccggguacgccgccgaccucaagagcacccagaacgcgaucgacgagaucaccaacaaggugaacuccgucaucgagaagaugaacacccaguucacggccgugggcaaggaguucaaccaccuggagaagcgcaucgagaaccugaacaagaaggucgacgacggcuuccucgacaucuggaccuacaacgccgagcugcuggugcuccuggagaacgagcggacccuggacuaccacgacagcaacgugaagaaccucuacgagaagguccgcucccagcugaagaacaacgccaaggagaucgggaacggcugcuucgaguucuaccacaagugcgacaacacgugcauggagagcgugaagaacgggaccuacgacuaccccaaguacuccgaggaggccaagcugaaccgggaggagaucgacggcgugaagcucgagagcacccgcaucuaccagauccuggcgaucuacuccaccgucgccagcagccuggugcucguggucucccugggggccaucagcuucuggaugugcuccaacggcagccugcagugccggaucugcaucuga

SEQ ID NO: 71198 - RNA, 1701 nt, Artificial Sequence; identical to SEQ ID NO: 67046
  derived and/or modified CDS sequence (opt1) from hemagglutinin__InfluenzaA__AEO01068

SEQ ID NO: 71199 - RNA, 1701 nt, Artificial Sequence; identical to SEQ ID NO: 66693
  derived and/or modified CDS sequence (opt1) from hemagglutinin__InfluenzaA__AEO01069

SEQ ID NO: 71200 - RNA, 1701 nt, Artificial Sequence; identical to SEQ ID NO: 67046
  derived and/or modified CDS sequence (opt1) from hemagglutinin__InfluenzaA__AEO01070

SEQ ID NO: 71201 - RNA, 1701 nt, Artificial Sequence; identical to SEQ ID NO: 66693
  derived and/or modified CDS sequence (opt1) from hemagglutinin__InfluenzaA__AEO01071

SEQ ID NO: 71202 - RNA, 1701 nt, Artificial Sequence
  derived and/or modified CDS sequence (opt1) from hemagglutinin__InfluenzaA__AEO01073
augaaggccauccuggugguccuccuguacaccuucgccaccgcgaacgccgacacgcugugcaucggcuaccacgccaacaacagcaccgacaccguggacaccgugcucgagaagaacgucacggugacccacuccgugaaccugcuggaggacaagcacaacgggaagcucugcaagcugcgcggcgucgcgccccugcaccucgggaagugcaacaucgccggcuggauccuggggaacccggagugcgagagccuguccaccgccagcuccuggagcuacaucguggagaccuccagcuccgacaacggcacgugcuaccccggcgacuucaucgacuacgaggagcuccgggagcagcugagcuccgugagcuccuucgagcgcuucgagaucuuccccaagaccagcuccuggcccaaccacgacagcaacaagggggucaccgccgccugcccgcacgccggcgcgaaguccuucuacaagaaccugaucuggcucgugaagaaggggaacagcuaccccaagcuguccaagagcuacaucaacgacaagggcaaggaggugcugguccucugggggauccaccaccccagcaccuccgccgaccagcagagccuguaccagaacgccgacgccuacguguucgugggcacgucccgguacagcaagaaguucaagcccgagaucgccauccgcccgaagguccgggaccaggagggccgcaugaacuacuacuggacccugguggagcccggggacaagaucaccuucgaggcgaccggcaaccucguggucccccgguacgccuucgccauggagcgcaacgccggguccggcaucaucaucagcgacacgcccgugcacgacugcaacacgaccugccagaccccgaagggcgccgugaacaccucccugcccuuccagaacauccaccccaucaccaucgggaagugccccaaguacgucaagagcaccaagcugcggcucgcgaccggccugcgcaacgugccguccauccagagccgggggcuguucggcgccaucgccggguucaucgagggcggcuggacggggaugguggacggcugguacggguaccaccaccagaacgagcagggcuccggguacgccgccgaccucaagagcacccagaacgcgaucgacgagaucaccaacaaggucaacuccgugaucgagaagaugaacacccaguucacggccgucggcaaggaguucaaccaccuggagaagcgcaucgagaaccugaacaagaagguggacgacggcuuccucgacaucuggaccuacaacgccgagcugcuggugcuccuggagaacgagcggacccuggacuaccacgacagcaacgucaagaaccucuacgagaaggugcgcucccagcugaagaacaacgccaaggagaucgggaacggcugcuucgaguucuaccacaagugcgacaacacgugcauggagagcgugaagaacgggaccuacgacuaccccaaguacuccgaggaggccaagcugaaccgggaggagaucgacggcgucaagcucgagagcacccgcaucuaccagauccuggcgaucuacuccaccguggccagcagccuggugcucgucgugucccugggggccaucagcuucuggaugugcuccaacggcagccugcagugccggaucugcaucuga

SEQ ID NO: 71203 - RNA, 1701 nt, Artificial Sequence; identical to SEQ ID NO: 66935
  derived and/or modified CDS sequence (opt1) from hemagglutinin__InfluenzaA__AEO01074

SEQ ID NO: 71204 - RNA, 1701 nt, Artificial Sequence; identical to SEQ ID NO: 67046
  derived and/or modified CDS sequence (opt1) from hemagglutinin__InfluenzaA__AEO01075

SEQ ID NO: 71205 - RNA, 1701 nt, Artificial Sequence; identical to SEQ ID NO: 67046
  derived and/or modified CDS sequence (opt1) from hemagglutinin__InfluenzaA__AEO01076

SEQ ID NO: 71206 - RNA, 1701 nt, Artificial Sequence
  derived and/or modified CDS sequence (opt1) from hemagglutinin__InfluenzaA__AEO01077
augaaggccauccuggugguccuccuguacaccuucgccaccgcgaacgccgacacgcugugcaucggcuaccacgccaacaacagcaccgacaccguggacaccgugcucgagaagaacgucacggugacccacuccgugaaccugcuggaggacaagcacaacgggaagcucugcaagcugcgcggcgucgcgccccugcaccucgggaagugcaacaucgccggcuggauccuggggaacccggagugcgagagccuguccaccgccagcuccuggagcuacaucguggagaccuccagcuccgacaacggcacgugcuaccccggcgacuucaucgacuacgaggagcuccgggagcagcugagcuccgugagcuccuucgagcgcuucgagaucuuccccaagaccagcuccuggcccaaccacgacagcaacaagggggucaccgccgccugcccgcacgccggcgcgaaguccuucuacaagaaccugaucuggcucgugaagaaggggaacagcuaccccaagcuguccaagagcuacaucaacgacaagggcaaggaggugcugguccucugggggauccaccaccccagcaccuccgccgaccagcagagccuguaccagaacgccgacgccuacguguucgugggcacgucccgguacagcaagaaguucaagcccgagaucgccauccgcccgaagguccgggagcaggagggccgcaugaacuacuacuggacccugguggagcccggggacaagaucaccuucgaggcgaccggcaaccucguggucccccgguacgccuucgccauggagcgcaacgccggguccggcaucaucaucagcgacacgcccgugcacgacugcaacacgaccugccagaccccgaagggcgccaucaacaccucccugcccuuccagaacauccaccccaucaccaucgggaagugccccaaguacgucaagagcaccaagcugcggcucgcgaccggccugcgcaacgugccguccauccagagccgggggcuguucggcgccaucgccggguucaucgagggcggcuggacggggaugguggacggcugguacggguaccaccaccagaacgagcagggcuccggguacgccgccgaccucaagagcacccagaacgcgaucgacgagaucaccaacaaggugaacuccgucaucgagaagaugaacacccaguucacggccgugggcaaggaguucaaccaccuggagaagcgcaucgagaaccugaacaagaaggucgacgacggcuuccucgacaucuggaccuacaacgccgagcugcuggugcuccuggagaacgagcggacccuggacuaccacgacagcaacgugaagaaccucuacgagaagguccgcucccagcugaagaacaacgccaaggagaucgggaacggcugcuucgaguucuaccacaagugcgacaacacgugcauggagaacgugaagaacgggaccuacgacuaccccaaguacagcgaggaggccaagcugaaccgggaggagaucgacggcgugaagcucgaguccacccgcaucuaccagauccuggcgaucuacagcaccgucgccuccagccuggugcucguggucagccugggggccaucuccuucuggaugugcagcaacggcucccugcagugccggaucugcaucuga

SEQ ID NO: 71207 - RNA, 1701 nt, Artificial Sequence; identical to SEQ ID NO: 66693
  derived and/or modified CDS sequence (opt1) from hemagglutinin__InfluenzaA__AEO01078

SEQ ID NO: 71208 - RNA, 1701 nt, Artificial Sequence; identical to SEQ ID NO: 66693
  derived and/or modified CDS sequence (opt1) from hemagglutinin__InfluenzaA__AEO01079

SEQ ID NO: 71209 - RNA, 1701 nt, Artificial Sequence; identical to SEQ ID NO: 66693
  derived and/or modified CDS sequence (opt1) from hemagglutinin__InfluenzaA__AEO01080

SEQ ID NO: 71210 - RNA, 1701 nt, Artificial Sequence; identical to SEQ ID NO: 67046
  derived and/or modified CDS sequence (opt1) from hemagglutinin__InfluenzaA__AEO01081

SEQ ID NO: 71211 - RNA, 1701 nt, Artificial Sequence; identical to SEQ ID NO: 66693
  derived and/or modified CDS sequence (opt1) from hemagglutinin__InfluenzaA__AEO01082

SEQ ID NO: 71212 - RNA, 1701 nt, Artificial Sequence; identical to SEQ ID NO: 66693
  derived and/or modified CDS sequence (opt1) from hemagglutinin__InfluenzaA__AEO01083

SEQ ID NO: 71213 - RNA, 1701 nt, Artificial Sequence; identical to SEQ ID NO: 66693
  derived and/or modified CDS sequence (opt1) from hemagglutinin__InfluenzaA__AEO01084

SEQ ID NO: 71214 - RNA, 1701 nt, Artificial Sequence; identical to SEQ ID NO: 67046
  derived and/or modified CDS sequence (opt1) from hemagglutinin__InfluenzaA__AEO01085

SEQ ID NO: 71215 - RNA, 1701 nt, Artificial Sequence; identical to SEQ ID NO: 66693
  derived and/or modified CDS sequence (opt1) from hemagglutinin__InfluenzaA__AEO01086

SEQ ID NO: 71216 - RNA, 1701 nt, Artificial Sequence; identical to SEQ ID NO: 67046
  derived and/or modified CDS sequence (opt1) from hemagglutinin__InfluenzaA__AEO01087

SEQ ID NO: 71217 - RNA, 1701 nt, Artificial Sequence; identical to SEQ ID NO: 66873
  derived and/or modified CDS sequence (opt1) from hemagglutinin__InfluenzaA__AEO01088

SEQ ID NO: 71218 - RNA, 1701 nt, Artificial Sequence; identical to SEQ ID NO: 67046
  derived and/or modified CDS sequence (opt1) from hemagglutinin__InfluenzaA__AEO01089

SEQ ID NO: 71219 - RNA, 1701 nt, Artificial Sequence; identical to SEQ ID NO: 67046
  derived and/or modified CDS sequence (opt1) from hemagglutinin__InfluenzaA__AEO01090

SEQ ID NO: 71220 - RNA, 1701 nt, Artificial Sequence; identical to SEQ ID NO: 67046
  derived and/or modified CDS sequence (opt1) from hemagglutinin__InfluenzaA__AEO01091
